United States Patent Application Publication US 2005/0255487 A1 - sequence listing, part 6

SEQ ID NO: 138122 - RNA, 19 nt, Homo sapiens
  misc_RNA (1)...(19): siRNA sense strand
acaauucugacuacgacua

SEQ ID NO: 138123 - RNA, 19 nt, Homo sapiens
  misc_RNA (1)...(19): siRNA sense strand
ccucuuaccgggagacaau

SEQ ID NO: 138124 - RNA, 19 nt, Homo sapiens
  misc_RNA (1)...(19): siRNA sense strand
gccgucggaucaucaucaa

SEQ ID NO: 138125 - RNA, 19 nt, Homo sapiens
  misc_RNA (1)...(19): siRNA sense strand
cgggagacaauucugacua

SEQ ID NO: 138126 - RNA, 19 nt, Homo sapiens
  misc_RNA (1)...(19): siRNA sense strand
gcuaccugcagaagauuga

SEQ ID NO: 138127 - RNA, 19 nt, Homo sapiens
  misc_RNA (1)...(19): siRNA sense strand
ggaauuagcuuaugagauu

SEQ ID NO: 138128 - RNA, 19 nt, Homo sapiens
  misc_RNA (1)...(19): siRNA sense strand
gaaggaaggucuuacauau

SEQ ID NO: 138129 - RNA, 19 nt, Homo sapiens
  misc_RNA (1)...(19): siRNA sense strand
gcgacaagcuggacaaaua

SEQ ID NO: 138130 - RNA, 19 nt, Homo sapiens
  misc_RNA (1)...(19): siRNA sense strand
agaaggagauugccauuua

SEQ ID NO: 138131 - RNA, 19 nt, Homo sapiens
  misc_RNA (1)...(19): siRNA sense strand
ugaaauagcuggcaaagug

SEQ ID NO: 138132 - RNA, 19 nt, Homo sapiens
  misc_RNA (1)...(19): siRNA sense strand
gggaagaccuugaaucuga

SEQ ID NO: 138133 - RNA, 19 nt, Homo sapiens
  misc_RNA (1)...(19): siRNA sense strand
gaauacgacuucaguguuu

SEQ ID NO: 138134 - RNA, 19 nt, Homo sapiens
  misc_RNA (1)...(19): siRNA sense strand
cagaagagcucgagcguuu

SEQ ID NO: 138135 - RNA, 19 nt, Homo sapiens
  misc_RNA (1)...(19): siRNA sense strand
ucaaauggcucaaggauga

SEQ ID NO: 138136 - RNA, 19 nt, Homo sapiens
  misc_RNA (1)...(19): siRNA sense strand
gcaucaacaucaagaauaa

SEQ ID NO: 138137 - RNA, 19 nt, Homo sapiens
  misc_RNA (1)...(19): siRNA sense strand
gaagggaagucuuaugugu

SEQ ID NO: 138138 - RNA, 19 nt, Homo sapiens
  misc_RNA (1)...(19): siRNA sense strand
ugacaaagcuacuggcauu

SEQ ID NO: 138139 - RNA, 19 nt, Homo sapiens
  misc_RNA (1)...(19): siRNA sense strand
gaagugauuugguucaaga

SEQ ID NO: 138140 - RNA, 19 nt, Homo sapiens
  misc_RNA (1)...(19): siRNA sense strand
gaacuggugucacaaagau

SEQ ID NO: 138141 - RNA, 19 nt, Homo sapiens
  misc_RNA (1)...(19): siRNA sense strand
gcaaggacccgcucaugua

SEQ ID NO: 138142 - RNA, 19 nt, Homo sapiens
  misc_RNA (1)...(19): siRNA sense strand
gaugccagcuaccgauuua

SEQ ID NO: 138143 - RNA, 19 nt, Homo sapiens
  misc_RNA (1)...(19): siRNA sense strand
ucacaaagaugcuaagauc

SEQ ID NO: 138144 - RNA, 19 nt, Homo sapiens
  misc_RNA (1)...(19): siRNA sense strand
gaaguaggaacgaauaauu

SEQ ID NO: 138145 - RNA, 19 nt, Homo sapiens
  misc_RNA (1)...(19): siRNA sense strand
gcuggaaggucccgaaauu

SEQ ID NO: 138146 - RNA, 19 nt, Homo sapiens
  misc_RNA (1)...(19): siRNA sense strand
caaaguguaugaugauaug

SEQ ID NO: 138147 - RNA, 19 nt, Homo sapiens
  misc_RNA (1)...(19): siRNA sense strand
gcacuucgacguccaguuu

SEQ ID NO: 138148 - RNA, 19 nt, Homo sapiens
  misc_RNA (1)...(19): siRNA sense strand
ggaagaaugugaaguucga

SEQ ID NO: 138149 - RNA, 19 nt, Homo sapiens
  misc_RNA (1)...(19): siRNA sense strand
gaccaguccuaccguaaua

SEQ ID NO: 138150 - RNA, 19 nt, Homo sapiens
  misc_RNA (1)...(19): siRNA sense strand
gaaggagauugccauuuau

SEQ ID NO: 138151 - RNA, 19 nt, Homo sapiens
  misc_RNA (1)...(19): siRNA sense strand
ggaagaggcugaguuucaa

SEQ ID NO: 138152 - RNA, 19 nt, Homo sapiens
  misc_RNA (1)...(19): siRNA sense strand
ggaccgaugugaaguagga

SEQ ID NO: 138153 - RNA, 19 nt, Homo sapiens
  misc_RNA (1)...(19): siRNA sense strand
cgacuucaguguuucauga

SEQ ID NO: 138154 - RNA, 19 nt, Homo sapiens
  misc_RNA (1)...(19): siRNA sense strand
uaaagaauccggauaagga

SEQ ID NO: 138155 - RNA, 19 nt, Homo sapiens
  misc_RNA (1)...(19): siRNA sense strand
ggaaacaaggcccucauuu

SEQ ID NO: 138156 - RNA, 19 nt, Homo sapiens
  misc_RNA (1)...(19): siRNA sense strand
gcaaacaccaagaaagaaa

SEQ ID NO: 138157 - RNA, 19 nt, Homo sapiens
  misc_RNA (1)...(19): siRNA sense strand
caaagcuacuggcauuauu

SEQ ID NO: 138158 - RNA, 19 nt, Homo sapiens
  misc_RNA (1)...(19): siRNA sense strand
ggauuacgcuccucaacug

SEQ ID NO: 138159 - RNA, 19 nt, Homo sapiens
  misc_RNA (1)...(19): siRNA sense strand
gcagauucaugaugggaaa

SEQ ID NO: 138160 - RNA, 19 nt, Homo sapiens
  misc_RNA (1)...(19): siRNA sense strand
aaagauggcagucugauuu

SEQ ID NO: 138161 - RNA, 19 nt, Homo sapiens
  misc_RNA (1)...(19): siRNA sense strand
caaggaugaugcucuguau

SEQ ID NO: 138162 - RNA, 19 nt, Homo sapiens
  misc_RNA (1)...(19): siRNA sense strand
ccaggaaucagacgucaua

SEQ ID NO: 138163 - RNA, 19 nt, Homo sapiens
  misc_RNA (1)...(19): siRNA sense strand
acuccaagcuguacuuaaa

SEQ ID NO: 138164 - RNA, 19 nt, Homo sapiens
  misc_RNA (1)...(19): siRNA sense strand
ggaauacgacuucaguguu

SEQ ID NO: 138165 - RNA, 19 nt, Homo sapiens
  misc_RNA (1)...(19): siRNA sense strand
ggaccacggugaauacaag

SEQ ID NO: 138166 - RNA, 19 nt, Homo sapiens
  misc_RNA (1)...(19): siRNA sense strand
gaagagcucgagcguuuga

SEQ ID NO: 138167 - RNA, 19 nt, Homo sapiens
  misc_RNA (1)...(19): siRNA sense strand
aggaaggucuuacauauuc

SEQ ID NO: 138168 - RNA, 19 nt, Homo sapiens
  misc_RNA (1)...(19): siRNA sense strand
ggagagacacacauuugaa

SEQ ID NO: 138169 - RNA, 19 nt, Homo sapiens
  misc_RNA (1)...(19): siRNA sense strand
gaaaucggaauuagcuuau

SEQ ID NO: 138170 - RNA, 19 nt, Homo sapiens
  misc_RNA (1)...(19): siRNA sense strand
ugaaaucggaauuagcuua

SEQ ID NO: 138171 - RNA, 19 nt, Homo sapiens
  misc_RNA (1)...(19): siRNA sense strand
acgaggagauuucagauga

SEQ ID NO: 138172 - RNA, 19 nt, Homo sapiens
  misc_RNA (1)...(19): siRNA sense strand
gaacagggcaacaucuauc

SEQ ID NO: 138173 - RNA, 19 nt, Homo sapiens
  misc_RNA (1)...(19): siRNA sense strand
gguaccugcuggacgaaua

SEQ ID NO: 138174 - RNA, 19 nt, Homo sapiens
  misc_RNA (1)...(19): siRNA sense strand
ugaaggaaggucuuacaua

SEQ ID NO: 138175 - RNA, 19 nt, Homo sapiens
  misc_RNA (1)...(19): siRNA sense strand
gaucaacagggcagacuuu

SEQ ID NO: 138176 - RNA, 19 nt, Homo sapiens
  misc_RNA (1)...(19): siRNA sense strand
ggaaaguacaggauugaga

SEQ ID NO: 138177 - RNA, 19 nt, Homo sapiens
  misc_RNA (1)...(19): siRNA sense strand
gaaacaaggcccucauuuu

SEQ ID NO: 138178 - RNA, 19 nt, Homo sapiens
  misc_RNA (1)...(19): siRNA sense strand
gaccuacacugugcagauu

SEQ ID NO: 138179 - RNA, 19 nt, Homo sapiens
  misc_RNA (1)...(19): siRNA sense strand
ggugauggaucgauuuagu

SEQ ID NO: 138180 - RNA, 19 nt, Homo sapiens
  misc_RNA (1)...(19): siRNA sense strand
cgagauaugccguguuuga

SEQ ID NO: 138181 - RNA, 19 nt, Homo sapiens
  misc_RNA (1)...(19): siRNA sense strand
gcgaugacuugcuguugaa

SEQ ID NO: 138182 - RNA, 19 nt, Homo sapiens
  misc_RNA (1)...(19): siRNA sense strand
gggagaggaugucugugaa

SEQ ID NO: 138183 - RNA, 19 nt, Homo sapiens
  misc_RNA (1)...(19): siRNA sense strand
guuacaagccguucauuug

SEQ ID NO: 138184 - RNA, 19 nt, Homo sapiens
  misc_RNA (1)...(19): siRNA sense strand
ugaagcauuugcagaauuc

SEQ ID NO: 138185 - RNA, 19 nt, Homo sapiens
  misc_RNA (1)...(19): siRNA sense strand
ucccaaaguugucaaagaa

SEQ ID NO: 138186 - RNA, 19 nt, Homo sapiens
  misc_RNA (1)...(19): siRNA sense strand
gagaugcauucaagacugu

SEQ ID NO: 138187 - RNA, 19 nt, Homo sapiens
  misc_RNA (1)...(19): siRNA sense strand
cgagauacacagaauuaaa

SEQ ID NO: 138188 - RNA, 19 nt, Homo sapiens
  misc_RNA (1)...(19): siRNA sense strand
gcagcccuguuucuggaua

SEQ ID NO: 138189 - RNA, 19 nt, Homo sapiens
  misc_RNA (1)...(19): siRNA sense strand
gcaaaguguaugaugauau

SEQ ID NO: 138190 - RNA, 19 nt, Homo sapiens
  misc_RNA (1)...(19): siRNA sense strand
gaggagauuucagaugaug

SEQ ID NO: 138191 - RNA, 19 nt, Homo sapiens
  misc_RNA (1)...(19): siRNA sense strand
ggaaucagacgucauaaaa

SEQ ID NO: 138192 - RNA, 19 nt, Homo sapiens
  misc_RNA (1)...(19): siRNA sense strand
ggcaaaguguaugaugaua

SEQ ID NO: 138193 - RNA, 19 nt, Homo sapiens
  misc_RNA (1)...(19): siRNA sense strand
ggaugaugcucuguaugaa

SEQ ID NO: 138194 - RNA, 19 nt, Homo sapiens
  misc_RNA (1)...(19): siRNA sense strand
ucaagacugugcuggaaga

SEQ ID NO: 138195 - RNA, 19 nt, Homo sapiens
  misc_RNA (1)...(19): siRNA sense strand
caacagccagccguuauuu

SEQ ID NO: 138196 - RNA, 19 nt, Homo sapiens
  misc_RNA (1)...(19): siRNA sense strand
gagaucagcagaaacuaug

SEQ ID NO: 138197 - RNA, 19 nt, Homo sapiens
  misc_RNA (1)...(19): siRNA sense strand
gaugaagcauuugcagaau

SEQ ID NO: 138198 - RNA, 19 nt, Homo sapiens
  misc_RNA (1)...(19): siRNA sense strand
ccagugagcauaugagaau

SEQ ID NO: 138199 - RNA, 19 nt, Homo sapiens
  misc_RNA (1)...(19): siRNA sense strand
aaacggagacacugccuaa

SEQ ID NO: 138200 - RNA, 19 nt, Homo sapiens
  misc_RNA (1)...(19): siRNA sense strand
cccgagauaugccguguuu

SEQ ID NO: 138201 - RNA, 19 nt, Homo sapiens
  misc_RNA (1)...(19): siRNA sense strand
ggacuuacuccgugucugu

SEQ ID NO: 138202 - RNA, 19 nt, Homo sapiens
  misc_RNA (1)...(19): siRNA sense strand
ugacagaggccaagaugug

SEQ ID NO: 138203 - RNA, 19 nt, Homo sapiens
  misc_RNA (1)...(19): siRNA sense strand
gcuggaagaggcugaguuu

SEQ ID NO: 138204 - RNA, 19 nt, Homo sapiens
  misc_RNA (1)...(19): siRNA sense strand
gagcacuuaucaccagaug

SEQ ID NO: 138205 - RNA, 19 nt, Homo sapiens
  misc_RNA (1)...(19): siRNA sense strand
aaucggaauuagcuuauga

SEQ ID NO: 138206 - RNA, 19 nt, Homo sapiens
  misc_RNA (1)...(19): siRNA sense strand
ggacaaauacgccauucag

SEQ ID NO: 138207 - RNA, 19 nt, Homo sapiens
  misc_RNA (1)...(19): siRNA sense strand
gcaaguacagcaucaacau

SEQ ID NO: 138208 - RNA, 19 nt, Homo sapiens
  misc_RNA (1)...(19): siRNA sense strand
cagacgaaaugaaagugaa

SEQ ID NO: 138209 - RNA, 19 nt, Homo sapiens
  misc_RNA (1)...(19): siRNA sense strand
gaugaugcucuguaugaaa

SEQ ID NO: 138210 - RNA, 19 nt, Homo sapiens
  misc_RNA (1)...(19): siRNA sense strand
gccagcuaccgauuuauua

SEQ ID NO: 138211 - RNA, 19 nt, Homo sapiens
  misc_RNA (1)...(19): siRNA sense strand
ccacaauuccucugaaauc

SEQ ID NO: 138212 - RNA, 19 nt, Homo sapiens
  misc_RNA (1)...(19): siRNA sense strand
caguacaucuuccgaguca

SEQ ID NO: 138213 - RNA, 19 nt, Homo sapiens
  misc_RNA (1)...(19): siRNA sense strand
ccaaguggacgaagauguu

SEQ ID NO: 138214 - RNA, 19 nt, Homo sapiens
  misc_RNA (1)...(19): siRNA sense strand
gaaggaccacggugaauac

SEQ ID NO: 138215 - RNA, 19 nt, Homo sapiens
  misc_RNA (1)...(19): siRNA sense strand
auggaucgauuuaguauug

SEQ ID NO: 138216 - RNA, 19 nt, Homo sapiens
  misc_RNA (1)...(19): siRNA sense strand
gaggaugucugugaaacuc

SEQ ID NO: 138217 - RNA, 19 nt, Homo sapiens
  misc_RNA (1)...(19): siRNA sense strand
gaggcugaguuucaaagga

SEQ ID NO: 138218 - RNA, 19 nt, Homo sapiens
  misc_RNA (1)...(19): siRNA sense strand
gaugagagguuuaaaaucg

SEQ ID NO: 138219 - RNA, 19 nt, Homo sapiens
  misc_RNA (1)...(19): siRNA sense strand
gagaaggagauugccauuu

SEQ ID NO: 138220 - RNA, 19 nt, Homo sapiens
  misc_RNA (1)...(19): siRNA sense strand
gaguagagucugugggaaa

SEQ ID NO: 138221 - RNA, 19 nt, Homo sapiens
  misc_RNA (1)...(19): siRNA sense strand
gaaauagcuggcaaagugu

SEQ ID NO: 138222 - RNA, 19 nt, Homo sapiens
  misc_RNA (1)...(19): siRNA sense strand
gggagagacacacauuuga

SEQ ID NO: 138223 - RNA, 19 nt, Homo sapiens
  misc_RNA (1)...(19): siRNA sense strand
gaagaggcugaguuucaaa

SEQ ID NO: 138224 - RNA, 19 nt, Homo sapiens
  misc_RNA (1)...(19): siRNA sense strand
ggaucgauuuaguauugaa

SEQ ID NO: 138225 - RNA, 19 nt, Homo sapiens
  misc_RNA (1)...(19): siRNA sense strand
gacaacagccagccguuau

SEQ ID NO: 138226 - RNA, 19 nt, Homo sapiens
  misc_RNA (1)...(19): siRNA sense strand
cgacaacagccagccguua

SEQ ID NO: 138227 - RNA, 19 nt, Homo sapiens
  misc_RNA (1)...(19): siRNA sense strand
gaacugaguaugacaaugu

SEQ ID NO: 138228 - RNA, 19 nt, Homo sapiens
  misc_RNA (1)...(19): siRNA sense strand
ggacaccagugccuucuuc

SEQ ID NO: 138229 - RNA, 19 nt, Homo sapiens
  misc_RNA (1)...(19): siRNA sense strand
gcagacguuuggaaagaaa

SEQ ID NO: 138230 - RNA, 19 nt, Homo sapiens
  misc_RNA (1)...(19): siRNA sense strand
aaagaaaggcccaaaguga

SEQ ID NO: 138231 - RNA, 19 nt, Homo sapiens
  misc_RNA (1)...(19): siRNA sense strand
cagcagacguuuggaaaga

SEQ ID NO: 138232 - RNA, 19 nt, Homo sapiens
  misc_RNA (1)...(19): siRNA sense strand
gcaaggcaaugagaucuuc

SEQ ID NO: 138233 - RNA, 19 nt, Homo sapiens
  misc_RNA (1)...(19): siRNA sense strand
cgacuggcccuacagguuu

SEQ ID NO: 138234 - RNA, 19 nt, Homo sapiens
  misc_RNA (1)...(19): siRNA sense strand
uaaagaaaggcccaaagug

SEQ ID NO: 138235 - RNA, 19 nt, Homo sapiens
  misc_RNA (1)...(19): siRNA sense strand
ggagagggcaacuuugagu

SEQ ID NO: 138236 - RNA, 19 nt, Homo sapiens
  misc_RNA (1)...(19): siRNA sense strand
ggaacugaguaugacaaug

SEQ ID NO: 138237 - RNA, 19 nt, Homo sapiens
  misc_RNA (1)...(19): siRNA sense strand
ggaggaaaaugaauuguac

SEQ ID NO: 138238 - RNA, 19 nt, Homo sapiens
  misc_RNA (1)...(19): siRNA sense strand
gaccugaccacauauacga

SEQ ID NO: 138239 - RNA, 19 nt, Homo sapiens
  misc_RNA (1)...(19): siRNA sense strand
guacagcagcgcagucaca

SEQ ID NO: 138240 - RNA, 19 nt, Homo sapiens
  misc_RNA (1)...(19): siRNA sense strand
cuaaagaaaggcccaaagu

SEQ ID NO: 138241 - RNA, 19 nt, Homo sapiens
  misc_RNA (1)...(19): siRNA sense strand
gaccaugagaccuacagaa

SEQ ID NO: 138242 - RNA, 19 nt, Homo sapiens
  misc_RNA (1)...(19): siRNA sense strand
cccucgaccugaccacaua

SEQ ID NO: 138243 - RNA, 19 nt, Homo sapiens
  misc_RNA (1)...(19): siRNA sense strand
uggcugcccugucccucua

SEQ ID NO: 138244 - RNA, 19 nt, Homo sapiens
  misc_RNA (1)...(19): siRNA sense strand
ccaaagaacgccuguaccu

SEQ ID NO: 138245 - RNA, 19 nt, Homo sapiens
  misc_RNA (1)...(19): siRNA sense strand
gaaggucauccgccucagu

SEQ ID NO: 138246 - RNA, 19 nt, Homo sapiens
  misc_RNA (1)...(19): siRNA sense strand
cugaccacauauacgauaa

SEQ ID NO: 138247 - RNA, 19 nt, Homo sapiens
  misc_RNA (1)...(19): siRNA sense strand
gaacuucaggggcaucuug

SEQ ID NO: 138248 - RNA, 19 nt, Homo sapiens
  misc_RNA (1)...(19): siRNA sense strand
ccugaccacauauacgaua

SEQ ID NO: 138249 - RNA, 19 nt, Homo sapiens
  misc_RNA (1)...(19): siRNA sense strand
cagcagcagacguuuggaa

SEQ ID NO: 138250 - RNA, 19 nt, Homo sapiens
  misc_RNA (1)...(19): siRNA sense strand
gcagccaggaacugaguau

SEQ ID NO: 138251 - RNA, 19 nt, Homo sapiens
  misc_RNA (1)...(19): siRNA sense strand
gcagcagacguuuggaaag

SEQ ID NO: 138252 - RNA, 19 nt, Homo sapiens
  misc_RNA (1)...(19): siRNA sense strand
cuggagagggcaacuuuga

SEQ ID NO: 138253 - RNA, 19 nt, Homo sapiens
  misc_RNA (1)...(19): siRNA sense strand
gccaggaacugaguaugac

SEQ ID NO: 138254 - RNA, 19 nt, Homo sapiens
  misc_RNA (1)...(19): siRNA sense strand
gaucuucuuggcccuggaa

SEQ ID NO: 138255 - RNA, 19 nt, Homo sapiens
  misc_RNA (1)...(19): siRNA sense strand
gacuggcccuacagguuuc

SEQ ID NO: 138256 - RNA, 19 nt, Homo sapiens
  misc_RNA (1)...(19): siRNA sense strand
gaccacauauacgauaagc

SEQ ID NO: 138257 - RNA, 19 nt, Homo sapiens
  misc_RNA (1)...(19): siRNA sense strand
ccgacgagcuggugcguuu

SEQ ID NO: 138258 - RNA, 19 nt, Homo sapiens
  misc_RNA (1)...(19): siRNA sense strand
gucaacagcaccuggagaa

SEQ ID NO: 138259 - RNA, 19 nt, Homo sapiens
  misc_RNA (1)...(19): siRNA sense strand
gcuacgaagcggucuccuu

SEQ ID NO: 138260 - RNA, 19 nt, Homo sapiens
  misc_RNA (1)...(19): siRNA sense strand
ccgacgagcuggugcguuu

SEQ ID NO: 138261 - RNA, 19 nt, Homo sapiens
  misc_RNA (1)...(19): siRNA sense strand
gucaacagcaccuggagaa

SEQ ID NO: 138262 - RNA, 19 nt, Homo sapiens
  misc_RNA (1)...(19): siRNA sense strand
gcuacgaagcggucuccuu

SEQ ID NO: 138263 - RNA, 19 nt, Homo sapiens
  misc_RNA (1)...(19): siRNA sense strand
ccgacgagcuggugcguuu

SEQ ID NO: 138264 - RNA, 19 nt, Homo sapiens
  misc_RNA (1)...(19): siRNA sense strand
gucaacagcaccuggagaa

SEQ ID NO: 138265 - RNA, 19 nt, Homo sapiens
  misc_RNA (1)...(19): siRNA sense strand
gcuacgaagcggucuccuu

SEQ ID NO: 138266 - RNA, 19 nt, Homo sapiens
  misc_RNA (1)...(19): siRNA sense strand
ccgacgagcuggugcguuu

SEQ ID NO: 138267 - RNA, 19 nt, Homo sapiens
  misc_RNA (1)...(19): siRNA sense strand
gucaacagcaccuggagaa

SEQ ID NO: 138268 - RNA, 19 nt, Homo sapiens
  misc_RNA (1)...(19): siRNA sense strand
gcuacgaagcggucuccuu

SEQ ID NO: 138269 - RNA, 19 nt, Homo sapiens
  misc_RNA (1)...(19): siRNA sense strand
ccauggagcucaucauugg

SEQ ID NO: 138270 - RNA, 19 nt, Homo sapiens
  misc_RNA (1)...(19): siRNA sense strand
ucaagcaugugguccugua

SEQ ID NO: 138271 - RNA, 19 nt, Homo sapiens
  misc_RNA (1)...(19): siRNA sense strand
gcucuuccauccucaacaa

SEQ ID NO: 138272 - RNA, 19 nt, Homo sapiens
  misc_RNA (1)...(19): siRNA sense strand
gccauugccugccucaaga

SEQ ID NO: 138273 - RNA, 19 nt, Homo sapiens
  misc_RNA (1)...(19): siRNA sense strand
gcacagaugcgugaacaca

SEQ ID NO: 138274 - RNA, 19 nt, Homo sapiens
  misc_RNA (1)...(19): siRNA sense strand
gaaggacgaagaggacaaa

SEQ ID NO: 138275 - RNA, 19 nt, Homo sapiens
  misc_RNA (1)...(19): siRNA sense strand
gcucaucauuggcaagaag

SEQ ID NO: 138276 - RNA, 19 nt, Homo sapiens
  misc_RNA (1)...(19): siRNA sense strand
ggaggcugcugccaaguac

SEQ ID NO: 138277 - RNA, 19 nt, Homo sapiens
  misc_RNA (1)...(19): siRNA sense strand
caaguacuacgaugccauu

SEQ ID NO: 138278 - RNA, 19 nt, Homo sapiens
  misc_RNA (1)...(19): siRNA sense strand
ccaagagucuccgcaacau

SEQ ID NO: 138279 - RNA, 19 nt, Homo sapiens
  misc_RNA (1)...(19): siRNA sense strand
ucacgccgcugcugcucaa

SEQ ID NO: 138280 - RNA, 19 nt, Homo sapiens
  misc_RNA (1)...(19): siRNA sense strand
gcccauggagcucaucauu

SEQ ID NO: 138281 - RNA, 19 nt, Homo sapiens
  misc_RNA (1)...(19): siRNA sense strand
caacaaguacgacgacaac

SEQ ID NO: 138282 - RNA, 19 nt, Homo sapiens
  misc_RNA (1)...(19): siRNA sense strand
cuuccauccucaacaagua

SEQ ID NO: 138283 - RNA, 19 nt, Homo sapiens
  misc_RNA (1)...(19): siRNA sense strand
ccaaggccacguuccacua

SEQ ID NO: 138284 - RNA, 19 nt, Homo sapiens
  misc_RNA (1)...(19): siRNA sense strand
acauggagaugcugaaggu

SEQ ID NO: 138285 - RNA, 19 nt, Homo sapiens
  misc_RNA (1)...(19): siRNA sense strand
cgucaaggccuacuucaag

SEQ ID NO: 138286 - RNA, 19 nt, Homo sapiens
  misc_RNA (1)...(19): siRNA sense strand
caacgucaaggccuacuuc

SEQ ID NO: 138287 - RNA, 19 nt, Homo sapiens
  misc_RNA (1)...(19): siRNA sense strand
gcaagcccauggagcucau

SEQ ID NO: 138288 - RNA, 19 nt, Homo sapiens
  misc_RNA (1)...(19): siRNA sense strand
gagcucaucauuggcaaga

SEQ ID NO: 138289 - RNA, 19 nt, Homo sapiens
  misc_RNA (1)...(19): siRNA sense strand
ggaccaaggccacguucca

SEQ ID NO: 138290 - RNA, 19 nt, Homo sapiens
  misc_RNA (1)...(19): siRNA sense strand
ggaggcccaggcugacuuu

SEQ ID NO: 138291 - RNA, 19 nt, Homo sapiens
  misc_RNA (1)...(19): siRNA sense strand
gccaagagucuccgcaaca

SEQ ID NO: 138292 - RNA, 19 nt, Homo sapiens
  misc_RNA (1)...(19): siRNA sense strand
gcacugcugcgguguugca

SEQ ID NO: 138293 - RNA, 19 nt, Homo sapiens
  misc_RNA (1)...(19): siRNA sense strand
cgccgcugcugcucaacua

SEQ ID NO: 138294 - RNA, 19 nt, Homo sapiens
  misc_RNA (1)...(19): siRNA sense strand
accggacgcugcacaguga

SEQ ID NO: 138295 - RNA, 19 nt, Homo sapiens
  misc_RNA (1)...(19): siRNA sense strand
caugacagacgaagagaag

SEQ ID NO: 138296 - RNA, 19 nt, Homo sapiens
  misc_RNA (1)...(19): siRNA sense strand
gagagcucccggacuuuca

SEQ ID NO: 138297 - RNA, 19 nt, Homo sapiens
  misc_RNA (1)...(19): siRNA sense strand
guuccucugugacaucaag

SEQ ID NO: 138298 - RNA, 19 nt, Homo sapiens
  misc_RNA (1)...(19): siRNA sense strand
gcaauggccugaaauccaa

SEQ ID NO: 138299 - RNA, 19 nt, Homo sapiens
  misc_RNA (1)...(19): siRNA sense strand
caaagacuaugaaguaaag

SEQ ID NO: 138300 - RNA, 19 nt, Homo sapiens
  misc_RNA (1)...(19): siRNA sense strand
gcgcugaccuuccucaugu

SEQ ID NO: 138301 - RNA, 19 nt, Homo sapiens
  misc_RNA (1)...(19): siRNA sense strand
gcucaugcuuccugacuuu

SEQ ID NO: 138302 - RNA, 19 nt, Homo sapiens
  misc_RNA (1)...(19): siRNA sense strand
ggaccaacgucaaugucuu

SEQ ID NO: 138303 - RNA, 19 nt, Homo sapiens
  misc_RNA (1)...(19): siRNA sense strand
ugaggaugcuuucuguaaa

SEQ ID NO: 138304 - RNA, 19 nt, Homo sapiens
  misc_RNA (1)...(19): siRNA sense strand
aaagaaagagggcagcuaa

SEQ ID NO: 138305 - RNA, 19 nt, Homo sapiens
  misc_RNA (1)...(19): siRNA sense strand
gauguuaucgcuauugaau

SEQ ID NO: 138306 - RNA, 19 nt, Homo sapiens
  misc_RNA (1)...(19): siRNA sense strand
gaauaggaccaacgucaau

SEQ ID NO: 138307 - RNA, 19 nt, Homo sapiens
  misc_RNA (1)...(19): siRNA sense strand
gaaauccaaguacuacaga

SEQ ID NO: 138308 - RNA, 19 nt, Homo sapiens
  misc_RNA (1)...(19): siRNA sense strand
ggguguuccuguuggcuua

SEQ ID NO: 138309 - RNA, 19 nt, Homo sapiens
  misc_RNA (1)...(19): siRNA sense strand
cuacagacuuugugauaag

SEQ ID NO: 138310 - RNA, 19 nt, Homo sapiens
  misc_RNA (1)...(19): siRNA sense strand
gaccaacgucaaugucuuu

SEQ ID NO: 138311 - RNA, 19 nt, Homo sapiens
  misc_RNA (1)...(19): siRNA sense strand
uauauuguccugaccauga

SEQ ID NO: 138312 - RNA, 19 nt, Homo sapiens
  misc_RNA (1)...(19): siRNA sense strand
gaggaugcuuucuguaaac

SEQ ID NO: 138313 - RNA, 19 nt, Homo sapiens
  misc_RNA (1)...(19): siRNA sense strand
aaccucaacucgugaagaa

SEQ ID NO: 138314 - RNA, 19 nt, Homo sapiens
  misc_RNA (1)...(19): siRNA sense strand
ccuguuggcuuauguuagu

SEQ ID NO: 138315 - RNA, 19 nt, Homo sapiens
  misc_RNA (1)...(19): siRNA sense strand
ucaccuacguccucuucuu

SEQ ID NO: 138316 - RNA, 19 nt, Homo sapiens
  misc_RNA (1)...(19): siRNA sense strand
gaaccagccuccccaaaag

SEQ ID NO: 138317 - RNA, 19 nt, Homo sapiens
  misc_RNA (1)...(19): siRNA sense strand
gcaaggugcaggacuccaa

SEQ ID NO: 138318 - RNA, 19 nt, Homo sapiens
  misc_RNA (1)...(19): siRNA sense strand
ucacgaugcuccucuccau

SEQ ID NO: 138319 - RNA, 19 nt, Homo sapiens
  misc_RNA (1)...(19): siRNA sense strand
caacgaaaccccauggauu

SEQ ID NO: 138320 - RNA, 19 nt, Homo sapiens
  misc_RNA (1)...(19): siRNA sense strand
ggccgagcccuuacaaaga

SEQ ID NO: 138321 - RNA, 19 nt, Homo sapiens
  misc_RNA (1)...(19): siRNA sense strand
acuacagacuuugugauaa

SEQ ID NO: 138322 - RNA, 19 nt, Homo sapiens
  misc_RNA (1)...(19): siRNA sense strand
uacuacagacuuugugaua

SEQ ID NO: 138323 - RNA, 19 nt, Homo sapiens
  misc_RNA (1)...(19): siRNA sense strand
gcuaugguguggagaacag

SEQ ID NO: 138324 - RNA, 19 nt, Homo sapiens
  misc_RNA (1)...(19): siRNA sense strand
aaugcugccuacucaguuu

SEQ ID NO: 138325 - RNA, 19 nt, Homo sapiens
  misc_RNA (1)...(19): siRNA sense strand
uaaagaaagagggcagcua

SEQ ID NO: 138326 - RNA, 19 nt, Homo sapiens
  misc_RNA (1)...(19): siRNA sense strand
gcccuuacaaagacuauga

SEQ ID NO: 138327 - RNA, 19 nt, Homo sapiens
  misc_RNA (1)...(19): siRNA sense strand
acacgcuucuuccucuuug

SEQ ID NO: 138328 - RNA, 19 nt, Homo sapiens
  misc_RNA (1)...(19): siRNA sense strand
uccaggauguuaucgcuau

SEQ ID NO: 138329 - RNA, 19 nt, Homo sapiens
  misc_RNA (1)...(19): siRNA sense strand
gccgagcccuuacaaagac

SEQ ID NO: 138330 - RNA, 19 nt, Homo sapiens
  misc_RNA (1)...(19): siRNA sense strand
ccucaacucgugaagaaga

SEQ ID NO: 138331 - RNA, 19 nt, Homo sapiens
  misc_RNA (1)...(19): siRNA sense strand
uugaggaugcuuucuguaa

SEQ ID NO: 138332 - RNA, 19 nt, Homo sapiens
  misc_RNA (1)...(19): siRNA sense strand
ugaauaggaccaacgucaa

SEQ ID NO: 138333 - RNA, 19 nt, Homo sapiens
  misc_RNA (1)...(19): siRNA sense strand
gaccgcaggugggaugaca

SEQ ID NO: 138334 - RNA, 19 nt, Homo sapiens
  misc_RNA (1)...(19): siRNA sense strand
ccacacgcuucuuccucuu

SEQ ID NO: 138335 - RNA, 19 nt, Homo sapiens
  misc_RNA (1)...(19): siRNA sense strand
guaaaccucaacucgugaa

SEQ ID NO: 138336 - RNA, 19 nt, Homo sapiens
  misc_RNA (1)...(19): siRNA sense strand
ccaggauguuaucgcuauu

SEQ ID NO: 138337 - RNA, 19 nt, Homo sapiens
  misc_RNA (1)...(19): siRNA sense strand
caccuucgccuucaucauc

SEQ ID NO: 138338 - RNA, 19 nt, Homo sapiens
  misc_RNA (1)...(19): siRNA sense strand
uuauguuagucccgaguuu

SEQ ID NO: 138339 - RNA, 19 nt, Homo sapiens
  misc_RNA (1)...(19): siRNA sense strand
caacgucaaugucuuuucu

SEQ ID NO: 138340 - RNA, 19 nt, Homo sapiens
  misc_RNA (1)...(19): siRNA sense strand
ggccugaaauccaaguacu

SEQ ID NO: 138341 - RNA, 19 nt, Homo sapiens
  misc_RNA (1)...(19): siRNA sense strand
aggauguuaucgcuauuga

SEQ ID NO: 138342 - RNA, 19 nt, Homo sapiens
  misc_RNA (1)...(19): siRNA sense strand
gcucaccuacguccucuuc

SEQ ID NO: 138343 - RNA, 19 nt, Homo sapiens
  misc_RNA (1)...(19): siRNA sense strand
ugaccucgguggccuucau

SEQ ID NO: 138344 - RNA, 19 nt, Homo sapiens
  misc_RNA (1)...(19): siRNA sense strand
gagcuaugguguggagaac

SEQ ID NO: 138345 - RNA, 19 nt, Homo sapiens
  misc_RNA (1)...(19): siRNA sense strand
ggccucaccuucgccuuca

SEQ ID NO: 138346 - RNA, 19 nt, Homo sapiens
  misc_RNA (1)...(19): siRNA sense strand
gcuacaacagucccugaug

SEQ ID NO: 138347 - RNA, 19 nt, Homo sapiens
  misc_RNA (1)...(19): siRNA sense strand
ggaucacccugcucaugcu

SEQ ID NO: 138348 - RNA, 19 nt, Homo sapiens
  misc_RNA (1)...(19): siRNA sense strand
uguugaggaugcuuucugu

SEQ ID NO: 138349 - RNA, 19 nt, Homo sapiens
  misc_RNA (1)...(19): siRNA sense strand
aacgaaaccccauggauua

SEQ ID NO: 138350 - RNA, 19 nt, Homo sapiens
  misc_RNA (1)...(19): siRNA sense strand
caccuacguccucuucuug

SEQ ID NO: 138351 - RNA, 19 nt, Homo sapiens
  misc_RNA (1)...(19): siRNA sense strand
acgcuuggccgagcccuua

SEQ ID NO: 138352 - RNA, 19 nt, Homo sapiens
  misc_RNA (1)...(19): siRNA sense strand
acgaugcuccucuccauug

SEQ ID NO: 138353 - RNA, 19 nt, Homo sapiens
  misc_RNA (1)...(19): siRNA sense strand
guacuacagacuuugugau

SEQ ID NO: 138354 - RNA, 19 nt, Homo sapiens
  misc_RNA (1)...(19): siRNA sense strand
gccugaaauccaaguacua

SEQ ID NO: 138355 - RNA, 19 nt, Homo sapiens
  misc_RNA (1)...(19): siRNA sense strand
gaacagaagcuacagauaa

SEQ ID NO: 138356 - RNA, 19 nt, Homo sapiens
  misc_RNA (1)...(19): siRNA sense strand
gaaauagugugguuagaaa

SEQ ID NO: 138357 - RNA, 19 nt, Homo sapiens
  misc_RNA (1)...(19): siRNA sense strand
ccaugaaucuuucgaaaua

SEQ ID NO: 138358 - RNA, 19 nt, Homo sapiens
  misc_RNA (1)...(19): siRNA sense strand
gaagaaagauccugagaag

SEQ ID NO: 138359 - RNA, 19 nt, Homo sapiens
  misc_RNA (1)...(19): siRNA sense strand
gaaggaaccucagaaaguu

SEQ ID NO: 138360 - RNA, 19 nt, Homo sapiens
  misc_RNA (1)...(19): siRNA sense strand
ccaagucucuuccucauuu

SEQ ID NO: 138361 - RNA, 19 nt, Homo sapiens
  misc_RNA (1)...(19): siRNA sense strand
gcacuuccauguacaacaa

SEQ ID NO: 138362 - RNA, 19 nt, Homo sapiens
  misc_RNA (1)...(19): siRNA sense strand
gcuacaaagugcaagauaa

SEQ ID NO: 138363 - RNA, 19 nt, Homo sapiens
  misc_RNA (1)...(19): siRNA sense strand
gcaagcggcucuccucuuc

SEQ ID NO: 138364 - RNA, 19 nt, Homo sapiens
  misc_RNA (1)...(19): siRNA sense strand
cuacaaagcugcacacucu

SEQ ID NO: 138365 - RNA, 19 nt, Homo sapiens
  misc_RNA (1)...(19): siRNA sense strand
caagagaaauagugugguu

SEQ ID NO: 138366 - RNA, 19 nt, Homo sapiens
  misc_RNA (1)...(19): siRNA sense strand
gagcagcguuguuaacaga

SEQ ID NO: 138367 - RNA, 19 nt, Homo sapiens
  misc_RNA (1)...(19): siRNA sense strand
ggacaaagaacgccacgaa

SEQ ID NO: 138368 - RNA, 19 nt, Homo sapiens
  misc_RNA (1)...(19): siRNA sense strand
gcccagaaauuccuuugaa

SEQ ID NO: 138369 - RNA, 19 nt, Homo sapiens
  misc_RNA (1)...(19): siRNA sense strand
ccagcucgcucccgacuuu

SEQ ID NO: 138370 - RNA, 19 nt, Homo sapiens
  misc_RNA (1)...(19): siRNA sense strand
ucagagaaacggugauaua

SEQ ID NO: 138371 - RNA, 19 nt, Homo sapiens
  misc_RNA (1)...(19): siRNA sense strand
gcaggaagagcuugaaaga

SEQ ID NO: 138372 - RNA, 19 nt, Homo sapiens
  misc_RNA (1)...(19): siRNA sense strand
gcugcacacucuagaaauu

SEQ ID NO: 138373 - RNA, 19 nt, Homo sapiens
  misc_RNA (1)...(19): siRNA sense strand
caacaaacgcuccgggaaa

SEQ ID NO: 138374 - RNA, 19 nt, Homo sapiens
  misc_RNA (1)...(19): siRNA sense strand
ggaagagcuugaaagacaa

SEQ ID NO: 138375 - RNA, 19 nt, Homo sapiens
  misc_RNA (1)...(19): siRNA sense strand
aggaagagcuugaaagaca

SEQ ID NO: 138376 - RNA, 19 nt, Homo sapiens
  misc_RNA (1)...(19): siRNA sense strand
gggcagagcaccuuuagug

SEQ ID NO: 138377 - RNA, 19 nt, Homo sapiens
  misc_RNA (1)...(19): siRNA sense strand
ggaaauggaaagccaguug

SEQ ID NO: 138378 - RNA, 19 nt, Homo sapiens
  misc_RNA (1)...(19): siRNA sense strand
gcagagcaccuuuagugaa

SEQ ID NO: 138379 - RNA, 19 nt, Homo sapiens
  misc_RNA (1)...(19): siRNA sense strand
gaagcgacuugaggagauu

SEQ ID NO: 138380 - RNA, 19 nt, Homo sapiens
  misc_RNA (1)...(19): siRNA sense strand
ccagacaggcggucaguuu

SEQ ID NO: 138381 - RNA, 19 nt, Homo sapiens
  misc_RNA (1)...(19): siRNA sense strand
aaacagcacccgacagcua

SEQ ID NO: 138382 - RNA, 19 nt, Homo sapiens
  misc_RNA (1)...(19): siRNA sense strand
caaagugcaagauaagaaa

SEQ ID NO: 138383 - RNA, 19 nt, Homo sapiens
  misc_RNA (1)...(19): siRNA sense strand
caccaugaaucuuucgaaa

SEQ ID NO: 138384 - RNA, 19 nt, Homo sapiens
  misc_RNA (1)...(19): siRNA sense strand
gaaaaccagugaucagaga

SEQ ID NO: 138385 - RNA, 19 nt, Homo sapiens
  misc_RNA (1)...(19): siRNA sense strand
guacggcgcacaauggaaa

SEQ ID NO: 138386 - RNA, 19 nt, Homo sapiens
  misc_RNA (1)...(19): siRNA sense strand
caaccacucaggaaauaaa

SEQ ID NO: 138387 - RNA, 19 nt, Homo sapiens
  misc_RNA (1)...(19): siRNA sense strand
aaagaaagagagagagaaa

SEQ ID NO: 138388 - RNA, 19 nt, Homo sapiens
  misc_RNA (1)...(19): siRNA sense strand
gagaaauagugugguuaga

SEQ ID NO: 138389 - RNA, 19 nt, Homo sapiens
  misc_RNA (1)...(19): siRNA sense strand
uaacaaccacucaggaaau

SEQ ID NO: 138390 - RNA, 19 nt, Homo sapiens
  misc_RNA (1)...(19): siRNA sense strand
aacaaccacucaggaaaua

SEQ ID NO: 138391 - RNA, 19 nt, Homo sapiens
  misc_RNA (1)...(19): siRNA sense strand
gauuagaugucaccaacag

SEQ ID NO: 138392 - RNA, 19 nt, Homo sapiens
  misc_RNA (1)...(19): siRNA sense strand
agagaagcauuuccagaga

SEQ ID NO: 138393 - RNA, 19 nt, Homo sapiens
  misc_RNA (1)...(19): siRNA sense strand
agaagaagccacaguugaa

SEQ ID NO: 138394 - RNA, 19 nt, Homo sapiens
  misc_RNA (1)...(19): siRNA sense strand
cagagcaccuuuagugaag

SEQ ID NO: 138395 - RNA, 19 nt, Homo sapiens
  misc_RNA (1)...(19): siRNA sense strand
aagcacagcugccuugucu

SEQ ID NO: 138396 - RNA, 19 nt, Homo sapiens
  misc_RNA (1)...(19): siRNA sense strand
caagagcgccuggagagaa

SEQ ID NO: 138397 - RNA, 19 nt, Homo sapiens
  misc_RNA (1)...(19): siRNA sense strand
agaagaagcucgcguucgu

SEQ ID NO: 138398 - RNA, 19 nt, Homo sapiens
  misc_RNA (1)...(19): siRNA sense strand
gcagaaagaagaagaagcu

SEQ ID NO: 138399 - RNA, 19 nt, Homo sapiens
  misc_RNA (1)...(19): siRNA sense strand
gaagagcuugaaagacaaa

SEQ ID NO: 138400 - RNA, 19 nt, Homo sapiens
  misc_RNA (1)...(19): siRNA sense strand
gagaagaaagauccugaga

SEQ ID NO: 138401 - RNA, 19 nt, Homo sapiens
  misc_RNA (1)...(19): siRNA sense strand
gggcugcuguggaggagaa

SEQ ID NO: 138402 - RNA, 19 nt, Homo sapiens
  misc_RNA (1)...(19): siRNA sense strand
gugcuucuguuaagacuuc

SEQ ID NO: 138403 - RNA, 19 nt, Homo sapiens
  misc_RNA (1)...(19): siRNA sense strand
ucagaaaguugccaaugag

SEQ ID NO: 138404 - RNA, 19 nt, Homo sapiens
  misc_RNA (1)...(19): siRNA sense strand
caagagggaagucaaagug

SEQ ID NO: 138405 - RNA, 19 nt, Homo sapiens
  misc_RNA (1)...(19): siRNA sense strand
agaaggaaccucagaaagu

SEQ ID NO: 138406 - RNA, 19 nt, Homo sapiens
  misc_RNA (1)...(19): siRNA sense strand
gaaugccagugcuucuguu

SEQ ID NO: 138407 - RNA, 19 nt, Homo sapiens
  misc_RNA (1)...(19): siRNA sense strand
gguagaagaagccacaguu

SEQ ID NO: 138408 - RNA, 19 nt, Homo sapiens
  misc_RNA (1)...(19): siRNA sense strand
cucagaaaguugccaauga

SEQ ID NO: 138409 - RNA, 19 nt, Homo sapiens
  misc_RNA (1)...(19): siRNA sense strand
gagaacagaagcuacagau

SEQ ID NO: 138410 - RNA, 19 nt, Homo sapiens
  misc_RNA (1)...(19): siRNA sense strand
uagaagaagccacaguuga

SEQ ID NO: 138411 - RNA, 19 nt, Homo sapiens
  misc_RNA (1)...(19): siRNA sense strand
gguagaugguguucagaca

SEQ ID NO: 138412 - RNA, 19 nt, Homo sapiens
  misc_RNA (1)...(19): siRNA sense strand
acuaaauucuccagauaga

SEQ ID NO: 138413 - RNA, 19 nt, Homo sapiens
  misc_RNA (1)...(19): siRNA sense strand
gaugaugaagggacacuug

SEQ ID NO: 138414 - RNA, 19 nt, Homo sapiens
  misc_RNA (1)...(19): siRNA sense strand
ugggagagcagcguuguua

SEQ ID NO: 138415 - RNA, 19 nt, Homo sapiens
  misc_RNA (1)...(19): siRNA sense strand
gagagaaagaagcgacuug

SEQ ID NO: 138416 - RNA, 19 nt, Homo sapiens
  misc_RNA (1)...(19): siRNA sense strand
gcggacaccugcugaacca

SEQ ID NO: 138417 - RNA, 19 nt, Homo sapiens
  misc_RNA (1)...(19): siRNA sense strand
guagaagaagccacaguug

SEQ ID NO: 138418 - RNA, 19 nt, Homo sapiens
  misc_RNA (1)...(19): siRNA sense strand
gagaaggaaccucagaaag

SEQ ID NO: 138419 - RNA, 19 nt, Homo sapiens
  misc_RNA (1)...(19): siRNA sense strand
gagcaggaagagcuugaaa

SEQ ID NO: 138420 - RNA, 19 nt, Homo sapiens
  misc_RNA (1)...(19): siRNA sense strand
gcuagcugcaagagaaaua

SEQ ID NO: 138421 - RNA, 19 nt, Homo sapiens
  misc_RNA (1)...(19): siRNA sense strand
gagagcagcguuguuaaca

SEQ ID NO: 138422 - RNA, 19 nt, Homo sapiens
  misc_RNA (1)...(19): siRNA sense strand
cagaagcuacagauaagaa

SEQ ID NO: 138423 - RNA, 19 nt, Homo sapiens
  misc_RNA (1)...(19): siRNA sense strand
aacagaagcuacagauaag

SEQ ID NO: 138424 - RNA, 19 nt, Homo sapiens
  misc_RNA (1)...(19): siRNA sense strand
aagagcgccuggagagaaa

SEQ ID NO: 138425 - RNA, 19 nt, Homo sapiens
  misc_RNA (1)...(19): siRNA sense strand
agaagcauuuccagagaga

SEQ ID NO: 138426 - RNA, 19 nt, Homo sapiens
  misc_RNA (1)...(19): siRNA sense strand
gaagcucgcguucgugaag

SEQ ID NO: 138427 - RNA, 19 nt, Homo sapiens
  misc_RNA (1)...(19): siRNA sense strand
gaagaagccacaguugaag

SEQ ID NO: 138428 - RNA, 19 nt, Homo sapiens
  misc_RNA (1)...(19): siRNA sense strand
ggcuguaucuccaucuaau

SEQ ID NO: 138429 - RNA, 19 nt, Homo sapiens
  misc_RNA (1)...(19): siRNA sense strand
caacauccgcccugucaag

SEQ ID NO: 138430 - RNA, 19 nt, Homo sapiens
  misc_RNA (1)...(19): siRNA sense strand
aaacuuacccauuggaucu

SEQ ID NO: 138431 - RNA, 19 nt, Homo sapiens
  misc_RNA (1)...(19): siRNA sense strand
gagcacucccgauuuggaa

SEQ ID NO: 138432 - RNA, 19 nt, Homo sapiens
  misc_RNA (1)...(19): siRNA sense strand
acaaagugcaagauaagaa

SEQ ID NO: 138433 - RNA, 19 nt, Homo sapiens
  misc_RNA (1)...(19): siRNA sense strand
gacaccugcugaaccagaa

SEQ ID NO: 138434 - RNA, 19 nt, Homo sapiens
  misc_RNA (1)...(19): siRNA sense strand
cgacuugaggagauuauga

SEQ ID NO: 138435 - RNA, 19 nt, Homo sapiens
  misc_RNA (1)...(19): siRNA sense strand
ucagguagaugguguucag

SEQ ID NO: 138436 - RNA, 19 nt, Homo sapiens
  misc_RNA (1)...(19): siRNA sense strand
gaaaaugguguaucuguuc

SEQ ID NO: 138437 - RNA, 19 nt, Homo sapiens
  misc_RNA (1)...(19): siRNA sense strand
agaaauagugugguuagaa

SEQ ID NO: 138438 - RNA, 19 nt, Homo sapiens
  misc_RNA (1)...(19): siRNA sense strand
ccaggcagcacuacgagaa

SEQ ID NO: 138439 - RNA, 19 nt, Homo sapiens
  misc_RNA (1)...(19): siRNA sense strand
caagucucuuccucauuug

SEQ ID NO: 138440 - RNA, 19 nt, Homo sapiens
  misc_RNA (1)...(19): siRNA sense strand
gacugcagaaguuauauga

SEQ ID NO: 138441 - RNA, 19 nt, Homo sapiens
  misc_RNA (1)...(19): siRNA sense strand
uaaaccauccagauuagau

SEQ ID NO: 138442 - RNA, 19 nt, Homo sapiens
  misc_RNA (1)...(19): siRNA sense strand
ggaacgggagaaacagcua

SEQ ID NO: 138443 - RNA, 19 nt, Homo sapiens
  misc_RNA (1)...(19): siRNA sense strand
ggagaacagaagcuacaga

SEQ ID NO: 138444 - RNA, 19 nt, Homo sapiens
  misc_RNA (1)...(19): siRNA sense strand
agaagcgacuugaggagau

SEQ ID NO: 138445 - RNA, 19 nt, Homo sapiens
  misc_RNA (1)...(19): siRNA sense strand
caaagaacgccacgaagcu

SEQ ID NO: 138446 - RNA, 19 nt, Homo sapiens
  misc_RNA (1)...(19): siRNA sense strand
aacaaacgcuccgggaaau

SEQ ID NO: 138447 - RNA, 19 nt, Homo sapiens
  misc_RNA (1)...(19): siRNA sense strand
aaguggagccugagaagaa

SEQ ID NO: 138448 - RNA, 19 nt, Homo sapiens
  misc_RNA (1)...(19): siRNA sense strand
caaaguggagccugagaag

SEQ ID NO: 138449 - RNA, 19 nt, Homo sapiens
  misc_RNA (1)...(19): siRNA sense strand
ggcaacauccgcccuguca

SEQ ID NO: 138450 - RNA, 19 nt, Homo sapiens
  misc_RNA (1)...(19): siRNA sense strand
cucuucaucugcaacuuua

SEQ ID NO: 138451 - RNA, 19 nt, Homo sapiens
  misc_RNA (1)...(19): siRNA sense strand
agaagaaagauccugagaa

SEQ ID NO: 138452 - RNA, 19 nt, Homo sapiens
  misc_RNA (1)...(19): siRNA sense strand
ugucugcacuuccauguac

SEQ ID NO: 138453 - RNA, 19 nt, Homo sapiens
  misc_RNA (1)...(19): siRNA sense strand
cagagaaacggugauauag

SEQ ID NO: 138454 - RNA, 19 nt, Homo sapiens
  misc_RNA (1)...(19): siRNA sense strand
cuacaaagugcaagauaag

SEQ ID NO: 138455 - RNA, 19 nt, Homo sapiens
  misc_RNA (1)...(19): siRNA sense strand
gcaaguagcaucucugauu

SEQ ID NO: 138456 - RNA, 19 nt, Homo sapiens
  misc_RNA (1)...(19): siRNA sense strand
ccaacaacauagcaauuaa

SEQ ID NO: 138457 - RNA, 19 nt, Homo sapiens
  misc_RNA (1)...(19): siRNA sense strand
caaguagcaucucugauug

SEQ ID NO: 138458 - RNA, 19 nt, Homo sapiens
  misc_RNA (1)...(19): siRNA sense strand
gcugcgaccucucuauaug

SEQ ID NO: 138459 - RNA, 19 nt, Homo sapiens
  misc_RNA (1)...(19): siRNA sense strand
ucccuuaccuaaucaacua

SEQ ID NO: 138460 - RNA, 19 nt, Homo sapiens
  misc_RNA (1)...(19): siRNA sense strand
gccaugcucccuuaccuaa

SEQ ID NO: 138461 - RNA, 19 nt, Homo sapiens
  misc_RNA (1)...(19): siRNA sense strand
gugcugcgaccucucuaua

SEQ ID NO: 138462 - RNA, 19 nt, Homo sapiens
  misc_RNA (1)...(19): siRNA sense strand
uugaugccaugcucccuua

SEQ ID NO: 138463 - RNA, 19 nt, Homo sapiens
  misc_RNA (1)...(19): siRNA sense strand
gcuacugaauccaacaaca

SEQ ID NO: 138464 - RNA, 19 nt, Homo sapiens
  misc_RNA (1)...(19): siRNA sense strand
caugcucccuuaccuaauc

SEQ ID NO: 138465 - RNA, 19 nt, Homo sapiens
  misc_RNA (1)...(19): siRNA sense strand
uccaacaacauagcaauua

SEQ ID NO: 138466 - RNA, 19 nt, Homo sapiens
  misc_RNA (1)...(19): siRNA sense strand
gagcugauccucgugagau

SEQ ID NO: 138467 - RNA, 19 nt, Homo sapiens
  misc_RNA (1)...(19): siRNA sense strand
cagcaaguagcaucucuga

SEQ ID NO: 138468 - RNA, 19 nt, Homo sapiens
  misc_RNA (1)...(19): siRNA sense strand
caacaacauagcaauuaag

SEQ ID NO: 138469 - RNA, 19 nt, Homo sapiens
  misc_RNA (1)...(19): siRNA sense strand
gagugaggcagccauggaa

SEQ ID NO: 138470 - RNA, 19 nt, Homo sapiens
  misc_RNA (1)...(19): siRNA sense strand
uacugaauccaacaacaua

SEQ ID NO: 138471 - RNA, 19 nt, Homo sapiens
  misc_RNA (1)...(19): siRNA sense strand
ccacacucccggacacaug

SEQ ID NO: 138472 - RNA, 19 nt, Homo sapiens
  misc_RNA (1)...(19): siRNA sense strand
gaauccaacaacauagcaa

SEQ ID NO: 138473 - RNA, 19 nt, Homo sapiens
  misc_RNA (1)...(19): siRNA sense strand
uuacuaguggugcuacuga

SEQ ID NO: 138474 - RNA, 19 nt, Homo sapiens
  misc_RNA (1)...(19): siRNA sense strand
cuacugaauccaacaacau

SEQ ID NO: 138475 - RNA, 19 nt, Homo sapiens
  misc_RNA (1)...(19): siRNA sense strand
ggagcugauccucgugaga

SEQ ID NO: 138476 - RNA, 19 nt, Homo sapiens
  misc_RNA (1)...(19): siRNA sense strand
gcaaguagcaucucugauu

SEQ ID NO: 138477 - RNA, 19 nt, Homo sapiens
  misc_RNA (1)...(19): siRNA sense strand
ccaacaacauagcaauuaa

SEQ ID NO: 138478 - RNA, 19 nt, Homo sapiens
  misc_RNA (1)...(19): siRNA sense strand
caaguagcaucucugauug

SEQ ID NO: 138479 - RNA, 19 nt, Homo sapiens
  misc_RNA (1)...(19): siRNA sense strand
gcugcgaccucucuauaug

SEQ ID NO: 138480 - RNA, 19 nt, Homo sapiens
  misc_RNA (1)...(19): siRNA sense strand
ucccuuaccuaaucaacua

SEQ ID NO: 138481 - RNA, 19 nt, Homo sapiens
  misc_RNA (1)...(19): siRNA sense strand
gccaugcucccuuaccuaa

SEQ ID NO: 138482 - RNA, 19 nt, Homo sapiens
  misc_RNA (1)...(19): siRNA sense strand
gugcugcgaccucucuaua

SEQ ID NO: 138483 - RNA, 19 nt, Homo sapiens
  misc_RNA (1)...(19): siRNA sense strand
uugaugccaugcucccuua

SEQ ID NO: 138484 - RNA, 19 nt, Homo sapiens
  misc_RNA (1)...(19): siRNA sense strand
gcuacugaauccaacaaca

SEQ ID NO: 138485 - RNA, 19 nt, Homo sapiens
  misc_RNA (1)...(19): siRNA sense strand
caugcucccuuaccuaauc

SEQ ID NO: 138486 - RNA, 19 nt, Homo sapiens
  misc_RNA (1)...(19): siRNA sense strand
uccaacaacauagcaauua

SEQ ID NO: 138487 - RNA, 19 nt, Homo sapiens
  misc_RNA (1)...(19): siRNA sense strand
gagcugauccucgugagau

SEQ ID NO: 138488 - RNA, 19 nt, Homo sapiens
  misc_RNA (1)...(19): siRNA sense strand
cagcaaguagcaucucuga

SEQ ID NO: 138489 - RNA, 19 nt, Homo sapiens
  misc_RNA (1)...(19): siRNA sense strand
caacaacauagcaauuaag

SEQ ID NO: 138490 - RNA, 19 nt, Homo sapiens
  misc_RNA (1)...(19): siRNA sense strand
gagugaggcagccauggaa

SEQ ID NO: 138491 - RNA, 19 nt, Homo sapiens
  misc_RNA (1)...(19): siRNA sense strand
uacugaauccaacaacaua

SEQ ID NO: 138492 - RNA, 19 nt, Homo sapiens
  misc_RNA (1)...(19): siRNA sense strand
ccacacucccggacacaug

SEQ ID NO: 138493 - RNA, 19 nt, Homo sapiens
  misc_RNA (1)...(19): siRNA sense strand
gaauccaacaacauagcaa

SEQ ID NO: 138494 - RNA, 19 nt, Homo sapiens
  misc_RNA (1)...(19): siRNA sense strand
uuacuaguggugcuacuga

SEQ ID NO: 138495 - RNA, 19 nt, Homo sapiens
  misc_RNA (1)...(19): siRNA sense strand
cuacugaauccaacaacau

SEQ ID NO: 138496 - RNA, 19 nt, Homo sapiens
  misc_RNA (1)...(19): siRNA sense strand
ggagcugauccucgugaga

SEQ ID NO: 138497 - RNA, 19 nt, Homo sapiens
  misc_RNA (1)...(19): siRNA sense strand
cuaagaagcugacuaaugc

SEQ ID NO: 138498 - RNA, 19 nt, Homo sapiens
  misc_RNA (1)...(19): siRNA sense strand
gcuaagaagcugacuaaug

SEQ ID NO: 138499 - RNA, 19 nt, Homo sapiens
  misc_RNA (1)...(19): siRNA sense strand
ccacucaacuuggcucaca

SEQ ID NO: 138500 - RNA, 19 nt, Homo sapiens
  misc_RNA (1)...(19): siRNA sense strand
cugcuaagaagcugacuaa

SEQ ID NO: 138501 - RNA, 19 nt, Homo sapiens
  misc_RNA (1)...(19): siRNA sense strand
gcaugaacgacacccuguu

SEQ ID NO: 138502 - RNA, 19 nt, Homo sapiens
  misc_RNA (1)...(19): siRNA sense strand
ggaaguccuuuuauuacca

SEQ ID NO: 138503 - RNA, 19 nt, Homo sapiens
  misc_RNA (1)...(19): siRNA sense strand
cuaagaagcugacuaaugc

SEQ ID NO: 138504 - RNA, 19 nt, Homo sapiens
  misc_RNA (1)...(19): siRNA sense strand
gcuaagaagcugacuaaug

SEQ ID NO: 138505 - RNA, 19 nt, Homo sapiens
  misc_RNA (1)...(19): siRNA sense strand
ccacucaacuuggcucaca

SEQ ID NO: 138506 - RNA, 19 nt, Homo sapiens
  misc_RNA (1)...(19): siRNA sense strand
cugcuaagaagcugacuaa

SEQ ID NO: 138507 - RNA, 19 nt, Homo sapiens
  misc_RNA (1)...(19): siRNA sense strand
gcaugaacgacacccuguu

SEQ ID NO: 138508 - RNA, 19 nt, Homo sapiens
  misc_RNA (1)...(19): siRNA sense strand
ggaaguccuuuuauuacca

SEQ ID NO: 138509 - RNA, 19 nt, Homo sapiens
  misc_RNA (1)...(19): siRNA sense strand
cuaagaagcugacuaaugc

SEQ ID NO: 138510 - RNA, 19 nt, Homo sapiens
  misc_RNA (1)...(19): siRNA sense strand
gcuaagaagcugacuaaug

SEQ ID NO: 138511 - RNA, 19 nt, Homo sapiens
  misc_RNA (1)...(19): siRNA sense strand
ccacucaacuuggcucaca

SEQ ID NO: 138512 - RNA, 19 nt, Homo sapiens
  misc_RNA (1)...(19): siRNA sense strand
cugcuaagaagcugacuaa

SEQ ID NO: 138513 - RNA, 19 nt, Homo sapiens
  misc_RNA (1)...(19): siRNA sense strand
gcaugaacgacacccuguu

SEQ ID NO: 138514 - RNA, 19 nt, Homo sapiens
  misc_RNA (1)...(19): siRNA sense strand
ggaaguccuuuuauuacca

SEQ ID NO: 138515 - RNA, 19 nt, Homo sapiens
  misc_RNA (1)...(19): siRNA sense strand
cuaagaagcugacuaaugc

SEQ ID NO: 138516 - RNA, 19 nt, Homo sapiens
  misc_RNA (1)...(19): siRNA sense strand
gcuaagaagcugacuaaug

SEQ ID NO: 138517 - RNA, 19 nt, Homo sapiens
  misc_RNA (1)...(19): siRNA sense strand
ccacucaacuuggcucaca

SEQ ID NO: 138518 - RNA, 19 nt, Homo sapiens
  misc_RNA (1)...(19): siRNA sense strand
cugcuaagaagcugacuaa

SEQ ID NO: 138519 - RNA, 19 nt, Homo sapiens
  misc_RNA (1)...(19): siRNA sense strand
gcaugaacgacacccuguu

SEQ ID NO: 138520 - RNA, 19 nt, Homo sapiens
  misc_RNA (1)...(19): siRNA sense strand
ggaaguccuuuuauuacca

SEQ ID NO: 138521 - RNA, 19 nt, Homo sapiens
  misc_RNA (1)...(19): siRNA sense strand
cuaagaagcugacuaaugc

SEQ ID NO: 138522 - RNA, 19 nt, Homo sapiens
  misc_RNA (1)...(19): siRNA sense strand
gcuaagaagcugacuaaug

SEQ ID NO: 138523 - RNA, 19 nt, Homo sapiens
  misc_RNA (1)...(19): siRNA sense strand
ccacucaacuuggcucaca

SEQ ID NO: 138524 - RNA, 19 nt, Homo sapiens
  misc_RNA (1)...(19): siRNA sense strand
cugcuaagaagcugacuaa

SEQ ID NO: 138525 - RNA, 19 nt, Homo sapiens
  misc_RNA (1)...(19): siRNA sense strand
gcaugaacgacacccuguu

SEQ ID NO: 138526 - RNA, 19 nt, Homo sapiens
  misc_RNA (1)...(19): siRNA sense strand
ggaaguccuuuuauuacca

SEQ ID NO: 138527 - RNA, 19 nt, Homo sapiens
  misc_RNA (1)...(19): siRNA sense strand
cuaagaagcugacuaaugc

SEQ ID NO: 138528 - RNA, 19 nt, Homo sapiens
  misc_RNA (1)...(19): siRNA sense strand
gcuaagaagcugacuaaug

SEQ ID NO: 138529 - RNA, 19 nt, Homo sapiens
  misc_RNA (1)...(19): siRNA sense strand
ccacucaacuuggcucaca

SEQ ID NO: 138530 - RNA, 19 nt, Homo sapiens
  misc_RNA (1)...(19): siRNA sense strand
cugcuaagaagcugacuaa

SEQ ID NO: 138531 - RNA, 19 nt, Homo sapiens
  misc_RNA (1)...(19): siRNA sense strand
gcaugaacgacacccuguu

SEQ ID NO: 138532 - RNA, 19 nt, Homo sapiens
  misc_RNA (1)...(19): siRNA sense strand
ggaaguccuuuuauuacca

SEQ ID NO: 138533 - RNA, 19 nt, Homo sapiens
  misc_RNA (1)...(19): siRNA sense strand
ccacucaacuuggcucaca

SEQ ID NO: 138534 - RNA, 19 nt, Homo sapiens
  misc_RNA (1)...(19): siRNA sense strand
gcaugaacgacacccuguu

SEQ ID NO: 138535 - RNA, 19 nt, Homo sapiens
  misc_RNA (1)...(19): siRNA sense strand
ggaaguccuuuuauuacca

SEQ ID NO: 138536 - RNA, 19 nt, Homo sapiens
  misc_RNA (1)...(19): siRNA sense strand
ccacucaacuuggcucaca

SEQ ID NO: 138537 - RNA, 19 nt, Homo sapiens
  misc_RNA (1)...(19): siRNA sense strand
gcaugaacgacacccuguu

SEQ ID NO: 138538 - RNA, 19 nt, Homo sapiens
  misc_RNA (1)...(19): siRNA sense strand
ggaaguccuuuuauuacca

SEQ ID NO: 138539 - RNA, 19 nt, Homo sapiens
  misc_RNA (1)...(19): siRNA sense strand
cuaagaagcugacuaaugc

SEQ ID NO: 138540 - RNA, 19 nt, Homo sapiens
  misc_RNA (1)...(19): siRNA sense strand
gcuaagaagcugacuaaug

SEQ ID NO: 138541 - RNA, 19 nt, Homo sapiens
  misc_RNA (1)...(19): siRNA sense strand
ccacucaacuuggcucaca

SEQ ID NO: 138542 - RNA, 19 nt, Homo sapiens
  misc_RNA (1)...(19): siRNA sense strand
cugcuaagaagcugacuaa

SEQ ID NO: 138543 - RNA, 19 nt, Homo sapiens
  misc_RNA (1)...(19): siRNA sense strand
gcaugaacgacacccuguu

SEQ ID NO: 138544 - RNA, 19 nt, Homo sapiens
  misc_RNA (1)...(19): siRNA sense strand
ggaaguccuuuuauuacca

SEQ ID NO: 138545 - RNA, 19 nt, Homo sapiens
  misc_RNA (1)...(19): siRNA sense strand
cuaagaagcugacuaaugc

SEQ ID NO: 138546 - RNA, 19 nt, Homo sapiens
  misc_RNA (1)...(19): siRNA sense strand
gcuaagaagcugacuaaug

SEQ ID NO: 138547 - RNA, 19 nt, Homo sapiens
  misc_RNA (1)...(19): siRNA sense strand
ccacucaacuuggcucaca

SEQ ID NO: 138548 - RNA, 19 nt, Homo sapiens
  misc_RNA (1)...(19): siRNA sense strand
cugcuaagaagcugacuaa

SEQ ID NO: 138549 - RNA, 19 nt, Homo sapiens
  misc_RNA (1)...(19): siRNA sense strand
gcaugaacgacacccuguu

SEQ ID NO: 138550 - RNA, 19 nt, Homo sapiens
  misc_RNA (1)...(19): siRNA sense strand
ggaaguccuuuuauuacca

SEQ ID NO: 138551 - RNA, 19 nt, Homo sapiens
  misc_RNA (1)...(19): siRNA sense strand
cuaagaagcugacuaaugc

SEQ ID NO: 138552 - RNA, 19 nt, Homo sapiens
  misc_RNA (1)...(19): siRNA sense strand
gcuaagaagcugacuaaug

SEQ ID NO: 138553 - RNA, 19 nt, Homo sapiens
  misc_RNA (1)...(19): siRNA sense strand
ccacucaacuuggcucaca

SEQ ID NO: 138554 - RNA, 19 nt, Homo sapiens
  misc_RNA (1)...(19): siRNA sense strand
cugcuaagaagcugacuaa

SEQ ID NO: 138555 - RNA, 19 nt, Homo sapiens
  misc_RNA (1)...(19): siRNA sense strand
gcaugaacgacacccuguu

SEQ ID NO: 138556 - RNA, 19 nt, Homo sapiens
  misc_RNA (1)...(19): siRNA sense strand
ggaaguccuuuuauuacca

SEQ ID NO: 138557 - RNA, 19 nt, Homo sapiens
  misc_RNA (1)...(19): siRNA sense strand
cuaagaagcugacuaaugc

SEQ ID NO: 138558 - RNA, 19 nt, Homo sapiens
  misc_RNA (1)...(19): siRNA sense strand
gcuaagaagcugacuaaug

SEQ ID NO: 138559 - RNA, 19 nt, Homo sapiens
  misc_RNA (1)...(19): siRNA sense strand
ccacucaacuuggcucaca

SEQ ID NO: 138560 - RNA, 19 nt, Homo sapiens
  misc_RNA (1)...(19): siRNA sense strand
cugcuaagaagcugacuaa

SEQ ID NO: 138561 - RNA, 19 nt, Homo sapiens
  misc_RNA (1)...(19): siRNA sense strand
gcaugaacgacacccuguu

SEQ ID NO: 138562 - RNA, 19 nt, Homo sapiens
  misc_RNA (1)...(19): siRNA sense strand
ggaaguccuuuuauuacca

SEQ ID NO: 138563 - RNA, 19 nt, Homo sapiens
  misc_RNA (1)...(19): siRNA sense strand
cuaagaagcugacuaaugc

SEQ ID NO: 138564 - RNA, 19 nt, Homo sapiens
  misc_RNA (1)...(19): siRNA sense strand
gcuaagaagcugacuaaug

SEQ ID NO: 138565 - RNA, 19 nt, Homo sapiens
  misc_RNA (1)...(19): siRNA sense strand
ccacucaacuuggcucaca

SEQ ID NO: 138566 - RNA, 19 nt, Homo sapiens
  misc_RNA (1)...(19): siRNA sense strand
cugcuaagaagcugacuaa

SEQ ID NO: 138567 - RNA, 19 nt, Homo sapiens
  misc_RNA (1)...(19): siRNA sense strand
gcaugaacgacacccuguu

SEQ ID NO: 138568 - RNA, 19 nt, Homo sapiens
  misc_RNA (1)...(19): siRNA sense strand
ggaaguccuuuuauuacca

SEQ ID NO: 138569 - RNA, 19 nt, Homo sapiens
  misc_RNA (1)...(19): siRNA sense strand
cuaagaagcugacuaaugc

SEQ ID NO: 138570 - RNA, 19 nt, Homo sapiens
  misc_RNA (1)...(19): siRNA sense strand
gcuaagaagcugacuaaug

SEQ ID NO: 138571 - RNA, 19 nt, Homo sapiens
  misc_RNA (1)...(19): siRNA sense strand
ccacucaacuuggcucaca

SEQ ID NO: 138572 - RNA, 19 nt, Homo sapiens
  misc_RNA (1)...(19): siRNA sense strand
cugcuaagaagcugacuaa

SEQ ID NO: 138573 - RNA, 19 nt, Homo sapiens
  misc_RNA (1)...(19): siRNA sense strand
gcaugaacgacacccuguu

SEQ ID NO: 138574 - RNA, 19 nt, Homo sapiens
  misc_RNA (1)...(19): siRNA sense strand
ggaaguccuuuuauuacca

SEQ ID NO: 138575 - RNA, 19 nt, Homo sapiens
  misc_RNA (1)...(19): siRNA sense strand
ccacucaacuuggcucaca

SEQ ID NO: 138576 - RNA, 19 nt, Homo sapiens
  misc_RNA (1)...(19): siRNA sense strand
gcaugaacgacacccuguu

SEQ ID NO: 138577 - RNA, 19 nt, Homo sapiens
  misc_RNA (1)...(19): siRNA sense strand
ggaaguccuuuuauuacca

SEQ ID NO: 138578 - RNA, 19 nt, Homo sapiens
  misc_RNA (1)...(19): siRNA sense strand
ccacucaacuuggcucaca

SEQ ID NO: 138579 - RNA, 19 nt, Homo sapiens
  misc_RNA (1)...(19): siRNA sense strand
gcaugaacgacacccuguu

SEQ ID NO: 138580 - RNA, 19 nt, Homo sapiens
  misc_RNA (1)...(19): siRNA sense strand
ggaaguccuuuuauuacca

SEQ ID NO: 138581 - RNA, 19 nt, Homo sapiens
  misc_RNA (1)...(19): siRNA sense strand
gaaauuaccucccaaguug

SEQ ID NO: 138582 - RNA, 19 nt, Homo sapiens
  misc_RNA (1)...(19): siRNA sense strand
ugacauagcuucuaacagu

SEQ ID NO: 138583 - RNA, 19 nt, Homo sapiens
  misc_RNA (1)...(19): siRNA sense strand
ggagggaguuuguguuuga

SEQ ID NO: 138584 - RNA, 19 nt, Homo sapiens
  misc_RNA (1)...(19): siRNA sense strand
gaacgggcaauaugaguua

SEQ ID NO: 138585 - RNA, 19 nt, Homo sapiens
  misc_RNA (1)...(19): siRNA sense strand
ggaugaugcuucuuauauu

SEQ ID NO: 138586 - RNA, 19 nt, Homo sapiens
  misc_RNA (1)...(19): siRNA sense strand
gaacgaagguaccggaaag

SEQ ID NO: 138587 - RNA, 19 nt, Homo sapiens
  misc_RNA (1)...(19): siRNA sense strand
ugaaaucccugaugaggaa

SEQ ID NO: 138588 - RNA, 19 nt, Homo sapiens
  misc_RNA (1)...(19): siRNA sense strand
gaaaggaucagugucgaua

SEQ ID NO: 138589 - RNA, 19 nt, Homo sapiens
  misc_RNA (1)...(19): siRNA sense strand
ggaaauuaccucccaaguu

SEQ ID NO: 138590 - RNA, 19 nt, Homo sapiens
  misc_RNA (1)...(19): siRNA sense strand
gaaaaugacuuccuuccuu

SEQ ID NO: 138591 - RNA, 19 nt, Homo sapiens
  misc_RNA (1)...(19): siRNA sense strand
ucaaacauauccuggcaaa

SEQ ID NO: 138592 - RNA, 19 nt, Homo sapiens
  misc_RNA (1)...(19): siRNA sense strand
gaagauaguguacgcauca

SEQ ID NO: 138593 - RNA, 19 nt, Homo sapiens
  misc_RNA (1)...(19): siRNA sense strand
uaagaaagaccuucagaga

SEQ ID NO: 138594 - RNA, 19 nt, Homo sapiens
  misc_RNA (1)...(19): siRNA sense strand
gaaauucgaccagcuaaau

SEQ ID NO: 138595 - RNA, 19 nt, Homo sapiens
  misc_RNA (1)...(19): siRNA sense strand
caagacagacuccaaguga

SEQ ID NO: 138596 - RNA, 19 nt, Homo sapiens
  misc_RNA (1)...(19): siRNA sense strand
ugacuuccuuccuuccuua

SEQ ID NO: 138597 - RNA, 19 nt, Homo sapiens
  misc_RNA (1)...(19): siRNA sense strand
ggagaucuggcuucuagua

SEQ ID NO: 138598 - RNA, 19 nt, Homo sapiens
  misc_RNA (1)...(19): siRNA sense strand
gagaagauaagauugaaga

SEQ ID NO: 138599 - RNA, 19 nt, Homo sapiens
  misc_RNA (1)...(19): siRNA sense strand
gaacuuggaaugugaaugg

SEQ ID NO: 138600 - RNA, 19 nt, Homo sapiens
  misc_RNA (1)...(19): siRNA sense strand
gggagggucucaucaaaca

SEQ ID NO: 138601 - RNA, 19 nt, Homo sapiens
  misc_RNA (1)...(19): siRNA sense strand
gggugaagguuguggauga

SEQ ID NO: 138602 - RNA, 19 nt, Homo sapiens
  misc_RNA (1)...(19): siRNA sense strand
gggaugaugcuucuuauau

SEQ ID NO: 138603 - RNA, 19 nt, Homo sapiens
  misc_RNA (1)...(19): siRNA sense strand
ccugauaucuacugcauug

SEQ ID NO: 138604 - RNA, 19 nt, Homo sapiens
  misc_RNA (1)...(19): siRNA sense strand
cuucagauguguucaagaa

SEQ ID NO: 138605 - RNA, 19 nt, Homo sapiens
  misc_RNA (1)...(19): siRNA sense strand
guccauggcuguagagaga

SEQ ID NO: 138606 - RNA, 19 nt, Homo sapiens
  misc_RNA (1)...(19): siRNA sense strand
ggagucacauggaacugaa

SEQ ID NO: 138607 - RNA, 19 nt, Homo sapiens
  misc_RNA (1)...(19): siRNA sense strand
gaagagcuccagcagauca

SEQ ID NO: 138608 - RNA, 19 nt, Homo sapiens
  misc_RNA (1)...(19): siRNA sense strand
guagaucaccuauucaaau

SEQ ID NO: 138609 - RNA, 19 nt, Homo sapiens
  misc_RNA (1)...(19): siRNA sense strand
gcuuugaaaucccugauga

SEQ ID NO: 138610 - RNA, 19 nt, Homo sapiens
  misc_RNA (1)...(19): siRNA sense strand
caugaucgcuacucucuuc

SEQ ID NO: 138611 - RNA, 19 nt, Homo sapiens
  misc_RNA (1)...(19): siRNA sense strand
gagaugccauagaaauguu

SEQ ID NO: 138612 - RNA, 19 nt, Homo sapiens
  misc_RNA (1)...(19): siRNA sense strand
agaaagaccuucagagacu

SEQ ID NO: 138613 - RNA, 19 nt, Homo sapiens
  misc_RNA (1)...(19): siRNA sense strand
gagggucucaucaaacaua

SEQ ID NO: 138614 - RNA, 19 nt, Homo sapiens
  misc_RNA (1)...(19): siRNA sense strand
gcgggagggucucaucaaa

SEQ ID NO: 138615 - RNA, 19 nt, Homo sapiens
  misc_RNA (1)...(19): siRNA sense strand
gaaaucccuucugcaaaug

SEQ ID NO: 138616 - RNA, 19 nt, Homo sapiens
  misc_RNA (1)...(19): siRNA sense strand
gcugugagauuuguauuuc

SEQ ID NO: 138617 - RNA, 19 nt, Homo sapiens
  misc_RNA (1)...(19): siRNA sense strand
guagagagagguuugcauu

SEQ ID NO: 138618 - RNA, 19 nt, Homo sapiens
  misc_RNA (1)...(19): siRNA sense strand
ugauugacauagcuucuaa

SEQ ID NO: 138619 - RNA, 19 nt, Homo sapiens
  misc_RNA (1)...(19): siRNA sense strand
gauuacuucuugacuauca

SEQ ID NO: 138620 - RNA, 19 nt, Homo sapiens
  misc_RNA (1)...(19): siRNA sense strand
gggagaagauaagauugaa

SEQ ID NO: 138621 - RNA, 19 nt, Homo sapiens
  misc_RNA (1)...(19): siRNA sense strand
cagcaacaauggacagguu

SEQ ID NO: 138622 - RNA, 19 nt, Homo sapiens
  misc_RNA (1)...(19): siRNA sense strand
ggaucagugucgauacauu

SEQ ID NO: 138623 - RNA, 19 nt, Homo sapiens
  misc_RNA (1)...(19): siRNA sense strand
uuucagggcuucuuggauu

SEQ ID NO: 138624 - RNA, 19 nt, Homo sapiens
  misc_RNA (1)...(19): siRNA sense strand
aaggagaucuggcuucuag

SEQ ID NO: 138625 - RNA, 19 nt, Homo sapiens
  misc_RNA (1)...(19): siRNA sense strand
uuaccaaacucauagacuu

SEQ ID NO: 138626 - RNA, 19 nt, Homo sapiens
  misc_RNA (1)...(19): siRNA sense strand
gaggcucugugccguauga

SEQ ID NO: 138627 - RNA, 19 nt, Homo sapiens
  misc_RNA (1)...(19): siRNA sense strand
gaagguaccggaaagucuu

SEQ ID NO: 138628 - RNA, 19 nt, Homo sapiens
  misc_RNA (1)...(19): siRNA sense strand
cgaauucuuuggagaggaa

SEQ ID NO: 138629 - RNA, 19 nt, Homo sapiens
  misc_RNA (1)...(19): siRNA sense strand
aaccuuggcugaacuguga

SEQ ID NO: 138630 - RNA, 19 nt, Homo sapiens
  misc_RNA (1)...(19): siRNA sense strand
cauucagacuuucagauuu

SEQ ID NO: 138631 - RNA, 19 nt, Homo sapiens
  misc_RNA (1)...(19): siRNA sense strand
gcaaagcgagagaaagaau

SEQ ID NO: 138632 - RNA, 19 nt, Homo sapiens
  misc_RNA (1)...(19): siRNA sense strand
aggaagagcuccagcagau

SEQ ID NO: 138633 - RNA, 19 nt, Homo sapiens
  misc_RNA (1)...(19): siRNA sense strand
guugggagauuugaauuau

SEQ ID NO: 138634 - RNA, 19 nt, Homo sapiens
  misc_RNA (1)...(19): siRNA sense strand
caaagcgagagaaagaaua

SEQ ID NO: 138635 - RNA, 19 nt, Homo sapiens
  misc_RNA (1)...(19): siRNA sense strand
agaaguuccuguuaccaaa

SEQ ID NO: 138636 - RNA, 19 nt, Homo sapiens
  misc_RNA (1)...(19): siRNA sense strand
ccaaagccaaguauaagaa

SEQ ID NO: 138637 - RNA, 19 nt, Homo sapiens
  misc_RNA (1)...(19): siRNA sense strand
gaaugugaauggccagucu

SEQ ID NO: 138638 - RNA, 19 nt, Homo sapiens
  misc_RNA (1)...(19): siRNA sense strand
gcaguugaacaucaugaaa

SEQ ID NO: 138639 - RNA, 19 nt, Homo sapiens
  misc_RNA (1)...(19): siRNA sense strand
gcuacucucuucacuaguc

SEQ ID NO: 138640 - RNA, 19 nt, Homo sapiens
  misc_RNA (1)...(19): siRNA sense strand
gcaaagacucuguaaccau

SEQ ID NO: 138641 - RNA, 19 nt, Homo sapiens
  misc_RNA (1)...(19): siRNA sense strand
uaccagaaauuagacacua

SEQ ID NO: 138642 - RNA, 19 nt, Homo sapiens
  misc_RNA (1)...(19): siRNA sense strand
gagaaguuccuguuaccaa

SEQ ID NO: 138643 - RNA, 19 nt, Homo sapiens
  misc_RNA (1)...(19): siRNA sense strand
ucaccuggaucgaggcaaa

SEQ ID NO: 138644 - RNA, 19 nt, Homo sapiens
  misc_RNA (1)...(19): siRNA sense strand
uaaauagccacuucagaug

SEQ ID NO: 138645 - RNA, 19 nt, Homo sapiens
  misc_RNA (1)...(19): siRNA sense strand
gauaucuacugcauuggau

SEQ ID NO: 138646 - RNA, 19 nt, Homo sapiens
  misc_RNA (1)...(19): siRNA sense strand
guuggaacuuggaauguga

SEQ ID NO: 138647 - RNA, 19 nt, Homo sapiens
  misc_RNA (1)...(19): siRNA sense strand
gagaaagaauaugucaaca

SEQ ID NO: 138648 - RNA, 19 nt, Homo sapiens
  misc_RNA (1)...(19): siRNA sense strand
cgggcaauaugaguuaaua

SEQ ID NO: 138649 - RNA, 19 nt, Homo sapiens
  misc_RNA (1)...(19): siRNA sense strand
aaggagaaguuccagauca

SEQ ID NO: 138650 - RNA, 19 nt, Homo sapiens
  misc_RNA (1)...(19): siRNA sense strand
cuaugaauuuggacaagaa

SEQ ID NO: 138651 - RNA, 19 nt, Homo sapiens
  misc_RNA (1)...(19): siRNA sense strand
ugaauacaauagcgucaau

SEQ ID NO: 138652 - RNA, 19 nt, Homo sapiens
  misc_RNA (1)...(19): siRNA sense strand
gauaccagcauuccugaga

SEQ ID NO: 138653 - RNA, 19 nt, Homo sapiens
  misc_RNA (1)...(19): siRNA sense strand
gaaaagaccaauccgagaa

SEQ ID NO: 138654 - RNA, 19 nt, Homo sapiens
  misc_RNA (1)...(19): siRNA sense strand
gaggugaaaagucuuauua

SEQ ID NO: 138655 - RNA, 19 nt, Homo sapiens
  misc_RNA (1)...(19): siRNA sense strand
ugggagauuugaauuauag

SEQ ID NO: 138656 - RNA, 19 nt, Homo sapiens
  misc_RNA (1)...(19): siRNA sense strand
ugauauugcuacagaaaca

SEQ ID NO: 138657 - RNA, 19 nt, Homo sapiens
  misc_RNA (1)...(19): siRNA sense strand
ccaauccuccugauaucua

SEQ ID NO: 138658 - RNA, 19 nt, Homo sapiens
  misc_RNA (1)...(19): siRNA sense strand
ucaagaagcagaagaaacu

SEQ ID NO: 138659 - RNA, 19 nt, Homo sapiens
  misc_RNA (1)...(19): siRNA sense strand
gcugaacugugaucccaau

SEQ ID NO: 138660 - RNA, 19 nt, Homo sapiens
  misc_RNA (1)...(19): siRNA sense strand
cuuccgagaugccauagaa

SEQ ID NO: 138661 - RNA, 19 nt, Homo sapiens
  misc_RNA (1)...(19): siRNA sense strand
ggaacgggcaauaugaguu

SEQ ID NO: 138662 - RNA, 19 nt, Homo sapiens
  misc_RNA (1)...(19): siRNA sense strand
gguugggagauuugaauua

SEQ ID NO: 138663 - RNA, 19 nt, Homo sapiens
  misc_RNA (1)...(19): siRNA sense strand
guugggaugaugcuucuua

SEQ ID NO: 138664 - RNA, 19 nt, Homo sapiens
  misc_RNA (1)...(19): siRNA sense strand
caaagccaaguauaagaaa

SEQ ID NO: 138665 - RNA, 19 nt, Homo sapiens
  misc_RNA (1)...(19): siRNA sense strand
gaacugugaucccaauccu

SEQ ID NO: 138666 - RNA, 19 nt, Homo sapiens
  misc_RNA (1)...(19): siRNA sense strand
caguggacauuucucuuga

SEQ ID NO: 138667 - RNA, 19 nt, Homo sapiens
  misc_RNA (1)...(19): siRNA sense strand
gaucagugucgauacauuc

SEQ ID NO: 138668 - RNA, 19 nt, Homo sapiens
  misc_RNA (1)...(19): siRNA sense strand
caggagggaguuuguguuu

SEQ ID NO: 138669 - RNA, 19 nt, Homo sapiens
  misc_RNA (1)...(19): siRNA sense strand
gaucccaauccuccugaua

SEQ ID NO: 138670 - RNA, 19 nt, Homo sapiens
  misc_RNA (1)...(19): siRNA sense strand
gcaagacagacuccaagug

SEQ ID NO: 138671 - RNA, 19 nt, Homo sapiens
  misc_RNA (1)...(19): siRNA sense strand
uaucagcgaugucuugacu

SEQ ID NO: 138672 - RNA, 19 nt, Homo sapiens
  misc_RNA (1)...(19): siRNA sense strand
caaaugagacaguggacau

SEQ ID NO: 138673 - RNA, 19 nt, Homo sapiens
  misc_RNA (1)...(19): siRNA sense strand
auaaauagccacuucagau

SEQ ID NO: 138674 - RNA, 19 nt, Homo sapiens
  misc_RNA (1)...(19): siRNA sense strand
guggaggacuuugagagaa

SEQ ID NO: 138675 - RNA, 19 nt, Homo sapiens
  misc_RNA (1)...(19): siRNA sense strand
ccaaguauaagaaaguuca

SEQ ID NO: 138676 - RNA, 19 nt, Homo sapiens
  misc_RNA (1)...(19): siRNA sense strand
ucgcuacucucuucacuag

SEQ ID NO: 138677 - RNA, 19 nt, Homo sapiens
  misc_RNA (1)...(19): siRNA sense strand
uagcgucaaugccaacaug

SEQ ID NO: 138678 - RNA, 19 nt, Homo sapiens
  misc_RNA (1)...(19): siRNA sense strand
ccaaggagaucuggcuucu

SEQ ID NO: 138679 - RNA, 19 nt, Homo sapiens
  misc_RNA (1)...(19): siRNA sense strand
gaacucgggagaagauaag

SEQ ID NO: 138680 - RNA, 19 nt, Homo sapiens
  misc_RNA (1)...(19): siRNA sense strand
ggugaagguuguggaugaa

SEQ ID NO: 138681 - RNA, 19 nt, Homo sapiens
  misc_RNA (1)...(19): siRNA sense strand
gaaauuaccucccaaguug

SEQ ID NO: 138682 - RNA, 19 nt, Homo sapiens
  misc_RNA (1)...(19): siRNA sense strand
ugacauagcuucuaacagu

SEQ ID NO: 138683 - RNA, 19 nt, Homo sapiens
  misc_RNA (1)...(19): siRNA sense strand
ggagggaguuuguguuuga

SEQ ID NO: 138684 - RNA, 19 nt, Homo sapiens
  misc_RNA (1)...(19): siRNA sense strand
gaacgggcaauaugaguua

SEQ ID NO: 138685 - RNA, 19 nt, Homo sapiens
  misc_RNA (1)...(19): siRNA sense strand
ggaugaugcuucuuauauu

SEQ ID NO: 138686 - RNA, 19 nt, Homo sapiens
  misc_RNA (1)...(19): siRNA sense strand
gaacgaagguaccggaaag

SEQ ID NO: 138687 - RNA, 19 nt, Homo sapiens
  misc_RNA (1)...(19): siRNA sense strand
ugaaaucccugaugaggaa

SEQ ID NO: 138688 - RNA, 19 nt, Homo sapiens
  misc_RNA (1)...(19): siRNA sense strand
gaaaggaucagugucgaua

SEQ ID NO: 138689 - RNA, 19 nt, Homo sapiens
  misc_RNA (1)...(19): siRNA sense strand
ggaaauuaccucccaaguu

SEQ ID NO: 138690 - RNA, 19 nt, Homo sapiens
  misc_RNA (1)...(19): siRNA sense strand
gaaaaugacuuccuuccuu

SEQ ID NO: 138691 - RNA, 19 nt, Homo sapiens
  misc_RNA (1)...(19): siRNA sense strand
ucaaacauauccuggcaaa

SEQ ID NO: 138692 - RNA, 19 nt, Homo sapiens
  misc_RNA (1)...(19): siRNA sense strand
gaagauaguguacgcauca

SEQ ID NO: 138693 - RNA, 19 nt, Homo sapiens
  misc_RNA (1)...(19): siRNA sense strand
uaagaaagaccuucagaga

SEQ ID NO: 138694 - RNA, 19 nt, Homo sapiens
  misc_RNA (1)...(19): siRNA sense strand
gaaauucgaccagcuaaau

SEQ ID NO: 138695 - RNA, 19 nt, Homo sapiens
  misc_RNA (1)...(19): siRNA sense strand
caagacagacuccaaguga

SEQ ID NO: 138696 - RNA, 19 nt, Homo sapiens
  misc_RNA (1)...(19): siRNA sense strand
ugacuuccuuccuuccuua

SEQ ID NO: 138697 - RNA, 19 nt, Homo sapiens
  misc_RNA (1)...(19): siRNA sense strand
ggagaucuggcuucuagua

SEQ ID NO: 138698 - RNA, 19 nt, Homo sapiens
  misc_RNA (1)...(19): siRNA sense strand
gagaagauaagauugaaga

SEQ ID NO: 138699 - RNA, 19 nt, Homo sapiens
  misc_RNA (1)...(19): siRNA sense strand
gaacuuggaaugugaaugg

SEQ ID NO: 138700 - RNA, 19 nt, Homo sapiens
  misc_RNA (1)...(19): siRNA sense strand
gggagggucucaucaaaca

SEQ ID NO: 138701 - RNA, 19 nt, Homo sapiens
  misc_RNA (1)...(19): siRNA sense strand
gggugaagguuguggauga

SEQ ID NO: 138702 - RNA, 19 nt, Homo sapiens
  misc_RNA (1)...(19): siRNA sense strand
gggaugaugcuucuuauau

SEQ ID NO: 138703 - RNA, 19 nt, Homo sapiens
  misc_RNA (1)...(19): siRNA sense strand
ccugauaucuacugcauug

SEQ ID NO: 138704 - RNA, 19 nt, Homo sapiens
  misc_RNA (1)...(19): siRNA sense strand
cuucagauguguucaagaa

SEQ ID NO: 138705 - RNA, 19 nt, Homo sapiens
  misc_RNA (1)...(19): siRNA sense strand
guccauggcuguagagaga

SEQ ID NO: 138706 - RNA, 19 nt, Homo sapiens
  misc_RNA (1)...(19): siRNA sense strand
ggagucacauggaacugaa

SEQ ID NO: 138707 - RNA, 19 nt, Homo sapiens
  misc_RNA (1)...(19): siRNA sense strand
gaagagcuccagcagauca

SEQ ID NO: 138708 - RNA, 19 nt, Homo sapiens
  misc_RNA (1)...(19): siRNA sense strand
guagaucaccuauucaaau

SEQ ID NO: 138709 - RNA, 19 nt, Homo sapiens
  misc_RNA (1)...(19): siRNA sense strand
gcuuugaaaucccugauga

SEQ ID NO: 138710 - RNA, 19 nt, Homo sapiens
  misc_RNA (1)...(19): siRNA sense strand
caugaucgcuacucucuuc

SEQ ID NO: 138711 - RNA, 19 nt, Homo sapiens
  misc_RNA (1)...(19): siRNA sense strand
gagaugccauagaaauguu

SEQ ID NO: 138712 - RNA, 19 nt, Homo sapiens
  misc_RNA (1)...(19): siRNA sense strand
agaaagaccuucagagacu

SEQ ID NO: 138713 - RNA, 19 nt, Homo sapiens
  misc_RNA (1)...(19): siRNA sense strand
gagggucucaucaaacaua

SEQ ID NO: 138714 - RNA, 19 nt, Homo sapiens
  misc_RNA (1)...(19): siRNA sense strand
gcgggagggucucaucaaa

SEQ ID NO: 138715 - RNA, 19 nt, Homo sapiens
  misc_RNA (1)...(19): siRNA sense strand
gaaaucccuucugcaaaug

SEQ ID NO: 138716 - RNA, 19 nt, Homo sapiens
  misc_RNA (1)...(19): siRNA sense strand
gcugugagauuuguauuuc

SEQ ID NO: 138717 - RNA, 19 nt, Homo sapiens
  misc_RNA (1)...(19): siRNA sense strand
guagagagagguuugcauu

SEQ ID NO: 138718 - RNA, 19 nt, Homo sapiens
  misc_RNA (1)...(19): siRNA sense strand
ugauugacauagcuucuaa

SEQ ID NO: 138719 - RNA, 19 nt, Homo sapiens
  misc_RNA (1)...(19): siRNA sense strand
gauuacuucuugacuauca

SEQ ID NO: 138720 - RNA, 19 nt, Homo sapiens
  misc_RNA (1)...(19): siRNA sense strand
gggagaagauaagauugaa

SEQ ID NO: 138721 - RNA, 19 nt, Homo sapiens
  misc_RNA (1)...(19): siRNA sense strand
cagcaacaauggacagguu

SEQ ID NO: 138722 - RNA, 19 nt, Homo sapiens
  misc_RNA (1)...(19): siRNA sense strand
ggaucagugucgauacauu

SEQ ID NO: 138723 - RNA, 19 nt, Homo sapiens
  misc_RNA (1)...(19): siRNA sense strand
uuucagggcuucuuggauu

SEQ ID NO: 138724 - RNA, 19 nt, Homo sapiens
  misc_RNA (1)...(19): siRNA sense strand
aaggagaucuggcuucuag

SEQ ID NO: 138725 - RNA, 19 nt, Homo sapiens
  misc_RNA (1)...(19): siRNA sense strand
uuaccaaacucauagacuu

SEQ ID NO: 138726 - RNA, 19 nt, Homo sapiens
  misc_RNA (1)...(19): siRNA sense strand
gaggcucugugccguauga

SEQ ID NO: 138727 - RNA, 19 nt, Homo sapiens
  misc_RNA (1)...(19): siRNA sense strand
gaagguaccggaaagucuu

SEQ ID NO: 138728 - RNA, 19 nt, Homo sapiens
  misc_RNA (1)...(19): siRNA sense strand
cgaauucuuuggagaggaa

SEQ ID NO: 138729 - RNA, 19 nt, Homo sapiens
  misc_RNA (1)...(19): siRNA sense strand
aaccuuggcugaacuguga

SEQ ID NO: 138730 - RNA, 19 nt, Homo sapiens
  misc_RNA (1)...(19): siRNA sense strand
cauucagacuuucagauuu

SEQ ID NO: 138731 - RNA, 19 nt, Homo sapiens
  misc_RNA (1)...(19): siRNA sense strand
gcaaagcgagagaaagaau

SEQ ID NO: 138732 - RNA, 19 nt, Homo sapiens
  misc_RNA (1)...(19): siRNA sense strand
aggaagagcuccagcagau

SEQ ID NO: 138733 - RNA, 19 nt, Homo sapiens
  misc_RNA (1)...(19): siRNA sense strand
guugggagauuugaauuau

SEQ ID NO: 138734 - RNA, 19 nt, Homo sapiens
  misc_RNA (1)...(19): siRNA sense strand
caaagcgagagaaagaaua

SEQ ID NO: 138735 - RNA, 19 nt, Homo sapiens
  misc_RNA (1)...(19): siRNA sense strand
agaaguuccuguuaccaaa

SEQ ID NO: 138736 - RNA, 19 nt, Homo sapiens
  misc_RNA (1)...(19): siRNA sense strand
ccaaagccaaguauaagaa

SEQ ID NO: 138737 - RNA, 19 nt, Homo sapiens
  misc_RNA (1)...(19): siRNA sense strand
gaaugugaauggccagucu

SEQ ID NO: 138738 - RNA, 19 nt, Homo sapiens
  misc_RNA (1)...(19): siRNA sense strand
gcaguugaacaucaugaaa

SEQ ID NO: 138739 - RNA, 19 nt, Homo sapiens
  misc_RNA (1)...(19): siRNA sense strand
gcuacucucuucacuaguc

SEQ ID NO: 138740 - RNA, 19 nt, Homo sapiens
  misc_RNA (1)...(19): siRNA sense strand
gcaaagacucuguaaccau

SEQ ID NO: 138741 - RNA, 19 nt, Homo sapiens
  misc_RNA (1)...(19): siRNA sense strand
uaccagaaauuagacacua

SEQ ID NO: 138742 - RNA, 19 nt, Homo sapiens
  misc_RNA (1)...(19): siRNA sense strand
gagaaguuccuguuaccaa

SEQ ID NO: 138743 - RNA, 19 nt, Homo sapiens
  misc_RNA (1)...(19): siRNA sense strand
ucaccuggaucgaggcaaa

SEQ ID NO: 138744 - RNA, 19 nt, Homo sapiens
  misc_RNA (1)...(19): siRNA sense strand
uaaauagccacuucagaug

SEQ ID NO: 138745 - RNA, 19 nt, Homo sapiens
  misc_RNA (1)...(19): siRNA sense strand
gauaucuacugcauuggau

SEQ ID NO: 138746 - RNA, 19 nt, Homo sapiens
  misc_RNA (1)...(19): siRNA sense strand
guuggaacuuggaauguga

SEQ ID NO: 138747 - RNA, 19 nt, Homo sapiens
  misc_RNA (1)...(19): siRNA sense strand
gagaaagaauaugucaaca

SEQ ID NO: 138748 - RNA, 19 nt, Homo sapiens
  misc_RNA (1)...(19): siRNA sense strand
cgggcaauaugaguuaaua

SEQ ID NO: 138749 - RNA, 19 nt, Homo sapiens
  misc_RNA (1)...(19): siRNA sense strand
aaggagaaguuccagauca

SEQ ID NO: 138750 - RNA, 19 nt, Homo sapiens
  misc_RNA (1)...(19): siRNA sense strand
cuaugaauuuggacaagaa

SEQ ID NO: 138751 - RNA, 19 nt, Homo sapiens
  misc_RNA (1)...(19): siRNA sense strand
ugaauacaauagcgucaau

SEQ ID NO: 138752 - RNA, 19 nt, Homo sapiens
  misc_RNA (1)...(19): siRNA sense strand
gauaccagcauuccugaga

SEQ ID NO: 138753 - RNA, 19 nt, Homo sapiens
  misc_RNA (1)...(19): siRNA sense strand
gaaaagaccaauccgagaa

SEQ ID NO: 138754 - RNA, 19 nt, Homo sapiens
  misc_RNA (1)...(19): siRNA sense strand
gaggugaaaagucuuauua

SEQ ID NO: 138755 - RNA, 19 nt, Homo sapiens
  misc_RNA (1)...(19): siRNA sense strand
ugggagauuugaauuauag

SEQ ID NO: 138756 - RNA, 19 nt, Homo sapiens
  misc_RNA (1)...(19): siRNA sense strand
ugauauugcuacagaaaca

SEQ ID NO: 138757 - RNA, 19 nt, Homo sapiens
  misc_RNA (1)...(19): siRNA sense strand
ccaauccuccugauaucua

SEQ ID NO: 138758 - RNA, 19 nt, Homo sapiens
  misc_RNA (1)...(19): siRNA sense strand
ucaagaagcagaagaaacu

SEQ ID NO: 138759 - RNA, 19 nt, Homo sapiens
  misc_RNA (1)...(19): siRNA sense strand
gcugaacugugaucccaau

SEQ ID NO: 138760 - RNA, 19 nt, Homo sapiens
  misc_RNA (1)...(19): siRNA sense strand
cuuccgagaugccauagaa

SEQ ID NO: 138761 - RNA, 19 nt, Homo sapiens
  misc_RNA (1)...(19): siRNA sense strand
ggaacgggcaauaugaguu

SEQ ID NO: 138762 - RNA, 19 nt, Homo sapiens
  misc_RNA (1)...(19): siRNA sense strand
gguugggagauuugaauua

SEQ ID NO: 138763 - RNA, 19 nt, Homo sapiens
  misc_RNA (1)...(19): siRNA sense strand
guugggaugaugcuucuua

SEQ ID NO: 138764 - RNA, 19 nt, Homo sapiens
  misc_RNA (1)...(19): siRNA sense strand
caaagccaaguauaagaaa

SEQ ID NO: 138765 - RNA, 19 nt, Homo sapiens
  misc_RNA (1)...(19): siRNA sense strand
gaacugugaucccaauccu

SEQ ID NO: 138766 - RNA, 19 nt, Homo sapiens
  misc_RNA (1)...(19): siRNA sense strand
caguggacauuucucuuga

SEQ ID NO: 138767 - RNA, 19 nt, Homo sapiens
  misc_RNA (1)...(19): siRNA sense strand
gaucagugucgauacauuc

SEQ ID NO: 138768 - RNA, 19 nt, Homo sapiens
  misc_RNA (1)...(19): siRNA sense strand
caggagggaguuuguguuu

SEQ ID NO: 138769 - RNA, 19 nt, Homo sapiens
  misc_RNA (1)...(19): siRNA sense strand
gaucccaauccuccugaua

SEQ ID NO: 138770 - RNA, 19 nt, Homo sapiens
  misc_RNA (1)...(19): siRNA sense strand
gcaagacagacuccaagug

SEQ ID NO: 138771 - RNA, 19 nt, Homo sapiens
  misc_RNA (1)...(19): siRNA sense strand
uaucagcgaugucuugacu

SEQ ID NO: 138772 - RNA, 19 nt, Homo sapiens
  misc_RNA (1)...(19): siRNA sense strand
caaaugagacaguggacau

SEQ ID NO: 138773 - RNA, 19 nt, Homo sapiens
  misc_RNA (1)...(19): siRNA sense strand
auaaauagccacuucagau

SEQ ID NO: 138774 - RNA, 19 nt, Homo sapiens
  misc_RNA (1)...(19): siRNA sense strand
guggaggacuuugagagaa

SEQ ID NO: 138775 - RNA, 19 nt, Homo sapiens
  misc_RNA (1)...(19): siRNA sense strand
ccaaguauaagaaaguuca

SEQ ID NO: 138776 - RNA, 19 nt, Homo sapiens
  misc_RNA (1)...(19): siRNA sense strand
ucgcuacucucuucacuag

SEQ ID NO: 138777 - RNA, 19 nt, Homo sapiens
  misc_RNA (1)...(19): siRNA sense strand
uagcgucaaugccaacaug

SEQ ID NO: 138778 - RNA, 19 nt, Homo sapiens
  misc_RNA (1)...(19): siRNA sense strand
ccaaggagaucuggcuucu

SEQ ID NO: 138779 - RNA, 19 nt, Homo sapiens
  misc_RNA (1)...(19): siRNA sense strand
gaacucgggagaagauaag

SEQ ID NO: 138780 - RNA, 19 nt, Homo sapiens
  misc_RNA (1)...(19): siRNA sense strand
ggugaagguuguggaugaa

SEQ ID NO: 138781 - RNA, 19 nt, Homo sapiens
  misc_RNA (1)...(19): siRNA sense strand
gcagagagcuugaagaaau

SEQ ID NO: 138782 - RNA, 19 nt, Homo sapiens
  misc_RNA (1)...(19): siRNA sense strand
gaucaggucuggcuguuua

SEQ ID NO: 138783 - RNA, 19 nt, Homo sapiens
  misc_RNA (1)...(19): siRNA sense strand
caagaaggcugaagagauu

SEQ ID NO: 138784 - RNA, 19 nt, Homo sapiens
  misc_RNA (1)...(19): siRNA sense strand
agaauaagauguccaacua

SEQ ID NO: 138785 - RNA, 19 nt, Homo sapiens
  misc_RNA (1)...(19): siRNA sense strand
ggagaucgcugaccuugga

SEQ ID NO: 138786 - RNA, 19 nt, Homo sapiens
  misc_RNA (1)...(19): siRNA sense strand
ggacaagaccuguuucuau

SEQ ID NO: 138787 - RNA, 19 nt, Homo sapiens
  misc_RNA (1)...(19): siRNA sense strand
gacaagaccuguuucuaug

SEQ ID NO: 138788 - RNA, 19 nt, Homo sapiens
  misc_RNA (1)...(19): siRNA sense strand
cugaagagauugcuaauga

SEQ ID NO: 138789 - RNA, 19 nt, Homo sapiens
  misc_RNA (1)...(19): siRNA sense strand
aaacagaucuggcaaaauu

SEQ ID NO: 138790 - RNA, 19 nt, Homo sapiens
  misc_RNA (1)...(19): siRNA sense strand
ucauuaugcuggacauuua

SEQ ID NO: 138791 - RNA, 19 nt, Homo sapiens
  misc_RNA (1)...(19): siRNA sense strand
caaagccgauguccagaaa

SEQ ID NO: 138792 - RNA, 19 nt, Homo sapiens
  misc_RNA (1)...(19): siRNA sense strand
gaacacaauugacccaucu

SEQ ID NO: 138793 - RNA, 19 nt, Homo sapiens
  misc_RNA (1)...(19): siRNA sense strand
ugacagcagugaagauaaa

SEQ ID NO: 138794 - RNA, 19 nt, Homo sapiens
  misc_RNA (1)...(19): siRNA sense strand
ggagauuacuuuaaggaau

SEQ ID NO: 138795 - RNA, 19 nt, Homo sapiens
  misc_RNA (1)...(19): siRNA sense strand
ggaauuggcauguaagaug

SEQ ID NO: 138796 - RNA, 19 nt, Homo sapiens
  misc_RNA (1)...(19): siRNA sense strand
gaagaaggacccagacaug

SEQ ID NO: 138797 - RNA, 19 nt, Homo sapiens
  misc_RNA (1)...(19): siRNA sense strand
gaaaguuggugcugaggau

SEQ ID NO: 138798 - RNA, 19 nt, Homo sapiens
  misc_RNA (1)...(19): siRNA sense strand
cagggaagcugauggcauu

SEQ ID NO: 138799 - RNA, 19 nt, Homo sapiens
  misc_RNA (1)...(19): siRNA sense strand
cggcagcgauuuauagauu

SEQ ID NO: 138800 - RNA, 19 nt, Homo sapiens
  misc_RNA (1)...(19): siRNA sense strand
agacauggauggcuuugaa

SEQ ID NO: 138801 - RNA, 19 nt, Homo sapiens
  misc_RNA (1)...(19): siRNA sense strand
ccacacagcuacgcacauu

SEQ ID NO: 138802 - RNA, 19 nt, Homo sapiens
  misc_RNA (1)...(19): siRNA sense strand
gaagacccaucaugagcaa

SEQ ID NO: 138803 - RNA, 19 nt, Homo sapiens
  misc_RNA (1)...(19): siRNA sense strand
uuaaggaauuggcauguaa

SEQ ID NO: 138804 - RNA, 19 nt, Homo sapiens
  misc_RNA (1)...(19): siRNA sense strand
caucuacggugaccugaaa

SEQ ID NO: 138805 - RNA, 19 nt, Homo sapiens
  misc_RNA (1)...(19): siRNA sense strand
gggcuucuuugcuacguua

SEQ ID NO: 138806 - RNA, 19 nt, Homo sapiens
  misc_RNA (1)...(19): siRNA sense strand
cgacgaagacccaucauga

SEQ ID NO: 138807 - RNA, 19 nt, Homo sapiens
  misc_RNA (1)...(19): siRNA sense strand
ggaucugacuggacugauu

SEQ ID NO: 138808 - RNA, 19 nt, Homo sapiens
  misc_RNA (1)...(19): siRNA sense strand
gaagagauugcuaaugaga

SEQ ID NO: 138809 - RNA, 19 nt, Homo sapiens
  misc_RNA (1)...(19): siRNA sense strand
aagcagaucuggaaugcaa

SEQ ID NO: 138810 - RNA, 19 nt, Homo sapiens
  misc_RNA (1)...(19): siRNA sense strand
gaugacagcagugaagaua

SEQ ID NO: 138811 - RNA, 19 nt, Homo sapiens
  misc_RNA (1)...(19): siRNA sense strand
cugcuuggcuccucuauga

SEQ ID NO: 138812 - RNA, 19 nt, Homo sapiens
  misc_RNA (1)...(19): siRNA sense strand
gcaaggaggccagaucuau

SEQ ID NO: 138813 - RNA, 19 nt, Homo sapiens
  misc_RNA (1)...(19): siRNA sense strand
gaaccaguuuaaacccauu

SEQ ID NO: 138814 - RNA, 19 nt, Homo sapiens
  misc_RNA (1)...(19): siRNA sense strand
caaugaggcuggcaagauc

SEQ ID NO: 138815 - RNA, 19 nt, Homo sapiens
  misc_RNA (1)...(19): siRNA sense strand
ccagaaaggcucauugguu

SEQ ID NO: 138816 - RNA, 19 nt, Homo sapiens
  misc_RNA (1)...(19): siRNA sense strand
gggaagaccucauuaugcu

SEQ ID NO: 138817 - RNA, 19 nt, Homo sapiens
  misc_RNA (1)...(19): siRNA sense strand
caggcaacaugaaggauaa

SEQ ID NO: 138818 - RNA, 19 nt, Homo sapiens
  misc_RNA (1)...(19): siRNA sense strand
caaccagccucuugucauc

SEQ ID NO: 138819 - RNA, 19 nt, Homo sapiens
  misc_RNA (1)...(19): siRNA sense strand
ggacuccagugguagcuau

SEQ ID NO: 138820 - RNA, 19 nt, Homo sapiens
  misc_RNA (1)...(19): siRNA sense strand
gcaaacagaucuggcaaaa

SEQ ID NO: 138821 - RNA, 19 nt, Homo sapiens
  misc_RNA (1)...(19): siRNA sense strand
ucaaaucccuaaagaaggu

SEQ ID NO: 138822 - RNA, 19 nt, Homo sapiens
  misc_RNA (1)...(19): siRNA sense strand
gaggugcaguuucucaaga

SEQ ID NO: 138823 - RNA, 19 nt, Homo sapiens
  misc_RNA (1)...(19): siRNA sense strand
caacacagggcguggauau

SEQ ID NO: 138824 - RNA, 19 nt, Homo sapiens
  misc_RNA (1)...(19): siRNA sense strand
aauaagauguccaacuaug

SEQ ID NO: 138825 - RNA, 19 nt, Homo sapiens
  misc_RNA (1)...(19): siRNA sense strand
gggcaaggaugucuaucau

SEQ ID NO: 138826 - RNA, 19 nt, Homo sapiens
  misc_RNA (1)...(19): siRNA sense strand
ccagaaggcccucaggaaa

SEQ ID NO: 138827 - RNA, 19 nt, Homo sapiens
  misc_RNA (1)...(19): siRNA sense strand
guagcuauguauuugagaa

SEQ ID NO: 138828 - RNA, 19 nt, Homo sapiens
  misc_RNA (1)...(19): siRNA sense strand
ggacauuuacgcuaucgaa

SEQ ID NO: 138829 - RNA, 19 nt, Homo sapiens
  misc_RNA (1)...(19): siRNA sense strand
ggagacagcaagaccauuc

SEQ ID NO: 138830 - RNA, 19 nt, Homo sapiens
  misc_RNA (1)...(19): siRNA sense strand
uaagauggcucuggaacuc

SEQ ID NO: 138831 - RNA, 19 nt, Homo sapiens
  misc_RNA (1)...(19): siRNA sense strand
gcaaagccgauguccagaa

SEQ ID NO: 138832 - RNA, 19 nt, Homo sapiens
  misc_RNA (1)...(19): siRNA sense strand
gaagaggugcaguuucuca

SEQ ID NO: 138833 - RNA, 19 nt, Homo sapiens
  misc_RNA (1)...(19): siRNA sense strand
gcagcgauuuauagauuuc

SEQ ID NO: 138834 - RNA, 19 nt, Homo sapiens
  misc_RNA (1)...(19): siRNA sense strand
agaaacgaguguuagagaa

SEQ ID NO: 138835 - RNA, 19 nt, Homo sapiens
  misc_RNA (1)...(19): siRNA sense strand
cuacgcacauucugaacuu

SEQ ID NO: 138836 - RNA, 19 nt, Homo sapiens
  misc_RNA (1)...(19): siRNA sense strand
agagauugcuaaugagaug

SEQ ID NO: 138837 - RNA, 19 nt, Homo sapiens
  misc_RNA (1)...(19): siRNA sense strand
cagagagcuugaagaaaug

SEQ ID NO: 138838 - RNA, 19 nt, Homo sapiens
  misc_RNA (1)...(19): siRNA sense strand
gaauaagauguccaacuau

SEQ ID NO: 138839 - RNA, 19 nt, Homo sapiens
  misc_RNA (1)...(19): siRNA sense strand
gaaacgaguguuagagaag

SEQ ID NO: 138840 - RNA, 19 nt, Homo sapiens
  misc_RNA (1)...(19): siRNA sense strand
gaagaagaggugcaguuuc

SEQ ID NO: 138841 - RNA, 19 nt, Homo sapiens
  misc_RNA (1)...(19): siRNA sense strand
gugaaggacaucauuaaug

SEQ ID NO: 138842 - RNA, 19 nt, Homo sapiens
  misc_RNA (1)...(19): siRNA sense strand
agaaaugucucucugucau

SEQ ID NO: 138843 - RNA, 19 nt, Homo sapiens
  misc_RNA (1)...(19): siRNA sense strand
uaaaggugguggcaaggau

SEQ ID NO: 138844 - RNA, 19 nt, Homo sapiens
  misc_RNA (1)...(19): siRNA sense strand
cagccaaggcccugaauga

SEQ ID NO: 138845 - RNA, 19 nt, Homo sapiens
  misc_RNA (1)...(19): siRNA sense strand
aaacgaguguuagagaaga

SEQ ID NO: 138846 - RNA, 19 nt, Homo sapiens
  misc_RNA (1)...(19): siRNA sense strand
ugaagaagaggugcaguuu

SEQ ID NO: 138847 - RNA, 19 nt, Homo sapiens
  misc_RNA (1)...(19): siRNA sense strand
cgccucagauuugacuuua

SEQ ID NO: 138848 - RNA, 19 nt, Homo sapiens
  misc_RNA (1)...(19): siRNA sense strand
ggcagcgauuuauagauuu

SEQ ID NO: 138849 - RNA, 19 nt, Homo sapiens
  misc_RNA (1)...(19): siRNA sense strand
aaaaugaccuggacgaugu

SEQ ID NO: 138850 - RNA, 19 nt, Homo sapiens
  misc_RNA (1)...(19): siRNA sense strand
caagaucacgugccugugu

SEQ ID NO: 138851 - RNA, 19 nt, Homo sapiens
  misc_RNA (1)...(19): siRNA sense strand
uagagaagacgaagcaguu

SEQ ID NO: 138852 - RNA, 19 nt, Homo sapiens
  misc_RNA (1)...(19): siRNA sense strand
gaaaugucucucugucaug

SEQ ID NO: 138853 - RNA, 19 nt, Homo sapiens
  misc_RNA (1)...(19): siRNA sense strand
cugcggaacucgagucaug

SEQ ID NO: 138854 - RNA, 19 nt, Homo sapiens
  misc_RNA (1)...(19): siRNA sense strand
ucaagaaggcugaagagau

SEQ ID NO: 138855 - RNA, 19 nt, Homo sapiens
  misc_RNA (1)...(19): siRNA sense strand
agaagggccuggugguaga

SEQ ID NO: 138856 - RNA, 19 nt, Homo sapiens
  misc_RNA (1)...(19): siRNA sense strand
gaucugacuggacugauug

SEQ ID NO: 138857 - RNA, 19 nt, Homo sapiens
  misc_RNA (1)...(19): siRNA sense strand
gcaggcaugaaccaguuua

SEQ ID NO: 138858 - RNA, 19 nt, Homo sapiens
  misc_RNA (1)...(19): siRNA sense strand
ccaggcaacaugaaggaua

SEQ ID NO: 138859 - RNA, 19 nt, Homo sapiens
  misc_RNA (1)...(19): siRNA sense strand
gaguuuggcauucccauug

SEQ ID NO: 138860 - RNA, 19 nt, Homo sapiens
  misc_RNA (1)...(19): siRNA sense strand
ggaagcugauggcauucug

SEQ ID NO: 138861 - RNA, 19 nt, Homo sapiens
  misc_RNA (1)...(19): siRNA sense strand
gaggaacgagcauacguau

SEQ ID NO: 138862 - RNA, 19 nt, Homo sapiens
  misc_RNA (1)...(19): siRNA sense strand
gcacaggccacaggcaaga

SEQ ID NO: 138863 - RNA, 19 nt, Homo sapiens
  misc_RNA (1)...(19): siRNA sense strand
gcaggugucaggcuugaug

SEQ ID NO: 138864 - RNA, 19 nt, Homo sapiens
  misc_RNA (1)...(19): siRNA sense strand
cagaaacgaguguuagaga

SEQ ID NO: 138865 - RNA, 19 nt, Homo sapiens
  misc_RNA (1)...(19): siRNA sense strand
gcuccucuaugacaccuau

SEQ ID NO: 138866 - RNA, 19 nt, Homo sapiens
  misc_RNA (1)...(19): siRNA sense strand
ccgcacaucuugucaacca

SEQ ID NO: 138867 - RNA, 19 nt, Homo sapiens
  misc_RNA (1)...(19): siRNA sense strand
cuaaugugcuggagaucug

SEQ ID NO: 138868 - RNA, 19 nt, Homo sapiens
  misc_RNA (1)...(19): siRNA sense strand
ugacuucuguugaguucug

SEQ ID NO: 138869 - RNA, 19 nt, Homo sapiens
  misc_RNA (1)...(19): siRNA sense strand
acucucaaaucccuaaaga

SEQ ID NO: 138870 - RNA, 19 nt, Homo sapiens
  misc_RNA (1)...(19): siRNA sense strand
uggaacgacugguaucugu

SEQ ID NO: 138871 - RNA, 19 nt, Homo sapiens
  misc_RNA (1)...(19): siRNA sense strand
ucucaaaucccuaaagaag

SEQ ID NO: 138872 - RNA, 19 nt, Homo sapiens
  misc_RNA (1)...(19): siRNA sense strand
ucagacugcuccaaacaag

SEQ ID NO: 138873 - RNA, 19 nt, Homo sapiens
  misc_RNA (1)...(19): siRNA sense strand
caaggaggccagaucuaug

SEQ ID NO: 138874 - RNA, 19 nt, Homo sapiens
  misc_RNA (1)...(19): siRNA sense strand
gggcguggauauguguuga

SEQ ID NO: 138875 - RNA, 19 nt, Homo sapiens
  misc_RNA (1)...(19): siRNA sense strand
uguccgaguugcuggauga

SEQ ID NO: 138876 - RNA, 19 nt, Homo sapiens
  misc_RNA (1)...(19): siRNA sense strand
ccacccaacagaucaagaa

SEQ ID NO: 138877 - RNA, 19 nt, Homo sapiens
  misc_RNA (1)...(19): siRNA sense strand
ggagaagauguucguggaa

SEQ ID NO: 138878 - RNA, 19 nt, Homo sapiens
  misc_RNA (1)...(19): siRNA sense strand
agaagauguucguggaaga

SEQ ID NO: 138879 - RNA, 19 nt, Homo sapiens
  misc_RNA (1)...(19): siRNA sense strand
cagcaggugucaggcuuga

SEQ ID NO: 138880 - RNA, 19 nt, Homo sapiens
  misc_RNA (1)...(19): siRNA sense strand
gggaucaggucuggcuguu

SEQ ID NO: 138881 - RNA, 19 nt, Homo sapiens
  misc_RNA (1)...(19): siRNA sense strand
gcagagagauggacaagau

SEQ ID NO: 138882 - RNA, 19 nt, Homo sapiens
  misc_RNA (1)...(19): siRNA sense strand
ggagauggcuacaugauca

SEQ ID NO: 138883 - RNA, 19 nt, Homo sapiens
  misc_RNA (1)...(19): siRNA sense strand
gagaggagguggcgcauga

SEQ ID NO: 138884 - RNA, 19 nt, Homo sapiens
  misc_RNA (1)...(19): siRNA sense strand
gcacggagauggaugagau

SEQ ID NO: 138885 - RNA, 19 nt, Homo sapiens
  misc_RNA (1)...(19): siRNA sense strand
ggaagaacgugacgcucaa

SEQ ID NO: 138886 - RNA, 19 nt, Homo sapiens
  misc_RNA (1)...(19): siRNA sense strand
gcaagaaccugggcaugug

SEQ ID NO: 138887 - RNA, 19 nt, Homo sapiens
  misc_RNA (1)...(19): siRNA sense strand
acaagaagcuggcccugaa

SEQ ID NO: 138888 - RNA, 19 nt, Homo sapiens
  misc_RNA (1)...(19): siRNA sense strand
ggaggaaggcaaccuguuu

SEQ ID NO: 138889 - RNA, 19 nt, Homo sapiens
  misc_RNA (1)...(19): siRNA sense strand
ccaagcaucugcaguuugu

SEQ ID NO: 138890 - RNA, 19 nt, Homo sapiens
  misc_RNA (1)...(19): siRNA sense strand
gaagugggcucuggagaag

SEQ ID NO: 138891 - RNA, 19 nt, Homo sapiens
  misc_RNA (1)...(19): siRNA sense strand
ggaugaggcugaccugcuu

SEQ ID NO: 138892 - RNA, 19 nt, Homo sapiens
  misc_RNA (1)...(19): siRNA sense strand
gcaacaaccgcaccauuga

SEQ ID NO: 138893 - RNA, 19 nt, Homo sapiens
  misc_RNA (1)...(19): siRNA sense strand
gggagcaccugcagcugua

SEQ ID NO: 138894 - RNA, 19 nt, Homo sapiens
  misc_RNA (1)...(19): siRNA sense strand
ucaccaaggucuacaagga

SEQ ID NO: 138895 - RNA, 19 nt, Homo sapiens
  misc_RNA (1)...(19): siRNA sense strand
gcagcuacgugcagauguu

SEQ ID NO: 138896 - RNA, 19 nt, Homo sapiens
  misc_RNA (1)...(19): siRNA sense strand
gaggagauccgcagagaga

SEQ ID NO: 138897 - RNA, 19 nt, Homo sapiens
  misc_RNA (1)...(19): siRNA sense strand
caacgagacuuuugcuuuu

SEQ ID NO: 138898 - RNA, 19 nt, Homo sapiens
  misc_RNA (1)...(19): siRNA sense strand
acacaaaggugcaguacca

SEQ ID NO: 138899 - RNA, 19 nt, Homo sapiens
  misc_RNA (1)...(19): siRNA sense strand
gcaugugucuggaguccuu

SEQ ID NO: 138900 - RNA, 19 nt, Homo sapiens
  misc_RNA (1)...(19): siRNA sense strand
gccacaaugucucugagua

SEQ ID NO: 138901 - RNA, 19 nt, Homo sapiens
  misc_RNA (1)...(19): siRNA sense strand
ucaccgccauccugaagua

SEQ ID NO: 138902 - RNA, 19 nt, Homo sapiens
  misc_RNA (1)...(19): siRNA sense strand
ggagagcauugucaacuac

SEQ ID NO: 138903 - RNA, 19 nt, Homo sapiens
  misc_RNA (1)...(19): siRNA sense strand
ugucaacaguuaccugaaa

SEQ ID NO: 138904 - RNA, 19 nt, Homo sapiens
  misc_RNA (1)...(19): siRNA sense strand
ucaaggaggugaugaagac

SEQ ID NO: 138905 - RNA, 19 nt, Homo sapiens
  misc_RNA (1)...(19): siRNA sense strand
gaaacguccugaaguccau

SEQ ID NO: 138906 - RNA, 19 nt, Homo sapiens
  misc_RNA (1)...(19): siRNA sense strand
gcgaugacuuccuguuugu

SEQ ID NO: 138907 - RNA, 19 nt, Homo sapiens
  misc_RNA (1)...(19): siRNA sense strand
ucauggagauggccuacaa

SEQ ID NO: 138908 - RNA, 19 nt, Homo sapiens
  misc_RNA (1)...(19): siRNA sense strand
cuaaguacuucgcgcugua

SEQ ID NO: 138909 - RNA, 19 nt, Homo sapiens
  misc_RNA (1)...(19): siRNA sense strand
ugaacaagcugagccugaa

SEQ ID NO: 138910 - RNA, 19 nt, Homo sapiens
  misc_RNA (1)...(19): siRNA sense strand
acgaguacaucaacgagua

SEQ ID NO: 138911 - RNA, 19 nt, Homo sapiens
  misc_RNA (1)...(19): siRNA sense strand
ggagccaccuggacagauc

SEQ ID NO: 138912 - RNA, 19 nt, Homo sapiens
  misc_RNA (1)...(19): siRNA sense strand
guacccagccuucaucuuc

SEQ ID NO: 138913 - RNA, 19 nt, Homo sapiens
  misc_RNA (1)...(19): siRNA sense strand
gaccagcaccuucaagaug

SEQ ID NO: 138914 - RNA, 19 nt, Homo sapiens
  misc_RNA (1)...(19): siRNA sense strand
ccaagccuguggaggauga

SEQ ID NO: 138915 - RNA, 19 nt, Homo sapiens
  misc_RNA (1)...(19): siRNA sense strand
ucuacuggcuggcgaacua

SEQ ID NO: 138916 - RNA, 19 nt, Homo sapiens
  misc_RNA (1)...(19): siRNA sense strand
ggccaagcaucugcaguuu

SEQ ID NO: 138917 - RNA, 19 nt, Homo sapiens
  misc_RNA (1)...(19): siRNA sense strand
gggcccagcuguccuucaa

SEQ ID NO: 138918 - RNA, 19 nt, Homo sapiens
  misc_RNA (1)...(19): siRNA sense strand
agaccacacuggacaaugu

SEQ ID NO: 138919 - RNA, 19 nt, Homo sapiens
  misc_RNA (1)...(19): siRNA sense strand
caucugcccuggauucaca

SEQ ID NO: 138920 - RNA, 19 nt, Homo sapiens
  misc_RNA (1)...(19): siRNA sense strand
gcccagguguucagcaaga

SEQ ID NO: 138921 - RNA, 19 nt, Homo sapiens
  misc_RNA (1)...(19): siRNA sense strand
cgacaucaccggccacaau

SEQ ID NO: 138922 - RNA, 19 nt, Homo sapiens
  misc_RNA (1)...(19): siRNA sense strand
gaggagguggcgcaugaua

SEQ ID NO: 138923 - RNA, 19 nt, Homo sapiens
  misc_RNA (1)...(19): siRNA sense strand
gcacucuucucccagaucu

SEQ ID NO: 138924 - RNA, 19 nt, Homo sapiens
  misc_RNA (1)...(19): siRNA sense strand
gauccacagugucuuccuu

SEQ ID NO: 138925 - RNA, 19 nt, Homo sapiens
  misc_RNA (1)...(19): siRNA sense strand
gaacagugaggccgaugug

SEQ ID NO: 138926 - RNA, 19 nt, Homo sapiens
  misc_RNA (1)...(19): siRNA sense strand
gccugaaccucuacgagaa

SEQ ID NO: 138927 - RNA, 19 nt, Homo sapiens
  misc_RNA (1)...(19): siRNA sense strand
ggucugggcucuaaguacu

SEQ ID NO: 138928 - RNA, 19 nt, Homo sapiens
  misc_RNA (1)...(19): siRNA sense strand
ggcaacaaccgcaccauug

SEQ ID NO: 138929 - RNA, 19 nt, Homo sapiens
  misc_RNA (1)...(19): siRNA sense strand
caacaaccgcaccauugaa

SEQ ID NO: 138930 - RNA, 19 nt, Homo sapiens
  misc_RNA (1)...(19): siRNA sense strand
guuuggagauggcuacaug

SEQ ID NO: 138931 - RNA, 19 nt, Homo sapiens
  misc_RNA (1)...(19): siRNA sense strand
ugugggacaugcucaacua

SEQ ID NO: 138932 - RNA, 19 nt, Homo sapiens
  misc_RNA (1)...(19): siRNA sense strand
cgccagaacuccagcuuca

SEQ ID NO: 138933 - RNA, 19 nt, Homo sapiens
  misc_RNA (1)...(19): siRNA sense strand
caggacaacgucacuguuu

SEQ ID NO: 138934 - RNA, 19 nt, Homo sapiens
  misc_RNA (1)...(19): siRNA sense strand
cgcaggagcucuggcguuu

SEQ ID NO: 138935 - RNA, 19 nt, Homo sapiens
  misc_RNA (1)...(19): siRNA sense strand
gaagaaccgguuuggagau

SEQ ID NO: 138936 - RNA, 19 nt, Homo sapiens
  misc_RNA (1)...(19): siRNA sense strand
ggcugccacuguccaauuu

SEQ ID NO: 138937 - RNA, 19 nt, Homo sapiens
  misc_RNA (1)...(19): siRNA sense strand
gcgccaucaucgacacuuu

SEQ ID NO: 138938 - RNA, 19 nt, Homo sapiens
  misc_RNA (1)...(19): siRNA sense strand
cggaagccaugcucaagga

SEQ ID NO: 138939 - RNA, 19 nt, Homo sapiens
  misc_RNA (1)...(19): siRNA sense strand
gggcgaggccuucgucaau

SEQ ID NO: 138940 - RNA, 19 nt, Homo sapiens
  misc_RNA (1)...(19): siRNA sense strand
gcgguggcaucaucuacuu

SEQ ID NO: 138941 - RNA, 19 nt, Homo sapiens
  misc_RNA (1)...(19): siRNA sense strand
gaggaaggcaaccuguuug

SEQ ID NO: 138942 - RNA, 19 nt, Homo sapiens
  misc_RNA (1)...(19): siRNA sense strand
cgacgucuauggcgacuac

SEQ ID NO: 138943 - RNA, 19 nt, Homo sapiens
  misc_RNA (1)...(19): siRNA sense strand
gcuacgugcccuacaugua

SEQ ID NO: 138944 - RNA, 19 nt, Homo sapiens
  misc_RNA (1)...(19): siRNA sense strand
gcauccagcaccugaagaa

SEQ ID NO: 138945 - RNA, 19 nt, Homo sapiens
  misc_RNA (1)...(19): siRNA sense strand
ggacacgacccuggaggaa

SEQ ID NO: 138946 - RNA, 19 nt, Homo sapiens
  misc_RNA (1)...(19): siRNA sense strand
ggaccgcauugccaucauc

SEQ ID NO: 138947 - RNA, 19 nt, Homo sapiens
  misc_RNA (1)...(19): siRNA sense strand
ggagguggcgcaugauaag

SEQ ID NO: 138948 - RNA, 19 nt, Homo sapiens
  misc_RNA (1)...(19): siRNA sense strand
aggagagcauugucaacua

SEQ ID NO: 138949 - RNA, 19 nt, Homo sapiens
  misc_RNA (1)...(19): siRNA sense strand
ccaagaagcagagugacaa

SEQ ID NO: 138950 - RNA, 19 nt, Homo sapiens
  misc_RNA (1)...(19): siRNA sense strand
ugucaucaaucucuucauc

SEQ ID NO: 138951 - RNA, 19 nt, Homo sapiens
  misc_RNA (1)...(19): siRNA sense strand
acacgacccuggaggaagu

SEQ ID NO: 138952 - RNA, 19 nt, Homo sapiens
  misc_RNA (1)...(19): siRNA sense strand
cauccugccugucaugcaa

SEQ ID NO: 138953 - RNA, 19 nt, Homo sapiens
  misc_RNA (1)...(19): siRNA sense strand
ggauccaguucauguccaa

SEQ ID NO: 138954 - RNA, 19 nt, Homo sapiens
  misc_RNA (1)...(19): siRNA sense strand
gcccagcuguccuucaaca

SEQ ID NO: 138955 - RNA, 19 nt, Homo sapiens
  misc_RNA (1)...(19): siRNA sense strand
ugaagugggcucuggagaa

SEQ ID NO: 138956 - RNA, 19 nt, Homo sapiens
  misc_RNA (1)...(19): siRNA sense strand
cuacaagucccggaagauu

SEQ ID NO: 138957 - RNA, 19 nt, Homo sapiens
  misc_RNA (1)...(19): siRNA sense strand
acacgucgcccaccaacuu

SEQ ID NO: 138958 - RNA, 19 nt, Homo sapiens
  misc_RNA (1)...(19): siRNA sense strand
ccagugcucagccuucgua

SEQ ID NO: 138959 - RNA, 19 nt, Homo sapiens
  misc_RNA (1)...(19): siRNA sense strand
ccaucacgcccaucaugua

SEQ ID NO: 138960 - RNA, 19 nt, Homo sapiens
  misc_RNA (1)...(19): siRNA sense strand
ccacaggacccagacaaug

SEQ ID NO: 138961 - RNA, 19 nt, Homo sapiens
  misc_RNA (1)...(19): siRNA sense strand
ggagauccgcagagagaug

SEQ ID NO: 138962 - RNA, 19 nt, Homo sapiens
  misc_RNA (1)...(19): siRNA sense strand
cgcgaugacuuccuguuug

SEQ ID NO: 138963 - RNA, 19 nt, Homo sapiens
  misc_RNA (1)...(19): siRNA sense strand
cacagugucuuccuucucu

SEQ ID NO: 138964 - RNA, 19 nt, Homo sapiens
  misc_RNA (1)...(19): siRNA sense strand
cgaguacuacgccaagauu

SEQ ID NO: 138965 - RNA, 19 nt, Homo sapiens
  misc_RNA (1)...(19): siRNA sense strand
gaacuacgugugggacaug

SEQ ID NO: 138966 - RNA, 19 nt, Homo sapiens
  misc_RNA (1)...(19): siRNA sense strand
gggaccucauccugaagua

SEQ ID NO: 138967 - RNA, 19 nt, Homo sapiens
  misc_RNA (1)...(19): siRNA sense strand
ucugggaccucauccugaa

SEQ ID NO: 138968 - RNA, 19 nt, Homo sapiens
  misc_RNA (1)...(19): siRNA sense strand
gcucuuuggucccucaucu

SEQ ID NO: 138969 - RNA, 19 nt, Homo sapiens
  misc_RNA (1)...(19): siRNA sense strand
gaagaacgugacgcucaaa

SEQ ID NO: 138970 - RNA, 19 nt, Homo sapiens
  misc_RNA (1)...(19): siRNA sense strand
ggcaagaccaccaccaugu

SEQ ID NO: 138971 - RNA, 19 nt, Homo sapiens
  misc_RNA (1)...(19): siRNA sense strand
ucacugugccugagaguca

SEQ ID NO: 138972 - RNA, 19 nt, Homo sapiens
  misc_RNA (1)...(19): siRNA sense strand
gcaagaccagcaccuucaa

SEQ ID NO: 138973 - RNA, 19 nt, Homo sapiens
  misc_RNA (1)...(19): siRNA sense strand
gcaugccugugucuaccaa

SEQ ID NO: 138974 - RNA, 19 nt, Homo sapiens
  misc_RNA (1)...(19): siRNA sense strand
gccacgggcucauggagau

SEQ ID NO: 138975 - RNA, 19 nt, Homo sapiens
  misc_RNA (1)...(19): siRNA sense strand
gugccaaccugcccaagag

SEQ ID NO: 138976 - RNA, 19 nt, Homo sapiens
  misc_RNA (1)...(19): siRNA sense strand
gggcugccacuguccaauu

SEQ ID NO: 138977 - RNA, 19 nt, Homo sapiens
  misc_RNA (1)...(19): siRNA sense strand
gugcaucgcgucccucaug

SEQ ID NO: 138978 - RNA, 19 nt, Homo sapiens
  misc_RNA (1)...(19): siRNA sense strand
gaaguacggccaggugcuu

SEQ ID NO: 138979 - RNA, 19 nt, Homo sapiens
  misc_RNA (1)...(19): siRNA sense strand
ucaaggccaacgagacuuu

SEQ ID NO: 138980 - RNA, 19 nt, Homo sapiens
  misc_RNA (1)...(19): siRNA sense strand
guccaucccagccucauuu

SEQ ID NO: 138981 - RNA, 19 nt, Homo sapiens
  misc_RNA (1)...(19): siRNA sense strand
ggccagagauugccugauu

SEQ ID NO: 138982 - RNA, 19 nt, Homo sapiens
  misc_RNA (1)...(19): siRNA sense strand
gagauugccugauuccuau

SEQ ID NO: 138983 - RNA, 19 nt, Homo sapiens
  misc_RNA (1)...(19): siRNA sense strand
gaauguggcugagcgguuu

SEQ ID NO: 138984 - RNA, 19 nt, Homo sapiens
  misc_RNA (1)...(19): siRNA sense strand
gggauaaccucugagaaug

SEQ ID NO: 138985 - RNA, 19 nt, Homo sapiens
  misc_RNA (1)...(19): siRNA sense strand
gcagguggcaucagaaaug

SEQ ID NO: 138986 - RNA, 19 nt, Homo sapiens
  misc_RNA (1)...(19): siRNA sense strand
gcugagcgguuuggcauuu

SEQ ID NO: 138987 - RNA, 19 nt, Homo sapiens
  misc_RNA (1)...(19): siRNA sense strand
agaaaugggucuuaugaca

SEQ ID NO: 138988 - RNA, 19 nt, Homo sapiens
  misc_RNA (1)...(19): siRNA sense strand
ccaccacgguccaugauga

SEQ ID NO: 138989 - RNA, 19 nt, Homo sapiens
  misc_RNA (1)...(19): siRNA sense strand
ugaauacccugggaacuga

SEQ ID NO: 138990 - RNA, 19 nt, Homo sapiens
  misc_RNA (1)...(19): siRNA sense strand
cauagcagguggcaucaga

SEQ ID NO: 138991 - RNA, 19 nt, Homo sapiens
  misc_RNA (1)...(19): siRNA sense strand
caucagaaaugggucuuau

SEQ ID NO: 138992 - RNA, 19 nt, Homo sapiens
  misc_RNA (1)...(19): siRNA sense strand
gauaaccucugagaaugug

SEQ ID NO: 138993 - RNA, 19 nt, Homo sapiens
  misc_RNA (1)...(19): siRNA sense strand
ucagaaaugggucuuauga

SEQ ID NO: 138994 - RNA, 19 nt, Homo sapiens
  misc_RNA (1)...(19): siRNA sense strand
gagcuucucucggcaguca

SEQ ID NO: 138995 - RNA, 19 nt, Homo sapiens
  misc_RNA (1)...(19): siRNA sense strand
ggagaagcaggauaccuuu

SEQ ID NO: 138996 - RNA, 19 nt, Homo sapiens
  misc_RNA (1)...(19): siRNA sense strand
gagcaagggcuguuuccaa

SEQ ID NO: 138997 - RNA, 19 nt, Homo sapiens
  misc_RNA (1)...(19): siRNA sense strand
gaaaugggucuuaugacau

SEQ ID NO: 138998 - RNA, 19 nt, Homo sapiens
  misc_RNA (1)...(19): siRNA sense strand
cgagaucaaugaggccuuu

SEQ ID NO: 138999 - RNA, 19 nt, Homo sapiens
  misc_RNA (1)...(19): siRNA sense strand
gggaacccuggaaauauua

SEQ ID NO: 139000 - RNA, 19 nt, Homo sapiens
  misc_RNA (1)...(19): siRNA sense strand
ggucccaccugacaucaug

SEQ ID NO: 139001 - RNA, 19 nt, Homo sapiens
  misc_RNA (1)...(19): siRNA sense strand
gggagaagcaggauaccuu

SEQ ID NO: 139002 - RNA, 19 nt, Homo sapiens
  misc_RNA (1)...(19): siRNA sense strand
uaccacagcuggaaacucu

SEQ ID NO: 139003 - RNA, 19 nt, Homo sapiens
  misc_RNA (1)...(19): siRNA sense strand
ugaccgcgguucucaagga

SEQ ID NO: 139004 - RNA, 19 nt, Homo sapiens
  misc_RNA (1)...(19): siRNA sense strand
ugagugacguggacaucuu

SEQ ID NO: 139005 - RNA, 19 nt, Homo sapiens
  misc_RNA (1)...(19): siRNA sense strand
aauauuacuucgcgcuuga

SEQ ID NO: 139006 - RNA, 19 nt, Homo sapiens
  misc_RNA (1)...(19): siRNA sense strand
ggagaaggccagagauugc

SEQ ID NO: 139007 - RNA, 19 nt, Homo sapiens
  misc_RNA (1)...(19): siRNA sense strand
ggauaaccucugagaaugu

SEQ ID NO: 139008 - RNA, 19 nt, Homo sapiens
  misc_RNA (1)...(19): siRNA sense strand
agagauugccugauuccua

SEQ ID NO: 139009 - RNA, 19 nt, Homo sapiens
  misc_RNA (1)...(19): siRNA sense strand
guccaaggcagaagaguug

SEQ ID NO: 139010 - RNA, 19 nt, Homo sapiens
  misc_RNA (1)...(19): siRNA sense strand
caagggcuguuuccaagcu

SEQ ID NO: 139011 - RNA, 19 nt, Homo sapiens
  misc_RNA (1)...(19): siRNA sense strand
cgaaucgcccaguuucuga

SEQ ID NO: 139012 - RNA, 19 nt, Homo sapiens
  misc_RNA (1)...(19): siRNA sense strand
agaaggagaaggccagaga

SEQ ID NO: 139013 - RNA, 19 nt, Homo sapiens
  misc_RNA (1)...(19): siRNA sense strand
ccaagaggagcaucacugu

SEQ ID NO: 139014 - RNA, 19 nt, Homo sapiens
  misc_RNA (1)...(19): siRNA sense strand
gaugacaagggcaccaaga

SEQ ID NO: 139015 - RNA, 19 nt, Homo sapiens
  misc_RNA (1)...(19): siRNA sense strand
gcugagauugugccuguga

SEQ ID NO: 139016 - RNA, 19 nt, Homo sapiens
  misc_RNA (1)...(19): siRNA sense strand
gagaagcaggauaccuuug

SEQ ID NO: 139017 - RNA, 19 nt, Homo sapiens
  misc_RNA (1)...(19): siRNA sense strand
gaaggagaaggccagagau

SEQ ID NO: 139018 - RNA, 19 nt, Homo sapiens
  misc_RNA (1)...(19): siRNA sense strand
gaggucuuaugcagugguu

SEQ ID NO: 139019 - RNA, 19 nt, Homo sapiens
  misc_RNA (1)...(19): siRNA sense strand
gccagagauugccugauuc

SEQ ID NO: 139020 - RNA, 19 nt, Homo sapiens
  misc_RNA (1)...(19): siRNA sense strand
ggagguccaaggcagaaga

SEQ ID NO: 139021 - RNA, 19 nt, Homo sapiens
  misc_RNA (1)...(19): siRNA sense strand
gguccaaggcagaagaguu

SEQ ID NO: 139022 - RNA, 19 nt, Homo sapiens
  misc_RNA (1)...(19): siRNA sense strand
gcaucagaaaugggucuua

SEQ ID NO: 139023 - RNA, 19 nt, Homo sapiens
  misc_RNA (1)...(19): siRNA sense strand
aaagcagggcugacaguga

SEQ ID NO: 139024 - RNA, 19 nt, Homo sapiens
  misc_RNA (1)...(19): siRNA sense strand
uagcagguggcaucagaaa

SEQ ID NO: 139025 - RNA, 19 nt, Homo sapiens
  misc_RNA (1)...(19): siRNA sense strand
gcauuucacgggagaagca

SEQ ID NO: 139026 - RNA, 19 nt, Homo sapiens
  misc_RNA (1)...(19): siRNA sense strand
ucgcccaguuucugaguga

SEQ ID NO: 139027 - RNA, 19 nt, Homo sapiens
  misc_RNA (1)...(19): siRNA sense strand
gcaaucauggcccgaaucg

SEQ ID NO: 139028 - RNA, 19 nt, Homo sapiens
  misc_RNA (1)...(19): siRNA sense strand
uuacuucgcgcuugaugga

SEQ ID NO: 139029 - RNA, 19 nt, Homo sapiens
  misc_RNA (1)...(19): siRNA sense strand
aagccugccuucaagaaag

SEQ ID NO: 139030 - RNA, 19 nt, Homo sapiens
  misc_RNA (1)...(19): siRNA sense strand
gaucaaugaggccuuugca

SEQ ID NO: 139031 - RNA, 19 nt, Homo sapiens
  misc_RNA (1)...(19): siRNA sense strand
cagcaagagcccagagcaa

SEQ ID NO: 139032 - RNA, 19 nt, Homo sapiens
  misc_RNA (1)...(19): siRNA sense strand
ucccggagacugugccuuu

SEQ ID NO: 139033 - RNA, 19 nt, Homo sapiens
  misc_RNA (1)...(19): siRNA sense strand
uuuccaagcugagauugug

SEQ ID NO: 139034 - RNA, 19 nt, Homo sapiens
  misc_RNA (1)...(19): siRNA sense strand
aaggagaaggccagagauu

SEQ ID NO: 139035 - RNA, 19 nt, Homo sapiens
  misc_RNA (1)...(19): siRNA sense strand
gcccgaaucgcccaguuuc

SEQ ID NO: 139036 - RNA, 19 nt, Homo sapiens
  misc_RNA (1)...(19): siRNA sense strand
ccacagcuggaaacucuag

SEQ ID NO: 139037 - RNA, 19 nt, Homo sapiens
  misc_RNA (1)...(19): siRNA sense strand
ggggauaaccucugagaau

SEQ ID NO: 139038 - RNA, 19 nt, Homo sapiens
  misc_RNA (1)...(19): siRNA sense strand
ugagcgguuuggcauuuca

SEQ ID NO: 139039 - RNA, 19 nt, Homo sapiens
  misc_RNA (1)...(19): siRNA sense strand
ggagaaagcuggagaagua

SEQ ID NO: 139040 - RNA, 19 nt, Homo sapiens
  misc_RNA (1)...(19): siRNA sense strand
ggagcaagcuuauucaaau

SEQ ID NO: 139041 - RNA, 19 nt, Homo sapiens
  misc_RNA (1)...(19): siRNA sense strand
ggaagugacuggauucuca

SEQ ID NO: 139042 - RNA, 19 nt, Homo sapiens
  misc_RNA (1)...(19): siRNA sense strand
gaacagauuaagcacuuua

SEQ ID NO: 139043 - RNA, 19 nt, Homo sapiens
  misc_RNA (1)...(19): siRNA sense strand
gcaagguguucaucaguaa

SEQ ID NO: 139044 - RNA, 19 nt, Homo sapiens
  misc_RNA (1)...(19): siRNA sense strand
gauauacgguugccagcua

SEQ ID NO: 139045 - RNA, 19 nt, Homo sapiens
  misc_RNA (1)...(19): siRNA sense strand
ggaagaacgucuagaaacu

SEQ ID NO: 139046 - RNA, 19 nt, Homo sapiens
  misc_RNA (1)...(19): siRNA sense strand
gagcaagcuuauucaaauu

SEQ ID NO: 139047 - RNA, 19 nt, Homo sapiens
  misc_RNA (1)...(19): siRNA sense strand
gaaaccaggaacuauguua

SEQ ID NO: 139048 - RNA, 19 nt, Homo sapiens
  misc_RNA (1)...(19): siRNA sense strand
ggaaugaaaggauuuauca

SEQ ID NO: 139049 - RNA, 19 nt, Homo sapiens
  misc_RNA (1)...(19): siRNA sense strand
gaagaaaccaggaacuaug

SEQ ID NO: 139050 - RNA, 19 nt, Homo sapiens
  misc_RNA (1)...(19): siRNA sense strand
ccagaugacugcaggcaaa

SEQ ID NO: 139051 - RNA, 19 nt, Homo sapiens
  misc_RNA (1)...(19): siRNA sense strand
uaagugauguugugauugu

SEQ ID NO: 139052 - RNA, 19 nt, Homo sapiens
  misc_RNA (1)...(19): siRNA sense strand
ggauggaagugacuggauu

SEQ ID NO: 139053 - RNA, 19 nt, Homo sapiens
  misc_RNA (1)...(19): siRNA sense strand
caggaaaggcuguuaauug

SEQ ID NO: 139054 - RNA, 19 nt, Homo sapiens
  misc_RNA (1)...(19): siRNA sense strand
gacagugcaacauaaauua

SEQ ID NO: 139055 - RNA, 19 nt, Homo sapiens
  misc_RNA (1)...(19): siRNA sense strand
gauauaggaauucgaagaa

SEQ ID NO: 139056 - RNA, 19 nt, Homo sapiens
  misc_RNA (1)...(19): siRNA sense strand
gaagcaagguguucaucag

SEQ ID NO: 139057 - RNA, 19 nt, Homo sapiens
  misc_RNA (1)...(19): siRNA sense strand
cuacagacagugcaacaua

SEQ ID NO: 139058 - RNA, 19 nt, Homo sapiens
  misc_RNA (1)...(19): siRNA sense strand
gcaagcuuauucaaauugu

SEQ ID NO: 139059 - RNA, 19 nt, Homo sapiens
  misc_RNA (1)...(19): siRNA sense strand
gguauugucauguccuaua

SEQ ID NO: 139060 - RNA, 19 nt, Homo sapiens
  misc_RNA (1)...(19): siRNA sense strand
gacgaaagcuacauaaaau

SEQ ID NO: 139061 - RNA, 19 nt, Homo sapiens
  misc_RNA (1)...(19): siRNA sense strand
aagaacagauuaagcacuu

SEQ ID NO: 139062 - RNA, 19 nt, Homo sapiens
  misc_RNA (1)...(19): siRNA sense strand
gcucagaagaacagauuaa

SEQ ID NO: 139063 - RNA, 19 nt, Homo sapiens
  misc_RNA (1)...(19): siRNA sense strand
ggacgaaagcuacauaaaa

SEQ ID NO: 139064 - RNA, 19 nt, Homo sapiens
  misc_RNA (1)...(19): siRNA sense strand
uaguguagcuuacgacugu

SEQ ID NO: 139065 - RNA, 19 nt, Homo sapiens
  misc_RNA (1)...(19): siRNA sense strand
cugcuugcauggcgaaaua

SEQ ID NO: 139066 - RNA, 19 nt, Homo sapiens
  misc_RNA (1)...(19): siRNA sense strand
gaaguaaguagggagguuu

SEQ ID NO: 139067 - RNA, 19 nt, Homo sapiens
  misc_RNA (1)...(19): siRNA sense strand
cgaaauauugggcaucuga

SEQ ID NO: 139068 - RNA, 19 nt, Homo sapiens
  misc_RNA (1)...(19): siRNA sense strand
uacagacagugcaacauaa

SEQ ID NO: 139069 - RNA, 19 nt, Homo sapiens
  misc_RNA (1)...(19): siRNA sense strand
caaaacaguugcucaccua

SEQ ID NO: 139070 - RNA, 19 nt, Homo sapiens
  misc_RNA (1)...(19): siRNA sense strand
ggauaccgcagaacuauuc

SEQ ID NO: 139071 - RNA, 19 nt, Homo sapiens
  misc_RNA (1)...(19): siRNA sense strand
gggaggagcaagcuuauuc

SEQ ID NO: 139072 - RNA, 19 nt, Homo sapiens
  misc_RNA (1)...(19): siRNA sense strand
guauugucauguccuauau

SEQ ID NO: 139073 - RNA, 19 nt, Homo sapiens
  misc_RNA (1)...(19): siRNA sense strand
gaagaagugauuccucauc

SEQ ID NO: 139074 - RNA, 19 nt, Homo sapiens
  misc_RNA (1)...(19): siRNA sense strand
gaucuguacuccgcagcua

SEQ ID NO: 139075 - RNA, 19 nt, Homo sapiens
  misc_RNA (1)...(19): siRNA sense strand
gcaugaagcgaaacguuug

SEQ ID NO: 139076 - RNA, 19 nt, Homo sapiens
  misc_RNA (1)...(19): siRNA sense strand
gggaguacccaauugcaaa

SEQ ID NO: 139077 - RNA, 19 nt, Homo sapiens
  misc_RNA (1)...(19): siRNA sense strand
cagaagaacagauuaagca

SEQ ID NO: 139078 - RNA, 19 nt, Homo sapiens
  misc_RNA (1)...(19): siRNA sense strand
gcaucugaguuacaaaaua

SEQ ID NO: 139079 - RNA, 19 nt, Homo sapiens
  misc_RNA (1)...(19): siRNA sense strand
ggucacaaaucaugaagcu

SEQ ID NO: 139080 - RNA, 19 nt, Homo sapiens
  misc_RNA (1)...(19): siRNA sense strand
cagccaaucuaugguggua

SEQ ID NO: 139081 - RNA, 19 nt, Homo sapiens
  misc_RNA (1)...(19): siRNA sense strand
ggaagcaagguguucauca

SEQ ID NO: 139082 - RNA, 19 nt, Homo sapiens
  misc_RNA (1)...(19): siRNA sense strand
cagauuaagcacuuuauuc

SEQ ID NO: 139083 - RNA, 19 nt, Homo sapiens
  misc_RNA (1)...(19): siRNA sense strand
agacagugcaacauaaauu

SEQ ID NO: 139084 - RNA, 19 nt, Homo sapiens
  misc_RNA (1)...(19): siRNA sense strand
gcuguuaauugcugaugug

SEQ ID NO: 139085 - RNA, 19 nt, Homo sapiens
  misc_RNA (1)...(19): siRNA sense strand
uacaaaccauggcucagaa

SEQ ID NO: 139086 - RNA, 19 nt, Homo sapiens
  misc_RNA (1)...(19): siRNA sense strand
gucauuaagugauguugug

SEQ ID NO: 139087 - RNA, 19 nt, Homo sapiens
  misc_RNA (1)...(19): siRNA sense strand
uaacagauauaggaauucg

SEQ ID NO: 139088 - RNA, 19 nt, Homo sapiens
  misc_RNA (1)...(19): siRNA sense strand
aggaaaggcuguuaauugc

SEQ ID NO: 139089 - RNA, 19 nt, Homo sapiens
  misc_RNA (1)...(19): siRNA sense strand
ggacugcuuggugucaaua

SEQ ID NO: 139090 - RNA, 19 nt, Homo sapiens
  misc_RNA (1)...(19): siRNA sense strand
aaaccaggaacuauguuaa

SEQ ID NO: 139091 - RNA, 19 nt, Homo sapiens
  misc_RNA (1)...(19): siRNA sense strand
gaacgucuagaaacuccuu

SEQ ID NO: 139092 - RNA, 19 nt, Homo sapiens
  misc_RNA (1)...(19): siRNA sense strand
gguggaaaauggaaugaaa

SEQ ID NO: 139093 - RNA, 19 nt, Homo sapiens
  misc_RNA (1)...(19): siRNA sense strand
uaguugcggucacaaauca

SEQ ID NO: 139094 - RNA, 19 nt, Homo sapiens
  misc_RNA (1)...(19): siRNA sense strand
gugacuggauucucaaugg

SEQ ID NO: 139095 - RNA, 19 nt, Homo sapiens
  misc_RNA (1)...(19): siRNA sense strand
gggaagaacgucuagaaac

SEQ ID NO: 139096 - RNA, 19 nt, Homo sapiens
  misc_RNA (1)...(19): siRNA sense strand
ugacuggauucucaaugga

SEQ ID NO: 139097 - RNA, 19 nt, Homo sapiens
  misc_RNA (1)...(19): siRNA sense strand
ggaaaaguguaaggaaguu

SEQ ID NO: 139098 - RNA, 19 nt, Homo sapiens
  misc_RNA (1)...(19): siRNA sense strand
gaaaauggaaugaaaggau

SEQ ID NO: 139099 - RNA, 19 nt, Homo sapiens
  misc_RNA (1)...(19): siRNA sense strand
gaaagcuggagaaguaagu

SEQ ID NO: 139100 - RNA, 19 nt, Homo sapiens
  misc_RNA (1)...(19): siRNA sense strand
agcaagguguucaucagua

SEQ ID NO: 139101 - RNA, 19 nt, Homo sapiens
  misc_RNA (1)...(19): siRNA sense strand
ucauucagguauugucaug

SEQ ID NO: 139102 - RNA, 19 nt, Homo sapiens
  misc_RNA (1)...(19): siRNA sense strand
gagcugauugcaagagaga

SEQ ID NO: 139103 - RNA, 19 nt, Homo sapiens
  misc_RNA (1)...(19): siRNA sense strand
gccaaucuauggugguaca

SEQ ID NO: 139104 - RNA, 19 nt, Homo sapiens
  misc_RNA (1)...(19): siRNA sense strand
auauugggcaucugaguua

SEQ ID NO: 139105 - RNA, 19 nt, Homo sapiens
  misc_RNA (1)...(19): siRNA sense strand
ccagcugcaugaagcgaaa

SEQ ID NO: 139106 - RNA, 19 nt, Homo sapiens
  misc_RNA (1)...(19): siRNA sense strand
gagaaagcuggagaaguaa

SEQ ID NO: 139107 - RNA, 19 nt, Homo sapiens
  misc_RNA (1)...(19): siRNA sense strand
ugaagaaaccaggaacuau

SEQ ID NO: 139108 - RNA, 19 nt, Homo sapiens
  misc_RNA (1)...(19): siRNA sense strand
acagauauaggaauucgaa

SEQ ID NO: 139109 - RNA, 19 nt, Homo sapiens
  misc_RNA (1)...(19): siRNA sense strand
gaagugacuggauucucaa

SEQ ID NO: 139110 - RNA, 19 nt, Homo sapiens
  misc_RNA (1)...(19): siRNA sense strand
aaucuauggugguacaaau

SEQ ID NO: 139111 - RNA, 19 nt, Homo sapiens
  misc_RNA (1)...(19): siRNA sense strand
gaagaacgucuagaaacuc

SEQ ID NO: 139112 - RNA, 19 nt, Homo sapiens
  misc_RNA (1)...(19): siRNA sense strand
ccaggauaccgcagaacua

SEQ ID NO: 139113 - RNA, 19 nt, Homo sapiens
  misc_RNA (1)...(19): siRNA sense strand
gggacgaaagcuacauaaa

SEQ ID NO: 139114 - RNA, 19 nt, Homo sapiens
  misc_RNA (1)...(19): siRNA sense strand
uaucaagggacgaaagcua

SEQ ID NO: 139115 - RNA, 19 nt, Homo sapiens
  misc_RNA (1)...(19): siRNA sense strand
gaaacuccuucugcuaaaa

SEQ ID NO: 139116 - RNA, 19 nt, Homo sapiens
  misc_RNA (1)...(19): siRNA sense strand
gcaucuugguggaauugga

SEQ ID NO: 139117 - RNA, 19 nt, Homo sapiens
  misc_RNA (1)...(19): siRNA sense strand
guagggagguuugggaaaa

SEQ ID NO: 139118 - RNA, 19 nt, Homo sapiens
  misc_RNA (1)...(19): siRNA sense strand
gaugacugcaggcaaaugu

SEQ ID NO: 139119 - RNA, 19 nt, Homo sapiens
  misc_RNA (1)...(19): siRNA sense strand
ggaggagcaagcuuauuca

SEQ ID NO: 139120 - RNA, 19 nt, Homo sapiens
  misc_RNA (1)...(19): siRNA sense strand
cagagcaucuugguggaau

SEQ ID NO: 139121 - RNA, 19 nt, Homo sapiens
  misc_RNA (1)...(19): siRNA sense strand
cagguauugucauguccua

SEQ ID NO: 139122 - RNA, 19 nt, Homo sapiens
  misc_RNA (1)...(19): siRNA sense strand
agaaguaaguagggagguu

SEQ ID NO: 139123 - RNA, 19 nt, Homo sapiens
  misc_RNA (1)...(19): siRNA sense strand
gcugauugcaagagagauu

SEQ ID NO: 139124 - RNA, 19 nt, Homo sapiens
  misc_RNA (1)...(19): siRNA sense strand
ggugguacaaaugaaauaa

SEQ ID NO: 139125 - RNA, 19 nt, Homo sapiens
  misc_RNA (1)...(19): siRNA sense strand
uuauguggaugccagaguu

SEQ ID NO: 139126 - RNA, 19 nt, Homo sapiens
  misc_RNA (1)...(19): siRNA sense strand
gauguggcaauuucagcua

SEQ ID NO: 139127 - RNA, 19 nt, Homo sapiens
  misc_RNA (1)...(19): siRNA sense strand
gagcaucuugguggaauug

SEQ ID NO: 139128 - RNA, 19 nt, Homo sapiens
  misc_RNA (1)...(19): siRNA sense strand
ugucauguccuauauuaca

SEQ ID NO: 139129 - RNA, 19 nt, Homo sapiens
  misc_RNA (1)...(19): siRNA sense strand
gaguucagccaaucuaugg

SEQ ID NO: 139130 - RNA, 19 nt, Homo sapiens
  misc_RNA (1)...(19): siRNA sense strand
gcaacauaaauuagcagaa

SEQ ID NO: 139131 - RNA, 19 nt, Homo sapiens
  misc_RNA (1)...(19): siRNA sense strand
aggcuucuauuacaucaug

SEQ ID NO: 139132 - RNA, 19 nt, Homo sapiens
  misc_RNA (1)...(19): siRNA sense strand
uaaaggcuucuauuacauc

SEQ ID NO: 139133 - RNA, 19 nt, Homo sapiens
  misc_RNA (1)...(19): siRNA sense strand
gauuguaguugcggucaca

SEQ ID NO: 139134 - RNA, 19 nt, Homo sapiens
  misc_RNA (1)...(19): siRNA sense strand
gaggagcaagcuuauucaa

SEQ ID NO: 139135 - RNA, 19 nt, Homo sapiens
  misc_RNA (1)...(19): siRNA sense strand
ccagaguucagccaaucua

SEQ ID NO: 139136 - RNA, 19 nt, Homo sapiens
  misc_RNA (1)...(19): siRNA sense strand
aaaggcuucuauuacauca

SEQ ID NO: 139137 - RNA, 19 nt, Homo sapiens
  misc_RNA (1)...(19): siRNA sense strand
gcccaugguauuagccuuu

SEQ ID NO: 139138 - RNA, 19 nt, Homo sapiens
  misc_RNA (1)...(19): siRNA sense strand
gucauguccuauauuacaa

SEQ ID NO: 139139 - RNA, 19 nt, Homo sapiens
  misc_RNA (1)...(19): siRNA sense strand
gaaauuuccugacuuguuu

SEQ ID NO: 139140 - RNA, 19 nt, Homo sapiens
  misc_RNA (1)...(19): siRNA sense strand
gcuggaagcugcaagauua

SEQ ID NO: 139141 - RNA, 19 nt, Homo sapiens
  misc_RNA (1)...(19): siRNA sense strand
gaagaaauuuccugacuug

SEQ ID NO: 139142 - RNA, 19 nt, Homo sapiens
  misc_RNA (1)...(19): siRNA sense strand
ggaauuaccuccuucuuag

SEQ ID NO: 139143 - RNA, 19 nt, Homo sapiens
  misc_RNA (1)...(19): siRNA sense strand
ggacauggcuauaaguaug

SEQ ID NO: 139144 - RNA, 19 nt, Homo sapiens
  misc_RNA (1)...(19): siRNA sense strand
gaccagagcugauaaagag

SEQ ID NO: 139145 - RNA, 19 nt, Homo sapiens
  misc_RNA (1)...(19): siRNA sense strand
ggagaaaucaguaauacaa

SEQ ID NO: 139146 - RNA, 19 nt, Homo sapiens
  misc_RNA (1)...(19): siRNA sense strand
guaggaaguuucugccuuu

SEQ ID NO: 139147 - RNA, 19 nt, Homo sapiens
  misc_RNA (1)...(19): siRNA sense strand
gaagcucuacucaauauaa

SEQ ID NO: 139148 - RNA, 19 nt, Homo sapiens
  misc_RNA (1)...(19): siRNA sense strand
gagaaauacuuccgagaug

SEQ ID NO: 139149 - RNA, 19 nt, Homo sapiens
  misc_RNA (1)...(19): siRNA sense strand
cagaagcucuacucaauau

SEQ ID NO: 139150 - RNA, 19 nt, Homo sapiens
  misc_RNA (1)...(19): siRNA sense strand
ggacaaacaacgaguaaau

SEQ ID NO: 139151 - RNA, 19 nt, Homo sapiens
  misc_RNA (1)...(19): siRNA sense strand
gggaauuaccuccuucuua

SEQ ID NO: 139152 - RNA, 19 nt, Homo sapiens
  misc_RNA (1)...(19): siRNA sense strand
ggaauuagccaaaguugau

SEQ ID NO: 139153 - RNA, 19 nt, Homo sapiens
  misc_RNA (1)...(19): siRNA sense strand
gaagguagaauaggaauug

SEQ ID NO: 139154 - RNA, 19 nt, Homo sapiens
  misc_RNA (1)...(19): siRNA sense strand
gaagauuccuccucauguc

SEQ ID NO: 139155 - RNA, 19 nt, Homo sapiens
  misc_RNA (1)...(19): siRNA sense strand
guaaauguaucgaguggau

SEQ ID NO: 139156 - RNA, 19 nt, Homo sapiens
  misc_RNA (1)...(19): siRNA sense strand
caaugaagguagaauagga

SEQ ID NO: 139157 - RNA, 19 nt, Homo sapiens
  misc_RNA (1)...(19): siRNA sense strand
gcaaagauugguacgauau

SEQ ID NO: 139158 - RNA, 19 nt, Homo sapiens
  misc_RNA (1)...(19): siRNA sense strand
ugacuacacuauuccauau

SEQ ID NO: 139159 - RNA, 19 nt, Homo sapiens
  misc_RNA (1)...(19): siRNA sense strand
gucagaagcucuacucaau

SEQ ID NO: 139160 - RNA, 19 nt, Homo sapiens
  misc_RNA (1)...(19): siRNA sense strand
ccacugugcucgugauaga

SEQ ID NO: 139161 - RNA, 19 nt, Homo sapiens
  misc_RNA (1)...(19): siRNA sense strand
gguagugacucauuugcuu

SEQ ID NO: 139162 - RNA, 19 nt, Homo sapiens
  misc_RNA (1)...(19): siRNA sense strand
gaggaaaugaugauaaaga

SEQ ID NO: 139163 - RNA, 19 nt, Homo sapiens
  misc_RNA (1)...(19): siRNA sense strand
aagcgucaauggccaaaua

SEQ ID NO: 139164 - RNA, 19 nt, Homo sapiens
  misc_RNA (1)...(19): siRNA sense strand
gaugaggaaaugaugauaa

SEQ ID NO: 139165 - RNA, 19 nt, Homo sapiens
  misc_RNA (1)...(19): siRNA sense strand
caaacaacgaguaaaugua

SEQ ID NO: 139166 - RNA, 19 nt, Homo sapiens
  misc_RNA (1)...(19): siRNA sense strand
ggagaaauacuuccgagau

SEQ ID NO: 139167 - RNA, 19 nt, Homo sapiens
  misc_RNA (1)...(19): siRNA sense strand
gaacaccauugcaaagcau

SEQ ID NO: 139168 - RNA, 19 nt, Homo sapiens
  misc_RNA (1)...(19): siRNA sense strand
guugauggguauugaaguu

SEQ ID NO: 139169 - RNA, 19 nt, Homo sapiens
  misc_RNA (1)...(19): siRNA sense strand
gcuggaaagccauucauaa

SEQ ID NO: 139170 - RNA, 19 nt, Homo sapiens
  misc_RNA (1)...(19): siRNA sense strand
gaagcugcaagauuacuaa

SEQ ID NO: 139171 - RNA, 19 nt, Homo sapiens
  misc_RNA (1)...(19): siRNA sense strand
ugacuuguuugucuucuug

SEQ ID NO: 139172 - RNA, 19 nt, Homo sapiens
  misc_RNA (1)...(19): siRNA sense strand
cugcaaacauuuacagaug

SEQ ID NO: 139173 - RNA, 19 nt, Homo sapiens
  misc_RNA (1)...(19): siRNA sense strand
ggaaagccauucauaaaag

SEQ ID NO: 139174 - RNA, 19 nt, Homo sapiens
  misc_RNA (1)...(19): siRNA sense strand
gaaguugacccagaauaug

SEQ ID NO: 139175 - RNA, 19 nt, Homo sapiens
  misc_RNA (1)...(19): siRNA sense strand
gaaaucaguaauacaagga

SEQ ID NO: 139176 - RNA, 19 nt, Homo sapiens
  misc_RNA (1)...(19): siRNA sense strand
gaagaccagagcugauaaa

SEQ ID NO: 139177 - RNA, 19 nt, Homo sapiens
  misc_RNA (1)...(19): siRNA sense strand
caaagauugguacgauaua

SEQ ID NO: 139178 - RNA, 19 nt, Homo sapiens
  misc_RNA (1)...(19): siRNA sense strand
gcaaacauuuacagaugag

SEQ ID NO: 139179 - RNA, 19 nt, Homo sapiens
  misc_RNA (1)...(19): siRNA sense strand
gcugcaagauuacuaacau

SEQ ID NO: 139180 - RNA, 19 nt, Homo sapiens
  misc_RNA (1)...(19): siRNA sense strand
cauagggagucucaaugaa

SEQ ID NO: 139181 - RNA, 19 nt, Homo sapiens
  misc_RNA (1)...(19): siRNA sense strand
gauagaggaauuagccaaa

SEQ ID NO: 139182 - RNA, 19 nt, Homo sapiens
  misc_RNA (1)...(19): siRNA sense strand
gaaaauggagaaaucagua

SEQ ID NO: 139183 - RNA, 19 nt, Homo sapiens
  misc_RNA (1)...(19): siRNA sense strand
gagcagguagugacucauu

SEQ ID NO: 139184 - RNA, 19 nt, Homo sapiens
  misc_RNA (1)...(19): siRNA sense strand
aggaacaaauugcaccuuu

SEQ ID NO: 139185 - RNA, 19 nt, Homo sapiens
  misc_RNA (1)...(19): siRNA sense strand
gcaggacaaacaacgagua

SEQ ID NO: 139186 - RNA, 19 nt, Homo sapiens
  misc_RNA (1)...(19): siRNA sense strand
gaaagccauucauaaaaga

SEQ ID NO: 139187 - RNA, 19 nt, Homo sapiens
  misc_RNA (1)...(19): siRNA sense strand
caaauuggacauggcuaua

SEQ ID NO: 139188 - RNA, 19 nt, Homo sapiens
  misc_RNA (1)...(19): siRNA sense strand
agagggagauuauuauguc

SEQ ID NO: 139189 - RNA, 19 nt, Homo sapiens
  misc_RNA (1)...(19): siRNA sense strand
ggaaguuucugccuuucag

SEQ ID NO: 139190 - RNA, 19 nt, Homo sapiens
  misc_RNA (1)...(19): siRNA sense strand
agaagaaauuuccugacuu

SEQ ID NO: 139191 - RNA, 19 nt, Homo sapiens
  misc_RNA (1)...(19): siRNA sense strand
cuuccgagaugcaaagauu

SEQ ID NO: 139192 - RNA, 19 nt, Homo sapiens
  misc_RNA (1)...(19): siRNA sense strand
ucagaagcucuacucaaua

SEQ ID NO: 139193 - RNA, 19 nt, Homo sapiens
  misc_RNA (1)...(19): siRNA sense strand
ccaaauacuaugcaucaga

SEQ ID NO: 139194 - RNA, 19 nt, Homo sapiens
  misc_RNA (1)...(19): siRNA sense strand
ggccaaauacuaugcauca

SEQ ID NO: 139195 - RNA, 19 nt, Homo sapiens
  misc_RNA (1)...(19): siRNA sense strand
ggaagcugcaagauuacua

SEQ ID NO: 139196 - RNA, 19 nt, Homo sapiens
  misc_RNA (1)...(19): siRNA sense strand
gcaaggauguuuugacuac

SEQ ID NO: 139197 - RNA, 19 nt, Homo sapiens
  misc_RNA (1)...(19): siRNA sense strand
gaugauaaagaguucaguu

SEQ ID NO: 139198 - RNA, 19 nt, Homo sapiens
  misc_RNA (1)...(19): siRNA sense strand
gauccagaacacauuaauu

SEQ ID NO: 139199 - RNA, 19 nt, Homo sapiens
  misc_RNA (1)...(19): siRNA sense strand
caaggauuauuucaacaag

SEQ ID NO: 139200 - RNA, 19 nt, Homo sapiens
  misc_RNA (1)...(19): siRNA sense strand
ugaaguugacccagaauau

SEQ ID NO: 139201 - RNA, 19 nt, Homo sapiens
  misc_RNA (1)...(19): siRNA sense strand
uaggcuacaccaaagauua

SEQ ID NO: 139202 - RNA, 19 nt, Homo sapiens
  misc_RNA (1)...(19): siRNA sense strand
cugcaagauuacuaacaua

SEQ ID NO: 139203 - RNA, 19 nt, Homo sapiens
  misc_RNA (1)...(19): siRNA sense strand
ccauagggagucucaauga

SEQ ID NO: 139204 - RNA, 19 nt, Homo sapiens
  misc_RNA (1)...(19): siRNA sense strand
gcagguagugacucauuug

SEQ ID NO: 139205 - RNA, 19 nt, Homo sapiens
  misc_RNA (1)...(19): siRNA sense strand
gaacaaaaggccaccuauu

SEQ ID NO: 139206 - RNA, 19 nt, Homo sapiens
  misc_RNA (1)...(19): siRNA sense strand
ugagauccagaacacauua

SEQ ID NO: 139207 - RNA, 19 nt, Homo sapiens
  misc_RNA (1)...(19): siRNA sense strand
aagaagaaauuuccugacu

SEQ ID NO: 139208 - RNA, 19 nt, Homo sapiens
  misc_RNA (1)...(19): siRNA sense strand
aggaauugcugcacagaug

SEQ ID NO: 139209 - RNA, 19 nt, Homo sapiens
  misc_RNA (1)...(19): siRNA sense strand
ccaccugcccguuaacauu

SEQ ID NO: 139210 - RNA, 19 nt, Homo sapiens
  misc_RNA (1)...(19): siRNA sense strand
gcaagauuacuaacauaca

SEQ ID NO: 139211 - RNA, 19 nt, Homo sapiens
  misc_RNA (1)...(19): siRNA sense strand
gucaauggccaaauacuau

SEQ ID NO: 139212 - RNA, 19 nt, Homo sapiens
  misc_RNA (1)...(19): siRNA sense strand
cuggaaagccauucauaaa

SEQ ID NO: 139213 - RNA, 19 nt, Homo sapiens
  misc_RNA (1)...(19): siRNA sense strand
ugccucagcucacuacaga

SEQ ID NO: 139214 - RNA, 19 nt, Homo sapiens
  misc_RNA (1)...(19): siRNA sense strand
gaaauacuuccgagaugca

SEQ ID NO: 139215 - RNA, 19 nt, Homo sapiens
  misc_RNA (1)...(19): siRNA sense strand
aagauuacccuguggagaa

SEQ ID NO: 139216 - RNA, 19 nt, Homo sapiens
  misc_RNA (1)...(19): siRNA sense strand
agaaauuuccugacuuguu

SEQ ID NO: 139217 - RNA, 19 nt, Homo sapiens
  misc_RNA (1)...(19): siRNA sense strand
aagaaaggauacaauuugg

SEQ ID NO: 139218 - RNA, 19 nt, Homo sapiens
  misc_RNA (1)...(19): siRNA sense strand
caauaucuugggacaaauu

SEQ ID NO: 139219 - RNA, 19 nt, Homo sapiens
  misc_RNA (1)...(19): siRNA sense strand
gacccuaccauuggauaua

SEQ ID NO: 139220 - RNA, 19 nt, Homo sapiens
  misc_RNA (1)...(19): siRNA sense strand
gaugaaaauucgaaaaugg

SEQ ID NO: 139221 - RNA, 19 nt, Homo sapiens
  misc_RNA (1)...(19): siRNA sense strand
gacaaacaacgaguaaaug

SEQ ID NO: 139222 - RNA, 19 nt, Homo sapiens
  misc_RNA (1)...(19): siRNA sense strand
uauugaaguugacccagaa

SEQ ID NO: 139223 - RNA, 19 nt, Homo sapiens
  misc_RNA (1)...(19): siRNA sense strand
ugauggguauugaaguuga

SEQ ID NO: 139224 - RNA, 19 nt, Homo sapiens
  misc_RNA (1)...(19): siRNA sense strand
uagaaaacauggaacagaa

SEQ ID NO: 139225 - RNA, 19 nt, Homo sapiens
  misc_RNA (1)...(19): siRNA sense strand
ugcaaagauugguacgaua

SEQ ID NO: 139226 - RNA, 19 nt, Homo sapiens
  misc_RNA (1)...(19): siRNA sense strand
ugcaaacauuuacagauga

SEQ ID NO: 139227 - RNA, 19 nt, Homo sapiens
  misc_RNA (1)...(19): siRNA sense strand
acaaacaacgaguaaaugu

SEQ ID NO: 139228 - RNA, 19 nt, Homo sapiens
  misc_RNA (1)...(19): siRNA sense strand
gagauugcaggacaaacaa

SEQ ID NO: 139229 - RNA, 19 nt, Homo sapiens
  misc_RNA (1)...(19): siRNA sense strand
cgucaauggccaaauacua

SEQ ID NO: 139230 - RNA, 19 nt, Homo sapiens
  misc_RNA (1)...(19): siRNA sense strand
cucaauggaucaaagaugu

SEQ ID NO: 139231 - RNA, 19 nt, Homo sapiens
  misc_RNA (1)...(19): siRNA sense strand
guagugacucauuugcuuu

SEQ ID NO: 139232 - RNA, 19 nt, Homo sapiens
  misc_RNA (1)...(19): siRNA sense strand
ccucagcucacuacagaaa

SEQ ID NO: 139233 - RNA, 19 nt, Homo sapiens
  misc_RNA (1)...(19): siRNA sense strand
ugacucauuugcuuugaag

SEQ ID NO: 139234 - RNA, 19 nt, Homo sapiens
  misc_RNA (1)...(19): siRNA sense strand
gcucgugauagaggaauua

SEQ ID NO: 139235 - RNA, 19 nt, Homo sapiens
  misc_RNA (1)...(19): siRNA sense strand
gcucuacucaauauaacaa

SEQ ID NO: 139236 - RNA, 19 nt, Homo sapiens
  misc_RNA (1)...(19): siRNA sense strand
ucucaaugaagguagaaua

SEQ ID NO: 139237 - RNA, 19 nt, Homo sapiens
  misc_RNA (1)...(19): siRNA sense strand
ugaacaccauugcaaagca

SEQ ID NO: 139238 - RNA, 19 nt, Homo sapiens
  misc_RNA (1)...(19): siRNA sense strand
caggacaaacaacgaguaa

SEQ ID NO: 139239 - RNA, 19 nt, Homo sapiens
  misc_RNA (1)...(19): siRNA sense strand
ggaagaaccugacccuaau

SEQ ID NO: 139240 - RNA, 19 nt, Homo sapiens
  misc_RNA (1)...(19): siRNA sense strand
caaccuggcuggacucuuc

SEQ ID NO: 139241 - RNA, 19 nt, Homo sapiens
  misc_RNA (1)...(19): siRNA sense strand
gcacgacacuacccugguu

SEQ ID NO: 139242 - RNA, 19 nt, Homo sapiens
  misc_RNA (1)...(19): siRNA sense strand
ccacauauuugaacuguac

SEQ ID NO: 139243 - RNA, 19 nt, Homo sapiens
  misc_RNA (1)...(19): siRNA sense strand
uaucacggcuuccuaaaca

SEQ ID NO: 139244 - RNA, 19 nt, Homo sapiens
  misc_RNA (1)...(19): siRNA sense strand
ggacuuccuucgccucaca

SEQ ID NO: 139245 - RNA, 19 nt, Homo sapiens
  misc_RNA (1)...(19): siRNA sense strand
guuaugagcagcugcagaa

SEQ ID NO: 139246 - RNA, 19 nt, Homo sapiens
  misc_RNA (1)...(19): siRNA sense strand
aaauggcacuggaugucua

SEQ ID NO: 139247 - RNA, 19 nt, Homo sapiens
  misc_RNA (1)...(19): siRNA sense strand
gaacuguaccaggaagauu

SEQ ID NO: 139248 - RNA, 19 nt, Homo sapiens
  misc_RNA (1)...(19): siRNA sense strand
caccagaguaucagaauga

SEQ ID NO: 139249 - RNA, 19 nt, Homo sapiens
  misc_RNA (1)...(19): siRNA sense strand
aggaagaaccugacccuaa

SEQ ID NO: 139250 - RNA, 19 nt, Homo sapiens
  misc_RNA (1)...(19): siRNA sense strand
gaacgagacccggcagaca

SEQ ID NO: 139251 - RNA, 19 nt, Homo sapiens
  misc_RNA (1)...(19): siRNA sense strand
gcaaauggcacuggauguc

SEQ ID NO: 139252 - RNA, 19 nt, Homo sapiens
  misc_RNA (1)...(19): siRNA sense strand
gaagaaccugacccuaaug

SEQ ID NO: 139253 - RNA, 19 nt, Homo sapiens
  misc_RNA (1)...(19): siRNA sense strand
aggacaggcugcugaaguu

SEQ ID NO: 139254 - RNA, 19 nt, Homo sapiens
  misc_RNA (1)...(19): siRNA sense strand
cuacgccuccugccacaua

SEQ ID NO: 139255 - RNA, 19 nt, Homo sapiens
  misc_RNA (1)...(19): siRNA sense strand
ggcacuggaugucuacaau

SEQ ID NO: 139256 - RNA, 19 nt, Homo sapiens
  misc_RNA (1)...(19): siRNA sense strand
acacugugcccaucacuga

SEQ ID NO: 139257 - RNA, 19 nt, Homo sapiens
  misc_RNA (1)...(19): siRNA sense strand
ugucuacaauggugaacaa

SEQ ID NO: 139258 - RNA, 19 nt, Homo sapiens
  misc_RNA (1)...(19): siRNA sense strand
ccaagcugcugguuuacuc

SEQ ID NO: 139259 - RNA, 19 nt, Homo sapiens
  misc_RNA (1)...(19): siRNA sense strand
gaggacaggcugcugaagu

SEQ ID NO: 139260 - RNA, 19 nt, Homo sapiens
  misc_RNA (1)...(19): siRNA sense strand
gcacuggaugucuacaaug

SEQ ID NO: 139261 - RNA, 19 nt, Homo sapiens
  misc_RNA (1)...(19): siRNA sense strand
gcgugaaccugguggugau

SEQ ID NO: 139262 - RNA, 19 nt, Homo sapiens
  misc_RNA (1)...(19): siRNA sense strand
cggagucugcgcuucguua

SEQ ID NO: 139263 - RNA, 19 nt, Homo sapiens
  misc_RNA (1)...(19): siRNA sense strand
gauuguggccuuggcugua

SEQ ID NO: 139264 - RNA, 19 nt, Homo sapiens
  misc_RNA (1)...(19): siRNA sense strand
ccagggguuuggucaguua

SEQ ID NO: 139265 - RNA, 19 nt, Homo sapiens
  misc_RNA (1)...(19): siRNA sense strand
cacaauuucuggacauggu

SEQ ID NO: 139266 - RNA, 19 nt, Homo sapiens
  misc_RNA (1)...(19): siRNA sense strand
cagcgucucagccggcuaa

SEQ ID NO: 139267 - RNA, 19 nt, Homo sapiens
  misc_RNA (1)...(19): siRNA sense strand
caguggagauguacuuucg

SEQ ID NO: 139268 - RNA, 19 nt, Homo sapiens
  misc_RNA (1)...(19): siRNA sense strand
ggcagacaccagaguauca

SEQ ID NO: 139269 - RNA, 19 nt, Homo sapiens
  misc_RNA (1)...(19): siRNA sense strand
gcuaucacggcuuccuaaa

SEQ ID NO: 139270 - RNA, 19 nt, Homo sapiens
  misc_RNA (1)...(19): siRNA sense strand
gcuccucaccguccucuuc

SEQ ID NO: 139271 - RNA, 19 nt, Homo sapiens
  misc_RNA (1)...(19): siRNA sense strand
uggcucagauaaggaagaa

SEQ ID NO: 139272 - RNA, 19 nt, Homo sapiens
  misc_RNA (1)...(19): siRNA sense strand
acaccagaguaucagaaug

SEQ ID NO: 139273 - RNA, 19 nt, Homo sapiens
  misc_RNA (1)...(19): siRNA sense strand
augagcagcugcagaacga

SEQ ID NO: 139274 - RNA, 19 nt, Homo sapiens
  misc_RNA (1)...(19): siRNA sense strand
cauccucuuccuccucaua

SEQ ID NO: 139275 - RNA, 19 nt, Homo sapiens
  misc_RNA (1)...(19): siRNA sense strand
cacuggaugucuacaaugg

SEQ ID NO: 139276 - RNA, 19 nt, Homo sapiens
  misc_RNA (1)...(19): siRNA sense strand
uccccaagcugcugguuua

SEQ ID NO: 139277 - RNA, 19 nt, Homo sapiens
  misc_RNA (1)...(19): siRNA sense strand
gcagacacagaggugauug

SEQ ID NO: 139278 - RNA, 19 nt, Homo sapiens
  misc_RNA (1)...(19): siRNA sense strand
ggacaggcugcugaaguuc

SEQ ID NO: 139279 - RNA, 19 nt, Homo sapiens
  misc_RNA (1)...(19): siRNA sense strand
gacaccagaguaucagaau

SEQ ID NO: 139280 - RNA, 19 nt, Homo sapiens
  misc_RNA (1)...(19): siRNA sense strand
gccacauauuugaacugua

SEQ ID NO: 139281 - RNA, 19 nt, Homo sapiens
  misc_RNA (1)...(19): siRNA sense strand
acacucuucugugagcaaa

SEQ ID NO: 139282 - RNA, 19 nt, Homo sapiens
  misc_RNA (1)...(19): siRNA sense strand
guucucggaaugcacaauu

SEQ ID NO: 139283 - RNA, 19 nt, Homo sapiens
  misc_RNA (1)...(19): siRNA sense strand
gacuuugaccggacucuca

SEQ ID NO: 139284 - RNA, 19 nt, Homo sapiens
  misc_RNA (1)...(19): siRNA sense strand
ggaugucuacaauggugaa

SEQ ID NO: 139285 - RNA, 19 nt, Homo sapiens
  misc_RNA (1)...(19): siRNA sense strand
cagcuuccgcuuccucuuc

SEQ ID NO: 139286 - RNA, 19 nt, Homo sapiens
  misc_RNA (1)...(19): siRNA sense strand
ucagccggcuaaaggacuu

SEQ ID NO: 139287 - RNA, 19 nt, Homo sapiens
  misc_RNA (1)...(19): siRNA sense strand
caaaccaugcagcgucuca

SEQ ID NO: 139288 - RNA, 19 nt, Homo sapiens
  misc_RNA (1)...(19): siRNA sense strand
caacgagacagggcuuaca

SEQ ID NO: 139289 - RNA, 19 nt, Homo sapiens
  misc_RNA (1)...(19): siRNA sense strand
cgucucagccggcuaaagg

SEQ ID NO: 139290 - RNA, 19 nt, Homo sapiens
  misc_RNA (1)...(19): siRNA sense strand
gcgcuaucacggcuuccua

SEQ ID NO: 139291 - RNA, 19 nt, Homo sapiens
  misc_RNA (1)...(19): siRNA sense strand
gagaucagcuccaaagaga

SEQ ID NO: 139292 - RNA, 19 nt, Homo sapiens
  misc_RNA (1)...(19): siRNA sense strand
gauccugggugcagacuuc

SEQ ID NO: 139293 - RNA, 19 nt, Homo sapiens
  misc_RNA (1)...(19): siRNA sense strand
uaucugcgcuuccacuaug

SEQ ID NO: 139294 - RNA, 19 nt, Homo sapiens
  misc_RNA (1)...(19): siRNA sense strand
gaucagcuccaaagagaug

SEQ ID NO: 139295 - RNA, 19 nt, Homo sapiens
  misc_RNA (1)...(19): siRNA sense strand
gacacuauguggcaacuca

SEQ ID NO: 139296 - RNA, 19 nt, Homo sapiens
  misc_RNA (1)...(19): siRNA sense strand
cagauugcauacucuaaga

SEQ ID NO: 139297 - RNA, 19 nt, Homo sapiens
  misc_RNA (1)...(19): siRNA sense strand
uuacuucacuggugugcaa

SEQ ID NO: 139298 - RNA, 19 nt, Homo sapiens
  misc_RNA (1)...(19): siRNA sense strand
ggagaccuuugaggacgua

SEQ ID NO: 139299 - RNA, 19 nt, Homo sapiens
  misc_RNA (1)...(19): siRNA sense strand
cagcuguccuggcucaaga

SEQ ID NO: 139300 - RNA, 19 nt, Homo sapiens
  misc_RNA (1)...(19): siRNA sense strand
ugcaagacaucaaugacaa

SEQ ID NO: 139301 - RNA, 19 nt, Homo sapiens
  misc_RNA (1)...(19): siRNA sense strand
gggcaagucccucuuuaag

SEQ ID NO: 139302 - RNA, 19 nt, Homo sapiens
  misc_RNA (1)...(19): siRNA sense strand
uguccuggcucaagaaaca

SEQ ID NO: 139303 - RNA, 19 nt, Homo sapiens
  misc_RNA (1)...(19): siRNA sense strand
cuaugggacugaagacuca

SEQ ID NO: 139304 - RNA, 19 nt, Homo sapiens
  misc_RNA (1)...(19): siRNA sense strand
ucgggcaagucccucuuua

SEQ ID NO: 139305 - RNA, 19 nt, Homo sapiens
  misc_RNA (1)...(19): siRNA sense strand
cggaaaccaugaccaccuu

SEQ ID NO: 139306 - RNA, 19 nt, Homo sapiens
  misc_RNA (1)...(19): siRNA sense strand
ucacuggugugcaagacau

SEQ ID NO: 139307 - RNA, 19 nt, Homo sapiens
  misc_RNA (1)...(19): siRNA sense strand
uugaggacguauucucuga

SEQ ID NO: 139308 - RNA, 19 nt, Homo sapiens
  misc_RNA (1)...(19): siRNA sense strand
caagacaucaaugacaaga

SEQ ID NO: 139309 - RNA, 19 nt, Homo sapiens
  misc_RNA (1)...(19): siRNA sense strand
gugcaagacaucaaugaca

SEQ ID NO: 139310 - RNA, 19 nt, Homo sapiens
  misc_RNA (1)...(19): siRNA sense strand
gaccuuugaggacguauuc

SEQ ID NO: 139311 - RNA, 19 nt, Homo sapiens
  misc_RNA (1)...(19): siRNA sense strand
gcaagacaucaaugacaag

SEQ ID NO: 139312 - RNA, 19 nt, Homo sapiens
  misc_RNA (1)...(19): siRNA sense strand
ugaccgcucccuucgcaaa

SEQ ID NO: 139313 - RNA, 19 nt, Homo sapiens
  misc_RNA (1)...(19): siRNA sense strand
gggcugggaauuucaugga

SEQ ID NO: 139314 - RNA, 19 nt, Homo sapiens
  misc_RNA (1)...(19): siRNA sense strand
gcuaucugcgcuuccacua

SEQ ID NO: 139315 - RNA, 19 nt, Homo sapiens
  misc_RNA (1)...(19): siRNA sense strand
gauugcauacucuaagauc

SEQ ID NO: 139316 - RNA, 19 nt, Homo sapiens
  misc_RNA (1)...(19): siRNA sense strand
caagaucccacagaccaau

SEQ ID NO: 139317 - RNA, 19 nt, Homo sapiens
  misc_RNA (1)...(19): siRNA sense strand
gacuucauccugucucuag

SEQ ID NO: 139318 - RNA, 19 nt, Homo sapiens
  misc_RNA (1)...(19): siRNA sense strand
gcuccaaagagaugacugu

SEQ ID NO: 139319 - RNA, 19 nt, Homo sapiens
  misc_RNA (1)...(19): siRNA sense strand
uggcaacucagaugacuuc

SEQ ID NO: 139320 - RNA, 19 nt, Homo sapiens
  misc_RNA (1)...(19): siRNA sense strand
ccagauugcauacucuaag

SEQ ID NO: 139321 - RNA, 19 nt, Homo sapiens
  misc_RNA (1)...(19): siRNA sense strand
gcccagauugcauacucua

SEQ ID NO: 139322 - RNA, 19 nt, Homo sapiens
  misc_RNA (1)...(19): siRNA sense strand
guaccugcaagaugagaau

SEQ ID NO: 139323 - RNA, 19 nt, Homo sapiens
  misc_RNA (1)...(19): siRNA sense strand
cgggcaagucccucuuuaa

SEQ ID NO: 139324 - RNA, 19 nt, Homo sapiens
  misc_RNA (1)...(19): siRNA sense strand
gaacgaggaugcaaauuau

SEQ ID NO: 139325 - RNA, 19 nt, Homo sapiens
  misc_RNA (1)...(19): siRNA sense strand
ggaacgaggaugcaaauua

SEQ ID NO: 139326 - RNA, 19 nt, Homo sapiens
  misc_RNA (1)...(19): siRNA sense strand
gaacagguuucucuugcua

SEQ ID NO: 139327 - RNA, 19 nt, Homo sapiens
  misc_RNA (1)...(19): siRNA sense strand
caaauuauaugcugucgaa

SEQ ID NO: 139328 - RNA, 19 nt, Homo sapiens
  misc_RNA (1)...(19): siRNA sense strand
gagaacaugugcccaucua

SEQ ID NO: 139329 - RNA, 19 nt, Homo sapiens
  misc_RNA (1)...(19): siRNA sense strand
gaacaucaagucagccuaa

SEQ ID NO: 139330 - RNA, 19 nt, Homo sapiens
  misc_RNA (1)...(19): siRNA sense strand
gaacaugugcccaucuaug

SEQ ID NO: 139331 - RNA, 19 nt, Homo sapiens
  misc_RNA (1)...(19): siRNA sense strand
caucaagucagccuaauga

SEQ ID NO: 139332 - RNA, 19 nt, Homo sapiens
  misc_RNA (1)...(19): siRNA sense strand
gcuaaugagucuuuaucug

SEQ ID NO: 139333 - RNA, 19 nt, Homo sapiens
  misc_RNA (1)...(19): siRNA sense strand
ccauagaucaucaaacuuc

SEQ ID NO: 139334 - RNA, 19 nt, Homo sapiens
  misc_RNA (1)...(19): siRNA sense strand
uauaugcugucgaaaucaa

SEQ ID NO: 139335 - RNA, 19 nt, Homo sapiens
  misc_RNA (1)...(19): siRNA sense strand
agguuucucuugcuaauga

SEQ ID NO: 139336 - RNA, 19 nt, Homo sapiens
  misc_RNA (1)...(19): siRNA sense strand
cuccauagaucaucaaacu

SEQ ID NO: 139337 - RNA, 19 nt, Homo sapiens
  misc_RNA (1)...(19): siRNA sense strand
gcccaucuaugaaccucuu

SEQ ID NO: 139338 - RNA, 19 nt, Homo sapiens
  misc_RNA (1)...(19): siRNA sense strand
cauagaucaucaaacuuca

SEQ ID NO: 139339 - RNA, 19 nt, Homo sapiens
  misc_RNA (1)...(19): siRNA sense strand
ucaagggugugagaacaug

SEQ ID NO: 139340 - RNA, 19 nt, Homo sapiens
  misc_RNA (1)...(19): siRNA sense strand
gaaccucuucucccaugga

SEQ ID NO: 139341 - RNA, 19 nt, Homo sapiens
  misc_RNA (1)...(19): siRNA sense strand
auuauaugcugucgaaauc

SEQ ID NO: 139342 - RNA, 19 nt, Homo sapiens
  misc_RNA (1)...(19): siRNA sense strand
aacaugugcccaucuauga

SEQ ID NO: 139343 - RNA, 19 nt, Homo sapiens
  misc_RNA (1)...(19): siRNA sense strand
acagguuucucuugcuaau

SEQ ID NO: 139344 - RNA, 19 nt, Homo sapiens
  misc_RNA (1)...(19): siRNA sense strand
ccagaggaacaucaaguca

SEQ ID NO: 139345 - RNA, 19 nt, Homo sapiens
  misc_RNA (1)...(19): siRNA sense strand
gcugucgaaaucaaucuuu

SEQ ID NO: 139346 - RNA, 19 nt, Homo sapiens
  misc_RNA (1)...(19): siRNA sense strand
acgaggaugcaaauuauau

SEQ ID NO: 139347 - RNA, 19 nt, Homo sapiens
  misc_RNA (1)...(19): siRNA sense strand
cgaggaugcaaauuauaug

SEQ ID NO: 139348 - RNA, 19 nt, Homo sapiens
  misc_RNA (1)...(19): siRNA sense strand
cauggaacgaggaugcaaa

SEQ ID NO: 139349 - RNA, 19 nt, Homo sapiens
  misc_RNA (1)...(19): siRNA sense strand
gaacgaggaugcaaauuau

SEQ ID NO: 139350 - RNA, 19 nt, Homo sapiens
  misc_RNA (1)...(19): siRNA sense strand
ggaacgaggaugcaaauua

SEQ ID NO: 139351 - RNA, 19 nt, Homo sapiens
  misc_RNA (1)...(19): siRNA sense strand
gaacagguuucucuugcua

SEQ ID NO: 139352 - RNA, 19 nt, Homo sapiens
  misc_RNA (1)...(19): siRNA sense strand
caaauuauaugcugucgaa

SEQ ID NO: 139353 - RNA, 19 nt, Homo sapiens
  misc_RNA (1)...(19): siRNA sense strand
gagaacaugugcccaucua

SEQ ID NO: 139354 - RNA, 19 nt, Homo sapiens
  misc_RNA (1)...(19): siRNA sense strand
gaacaucaagucagccuaa

SEQ ID NO: 139355 - RNA, 19 nt, Homo sapiens
  misc_RNA (1)...(19): siRNA sense strand
gaacaugugcccaucuaug

SEQ ID NO: 139356 - RNA, 19 nt, Homo sapiens
  misc_RNA (1)...(19): siRNA sense strand
caucaagucagccuaauga

SEQ ID NO: 139357 - RNA, 19 nt, Homo sapiens
  misc_RNA (1)...(19): siRNA sense strand
gcuaaugagucuuuaucug

SEQ ID NO: 139358 - RNA, 19 nt, Homo sapiens
  misc_RNA (1)...(19): siRNA sense strand
ccauagaucaucaaacuuc

SEQ ID NO: 139359 - RNA, 19 nt, Homo sapiens
  misc_RNA (1)...(19): siRNA sense strand
uauaugcugucgaaaucaa

SEQ ID NO: 139360 - RNA, 19 nt, Homo sapiens
  misc_RNA (1)...(19): siRNA sense strand
agguuucucuugcuaauga

SEQ ID NO: 139361 - RNA, 19 nt, Homo sapiens
  misc_RNA (1)...(19): siRNA sense strand
cuccauagaucaucaaacu

SEQ ID NO: 139362 - RNA, 19 nt, Homo sapiens
  misc_RNA (1)...(19): siRNA sense strand
gcccaucuaugaaccucuu

SEQ ID NO: 139363 - RNA, 19 nt, Homo sapiens
  misc_RNA (1)...(19): siRNA sense strand
cauagaucaucaaacuuca

SEQ ID NO: 139364 - RNA, 19 nt, Homo sapiens
  misc_RNA (1)...(19): siRNA sense strand
ucaagggugugagaacaug

SEQ ID NO: 139365 - RNA, 19 nt, Homo sapiens
  misc_RNA (1)...(19): siRNA sense strand
gaaccucuucucccaugga

SEQ ID NO: 139366 - RNA, 19 nt, Homo sapiens
  misc_RNA (1)...(19): siRNA sense strand
auuauaugcugucgaaauc

SEQ ID NO: 139367 - RNA, 19 nt, Homo sapiens
  misc_RNA (1)...(19): siRNA sense strand
aacaugugcccaucuauga

SEQ ID NO: 139368 - RNA, 19 nt, Homo sapiens
  misc_RNA (1)...(19): siRNA sense strand
acagguuucucuugcuaau

SEQ ID NO: 139369 - RNA, 19 nt, Homo sapiens
  misc_RNA (1)...(19): siRNA sense strand
ccagaggaacaucaaguca

SEQ ID NO: 139370 - RNA, 19 nt, Homo sapiens
  misc_RNA (1)...(19): siRNA sense strand
gcugucgaaaucaaucuuu

SEQ ID NO: 139371 - RNA, 19 nt, Homo sapiens
  misc_RNA (1)...(19): siRNA sense strand
acgaggaugcaaauuauau

SEQ ID NO: 139372 - RNA, 19 nt, Homo sapiens
  misc_RNA (1)...(19): siRNA sense strand
cgaggaugcaaauuauaug

SEQ ID NO: 139373 - RNA, 19 nt, Homo sapiens
  misc_RNA (1)...(19): siRNA sense strand
cauggaacgaggaugcaaa

SEQ ID NO: 139374 - RNA, 19 nt, Homo sapiens
  misc_RNA (1)...(19): siRNA sense strand
gaacgaggaugcaaauuau

SEQ ID NO: 139375 - RNA, 19 nt, Homo sapiens
  misc_RNA (1)...(19): siRNA sense strand
ggaacgaggaugcaaauua

SEQ ID NO: 139376 - RNA, 19 nt, Homo sapiens
  misc_RNA (1)...(19): siRNA sense strand
gaacagguuucucuugcua

SEQ ID NO: 139377 - RNA, 19 nt, Homo sapiens
  misc_RNA (1)...(19): siRNA sense strand
caaauuauaugcugucgaa

SEQ ID NO: 139378 - RNA, 19 nt, Homo sapiens
  misc_RNA (1)...(19): siRNA sense strand
gagaacaugugcccaucua

SEQ ID NO: 139379 - RNA, 19 nt, Homo sapiens
  misc_RNA (1)...(19): siRNA sense strand
gaacaucaagucagccuaa

SEQ ID NO: 139380 - RNA, 19 nt, Homo sapiens
  misc_RNA (1)...(19): siRNA sense strand
gaacaugugcccaucuaug

SEQ ID NO: 139381 - RNA, 19 nt, Homo sapiens
  misc_RNA (1)...(19): siRNA sense strand
caucaagucagccuaauga

SEQ ID NO: 139382 - RNA, 19 nt, Homo sapiens
  misc_RNA (1)...(19): siRNA sense strand
gcuaaugagucuuuaucug

SEQ ID NO: 139383 - RNA, 19 nt, Homo sapiens
  misc_RNA (1)...(19): siRNA sense strand
ccauagaucaucaaacuuc

SEQ ID NO: 139384 - RNA, 19 nt, Homo sapiens
  misc_RNA (1)...(19): siRNA sense strand
uauaugcugucgaaaucaa

SEQ ID NO: 139385 - RNA, 19 nt, Homo sapiens
  misc_RNA (1)...(19): siRNA sense strand
agguuucucuugcuaauga

SEQ ID NO: 139386 - RNA, 19 nt, Homo sapiens
  misc_RNA (1)...(19): siRNA sense strand
cuccauagaucaucaaacu

SEQ ID NO: 139387 - RNA, 19 nt, Homo sapiens
  misc_RNA (1)...(19): siRNA sense strand
gcccaucuaugaaccucuu

SEQ ID NO: 139388 - RNA, 19 nt, Homo sapiens
  misc_RNA (1)...(19): siRNA sense strand
cauagaucaucaaacuuca

SEQ ID NO: 139389 - RNA, 19 nt, Homo sapiens
  misc_RNA (1)...(19): siRNA sense strand
ucaagggugugagaacaug

SEQ ID NO: 139390 - RNA, 19 nt, Homo sapiens
  misc_RNA (1)...(19): siRNA sense strand
gaaccucuucucccaugga

SEQ ID NO: 139391 - RNA, 19 nt, Homo sapiens
  misc_RNA (1)...(19): siRNA sense strand
auuauaugcugucgaaauc

SEQ ID NO: 139392 - RNA, 19 nt, Homo sapiens
  misc_RNA (1)...(19): siRNA sense strand
aacaugugcccaucuauga

SEQ ID NO: 139393 - RNA, 19 nt, Homo sapiens
  misc_RNA (1)...(19): siRNA sense strand
acagguuucucuugcuaau

SEQ ID NO: 139394 - RNA, 19 nt, Homo sapiens
  misc_RNA (1)...(19): siRNA sense strand
ccagaggaacaucaaguca

SEQ ID NO: 139395 - RNA, 19 nt, Homo sapiens
  misc_RNA (1)...(19): siRNA sense strand
gcugucgaaaucaaucuuu

SEQ ID NO: 139396 - RNA, 19 nt, Homo sapiens
  misc_RNA (1)...(19): siRNA sense strand
acgaggaugcaaauuauau

SEQ ID NO: 139397 - RNA, 19 nt, Homo sapiens
  misc_RNA (1)...(19): siRNA sense strand
cgaggaugcaaauuauaug

SEQ ID NO: 139398 - RNA, 19 nt, Homo sapiens
  misc_RNA (1)...(19): siRNA sense strand
cauggaacgaggaugcaaa

SEQ ID NO: 139399 - RNA, 19 nt, Homo sapiens
  misc_RNA (1)...(19): siRNA sense strand
gaacgaggaugcaaauuau

SEQ ID NO: 139400 - RNA, 19 nt, Homo sapiens
  misc_RNA (1)...(19): siRNA sense strand
ggaacgaggaugcaaauua

SEQ ID NO: 139401 - RNA, 19 nt, Homo sapiens
  misc_RNA (1)...(19): siRNA sense strand
gaacagguuucucuugcua

SEQ ID NO: 139402 - RNA, 19 nt, Homo sapiens
  misc_RNA (1)...(19): siRNA sense strand
caaauuauaugcugucgaa

SEQ ID NO: 139403 - RNA, 19 nt, Homo sapiens
  misc_RNA (1)...(19): siRNA sense strand
gagaacaugugcccaucua

SEQ ID NO: 139404 - RNA, 19 nt, Homo sapiens
  misc_RNA (1)...(19): siRNA sense strand
gaacaucaagucagccuaa

SEQ ID NO: 139405 - RNA, 19 nt, Homo sapiens
  misc_RNA (1)...(19): siRNA sense strand
gaacaugugcccaucuaug

SEQ ID NO: 139406 - RNA, 19 nt, Homo sapiens
  misc_RNA (1)...(19): siRNA sense strand
caucaagucagccuaauga

SEQ ID NO: 139407 - RNA, 19 nt, Homo sapiens
  misc_RNA (1)...(19): siRNA sense strand
gcuaaugagucuuuaucug

SEQ ID NO: 139408 - RNA, 19 nt, Homo sapiens
  misc_RNA (1)...(19): siRNA sense strand
ccauagaucaucaaacuuc

SEQ ID NO: 139409 - RNA, 19 nt, Homo sapiens
  misc_RNA (1)...(19): siRNA sense strand
uauaugcugucgaaaucaa

SEQ ID NO: 139410 - RNA, 19 nt, Homo sapiens
  misc_RNA (1)...(19): siRNA sense strand
agguuucucuugcuaauga

SEQ ID NO: 139411 - RNA, 19 nt, Homo sapiens
  misc_RNA (1)...(19): siRNA sense strand
cuccauagaucaucaaacu

SEQ ID NO: 139412 - RNA, 19 nt, Homo sapiens
  misc_RNA (1)...(19): siRNA sense strand
gcccaucuaugaaccucuu

SEQ ID NO: 139413 - RNA, 19 nt, Homo sapiens
  misc_RNA (1)...(19): siRNA sense strand
cauagaucaucaaacuuca

SEQ ID NO: 139414 - RNA, 19 nt, Homo sapiens
  misc_RNA (1)...(19): siRNA sense strand
ucaagggugugagaacaug

SEQ ID NO: 139415 - RNA, 19 nt, Homo sapiens
  misc_RNA (1)...(19): siRNA sense strand
gaaccucuucucccaugga

SEQ ID NO: 139416 - RNA, 19 nt, Homo sapiens
  misc_RNA (1)...(19): siRNA sense strand
auuauaugcugucgaaauc

SEQ ID NO: 139417 - RNA, 19 nt, Homo sapiens
  misc_RNA (1)...(19): siRNA sense strand
aacaugugcccaucuauga

SEQ ID NO: 139418 - RNA, 19 nt, Homo sapiens
  misc_RNA (1)...(19): siRNA sense strand
acagguuucucuugcuaau

SEQ ID NO: 139419 - RNA, 19 nt, Homo sapiens
  misc_RNA (1)...(19): siRNA sense strand
ccagaggaacaucaaguca

SEQ ID NO: 139420 - RNA, 19 nt, Homo sapiens
  misc_RNA (1)...(19): siRNA sense strand
gcugucgaaaucaaucuuu

SEQ ID NO: 139421 - RNA, 19 nt, Homo sapiens
  misc_RNA (1)...(19): siRNA sense strand
acgaggaugcaaauuauau

SEQ ID NO: 139422 - RNA, 19 nt, Homo sapiens
  misc_RNA (1)...(19): siRNA sense strand
cgaggaugcaaauuauaug

SEQ ID NO: 139423 - RNA, 19 nt, Homo sapiens
  misc_RNA (1)...(19): siRNA sense strand
cauggaacgaggaugcaaa

SEQ ID NO: 139424 - RNA, 19 nt, Homo sapiens
  misc_RNA (1)...(19): siRNA sense strand
gaacgaggaugcaaauuau

SEQ ID NO: 139425 - RNA, 19 nt, Homo sapiens
  misc_RNA (1)...(19): siRNA sense strand
ggaacgaggaugcaaauua

SEQ ID NO: 139426 - RNA, 19 nt, Homo sapiens
  misc_RNA (1)...(19): siRNA sense strand
gaacagguuucucuugcua

SEQ ID NO: 139427 - RNA, 19 nt, Homo sapiens
  misc_RNA (1)...(19): siRNA sense strand
caaauuauaugcugucgaa

SEQ ID NO: 139428 - RNA, 19 nt, Homo sapiens
  misc_RNA (1)...(19): siRNA sense strand
gagaacaugugcccaucua

SEQ ID NO: 139429 - RNA, 19 nt, Homo sapiens
  misc_RNA (1)...(19): siRNA sense strand
gaacaucaagucagccuaa

SEQ ID NO: 139430 - RNA, 19 nt, Homo sapiens
  misc_RNA (1)...(19): siRNA sense strand
gaacaugugcccaucuaug

SEQ ID NO: 139431 - RNA, 19 nt, Homo sapiens
  misc_RNA (1)...(19): siRNA sense strand
caucaagucagccuaauga

SEQ ID NO: 139432 - RNA, 19 nt, Homo sapiens
  misc_RNA (1)...(19): siRNA sense strand
gcuaaugagucuuuaucug

SEQ ID NO: 139433 - RNA, 19 nt, Homo sapiens
  misc_RNA (1)...(19): siRNA sense strand
ccauagaucaucaaacuuc

SEQ ID NO: 139434 - RNA, 19 nt, Homo sapiens
  misc_RNA (1)...(19): siRNA sense strand
uauaugcugucgaaaucaa

SEQ ID NO: 139435 - RNA, 19 nt, Homo sapiens
  misc_RNA (1)...(19): siRNA sense strand
agguuucucuugcuaauga

SEQ ID NO: 139436 - RNA, 19 nt, Homo sapiens
  misc_RNA (1)...(19): siRNA sense strand
cuccauagaucaucaaacu

SEQ ID NO: 139437 - RNA, 19 nt, Homo sapiens
  misc_RNA (1)...(19): siRNA sense strand
gcccaucuaugaaccucuu

SEQ ID NO: 139438 - RNA, 19 nt, Homo sapiens
  misc_RNA (1)...(19): siRNA sense strand
cauagaucaucaaacuuca

SEQ ID NO: 139439 - RNA, 19 nt, Homo sapiens
  misc_RNA (1)...(19): siRNA sense strand
ucaagggugugagaacaug

SEQ ID NO: 139440 - RNA, 19 nt, Homo sapiens
  misc_RNA (1)...(19): siRNA sense strand
gaaccucuucucccaugga

SEQ ID NO: 139441 - RNA, 19 nt, Homo sapiens
  misc_RNA (1)...(19): siRNA sense strand
auuauaugcugucgaaauc

SEQ ID NO: 139442 - RNA, 19 nt, Homo sapiens
  misc_RNA (1)...(19): siRNA sense strand
aacaugugcccaucuauga

SEQ ID NO: 139443 - RNA, 19 nt, Homo sapiens
  misc_RNA (1)...(19): siRNA sense strand
acagguuucucuugcuaau

SEQ ID NO: 139444 - RNA, 19 nt, Homo sapiens
  misc_RNA (1)...(19): siRNA sense strand
ccagaggaacaucaaguca

SEQ ID NO: 139445 - RNA, 19 nt, Homo sapiens
  misc_RNA (1)...(19): siRNA sense strand
gcugucgaaaucaaucuuu

SEQ ID NO: 139446 - RNA, 19 nt, Homo sapiens
  misc_RNA (1)...(19): siRNA sense strand
acgaggaugcaaauuauau

SEQ ID NO: 139447 - RNA, 19 nt, Homo sapiens
  misc_RNA (1)...(19): siRNA sense strand
cgaggaugcaaauuauaug

SEQ ID NO: 139448 - RNA, 19 nt, Homo sapiens
  misc_RNA (1)...(19): siRNA sense strand
cauggaacgaggaugcaaa

SEQ ID NO: 139449 - RNA, 19 nt, Homo sapiens
  misc_RNA (1)...(19): siRNA sense strand
gaacgaggaugcaaauuau

SEQ ID NO: 139450 - RNA, 19 nt, Homo sapiens
  misc_RNA (1)...(19): siRNA sense strand
ggaacgaggaugcaaauua

SEQ ID NO: 139451 - RNA, 19 nt, Homo sapiens
  misc_RNA (1)...(19): siRNA sense strand
gaacagguuucucuugcua

SEQ ID NO: 139452 - RNA, 19 nt, Homo sapiens
  misc_RNA (1)...(19): siRNA sense strand
caaauuauaugcugucgaa

SEQ ID NO: 139453 - RNA, 19 nt, Homo sapiens
  misc_RNA (1)...(19): siRNA sense strand
gagaacaugugcccaucua

SEQ ID NO: 139454 - RNA, 19 nt, Homo sapiens
  misc_RNA (1)...(19): siRNA sense strand
gaacaucaagucagccuaa

SEQ ID NO: 139455 - RNA, 19 nt, Homo sapiens
  misc_RNA (1)...(19): siRNA sense strand
gaacaugugcccaucuaug

SEQ ID NO: 139456 - RNA, 19 nt, Homo sapiens
  misc_RNA (1)...(19): siRNA sense strand
caucaagucagccuaauga

SEQ ID NO: 139457 - RNA, 19 nt, Homo sapiens
  misc_RNA (1)...(19): siRNA sense strand
gcuaaugagucuuuaucug

SEQ ID NO: 139458 - RNA, 19 nt, Homo sapiens
  misc_RNA (1)...(19): siRNA sense strand
ccauagaucaucaaacuuc

SEQ ID NO: 139459 - RNA, 19 nt, Homo sapiens
  misc_RNA (1)...(19): siRNA sense strand
uauaugcugucgaaaucaa

SEQ ID NO: 139460 - RNA, 19 nt, Homo sapiens
  misc_RNA (1)...(19): siRNA sense strand
agguuucucuugcuaauga

SEQ ID NO: 139461 - RNA, 19 nt, Homo sapiens
  misc_RNA (1)...(19): siRNA sense strand
cuccauagaucaucaaacu

SEQ ID NO: 139462 - RNA, 19 nt, Homo sapiens
  misc_RNA (1)...(19): siRNA sense strand
gcccaucuaugaaccucuu

SEQ ID NO: 139463 - RNA, 19 nt, Homo sapiens
  misc_RNA (1)...(19): siRNA sense strand
cauagaucaucaaacuuca

SEQ ID NO: 139464 - RNA, 19 nt, Homo sapiens
  misc_RNA (1)...(19): siRNA sense strand
ucaagggugugagaacaug

SEQ ID NO: 139465 - RNA, 19 nt, Homo sapiens
  misc_RNA (1)...(19): siRNA sense strand
gaaccucuucucccaugga

SEQ ID NO: 139466 - RNA, 19 nt, Homo sapiens
  misc_RNA (1)...(19): siRNA sense strand
auuauaugcugucgaaauc

SEQ ID NO: 139467 - RNA, 19 nt, Homo sapiens
  misc_RNA (1)...(19): siRNA sense strand
aacaugugcccaucuauga

SEQ ID NO: 139468 - RNA, 19 nt, Homo sapiens
  misc_RNA (1)...(19): siRNA sense strand
acagguuucucuugcuaau

SEQ ID NO: 139469 - RNA, 19 nt, Homo sapiens
  misc_RNA (1)...(19): siRNA sense strand
ccagaggaacaucaaguca

SEQ ID NO: 139470 - RNA, 19 nt, Homo sapiens
  misc_RNA (1)...(19): siRNA sense strand
gcugucgaaaucaaucuuu

SEQ ID NO: 139471 - RNA, 19 nt, Homo sapiens
  misc_RNA (1)...(19): siRNA sense strand
acgaggaugcaaauuauau

SEQ ID NO: 139472 - RNA, 19 nt, Homo sapiens
  misc_RNA (1)...(19): siRNA sense strand
cgaggaugcaaauuauaug

SEQ ID NO: 139473 - RNA, 19 nt, Homo sapiens
  misc_RNA (1)...(19): siRNA sense strand
cauggaacgaggaugcaaa

SEQ ID NO: 139474 - RNA, 19 nt, Homo sapiens
  misc_RNA (1)...(19): siRNA sense strand
gaacgaggaugcaaauuau

SEQ ID NO: 139475 - RNA, 19 nt, Homo sapiens
  misc_RNA (1)...(19): siRNA sense strand
ggaacgaggaugcaaauua

SEQ ID NO: 139476 - RNA, 19 nt, Homo sapiens
  misc_RNA (1)...(19): siRNA sense strand
gaacagguuucucuugcua

SEQ ID NO: 139477 - RNA, 19 nt, Homo sapiens
  misc_RNA (1)...(19): siRNA sense strand
caaauuauaugcugucgaa

SEQ ID NO: 139478 - RNA, 19 nt, Homo sapiens
  misc_RNA (1)...(19): siRNA sense strand
gagaacaugugcccaucua

SEQ ID NO: 139479 - RNA, 19 nt, Homo sapiens
  misc_RNA (1)...(19): siRNA sense strand
gaacaucaagucagccuaa

SEQ ID NO: 139480 - RNA, 19 nt, Homo sapiens
  misc_RNA (1)...(19): siRNA sense strand
gaacaugugcccaucuaug

SEQ ID NO: 139481 - RNA, 19 nt, Homo sapiens
  misc_RNA (1)...(19): siRNA sense strand
caucaagucagccuaauga

SEQ ID NO: 139482 - RNA, 19 nt, Homo sapiens
  misc_RNA (1)...(19): siRNA sense strand
gcuaaugagucuuuaucug

SEQ ID NO: 139483 - RNA, 19 nt, Homo sapiens
  misc_RNA (1)...(19): siRNA sense strand
ccauagaucaucaaacuuc

SEQ ID NO: 139484 - RNA, 19 nt, Homo sapiens
  misc_RNA (1)...(19): siRNA sense strand
uauaugcugucgaaaucaa

SEQ ID NO: 139485 - RNA, 19 nt, Homo sapiens
  misc_RNA (1)...(19): siRNA sense strand
agguuucucuugcuaauga

SEQ ID NO: 139486 - RNA, 19 nt, Homo sapiens
  misc_RNA (1)...(19): siRNA sense strand
cuccauagaucaucaaacu

SEQ ID NO: 139487 - RNA, 19 nt, Homo sapiens
  misc_RNA (1)...(19): siRNA sense strand
gcccaucuaugaaccucuu

SEQ ID NO: 139488 - RNA, 19 nt, Homo sapiens
  misc_RNA (1)...(19): siRNA sense strand
cauagaucaucaaacuuca

SEQ ID NO: 139489 - RNA, 19 nt, Homo sapiens
  misc_RNA (1)...(19): siRNA sense strand
ucaagggugugagaacaug

SEQ ID NO: 139490 - RNA, 19 nt, Homo sapiens
  misc_RNA (1)...(19): siRNA sense strand
gaaccucuucucccaugga

SEQ ID NO: 139491 - RNA, 19 nt, Homo sapiens
  misc_RNA (1)...(19): siRNA sense strand
auuauaugcugucgaaauc

SEQ ID NO: 139492 - RNA, 19 nt, Homo sapiens
  misc_RNA (1)...(19): siRNA sense strand
aacaugugcccaucuauga

SEQ ID NO: 139493 - RNA, 19 nt, Homo sapiens
  misc_RNA (1)...(19): siRNA sense strand
acagguuucucuugcuaau

SEQ ID NO: 139494 - RNA, 19 nt, Homo sapiens
  misc_RNA (1)...(19): siRNA sense strand
ccagaggaacaucaaguca

SEQ ID NO: 139495 - RNA, 19 nt, Homo sapiens
  misc_RNA (1)...(19): siRNA sense strand
gcugucgaaaucaaucuuu

SEQ ID NO: 139496 - RNA, 19 nt, Homo sapiens
  misc_RNA (1)...(19): siRNA sense strand
acgaggaugcaaauuauau

SEQ ID NO: 139497 - RNA, 19 nt, Homo sapiens
  misc_RNA (1)...(19): siRNA sense strand
cgaggaugcaaauuauaug

SEQ ID NO: 139498 - RNA, 19 nt, Homo sapiens
  misc_RNA (1)...(19): siRNA sense strand
cauggaacgaggaugcaaa

SEQ ID NO: 139499 - RNA, 19 nt, Homo sapiens
  misc_RNA (1)...(19): siRNA sense strand
gaacgaggaugcaaauuau

SEQ ID NO: 139500 - RNA, 19 nt, Homo sapiens
  misc_RNA (1)...(19): siRNA sense strand
ggaacgaggaugcaaauua

SEQ ID NO: 139501 - RNA, 19 nt, Homo sapiens
  misc_RNA (1)...(19): siRNA sense strand
gaacagguuucucuugcua

SEQ ID NO: 139502 - RNA, 19 nt, Homo sapiens
  misc_RNA (1)...(19): siRNA sense strand
caaauuauaugcugucgaa

SEQ ID NO: 139503 - RNA, 19 nt, Homo sapiens
  misc_RNA (1)...(19): siRNA sense strand
gagaacaugugcccaucua

SEQ ID NO: 139504 - RNA, 19 nt, Homo sapiens
  misc_RNA (1)...(19): siRNA sense strand
gaacaucaagucagccuaa

SEQ ID NO: 139505 - RNA, 19 nt, Homo sapiens
  misc_RNA (1)...(19): siRNA sense strand
gaacaugugcccaucuaug

SEQ ID NO: 139506 - RNA, 19 nt, Homo sapiens
  misc_RNA (1)...(19): siRNA sense strand
caucaagucagccuaauga

SEQ ID NO: 139507 - RNA, 19 nt, Homo sapiens
  misc_RNA (1)...(19): siRNA sense strand
gcuaaugagucuuuaucug

SEQ ID NO: 139508 - RNA, 19 nt, Homo sapiens
  misc_RNA (1)...(19): siRNA sense strand
ccauagaucaucaaacuuc

SEQ ID NO: 139509 - RNA, 19 nt, Homo sapiens
  misc_RNA (1)...(19): siRNA sense strand
uauaugcugucgaaaucaa

SEQ ID NO: 139510 - RNA, 19 nt, Homo sapiens
  misc_RNA (1)...(19): siRNA sense strand
agguuucucuugcuaauga

SEQ ID NO: 139511 - RNA, 19 nt, Homo sapiens
  misc_RNA (1)...(19): siRNA sense strand
cuccauagaucaucaaacu

SEQ ID NO: 139512 - RNA, 19 nt, Homo sapiens
  misc_RNA (1)...(19): siRNA sense strand
gcccaucuaugaaccucuu

SEQ ID NO: 139513 - RNA, 19 nt, Homo sapiens
  misc_RNA (1)...(19): siRNA sense strand
cauagaucaucaaacuuca

SEQ ID NO: 139514 - RNA, 19 nt, Homo sapiens
  misc_RNA (1)...(19): siRNA sense strand
ucaagggugugagaacaug

SEQ ID NO: 139515 - RNA, 19 nt, Homo sapiens
  misc_RNA (1)...(19): siRNA sense strand
gaaccucuucucccaugga

SEQ ID NO: 139516 - RNA, 19 nt, Homo sapiens
  misc_RNA (1)...(19): siRNA sense strand
auuauaugcugucgaaauc

SEQ ID NO: 139517 - RNA, 19 nt, Homo sapiens
  misc_RNA (1)...(19): siRNA sense strand
aacaugugcccaucuauga

SEQ ID NO: 139518 - RNA, 19 nt, Homo sapiens
  misc_RNA (1)...(19): siRNA sense strand
acagguuucucuugcuaau

SEQ ID NO: 139519 - RNA, 19 nt, Homo sapiens
  misc_RNA (1)...(19): siRNA sense strand
ccagaggaacaucaaguca

SEQ ID NO: 139520 - RNA, 19 nt, Homo sapiens
  misc_RNA (1)...(19): siRNA sense strand
gcugucgaaaucaaucuuu

SEQ ID NO: 139521 - RNA, 19 nt, Homo sapiens
  misc_RNA (1)...(19): siRNA sense strand
acgaggaugcaaauuauau

SEQ ID NO: 139522 - RNA, 19 nt, Homo sapiens
  misc_RNA (1)...(19): siRNA sense strand
cgaggaugcaaauuauaug

SEQ ID NO: 139523 - RNA, 19 nt, Homo sapiens
  misc_RNA (1)...(19): siRNA sense strand
cauggaacgaggaugcaaa

SEQ ID NO: 139524 - RNA, 19 nt, Homo sapiens
  misc_RNA (1)...(19): siRNA sense strand
gaacgaggaugcaaauuau

SEQ ID NO: 139525 - RNA, 19 nt, Homo sapiens
  misc_RNA (1)...(19): siRNA sense strand
ggaacgaggaugcaaauua

SEQ ID NO: 139526 - RNA, 19 nt, Homo sapiens
  misc_RNA (1)...(19): siRNA sense strand
gaacagguuucucuugcua

SEQ ID NO: 139527 - RNA, 19 nt, Homo sapiens
  misc_RNA (1)...(19): siRNA sense strand
caaauuauaugcugucgaa

SEQ ID NO: 139528 - RNA, 19 nt, Homo sapiens
  misc_RNA (1)...(19): siRNA sense strand
gagaacaugugcccaucua

SEQ ID NO: 139529 - RNA, 19 nt, Homo sapiens
  misc_RNA (1)...(19): siRNA sense strand
gaacaucaagucagccuaa

SEQ ID NO: 139530 - RNA, 19 nt, Homo sapiens
  misc_RNA (1)...(19): siRNA sense strand
gaacaugugcccaucuaug

SEQ ID NO: 139531 - RNA, 19 nt, Homo sapiens
  misc_RNA (1)...(19): siRNA sense strand
caucaagucagccuaauga

SEQ ID NO: 139532 - RNA, 19 nt, Homo sapiens
  misc_RNA (1)...(19): siRNA sense strand
gcuaaugagucuuuaucug

SEQ ID NO: 139533 - RNA, 19 nt, Homo sapiens
  misc_RNA (1)...(19): siRNA sense strand
ccauagaucaucaaacuuc

SEQ ID NO: 139534 - RNA, 19 nt, Homo sapiens
  misc_RNA (1)...(19): siRNA sense strand
uauaugcugucgaaaucaa

SEQ ID NO: 139535 - RNA, 19 nt, Homo sapiens
  misc_RNA (1)...(19): siRNA sense strand
agguuucucuugcuaauga

SEQ ID NO: 139536 - RNA, 19 nt, Homo sapiens
  misc_RNA (1)...(19): siRNA sense strand
cuccauagaucaucaaacu

SEQ ID NO: 139537 - RNA, 19 nt, Homo sapiens
  misc_RNA (1)...(19): siRNA sense strand
gcccaucuaugaaccucuu

SEQ ID NO: 139538 - RNA, 19 nt, Homo sapiens
  misc_RNA (1)...(19): siRNA sense strand
cauagaucaucaaacuuca

SEQ ID NO: 139539 - RNA, 19 nt, Homo sapiens
  misc_RNA (1)...(19): siRNA sense strand
ucaagggugugagaacaug

SEQ ID NO: 139540 - RNA, 19 nt, Homo sapiens
  misc_RNA (1)...(19): siRNA sense strand
gaaccucuucucccaugga

SEQ ID NO: 139541 - RNA, 19 nt, Homo sapiens
  misc_RNA (1)...(19): siRNA sense strand
auuauaugcugucgaaauc

SEQ ID NO: 139542 - RNA, 19 nt, Homo sapiens
  misc_RNA (1)...(19): siRNA sense strand
aacaugugcccaucuauga

SEQ ID NO: 139543 - RNA, 19 nt, Homo sapiens
  misc_RNA (1)...(19): siRNA sense strand
acagguuucucuugcuaau

SEQ ID NO: 139544 - RNA, 19 nt, Homo sapiens
  misc_RNA (1)...(19): siRNA sense strand
ccagaggaacaucaaguca

SEQ ID NO: 139545 - RNA, 19 nt, Homo sapiens
  misc_RNA (1)...(19): siRNA sense strand
gcugucgaaaucaaucuuu

SEQ ID NO: 139546 - RNA, 19 nt, Homo sapiens
  misc_RNA (1)...(19): siRNA sense strand
acgaggaugcaaauuauau

SEQ ID NO: 139547 - RNA, 19 nt, Homo sapiens
  misc_RNA (1)...(19): siRNA sense strand
cgaggaugcaaauuauaug

SEQ ID NO: 139548 - RNA, 19 nt, Homo sapiens
  misc_RNA (1)...(19): siRNA sense strand
cauggaacgaggaugcaaa

SEQ ID NO: 139549 - RNA, 19 nt, Homo sapiens
  misc_RNA (1)...(19): siRNA sense strand
gaacgaggaugcaaauuau

SEQ ID NO: 139550 - RNA, 19 nt, Homo sapiens
  misc_RNA (1)...(19): siRNA sense strand
ggaacgaggaugcaaauua

SEQ ID NO: 139551 - RNA, 19 nt, Homo sapiens
  misc_RNA (1)...(19): siRNA sense strand
gaacagguuucucuugcua

SEQ ID NO: 139552 - RNA, 19 nt, Homo sapiens
  misc_RNA (1)...(19): siRNA sense strand
caaauuauaugcugucgaa

SEQ ID NO: 139553 - RNA, 19 nt, Homo sapiens
  misc_RNA (1)...(19): siRNA sense strand
gagaacaugugcccaucua

SEQ ID NO: 139554 - RNA, 19 nt, Homo sapiens
  misc_RNA (1)...(19): siRNA sense strand
gaacaucaagucagccuaa

SEQ ID NO: 139555 - RNA, 19 nt, Homo sapiens
  misc_RNA (1)...(19): siRNA sense strand
gaacaugugcccaucuaug

SEQ ID NO: 139556 - RNA, 19 nt, Homo sapiens
  misc_RNA (1)...(19): siRNA sense strand
caucaagucagccuaauga

SEQ ID NO: 139557 - RNA, 19 nt, Homo sapiens
  misc_RNA (1)...(19): siRNA sense strand
gcuaaugagucuuuaucug

SEQ ID NO: 139558 - RNA, 19 nt, Homo sapiens
  misc_RNA (1)...(19): siRNA sense strand
ccauagaucaucaaacuuc

SEQ ID NO: 139559 - RNA, 19 nt, Homo sapiens
  misc_RNA (1)...(19): siRNA sense strand
uauaugcugucgaaaucaa

SEQ ID NO: 139560 - RNA, 19 nt, Homo sapiens
  misc_RNA (1)...(19): siRNA sense strand
agguuucucuugcuaauga

SEQ ID NO: 139561 - RNA, 19 nt, Homo sapiens
  misc_RNA (1)...(19): siRNA sense strand
cuccauagaucaucaaacu

SEQ ID NO: 139562 - RNA, 19 nt, Homo sapiens
  misc_RNA (1)...(19): siRNA sense strand
gcccaucuaugaaccucuu

SEQ ID NO: 139563 - RNA, 19 nt, Homo sapiens
  misc_RNA (1)...(19): siRNA sense strand
cauagaucaucaaacuuca

SEQ ID NO: 139564 - RNA, 19 nt, Homo sapiens
  misc_RNA (1)...(19): siRNA sense strand
ucaagggugugagaacaug

SEQ ID NO: 139565 - RNA, 19 nt, Homo sapiens
  misc_RNA (1)...(19): siRNA sense strand
gaaccucuucucccaugga

SEQ ID NO: 139566 - RNA, 19 nt, Homo sapiens
  misc_RNA (1)...(19): siRNA sense strand
auuauaugcugucgaaauc

SEQ ID NO: 139567 - RNA, 19 nt, Homo sapiens
  misc_RNA (1)...(19): siRNA sense strand
aacaugugcccaucuauga

SEQ ID NO: 139568 - RNA, 19 nt, Homo sapiens
  misc_RNA (1)...(19): siRNA sense strand
acagguuucucuugcuaau

SEQ ID NO: 139569 - RNA, 19 nt, Homo sapiens
  misc_RNA (1)...(19): siRNA sense strand
ccagaggaacaucaaguca

SEQ ID NO: 139570 - RNA, 19 nt, Homo sapiens
  misc_RNA (1)...(19): siRNA sense strand
gcugucgaaaucaaucuuu

SEQ ID NO: 139571 - RNA, 19 nt, Homo sapiens
  misc_RNA (1)...(19): siRNA sense strand
acgaggaugcaaauuauau

SEQ ID NO: 139572 - RNA, 19 nt, Homo sapiens
  misc_RNA (1)...(19): siRNA sense strand
cgaggaugcaaauuauaug

SEQ ID NO: 139573 - RNA, 19 nt, Homo sapiens
  misc_RNA (1)...(19): siRNA sense strand
cauggaacgaggaugcaaa

SEQ ID NO: 139574 - RNA, 19 nt, Homo sapiens
  misc_RNA (1)...(19): siRNA sense strand
gaacgaggaugcaaauuau

SEQ ID NO: 139575 - RNA, 19 nt, Homo sapiens
  misc_RNA (1)...(19): siRNA sense strand
ggaacgaggaugcaaauua

SEQ ID NO: 139576 - RNA, 19 nt, Homo sapiens
  misc_RNA (1)...(19): siRNA sense strand
gaacagguuucucuugcua

SEQ ID NO: 139577 - RNA, 19 nt, Homo sapiens
  misc_RNA (1)...(19): siRNA sense strand
caaauuauaugcugucgaa

SEQ ID NO: 139578 - RNA, 19 nt, Homo sapiens
  misc_RNA (1)...(19): siRNA sense strand
gagaacaugugcccaucua

SEQ ID NO: 139579 - RNA, 19 nt, Homo sapiens
  misc_RNA (1)...(19): siRNA sense strand
gaacaucaagucagccuaa

SEQ ID NO: 139580 - RNA, 19 nt, Homo sapiens
  misc_RNA (1)...(19): siRNA sense strand
gaacaugugcccaucuaug

SEQ ID NO: 139581 - RNA, 19 nt, Homo sapiens
  misc_RNA (1)...(19): siRNA sense strand
caucaagucagccuaauga

SEQ ID NO: 139582 - RNA, 19 nt, Homo sapiens
  misc_RNA (1)...(19): siRNA sense strand
gcuaaugagucuuuaucug

SEQ ID NO: 139583 - RNA, 19 nt, Homo sapiens
  misc_RNA (1)...(19): siRNA sense strand
ccauagaucaucaaacuuc

SEQ ID NO: 139584 - RNA, 19 nt, Homo sapiens
  misc_RNA (1)...(19): siRNA sense strand
uauaugcugucgaaaucaa

SEQ ID NO: 139585 - RNA, 19 nt, Homo sapiens
  misc_RNA (1)...(19): siRNA sense strand
agguuucucuugcuaauga

SEQ ID NO: 139586 - RNA, 19 nt, Homo sapiens
  misc_RNA (1)...(19): siRNA sense strand
cuccauagaucaucaaacu

SEQ ID NO: 139587 - RNA, 19 nt, Homo sapiens
  misc_RNA (1)...(19): siRNA sense strand
gcccaucuaugaaccucuu

SEQ ID NO: 139588 - RNA, 19 nt, Homo sapiens
  misc_RNA (1)...(19): siRNA sense strand
cauagaucaucaaacuuca

SEQ ID NO: 139589 - RNA, 19 nt, Homo sapiens
  misc_RNA (1)...(19): siRNA sense strand
ucaagggugugagaacaug

SEQ ID NO: 139590 - RNA, 19 nt, Homo sapiens
  misc_RNA (1)...(19): siRNA sense strand
gaaccucuucucccaugga

SEQ ID NO: 139591 - RNA, 19 nt, Homo sapiens
  misc_RNA (1)...(19): siRNA sense strand
auuauaugcugucgaaauc

SEQ ID NO: 139592 - RNA, 19 nt, Homo sapiens
  misc_RNA (1)...(19): siRNA sense strand
aacaugugcccaucuauga

SEQ ID NO: 139593 - RNA, 19 nt, Homo sapiens
  misc_RNA (1)...(19): siRNA sense strand
acagguuucucuugcuaau

SEQ ID NO: 139594 - RNA, 19 nt, Homo sapiens
  misc_RNA (1)...(19): siRNA sense strand
ccagaggaacaucaaguca

SEQ ID NO: 139595 - RNA, 19 nt, Homo sapiens
  misc_RNA (1)...(19): siRNA sense strand
gcugucgaaaucaaucuuu

SEQ ID NO: 139596 - RNA, 19 nt, Homo sapiens
  misc_RNA (1)...(19): siRNA sense strand
acgaggaugcaaauuauau

SEQ ID NO: 139597 - RNA, 19 nt, Homo sapiens
  misc_RNA (1)...(19): siRNA sense strand
cgaggaugcaaauuauaug

SEQ ID NO: 139598 - RNA, 19 nt, Homo sapiens
  misc_RNA (1)...(19): siRNA sense strand
cauggaacgaggaugcaaa

SEQ ID NO: 139599 - RNA, 19 nt, Homo sapiens
  misc_RNA (1)...(19): siRNA sense strand
ggaaggaccucuaugcuaa

SEQ ID NO: 139600 - RNA, 19 nt, Homo sapiens
  misc_RNA (1)...(19): siRNA sense strand
gagaaacuguguuauguag

SEQ ID NO: 139601 - RNA, 19 nt, Homo sapiens
  misc_RNA (1)...(19): siRNA sense strand
gcaccacucuuucuacaau

SEQ ID NO: 139602 - RNA, 19 nt, Homo sapiens
  misc_RNA (1)...(19): siRNA sense strand
gauagaacauggcaucauc

SEQ ID NO: 139603 - RNA, 19 nt, Homo sapiens
  misc_RNA (1)...(19): siRNA sense strand
gccgagaucucacugacua

SEQ ID NO: 139604 - RNA, 19 nt, Homo sapiens
  misc_RNA (1)...(19): siRNA sense strand
gcacugccuugguguguga

SEQ ID NO: 139605 - RNA, 19 nt, Homo sapiens
  misc_RNA (1)...(19): siRNA sense strand
ggagaaacuguguuaugua

SEQ ID NO: 139606 - RNA, 19 nt, Homo sapiens
  misc_RNA (1)...(19): siRNA sense strand
gcaaacaggaauacgauga

SEQ ID NO: 139607 - RNA, 19 nt, Homo sapiens
  misc_RNA (1)...(19): siRNA sense strand
ucaaggagaaacuguguua

SEQ ID NO: 139608 - RNA, 19 nt, Homo sapiens
  misc_RNA (1)...(19): siRNA sense strand
ggaccucuaugcuaacaau

SEQ ID NO: 139609 - RNA, 19 nt, Homo sapiens
  misc_RNA (1)...(19): siRNA sense strand
ugagaagaguuacgaguug

SEQ ID NO: 139610 - RNA, 19 nt, Homo sapiens
  misc_RNA (1)...(19): siRNA sense strand
gaagugugauauugacauc

SEQ ID NO: 139611 - RNA, 19 nt, Homo sapiens
  misc_RNA (1)...(19): siRNA sense strand
gaaacuguguuauguagcu

SEQ ID NO: 139612 - RNA, 19 nt, Homo sapiens
  misc_RNA (1)...(19): siRNA sense strand
uuauguagcucuggacuuu

SEQ ID NO: 139613 - RNA, 19 nt, Homo sapiens
  misc_RNA (1)...(19): siRNA sense strand
gcaaauacucugucuggau

SEQ ID NO: 139614 - RNA, 19 nt, Homo sapiens
  misc_RNA (1)...(19): siRNA sense strand
caacugggacgacauggaa

SEQ ID NO: 139615 - RNA, 19 nt, Homo sapiens
  misc_RNA (1)...(19): siRNA sense strand
gcacccagcaccaugaaga

SEQ ID NO: 139616 - RNA, 19 nt, Homo sapiens
  misc_RNA (1)...(19): siRNA sense strand
ugaaguacccgauagaaca

SEQ ID NO: 139617 - RNA, 19 nt, Homo sapiens
  misc_RNA (1)...(19): siRNA sense strand
gcacagagcaaaagaggaa

SEQ ID NO: 139618 - RNA, 19 nt, Homo sapiens
  misc_RNA (1)...(19): siRNA sense strand
aggagaaacuguguuaugu

SEQ ID NO: 139619 - RNA, 19 nt, Homo sapiens
  misc_RNA (1)...(19): siRNA sense strand
caaacaggaauacgaugaa

SEQ ID NO: 139620 - RNA, 19 nt, Homo sapiens
  misc_RNA (1)...(19): siRNA sense strand
cuacgugggugacgaagca

SEQ ID NO: 139621 - RNA, 19 nt, Homo sapiens
  misc_RNA (1)...(19): siRNA sense strand
gagcgcaaauacucugucu

SEQ ID NO: 139622 - RNA, 19 nt, Homo sapiens
  misc_RNA (1)...(19): siRNA sense strand
ugacgaagcacagagcaaa

SEQ ID NO: 139623 - RNA, 19 nt, Homo sapiens
  misc_RNA (1)...(19): siRNA sense strand
ggagucugcuggcauccau

SEQ ID NO: 139624 - RNA, 19 nt, Homo sapiens
  misc_RNA (1)...(19): siRNA sense strand
gaaguacccgauagaacau

SEQ ID NO: 139625 - RNA, 19 nt, Homo sapiens
  misc_RNA (1)...(19): siRNA sense strand
gcuauuccuucguuacuac

SEQ ID NO: 139626 - RNA, 19 nt, Homo sapiens
  misc_RNA (1)...(19): siRNA sense strand
cugacuaccucaugaagau

SEQ ID NO: 139627 - RNA, 19 nt, Homo sapiens
  misc_RNA (1)...(19): siRNA sense strand
gaauccugacccugaagua

SEQ ID NO: 139628 - RNA, 19 nt, Homo sapiens
  misc_RNA (1)...(19): siRNA sense strand
acaacagcaucaugaagug

SEQ ID NO: 139629 - RNA, 19 nt, Homo sapiens
  misc_RNA (1)...(19): siRNA sense strand
gggagaaaaugacucaaau

SEQ ID NO: 139630 - RNA, 19 nt, Homo sapiens
  misc_RNA (1)...(19): siRNA sense strand
gcagauguggaucagcaaa

SEQ ID NO: 139631 - RNA, 19 nt, Homo sapiens
  misc_RNA (1)...(19): siRNA sense strand
cauccucccuugagaagag

SEQ ID NO: 139632 - RNA, 19 nt, Homo sapiens
  misc_RNA (1)...(19): siRNA sense strand
caauggcucugggcucugu

SEQ ID NO: 139633 - RNA, 19 nt, Homo sapiens
  misc_RNA (1)...(19): siRNA sense strand
caugaaaccaccuacaaca

SEQ ID NO: 139634 - RNA, 19 nt, Homo sapiens
  misc_RNA (1)...(19): siRNA sense strand
gaucaccaucggaaaugaa

SEQ ID NO: 139635 - RNA, 19 nt, Homo sapiens
  misc_RNA (1)...(19): siRNA sense strand
gugcuggacucuggagaug

SEQ ID NO: 139636 - RNA, 19 nt, Homo sapiens
  misc_RNA (1)...(19): siRNA sense strand
gcuggacucuggagauggu

SEQ ID NO: 139637 - RNA, 19 nt, Homo sapiens
  misc_RNA (1)...(19): siRNA sense strand
gaucuggcaccacucuuuc

SEQ ID NO: 139638 - RNA, 19 nt, Homo sapiens
  misc_RNA (1)...(19): siRNA sense strand
gcguggcuauuccuucguu

SEQ ID NO: 139639 - RNA, 19 nt, Homo sapiens
  misc_RNA (1)...(19): siRNA sense strand
gcggugcugucucucuaug

SEQ ID NO: 139640 - RNA, 19 nt, Homo sapiens
  misc_RNA (1)...(19): siRNA sense strand
caaugucccagccauguau

SEQ ID NO: 139641 - RNA, 19 nt, Homo sapiens
  misc_RNA (1)...(19): siRNA sense strand
ggcuauuccuucguuacua

SEQ ID NO: 139642 - RNA, 19 nt, Homo sapiens
  misc_RNA (1)...(19): siRNA sense strand
aaacaggaauacgaugaag

SEQ ID NO: 139643 - RNA, 19 nt, Homo sapiens
  misc_RNA (1)...(19): siRNA sense strand
ccagcaccaugaagaucaa

SEQ ID NO: 139644 - RNA, 19 nt, Homo sapiens
  misc_RNA (1)...(19): siRNA sense strand
ggacaucaaggagaaacug

SEQ ID NO: 139645 - RNA, 19 nt, Homo sapiens
  misc_RNA (1)...(19): siRNA sense strand
ucaugaagugugauauuga

SEQ ID NO: 139646 - RNA, 19 nt, Homo sapiens
  misc_RNA (1)...(19): siRNA sense strand
cagcaaacaggaauacgau

SEQ ID NO: 139647 - RNA, 19 nt, Homo sapiens
  misc_RNA (1)...(19): siRNA sense strand
caucaggaaggaccucuau

SEQ ID NO: 139648 - RNA, 19 nt, Homo sapiens
  misc_RNA (1)...(19): siRNA sense strand
ucaaugucccagccaugua

SEQ ID NO: 139649 - RNA, 19 nt, Homo sapiens
  misc_RNA (1)...(19): siRNA sense strand
gcaccaugaagaucaagau

SEQ ID NO: 139650 - RNA, 19 nt, Homo sapiens
  misc_RNA (1)...(19): siRNA sense strand
aggaaggaccucuaugcua

SEQ ID NO: 139651 - RNA, 19 nt, Homo sapiens
  misc_RNA (1)...(19): siRNA sense strand
gcucuggacuuugaaaaug

SEQ ID NO: 139652 - RNA, 19 nt, Homo sapiens
  misc_RNA (1)...(19): siRNA sense strand
aaggagaaacuguguuaug

SEQ ID NO: 139653 - RNA, 19 nt, Homo sapiens
  misc_RNA (1)...(19): siRNA sense strand
uacaaugagcuucguguug

SEQ ID NO: 139654 - RNA, 19 nt, Homo sapiens
  misc_RNA (1)...(19): siRNA sense strand
caugaagugugauauugac

SEQ ID NO: 139655 - RNA, 19 nt, Homo sapiens
  misc_RNA (1)...(19): siRNA sense strand
ggagaaaaugacucaaauu

SEQ ID NO: 139656 - RNA, 19 nt, Homo sapiens
  misc_RNA (1)...(19): siRNA sense strand
gaucagcaaacaggaauac

SEQ ID NO: 139657 - RNA, 19 nt, Homo sapiens
  misc_RNA (1)...(19): siRNA sense strand
caucaaggagaaacugugu

SEQ ID NO: 139658 - RNA, 19 nt, Homo sapiens
  misc_RNA (1)...(19): siRNA sense strand
ccauguauguggcuaucca

SEQ ID NO: 139659 - RNA, 19 nt, Homo sapiens
  misc_RNA (1)...(19): siRNA sense strand
uggcaccacucuuucuaca

SEQ ID NO: 139660 - RNA, 19 nt, Homo sapiens
  misc_RNA (1)...(19): siRNA sense strand
ggaucagcaaacaggaaua

SEQ ID NO: 139661 - RNA, 19 nt, Homo sapiens
  misc_RNA (1)...(19): siRNA sense strand
ccucuaugcuaacaauguc

SEQ ID NO: 139662 - RNA, 19 nt, Homo sapiens
  misc_RNA (1)...(19): siRNA sense strand
uacaacagcaucaugaagu

SEQ ID NO: 139663 - RNA, 19 nt, Homo sapiens
  misc_RNA (1)...(19): siRNA sense strand
auguagcucuggacuuuga

SEQ ID NO: 139664 - RNA, 19 nt, Homo sapiens
  misc_RNA (1)...(19): siRNA sense strand
ucacugacuaccucaugaa

SEQ ID NO: 139665 - RNA, 19 nt, Homo sapiens
  misc_RNA (1)...(19): siRNA sense strand
aggcggugcugucucucua

SEQ ID NO: 139666 - RNA, 19 nt, Homo sapiens
  misc_RNA (1)...(19): siRNA sense strand
acagcaucaugaaguguga

SEQ ID NO: 139667 - RNA, 19 nt, Homo sapiens
  misc_RNA (1)...(19): siRNA sense strand
ugaucaccaucggaaauga

SEQ ID NO: 139668 - RNA, 19 nt, Homo sapiens
  misc_RNA (1)...(19): siRNA sense strand
caucaugcgucuggaucug

SEQ ID NO: 139669 - RNA, 19 nt, Homo sapiens
  misc_RNA (1)...(19): siRNA sense strand
cugcugagcgugagauugu

SEQ ID NO: 139670 - RNA, 19 nt, Homo sapiens
  misc_RNA (1)...(19): siRNA sense strand
cguuuccgcugcccagaga

SEQ ID NO: 139671 - RNA, 19 nt, Homo sapiens
  misc_RNA (1)...(19): siRNA sense strand
gacccugaaguacccgaua

SEQ ID NO: 139672 - RNA, 19 nt, Homo sapiens
  misc_RNA (1)...(19): siRNA sense strand
ugcuaacaauguccuauca

SEQ ID NO: 139673 - RNA, 19 nt, Homo sapiens
  misc_RNA (1)...(19): siRNA sense strand
uccgggacaucaaggagaa

SEQ ID NO: 139674 - RNA, 19 nt, Homo sapiens
  misc_RNA (1)...(19): siRNA sense strand
ucagcaaacaggaauacga

SEQ ID NO: 139675 - RNA, 19 nt, Homo sapiens
  misc_RNA (1)...(19): siRNA sense strand
agauguggaucagcaaaca

SEQ ID NO: 139676 - RNA, 19 nt, Homo sapiens
  misc_RNA (1)...(19): siRNA sense strand
gcuccauccuggccucucu

SEQ ID NO: 139677 - RNA, 19 nt, Homo sapiens
  misc_RNA (1)...(19): siRNA sense strand
aacauggcaucaucaccaa

SEQ ID NO: 139678 - RNA, 19 nt, Homo sapiens
  misc_RNA (1)...(19): siRNA sense strand
agaucuggcaccacucuuu

SEQ ID NO: 139679 - RNA, 19 nt, Homo sapiens
  misc_RNA (1)...(19): siRNA sense strand
ggaauccugacccugaagu

SEQ ID NO: 139680 - RNA, 19 nt, Homo sapiens
  misc_RNA (1)...(19): siRNA sense strand
caacagcaucaugaagugu

SEQ ID NO: 139681 - RNA, 19 nt, Homo sapiens
  misc_RNA (1)...(19): siRNA sense strand
gcccagagacccuguucca

SEQ ID NO: 139682 - RNA, 19 nt, Homo sapiens
  misc_RNA (1)...(19): siRNA sense strand
gagaagaugacucagauua

SEQ ID NO: 139683 - RNA, 19 nt, Homo sapiens
  misc_RNA (1)...(19): siRNA sense strand
gaagaugacucagauuaug

SEQ ID NO: 139684 - RNA, 19 nt, Homo sapiens
  misc_RNA (1)...(19): siRNA sense strand
ugacucagauuauguuuga

SEQ ID NO: 139685 - RNA, 19 nt, Homo sapiens
  misc_RNA (1)...(19): siRNA sense strand
gagagaagaugacucagau

SEQ ID NO: 139686 - RNA, 19 nt, Homo sapiens
  misc_RNA (1)...(19): siRNA sense strand
ucaugaagauccucacuga

SEQ ID NO: 139687 - RNA, 19 nt, Homo sapiens
  misc_RNA (1)...(19): siRNA sense strand
gagcgaggcuacagcuuca

SEQ ID NO: 139688 - RNA, 19 nt, Homo sapiens
  misc_RNA (1)...(19): siRNA sense strand
gacaauggcuccggcaugu

SEQ ID NO: 139689 - RNA, 19 nt, Homo sapiens
  misc_RNA (1)...(19): siRNA sense strand
cagcagauguggauuagca

SEQ ID NO: 139690 - RNA, 19 nt, Homo sapiens
  misc_RNA (1)...(19): siRNA sense strand
ccacuggcauugucaugga

SEQ ID NO: 139691 - RNA, 19 nt, Homo sapiens
  misc_RNA (1)...(19): siRNA sense strand
gggacgacauggagaagau

SEQ ID NO: 139692 - RNA, 19 nt, Homo sapiens
  misc_RNA (1)...(19): siRNA sense strand
ccgacuaccucaugaagau

SEQ ID NO: 139693 - RNA, 19 nt, Homo sapiens
  misc_RNA (1)...(19): siRNA sense strand
ucaaggagaagcugugcua

SEQ ID NO: 139694 - RNA, 19 nt, Homo sapiens
  misc_RNA (1)...(19): siRNA sense strand
ucaacuccaucaugaagug

SEQ ID NO: 139695 - RNA, 19 nt, Homo sapiens
  misc_RNA (1)...(19): siRNA sense strand
gcgcaccacuggcauuguc

SEQ ID NO: 139696 - RNA, 19 nt, Homo sapiens
  misc_RNA (1)...(19): siRNA sense strand
ggaaaucgugcgcgacauc

SEQ ID NO: 139697 - RNA, 19 nt, Homo sapiens
  misc_RNA (1)...(19): siRNA sense strand
acagagagaagaugacuca

SEQ ID NO: 139698 - RNA, 19 nt, Homo sapiens
  misc_RNA (1)...(19): siRNA sense strand
ggauuagcaagcaggagua

SEQ ID NO: 139699 - RNA, 19 nt, Homo sapiens
  misc_RNA (1)...(19): siRNA sense strand
ggccaggucaucaccauug

SEQ ID NO: 139700 - RNA, 19 nt, Homo sapiens
  misc_RNA (1)...(19): siRNA sense strand
gcaccacaccuucuacaac

SEQ ID NO: 139701 - RNA, 19 nt, Homo sapiens
  misc_RNA (1)...(19): siRNA sense strand
ggacuucgagcaggagaug

SEQ ID NO: 139702 - RNA, 19 nt, Homo sapiens
  misc_RNA (1)...(19): siRNA sense strand
agaagaugacucagauuau

SEQ ID NO: 139703 - RNA, 19 nt, Homo sapiens
  misc_RNA (1)...(19): siRNA sense strand
ccaccgcaaaugcuucuaa

SEQ ID NO: 139704 - RNA, 19 nt, Homo sapiens
  misc_RNA (1)...(19): siRNA sense strand
gaaaucgugcgcgacauca

SEQ ID NO: 139705 - RNA, 19 nt, Homo sapiens
  misc_RNA (1)...(19): siRNA sense strand
gccaacagagagaagauga

SEQ ID NO: 139706 - RNA, 19 nt, Homo sapiens
  misc_RNA (1)...(19): siRNA sense strand
ccagcaccaugaagaucaa

SEQ ID NO: 139707 - RNA, 19 nt, Homo sapiens
  misc_RNA (1)...(19): siRNA sense strand
agagagaagaugacucaga

SEQ ID NO: 139708 - RNA, 19 nt, Homo sapiens
  misc_RNA (1)...(19): siRNA sense strand
gcaccaugaagaucaagau

SEQ ID NO: 139709 - RNA, 19 nt, Homo sapiens
  misc_RNA (1)...(19): siRNA sense strand
ugacguggacauccgcaaa

SEQ ID NO: 139710 - RNA, 19 nt, Homo sapiens
  misc_RNA (1)...(19): siRNA sense strand
gcgcccagcaccaugaaga

SEQ ID NO: 139711 - RNA, 19 nt, Homo sapiens
  misc_RNA (1)...(19): siRNA sense strand
gaagugugacguggacauc

SEQ ID NO: 139712 - RNA, 19 nt, Homo sapiens
  misc_RNA (1)...(19): siRNA sense strand
gcauccugacccugaagua

SEQ ID NO: 139713 - RNA, 19 nt, Homo sapiens
  misc_RNA (1)...(19): siRNA sense strand
caacagagagaagaugacu

SEQ ID NO: 139714 - RNA, 19 nt, Homo sapiens
  misc_RNA (1)...(19): siRNA sense strand
gaugacucagauuauguuu

SEQ ID NO: 139715 - RNA, 19 nt, Homo sapiens
  misc_RNA (1)...(19): siRNA sense strand
cuacgucgcccuggacuuc

SEQ ID NO: 139716 - RNA, 19 nt, Homo sapiens
  misc_RNA (1)...(19): siRNA sense strand
gcaugugcaaagcugguuu

SEQ ID NO: 139717 - RNA, 19 nt, Homo sapiens
  misc_RNA (1)...(19): siRNA sense strand
cccacacggugcccaucua

SEQ ID NO: 139718 - RNA, 19 nt, Homo sapiens
  misc_RNA (1)...(19): siRNA sense strand
aggagaagcugugcuacgu

SEQ ID NO: 139719 - RNA, 19 nt, Homo sapiens
  misc_RNA (1)...(19): siRNA sense strand
acacggugcccaucuacga

SEQ ID NO: 139720 - RNA, 19 nt, Homo sapiens
  misc_RNA (1)...(19): siRNA sense strand
ggacuuauaugccaacaau

SEQ ID NO: 139721 - RNA, 19 nt, Homo sapiens
  misc_RNA (1)...(19): siRNA sense strand
gauccuaacucucaaauac

SEQ ID NO: 139722 - RNA, 19 nt, Homo sapiens
  misc_RNA (1)...(19): siRNA sense strand
gagagaggcuauuccuuug

SEQ ID NO: 139723 - RNA, 19 nt, Homo sapiens
  misc_RNA (1)...(19): siRNA sense strand
ccaugaagaucaagauuau

SEQ ID NO: 139724 - RNA, 19 nt, Homo sapiens
  misc_RNA (1)...(19): siRNA sense strand
gaccacagcugagagagaa

SEQ ID NO: 139725 - RNA, 19 nt, Homo sapiens
  misc_RNA (1)...(19): siRNA sense strand
gggaugacauggagaagau

SEQ ID NO: 139726 - RNA, 19 nt, Homo sapiens
  misc_RNA (1)...(19): siRNA sense strand
ugacccagaucauguuuga

SEQ ID NO: 139727 - RNA, 19 nt, Homo sapiens
  misc_RNA (1)...(19): siRNA sense strand
ucaugaagauccucacaga

SEQ ID NO: 139728 - RNA, 19 nt, Homo sapiens
  misc_RNA (1)...(19): siRNA sense strand
gagaggcuauuccuuugug

SEQ ID NO: 139729 - RNA, 19 nt, Homo sapiens
  misc_RNA (1)...(19): siRNA sense strand
agagagaggcuauuccuuu

SEQ ID NO: 139730 - RNA, 19 nt, Homo sapiens
  misc_RNA (1)...(19): siRNA sense strand
ggaguccgcuggaauucau

SEQ ID NO: 139731 - RNA, 19 nt, Homo sapiens
  misc_RNA (1)...(19): siRNA sense strand
ggaaugggccagaaagaca

SEQ ID NO: 139732 - RNA, 19 nt, Homo sapiens
  misc_RNA (1)...(19): siRNA sense strand
gcaccacuccuucuacaau

SEQ ID NO: 139733 - RNA, 19 nt, Homo sapiens
  misc_RNA (1)...(19): siRNA sense strand
acaauuccaucaugaagug

SEQ ID NO: 139734 - RNA, 19 nt, Homo sapiens
  misc_RNA (1)...(19): siRNA sense strand
gaaauugugcgagacauca

SEQ ID NO: 139735 - RNA, 19 nt, Homo sapiens
  misc_RNA (1)...(19): siRNA sense strand
cgagggauccuaacucuca

SEQ ID NO: 139736 - RNA, 19 nt, Homo sapiens
  misc_RNA (1)...(19): siRNA sense strand
gagcggaaguacucagucu

SEQ ID NO: 139737 - RNA, 19 nt, Homo sapiens
  misc_RNA (1)...(19): siRNA sense strand
cggacuaccucaugaagau

SEQ ID NO: 139738 - RNA, 19 nt, Homo sapiens
  misc_RNA (1)...(19): siRNA sense strand
caaugucccugccauguac

SEQ ID NO: 139739 - RNA, 19 nt, Homo sapiens
  misc_RNA (1)...(19): siRNA sense strand
aggagaagcugugcuaugu

SEQ ID NO: 139740 - RNA, 19 nt, Homo sapiens
  misc_RNA (1)...(19): siRNA sense strand
ucaaggagaagcugugcua

SEQ ID NO: 139741 - RNA, 19 nt, Homo sapiens
  misc_RNA (1)...(19): siRNA sense strand
ccauguacgucgccauuca

SEQ ID NO: 139742 - RNA, 19 nt, Homo sapiens
  misc_RNA (1)...(19): siRNA sense strand
gagacaaccuacaauucca

SEQ ID NO: 139743 - RNA, 19 nt, Homo sapiens
  misc_RNA (1)...(19): siRNA sense strand
gaauucaugagacaaccua

SEQ ID NO: 139744 - RNA, 19 nt, Homo sapiens
  misc_RNA (1)...(19): siRNA sense strand
gcugugcucucccucuaug

SEQ ID NO: 139745 - RNA, 19 nt, Homo sapiens
  misc_RNA (1)...(19): siRNA sense strand
gaagauccucacagagaga

SEQ ID NO: 139746 - RNA, 19 nt, Homo sapiens
  misc_RNA (1)...(19): siRNA sense strand
gcuauguggcccuggauuu

SEQ ID NO: 139747 - RNA, 19 nt, Homo sapiens
  misc_RNA (1)...(19): siRNA sense strand
gcaagccugaguaugauga

SEQ ID NO: 139748 - RNA, 19 nt, Homo sapiens
  misc_RNA (1)...(19): siRNA sense strand
caugagacaaccuacaauu

SEQ ID NO: 139749 - RNA, 19 nt, Homo sapiens
  misc_RNA (1)...(19): siRNA sense strand
cagcaagccugaguaugau

SEQ ID NO: 139750 - RNA, 19 nt, Homo sapiens
  misc_RNA (1)...(19): siRNA sense strand
ucaaugucccugccaugua

SEQ ID NO: 139751 - RNA, 19 nt, Homo sapiens
  misc_RNA (1)...(19): siRNA sense strand
caucaugaagugugacauu

SEQ ID NO: 139752 - RNA, 19 nt, Homo sapiens
  misc_RNA (1)...(19): siRNA sense strand
ccagaaagacagcuaugug

SEQ ID NO: 139753 - RNA, 19 nt, Homo sapiens
  misc_RNA (1)...(19): siRNA sense strand
cuuccagccuuccuuuauu

SEQ ID NO: 139754 - RNA, 19 nt, Homo sapiens
  misc_RNA (1)...(19): siRNA sense strand
aagcugugcucucccucua

SEQ ID NO: 139755 - RNA, 19 nt, Homo sapiens
  misc_RNA (1)...(19): siRNA sense strand
gaagugugacauugacauc

SEQ ID NO: 139756 - RNA, 19 nt, Homo sapiens
  misc_RNA (1)...(19): siRNA sense strand
gcucuauccuggccucucu

SEQ ID NO: 139757 - RNA, 19 nt, Homo sapiens
  misc_RNA (1)...(19): siRNA sense strand
caccacuccuucuacaaug

SEQ ID NO: 139758 - RNA, 19 nt, Homo sapiens
  misc_RNA (1)...(19): siRNA sense strand
ggaaguacucagucuggau

SEQ ID NO: 139759 - RNA, 19 nt, Homo sapiens
  misc_RNA (1)...(19): siRNA sense strand
cauggaguccgcuggaauu

SEQ ID NO: 139760 - RNA, 19 nt, Homo sapiens
  misc_RNA (1)...(19): siRNA sense strand
ugcgagacaucaaggagaa

SEQ ID NO: 139761 - RNA, 19 nt, Homo sapiens
  misc_RNA (1)...(19): siRNA sense strand
ucacagagagaggcuauuc

SEQ ID NO: 139762 - RNA, 19 nt, Homo sapiens
  misc_RNA (1)...(19): siRNA sense strand
ccagcaccaugaagaucaa

SEQ ID NO: 139763 - RNA, 19 nt, Homo sapiens
  misc_RNA (1)...(19): siRNA sense strand
ggauccuaacucucaaaua

SEQ ID NO: 139764 - RNA, 19 nt, Homo sapiens
  misc_RNA (1)...(19): siRNA sense strand
accaugaagaucaagauua

SEQ ID NO: 139765 - RNA, 19 nt, Homo sapiens
  misc_RNA (1)...(19): siRNA sense strand
acccagaucauguuugaaa

SEQ ID NO: 139766 - RNA, 19 nt, Homo sapiens
  misc_RNA (1)...(19): siRNA sense strand
gcaccaugaagaucaagau

SEQ ID NO: 139767 - RNA, 19 nt, Homo sapiens
  misc_RNA (1)...(19): siRNA sense strand
aaccuacaauuccaucaug

SEQ ID NO: 139768 - RNA, 19 nt, Homo sapiens
  misc_RNA (1)...(19): siRNA sense strand
gagggauccuaacucucaa

SEQ ID NO: 139769 - RNA, 19 nt, Homo sapiens
  misc_RNA (1)...(19): siRNA sense strand
gagaaauugugcgagacau

SEQ ID NO: 139770 - RNA, 19 nt, Homo sapiens
  misc_RNA (1)...(19): siRNA sense strand
guacgucgccauucaagcu

SEQ ID NO: 139771 - RNA, 19 nt, Homo sapiens
  misc_RNA (1)...(19): siRNA sense strand
augaagauccucacagaga

SEQ ID NO: 139772 - RNA, 19 nt, Homo sapiens
  misc_RNA (1)...(19): siRNA sense strand
gcauggaguccgcuggaau

SEQ ID NO: 139773 - RNA, 19 nt, Homo sapiens
  misc_RNA (1)...(19): siRNA sense strand
gggcagguuaucaccauug

SEQ ID NO: 139774 - RNA, 19 nt, Homo sapiens
  misc_RNA (1)...(19): siRNA sense strand
cagcugagagagaaauugu

SEQ ID NO: 139775 - RNA, 19 nt, Homo sapiens
  misc_RNA (1)...(19): siRNA sense strand
ucaugaagugugacauuga

SEQ ID NO: 139776 - RNA, 19 nt, Homo sapiens
  misc_RNA (1)...(19): siRNA sense strand
cacagaggcuccccuaaau

SEQ ID NO: 139777 - RNA, 19 nt, Homo sapiens
  misc_RNA (1)...(19): siRNA sense strand
gaagaucaagauuauugcu

SEQ ID NO: 139778 - RNA, 19 nt, Homo sapiens
  misc_RNA (1)...(19): siRNA sense strand
acauugacauccguaagga

SEQ ID NO: 139779 - RNA, 19 nt, Homo sapiens
  misc_RNA (1)...(19): siRNA sense strand
caugaagugugacauugac

SEQ ID NO: 139780 - RNA, 19 nt, Homo sapiens
  misc_RNA (1)...(19): siRNA sense strand
gagcaagcgagggauccua

SEQ ID NO: 139781 - RNA, 19 nt, Homo sapiens
  misc_RNA (1)...(19): siRNA sense strand
uuccagccuuccuuuauug

SEQ ID NO: 139782 - RNA, 19 nt, Homo sapiens
  misc_RNA (1)...(19): siRNA sense strand
ggagaagcugugcuaugug

SEQ ID NO: 139783 - RNA, 19 nt, Homo sapiens
  misc_RNA (1)...(19): siRNA sense strand
ucacagaggcuccccuaaa

SEQ ID NO: 139784 - RNA, 19 nt, Homo sapiens
  misc_RNA (1)...(19): siRNA sense strand
cugacaggaugcagaagga

SEQ ID NO: 139785 - RNA, 19 nt, Homo sapiens
  misc_RNA (1)...(19): siRNA sense strand
gacauugacauccguaagg

SEQ ID NO: 139786 - RNA, 19 nt, Homo sapiens
  misc_RNA (1)...(19): siRNA sense strand
caaccuacaauuccaucau

SEQ ID NO: 139787 - RNA, 19 nt, Homo sapiens
  misc_RNA (1)...(19): siRNA sense strand
ccagaugggcagguuauca

SEQ ID NO: 139788 - RNA, 19 nt, Homo sapiens
  misc_RNA (1)...(19): siRNA sense strand
gcgcucgugugugacaaug

SEQ ID NO: 139789 - RNA, 19 nt, Homo sapiens
  misc_RNA (1)...(19): siRNA sense strand
caucaugcgccuggacuug

SEQ ID NO: 139790 - RNA, 19 nt, Homo sapiens
  misc_RNA (1)...(19): siRNA sense strand
caccauguacccuggcauu

SEQ ID NO: 139791 - RNA, 19 nt, Homo sapiens
  misc_RNA (1)...(19): siRNA sense strand
ucacggacuaccucaugaa

SEQ ID NO: 139792 - RNA, 19 nt, Homo sapiens
  misc_RNA (1)...(19): siRNA sense strand
uggcaccacuccuucuaca

SEQ ID NO: 139793 - RNA, 19 nt, Homo sapiens
  misc_RNA (1)...(19): siRNA sense strand
gcguguagcaccugaagag

SEQ ID NO: 139794 - RNA, 19 nt, Homo sapiens
  misc_RNA (1)...(19): siRNA sense strand
aggcagggcccuccauugu

SEQ ID NO: 139795 - RNA, 19 nt, Homo sapiens
  misc_RNA (1)...(19): siRNA sense strand
ggcauggaguccgcuggaa

SEQ ID NO: 139796 - RNA, 19 nt, Homo sapiens
  misc_RNA (1)...(19): siRNA sense strand
ggugggaaugggccagaaa

SEQ ID NO: 139797 - RNA, 19 nt, Homo sapiens
  misc_RNA (1)...(19): siRNA sense strand
cauguacccuggcauugcu

SEQ ID NO: 139798 - RNA, 19 nt, Homo sapiens
  misc_RNA (1)...(19): siRNA sense strand
ccucacggacuaccucaug

SEQ ID NO: 139799 - RNA, 19 nt, Homo sapiens
  misc_RNA (1)...(19): siRNA sense strand
gauggcgucacccacaaug

SEQ ID NO: 139800 - RNA, 19 nt, Homo sapiens
  misc_RNA (1)...(19): siRNA sense strand
caaagaaucuagucuauga

SEQ ID NO: 139801 - RNA, 19 nt, Homo sapiens
  misc_RNA (1)...(19): siRNA sense strand
guacauggcuccagaggua

SEQ ID NO: 139802 - RNA, 19 nt, Homo sapiens
  misc_RNA (1)...(19): siRNA sense strand
gaauacauguugccauuug

SEQ ID NO: 139803 - RNA, 19 nt, Homo sapiens
  misc_RNA (1)...(19): siRNA sense strand
gcagaaacaugcuggaaug

SEQ ID NO: 139804 - RNA, 19 nt, Homo sapiens
  misc_RNA (1)...(19): siRNA sense strand
ccacaaaccugccauaucu

SEQ ID NO: 139805 - RNA, 19 nt, Homo sapiens
  misc_RNA (1)...(19): siRNA sense strand
gaauauuucugguuccauu

SEQ ID NO: 139806 - RNA, 19 nt, Homo sapiens
  misc_RNA (1)...(19): siRNA sense strand
ggcaauauguguaaugaaa

SEQ ID NO: 139807 - RNA, 19 nt, Homo sapiens
  misc_RNA (1)...(19): siRNA sense strand
ugacaggacugauugugua

SEQ ID NO: 139808 - RNA, 19 nt, Homo sapiens
  misc_RNA (1)...(19): siRNA sense strand
agacagcccugaaguauau

SEQ ID NO: 139809 - RNA, 19 nt, Homo sapiens
  misc_RNA (1)...(19): siRNA sense strand
ggugacaaauguugacuuu

SEQ ID NO: 139810 - RNA, 19 nt, Homo sapiens
  misc_RNA (1)...(19): siRNA sense strand
gaacuggcuucucgcugua

SEQ ID NO: 139811 - RNA, 19 nt, Homo sapiens
  misc_RNA (1)...(19): siRNA sense strand
gauaucaacugcuaugaca

SEQ ID NO: 139812 - RNA, 19 nt, Homo sapiens
  misc_RNA (1)...(19): siRNA sense strand
ugaaaccacugcaguuauu

SEQ ID NO: 139813 - RNA, 19 nt, Homo sapiens
  misc_RNA (1)...(19): siRNA sense strand
guuaucagcuggaugugua

SEQ ID NO: 139814 - RNA, 19 nt, Homo sapiens
  misc_RNA (1)...(19): siRNA sense strand
gaauggcaaugcucuguga

SEQ ID NO: 139815 - RNA, 19 nt, Homo sapiens
  misc_RNA (1)...(19): siRNA sense strand
caaauccaguuacaccuaa

SEQ ID NO: 139816 - RNA, 19 nt, Homo sapiens
  misc_RNA (1)...(19): siRNA sense strand
ggauauaccuggccuaaaa

SEQ ID NO: 139817 - RNA, 19 nt, Homo sapiens
  misc_RNA (1)...(19): siRNA sense strand
caccuaagccacccuauua

SEQ ID NO: 139818 - RNA, 19 nt, Homo sapiens
  misc_RNA (1)...(19): siRNA sense strand
gaucacagcauuucaugaa

SEQ ID NO: 139819 - RNA, 19 nt, Homo sapiens
  misc_RNA (1)...(19): siRNA sense strand
ucacacagcccacuucaaa

SEQ ID NO: 139820 - RNA, 19 nt, Homo sapiens
  misc_RNA (1)...(19): siRNA sense strand
gacaaacagucauggcaaa

SEQ ID NO: 139821 - RNA, 19 nt, Homo sapiens
  misc_RNA (1)...(19): siRNA sense strand
cuagaggauuggcauauuu

SEQ ID NO: 139822 - RNA, 19 nt, Homo sapiens
  misc_RNA (1)...(19): siRNA sense strand
guuguuggcuggaugauau

SEQ ID NO: 139823 - RNA, 19 nt, Homo sapiens
  misc_RNA (1)...(19): siRNA sense strand
gaagcaugagaacauauua

SEQ ID NO: 139824 - RNA, 19 nt, Homo sapiens
  misc_RNA (1)...(19): siRNA sense strand
gaaugaagcaugagaacau

SEQ ID NO: 139825 - RNA, 19 nt, Homo sapiens
  misc_RNA (1)...(19): siRNA sense strand
gguauuagagggugcuaua

SEQ ID NO: 139826 - RNA, 19 nt, Homo sapiens
  misc_RNA (1)...(19): siRNA sense strand
ggaaguuguugugcauaaa

SEQ ID NO: 139827 - RNA, 19 nt, Homo sapiens
  misc_RNA (1)...(19): siRNA sense strand
gauugucauuugugcauuu

SEQ ID NO: 139828 - RNA, 19 nt, Homo sapiens
  misc_RNA (1)...(19): siRNA sense strand
gcaggaaguuguugugcau

SEQ ID NO: 139829 - RNA, 19 nt, Homo sapiens
  misc_RNA (1)...(19): siRNA sense strand
gcuagaggauuggcauauu

SEQ ID NO: 139830 - RNA, 19 nt, Homo sapiens
  misc_RNA (1)...(19): siRNA sense strand
cccaguugcuuaacgaaua

SEQ ID NO: 139831 - RNA, 19 nt, Homo sapiens
  misc_RNA (1)...(19): siRNA sense strand
gaaaccacugcaguuauua

SEQ ID NO: 139832 - RNA, 19 nt, Homo sapiens
  misc_RNA (1)...(19): siRNA sense strand
aauacgaagucuacaguuu

SEQ ID NO: 139833 - RNA, 19 nt, Homo sapiens
  misc_RNA (1)...(19): siRNA sense strand
ugaaagaauuacccagaug

SEQ ID NO: 139834 - RNA, 19 nt, Homo sapiens
  misc_RNA (1)...(19): siRNA sense strand
augcagagacuaacaaaua

SEQ ID NO: 139835 - RNA, 19 nt, Homo sapiens
  misc_RNA (1)...(19): siRNA sense strand
gaaauuggccagcauccau

SEQ ID NO: 139836 - RNA, 19 nt, Homo sapiens
  misc_RNA (1)...(19): siRNA sense strand
gcaaugcucugugaaacca

SEQ ID NO: 139837 - RNA, 19 nt, Homo sapiens
  misc_RNA (1)...(19): siRNA sense strand
gcaguuauuagaagugaaa

SEQ ID NO: 139838 - RNA, 19 nt, Homo sapiens
  misc_RNA (1)...(19): siRNA sense strand
gggagcugcugcaaaguug

SEQ ID NO: 139839 - RNA, 19 nt, Homo sapiens
  misc_RNA (1)...(19): siRNA sense strand
uggaugauaucaacugcua

SEQ ID NO: 139840 - RNA, 19 nt, Homo sapiens
  misc_RNA (1)...(19): siRNA sense strand
gaaauagugaaacaagguu

SEQ ID NO: 139841 - RNA, 19 nt, Homo sapiens
  misc_RNA (1)...(19): siRNA sense strand
ccacugcaguuauuagaag

SEQ ID NO: 139842 - RNA, 19 nt, Homo sapiens
  misc_RNA (1)...(19): siRNA sense strand
cagaggacauuguaacagu

SEQ ID NO: 139843 - RNA, 19 nt, Homo sapiens
  misc_RNA (1)...(19): siRNA sense strand
cgacgcagaagccagguua

SEQ ID NO: 139844 - RNA, 19 nt, Homo sapiens
  misc_RNA (1)...(19): siRNA sense strand
agauggaccuguagaugaa

SEQ ID NO: 139845 - RNA, 19 nt, Homo sapiens
  misc_RNA (1)...(19): siRNA sense strand
ggauuggcauauuuacaug

SEQ ID NO: 139846 - RNA, 19 nt, Homo sapiens
  misc_RNA (1)...(19): siRNA sense strand
cagacuuucuuaaggcuaa

SEQ ID NO: 139847 - RNA, 19 nt, Homo sapiens
  misc_RNA (1)...(19): siRNA sense strand
guugaaaccacugcaguua

SEQ ID NO: 139848 - RNA, 19 nt, Homo sapiens
  misc_RNA (1)...(19): siRNA sense strand
uaacaguggucacaauggu

SEQ ID NO: 139849 - RNA, 19 nt, Homo sapiens
  misc_RNA (1)...(19): siRNA sense strand
aaagacagaaccaaucaaa

SEQ ID NO: 139850 - RNA, 19 nt, Homo sapiens
  misc_RNA (1)...(19): siRNA sense strand
gcagagacuaacaaauauu

SEQ ID NO: 139851 - RNA, 19 nt, Homo sapiens
  misc_RNA (1)...(19): siRNA sense strand
aaccauggcuagaggauug

SEQ ID NO: 139852 - RNA, 19 nt, Homo sapiens
  misc_RNA (1)...(19): siRNA sense strand
ggccuacccuccuguacuu

SEQ ID NO: 139853 - RNA, 19 nt, Homo sapiens
  misc_RNA (1)...(19): siRNA sense strand
ugacaaauguugacuuucc

SEQ ID NO: 139854 - RNA, 19 nt, Homo sapiens
  misc_RNA (1)...(19): siRNA sense strand
aaacgaggcaccaguguug

SEQ ID NO: 139855 - RNA, 19 nt, Homo sapiens
  misc_RNA (1)...(19): siRNA sense strand
uuugcuaccuggaagaaua

SEQ ID NO: 139856 - RNA, 19 nt, Homo sapiens
  misc_RNA (1)...(19): siRNA sense strand
gugaaagaauuacccagau

SEQ ID NO: 139857 - RNA, 19 nt, Homo sapiens
  misc_RNA (1)...(19): siRNA sense strand
cagauggaccuguagauga

SEQ ID NO: 139858 - RNA, 19 nt, Homo sapiens
  misc_RNA (1)...(19): siRNA sense strand
gaggauauaccuggccuaa

SEQ ID NO: 139859 - RNA, 19 nt, Homo sapiens
  misc_RNA (1)...(19): siRNA sense strand
cuaauguggucucuuggaa

SEQ ID NO: 139860 - RNA, 19 nt, Homo sapiens
  misc_RNA (1)...(19): siRNA sense strand
ccauugaaauagugaaaca

SEQ ID NO: 139861 - RNA, 19 nt, Homo sapiens
  misc_RNA (1)...(19): siRNA sense strand
cccaaagaaucuagucuau

SEQ ID NO: 139862 - RNA, 19 nt, Homo sapiens
  misc_RNA (1)...(19): siRNA sense strand
aaagaggccuguuuuaaga

SEQ ID NO: 139863 - RNA, 19 nt, Homo sapiens
  misc_RNA (1)...(19): siRNA sense strand
ccuaaaagauggccacaaa

SEQ ID NO: 139864 - RNA, 19 nt, Homo sapiens
  misc_RNA (1)...(19): siRNA sense strand
uagaggauuggcauauuua

SEQ ID NO: 139865 - RNA, 19 nt, Homo sapiens
  misc_RNA (1)...(19): siRNA sense strand
aaugaagcaugagaacaua

SEQ ID NO: 139866 - RNA, 19 nt, Homo sapiens
  misc_RNA (1)...(19): siRNA sense strand
aaagacagcccugaaguau

SEQ ID NO: 139867 - RNA, 19 nt, Homo sapiens
  misc_RNA (1)...(19): siRNA sense strand
cagcauccaucucuugaag

SEQ ID NO: 139868 - RNA, 19 nt, Homo sapiens
  misc_RNA (1)...(19): siRNA sense strand
ggaggaaauuggccagcau

SEQ ID NO: 139869 - RNA, 19 nt, Homo sapiens
  misc_RNA (1)...(19): siRNA sense strand
gcagauggaccuguagaug

SEQ ID NO: 139870 - RNA, 19 nt, Homo sapiens
  misc_RNA (1)...(19): siRNA sense strand
ccaguugcuuaacgaauau

SEQ ID NO: 139871 - RNA, 19 nt, Homo sapiens
  misc_RNA (1)...(19): siRNA sense strand
gaugauaucaacugcuaug

SEQ ID NO: 139872 - RNA, 19 nt, Homo sapiens
  misc_RNA (1)...(19): siRNA sense strand
gaagacaugcaggaaguug

SEQ ID NO: 139873 - RNA, 19 nt, Homo sapiens
  misc_RNA (1)...(19): siRNA sense strand
caggacugauuguguagaa

SEQ ID NO: 139874 - RNA, 19 nt, Homo sapiens
  misc_RNA (1)...(19): siRNA sense strand
gcguuugccgucuuucuua

SEQ ID NO: 139875 - RNA, 19 nt, Homo sapiens
  misc_RNA (1)...(19): siRNA sense strand
gcuaugacaggacugauug

SEQ ID NO: 139876 - RNA, 19 nt, Homo sapiens
  misc_RNA (1)...(19): siRNA sense strand
aggcuaauguggucucuug

SEQ ID NO: 139877 - RNA, 19 nt, Homo sapiens
  misc_RNA (1)...(19): siRNA sense strand
uuucuuaucuccuguucuu

SEQ ID NO: 139878 - RNA, 19 nt, Homo sapiens
  misc_RNA (1)...(19): siRNA sense strand
acaacauccugcucuauuc

SEQ ID NO: 139879 - RNA, 19 nt, Homo sapiens
  misc_RNA (1)...(19): siRNA sense strand
aggaaguuguugugcauaa

SEQ ID NO: 139880 - RNA, 19 nt, Homo sapiens
  misc_RNA (1)...(19): siRNA sense strand
augaauacauguugccauu

SEQ ID NO: 139881 - RNA, 19 nt, Homo sapiens
  misc_RNA (1)...(19): siRNA sense strand
ucaaauccaguuacaccua

SEQ ID NO: 139882 - RNA, 19 nt, Homo sapiens
  misc_RNA (1)...(19): siRNA sense strand
ugcagagacuaacaaauau

SEQ ID NO: 139883 - RNA, 19 nt, Homo sapiens
  misc_RNA (1)...(19): siRNA sense strand
aauguggucucuuggaaug

SEQ ID NO: 139884 - RNA, 19 nt, Homo sapiens
  misc_RNA (1)...(19): siRNA sense strand
gagauuauuggcagaaaca

SEQ ID NO: 139885 - RNA, 19 nt, Homo sapiens
  misc_RNA (1)...(19): siRNA sense strand
gaaagcaaggggaagauuu

SEQ ID NO: 139886 - RNA, 19 nt, Homo sapiens
  misc_RNA (1)...(19): siRNA sense strand
caugagaacauauuacagu

SEQ ID NO: 139887 - RNA, 19 nt, Homo sapiens
  misc_RNA (1)...(19): siRNA sense strand
gaauacgaagucuacaguu

SEQ ID NO: 139888 - RNA, 19 nt, Homo sapiens
  misc_RNA (1)...(19): siRNA sense strand
guguugauguggaucuuug

SEQ ID NO: 139889 - RNA, 19 nt, Homo sapiens
  misc_RNA (1)...(19): siRNA sense strand
caaccugacagcuugcauu

SEQ ID NO: 139890 - RNA, 19 nt, Homo sapiens
  misc_RNA (1)...(19): siRNA sense strand
gcagaaaccauggcuagag

SEQ ID NO: 139891 - RNA, 19 nt, Homo sapiens
  misc_RNA (1)...(19): siRNA sense strand
auauguggcugucaaaaua

SEQ ID NO: 139892 - RNA, 19 nt, Homo sapiens
  misc_RNA (1)...(19): siRNA sense strand
agacagaaccaaucaaacu

SEQ ID NO: 139893 - RNA, 19 nt, Homo sapiens
  misc_RNA (1)...(19): siRNA sense strand
agagggugcuauaaacuuc

SEQ ID NO: 139894 - RNA, 19 nt, Homo sapiens
  misc_RNA (1)...(19): siRNA sense strand
uauuagagggugcuauaaa

SEQ ID NO: 139895 - RNA, 19 nt, Homo sapiens
  misc_RNA (1)...(19): siRNA sense strand
gaaaaggguucacuaucag

SEQ ID NO: 139896 - RNA, 19 nt, Homo sapiens
  misc_RNA (1)...(19): siRNA sense strand
ugaagcaugagaacauauu

SEQ ID NO: 139897 - RNA, 19 nt, Homo sapiens
  misc_RNA (1)...(19): siRNA sense strand
gccaugggauuaguccuau

SEQ ID NO: 139898 - RNA, 19 nt, Homo sapiens
  misc_RNA (1)...(19): siRNA sense strand
gacuuuggguuggccuuaa

SEQ ID NO: 139899 - RNA, 19 nt, Homo sapiens
  misc_RNA (1)...(19): siRNA sense strand
acagggacaucaaaaguaa

SEQ ID NO: 139900 - RNA, 19 nt, Homo sapiens
  misc_RNA (1)...(19): siRNA sense strand
gaacaagauucgagaacaa

SEQ ID NO: 139901 - RNA, 19 nt, Homo sapiens
  misc_RNA (1)...(19): siRNA sense strand
gaacaaaaccgacaagaug

SEQ ID NO: 139902 - RNA, 19 nt, Homo sapiens
  misc_RNA (1)...(19): siRNA sense strand
ggaacaagauucgagaaca

SEQ ID NO: 139903 - RNA, 19 nt, Homo sapiens
  misc_RNA (1)...(19): siRNA sense strand
gagaugaggaacaagauuc

SEQ ID NO: 139904 - RNA, 19 nt, Homo sapiens
  misc_RNA (1)...(19): siRNA sense strand
ggagaugaggaacaagauu

SEQ ID NO: 139905 - RNA, 19 nt, Homo sapiens
  misc_RNA (1)...(19): siRNA sense strand
aagaagcgcgucaccauga

SEQ ID NO: 139906 - RNA, 19 nt, Homo sapiens
  misc_RNA (1)...(19): siRNA sense strand
gagcgucauugccgagaag

SEQ ID NO: 139907 - RNA, 19 nt, Homo sapiens
  misc_RNA (1)...(19): siRNA sense strand
ccgacaagaugugaaguca

SEQ ID NO: 139908 - RNA, 19 nt, Homo sapiens
  misc_RNA (1)...(19): siRNA sense strand
gaggaacaagauucgagaa

SEQ ID NO: 139909 - RNA, 19 nt, Homo sapiens
  misc_RNA (1)...(19): siRNA sense strand
ucaaccugauggagcagaa

SEQ ID NO: 139910 - RNA, 19 nt, Homo sapiens
  misc_RNA (1)...(19): siRNA sense strand
agaagaagcgcgucaccau

SEQ ID NO: 139911 - RNA, 19 nt, Homo sapiens
  misc_RNA (1)...(19): siRNA sense strand
guacuggagaugaggaaca

SEQ ID NO: 139912 - RNA, 19 nt, Homo sapiens
  misc_RNA (1)...(19): siRNA sense strand
cgagcgucauugccgagaa

SEQ ID NO: 139913 - RNA, 19 nt, Homo sapiens
  misc_RNA (1)...(19): siRNA sense strand
gaacaagauucgagaacaa

SEQ ID NO: 139914 - RNA, 19 nt, Homo sapiens
  misc_RNA (1)...(19): siRNA sense strand
gaacaaaaccgacaagaug

SEQ ID NO: 139915 - RNA, 19 nt, Homo sapiens
  misc_RNA (1)...(19): siRNA sense strand
ggaacaagauucgagaaca

SEQ ID NO: 139916 - RNA, 19 nt, Homo sapiens
  misc_RNA (1)...(19): siRNA sense strand
gagaugaggaacaagauuc

SEQ ID NO: 139917 - RNA, 19 nt, Homo sapiens
  misc_RNA (1)...(19): siRNA sense strand
ggagaugaggaacaagauu

SEQ ID NO: 139918 - RNA, 19 nt, Homo sapiens
  misc_RNA (1)...(19): siRNA sense strand
aagaagcgcgucaccauga

SEQ ID NO: 139919 - RNA, 19 nt, Homo sapiens
  misc_RNA (1)...(19): siRNA sense strand
gagcgucauugccgagaag

SEQ ID NO: 139920 - RNA, 19 nt, Homo sapiens
  misc_RNA (1)...(19): siRNA sense strand
ccgacaagaugugaaguca

SEQ ID NO: 139921 - RNA, 19 nt, Homo sapiens
  misc_RNA (1)...(19): siRNA sense strand
gaggaacaagauucgagaa

SEQ ID NO: 139922 - RNA, 19 nt, Homo sapiens
  misc_RNA (1)...(19): siRNA sense strand
ucaaccugauggagcagaa

SEQ ID NO: 139923 - RNA, 19 nt, Homo sapiens
  misc_RNA (1)...(19): siRNA sense strand
agaagaagcgcgucaccau

SEQ ID NO: 139924 - RNA, 19 nt, Homo sapiens
  misc_RNA (1)...(19): siRNA sense strand
guacuggagaugaggaaca

SEQ ID NO: 139925 - RNA, 19 nt, Homo sapiens
  misc_RNA (1)...(19): siRNA sense strand
cgagcgucauugccgagaa

SEQ ID NO: 139926 - RNA, 19 nt, Homo sapiens
  misc_RNA (1)...(19): siRNA sense strand
gaacaagauucgagaacaa

SEQ ID NO: 139927 - RNA, 19 nt, Homo sapiens
  misc_RNA (1)...(19): siRNA sense strand
gaacaaaaccgacaagaug

SEQ ID NO: 139928 - RNA, 19 nt, Homo sapiens
  misc_RNA (1)...(19): siRNA sense strand
ggaacaagauucgagaaca

SEQ ID NO: 139929 - RNA, 19 nt, Homo sapiens
  misc_RNA (1)...(19): siRNA sense strand
gagaugaggaacaagauuc

SEQ ID NO: 139930 - RNA, 19 nt, Homo sapiens
  misc_RNA (1)...(19): siRNA sense strand
ggagaugaggaacaagauu

SEQ ID NO: 139931 - RNA, 19 nt, Homo sapiens
  misc_RNA (1)...(19): siRNA sense strand
aagaagcgcgucaccauga

SEQ ID NO: 139932 - RNA, 19 nt, Homo sapiens
  misc_RNA (1)...(19): siRNA sense strand
gagcgucauugccgagaag

SEQ ID NO: 139933 - RNA, 19 nt, Homo sapiens
  misc_RNA (1)...(19): siRNA sense strand
ccgacaagaugugaaguca

SEQ ID NO: 139934 - RNA, 19 nt, Homo sapiens
  misc_RNA (1)...(19): siRNA sense strand
gaggaacaagauucgagaa

SEQ ID NO: 139935 - RNA, 19 nt, Homo sapiens
  misc_RNA (1)...(19): siRNA sense strand
ucaaccugauggagcagaa

SEQ ID NO: 139936 - RNA, 19 nt, Homo sapiens
  misc_RNA (1)...(19): siRNA sense strand
agaagaagcgcgucaccau

SEQ ID NO: 139937 - RNA, 19 nt, Homo sapiens
  misc_RNA (1)...(19): siRNA sense strand
guacuggagaugaggaaca

SEQ ID NO: 139938 - RNA, 19 nt, Homo sapiens
  misc_RNA (1)...(19): siRNA sense strand
cgagcgucauugccgagaa

SEQ ID NO: 139939 - RNA, 19 nt, Homo sapiens
  misc_RNA (1)...(19): siRNA sense strand
gaacaagauucgagaacaa

SEQ ID NO: 139940 - RNA, 19 nt, Homo sapiens
  misc_RNA (1)...(19): siRNA sense strand
gaacaaaaccgacaagaug

SEQ ID NO: 139941 - RNA, 19 nt, Homo sapiens
  misc_RNA (1)...(19): siRNA sense strand
ggaacaagauucgagaaca

SEQ ID NO: 139942 - RNA, 19 nt, Homo sapiens
  misc_RNA (1)...(19): siRNA sense strand
gagaugaggaacaagauuc

SEQ ID NO: 139943 - RNA, 19 nt, Homo sapiens
  misc_RNA (1)...(19): siRNA sense strand
ggagaugaggaacaagauu

SEQ ID NO: 139944 - RNA, 19 nt, Homo sapiens
  misc_RNA (1)...(19): siRNA sense strand
aagaagcgcgucaccauga

SEQ ID NO: 139945 - RNA, 19 nt, Homo sapiens
  misc_RNA (1)...(19): siRNA sense strand
gagcgucauugccgagaag

SEQ ID NO: 139946 - RNA, 19 nt, Homo sapiens
  misc_RNA (1)...(19): siRNA sense strand
ccgacaagaugugaaguca

SEQ ID NO: 139947 - RNA, 19 nt, Homo sapiens
  misc_RNA (1)...(19): siRNA sense strand
gaggaacaagauucgagaa

SEQ ID NO: 139948 - RNA, 19 nt, Homo sapiens
  misc_RNA (1)...(19): siRNA sense strand
ucaaccugauggagcagaa

SEQ ID NO: 139949 - RNA, 19 nt, Homo sapiens
  misc_RNA (1)...(19): siRNA sense strand
agaagaagcgcgucaccau

SEQ ID NO: 139950 - RNA, 19 nt, Homo sapiens
  misc_RNA (1)...(19): siRNA sense strand
guacuggagaugaggaaca

SEQ ID NO: 139951 - RNA, 19 nt, Homo sapiens
  misc_RNA (1)...(19): siRNA sense strand
cgagcgucauugccgagaa

SEQ ID NO: 139952 - RNA, 19 nt, Homo sapiens
  misc_RNA (1)...(19): siRNA sense strand
gaacaagauucgagaacaa

SEQ ID NO: 139953 - RNA, 19 nt, Homo sapiens
  misc_RNA (1)...(19): siRNA sense strand
gaacaaaaccgacaagaug

SEQ ID NO: 139954 - RNA, 19 nt, Homo sapiens
  misc_RNA (1)...(19): siRNA sense strand
ggaacaagauucgagaaca

SEQ ID NO: 139955 - RNA, 19 nt, Homo sapiens
  misc_RNA (1)...(19): siRNA sense strand
gagaugaggaacaagauuc

SEQ ID NO: 139956 - RNA, 19 nt, Homo sapiens
  misc_RNA (1)...(19): siRNA sense strand
ggagaugaggaacaagauu

SEQ ID NO: 139957 - RNA, 19 nt, Homo sapiens
  misc_RNA (1)...(19): siRNA sense strand
aagaagcgcgucaccauga

SEQ ID NO: 139958 - RNA, 19 nt, Homo sapiens
  misc_RNA (1)...(19): siRNA sense strand
gagcgucauugccgagaag

SEQ ID NO: 139959 - RNA, 19 nt, Homo sapiens
  misc_RNA (1)...(19): siRNA sense strand
ccgacaagaugugaaguca

SEQ ID NO: 139960 - RNA, 19 nt, Homo sapiens
  misc_RNA (1)...(19): siRNA sense strand
gaggaacaagauucgagaa

SEQ ID NO: 139961 - RNA, 19 nt, Homo sapiens
  misc_RNA (1)...(19): siRNA sense strand
ucaaccugauggagcagaa

SEQ ID NO: 139962 - RNA, 19 nt, Homo sapiens
  misc_RNA (1)...(19): siRNA sense strand
agaagaagcgcgucaccau

SEQ ID NO: 139963 - RNA, 19 nt, Homo sapiens
  misc_RNA (1)...(19): siRNA sense strand
guacuggagaugaggaaca

SEQ ID NO: 139964 - RNA, 19 nt, Homo sapiens
  misc_RNA (1)...(19): siRNA sense strand
cgagcgucauugccgagaa

SEQ ID NO: 139965 - RNA, 19 nt, Homo sapiens
  misc_RNA (1)...(19): siRNA sense strand
gaacaagauucgagaacaa

SEQ ID NO: 139966 - RNA, 19 nt, Homo sapiens
  misc_RNA (1)...(19): siRNA sense strand
gaacaaaaccgacaagaug

SEQ ID NO: 139967 - RNA, 19 nt, Homo sapiens
  misc_RNA (1)...(19): siRNA sense strand
ggaacaagauucgagaaca

SEQ ID NO: 139968 - RNA, 19 nt, Homo sapiens
  misc_RNA (1)...(19): siRNA sense strand
gagaugaggaacaagauuc

SEQ ID NO: 139969 - RNA, 19 nt, Homo sapiens
  misc_RNA (1)...(19): siRNA sense strand
ggagaugaggaacaagauu

SEQ ID NO: 139970 - RNA, 19 nt, Homo sapiens
  misc_RNA (1)...(19): siRNA sense strand
aagaagcgcgucaccauga

SEQ ID NO: 139971 - RNA, 19 nt, Homo sapiens
  misc_RNA (1)...(19): siRNA sense strand
gagcgucauugccgagaag

SEQ ID NO: 139972 - RNA, 19 nt, Homo sapiens
  misc_RNA (1)...(19): siRNA sense strand
ccgacaagaugugaaguca

SEQ ID NO: 139973 - RNA, 19 nt, Homo sapiens
  misc_RNA (1)...(19): siRNA sense strand
gaggaacaagauucgagaa

SEQ ID NO: 139974 - RNA, 19 nt, Homo sapiens
  misc_RNA (1)...(19): siRNA sense strand
ucaaccugauggagcagaa

SEQ ID NO: 139975 - RNA, 19 nt, Homo sapiens
  misc_RNA (1)...(19): siRNA sense strand
agaagaagcgcgucaccau

SEQ ID NO: 139976 - RNA, 19 nt, Homo sapiens
  misc_RNA (1)...(19): siRNA sense strand
guacuggagaugaggaaca

SEQ ID NO: 139977 - RNA, 19 nt, Homo sapiens
  misc_RNA (1)...(19): siRNA sense strand
cgagcgucauugccgagaa

SEQ ID NO: 139978 - RNA, 19 nt, Homo sapiens
  misc_RNA (1)...(19): siRNA sense strand
gaacaagauucgagaacaa

SEQ ID NO: 139979 - RNA, 19 nt, Homo sapiens
  misc_RNA (1)...(19): siRNA sense strand
gaacaaaaccgacaagaug

SEQ ID NO: 139980 - RNA, 19 nt, Homo sapiens
  misc_RNA (1)...(19): siRNA sense strand
ggaacaagauucgagaaca

SEQ ID NO: 139981 - RNA, 19 nt, Homo sapiens
  misc_RNA (1)...(19): siRNA sense strand
gagaugaggaacaagauuc

SEQ ID NO: 139982 - RNA, 19 nt, Homo sapiens
  misc_RNA (1)...(19): siRNA sense strand
ggagaugaggaacaagauu

SEQ ID NO: 139983 - RNA, 19 nt, Homo sapiens
  misc_RNA (1)...(19): siRNA sense strand
aagaagcgcgucaccauga

SEQ ID NO: 139984 - RNA, 19 nt, Homo sapiens
  misc_RNA (1)...(19): siRNA sense strand
gagcgucauugccgagaag

SEQ ID NO: 139985 - RNA, 19 nt, Homo sapiens
  misc_RNA (1)...(19): siRNA sense strand
ccgacaagaugugaaguca

SEQ ID NO: 139986 - RNA, 19 nt, Homo sapiens
  misc_RNA (1)...(19): siRNA sense strand
gaggaacaagauucgagaa

SEQ ID NO: 139987 - RNA, 19 nt, Homo sapiens
  misc_RNA (1)...(19): siRNA sense strand
ucaaccugauggagcagaa

SEQ ID NO: 139988 - RNA, 19 nt, Homo sapiens
  misc_RNA (1)...(19): siRNA sense strand
agaagaagcgcgucaccau

SEQ ID NO: 139989 - RNA, 19 nt, Homo sapiens
  misc_RNA (1)...(19): siRNA sense strand
guacuggagaugaggaaca

SEQ ID NO: 139990 - RNA, 19 nt, Homo sapiens
  misc_RNA (1)...(19): siRNA sense strand
cgagcgucauugccgagaa

SEQ ID NO: 139991 - RNA, 19 nt, Homo sapiens
  misc_RNA (1)...(19): siRNA sense strand
gaacaagauucgagaacaa

SEQ ID NO: 139992 - RNA, 19 nt, Homo sapiens
  misc_RNA (1)...(19): siRNA sense strand
gaacaaaaccgacaagaug

SEQ ID NO: 139993 - RNA, 19 nt, Homo sapiens
  misc_RNA (1)...(19): siRNA sense strand
ggaacaagauucgagaaca

SEQ ID NO: 139994 - RNA, 19 nt, Homo sapiens
  misc_RNA (1)...(19): siRNA sense strand
gagaugaggaacaagauuc

SEQ ID NO: 139995 - RNA, 19 nt, Homo sapiens
  misc_RNA (1)...(19): siRNA sense strand
ggagaugaggaacaagauu

SEQ ID NO: 139996 - RNA, 19 nt, Homo sapiens
  misc_RNA (1)...(19): siRNA sense strand
aagaagcgcgucaccauga

SEQ ID NO: 139997 - RNA, 19 nt, Homo sapiens
  misc_RNA (1)...(19): siRNA sense strand
gagcgucauugccgagaag

SEQ ID NO: 139998 - RNA, 19 nt, Homo sapiens
  misc_RNA (1)...(19): siRNA sense strand
ccgacaagaugugaaguca

SEQ ID NO: 139999 - RNA, 19 nt, Homo sapiens
  misc_RNA (1)...(19): siRNA sense strand
gaggaacaagauucgagaa

SEQ ID NO: 140000 - RNA, 19 nt, Homo sapiens
  misc_RNA (1)...(19): siRNA sense strand
ucaaccugauggagcagaa

SEQ ID NO: 140001 - RNA, 19 nt, Homo sapiens
  misc_RNA (1)...(19): siRNA sense strand
agaagaagcgcgucaccau

SEQ ID NO: 140002 - RNA, 19 nt, Homo sapiens
  misc_RNA (1)...(19): siRNA sense strand
guacuggagaugaggaaca

SEQ ID NO: 140003 - RNA, 19 nt, Homo sapiens
  misc_RNA (1)...(19): siRNA sense strand
cgagcgucauugccgagaa

SEQ ID NO: 140004 - RNA, 19 nt, Homo sapiens
  misc_RNA (1)...(19): siRNA sense strand
gaacaaggaugaagugaag

SEQ ID NO: 140005 - RNA, 19 nt, Homo sapiens
  misc_RNA (1)...(19): siRNA sense strand
ggaggaagguaucaacaaa

SEQ ID NO: 140006 - RNA, 19 nt, Homo sapiens
  misc_RNA (1)...(19): siRNA sense strand
gaaaguguguucaacuaau

SEQ ID NO: 140007 - RNA, 19 nt, Homo sapiens
  misc_RNA (1)...(19): siRNA sense strand
gauuucaucuggugugaua

SEQ ID NO: 140008 - RNA, 19 nt, Homo sapiens
  misc_RNA (1)...(19): siRNA sense strand
gcaacaaacuggaacagau

SEQ ID NO: 140009 - RNA, 19 nt, Homo sapiens
  misc_RNA (1)...(19): siRNA sense strand
ccaaaggaauuccgagaaa

SEQ ID NO: 140010 - RNA, 19 nt, Homo sapiens
  misc_RNA (1)...(19): siRNA sense strand
caacaaaucugaaaagaga

SEQ ID NO: 140011 - RNA, 19 nt, Homo sapiens
  misc_RNA (1)...(19): siRNA sense strand
gaagucaucgauaucuuua

SEQ ID NO: 140012 - RNA, 19 nt, Homo sapiens
  misc_RNA (1)...(19): siRNA sense strand
ggaaacauguaugaacuga

SEQ ID NO: 140013 - RNA, 19 nt, Homo sapiens
  misc_RNA (1)...(19): siRNA sense strand
gaaaacagguauuggauau

SEQ ID NO: 140014 - RNA, 19 nt, Homo sapiens
  misc_RNA (1)...(19): siRNA sense strand
gcaaggaucccaucgaugu

SEQ ID NO: 140015 - RNA, 19 nt, Homo sapiens
  misc_RNA (1)...(19): siRNA sense strand
gaacaucaaggacgagcua

SEQ ID NO: 140016 - RNA, 19 nt, Homo sapiens
  misc_RNA (1)...(19): siRNA sense strand
ccaagagccuucaggaguu

SEQ ID NO: 140017 - RNA, 19 nt, Homo sapiens
  misc_RNA (1)...(19): siRNA sense strand
ugaaggagcuacucaucuu

SEQ ID NO: 140018 - RNA, 19 nt, Homo sapiens
  misc_RNA (1)...(19): siRNA sense strand
ugaaguaucugcugaaacu

SEQ ID NO: 140019 - RNA, 19 nt, Homo sapiens
  misc_RNA (1)...(19): siRNA sense strand
caagagcgaugccuauuac

SEQ ID NO: 140020 - RNA, 19 nt, Homo sapiens
  misc_RNA (1)...(19): siRNA sense strand
ggaagucaucgauaucuuu

SEQ ID NO: 140021 - RNA, 19 nt, Homo sapiens
  misc_RNA (1)...(19): siRNA sense strand
agaaagccaugguggagua

SEQ ID NO: 140022 - RNA, 19 nt, Homo sapiens
  misc_RNA (1)...(19): siRNA sense strand
gaagugaaggccaugauug

SEQ ID NO: 140023 - RNA, 19 nt, Homo sapiens
  misc_RNA (1)...(19): siRNA sense strand
aagaaaguguguucaacua

SEQ ID NO: 140024 - RNA, 19 nt, Homo sapiens
  misc_RNA (1)...(19): siRNA sense strand
aaacagguauuggauauuc

SEQ ID NO: 140025 - RNA, 19 nt, Homo sapiens
  misc_RNA (1)...(19): siRNA sense strand
gaagauggaggaaguaaag

SEQ ID NO: 140026 - RNA, 19 nt, Homo sapiens
  misc_RNA (1)...(19): siRNA sense strand
ggugaucgguagcaacaaa

SEQ ID NO: 140027 - RNA, 19 nt, Homo sapiens
  misc_RNA (1)...(19): siRNA sense strand
gaugaucuuugauguggaa

SEQ ID NO: 140028 - RNA, 19 nt, Homo sapiens
  misc_RNA (1)...(19): siRNA sense strand
agaaaucucuuaccucaag

SEQ ID NO: 140029 - RNA, 19 nt, Homo sapiens
  misc_RNA (1)...(19): siRNA sense strand
aaacauguaugaacugaag

SEQ ID NO: 140030 - RNA, 19 nt, Homo sapiens
  misc_RNA (1)...(19): siRNA sense strand
ggcagagccuguugaaguu

SEQ ID NO: 140031 - RNA, 19 nt, Homo sapiens
  misc_RNA (1)...(19): siRNA sense strand
ggaaccaacuccuacuaca

SEQ ID NO: 140032 - RNA, 19 nt, Homo sapiens
  misc_RNA (1)...(19): siRNA sense strand
gcugugaacuccucugcuu

SEQ ID NO: 140033 - RNA, 19 nt, Homo sapiens
  misc_RNA (1)...(19): siRNA sense strand
agaacgaccugaucuggaa

SEQ ID NO: 140034 - RNA, 19 nt, Homo sapiens
  misc_RNA (1)...(19): siRNA sense strand
acgaguacauugucuauga

SEQ ID NO: 140035 - RNA, 19 nt, Homo sapiens
  misc_RNA (1)...(19): siRNA sense strand
ccaucgaugucaacuauga

SEQ ID NO: 140036 - RNA, 19 nt, Homo sapiens
  misc_RNA (1)...(19): siRNA sense strand
ucaagagcgaugccuauua

SEQ ID NO: 140037 - RNA, 19 nt, Homo sapiens
  misc_RNA (1)...(19): siRNA sense strand
gaaccaacuccuacuacaa

SEQ ID NO: 140038 - RNA, 19 nt, Homo sapiens
  misc_RNA (1)...(19): siRNA sense strand
caaaggaauuccgagaaau

SEQ ID NO: 140039 - RNA, 19 nt, Homo sapiens
  misc_RNA (1)...(19): siRNA sense strand
ugaaggccaugauugagaa

SEQ ID NO: 140040 - RNA, 19 nt, Homo sapiens
  misc_RNA (1)...(19): siRNA sense strand
cauccaggcugcuuuguca

SEQ ID NO: 140041 - RNA, 19 nt, Homo sapiens
  misc_RNA (1)...(19): siRNA sense strand
gaagaagccgagaucauca

SEQ ID NO: 140042 - RNA, 19 nt, Homo sapiens
  misc_RNA (1)...(19): siRNA sense strand
guucuuagcgcacaucuug

SEQ ID NO: 140043 - RNA, 19 nt, Homo sapiens
  misc_RNA (1)...(19): siRNA sense strand
ccaaggaggaugccauuga

SEQ ID NO: 140044 - RNA, 19 nt, Homo sapiens
  misc_RNA (1)...(19): siRNA sense strand
gggagaaguugcccuugga

SEQ ID NO: 140045 - RNA, 19 nt, Homo sapiens
  misc_RNA (1)...(19): siRNA sense strand
caacuaaugaccugaagga

SEQ ID NO: 140046 - RNA, 19 nt, Homo sapiens
  misc_RNA (1)...(19): siRNA sense strand
cagcaaggaucccaucgau

SEQ ID NO: 140047 - RNA, 19 nt, Homo sapiens
  misc_RNA (1)...(19): siRNA sense strand
gcaaaggccaggauggaau

SEQ ID NO: 140048 - RNA, 19 nt, Homo sapiens
  misc_RNA (1)...(19): siRNA sense strand
caggcuacauguuugguaa

SEQ ID NO: 140049 - RNA, 19 nt, Homo sapiens
  misc_RNA (1)...(19): siRNA sense strand
caacaaacuggaacagaug

SEQ ID NO: 140050 - RNA, 19 nt, Homo sapiens
  misc_RNA (1)...(19): siRNA sense strand
ggaacaaggaugaagugaa

SEQ ID NO: 140051 - RNA, 19 nt, Homo sapiens
  misc_RNA (1)...(19): siRNA sense strand
agacaaggauaguaagcuu

SEQ ID NO: 140052 - RNA, 19 nt, Homo sapiens
  misc_RNA (1)...(19): siRNA sense strand
uggaugaaguggcgaagaa

SEQ ID NO: 140053 - RNA, 19 nt, Homo sapiens
  misc_RNA (1)...(19): siRNA sense strand
caaggacgagcuaaagaaa

SEQ ID NO: 140054 - RNA, 19 nt, Homo sapiens
  misc_RNA (1)...(19): siRNA sense strand
uaaagaagcccugaagaag

SEQ ID NO: 140055 - RNA, 19 nt, Homo sapiens
  misc_RNA (1)...(19): siRNA sense strand
gaaguugcccuuggaaaca

SEQ ID NO: 140056 - RNA, 19 nt, Homo sapiens
  misc_RNA (1)...(19): siRNA sense strand
gcucaaaacugacauuaag

SEQ ID NO: 140057 - RNA, 19 nt, Homo sapiens
  misc_RNA (1)...(19): siRNA sense strand
auaagaagauggaggaagu

SEQ ID NO: 140058 - RNA, 19 nt, Homo sapiens
  misc_RNA (1)...(19): siRNA sense strand
gauaaagaagcccugaaga

SEQ ID NO: 140059 - RNA, 19 nt, Homo sapiens
  misc_RNA (1)...(19): siRNA sense strand
gaagguaucaacaaaucug

SEQ ID NO: 140060 - RNA, 19 nt, Homo sapiens
  misc_RNA (1)...(19): siRNA sense strand
gcaagggccaggucaagga

SEQ ID NO: 140061 - RNA, 19 nt, Homo sapiens
  misc_RNA (1)...(19): siRNA sense strand
aaaguguguucaacuaaug

SEQ ID NO: 140062 - RNA, 19 nt, Homo sapiens
  misc_RNA (1)...(19): siRNA sense strand
uaaagaaaguguguucaac

SEQ ID NO: 140063 - RNA, 19 nt, Homo sapiens
  misc_RNA (1)...(19): siRNA sense strand
caaggaggaugccauugag

SEQ ID NO: 140064 - RNA, 19 nt, Homo sapiens
  misc_RNA (1)...(19): siRNA sense strand
caagagccuucaggaguug

SEQ ID NO: 140065 - RNA, 19 nt, Homo sapiens
  misc_RNA (1)...(19): siRNA sense strand
auaaagaagcccugaagaa

SEQ ID NO: 140066 - RNA, 19 nt, Homo sapiens
  misc_RNA (1)...(19): siRNA sense strand
ugauauugcucagguaaau

SEQ ID NO: 140067 - RNA, 19 nt, Homo sapiens
  misc_RNA (1)...(19): siRNA sense strand
ucccaucgaugucaacuau

SEQ ID NO: 140068 - RNA, 19 nt, Homo sapiens
  misc_RNA (1)...(19): siRNA sense strand
cauacuccauccucaguga

SEQ ID NO: 140069 - RNA, 19 nt, Homo sapiens
  misc_RNA (1)...(19): siRNA sense strand
aagaagcccugaagaagca

SEQ ID NO: 140070 - RNA, 19 nt, Homo sapiens
  misc_RNA (1)...(19): siRNA sense strand
guucaggaccucaucaaga

SEQ ID NO: 140071 - RNA, 19 nt, Homo sapiens
  misc_RNA (1)...(19): siRNA sense strand
caaaggccaggauggaauu

SEQ ID NO: 140072 - RNA, 19 nt, Homo sapiens
  misc_RNA (1)...(19): siRNA sense strand
guuaagaacacucaugcaa

SEQ ID NO: 140073 - RNA, 19 nt, Homo sapiens
  misc_RNA (1)...(19): siRNA sense strand
aagccgagaucaucaggaa

SEQ ID NO: 140074 - RNA, 19 nt, Homo sapiens
  misc_RNA (1)...(19): siRNA sense strand
ggauaaagaagcccugaag

SEQ ID NO: 140075 - RNA, 19 nt, Homo sapiens
  misc_RNA (1)...(19): siRNA sense strand
gauccuucagcuaacauua

SEQ ID NO: 140076 - RNA, 19 nt, Homo sapiens
  misc_RNA (1)...(19): siRNA sense strand
gugacaggcuacauguuug

SEQ ID NO: 140077 - RNA, 19 nt, Homo sapiens
  misc_RNA (1)...(19): siRNA sense strand
uaaggugguugacagagau

SEQ ID NO: 140078 - RNA, 19 nt, Homo sapiens
  misc_RNA (1)...(19): siRNA sense strand
gguaucaacaaaucugaaa

SEQ ID NO: 140079 - RNA, 19 nt, Homo sapiens
  misc_RNA (1)...(19): siRNA sense strand
aaaaggagguggaaaagau

SEQ ID NO: 140080 - RNA, 19 nt, Homo sapiens
  misc_RNA (1)...(19): siRNA sense strand
uggcgaagaagaaaucuaa

SEQ ID NO: 140081 - RNA, 19 nt, Homo sapiens
  misc_RNA (1)...(19): siRNA sense strand
ccacagcuaggcaugauug

SEQ ID NO: 140082 - RNA, 19 nt, Homo sapiens
  misc_RNA (1)...(19): siRNA sense strand
gaguacauugucuaugaua

SEQ ID NO: 140083 - RNA, 19 nt, Homo sapiens
  misc_RNA (1)...(19): siRNA sense strand
gggagacccaauaggcuua

SEQ ID NO: 140084 - RNA, 19 nt, Homo sapiens
  misc_RNA (1)...(19): siRNA sense strand
cgugacaggcuacauguuu

SEQ ID NO: 140085 - RNA, 19 nt, Homo sapiens
  misc_RNA (1)...(19): siRNA sense strand
cagcagaaagucaagaaga

SEQ ID NO: 140086 - RNA, 19 nt, Homo sapiens
  misc_RNA (1)...(19): siRNA sense strand
ucaaggacgagcuaaagaa

SEQ ID NO: 140087 - RNA, 19 nt, Homo sapiens
  misc_RNA (1)...(19): siRNA sense strand
gagaucaucaggaaguaug

SEQ ID NO: 140088 - RNA, 19 nt, Homo sapiens
  misc_RNA (1)...(19): siRNA sense strand
uaacgaguacauugucuau

SEQ ID NO: 140089 - RNA, 19 nt, Homo sapiens
  misc_RNA (1)...(19): siRNA sense strand
gagcuacucaucuucaaca

SEQ ID NO: 140090 - RNA, 19 nt, Homo sapiens
  misc_RNA (1)...(19): siRNA sense strand
agguaaaucugaaguaucu

SEQ ID NO: 140091 - RNA, 19 nt, Homo sapiens
  misc_RNA (1)...(19): siRNA sense strand
gagaaguugcccuuggaaa

SEQ ID NO: 140092 - RNA, 19 nt, Homo sapiens
  misc_RNA (1)...(19): siRNA sense strand
ucaggaaguauguuaagaa

SEQ ID NO: 140093 - RNA, 19 nt, Homo sapiens
  misc_RNA (1)...(19): siRNA sense strand
ugaagaagccgagaucauc

SEQ ID NO: 140094 - RNA, 19 nt, Homo sapiens
  misc_RNA (1)...(19): siRNA sense strand
uuaaggugguugacagaga

SEQ ID NO: 140095 - RNA, 19 nt, Homo sapiens
  misc_RNA (1)...(19): siRNA sense strand
aguaugagaucgaccuuca

SEQ ID NO: 140096 - RNA, 19 nt, Homo sapiens
  misc_RNA (1)...(19): siRNA sense strand
ggaaaacagguauuggaua

SEQ ID NO: 140097 - RNA, 19 nt, Homo sapiens
  misc_RNA (1)...(19): siRNA sense strand
gggaugaccagcagaaagu

SEQ ID NO: 140098 - RNA, 19 nt, Homo sapiens
  misc_RNA (1)...(19): siRNA sense strand
ccaaguguauggucaagac

SEQ ID NO: 140099 - RNA, 19 nt, Homo sapiens
  misc_RNA (1)...(19): siRNA sense strand
gauggaggaaguaaaggaa

SEQ ID NO: 140100 - RNA, 19 nt, Homo sapiens
  misc_RNA (1)...(19): siRNA sense strand
guuacaagcccuuuaagca

SEQ ID NO: 140101 - RNA, 19 nt, Homo sapiens
  misc_RNA (1)...(19): siRNA sense strand
gaaaagucccacacuggua

SEQ ID NO: 140102 - RNA, 19 nt, Homo sapiens
  misc_RNA (1)...(19): siRNA sense strand
ggaacacucugcgcauguc

SEQ ID NO: 140103 - RNA, 19 nt, Homo sapiens
  misc_RNA (1)...(19): siRNA sense strand
aggaagguaucaacaaauc

SEQ ID NO: 140104 - RNA, 19 nt, Homo sapiens
  misc_RNA (1)...(19): siRNA sense strand
gcagugucaugcagaagua

SEQ ID NO: 140105 - RNA, 19 nt, Homo sapiens
  misc_RNA (1)...(19): siRNA sense strand
ggaagaauguggagcucaa

SEQ ID NO: 140106 - RNA, 19 nt, Homo sapiens
  misc_RNA (1)...(19): siRNA sense strand
gcuggaggcucgcaagaaa

SEQ ID NO: 140107 - RNA, 19 nt, Homo sapiens
  misc_RNA (1)...(19): siRNA sense strand
gcaagaaagccaagaacaa

SEQ ID NO: 140108 - RNA, 19 nt, Homo sapiens
  misc_RNA (1)...(19): siRNA sense strand
gcaagugccugcuccucaa

SEQ ID NO: 140109 - RNA, 19 nt, Homo sapiens
  misc_RNA (1)...(19): siRNA sense strand
augaggagaucaagaagua

SEQ ID NO: 140110 - RNA, 19 nt, Homo sapiens
  misc_RNA (1)...(19): siRNA sense strand
ggaauucuaugaggagauc

SEQ ID NO: 140111 - RNA, 19 nt, Homo sapiens
  misc_RNA (1)...(19): siRNA sense strand
gcacaagaccaaagacaag

SEQ ID NO: 140112 - RNA, 19 nt, Homo sapiens
  misc_RNA (1)...(19): siRNA sense strand
acaagcagcugggccauga

SEQ ID NO: 140113 - RNA, 19 nt, Homo sapiens
  misc_RNA (1)...(19): siRNA sense strand
gggagaucuucgacucaua

SEQ ID NO: 140114 - RNA, 19 nt, Homo sapiens
  misc_RNA (1)...(19): siRNA sense strand
ggugcaugcucuucaaguu

SEQ ID NO: 140115 - RNA, 19 nt, Homo sapiens
  misc_RNA (1)...(19): siRNA sense strand
cagcgugcaucgcaucauu

SEQ ID NO: 140116 - RNA, 19 nt, Homo sapiens
  misc_RNA (1)...(19): siRNA sense strand
gaucuucgacucauacauc

SEQ ID NO: 140117 - RNA, 19 nt, Homo sapiens
  misc_RNA (1)...(19): siRNA sense strand
gggcaaggacugcaucaug

SEQ ID NO: 140118 - RNA, 19 nt, Homo sapiens
  misc_RNA (1)...(19): siRNA sense strand
caagaaagccaagaacaag

SEQ ID NO: 140119 - RNA, 19 nt, Homo sapiens
  misc_RNA (1)...(19): siRNA sense strand
gggacguguuccagaaauu

SEQ ID NO: 140120 - RNA, 19 nt, Homo sapiens
  misc_RNA (1)...(19): siRNA sense strand
ggcaagauguacgccauga

SEQ ID NO: 140121 - RNA, 19 nt, Homo sapiens
  misc_RNA (1)...(19): siRNA sense strand
ggugggaaacaguucauuu

SEQ ID NO: 140122 - RNA, 19 nt, Homo sapiens
  misc_RNA (1)...(19): siRNA sense strand
gaagccagccaacauccuu

SEQ ID NO: 140123 - RNA, 19 nt, Homo sapiens
  misc_RNA (1)...(19): siRNA sense strand
ggccgacgccuucgacauu

SEQ ID NO: 140124 - RNA, 19 nt, Homo sapiens
  misc_RNA (1)...(19): siRNA sense strand
gcucgcaucccuucucgaa

SEQ ID NO: 140125 - RNA, 19 nt, Homo sapiens
  misc_RNA (1)...(19): siRNA sense strand
ggaaacaguucauuuugca

SEQ ID NO: 140126 - RNA, 19 nt, Homo sapiens
  misc_RNA (1)...(19): siRNA sense strand
caagauccgcggugggaaa

SEQ ID NO: 140127 - RNA, 19 nt, Homo sapiens
  misc_RNA (1)...(19): siRNA sense strand
ccaaagacaagcaugagau

SEQ ID NO: 140128 - RNA, 19 nt, Homo sapiens
  misc_RNA (1)...(19): siRNA sense strand
uuccagaaauucauugaga

SEQ ID NO: 140129 - RNA, 19 nt, Homo sapiens
  misc_RNA (1)...(19): siRNA sense strand
ggacugcccauucauuguc

SEQ ID NO: 140130 - RNA, 19 nt, Homo sapiens
  misc_RNA (1)...(19): siRNA sense strand
ucuaugaggagaucaagaa

SEQ ID NO: 140131 - RNA, 19 nt, Homo sapiens
  misc_RNA (1)...(19): siRNA sense strand
gcagcugggccaugaggaa

SEQ ID NO: 140132 - RNA, 19 nt, Homo sapiens
  misc_RNA (1)...(19): siRNA sense strand
gggcucaggaggugaaaga

SEQ ID NO: 140133 - RNA, 19 nt, Homo sapiens
  misc_RNA (1)...(19): siRNA sense strand
caagauguacgccaugaag

SEQ ID NO: 140134 - RNA, 19 nt, Homo sapiens
  misc_RNA (1)...(19): siRNA sense strand
ucauugagagcgauaaguu

SEQ ID NO: 140135 - RNA, 19 nt, Homo sapiens
  misc_RNA (1)...(19): siRNA sense strand
ggacguguuccagaaauuc

SEQ ID NO: 140136 - RNA, 19 nt, Homo sapiens
  misc_RNA (1)...(19): siRNA sense strand
gaucaagaaguacgagaag

SEQ ID NO: 140137 - RNA, 19 nt, Homo sapiens
  misc_RNA (1)...(19): siRNA sense strand
gccugugacuucuccaaga

SEQ ID NO: 140138 - RNA, 19 nt, Homo sapiens
  misc_RNA (1)...(19): siRNA sense strand
ggagaucuucgacucauac

SEQ ID NO: 140139 - RNA, 19 nt, Homo sapiens
  misc_RNA (1)...(19): siRNA sense strand
ugcccaagaugaagaacaa

SEQ ID NO: 140140 - RNA, 19 nt, Homo sapiens
  misc_RNA (1)...(19): siRNA sense strand
caaagacaagcaugagauc

SEQ ID NO: 140141 - RNA, 19 nt, Homo sapiens
  misc_RNA (1)...(19): siRNA sense strand
gaagaucuuuucccagaag

SEQ ID NO: 140142 - RNA, 19 nt, Homo sapiens
  misc_RNA (1)...(19): siRNA sense strand
gaugucaaccggagauugg

SEQ ID NO: 140143 - RNA, 19 nt, Homo sapiens
  misc_RNA (1)...(19): siRNA sense strand
gcucaggaggugaaagaga

SEQ ID NO: 140144 - RNA, 19 nt, Homo sapiens
  misc_RNA (1)...(19): siRNA sense strand
gcaagauguacgccaugaa

SEQ ID NO: 140145 - RNA, 19 nt, Homo sapiens
  misc_RNA (1)...(19): siRNA sense strand
cgacgugagcuaccugaug

SEQ ID NO: 140146 - RNA, 19 nt, Homo sapiens
  misc_RNA (1)...(19): siRNA sense strand
caaaaggaaucaaguuacu

SEQ ID NO: 140147 - RNA, 19 nt, Homo sapiens
  misc_RNA (1)...(19): siRNA sense strand
ggcccuugguggaauucua

SEQ ID NO: 140148 - RNA, 19 nt, Homo sapiens
  misc_RNA (1)...(19): siRNA sense strand
ugagagcgauaaguucaca

SEQ ID NO: 140149 - RNA, 19 nt, Homo sapiens
  misc_RNA (1)...(19): siRNA sense strand
ccaggcccuugguggaauu

SEQ ID NO: 140150 - RNA, 19 nt, Homo sapiens
  misc_RNA (1)...(19): siRNA sense strand
ucgaugaggaggacacaaa

SEQ ID NO: 140151 - RNA, 19 nt, Homo sapiens
  misc_RNA (1)...(19): siRNA sense strand
cgacauuggcuccuucgau

SEQ ID NO: 140152 - RNA, 19 nt, Homo sapiens
  misc_RNA (1)...(19): siRNA sense strand
gugcaugcucuucaaguug

SEQ ID NO: 140153 - RNA, 19 nt, Homo sapiens
  misc_RNA (1)...(19): siRNA sense strand
gaggggacguguuccagaa

SEQ ID NO: 140154 - RNA, 19 nt, Homo sapiens
  misc_RNA (1)...(19): siRNA sense strand
ggagcucuaccgcaacuuc

SEQ ID NO: 140155 - RNA, 19 nt, Homo sapiens
  misc_RNA (1)...(19): siRNA sense strand
cacaaaaggaaucaaguua

SEQ ID NO: 140156 - RNA, 19 nt, Homo sapiens
  misc_RNA (1)...(19): siRNA sense strand
gccgacgccuucgacauug

SEQ ID NO: 140157 - RNA, 19 nt, Homo sapiens
  misc_RNA (1)...(19): siRNA sense strand
agaagggcguggccuacga

SEQ ID NO: 140158 - RNA, 19 nt, Homo sapiens
  misc_RNA (1)...(19): siRNA sense strand
cuccggagguccugcagaa

SEQ ID NO: 140159 - RNA, 19 nt, Homo sapiens
  misc_RNA (1)...(19): siRNA sense strand
gagcuggugcaguggaaga

SEQ ID NO: 140160 - RNA, 19 nt, Homo sapiens
  misc_RNA (1)...(19): siRNA sense strand
agccauacaucgaagagau

SEQ ID NO: 140161 - RNA, 19 nt, Homo sapiens
  misc_RNA (1)...(19): siRNA sense strand
cagcgggugcccaagauga

SEQ ID NO: 140162 - RNA, 19 nt, Homo sapiens
  misc_RNA (1)...(19): siRNA sense strand
agaccaaagacaagcauga

SEQ ID NO: 140163 - RNA, 19 nt, Homo sapiens
  misc_RNA (1)...(19): siRNA sense strand
acauccaccugaccaugaa

SEQ ID NO: 140164 - RNA, 19 nt, Homo sapiens
  misc_RNA (1)...(19): siRNA sense strand
ccauacaucgaagagauuu

SEQ ID NO: 140165 - RNA, 19 nt, Homo sapiens
  misc_RNA (1)...(19): siRNA sense strand
acagugaucaggagcucua

SEQ ID NO: 140166 - RNA, 19 nt, Homo sapiens
  misc_RNA (1)...(19): siRNA sense strand
gccauacaucgaagagauu

SEQ ID NO: 140167 - RNA, 19 nt, Homo sapiens
  misc_RNA (1)...(19): siRNA sense strand
ggaugucaaccggagauug

SEQ ID NO: 140168 - RNA, 19 nt, Homo sapiens
  misc_RNA (1)...(19): siRNA sense strand
gcugacaugcgcuucuaug

SEQ ID NO: 140169 - RNA, 19 nt, Homo sapiens
  misc_RNA (1)...(19): siRNA sense strand
gauaaguucacacgguuuu

SEQ ID NO: 140170 - RNA, 19 nt, Homo sapiens
  misc_RNA (1)...(19): siRNA sense strand
caggagcucuaccgcaacu

SEQ ID NO: 140171 - RNA, 19 nt, Homo sapiens
  misc_RNA (1)...(19): siRNA sense strand
ggcagauggucuucuugca

SEQ ID NO: 140172 - RNA, 19 nt, Homo sapiens
  misc_RNA (1)...(19): siRNA sense strand
gcccauucauugucugcau

SEQ ID NO: 140173 - RNA, 19 nt, Homo sapiens
  misc_RNA (1)...(19): siRNA sense strand
caucgaagagauuugucaa

SEQ ID NO: 140174 - RNA, 19 nt, Homo sapiens
  misc_RNA (1)...(19): siRNA sense strand
uggaggagacgcagaucaa

SEQ ID NO: 140175 - RNA, 19 nt, Homo sapiens
  misc_RNA (1)...(19): siRNA sense strand
gccaggcccuugguggaau

SEQ ID NO: 140176 - RNA, 19 nt, Homo sapiens
  misc_RNA (1)...(19): siRNA sense strand
aggcugacaugcgcuucua

SEQ ID NO: 140177 - RNA, 19 nt, Homo sapiens
  misc_RNA (1)...(19): siRNA sense strand
caugaagugccuggacaaa

SEQ ID NO: 140178 - RNA, 19 nt, Homo sapiens
  misc_RNA (1)...(19): siRNA sense strand
gauccgcggugggaaacag

SEQ ID NO: 140179 - RNA, 19 nt, Homo sapiens
  misc_RNA (1)...(19): siRNA sense strand
gaacagagcauuuacgaaa

SEQ ID NO: 140180 - RNA, 19 nt, Homo sapiens
  misc_RNA (1)...(19): siRNA sense strand
gaaaguggcaugauaguuu

SEQ ID NO: 140181 - RNA, 19 nt, Homo sapiens
  misc_RNA (1)...(19): siRNA sense strand
gagaagcuguguuguauga

SEQ ID NO: 140182 - RNA, 19 nt, Homo sapiens
  misc_RNA (1)...(19): siRNA sense strand
gcucugaacucaagcugua

SEQ ID NO: 140183 - RNA, 19 nt, Homo sapiens
  misc_RNA (1)...(19): siRNA sense strand
gcaaguuaauggcauguuu

SEQ ID NO: 140184 - RNA, 19 nt, Homo sapiens
  misc_RNA (1)...(19): siRNA sense strand
uaaggugucugcuggauaa

SEQ ID NO: 140185 - RNA, 19 nt, Homo sapiens
  misc_RNA (1)...(19): siRNA sense strand
ggaaggaacagagcauuua

SEQ ID NO: 140186 - RNA, 19 nt, Homo sapiens
  misc_RNA (1)...(19): siRNA sense strand
cagcugauaugcuuuauug

SEQ ID NO: 140187 - RNA, 19 nt, Homo sapiens
  misc_RNA (1)...(19): siRNA sense strand
gaaguugccuuuuauguuu

SEQ ID NO: 140188 - RNA, 19 nt, Homo sapiens
  misc_RNA (1)...(19): siRNA sense strand
gaacucaagcuguauggua

SEQ ID NO: 140189 - RNA, 19 nt, Homo sapiens
  misc_RNA (1)...(19): siRNA sense strand
gaaauacgaaguugccuuu

SEQ ID NO: 140190 - RNA, 19 nt, Homo sapiens
  misc_RNA (1)...(19): siRNA sense strand
cauaauaacuccucagaca

SEQ ID NO: 140191 - RNA, 19 nt, Homo sapiens
  misc_RNA (1)...(19): siRNA sense strand
cuacaaaucugaaauggau

SEQ ID NO: 140192 - RNA, 19 nt, Homo sapiens
  misc_RNA (1)...(19): siRNA sense strand
caacagcugugucagaaga

SEQ ID NO: 140193 - RNA, 19 nt, Homo sapiens
  misc_RNA (1)...(19): siRNA sense strand
aaacuagacuucacaccua

SEQ ID NO: 140194 - RNA, 19 nt, Homo sapiens
  misc_RNA (1)...(19): siRNA sense strand
gagaaggccugaacuuaca

SEQ ID NO: 140195 - RNA, 19 nt, Homo sapiens
  misc_RNA (1)...(19): siRNA sense strand
gcaacaagaugagucuauu

SEQ ID NO: 140196 - RNA, 19 nt, Homo sapiens
  misc_RNA (1)...(19): siRNA sense strand
ggaaucaagucaaauccuu

SEQ ID NO: 140197 - RNA, 19 nt, Homo sapiens
  misc_RNA (1)...(19): siRNA sense strand
caacgaaucuaugaaugaa

SEQ ID NO: 140198 - RNA, 19 nt, Homo sapiens
  misc_RNA (1)...(19): siRNA sense strand
gaaggagaauucuuauuac

SEQ ID NO: 140199 - RNA, 19 nt, Homo sapiens
  misc_RNA (1)...(19): siRNA sense strand
aaagauggaucaauacuuc

SEQ ID NO: 140200 - RNA, 19 nt, Homo sapiens
  misc_RNA (1)...(19): siRNA sense strand
gaacuuacaagaaggagaa

SEQ ID NO: 140201 - RNA, 19 nt, Homo sapiens
  misc_RNA (1)...(19): siRNA sense strand
cauagagaccgacuuaaua

SEQ ID NO: 140202 - RNA, 19 nt, Homo sapiens
  misc_RNA (1)...(19): siRNA sense strand
cuucauaccuucagauuau

SEQ ID NO: 140203 - RNA, 19 nt, Homo sapiens
  misc_RNA (1)...(19): siRNA sense strand
agggaaagauggaucaaua

SEQ ID NO: 140204 - RNA, 19 nt, Homo sapiens
  misc_RNA (1)...(19): siRNA sense strand
gaauggcuuuguauuaguu

SEQ ID NO: 140205 - RNA, 19 nt, Homo sapiens
  misc_RNA (1)...(19): siRNA sense strand
ccagaaaacucuccuuuaa

SEQ ID NO: 140206 - RNA, 19 nt, Homo sapiens
  misc_RNA (1)...(19): siRNA sense strand
aaacauauccagcugaauu

SEQ ID NO: 140207 - RNA, 19 nt, Homo sapiens
  misc_RNA (1)...(19): siRNA sense strand
gcaagacccacaacaauau

SEQ ID NO: 140208 - RNA, 19 nt, Homo sapiens
  misc_RNA (1)...(19): siRNA sense strand
gaaauuggcaagauaauac

SEQ ID NO: 140209 - RNA, 19 nt, Homo sapiens
  misc_RNA (1)...(19): siRNA sense strand
caagaugagucuauuuauc

SEQ ID NO: 140210 - RNA, 19 nt, Homo sapiens
  misc_RNA (1)...(19): siRNA sense strand
gcagaaauuggcaagauaa

SEQ ID NO: 140211 - RNA, 19 nt, Homo sapiens
  misc_RNA (1)...(19): siRNA sense strand
gauuaagacuggagaaagu

SEQ ID NO: 140212 - RNA, 19 nt, Homo sapiens
  misc_RNA (1)...(19): siRNA sense strand
gaaccaaacacaaacuaga

SEQ ID NO: 140213 - RNA, 19 nt, Homo sapiens
  misc_RNA (1)...(19): siRNA sense strand
ugaagcacaugcaaguuaa

SEQ ID NO: 140214 - RNA, 19 nt, Homo sapiens
  misc_RNA (1)...(19): siRNA sense strand
caacaguccuuggcucuga

SEQ ID NO: 140215 - RNA, 19 nt, Homo sapiens
  misc_RNA (1)...(19): siRNA sense strand
ugacguauguccaagauuc

SEQ ID NO: 140216 - RNA, 19 nt, Homo sapiens
  misc_RNA (1)...(19): siRNA sense strand
ucccauauccgaaugauua

SEQ ID NO: 140217 - RNA, 19 nt, Homo sapiens
  misc_RNA (1)...(19): siRNA sense strand
gcaccgaugggaaaugaua

SEQ ID NO: 140218 - RNA, 19 nt, Homo sapiens
  misc_RNA (1)...(19): siRNA sense strand
uggagaaaguggcaugaua

SEQ ID NO: 140219 - RNA, 19 nt, Homo sapiens
  misc_RNA (1)...(19): siRNA sense strand
auacagaguuggaccguuu

SEQ ID NO: 140220 - RNA, 19 nt, Homo sapiens
  misc_RNA (1)...(19): siRNA sense strand
gcauagagaccgacuuaau

SEQ ID NO: 140221 - RNA, 19 nt, Homo sapiens
  misc_RNA (1)...(19): siRNA sense strand
gaaggaaucaagucaaauc

SEQ ID NO: 140222 - RNA, 19 nt, Homo sapiens
  misc_RNA (1)...(19): siRNA sense strand
gaugaaauccugacguaug

SEQ ID NO: 140223 - RNA, 19 nt, Homo sapiens
  misc_RNA (1)...(19): siRNA sense strand
caagggaaguuaaaguauc

SEQ ID NO: 140224 - RNA, 19 nt, Homo sapiens
  misc_RNA (1)...(19): siRNA sense strand
guuaauggcauguuugaaa

SEQ ID NO: 140225 - RNA, 19 nt, Homo sapiens
  misc_RNA (1)...(19): siRNA sense strand
cuucuuugauguugcauua

SEQ ID NO: 140226 - RNA, 19 nt, Homo sapiens
  misc_RNA (1)...(19): siRNA sense strand
ugaaacauauccagcugaa

SEQ ID NO: 140227 - RNA, 19 nt, Homo sapiens
  misc_RNA (1)...(19): siRNA sense strand
aaguaagucucccuucaua

SEQ ID NO: 140228 - RNA, 19 nt, Homo sapiens
  misc_RNA (1)...(19): siRNA sense strand
gcuaccacauccacucuaa

SEQ ID NO: 140229 - RNA, 19 nt, Homo sapiens
  misc_RNA (1)...(19): siRNA sense strand
gagaccgacuuaauacaga

SEQ ID NO: 140230 - RNA, 19 nt, Homo sapiens
  misc_RNA (1)...(19): siRNA sense strand
gcacgagaggcucagguua

SEQ ID NO: 140231 - RNA, 19 nt, Homo sapiens
  misc_RNA (1)...(19): siRNA sense strand
gaaagauggaucaauacuu

SEQ ID NO: 140232 - RNA, 19 nt, Homo sapiens
  misc_RNA (1)...(19): siRNA sense strand
cagcuacacugggcauuaa

SEQ ID NO: 140233 - RNA, 19 nt, Homo sapiens
  misc_RNA (1)...(19): siRNA sense strand
cagagaaggccugaacuua

SEQ ID NO: 140234 - RNA, 19 nt, Homo sapiens
  misc_RNA (1)...(19): siRNA sense strand
cagaguguauaugaacuua

SEQ ID NO: 140235 - RNA, 19 nt, Homo sapiens
  misc_RNA (1)...(19): siRNA sense strand
cuucagagacauugacuua

SEQ ID NO: 140236 - RNA, 19 nt, Homo sapiens
  misc_RNA (1)...(19): siRNA sense strand
gagaggugcuucauauguc

SEQ ID NO: 140237 - RNA, 19 nt, Homo sapiens
  misc_RNA (1)...(19): siRNA sense strand
ggagaggugcuucauaugu

SEQ ID NO: 140238 - RNA, 19 nt, Homo sapiens
  misc_RNA (1)...(19): siRNA sense strand
ggccugaacuuacaagaag

SEQ ID NO: 140239 - RNA, 19 nt, Homo sapiens
  misc_RNA (1)...(19): siRNA sense strand
caacaagaugagucuauuu

SEQ ID NO: 140240 - RNA, 19 nt, Homo sapiens
  misc_RNA (1)...(19): siRNA sense strand
gaguguauaugaacuuauc

SEQ ID NO: 140241 - RNA, 19 nt, Homo sapiens
  misc_RNA (1)...(19): siRNA sense strand
gaaacggaggccaggauaa

SEQ ID NO: 140242 - RNA, 19 nt, Homo sapiens
  misc_RNA (1)...(19): siRNA sense strand
gagcuggacuacccuaugg

SEQ ID NO: 140243 - RNA, 19 nt, Homo sapiens
  misc_RNA (1)...(19): siRNA sense strand
uggagaagcuguguuguau

SEQ ID NO: 140244 - RNA, 19 nt, Homo sapiens
  misc_RNA (1)...(19): siRNA sense strand
gaaagggaaagauggauca

SEQ ID NO: 140245 - RNA, 19 nt, Homo sapiens
  misc_RNA (1)...(19): siRNA sense strand
guuaaaguaucuucaugga

SEQ ID NO: 140246 - RNA, 19 nt, Homo sapiens
  misc_RNA (1)...(19): siRNA sense strand
gguuaucaguuuauucaug

SEQ ID NO: 140247 - RNA, 19 nt, Homo sapiens
  misc_RNA (1)...(19): siRNA sense strand
ccugaaacaugagcaaauu

SEQ ID NO: 140248 - RNA, 19 nt, Homo sapiens
  misc_RNA (1)...(19): siRNA sense strand
gccaaaggaagaauuguuu

SEQ ID NO: 140249 - RNA, 19 nt, Homo sapiens
  misc_RNA (1)...(19): siRNA sense strand
ccacaacaauauaaugucu

SEQ ID NO: 140250 - RNA, 19 nt, Homo sapiens
  misc_RNA (1)...(19): siRNA sense strand
gaacagcaacagcaacauc

SEQ ID NO: 140251 - RNA, 19 nt, Homo sapiens
  misc_RNA (1)...(19): siRNA sense strand
cauaauggaucccuuacca

SEQ ID NO: 140252 - RNA, 19 nt, Homo sapiens
  misc_RNA (1)...(19): siRNA sense strand
ggagaaaguggcaugauag

SEQ ID NO: 140253 - RNA, 19 nt, Homo sapiens
  misc_RNA (1)...(19): siRNA sense strand
uuaaauccuucucagugua

SEQ ID NO: 140254 - RNA, 19 nt, Homo sapiens
  misc_RNA (1)...(19): siRNA sense strand
aggcucagguuaucaguuu

SEQ ID NO: 140255 - RNA, 19 nt, Homo sapiens
  misc_RNA (1)...(19): siRNA sense strand
ggugucugcuggauaauuc

SEQ ID NO: 140256 - RNA, 19 nt, Homo sapiens
  misc_RNA (1)...(19): siRNA sense strand
cggcauagagaccgacuua

SEQ ID NO: 140257 - RNA, 19 nt, Homo sapiens
  misc_RNA (1)...(19): siRNA sense strand
gaagaugaagcacaugcaa

SEQ ID NO: 140258 - RNA, 19 nt, Homo sapiens
  misc_RNA (1)...(19): siRNA sense strand
ucugaauggcuuuguauua

SEQ ID NO: 140259 - RNA, 19 nt, Homo sapiens
  misc_RNA (1)...(19): siRNA sense strand
ccacagucagccauaauaa

SEQ ID NO: 140260 - RNA, 19 nt, Homo sapiens
  misc_RNA (1)...(19): siRNA sense strand
acacagaacuuuauuuccu

SEQ ID NO: 140261 - RNA, 19 nt, Homo sapiens
  misc_RNA (1)...(19): siRNA sense strand
cugaaggaaucaagucaaa

SEQ ID NO: 140262 - RNA, 19 nt, Homo sapiens
  misc_RNA (1)...(19): siRNA sense strand
ugacuuaacggaugaaauc

SEQ ID NO: 140263 - RNA, 19 nt, Homo sapiens
  misc_RNA (1)...(19): siRNA sense strand
auacuauccugaaacauga

SEQ ID NO: 140264 - RNA, 19 nt, Homo sapiens
  misc_RNA (1)...(19): siRNA sense strand
gaccagauuccuccagaaa

SEQ ID NO: 140265 - RNA, 19 nt, Homo sapiens
  misc_RNA (1)...(19): siRNA sense strand
gcagcaaauuucagagaag

SEQ ID NO: 140266 - RNA, 19 nt, Homo sapiens
  misc_RNA (1)...(19): siRNA sense strand
uaaauaacacucagacuac

SEQ ID NO: 140267 - RNA, 19 nt, Homo sapiens
  misc_RNA (1)...(19): siRNA sense strand
caagacccacaacaauaua

SEQ ID NO: 140268 - RNA, 19 nt, Homo sapiens
  misc_RNA (1)...(19): siRNA sense strand
caacagcaacaucaccaaa

SEQ ID NO: 140269 - RNA, 19 nt, Homo sapiens
  misc_RNA (1)...(19): siRNA sense strand
ucagagacauugacuuaac

SEQ ID NO: 140270 - RNA, 19 nt, Homo sapiens
  misc_RNA (1)...(19): siRNA sense strand
ucaugcagcugauaugcuu

SEQ ID NO: 140271 - RNA, 19 nt, Homo sapiens
  misc_RNA (1)...(19): siRNA sense strand
agaaaacucuccuuuaaug

SEQ ID NO: 140272 - RNA, 19 nt, Homo sapiens
  misc_RNA (1)...(19): siRNA sense strand
cgaagaccgagcugaauuu

SEQ ID NO: 140273 - RNA, 19 nt, Homo sapiens
  misc_RNA (1)...(19): siRNA sense strand
cuaaugcacgccugcuuua

SEQ ID NO: 140274 - RNA, 19 nt, Homo sapiens
  misc_RNA (1)...(19): siRNA sense strand
uuaaguaagucucccuuca

SEQ ID NO: 140275 - RNA, 19 nt, Homo sapiens
  misc_RNA (1)...(19): siRNA sense strand
augcacgccugcuuuauaa

SEQ ID NO: 140276 - RNA, 19 nt, Homo sapiens
  misc_RNA (1)...(19): siRNA sense strand
ccaaaagcauggauuaaau

SEQ ID NO: 140277 - RNA, 19 nt, Homo sapiens
  misc_RNA (1)...(19): siRNA sense strand
ccagcugaauuaaauaaca

SEQ ID NO: 140278 - RNA, 19 nt, Homo sapiens
  misc_RNA (1)...(19): siRNA sense strand
uaauaacuccucagacaug

SEQ ID NO: 140279 - RNA, 19 nt, Homo sapiens
  misc_RNA (1)...(19): siRNA sense strand
gaacugcgaugauccagaa

SEQ ID NO: 140280 - RNA, 19 nt, Homo sapiens
  misc_RNA (1)...(19): siRNA sense strand
gaaccagauugaugaagua

SEQ ID NO: 140281 - RNA, 19 nt, Homo sapiens
  misc_RNA (1)...(19): siRNA sense strand
gaaggagcaugcugucgaa

SEQ ID NO: 140282 - RNA, 19 nt, Homo sapiens
  misc_RNA (1)...(19): siRNA sense strand
gaaauagacacccuggaaa

SEQ ID NO: 140283 - RNA, 19 nt, Homo sapiens
  misc_RNA (1)...(19): siRNA sense strand
ggagagcuguuugagauug

SEQ ID NO: 140284 - RNA, 19 nt, Homo sapiens
  misc_RNA (1)...(19): siRNA sense strand
gaacaacggcuccaauuuu

SEQ ID NO: 140285 - RNA, 19 nt, Homo sapiens
  misc_RNA (1)...(19): siRNA sense strand
ggagcaugcugucgaagga

SEQ ID NO: 140286 - RNA, 19 nt, Homo sapiens
  misc_RNA (1)...(19): siRNA sense strand
ccagauugaugaaguaaag

SEQ ID NO: 140287 - RNA, 19 nt, Homo sapiens
  misc_RNA (1)...(19): siRNA sense strand
cgaaggagacugugauuuc

SEQ ID NO: 140288 - RNA, 19 nt, Homo sapiens
  misc_RNA (1)...(19): siRNA sense strand
ccggagagcuguuugagau

SEQ ID NO: 140289 - RNA, 19 nt, Homo sapiens
  misc_RNA (1)...(19): siRNA sense strand
gcgaugauccagaaacuga

SEQ ID NO: 140290 - RNA, 19 nt, Homo sapiens
  misc_RNA (1)...(19): siRNA sense strand
gcacugacuguguugcuaa

SEQ ID NO: 140291 - RNA, 19 nt, Homo sapiens
  misc_RNA (1)...(19): siRNA sense strand
gcuauagacuacaucaauc

SEQ ID NO: 140292 - RNA, 19 nt, Homo sapiens
  misc_RNA (1)...(19): siRNA sense strand
caaccgaacugcgaugauc

SEQ ID NO: 140293 - RNA, 19 nt, Homo sapiens
  misc_RNA (1)...(19): siRNA sense strand
ugaaauagacacccuggaa

SEQ ID NO: 140294 - RNA, 19 nt, Homo sapiens
  misc_RNA (1)...(19): siRNA sense strand
gauacaaacacaccuugaa

SEQ ID NO: 140295 - RNA, 19 nt, Homo sapiens
  misc_RNA (1)...(19): siRNA sense strand
gagagcuguuugagauuga

SEQ ID NO: 140296 - RNA, 19 nt, Homo sapiens
  misc_RNA (1)...(19): siRNA sense strand
ggaaaccaccugccaugug

SEQ ID NO: 140297 - RNA, 19 nt, Homo sapiens
  misc_RNA (1)...(19): siRNA sense strand
aagcagcucugguggcuau

SEQ ID NO: 140298 - RNA, 19 nt, Homo sapiens
  misc_RNA (1)...(19): siRNA sense strand
ccacagaggcagccaagug

SEQ ID NO: 140299 - RNA, 19 nt, Homo sapiens
  misc_RNA (1)...(19): siRNA sense strand
ugaaccagauugaugaagu

SEQ ID NO: 140300 - RNA, 19 nt, Homo sapiens
  misc_RNA (1)...(19): siRNA sense strand
cagaacaacggcuccaauu

SEQ ID NO: 140301 - RNA, 19 nt, Homo sapiens
  misc_RNA (1)...(19): siRNA sense strand
gaaggagacugugauuucc

SEQ ID NO: 140302 - RNA, 19 nt, Homo sapiens
  misc_RNA (1)...(19): siRNA sense strand
cccagacucccauguguua

SEQ ID NO: 140303 - RNA, 19 nt, Homo sapiens
  misc_RNA (1)...(19): siRNA sense strand
caauauggcuuuuguaagg

SEQ ID NO: 140304 - RNA, 19 nt, Homo sapiens
  misc_RNA (1)...(19): siRNA sense strand
agaacaacggcuccaauuu

SEQ ID NO: 140305 - RNA, 19 nt, Homo sapiens
  misc_RNA (1)...(19): siRNA sense strand
cagaggcagccaaguguaa

SEQ ID NO: 140306 - RNA, 19 nt, Homo sapiens
  misc_RNA (1)...(19): siRNA sense strand
gcuguuugagauugaaaua

SEQ ID NO: 140307 - RNA, 19 nt, Homo sapiens
  misc_RNA (1)...(19): siRNA sense strand
ucauggguguggucucauu

SEQ ID NO: 140308 - RNA, 19 nt, Homo sapiens
  misc_RNA (1)...(19): siRNA sense strand
cuaccuauguggaguuuac

SEQ ID NO: 140309 - RNA, 19 nt, Homo sapiens
  misc_RNA (1)...(19): siRNA sense strand
ggauacaaacacaccuuga

SEQ ID NO: 140310 - RNA, 19 nt, Homo sapiens
  misc_RNA (1)...(19): siRNA sense strand
ggcuauagacuacaucaau

SEQ ID NO: 140311 - RNA, 19 nt, Homo sapiens
  misc_RNA (1)...(19): siRNA sense strand
gggaggaucagacacuuca

SEQ ID NO: 140312 - RNA, 19 nt, Homo sapiens
  misc_RNA (1)...(19): siRNA sense strand
uauguggaguuuacagugu

SEQ ID NO: 140313 - RNA, 19 nt, Homo sapiens
  misc_RNA (1)...(19): siRNA sense strand
gccagugguuccuccaugu

SEQ ID NO: 140314 - RNA, 19 nt, Homo sapiens
  misc_RNA (1)...(19): siRNA sense strand
accagaaggugccaaugaa

SEQ ID NO: 140315 - RNA, 19 nt, Homo sapiens
  misc_RNA (1)...(19): siRNA sense strand
ccucccaccuucuaccuau

SEQ ID NO: 140316 - RNA, 19 nt, Homo sapiens
  misc_RNA (1)...(19): siRNA sense strand
ggcacugacuguguugcua

SEQ ID NO: 140317 - RNA, 19 nt, Homo sapiens
  misc_RNA (1)...(19): siRNA sense strand
gggcugauuuauagacaac

SEQ ID NO: 140318 - RNA, 19 nt, Homo sapiens
  misc_RNA (1)...(19): siRNA sense strand
cagcucugguggcuauaga

SEQ ID NO: 140319 - RNA, 19 nt, Homo sapiens
  misc_RNA (1)...(19): siRNA sense strand
ugacuguguugcuaaagag

SEQ ID NO: 140320 - RNA, 19 nt, Homo sapiens
  misc_RNA (1)...(19): siRNA sense strand
guccugcuccuuugucuug

SEQ ID NO: 140321 - RNA, 19 nt, Homo sapiens
  misc_RNA (1)...(19): siRNA sense strand
aaccagaaggugccaauga

SEQ ID NO: 140322 - RNA, 19 nt, Homo sapiens
  misc_RNA (1)...(19): siRNA sense strand
cugacuguguugcuaaaga

SEQ ID NO: 140323 - RNA, 19 nt, Homo sapiens
  misc_RNA (1)...(19): siRNA sense strand
cuucauggguguggucuca

SEQ ID NO: 140324 - RNA, 19 nt, Homo sapiens
  misc_RNA (1)...(19): siRNA sense strand
cuacaucaaucaaaaccuu

SEQ ID NO: 140325 - RNA, 19 nt, Homo sapiens
  misc_RNA (1)...(19): siRNA sense strand
gaccugcgccacaccuuca

SEQ ID NO: 140326 - RNA, 19 nt, Homo sapiens
  misc_RNA (1)...(19): siRNA sense strand
ccuugaaccagauugauga

SEQ ID NO: 140327 - RNA, 19 nt, Homo sapiens
  misc_RNA (1)...(19): siRNA sense strand
cuucaacgcucagaacaac

SEQ ID NO: 140328 - RNA, 19 nt, Homo sapiens
  misc_RNA (1)...(19): siRNA sense strand
ucugguggcuauagacuac

SEQ ID NO: 140329 - RNA, 19 nt, Homo sapiens
  misc_RNA (1)...(19): siRNA sense strand
gaggaucagacacuucaag

SEQ ID NO: 140330 - RNA, 19 nt, Homo sapiens
  misc_RNA (1)...(19): siRNA sense strand
cuauagacuacaucaauca

SEQ ID NO: 140331 - RNA, 19 nt, Homo sapiens
  misc_RNA (1)...(19): siRNA sense strand
gacaaccgaacugcgauga

SEQ ID NO: 140332 - RNA, 19 nt, Homo sapiens
  misc_RNA (1)...(19): siRNA sense strand
cacugacuguguugcuaaa

SEQ ID NO: 140333 - RNA, 19 nt, Homo sapiens
  misc_RNA (1)...(19): siRNA sense strand
acaaacacaccuugaacca

SEQ ID NO: 140334 - RNA, 19 nt, Homo sapiens
  misc_RNA (1)...(19): siRNA sense strand
ucagaacaacggcuccaau

SEQ ID NO: 140335 - RNA, 19 nt, Homo sapiens
  misc_RNA (1)...(19): siRNA sense strand
cagggcugauuuauagaca

SEQ ID NO: 140336 - RNA, 19 nt, Homo sapiens
  misc_RNA (1)...(19): siRNA sense strand
uccagaaacugaggaagca

SEQ ID NO: 140337 - RNA, 19 nt, Homo sapiens
  misc_RNA (1)...(19): siRNA sense strand
ggaaagagaagcuugauuc

SEQ ID NO: 140338 - RNA, 19 nt, Homo sapiens
  misc_RNA (1)...(19): siRNA sense strand
gaagcuugauucugugauu

SEQ ID NO: 140339 - RNA, 19 nt, Homo sapiens
  misc_RNA (1)...(19): siRNA sense strand
ggugagugaugaaauggua

SEQ ID NO: 140340 - RNA, 19 nt, Homo sapiens
  misc_RNA (1)...(19): siRNA sense strand
caaaagagcccaugaaaga

SEQ ID NO: 140341 - RNA, 19 nt, Homo sapiens
  misc_RNA (1)...(19): siRNA sense strand
aggcagaaaugcucgauga

SEQ ID NO: 140342 - RNA, 19 nt, Homo sapiens
  misc_RNA (1)...(19): siRNA sense strand
gcagaacccgaguauccua

SEQ ID NO: 140343 - RNA, 19 nt, Homo sapiens
  misc_RNA (1)...(19): siRNA sense strand
gaacccgaguauccuaaag

SEQ ID NO: 140344 - RNA, 19 nt, Homo sapiens
  misc_RNA (1)...(19): siRNA sense strand
aaagagcccaugaaagaug

SEQ ID NO: 140345 - RNA, 19 nt, Homo sapiens
  misc_RNA (1)...(19): siRNA sense strand
gcugaaaacuucugugucu

SEQ ID NO: 140346 - RNA, 19 nt, Homo sapiens
  misc_RNA (1)...(19): siRNA sense strand
gaauucagcaucccagacu

SEQ ID NO: 140347 - RNA, 19 nt, Homo sapiens
  misc_RNA (1)...(19): siRNA sense strand
aagagcccaugaaagauga

SEQ ID NO: 140348 - RNA, 19 nt, Homo sapiens
  misc_RNA (1)...(19): siRNA sense strand
gaagaggaaagagaagcuu

SEQ ID NO: 140349 - RNA, 19 nt, Homo sapiens
  misc_RNA (1)...(19): siRNA sense strand
gaaggcaacuauggaugcu

SEQ ID NO: 140350 - RNA, 19 nt, Homo sapiens
  misc_RNA (1)...(19): siRNA sense strand
ucacaggaaggcugauuca

SEQ ID NO: 140351 - RNA, 19 nt, Homo sapiens
  misc_RNA (1)...(19): siRNA sense strand
uggagaagaggaaagagaa

SEQ ID NO: 140352 - RNA, 19 nt, Homo sapiens
  misc_RNA (1)...(19): siRNA sense strand
acuggugagugaugaaaug

SEQ ID NO: 140353 - RNA, 19 nt, Homo sapiens
  misc_RNA (1)...(19): siRNA sense strand
gcuugauucugugauugaa

SEQ ID NO: 140354 - RNA, 19 nt, Homo sapiens
  misc_RNA (1)...(19): siRNA sense strand
gcugaaggcaacuauggau

SEQ ID NO: 140355 - RNA, 19 nt, Homo sapiens
  misc_RNA (1)...(19): siRNA sense strand
ucauugagaagaauuugga

SEQ ID NO: 140356 - RNA, 19 nt, Homo sapiens
  misc_RNA (1)...(19): siRNA sense strand
cagaacccgaguauccuaa

SEQ ID NO: 140357 - RNA, 19 nt, Homo sapiens
  misc_RNA (1)...(19): siRNA sense strand
ggagaagaggaaagagaag

SEQ ID NO: 140358 - RNA, 19 nt, Homo sapiens
  misc_RNA (1)...(19): siRNA sense strand
aagcuugauucugugauug

SEQ ID NO: 140359 - RNA, 19 nt, Homo sapiens
  misc_RNA (1)...(19): siRNA sense strand
aaacuggugagugaugaaa

SEQ ID NO: 140360 - RNA, 19 nt, Homo sapiens
  misc_RNA (1)...(19): siRNA sense strand
cuucugugucugccauuua

SEQ ID NO: 140361 - RNA, 19 nt, Homo sapiens
  misc_RNA (1)...(19): siRNA sense strand
agaggaaagagaagcuuga

SEQ ID NO: 140362 - RNA, 19 nt, Homo sapiens
  misc_RNA (1)...(19): siRNA sense strand
gaggaaagagaagcuugau

SEQ ID NO: 140363 - RNA, 19 nt, Homo sapiens
  misc_RNA (1)...(19): siRNA sense strand
cggcagaacccgaguaucc

SEQ ID NO: 140364 - RNA, 19 nt, Homo sapiens
  misc_RNA (1)...(19): siRNA sense strand
ggaaagagaagcuugauuc

SEQ ID NO: 140365 - RNA, 19 nt, Homo sapiens
  misc_RNA (1)...(19): siRNA sense strand
gaagcuugauucugugauu

SEQ ID NO: 140366 - RNA, 19 nt, Homo sapiens
  misc_RNA (1)...(19): siRNA sense strand
ggugagugaugaaauggua

SEQ ID NO: 140367 - RNA, 19 nt, Homo sapiens
  misc_RNA (1)...(19): siRNA sense strand
caaaagagcccaugaaaga

SEQ ID NO: 140368 - RNA, 19 nt, Homo sapiens
  misc_RNA (1)...(19): siRNA sense strand
aggcagaaaugcucgauga

SEQ ID NO: 140369 - RNA, 19 nt, Homo sapiens
  misc_RNA (1)...(19): siRNA sense strand
gcagaacccgaguauccua

SEQ ID NO: 140370 - RNA, 19 nt, Homo sapiens
  misc_RNA (1)...(19): siRNA sense strand
gaacccgaguauccuaaag

SEQ ID NO: 140371 - RNA, 19 nt, Homo sapiens
  misc_RNA (1)...(19): siRNA sense strand
aaagagcccaugaaagaug

SEQ ID NO: 140372 - RNA, 19 nt, Homo sapiens
  misc_RNA (1)...(19): siRNA sense strand
gcugaaaacuucugugucu

SEQ ID NO: 140373 - RNA, 19 nt, Homo sapiens
  misc_RNA (1)...(19): siRNA sense strand
gaauucagcaucccagacu

SEQ ID NO: 140374 - RNA, 19 nt, Homo sapiens
  misc_RNA (1)...(19): siRNA sense strand
aagagcccaugaaagauga

SEQ ID NO: 140375 - RNA, 19 nt, Homo sapiens
  misc_RNA (1)...(19): siRNA sense strand
gaagaggaaagagaagcuu

SEQ ID NO: 140376 - RNA, 19 nt, Homo sapiens
  misc_RNA (1)...(19): siRNA sense strand
gaaggcaacuauggaugcu

SEQ ID NO: 140377 - RNA, 19 nt, Homo sapiens
  misc_RNA (1)...(19): siRNA sense strand
ucacaggaaggcugauuca

SEQ ID NO: 140378 - RNA, 19 nt, Homo sapiens
  misc_RNA (1)...(19): siRNA sense strand
uggagaagaggaaagagaa

SEQ ID NO: 140379 - RNA, 19 nt, Homo sapiens
  misc_RNA (1)...(19): siRNA sense strand
acuggugagugaugaaaug

SEQ ID NO: 140380 - RNA, 19 nt, Homo sapiens
  misc_RNA (1)...(19): siRNA sense strand
gcuugauucugugauugaa

SEQ ID NO: 140381 - RNA, 19 nt, Homo sapiens
  misc_RNA (1)...(19): siRNA sense strand
gcugaaggcaacuauggau

SEQ ID NO: 140382 - RNA, 19 nt, Homo sapiens
  misc_RNA (1)...(19): siRNA sense strand
ucauugagaagaauuugga

SEQ ID NO: 140383 - RNA, 19 nt, Homo sapiens
  misc_RNA (1)...(19): siRNA sense strand
cagaacccgaguauccuaa

SEQ ID NO: 140384 - RNA, 19 nt, Homo sapiens
  misc_RNA (1)...(19): siRNA sense strand
ggagaagaggaaagagaag

SEQ ID NO: 140385 - RNA, 19 nt, Homo sapiens
  misc_RNA (1)...(19): siRNA sense strand
aagcuugauucugugauug

SEQ ID NO: 140386 - RNA, 19 nt, Homo sapiens
  misc_RNA (1)...(19): siRNA sense strand
aaacuggugagugaugaaa

SEQ ID NO: 140387 - RNA, 19 nt, Homo sapiens
  misc_RNA (1)...(19): siRNA sense strand
cuucugugucugccauuua

SEQ ID NO: 140388 - RNA, 19 nt, Homo sapiens
  misc_RNA (1)...(19): siRNA sense strand
agaggaaagagaagcuuga

SEQ ID NO: 140389 - RNA, 19 nt, Homo sapiens
  misc_RNA (1)...(19): siRNA sense strand
gaggaaagagaagcuugau

SEQ ID NO: 140390 - RNA, 19 nt, Homo sapiens
  misc_RNA (1)...(19): siRNA sense strand
cggcagaacccgaguaucc

SEQ ID NO: 140391 - RNA, 19 nt, Homo sapiens
  misc_RNA (1)...(19): siRNA sense strand
ggaaagagaagcuugauuc

SEQ ID NO: 140392 - RNA, 19 nt, Homo sapiens
  misc_RNA (1)...(19): siRNA sense strand
gaagcuugauucugugauu

SEQ ID NO: 140393 - RNA, 19 nt, Homo sapiens
  misc_RNA (1)...(19): siRNA sense strand
ggugagugaugaaauggua

SEQ ID NO: 140394 - RNA, 19 nt, Homo sapiens
  misc_RNA (1)...(19): siRNA sense strand
caaaagagcccaugaaaga

SEQ ID NO: 140395 - RNA, 19 nt, Homo sapiens
  misc_RNA (1)...(19): siRNA sense strand
aggcagaaaugcucgauga

SEQ ID NO: 140396 - RNA, 19 nt, Homo sapiens
  misc_RNA (1)...(19): siRNA sense strand
gcagaacccgaguauccua

SEQ ID NO: 140397 - RNA, 19 nt, Homo sapiens
  misc_RNA (1)...(19): siRNA sense strand
gaacccgaguauccuaaag

SEQ ID NO: 140398 - RNA, 19 nt, Homo sapiens
  misc_RNA (1)...(19): siRNA sense strand
aaagagcccaugaaagaug

SEQ ID NO: 140399 - RNA, 19 nt, Homo sapiens
  misc_RNA (1)...(19): siRNA sense strand
gcugaaaacuucugugucu

SEQ ID NO: 140400 - RNA, 19 nt, Homo sapiens
  misc_RNA (1)...(19): siRNA sense strand
gaauucagcaucccagacu

SEQ ID NO: 140401 - RNA, 19 nt, Homo sapiens
  misc_RNA (1)...(19): siRNA sense strand
aagagcccaugaaagauga

SEQ ID NO: 140402 - RNA, 19 nt, Homo sapiens
  misc_RNA (1)...(19): siRNA sense strand
gaagaggaaagagaagcuu

SEQ ID NO: 140403 - RNA, 19 nt, Homo sapiens
  misc_RNA (1)...(19): siRNA sense strand
gaaggcaacuauggaugcu

SEQ ID NO: 140404 - RNA, 19 nt, Homo sapiens
  misc_RNA (1)...(19): siRNA sense strand
ucacaggaaggcugauuca

SEQ ID NO: 140405 - RNA, 19 nt, Homo sapiens
  misc_RNA (1)...(19): siRNA sense strand
uggagaagaggaaagagaa

SEQ ID NO: 140406 - RNA, 19 nt, Homo sapiens
  misc_RNA (1)...(19): siRNA sense strand
acuggugagugaugaaaug

SEQ ID NO: 140407 - RNA, 19 nt, Homo sapiens
  misc_RNA (1)...(19): siRNA sense strand
gcuugauucugugauugaa

SEQ ID NO: 140408 - RNA, 19 nt, Homo sapiens
  misc_RNA (1)...(19): siRNA sense strand
gcugaaggcaacuauggau

SEQ ID NO: 140409 - RNA, 19 nt, Homo sapiens
  misc_RNA (1)...(19): siRNA sense strand
ucauugagaagaauuugga

SEQ ID NO: 140410 - RNA, 19 nt, Homo sapiens
  misc_RNA (1)...(19): siRNA sense strand
cagaacccgaguauccuaa

SEQ ID NO: 140411 - RNA, 19 nt, Homo sapiens
  misc_RNA (1)...(19): siRNA sense strand
ggagaagaggaaagagaag

SEQ ID NO: 140412 - RNA, 19 nt, Homo sapiens
  misc_RNA (1)...(19): siRNA sense strand
aagcuugauucugugauug

SEQ ID NO: 140413 - RNA, 19 nt, Homo sapiens
  misc_RNA (1)...(19): siRNA sense strand
aaacuggugagugaugaaa

SEQ ID NO: 140414 - RNA, 19 nt, Homo sapiens
  misc_RNA (1)...(19): siRNA sense strand
cuucugugucugccauuua

SEQ ID NO: 140415 - RNA, 19 nt, Homo sapiens
  misc_RNA (1)...(19): siRNA sense strand
agaggaaagagaagcuuga

SEQ ID NO: 140416 - RNA, 19 nt, Homo sapiens
  misc_RNA (1)...(19): siRNA sense strand
gaggaaagagaagcuugau

SEQ ID NO: 140417 - RNA, 19 nt, Homo sapiens
  misc_RNA (1)...(19): siRNA sense strand
cggcagaacccgaguaucc

SEQ ID NO: 140418 - RNA, 19 nt, Homo sapiens
  misc_RNA (1)...(19): siRNA sense strand
guacuucgaugaugaauuu

SEQ ID NO: 140419 - RNA, 19 nt, Homo sapiens
  misc_RNA (1)...(19): siRNA sense strand
gcaaagagggcaucaguga

SEQ ID NO: 140420 - RNA, 19 nt, Homo sapiens
  misc_RNA (1)...(19): siRNA sense strand
caagguacuucgaugauga

SEQ ID NO: 140421 - RNA, 19 nt, Homo sapiens
  misc_RNA (1)...(19): siRNA sense strand
gggcuaaagugaccaugaa

SEQ ID NO: 140422 - RNA, 19 nt, Homo sapiens
  misc_RNA (1)...(19): siRNA sense strand
ugaggugucugucaucaaa

SEQ ID NO: 140423 - RNA, 19 nt, Homo sapiens
  misc_RNA (1)...(19): siRNA sense strand
ucacugcgcugaaguaugc

SEQ ID NO: 140424 - RNA, 19 nt, Homo sapiens
  misc_RNA (1)...(19): siRNA sense strand
gcagaaugccagcugauga

SEQ ID NO: 140425 - RNA, 19 nt, Homo sapiens
  misc_RNA (1)...(19): siRNA sense strand
ugacuucgacuaucucaaa

SEQ ID NO: 140426 - RNA, 19 nt, Homo sapiens
  misc_RNA (1)...(19): siRNA sense strand
cuaaagugaccaugaauga

SEQ ID NO: 140427 - RNA, 19 nt, Homo sapiens
  misc_RNA (1)...(19): siRNA sense strand
ugaaugacuucgacuaucu

SEQ ID NO: 140428 - RNA, 19 nt, Homo sapiens
  misc_RNA (1)...(19): siRNA sense strand
uugcugggcugcuuaagaa

SEQ ID NO: 140429 - RNA, 19 nt, Homo sapiens
  misc_RNA (1)...(19): siRNA sense strand
gcaaggcacgggcuaaagu

SEQ ID NO: 140430 - RNA, 19 nt, Homo sapiens
  misc_RNA (1)...(19): siRNA sense strand
gaccgccugugcuuuguga

SEQ ID NO: 140431 - RNA, 19 nt, Homo sapiens
  misc_RNA (1)...(19): siRNA sense strand
gggagcgugucuucacaga

SEQ ID NO: 140432 - RNA, 19 nt, Homo sapiens
  misc_RNA (1)...(19): siRNA sense strand
cagaaugccagcugaugaa

SEQ ID NO: 140433 - RNA, 19 nt, Homo sapiens
  misc_RNA (1)...(19): siRNA sense strand
gcuaaagugaccaugaaug

SEQ ID NO: 140434 - RNA, 19 nt, Homo sapiens
  misc_RNA (1)...(19): siRNA sense strand
caagcguggugaauacauc

SEQ ID NO: 140435 - RNA, 19 nt, Homo sapiens
  misc_RNA (1)...(19): siRNA sense strand
acccaacaccuuugucaua

SEQ ID NO: 140436 - RNA, 19 nt, Homo sapiens
  misc_RNA (1)...(19): siRNA sense strand
caucaagaucacugacuuu

SEQ ID NO: 140437 - RNA, 19 nt, Homo sapiens
  misc_RNA (1)...(19): siRNA sense strand
cgacugaggagauggaagu

SEQ ID NO: 140438 - RNA, 19 nt, Homo sapiens
  misc_RNA (1)...(19): siRNA sense strand
acacaagguacuucgauga

SEQ ID NO: 140439 - RNA, 19 nt, Homo sapiens
  misc_RNA (1)...(19): siRNA sense strand
gaaugccagcugaugaaga

SEQ ID NO: 140440 - RNA, 19 nt, Homo sapiens
  misc_RNA (1)...(19): siRNA sense strand
acaucaagaucacugacuu

SEQ ID NO: 140441 - RNA, 19 nt, Homo sapiens
  misc_RNA (1)...(19): siRNA sense strand
ggaugaagucgcucacaca

SEQ ID NO: 140442 - RNA, 19 nt, Homo sapiens
  misc_RNA (1)...(19): siRNA sense strand
caugaaugacuucgacuau

SEQ ID NO: 140443 - RNA, 19 nt, Homo sapiens
  misc_RNA (1)...(19): siRNA sense strand
acaagguacuucgaugaug

SEQ ID NO: 140444 - RNA, 19 nt, Homo sapiens
  misc_RNA (1)...(19): siRNA sense strand
gcuacuacgccaugaagau

SEQ ID NO: 140445 - RNA, 19 nt, Homo sapiens
  misc_RNA (1)...(19): siRNA sense strand
ggcuggguguggucaugua

SEQ ID NO: 140446 - RNA, 19 nt, Homo sapiens
  misc_RNA (1)...(19): siRNA sense strand
gcuggaggacaaugacuau

SEQ ID NO: 140447 - RNA, 19 nt, Homo sapiens
  misc_RNA (1)...(19): siRNA sense strand
cguccgaggucgacacaag

SEQ ID NO: 140448 - RNA, 19 nt, Homo sapiens
  misc_RNA (1)...(19): siRNA sense strand
ccaugaaugacuucgacua

SEQ ID NO: 140449 - RNA, 19 nt, Homo sapiens
  misc_RNA (1)...(19): siRNA sense strand
cgacacaagguacuucgau

SEQ ID NO: 140450 - RNA, 19 nt, Homo sapiens
  misc_RNA (1)...(19): siRNA sense strand
gcuccugccacccuucaaa

SEQ ID NO: 140451 - RNA, 19 nt, Homo sapiens
  misc_RNA (1)...(19): siRNA sense strand
agcgacggcuccuucauug

SEQ ID NO: 140452 - RNA, 19 nt, Homo sapiens
  misc_RNA (1)...(19): siRNA sense strand
aaacaacuucuccguagca

SEQ ID NO: 140453 - RNA, 19 nt, Homo sapiens
  misc_RNA (1)...(19): siRNA sense strand
cagcaaggcacgggcuaaa

SEQ ID NO: 140454 - RNA, 19 nt, Homo sapiens
  misc_RNA (1)...(19): siRNA sense strand
cgacccaacaccuuuguca

SEQ ID NO: 140455 - RNA, 19 nt, Homo sapiens
  misc_RNA (1)...(19): siRNA sense strand
cguggugaauacaucaaga

SEQ ID NO: 140456 - RNA, 19 nt, Homo sapiens
  misc_RNA (1)...(19): siRNA sense strand
gcccaguccaucacaauca

SEQ ID NO: 140457 - RNA, 19 nt, Homo sapiens
  misc_RNA (1)...(19): siRNA sense strand
cccaacaccuuugucauac

SEQ ID NO: 140458 - RNA, 19 nt, Homo sapiens
  misc_RNA (1)...(19): siRNA sense strand
cugaggugcuggaggacaa

SEQ ID NO: 140459 - RNA, 19 nt, Homo sapiens
  misc_RNA (1)...(19): siRNA sense strand
aaagugaccaugaaugacu

SEQ ID NO: 140460 - RNA, 19 nt, Homo sapiens
  misc_RNA (1)...(19): siRNA sense strand
caaggcacgggcuaaagug

SEQ ID NO: 140461 - RNA, 19 nt, Homo sapiens
  misc_RNA (1)...(19): siRNA sense strand
gcuuugugauggaguaugc

SEQ ID NO: 140462 - RNA, 19 nt, Homo sapiens
  misc_RNA (1)...(19): siRNA sense strand
ccacgaccgccugugcuuu

SEQ ID NO: 140463 - RNA, 19 nt, Homo sapiens
  misc_RNA (1)...(19): siRNA sense strand
gguauaccgcgacaucaag

SEQ ID NO: 140464 - RNA, 19 nt, Homo sapiens
  misc_RNA (1)...(19): siRNA sense strand
gcgaggaccccauggacua

SEQ ID NO: 140465 - RNA, 19 nt, Homo sapiens
  misc_RNA (1)...(19): siRNA sense strand
cacgguacuuccugcugaa

SEQ ID NO: 140466 - RNA, 19 nt, Homo sapiens
  misc_RNA (1)...(19): siRNA sense strand
ccacucagcucaucuccaa

SEQ ID NO: 140467 - RNA, 19 nt, Homo sapiens
  misc_RNA (1)...(19): siRNA sense strand
gcagaagaauggcaaacug

SEQ ID NO: 140468 - RNA, 19 nt, Homo sapiens
  misc_RNA (1)...(19): siRNA sense strand
gaaccgcacugagcucaug

SEQ ID NO: 140469 - RNA, 19 nt, Homo sapiens
  misc_RNA (1)...(19): siRNA sense strand
gcgaagacguggcgguguu

SEQ ID NO: 140470 - RNA, 19 nt, Homo sapiens
  misc_RNA (1)...(19): siRNA sense strand
caagcaagcaggaaaguca

SEQ ID NO: 140471 - RNA, 19 nt, Homo sapiens
  misc_RNA (1)...(19): siRNA sense strand
ucacugaggcggucauguu

SEQ ID NO: 140472 - RNA, 19 nt, Homo sapiens
  misc_RNA (1)...(19): siRNA sense strand
uccagaaggucgccaagaa

SEQ ID NO: 140473 - RNA, 19 nt, Homo sapiens
  misc_RNA (1)...(19): siRNA sense strand
gccaggacaucgccacuca

SEQ ID NO: 140474 - RNA, 19 nt, Homo sapiens
  misc_RNA (1)...(19): siRNA sense strand
ccggagacacgaaauauga

SEQ ID NO: 140475 - RNA, 19 nt, Homo sapiens
  misc_RNA (1)...(19): siRNA sense strand
aggaauggcuggcaaagca

SEQ ID NO: 140476 - RNA, 19 nt, Homo sapiens
  misc_RNA (1)...(19): siRNA sense strand
gcaaggcucaggacagcaa

SEQ ID NO: 140477 - RNA, 19 nt, Homo sapiens
  misc_RNA (1)...(19): siRNA sense strand
cauacaauguggacagaca

SEQ ID NO: 140478 - RNA, 19 nt, Homo sapiens
  misc_RNA (1)...(19): siRNA sense strand
ucccaugucuucuccuuug

SEQ ID NO: 140479 - RNA, 19 nt, Homo sapiens
  misc_RNA (1)...(19): siRNA sense strand
gcaagcaggaaagucagua

SEQ ID NO: 140480 - RNA, 19 nt, Homo sapiens
  misc_RNA (1)...(19): siRNA sense strand
ggagacacgaaauaugaga

SEQ ID NO: 140481 - RNA, 19 nt, Homo sapiens
  misc_RNA (1)...(19): siRNA sense strand
ggacauugacgugauccuu

SEQ ID NO: 140482 - RNA, 19 nt, Homo sapiens
  misc_RNA (1)...(19): siRNA sense strand
gcugaccacucccaugucu

SEQ ID NO: 140483 - RNA, 19 nt, Homo sapiens
  misc_RNA (1)...(19): siRNA sense strand
gaaccgcaacugguacuca

SEQ ID NO: 140484 - RNA, 19 nt, Homo sapiens
  misc_RNA (1)...(19): siRNA sense strand
gaugccagccagaauggaa

SEQ ID NO: 140485 - RNA, 19 nt, Homo sapiens
  misc_RNA (1)...(19): siRNA sense strand
gcaggagcagagcuucgua

SEQ ID NO: 140486 - RNA, 19 nt, Homo sapiens
  misc_RNA (1)...(19): siRNA sense strand
gggccaagcaagcaggaaa

SEQ ID NO: 140487 - RNA, 19 nt, Homo sapiens
  misc_RNA (1)...(19): siRNA sense strand
caacacgacacgcggcaau

SEQ ID NO: 140488 - RNA, 19 nt, Homo sapiens
  misc_RNA (1)...(19): siRNA sense strand
ugaccacucccaugucuuc

SEQ ID NO: 140489 - RNA, 19 nt, Homo sapiens
  misc_RNA (1)...(19): siRNA sense strand
cgaccagacgugaaugaga

SEQ ID NO: 140490 - RNA, 19 nt, Homo sapiens
  misc_RNA (1)...(19): siRNA sense strand
gcaccuacgcacacacagu

SEQ ID NO: 140491 - RNA, 19 nt, Homo sapiens
  misc_RNA (1)...(19): siRNA sense strand
ggaggccgcaaguacaugu

SEQ ID NO: 140492 - RNA, 19 nt, Homo sapiens
  misc_RNA (1)...(19): siRNA sense strand
gcccggagacacgaaauau

SEQ ID NO: 140493 - RNA, 19 nt, Homo sapiens
  misc_RNA (1)...(19): siRNA sense strand
gcgagggagcuccaucuuc

SEQ ID NO: 140494 - RNA, 19 nt, Homo sapiens
  misc_RNA (1)...(19): siRNA sense strand
cauguucgacgacgccauu

SEQ ID NO: 140495 - RNA, 19 nt, Homo sapiens
  misc_RNA (1)...(19): siRNA sense strand
ggccgcaaguacauguuuc

SEQ ID NO: 140496 - RNA, 19 nt, Homo sapiens
  misc_RNA (1)...(19): siRNA sense strand
ccuggaugcugccaagaag

SEQ ID NO: 140497 - RNA, 19 nt, Homo sapiens
  misc_RNA (1)...(19): siRNA sense strand
gaagacguggcgguguuug

SEQ ID NO: 140498 - RNA, 19 nt, Homo sapiens
  misc_RNA (1)...(19): siRNA sense strand
cgaagacguggcgguguuu

SEQ ID NO: 140499 - RNA, 19 nt, Homo sapiens
  misc_RNA (1)...(19): siRNA sense strand
gggcuacguguucaacuca

SEQ ID NO: 140500 - RNA, 19 nt, Homo sapiens
  misc_RNA (1)...(19): siRNA sense strand
gcaaagccuacacguccau

SEQ ID NO: 140501 - RNA, 19 nt, Homo sapiens
  misc_RNA (1)...(19): siRNA sense strand
cauggacauugacgugauc

SEQ ID NO: 140502 - RNA, 19 nt, Homo sapiens
  misc_RNA (1)...(19): siRNA sense strand
acacgacacgcggcaauga

SEQ ID NO: 140503 - RNA, 19 nt, Homo sapiens
  misc_RNA (1)...(19): siRNA sense strand
acauggacauugacgugau

SEQ ID NO: 140504 - RNA, 19 nt, Homo sapiens
  misc_RNA (1)...(19): siRNA sense strand
caucgccacucagcucauc

SEQ ID NO: 140505 - RNA, 19 nt, Homo sapiens
  misc_RNA (1)...(19): siRNA sense strand
gaaccgcacugagcucaug

SEQ ID NO: 140506 - RNA, 19 nt, Homo sapiens
  misc_RNA (1)...(19): siRNA sense strand
ugacugagacgaucauguu

SEQ ID NO: 140507 - RNA, 19 nt, Homo sapiens
  misc_RNA (1)...(19): siRNA sense strand
cggaaacgguccaggcuau

SEQ ID NO: 140508 - RNA, 19 nt, Homo sapiens
  misc_RNA (1)...(19): siRNA sense strand
ccuacacgguccuccuaua

SEQ ID NO: 140509 - RNA, 19 nt, Homo sapiens
  misc_RNA (1)...(19): siRNA sense strand
gccaagaaccucaucaucu

SEQ ID NO: 140510 - RNA, 19 nt, Homo sapiens
  misc_RNA (1)...(19): siRNA sense strand
gcacagacagccgccaaga

SEQ ID NO: 140511 - RNA, 19 nt, Homo sapiens
  misc_RNA (1)...(19): siRNA sense strand
gcaggagcagaccuucaua

SEQ ID NO: 140512 - RNA, 19 nt, Homo sapiens
  misc_RNA (1)...(19): siRNA sense strand
gggccgaaaguacauguuu

SEQ ID NO: 140513 - RNA, 19 nt, Homo sapiens
  misc_RNA (1)...(19): siRNA sense strand
gcagaagaaggacaaacug

SEQ ID NO: 140514 - RNA, 19 nt, Homo sapiens
  misc_RNA (1)...(19): siRNA sense strand
gaaacgguccaggcuaugu

SEQ ID NO: 140515 - RNA, 19 nt, Homo sapiens
  misc_RNA (1)...(19): siRNA sense strand
caggcuaugugcucaagga

SEQ ID NO: 140516 - RNA, 19 nt, Homo sapiens
  misc_RNA (1)...(19): siRNA sense strand
cuucauagcgcacgucaug

SEQ ID NO: 140517 - RNA, 19 nt, Homo sapiens
  misc_RNA (1)...(19): siRNA sense strand
cuggagacaugaaauacga

SEQ ID NO: 140518 - RNA, 19 nt, Homo sapiens
  misc_RNA (1)...(19): siRNA sense strand
ugaugaaucgggccaagaa

SEQ ID NO: 140519 - RNA, 19 nt, Homo sapiens
  misc_RNA (1)...(19): siRNA sense strand
uaaaagggcagaagaagga

SEQ ID NO: 140520 - RNA, 19 nt, Homo sapiens
  misc_RNA (1)...(19): siRNA sense strand
gcacugacugagacgauca

SEQ ID NO: 140521 - RNA, 19 nt, Homo sapiens
  misc_RNA (1)...(19): siRNA sense strand
agaaucuggugcaggaaug

SEQ ID NO: 140522 - RNA, 19 nt, Homo sapiens
  misc_RNA (1)...(19): siRNA sense strand
gaugaaucgggccaagaaa

SEQ ID NO: 140523 - RNA, 19 nt, Homo sapiens
  misc_RNA (1)...(19): siRNA sense strand
cgaccacucccacgucuuc

SEQ ID NO: 140524 - RNA, 19 nt, Homo sapiens
  misc_RNA (1)...(19): siRNA sense strand
gacccugaguacccagaug

SEQ ID NO: 140525 - RNA, 19 nt, Homo sapiens
  misc_RNA (1)...(19): siRNA sense strand
gcgagggagcuccaucuuc

SEQ ID NO: 140526 - RNA, 19 nt, Homo sapiens
  misc_RNA (1)...(19): siRNA sense strand
cauguucgacgacgccauu

SEQ ID NO: 140527 - RNA, 19 nt, Homo sapiens
  misc_RNA (1)...(19): siRNA sense strand
ccagaccauuggcuugagu

SEQ ID NO: 140528 - RNA, 19 nt, Homo sapiens
  misc_RNA (1)...(19): siRNA sense strand
cugaguacccagaugacua

SEQ ID NO: 140529 - RNA, 19 nt, Homo sapiens
  misc_RNA (1)...(19): siRNA sense strand
ggaaacgguccaggcuaug

SEQ ID NO: 140530 - RNA, 19 nt, Homo sapiens
  misc_RNA (1)...(19): siRNA sense strand
cugagacgaucauguucga

SEQ ID NO: 140531 - RNA, 19 nt, Homo sapiens
  misc_RNA (1)...(19): siRNA sense strand
gcagcucaucuccaacaug

SEQ ID NO: 140532 - RNA, 19 nt, Homo sapiens
  misc_RNA (1)...(19): siRNA sense strand
ggccuacacgguccuccua

SEQ ID NO: 140533 - RNA, 19 nt, Homo sapiens
  misc_RNA (1)...(19): siRNA sense strand
agacaugaaauacgagauc

SEQ ID NO: 140534 - RNA, 19 nt, Homo sapiens
  misc_RNA (1)...(19): siRNA sense strand
ggcagaagaaggacaaacu

SEQ ID NO: 140535 - RNA, 19 nt, Homo sapiens
  misc_RNA (1)...(19): siRNA sense strand
ggaggagaacccggacuuc

SEQ ID NO: 140536 - RNA, 19 nt, Homo sapiens
  misc_RNA (1)...(19): siRNA sense strand
acagacagccgccaagaac

SEQ ID NO: 140537 - RNA, 19 nt, Homo sapiens
  misc_RNA (1)...(19): siRNA sense strand
caaacuggggccugagaua

SEQ ID NO: 140538 - RNA, 19 nt, Homo sapiens
  misc_RNA (1)...(19): siRNA sense strand
gaaacaaacuuaagucaga

SEQ ID NO: 140539 - RNA, 19 nt, Homo sapiens
  misc_RNA (1)...(19): siRNA sense strand
gaaaucggauggaacuuau

SEQ ID NO: 140540 - RNA, 19 nt, Homo sapiens
  misc_RNA (1)...(19): siRNA sense strand
gcaggaagcuuauguacuc

SEQ ID NO: 140541 - RNA, 19 nt, Homo sapiens
  misc_RNA (1)...(19): siRNA sense strand
ggaaugaaaucggauggaa

SEQ ID NO: 140542 - RNA, 19 nt, Homo sapiens
  misc_RNA (1)...(19): siRNA sense strand
gugaccaccuuguuuguua

SEQ ID NO: 140543 - RNA, 19 nt, Homo sapiens
  misc_RNA (1)...(19): siRNA sense strand
gauaccagguucugucauu

SEQ ID NO: 140544 - RNA, 19 nt, Homo sapiens
  misc_RNA (1)...(19): siRNA sense strand
gaugugcaauguucaauca

SEQ ID NO: 140545 - RNA, 19 nt, Homo sapiens
  misc_RNA (1)...(19): siRNA sense strand
gugcuauguucaaugauua

SEQ ID NO: 140546 - RNA, 19 nt, Homo sapiens
  misc_RNA (1)...(19): siRNA sense strand
ugaaggaugugcaauguuc

SEQ ID NO: 140547 - RNA, 19 nt, Homo sapiens
  misc_RNA (1)...(19): siRNA sense strand
gugcaauguucaaucauaa

SEQ ID NO: 140548 - RNA, 19 nt, Homo sapiens
  misc_RNA (1)...(19): siRNA sense strand
gagcuugacccagcaguua

SEQ ID NO: 140549 - RNA, 19 nt, Homo sapiens
  misc_RNA (1)...(19): siRNA sense strand
gaacuuauuggacuauuca

SEQ ID NO: 140550 - RNA, 19 nt, Homo sapiens
  misc_RNA (1)...(19): siRNA sense strand
guacuuauauacucuggau

SEQ ID NO: 140551 - RNA, 19 nt, Homo sapiens
  misc_RNA (1)...(19): siRNA sense strand
cccagaagauugaagguuu

SEQ ID NO: 140552 - RNA, 19 nt, Homo sapiens
  misc_RNA (1)...(19): siRNA sense strand
uaagucagaccuccuauga

SEQ ID NO: 140553 - RNA, 19 nt, Homo sapiens
  misc_RNA (1)...(19): siRNA sense strand
agagugcuauguucaauga

SEQ ID NO: 140554 - RNA, 19 nt, Homo sapiens
  misc_RNA (1)...(19): siRNA sense strand
gagaguagcauguuugucu

SEQ ID NO: 140555 - RNA, 19 nt, Homo sapiens
  misc_RNA (1)...(19): siRNA sense strand
gaucaggaaaguuguagaa

SEQ ID NO: 140556 - RNA, 19 nt, Homo sapiens
  misc_RNA (1)...(19): siRNA sense strand
agucagaccuccuaugaug

SEQ ID NO: 140557 - RNA, 19 nt, Homo sapiens
  misc_RNA (1)...(19): siRNA sense strand
gauggaacuuauuggacua

SEQ ID NO: 140558 - RNA, 19 nt, Homo sapiens
  misc_RNA (1)...(19): siRNA sense strand
ugaaaucggauggaacuua

SEQ ID NO: 140559 - RNA, 19 nt, Homo sapiens
  misc_RNA (1)...(19): siRNA sense strand
ucacaucacuccagaacca

SEQ ID NO: 140560 - RNA, 19 nt, Homo sapiens
  misc_RNA (1)...(19): siRNA sense strand
guaccacccucuugcugaa

SEQ ID NO: 140561 - RNA, 19 nt, Homo sapiens
  misc_RNA (1)...(19): siRNA sense strand
caggaaaguuguagaaguc

SEQ ID NO: 140562 - RNA, 19 nt, Homo sapiens
  misc_RNA (1)...(19): siRNA sense strand
ggaacuuauuggacuauuc

SEQ ID NO: 140563 - RNA, 19 nt, Homo sapiens
  misc_RNA (1)...(19): siRNA sense strand
uggaaauucugaugaguga

SEQ ID NO: 140564 - RNA, 19 nt, Homo sapiens
  misc_RNA (1)...(19): siRNA sense strand
caugaaagaugguguuacu

SEQ ID NO: 140565 - RNA, 19 nt, Homo sapiens
  misc_RNA (1)...(19): siRNA sense strand
ugugcaauguucaaucaua

SEQ ID NO: 140566 - RNA, 19 nt, Homo sapiens
  misc_RNA (1)...(19): siRNA sense strand
ggaaaguuguagaagucuu

SEQ ID NO: 140567 - RNA, 19 nt, Homo sapiens
  misc_RNA (1)...(19): siRNA sense strand
guucaauccuuguggguau

SEQ ID NO: 140568 - RNA, 19 nt, Homo sapiens
  misc_RNA (1)...(19): siRNA sense strand
ccaggaagaaauagaguuu

SEQ ID NO: 140569 - RNA, 19 nt, Homo sapiens
  misc_RNA (1)...(19): siRNA sense strand
aagcuuauguacucaguga

SEQ ID NO: 140570 - RNA, 19 nt, Homo sapiens
  misc_RNA (1)...(19): siRNA sense strand
ucaggaaaguuguagaagu

SEQ ID NO: 140571 - RNA, 19 nt, Homo sapiens
  misc_RNA (1)...(19): siRNA sense strand
uggaauucgugaccugaua

SEQ ID NO: 140572 - RNA, 19 nt, Homo sapiens
  misc_RNA (1)...(19): siRNA sense strand
aaucagaguucuaaauguc

SEQ ID NO: 140573 - RNA, 19 nt, Homo sapiens
  misc_RNA (1)...(19): siRNA sense strand
gacuguugguacuuauaua

SEQ ID NO: 140574 - RNA, 19 nt, Homo sapiens
  misc_RNA (1)...(19): siRNA sense strand
ccaccuuguuuguuaauca

SEQ ID NO: 140575 - RNA, 19 nt, Homo sapiens
  misc_RNA (1)...(19): siRNA sense strand
gaaaauuugugaccaccuu

SEQ ID NO: 140576 - RNA, 19 nt, Homo sapiens
  misc_RNA (1)...(19): siRNA sense strand
ggaccaguucuacaugaaa

SEQ ID NO: 140577 - RNA, 19 nt, Homo sapiens
  misc_RNA (1)...(19): siRNA sense strand
ugaccaccuuguuuguuaa

SEQ ID NO: 140578 - RNA, 19 nt, Homo sapiens
  misc_RNA (1)...(19): siRNA sense strand
ggaagcuuauguacucagu

SEQ ID NO: 140579 - RNA, 19 nt, Homo sapiens
  misc_RNA (1)...(19): siRNA sense strand
cuaagaagcagcaacaaca

SEQ ID NO: 140580 - RNA, 19 nt, Homo sapiens
  misc_RNA (1)...(19): siRNA sense strand
cagcaguuauggaccaguu

SEQ ID NO: 140581 - RNA, 19 nt, Homo sapiens
  misc_RNA (1)...(19): siRNA sense strand
gaccaguucuacaugaaag

SEQ ID NO: 140582 - RNA, 19 nt, Homo sapiens
  misc_RNA (1)...(19): siRNA sense strand
aagaugguguuacugcaaa

SEQ ID NO: 140583 - RNA, 19 nt, Homo sapiens
  misc_RNA (1)...(19): siRNA sense strand
gagaagcugcuggagguuu

SEQ ID NO: 140584 - RNA, 19 nt, Homo sapiens
  misc_RNA (1)...(19): siRNA sense strand
gccacaauguucaauccuu

SEQ ID NO: 140585 - RNA, 19 nt, Homo sapiens
  misc_RNA (1)...(19): siRNA sense strand
ccagagugcuauguucaau

SEQ ID NO: 140586 - RNA, 19 nt, Homo sapiens
  misc_RNA (1)...(19): siRNA sense strand
agaagcugcuggagguuug

SEQ ID NO: 140587 - RNA, 19 nt, Homo sapiens
  misc_RNA (1)...(19): siRNA sense strand
gcaauguucaaucauaagu

SEQ ID NO: 140588 - RNA, 19 nt, Homo sapiens
  misc_RNA (1)...(19): siRNA sense strand
gguaaucagucagccagau

SEQ ID NO: 140589 - RNA, 19 nt, Homo sapiens
  misc_RNA (1)...(19): siRNA sense strand
guaugaauucugacuguug

SEQ ID NO: 140590 - RNA, 19 nt, Homo sapiens
  misc_RNA (1)...(19): siRNA sense strand
ccagagagucggguaauca

SEQ ID NO: 140591 - RNA, 19 nt, Homo sapiens
  misc_RNA (1)...(19): siRNA sense strand
gcacuaucccaagaucuga

SEQ ID NO: 140592 - RNA, 19 nt, Homo sapiens
  misc_RNA (1)...(19): siRNA sense strand
cagugagaguagcauguuu

SEQ ID NO: 140593 - RNA, 19 nt, Homo sapiens
  misc_RNA (1)...(19): siRNA sense strand
gaagcuugcuagggauuac

SEQ ID NO: 140594 - RNA, 19 nt, Homo sapiens
  misc_RNA (1)...(19): siRNA sense strand
ggacauacuuuugaaggau

SEQ ID NO: 140595 - RNA, 19 nt, Homo sapiens
  misc_RNA (1)...(19): siRNA sense strand
agugcuauguucaaugauu

SEQ ID NO: 140596 - RNA, 19 nt, Homo sapiens
  misc_RNA (1)...(19): siRNA sense strand
gggauuacaguggguuuga

SEQ ID NO: 140597 - RNA, 19 nt, Homo sapiens
  misc_RNA (1)...(19): siRNA sense strand
ccagaagauugaagguuuu

SEQ ID NO: 140598 - RNA, 19 nt, Homo sapiens
  misc_RNA (1)...(19): siRNA sense strand
ugacuguugguacuuauau

SEQ ID NO: 140599 - RNA, 19 nt, Homo sapiens
  misc_RNA (1)...(19): siRNA sense strand
guagcauguuugucuccaa

SEQ ID NO: 140600 - RNA, 19 nt, Homo sapiens
  misc_RNA (1)...(19): siRNA sense strand
gaaggaugugcaauguuca

SEQ ID NO: 140601 - RNA, 19 nt, Homo sapiens
  misc_RNA (1)...(19): siRNA sense strand
ccuuguggguauucgauga

SEQ ID NO: 140602 - RNA, 19 nt, Homo sapiens
  misc_RNA (1)...(19): siRNA sense strand
uucgaugaauggaaugaaa

SEQ ID NO: 140603 - RNA, 19 nt, Homo sapiens
  misc_RNA (1)...(19): siRNA sense strand
aaucggauggaacuuauug

SEQ ID NO: 140604 - RNA, 19 nt, Homo sapiens
  misc_RNA (1)...(19): siRNA sense strand
cagcaacaacagcagaguu

SEQ ID NO: 140605 - RNA, 19 nt, Homo sapiens
  misc_RNA (1)...(19): siRNA sense strand
gcuaagaagcagcaacaac

SEQ ID NO: 140606 - RNA, 19 nt, Homo sapiens
  misc_RNA (1)...(19): siRNA sense strand
ugaauucugacuguuggua

SEQ ID NO: 140607 - RNA, 19 nt, Homo sapiens
  misc_RNA (1)...(19): siRNA sense strand
ggaauucgugaccugauac

SEQ ID NO: 140608 - RNA, 19 nt, Homo sapiens
  misc_RNA (1)...(19): siRNA sense strand
aaagaugguguuacugcaa

SEQ ID NO: 140609 - RNA, 19 nt, Homo sapiens
  misc_RNA (1)...(19): siRNA sense strand
cuacaugaaagaugguguu

SEQ ID NO: 140610 - RNA, 19 nt, Homo sapiens
  misc_RNA (1)...(19): siRNA sense strand
uuugaaggaugugcaaugu

SEQ ID NO: 140611 - RNA, 19 nt, Homo sapiens
  misc_RNA (1)...(19): siRNA sense strand
uggaccaguucuacaugaa

SEQ ID NO: 140612 - RNA, 19 nt, Homo sapiens
  misc_RNA (1)...(19): siRNA sense strand
gaucugagugggacauacu

SEQ ID NO: 140613 - RNA, 19 nt, Homo sapiens
  misc_RNA (1)...(19): siRNA sense strand
guaaucagucagccagauc

SEQ ID NO: 140614 - RNA, 19 nt, Homo sapiens
  misc_RNA (1)...(19): siRNA sense strand
agagucggguaaucaguca

SEQ ID NO: 140615 - RNA, 19 nt, Homo sapiens
  misc_RNA (1)...(19): siRNA sense strand
uuauuggacuauucacauc

SEQ ID NO: 140616 - RNA, 19 nt, Homo sapiens
  misc_RNA (1)...(19): siRNA sense strand
guugguacuuauauacucu

SEQ ID NO: 140617 - RNA, 19 nt, Homo sapiens
  misc_RNA (1)...(19): siRNA sense strand
cgacgcaaaccaaggaucu

SEQ ID NO: 140618 - RNA, 19 nt, Homo sapiens
  misc_RNA (1)...(19): siRNA sense strand
ugaagcuugcuagggauua

SEQ ID NO: 140619 - RNA, 19 nt, Homo sapiens
  misc_RNA (1)...(19): siRNA sense strand
ucagugagaguagcauguu

SEQ ID NO: 140620 - RNA, 19 nt, Homo sapiens
  misc_RNA (1)...(19): siRNA sense strand
uacaugaaagaugguguua

SEQ ID NO: 140621 - RNA, 19 nt, Homo sapiens
  misc_RNA (1)...(19): siRNA sense strand
ggaugugcaauguucaauc

SEQ ID NO: 140622 - RNA, 19 nt, Homo sapiens
  misc_RNA (1)...(19): siRNA sense strand
cuuauauacucuggauuuc

SEQ ID NO: 140623 - RNA, 19 nt, Homo sapiens
  misc_RNA (1)...(19): siRNA sense strand
gaaaguguuugaagaguuu

SEQ ID NO: 140624 - RNA, 19 nt, Homo sapiens
  misc_RNA (1)...(19): siRNA sense strand
gaacuucacccgacgcuua

SEQ ID NO: 140625 - RNA, 19 nt, Homo sapiens
  misc_RNA (1)...(19): siRNA sense strand
gacaagcacugauuuggua

SEQ ID NO: 140626 - RNA, 19 nt, Homo sapiens
  misc_RNA (1)...(19): siRNA sense strand
gcaauuuccugacauaaag

SEQ ID NO: 140627 - RNA, 19 nt, Homo sapiens
  misc_RNA (1)...(19): siRNA sense strand
gaacaucaucaguuucuuu

SEQ ID NO: 140628 - RNA, 19 nt, Homo sapiens
  misc_RNA (1)...(19): siRNA sense strand
gaaaaugguuggugagaaa

SEQ ID NO: 140629 - RNA, 19 nt, Homo sapiens
  misc_RNA (1)...(19): siRNA sense strand
uggaaacacugcaugauuu

SEQ ID NO: 140630 - RNA, 19 nt, Homo sapiens
  misc_RNA (1)...(19): siRNA sense strand
gacaacaccuucccagaau

SEQ ID NO: 140631 - RNA, 19 nt, Homo sapiens
  misc_RNA (1)...(19): siRNA sense strand
acagagaccuugccaccua

SEQ ID NO: 140632 - RNA, 19 nt, Homo sapiens
  misc_RNA (1)...(19): siRNA sense strand
ugacuuacaagaagaguua

SEQ ID NO: 140633 - RNA, 19 nt, Homo sapiens
  misc_RNA (1)...(19): siRNA sense strand
ggaaagcugaugagacaaa

SEQ ID NO: 140634 - RNA, 19 nt, Homo sapiens
  misc_RNA (1)...(19): siRNA sense strand
gaaagcacagaaaguguuu

SEQ ID NO: 140635 - RNA, 19 nt, Homo sapiens
  misc_RNA (1)...(19): siRNA sense strand
cgaguuggauuuuauguua

SEQ ID NO: 140636 - RNA, 19 nt, Homo sapiens
  misc_RNA (1)...(19): siRNA sense strand
caaacuguaugaagugaug

SEQ ID NO: 140637 - RNA, 19 nt, Homo sapiens
  misc_RNA (1)...(19): siRNA sense strand
aagaauauguccagaacuu

SEQ ID NO: 140638 - RNA, 19 nt, Homo sapiens
  misc_RNA (1)...(19): siRNA sense strand
caacagugccucaggagaa

SEQ ID NO: 140639 - RNA, 19 nt, Homo sapiens
  misc_RNA (1)...(19): siRNA sense strand
ccaggauacuucauuauuc

SEQ ID NO: 140640 - RNA, 19 nt, Homo sapiens
  misc_RNA (1)...(19): siRNA sense strand
gaagaguuaccaucauuau

SEQ ID NO: 140641 - RNA, 19 nt, Homo sapiens
  misc_RNA (1)...(19): siRNA sense strand
uaaggcagaagaagaauuu

SEQ ID NO: 140642 - RNA, 19 nt, Homo sapiens
  misc_RNA (1)...(19): siRNA sense strand
uguaugaagugaugacaaa

SEQ ID NO: 140643 - RNA, 19 nt, Homo sapiens
  misc_RNA (1)...(19): siRNA sense strand
ggacgacaagcacugauuu

SEQ ID NO: 140644 - RNA, 19 nt, Homo sapiens
  misc_RNA (1)...(19): siRNA sense strand
caacuuuguuccagaaauc

SEQ ID NO: 140645 - RNA, 19 nt, Homo sapiens
  misc_RNA (1)...(19): siRNA sense strand
guggauggguccuugcuaa

SEQ ID NO: 140646 - RNA, 19 nt, Homo sapiens
  misc_RNA (1)...(19): siRNA sense strand
aagaagaguuaccaucauu

SEQ ID NO: 140647 - RNA, 19 nt, Homo sapiens
  misc_RNA (1)...(19): siRNA sense strand
gcacagaaaguguuugaag

SEQ ID NO: 140648 - RNA, 19 nt, Homo sapiens
  misc_RNA (1)...(19): siRNA sense strand
gaagccaaguuucauaagg

SEQ ID NO: 140649 - RNA, 19 nt, Homo sapiens
  misc_RNA (1)...(19): siRNA sense strand
caggauacuucauuauuca

SEQ ID NO: 140650 - RNA, 19 nt, Homo sapiens
  misc_RNA (1)...(19): siRNA sense strand
aggagaacaucaucaguuu

SEQ ID NO: 140651 - RNA, 19 nt, Homo sapiens
  misc_RNA (1)...(19): siRNA sense strand
ucacagagucgcugcauga

SEQ ID NO: 140652 - RNA, 19 nt, Homo sapiens
  misc_RNA (1)...(19): siRNA sense strand
cacagaaaguguuugaaga

SEQ ID NO: 140653 - RNA, 19 nt, Homo sapiens
  misc_RNA (1)...(19): siRNA sense strand
ucuaugagccugacuggua

SEQ ID NO: 140654 - RNA, 19 nt, Homo sapiens
  misc_RNA (1)...(19): siRNA sense strand
cagagucgcugcaugaagu

SEQ ID NO: 140655 - RNA, 19 nt, Homo sapiens
  misc_RNA (1)...(19): siRNA sense strand
cgaagaauauguccagaac

SEQ ID NO: 140656 - RNA, 19 nt, Homo sapiens
  misc_RNA (1)...(19): siRNA sense strand
caagaagaguuaccaucau

SEQ ID NO: 140657 - RNA, 19 nt, Homo sapiens
  misc_RNA (1)...(19): siRNA sense strand
uaacguugacuuacaagaa

SEQ ID NO: 140658 - RNA, 19 nt, Homo sapiens
  misc_RNA (1)...(19): siRNA sense strand
ggaaggagaaaacgaaaua

SEQ ID NO: 140659 - RNA, 19 nt, Homo sapiens
  misc_RNA (1)...(19): siRNA sense strand
gaacuccgaggauauuuag

SEQ ID NO: 140660 - RNA, 19 nt, Homo sapiens
  misc_RNA (1)...(19): siRNA sense strand
ugacaacaccuucccagaa

SEQ ID NO: 140661 - RNA, 19 nt, Homo sapiens
  misc_RNA (1)...(19): siRNA sense strand
gaauauguccagaacuuca

SEQ ID NO: 140662 - RNA, 19 nt, Homo sapiens
  misc_RNA (1)...(19): siRNA sense strand
gaggauauuuagcagcaau

SEQ ID NO: 140663 - RNA, 19 nt, Homo sapiens
  misc_RNA (1)...(19): siRNA sense strand
caacaccuucccagaauga

SEQ ID NO: 140664 - RNA, 19 nt, Homo sapiens
  misc_RNA (1)...(19): siRNA sense strand
uugaagaguuuaacguuga

SEQ ID NO: 140665 - RNA, 19 nt, Homo sapiens
  misc_RNA (1)...(19): siRNA sense strand
agaaaguguuugaagaguu

SEQ ID NO: 140666 - RNA, 19 nt, Homo sapiens
  misc_RNA (1)...(19): siRNA sense strand
gccacaaacuguaugaagu

SEQ ID NO: 140667 - RNA, 19 nt, Homo sapiens
  misc_RNA (1)...(19): siRNA sense strand
ucccugaggugaagaaaga

SEQ ID NO: 140668 - RNA, 19 nt, Homo sapiens
  misc_RNA (1)...(19): siRNA sense strand
gaacuucaaacggcaagaa

SEQ ID NO: 140669 - RNA, 19 nt, Homo sapiens
  misc_RNA (1)...(19): siRNA sense strand
ggcagcaaauucugaugaa

SEQ ID NO: 140670 - RNA, 19 nt, Homo sapiens
  misc_RNA (1)...(19): siRNA sense strand
cugaugaacuuaccuuaca

SEQ ID NO: 140671 - RNA, 19 nt, Homo sapiens
  misc_RNA (1)...(19): siRNA sense strand
ggagaaaacgaaauaacua

SEQ ID NO: 140672 - RNA, 19 nt, Homo sapiens
  misc_RNA (1)...(19): siRNA sense strand
ggcaauuuccugacauaaa

SEQ ID NO: 140673 - RNA, 19 nt, Homo sapiens
  misc_RNA (1)...(19): siRNA sense strand
caucaucaguuucuuugag

SEQ ID NO: 140674 - RNA, 19 nt, Homo sapiens
  misc_RNA (1)...(19): siRNA sense strand
cgacagcaaguccaaauca

SEQ ID NO: 140675 - RNA, 19 nt, Homo sapiens
  misc_RNA (1)...(19): siRNA sense strand
guggaaacacugcaugauu

SEQ ID NO: 140676 - RNA, 19 nt, Homo sapiens
  misc_RNA (1)...(19): siRNA sense strand
ggggaaagcugaugagaca

SEQ ID NO: 140677 - RNA, 19 nt, Homo sapiens
  misc_RNA (1)...(19): siRNA sense strand
caggagaacaucaucaguu

SEQ ID NO: 140678 - RNA, 19 nt, Homo sapiens
  misc_RNA (1)...(19): siRNA sense strand
gcagaagaagaauuucaga

SEQ ID NO: 140679 - RNA, 19 nt, Homo sapiens
  misc_RNA (1)...(19): siRNA sense strand
cuacggagcagaagccuau

SEQ ID NO: 140680 - RNA, 19 nt, Homo sapiens
  misc_RNA (1)...(19): siRNA sense strand
ucauagagccugccuccaa

SEQ ID NO: 140681 - RNA, 19 nt, Homo sapiens
  misc_RNA (1)...(19): siRNA sense strand
ccacaaacuguaugaagug

SEQ ID NO: 140682 - RNA, 19 nt, Homo sapiens
  misc_RNA (1)...(19): siRNA sense strand
guuuaacguugacuuacaa

SEQ ID NO: 140683 - RNA, 19 nt, Homo sapiens
  misc_RNA (1)...(19): siRNA sense strand
gcuccaagaggaaggauga

SEQ ID NO: 140684 - RNA, 19 nt, Homo sapiens
  misc_RNA (1)...(19): siRNA sense strand
gaugaacuuaccuuacaaa

SEQ ID NO: 140685 - RNA, 19 nt, Homo sapiens
  misc_RNA (1)...(19): siRNA sense strand
gcaaauucugaugaacuua

SEQ ID NO: 140686 - RNA, 19 nt, Homo sapiens
  misc_RNA (1)...(19): siRNA sense strand
gggaaggaguaaguuuaga

SEQ ID NO: 140687 - RNA, 19 nt, Homo sapiens
  misc_RNA (1)...(19): siRNA sense strand
aagccaaguuucauaagga

SEQ ID NO: 140688 - RNA, 19 nt, Homo sapiens
  misc_RNA (1)...(19): siRNA sense strand
acaagaagaguuaccauca

SEQ ID NO: 140689 - RNA, 19 nt, Homo sapiens
  misc_RNA (1)...(19): siRNA sense strand
ucagaaagcacagaaagug

SEQ ID NO: 140690 - RNA, 19 nt, Homo sapiens
  misc_RNA (1)...(19): siRNA sense strand
agaagaguuaccaucauua

SEQ ID NO: 140691 - RNA, 19 nt, Homo sapiens
  misc_RNA (1)...(19): siRNA sense strand
cgagaacuccgaggauauu

SEQ ID NO: 140692 - RNA, 19 nt, Homo sapiens
  misc_RNA (1)...(19): siRNA sense strand
acagcaaguccaaaucaua

SEQ ID NO: 140693 - RNA, 19 nt, Homo sapiens
  misc_RNA (1)...(19): siRNA sense strand
caagacgaguuggauuuua

SEQ ID NO: 140694 - RNA, 19 nt, Homo sapiens
  misc_RNA (1)...(19): siRNA sense strand
gucaagacgaguuggauuu

SEQ ID NO: 140695 - RNA, 19 nt, Homo sapiens
  misc_RNA (1)...(19): siRNA sense strand
agaguuuaacguugacuua

SEQ ID NO: 140696 - RNA, 19 nt, Homo sapiens
  misc_RNA (1)...(19): siRNA sense strand
ucacccgacgcuuagauua

SEQ ID NO: 140697 - RNA, 19 nt, Homo sapiens
  misc_RNA (1)...(19): siRNA sense strand
gcagacagaccagaguaug

SEQ ID NO: 140698 - RNA, 19 nt, Homo sapiens
  misc_RNA (1)...(19): siRNA sense strand
gcagaggguaccagacuuc

SEQ ID NO: 140699 - RNA, 19 nt, Homo sapiens
  misc_RNA (1)...(19): siRNA sense strand
caaggagcgcccagugauu

SEQ ID NO: 140700 - RNA, 19 nt, Homo sapiens
  misc_RNA (1)...(19): siRNA sense strand
cagaagaagaauuucagaa

SEQ ID NO: 140701 - RNA, 19 nt, Homo sapiens
  misc_RNA (1)...(19): siRNA sense strand
ggaaggaguaaguuuagag

SEQ ID NO: 140702 - RNA, 19 nt, Homo sapiens
  misc_RNA (1)...(19): siRNA sense strand
gacagcaaguccaaaucau

SEQ ID NO: 140703 - RNA, 19 nt, Homo sapiens
  misc_RNA (1)...(19): siRNA sense strand
cagaaaguguuugaagagu

SEQ ID NO: 140704 - RNA, 19 nt, Homo sapiens
  misc_RNA (1)...(19): siRNA sense strand
ggucaagacgaguuggauu

SEQ ID NO: 140705 - RNA, 19 nt, Homo sapiens
  misc_RNA (1)...(19): siRNA sense strand
gcgagaacuccgaggauau

SEQ ID NO: 140706 - RNA, 19 nt, Homo sapiens
  misc_RNA (1)...(19): siRNA sense strand
agaaaucagugugacaaca

SEQ ID NO: 140707 - RNA, 19 nt, Homo sapiens
  misc_RNA (1)...(19): siRNA sense strand
gaaagcugaugagacaaaa

SEQ ID NO: 140708 - RNA, 19 nt, Homo sapiens
  misc_RNA (1)...(19): siRNA sense strand
cuaugagccugacugguau

SEQ ID NO: 140709 - RNA, 19 nt, Homo sapiens
  misc_RNA (1)...(19): siRNA sense strand
gugaugugcugugggaaga

SEQ ID NO: 140710 - RNA, 19 nt, Homo sapiens
  misc_RNA (1)...(19): siRNA sense strand
agaacuccgaggauauuua

SEQ ID NO: 140711 - RNA, 19 nt, Homo sapiens
  misc_RNA (1)...(19): siRNA sense strand
cacaaacuguaugaaguga

SEQ ID NO: 140712 - RNA, 19 nt, Homo sapiens
  misc_RNA (1)...(19): siRNA sense strand
agaaagcacagaaaguguu

SEQ ID NO: 140713 - RNA, 19 nt, Homo sapiens
  misc_RNA (1)...(19): siRNA sense strand
gaguaugaucugcaacuug

SEQ ID NO: 140714 - RNA, 19 nt, Homo sapiens
  misc_RNA (1)...(19): siRNA sense strand
ugaagucccugaggugaag

SEQ ID NO: 140715 - RNA, 19 nt, Homo sapiens
  misc_RNA (1)...(19): siRNA sense strand
caaguccaaaucauacauu

SEQ ID NO: 140716 - RNA, 19 nt, Homo sapiens
  misc_RNA (1)...(19): siRNA sense strand
ccaaggagcgcccagugau

SEQ ID NO: 140717 - RNA, 19 nt, Homo sapiens
  misc_RNA (1)...(19): siRNA sense strand
aaacgucuccagccuugaa

SEQ ID NO: 140718 - RNA, 19 nt, Homo sapiens
  misc_RNA (1)...(19): siRNA sense strand
uaaggaaauugcggugcuu

SEQ ID NO: 140719 - RNA, 19 nt, Homo sapiens
  misc_RNA (1)...(19): siRNA sense strand
cagacagaccagaguauga

SEQ ID NO: 140720 - RNA, 19 nt, Homo sapiens
  misc_RNA (1)...(19): siRNA sense strand
gaaaagguccuccaaaagc

SEQ ID NO: 140721 - RNA, 19 nt, Homo sapiens
  misc_RNA (1)...(19): siRNA sense strand
ccagaaaucagugugacaa

SEQ ID NO: 140722 - RNA, 19 nt, Homo sapiens
  misc_RNA (1)...(19): siRNA sense strand
ugucccaccucuaccuaaa

SEQ ID NO: 140723 - RNA, 19 nt, Homo sapiens
  misc_RNA (1)...(19): siRNA sense strand
gaaaguguuugaagaguuu

SEQ ID NO: 140724 - RNA, 19 nt, Homo sapiens
  misc_RNA (1)...(19): siRNA sense strand
gaacuucacccgacgcuua

SEQ ID NO: 140725 - RNA, 19 nt, Homo sapiens
  misc_RNA (1)...(19): siRNA sense strand
gacaagcacugauuuggua

SEQ ID NO: 140726 - RNA, 19 nt, Homo sapiens
  misc_RNA (1)...(19): siRNA sense strand
gcaauuuccugacauaaag

SEQ ID NO: 140727 - RNA, 19 nt, Homo sapiens
  misc_RNA (1)...(19): siRNA sense strand
gaacaucaucaguuucuuu

SEQ ID NO: 140728 - RNA, 19 nt, Homo sapiens
  misc_RNA (1)...(19): siRNA sense strand
gaaaaugguuggugagaaa

SEQ ID NO: 140729 - RNA, 19 nt, Homo sapiens
  misc_RNA (1)...(19): siRNA sense strand
uggaaacacugcaugauuu

SEQ ID NO: 140730 - RNA, 19 nt, Homo sapiens
  misc_RNA (1)...(19): siRNA sense strand
gacaacaccuucccagaau

SEQ ID NO: 140731 - RNA, 19 nt, Homo sapiens
  misc_RNA (1)...(19): siRNA sense strand
acagagaccuugccaccua

SEQ ID NO: 140732 - RNA, 19 nt, Homo sapiens
  misc_RNA (1)...(19): siRNA sense strand
ugacuuacaagaagaguua

SEQ ID NO: 140733 - RNA, 19 nt, Homo sapiens
  misc_RNA (1)...(19): siRNA sense strand
ggaaagcugaugagacaaa

SEQ ID NO: 140734 - RNA, 19 nt, Homo sapiens
  misc_RNA (1)...(19): siRNA sense strand
gaaagcacagaaaguguuu

SEQ ID NO: 140735 - RNA, 19 nt, Homo sapiens
  misc_RNA (1)...(19): siRNA sense strand
cgaguuggauuuuauguua

SEQ ID NO: 140736 - RNA, 19 nt, Homo sapiens
  misc_RNA (1)...(19): siRNA sense strand
caaacuguaugaagugaug

SEQ ID NO: 140737 - RNA, 19 nt, Homo sapiens
  misc_RNA (1)...(19): siRNA sense strand
aagaauauguccagaacuu

SEQ ID NO: 140738 - RNA, 19 nt, Homo sapiens
  misc_RNA (1)...(19): siRNA sense strand
caacagugccucaggagaa

SEQ ID NO: 140739 - RNA, 19 nt, Homo sapiens
  misc_RNA (1)...(19): siRNA sense strand
ccaggauacuucauuauuc

SEQ ID NO: 140740 - RNA, 19 nt, Homo sapiens
  misc_RNA (1)...(19): siRNA sense strand
gaagaguuaccaucauuau

SEQ ID NO: 140741 - RNA, 19 nt, Homo sapiens
  misc_RNA (1)...(19): siRNA sense strand
uaaggcagaagaagaauuu

SEQ ID NO: 140742 - RNA, 19 nt, Homo sapiens
  misc_RNA (1)...(19): siRNA sense strand
uguaugaagugaugacaaa

SEQ ID NO: 140743 - RNA, 19 nt, Homo sapiens
  misc_RNA (1)...(19): siRNA sense strand
ggacgacaagcacugauuu

SEQ ID NO: 140744 - RNA, 19 nt, Homo sapiens
  misc_RNA (1)...(19): siRNA sense strand
caacuuuguuccagaaauc

SEQ ID NO: 140745 - RNA, 19 nt, Homo sapiens
  misc_RNA (1)...(19): siRNA sense strand
guggauggguccuugcuaa

SEQ ID NO: 140746 - RNA, 19 nt, Homo sapiens
  misc_RNA (1)...(19): siRNA sense strand
aagaagaguuaccaucauu

SEQ ID NO: 140747 - RNA, 19 nt, Homo sapiens
  misc_RNA (1)...(19): siRNA sense strand
gcacagaaaguguuugaag

SEQ ID NO: 140748 - RNA, 19 nt, Homo sapiens
  misc_RNA (1)...(19): siRNA sense strand
gaagccaaguuucauaagg

SEQ ID NO: 140749 - RNA, 19 nt, Homo sapiens
  misc_RNA (1)...(19): siRNA sense strand
caggauacuucauuauuca

SEQ ID NO: 140750 - RNA, 19 nt, Homo sapiens
  misc_RNA (1)...(19): siRNA sense strand
aggagaacaucaucaguuu

SEQ ID NO: 140751 - RNA, 19 nt, Homo sapiens
  misc_RNA (1)...(19): siRNA sense strand
ucacagagucgcugcauga

SEQ ID NO: 140752 - RNA, 19 nt, Homo sapiens
  misc_RNA (1)...(19): siRNA sense strand
cacagaaaguguuugaaga

SEQ ID NO: 140753 - RNA, 19 nt, Homo sapiens
  misc_RNA (1)...(19): siRNA sense strand
ucuaugagccugacuggua

SEQ ID NO: 140754 - RNA, 19 nt, Homo sapiens
  misc_RNA (1)...(19): siRNA sense strand
cagagucgcugcaugaagu

SEQ ID NO: 140755 - RNA, 19 nt, Homo sapiens
  misc_RNA (1)...(19): siRNA sense strand
cgaagaauauguccagaac

SEQ ID NO: 140756 - RNA, 19 nt, Homo sapiens
  misc_RNA (1)...(19): siRNA sense strand
caagaagaguuaccaucau

SEQ ID NO: 140757 - RNA, 19 nt, Homo sapiens
  misc_RNA (1)...(19): siRNA sense strand
uaacguugacuuacaagaa

SEQ ID NO: 140758 - RNA, 19 nt, Homo sapiens
  misc_RNA (1)...(19): siRNA sense strand
ggaaggagaaaacgaaaua

SEQ ID NO: 140759 - RNA, 19 nt, Homo sapiens
  misc_RNA (1)...(19): siRNA sense strand
gaacuccgaggauauuuag

SEQ ID NO: 140760 - RNA, 19 nt, Homo sapiens
  misc_RNA (1)...(19): siRNA sense strand
ugacaacaccuucccagaa

SEQ ID NO: 140761 - RNA, 19 nt, Homo sapiens
  misc_RNA (1)...(19): siRNA sense strand
gaauauguccagaacuuca

SEQ ID NO: 140762 - RNA, 19 nt, Homo sapiens
  misc_RNA (1)...(19): siRNA sense strand
gaggauauuuagcagcaau

SEQ ID NO: 140763 - RNA, 19 nt, Homo sapiens
  misc_RNA (1)...(19): siRNA sense strand
caacaccuucccagaauga

SEQ ID NO: 140764 - RNA, 19 nt, Homo sapiens
  misc_RNA (1)...(19): siRNA sense strand
uugaagaguuuaacguuga

SEQ ID NO: 140765 - RNA, 19 nt, Homo sapiens
  misc_RNA (1)...(19): siRNA sense strand
agaaaguguuugaagaguu

SEQ ID NO: 140766 - RNA, 19 nt, Homo sapiens
  misc_RNA (1)...(19): siRNA sense strand
gccacaaacuguaugaagu

SEQ ID NO: 140767 - RNA, 19 nt, Homo sapiens
  misc_RNA (1)...(19): siRNA sense strand
ucccugaggugaagaaaga

SEQ ID NO: 140768 - RNA, 19 nt, Homo sapiens
  misc_RNA (1)...(19): siRNA sense strand
gaacuucaaacggcaagaa

SEQ ID NO: 140769 - RNA, 19 nt, Homo sapiens
  misc_RNA (1)...(19): siRNA sense strand
ggcagcaaauucugaugaa

SEQ ID NO: 140770 - RNA, 19 nt, Homo sapiens
  misc_RNA (1)...(19): siRNA sense strand
cugaugaacuuaccuuaca

SEQ ID NO: 140771 - RNA, 19 nt, Homo sapiens
  misc_RNA (1)...(19): siRNA sense strand
ggagaaaacgaaauaacua

SEQ ID NO: 140772 - RNA, 19 nt, Homo sapiens
  misc_RNA (1)...(19): siRNA sense strand
ggcaauuuccugacauaaa

SEQ ID NO: 140773 - RNA, 19 nt, Homo sapiens
  misc_RNA (1)...(19): siRNA sense strand
caucaucaguuucuuugag

SEQ ID NO: 140774 - RNA, 19 nt, Homo sapiens
  misc_RNA (1)...(19): siRNA sense strand
cgacagcaaguccaaauca

SEQ ID NO: 140775 - RNA, 19 nt, Homo sapiens
  misc_RNA (1)...(19): siRNA sense strand
guggaaacacugcaugauu

SEQ ID NO: 140776 - RNA, 19 nt, Homo sapiens
  misc_RNA (1)...(19): siRNA sense strand
ggggaaagcugaugagaca

SEQ ID NO: 140777 - RNA, 19 nt, Homo sapiens
  misc_RNA (1)...(19): siRNA sense strand
caggagaacaucaucaguu

SEQ ID NO: 140778 - RNA, 19 nt, Homo sapiens
  misc_RNA (1)...(19): siRNA sense strand
gcagaagaagaauuucaga

SEQ ID NO: 140779 - RNA, 19 nt, Homo sapiens
  misc_RNA (1)...(19): siRNA sense strand
cuacggagcagaagccuau

SEQ ID NO: 140780 - RNA, 19 nt, Homo sapiens
  misc_RNA (1)...(19): siRNA sense strand
ucauagagccugccuccaa

SEQ ID NO: 140781 - RNA, 19 nt, Homo sapiens
  misc_RNA (1)...(19): siRNA sense strand
ccacaaacuguaugaagug

SEQ ID NO: 140782 - RNA, 19 nt, Homo sapiens
  misc_RNA (1)...(19): siRNA sense strand
guuuaacguugacuuacaa

SEQ ID NO: 140783 - RNA, 19 nt, Homo sapiens
  misc_RNA (1)...(19): siRNA sense strand
gcuccaagaggaaggauga

SEQ ID NO: 140784 - RNA, 19 nt, Homo sapiens
  misc_RNA (1)...(19): siRNA sense strand
gaugaacuuaccuuacaaa

SEQ ID NO: 140785 - RNA, 19 nt, Homo sapiens
  misc_RNA (1)...(19): siRNA sense strand
gcaaauucugaugaacuua

SEQ ID NO: 140786 - RNA, 19 nt, Homo sapiens
  misc_RNA (1)...(19): siRNA sense strand
gggaaggaguaaguuuaga

SEQ ID NO: 140787 - RNA, 19 nt, Homo sapiens
  misc_RNA (1)...(19): siRNA sense strand
aagccaaguuucauaagga

SEQ ID NO: 140788 - RNA, 19 nt, Homo sapiens
  misc_RNA (1)...(19): siRNA sense strand
acaagaagaguuaccauca

SEQ ID NO: 140789 - RNA, 19 nt, Homo sapiens
  misc_RNA (1)...(19): siRNA sense strand
ucagaaagcacagaaagug

SEQ ID NO: 140790 - RNA, 19 nt, Homo sapiens
  misc_RNA (1)...(19): siRNA sense strand
agaagaguuaccaucauua

SEQ ID NO: 140791 - RNA, 19 nt, Homo sapiens
  misc_RNA (1)...(19): siRNA sense strand
cgagaacuccgaggauauu

SEQ ID NO: 140792 - RNA, 19 nt, Homo sapiens
  misc_RNA (1)...(19): siRNA sense strand
acagcaaguccaaaucaua

SEQ ID NO: 140793 - RNA, 19 nt, Homo sapiens
  misc_RNA (1)...(19): siRNA sense strand
caagacgaguuggauuuua

SEQ ID NO: 140794 - RNA, 19 nt, Homo sapiens
  misc_RNA (1)...(19): siRNA sense strand
gucaagacgaguuggauuu

SEQ ID NO: 140795 - RNA, 19 nt, Homo sapiens
  misc_RNA (1)...(19): siRNA sense strand
agaguuuaacguugacuua

SEQ ID NO: 140796 - RNA, 19 nt, Homo sapiens
  misc_RNA (1)...(19): siRNA sense strand
ucacccgacgcuuagauua

SEQ ID NO: 140797 - RNA, 19 nt, Homo sapiens
  misc_RNA (1)...(19): siRNA sense strand
gcagacagaccagaguaug

SEQ ID NO: 140798 - RNA, 19 nt, Homo sapiens
  misc_RNA (1)...(19): siRNA sense strand
gcagaggguaccagacuuc

SEQ ID NO: 140799 - RNA, 19 nt, Homo sapiens
  misc_RNA (1)...(19): siRNA sense strand
caaggagcgcccagugauu

SEQ ID NO: 140800 - RNA, 19 nt, Homo sapiens
  misc_RNA (1)...(19): siRNA sense strand
cagaagaagaauuucagaa

SEQ ID NO: 140801 - RNA, 19 nt, Homo sapiens
  misc_RNA (1)...(19): siRNA sense strand
ggaaggaguaaguuuagag

SEQ ID NO: 140802 - RNA, 19 nt, Homo sapiens
  misc_RNA (1)...(19): siRNA sense strand
gacagcaaguccaaaucau

SEQ ID NO: 140803 - RNA, 19 nt, Homo sapiens
  misc_RNA (1)...(19): siRNA sense strand
cagaaaguguuugaagagu

SEQ ID NO: 140804 - RNA, 19 nt, Homo sapiens
  misc_RNA (1)...(19): siRNA sense strand
ggucaagacgaguuggauu

SEQ ID NO: 140805 - RNA, 19 nt, Homo sapiens
  misc_RNA (1)...(19): siRNA sense strand
gcgagaacuccgaggauau

SEQ ID NO: 140806 - RNA, 19 nt, Homo sapiens
  misc_RNA (1)...(19): siRNA sense strand
agaaaucagugugacaaca

SEQ ID NO: 140807 - RNA, 19 nt, Homo sapiens
  misc_RNA (1)...(19): siRNA sense strand
gaaagcugaugagacaaaa

SEQ ID NO: 140808 - RNA, 19 nt, Homo sapiens
  misc_RNA (1)...(19): siRNA sense strand
cuaugagccugacugguau

SEQ ID NO: 140809 - RNA, 19 nt, Homo sapiens
  misc_RNA (1)...(19): siRNA sense strand
gugaugugcugugggaaga

SEQ ID NO: 140810 - RNA, 19 nt, Homo sapiens
  misc_RNA (1)...(19): siRNA sense strand
agaacuccgaggauauuua

SEQ ID NO: 140811 - RNA, 19 nt, Homo sapiens
  misc_RNA (1)...(19): siRNA sense strand
cacaaacuguaugaaguga

SEQ ID NO: 140812 - RNA, 19 nt, Homo sapiens
  misc_RNA (1)...(19): siRNA sense strand
agaaagcacagaaaguguu

SEQ ID NO: 140813 - RNA, 19 nt, Homo sapiens
  misc_RNA (1)...(19): siRNA sense strand
gaguaugaucugcaacuug

SEQ ID NO: 140814 - RNA, 19 nt, Homo sapiens
  misc_RNA (1)...(19): siRNA sense strand
ugaagucccugaggugaag

SEQ ID NO: 140815 - RNA, 19 nt, Homo sapiens
  misc_RNA (1)...(19): siRNA sense strand
caaguccaaaucauacauu

SEQ ID NO: 140816 - RNA, 19 nt, Homo sapiens
  misc_RNA (1)...(19): siRNA sense strand
ccaaggagcgcccagugau

SEQ ID NO: 140817 - RNA, 19 nt, Homo sapiens
  misc_RNA (1)...(19): siRNA sense strand
aaacgucuccagccuugaa

SEQ ID NO: 140818 - RNA, 19 nt, Homo sapiens
  misc_RNA (1)...(19): siRNA sense strand
uaaggaaauugcggugcuu

SEQ ID NO: 140819 - RNA, 19 nt, Homo sapiens
  misc_RNA (1)...(19): siRNA sense strand
cagacagaccagaguauga

SEQ ID NO: 140820 - RNA, 19 nt, Homo sapiens
  misc_RNA (1)...(19): siRNA sense strand
gaaaagguccuccaaaagc

SEQ ID NO: 140821 - RNA, 19 nt, Homo sapiens
  misc_RNA (1)...(19): siRNA sense strand
ccagaaaucagugugacaa

SEQ ID NO: 140822 - RNA, 19 nt, Homo sapiens
  misc_RNA (1)...(19): siRNA sense strand
ugucccaccucuaccuaaa

SEQ ID NO: 140823 - RNA, 19 nt, Homo sapiens
  misc_RNA (1)...(19): siRNA sense strand
ggagcgagauugacuuaaa

SEQ ID NO: 140824 - RNA, 19 nt, Homo sapiens
  misc_RNA (1)...(19): siRNA sense strand
caaggagggugucaucauu

SEQ ID NO: 140825 - RNA, 19 nt, Homo sapiens
  misc_RNA (1)...(19): siRNA sense strand
ggacugaugagaugaaauu

SEQ ID NO: 140826 - RNA, 19 nt, Homo sapiens
  misc_RNA (1)...(19): siRNA sense strand
gaugggacccugauaagaa

SEQ ID NO: 140827 - RNA, 19 nt, Homo sapiens
  misc_RNA (1)...(19): siRNA sense strand
gagaguguuugaagaguau

SEQ ID NO: 140828 - RNA, 19 nt, Homo sapiens
  misc_RNA (1)...(19): siRNA sense strand
gagcgagauugacuuaaau

SEQ ID NO: 140829 - RNA, 19 nt, Homo sapiens
  misc_RNA (1)...(19): siRNA sense strand
uaucaaaugucacuucaag

SEQ ID NO: 140830 - RNA, 19 nt, Homo sapiens
  misc_RNA (1)...(19): siRNA sense strand
ucaaaugucacuucaagaa

SEQ ID NO: 140831 - RNA, 19 nt, Homo sapiens
  misc_RNA (1)...(19): siRNA sense strand
ugagaguguuugaagagua

SEQ ID NO: 140832 - RNA, 19 nt, Homo sapiens
  misc_RNA (1)...(19): siRNA sense strand
gcaagacccucagcagcau

SEQ ID NO: 140833 - RNA, 19 nt, Homo sapiens
  misc_RNA (1)...(19): siRNA sense strand
ugagcucaguggcaaguuu

SEQ ID NO: 140834 - RNA, 19 nt, Homo sapiens
  misc_RNA (1)...(19): siRNA sense strand
ucacugagaccuugaaguc

SEQ ID NO: 140835 - RNA, 19 nt, Homo sapiens
  misc_RNA (1)...(19): siRNA sense strand
ggacauccaagcagacaca

SEQ ID NO: 140836 - RNA, 19 nt, Homo sapiens
  misc_RNA (1)...(19): siRNA sense strand
gggaugaugugagcagcuu

SEQ ID NO: 140837 - RNA, 19 nt, Homo sapiens
  misc_RNA (1)...(19): siRNA sense strand
guggaaagccuggauugaa

SEQ ID NO: 140838 - RNA, 19 nt, Homo sapiens
  misc_RNA (1)...(19): siRNA sense strand
cagcuacuuugcagagaga

SEQ ID NO: 140839 - RNA, 19 nt, Homo sapiens
  misc_RNA (1)...(19): siRNA sense strand
gaugugcucaccaagagaa

SEQ ID NO: 140840 - RNA, 19 nt, Homo sapiens
  misc_RNA (1)...(19): siRNA sense strand
gagggugucaucauugaga

SEQ ID NO: 140841 - RNA, 19 nt, Homo sapiens
  misc_RNA (1)...(19): siRNA sense strand
ggcagcagaucgccaaguc

SEQ ID NO: 140842 - RNA, 19 nt, Homo sapiens
  misc_RNA (1)...(19): siRNA sense strand
gaagauucgugggacugau

SEQ ID NO: 140843 - RNA, 19 nt, Homo sapiens
  misc_RNA (1)...(19): siRNA sense strand
cgagcaggcuaucaucgau

SEQ ID NO: 140844 - RNA, 19 nt, Homo sapiens
  misc_RNA (1)...(19): siRNA sense strand
ggaaagccuggauugaaca

SEQ ID NO: 140845 - RNA, 19 nt, Homo sapiens
  misc_RNA (1)...(19): siRNA sense strand
ggaccaacgagcaggcuau

SEQ ID NO: 140846 - RNA, 19 nt, Homo sapiens
  misc_RNA (1)...(19): siRNA sense strand
gaugaugugagcagcuuug

SEQ ID NO: 140847 - RNA, 19 nt, Homo sapiens
  misc_RNA (1)...(19): siRNA sense strand
uggaaagccuggauugaac

SEQ ID NO: 140848 - RNA, 19 nt, Homo sapiens
  misc_RNA (1)...(19): siRNA sense strand
aggagggugucaucauuga

SEQ ID NO: 140849 - RNA, 19 nt, Homo sapiens
  misc_RNA (1)...(19): siRNA sense strand
aaggagcgagauugacuua

SEQ ID NO: 140850 - RNA, 19 nt, Homo sapiens
  misc_RNA (1)...(19): siRNA sense strand
guuugaagaguaugagaaa

SEQ ID NO: 140851 - RNA, 19 nt, Homo sapiens
  misc_RNA (1)...(19): siRNA sense strand
gagcucaguggcaaguuug

SEQ ID NO: 140852 - RNA, 19 nt, Homo sapiens
  misc_RNA (1)...(19): siRNA sense strand
aagaagauguacggcaaga

SEQ ID NO: 140853 - RNA, 19 nt, Homo sapiens
  misc_RNA (1)...(19): siRNA sense strand
gaaccagcugcgggagaua

SEQ ID NO: 140854 - RNA, 19 nt, Homo sapiens
  misc_RNA (1)...(19): siRNA sense strand
cgugaugggacccugauaa

SEQ ID NO: 140855 - RNA, 19 nt, Homo sapiens
  misc_RNA (1)...(19): siRNA sense strand
aaugaaggcguaugaggaa

SEQ ID NO: 140856 - RNA, 19 nt, Homo sapiens
  misc_RNA (1)...(19): siRNA sense strand
cagcugcgggagauaauga

SEQ ID NO: 140857 - RNA, 19 nt, Homo sapiens
  misc_RNA (1)...(19): siRNA sense strand
guggcuaccuggagaggau

SEQ ID NO: 140858 - RNA, 19 nt, Homo sapiens
  misc_RNA (1)...(19): siRNA sense strand
ggaggaggacauccaagca

SEQ ID NO: 140859 - RNA, 19 nt, Homo sapiens
  misc_RNA (1)...(19): siRNA sense strand
cauccaagcagacacaagu

SEQ ID NO: 140860 - RNA, 19 nt, Homo sapiens
  misc_RNA (1)...(19): siRNA sense strand
cuuaucaaaugucacuuca

SEQ ID NO: 140861 - RNA, 19 nt, Homo sapiens
  misc_RNA (1)...(19): siRNA sense strand
aaaccuccacagcuacuuu

SEQ ID NO: 140862 - RNA, 19 nt, Homo sapiens
  misc_RNA (1)...(19): siRNA sense strand
cccaaaaccuccacagcua

SEQ ID NO: 140863 - RNA, 19 nt, Homo sapiens
  misc_RNA (1)...(19): siRNA sense strand
ccaaggagggugucaucau

SEQ ID NO: 140864 - RNA, 19 nt, Homo sapiens
  misc_RNA (1)...(19): siRNA sense strand
ccaacgagcaggcuaucau

SEQ ID NO: 140865 - RNA, 19 nt, Homo sapiens
  misc_RNA (1)...(19): siRNA sense strand
augggacccugauaagaaa

SEQ ID NO: 140866 - RNA, 19 nt, Homo sapiens
  misc_RNA (1)...(19): siRNA sense strand
caacgagcaggcuaucauc

SEQ ID NO: 140867 - RNA, 19 nt, Homo sapiens
  misc_RNA (1)...(19): siRNA sense strand
gaaggcguaugaggaagac

SEQ ID NO: 140868 - RNA, 19 nt, Homo sapiens
  misc_RNA (1)...(19): siRNA sense strand
ucgaugugcucaccaagag

SEQ ID NO: 140869 - RNA, 19 nt, Homo sapiens
  misc_RNA (1)...(19): siRNA sense strand
gguggaaagccuggauuga

SEQ ID NO: 140870 - RNA, 19 nt, Homo sapiens
  misc_RNA (1)...(19): siRNA sense strand
gcugagaguguuugaagag

SEQ ID NO: 140871 - RNA, 19 nt, Homo sapiens
  misc_RNA (1)...(19): siRNA sense strand
ucaucgaugugcucaccaa

SEQ ID NO: 140872 - RNA, 19 nt, Homo sapiens
  misc_RNA (1)...(19): siRNA sense strand
gacagcaucaagagugaga

SEQ ID NO: 140873 - RNA, 19 nt, Homo sapiens
  misc_RNA (1)...(19): siRNA sense strand
gccaugaagggcuuaggaa

SEQ ID NO: 140874 - RNA, 19 nt, Homo sapiens
  misc_RNA (1)...(19): siRNA sense strand
agaaccagcugcgggagau

SEQ ID NO: 140875 - RNA, 19 nt, Homo sapiens
  misc_RNA (1)...(19): siRNA sense strand
aggacagcaucaagaguga

SEQ ID NO: 140876 - RNA, 19 nt, Homo sapiens
  misc_RNA (1)...(19): siRNA sense strand
caacccagacccugaugca

SEQ ID NO: 140877 - RNA, 19 nt, Homo sapiens
  misc_RNA (1)...(19): siRNA sense strand
ucauuguggcccuuaugua

SEQ ID NO: 140878 - RNA, 19 nt, Homo sapiens
  misc_RNA (1)...(19): siRNA sense strand
ugaaggcguaugaggaaga

SEQ ID NO: 140879 - RNA, 19 nt, Homo sapiens
  misc_RNA (1)...(19): siRNA sense strand
agauaaugaaggcguauga

SEQ ID NO: 140880 - RNA, 19 nt, Homo sapiens
  misc_RNA (1)...(19): siRNA sense strand
ggagauaaugaaggcguau

SEQ ID NO: 140881 - RNA, 19 nt, Homo sapiens
  misc_RNA (1)...(19): siRNA sense strand
caaggagcgagauugacuu

SEQ ID NO: 140882 - RNA, 19 nt, Homo sapiens
  misc_RNA (1)...(19): siRNA sense strand
ucgugggacugaugagaug

SEQ ID NO: 140883 - RNA, 19 nt, Homo sapiens
  misc_RNA (1)...(19): siRNA sense strand
gagaaaauugccaacaaga

SEQ ID NO: 140884 - RNA, 19 nt, Homo sapiens
  misc_RNA (1)...(19): siRNA sense strand
aaggagacauggaaauuua

SEQ ID NO: 140885 - RNA, 19 nt, Homo sapiens
  misc_RNA (1)...(19): siRNA sense strand
ucaaagauguggauucaga

SEQ ID NO: 140886 - RNA, 19 nt, Homo sapiens
  misc_RNA (1)...(19): siRNA sense strand
caacagcccuuaccaacga

SEQ ID NO: 140887 - RNA, 19 nt, Homo sapiens
  misc_RNA (1)...(19): siRNA sense strand
gaaccuuucucugggauaa

SEQ ID NO: 140888 - RNA, 19 nt, Homo sapiens
  misc_RNA (1)...(19): siRNA sense strand
gaaaaccaccugcuauuua

SEQ ID NO: 140889 - RNA, 19 nt, Homo sapiens
  misc_RNA (1)...(19): siRNA sense strand
gguggugucuguaauagaa

SEQ ID NO: 140890 - RNA, 19 nt, Homo sapiens
  misc_RNA (1)...(19): siRNA sense strand
gaaaggagaauccguucaa

SEQ ID NO: 140891 - RNA, 19 nt, Homo sapiens
  misc_RNA (1)...(19): siRNA sense strand
ucacaucucuccugaaugg

SEQ ID NO: 140892 - RNA, 19 nt, Homo sapiens
  misc_RNA (1)...(19): siRNA sense strand
uaugaaugcugauguggua

SEQ ID NO: 140893 - RNA, 19 nt, Homo sapiens
  misc_RNA (1)...(19): siRNA sense strand
cccgaaaccugaagaaauu

SEQ ID NO: 140894 - RNA, 19 nt, Homo sapiens
  misc_RNA (1)...(19): siRNA sense strand
gaaagcuugucuagaaaca

SEQ ID NO: 140895 - RNA, 19 nt, Homo sapiens
  misc_RNA (1)...(19): siRNA sense strand
gaacacuggccaaccauug

SEQ ID NO: 140896 - RNA, 19 nt, Homo sapiens
  misc_RNA (1)...(19): siRNA sense strand
gcagaugucuuugaacucu

SEQ ID NO: 140897 - RNA, 19 nt, Homo sapiens
  misc_RNA (1)...(19): siRNA sense strand
gggagagacuguaaugaca

SEQ ID NO: 140898 - RNA, 19 nt, Homo sapiens
  misc_RNA (1)...(19): siRNA sense strand
uaaauuagcuauggaacag

SEQ ID NO: 140899 - RNA, 19 nt, Homo sapiens
  misc_RNA (1)...(19): siRNA sense strand
cgagguggcuuugcuguug

SEQ ID NO: 140900 - RNA, 19 nt, Homo sapiens
  misc_RNA (1)...(19): siRNA sense strand
caucaggauucaaacugua

SEQ ID NO: 140901 - RNA, 19 nt, Homo sapiens
  misc_RNA (1)...(19): siRNA sense strand
cacagggacuaccagaaua

SEQ ID NO: 140902 - RNA, 19 nt, Homo sapiens
  misc_RNA (1)...(19): siRNA sense strand
caugaccacuccugagaaa

SEQ ID NO: 140903 - RNA, 19 nt, Homo sapiens
  misc_RNA (1)...(19): siRNA sense strand
cguuauauaugccaugauu

SEQ ID NO: 140904 - RNA, 19 nt, Homo sapiens
  misc_RNA (1)...(19): siRNA sense strand
gaagugguucugacauuug

SEQ ID NO: 140905 - RNA, 19 nt, Homo sapiens
  misc_RNA (1)...(19): siRNA sense strand
ucagacaaauacagcguuu

SEQ ID NO: 140906 - RNA, 19 nt, Homo sapiens
  misc_RNA (1)...(19): siRNA sense strand
guagaaggccgaacaacug

SEQ ID NO: 140907 - RNA, 19 nt, Homo sapiens
  misc_RNA (1)...(19): siRNA sense strand
caaggagacauggaaauuu

SEQ ID NO: 140908 - RNA, 19 nt, Homo sapiens
  misc_RNA (1)...(19): siRNA sense strand
agaaaccacuguaaucaca

SEQ ID NO: 140909 - RNA, 19 nt, Homo sapiens
  misc_RNA (1)...(19): siRNA sense strand
gaaauuuacacuacagaag

SEQ ID NO: 140910 - RNA, 19 nt, Homo sapiens
  misc_RNA (1)...(19): siRNA sense strand
uauaugccaugauuggaaa

SEQ ID NO: 140911 - RNA, 19 nt, Homo sapiens
  misc_RNA (1)...(19): siRNA sense strand
caccugcuauuuagucauu

SEQ ID NO: 140912 - RNA, 19 nt, Homo sapiens
  misc_RNA (1)...(19): siRNA sense strand
cgaaaccugaagaaauuua

SEQ ID NO: 140913 - RNA, 19 nt, Homo sapiens
  misc_RNA (1)...(19): siRNA sense strand
cagcgucgcagaugucuuu

SEQ ID NO: 140914 - RNA, 19 nt, Homo sapiens
  misc_RNA (1)...(19): siRNA sense strand
ggaaauuuacacuacagaa

SEQ ID NO: 140915 - RNA, 19 nt, Homo sapiens
  misc_RNA (1)...(19): siRNA sense strand
ccaaggagacauggaaauu

SEQ ID NO: 140916 - RNA, 19 nt, Homo sapiens
  misc_RNA (1)...(19): siRNA sense strand
cgucgcagaugucuuugaa

SEQ ID NO: 140917 - RNA, 19 nt, Homo sapiens
  misc_RNA (1)...(19): siRNA sense strand
gguggcgccucuauucuug

SEQ ID NO: 140918 - RNA, 19 nt, Homo sapiens
  misc_RNA (1)...(19): siRNA sense strand
agauguggauucagacaaa

SEQ ID NO: 140919 - RNA, 19 nt, Homo sapiens
  misc_RNA (1)...(19): siRNA sense strand
cuacagaaggcaagacaaa

SEQ ID NO: 140920 - RNA, 19 nt, Homo sapiens
  misc_RNA (1)...(19): siRNA sense strand
auaaagacaugaccuaugc

SEQ ID NO: 140921 - RNA, 19 nt, Homo sapiens
  misc_RNA (1)...(19): siRNA sense strand
gaaaagaaaccacuguaau

SEQ ID NO: 140922 - RNA, 19 nt, Homo sapiens
  misc_RNA (1)...(19): siRNA sense strand
gaucagacaucauaaaacu

SEQ ID NO: 140923 - RNA, 19 nt, Homo sapiens
  misc_RNA (1)...(19): siRNA sense strand
ccagugagaaauuuacaaa

SEQ ID NO: 140924 - RNA, 19 nt, Homo sapiens
  misc_RNA (1)...(19): siRNA sense strand
cugagaaacucuacuccaa

SEQ ID NO: 140925 - RNA, 19 nt, Homo sapiens
  misc_RNA (1)...(19): siRNA sense strand
ggacuaucccgccaucguu

SEQ ID NO: 140926 - RNA, 19 nt, Homo sapiens
  misc_RNA (1)...(19): siRNA sense strand
aaagaaaccacuguaauca

SEQ ID NO: 140927 - RNA, 19 nt, Homo sapiens
  misc_RNA (1)...(19): siRNA sense strand
ccagcuaaauaaagacaug

SEQ ID NO: 140928 - RNA, 19 nt, Homo sapiens
  misc_RNA (1)...(19): siRNA sense strand
acagaaggcaagacaaauu

SEQ ID NO: 140929 - RNA, 19 nt, Homo sapiens
  misc_RNA (1)...(19): siRNA sense strand
ucacagggacuaccagaau

SEQ ID NO: 140930 - RNA, 19 nt, Homo sapiens
  misc_RNA (1)...(19): siRNA sense strand
ggaguuccauaugagaaga

SEQ ID NO: 140931 - RNA, 19 nt, Homo sapiens
  misc_RNA (1)...(19): siRNA sense strand
gaacaacugggauguccau

SEQ ID NO: 140932 - RNA, 19 nt, Homo sapiens
  misc_RNA (1)...(19): siRNA sense strand
cagaaggcaagacaaauug

SEQ ID NO: 140933 - RNA, 19 nt, Homo sapiens
  misc_RNA (1)...(19): siRNA sense strand
gcagccagugagaaauuua

SEQ ID NO: 140934 - RNA, 19 nt, Homo sapiens
  misc_RNA (1)...(19): siRNA sense strand
gaucacagcgucgcagaug

SEQ ID NO: 140935 - RNA, 19 nt, Homo sapiens
  misc_RNA (1)...(19): siRNA sense strand
ggccaaccauugugucauc

SEQ ID NO: 140936 - RNA, 19 nt, Homo sapiens
  misc_RNA (1)...(19): siRNA sense strand
auacaggaguggcagaaga

SEQ ID NO: 140937 - RNA, 19 nt, Homo sapiens
  misc_RNA (1)...(19): siRNA sense strand
ggaaaagaaaccacuguaa

SEQ ID NO: 140938 - RNA, 19 nt, Homo sapiens
  misc_RNA (1)...(19): siRNA sense strand
gcugguggugucuguaaua

SEQ ID NO: 140939 - RNA, 19 nt, Homo sapiens
  misc_RNA (1)...(19): siRNA sense strand
gaaugcugaugugguaugu

SEQ ID NO: 140940 - RNA, 19 nt, Homo sapiens
  misc_RNA (1)...(19): siRNA sense strand
ugaccuaugcgcaguugua

SEQ ID NO: 140941 - RNA, 19 nt, Homo sapiens
  misc_RNA (1)...(19): siRNA sense strand
gggauaauuugcacaacag

SEQ ID NO: 140942 - RNA, 19 nt, Homo sapiens
  misc_RNA (1)...(19): siRNA sense strand
gacuaucccgccaucguua

SEQ ID NO: 140943 - RNA, 19 nt, Homo sapiens
  misc_RNA (1)...(19): siRNA sense strand
guuuggaucagacaucaua

SEQ ID NO: 140944 - RNA, 19 nt, Homo sapiens
  misc_RNA (1)...(19): siRNA sense strand
ugucaucucuacccucuuc

SEQ ID NO: 140945 - RNA, 19 nt, Homo sapiens
  misc_RNA (1)...(19): siRNA sense strand
ccaacucucuggugcuaca

SEQ ID NO: 140946 - RNA, 19 nt, Homo sapiens
  misc_RNA (1)...(19): siRNA sense strand
ccucucggccagcuaaaua

SEQ ID NO: 140947 - RNA, 19 nt, Homo sapiens
  misc_RNA (1)...(19): siRNA sense strand
gcagccauguuauuuugua

SEQ ID NO: 140948 - RNA, 19 nt, Homo sapiens
  misc_RNA (1)...(19): siRNA sense strand
cuauuuaccuucgcuuaug

SEQ ID NO: 140949 - RNA, 19 nt, Homo sapiens
  misc_RNA (1)...(19): siRNA sense strand
agaugucuuugaacucuuu

SEQ ID NO: 140950 - RNA, 19 nt, Homo sapiens
  misc_RNA (1)...(19): siRNA sense strand
ggacuaccagaauauuuca

SEQ ID NO: 140951 - RNA, 19 nt, Homo sapiens
  misc_RNA (1)...(19): siRNA sense strand
gggacuaccagaauauuuc

SEQ ID NO: 140952 - RNA, 19 nt, Homo sapiens
  misc_RNA (1)...(19): siRNA sense strand
ccaucaggauucaaacugu

SEQ ID NO: 140953 - RNA, 19 nt, Homo sapiens
  misc_RNA (1)...(19): siRNA sense strand
gauuuugccuuccaugaaa

SEQ ID NO: 140954 - RNA, 19 nt, Homo sapiens
  misc_RNA (1)...(19): siRNA sense strand
acagaacacuggccaacca

SEQ ID NO: 140955 - RNA, 19 nt, Homo sapiens
  misc_RNA (1)...(19): siRNA sense strand
cuuaccagauggaaccuuu

SEQ ID NO: 140956 - RNA, 19 nt, Homo sapiens
  misc_RNA (1)...(19): siRNA sense strand
gacauggaaauuuacacua

SEQ ID NO: 140957 - RNA, 19 nt, Homo sapiens
  misc_RNA (1)...(19): siRNA sense strand
cuaccagaauauuucaaga

SEQ ID NO: 140958 - RNA, 19 nt, Homo sapiens
  misc_RNA (1)...(19): siRNA sense strand
acauggaaauuuacacuac

SEQ ID NO: 140959 - RNA, 19 nt, Homo sapiens
  misc_RNA (1)...(19): siRNA sense strand
gcuuagcgcagauaugaau

SEQ ID NO: 140960 - RNA, 19 nt, Homo sapiens
  misc_RNA (1)...(19): siRNA sense strand
auucaaagauguggauuca

SEQ ID NO: 140961 - RNA, 19 nt, Homo sapiens
  misc_RNA (1)...(19): siRNA sense strand
caaccauugugucaucucu

SEQ ID NO: 140962 - RNA, 19 nt, Homo sapiens
  misc_RNA (1)...(19): siRNA sense strand
ggaaaggagaauccguuca

SEQ ID NO: 140963 - RNA, 19 nt, Homo sapiens
  misc_RNA (1)...(19): siRNA sense strand
ccaacgagguggcuuugcu

SEQ ID NO: 140964 - RNA, 19 nt, Homo sapiens
  misc_RNA (1)...(19): siRNA sense strand
ucggccagcuaaauaaaga

SEQ ID NO: 140965 - RNA, 19 nt, Homo sapiens
  misc_RNA (1)...(19): siRNA sense strand
uuguauggcuuaccagaug

SEQ ID NO: 140966 - RNA, 19 nt, Homo sapiens
  misc_RNA (1)...(19): siRNA sense strand
ucgcagaugucuuugaacu

SEQ ID NO: 140967 - RNA, 19 nt, Homo sapiens
  misc_RNA (1)...(19): siRNA sense strand
cauggaaauuuacacuaca

SEQ ID NO: 140968 - RNA, 19 nt, Homo sapiens
  misc_RNA (1)...(19): siRNA sense strand
agauaugaaugcugaugug

SEQ ID NO: 140969 - RNA, 19 nt, Homo sapiens
  misc_RNA (1)...(19): siRNA sense strand
uaccuucgcuuauggaaaa

SEQ ID NO: 140970 - RNA, 19 nt, Homo sapiens
  misc_RNA (1)...(19): siRNA sense strand
gcagauaugaaugcugaug

SEQ ID NO: 140971 - RNA, 19 nt, Homo sapiens
  misc_RNA (1)...(19): siRNA sense strand
gauguggauucagacaaau

SEQ ID NO: 140972 - RNA, 19 nt, Homo sapiens
  misc_RNA (1)...(19): siRNA sense strand
ggagacauggaaauuuaca

SEQ ID NO: 140973 - RNA, 19 nt, Homo sapiens
  misc_RNA (1)...(19): siRNA sense strand
gagguggcuuugcuguugu

SEQ ID NO: 140974 - RNA, 19 nt, Homo sapiens
  misc_RNA (1)...(19): siRNA sense strand
gccaugaccacuccugaga

SEQ ID NO: 140975 - RNA, 19 nt, Homo sapiens
  misc_RNA (1)...(19): siRNA sense strand
gaacucuuucaucaaucua

SEQ ID NO: 140976 - RNA, 19 nt, Homo sapiens
  misc_RNA (1)...(19): siRNA sense strand
gguagaaggccgaacaacu

SEQ ID NO: 140977 - RNA, 19 nt, Homo sapiens
  misc_RNA (1)...(19): siRNA sense strand
ugggauaauuugcacaaca

SEQ ID NO: 140978 - RNA, 19 nt, Homo sapiens
  misc_RNA (1)...(19): siRNA sense strand
uggagagacugugcagcua

SEQ ID NO: 140979 - RNA, 19 nt, Homo sapiens
  misc_RNA (1)...(19): siRNA sense strand
uuucaucaaucuaccaaca

SEQ ID NO: 140980 - RNA, 19 nt, Homo sapiens
  misc_RNA (1)...(19): siRNA sense strand
acucugaagcaucuaaauu

SEQ ID NO: 140981 - RNA, 19 nt, Homo sapiens
  misc_RNA (1)...(19): siRNA sense strand
gauaauuugcacaacagau

SEQ ID NO: 140982 - RNA, 19 nt, Homo sapiens
  misc_RNA (1)...(19): siRNA sense strand
caugaccuaugcgcaguug

SEQ ID NO: 140983 - RNA, 19 nt, Homo sapiens
  misc_RNA (1)...(19): siRNA sense strand
guuguuggcggaucauuuc

SEQ ID NO: 140984 - RNA, 19 nt, Homo sapiens
  misc_RNA (1)...(19): siRNA sense strand
gagaaucuguuacugauca

SEQ ID NO: 140985 - RNA, 19 nt, Homo sapiens
  misc_RNA (1)...(19): siRNA sense strand
gauaaugagcuacuaguuu

SEQ ID NO: 140986 - RNA, 19 nt, Homo sapiens
  misc_RNA (1)...(19): siRNA sense strand
cuacagaacuuuaccuugu

SEQ ID NO: 140987 - RNA, 19 nt, Homo sapiens
  misc_RNA (1)...(19): siRNA sense strand
gaggauaugucaucaucaa

SEQ ID NO: 140988 - RNA, 19 nt, Homo sapiens
  misc_RNA (1)...(19): siRNA sense strand
agaaagaguuggagaguau

SEQ ID NO: 140989 - RNA, 19 nt, Homo sapiens
  misc_RNA (1)...(19): siRNA sense strand
gaaaucagaggauauguca

SEQ ID NO: 140990 - RNA, 19 nt, Homo sapiens
  misc_RNA (1)...(19): siRNA sense strand
ggcaggcucugaacuauga

SEQ ID NO: 140991 - RNA, 19 nt, Homo sapiens
  misc_RNA (1)...(19): siRNA sense strand
ggagaagccucuacagaac

SEQ ID NO: 140992 - RNA, 19 nt, Homo sapiens
  misc_RNA (1)...(19): siRNA sense strand
acacaaaguuacauccaaa

SEQ ID NO: 140993 - RNA, 19 nt, Homo sapiens
  misc_RNA (1)...(19): siRNA sense strand
gcucugaacuaugaaauca

SEQ ID NO: 140994 - RNA, 19 nt, Homo sapiens
  misc_RNA (1)...(19): siRNA sense strand
gugggaagguguuuguauu

SEQ ID NO: 140995 - RNA, 19 nt, Homo sapiens
  misc_RNA (1)...(19): siRNA sense strand
uagagaaucuguuacugau

SEQ ID NO: 140996 - RNA, 19 nt, Homo sapiens
  misc_RNA (1)...(19): siRNA sense strand
cagaggauaugucaucauc

SEQ ID NO: 140997 - RNA, 19 nt, Homo sapiens
  misc_RNA (1)...(19): siRNA sense strand
gacacaaaguuacauccaa

SEQ ID NO: 140998 - RNA, 19 nt, Homo sapiens
  misc_RNA (1)...(19): siRNA sense strand
caaaguuacauccaaaguu

SEQ ID NO: 140999 - RNA, 19 nt, Homo sapiens
  misc_RNA (1)...(19): siRNA sense strand
gggaagguguuuguauuuc

SEQ ID NO: 141000 - RNA, 19 nt, Homo sapiens
  misc_RNA (1)...(19): siRNA sense strand
gaagcucagcccaagauug

SEQ ID NO: 141001 - RNA, 19 nt, Homo sapiens
  misc_RNA (1)...(19): siRNA sense strand
gaaagaguuggagaguaua

SEQ ID NO: 141002 - RNA, 19 nt, Homo sapiens
  misc_RNA (1)...(19): siRNA sense strand
aagaaagaguuggagagua

SEQ ID NO: 141003 - RNA, 19 nt, Homo sapiens
  misc_RNA (1)...(19): siRNA sense strand
uggagaagccucuacagaa

SEQ ID NO: 141004 - RNA, 19 nt, Homo sapiens
  misc_RNA (1)...(19): siRNA sense strand
ggauaaugagcuacuaguu

SEQ ID NO: 141005 - RNA, 19 nt, Homo sapiens
  misc_RNA (1)...(19): siRNA sense strand
cuagagaaucuguuacuga

SEQ ID NO: 141006 - RNA, 19 nt, Homo sapiens
  misc_RNA (1)...(19): siRNA sense strand
acuaugaaaucagaggaua

SEQ ID NO: 141007 - RNA, 19 nt, Homo sapiens
  misc_RNA (1)...(19): siRNA sense strand
ggaagccuuugcucacaca

SEQ ID NO: 141008 - RNA, 19 nt, Homo sapiens
  misc_RNA (1)...(19): siRNA sense strand
ccuacagccucuucuccua

SEQ ID NO: 141009 - RNA, 19 nt, Homo sapiens
  misc_RNA (1)...(19): siRNA sense strand
gaagacacaaaguuacauc

SEQ ID NO: 141010 - RNA, 19 nt, Homo sapiens
  misc_RNA (1)...(19): siRNA sense strand
gagcuacuaguuuauaaag

SEQ ID NO: 141011 - RNA, 19 nt, Homo sapiens
  misc_RNA (1)...(19): siRNA sense strand
ugggaguccucaucaggua

SEQ ID NO: 141012 - RNA, 19 nt, Homo sapiens
  misc_RNA (1)...(19): siRNA sense strand
ccaaaguuaucgaaaaguu

SEQ ID NO: 141013 - RNA, 19 nt, Homo sapiens
  misc_RNA (1)...(19): siRNA sense strand
agaagccucuacagaacuu

SEQ ID NO: 141014 - RNA, 19 nt, Homo sapiens
  misc_RNA (1)...(19): siRNA sense strand
gagcugggaguccucauca

SEQ ID NO: 141015 - RNA, 19 nt, Homo sapiens
  misc_RNA (1)...(19): siRNA sense strand
aggcagggauaaugagcua

SEQ ID NO: 141016 - RNA, 19 nt, Homo sapiens
  misc_RNA (1)...(19): siRNA sense strand
gaagguguuuguauuuccu

SEQ ID NO: 141017 - RNA, 19 nt, Homo sapiens
  misc_RNA (1)...(19): siRNA sense strand
ggaguccucaucagguauu

SEQ ID NO: 141018 - RNA, 19 nt, Homo sapiens
  misc_RNA (1)...(19): siRNA sense strand
guuuguauuuccuagagaa

SEQ ID NO: 141019 - RNA, 19 nt, Homo sapiens
  misc_RNA (1)...(19): siRNA sense strand
ggaucaaugggacaccuuu

SEQ ID NO: 141020 - RNA, 19 nt, Homo sapiens
  misc_RNA (1)...(19): siRNA sense strand
ggauaugucaucaucaaac

SEQ ID NO: 141021 - RNA, 19 nt, Homo sapiens
  misc_RNA (1)...(19): siRNA sense strand
cauccaaaguuaucgaaaa

SEQ ID NO: 141022 - RNA, 19 nt, Homo sapiens
  misc_RNA (1)...(19): siRNA sense strand
aaucagaggauaugucauc

SEQ ID NO: 141023 - RNA, 19 nt, Homo sapiens
  misc_RNA (1)...(19): siRNA sense strand
gaacuuuaccuuguguuuu

SEQ ID NO: 141024 - RNA, 19 nt, Homo sapiens
  misc_RNA (1)...(19): siRNA sense strand
aagcucagcccaagauugu

SEQ ID NO: 141025 - RNA, 19 nt, Homo sapiens
  misc_RNA (1)...(19): siRNA sense strand
uacagaacuuuaccuugug

SEQ ID NO: 141026 - RNA, 19 nt, Homo sapiens
  misc_RNA (1)...(19): siRNA sense strand
gauaugucaucaucaaacc

SEQ ID NO: 141027 - RNA, 19 nt, Homo sapiens
  misc_RNA (1)...(19): siRNA sense strand
gaucaaugggacaccuuug

SEQ ID NO: 141028 - RNA, 19 nt, Homo sapiens
  misc_RNA (1)...(19): siRNA sense strand
auuggaagacacaaaguua

SEQ ID NO: 141029 - RNA, 19 nt, Homo sapiens
  misc_RNA (1)...(19): siRNA sense strand
ugggaagguguuuguauuu

SEQ ID NO: 141030 - RNA, 19 nt, Homo sapiens
  misc_RNA (1)...(19): siRNA sense strand
acagaacuuuaccuugugu

SEQ ID NO: 141031 - RNA, 19 nt, Homo sapiens
  misc_RNA (1)...(19): siRNA sense strand
uaugaaaucagaggauaug

SEQ ID NO: 141032 - RNA, 19 nt, Homo sapiens
  misc_RNA (1)...(19): siRNA sense strand
uuuccuagagaaucuguua

SEQ ID NO: 141033 - RNA, 19 nt, Homo sapiens
  misc_RNA (1)...(19): siRNA sense strand
ggaagacacaaaguuacau

SEQ ID NO: 141034 - RNA, 19 nt, Homo sapiens
  misc_RNA (1)...(19): siRNA sense strand
aaagaaagaguuggagagu

SEQ ID NO: 141035 - RNA, 19 nt, Homo sapiens
  misc_RNA (1)...(19): siRNA sense strand
cagggauaaugagcuacua

SEQ ID NO: 141036 - RNA, 19 nt, Homo sapiens
  misc_RNA (1)...(19): siRNA sense strand
agaacuuuaccuuguguuu

SEQ ID NO: 141037 - RNA, 19 nt, Homo sapiens
  misc_RNA (1)...(19): siRNA sense strand
agccucuucuccuacaaua

SEQ ID NO: 141038 - RNA, 19 nt, Homo sapiens
  misc_RNA (1)...(19): siRNA sense strand
gaucacaccgcuggagaag

SEQ ID NO: 141039 - RNA, 19 nt, Homo sapiens
  misc_RNA (1)...(19): siRNA sense strand
uguauuuccuagagaaucu

SEQ ID NO: 141040 - RNA, 19 nt, Homo sapiens
  misc_RNA (1)...(19): siRNA sense strand
gagaagccucuacagaacu

SEQ ID NO: 141041 - RNA, 19 nt, Homo sapiens
  misc_RNA (1)...(19): siRNA sense strand
cauuggaagacacaaaguu

SEQ ID NO: 141042 - RNA, 19 nt, Homo sapiens
  misc_RNA (1)...(19): siRNA sense strand
gggauaaugagcuacuagu

SEQ ID NO: 141043 - RNA, 19 nt, Homo sapiens
  misc_RNA (1)...(19): siRNA sense strand
ugaaaucagaggauauguc

SEQ ID NO: 141044 - RNA, 19 nt, Homo sapiens
  misc_RNA (1)...(19): siRNA sense strand
cccaaggcagggauaauga

SEQ ID NO: 141045 - RNA, 19 nt, Homo sapiens
  misc_RNA (1)...(19): siRNA sense strand
guguuuguauuuccuagag

SEQ ID NO: 141046 - RNA, 19 nt, Homo sapiens
  misc_RNA (1)...(19): siRNA sense strand
ccuagagaaucuguuacug

SEQ ID NO: 141047 - RNA, 19 nt, Homo sapiens
  misc_RNA (1)...(19): siRNA sense strand
gcaaggaccugauggagaa

SEQ ID NO: 141048 - RNA, 19 nt, Homo sapiens
  misc_RNA (1)...(19): siRNA sense strand
guuaacuucuugagcuauu

SEQ ID NO: 141049 - RNA, 19 nt, Homo sapiens
  misc_RNA (1)...(19): siRNA sense strand
ugacaccccugaucaagaa

SEQ ID NO: 141050 - RNA, 19 nt, Homo sapiens
  misc_RNA (1)...(19): siRNA sense strand
cuugagcuauuucguggaa

SEQ ID NO: 141051 - RNA, 19 nt, Homo sapiens
  misc_RNA (1)...(19): siRNA sense strand
ggucaagagcccagagcuu

SEQ ID NO: 141052 - RNA, 19 nt, Homo sapiens
  misc_RNA (1)...(19): siRNA sense strand
ugguuaacuucuugagcua

SEQ ID NO: 141053 - RNA, 19 nt, Homo sapiens
  misc_RNA (1)...(19): siRNA sense strand
uccagaccgugacugacua

SEQ ID NO: 141054 - RNA, 19 nt, Homo sapiens
  misc_RNA (1)...(19): siRNA sense strand
ucaagagcccagagcuuca

SEQ ID NO: 141055 - RNA, 19 nt, Homo sapiens
  misc_RNA (1)...(19): siRNA sense strand
ccagagaacuucguaaaga

SEQ ID NO: 141056 - RNA, 19 nt, Homo sapiens
  misc_RNA (1)...(19): siRNA sense strand
ggaguaacuauucagauua

SEQ ID NO: 141057 - RNA, 19 nt, Homo sapiens
  misc_RNA (1)...(19): siRNA sense strand
ccaaucacguggaaguuaa

SEQ ID NO: 141058 - RNA, 19 nt, Homo sapiens
  misc_RNA (1)...(19): siRNA sense strand
gcacauggaucaacaaaau

SEQ ID NO: 141059 - RNA, 19 nt, Homo sapiens
  misc_RNA (1)...(19): siRNA sense strand
gaagcucacuggccacaau

SEQ ID NO: 141060 - RNA, 19 nt, Homo sapiens
  misc_RNA (1)...(19): siRNA sense strand
uggaguaacuauucagauu

SEQ ID NO: 141061 - RNA, 19 nt, Homo sapiens
  misc_RNA (1)...(19): siRNA sense strand
uaucacugcuggaggaauu

SEQ ID NO: 141062 - RNA, 19 nt, Homo sapiens
  misc_RNA (1)...(19): siRNA sense strand
gagcaucagaguauuauca

SEQ ID NO: 141063 - RNA, 19 nt, Homo sapiens
  misc_RNA (1)...(19): siRNA sense strand
uaugagagcaucagaguau

SEQ ID NO: 141064 - RNA, 19 nt, Homo sapiens
  misc_RNA (1)...(19): siRNA sense strand
ggaggaauuuugucaacua

SEQ ID NO: 141065 - RNA, 19 nt, Homo sapiens
  misc_RNA (1)...(19): siRNA sense strand
gcuauuagagaguuucuga

SEQ ID NO: 141066 - RNA, 19 nt, Homo sapiens
  misc_RNA (1)...(19): siRNA sense strand
ggaguuugacgucuucuau

SEQ ID NO: 141067 - RNA, 19 nt, Homo sapiens
  misc_RNA (1)...(19): siRNA sense strand
ugagagcaucagaguauua

SEQ ID NO: 141068 - RNA, 19 nt, Homo sapiens
  misc_RNA (1)...(19): siRNA sense strand
ggaaugcucccaggcuauu

SEQ ID NO: 141069 - RNA, 19 nt, Homo sapiens
  misc_RNA (1)...(19): siRNA sense strand
ucagggaccuuguuaacag

SEQ ID NO: 141070 - RNA, 19 nt, Homo sapiens
  misc_RNA (1)...(19): siRNA sense strand
gaaaucaaguggggcauga

SEQ ID NO: 141071 - RNA, 19 nt, Homo sapiens
  misc_RNA (1)...(19): siRNA sense strand
ucaagaagauggcaaaauc

SEQ ID NO: 141072 - RNA, 19 nt, Homo sapiens
  misc_RNA (1)...(19): siRNA sense strand
ccacccuguuuaaagauuu

SEQ ID NO: 141073 - RNA, 19 nt, Homo sapiens
  misc_RNA (1)...(19): siRNA sense strand
cggaagaucuggcgaagcu

SEQ ID NO: 141074 - RNA, 19 nt, Homo sapiens
  misc_RNA (1)...(19): siRNA sense strand
uaacaguggaguaacuauu

SEQ ID NO: 141075 - RNA, 19 nt, Homo sapiens
  misc_RNA (1)...(19): siRNA sense strand
cagagaacuucguaaagag

SEQ ID NO: 141076 - RNA, 19 nt, Homo sapiens
  misc_RNA (1)...(19): siRNA sense strand
gagagcaucagaguauuau

SEQ ID NO: 141077 - RNA, 19 nt, Homo sapiens
  misc_RNA (1)...(19): siRNA sense strand
cuuccacccuguuuaaaga

SEQ ID NO: 141078 - RNA, 19 nt, Homo sapiens
  misc_RNA (1)...(19): siRNA sense strand
ccacaauacccaccucugu

SEQ ID NO: 141079 - RNA, 19 nt, Homo sapiens
  misc_RNA (1)...(19): siRNA sense strand
uccaucagcugcuccauca

SEQ ID NO: 141080 - RNA, 19 nt, Homo sapiens
  misc_RNA (1)...(19): siRNA sense strand
aguuugacgucuucuauga

SEQ ID NO: 141081 - RNA, 19 nt, Homo sapiens
  misc_RNA (1)...(19): siRNA sense strand
gaaugcucccaggcuauua

SEQ ID NO: 141082 - RNA, 19 nt, Homo sapiens
  misc_RNA (1)...(19): siRNA sense strand
ggcaugagccggaagaucu

SEQ ID NO: 141083 - RNA, 19 nt, Homo sapiens
  misc_RNA (1)...(19): siRNA sense strand
gaaucgaacccugggaguu

SEQ ID NO: 141084 - RNA, 19 nt, Homo sapiens
  misc_RNA (1)...(19): siRNA sense strand
aaacugccauuaccaaacg

SEQ ID NO: 141085 - RNA, 19 nt, Homo sapiens
  misc_RNA (1)...(19): siRNA sense strand
aaucgaacccugggaguuu

SEQ ID NO: 141086 - RNA, 19 nt, Homo sapiens
  misc_RNA (1)...(19): siRNA sense strand
ccacacauccuuuuagcua

SEQ ID NO: 141087 - RNA, 19 nt, Homo sapiens
  misc_RNA (1)...(19): siRNA sense strand
gcucccaggcuauuagaga

SEQ ID NO: 141088 - RNA, 19 nt, Homo sapiens
  misc_RNA (1)...(19): siRNA sense strand
uuucagacuucaucuucaa

SEQ ID NO: 141089 - RNA, 19 nt, Homo sapiens
  misc_RNA (1)...(19): siRNA sense strand
cugcauaauucuaagucuu

SEQ ID NO: 141090 - RNA, 19 nt, Homo sapiens
  misc_RNA (1)...(19): siRNA sense strand
gugugacucuagugaucua

SEQ ID NO: 141091 - RNA, 19 nt, Homo sapiens
  misc_RNA (1)...(19): siRNA sense strand
gcugcuccaucaccugguu

SEQ ID NO: 141092 - RNA, 19 nt, Homo sapiens
  misc_RNA (1)...(19): siRNA sense strand
ggcaaaaucaucuuacauu

SEQ ID NO: 141093 - RNA, 19 nt, Homo sapiens
  misc_RNA (1)...(19): siRNA sense strand
acaguggaguaacuauuca

SEQ ID NO: 141094 - RNA, 19 nt, Homo sapiens
  misc_RNA (1)...(19): siRNA sense strand
aaauuuacgucagaaagag

SEQ ID NO: 141095 - RNA, 19 nt, Homo sapiens
  misc_RNA (1)...(19): siRNA sense strand
ugucugcucuacgaaauca

SEQ ID NO: 141096 - RNA, 19 nt, Homo sapiens
  misc_RNA (1)...(19): siRNA sense strand
gcacugcauaauucuaagu

SEQ ID NO: 141097 - RNA, 19 nt, Homo sapiens
  misc_RNA (1)...(19): siRNA sense strand
uaagucuuccacccuguuu

SEQ ID NO: 141098 - RNA, 19 nt, Homo sapiens
  misc_RNA (1)...(19): siRNA sense strand
caaacgauuccgccacaca

SEQ ID NO: 141099 - RNA, 19 nt, Homo sapiens
  misc_RNA (1)...(19): siRNA sense strand
ccugucugcucuacgaaau

SEQ ID NO: 141100 - RNA, 19 nt, Homo sapiens
  misc_RNA (1)...(19): siRNA sense strand
ccaggcuauuagagaguuu

SEQ ID NO: 141101 - RNA, 19 nt, Homo sapiens
  misc_RNA (1)...(19): siRNA sense strand
gcuacagggcugauacauc

SEQ ID NO: 141102 - RNA, 19 nt, Homo sapiens
  misc_RNA (1)...(19): siRNA sense strand
ccugggaguuugacgucuu

SEQ ID NO: 141103 - RNA, 19 nt, Homo sapiens
  misc_RNA (1)...(19): siRNA sense strand
gaguuugacgucuucuaug

SEQ ID NO: 141104 - RNA, 19 nt, Homo sapiens
  misc_RNA (1)...(19): siRNA sense strand
uccaucaccugguucuugu

SEQ ID NO: 141105 - RNA, 19 nt, Homo sapiens
  misc_RNA (1)...(19): siRNA sense strand
agucuuccacccuguuuaa

SEQ ID NO: 141106 - RNA, 19 nt, Homo sapiens
  misc_RNA (1)...(19): siRNA sense strand
cucuguggaugauguugua

SEQ ID NO: 141107 - RNA, 19 nt, Homo sapiens
  misc_RNA (1)...(19): siRNA sense strand
uggcgaagcucaggcaaaa

SEQ ID NO: 141108 - RNA, 19 nt, Homo sapiens
  misc_RNA (1)...(19): siRNA sense strand
ucacguggaaguuaauuuu

SEQ ID NO: 141109 - RNA, 19 nt, Homo sapiens
  misc_RNA (1)...(19): siRNA sense strand
uauuagagaguuucugagu

SEQ ID NO: 141110 - RNA, 19 nt, Homo sapiens
  misc_RNA (1)...(19): siRNA sense strand
gcaucagaguauuaucacu

SEQ ID NO: 141111 - RNA, 19 nt, Homo sapiens
  misc_RNA (1)...(19): siRNA sense strand
accaaucacguggaaguua

SEQ ID NO: 141112 - RNA, 19 nt, Homo sapiens
  misc_RNA (1)...(19): siRNA sense strand
ccagagaacuucguaaaga

SEQ ID NO: 141113 - RNA, 19 nt, Homo sapiens
  misc_RNA (1)...(19): siRNA sense strand
ggaguuugacgucuucuau

SEQ ID NO: 141114 - RNA, 19 nt, Homo sapiens
  misc_RNA (1)...(19): siRNA sense strand
gaaaucaaguggggcauga

SEQ ID NO: 141115 - RNA, 19 nt, Homo sapiens
  misc_RNA (1)...(19): siRNA sense strand
cagagaacuucguaaagag

SEQ ID NO: 141116 - RNA, 19 nt, Homo sapiens
  misc_RNA (1)...(19): siRNA sense strand
aguuugacgucuucuauga

SEQ ID NO: 141117 - RNA, 19 nt, Homo sapiens
  misc_RNA (1)...(19): siRNA sense strand
gaaucgaacccugggaguu

SEQ ID NO: 141118 - RNA, 19 nt, Homo sapiens
  misc_RNA (1)...(19): siRNA sense strand
aaucgaacccugggaguuu

SEQ ID NO: 141119 - RNA, 19 nt, Homo sapiens
  misc_RNA (1)...(19): siRNA sense strand
ugucugcucuacgaaauca

SEQ ID NO: 141120 - RNA, 19 nt, Homo sapiens
  misc_RNA (1)...(19): siRNA sense strand
ccugucugcucuacgaaau

SEQ ID NO: 141121 - RNA, 19 nt, Homo sapiens
  misc_RNA (1)...(19): siRNA sense strand
gaguuugacgucuucuaug

SEQ ID NO: 141122 - RNA, 19 nt, Homo sapiens
  misc_RNA (1)...(19): siRNA sense strand
ccugggaguuugacgucuu

SEQ ID NO: 141123 - RNA, 19 nt, Homo sapiens
  misc_RNA (1)...(19): siRNA sense strand
gaaacacacuggaggacaa

SEQ ID NO: 141124 - RNA, 19 nt, Homo sapiens
  misc_RNA (1)...(19): siRNA sense strand
uggauaagcugaaggaguu

SEQ ID NO: 141125 - RNA, 19 nt, Homo sapiens
  misc_RNA (1)...(19): siRNA sense strand
ggacaaggcucgggaacuc

SEQ ID NO: 141126 - RNA, 19 nt, Homo sapiens
  misc_RNA (1)...(19): siRNA sense strand
gaacucaucagccgcauca

SEQ ID NO: 141127 - RNA, 19 nt, Homo sapiens
  misc_RNA (1)...(19): siRNA sense strand
gaaggagaaacucaagauu

SEQ ID NO: 141128 - RNA, 19 nt, Homo sapiens
  misc_RNA (1)...(19): siRNA sense strand
caaacagagugaacuuucu

SEQ ID NO: 141129 - RNA, 19 nt, Homo sapiens
  misc_RNA (1)...(19): siRNA sense strand
ugaacuuucugccaagaug

SEQ ID NO: 141130 - RNA, 19 nt, Homo sapiens
  misc_RNA (1)...(19): siRNA sense strand
ucaaacagagugaacuuuc

SEQ ID NO: 141131 - RNA, 19 nt, Homo sapiens
  misc_RNA (1)...(19): siRNA sense strand
aaggagaaacucaagauug

SEQ ID NO: 141132 - RNA, 19 nt, Homo sapiens
  misc_RNA (1)...(19): siRNA sense strand
caucaaacagagugaacuu

SEQ ID NO: 141133 - RNA, 19 nt, Homo sapiens
  misc_RNA (1)...(19): siRNA sense strand
ugaaggagaaacucaagau

SEQ ID NO: 141134 - RNA, 19 nt, Homo sapiens
  misc_RNA (1)...(19): siRNA sense strand
ccaagaugcgggagugguu

SEQ ID NO: 141135 - RNA, 19 nt, Homo sapiens
  misc_RNA (1)...(19): siRNA sense strand
uuucagagacauuucagaa

SEQ ID NO: 141136 - RNA, 19 nt, Homo sapiens
  misc_RNA (1)...(19): siRNA sense strand
caagaugcgggagugguuu

SEQ ID NO: 141137 - RNA, 19 nt, Homo sapiens
  misc_RNA (1)...(19): siRNA sense strand
gaaagugaaggagaaacuc

SEQ ID NO: 141138 - RNA, 19 nt, Homo sapiens
  misc_RNA (1)...(19): siRNA sense strand
acucaucagccgcaucaaa

SEQ ID NO: 141139 - RNA, 19 nt, Homo sapiens
  misc_RNA (1)...(19): siRNA sense strand
aaagugaaggagaaacuca

SEQ ID NO: 141140 - RNA, 19 nt, Homo sapiens
  misc_RNA (1)...(19): siRNA sense strand
ucagaaagugaaggagaaa

SEQ ID NO: 141141 - RNA, 19 nt, Homo sapiens
  misc_RNA (1)...(19): siRNA sense strand
gauaagcugaaggaguuug

SEQ ID NO: 141142 - RNA, 19 nt, Homo sapiens
  misc_RNA (1)...(19): siRNA sense strand
caccaaagcuaaagaugag

SEQ ID NO: 141143 - RNA, 19 nt, Homo sapiens
  misc_RNA (1)...(19): siRNA sense strand
ccaccaaagcuaaagauga

SEQ ID NO: 141144 - RNA, 19 nt, Homo sapiens
  misc_RNA (1)...(19): siRNA sense strand
ccugguuccucgaauccaa

SEQ ID NO: 141145 - RNA, 19 nt, Homo sapiens
  misc_RNA (1)...(19): siRNA sense strand
gaauaaguaucucggaaga

SEQ ID NO: 141146 - RNA, 19 nt, Homo sapiens
  misc_RNA (1)...(19): siRNA sense strand
gaacuaugcccucguguau

SEQ ID NO: 141147 - RNA, 19 nt, Homo sapiens
  misc_RNA (1)...(19): siRNA sense strand
gaagaugguacgaaauuga

SEQ ID NO: 141148 - RNA, 19 nt, Homo sapiens
  misc_RNA (1)...(19): siRNA sense strand
ggaaagaucaaaguguuaa

SEQ ID NO: 141149 - RNA, 19 nt, Homo sapiens
  misc_RNA (1)...(19): siRNA sense strand
caacaaccuuugagaaugg

SEQ ID NO: 141150 - RNA, 19 nt, Homo sapiens
  misc_RNA (1)...(19): siRNA sense strand
gaagaucccaacaaccuuu

SEQ ID NO: 141151 - RNA, 19 nt, Homo sapiens
  misc_RNA (1)...(19): siRNA sense strand
ggaagaugguacgaaauug

SEQ ID NO: 141152 - RNA, 19 nt, Homo sapiens
  misc_RNA (1)...(19): siRNA sense strand
ccaacaaccuuugagaaug

SEQ ID NO: 141153 - RNA, 19 nt, Homo sapiens
  misc_RNA (1)...(19): siRNA sense strand
gguacgaaauugagaagau

SEQ ID NO: 141154 - RNA, 19 nt, Homo sapiens
  misc_RNA (1)...(19): siRNA sense strand
caacuacucacuaauggaa

SEQ ID NO: 141155 - RNA, 19 nt, Homo sapiens
  misc_RNA (1)...(19): siRNA sense strand
cugccaagcuggaaguuaa

SEQ ID NO: 141156 - RNA, 19 nt, Homo sapiens
  misc_RNA (1)...(19): siRNA sense strand
guugagagcugauggaacu

SEQ ID NO: 141157 - RNA, 19 nt, Homo sapiens
  misc_RNA (1)...(19): siRNA sense strand
gaaacaguggacucucuaa

SEQ ID NO: 141158 - RNA, 19 nt, Homo sapiens
  misc_RNA (1)...(19): siRNA sense strand
guacgaaauugagaagauc

SEQ ID NO: 141159 - RNA, 19 nt, Homo sapiens
  misc_RNA (1)...(19): siRNA sense strand
caagcuggaaguuaaguuu

SEQ ID NO: 141160 - RNA, 19 nt, Homo sapiens
  misc_RNA (1)...(19): siRNA sense strand
gagaagaucccaacaaccu

SEQ ID NO: 141161 - RNA, 19 nt, Homo sapiens
  misc_RNA (1)...(19): siRNA sense strand
ccuaaucucccuccagaaa

SEQ ID NO: 141162 - RNA, 19 nt, Homo sapiens
  misc_RNA (1)...(19): siRNA sense strand
cggaagaugguacgaaauu

SEQ ID NO: 141163 - RNA, 19 nt, Homo sapiens
  misc_RNA (1)...(19): siRNA sense strand
caggccaacuacucacuaa

SEQ ID NO: 141164 - RNA, 19 nt, Homo sapiens
  misc_RNA (1)...(19): siRNA sense strand
ucacagagccugccaagcu

SEQ ID NO: 141165 - RNA, 19 nt, Homo sapiens
  misc_RNA (1)...(19): siRNA sense strand
acggaaagaucaaaguguu

SEQ ID NO: 141166 - RNA, 19 nt, Homo sapiens
  misc_RNA (1)...(19): siRNA sense strand
acuaugcccucguguauuc

SEQ ID NO: 141167 - RNA, 19 nt, Homo sapiens
  misc_RNA (1)...(19): siRNA sense strand
cagaaacaguggacucucu

SEQ ID NO: 141168 - RNA, 19 nt, Homo sapiens
  misc_RNA (1)...(19): siRNA sense strand
gaacugugaaucaaaucga

SEQ ID NO: 141169 - RNA, 19 nt, Homo sapiens
  misc_RNA (1)...(19): siRNA sense strand
uaaucucccuccagaaaca

SEQ ID NO: 141170 - RNA, 19 nt, Homo sapiens
  misc_RNA (1)...(19): siRNA sense strand
gauggaacugugaaucaaa

SEQ ID NO: 141171 - RNA, 19 nt, Homo sapiens
  misc_RNA (1)...(19): siRNA sense strand
gggacaagcauuucaucuu

SEQ ID NO: 141172 - RNA, 19 nt, Homo sapiens
  misc_RNA (1)...(19): siRNA sense strand
gauccuggccaccgacuau

SEQ ID NO: 141173 - RNA, 19 nt, Homo sapiens
  misc_RNA (1)...(19): siRNA sense strand
ggccaacuacucacuaaug

SEQ ID NO: 141174 - RNA, 19 nt, Homo sapiens
  misc_RNA (1)...(19): siRNA sense strand
cggaaagaucaaaguguua

SEQ ID NO: 141175 - RNA, 19 nt, Homo sapiens
  misc_RNA (1)...(19): siRNA sense strand
gccaacuacucacuaaugg

SEQ ID NO: 141176 - RNA, 19 nt, Homo sapiens
  misc_RNA (1)...(19): siRNA sense strand
ggcagagggacaagcauuu

SEQ ID NO: 141177 - RNA, 19 nt, Homo sapiens
  misc_RNA (1)...(19): siRNA sense strand
aaacaguggacucucuaaa

SEQ ID NO: 141178 - RNA, 19 nt, Homo sapiens
  misc_RNA (1)...(19): siRNA sense strand
gaaucaaaucgaaggugaa

SEQ ID NO: 141179 - RNA, 19 nt, Homo sapiens
  misc_RNA (1)...(19): siRNA sense strand
gcagagggacaagcauuuc

SEQ ID NO: 141180 - RNA, 19 nt, Homo sapiens
  misc_RNA (1)...(19): siRNA sense strand
gaugguacgaaauugagaa

SEQ ID NO: 141181 - RNA, 19 nt, Homo sapiens
  misc_RNA (1)...(19): siRNA sense strand
ccugacuucuaauaacauu

SEQ ID NO: 141182 - RNA, 19 nt, Homo sapiens
  misc_RNA (1)...(19): siRNA sense strand
guaccugcaucauccaacu

SEQ ID NO: 141183 - RNA, 19 nt, Homo sapiens
  misc_RNA (1)...(19): siRNA sense strand
uauccugacuucuaauaac

SEQ ID NO: 141184 - RNA, 19 nt, Homo sapiens
  misc_RNA (1)...(19): siRNA sense strand
aaacggaaagaucaaagug

SEQ ID NO: 141185 - RNA, 19 nt, Homo sapiens
  misc_RNA (1)...(19): siRNA sense strand
ccaccgacuaugagaacua

SEQ ID NO: 141186 - RNA, 19 nt, Homo sapiens
  misc_RNA (1)...(19): siRNA sense strand
cucggaagaugguacgaaa

SEQ ID NO: 141187 - RNA, 19 nt, Homo sapiens
  misc_RNA (1)...(19): siRNA sense strand
gagcugauggaacugugaa

SEQ ID NO: 141188 - RNA, 19 nt, Homo sapiens
  misc_RNA (1)...(19): siRNA sense strand
cauuucaucuugggaagug

SEQ ID NO: 141189 - RNA, 19 nt, Homo sapiens
  misc_RNA (1)...(19): siRNA sense strand
agaacuaugcccucgugua

SEQ ID NO: 141190 - RNA, 19 nt, Homo sapiens
  misc_RNA (1)...(19): siRNA sense strand
caccgacuaugagaacuau

SEQ ID NO: 141191 - RNA, 19 nt, Homo sapiens
  misc_RNA (1)...(19): siRNA sense strand
cccaacaaccuuugagaau

SEQ ID NO: 141192 - RNA, 19 nt, Homo sapiens
  misc_RNA (1)...(19): siRNA sense strand
ggauuuugcuuggaucuug

SEQ ID NO: 141193 - RNA, 19 nt, Homo sapiens
  misc_RNA (1)...(19): siRNA sense strand
ggaguugagagcugaugga

SEQ ID NO: 141194 - RNA, 19 nt, Homo sapiens
  misc_RNA (1)...(19): siRNA sense strand
guuaaguuuuccugguuua

SEQ ID NO: 141195 - RNA, 19 nt, Homo sapiens
  misc_RNA (1)...(19): siRNA sense strand
uugagaagaucccaacaac

SEQ ID NO: 141196 - RNA, 19 nt, Homo sapiens
  misc_RNA (1)...(19): siRNA sense strand
gcccucguguauuccugua

SEQ ID NO: 141197 - RNA, 19 nt, Homo sapiens
  misc_RNA (1)...(19): siRNA sense strand
agaaacaguggacucucua

SEQ ID NO: 141198 - RNA, 19 nt, Homo sapiens
  misc_RNA (1)...(19): siRNA sense strand
cauccaggccaacuacuca

SEQ ID NO: 141199 - RNA, 19 nt, Homo sapiens
  misc_RNA (1)...(19): siRNA sense strand
gaguugagagcugauggaa

SEQ ID NO: 141200 - RNA, 19 nt, Homo sapiens
  misc_RNA (1)...(19): siRNA sense strand
caucggcaccguacuggau

SEQ ID NO: 141201 - RNA, 19 nt, Homo sapiens
  misc_RNA (1)...(19): siRNA sense strand
cggcagagggacaagcauu

SEQ ID NO: 141202 - RNA, 19 nt, Homo sapiens
  misc_RNA (1)...(19): siRNA sense strand
ggcaagaaacccuaaucuc

SEQ ID NO: 141203 - RNA, 19 nt, Homo sapiens
  misc_RNA (1)...(19): siRNA sense strand
ccaggccaacuacucacua

SEQ ID NO: 141204 - RNA, 19 nt, Homo sapiens
  misc_RNA (1)...(19): siRNA sense strand
caacuacucuggcuucuuu

SEQ ID NO: 141205 - RNA, 19 nt, Homo sapiens
  misc_RNA (1)...(19): siRNA sense strand
caaagucacugccugguuu

SEQ ID NO: 141206 - RNA, 19 nt, Homo sapiens
  misc_RNA (1)...(19): siRNA sense strand
gggcacagcuuuguauuau

SEQ ID NO: 141207 - RNA, 19 nt, Homo sapiens
  misc_RNA (1)...(19): siRNA sense strand
caagagcuaugacuuagau

SEQ ID NO: 141208 - RNA, 19 nt, Homo sapiens
  misc_RNA (1)...(19): siRNA sense strand
ggauaugaccuucugauga

SEQ ID NO: 141209 - RNA, 19 nt, Homo sapiens
  misc_RNA (1)...(19): siRNA sense strand
gcacagcuuuguauuaugc

SEQ ID NO: 141210 - RNA, 19 nt, Homo sapiens
  misc_RNA (1)...(19): siRNA sense strand
ggagcaagcugugcacaau

SEQ ID NO: 141211 - RNA, 19 nt, Homo sapiens
  misc_RNA (1)...(19): siRNA sense strand
gauaugaccuucugaugac

SEQ ID NO: 141212 - RNA, 19 nt, Homo sapiens
  misc_RNA (1)...(19): siRNA sense strand
ggccauagaucugggauau

SEQ ID NO: 141213 - RNA, 19 nt, Homo sapiens
  misc_RNA (1)...(19): siRNA sense strand
caguugagcugcuacuuug

SEQ ID NO: 141214 - RNA, 19 nt, Homo sapiens
  misc_RNA (1)...(19): siRNA sense strand
gaccauggcugggauguca

SEQ ID NO: 141215 - RNA, 19 nt, Homo sapiens
  misc_RNA (1)...(19): siRNA sense strand
uaucagaaguaguaaguuc

SEQ ID NO: 141216 - RNA, 19 nt, Homo sapiens
  misc_RNA (1)...(19): siRNA sense strand
aaucaagagcuaugacuua

SEQ ID NO: 141217 - RNA, 19 nt, Homo sapiens
  misc_RNA (1)...(19): siRNA sense strand
gauccaguauuaccaagau

SEQ ID NO: 141218 - RNA, 19 nt, Homo sapiens
  misc_RNA (1)...(19): siRNA sense strand
gaaagacgcaaacaucucu

SEQ ID NO: 141219 - RNA, 19 nt, Homo sapiens
  misc_RNA (1)...(19): siRNA sense strand
gccaauuucugcacccaaa

SEQ ID NO: 141220 - RNA, 19 nt, Homo sapiens
  misc_RNA (1)...(19): siRNA sense strand
gugagugacuuggaagaaa

SEQ ID NO: 141221 - RNA, 19 nt, Homo sapiens
  misc_RNA (1)...(19): siRNA sense strand
cugggagucuugagauaua

SEQ ID NO: 141222 - RNA, 19 nt, Homo sapiens
  misc_RNA (1)...(19): siRNA sense strand
ggaugccacuucauaugga

SEQ ID NO: 141223 - RNA, 19 nt, Homo sapiens
  misc_RNA (1)...(19): siRNA sense strand
agcaguugauccaguauua

SEQ ID NO: 141224 - RNA, 19 nt, Homo sapiens
  misc_RNA (1)...(19): siRNA sense strand
agacaugcguggccucaga

SEQ ID NO: 141225 - RNA, 19 nt, Homo sapiens
  misc_RNA (1)...(19): siRNA sense strand
ucagaaagacgcaaacauc

SEQ ID NO: 141226 - RNA, 19 nt, Homo sapiens
  misc_RNA (1)...(19): siRNA sense strand
uacucuggcuucuuucaua

SEQ ID NO: 141227 - RNA, 19 nt, Homo sapiens
  misc_RNA (1)...(19): siRNA sense strand
caaaugucuugaugcacuu

SEQ ID NO: 141228 - RNA, 19 nt, Homo sapiens
  misc_RNA (1)...(19): siRNA sense strand
ccaguugagcugcuacuuu

SEQ ID NO: 141229 - RNA, 19 nt, Homo sapiens
  misc_RNA (1)...(19): siRNA sense strand
gauaccaguugagcugcua

SEQ ID NO: 141230 - RNA, 19 nt, Homo sapiens
  misc_RNA (1)...(19): siRNA sense strand
gcagaagcacagagaggaa

SEQ ID NO: 141231 - RNA, 19 nt, Homo sapiens
  misc_RNA (1)...(19): siRNA sense strand
gagcagcaaagcacaggaa

SEQ ID NO: 141232 - RNA, 19 nt, Homo sapiens
  misc_RNA (1)...(19): siRNA sense strand
ggcugggagucuugagaua

SEQ ID NO: 141233 - RNA, 19 nt, Homo sapiens
  misc_RNA (1)...(19): siRNA sense strand
gaugccacuucauauggaa

SEQ ID NO: 141234 - RNA, 19 nt, Homo sapiens
  misc_RNA (1)...(19): siRNA sense strand
uguuugggcucuacagcua

SEQ ID NO: 141235 - RNA, 19 nt, Homo sapiens
  misc_RNA (1)...(19): siRNA sense strand
cuacacagguccucaucca

SEQ ID NO: 141236 - RNA, 19 nt, Homo sapiens
  misc_RNA (1)...(19): siRNA sense strand
cagaggacugugagaauga

SEQ ID NO: 141237 - RNA, 19 nt, Homo sapiens
  misc_RNA (1)...(19): siRNA sense strand
gaggaacgugucaguggaa

SEQ ID NO: 141238 - RNA, 19 nt, Homo sapiens
  misc_RNA (1)...(19): siRNA sense strand
cauaucagaaguaguaagu

SEQ ID NO: 141239 - RNA, 19 nt, Homo sapiens
  misc_RNA (1)...(19): siRNA sense strand
gcaagcugugcacaaugua

SEQ ID NO: 141240 - RNA, 19 nt, Homo sapiens
  misc_RNA (1)...(19): siRNA sense strand
cauauggaaagcagacaaa

SEQ ID NO: 141241 - RNA, 19 nt, Homo sapiens
  misc_RNA (1)...(19): siRNA sense strand
gggauaugaccuucugaug

SEQ ID NO: 141242 - RNA, 19 nt, Homo sapiens
  misc_RNA (1)...(19): siRNA sense strand
ccaaagucacugccugguu

SEQ ID NO: 141243 - RNA, 19 nt, Homo sapiens
  misc_RNA (1)...(19): siRNA sense strand
guauuaccaagaucagaaa

SEQ ID NO: 141244 - RNA, 19 nt, Homo sapiens
  misc_RNA (1)...(19): siRNA sense strand
gagcaagcugugcacaaug

SEQ ID NO: 141245 - RNA, 19 nt, Homo sapiens
  misc_RNA (1)...(19): siRNA sense strand
gaucagaaagacgcaaaca

SEQ ID NO: 141246 - RNA, 19 nt, Homo sapiens
  misc_RNA (1)...(19): siRNA sense strand
uggcuucuuucauaucaga

SEQ ID NO: 141247 - RNA, 19 nt, Homo sapiens
  misc_RNA (1)...(19): siRNA sense strand
agaugugagugacuuggaa

SEQ ID NO: 141248 - RNA, 19 nt, Homo sapiens
  misc_RNA (1)...(19): siRNA sense strand
cagaaagacgcaaacaucu

SEQ ID NO: 141249 - RNA, 19 nt, Homo sapiens
  misc_RNA (1)...(19): siRNA sense strand
caaccugggcacagcuuug

SEQ ID NO: 141250 - RNA, 19 nt, Homo sapiens
  misc_RNA (1)...(19): siRNA sense strand
ugagugacuuggaagaaac

SEQ ID NO: 141251 - RNA, 19 nt, Homo sapiens
  misc_RNA (1)...(19): siRNA sense strand
ugggcacagcuuuguauua

SEQ ID NO: 141252 - RNA, 19 nt, Homo sapiens
  misc_RNA (1)...(19): siRNA sense strand
agcaagcugugcacaaugu

SEQ ID NO: 141253 - RNA, 19 nt, Homo sapiens
  misc_RNA (1)...(19): siRNA sense strand
ggucugggguucagcaguu

SEQ ID NO: 141254 - RNA, 19 nt, Homo sapiens
  misc_RNA (1)...(19): siRNA sense strand
ggcacagcuuuguauuaug

SEQ ID NO: 141255 - RNA, 19 nt, Homo sapiens
  misc_RNA (1)...(19): siRNA sense strand
ggagugggaaccuucuaca

SEQ ID NO: 141256 - RNA, 19 nt, Homo sapiens
  misc_RNA (1)...(19): siRNA sense strand
aaaggcagaagcacagaga

SEQ ID NO: 141257 - RNA, 19 nt, Homo sapiens
  misc_RNA (1)...(19): siRNA sense strand
gcugggagucuugagauau

SEQ ID NO: 141258 - RNA, 19 nt, Homo sapiens
  misc_RNA (1)...(19): siRNA sense strand
acucuggcuucuuucauau

SEQ ID NO: 141259 - RNA, 19 nt, Homo sapiens
  misc_RNA (1)...(19): siRNA sense strand
auggaaagcagacaaaugu

SEQ ID NO: 141260 - RNA, 19 nt, Homo sapiens
  misc_RNA (1)...(19): siRNA sense strand
ccgccaggguggugugaau

SEQ ID NO: 141261 - RNA, 19 nt, Homo sapiens
  misc_RNA (1)...(19): siRNA sense strand
uauggaaagcagacaaaug

SEQ ID NO: 141262 - RNA, 19 nt, Homo sapiens
  misc_RNA (1)...(19): siRNA sense strand
uucagcaguugauccagua

SEQ ID NO: 141263 - RNA, 19 nt, Homo sapiens
  misc_RNA (1)...(19): siRNA sense strand
gagugggaaccuucuacaa

SEQ ID NO: 141264 - RNA, 19 nt, Homo sapiens
  misc_RNA (1)...(19): siRNA sense strand
uugaugcacuuucccuugu

SEQ ID NO: 141265 - RNA, 19 nt, Homo sapiens
  misc_RNA (1)...(19): siRNA sense strand
ucuggcuucuuucauauca

SEQ ID NO: 141266 - RNA, 19 nt, Homo sapiens
  misc_RNA (1)...(19): siRNA sense strand
uaaguucagcucccuacug

SEQ ID NO: 141267 - RNA, 19 nt, Homo sapiens
  misc_RNA (1)...(19): siRNA sense strand
uuaccaagaucagaaagac

SEQ ID NO: 141268 - RNA, 19 nt, Homo sapiens
  misc_RNA (1)...(19): siRNA sense strand
ugggagucuugagauauaa

SEQ ID NO: 141269 - RNA, 19 nt, Homo sapiens
  misc_RNA (1)...(19): siRNA sense strand
ggacugugagaaugagaag

SEQ ID NO: 141270 - RNA, 19 nt, Homo sapiens
  misc_RNA (1)...(19): siRNA sense strand
gcaggaagcuucugucgaa

SEQ ID NO: 141271 - RNA, 19 nt, Homo sapiens
  misc_RNA (1)...(19): siRNA sense strand
ccaaggagcucaaggagaa

SEQ ID NO: 141272 - RNA, 19 nt, Homo sapiens
  misc_RNA (1)...(19): siRNA sense strand
agaaugcccucaauaauuu

SEQ ID NO: 141273 - RNA, 19 nt, Homo sapiens
  misc_RNA (1)...(19): siRNA sense strand
gagaaugcccucaauaauu

SEQ ID NO: 141274 - RNA, 19 nt, Homo sapiens
  misc_RNA (1)...(19): siRNA sense strand
ggaaugagauccagaugca

SEQ ID NO: 141275 - RNA, 19 nt, Homo sapiens
  misc_RNA (1)...(19): siRNA sense strand
gaaccuacagcgcaccuua

SEQ ID NO: 141276 - RNA, 19 nt, Homo sapiens
  misc_RNA (1)...(19): siRNA sense strand
gagccaagcugcagaagag

SEQ ID NO: 141277 - RNA, 19 nt, Homo sapiens
  misc_RNA (1)...(19): siRNA sense strand
guucacagcugagcagaaa

SEQ ID NO: 141278 - RNA, 19 nt, Homo sapiens
  misc_RNA (1)...(19): siRNA sense strand
ggcaaucacugcuugagaa

SEQ ID NO: 141279 - RNA, 19 nt, Homo sapiens
  misc_RNA (1)...(19): siRNA sense strand
gaaacgagcaaaccuguuc

SEQ ID NO: 141280 - RNA, 19 nt, Homo sapiens
  misc_RNA (1)...(19): siRNA sense strand
gcacagaggagaggaaaga

SEQ ID NO: 141281 - RNA, 19 nt, Homo sapiens
  misc_RNA (1)...(19): siRNA sense strand
ggagaaugcccucaauaau

SEQ ID NO: 141282 - RNA, 19 nt, Homo sapiens
  misc_RNA (1)...(19): siRNA sense strand
gaccacaccuuguccaaag

SEQ ID NO: 141283 - RNA, 19 nt, Homo sapiens
  misc_RNA (1)...(19): siRNA sense strand
gcucagcccugcucuccaa

SEQ ID NO: 141284 - RNA, 19 nt, Homo sapiens
  misc_RNA (1)...(19): siRNA sense strand
gaugugcgcuucccucagu

SEQ ID NO: 141285 - RNA, 19 nt, Homo sapiens
  misc_RNA (1)...(19): siRNA sense strand
aggagaagcucaguuguuu

SEQ ID NO: 141286 - RNA, 19 nt, Homo sapiens
  misc_RNA (1)...(19): siRNA sense strand
gaugaggauucaaccagaa

SEQ ID NO: 141287 - RNA, 19 nt, Homo sapiens
  misc_RNA (1)...(19): siRNA sense strand
gaauugagcgggugaugga

SEQ ID NO: 141288 - RNA, 19 nt, Homo sapiens
  misc_RNA (1)...(19): siRNA sense strand
gagaaagaccagaucaaga

SEQ ID NO: 141289 - RNA, 19 nt, Homo sapiens
  misc_RNA (1)...(19): siRNA sense strand
ccagcgaguuugacaaguu

SEQ ID NO: 141290 - RNA, 19 nt, Homo sapiens
  misc_RNA (1)...(19): siRNA sense strand
gaggagaagcucaguuguu

SEQ ID NO: 141291 - RNA, 19 nt, Homo sapiens
  misc_RNA (1)...(19): siRNA sense strand
cagcugagcagaaauugaa

SEQ ID NO: 141292 - RNA, 19 nt, Homo sapiens
  misc_RNA (1)...(19): siRNA sense strand
ucugguauguucccgauaa

SEQ ID NO: 141293 - RNA, 19 nt, Homo sapiens
  misc_RNA (1)...(19): siRNA sense strand
ggaagcuucugucgaacug

SEQ ID NO: 141294 - RNA, 19 nt, Homo sapiens
  misc_RNA (1)...(19): siRNA sense strand
gaacccuaccucgagauua

SEQ ID NO: 141295 - RNA, 19 nt, Homo sapiens
  misc_RNA (1)...(19): siRNA sense strand
gugaagagcagcugaagug

SEQ ID NO: 141296 - RNA, 19 nt, Homo sapiens
  misc_RNA (1)...(19): siRNA sense strand
gaagucggcccucaucauc

SEQ ID NO: 141297 - RNA, 19 nt, Homo sapiens
  misc_RNA (1)...(19): siRNA sense strand
ggagauacagggccacaga

SEQ ID NO: 141298 - RNA, 19 nt, Homo sapiens
  misc_RNA (1)...(19): siRNA sense strand
ccaccacccugcggaauga

SEQ ID NO: 141299 - RNA, 19 nt, Homo sapiens
  misc_RNA (1)...(19): siRNA sense strand
agcgggagcuggaagauaa

SEQ ID NO: 141300 - RNA, 19 nt, Homo sapiens
  misc_RNA (1)...(19): siRNA sense strand
gcgcaucgucuuugacauu

SEQ ID NO: 141301 - RNA, 19 nt, Homo sapiens
  misc_RNA (1)...(19): siRNA sense strand
ggacaucugaggauacugu

SEQ ID NO: 141302 - RNA, 19 nt, Homo sapiens
  misc_RNA (1)...(19): siRNA sense strand
cuauaaagaccaccugaaa

SEQ ID NO: 141303 - RNA, 19 nt, Homo sapiens
  misc_RNA (1)...(19): siRNA sense strand
cacauucucugaacuaucu

SEQ ID NO: 141304 - RNA, 19 nt, Homo sapiens
  misc_RNA (1)...(19): siRNA sense strand
ggagaaagaccagaucaag

SEQ ID NO: 141305 - RNA, 19 nt, Homo sapiens
  misc_RNA (1)...(19): siRNA sense strand
auaaagaccaccugaaaga

SEQ ID NO: 141306 - RNA, 19 nt, Homo sapiens
  misc_RNA (1)...(19): siRNA sense strand
acaagcagaugcccagugu

SEQ ID NO: 141307 - RNA, 19 nt, Homo sapiens
  misc_RNA (1)...(19): siRNA sense strand
ccacagaccacuacaagca

SEQ ID NO: 141308 - RNA, 19 nt, Homo sapiens
  misc_RNA (1)...(19): siRNA sense strand
uggagaaugcccucaauaa

SEQ ID NO: 141309 - RNA, 19 nt, Homo sapiens
  misc_RNA (1)...(19): siRNA sense strand
cagccacccucaucuacaa

SEQ ID NO: 141310 - RNA, 19 nt, Homo sapiens
  misc_RNA (1)...(19): siRNA sense strand
gcgagcgcaucgucuuuga

SEQ ID NO: 141311 - RNA, 19 nt, Homo sapiens
  misc_RNA (1)...(19): siRNA sense strand
caagacucguggccaguga

SEQ ID NO: 141312 - RNA, 19 nt, Homo sapiens
  misc_RNA (1)...(19): siRNA sense strand
ucacagcugagcagaaauu

SEQ ID NO: 141313 - RNA, 19 nt, Homo sapiens
  misc_RNA (1)...(19): siRNA sense strand
gguauguucccgauaagaa

SEQ ID NO: 141314 - RNA, 19 nt, Homo sapiens
  misc_RNA (1)...(19): siRNA sense strand
aaugagauccagaugcaua

SEQ ID NO: 141315 - RNA, 19 nt, Homo sapiens
  misc_RNA (1)...(19): siRNA sense strand
aggcggagcugcugaucaa

SEQ ID NO: 141316 - RNA, 19 nt, Homo sapiens
  misc_RNA (1)...(19): siRNA sense strand
ggaaggcagcccaggauca

SEQ ID NO: 141317 - RNA, 19 nt, Homo sapiens
  misc_RNA (1)...(19): siRNA sense strand
ccaccaauucuaccuacua

SEQ ID NO: 141318 - RNA, 19 nt, Homo sapiens
  misc_RNA (1)...(19): siRNA sense strand
gagcugcugaucaagauga

SEQ ID NO: 141319 - RNA, 19 nt, Homo sapiens
  misc_RNA (1)...(19): siRNA sense strand
ggucuucaccguccacaga

SEQ ID NO: 141320 - RNA, 19 nt, Homo sapiens
  misc_RNA (1)...(19): siRNA sense strand
cccagaaacugacggacaa

SEQ ID NO: 141321 - RNA, 19 nt, Homo sapiens
  misc_RNA (1)...(19): siRNA sense strand
aacccuaccucgagauuau

SEQ ID NO: 141322 - RNA, 19 nt, Homo sapiens
  misc_RNA (1)...(19): siRNA sense strand
cgaaggccacugucuguga

SEQ ID NO: 141323 - RNA, 19 nt, Homo sapiens
  misc_RNA (1)...(19): siRNA sense strand
gauugaagagggcaguaaa

SEQ ID NO: 141324 - RNA, 19 nt, Homo sapiens
  misc_RNA (1)...(19): siRNA sense strand
gguggagaaugcccucaau

SEQ ID NO: 141325 - RNA, 19 nt, Homo sapiens
  misc_RNA (1)...(19): siRNA sense strand
ggaagcugcuccccaaaau

SEQ ID NO: 141326 - RNA, 19 nt, Homo sapiens
  misc_RNA (1)...(19): siRNA sense strand
gcugacagguggaaguuuu

SEQ ID NO: 141327 - RNA, 19 nt, Homo sapiens
  misc_RNA (1)...(19): siRNA sense strand
gcaccgaacccacccacau

SEQ ID NO: 141328 - RNA, 19 nt, Homo sapiens
  misc_RNA (1)...(19): siRNA sense strand
uuggagaccuggacaaagu

SEQ ID NO: 141329 - RNA, 19 nt, Homo sapiens
  misc_RNA (1)...(19): siRNA sense strand
cagcgaguuugacaaguuc

SEQ ID NO: 141330 - RNA, 19 nt, Homo sapiens
  misc_RNA (1)...(19): siRNA sense strand
gguggaggccaucgugaaa

SEQ ID NO: 141331 - RNA, 19 nt, Homo sapiens
  misc_RNA (1)...(19): siRNA sense strand
aagagaagacuguggaaga

SEQ ID NO: 141332 - RNA, 19 nt, Homo sapiens
  misc_RNA (1)...(19): siRNA sense strand
gaacccacccacauucucu

SEQ ID NO: 141333 - RNA, 19 nt, Homo sapiens
  misc_RNA (1)...(19): siRNA sense strand
aaaccacuauggacuugau

SEQ ID NO: 141334 - RNA, 19 nt, Homo sapiens
  misc_RNA (1)...(19): siRNA sense strand
cccacgggcuggagaaaga

SEQ ID NO: 141335 - RNA, 19 nt, Homo sapiens
  misc_RNA (1)...(19): siRNA sense strand
cugcgucccuggaugugua

SEQ ID NO: 141336 - RNA, 19 nt, Homo sapiens
  misc_RNA (1)...(19): siRNA sense strand
cuacagcgcaccuuagauc

SEQ ID NO: 141337 - RNA, 19 nt, Homo sapiens
  misc_RNA (1)...(19): siRNA sense strand
gcaagcccagcgaguuuga

SEQ ID NO: 141338 - RNA, 19 nt, Homo sapiens
  misc_RNA (1)...(19): siRNA sense strand
ggaacccuaccucgagauu

SEQ ID NO: 141339 - RNA, 19 nt, Homo sapiens
  misc_RNA (1)...(19): siRNA sense strand
gguguuacccgcuggacaa

SEQ ID NO: 141340 - RNA, 19 nt, Homo sapiens
  misc_RNA (1)...(19): siRNA sense strand
uaagaagaaagcaccauca

SEQ ID NO: 141341 - RNA, 19 nt, Homo sapiens
  misc_RNA (1)...(19): siRNA sense strand
gagcgcaucgucuuugaca

SEQ ID NO: 141342 - RNA, 19 nt, Homo sapiens
  misc_RNA (1)...(19): siRNA sense strand
ccaccaagagccacgagaa

SEQ ID NO: 141343 - RNA, 19 nt, Homo sapiens
  misc_RNA (1)...(19): siRNA sense strand
guggagaaugcccucaaua

SEQ ID NO: 141344 - RNA, 19 nt, Homo sapiens
  misc_RNA (1)...(19): siRNA sense strand
ccagggcucagcuacauga

SEQ ID NO: 141345 - RNA, 19 nt, Homo sapiens
  misc_RNA (1)...(19): siRNA sense strand
cguggaagccagcauguga

SEQ ID NO: 141346 - RNA, 19 nt, Homo sapiens
  misc_RNA (1)...(19): siRNA sense strand
gugaaggggucccauaaga

SEQ ID NO: 141347 - RNA, 19 nt, Homo sapiens
  misc_RNA (1)...(19): siRNA sense strand
ggaaacgagcaaaccuguu

SEQ ID NO: 141348 - RNA, 19 nt, Homo sapiens
  misc_RNA (1)...(19): siRNA sense strand
agaacauccucuacacugu

SEQ ID NO: 141349 - RNA, 19 nt, Homo sapiens
  misc_RNA (1)...(19): siRNA sense strand
aaaauccccucuccuagaa

SEQ ID NO: 141350 - RNA, 19 nt, Homo sapiens
  misc_RNA (1)...(19): siRNA sense strand
ggucaucaccaagauugaa

SEQ ID NO: 141351 - RNA, 19 nt, Homo sapiens
  misc_RNA (1)...(19): siRNA sense strand
cccaggacaucugaggaua

SEQ ID NO: 141352 - RNA, 19 nt, Homo sapiens
  misc_RNA (1)...(19): siRNA sense strand
ggcaagcccacccgaagaa

SEQ ID NO: 141353 - RNA, 19 nt, Homo sapiens
  misc_RNA (1)...(19): siRNA sense strand
guuacuggcuggagaugag

SEQ ID NO: 141354 - RNA, 19 nt, Homo sapiens
  misc_RNA (1)...(19): siRNA sense strand
gagaucgucggcaucaaug

SEQ ID NO: 141355 - RNA, 19 nt, Homo sapiens
  misc_RNA (1)...(19): siRNA sense strand
caaagagaagacuguggaa

SEQ ID NO: 141356 - RNA, 19 nt, Homo sapiens
  misc_RNA (1)...(19): siRNA sense strand
aggagagccucgcggacua

SEQ ID NO: 141357 - RNA, 19 nt, Homo sapiens
  misc_RNA (1)...(19): siRNA sense strand
cgcaucgucuuugacauuu

SEQ ID NO: 141358 - RNA, 19 nt, Homo sapiens
  misc_RNA (1)...(19): siRNA sense strand
gacaaguuccggauguuca

SEQ ID NO: 141359 - RNA, 19 nt, Homo sapiens
  misc_RNA (1)...(19): siRNA sense strand
gaagcacagaggagaggaa

SEQ ID NO: 141360 - RNA, 19 nt, Homo sapiens
  misc_RNA (1)...(19): siRNA sense strand
acgagcaccuccuggaaga

SEQ ID NO: 141361 - RNA, 19 nt, Homo sapiens
  misc_RNA (1)...(19): siRNA sense strand
cggaggagaagcucaguug

SEQ ID NO: 141362 - RNA, 19 nt, Homo sapiens
  misc_RNA (1)...(19): siRNA sense strand
agaaagaccagaucaagac

SEQ ID NO: 141363 - RNA, 19 nt, Homo sapiens
  misc_RNA (1)...(19): siRNA sense strand
cccacgaccuguccaguuc

SEQ ID NO: 141364 - RNA, 19 nt, Homo sapiens
  misc_RNA (1)...(19): siRNA sense strand
gcaagcucuucacggaauc

SEQ ID NO: 141365 - RNA, 19 nt, Homo sapiens
  misc_RNA (1)...(19): siRNA sense strand
acaugaaggccaaagagaa

SEQ ID NO: 141366 - RNA, 19 nt, Homo sapiens
  misc_RNA (1)...(19): siRNA sense strand
cggagcugcugaucaagau

SEQ ID NO: 141367 - RNA, 19 nt, Homo sapiens
  misc_RNA (1)...(19): siRNA sense strand
gcggagcugcugaucaaga

SEQ ID NO: 141368 - RNA, 19 nt, Homo sapiens
  misc_RNA (1)...(19): siRNA sense strand
caaaaccacuauggacuug

SEQ ID NO: 141369 - RNA, 19 nt, Homo sapiens
  misc_RNA (1)...(19): siRNA sense strand
gaagaagcaggagcucauc

SEQ ID NO: 141370 - RNA, 19 nt, Homo sapiens
  misc_RNA (1)...(19): siRNA sense strand
gguauugucuucaguauga

SEQ ID NO: 141371 - RNA, 19 nt, Homo sapiens
  misc_RNA (1)...(19): siRNA sense strand
cucaauagcuuuagcaauu

SEQ ID NO: 141372 - RNA, 19 nt, Homo sapiens
  misc_RNA (1)...(19): siRNA sense strand
ggacauuuauuugcaauca

SEQ ID NO: 141373 - RNA, 19 nt, Homo sapiens
  misc_RNA (1)...(19): siRNA sense strand
gcaauuggacauuuauuug

SEQ ID NO: 141374 - RNA, 19 nt, Homo sapiens
  misc_RNA (1)...(19): siRNA sense strand
agaccaaucuggagaggua

SEQ ID NO: 141375 - RNA, 19 nt, Homo sapiens
  misc_RNA (1)...(19): siRNA sense strand
gcaauuggauuuucuguug

SEQ ID NO: 141376 - RNA, 19 nt, Homo sapiens
  misc_RNA (1)...(19): siRNA sense strand
ugaugucacuggcucaaua

SEQ ID NO: 141377 - RNA, 19 nt, Homo sapiens
  misc_RNA (1)...(19): siRNA sense strand
cggaugaccugauucuaaa

SEQ ID NO: 141378 - RNA, 19 nt, Homo sapiens
  misc_RNA (1)...(19): siRNA sense strand
gcaguuaucaugggaaauu

SEQ ID NO: 141379 - RNA, 19 nt, Homo sapiens
  misc_RNA (1)...(19): siRNA sense strand
gaauuucuggccaugcuua

SEQ ID NO: 141380 - RNA, 19 nt, Homo sapiens
  misc_RNA (1)...(19): siRNA sense strand
ggucuggacucaagcuuuc

SEQ ID NO: 141381 - RNA, 19 nt, Homo sapiens
  misc_RNA (1)...(19): siRNA sense strand
ggacucaagcuuucuggaa

SEQ ID NO: 141382 - RNA, 19 nt, Homo sapiens
  misc_RNA (1)...(19): siRNA sense strand
ggaaaaccauuggauauau

SEQ ID NO: 141383 - RNA, 19 nt, Homo sapiens
  misc_RNA (1)...(19): siRNA sense strand
gugcagugcuuuggccaua

SEQ ID NO: 141384 - RNA, 19 nt, Homo sapiens
  misc_RNA (1)...(19): siRNA sense strand
ggacaacaggagucaggua

SEQ ID NO: 141385 - RNA, 19 nt, Homo sapiens
  misc_RNA (1)...(19): siRNA sense strand
gagguauugucuucaguau

SEQ ID NO: 141386 - RNA, 19 nt, Homo sapiens
  misc_RNA (1)...(19): siRNA sense strand
caauugguguuuacuaucu

SEQ ID NO: 141387 - RNA, 19 nt, Homo sapiens
  misc_RNA (1)...(19): siRNA sense strand
ccaagucugucuucuacau

SEQ ID NO: 141388 - RNA, 19 nt, Homo sapiens
  misc_RNA (1)...(19): siRNA sense strand
agagacggaugaccugauu

SEQ ID NO: 141389 - RNA, 19 nt, Homo sapiens
  misc_RNA (1)...(19): siRNA sense strand
ggagagguauugucuucag

SEQ ID NO: 141390 - RNA, 19 nt, Homo sapiens
  misc_RNA (1)...(19): siRNA sense strand
caaacggacugaugucacu

SEQ ID NO: 141391 - RNA, 19 nt, Homo sapiens
  misc_RNA (1)...(19): siRNA sense strand
caacaggagucagguagag

SEQ ID NO: 141392 - RNA, 19 nt, Homo sapiens
  misc_RNA (1)...(19): siRNA sense strand
gcagugcuuuggccauauc

SEQ ID NO: 141393 - RNA, 19 nt, Homo sapiens
  misc_RNA (1)...(19): siRNA sense strand
caucaacccugcagugacu

SEQ ID NO: 141394 - RNA, 19 nt, Homo sapiens
  misc_RNA (1)...(19): siRNA sense strand
uaucagcgguggccacauc

SEQ ID NO: 141395 - RNA, 19 nt, Homo sapiens
  misc_RNA (1)...(19): siRNA sense strand
caacugggguggaacagaa

SEQ ID NO: 141396 - RNA, 19 nt, Homo sapiens
  misc_RNA (1)...(19): siRNA sense strand
cugguggccuuuaugagua

SEQ ID NO: 141397 - RNA, 19 nt, Homo sapiens
  misc_RNA (1)...(19): siRNA sense strand
gucauggucuccugguuga

SEQ ID NO: 141398 - RNA, 19 nt, Homo sapiens
  misc_RNA (1)...(19): siRNA sense strand
caaccauggugcagugcuu

SEQ ID NO: 141399 - RNA, 19 nt, Homo sapiens
  misc_RNA (1)...(19): siRNA sense strand
ucucaucucccuuugcuuu

SEQ ID NO: 141400 - RNA, 19 nt, Homo sapiens
  misc_RNA (1)...(19): siRNA sense strand
caucaugguggcuuucaaa

SEQ ID NO: 141401 - RNA, 19 nt, Homo sapiens
  misc_RNA (1)...(19): siRNA sense strand
uguugcaauuggacauuua

SEQ ID NO: 141402 - RNA, 19 nt, Homo sapiens
  misc_RNA (1)...(19): siRNA sense strand
cuggagagguauugucuuc

SEQ ID NO: 141403 - RNA, 19 nt, Homo sapiens
  misc_RNA (1)...(19): siRNA sense strand
gucacuggcucaauagcuu

SEQ ID NO: 141404 - RNA, 19 nt, Homo sapiens
  misc_RNA (1)...(19): siRNA sense strand
acauggagguggaggacaa

SEQ ID NO: 141405 - RNA, 19 nt, Homo sapiens
  misc_RNA (1)...(19): siRNA sense strand
cgccaagucugucuucuac

SEQ ID NO: 141406 - RNA, 19 nt, Homo sapiens
  misc_RNA (1)...(19): siRNA sense strand
acggaugaccugauucuaa

SEQ ID NO: 141407 - RNA, 19 nt, Homo sapiens
  misc_RNA (1)...(19): siRNA sense strand
gaaauugggaaaaccauug

SEQ ID NO: 141408 - RNA, 19 nt, Homo sapiens
  misc_RNA (1)...(19): siRNA sense strand
gagagguauugucuucagu

SEQ ID NO: 141409 - RNA, 19 nt, Homo sapiens
  misc_RNA (1)...(19): siRNA sense strand
gcugguggccuuuaugagu

SEQ ID NO: 141410 - RNA, 19 nt, Homo sapiens
  misc_RNA (1)...(19): siRNA sense strand
gggaaaaccauuggauaua

SEQ ID NO: 141411 - RNA, 19 nt, Homo sapiens
  misc_RNA (1)...(19): siRNA sense strand
ggacucagcauugcaacca

SEQ ID NO: 141412 - RNA, 19 nt, Homo sapiens
  misc_RNA (1)...(19): siRNA sense strand
agaacaucaugguggcuuu

SEQ ID NO: 141413 - RNA, 19 nt, Homo sapiens
  misc_RNA (1)...(19): siRNA sense strand
ugccagcugugauuccaaa

SEQ ID NO: 141414 - RNA, 19 nt, Homo sapiens
  misc_RNA (1)...(19): siRNA sense strand
gaguggugcaugugauuga

SEQ ID NO: 141415 - RNA, 19 nt, Homo sapiens
  misc_RNA (1)...(19): siRNA sense strand
gaacaucaugguggcuuuc

SEQ ID NO: 141416 - RNA, 19 nt, Homo sapiens
  misc_RNA (1)...(19): siRNA sense strand
ccagagagaacaucauggu

SEQ ID NO: 141417 - RNA, 19 nt, Homo sapiens
  misc_RNA (1)...(19): siRNA sense strand
uuucuggccaugcuuauuu

SEQ ID NO: 141418 - RNA, 19 nt, Homo sapiens
  misc_RNA (1)...(19): siRNA sense strand
guucucaucucccuuugcu

SEQ ID NO: 141419 - RNA, 19 nt, Homo sapiens
  misc_RNA (1)...(19): siRNA sense strand
cugcaguuaucaugggaaa

SEQ ID NO: 141420 - RNA, 19 nt, Homo sapiens
  misc_RNA (1)...(19): siRNA sense strand
ucuccugguugaguugaua

SEQ ID NO: 141421 - RNA, 19 nt, Homo sapiens
  misc_RNA (1)...(19): siRNA sense strand
gaucagcaucgccaagucu

SEQ ID NO: 141422 - RNA, 19 nt, Homo sapiens
  misc_RNA (1)...(19): siRNA sense strand
agagguauugucuucagua

SEQ ID NO: 141423 - RNA, 19 nt, Homo sapiens
  misc_RNA (1)...(19): siRNA sense strand
uuaugaguaugucuucugu

SEQ ID NO: 141424 - RNA, 19 nt, Homo sapiens
  misc_RNA (1)...(19): siRNA sense strand
gcucaauagcuuuagcaau

SEQ ID NO: 141425 - RNA, 19 nt, Homo sapiens
  misc_RNA (1)...(19): siRNA sense strand
ggaguggugcaugugauug

SEQ ID NO: 141426 - RNA, 19 nt, Homo sapiens
  misc_RNA (1)...(19): siRNA sense strand
gcaccaggaagaucagcau

SEQ ID NO: 141427 - RNA, 19 nt, Homo sapiens
  misc_RNA (1)...(19): siRNA sense strand
uaccagagagaacaucaug

SEQ ID NO: 141428 - RNA, 19 nt, Homo sapiens
  misc_RNA (1)...(19): siRNA sense strand
ugcaugugauugacguuga

SEQ ID NO: 141429 - RNA, 19 nt, Homo sapiens
  misc_RNA (1)...(19): siRNA sense strand
cuuuggaccugcaguuauc

SEQ ID NO: 141430 - RNA, 19 nt, Homo sapiens
  misc_RNA (1)...(19): siRNA sense strand
caucucccuuugcuuugga

SEQ ID NO: 141431 - RNA, 19 nt, Homo sapiens
  misc_RNA (1)...(19): siRNA sense strand
ccucgcugguggccuuuau

SEQ ID NO: 141432 - RNA, 19 nt, Homo sapiens
  misc_RNA (1)...(19): siRNA sense strand
caguuaucaugggaaauug

SEQ ID NO: 141433 - RNA, 19 nt, Homo sapiens
  misc_RNA (1)...(19): siRNA sense strand
caauuggacauuuauuugc

SEQ ID NO: 141434 - RNA, 19 nt, Homo sapiens
  misc_RNA (1)...(19): siRNA sense strand
ucacuggcucaauagcuuu

SEQ ID NO: 141435 - RNA, 19 nt, Homo sapiens
  misc_RNA (1)...(19): siRNA sense strand
ucacauuucaauugguguu

SEQ ID NO: 141436 - RNA, 19 nt, Homo sapiens
  misc_RNA (1)...(19): siRNA sense strand
gcaugugauugacguugac

SEQ ID NO: 141437 - RNA, 19 nt, Homo sapiens
  misc_RNA (1)...(19): siRNA sense strand
gaugucacuggcucaauag

SEQ ID NO: 141438 - RNA, 19 nt, Homo sapiens
  misc_RNA (1)...(19): siRNA sense strand
gguauugucuucaguauga

SEQ ID NO: 141439 - RNA, 19 nt, Homo sapiens
  misc_RNA (1)...(19): siRNA sense strand
cucaauagcuuuagcaauu

SEQ ID NO: 141440 - RNA, 19 nt, Homo sapiens
  misc_RNA (1)...(19): siRNA sense strand
ggacauuuauuugcaauca

SEQ ID NO: 141441 - RNA, 19 nt, Homo sapiens
  misc_RNA (1)...(19): siRNA sense strand
gcaauuggacauuuauuug

SEQ ID NO: 141442 - RNA, 19 nt, Homo sapiens
  misc_RNA (1)...(19): siRNA sense strand
agaccaaucuggagaggua

SEQ ID NO: 141443 - RNA, 19 nt, Homo sapiens
  misc_RNA (1)...(19): siRNA sense strand
gcaauuggauuuucuguug

SEQ ID NO: 141444 - RNA, 19 nt, Homo sapiens
  misc_RNA (1)...(19): siRNA sense strand
ugaugucacuggcucaaua

SEQ ID NO: 141445 - RNA, 19 nt, Homo sapiens
  misc_RNA (1)...(19): siRNA sense strand
cggaugaccugauucuaaa

SEQ ID NO: 141446 - RNA, 19 nt, Homo sapiens
  misc_RNA (1)...(19): siRNA sense strand
gcaguuaucaugggaaauu

SEQ ID NO: 141447 - RNA, 19 nt, Homo sapiens
  misc_RNA (1)...(19): siRNA sense strand
gaauuucuggccaugcuua

SEQ ID NO: 141448 - RNA, 19 nt, Homo sapiens
  misc_RNA (1)...(19): siRNA sense strand
ggucuggacucaagcuuuc

SEQ ID NO: 141449 - RNA, 19 nt, Homo sapiens
  misc_RNA (1)...(19): siRNA sense strand
ggacucaagcuuucuggaa

SEQ ID NO: 141450 - RNA, 19 nt, Homo sapiens
  misc_RNA (1)...(19): siRNA sense strand
ggaaaaccauuggauauau

SEQ ID NO: 141451 - RNA, 19 nt, Homo sapiens
  misc_RNA (1)...(19): siRNA sense strand
gugcagugcuuuggccaua

SEQ ID NO: 141452 - RNA, 19 nt, Homo sapiens
  misc_RNA (1)...(19): siRNA sense strand
ggacaacaggagucaggua

SEQ ID NO: 141453 - RNA, 19 nt, Homo sapiens
  misc_RNA (1)...(19): siRNA sense strand
gagguauugucuucaguau

SEQ ID NO: 141454 - RNA, 19 nt, Homo sapiens
  misc_RNA (1)...(19): siRNA sense strand
caauugguguuuacuaucu

SEQ ID NO: 141455 - RNA, 19 nt, Homo sapiens
  misc_RNA (1)...(19): siRNA sense strand
ccaagucugucuucuacau

SEQ ID NO: 141456 - RNA, 19 nt, Homo sapiens
  misc_RNA (1)...(19): siRNA sense strand
agagacggaugaccugauu

SEQ ID NO: 141457 - RNA, 19 nt, Homo sapiens
  misc_RNA (1)...(19): siRNA sense strand
ggagagguauugucuucag

SEQ ID NO: 141458 - RNA, 19 nt, Homo sapiens
  misc_RNA (1)...(19): siRNA sense strand
caaacggacugaugucacu

SEQ ID NO: 141459 - RNA, 19 nt, Homo sapiens
  misc_RNA (1)...(19): siRNA sense strand
caacaggagucagguagag

SEQ ID NO: 141460 - RNA, 19 nt, Homo sapiens
  misc_RNA (1)...(19): siRNA sense strand
gcagugcuuuggccauauc

SEQ ID NO: 141461 - RNA, 19 nt, Homo sapiens
  misc_RNA (1)...(19): siRNA sense strand
caucaacccugcagugacu

SEQ ID NO: 141462 - RNA, 19 nt, Homo sapiens
  misc_RNA (1)...(19): siRNA sense strand
uaucagcgguggccacauc

SEQ ID NO: 141463 - RNA, 19 nt, Homo sapiens
  misc_RNA (1)...(19): siRNA sense strand
caacugggguggaacagaa

SEQ ID NO: 141464 - RNA, 19 nt, Homo sapiens
  misc_RNA (1)...(19): siRNA sense strand
cugguggccuuuaugagua

SEQ ID NO: 141465 - RNA, 19 nt, Homo sapiens
  misc_RNA (1)...(19): siRNA sense strand
gucauggucuccugguuga

SEQ ID NO: 141466 - RNA, 19 nt, Homo sapiens
  misc_RNA (1)...(19): siRNA sense strand
caaccauggugcagugcuu

SEQ ID NO: 141467 - RNA, 19 nt, Homo sapiens
  misc_RNA (1)...(19): siRNA sense strand
ucucaucucccuuugcuuu

SEQ ID NO: 141468 - RNA, 19 nt, Homo sapiens
  misc_RNA (1)...(19): siRNA sense strand
uguugcaauuggacauuua

SEQ ID NO: 141469 - RNA, 19 nt, Homo sapiens
  misc_RNA (1)...(19): siRNA sense strand
cuggagagguauugucuuc

SEQ ID NO: 141470 - RNA, 19 nt, Homo sapiens
  misc_RNA (1)...(19): siRNA sense strand
gucacuggcucaauagcuu

SEQ ID NO: 141471 - RNA, 19 nt, Homo sapiens
  misc_RNA (1)...(19): siRNA sense strand
acauggagguggaggacaa

SEQ ID NO: 141472 - RNA, 19 nt, Homo sapiens
  misc_RNA (1)...(19): siRNA sense strand
cgccaagucugucuucuac

SEQ ID NO: 141473 - RNA, 19 nt, Homo sapiens
  misc_RNA (1)...(19): siRNA sense strand
acggaugaccugauucuaa

SEQ ID NO: 141474 - RNA, 19 nt, Homo sapiens
  misc_RNA (1)...(19): siRNA sense strand
gaaauugggaaaaccauug

SEQ ID NO: 141475 - RNA, 19 nt, Homo sapiens
  misc_RNA (1)...(19): siRNA sense strand
gagagguauugucuucagu

SEQ ID NO: 141476 - RNA, 19 nt, Homo sapiens
  misc_RNA (1)...(19): siRNA sense strand
gcugguggccuuuaugagu

SEQ ID NO: 141477 - RNA, 19 nt, Homo sapiens
  misc_RNA (1)...(19): siRNA sense strand
gggaaaaccauuggauaua

SEQ ID NO: 141478 - RNA, 19 nt, Homo sapiens
  misc_RNA (1)...(19): siRNA sense strand
ggacucagcauugcaacca

SEQ ID NO: 141479 - RNA, 19 nt, Homo sapiens
  misc_RNA (1)...(19): siRNA sense strand
ugccagcugugauuccaaa

SEQ ID NO: 141480 - RNA, 19 nt, Homo sapiens
  misc_RNA (1)...(19): siRNA sense strand
gaguggugcaugugauuga

SEQ ID NO: 141481 - RNA, 19 nt, Homo sapiens
  misc_RNA (1)...(19): siRNA sense strand
uuucuggccaugcuuauuu

SEQ ID NO: 141482 - RNA, 19 nt, Homo sapiens
  misc_RNA (1)...(19): siRNA sense strand
guucucaucucccuuugcu

SEQ ID NO: 141483 - RNA, 19 nt, Homo sapiens
  misc_RNA (1)...(19): siRNA sense strand
cugcaguuaucaugggaaa

SEQ ID NO: 141484 - RNA, 19 nt, Homo sapiens
  misc_RNA (1)...(19): siRNA sense strand
ucuccugguugaguugaua

SEQ ID NO: 141485 - RNA, 19 nt, Homo sapiens
  misc_RNA (1)...(19): siRNA sense strand
gaucagcaucgccaagucu

SEQ ID NO: 141486 - RNA, 19 nt, Homo sapiens
  misc_RNA (1)...(19): siRNA sense strand
agagguauugucuucagua

SEQ ID NO: 141487 - RNA, 19 nt, Homo sapiens
  misc_RNA (1)...(19): siRNA sense strand
uuaugaguaugucuucugu

SEQ ID NO: 141488 - RNA, 19 nt, Homo sapiens
  misc_RNA (1)...(19): siRNA sense strand
gcucaauagcuuuagcaau

SEQ ID NO: 141489 - RNA, 19 nt, Homo sapiens
  misc_RNA (1)...(19): siRNA sense strand
ggaguggugcaugugauug

SEQ ID NO: 141490 - RNA, 19 nt, Homo sapiens
  misc_RNA (1)...(19): siRNA sense strand
gcaccaggaagaucagcau

SEQ ID NO: 141491 - RNA, 19 nt, Homo sapiens
  misc_RNA (1)...(19): siRNA sense strand
ugcaugugauugacguuga

SEQ ID NO: 141492 - RNA, 19 nt, Homo sapiens
  misc_RNA (1)...(19): siRNA sense strand
cuuuggaccugcaguuauc

SEQ ID NO: 141493 - RNA, 19 nt, Homo sapiens
  misc_RNA (1)...(19): siRNA sense strand
caucucccuuugcuuugga

SEQ ID NO: 141494 - RNA, 19 nt, Homo sapiens
  misc_RNA (1)...(19): siRNA sense strand
ccucgcugguggccuuuau

SEQ ID NO: 141495 - RNA, 19 nt, Homo sapiens
  misc_RNA (1)...(19): siRNA sense strand
caguuaucaugggaaauug

SEQ ID NO: 141496 - RNA, 19 nt, Homo sapiens
  misc_RNA (1)...(19): siRNA sense strand
caauuggacauuuauuugc

SEQ ID NO: 141497 - RNA, 19 nt, Homo sapiens
  misc_RNA (1)...(19): siRNA sense strand
ucacuggcucaauagcuuu

SEQ ID NO: 141498 - RNA, 19 nt, Homo sapiens
  misc_RNA (1)...(19): siRNA sense strand
ucacauuucaauugguguu

SEQ ID NO: 141499 - RNA, 19 nt, Homo sapiens
  misc_RNA (1)...(19): siRNA sense strand
gcaugugauugacguugac

SEQ ID NO: 141500 - RNA, 19 nt, Homo sapiens
  misc_RNA (1)...(19): siRNA sense strand
gaugucacuggcucaauag

SEQ ID NO: 141501 - RNA, 19 nt, Homo sapiens
  misc_RNA (1)...(19): siRNA sense strand
ucaacgcgcucaacaacaa

SEQ ID NO: 141502 - RNA, 19 nt, Homo sapiens
  misc_RNA (1)...(19): siRNA sense strand
gcagaucgcgcuggcguuu

SEQ ID NO: 141503 - RNA, 19 nt, Homo sapiens
  misc_RNA (1)...(19): siRNA sense strand
gcuccgggcuuucuucuac

SEQ ID NO: 141504 - RNA, 19 nt, Homo sapiens
  misc_RNA (1)...(19): siRNA sense strand
gcccugcgguggucaugaa

SEQ ID NO: 141505 - RNA, 19 nt, Homo sapiens
  misc_RNA (1)...(19): siRNA sense strand
gggaagagcggaagaagac

SEQ ID NO: 141506 - RNA, 19 nt, Homo sapiens
  misc_RNA (1)...(19): siRNA sense strand
gaacccagcccgcucuuuu

SEQ ID NO: 141507 - RNA, 19 nt, Homo sapiens
  misc_RNA (1)...(19): siRNA sense strand
ccucaucuucgucuucuuu

SEQ ID NO: 141508 - RNA, 19 nt, Homo sapiens
  misc_RNA (1)...(19): siRNA sense strand
gcguguggccaucaucaaa

SEQ ID NO: 141509 - RNA, 19 nt, Homo sapiens
  misc_RNA (1)...(19): siRNA sense strand
gagcguguggccaucauca

SEQ ID NO: 141510 - RNA, 19 nt, Homo sapiens
  misc_RNA (1)...(19): siRNA sense strand
caucaucaaaggcacguau

SEQ ID NO: 141511 - RNA, 19 nt, Homo sapiens
  misc_RNA (1)...(19): siRNA sense strand
uucacuggcugcuccauga

SEQ ID NO: 141512 - RNA, 19 nt, Homo sapiens
  misc_RNA (1)...(19): siRNA sense strand
cugccauccuuuacuucua

SEQ ID NO: 141513 - RNA, 19 nt, Homo sapiens
  misc_RNA (1)...(19): siRNA sense strand
gcgcucaacaacaacacaa

SEQ ID NO: 141514 - RNA, 19 nt, Homo sapiens
  misc_RNA (1)...(19): siRNA sense strand
guucuuggccacccucauc

SEQ ID NO: 141515 - RNA, 19 nt, Homo sapiens
  misc_RNA (1)...(19): siRNA sense strand
gugguggagcugauucuga

SEQ ID NO: 141516 - RNA, 19 nt, Homo sapiens
  misc_RNA (1)...(19): siRNA sense strand
gcacugggccaccucauug

SEQ ID NO: 141517 - RNA, 19 nt, Homo sapiens
  misc_RNA (1)...(19): siRNA sense strand
gggcugcucugcuuuaugg

SEQ ID NO: 141518 - RNA, 19 nt, Homo sapiens
  misc_RNA (1)...(19): siRNA sense strand
gagagacccuugggaucaa

SEQ ID NO: 141519 - RNA, 19 nt, Homo sapiens
  misc_RNA (1)...(19): siRNA sense strand
ggagauggagaguguguga

SEQ ID NO: 141520 - RNA, 19 nt, Homo sapiens
  misc_RNA (1)...(19): siRNA sense strand
cgacagccgucagacauca

SEQ ID NO: 141521 - RNA, 19 nt, Homo sapiens
  misc_RNA (1)...(19): siRNA sense strand
cgagagacccuugggauca

SEQ ID NO: 141522 - RNA, 19 nt, Homo sapiens
  misc_RNA (1)...(19): siRNA sense strand
gacgcuggccuuccucgua

SEQ ID NO: 141523 - RNA, 19 nt, Homo sapiens
  misc_RNA (1)...(19): siRNA sense strand
ccucacugaucuacaacuu

SEQ ID NO: 141524 - RNA, 19 nt, Homo sapiens
  misc_RNA (1)...(19): siRNA sense strand
caucaucauugggaaguuc

SEQ ID NO: 141525 - RNA, 19 nt, Homo sapiens
  misc_RNA (1)...(19): siRNA sense strand
ccacggggcuguauguguu

SEQ ID NO: 141526 - RNA, 19 nt, Homo sapiens
  misc_RNA (1)...(19): siRNA sense strand
uggccucacugaucuacaa

SEQ ID NO: 141527 - RNA, 19 nt, Homo sapiens
  misc_RNA (1)...(19): siRNA sense strand
ccguggagauggagagugu

SEQ ID NO: 141528 - RNA, 19 nt, Homo sapiens
  misc_RNA (1)...(19): siRNA sense strand
ggucaugccgggagacauc

SEQ ID NO: 141529 - RNA, 19 nt, Homo sapiens
  misc_RNA (1)...(19): siRNA sense strand
gcggcuggcuauccucaca

SEQ ID NO: 141530 - RNA, 19 nt, Homo sapiens
  misc_RNA (1)...(19): siRNA sense strand
gcccugccaucaucauugg

SEQ ID NO: 141531 - RNA, 19 nt, Homo sapiens
  misc_RNA (1)...(19): siRNA sense strand
ggcuguauguguucuuugg

SEQ ID NO: 141532 - RNA, 19 nt, Homo sapiens
  misc_RNA (1)...(19): siRNA sense strand
cuacaacuucguccuguuc

SEQ ID NO: 141533 - RNA, 19 nt, Homo sapiens
  misc_RNA (1)...(19): siRNA sense strand
gggcgcuguuugcagaguu

SEQ ID NO: 141534 - RNA, 19 nt, Homo sapiens
  misc_RNA (1)...(19): siRNA sense strand
uucacuggcugcuccauga

SEQ ID NO: 141535 - RNA, 19 nt, Homo sapiens
  misc_RNA (1)...(19): siRNA sense strand
ccucguaggcucccacauc

SEQ ID NO: 141536 - RNA, 19 nt, Homo sapiens
  misc_RNA (1)...(19): siRNA sense strand
cuucggcccugccaucauc

SEQ ID NO: 141537 - RNA, 19 nt, Homo sapiens
  misc_RNA (1)...(19): siRNA sense strand
cagauugccaucaccuuca

SEQ ID NO: 141538 - RNA, 19 nt, Homo sapiens
  misc_RNA (1)...(19): siRNA sense strand
agauugccaucaccuucaa

SEQ ID NO: 141539 - RNA, 19 nt, Homo sapiens
  misc_RNA (1)...(19): siRNA sense strand
ggcacugggccaccucauu

SEQ ID NO: 141540 - RNA, 19 nt, Homo sapiens
  misc_RNA (1)...(19): siRNA sense strand
gggcugcucugcuuuaugg

SEQ ID NO: 141541 - RNA, 19 nt, Homo sapiens
  misc_RNA (1)...(19): siRNA sense strand
gagagacccuugggaucaa

SEQ ID NO: 141542 - RNA, 19 nt, Homo sapiens
  misc_RNA (1)...(19): siRNA sense strand
cgagagacccuugggauca

SEQ ID NO: 141543 - RNA, 19 nt, Homo sapiens
  misc_RNA (1)...(19): siRNA sense strand
gacgcuggccuuccucgua

SEQ ID NO: 141544 - RNA, 19 nt, Homo sapiens
  misc_RNA (1)...(19): siRNA sense strand
ccacggggcuguauguguu

SEQ ID NO: 141545 - RNA, 19 nt, Homo sapiens
  misc_RNA (1)...(19): siRNA sense strand
ggucaugccgggagacauc

SEQ ID NO: 141546 - RNA, 19 nt, Homo sapiens
  misc_RNA (1)...(19): siRNA sense strand
gggcgcuguuugcagaguu

SEQ ID NO: 141547 - RNA, 19 nt, Homo sapiens
  misc_RNA (1)...(19): siRNA sense strand
ggcuguauguguucuuugg

SEQ ID NO: 141548 - RNA, 19 nt, Homo sapiens
  misc_RNA (1)...(19): siRNA sense strand
ccucguaggcucccacauc

SEQ ID NO: 141549 - RNA, 19 nt, Homo sapiens
  misc_RNA (1)...(19): siRNA sense strand
cagauugccaucaccuuca

SEQ ID NO: 141550 - RNA, 19 nt, Homo sapiens
  misc_RNA (1)...(19): siRNA sense strand
agauugccaucaccuucaa

SEQ ID NO: 141551 - RNA, 19 nt, Homo sapiens
  misc_RNA (1)...(19): siRNA sense strand
gaagaagguugucaaacua

SEQ ID NO: 141552 - RNA, 19 nt, Homo sapiens
  misc_RNA (1)...(19): siRNA sense strand
ggaagaagguugucaaacu

SEQ ID NO: 141553 - RNA, 19 nt, Homo sapiens
  misc_RNA (1)...(19): siRNA sense strand
guauggagcugcagaagaa

SEQ ID NO: 141554 - RNA, 19 nt, Homo sapiens
  misc_RNA (1)...(19): siRNA sense strand
ugauaaaccucaugagaaa

SEQ ID NO: 141555 - RNA, 19 nt, Homo sapiens
  misc_RNA (1)...(19): siRNA sense strand
gaacuacucagucuccaua

SEQ ID NO: 141556 - RNA, 19 nt, Homo sapiens
  misc_RNA (1)...(19): siRNA sense strand
ucacaagcauucaguauug

SEQ ID NO: 141557 - RNA, 19 nt, Homo sapiens
  misc_RNA (1)...(19): siRNA sense strand
gcaaaguuguuaacggaaa

SEQ ID NO: 141558 - RNA, 19 nt, Homo sapiens
  misc_RNA (1)...(19): siRNA sense strand
ggagagagcaucauucguu

SEQ ID NO: 141559 - RNA, 19 nt, Homo sapiens
  misc_RNA (1)...(19): siRNA sense strand
gagaacaaaucguggaaga

SEQ ID NO: 141560 - RNA, 19 nt, Homo sapiens
  misc_RNA (1)...(19): siRNA sense strand
gaacaaaucguggaagaug

SEQ ID NO: 141561 - RNA, 19 nt, Homo sapiens
  misc_RNA (1)...(19): siRNA sense strand
agaaauggcucuaaguguu

SEQ ID NO: 141562 - RNA, 19 nt, Homo sapiens
  misc_RNA (1)...(19): siRNA sense strand
gagaaugcccggucaugua

SEQ ID NO: 141563 - RNA, 19 nt, Homo sapiens
  misc_RNA (1)...(19): siRNA sense strand
ggucauguauucgagcuua

SEQ ID NO: 141564 - RNA, 19 nt, Homo sapiens
  misc_RNA (1)...(19): siRNA sense strand
caagguuacuggaaacauu

SEQ ID NO: 141565 - RNA, 19 nt, Homo sapiens
  misc_RNA (1)...(19): siRNA sense strand
cguggaaacuguagaauau

SEQ ID NO: 141566 - RNA, 19 nt, Homo sapiens
  misc_RNA (1)...(19): siRNA sense strand
uaacagaccuaggugauuc

SEQ ID NO: 141567 - RNA, 19 nt, Homo sapiens
  misc_RNA (1)...(19): siRNA sense strand
gaagaaauggcucuaagug

SEQ ID NO: 141568 - RNA, 19 nt, Homo sapiens
  misc_RNA (1)...(19): siRNA sense strand
gauaaucgaguucacauug

SEQ ID NO: 141569 - RNA, 19 nt, Homo sapiens
  misc_RNA (1)...(19): siRNA sense strand
gcaggaugauuguagaguu

SEQ ID NO: 141570 - RNA, 19 nt, Homo sapiens
  misc_RNA (1)...(19): siRNA sense strand
caaacuagcccacucaugu

SEQ ID NO: 141571 - RNA, 19 nt, Homo sapiens
  misc_RNA (1)...(19): siRNA sense strand
gaaauggcucuaaguguug

SEQ ID NO: 141572 - RNA, 19 nt, Homo sapiens
  misc_RNA (1)...(19): siRNA sense strand
uuacagaaguugcagauca

SEQ ID NO: 141573 - RNA, 19 nt, Homo sapiens
  misc_RNA (1)...(19): siRNA sense strand
uggaauggcucacacagaa

SEQ ID NO: 141574 - RNA, 19 nt, Homo sapiens
  misc_RNA (1)...(19): siRNA sense strand
gaaacucugugucgucaag

SEQ ID NO: 141575 - RNA, 19 nt, Homo sapiens
  misc_RNA (1)...(19): siRNA sense strand
gcaaagcacaggcgaguuc

SEQ ID NO: 141576 - RNA, 19 nt, Homo sapiens
  misc_RNA (1)...(19): siRNA sense strand
gcagcaggaugauuguaga

SEQ ID NO: 141577 - RNA, 19 nt, Homo sapiens
  misc_RNA (1)...(19): siRNA sense strand
ggacagcuguagugaaggu

SEQ ID NO: 141578 - RNA, 19 nt, Homo sapiens
  misc_RNA (1)...(19): siRNA sense strand
guagauagcagucauagag

SEQ ID NO: 141579 - RNA, 19 nt, Homo sapiens
  misc_RNA (1)...(19): siRNA sense strand
agucauagagacagaauua

SEQ ID NO: 141580 - RNA, 19 nt, Homo sapiens
  misc_RNA (1)...(19): siRNA sense strand
agaaaucacugaacuacuc

SEQ ID NO: 141581 - RNA, 19 nt, Homo sapiens
  misc_RNA (1)...(19): siRNA sense strand
gaagaaaucacugaacuac

SEQ ID NO: 141582 - RNA, 19 nt, Homo sapiens
  misc_RNA (1)...(19): siRNA sense strand
cuacaaagacauuagcaaa

SEQ ID NO: 141583 - RNA, 19 nt, Homo sapiens
  misc_RNA (1)...(19): siRNA sense strand
gcacacagcgaacuugcaa

SEQ ID NO: 141584 - RNA, 19 nt, Homo sapiens
  misc_RNA (1)...(19): siRNA sense strand
acaggaaauuacaagguua

SEQ ID NO: 141585 - RNA, 19 nt, Homo sapiens
  misc_RNA (1)...(19): siRNA sense strand
caacucauuugugcucuga

SEQ ID NO: 141586 - RNA, 19 nt, Homo sapiens
  misc_RNA (1)...(19): siRNA sense strand
gagaugcucugcuccugau

SEQ ID NO: 141587 - RNA, 19 nt, Homo sapiens
  misc_RNA (1)...(19): siRNA sense strand
guagaguugucuuggcaaa

SEQ ID NO: 141588 - RNA, 19 nt, Homo sapiens
  misc_RNA (1)...(19): siRNA sense strand
gauccgagcaucaauuuua

SEQ ID NO: 141589 - RNA, 19 nt, Homo sapiens
  misc_RNA (1)...(19): siRNA sense strand
gaguuccucuagcugauaa

SEQ ID NO: 141590 - RNA, 19 nt, Homo sapiens
  misc_RNA (1)...(19): siRNA sense strand
gaccauuguggaaacauua

SEQ ID NO: 141591 - RNA, 19 nt, Homo sapiens
  misc_RNA (1)...(19): siRNA sense strand
uacucaagcuguuguguuu

SEQ ID NO: 141592 - RNA, 19 nt, Homo sapiens
  misc_RNA (1)...(19): siRNA sense strand
gcacauugaaggaggagaa

SEQ ID NO: 141593 - RNA, 19 nt, Homo sapiens
  misc_RNA (1)...(19): siRNA sense strand
gcuagaguguggaguuugu

SEQ ID NO: 141594 - RNA, 19 nt, Homo sapiens
  misc_RNA (1)...(19): siRNA sense strand
guucucaaguuacucauuc

SEQ ID NO: 141595 - RNA, 19 nt, Homo sapiens
  misc_RNA (1)...(19): siRNA sense strand
caacaagaagauaugacua

SEQ ID NO: 141596 - RNA, 19 nt, Homo sapiens
  misc_RNA (1)...(19): siRNA sense strand
gcugauaaaccucaugaga

SEQ ID NO: 141597 - RNA, 19 nt, Homo sapiens
  misc_RNA (1)...(19): siRNA sense strand
ccauugaguuuguuugcuu

SEQ ID NO: 141598 - RNA, 19 nt, Homo sapiens
  misc_RNA (1)...(19): siRNA sense strand
uagaagaaaucacugaacu

SEQ ID NO: 141599 - RNA, 19 nt, Homo sapiens
  misc_RNA (1)...(19): siRNA sense strand
caggaugauuguagaguug

SEQ ID NO: 141600 - RNA, 19 nt, Homo sapiens
  misc_RNA (1)...(19): siRNA sense strand
gaaccagaagcuaaucaga

SEQ ID NO: 141601 - RNA, 19 nt, Homo sapiens
  misc_RNA (1)...(19): siRNA sense strand
cagccugccuccacuguga

SEQ ID NO: 141602 - RNA, 19 nt, Homo sapiens
  misc_RNA (1)...(19): siRNA sense strand
gaagauggaauuggaaugg

SEQ ID NO: 141603 - RNA, 19 nt, Homo sapiens
  misc_RNA (1)...(19): siRNA sense strand
cccauuugaucgacaagua

SEQ ID NO: 141604 - RNA, 19 nt, Homo sapiens
  misc_RNA (1)...(19): siRNA sense strand
uacaaaggauaaucgaguu

SEQ ID NO: 141605 - RNA, 19 nt, Homo sapiens
  misc_RNA (1)...(19): siRNA sense strand
cagcagcaguuuacagaag

SEQ ID NO: 141606 - RNA, 19 nt, Homo sapiens
  misc_RNA (1)...(19): siRNA sense strand
caaagacauuagcaaagca

SEQ ID NO: 141607 - RNA, 19 nt, Homo sapiens
  misc_RNA (1)...(19): siRNA sense strand
cagaucacauucaguugga

SEQ ID NO: 141608 - RNA, 19 nt, Homo sapiens
  misc_RNA (1)...(19): siRNA sense strand
gcagcaguuuacagaaguu

SEQ ID NO: 141609 - RNA, 19 nt, Homo sapiens
  misc_RNA (1)...(19): siRNA sense strand
agaaacagcagcagcaguu

SEQ ID NO: 141610 - RNA, 19 nt, Homo sapiens
  misc_RNA (1)...(19): siRNA sense strand
cguggaagauggaauugga

SEQ ID NO: 141611 - RNA, 19 nt, Homo sapiens
  misc_RNA (1)...(19): siRNA sense strand
ucaaguuacucauucuaca

SEQ ID NO: 141612 - RNA, 19 nt, Homo sapiens
  misc_RNA (1)...(19): siRNA sense strand
aacaggaaauuacaagguu

SEQ ID NO: 141613 - RNA, 19 nt, Homo sapiens
  misc_RNA (1)...(19): siRNA sense strand
caagaagaaauggcucuaa

SEQ ID NO: 141614 - RNA, 19 nt, Homo sapiens
  misc_RNA (1)...(19): siRNA sense strand
ugaaggaggagaacaaauc

SEQ ID NO: 141615 - RNA, 19 nt, Homo sapiens
  misc_RNA (1)...(19): siRNA sense strand
ucacagaggaaaucucaga

SEQ ID NO: 141616 - RNA, 19 nt, Homo sapiens
  misc_RNA (1)...(19): siRNA sense strand
gcacaggcgaguuccucua

SEQ ID NO: 141617 - RNA, 19 nt, Homo sapiens
  misc_RNA (1)...(19): siRNA sense strand
caccuugccucuguauauu

SEQ ID NO: 141618 - RNA, 19 nt, Homo sapiens
  misc_RNA (1)...(19): siRNA sense strand
ccucaauacucaagcuguu

SEQ ID NO: 141619 - RNA, 19 nt, Homo sapiens
  misc_RNA (1)...(19): siRNA sense strand
uaacguggaaacuguagaa

SEQ ID NO: 141620 - RNA, 19 nt, Homo sapiens
  misc_RNA (1)...(19): siRNA sense strand
cagcaucccugucacuuuu

SEQ ID NO: 141621 - RNA, 19 nt, Homo sapiens
  misc_RNA (1)...(19): siRNA sense strand
gugcuagaguguggaguuu

SEQ ID NO: 141622 - RNA, 19 nt, Homo sapiens
  misc_RNA (1)...(19): siRNA sense strand
ccacucaugugcugugucu

SEQ ID NO: 141623 - RNA, 19 nt, Homo sapiens
  misc_RNA (1)...(19): siRNA sense strand
ucaccuugccucuguauau

SEQ ID NO: 141624 - RNA, 19 nt, Homo sapiens
  misc_RNA (1)...(19): siRNA sense strand
agacagaauuagugaagca

SEQ ID NO: 141625 - RNA, 19 nt, Homo sapiens
  misc_RNA (1)...(19): siRNA sense strand
gcagcccauuccaacaauu

SEQ ID NO: 141626 - RNA, 19 nt, Homo sapiens
  misc_RNA (1)...(19): siRNA sense strand
aagaagaaauggcucuaag

SEQ ID NO: 141627 - RNA, 19 nt, Homo sapiens
  misc_RNA (1)...(19): siRNA sense strand
cagauccgagcaucaauuu

SEQ ID NO: 141628 - RNA, 19 nt, Homo sapiens
  misc_RNA (1)...(19): siRNA sense strand
guuacucauucuacaaaga

SEQ ID NO: 141629 - RNA, 19 nt, Homo sapiens
  misc_RNA (1)...(19): siRNA sense strand
uaaucgaguucacauugga

SEQ ID NO: 141630 - RNA, 19 nt, Homo sapiens
  misc_RNA (1)...(19): siRNA sense strand
gcaacaagaagauaugacu

SEQ ID NO: 141631 - RNA, 19 nt, Homo sapiens
  misc_RNA (1)...(19): siRNA sense strand
ggccauaccgucugucaug

SEQ ID NO: 141632 - RNA, 19 nt, Homo sapiens
  misc_RNA (1)...(19): siRNA sense strand
gcauacggaccuucacaga

SEQ ID NO: 141633 - RNA, 19 nt, Homo sapiens
  misc_RNA (1)...(19): siRNA sense strand
caugugcugugucugcaaa

SEQ ID NO: 141634 - RNA, 19 nt, Homo sapiens
  misc_RNA (1)...(19): siRNA sense strand
aagcucaccuugccucugu

SEQ ID NO: 141635 - RNA, 19 nt, Homo sapiens
  misc_RNA (1)...(19): siRNA sense strand
gaaaucacugaacuacuca

SEQ ID NO: 141636 - RNA, 19 nt, Homo sapiens
  misc_RNA (1)...(19): siRNA sense strand
ggaaacauuauuaccucaa

SEQ ID NO: 141637 - RNA, 19 nt, Homo sapiens
  misc_RNA (1)...(19): siRNA sense strand
gcucaggcagcaacaagaa

SEQ ID NO: 141638 - RNA, 19 nt, Homo sapiens
  misc_RNA (1)...(19): siRNA sense strand
ggucacaagcauucaguau

SEQ ID NO: 141639 - RNA, 19 nt, Homo sapiens
  misc_RNA (1)...(19): siRNA sense strand
gagagcaucauucguugug

SEQ ID NO: 141640 - RNA, 19 nt, Homo sapiens
  misc_RNA (1)...(19): siRNA sense strand
gaugcucugcuccugauuu

SEQ ID NO: 141641 - RNA, 19 nt, Homo sapiens
  misc_RNA (1)...(19): siRNA sense strand
gaaguugcagaucacauuc

SEQ ID NO: 141642 - RNA, 19 nt, Homo sapiens
  misc_RNA (1)...(19): siRNA sense strand
gcagcaacaagaagauaug

SEQ ID NO: 141643 - RNA, 19 nt, Homo sapiens
  misc_RNA (1)...(19): siRNA sense strand
guaacagaccuaggugauu

SEQ ID NO: 141644 - RNA, 19 nt, Homo sapiens
  misc_RNA (1)...(19): siRNA sense strand
caaguuacucauucuacaa

SEQ ID NO: 141645 - RNA, 19 nt, Homo sapiens
  misc_RNA (1)...(19): siRNA sense strand
acaaagacauuagcaaagc

SEQ ID NO: 141646 - RNA, 19 nt, Homo sapiens
  misc_RNA (1)...(19): siRNA sense strand
gaauggcucacacagaaca

SEQ ID NO: 141647 - RNA, 19 nt, Homo sapiens
  misc_RNA (1)...(19): siRNA sense strand
ugaguuuguuugcuuggaa

SEQ ID NO: 141648 - RNA, 19 nt, Homo sapiens
  misc_RNA (1)...(19): siRNA sense strand
cugauaaaccucaugagaa

SEQ ID NO: 141649 - RNA, 19 nt, Homo sapiens
  misc_RNA (1)...(19): siRNA sense strand
aaauucgggucguuacguu

SEQ ID NO: 141650 - RNA, 19 nt, Homo sapiens
  misc_RNA (1)...(19): siRNA sense strand
cauagagacagaauuagug

SEQ ID NO: 141651 - RNA, 19 nt, Homo sapiens
  misc_RNA (1)...(19): siRNA sense strand
gaagaagguugucaaacua

SEQ ID NO: 141652 - RNA, 19 nt, Homo sapiens
  misc_RNA (1)...(19): siRNA sense strand
ggaaagagguagucacaga

SEQ ID NO: 141653 - RNA, 19 nt, Homo sapiens
  misc_RNA (1)...(19): siRNA sense strand
ggaagaagguugucaaacu

SEQ ID NO: 141654 - RNA, 19 nt, Homo sapiens
  misc_RNA (1)...(19): siRNA sense strand
guauggagcugcagaagaa

SEQ ID NO: 141655 - RNA, 19 nt, Homo sapiens
  misc_RNA (1)...(19): siRNA sense strand
ugauaaaccucaugagaaa

SEQ ID NO: 141656 - RNA, 19 nt, Homo sapiens
  misc_RNA (1)...(19): siRNA sense strand
gaacuacucagucuccaua

SEQ ID NO: 141657 - RNA, 19 nt, Homo sapiens
  misc_RNA (1)...(19): siRNA sense strand
ucacaagcauucaguauug

SEQ ID NO: 141658 - RNA, 19 nt, Homo sapiens
  misc_RNA (1)...(19): siRNA sense strand
gcaaaguuguuaacggaaa

SEQ ID NO: 141659 - RNA, 19 nt, Homo sapiens
  misc_RNA (1)...(19): siRNA sense strand
ggagagagcaucauucguu

SEQ ID NO: 141660 - RNA, 19 nt, Homo sapiens
  misc_RNA (1)...(19): siRNA sense strand
gagaacaaaucguggaaga

SEQ ID NO: 141661 - RNA, 19 nt, Homo sapiens
  misc_RNA (1)...(19): siRNA sense strand
gaacaaaucguggaagaug

SEQ ID NO: 141662 - RNA, 19 nt, Homo sapiens
  misc_RNA (1)...(19): siRNA sense strand
agaaauggcucuaaguguu

SEQ ID NO: 141663 - RNA, 19 nt, Homo sapiens
  misc_RNA (1)...(19): siRNA sense strand
gagaaugcccggucaugua

SEQ ID NO: 141664 - RNA, 19 nt, Homo sapiens
  misc_RNA (1)...(19): siRNA sense strand
ggucauguauucgagcuua

SEQ ID NO: 141665 - RNA, 19 nt, Homo sapiens
  misc_RNA (1)...(19): siRNA sense strand
caagguuacuggaaacauu

SEQ ID NO: 141666 - RNA, 19 nt, Homo sapiens
  misc_RNA (1)...(19): siRNA sense strand
cguggaaacuguagaauau

SEQ ID NO: 141667 - RNA, 19 nt, Homo sapiens
  misc_RNA (1)...(19): siRNA sense strand
uaacagaccuaggugauuc

SEQ ID NO: 141668 - RNA, 19 nt, Homo sapiens
  misc_RNA (1)...(19): siRNA sense strand
gaagaaauggcucuaagug

SEQ ID NO: 141669 - RNA, 19 nt, Homo sapiens
  misc_RNA (1)...(19): siRNA sense strand
gauaaucgaguucacauug

SEQ ID NO: 141670 - RNA, 19 nt, Homo sapiens
  misc_RNA (1)...(19): siRNA sense strand
gcaggaugauuguagaguu

SEQ ID NO: 141671 - RNA, 19 nt, Homo sapiens
  misc_RNA (1)...(19): siRNA sense strand
caaacuagcccacucaugu

SEQ ID NO: 141672 - RNA, 19 nt, Homo sapiens
  misc_RNA (1)...(19): siRNA sense strand
gaaauggcucuaaguguug

SEQ ID NO: 141673 - RNA, 19 nt, Homo sapiens
  misc_RNA (1)...(19): siRNA sense strand
uuacagaaguugcagauca

SEQ ID NO: 141674 - RNA, 19 nt, Homo sapiens
  misc_RNA (1)...(19): siRNA sense strand
uggaauggcucacacagaa

SEQ ID NO: 141675 - RNA, 19 nt, Homo sapiens
  misc_RNA (1)...(19): siRNA sense strand
gaaacucugugucgucaag

SEQ ID NO: 141676 - RNA, 19 nt, Homo sapiens
  misc_RNA (1)...(19): siRNA sense strand
gcaaagcacaggcgaguuc

SEQ ID NO: 141677 - RNA, 19 nt, Homo sapiens
  misc_RNA (1)...(19): siRNA sense strand
gcagcaggaugauuguaga

SEQ ID NO: 141678 - RNA, 19 nt, Homo sapiens
  misc_RNA (1)...(19): siRNA sense strand
ggacagcuguagugaaggu

SEQ ID NO: 141679 - RNA, 19 nt, Homo sapiens
  misc_RNA (1)...(19): siRNA sense strand
guagauagcagucauagag

SEQ ID NO: 141680 - RNA, 19 nt, Homo sapiens
  misc_RNA (1)...(19): siRNA sense strand
agucauagagacagaauua

SEQ ID NO: 141681 - RNA, 19 nt, Homo sapiens
  misc_RNA (1)...(19): siRNA sense strand
agaaaucacugaacuacuc

SEQ ID NO: 141682 - RNA, 19 nt, Homo sapiens
  misc_RNA (1)...(19): siRNA sense strand
gaagaaaucacugaacuac

SEQ ID NO: 141683 - RNA, 19 nt, Homo sapiens
  misc_RNA (1)...(19): siRNA sense strand
cuacaaagacauuagcaaa

SEQ ID NO: 141684 - RNA, 19 nt, Homo sapiens
  misc_RNA (1)...(19): siRNA sense strand
gcacacagcgaacuugcaa

SEQ ID NO: 141685 - RNA, 19 nt, Homo sapiens
  misc_RNA (1)...(19): siRNA sense strand
acaggaaauuacaagguua

SEQ ID NO: 141686 - RNA, 19 nt, Homo sapiens
  misc_RNA (1)...(19): siRNA sense strand
caacucauuugugcucuga

SEQ ID NO: 141687 - RNA, 19 nt, Homo sapiens
  misc_RNA (1)...(19): siRNA sense strand
gagaugcucugcuccugau

SEQ ID NO: 141688 - RNA, 19 nt, Homo sapiens
  misc_RNA (1)...(19): siRNA sense strand
guagaguugucuuggcaaa

SEQ ID NO: 141689 - RNA, 19 nt, Homo sapiens
  misc_RNA (1)...(19): siRNA sense strand
gauccgagcaucaauuuua

SEQ ID NO: 141690 - RNA, 19 nt, Homo sapiens
  misc_RNA (1)...(19): siRNA sense strand
gaguuccucuagcugauaa

SEQ ID NO: 141691 - RNA, 19 nt, Homo sapiens
  misc_RNA (1)...(19): siRNA sense strand
gaccauuguggaaacauua

SEQ ID NO: 141692 - RNA, 19 nt, Homo sapiens
  misc_RNA (1)...(19): siRNA sense strand
uacucaagcuguuguguuu

SEQ ID NO: 141693 - RNA, 19 nt, Homo sapiens
  misc_RNA (1)...(19): siRNA sense strand
gcacauugaaggaggagaa

SEQ ID NO: 141694 - RNA, 19 nt, Homo sapiens
  misc_RNA (1)...(19): siRNA sense strand
gcuagaguguggaguuugu

SEQ ID NO: 141695 - RNA, 19 nt, Homo sapiens
  misc_RNA (1)...(19): siRNA sense strand
guucucaaguuacucauuc

SEQ ID NO: 141696 - RNA, 19 nt, Homo sapiens
  misc_RNA (1)...(19): siRNA sense strand
caacaagaagauaugacua

SEQ ID NO: 141697 - RNA, 19 nt, Homo sapiens
  misc_RNA (1)...(19): siRNA sense strand
gcugauaaaccucaugaga

SEQ ID NO: 141698 - RNA, 19 nt, Homo sapiens
  misc_RNA (1)...(19): siRNA sense strand
ccauugaguuuguuugcuu

SEQ ID NO: 141699 - RNA, 19 nt, Homo sapiens
  misc_RNA (1)...(19): siRNA sense strand
uagaagaaaucacugaacu

SEQ ID NO: 141700 - RNA, 19 nt, Homo sapiens
  misc_RNA (1)...(19): siRNA sense strand
caggaugauuguagaguug

SEQ ID NO: 141701 - RNA, 19 nt, Homo sapiens
  misc_RNA (1)...(19): siRNA sense strand
gaaccagaagcuaaucaga

SEQ ID NO: 141702 - RNA, 19 nt, Homo sapiens
  misc_RNA (1)...(19): siRNA sense strand
ugaccaauauacugggaaa

SEQ ID NO: 141703 - RNA, 19 nt, Homo sapiens
  misc_RNA (1)...(19): siRNA sense strand
cagccugccuccacuguga

SEQ ID NO: 141704 - RNA, 19 nt, Homo sapiens
  misc_RNA (1)...(19): siRNA sense strand
gaagauggaauuggaaugg

SEQ ID NO: 141705 - RNA, 19 nt, Homo sapiens
  misc_RNA (1)...(19): siRNA sense strand
cccauuugaucgacaagua

SEQ ID NO: 141706 - RNA, 19 nt, Homo sapiens
  misc_RNA (1)...(19): siRNA sense strand
uacaaaggauaaucgaguu

SEQ ID NO: 141707 - RNA, 19 nt, Homo sapiens
  misc_RNA (1)...(19): siRNA sense strand
cagcagcaguuuacagaag

SEQ ID NO: 141708 - RNA, 19 nt, Homo sapiens
  misc_RNA (1)...(19): siRNA sense strand
caaagacauuagcaaagca

SEQ ID NO: 141709 - RNA, 19 nt, Homo sapiens
  misc_RNA (1)...(19): siRNA sense strand
cagaucacauucaguugga

SEQ ID NO: 141710 - RNA, 19 nt, Homo sapiens
  misc_RNA (1)...(19): siRNA sense strand
gcagcaguuuacagaaguu

SEQ ID NO: 141711 - RNA, 19 nt, Homo sapiens
  misc_RNA (1)...(19): siRNA sense strand
agaaacagcagcagcaguu

SEQ ID NO: 141712 - RNA, 19 nt, Homo sapiens
  misc_RNA (1)...(19): siRNA sense strand
cguggaagauggaauugga

SEQ ID NO: 141713 - RNA, 19 nt, Homo sapiens
  misc_RNA (1)...(19): siRNA sense strand
ucaaguuacucauucuaca

SEQ ID NO: 141714 - RNA, 19 nt, Homo sapiens
  misc_RNA (1)...(19): siRNA sense strand
aacaggaaauuacaagguu

SEQ ID NO: 141715 - RNA, 19 nt, Homo sapiens
  misc_RNA (1)...(19): siRNA sense strand
caagaagaaauggcucuaa

SEQ ID NO: 141716 - RNA, 19 nt, Homo sapiens
  misc_RNA (1)...(19): siRNA sense strand
ugaaggaggagaacaaauc

SEQ ID NO: 141717 - RNA, 19 nt, Homo sapiens
  misc_RNA (1)...(19): siRNA sense strand
ucacagaggaaaucucaga

SEQ ID NO: 141718 - RNA, 19 nt, Homo sapiens
  misc_RNA (1)...(19): siRNA sense strand
gcacaggcgaguuccucua

SEQ ID NO: 141719 - RNA, 19 nt, Homo sapiens
  misc_RNA (1)...(19): siRNA sense strand
caccuugccucuguauauu

SEQ ID NO: 141720 - RNA, 19 nt, Homo sapiens
  misc_RNA (1)...(19): siRNA sense strand
cagauaauaugugaccaau

SEQ ID NO: 141721 - RNA, 19 nt, Homo sapiens
  misc_RNA (1)...(19): siRNA sense strand
ccucaauacucaagcuguu

SEQ ID NO: 141722 - RNA, 19 nt, Homo sapiens
  misc_RNA (1)...(19): siRNA sense strand
uaacguggaaacuguagaa

SEQ ID NO: 141723 - RNA, 19 nt, Homo sapiens
  misc_RNA (1)...(19): siRNA sense strand
cagcaucccugucacuuuu

SEQ ID NO: 141724 - RNA, 19 nt, Homo sapiens
  misc_RNA (1)...(19): siRNA sense strand
gugcuagaguguggaguuu

SEQ ID NO: 141725 - RNA, 19 nt, Homo sapiens
  misc_RNA (1)...(19): siRNA sense strand
ccacucaugugcugugucu

SEQ ID NO: 141726 - RNA, 19 nt, Homo sapiens
  misc_RNA (1)...(19): siRNA sense strand
ucaccuugccucuguauau

SEQ ID NO: 141727 - RNA, 19 nt, Homo sapiens
  misc_RNA (1)...(19): siRNA sense strand
agacagaauuagugaagca

SEQ ID NO: 141728 - RNA, 19 nt, Homo sapiens
  misc_RNA (1)...(19): siRNA sense strand
gcagcccauuccaacaauu

SEQ ID NO: 141729 - RNA, 19 nt, Homo sapiens
  misc_RNA (1)...(19): siRNA sense strand
aagaagaaauggcucuaag

SEQ ID NO: 141730 - RNA, 19 nt, Homo sapiens
  misc_RNA (1)...(19): siRNA sense strand
cagauccgagcaucaauuu

SEQ ID NO: 141731 - RNA, 19 nt, Homo sapiens
  misc_RNA (1)...(19): siRNA sense strand
guuacucauucuacaaaga

SEQ ID NO: 141732 - RNA, 19 nt, Homo sapiens
  misc_RNA (1)...(19): siRNA sense strand
uaaucgaguucacauugga

SEQ ID NO: 141733 - RNA, 19 nt, Homo sapiens
  misc_RNA (1)...(19): siRNA sense strand
ggccauaccgucugucaug

SEQ ID NO: 141734 - RNA, 19 nt, Homo sapiens
  misc_RNA (1)...(19): siRNA sense strand
gcaacaagaagauaugacu

SEQ ID NO: 141735 - RNA, 19 nt, Homo sapiens
  misc_RNA (1)...(19): siRNA sense strand
gcauacggaccuucacaga

SEQ ID NO: 141736 - RNA, 19 nt, Homo sapiens
  misc_RNA (1)...(19): siRNA sense strand
caugugcugugucugcaaa

SEQ ID NO: 141737 - RNA, 19 nt, Homo sapiens
  misc_RNA (1)...(19): siRNA sense strand
aagcucaccuugccucugu

SEQ ID NO: 141738 - RNA, 19 nt, Homo sapiens
  misc_RNA (1)...(19): siRNA sense strand
gaaaucacugaacuacuca

SEQ ID NO: 141739 - RNA, 19 nt, Homo sapiens
  misc_RNA (1)...(19): siRNA sense strand
ggaaacauuauuaccucaa

SEQ ID NO: 141740 - RNA, 19 nt, Homo sapiens
  misc_RNA (1)...(19): siRNA sense strand
gcucaggcagcaacaagaa

SEQ ID NO: 141741 - RNA, 19 nt, Homo sapiens
  misc_RNA (1)...(19): siRNA sense strand
ggucacaagcauucaguau

SEQ ID NO: 141742 - RNA, 19 nt, Homo sapiens
  misc_RNA (1)...(19): siRNA sense strand
gagagcaucauucguugug

SEQ ID NO: 141743 - RNA, 19 nt, Homo sapiens
  misc_RNA (1)...(19): siRNA sense strand
gaugcucugcuccugauuu

SEQ ID NO: 141744 - RNA, 19 nt, Homo sapiens
  misc_RNA (1)...(19): siRNA sense strand
gaaguugcagaucacauuc

SEQ ID NO: 141745 - RNA, 19 nt, Homo sapiens
  misc_RNA (1)...(19): siRNA sense strand
gcagcaacaagaagauaug

SEQ ID NO: 141746 - RNA, 19 nt, Homo sapiens
  misc_RNA (1)...(19): siRNA sense strand
caaguuacucauucuacaa

SEQ ID NO: 141747 - RNA, 19 nt, Homo sapiens
  misc_RNA (1)...(19): siRNA sense strand
guaacagaccuaggugauu

SEQ ID NO: 141748 - RNA, 19 nt, Homo sapiens
  misc_RNA (1)...(19): siRNA sense strand
cugauaaaccucaugagaa

SEQ ID NO: 141749 - RNA, 19 nt, Homo sapiens
  misc_RNA (1)...(19): siRNA sense strand
gaauggcucacacagaaca

SEQ ID NO: 141750 - RNA, 19 nt, Homo sapiens
  misc_RNA (1)...(19): siRNA sense strand
ugaguuuguuugcuuggaa

SEQ ID NO: 141751 - RNA, 19 nt, Homo sapiens
  misc_RNA (1)...(19): siRNA sense strand
gaagaagguugucaaacua

SEQ ID NO: 141752 - RNA, 19 nt, Homo sapiens
  misc_RNA (1)...(19): siRNA sense strand
ggaagaagguugucaaacu

SEQ ID NO: 141753 - RNA, 19 nt, Homo sapiens
  misc_RNA (1)...(19): siRNA sense strand
guauggagcugcagaagaa

SEQ ID NO: 141754 - RNA, 19 nt, Homo sapiens
  misc_RNA (1)...(19): siRNA sense strand
ugauaaaccucaugagaaa

SEQ ID NO: 141755 - RNA, 19 nt, Homo sapiens
  misc_RNA (1)...(19): siRNA sense strand
gaacuacucagucuccaua

SEQ ID NO: 141756 - RNA, 19 nt, Homo sapiens
  misc_RNA (1)...(19): siRNA sense strand
ucacaagcauucaguauug

SEQ ID NO: 141757 - RNA, 19 nt, Homo sapiens
  misc_RNA (1)...(19): siRNA sense strand
gcaaaguuguuaacggaaa

SEQ ID NO: 141758 - RNA, 19 nt, Homo sapiens
  misc_RNA (1)...(19): siRNA sense strand
ggagagagcaucauucguu

SEQ ID NO: 141759 - RNA, 19 nt, Homo sapiens
  misc_RNA (1)...(19): siRNA sense strand
gagaacaaaucguggaaga

SEQ ID NO: 141760 - RNA, 19 nt, Homo sapiens
  misc_RNA (1)...(19): siRNA sense strand
gaacaaaucguggaagaug

SEQ ID NO: 141761 - RNA, 19 nt, Homo sapiens
  misc_RNA (1)...(19): siRNA sense strand
agaaauggcucuaaguguu

SEQ ID NO: 141762 - RNA, 19 nt, Homo sapiens
  misc_RNA (1)...(19): siRNA sense strand
gagaaugcccggucaugua

SEQ ID NO: 141763 - RNA, 19 nt, Homo sapiens
  misc_RNA (1)...(19): siRNA sense strand
ggucauguauucgagcuua

SEQ ID NO: 141764 - RNA, 19 nt, Homo sapiens
  misc_RNA (1)...(19): siRNA sense strand
caagguuacuggaaacauu

SEQ ID NO: 141765 - RNA, 19 nt, Homo sapiens
  misc_RNA (1)...(19): siRNA sense strand
cguggaaacuguagaauau

SEQ ID NO: 141766 - RNA, 19 nt, Homo sapiens
  misc_RNA (1)...(19): siRNA sense strand
uaacagaccuaggugauuc

SEQ ID NO: 141767 - RNA, 19 nt, Homo sapiens
  misc_RNA (1)...(19): siRNA sense strand
gaagaaauggcucuaagug

SEQ ID NO: 141768 - RNA, 19 nt, Homo sapiens
  misc_RNA (1)...(19): siRNA sense strand
gauaaucgaguucacauug

SEQ ID NO: 141769 - RNA, 19 nt, Homo sapiens
  misc_RNA (1)...(19): siRNA sense strand
gcaggaugauuguagaguu

SEQ ID NO: 141770 - RNA, 19 nt, Homo sapiens
  misc_RNA (1)...(19): siRNA sense strand
caaacuagcccacucaugu

SEQ ID NO: 141771 - RNA, 19 nt, Homo sapiens
  misc_RNA (1)...(19): siRNA sense strand
gaaauggcucuaaguguug

SEQ ID NO: 141772 - RNA, 19 nt, Homo sapiens
  misc_RNA (1)...(19): siRNA sense strand
uuacagaaguugcagauca

SEQ ID NO: 141773 - RNA, 19 nt, Homo sapiens
  misc_RNA (1)...(19): siRNA sense strand
uggaauggcucacacagaa

SEQ ID NO: 141774 - RNA, 19 nt, Homo sapiens
  misc_RNA (1)...(19): siRNA sense strand
gaaacucugugucgucaag

SEQ ID NO: 141775 - RNA, 19 nt, Homo sapiens
  misc_RNA (1)...(19): siRNA sense strand
gcaaagcacaggcgaguuc

SEQ ID NO: 141776 - RNA, 19 nt, Homo sapiens
  misc_RNA (1)...(19): siRNA sense strand
gcagcaggaugauuguaga

SEQ ID NO: 141777 - RNA, 19 nt, Homo sapiens
  misc_RNA (1)...(19): siRNA sense strand
ggacagcuguagugaaggu

SEQ ID NO: 141778 - RNA, 19 nt, Homo sapiens
  misc_RNA (1)...(19): siRNA sense strand
guagauagcagucauagag

SEQ ID NO: 141779 - RNA, 19 nt, Homo sapiens
  misc_RNA (1)...(19): siRNA sense strand
agucauagagacagaauua

SEQ ID NO: 141780 - RNA, 19 nt, Homo sapiens
  misc_RNA (1)...(19): siRNA sense strand
agaaaucacugaacuacuc

SEQ ID NO: 141781 - RNA, 19 nt, Homo sapiens
  misc_RNA (1)...(19): siRNA sense strand
gaagaaaucacugaacuac

SEQ ID NO: 141782 - RNA, 19 nt, Homo sapiens
  misc_RNA (1)...(19): siRNA sense strand
cuacaaagacauuagcaaa

SEQ ID NO: 141783 - RNA, 19 nt, Homo sapiens
  misc_RNA (1)...(19): siRNA sense strand
gcacacagcgaacuugcaa

SEQ ID NO: 141784 - RNA, 19 nt, Homo sapiens
  misc_RNA (1)...(19): siRNA sense strand
acaggaaauuacaagguua

SEQ ID NO: 141785 - RNA, 19 nt, Homo sapiens
  misc_RNA (1)...(19): siRNA sense strand
caacucauuugugcucuga

SEQ ID NO: 141786 - RNA, 19 nt, Homo sapiens
  misc_RNA (1)...(19): siRNA sense strand
gagaugcucugcuccugau

SEQ ID NO: 141787 - RNA, 19 nt, Homo sapiens
  misc_RNA (1)...(19): siRNA sense strand
guagaguugucuuggcaaa

SEQ ID NO: 141788 - RNA, 19 nt, Homo sapiens
  misc_RNA (1)...(19): siRNA sense strand
gauccgagcaucaauuuua

SEQ ID NO: 141789 - RNA, 19 nt, Homo sapiens
  misc_RNA (1)...(19): siRNA sense strand
gaguuccucuagcugauaa

SEQ ID NO: 141790 - RNA, 19 nt, Homo sapiens
  misc_RNA (1)...(19): siRNA sense strand
gaccauuguggaaacauua

SEQ ID NO: 141791 - RNA, 19 nt, Homo sapiens
  misc_RNA (1)...(19): siRNA sense strand
uacucaagcuguuguguuu

SEQ ID NO: 141792 - RNA, 19 nt, Homo sapiens
  misc_RNA (1)...(19): siRNA sense strand
gcacauugaaggaggagaa

SEQ ID NO: 141793 - RNA, 19 nt, Homo sapiens
  misc_RNA (1)...(19): siRNA sense strand
gcuagaguguggaguuugu

SEQ ID NO: 141794 - RNA, 19 nt, Homo sapiens
  misc_RNA (1)...(19): siRNA sense strand
guucucaaguuacucauuc

SEQ ID NO: 141795 - RNA, 19 nt, Homo sapiens
  misc_RNA (1)...(19): siRNA sense strand
caacaagaagauaugacua

SEQ ID NO: 141796 - RNA, 19 nt, Homo sapiens
  misc_RNA (1)...(19): siRNA sense strand
gcugauaaaccucaugaga

SEQ ID NO: 141797 - RNA, 19 nt, Homo sapiens
  misc_RNA (1)...(19): siRNA sense strand
ccauugaguuuguuugcuu

SEQ ID NO: 141798 - RNA, 19 nt, Homo sapiens
  misc_RNA (1)...(19): siRNA sense strand
uagaagaaaucacugaacu

SEQ ID NO: 141799 - RNA, 19 nt, Homo sapiens
  misc_RNA (1)...(19): siRNA sense strand
caggaugauuguagaguug

SEQ ID NO: 141800 - RNA, 19 nt, Homo sapiens
  misc_RNA (1)...(19): siRNA sense strand
gaaccagaagcuaaucaga

SEQ ID NO: 141801 - RNA, 19 nt, Homo sapiens
  misc_RNA (1)...(19): siRNA sense strand
cagccugccuccacuguga

SEQ ID NO: 141802 - RNA, 19 nt, Homo sapiens
  misc_RNA (1)...(19): siRNA sense strand
gaagauggaauuggaaugg

SEQ ID NO: 141803 - RNA, 19 nt, Homo sapiens
  misc_RNA (1)...(19): siRNA sense strand
cccauuugaucgacaagua

SEQ ID NO: 141804 - RNA, 19 nt, Homo sapiens
  misc_RNA (1)...(19): siRNA sense strand
uacaaaggauaaucgaguu

SEQ ID NO: 141805 - RNA, 19 nt, Homo sapiens
  misc_RNA (1)...(19): siRNA sense strand
cagcagcaguuuacagaag

SEQ ID NO: 141806 - RNA, 19 nt, Homo sapiens
  misc_RNA (1)...(19): siRNA sense strand
caaagacauuagcaaagca

SEQ ID NO: 141807 - RNA, 19 nt, Homo sapiens
  misc_RNA (1)...(19): siRNA sense strand
cagaucacauucaguugga

SEQ ID NO: 141808 - RNA, 19 nt, Homo sapiens
  misc_RNA (1)...(19): siRNA sense strand
gcagcaguuuacagaaguu

SEQ ID NO: 141809 - RNA, 19 nt, Homo sapiens
  misc_RNA (1)...(19): siRNA sense strand
agaaacagcagcagcaguu

SEQ ID NO: 141810 - RNA, 19 nt, Homo sapiens
  misc_RNA (1)...(19): siRNA sense strand
cguggaagauggaauugga

SEQ ID NO: 141811 - RNA, 19 nt, Homo sapiens
  misc_RNA (1)...(19): siRNA sense strand
ucaaguuacucauucuaca

SEQ ID NO: 141812 - RNA, 19 nt, Homo sapiens
  misc_RNA (1)...(19): siRNA sense strand
aacaggaaauuacaagguu

SEQ ID NO: 141813 - RNA, 19 nt, Homo sapiens
  misc_RNA (1)...(19): siRNA sense strand
caagaagaaauggcucuaa

SEQ ID NO: 141814 - RNA, 19 nt, Homo sapiens
  misc_RNA (1)...(19): siRNA sense strand
ugaaggaggagaacaaauc

SEQ ID NO: 141815 - RNA, 19 nt, Homo sapiens
  misc_RNA (1)...(19): siRNA sense strand
ucacagaggaaaucucaga

SEQ ID NO: 141816 - RNA, 19 nt, Homo sapiens
  misc_RNA (1)...(19): siRNA sense strand
gcacaggcgaguuccucua

SEQ ID NO: 141817 - RNA, 19 nt, Homo sapiens
  misc_RNA (1)...(19): siRNA sense strand
caccuugccucuguauauu

SEQ ID NO: 141818 - RNA, 19 nt, Homo sapiens
  misc_RNA (1)...(19): siRNA sense strand
ccucaauacucaagcuguu

SEQ ID NO: 141819 - RNA, 19 nt, Homo sapiens
  misc_RNA (1)...(19): siRNA sense strand
uaacguggaaacuguagaa

SEQ ID NO: 141820 - RNA, 19 nt, Homo sapiens
  misc_RNA (1)...(19): siRNA sense strand
cagcaucccugucacuuuu

SEQ ID NO: 141821 - RNA, 19 nt, Homo sapiens
  misc_RNA (1)...(19): siRNA sense strand
gugcuagaguguggaguuu

SEQ ID NO: 141822 - RNA, 19 nt, Homo sapiens
  misc_RNA (1)...(19): siRNA sense strand
ccacucaugugcugugucu

SEQ ID NO: 141823 - RNA, 19 nt, Homo sapiens
  misc_RNA (1)...(19): siRNA sense strand
ucaccuugccucuguauau

SEQ ID NO: 141824 - RNA, 19 nt, Homo sapiens
  misc_RNA (1)...(19): siRNA sense strand
agacagaauuagugaagca

SEQ ID NO: 141825 - RNA, 19 nt, Homo sapiens
  misc_RNA (1)...(19): siRNA sense strand
gcagcccauuccaacaauu

SEQ ID NO: 141826 - RNA, 19 nt, Homo sapiens
  misc_RNA (1)...(19): siRNA sense strand
aagaagaaauggcucuaag

SEQ ID NO: 141827 - RNA, 19 nt, Homo sapiens
  misc_RNA (1)...(19): siRNA sense strand
cagauccgagcaucaauuu

SEQ ID NO: 141828 - RNA, 19 nt, Homo sapiens
  misc_RNA (1)...(19): siRNA sense strand
guuacucauucuacaaaga

SEQ ID NO: 141829 - RNA, 19 nt, Homo sapiens
  misc_RNA (1)...(19): siRNA sense strand
uaaucgaguucacauugga

SEQ ID NO: 141830 - RNA, 19 nt, Homo sapiens
  misc_RNA (1)...(19): siRNA sense strand
gcaacaagaagauaugacu

SEQ ID NO: 141831 - RNA, 19 nt, Homo sapiens
  misc_RNA (1)...(19): siRNA sense strand
ggccauaccgucugucaug

SEQ ID NO: 141832 - RNA, 19 nt, Homo sapiens
  misc_RNA (1)...(19): siRNA sense strand
gcauacggaccuucacaga

SEQ ID NO: 141833 - RNA, 19 nt, Homo sapiens
  misc_RNA (1)...(19): siRNA sense strand
caugugcugugucugcaaa

SEQ ID NO: 141834 - RNA, 19 nt, Homo sapiens
  misc_RNA (1)...(19): siRNA sense strand
aagcucaccuugccucugu

SEQ ID NO: 141835 - RNA, 19 nt, Homo sapiens
  misc_RNA (1)...(19): siRNA sense strand
gaaaucacugaacuacuca

SEQ ID NO: 141836 - RNA, 19 nt, Homo sapiens
  misc_RNA (1)...(19): siRNA sense strand
ggaaacauuauuaccucaa

SEQ ID NO: 141837 - RNA, 19 nt, Homo sapiens
  misc_RNA (1)...(19): siRNA sense strand
gcucaggcagcaacaagaa

SEQ ID NO: 141838 - RNA, 19 nt, Homo sapiens
  misc_RNA (1)...(19): siRNA sense strand
ggucacaagcauucaguau

SEQ ID NO: 141839 - RNA, 19 nt, Homo sapiens
  misc_RNA (1)...(19): siRNA sense strand
gagagcaucauucguugug

SEQ ID NO: 141840 - RNA, 19 nt, Homo sapiens
  misc_RNA (1)...(19): siRNA sense strand
gaugcucugcuccugauuu

SEQ ID NO: 141841 - RNA, 19 nt, Homo sapiens
  misc_RNA (1)...(19): siRNA sense strand
gaaguugcagaucacauuc

SEQ ID NO: 141842 - RNA, 19 nt, Homo sapiens
  misc_RNA (1)...(19): siRNA sense strand
gcagcaacaagaagauaug

SEQ ID NO: 141843 - RNA, 19 nt, Homo sapiens
  misc_RNA (1)...(19): siRNA sense strand
guaacagaccuaggugauu

SEQ ID NO: 141844 - RNA, 19 nt, Homo sapiens
  misc_RNA (1)...(19): siRNA sense strand
caaguuacucauucuacaa

SEQ ID NO: 141845 - RNA, 19 nt, Homo sapiens
  misc_RNA (1)...(19): siRNA sense strand
acaaagacauuagcaaagc

SEQ ID NO: 141846 - RNA, 19 nt, Homo sapiens
  misc_RNA (1)...(19): siRNA sense strand
gaauggcucacacagaaca

SEQ ID NO: 141847 - RNA, 19 nt, Homo sapiens
  misc_RNA (1)...(19): siRNA sense strand
ugaguuuguuugcuuggaa

SEQ ID NO: 141848 - RNA, 19 nt, Homo sapiens
  misc_RNA (1)...(19): siRNA sense strand
cugauaaaccucaugagaa

SEQ ID NO: 141849 - RNA, 19 nt, Homo sapiens
  misc_RNA (1)...(19): siRNA sense strand
aaauucgggucguuacguu

SEQ ID NO: 141850 - RNA, 19 nt, Homo sapiens
  misc_RNA (1)...(19): siRNA sense strand
cauagagacagaauuagug

SEQ ID NO: 141851 - RNA, 19 nt, Homo sapiens
  misc_RNA (1)...(19): siRNA sense strand
cacaggaacugguacauuc

SEQ ID NO: 141852 - RNA, 19 nt, Homo sapiens
  misc_RNA (1)...(19): siRNA sense strand
gaacacacaaggccugauc

SEQ ID NO: 141853 - RNA, 19 nt, Homo sapiens
  misc_RNA (1)...(19): siRNA sense strand
gaccaccauucccaccaua

SEQ ID NO: 141854 - RNA, 19 nt, Homo sapiens
  misc_RNA (1)...(19): siRNA sense strand
ggaagaccacgauccucua

SEQ ID NO: 141855 - RNA, 19 nt, Homo sapiens
  misc_RNA (1)...(19): siRNA sense strand
aacaucagcuucacugugu

SEQ ID NO: 141856 - RNA, 19 nt, Homo sapiens
  misc_RNA (1)...(19): siRNA sense strand
agaccacgauccucuacaa

SEQ ID NO: 141857 - RNA, 19 nt, Homo sapiens
  misc_RNA (1)...(19): siRNA sense strand
ccaaucagcuccggaacca

SEQ ID NO: 141858 - RNA, 19 nt, Homo sapiens
  misc_RNA (1)...(19): siRNA sense strand
uggaaaccguggaguacaa

SEQ ID NO: 141859 - RNA, 19 nt, Homo sapiens
  misc_RNA (1)...(19): siRNA sense strand
acgauccucuacaagcuua

SEQ ID NO: 141860 - RNA, 19 nt, Homo sapiens
  misc_RNA (1)...(19): siRNA sense strand
ccacaggaacugguacauu

SEQ ID NO: 141861 - RNA, 19 nt, Homo sapiens
  misc_RNA (1)...(19): siRNA sense strand
acagagagcgugugaacga

SEQ ID NO: 141862 - RNA, 19 nt, Homo sapiens
  misc_RNA (1)...(19): siRNA sense strand
cggccgagaucacagacaa

SEQ ID NO: 141863 - RNA, 19 nt, Homo sapiens
  misc_RNA (1)...(19): siRNA sense strand
caucuucgccaaccucuuc

SEQ ID NO: 141864 - RNA, 19 nt, Homo sapiens
  misc_RNA (1)...(19): siRNA sense strand
ccacgauccucuacaagcu

SEQ ID NO: 141865 - RNA, 19 nt, Homo sapiens
  misc_RNA (1)...(19): siRNA sense strand
gaagaccacgauccucuac

SEQ ID NO: 141866 - RNA, 19 nt, Homo sapiens
  misc_RNA (1)...(19): siRNA sense strand
ugacagagagcgugugaac

SEQ ID NO: 141867 - RNA, 19 nt, Homo sapiens
  misc_RNA (1)...(19): siRNA sense strand
uacaagaacaucagcuuca

SEQ ID NO: 141868 - RNA, 19 nt, Homo sapiens
  misc_RNA (1)...(19): siRNA sense strand
cacaaggccugaucuucgu

SEQ ID NO: 141869 - RNA, 19 nt, Homo sapiens
  misc_RNA (1)...(19): siRNA sense strand
gaaaccguggaguacaaga

SEQ ID NO: 141870 - RNA, 19 nt, Homo sapiens
  misc_RNA (1)...(19): siRNA sense strand
cgacgggcucuaugaagga

SEQ ID NO: 141871 - RNA, 19 nt, Homo sapiens
  misc_RNA (1)...(19): siRNA sense strand
agaaaugcgcauccucaug

SEQ ID NO: 141872 - RNA, 19 nt, Homo sapiens
  misc_RNA (1)...(19): siRNA sense strand
gagaucgugaccaccauuc

SEQ ID NO: 141873 - RNA, 19 nt, Homo sapiens
  misc_RNA (1)...(19): siRNA sense strand
aaaccguggaguacaagaa

SEQ ID NO: 141874 - RNA, 19 nt, Homo sapiens
  misc_RNA (1)...(19): siRNA sense strand
gggaagagcugaugagaau

SEQ ID NO: 141875 - RNA, 19 nt, Homo sapiens
  misc_RNA (1)...(19): siRNA sense strand
gaaagaccaccauccuaua

SEQ ID NO: 141876 - RNA, 19 nt, Homo sapiens
  misc_RNA (1)...(19): siRNA sense strand
ggaaagaccaccauccuau

SEQ ID NO: 141877 - RNA, 19 nt, Homo sapiens
  misc_RNA (1)...(19): siRNA sense strand
caccguaacugguacauuc

SEQ ID NO: 141878 - RNA, 19 nt, Homo sapiens
  misc_RNA (1)...(19): siRNA sense strand
uggagacaguggaguauaa

SEQ ID NO: 141879 - RNA, 19 nt, Homo sapiens
  misc_RNA (1)...(19): siRNA sense strand
uaugaacgcugcugagauc

SEQ ID NO: 141880 - RNA, 19 nt, Homo sapiens
  misc_RNA (1)...(19): siRNA sense strand
gaacgcugcugagaucaca

SEQ ID NO: 141881 - RNA, 19 nt, Homo sapiens
  misc_RNA (1)...(19): siRNA sense strand
caauaucuuuggaaaccuu

SEQ ID NO: 141882 - RNA, 19 nt, Homo sapiens
  misc_RNA (1)...(19): siRNA sense strand
aacaucagcuuuacagugu

SEQ ID NO: 141883 - RNA, 19 nt, Homo sapiens
  misc_RNA (1)...(19): siRNA sense strand
acaaacaggaucugccuaa

SEQ ID NO: 141884 - RNA, 19 nt, Homo sapiens
  misc_RNA (1)...(19): siRNA sense strand
gaagagcugaugagaaugc

SEQ ID NO: 141885 - RNA, 19 nt, Homo sapiens
  misc_RNA (1)...(19): siRNA sense strand
caaacaggaucugccuaau

SEQ ID NO: 141886 - RNA, 19 nt, Homo sapiens
  misc_RNA (1)...(19): siRNA sense strand
aaacaggaucugccuaaug

SEQ ID NO: 141887 - RNA, 19 nt, Homo sapiens
  misc_RNA (1)...(19): siRNA sense strand
cugcugagaucacagacaa

SEQ ID NO: 141888 - RNA, 19 nt, Homo sapiens
  misc_RNA (1)...(19): siRNA sense strand
guauaagaacaucagcuuu

SEQ ID NO: 141889 - RNA, 19 nt, Homo sapiens
  misc_RNA (1)...(19): siRNA sense strand
ggaucugccuaaugcuaug

SEQ ID NO: 141890 - RNA, 19 nt, Homo sapiens
  misc_RNA (1)...(19): siRNA sense strand
agaccaccauccuauacaa

SEQ ID NO: 141891 - RNA, 19 nt, Homo sapiens
  misc_RNA (1)...(19): siRNA sense strand
ggcaauaucuuuggaaacc

SEQ ID NO: 141892 - RNA, 19 nt, Homo sapiens
  misc_RNA (1)...(19): siRNA sense strand
cccaaggguugauauuugu

SEQ ID NO: 141893 - RNA, 19 nt, Homo sapiens
  misc_RNA (1)...(19): siRNA sense strand
uuggaaaccuucucaagag

SEQ ID NO: 141894 - RNA, 19 nt, Homo sapiens
  misc_RNA (1)...(19): siRNA sense strand
aacaggaucugccuaaugc

SEQ ID NO: 141895 - RNA, 19 nt, Homo sapiens
  misc_RNA (1)...(19): siRNA sense strand
agacaguggaguauaagaa

SEQ ID NO: 141896 - RNA, 19 nt, Homo sapiens
  misc_RNA (1)...(19): siRNA sense strand
gaucgggagcgaguaaaug

SEQ ID NO: 141897 - RNA, 19 nt, Homo sapiens
  misc_RNA (1)...(19): siRNA sense strand
gcuaugaacgcugcugaga

SEQ ID NO: 141898 - RNA, 19 nt, Homo sapiens
  misc_RNA (1)...(19): siRNA sense strand
caggaucugccuaaugcua

SEQ ID NO: 141899 - RNA, 19 nt, Homo sapiens
  misc_RNA (1)...(19): siRNA sense strand
gggaugcuguacuccuugu

SEQ ID NO: 141900 - RNA, 19 nt, Homo sapiens
  misc_RNA (1)...(19): siRNA sense strand
gcuccgggaugcuguacuc

SEQ ID NO: 141901 - RNA, 19 nt, Homo sapiens
  misc_RNA (1)...(19): siRNA sense strand
auaagaacaucagcuuuac

SEQ ID NO: 141902 - RNA, 19 nt, Homo sapiens
  misc_RNA (1)...(19): siRNA sense strand
gacaagcugggccugcauu

SEQ ID NO: 141903 - RNA, 19 nt, Homo sapiens
  misc_RNA (1)...(19): siRNA sense strand
gguucaauguggagacagu

SEQ ID NO: 141904 - RNA, 19 nt, Homo sapiens
  misc_RNA (1)...(19): siRNA sense strand
ccgggaugcuguacuccuu

SEQ ID NO: 141905 - RNA, 19 nt, Homo sapiens
  misc_RNA (1)...(19): siRNA sense strand
gagacaguggaguauaaga

SEQ ID NO: 141906 - RNA, 19 nt, Homo sapiens
  misc_RNA (1)...(19): siRNA sense strand
acaguggaguauaagaaca

SEQ ID NO: 141907 - RNA, 19 nt, Homo sapiens
  misc_RNA (1)...(19): siRNA sense strand
gcuguacuccuugucuuug

SEQ ID NO: 141908 - RNA, 19 nt, Homo sapiens
  misc_RNA (1)...(19): siRNA sense strand
aaagaccaccauccuauac

SEQ ID NO: 141909 - RNA, 19 nt, Homo sapiens
  misc_RNA (1)...(19): siRNA sense strand
guggagacaguggaguaua

SEQ ID NO: 141910 - RNA, 19 nt, Homo sapiens
  misc_RNA (1)...(19): siRNA sense strand
uuuggaaaccuucucaaga

SEQ ID NO: 141911 - RNA, 19 nt, Homo sapiens
  misc_RNA (1)...(19): siRNA sense strand
agacaaccauucuguauaa

SEQ ID NO: 141912 - RNA, 19 nt, Homo sapiens
  misc_RNA (1)...(19): siRNA sense strand
ucagugaaaugacagauaa

SEQ ID NO: 141913 - RNA, 19 nt, Homo sapiens
  misc_RNA (1)...(19): siRNA sense strand
acaaggaacuggucuguau

SEQ ID NO: 141914 - RNA, 19 nt, Homo sapiens
  misc_RNA (1)...(19): siRNA sense strand
uagcaacgaucgugaaaga

SEQ ID NO: 141915 - RNA, 19 nt, Homo sapiens
  misc_RNA (1)...(19): siRNA sense strand
guagaugaauugagagaug

SEQ ID NO: 141916 - RNA, 19 nt, Homo sapiens
  misc_RNA (1)...(19): siRNA sense strand
caacgaucgugaaagaauu

SEQ ID NO: 141917 - RNA, 19 nt, Homo sapiens
  misc_RNA (1)...(19): siRNA sense strand
gaauuaggccucucuggaa

SEQ ID NO: 141918 - RNA, 19 nt, Homo sapiens
  misc_RNA (1)...(19): siRNA sense strand
gggcuucagucucuucgua

SEQ ID NO: 141919 - RNA, 19 nt, Homo sapiens
  misc_RNA (1)...(19): siRNA sense strand
gcaagacaaccauucugua

SEQ ID NO: 141920 - RNA, 19 nt, Homo sapiens
  misc_RNA (1)...(19): siRNA sense strand
gaaaugacagauaaacuag

SEQ ID NO: 141921 - RNA, 19 nt, Homo sapiens
  misc_RNA (1)...(19): siRNA sense strand
caagacaaccauucuguau

SEQ ID NO: 141922 - RNA, 19 nt, Homo sapiens
  misc_RNA (1)...(19): siRNA sense strand
gcaacgaucgugaaagaau

SEQ ID NO: 141923 - RNA, 19 nt, Homo sapiens
  misc_RNA (1)...(19): siRNA sense strand
ggagauagucaccaccauu

SEQ ID NO: 141924 - RNA, 19 nt, Homo sapiens
  misc_RNA (1)...(19): siRNA sense strand
cagaugagcugcagaaaau

SEQ ID NO: 141925 - RNA, 19 nt, Homo sapiens
  misc_RNA (1)...(19): siRNA sense strand
caaaugagcuuucaaaacg

SEQ ID NO: 141926 - RNA, 19 nt, Homo sapiens
  misc_RNA (1)...(19): siRNA sense strand
caaccauucuguauaaacu

SEQ ID NO: 141927 - RNA, 19 nt, Homo sapiens
  misc_RNA (1)...(19): siRNA sense strand
ccucuucucccgacuauuu

SEQ ID NO: 141928 - RNA, 19 nt, Homo sapiens
  misc_RNA (1)...(19): siRNA sense strand
ucugguagaugaauugaga

SEQ ID NO: 141929 - RNA, 19 nt, Homo sapiens
  misc_RNA (1)...(19): siRNA sense strand
ggaaacaguagaauauaag

SEQ ID NO: 141930 - RNA, 19 nt, Homo sapiens
  misc_RNA (1)...(19): siRNA sense strand
ggauguugguggucaagau

SEQ ID NO: 141931 - RNA, 19 nt, Homo sapiens
  misc_RNA (1)...(19): siRNA sense strand
gauguugguggucaagaua

SEQ ID NO: 141932 - RNA, 19 nt, Homo sapiens
  misc_RNA (1)...(19): siRNA sense strand
gauagcaacgaucgugaaa

SEQ ID NO: 141933 - RNA, 19 nt, Homo sapiens
  misc_RNA (1)...(19): siRNA sense strand
gagauagucaccaccauuc

SEQ ID NO: 141934 - RNA, 19 nt, Homo sapiens
  misc_RNA (1)...(19): siRNA sense strand
gguggucaagauagaauua

SEQ ID NO: 141935 - RNA, 19 nt, Homo sapiens
  misc_RNA (1)...(19): siRNA sense strand
gcuauggccaucagugaaa

SEQ ID NO: 141936 - RNA, 19 nt, Homo sapiens
  misc_RNA (1)...(19): siRNA sense strand
ggccaucagugaaaugaca

SEQ ID NO: 141937 - RNA, 19 nt, Homo sapiens
  misc_RNA (1)...(19): siRNA sense strand
gacaaccauucuguauaaa

SEQ ID NO: 141938 - RNA, 19 nt, Homo sapiens
  misc_RNA (1)...(19): siRNA sense strand
gaaagaauucaggaaguag

SEQ ID NO: 141939 - RNA, 19 nt, Homo sapiens
  misc_RNA (1)...(19): siRNA sense strand
caaaugcuauggccaucag

SEQ ID NO: 141940 - RNA, 19 nt, Homo sapiens
  misc_RNA (1)...(19): siRNA sense strand
cagauaaacuagggcuuca

SEQ ID NO: 141941 - RNA, 19 nt, Homo sapiens
  misc_RNA (1)...(19): siRNA sense strand
ggaugcugcuggcaagaca

SEQ ID NO: 141942 - RNA, 19 nt, Homo sapiens
  misc_RNA (1)...(19): siRNA sense strand
ugucaaaugagcuuucaaa

SEQ ID NO: 141943 - RNA, 19 nt, Homo sapiens
  misc_RNA (1)...(19): siRNA sense strand
guggaaacaguagaauaua

SEQ ID NO: 141944 - RNA, 19 nt, Homo sapiens
  misc_RNA (1)...(19): siRNA sense strand
aaaugcuucugguagauga

SEQ ID NO: 141945 - RNA, 19 nt, Homo sapiens
  misc_RNA (1)...(19): siRNA sense strand
gaaaaugcuucugguagau

SEQ ID NO: 141946 - RNA, 19 nt, Homo sapiens
  misc_RNA (1)...(19): siRNA sense strand
aagacaaccauucuguaua

SEQ ID NO: 141947 - RNA, 19 nt, Homo sapiens
  misc_RNA (1)...(19): siRNA sense strand
gauaaacuagggcuucagu

SEQ ID NO: 141948 - RNA, 19 nt, Homo sapiens
  misc_RNA (1)...(19): siRNA sense strand
uguggaaacaguagaauau

SEQ ID NO: 141949 - RNA, 19 nt, Homo sapiens
  misc_RNA (1)...(19): siRNA sense strand
ggaacuggucuguaugaag

SEQ ID NO: 141950 - RNA, 19 nt, Homo sapiens
  misc_RNA (1)...(19): siRNA sense strand
gcugucaaaugagcuuuca

SEQ ID NO: 141951 - RNA, 19 nt, Homo sapiens
  misc_RNA (1)...(19): siRNA sense strand
ggcaagacaaccauucugu

SEQ ID NO: 141952 - RNA, 19 nt, Homo sapiens
  misc_RNA (1)...(19): siRNA sense strand
uaaacuagggcuucagucu

SEQ ID NO: 141953 - RNA, 19 nt, Homo sapiens
  misc_RNA (1)...(19): siRNA sense strand
aagaagcagaugcgcauuu

SEQ ID NO: 141954 - RNA, 19 nt, Homo sapiens
  misc_RNA (1)...(19): siRNA sense strand
uaauguggaaacaguagaa

SEQ ID NO: 141955 - RNA, 19 nt, Homo sapiens
  misc_RNA (1)...(19): siRNA sense strand
gcauuuugaugguuggauu

SEQ ID NO: 141956 - RNA, 19 nt, Homo sapiens
  misc_RNA (1)...(19): siRNA sense strand
caccaccauuccuaccauu

SEQ ID NO: 141957 - RNA, 19 nt, Homo sapiens
  misc_RNA (1)...(19): siRNA sense strand
ugugguagauagcaacgau

SEQ ID NO: 141958 - RNA, 19 nt, Homo sapiens
  misc_RNA (1)...(19): siRNA sense strand
gauagaauuaggccucucu

SEQ ID NO: 141959 - RNA, 19 nt, Homo sapiens
  misc_RNA (1)...(19): siRNA sense strand
agaagcagaugcgcauuuu

SEQ ID NO: 141960 - RNA, 19 nt, Homo sapiens
  misc_RNA (1)...(19): siRNA sense strand
aaggaacuggucuguauga

SEQ ID NO: 141961 - RNA, 19 nt, Homo sapiens
  misc_RNA (1)...(19): siRNA sense strand
caaggaacuggucuguaug

SEQ ID NO: 141962 - RNA, 19 nt, Homo sapiens
  misc_RNA (1)...(19): siRNA sense strand
accauucuguauaaacuga

SEQ ID NO: 141963 - RNA, 19 nt, Homo sapiens
  misc_RNA (1)...(19): siRNA sense strand
uugcaaacaaacaggauuu

SEQ ID NO: 141964 - RNA, 19 nt, Homo sapiens
  misc_RNA (1)...(19): siRNA sense strand
ucaccaccauuccuaccau

SEQ ID NO: 141965 - RNA, 19 nt, Homo sapiens
  misc_RNA (1)...(19): siRNA sense strand
gggagauagucaccaccau

SEQ ID NO: 141966 - RNA, 19 nt, Homo sapiens
  misc_RNA (1)...(19): siRNA sense strand
aacuagggcuucagucucu

SEQ ID NO: 141967 - RNA, 19 nt, Homo sapiens
  misc_RNA (1)...(19): siRNA sense strand
uucaggaaguagcagauga

SEQ ID NO: 141968 - RNA, 19 nt, Homo sapiens
  misc_RNA (1)...(19): siRNA sense strand
gggaaccacuugacugaga

SEQ ID NO: 141969 - RNA, 19 nt, Homo sapiens
  misc_RNA (1)...(19): siRNA sense strand
ggcaucaccuuccaagugu

SEQ ID NO: 141970 - RNA, 19 nt, Homo sapiens
  misc_RNA (1)...(19): siRNA sense strand
gagcgccucuaugagauga

SEQ ID NO: 141971 - RNA, 19 nt, Homo sapiens
  misc_RNA (1)...(19): siRNA sense strand
gggcuggacucugcuggaa

SEQ ID NO: 141972 - RNA, 19 nt, Homo sapiens
  misc_RNA (1)...(19): siRNA sense strand
ggaaccacuugacugagau

SEQ ID NO: 141973 - RNA, 19 nt, Homo sapiens
  misc_RNA (1)...(19): siRNA sense strand
gagaagcugcgaccacugu

SEQ ID NO: 141974 - RNA, 19 nt, Homo sapiens
  misc_RNA (1)...(19): siRNA sense strand
gcuggacucugcuggaaag

SEQ ID NO: 141975 - RNA, 19 nt, Homo sapiens
  misc_RNA (1)...(19): siRNA sense strand
caaggaguuuguccagagu

SEQ ID NO: 141976 - RNA, 19 nt, Homo sapiens
  misc_RNA (1)...(19): siRNA sense strand
gccuugagcgccucuauga

SEQ ID NO: 141977 - RNA, 19 nt, Homo sapiens
  misc_RNA (1)...(19): siRNA sense strand
cugcugagguggagaagag

SEQ ID NO: 141978 - RNA, 19 nt, Homo sapiens
  misc_RNA (1)...(19): siRNA sense strand
ccgccacucucacucaugu

SEQ ID NO: 141979 - RNA, 19 nt, Homo sapiens
  misc_RNA (1)...(19): siRNA sense strand
uggcaucaccuuccaagug

SEQ ID NO: 141980 - RNA, 19 nt, Homo sapiens
  misc_RNA (1)...(19): siRNA sense strand
cuugagcgccucuaugaga

SEQ ID NO: 141981 - RNA, 19 nt, Homo sapiens
  misc_RNA (1)...(19): siRNA sense strand
gccucaaguucaaggaguu

SEQ ID NO: 141982 - RNA, 19 nt, Homo sapiens
  misc_RNA (1)...(19): siRNA sense strand
aagccaagguggaguugca

SEQ ID NO: 141983 - RNA, 19 nt, Homo sapiens
  misc_RNA (1)...(19): siRNA sense strand
gaaccacuugacugagaug

SEQ ID NO: 141984 - RNA, 19 nt, Homo sapiens
  misc_RNA (1)...(19): siRNA sense strand
uggaaagaccucccuccuu

SEQ ID NO: 141985 - RNA, 19 nt, Homo sapiens
  misc_RNA (1)...(19): siRNA sense strand
gcuggcaguccgagagcua

SEQ ID NO: 141986 - RNA, 19 nt, Homo sapiens
  misc_RNA (1)...(19): siRNA sense strand
ggaagccaagguggaguug

SEQ ID NO: 141987 - RNA, 19 nt, Homo sapiens
  misc_RNA (1)...(19): siRNA sense strand
ccaagaaucugcugaugaa

SEQ ID NO: 141988 - RNA, 19 nt, Homo sapiens
  misc_RNA (1)...(19): siRNA sense strand
guagaaacaguggaauaua

SEQ ID NO: 141989 - RNA, 19 nt, Homo sapiens
  misc_RNA (1)...(19): siRNA sense strand
ccacaauccuguacaaacu

SEQ ID NO: 141990 - RNA, 19 nt, Homo sapiens
  misc_RNA (1)...(19): siRNA sense strand
ugagcgagcugacugacaa

SEQ ID NO: 141991 - RNA, 19 nt, Homo sapiens
  misc_RNA (1)...(19): siRNA sense strand
gaaacaguggaauauaaga

SEQ ID NO: 141992 - RNA, 19 nt, Homo sapiens
  misc_RNA (1)...(19): siRNA sense strand
aaccauaggcuucaaugua

SEQ ID NO: 141993 - RNA, 19 nt, Homo sapiens
  misc_RNA (1)...(19): siRNA sense strand
cugaugaacuccagaagau

SEQ ID NO: 141994 - RNA, 19 nt, Homo sapiens
  misc_RNA (1)...(19): siRNA sense strand
gcaagaccacaauccugua

SEQ ID NO: 141995 - RNA, 19 nt, Homo sapiens
  misc_RNA (1)...(19): siRNA sense strand
acaauccuguacaaacuga

SEQ ID NO: 141996 - RNA, 19 nt, Homo sapiens
  misc_RNA (1)...(19): siRNA sense strand
agaccacaauccuguacaa

SEQ ID NO: 141997 - RNA, 19 nt, Homo sapiens
  misc_RNA (1)...(19): siRNA sense strand
gcugguauuugccaacaag

SEQ ID NO: 141998 - RNA, 19 nt, Homo sapiens
  misc_RNA (1)...(19): siRNA sense strand
gggagcggguccaagaauc

SEQ ID NO: 141999 - RNA, 19 nt, Homo sapiens
  misc_RNA (1)...(19): siRNA sense strand
accauaggcuucaauguag

SEQ ID NO: 142000 - RNA, 19 nt, Homo sapiens
  misc_RNA (1)...(19): siRNA sense strand
gcugaugaacuccagaaga

SEQ ID NO: 142001 - RNA, 19 nt, Homo sapiens
  misc_RNA (1)...(19): siRNA sense strand
gacaagauucggccucugu

SEQ ID NO: 142002 - RNA, 19 nt, Homo sapiens
  misc_RNA (1)...(19): siRNA sense strand
ccauaggcuucaauguaga

SEQ ID NO: 142003 - RNA, 19 nt, Homo sapiens
  misc_RNA (1)...(19): siRNA sense strand
caauguagaaacaguggaa

SEQ ID NO: 142004 - RNA, 19 nt, Homo sapiens
  misc_RNA (1)...(19): siRNA sense strand
gaugcggauucucaugguu

SEQ ID NO: 142005 - RNA, 19 nt, Homo sapiens
  misc_RNA (1)...(19): siRNA sense strand
aagcagaugcggauucuca

SEQ ID NO: 142006 - RNA, 19 nt, Homo sapiens
  misc_RNA (1)...(19): siRNA sense strand
acucagggccucaucuuug

SEQ ID NO: 142007 - RNA, 19 nt, Homo sapiens
  misc_RNA (1)...(19): siRNA sense strand
gcagaugcggauucucaug

SEQ ID NO: 142008 - RNA, 19 nt, Homo sapiens
  misc_RNA (1)...(19): siRNA sense strand
agaaucugcugaugaacuc

SEQ ID NO: 142009 - RNA, 19 nt, Homo sapiens
  misc_RNA (1)...(19): siRNA sense strand
ucucaugguuggcuuggau

SEQ ID NO: 142010 - RNA, 19 nt, Homo sapiens
  misc_RNA (1)...(19): siRNA sense strand
aggcuucaauguagaaaca

SEQ ID NO: 142011 - RNA, 19 nt, Homo sapiens
  misc_RNA (1)...(19): siRNA sense strand
gaagaagcagaugcggauu

SEQ ID NO: 142012 - RNA, 19 nt, Homo sapiens
  misc_RNA (1)...(19): siRNA sense strand
ggaauauaagaacaucugu

SEQ ID NO: 142013 - RNA, 19 nt, Homo sapiens
  misc_RNA (1)...(19): siRNA sense strand
uguagaaacaguggaauau

SEQ ID NO: 142014 - RNA, 19 nt, Homo sapiens
  misc_RNA (1)...(19): siRNA sense strand
gaccacaauccuguacaaa

SEQ ID NO: 142015 - RNA, 19 nt, Homo sapiens
  misc_RNA (1)...(19): siRNA sense strand
ucuuugugguggacaguaa

SEQ ID NO: 142016 - RNA, 19 nt, Homo sapiens
  misc_RNA (1)...(19): siRNA sense strand
acaguggaauauaagaaca

SEQ ID NO: 142017 - RNA, 19 nt, Homo sapiens
  misc_RNA (1)...(19): siRNA sense strand
guccaagaaucugcugaug

SEQ ID NO: 142018 - RNA, 19 nt, Homo sapiens
  misc_RNA (1)...(19): siRNA sense strand
gggaggccaggacaagauu

SEQ ID NO: 142019 - RNA, 19 nt, Homo sapiens
  misc_RNA (1)...(19): siRNA sense strand
gaacacucagggccucauc

SEQ ID NO: 142020 - RNA, 19 nt, Homo sapiens
  misc_RNA (1)...(19): siRNA sense strand
cggcacuacuuccagaaca

SEQ ID NO: 142021 - RNA, 19 nt, Homo sapiens
  misc_RNA (1)...(19): siRNA sense strand
agaaacaguggaauauaag

SEQ ID NO: 142022 - RNA, 19 nt, Homo sapiens
  misc_RNA (1)...(19): siRNA sense strand
uccaagaaucugcugauga

SEQ ID NO: 142023 - RNA, 19 nt, Homo sapiens
  misc_RNA (1)...(19): siRNA sense strand
ggagcggguccaagaaucu

SEQ ID NO: 142024 - RNA, 19 nt, Homo sapiens
  misc_RNA (1)...(19): siRNA sense strand
caaccauaggcuucaaugu

SEQ ID NO: 142025 - RNA, 19 nt, Homo sapiens
  misc_RNA (1)...(19): siRNA sense strand
cucagggccucaucuuugu

SEQ ID NO: 142026 - RNA, 19 nt, Homo sapiens
  misc_RNA (1)...(19): siRNA sense strand
gggagauugucaccaccau

SEQ ID NO: 142027 - RNA, 19 nt, Homo sapiens
  misc_RNA (1)...(19): siRNA sense strand
gcuucaauguagaaacagu

SEQ ID NO: 142028 - RNA, 19 nt, Homo sapiens
  misc_RNA (1)...(19): siRNA sense strand
cauaggcuucaauguagaa

SEQ ID NO: 142029 - RNA, 19 nt, Homo sapiens
  misc_RNA (1)...(19): siRNA sense strand
caacaauccuguacaaguu

SEQ ID NO: 142030 - RNA, 19 nt, Homo sapiens
  misc_RNA (1)...(19): siRNA sense strand
ucacaugguuaaccucuaa

SEQ ID NO: 142031 - RNA, 19 nt, Homo sapiens
  misc_RNA (1)...(19): siRNA sense strand
gaaaugcggauccucaugu

SEQ ID NO: 142032 - RNA, 19 nt, Homo sapiens
  misc_RNA (1)...(19): siRNA sense strand
agacaacaauccuguacaa

SEQ ID NO: 142033 - RNA, 19 nt, Homo sapiens
  misc_RNA (1)...(19): siRNA sense strand
gagcugcaccgcauuauca

SEQ ID NO: 142034 - RNA, 19 nt, Homo sapiens
  misc_RNA (1)...(19): siRNA sense strand
gcaagacaacaauccugua

SEQ ID NO: 142035 - RNA, 19 nt, Homo sapiens
  misc_RNA (1)...(19): siRNA sense strand
ggagaugagggacgccaua

SEQ ID NO: 142036 - RNA, 19 nt, Homo sapiens
  misc_RNA (1)...(19): siRNA sense strand
gaugagggacgccauaauc

SEQ ID NO: 142037 - RNA, 19 nt, Homo sapiens
  misc_RNA (1)...(19): siRNA sense strand
ggaaggugcuauccaaaau

SEQ ID NO: 142038 - RNA, 19 nt, Homo sapiens
  misc_RNA (1)...(19): siRNA sense strand
ccucuaacuacaaaucuua

SEQ ID NO: 142039 - RNA, 19 nt, Homo sapiens
  misc_RNA (1)...(19): siRNA sense strand
uggagacggugacuuacaa

SEQ ID NO: 142040 - RNA, 19 nt, Homo sapiens
  misc_RNA (1)...(19): siRNA sense strand
gagaugagggacgccauaa

SEQ ID NO: 142041 - RNA, 19 nt, Homo sapiens
  misc_RNA (1)...(19): siRNA sense strand
ggaaaugcggauccucaug

SEQ ID NO: 142042 - RNA, 19 nt, Homo sapiens
  misc_RNA (1)...(19): siRNA sense strand
ggacaggaacugguaugug

SEQ ID NO: 142043 - RNA, 19 nt, Homo sapiens
  misc_RNA (1)...(19): siRNA sense strand
caggagcugcaccgcauua

SEQ ID NO: 142044 - RNA, 19 nt, Homo sapiens
  misc_RNA (1)...(19): siRNA sense strand
aaaugcggauccucauguu

SEQ ID NO: 142045 - RNA, 19 nt, Homo sapiens
  misc_RNA (1)...(19): siRNA sense strand
ugaccaccauucccacugu

SEQ ID NO: 142046 - RNA, 19 nt, Homo sapiens
  misc_RNA (1)...(19): siRNA sense strand
cccacgagauccaggagaa

SEQ ID NO: 142047 - RNA, 19 nt, Homo sapiens
  misc_RNA (1)...(19): siRNA sense strand
acaacaauccuguacaagu

SEQ ID NO: 142048 - RNA, 19 nt, Homo sapiens
  misc_RNA (1)...(19): siRNA sense strand
aaugucaaguucaacguau

SEQ ID NO: 142049 - RNA, 19 nt, Homo sapiens
  misc_RNA (1)...(19): siRNA sense strand
ggagacggugacuuacaaa

SEQ ID NO: 142050 - RNA, 19 nt, Homo sapiens
  misc_RNA (1)...(19): siRNA sense strand
caagacaacaauccuguac

SEQ ID NO: 142051 - RNA, 19 nt, Homo sapiens
  misc_RNA (1)...(19): siRNA sense strand
acaauccuguacaaguuga

SEQ ID NO: 142052 - RNA, 19 nt, Homo sapiens
  misc_RNA (1)...(19): siRNA sense strand
acguggagacggugacuua

SEQ ID NO: 142053 - RNA, 19 nt, Homo sapiens
  misc_RNA (1)...(19): siRNA sense strand
uaaccucuaacuacaaauc

SEQ ID NO: 142054 - RNA, 19 nt, Homo sapiens
  misc_RNA (1)...(19): siRNA sense strand
aaaugucaaguucaacgua

SEQ ID NO: 142055 - RNA, 19 nt, Homo sapiens
  misc_RNA (1)...(19): siRNA sense strand
gggcucacaugguuaaccu

SEQ ID NO: 142056 - RNA, 19 nt, Homo sapiens
  misc_RNA (1)...(19): siRNA sense strand
ucaaugaccgggagaugag

SEQ ID NO: 142057 - RNA, 19 nt, Homo sapiens
  misc_RNA (1)...(19): siRNA sense strand
cccaaggucucaucuucgu

SEQ ID NO: 142058 - RNA, 19 nt, Homo sapiens
  misc_RNA (1)...(19): siRNA sense strand
ccugcccgaugccaugaaa

SEQ ID NO: 142059 - RNA, 19 nt, Homo sapiens
  misc_RNA (1)...(19): siRNA sense strand
ggagcugcaccgcauuauc

SEQ ID NO: 142060 - RNA, 19 nt, Homo sapiens
  misc_RNA (1)...(19): siRNA sense strand
ggacaaugcuggaaagaca

SEQ ID NO: 142061 - RNA, 19 nt, Homo sapiens
  misc_RNA (1)...(19): siRNA sense strand
ugaagaagaugaagcagaa

SEQ ID NO: 142062 - RNA, 19 nt, Homo sapiens
  misc_RNA (1)...(19): siRNA sense strand
gagcaacccuccucaucuu

SEQ ID NO: 142063 - RNA, 19 nt, Homo sapiens
  misc_RNA (1)...(19): siRNA sense strand
caaccauccugaagaaguu

SEQ ID NO: 142064 - RNA, 19 nt, Homo sapiens
  misc_RNA (1)...(19): siRNA sense strand
agacaaccauccugaagaa

SEQ ID NO: 142065 - RNA, 19 nt, Homo sapiens
  misc_RNA (1)...(19): siRNA sense strand
gaaagacaaccauccugaa

SEQ ID NO: 142066 - RNA, 19 nt, Homo sapiens
  misc_RNA (1)...(19): siRNA sense strand
cuggagcacuguccucuaa

SEQ ID NO: 142067 - RNA, 19 nt, Homo sapiens
  misc_RNA (1)...(19): siRNA sense strand
ggauguggguggccagaag

SEQ ID NO: 142068 - RNA, 19 nt, Homo sapiens
  misc_RNA (1)...(19): siRNA sense strand
ucgacuggcuccuggauga

SEQ ID NO: 142069 - RNA, 19 nt, Homo sapiens
  misc_RNA (1)...(19): siRNA sense strand
cuccucaucuuugcuaaua

SEQ ID NO: 142070 - RNA, 19 nt, Homo sapiens
  misc_RNA (1)...(19): siRNA sense strand
uggcggaacuacuuugaga

SEQ ID NO: 142071 - RNA, 19 nt, Homo sapiens
  misc_RNA (1)...(19): siRNA sense strand
acgcugggcuucaacauca

SEQ ID NO: 142072 - RNA, 19 nt, Homo sapiens
  misc_RNA (1)...(19): siRNA sense strand
gggaggacaucgacaccau

SEQ ID NO: 142073 - RNA, 19 nt, Homo sapiens
  misc_RNA (1)...(19): siRNA sense strand
gcaacccuccucaucuuug

SEQ ID NO: 142074 - RNA, 19 nt, Homo sapiens
  misc_RNA (1)...(19): siRNA sense strand
agaagucccugcgguccua

SEQ ID NO: 142075 - RNA, 19 nt, Homo sapiens
  misc_RNA (1)...(19): siRNA sense strand
gacauuuccagccgcauuu

SEQ ID NO: 142076 - RNA, 19 nt, Homo sapiens
  misc_RNA (1)...(19): siRNA sense strand
ccucaucuuugcuaauaag

SEQ ID NO: 142077 - RNA, 19 nt, Homo sapiens
  misc_RNA (1)...(19): siRNA sense strand
gaagaagaugaagcagaaa

SEQ ID NO: 142078 - RNA, 19 nt, Homo sapiens
  misc_RNA (1)...(19): siRNA sense strand
gaagaugaagcagaaagag

SEQ ID NO: 142079 - RNA, 19 nt, Homo sapiens
  misc_RNA (1)...(19): siRNA sense strand
ggagcacuguccucuaacg

SEQ ID NO: 142080 - RNA, 19 nt, Homo sapiens
  misc_RNA (1)...(19): siRNA sense strand
ugacauuuccagccgcauu

SEQ ID NO: 142081 - RNA, 19 nt, Homo sapiens
  misc_RNA (1)...(19): siRNA sense strand
aaagacaaccauccugaag

SEQ ID NO: 142082 - RNA, 19 nt, Homo sapiens
  misc_RNA (1)...(19): siRNA sense strand
agaagaugaagcagaaaga

SEQ ID NO: 142083 - RNA, 19 nt, Homo sapiens
  misc_RNA (1)...(19): siRNA sense strand
caacccuccucaucuuugc

SEQ ID NO: 142084 - RNA, 19 nt, Homo sapiens
  misc_RNA (1)...(19): siRNA sense strand
gcuccuggaugacauuucc

SEQ ID NO: 142085 - RNA, 19 nt, Homo sapiens
  misc_RNA (1)...(19): siRNA sense strand
cuacuggcggaacuacuuu

SEQ ID NO: 142086 - RNA, 19 nt, Homo sapiens
  misc_RNA (1)...(19): siRNA sense strand
aagacaaccauccugaaga

SEQ ID NO: 142087 - RNA, 19 nt, Homo sapiens
  misc_RNA (1)...(19): siRNA sense strand
gacaaugcuggaaagacaa

SEQ ID NO: 142088 - RNA, 19 nt, Homo sapiens
  misc_RNA (1)...(19): siRNA sense strand
gaggacaucgacaccaucu

SEQ ID NO: 142089 - RNA, 19 nt, Homo sapiens
  misc_RNA (1)...(19): siRNA sense strand
gaucagaugucuaacgaua

SEQ ID NO: 142090 - RNA, 19 nt, Homo sapiens
  misc_RNA (1)...(19): siRNA sense strand
ucaaggagaucguuuauuu

SEQ ID NO: 142091 - RNA, 19 nt, Homo sapiens
  misc_RNA (1)...(19): siRNA sense strand
cgaaugagguguggcagua

SEQ ID NO: 142092 - RNA, 19 nt, Homo sapiens
  misc_RNA (1)...(19): siRNA sense strand
cuacaacaaugaagaauuc

SEQ ID NO: 142093 - RNA, 19 nt, Homo sapiens
  misc_RNA (1)...(19): siRNA sense strand
ggucagcagucuuccauga

SEQ ID NO: 142094 - RNA, 19 nt, Homo sapiens
  misc_RNA (1)...(19): siRNA sense strand
gaauggacuuggcucugua

SEQ ID NO: 142095 - RNA, 19 nt, Homo sapiens
  misc_RNA (1)...(19): siRNA sense strand
gaagaauucccugaucuaa

SEQ ID NO: 142096 - RNA, 19 nt, Homo sapiens
  misc_RNA (1)...(19): siRNA sense strand
ggacuuggcucuguaaagg

SEQ ID NO: 142097 - RNA, 19 nt, Homo sapiens
  misc_RNA (1)...(19): siRNA sense strand
gcagcacacucuaugauca

SEQ ID NO: 142098 - RNA, 19 nt, Homo sapiens
  misc_RNA (1)...(19): siRNA sense strand
ggaauggacuuggcucugu

SEQ ID NO: 142099 - RNA, 19 nt, Homo sapiens
  misc_RNA (1)...(19): siRNA sense strand
ccacugauggcuccuauaa

SEQ ID NO: 142100 - RNA, 19 nt, Homo sapiens
  misc_RNA (1)...(19): siRNA sense strand
gugagcagcuuuccacuuc

SEQ ID NO: 142101 - RNA, 19 nt, Homo sapiens
  misc_RNA (1)...(19): siRNA sense strand
guagugcccuggcucgaaa

SEQ ID NO: 142102 - RNA, 19 nt, Homo sapiens
  misc_RNA (1)...(19): siRNA sense strand
gaacugaaacauuugaucu

SEQ ID NO: 142103 - RNA, 19 nt, Homo sapiens
  misc_RNA (1)...(19): siRNA sense strand
ggacccaguuucugugaau

SEQ ID NO: 142104 - RNA, 19 nt, Homo sapiens
  misc_RNA (1)...(19): siRNA sense strand
gcacccagaugauguggau

SEQ ID NO: 142105 - RNA, 19 nt, Homo sapiens
  misc_RNA (1)...(19): siRNA sense strand
ggaggcagcagauggcuuu

SEQ ID NO: 142106 - RNA, 19 nt, Homo sapiens
  misc_RNA (1)...(19): siRNA sense strand
gaagggaacaguaaauuuu

SEQ ID NO: 142107 - RNA, 19 nt, Homo sapiens
  misc_RNA (1)...(19): siRNA sense strand
gagaagggaacaguaaauu

SEQ ID NO: 142108 - RNA, 19 nt, Homo sapiens
  misc_RNA (1)...(19): siRNA sense strand
ugaauaggcugagcuuugu

SEQ ID NO: 142109 - RNA, 19 nt, Homo sapiens
  misc_RNA (1)...(19): siRNA sense strand
cagacaagcuaaccaucuu

SEQ ID NO: 142110 - RNA, 19 nt, Homo sapiens
  misc_RNA (1)...(19): siRNA sense strand
gccacagucugaaugguuu

SEQ ID NO: 142111 - RNA, 19 nt, Homo sapiens
  misc_RNA (1)...(19): siRNA sense strand
ugaaacauuugaucuugga

SEQ ID NO: 142112 - RNA, 19 nt, Homo sapiens
  misc_RNA (1)...(19): siRNA sense strand
gugaauaggcugagcuuug

SEQ ID NO: 142113 - RNA, 19 nt, Homo sapiens
  misc_RNA (1)...(19): siRNA sense strand
cagaugauguggauaaacu

SEQ ID NO: 142114 - RNA, 19 nt, Homo sapiens
  misc_RNA (1)...(19): siRNA sense strand
caacagcuacaacaaugaa

SEQ ID NO: 142115 - RNA, 19 nt, Homo sapiens
  misc_RNA (1)...(19): siRNA sense strand
gagcaacagcuacaacaau

SEQ ID NO: 142116 - RNA, 19 nt, Homo sapiens
  misc_RNA (1)...(19): siRNA sense strand
gaacagaugcaggaaugga

SEQ ID NO: 142117 - RNA, 19 nt, Homo sapiens
  misc_RNA (1)...(19): siRNA sense strand
ggagaagggaacaguaaau

SEQ ID NO: 142118 - RNA, 19 nt, Homo sapiens
  misc_RNA (1)...(19): siRNA sense strand
agaauucccugaucuaacu

SEQ ID NO: 142119 - RNA, 19 nt, Homo sapiens
  misc_RNA (1)...(19): siRNA sense strand
gagaucagagcaacagcua

SEQ ID NO: 142120 - RNA, 19 nt, Homo sapiens
  misc_RNA (1)...(19): siRNA sense strand
gauaugguacccaccugua

SEQ ID NO: 142121 - RNA, 19 nt, Homo sapiens
  misc_RNA (1)...(19): siRNA sense strand
gaucagagcaacagcuaca

SEQ ID NO: 142122 - RNA, 19 nt, Homo sapiens
  misc_RNA (1)...(19): siRNA sense strand
ucagaugucuaacgauaag

SEQ ID NO: 142123 - RNA, 19 nt, Homo sapiens
  misc_RNA (1)...(19): siRNA sense strand
ucagcagucuuccaugaga

SEQ ID NO: 142124 - RNA, 19 nt, Homo sapiens
  misc_RNA (1)...(19): siRNA sense strand
agaagggaacaguaaauuu

SEQ ID NO: 142125 - RNA, 19 nt, Homo sapiens
  misc_RNA (1)...(19): siRNA sense strand
aggaacagaugcaggaaug

SEQ ID NO: 142126 - RNA, 19 nt, Homo sapiens
  misc_RNA (1)...(19): siRNA sense strand
uguaugggcucaaggagau

SEQ ID NO: 142127 - RNA, 19 nt, Homo sapiens
  misc_RNA (1)...(19): siRNA sense strand
gcaacagcuacaacaauga

SEQ ID NO: 142128 - RNA, 19 nt, Homo sapiens
  misc_RNA (1)...(19): siRNA sense strand
caaggagaucguuuauuug

SEQ ID NO: 142129 - RNA, 19 nt, Homo sapiens
  misc_RNA (1)...(19): siRNA sense strand
ugaagaauucccugaucua

SEQ ID NO: 142130 - RNA, 19 nt, Homo sapiens
  misc_RNA (1)...(19): siRNA sense strand
gcuacaacaaugaagaauu

SEQ ID NO: 142131 - RNA, 19 nt, Homo sapiens
  misc_RNA (1)...(19): siRNA sense strand
guguuucccucccagauga

SEQ ID NO: 142132 - RNA, 19 nt, Homo sapiens
  misc_RNA (1)...(19): siRNA sense strand
gcuccuauaagccgucuuu

SEQ ID NO: 142133 - RNA, 19 nt, Homo sapiens
  misc_RNA (1)...(19): siRNA sense strand
gacccaguuucugugaaua

SEQ ID NO: 142134 - RNA, 19 nt, Homo sapiens
  misc_RNA (1)...(19): siRNA sense strand
gcucaaggagaucguuuau

SEQ ID NO: 142135 - RNA, 19 nt, Homo sapiens
  misc_RNA (1)...(19): siRNA sense strand
acugaaacauuugaucuug

SEQ ID NO: 142136 - RNA, 19 nt, Homo sapiens
  misc_RNA (1)...(19): siRNA sense strand
ucccugaucuaacuauguu

SEQ ID NO: 142137 - RNA, 19 nt, Homo sapiens
  misc_RNA (1)...(19): siRNA sense strand
gauggagaagggaacagua

SEQ ID NO: 142138 - RNA, 19 nt, Homo sapiens
  misc_RNA (1)...(19): siRNA sense strand
gaauguguaugggcucaag

SEQ ID NO: 142139 - RNA, 19 nt, Homo sapiens
  misc_RNA (1)...(19): siRNA sense strand
gcauggcaguuucucacau

SEQ ID NO: 142140 - RNA, 19 nt, Homo sapiens
  misc_RNA (1)...(19): siRNA sense strand
agcaacagcuacaacaaug

SEQ ID NO: 142141 - RNA, 19 nt, Homo sapiens
  misc_RNA (1)...(19): siRNA sense strand
aaaggaaggucagcagucu

SEQ ID NO: 142142 - RNA, 19 nt, Homo sapiens
  misc_RNA (1)...(19): siRNA sense strand
cgucuuuccucacugauca

SEQ ID NO: 142143 - RNA, 19 nt, Homo sapiens
  misc_RNA (1)...(19): siRNA sense strand
ugaaccagccacagucuga

SEQ ID NO: 142144 - RNA, 19 nt, Homo sapiens
  misc_RNA (1)...(19): siRNA sense strand
agacaagcuaaccaucuua

SEQ ID NO: 142145 - RNA, 19 nt, Homo sapiens
  misc_RNA (1)...(19): siRNA sense strand
ucguuuauuugccgaauga

SEQ ID NO: 142146 - RNA, 19 nt, Homo sapiens
  misc_RNA (1)...(19): siRNA sense strand
cagcagucuuccaugagaa

SEQ ID NO: 142147 - RNA, 19 nt, Homo sapiens
  misc_RNA (1)...(19): siRNA sense strand
gaucaggugcacccagaug

SEQ ID NO: 142148 - RNA, 19 nt, Homo sapiens
  misc_RNA (1)...(19): siRNA sense strand
caggcagggugguguaugu

SEQ ID NO: 142149 - RNA, 19 nt, Homo sapiens
  misc_RNA (1)...(19): siRNA sense strand
agaacugucagauauggua

SEQ ID NO: 142150 - RNA, 19 nt, Homo sapiens
  misc_RNA (1)...(19): siRNA sense strand
gagcagcuuuccacuucag

SEQ ID NO: 142151 - RNA, 19 nt, Homo sapiens
  misc_RNA (1)...(19): siRNA sense strand
ggcaguuucucacaugaag

SEQ ID NO: 142152 - RNA, 19 nt, Homo sapiens
  misc_RNA (1)...(19): siRNA sense strand
aaugaagaauucccugauc

SEQ ID NO: 142153 - RNA, 19 nt, Homo sapiens
  misc_RNA (1)...(19): siRNA sense strand
ggaacugaaacauuugauc

SEQ ID NO: 142154 - RNA, 19 nt, Homo sapiens
  misc_RNA (1)...(19): siRNA sense strand
gaucguuuauuugccgaau

SEQ ID NO: 142155 - RNA, 19 nt, Homo sapiens
  misc_RNA (1)...(19): siRNA sense strand
gaugauguggauaaacuuc

SEQ ID NO: 142156 - RNA, 19 nt, Homo sapiens
  misc_RNA (1)...(19): siRNA sense strand
cagcuacaacaaugaagaa

SEQ ID NO: 142157 - RNA, 19 nt, Homo sapiens
  misc_RNA (1)...(19): siRNA sense strand
gaaccagccacagucugaa

SEQ ID NO: 142158 - RNA, 19 nt, Homo sapiens
  misc_RNA (1)...(19): siRNA sense strand
acugauggcuccuauaagc

SEQ ID NO: 142159 - RNA, 19 nt, Homo sapiens
  misc_RNA (1)...(19): siRNA sense strand
cagccuacaucacagaacu

SEQ ID NO: 142160 - RNA, 19 nt, Homo sapiens
  misc_RNA (1)...(19): siRNA sense strand
ccacugcacaggcuacauc

SEQ ID NO: 142161 - RNA, 19 nt, Homo sapiens
  misc_RNA (1)...(19): siRNA sense strand
caaugaagaauucccugau

SEQ ID NO: 142162 - RNA, 19 nt, Homo sapiens
  misc_RNA (1)...(19): siRNA sense strand
ccagacaagcuaaccaucu

SEQ ID NO: 142163 - RNA, 19 nt, Homo sapiens
  misc_RNA (1)...(19): siRNA sense strand
caagguggaggagccauug

SEQ ID NO: 142164 - RNA, 19 nt, Homo sapiens
  misc_RNA (1)...(19): siRNA sense strand
gccauugccucuggaaacu

SEQ ID NO: 142165 - RNA, 19 nt, Homo sapiens
  misc_RNA (1)...(19): siRNA sense strand
gcagcuuuccacuucagaa

SEQ ID NO: 142166 - RNA, 19 nt, Homo sapiens
  misc_RNA (1)...(19): siRNA sense strand
aaacuucgugagcagcuuu

SEQ ID NO: 142167 - RNA, 19 nt, Homo sapiens
  misc_RNA (1)...(19): siRNA sense strand
augaucagaugucuaacga

SEQ ID NO: 142168 - RNA, 19 nt, Homo sapiens
  misc_RNA (1)...(19): siRNA sense strand
gaggaacagaugcaggaau

SEQ ID NO: 142169 - RNA, 19 nt, Homo sapiens
  misc_RNA (1)...(19): siRNA sense strand
ggcucaaggagaucguuua

SEQ ID NO: 142170 - RNA, 19 nt, Homo sapiens
  misc_RNA (1)...(19): siRNA sense strand
gauggcuuucuguuuauug

SEQ ID NO: 142171 - RNA, 19 nt, Homo sapiens
  misc_RNA (1)...(19): siRNA sense strand
gaaacucuggaccuggaau

SEQ ID NO: 142172 - RNA, 19 nt, Homo sapiens
  misc_RNA (1)...(19): siRNA sense strand
acccagaugauguggauaa

SEQ ID NO: 142173 - RNA, 19 nt, Homo sapiens
  misc_RNA (1)...(19): siRNA sense strand
agacaggcaggguggugua

SEQ ID NO: 142174 - RNA, 19 nt, Homo sapiens
  misc_RNA (1)...(19): siRNA sense strand
ugacagccuacaucacaga

SEQ ID NO: 142175 - RNA, 19 nt, Homo sapiens
  misc_RNA (1)...(19): siRNA sense strand
gaauucccugaucuaacua

SEQ ID NO: 142176 - RNA, 19 nt, Homo sapiens
  misc_RNA (1)...(19): siRNA sense strand
cagagcaacagcuacaaca

SEQ ID NO: 142177 - RNA, 19 nt, Homo sapiens
  misc_RNA (1)...(19): siRNA sense strand
caggaacugaaacauuuga

SEQ ID NO: 142178 - RNA, 19 nt, Homo sapiens
  misc_RNA (1)...(19): siRNA sense strand
uaagccgucuuuccucacu

SEQ ID NO: 142179 - RNA, 19 nt, Homo sapiens
  misc_RNA (1)...(19): siRNA sense strand
cccagaugauguggauaaa

SEQ ID NO: 142180 - RNA, 19 nt, Homo sapiens
  misc_RNA (1)...(19): siRNA sense strand
ggauuuugaugaugaugga

SEQ ID NO: 142181 - RNA, 19 nt, Homo sapiens
  misc_RNA (1)...(19): siRNA sense strand
uccaggagaugcuguccau

SEQ ID NO: 142182 - RNA, 19 nt, Homo sapiens
  misc_RNA (1)...(19): siRNA sense strand
gggcucaaggagaucguuu

SEQ ID NO: 142183 - RNA, 19 nt, Homo sapiens
  misc_RNA (1)...(19): siRNA sense strand
gaucagaugucuaacgaua

SEQ ID NO: 142184 - RNA, 19 nt, Homo sapiens
  misc_RNA (1)...(19): siRNA sense strand
ucaaggagaucguuuauuu

SEQ ID NO: 142185 - RNA, 19 nt, Homo sapiens
  misc_RNA (1)...(19): siRNA sense strand
cgaaugagguguggcagua

SEQ ID NO: 142186 - RNA, 19 nt, Homo sapiens
  misc_RNA (1)...(19): siRNA sense strand
ggucagcagucuuccauga

SEQ ID NO: 142187 - RNA, 19 nt, Homo sapiens
  misc_RNA (1)...(19): siRNA sense strand
gaauggacuuggcucugua

SEQ ID NO: 142188 - RNA, 19 nt, Homo sapiens
  misc_RNA (1)...(19): siRNA sense strand
ggacuuggcucuguaaagg

SEQ ID NO: 142189 - RNA, 19 nt, Homo sapiens
  misc_RNA (1)...(19): siRNA sense strand
gcagcacacucuaugauca

SEQ ID NO: 142190 - RNA, 19 nt, Homo sapiens
  misc_RNA (1)...(19): siRNA sense strand
ggaauggacuuggcucugu

SEQ ID NO: 142191 - RNA, 19 nt, Homo sapiens
  misc_RNA (1)...(19): siRNA sense strand
ccacugauggcuccuauaa

SEQ ID NO: 142192 - RNA, 19 nt, Homo sapiens
  misc_RNA (1)...(19): siRNA sense strand
gugagcagcuuuccacuuc

SEQ ID NO: 142193 - RNA, 19 nt, Homo sapiens
  misc_RNA (1)...(19): siRNA sense strand
guagugcccuggcucgaaa

SEQ ID NO: 142194 - RNA, 19 nt, Homo sapiens
  misc_RNA (1)...(19): siRNA sense strand
gaacugaaacauuugaucu

SEQ ID NO: 142195 - RNA, 19 nt, Homo sapiens
  misc_RNA (1)...(19): siRNA sense strand
ggacccaguuucugugaau

SEQ ID NO: 142196 - RNA, 19 nt, Homo sapiens
  misc_RNA (1)...(19): siRNA sense strand
gcacccagaugauguggau

SEQ ID NO: 142197 - RNA, 19 nt, Homo sapiens
  misc_RNA (1)...(19): siRNA sense strand
ggaggcagcagauggcuuu

SEQ ID NO: 142198 - RNA, 19 nt, Homo sapiens
  misc_RNA (1)...(19): siRNA sense strand
gaagggaacaguaaauuuu

SEQ ID NO: 142199 - RNA, 19 nt, Homo sapiens
  misc_RNA (1)...(19): siRNA sense strand
gagaagggaacaguaaauu

SEQ ID NO: 142200 - RNA, 19 nt, Homo sapiens
  misc_RNA (1)...(19): siRNA sense strand
ugaauaggcugagcuuugu

SEQ ID NO: 142201 - RNA, 19 nt, Homo sapiens
  misc_RNA (1)...(19): siRNA sense strand
cagacaagcuaaccaucuu

SEQ ID NO: 142202 - RNA, 19 nt, Homo sapiens
  misc_RNA (1)...(19): siRNA sense strand
gccacagucugaaugguuu

SEQ ID NO: 142203 - RNA, 19 nt, Homo sapiens
  misc_RNA (1)...(19): siRNA sense strand
ugaaacauuugaucuugga

SEQ ID NO: 142204 - RNA, 19 nt, Homo sapiens
  misc_RNA (1)...(19): siRNA sense strand
gugaauaggcugagcuuug

SEQ ID NO: 142205 - RNA, 19 nt, Homo sapiens
  misc_RNA (1)...(19): siRNA sense strand
cagaugauguggauaaacu

SEQ ID NO: 142206 - RNA, 19 nt, Homo sapiens
  misc_RNA (1)...(19): siRNA sense strand
gaacagaugcaggaaugga

SEQ ID NO: 142207 - RNA, 19 nt, Homo sapiens
  misc_RNA (1)...(19): siRNA sense strand
ggagaagggaacaguaaau

SEQ ID NO: 142208 - RNA, 19 nt, Homo sapiens
  misc_RNA (1)...(19): siRNA sense strand
gauaugguacccaccugua

SEQ ID NO: 142209 - RNA, 19 nt, Homo sapiens
  misc_RNA (1)...(19): siRNA sense strand
ucagaugucuaacgauaag

SEQ ID NO: 142210 - RNA, 19 nt, Homo sapiens
  misc_RNA (1)...(19): siRNA sense strand
ucagcagucuuccaugaga

SEQ ID NO: 142211 - RNA, 19 nt, Homo sapiens
  misc_RNA (1)...(19): siRNA sense strand
agaagggaacaguaaauuu

SEQ ID NO: 142212 - RNA, 19 nt, Homo sapiens
  misc_RNA (1)...(19): siRNA sense strand
aggaacagaugcaggaaug

SEQ ID NO: 142213 - RNA, 19 nt, Homo sapiens
  misc_RNA (1)...(19): siRNA sense strand
uguaugggcucaaggagau

SEQ ID NO: 142214 - RNA, 19 nt, Homo sapiens
  misc_RNA (1)...(19): siRNA sense strand
caaggagaucguuuauuug

SEQ ID NO: 142215 - RNA, 19 nt, Homo sapiens
  misc_RNA (1)...(19): siRNA sense strand
guguuucccucccagauga

SEQ ID NO: 142216 - RNA, 19 nt, Homo sapiens
  misc_RNA (1)...(19): siRNA sense strand
gcuccuauaagccgucuuu

SEQ ID NO: 142217 - RNA, 19 nt, Homo sapiens
  misc_RNA (1)...(19): siRNA sense strand
gacccaguuucugugaaua

SEQ ID NO: 142218 - RNA, 19 nt, Homo sapiens
  misc_RNA (1)...(19): siRNA sense strand
gcucaaggagaucguuuau

SEQ ID NO: 142219 - RNA, 19 nt, Homo sapiens
  misc_RNA (1)...(19): siRNA sense strand
gauggagaagggaacagua

SEQ ID NO: 142220 - RNA, 19 nt, Homo sapiens
  misc_RNA (1)...(19): siRNA sense strand
gaauguguaugggcucaag

SEQ ID NO: 142221 - RNA, 19 nt, Homo sapiens
  misc_RNA (1)...(19): siRNA sense strand
acugaaacauuugaucuug

SEQ ID NO: 142222 - RNA, 19 nt, Homo sapiens
  misc_RNA (1)...(19): siRNA sense strand
gcauggcaguuucucacau

SEQ ID NO: 142223 - RNA, 19 nt, Homo sapiens
  misc_RNA (1)...(19): siRNA sense strand
aaaggaaggucagcagucu

SEQ ID NO: 142224 - RNA, 19 nt, Homo sapiens
  misc_RNA (1)...(19): siRNA sense strand
cgucuuuccucacugauca

SEQ ID NO: 142225 - RNA, 19 nt, Homo sapiens
  misc_RNA (1)...(19): siRNA sense strand
ugaaccagccacagucuga

SEQ ID NO: 142226 - RNA, 19 nt, Homo sapiens
  misc_RNA (1)...(19): siRNA sense strand
agacaagcuaaccaucuua

SEQ ID NO: 142227 - RNA, 19 nt, Homo sapiens
  misc_RNA (1)...(19): siRNA sense strand
ucguuuauuugccgaauga

SEQ ID NO: 142228 - RNA, 19 nt, Homo sapiens
  misc_RNA (1)...(19): siRNA sense strand
cagcagucuuccaugagaa

SEQ ID NO: 142229 - RNA, 19 nt, Homo sapiens
  misc_RNA (1)...(19): siRNA sense strand
gaucaggugcacccagaug

SEQ ID NO: 142230 - RNA, 19 nt, Homo sapiens
  misc_RNA (1)...(19): siRNA sense strand
caggcagggugguguaugu

SEQ ID NO: 142231 - RNA, 19 nt, Homo sapiens
  misc_RNA (1)...(19): siRNA sense strand
agaacugucagauauggua

SEQ ID NO: 142232 - RNA, 19 nt, Homo sapiens
  misc_RNA (1)...(19): siRNA sense strand
gagcagcuuuccacuucag

SEQ ID NO: 142233 - RNA, 19 nt, Homo sapiens
  misc_RNA (1)...(19): siRNA sense strand
ggcaguuucucacaugaag

SEQ ID NO: 142234 - RNA, 19 nt, Homo sapiens
  misc_RNA (1)...(19): siRNA sense strand
ggaacugaaacauuugauc

SEQ ID NO: 142235 - RNA, 19 nt, Homo sapiens
  misc_RNA (1)...(19): siRNA sense strand
gaucguuuauuugccgaau

SEQ ID NO: 142236 - RNA, 19 nt, Homo sapiens
  misc_RNA (1)...(19): siRNA sense strand
gaugauguggauaaacuuc

SEQ ID NO: 142237 - RNA, 19 nt, Homo sapiens
  misc_RNA (1)...(19): siRNA sense strand
gaaccagccacagucugaa

SEQ ID NO: 142238 - RNA, 19 nt, Homo sapiens
  misc_RNA (1)...(19): siRNA sense strand
acugauggcuccuauaagc

SEQ ID NO: 142239 - RNA, 19 nt, Homo sapiens
  misc_RNA (1)...(19): siRNA sense strand
cagccuacaucacagaacu

SEQ ID NO: 142240 - RNA, 19 nt, Homo sapiens
  misc_RNA (1)...(19): siRNA sense strand
ccacugcacaggcuacauc

SEQ ID NO: 142241 - RNA, 19 nt, Homo sapiens
  misc_RNA (1)...(19): siRNA sense strand
caagguggaggagccauug

SEQ ID NO: 142242 - RNA, 19 nt, Homo sapiens
  misc_RNA (1)...(19): siRNA sense strand
ccagacaagcuaaccaucu

SEQ ID NO: 142243 - RNA, 19 nt, Homo sapiens
  misc_RNA (1)...(19): siRNA sense strand
gccauugccucuggaaacu

SEQ ID NO: 142244 - RNA, 19 nt, Homo sapiens
  misc_RNA (1)...(19): siRNA sense strand
gcagcuuuccacuucagaa

SEQ ID NO: 142245 - RNA, 19 nt, Homo sapiens
  misc_RNA (1)...(19): siRNA sense strand
aaacuucgugagcagcuuu

SEQ ID NO: 142246 - RNA, 19 nt, Homo sapiens
  misc_RNA (1)...(19): siRNA sense strand
ggcucaaggagaucguuua

SEQ ID NO: 142247 - RNA, 19 nt, Homo sapiens
  misc_RNA (1)...(19): siRNA sense strand
augaucagaugucuaacga

SEQ ID NO: 142248 - RNA, 19 nt, Homo sapiens
  misc_RNA (1)...(19): siRNA sense strand
gaggaacagaugcaggaau

SEQ ID NO: 142249 - RNA, 19 nt, Homo sapiens
  misc_RNA (1)...(19): siRNA sense strand
gauggcuuucuguuuauug

SEQ ID NO: 142250 - RNA, 19 nt, Homo sapiens
  misc_RNA (1)...(19): siRNA sense strand
acccagaugauguggauaa

SEQ ID NO: 142251 - RNA, 19 nt, Homo sapiens
  misc_RNA (1)...(19): siRNA sense strand
gaaacucuggaccuggaau

SEQ ID NO: 142252 - RNA, 19 nt, Homo sapiens
  misc_RNA (1)...(19): siRNA sense strand
agacaggcaggguggugua

SEQ ID NO: 142253 - RNA, 19 nt, Homo sapiens
  misc_RNA (1)...(19): siRNA sense strand
ugacagccuacaucacaga

SEQ ID NO: 142254 - RNA, 19 nt, Homo sapiens
  misc_RNA (1)...(19): siRNA sense strand
caggaacugaaacauuuga

SEQ ID NO: 142255 - RNA, 19 nt, Homo sapiens
  misc_RNA (1)...(19): siRNA sense strand
uaagccgucuuuccucacu

SEQ ID NO: 142256 - RNA, 19 nt, Homo sapiens
  misc_RNA (1)...(19): siRNA sense strand
ggauuuugaugaugaugga

SEQ ID NO: 142257 - RNA, 19 nt, Homo sapiens
  misc_RNA (1)...(19): siRNA sense strand
gggcucaaggagaucguuu

SEQ ID NO: 142258 - RNA, 19 nt, Homo sapiens
  misc_RNA (1)...(19): siRNA sense strand
cccagaugauguggauaaa

SEQ ID NO: 142259 - RNA, 19 nt, Homo sapiens
  misc_RNA (1)...(19): siRNA sense strand
gaucagaugucuaacgaua

SEQ ID NO: 142260 - RNA, 19 nt, Homo sapiens
  misc_RNA (1)...(19): siRNA sense strand
ucaaggagaucguuuauuu

SEQ ID NO: 142261 - RNA, 19 nt, Homo sapiens
  misc_RNA (1)...(19): siRNA sense strand
cgaaugagguguggcagua

SEQ ID NO: 142262 - RNA, 19 nt, Homo sapiens
  misc_RNA (1)...(19): siRNA sense strand
cuacaacaaugaagaauuc

SEQ ID NO: 142263 - RNA, 19 nt, Homo sapiens
  misc_RNA (1)...(19): siRNA sense strand
ggucagcagucuuccauga

SEQ ID NO: 142264 - RNA, 19 nt, Homo sapiens
  misc_RNA (1)...(19): siRNA sense strand
gaauggacuuggcucugua

SEQ ID NO: 142265 - RNA, 19 nt, Homo sapiens
  misc_RNA (1)...(19): siRNA sense strand
gaagaauucccugaucuaa

SEQ ID NO: 142266 - RNA, 19 nt, Homo sapiens
  misc_RNA (1)...(19): siRNA sense strand
ggacuuggcucuguaaagg

SEQ ID NO: 142267 - RNA, 19 nt, Homo sapiens
  misc_RNA (1)...(19): siRNA sense strand
gcagcacacucuaugauca

SEQ ID NO: 142268 - RNA, 19 nt, Homo sapiens
  misc_RNA (1)...(19): siRNA sense strand
ggaauggacuuggcucugu

SEQ ID NO: 142269 - RNA, 19 nt, Homo sapiens
  misc_RNA (1)...(19): siRNA sense strand
ccacugauggcuccuauaa

SEQ ID NO: 142270 - RNA, 19 nt, Homo sapiens
  misc_RNA (1)...(19): siRNA sense strand
gugagcagcuuuccacuuc

SEQ ID NO: 142271 - RNA, 19 nt, Homo sapiens
  misc_RNA (1)...(19): siRNA sense strand
guagugcccuggcucgaaa

SEQ ID NO: 142272 - RNA, 19 nt, Homo sapiens
  misc_RNA (1)...(19): siRNA sense strand
gaacugaaacauuugaucu

SEQ ID NO: 142273 - RNA, 19 nt, Homo sapiens
  misc_RNA (1)...(19): siRNA sense strand
ggacccaguuucugugaau

SEQ ID NO: 142274 - RNA, 19 nt, Homo sapiens
  misc_RNA (1)...(19): siRNA sense strand
gcacccagaugauguggau

SEQ ID NO: 142275 - RNA, 19 nt, Homo sapiens
  misc_RNA (1)...(19): siRNA sense strand
ggaggcagcagauggcuuu

SEQ ID NO: 142276 - RNA, 19 nt, Homo sapiens
  misc_RNA (1)...(19): siRNA sense strand
gaagggaacaguaaauuuu

SEQ ID NO: 142277 - RNA, 19 nt, Homo sapiens
  misc_RNA (1)...(19): siRNA sense strand
gagaagggaacaguaaauu

SEQ ID NO: 142278 - RNA, 19 nt, Homo sapiens
  misc_RNA (1)...(19): siRNA sense strand
ugaauaggcugagcuuugu

SEQ ID NO: 142279 - RNA, 19 nt, Homo sapiens
  misc_RNA (1)...(19): siRNA sense strand
cagacaagcuaaccaucuu

SEQ ID NO: 142280 - RNA, 19 nt, Homo sapiens
  misc_RNA (1)...(19): siRNA sense strand
gccacagucugaaugguuu

SEQ ID NO: 142281 - RNA, 19 nt, Homo sapiens
  misc_RNA (1)...(19): siRNA sense strand
ugaaacauuugaucuugga

SEQ ID NO: 142282 - RNA, 19 nt, Homo sapiens
  misc_RNA (1)...(19): siRNA sense strand
gugaauaggcugagcuuug

SEQ ID NO: 142283 - RNA, 19 nt, Homo sapiens
  misc_RNA (1)...(19): siRNA sense strand
cagaugauguggauaaacu

SEQ ID NO: 142284 - RNA, 19 nt, Homo sapiens
  misc_RNA (1)...(19): siRNA sense strand
caacagcuacaacaaugaa

SEQ ID NO: 142285 - RNA, 19 nt, Homo sapiens
  misc_RNA (1)...(19): siRNA sense strand
gagcaacagcuacaacaau

SEQ ID NO: 142286 - RNA, 19 nt, Homo sapiens
  misc_RNA (1)...(19): siRNA sense strand
gaacagaugcaggaaugga

SEQ ID NO: 142287 - RNA, 19 nt, Homo sapiens
  misc_RNA (1)...(19): siRNA sense strand
ggagaagggaacaguaaau

SEQ ID NO: 142288 - RNA, 19 nt, Homo sapiens
  misc_RNA (1)...(19): siRNA sense strand
agaauucccugaucuaacu

SEQ ID NO: 142289 - RNA, 19 nt, Homo sapiens
  misc_RNA (1)...(19): siRNA sense strand
gagaucagagcaacagcua

SEQ ID NO: 142290 - RNA, 19 nt, Homo sapiens
  misc_RNA (1)...(19): siRNA sense strand
gauaugguacccaccugua

SEQ ID NO: 142291 - RNA, 19 nt, Homo sapiens
  misc_RNA (1)...(19): siRNA sense strand
gaucagagcaacagcuaca

SEQ ID NO: 142292 - RNA, 19 nt, Homo sapiens
  misc_RNA (1)...(19): siRNA sense strand
ucagaugucuaacgauaag

SEQ ID NO: 142293 - RNA, 19 nt, Homo sapiens
  misc_RNA (1)...(19): siRNA sense strand
ucagcagucuuccaugaga

SEQ ID NO: 142294 - RNA, 19 nt, Homo sapiens
  misc_RNA (1)...(19): siRNA sense strand
agaagggaacaguaaauuu

SEQ ID NO: 142295 - RNA, 19 nt, Homo sapiens
  misc_RNA (1)...(19): siRNA sense strand
aggaacagaugcaggaaug

SEQ ID NO: 142296 - RNA, 19 nt, Homo sapiens
  misc_RNA (1)...(19): siRNA sense strand
uguaugggcucaaggagau

SEQ ID NO: 142297 - RNA, 19 nt, Homo sapiens
  misc_RNA (1)...(19): siRNA sense strand
gcaacagcuacaacaauga

SEQ ID NO: 142298 - RNA, 19 nt, Homo sapiens
  misc_RNA (1)...(19): siRNA sense strand
caaggagaucguuuauuug

SEQ ID NO: 142299 - RNA, 19 nt, Homo sapiens
  misc_RNA (1)...(19): siRNA sense strand
ugaagaauucccugaucua

SEQ ID NO: 142300 - RNA, 19 nt, Homo sapiens
  misc_RNA (1)...(19): siRNA sense strand
gcuacaacaaugaagaauu

SEQ ID NO: 142301 - RNA, 19 nt, Homo sapiens
  misc_RNA (1)...(19): siRNA sense strand
guguuucccucccagauga

SEQ ID NO: 142302 - RNA, 19 nt, Homo sapiens
  misc_RNA (1)...(19): siRNA sense strand
gcuccuauaagccgucuuu

SEQ ID NO: 142303 - RNA, 19 nt, Homo sapiens
  misc_RNA (1)...(19): siRNA sense strand
gacccaguuucugugaaua

SEQ ID NO: 142304 - RNA, 19 nt, Homo sapiens
  misc_RNA (1)...(19): siRNA sense strand
gcucaaggagaucguuuau

SEQ ID NO: 142305 - RNA, 19 nt, Homo sapiens
  misc_RNA (1)...(19): siRNA sense strand
acugaaacauuugaucuug

SEQ ID NO: 142306 - RNA, 19 nt, Homo sapiens
  misc_RNA (1)...(19): siRNA sense strand
ucccugaucuaacuauguu

SEQ ID NO: 142307 - RNA, 19 nt, Homo sapiens
  misc_RNA (1)...(19): siRNA sense strand
gauggagaagggaacagua

SEQ ID NO: 142308 - RNA, 19 nt, Homo sapiens
  misc_RNA (1)...(19): siRNA sense strand
gaauguguaugggcucaag

SEQ ID NO: 142309 - RNA, 19 nt, Homo sapiens
  misc_RNA (1)...(19): siRNA sense strand
gcauggcaguuucucacau

SEQ ID NO: 142310 - RNA, 19 nt, Homo sapiens
  misc_RNA (1)...(19): siRNA sense strand
agcaacagcuacaacaaug

SEQ ID NO: 142311 - RNA, 19 nt, Homo sapiens
  misc_RNA (1)...(19): siRNA sense strand
aaaggaaggucagcagucu

SEQ ID NO: 142312 - RNA, 19 nt, Homo sapiens
  misc_RNA (1)...(19): siRNA sense strand
cgucuuuccucacugauca

SEQ ID NO: 142313 - RNA, 19 nt, Homo sapiens
  misc_RNA (1)...(19): siRNA sense strand
ugaaccagccacagucuga

SEQ ID NO: 142314 - RNA, 19 nt, Homo sapiens
  misc_RNA (1)...(19): siRNA sense strand
agacaagcuaaccaucuua

SEQ ID NO: 142315 - RNA, 19 nt, Homo sapiens
  misc_RNA (1)...(19): siRNA sense strand
ucguuuauuugccgaauga

SEQ ID NO: 142316 - RNA, 19 nt, Homo sapiens
  misc_RNA (1)...(19): siRNA sense strand
cagcagucuuccaugagaa

SEQ ID NO: 142317 - RNA, 19 nt, Homo sapiens
  misc_RNA (1)...(19): siRNA sense strand
gaucaggugcacccagaug

SEQ ID NO: 142318 - RNA, 19 nt, Homo sapiens
  misc_RNA (1)...(19): siRNA sense strand
caggcagggugguguaugu

SEQ ID NO: 142319 - RNA, 19 nt, Homo sapiens
  misc_RNA (1)...(19): siRNA sense strand
agaacugucagauauggua

SEQ ID NO: 142320 - RNA, 19 nt, Homo sapiens
  misc_RNA (1)...(19): siRNA sense strand
gagcagcuuuccacuucag

SEQ ID NO: 142321 - RNA, 19 nt, Homo sapiens
  misc_RNA (1)...(19): siRNA sense strand
ggcaguuucucacaugaag

SEQ ID NO: 142322 - RNA, 19 nt, Homo sapiens
  misc_RNA (1)...(19): siRNA sense strand
aaugaagaauucccugauc

SEQ ID NO: 142323 - RNA, 19 nt, Homo sapiens
  misc_RNA (1)...(19): siRNA sense strand
ggaacugaaacauuugauc

SEQ ID NO: 142324 - RNA, 19 nt, Homo sapiens
  misc_RNA (1)...(19): siRNA sense strand
gaucguuuauuugccgaau

SEQ ID NO: 142325 - RNA, 19 nt, Homo sapiens
  misc_RNA (1)...(19): siRNA sense strand
gaugauguggauaaacuuc

SEQ ID NO: 142326 - RNA, 19 nt, Homo sapiens
  misc_RNA (1)...(19): siRNA sense strand
cagcuacaacaaugaagaa

SEQ ID NO: 142327 - RNA, 19 nt, Homo sapiens
  misc_RNA (1)...(19): siRNA sense strand
gaaccagccacagucugaa

SEQ ID NO: 142328 - RNA, 19 nt, Homo sapiens
  misc_RNA (1)...(19): siRNA sense strand
acugauggcuccuauaagc

SEQ ID NO: 142329 - RNA, 19 nt, Homo sapiens
  misc_RNA (1)...(19): siRNA sense strand
cagccuacaucacagaacu

SEQ ID NO: 142330 - RNA, 19 nt, Homo sapiens
  misc_RNA (1)...(19): siRNA sense strand
ccacugcacaggcuacauc

SEQ ID NO: 142331 - RNA, 19 nt, Homo sapiens
  misc_RNA (1)...(19): siRNA sense strand
caaugaagaauucccugau

SEQ ID NO: 142332 - RNA, 19 nt, Homo sapiens
  misc_RNA (1)...(19): siRNA sense strand
ccagacaagcuaaccaucu

SEQ ID NO: 142333 - RNA, 19 nt, Homo sapiens
  misc_RNA (1)...(19): siRNA sense strand
caagguggaggagccauug

SEQ ID NO: 142334 - RNA, 19 nt, Homo sapiens
  misc_RNA (1)...(19): siRNA sense strand
gccauugccucuggaaacu

SEQ ID NO: 142335 - RNA, 19 nt, Homo sapiens
  misc_RNA (1)...(19): siRNA sense strand
gcagcuuuccacuucagaa

SEQ ID NO: 142336 - RNA, 19 nt, Homo sapiens
  misc_RNA (1)...(19): siRNA sense strand
aaacuucgugagcagcuuu

SEQ ID NO: 142337 - RNA, 19 nt, Homo sapiens
  misc_RNA (1)...(19): siRNA sense strand
augaucagaugucuaacga

SEQ ID NO: 142338 - RNA, 19 nt, Homo sapiens
  misc_RNA (1)...(19): siRNA sense strand
gaggaacagaugcaggaau

SEQ ID NO: 142339 - RNA, 19 nt, Homo sapiens
  misc_RNA (1)...(19): siRNA sense strand
ggcucaaggagaucguuua

SEQ ID NO: 142340 - RNA, 19 nt, Homo sapiens
  misc_RNA (1)...(19): siRNA sense strand
gauggcuuucuguuuauug

SEQ ID NO: 142341 - RNA, 19 nt, Homo sapiens
  misc_RNA (1)...(19): siRNA sense strand
gaaacucuggaccuggaau

SEQ ID NO: 142342 - RNA, 19 nt, Homo sapiens
  misc_RNA (1)...(19): siRNA sense strand
acccagaugauguggauaa

SEQ ID NO: 142343 - RNA, 19 nt, Homo sapiens
  misc_RNA (1)...(19): siRNA sense strand
agacaggcaggguggugua

SEQ ID NO: 142344 - RNA, 19 nt, Homo sapiens
  misc_RNA (1)...(19): siRNA sense strand
ugacagccuacaucacaga

SEQ ID NO: 142345 - RNA, 19 nt, Homo sapiens
  misc_RNA (1)...(19): siRNA sense strand
gaauucccugaucuaacua

SEQ ID NO: 142346 - RNA, 19 nt, Homo sapiens
  misc_RNA (1)...(19): siRNA sense strand
cagagcaacagcuacaaca

SEQ ID NO: 142347 - RNA, 19 nt, Homo sapiens
  misc_RNA (1)...(19): siRNA sense strand
caggaacugaaacauuuga

SEQ ID NO: 142348 - RNA, 19 nt, Homo sapiens
  misc_RNA (1)...(19): siRNA sense strand
uaagccgucuuuccucacu

SEQ ID NO: 142349 - RNA, 19 nt, Homo sapiens
  misc_RNA (1)...(19): siRNA sense strand
cccagaugauguggauaaa

SEQ ID NO: 142350 - RNA, 19 nt, Homo sapiens
  misc_RNA (1)...(19): siRNA sense strand
ggauuuugaugaugaugga

SEQ ID NO: 142351 - RNA, 19 nt, Homo sapiens
  misc_RNA (1)...(19): siRNA sense strand
uccaggagaugcuguccau

SEQ ID NO: 142352 - RNA, 19 nt, Homo sapiens
  misc_RNA (1)...(19): siRNA sense strand
gggcucaaggagaucguuu

SEQ ID NO: 142353 - RNA, 19 nt, Homo sapiens
  misc_RNA (1)...(19): siRNA sense strand
gcaaaugccuuuaaaccaa

SEQ ID NO: 142354 - RNA, 19 nt, Homo sapiens
  misc_RNA (1)...(19): siRNA sense strand
gaagacgugugaaccuaaa

SEQ ID NO: 142355 - RNA, 19 nt, Homo sapiens
  misc_RNA (1)...(19): siRNA sense strand
ccaaauauccuacugauca

SEQ ID NO: 142356 - RNA, 19 nt, Homo sapiens
  misc_RNA (1)...(19): siRNA sense strand
gaagcuguuuccuauauug

SEQ ID NO: 142357 - RNA, 19 nt, Homo sapiens
  misc_RNA (1)...(19): siRNA sense strand
gagauggacuggcucauag

SEQ ID NO: 142358 - RNA, 19 nt, Homo sapiens
  misc_RNA (1)...(19): siRNA sense strand
caaaugccuuuaaaccaaa

SEQ ID NO: 142359 - RNA, 19 nt, Homo sapiens
  misc_RNA (1)...(19): siRNA sense strand
caaccggccucauaggaaa

SEQ ID NO: 142360 - RNA, 19 nt, Homo sapiens
  misc_RNA (1)...(19): siRNA sense strand
ggagauggacuggcucaua

SEQ ID NO: 142361 - RNA, 19 nt, Homo sapiens
  misc_RNA (1)...(19): siRNA sense strand
ugagaacgccgaauauuga

SEQ ID NO: 142362 - RNA, 19 nt, Homo sapiens
  misc_RNA (1)...(19): siRNA sense strand
cagcgagucuuaugcuaaa

SEQ ID NO: 142363 - RNA, 19 nt, Homo sapiens
  misc_RNA (1)...(19): siRNA sense strand
gugcgacgcuggaacugua

SEQ ID NO: 142364 - RNA, 19 nt, Homo sapiens
  misc_RNA (1)...(19): siRNA sense strand
ccacggauuugacuauuuc

SEQ ID NO: 142365 - RNA, 19 nt, Homo sapiens
  misc_RNA (1)...(19): siRNA sense strand
gaaccacggauuugacuau

SEQ ID NO: 142366 - RNA, 19 nt, Homo sapiens
  misc_RNA (1)...(19): siRNA sense strand
acacugagaacgccgaaua

SEQ ID NO: 142367 - RNA, 19 nt, Homo sapiens
  misc_RNA (1)...(19): siRNA sense strand
gagaaaacagcgagucuua

SEQ ID NO: 142368 - RNA, 19 nt, Homo sapiens
  misc_RNA (1)...(19): siRNA sense strand
gcaaccggccucauaggaa

SEQ ID NO: 142369 - RNA, 19 nt, Homo sapiens
  misc_RNA (1)...(19): siRNA sense strand
guacuccuccuucggguuu

SEQ ID NO: 142370 - RNA, 19 nt, Homo sapiens
  misc_RNA (1)...(19): siRNA sense strand
aaacugcaaaugccuuuaa

SEQ ID NO: 142371 - RNA, 19 nt, Homo sapiens
  misc_RNA (1)...(19): siRNA sense strand
gugauaauguggaggagau

SEQ ID NO: 142372 - RNA, 19 nt, Homo sapiens
  misc_RNA (1)...(19): siRNA sense strand
caaauauccuacugaucau

SEQ ID NO: 142373 - RNA, 19 nt, Homo sapiens
  misc_RNA (1)...(19): siRNA sense strand
ggaacuguauccugaugag

SEQ ID NO: 142374 - RNA, 19 nt, Homo sapiens
  misc_RNA (1)...(19): siRNA sense strand
aaagucagcauggcuuaua

SEQ ID NO: 142375 - RNA, 19 nt, Homo sapiens
  misc_RNA (1)...(19): siRNA sense strand
gaaaacagcgagucuuaug

SEQ ID NO: 142376 - RNA, 19 nt, Homo sapiens
  misc_RNA (1)...(19): siRNA sense strand
ccauuucuccucuuccuuu

SEQ ID NO: 142377 - RNA, 19 nt, Homo sapiens
  misc_RNA (1)...(19): siRNA sense strand
uaaaccaaauauccuacug

SEQ ID NO: 142378 - RNA, 19 nt, Homo sapiens
  misc_RNA (1)...(19): siRNA sense strand
gaaaagucagcauggcuua

SEQ ID NO: 142379 - RNA, 19 nt, Homo sapiens
  misc_RNA (1)...(19): siRNA sense strand
cgaaaccacuuuugcaaga

SEQ ID NO: 142380 - RNA, 19 nt, Homo sapiens
  misc_RNA (1)...(19): siRNA sense strand
agggagacauuccuucaga

SEQ ID NO: 142381 - RNA, 19 nt, Homo sapiens
  misc_RNA (1)...(19): siRNA sense strand
ggccagaccugcgguuucu

SEQ ID NO: 142382 - RNA, 19 nt, Homo sapiens
  misc_RNA (1)...(19): siRNA sense strand
ggagacauuccuucagauc

SEQ ID NO: 142383 - RNA, 19 nt, Homo sapiens
  misc_RNA (1)...(19): siRNA sense strand
cugaagacgugugaaccua

SEQ ID NO: 142384 - RNA, 19 nt, Homo sapiens
  misc_RNA (1)...(19): siRNA sense strand
gggagacauuccuucagau

SEQ ID NO: 142385 - RNA, 19 nt, Homo sapiens
  misc_RNA (1)...(19): siRNA sense strand
aaccaaauauccuacugau

SEQ ID NO: 142386 - RNA, 19 nt, Homo sapiens
  misc_RNA (1)...(19): siRNA sense strand
gagacauuccuucagauca

SEQ ID NO: 142387 - RNA, 19 nt, Homo sapiens
  misc_RNA (1)...(19): siRNA sense strand
ugaagacgugugaaccuaa

SEQ ID NO: 142388 - RNA, 19 nt, Homo sapiens
  misc_RNA (1)...(19): siRNA sense strand
aaaccaaauauccuacuga

SEQ ID NO: 142389 - RNA, 19 nt, Homo sapiens
  misc_RNA (1)...(19): siRNA sense strand
cugagaacgccgaauauug

SEQ ID NO: 142390 - RNA, 19 nt, Homo sapiens
  misc_RNA (1)...(19): siRNA sense strand
cgagucuuaugcuaaagga

SEQ ID NO: 142391 - RNA, 19 nt, Homo sapiens
  misc_RNA (1)...(19): siRNA sense strand
agacauuccuucagaucag

SEQ ID NO: 142392 - RNA, 19 nt, Homo sapiens
  misc_RNA (1)...(19): siRNA sense strand
acuguauccugaugagaaa

SEQ ID NO: 142393 - RNA, 19 nt, Homo sapiens
  misc_RNA (1)...(19): siRNA sense strand
gaacuguauccugaugaga

SEQ ID NO: 142394 - RNA, 19 nt, Homo sapiens
  misc_RNA (1)...(19): siRNA sense strand
gaaaccacuuuugcaagaa

SEQ ID NO: 142395 - RNA, 19 nt, Homo sapiens
  misc_RNA (1)...(19): siRNA sense strand
gaacgaaaccacuuuugca

SEQ ID NO: 142396 - RNA, 19 nt, Homo sapiens
  misc_RNA (1)...(19): siRNA sense strand
gggaacaauacacugagaa

SEQ ID NO: 142397 - RNA, 19 nt, Homo sapiens
  misc_RNA (1)...(19): siRNA sense strand
ugaccagcuugcagaggaa

SEQ ID NO: 142398 - RNA, 19 nt, Homo sapiens
  misc_RNA (1)...(19): siRNA sense strand
ggaacaauacacugagaac

SEQ ID NO: 142399 - RNA, 19 nt, Homo sapiens
  misc_RNA (1)...(19): siRNA sense strand
acagcgagucuuaugcuaa

SEQ ID NO: 142400 - RNA, 19 nt, Homo sapiens
  misc_RNA (1)...(19): siRNA sense strand
ucacagggagacauuccuu

SEQ ID NO: 142401 - RNA, 19 nt, Homo sapiens
  misc_RNA (1)...(19): siRNA sense strand
ggcgugggcugccuguuuu

SEQ ID NO: 142402 - RNA, 19 nt, Homo sapiens
  misc_RNA (1)...(19): siRNA sense strand
gaauauugaccagcuugca

SEQ ID NO: 142403 - RNA, 19 nt, Homo sapiens
  misc_RNA (1)...(19): siRNA sense strand
ccagaccugcgguuucuuc

SEQ ID NO: 142404 - RNA, 19 nt, Homo sapiens
  misc_RNA (1)...(19): siRNA sense strand
ccuucacgcucacaaacga

SEQ ID NO: 142405 - RNA, 19 nt, Homo sapiens
  misc_RNA (1)...(19): siRNA sense strand
accacggauuugacuauuu

SEQ ID NO: 142406 - RNA, 19 nt, Homo sapiens
  misc_RNA (1)...(19): siRNA sense strand
aaccacggauuugacuauu

SEQ ID NO: 142407 - RNA, 19 nt, Homo sapiens
  misc_RNA (1)...(19): siRNA sense strand
aacagcgagucuuaugcua

SEQ ID NO: 142408 - RNA, 19 nt, Homo sapiens
  misc_RNA (1)...(19): siRNA sense strand
aagucagcauggcuuauau

SEQ ID NO: 142409 - RNA, 19 nt, Homo sapiens
  misc_RNA (1)...(19): siRNA sense strand
aacugcaaaugccuuuaaa

SEQ ID NO: 142410 - RNA, 19 nt, Homo sapiens
  misc_RNA (1)...(19): siRNA sense strand
gcaaaugccuuuaaaccaa

SEQ ID NO: 142411 - RNA, 19 nt, Homo sapiens
  misc_RNA (1)...(19): siRNA sense strand
gaagacgugugaaccuaaa

SEQ ID NO: 142412 - RNA, 19 nt, Homo sapiens
  misc_RNA (1)...(19): siRNA sense strand
ccaaauauccuacugauca

SEQ ID NO: 142413 - RNA, 19 nt, Homo sapiens
  misc_RNA (1)...(19): siRNA sense strand
gaagcuguuuccuauauug

SEQ ID NO: 142414 - RNA, 19 nt, Homo sapiens
  misc_RNA (1)...(19): siRNA sense strand
gagauggacuggcucauag

SEQ ID NO: 142415 - RNA, 19 nt, Homo sapiens
  misc_RNA (1)...(19): siRNA sense strand
caaaugccuuuaaaccaaa

SEQ ID NO: 142416 - RNA, 19 nt, Homo sapiens
  misc_RNA (1)...(19): siRNA sense strand
caaccggccucauaggaaa

SEQ ID NO: 142417 - RNA, 19 nt, Homo sapiens
  misc_RNA (1)...(19): siRNA sense strand
ggagauggacuggcucaua

SEQ ID NO: 142418 - RNA, 19 nt, Homo sapiens
  misc_RNA (1)...(19): siRNA sense strand
ugagaacgccgaauauuga

SEQ ID NO: 142419 - RNA, 19 nt, Homo sapiens
  misc_RNA (1)...(19): siRNA sense strand
cagcgagucuuaugcuaaa

SEQ ID NO: 142420 - RNA, 19 nt, Homo sapiens
  misc_RNA (1)...(19): siRNA sense strand
gugcgacgcuggaacugua

SEQ ID NO: 142421 - RNA, 19 nt, Homo sapiens
  misc_RNA (1)...(19): siRNA sense strand
ccacggauuugacuauuuc

SEQ ID NO: 142422 - RNA, 19 nt, Homo sapiens
  misc_RNA (1)...(19): siRNA sense strand
gaaccacggauuugacuau

SEQ ID NO: 142423 - RNA, 19 nt, Homo sapiens
  misc_RNA (1)...(19): siRNA sense strand
acacugagaacgccgaaua

SEQ ID NO: 142424 - RNA, 19 nt, Homo sapiens
  misc_RNA (1)...(19): siRNA sense strand
gagaaaacagcgagucuua

SEQ ID NO: 142425 - RNA, 19 nt, Homo sapiens
  misc_RNA (1)...(19): siRNA sense strand
gcaaccggccucauaggaa

SEQ ID NO: 142426 - RNA, 19 nt, Homo sapiens
  misc_RNA (1)...(19): siRNA sense strand
guacuccuccuucggguuu

SEQ ID NO: 142427 - RNA, 19 nt, Homo sapiens
  misc_RNA (1)...(19): siRNA sense strand
aaacugcaaaugccuuuaa

SEQ ID NO: 142428 - RNA, 19 nt, Homo sapiens
  misc_RNA (1)...(19): siRNA sense strand
gugauaauguggaggagau

SEQ ID NO: 142429 - RNA, 19 nt, Homo sapiens
  misc_RNA (1)...(19): siRNA sense strand
caaauauccuacugaucau

SEQ ID NO: 142430 - RNA, 19 nt, Homo sapiens
  misc_RNA (1)...(19): siRNA sense strand
ggaacuguauccugaugag

SEQ ID NO: 142431 - RNA, 19 nt, Homo sapiens
  misc_RNA (1)...(19): siRNA sense strand
aaagucagcauggcuuaua

SEQ ID NO: 142432 - RNA, 19 nt, Homo sapiens
  misc_RNA (1)...(19): siRNA sense strand
gaaaacagcgagucuuaug

SEQ ID NO: 142433 - RNA, 19 nt, Homo sapiens
  misc_RNA (1)...(19): siRNA sense strand
ccauuucuccucuuccuuu

SEQ ID NO: 142434 - RNA, 19 nt, Homo sapiens
  misc_RNA (1)...(19): siRNA sense strand
uaaaccaaauauccuacug

SEQ ID NO: 142435 - RNA, 19 nt, Homo sapiens
  misc_RNA (1)...(19): siRNA sense strand
gaaaagucagcauggcuua

SEQ ID NO: 142436 - RNA, 19 nt, Homo sapiens
  misc_RNA (1)...(19): siRNA sense strand
cgaaaccacuuuugcaaga

SEQ ID NO: 142437 - RNA, 19 nt, Homo sapiens
  misc_RNA (1)...(19): siRNA sense strand
agggagacauuccuucaga

SEQ ID NO: 142438 - RNA, 19 nt, Homo sapiens
  misc_RNA (1)...(19): siRNA sense strand
ggccagaccugcgguuucu

SEQ ID NO: 142439 - RNA, 19 nt, Homo sapiens
  misc_RNA (1)...(19): siRNA sense strand
ggagacauuccuucagauc

SEQ ID NO: 142440 - RNA, 19 nt, Homo sapiens
  misc_RNA (1)...(19): siRNA sense strand
cugaagacgugugaaccua

SEQ ID NO: 142441 - RNA, 19 nt, Homo sapiens
  misc_RNA (1)...(19): siRNA sense strand
gggagacauuccuucagau

SEQ ID NO: 142442 - RNA, 19 nt, Homo sapiens
  misc_RNA (1)...(19): siRNA sense strand
aaccaaauauccuacugau

SEQ ID NO: 142443 - RNA, 19 nt, Homo sapiens
  misc_RNA (1)...(19): siRNA sense strand
gagacauuccuucagauca

SEQ ID NO: 142444 - RNA, 19 nt, Homo sapiens
  misc_RNA (1)...(19): siRNA sense strand
ugaagacgugugaaccuaa

SEQ ID NO: 142445 - RNA, 19 nt, Homo sapiens
  misc_RNA (1)...(19): siRNA sense strand
aaaccaaauauccuacuga

SEQ ID NO: 142446 - RNA, 19 nt, Homo sapiens
  misc_RNA (1)...(19): siRNA sense strand
cugagaacgccgaauauug

SEQ ID NO: 142447 - RNA, 19 nt, Homo sapiens
  misc_RNA (1)...(19): siRNA sense strand
cgagucuuaugcuaaagga

SEQ ID NO: 142448 - RNA, 19 nt, Homo sapiens
  misc_RNA (1)...(19): siRNA sense strand
agacauuccuucagaucag

SEQ ID NO: 142449 - RNA, 19 nt, Homo sapiens
  misc_RNA (1)...(19): siRNA sense strand
acuguauccugaugagaaa

SEQ ID NO: 142450 - RNA, 19 nt, Homo sapiens
  misc_RNA (1)...(19): siRNA sense strand
gaacuguauccugaugaga

SEQ ID NO: 142451 - RNA, 19 nt, Homo sapiens
  misc_RNA (1)...(19): siRNA sense strand
gaaaccacuuuugcaagaa

SEQ ID NO: 142452 - RNA, 19 nt, Homo sapiens
  misc_RNA (1)...(19): siRNA sense strand
gaacgaaaccacuuuugca

SEQ ID NO: 142453 - RNA, 19 nt, Homo sapiens
  misc_RNA (1)...(19): siRNA sense strand
gggaacaauacacugagaa

SEQ ID NO: 142454 - RNA, 19 nt, Homo sapiens
  misc_RNA (1)...(19): siRNA sense strand
ugaccagcuugcagaggaa

SEQ ID NO: 142455 - RNA, 19 nt, Homo sapiens
  misc_RNA (1)...(19): siRNA sense strand
ggaacaauacacugagaac

SEQ ID NO: 142456 - RNA, 19 nt, Homo sapiens
  misc_RNA (1)...(19): siRNA sense strand
acagcgagucuuaugcuaa

SEQ ID NO: 142457 - RNA, 19 nt, Homo sapiens
  misc_RNA (1)...(19): siRNA sense strand
ucacagggagacauuccuu

SEQ ID NO: 142458 - RNA, 19 nt, Homo sapiens
  misc_RNA (1)...(19): siRNA sense strand
ggcgugggcugccuguuuu

SEQ ID NO: 142459 - RNA, 19 nt, Homo sapiens
  misc_RNA (1)...(19): siRNA sense strand
gaauauugaccagcuugca

SEQ ID NO: 142460 - RNA, 19 nt, Homo sapiens
  misc_RNA (1)...(19): siRNA sense strand
ccagaccugcgguuucuuc

SEQ ID NO: 142461 - RNA, 19 nt, Homo sapiens
  misc_RNA (1)...(19): siRNA sense strand
ccuucacgcucacaaacga

SEQ ID NO: 142462 - RNA, 19 nt, Homo sapiens
  misc_RNA (1)...(19): siRNA sense strand
accacggauuugacuauuu

SEQ ID NO: 142463 - RNA, 19 nt, Homo sapiens
  misc_RNA (1)...(19): siRNA sense strand
aaccacggauuugacuauu

SEQ ID NO: 142464 - RNA, 19 nt, Homo sapiens
  misc_RNA (1)...(19): siRNA sense strand
aacagcgagucuuaugcua

SEQ ID NO: 142465 - RNA, 19 nt, Homo sapiens
  misc_RNA (1)...(19): siRNA sense strand
aagucagcauggcuuauau

SEQ ID NO: 142466 - RNA, 19 nt, Homo sapiens
  misc_RNA (1)...(19): siRNA sense strand
aacugcaaaugccuuuaaa

SEQ ID NO: 142467 - RNA, 19 nt, Homo sapiens
  misc_RNA (1)...(19): siRNA sense strand
gaaggacacugacaacaag

SEQ ID NO: 142468 - RNA, 19 nt, Homo sapiens
  misc_RNA (1)...(19): siRNA sense strand
aaagaaggauggugagaug

SEQ ID NO: 142469 - RNA, 19 nt, Homo sapiens
  misc_RNA (1)...(19): siRNA sense strand
ggaaggacacugacaacaa

SEQ ID NO: 142470 - RNA, 19 nt, Homo sapiens
  misc_RNA (1)...(19): siRNA sense strand
gagauggaccggaacuuug

SEQ ID NO: 142471 - RNA, 19 nt, Homo sapiens
  misc_RNA (1)...(19): siRNA sense strand
gaacugcgugugcaucaug

SEQ ID NO: 142472 - RNA, 19 nt, Homo sapiens
  misc_RNA (1)...(19): siRNA sense strand
gaaagaaggauggugagau

SEQ ID NO: 142473 - RNA, 19 nt, Homo sapiens
  misc_RNA (1)...(19): siRNA sense strand
uguggaaccugucauccua

SEQ ID NO: 142474 - RNA, 19 nt, Homo sapiens
  misc_RNA (1)...(19): siRNA sense strand
gcuuugagcugcuguacca

SEQ ID NO: 142475 - RNA, 19 nt, Homo sapiens
  misc_RNA (1)...(19): siRNA sense strand
ggugaccacucggacagua

SEQ ID NO: 142476 - RNA, 19 nt, Homo sapiens
  misc_RNA (1)...(19): siRNA sense strand
ccacuucccaugugucuau

SEQ ID NO: 142477 - RNA, 19 nt, Homo sapiens
  misc_RNA (1)...(19): siRNA sense strand
acaagucgguggagaacug

SEQ ID NO: 142478 - RNA, 19 nt, Homo sapiens
  misc_RNA (1)...(19): siRNA sense strand
gcacacccacuucccaugu

SEQ ID NO: 142479 - RNA, 19 nt, Homo sapiens
  misc_RNA (1)...(19): siRNA sense strand
gcucaacaccauccacgaa

SEQ ID NO: 142480 - RNA, 19 nt, Homo sapiens
  misc_RNA (1)...(19): siRNA sense strand
gaugaugccagcugcuuug

SEQ ID NO: 142481 - RNA, 19 nt, Homo sapiens
  misc_RNA (1)...(19): siRNA sense strand
ggaaagaaggauggugaga

SEQ ID NO: 142482 - RNA, 19 nt, Homo sapiens
  misc_RNA (1)...(19): siRNA sense strand
gaggcaagaaggccaaaga

SEQ ID NO: 142483 - RNA, 19 nt, Homo sapiens
  misc_RNA (1)...(19): siRNA sense strand
cgugguaccuugcagaaag

SEQ ID NO: 142484 - RNA, 19 nt, Homo sapiens
  misc_RNA (1)...(19): siRNA sense strand
ucaacaccauccacgaaau

SEQ ID NO: 142485 - RNA, 19 nt, Homo sapiens
  misc_RNA (1)...(19): siRNA sense strand
ugagauggaccggaacuuu

SEQ ID NO: 142486 - RNA, 19 nt, Homo sapiens
  misc_RNA (1)...(19): siRNA sense strand
gagaacugcgugugcauca

SEQ ID NO: 142487 - RNA, 19 nt, Homo sapiens
  misc_RNA (1)...(19): siRNA sense strand
ggaugaugccagcugcuuu

SEQ ID NO: 142488 - RNA, 19 nt, Homo sapiens
  misc_RNA (1)...(19): siRNA sense strand
cguauggcuuggaggauga

SEQ ID NO: 142489 - RNA, 19 nt, Homo sapiens
  misc_RNA (1)...(19): siRNA sense strand
ccgcgacacugacaacaag

SEQ ID NO: 142490 - RNA, 19 nt, Homo sapiens
  misc_RNA (1)...(19): siRNA sense strand
caacaccauccacgaaauc

SEQ ID NO: 142491 - RNA, 19 nt, Homo sapiens
  misc_RNA (1)...(19): siRNA sense strand
caacgagguccgugagcuu

SEQ ID NO: 142492 - RNA, 19 nt, Homo sapiens
  misc_RNA (1)...(19): siRNA sense strand
gugguaccuugcagaaaga

SEQ ID NO: 142493 - RNA, 19 nt, Homo sapiens
  misc_RNA (1)...(19): siRNA sense strand
ucccaugugucuauuguca

SEQ ID NO: 142494 - RNA, 19 nt, Homo sapiens
  misc_RNA (1)...(19): siRNA sense strand
ccgccuaccugcagcaucu

SEQ ID NO: 142495 - RNA, 19 nt, Homo sapiens
  misc_RNA (1)...(19): siRNA sense strand
agauggaccggaacuuuga

SEQ ID NO: 142496 - RNA, 19 nt, Homo sapiens
  misc_RNA (1)...(19): siRNA sense strand
uacaaggagcugcguggua

SEQ ID NO: 142497 - RNA, 19 nt, Homo sapiens
  misc_RNA (1)...(19): siRNA sense strand
cgccauggcugagcuugug

SEQ ID NO: 142498 - RNA, 19 nt, Homo sapiens
  misc_RNA (1)...(19): siRNA sense strand
ucacuggcacccuguggaa

SEQ ID NO: 142499 - RNA, 19 nt, Homo sapiens
  misc_RNA (1)...(19): siRNA sense strand
acaacaagucgguggagaa

SEQ ID NO: 142500 - RNA, 19 nt, Homo sapiens
  misc_RNA (1)...(19): siRNA sense strand
ccuaccacgugcacaagga

SEQ ID NO: 142501 - RNA, 19 nt, Homo sapiens
  misc_RNA (1)...(19): siRNA sense strand
gcgcaacaaagaccucauc

SEQ ID NO: 142502 - RNA, 19 nt, Homo sapiens
  misc_RNA (1)...(19): siRNA sense strand
uggaaccugucauccuaug

SEQ ID NO: 142503 - RNA, 19 nt, Homo sapiens
  misc_RNA (1)...(19): siRNA sense strand
gagccuugagggcgagaaa

SEQ ID NO: 142504 - RNA, 19 nt, Homo sapiens
  misc_RNA (1)...(19): siRNA sense strand
ucaccaagacugucaagac

SEQ ID NO: 142505 - RNA, 19 nt, Homo sapiens
  misc_RNA (1)...(19): siRNA sense strand
acggagagccggaacuuca

SEQ ID NO: 142506 - RNA, 19 nt, Homo sapiens
  misc_RNA (1)...(19): siRNA sense strand
caacaagucgguggagaac

SEQ ID NO: 142507 - RNA, 19 nt, Homo sapiens
  misc_RNA (1)...(19): siRNA sense strand
gaaugugagcuccgauggu

SEQ ID NO: 142508 - RNA, 19 nt, Homo sapiens
  misc_RNA (1)...(19): siRNA sense strand
agaaggauggugagaugga

SEQ ID NO: 142509 - RNA, 19 nt, Homo sapiens
  misc_RNA (1)...(19): siRNA sense strand
ucacggagagccggaacuu

SEQ ID NO: 142510 - RNA, 19 nt, Homo sapiens
  misc_RNA (1)...(19): siRNA sense strand
agaagcaacuccucuguga

SEQ ID NO: 142511 - RNA, 19 nt, Homo sapiens
  misc_RNA (1)...(19): siRNA sense strand
caacuccucugugaaccua

SEQ ID NO: 142512 - RNA, 19 nt, Homo sapiens
  misc_RNA (1)...(19): siRNA sense strand
ggaugucccuucugucucu

SEQ ID NO: 142513 - RNA, 19 nt, Homo sapiens
  misc_RNA (1)...(19): siRNA sense strand
gaaaagcagcagaaaagaa

SEQ ID NO: 142514 - RNA, 19 nt, Homo sapiens
  misc_RNA (1)...(19): siRNA sense strand
gaagcaacuccucugugaa

SEQ ID NO: 142515 - RNA, 19 nt, Homo sapiens
  misc_RNA (1)...(19): siRNA sense strand
gagaagcuccgagaugaca

SEQ ID NO: 142516 - RNA, 19 nt, Homo sapiens
  misc_RNA (1)...(19): siRNA sense strand
gcagaaaagcagcagaaaa

SEQ ID NO: 142517 - RNA, 19 nt, Homo sapiens
  misc_RNA (1)...(19): siRNA sense strand
aaaagcagcagaaaagaaa

SEQ ID NO: 142518 - RNA, 19 nt, Homo sapiens
  misc_RNA (1)...(19): siRNA sense strand
ggaugucacccgcuuacuc

SEQ ID NO: 142519 - RNA, 19 nt, Homo sapiens
  misc_RNA (1)...(19): siRNA sense strand
cagaaaagcagcagaaaag

SEQ ID NO: 142520 - RNA, 19 nt, Homo sapiens
  misc_RNA (1)...(19): siRNA sense strand
gcugaacaagaaauccaaa

SEQ ID NO: 142521 - RNA, 19 nt, Homo sapiens
  misc_RNA (1)...(19): siRNA sense strand
ggucuuccucugcuucuuc

SEQ ID NO: 142522 - RNA, 19 nt, Homo sapiens
  misc_RNA (1)...(19): siRNA sense strand
ucccuucugucucuauugu

SEQ ID NO: 142523 - RNA, 19 nt, Homo sapiens
  misc_RNA (1)...(19): siRNA sense strand
caaaguggauggugagaua

SEQ ID NO: 142524 - RNA, 19 nt, Homo sapiens
  misc_RNA (1)...(19): siRNA sense strand
gaaaugagaauuccaaaga

SEQ ID NO: 142525 - RNA, 19 nt, Homo sapiens
  misc_RNA (1)...(19): siRNA sense strand
ggugaaaucuacaaccaua

SEQ ID NO: 142526 - RNA, 19 nt, Homo sapiens
  misc_RNA (1)...(19): siRNA sense strand
cuaaaggucuuguuacauu

SEQ ID NO: 142527 - RNA, 19 nt, Homo sapiens
  misc_RNA (1)...(19): siRNA sense strand
guuaagaauuccugguuua

SEQ ID NO: 142528 - RNA, 19 nt, Homo sapiens
  misc_RNA (1)...(19): siRNA sense strand
guaaagaaacguuugauga

SEQ ID NO: 142529 - RNA, 19 nt, Homo sapiens
  misc_RNA (1)...(19): siRNA sense strand
gaagcuaaaggucuuguua

SEQ ID NO: 142530 - RNA, 19 nt, Homo sapiens
  misc_RNA (1)...(19): siRNA sense strand
ggagucagaccuuuguuua

SEQ ID NO: 142531 - RNA, 19 nt, Homo sapiens
  misc_RNA (1)...(19): siRNA sense strand
gaacugagagucccauuuc

SEQ ID NO: 142532 - RNA, 19 nt, Homo sapiens
  misc_RNA (1)...(19): siRNA sense strand
caauucgagugaagaaaua

SEQ ID NO: 142533 - RNA, 19 nt, Homo sapiens
  misc_RNA (1)...(19): siRNA sense strand
ugagggaacucuauuuguu

SEQ ID NO: 142534 - RNA, 19 nt, Homo sapiens
  misc_RNA (1)...(19): siRNA sense strand
ccaaguauauucggaagaa

SEQ ID NO: 142535 - RNA, 19 nt, Homo sapiens
  misc_RNA (1)...(19): siRNA sense strand
cuagaaagguggcagauca

SEQ ID NO: 142536 - RNA, 19 nt, Homo sapiens
  misc_RNA (1)...(19): siRNA sense strand
gaagugaacauuaugaagu

SEQ ID NO: 142537 - RNA, 19 nt, Homo sapiens
  misc_RNA (1)...(19): siRNA sense strand
caacugcugcuuuggauuu

SEQ ID NO: 142538 - RNA, 19 nt, Homo sapiens
  misc_RNA (1)...(19): siRNA sense strand
gagagacguuugaggauuc

SEQ ID NO: 142539 - RNA, 19 nt, Homo sapiens
  misc_RNA (1)...(19): siRNA sense strand
caaaugcagcccagaaauu

SEQ ID NO: 142540 - RNA, 19 nt, Homo sapiens
  misc_RNA (1)...(19): siRNA sense strand
gcaacagcauuuugaauuu

SEQ ID NO: 142541 - RNA, 19 nt, Homo sapiens
  misc_RNA (1)...(19): siRNA sense strand
ccagaaauuucccuucaau

SEQ ID NO: 142542 - RNA, 19 nt, Homo sapiens
  misc_RNA (1)...(19): siRNA sense strand
gguuaaauaucaucacugu

SEQ ID NO: 142543 - RNA, 19 nt, Homo sapiens
  misc_RNA (1)...(19): siRNA sense strand
ccguggaaaugguuaaaua

SEQ ID NO: 142544 - RNA, 19 nt, Homo sapiens
  misc_RNA (1)...(19): siRNA sense strand
uauguuggaugguguguuu

SEQ ID NO: 142545 - RNA, 19 nt, Homo sapiens
  misc_RNA (1)...(19): siRNA sense strand
gauagaaacugugaagaac

SEQ ID NO: 142546 - RNA, 19 nt, Homo sapiens
  misc_RNA (1)...(19): siRNA sense strand
uuacuaccgucaagucuuu

SEQ ID NO: 142547 - RNA, 19 nt, Homo sapiens
  misc_RNA (1)...(19): siRNA sense strand
gaacucuauuuguuugaug

SEQ ID NO: 142548 - RNA, 19 nt, Homo sapiens
  misc_RNA (1)...(19): siRNA sense strand
ggaaacuuaugacauuaca

SEQ ID NO: 142549 - RNA, 19 nt, Homo sapiens
  misc_RNA (1)...(19): siRNA sense strand
uuaaagcaaugacagaaga

SEQ ID NO: 142550 - RNA, 19 nt, Homo sapiens
  misc_RNA (1)...(19): siRNA sense strand
ccaaagaaggauauuacua

SEQ ID NO: 142551 - RNA, 19 nt, Homo sapiens
  misc_RNA (1)...(19): siRNA sense strand
aagaauuccugguuuaaga

SEQ ID NO: 142552 - RNA, 19 nt, Homo sapiens
  misc_RNA (1)...(19): siRNA sense strand
uagaaacugugaagaacaa

SEQ ID NO: 142553 - RNA, 19 nt, Homo sapiens
  misc_RNA (1)...(19): siRNA sense strand
gcacacagagguccagaug

SEQ ID NO: 142554 - RNA, 19 nt, Homo sapiens
  misc_RNA (1)...(19): siRNA sense strand
cuuggaaacuuaugacauu

SEQ ID NO: 142555 - RNA, 19 nt, Homo sapiens
  misc_RNA (1)...(19): siRNA sense strand
agucagaccuuuguuuaaa

SEQ ID NO: 142556 - RNA, 19 nt, Homo sapiens
  misc_RNA (1)...(19): siRNA sense strand
gagggaacucuauuuguuu

SEQ ID NO: 142557 - RNA, 19 nt, Homo sapiens
  misc_RNA (1)...(19): siRNA sense strand
caaagaaggauauuacuac

SEQ ID NO: 142558 - RNA, 19 nt, Homo sapiens
  misc_RNA (1)...(19): siRNA sense strand
gaaagguggcagaucauau

SEQ ID NO: 142559 - RNA, 19 nt, Homo sapiens
  misc_RNA (1)...(19): siRNA sense strand
gaugauugccuuucuguuc

SEQ ID NO: 142560 - RNA, 19 nt, Homo sapiens
  misc_RNA (1)...(19): siRNA sense strand
gcccagaaauuucccuuca

SEQ ID NO: 142561 - RNA, 19 nt, Homo sapiens
  misc_RNA (1)...(19): siRNA sense strand
uaaaggucuuguuacauug

SEQ ID NO: 142562 - RNA, 19 nt, Homo sapiens
  misc_RNA (1)...(19): siRNA sense strand
acacagagguccagaugca

SEQ ID NO: 142563 - RNA, 19 nt, Homo sapiens
  misc_RNA (1)...(19): siRNA sense strand
ccaaagaaugggauagaaa

SEQ ID NO: 142564 - RNA, 19 nt, Homo sapiens
  misc_RNA (1)...(19): siRNA sense strand
ggaauacguugaacaucag

SEQ ID NO: 142565 - RNA, 19 nt, Homo sapiens
  misc_RNA (1)...(19): siRNA sense strand
ggguagagauacauaugga

SEQ ID NO: 142566 - RNA, 19 nt, Homo sapiens
  misc_RNA (1)...(19): siRNA sense strand
ggagaaggaucagaugaac

SEQ ID NO: 142567 - RNA, 19 nt, Homo sapiens
  misc_RNA (1)...(19): siRNA sense strand
gaugguguguuugcauuug

SEQ ID NO: 142568 - RNA, 19 nt, Homo sapiens
  misc_RNA (1)...(19): siRNA sense strand
gaaauuucccuucaauacu

SEQ ID NO: 142569 - RNA, 19 nt, Homo sapiens
  misc_RNA (1)...(19): siRNA sense strand
gcaaaugcagcccagaaau

SEQ ID NO: 142570 - RNA, 19 nt, Homo sapiens
  misc_RNA (1)...(19): siRNA sense strand
aggaauacguugaacauca

SEQ ID NO: 142571 - RNA, 19 nt, Homo sapiens
  misc_RNA (1)...(19): siRNA sense strand
gcauucaggcucuggauga

SEQ ID NO: 142572 - RNA, 19 nt, Homo sapiens
  misc_RNA (1)...(19): siRNA sense strand
gguggcagaucauauugga

SEQ ID NO: 142573 - RNA, 19 nt, Homo sapiens
  misc_RNA (1)...(19): siRNA sense strand
aaagaaacguuugaugaca

SEQ ID NO: 142574 - RNA, 19 nt, Homo sapiens
  misc_RNA (1)...(19): siRNA sense strand
gaaaucuacaaccauaaga

SEQ ID NO: 142575 - RNA, 19 nt, Homo sapiens
  misc_RNA (1)...(19): siRNA sense strand
cuacaagucagcugucaaa

SEQ ID NO: 142576 - RNA, 19 nt, Homo sapiens
  misc_RNA (1)...(19): siRNA sense strand
cagaucauauuggaaguga

SEQ ID NO: 142577 - RNA, 19 nt, Homo sapiens
  misc_RNA (1)...(19): siRNA sense strand
aaagguggcagaucauauu

SEQ ID NO: 142578 - RNA, 19 nt, Homo sapiens
  misc_RNA (1)...(19): siRNA sense strand
caaaguugcauccguggaa

SEQ ID NO: 142579 - RNA, 19 nt, Homo sapiens
  misc_RNA (1)...(19): siRNA sense strand
ggaacucuauuuguuugau

SEQ ID NO: 142580 - RNA, 19 nt, Homo sapiens
  misc_RNA (1)...(19): siRNA sense strand
gagucagaccuuuguuuaa

SEQ ID NO: 142581 - RNA, 19 nt, Homo sapiens
  misc_RNA (1)...(19): siRNA sense strand
gaugacagacagaaggauu

SEQ ID NO: 142582 - RNA, 19 nt, Homo sapiens
  misc_RNA (1)...(19): siRNA sense strand
ggauacugccaauaagaaa

SEQ ID NO: 142583 - RNA, 19 nt, Homo sapiens
  misc_RNA (1)...(19): siRNA sense strand
ggauauuacuaccgucaag

SEQ ID NO: 142584 - RNA, 19 nt, Homo sapiens
  misc_RNA (1)...(19): siRNA sense strand
ccaaucugauacccaaaga

SEQ ID NO: 142585 - RNA, 19 nt, Homo sapiens
  misc_RNA (1)...(19): siRNA sense strand
gagagucccauuucuagau

SEQ ID NO: 142586 - RNA, 19 nt, Homo sapiens
  misc_RNA (1)...(19): siRNA sense strand
uuacaauggugaaaucuac

SEQ ID NO: 142587 - RNA, 19 nt, Homo sapiens
  misc_RNA (1)...(19): siRNA sense strand
agagagacguuugaggauu

SEQ ID NO: 142588 - RNA, 19 nt, Homo sapiens
  misc_RNA (1)...(19): siRNA sense strand
uuacgcaggguuacauaua

SEQ ID NO: 142589 - RNA, 19 nt, Homo sapiens
  misc_RNA (1)...(19): siRNA sense strand
ggaagacagccccgauuua

SEQ ID NO: 142590 - RNA, 19 nt, Homo sapiens
  misc_RNA (1)...(19): siRNA sense strand
gcacuccgcgacucccuuu

SEQ ID NO: 142591 - RNA, 19 nt, Homo sapiens
  misc_RNA (1)...(19): siRNA sense strand
cauauggagucagaccuuu

SEQ ID NO: 142592 - RNA, 19 nt, Homo sapiens
  misc_RNA (1)...(19): siRNA sense strand
caaaggaggaauugagcaa

SEQ ID NO: 142593 - RNA, 19 nt, Homo sapiens
  misc_RNA (1)...(19): siRNA sense strand
gcaauuggcauggaagaca

SEQ ID NO: 142594 - RNA, 19 nt, Homo sapiens
  misc_RNA (1)...(19): siRNA sense strand
ucagguugaugaugcaaug

SEQ ID NO: 142595 - RNA, 19 nt, Homo sapiens
  misc_RNA (1)...(19): siRNA sense strand
agaaggaucagaugaacuu

SEQ ID NO: 142596 - RNA, 19 nt, Homo sapiens
  misc_RNA (1)...(19): siRNA sense strand
guaguugacccgcuguuug

SEQ ID NO: 142597 - RNA, 19 nt, Homo sapiens
  misc_RNA (1)...(19): siRNA sense strand
ccaauucgagugaagaaau

SEQ ID NO: 142598 - RNA, 19 nt, Homo sapiens
  misc_RNA (1)...(19): siRNA sense strand
cagaaauuucccuucaaua

SEQ ID NO: 142599 - RNA, 19 nt, Homo sapiens
  misc_RNA (1)...(19): siRNA sense strand
agauagaaacugugaagaa

SEQ ID NO: 142600 - RNA, 19 nt, Homo sapiens
  misc_RNA (1)...(19): siRNA sense strand
agauacauauggagucaga

SEQ ID NO: 142601 - RNA, 19 nt, Homo sapiens
  misc_RNA (1)...(19): siRNA sense strand
agaaacguuugaugacaga

SEQ ID NO: 142602 - RNA, 19 nt, Homo sapiens
  misc_RNA (1)...(19): siRNA sense strand
aaauuucccuucaauacuc

SEQ ID NO: 142603 - RNA, 19 nt, Homo sapiens
  misc_RNA (1)...(19): siRNA sense strand
gaauuccugguuuaagauu

SEQ ID NO: 142604 - RNA, 19 nt, Homo sapiens
  misc_RNA (1)...(19): siRNA sense strand
ggaagugaacauuaugaag

SEQ ID NO: 142605 - RNA, 19 nt, Homo sapiens
  misc_RNA (1)...(19): siRNA sense strand
ccagaaaugagaauuccaa

SEQ ID NO: 142606 - RNA, 19 nt, Homo sapiens
  misc_RNA (1)...(19): siRNA sense strand
gagagugagaggcuucuga

SEQ ID NO: 142607 - RNA, 19 nt, Homo sapiens
  misc_RNA (1)...(19): siRNA sense strand
gaaggaucagaugaacuua

SEQ ID NO: 142608 - RNA, 19 nt, Homo sapiens
  misc_RNA (1)...(19): siRNA sense strand
caauguggagaaacucuuu

SEQ ID NO: 142609 - RNA, 19 nt, Homo sapiens
  misc_RNA (1)...(19): siRNA sense strand
uaugaagauugcacacaga

SEQ ID NO: 142610 - RNA, 19 nt, Homo sapiens
  misc_RNA (1)...(19): siRNA sense strand
gaacuuacgcaggguuaca

SEQ ID NO: 142611 - RNA, 19 nt, Homo sapiens
  misc_RNA (1)...(19): siRNA sense strand
cuccagacauuugcaauug

SEQ ID NO: 142612 - RNA, 19 nt, Homo sapiens
  misc_RNA (1)...(19): siRNA sense strand
aaugacagaagauggauuu

SEQ ID NO: 142613 - RNA, 19 nt, Homo sapiens
  misc_RNA (1)...(19): siRNA sense strand
agaaauuucccuucaauac

SEQ ID NO: 142614 - RNA, 19 nt, Homo sapiens
  misc_RNA (1)...(19): siRNA sense strand
cuuaugacauuacaacagu

SEQ ID NO: 142615 - RNA, 19 nt, Homo sapiens
  misc_RNA (1)...(19): siRNA sense strand
uaaagaaacguuugaugac

SEQ ID NO: 142616 - RNA, 19 nt, Homo sapiens
  misc_RNA (1)...(19): siRNA sense strand
aguauccucuccagacauu

SEQ ID NO: 142617 - RNA, 19 nt, Homo sapiens
  misc_RNA (1)...(19): siRNA sense strand
ggcaaaugcagcccagaaa

SEQ ID NO: 142618 - RNA, 19 nt, Homo sapiens
  misc_RNA (1)...(19): siRNA sense strand
gguugaugaugcaaugaug

SEQ ID NO: 142619 - RNA, 19 nt, Homo sapiens
  misc_RNA (1)...(19): siRNA sense strand
agccuucagugauggaaua

SEQ ID NO: 142620 - RNA, 19 nt, Homo sapiens
  misc_RNA (1)...(19): siRNA sense strand
ucugauacccaaagagauu

SEQ ID NO: 142621 - RNA, 19 nt, Homo sapiens
  misc_RNA (1)...(19): siRNA sense strand
gagagagacguuugaggau

SEQ ID NO: 142622 - RNA, 19 nt, Homo sapiens
  misc_RNA (1)...(19): siRNA sense strand
uacgcaggguuacauauau

SEQ ID NO: 142623 - RNA, 19 nt, Homo sapiens
  misc_RNA (1)...(19): siRNA sense strand
caaaguggauggugagaua

SEQ ID NO: 142624 - RNA, 19 nt, Homo sapiens
  misc_RNA (1)...(19): siRNA sense strand
gaaaugagaauuccaaaga

SEQ ID NO: 142625 - RNA, 19 nt, Homo sapiens
  misc_RNA (1)...(19): siRNA sense strand
ggugaaaucuacaaccaua

SEQ ID NO: 142626 - RNA, 19 nt, Homo sapiens
  misc_RNA (1)...(19): siRNA sense strand
cuaaaggucuuguuacauu

SEQ ID NO: 142627 - RNA, 19 nt, Homo sapiens
  misc_RNA (1)...(19): siRNA sense strand
guuaagaauuccugguuua

SEQ ID NO: 142628 - RNA, 19 nt, Homo sapiens
  misc_RNA (1)...(19): siRNA sense strand
guaaagaaacguuugauga

SEQ ID NO: 142629 - RNA, 19 nt, Homo sapiens
  misc_RNA (1)...(19): siRNA sense strand
gaagcuaaaggucuuguua

SEQ ID NO: 142630 - RNA, 19 nt, Homo sapiens
  misc_RNA (1)...(19): siRNA sense strand
ggagucagaccuuuguuua

SEQ ID NO: 142631 - RNA, 19 nt, Homo sapiens
  misc_RNA (1)...(19): siRNA sense strand
gaacugagagucccauuuc

SEQ ID NO: 142632 - RNA, 19 nt, Homo sapiens
  misc_RNA (1)...(19): siRNA sense strand
caauucgagugaagaaaua

SEQ ID NO: 142633 - RNA, 19 nt, Homo sapiens
  misc_RNA (1)...(19): siRNA sense strand
ugagggaacucuauuuguu

SEQ ID NO: 142634 - RNA, 19 nt, Homo sapiens
  misc_RNA (1)...(19): siRNA sense strand
ccaaguauauucggaagaa

SEQ ID NO: 142635 - RNA, 19 nt, Homo sapiens
  misc_RNA (1)...(19): siRNA sense strand
cuagaaagguggcagauca

SEQ ID NO: 142636 - RNA, 19 nt, Homo sapiens
  misc_RNA (1)...(19): siRNA sense strand
gaagugaacauuaugaagu

SEQ ID NO: 142637 - RNA, 19 nt, Homo sapiens
  misc_RNA (1)...(19): siRNA sense strand
caacugcugcuuuggauuu

SEQ ID NO: 142638 - RNA, 19 nt, Homo sapiens
  misc_RNA (1)...(19): siRNA sense strand
gagagacguuugaggauuc

SEQ ID NO: 142639 - RNA, 19 nt, Homo sapiens
  misc_RNA (1)...(19): siRNA sense strand
caaaugcagcccagaaauu

SEQ ID NO: 142640 - RNA, 19 nt, Homo sapiens
  misc_RNA (1)...(19): siRNA sense strand
gcaacagcauuuugaauuu

SEQ ID NO: 142641 - RNA, 19 nt, Homo sapiens
  misc_RNA (1)...(19): siRNA sense strand
ccagaaauuucccuucaau

SEQ ID NO: 142642 - RNA, 19 nt, Homo sapiens
  misc_RNA (1)...(19): siRNA sense strand
gguuaaauaucaucacugu

SEQ ID NO: 142643 - RNA, 19 nt, Homo sapiens
  misc_RNA (1)...(19): siRNA sense strand
ccguggaaaugguuaaaua

SEQ ID NO: 142644 - RNA, 19 nt, Homo sapiens
  misc_RNA (1)...(19): siRNA sense strand
uauguuggaugguguguuu

SEQ ID NO: 142645 - RNA, 19 nt, Homo sapiens
  misc_RNA (1)...(19): siRNA sense strand
gauagaaacugugaagaac

SEQ ID NO: 142646 - RNA, 19 nt, Homo sapiens
  misc_RNA (1)...(19): siRNA sense strand
uuacuaccgucaagucuuu

SEQ ID NO: 142647 - RNA, 19 nt, Homo sapiens
  misc_RNA (1)...(19): siRNA sense strand
gaacucuauuuguuugaug

SEQ ID NO: 142648 - RNA, 19 nt, Homo sapiens
  misc_RNA (1)...(19): siRNA sense strand
ggaaacuuaugacauuaca

SEQ ID NO: 142649 - RNA, 19 nt, Homo sapiens
  misc_RNA (1)...(19): siRNA sense strand
uuaaagcaaugacagaaga

SEQ ID NO: 142650 - RNA, 19 nt, Homo sapiens
  misc_RNA (1)...(19): siRNA sense strand
ccaaagaaggauauuacua

SEQ ID NO: 142651 - RNA, 19 nt, Homo sapiens
  misc_RNA (1)...(19): siRNA sense strand
aagaauuccugguuuaaga

SEQ ID NO: 142652 - RNA, 19 nt, Homo sapiens
  misc_RNA (1)...(19): siRNA sense strand
uagaaacugugaagaacaa

SEQ ID NO: 142653 - RNA, 19 nt, Homo sapiens
  misc_RNA (1)...(19): siRNA sense strand
gcacacagagguccagaug

SEQ ID NO: 142654 - RNA, 19 nt, Homo sapiens
  misc_RNA (1)...(19): siRNA sense strand
cuuggaaacuuaugacauu

SEQ ID NO: 142655 - RNA, 19 nt, Homo sapiens
  misc_RNA (1)...(19): siRNA sense strand
agucagaccuuuguuuaaa

SEQ ID NO: 142656 - RNA, 19 nt, Homo sapiens
  misc_RNA (1)...(19): siRNA sense strand
gagggaacucuauuuguuu

SEQ ID NO: 142657 - RNA, 19 nt, Homo sapiens
  misc_RNA (1)...(19): siRNA sense strand
caaagaaggauauuacuac

SEQ ID NO: 142658 - RNA, 19 nt, Homo sapiens
  misc_RNA (1)...(19): siRNA sense strand
gaaagguggcagaucauau

SEQ ID NO: 142659 - RNA, 19 nt, Homo sapiens
  misc_RNA (1)...(19): siRNA sense strand
gaugauugccuuucuguuc

SEQ ID NO: 142660 - RNA, 19 nt, Homo sapiens
  misc_RNA (1)...(19): siRNA sense strand
gcccagaaauuucccuuca

SEQ ID NO: 142661 - RNA, 19 nt, Homo sapiens
  misc_RNA (1)...(19): siRNA sense strand
uaaaggucuuguuacauug

SEQ ID NO: 142662 - RNA, 19 nt, Homo sapiens
  misc_RNA (1)...(19): siRNA sense strand
acacagagguccagaugca

SEQ ID NO: 142663 - RNA, 19 nt, Homo sapiens
  misc_RNA (1)...(19): siRNA sense strand
ccaaagaaugggauagaaa

SEQ ID NO: 142664 - RNA, 19 nt, Homo sapiens
  misc_RNA (1)...(19): siRNA sense strand
ggaauacguugaacaucag

SEQ ID NO: 142665 - RNA, 19 nt, Homo sapiens
  misc_RNA (1)...(19): siRNA sense strand
ggguagagauacauaugga

SEQ ID NO: 142666 - RNA, 19 nt, Homo sapiens
  misc_RNA (1)...(19): siRNA sense strand
ggagaaggaucagaugaac

SEQ ID NO: 142667 - RNA, 19 nt, Homo sapiens
  misc_RNA (1)...(19): siRNA sense strand
gaugguguguuugcauuug

SEQ ID NO: 142668 - RNA, 19 nt, Homo sapiens
  misc_RNA (1)...(19): siRNA sense strand
gaaauuucccuucaauacu

SEQ ID NO: 142669 - RNA, 19 nt, Homo sapiens
  misc_RNA (1)...(19): siRNA sense strand
gcaaaugcagcccagaaau

SEQ ID NO: 142670 - RNA, 19 nt, Homo sapiens
  misc_RNA (1)...(19): siRNA sense strand
aggaauacguugaacauca

SEQ ID NO: 142671 - RNA, 19 nt, Homo sapiens
  misc_RNA (1)...(19): siRNA sense strand
gcauucaggcucuggauga

SEQ ID NO: 142672 - RNA, 19 nt, Homo sapiens
  misc_RNA (1)...(19): siRNA sense strand
gguggcagaucauauugga

SEQ ID NO: 142673 - RNA, 19 nt, Homo sapiens
  misc_RNA (1)...(19): siRNA sense strand
aaagaaacguuugaugaca

SEQ ID NO: 142674 - RNA, 19 nt, Homo sapiens
  misc_RNA (1)...(19): siRNA sense strand
gaaaucuacaaccauaaga

SEQ ID NO: 142675 - RNA, 19 nt, Homo sapiens
  misc_RNA (1)...(19): siRNA sense strand
cuacaagucagcugucaaa

SEQ ID NO: 142676 - RNA, 19 nt, Homo sapiens
  misc_RNA (1)...(19): siRNA sense strand
cagaucauauuggaaguga

SEQ ID NO: 142677 - RNA, 19 nt, Homo sapiens
  misc_RNA (1)...(19): siRNA sense strand
aaagguggcagaucauauu

SEQ ID NO: 142678 - RNA, 19 nt, Homo sapiens
  misc_RNA (1)...(19): siRNA sense strand
caaaguugcauccguggaa

SEQ ID NO: 142679 - RNA, 19 nt, Homo sapiens
  misc_RNA (1)...(19): siRNA sense strand
ggaacucuauuuguuugau

SEQ ID NO: 142680 - RNA, 19 nt, Homo sapiens
  misc_RNA (1)...(19): siRNA sense strand
gagucagaccuuuguuuaa

SEQ ID NO: 142681 - RNA, 19 nt, Homo sapiens
  misc_RNA (1)...(19): siRNA sense strand
gaugacagacagaaggauu

SEQ ID NO: 142682 - RNA, 19 nt, Homo sapiens
  misc_RNA (1)...(19): siRNA sense strand
ggauacugccaauaagaaa

SEQ ID NO: 142683 - RNA, 19 nt, Homo sapiens
  misc_RNA (1)...(19): siRNA sense strand
ggauauuacuaccgucaag

SEQ ID NO: 142684 - RNA, 19 nt, Homo sapiens
  misc_RNA (1)...(19): siRNA sense strand
ccaaucugauacccaaaga

SEQ ID NO: 142685 - RNA, 19 nt, Homo sapiens
  misc_RNA (1)...(19): siRNA sense strand
gagagucccauuucuagau

SEQ ID NO: 142686 - RNA, 19 nt, Homo sapiens
  misc_RNA (1)...(19): siRNA sense strand
uuacaauggugaaaucuac

SEQ ID NO: 142687 - RNA, 19 nt, Homo sapiens
  misc_RNA (1)...(19): siRNA sense strand
agagagacguuugaggauu

SEQ ID NO: 142688 - RNA, 19 nt, Homo sapiens
  misc_RNA (1)...(19): siRNA sense strand
uuacgcaggguuacauaua

SEQ ID NO: 142689 - RNA, 19 nt, Homo sapiens
  misc_RNA (1)...(19): siRNA sense strand
ggaagacagccccgauuua

SEQ ID NO: 142690 - RNA, 19 nt, Homo sapiens
  misc_RNA (1)...(19): siRNA sense strand
gcacuccgcgacucccuuu

SEQ ID NO: 142691 - RNA, 19 nt, Homo sapiens
  misc_RNA (1)...(19): siRNA sense strand
cauauggagucagaccuuu

SEQ ID NO: 142692 - RNA, 19 nt, Homo sapiens
  misc_RNA (1)...(19): siRNA sense strand
caaaggaggaauugagcaa

SEQ ID NO: 142693 - RNA, 19 nt, Homo sapiens
  misc_RNA (1)...(19): siRNA sense strand
gcaauuggcauggaagaca

SEQ ID NO: 142694 - RNA, 19 nt, Homo sapiens
  misc_RNA (1)...(19): siRNA sense strand
ucagguugaugaugcaaug

SEQ ID NO: 142695 - RNA, 19 nt, Homo sapiens
  misc_RNA (1)...(19): siRNA sense strand
agaaggaucagaugaacuu

SEQ ID NO: 142696 - RNA, 19 nt, Homo sapiens
  misc_RNA (1)...(19): siRNA sense strand
guaguugacccgcuguuug

SEQ ID NO: 142697 - RNA, 19 nt, Homo sapiens
  misc_RNA (1)...(19): siRNA sense strand
ccaauucgagugaagaaau

SEQ ID NO: 142698 - RNA, 19 nt, Homo sapiens
  misc_RNA (1)...(19): siRNA sense strand
cagaaauuucccuucaaua

SEQ ID NO: 142699 - RNA, 19 nt, Homo sapiens
  misc_RNA (1)...(19): siRNA sense strand
agauagaaacugugaagaa

SEQ ID NO: 142700 - RNA, 19 nt, Homo sapiens
  misc_RNA (1)...(19): siRNA sense strand
agauacauauggagucaga

SEQ ID NO: 142701 - RNA, 19 nt, Homo sapiens
  misc_RNA (1)...(19): siRNA sense strand
agaaacguuugaugacaga

SEQ ID NO: 142702 - RNA, 19 nt, Homo sapiens
  misc_RNA (1)...(19): siRNA sense strand
aaauuucccuucaauacuc

SEQ ID NO: 142703 - RNA, 19 nt, Homo sapiens
  misc_RNA (1)...(19): siRNA sense strand
gaauuccugguuuaagauu

SEQ ID NO: 142704 - RNA, 19 nt, Homo sapiens
  misc_RNA (1)...(19): siRNA sense strand
ggaagugaacauuaugaag

SEQ ID NO: 142705 - RNA, 19 nt, Homo sapiens
  misc_RNA (1)...(19): siRNA sense strand
ccagaaaugagaauuccaa

SEQ ID NO: 142706 - RNA, 19 nt, Homo sapiens
  misc_RNA (1)...(19): siRNA sense strand
gagagugagaggcuucuga

SEQ ID NO: 142707 - RNA, 19 nt, Homo sapiens
  misc_RNA (1)...(19): siRNA sense strand
gaaggaucagaugaacuua

SEQ ID NO: 142708 - RNA, 19 nt, Homo sapiens
  misc_RNA (1)...(19): siRNA sense strand
caauguggagaaacucuuu

SEQ ID NO: 142709 - RNA, 19 nt, Homo sapiens
  misc_RNA (1)...(19): siRNA sense strand
uaugaagauugcacacaga

SEQ ID NO: 142710 - RNA, 19 nt, Homo sapiens
  misc_RNA (1)...(19): siRNA sense strand
gaacuuacgcaggguuaca

SEQ ID NO: 142711 - RNA, 19 nt, Homo sapiens
  misc_RNA (1)...(19): siRNA sense strand
cuccagacauuugcaauug

SEQ ID NO: 142712 - RNA, 19 nt, Homo sapiens
  misc_RNA (1)...(19): siRNA sense strand
aaugacagaagauggauuu

SEQ ID NO: 142713 - RNA, 19 nt, Homo sapiens
  misc_RNA (1)...(19): siRNA sense strand
agaaauuucccuucaauac

SEQ ID NO: 142714 - RNA, 19 nt, Homo sapiens
  misc_RNA (1)...(19): siRNA sense strand
cuuaugacauuacaacagu

SEQ ID NO: 142715 - RNA, 19 nt, Homo sapiens
  misc_RNA (1)...(19): siRNA sense strand
uaaagaaacguuugaugac

SEQ ID NO: 142716 - RNA, 19 nt, Homo sapiens
  misc_RNA (1)...(19): siRNA sense strand
aguauccucuccagacauu

SEQ ID NO: 142717 - RNA, 19 nt, Homo sapiens
  misc_RNA (1)...(19): siRNA sense strand
ggcaaaugcagcccagaaa

SEQ ID NO: 142718 - RNA, 19 nt, Homo sapiens
  misc_RNA (1)...(19): siRNA sense strand
gguugaugaugcaaugaug

SEQ ID NO: 142719 - RNA, 19 nt, Homo sapiens
  misc_RNA (1)...(19): siRNA sense strand
agccuucagugauggaaua

SEQ ID NO: 142720 - RNA, 19 nt, Homo sapiens
  misc_RNA (1)...(19): siRNA sense strand
ucugauacccaaagagauu

SEQ ID NO: 142721 - RNA, 19 nt, Homo sapiens
  misc_RNA (1)...(19): siRNA sense strand
gagagagacguuugaggau

SEQ ID NO: 142722 - RNA, 19 nt, Homo sapiens
  misc_RNA (1)...(19): siRNA sense strand
uacgcaggguuacauauau

SEQ ID NO: 142723 - RNA, 19 nt, Homo sapiens
  misc_RNA (1)...(19): siRNA sense strand
caaaguggauggugagaua

SEQ ID NO: 142724 - RNA, 19 nt, Homo sapiens
  misc_RNA (1)...(19): siRNA sense strand
gaaaugagaauuccaaaga

SEQ ID NO: 142725 - RNA, 19 nt, Homo sapiens
  misc_RNA (1)...(19): siRNA sense strand
ggugaaaucuacaaccaua

SEQ ID NO: 142726 - RNA, 19 nt, Homo sapiens
  misc_RNA (1)...(19): siRNA sense strand
cuaaaggucuuguuacauu

SEQ ID NO: 142727 - RNA, 19 nt, Homo sapiens
  misc_RNA (1)...(19): siRNA sense strand
guuaagaauuccugguuua

SEQ ID NO: 142728 - RNA, 19 nt, Homo sapiens
  misc_RNA (1)...(19): siRNA sense strand
guaaagaaacguuugauga

SEQ ID NO: 142729 - RNA, 19 nt, Homo sapiens
  misc_RNA (1)...(19): siRNA sense strand
gaagcuaaaggucuuguua

SEQ ID NO: 142730 - RNA, 19 nt, Homo sapiens
  misc_RNA (1)...(19): siRNA sense strand
ggagucagaccuuuguuua

SEQ ID NO: 142731 - RNA, 19 nt, Homo sapiens
  misc_RNA (1)...(19): siRNA sense strand
gaacugagagucccauuuc

SEQ ID NO: 142732 - RNA, 19 nt, Homo sapiens
  misc_RNA (1)...(19): siRNA sense strand
caauucgagugaagaaaua

SEQ ID NO: 142733 - RNA, 19 nt, Homo sapiens
  misc_RNA (1)...(19): siRNA sense strand
ugagggaacucuauuuguu

SEQ ID NO: 142734 - RNA, 19 nt, Homo sapiens
  misc_RNA (1)...(19): siRNA sense strand
ccaaguauauucggaagaa

SEQ ID NO: 142735 - RNA, 19 nt, Homo sapiens
  misc_RNA (1)...(19): siRNA sense strand
cuagaaagguggcagauca

SEQ ID NO: 142736 - RNA, 19 nt, Homo sapiens
  misc_RNA (1)...(19): siRNA sense strand
gaagugaacauuaugaagu

SEQ ID NO: 142737 - RNA, 19 nt, Homo sapiens
  misc_RNA (1)...(19): siRNA sense strand
caacugcugcuuuggauuu

SEQ ID NO: 142738 - RNA, 19 nt, Homo sapiens
  misc_RNA (1)...(19): siRNA sense strand
gagagacguuugaggauuc

SEQ ID NO: 142739 - RNA, 19 nt, Homo sapiens
  misc_RNA (1)...(19): siRNA sense strand
caaaugcagcccagaaauu

SEQ ID NO: 142740 - RNA, 19 nt, Homo sapiens
  misc_RNA (1)...(19): siRNA sense strand
gcaacagcauuuugaauuu

SEQ ID NO: 142741 - RNA, 19 nt, Homo sapiens
  misc_RNA (1)...(19): siRNA sense strand
ccagaaauuucccuucaau

SEQ ID NO: 142742 - RNA, 19 nt, Homo sapiens
  misc_RNA (1)...(19): siRNA sense strand
gguuaaauaucaucacugu

SEQ ID NO: 142743 - RNA, 19 nt, Homo sapiens
  misc_RNA (1)...(19): siRNA sense strand
ccguggaaaugguuaaaua

SEQ ID NO: 142744 - RNA, 19 nt, Homo sapiens
  misc_RNA (1)...(19): siRNA sense strand
uauguuggaugguguguuu

SEQ ID NO: 142745 - RNA, 19 nt, Homo sapiens
  misc_RNA (1)...(19): siRNA sense strand
gauagaaacugugaagaac

SEQ ID NO: 142746 - RNA, 19 nt, Homo sapiens
  misc_RNA (1)...(19): siRNA sense strand
uuacuaccgucaagucuuu

SEQ ID NO: 142747 - RNA, 19 nt, Homo sapiens
  misc_RNA (1)...(19): siRNA sense strand
gaacucuauuuguuugaug

SEQ ID NO: 142748 - RNA, 19 nt, Homo sapiens
  misc_RNA (1)...(19): siRNA sense strand
ggaaacuuaugacauuaca

SEQ ID NO: 142749 - RNA, 19 nt, Homo sapiens
  misc_RNA (1)...(19): siRNA sense strand
uuaaagcaaugacagaaga

SEQ ID NO: 142750 - RNA, 19 nt, Homo sapiens
  misc_RNA (1)...(19): siRNA sense strand
ccaaagaaggauauuacua

SEQ ID NO: 142751 - RNA, 19 nt, Homo sapiens
  misc_RNA (1)...(19): siRNA sense strand
aagaauuccugguuuaaga

SEQ ID NO: 142752 - RNA, 19 nt, Homo sapiens
  misc_RNA (1)...(19): siRNA sense strand
uagaaacugugaagaacaa

SEQ ID NO: 142753 - RNA, 19 nt, Homo sapiens
  misc_RNA (1)...(19): siRNA sense strand
gcacacagagguccagaug

SEQ ID NO: 142754 - RNA, 19 nt, Homo sapiens
  misc_RNA (1)...(19): siRNA sense strand
cuuggaaacuuaugacauu

SEQ ID NO: 142755 - RNA, 19 nt, Homo sapiens
  misc_RNA (1)...(19): siRNA sense strand
agucagaccuuuguuuaaa

SEQ ID NO: 142756 - RNA, 19 nt, Homo sapiens
  misc_RNA (1)...(19): siRNA sense strand
gagggaacucuauuuguuu

SEQ ID NO: 142757 - RNA, 19 nt, Homo sapiens
  misc_RNA (1)...(19): siRNA sense strand
caaagaaggauauuacuac

SEQ ID NO: 142758 - RNA, 19 nt, Homo sapiens
  misc_RNA (1)...(19): siRNA sense strand
gaaagguggcagaucauau

SEQ ID NO: 142759 - RNA, 19 nt, Homo sapiens
  misc_RNA (1)...(19): siRNA sense strand
gaugauugccuuucuguuc

SEQ ID NO: 142760 - RNA, 19 nt, Homo sapiens
  misc_RNA (1)...(19): siRNA sense strand
gcccagaaauuucccuuca

SEQ ID NO: 142761 - RNA, 19 nt, Homo sapiens
  misc_RNA (1)...(19): siRNA sense strand
uaaaggucuuguuacauug

SEQ ID NO: 142762 - RNA, 19 nt, Homo sapiens
  misc_RNA (1)...(19): siRNA sense strand
acacagagguccagaugca

SEQ ID NO: 142763 - RNA, 19 nt, Homo sapiens
  misc_RNA (1)...(19): siRNA sense strand
ccaaagaaugggauagaaa

SEQ ID NO: 142764 - RNA, 19 nt, Homo sapiens
  misc_RNA (1)...(19): siRNA sense strand
ggaauacguugaacaucag

SEQ ID NO: 142765 - RNA, 19 nt, Homo sapiens
  misc_RNA (1)...(19): siRNA sense strand
ggguagagauacauaugga

SEQ ID NO: 142766 - RNA, 19 nt, Homo sapiens
  misc_RNA (1)...(19): siRNA sense strand
ggagaaggaucagaugaac

SEQ ID NO: 142767 - RNA, 19 nt, Homo sapiens
  misc_RNA (1)...(19): siRNA sense strand
gaugguguguuugcauuug

SEQ ID NO: 142768 - RNA, 19 nt, Homo sapiens
  misc_RNA (1)...(19): siRNA sense strand
gaaauuucccuucaauacu

SEQ ID NO: 142769 - RNA, 19 nt, Homo sapiens
  misc_RNA (1)...(19): siRNA sense strand
gcaaaugcagcccagaaau

SEQ ID NO: 142770 - RNA, 19 nt, Homo sapiens
  misc_RNA (1)...(19): siRNA sense strand
aggaauacguugaacauca

SEQ ID NO: 142771 - RNA, 19 nt, Homo sapiens
  misc_RNA (1)...(19): siRNA sense strand
gcauucaggcucuggauga

SEQ ID NO: 142772 - RNA, 19 nt, Homo sapiens
  misc_RNA (1)...(19): siRNA sense strand
gguggcagaucauauugga

SEQ ID NO: 142773 - RNA, 19 nt, Homo sapiens
  misc_RNA (1)...(19): siRNA sense strand
aaagaaacguuugaugaca

SEQ ID NO: 142774 - RNA, 19 nt, Homo sapiens
  misc_RNA (1)...(19): siRNA sense strand
gaaaucuacaaccauaaga

SEQ ID NO: 142775 - RNA, 19 nt, Homo sapiens
  misc_RNA (1)...(19): siRNA sense strand
cuacaagucagcugucaaa

SEQ ID NO: 142776 - RNA, 19 nt, Homo sapiens
  misc_RNA (1)...(19): siRNA sense strand
cagaucauauuggaaguga

SEQ ID NO: 142777 - RNA, 19 nt, Homo sapiens
  misc_RNA (1)...(19): siRNA sense strand
aaagguggcagaucauauu

SEQ ID NO: 142778 - RNA, 19 nt, Homo sapiens
  misc_RNA (1)...(19): siRNA sense strand
caaaguugcauccguggaa

SEQ ID NO: 142779 - RNA, 19 nt, Homo sapiens
  misc_RNA (1)...(19): siRNA sense strand
ggaacucuauuuguuugau

SEQ ID NO: 142780 - RNA, 19 nt, Homo sapiens
  misc_RNA (1)...(19): siRNA sense strand
gagucagaccuuuguuuaa

SEQ ID NO: 142781 - RNA, 19 nt, Homo sapiens
  misc_RNA (1)...(19): siRNA sense strand
gaugacagacagaaggauu

SEQ ID NO: 142782 - RNA, 19 nt, Homo sapiens
  misc_RNA (1)...(19): siRNA sense strand
ggauacugccaauaagaaa

SEQ ID NO: 142783 - RNA, 19 nt, Homo sapiens
  misc_RNA (1)...(19): siRNA sense strand
ggauauuacuaccgucaag

SEQ ID NO: 142784 - RNA, 19 nt, Homo sapiens
  misc_RNA (1)...(19): siRNA sense strand
ccaaucugauacccaaaga

SEQ ID NO: 142785 - RNA, 19 nt, Homo sapiens
  misc_RNA (1)...(19): siRNA sense strand
gagagucccauuucuagau

SEQ ID NO: 142786 - RNA, 19 nt, Homo sapiens
  misc_RNA (1)...(19): siRNA sense strand
uuacaauggugaaaucuac

SEQ ID NO: 142787 - RNA, 19 nt, Homo sapiens
  misc_RNA (1)...(19): siRNA sense strand
agagagacguuugaggauu

SEQ ID NO: 142788 - RNA, 19 nt, Homo sapiens
  misc_RNA (1)...(19): siRNA sense strand
uuacgcaggguuacauaua

SEQ ID NO: 142789 - RNA, 19 nt, Homo sapiens
  misc_RNA (1)...(19): siRNA sense strand
ggaagacagccccgauuua

SEQ ID NO: 142790 - RNA, 19 nt, Homo sapiens
  misc_RNA (1)...(19): siRNA sense strand
gcacuccgcgacucccuuu

SEQ ID NO: 142791 - RNA, 19 nt, Homo sapiens
  misc_RNA (1)...(19): siRNA sense strand
cauauggagucagaccuuu

SEQ ID NO: 142792 - RNA, 19 nt, Homo sapiens
  misc_RNA (1)...(19): siRNA sense strand
caaaggaggaauugagcaa

SEQ ID NO: 142793 - RNA, 19 nt, Homo sapiens
  misc_RNA (1)...(19): siRNA sense strand
gcaauuggcauggaagaca

SEQ ID NO: 142794 - RNA, 19 nt, Homo sapiens
  misc_RNA (1)...(19): siRNA sense strand
ucagguugaugaugcaaug

SEQ ID NO: 142795 - RNA, 19 nt, Homo sapiens
  misc_RNA (1)...(19): siRNA sense strand
agaaggaucagaugaacuu

SEQ ID NO: 142796 - RNA, 19 nt, Homo sapiens
  misc_RNA (1)...(19): siRNA sense strand
guaguugacccgcuguuug

SEQ ID NO: 142797 - RNA, 19 nt, Homo sapiens
  misc_RNA (1)...(19): siRNA sense strand
ccaauucgagugaagaaau

SEQ ID NO: 142798 - RNA, 19 nt, Homo sapiens
  misc_RNA (1)...(19): siRNA sense strand
cagaaauuucccuucaaua

SEQ ID NO: 142799 - RNA, 19 nt, Homo sapiens
  misc_RNA (1)...(19): siRNA sense strand
agauagaaacugugaagaa

SEQ ID NO: 142800 - RNA, 19 nt, Homo sapiens
  misc_RNA (1)...(19): siRNA sense strand
agauacauauggagucaga

SEQ ID NO: 142801 - RNA, 19 nt, Homo sapiens
  misc_RNA (1)...(19): siRNA sense strand
agaaacguuugaugacaga

SEQ ID NO: 142802 - RNA, 19 nt, Homo sapiens
  misc_RNA (1)...(19): siRNA sense strand
aaauuucccuucaauacuc

SEQ ID NO: 142803 - RNA, 19 nt, Homo sapiens
  misc_RNA (1)...(19): siRNA sense strand
gaauuccugguuuaagauu

SEQ ID NO: 142804 - RNA, 19 nt, Homo sapiens
  misc_RNA (1)...(19): siRNA sense strand
ggaagugaacauuaugaag

SEQ ID NO: 142805 - RNA, 19 nt, Homo sapiens
  misc_RNA (1)...(19): siRNA sense strand
ccagaaaugagaauuccaa

SEQ ID NO: 142806 - RNA, 19 nt, Homo sapiens
  misc_RNA (1)...(19): siRNA sense strand
gagagugagaggcuucuga

SEQ ID NO: 142807 - RNA, 19 nt, Homo sapiens
  misc_RNA (1)...(19): siRNA sense strand
gaaggaucagaugaacuua

SEQ ID NO: 142808 - RNA, 19 nt, Homo sapiens
  misc_RNA (1)...(19): siRNA sense strand
caauguggagaaacucuuu

SEQ ID NO: 142809 - RNA, 19 nt, Homo sapiens
  misc_RNA (1)...(19): siRNA sense strand
uaugaagauugcacacaga

SEQ ID NO: 142810 - RNA, 19 nt, Homo sapiens
  misc_RNA (1)...(19): siRNA sense strand
gaacuuacgcaggguuaca

SEQ ID NO: 142811 - RNA, 19 nt, Homo sapiens
  misc_RNA (1)...(19): siRNA sense strand
cuccagacauuugcaauug

SEQ ID NO: 142812 - RNA, 19 nt, Homo sapiens
  misc_RNA (1)...(19): siRNA sense strand
aaugacagaagauggauuu

SEQ ID NO: 142813 - RNA, 19 nt, Homo sapiens
  misc_RNA (1)...(19): siRNA sense strand
agaaauuucccuucaauac

SEQ ID NO: 142814 - RNA, 19 nt, Homo sapiens
  misc_RNA (1)...(19): siRNA sense strand
cuuaugacauuacaacagu

SEQ ID NO: 142815 - RNA, 19 nt, Homo sapiens
  misc_RNA (1)...(19): siRNA sense strand
uaaagaaacguuugaugac

SEQ ID NO: 142816 - RNA, 19 nt, Homo sapiens
  misc_RNA (1)...(19): siRNA sense strand
aguauccucuccagacauu

SEQ ID NO: 142817 - RNA, 19 nt, Homo sapiens
  misc_RNA (1)...(19): siRNA sense strand
ggcaaaugcagcccagaaa

SEQ ID NO: 142818 - RNA, 19 nt, Homo sapiens
  misc_RNA (1)...(19): siRNA sense strand
gguugaugaugcaaugaug

SEQ ID NO: 142819 - RNA, 19 nt, Homo sapiens
  misc_RNA (1)...(19): siRNA sense strand
agccuucagugauggaaua

SEQ ID NO: 142820 - RNA, 19 nt, Homo sapiens
  misc_RNA (1)...(19): siRNA sense strand
ucugauacccaaagagauu

SEQ ID NO: 142821 - RNA, 19 nt, Homo sapiens
  misc_RNA (1)...(19): siRNA sense strand
gagagagacguuugaggau

SEQ ID NO: 142822 - RNA, 19 nt, Homo sapiens
  misc_RNA (1)...(19): siRNA sense strand
uacgcaggguuacauauau

SEQ ID NO: 142823 - RNA, 19 nt, Homo sapiens
  misc_RNA (1)...(19): siRNA sense strand
ugaagaagaugaaaggaaa

SEQ ID NO: 142824 - RNA, 19 nt, Homo sapiens
  misc_RNA (1)...(19): siRNA sense strand
gcaaagugccgaaacaaga

SEQ ID NO: 142825 - RNA, 19 nt, Homo sapiens
  misc_RNA (1)...(19): siRNA sense strand
gaaacaagaagaaggagaa

SEQ ID NO: 142826 - RNA, 19 nt, Homo sapiens
  misc_RNA (1)...(19): siRNA sense strand
cggagaagcuggaaagugu

SEQ ID NO: 142827 - RNA, 19 nt, Homo sapiens
  misc_RNA (1)...(19): siRNA sense strand
agaagcagcauuugauaua

SEQ ID NO: 142828 - RNA, 19 nt, Homo sapiens
  misc_RNA (1)...(19): siRNA sense strand
cgagaaagaaauaagauug

SEQ ID NO: 142829 - RNA, 19 nt, Homo sapiens
  misc_RNA (1)...(19): siRNA sense strand
cgagaagcagcauuugaua

SEQ ID NO: 142830 - RNA, 19 nt, Homo sapiens
  misc_RNA (1)...(19): siRNA sense strand
gaagcagcauuugauauac

SEQ ID NO: 142831 - RNA, 19 nt, Homo sapiens
  misc_RNA (1)...(19): siRNA sense strand
gagaagcagcauuugauau

SEQ ID NO: 142832 - RNA, 19 nt, Homo sapiens
  misc_RNA (1)...(19): siRNA sense strand
caaagugccgaaacaagaa

SEQ ID NO: 142833 - RNA, 19 nt, Homo sapiens
  misc_RNA (1)...(19): siRNA sense strand
gauaaaagaaggaacauug

SEQ ID NO: 142834 - RNA, 19 nt, Homo sapiens
  misc_RNA (1)...(19): siRNA sense strand
gaacgagaagcagcauuug

SEQ ID NO: 142835 - RNA, 19 nt, Homo sapiens
  misc_RNA (1)...(19): siRNA sense strand
ccucugcgcuggaaucagu

SEQ ID NO: 142836 - RNA, 19 nt, Homo sapiens
  misc_RNA (1)...(19): siRNA sense strand
caaggaagagcugagguuu

SEQ ID NO: 142837 - RNA, 19 nt, Homo sapiens
  misc_RNA (1)...(19): siRNA sense strand
gagaaaccucuuuauccaa

SEQ ID NO: 142838 - RNA, 19 nt, Homo sapiens
  misc_RNA (1)...(19): siRNA sense strand
cgacgagaaagaaauaaga

SEQ ID NO: 142839 - RNA, 19 nt, Homo sapiens
  misc_RNA (1)...(19): siRNA sense strand
gcugcaaagugccgaaaca

SEQ ID NO: 142840 - RNA, 19 nt, Homo sapiens
  misc_RNA (1)...(19): siRNA sense strand
agaacgagaagcagcauuu

SEQ ID NO: 142841 - RNA, 19 nt, Homo sapiens
  misc_RNA (1)...(19): siRNA sense strand
gagaagcuggaaaguguga

SEQ ID NO: 142842 - RNA, 19 nt, Homo sapiens
  misc_RNA (1)...(19): siRNA sense strand
ucacugguguuugaggauu

SEQ ID NO: 142843 - RNA, 19 nt, Homo sapiens
  misc_RNA (1)...(19): siRNA sense strand
caucggcccacguguauug

SEQ ID NO: 142844 - RNA, 19 nt, Homo sapiens
  misc_RNA (1)...(19): siRNA sense strand
gaaaccucuuuauccaaca

SEQ ID NO: 142845 - RNA, 19 nt, Homo sapiens
  misc_RNA (1)...(19): siRNA sense strand
gguuugccauccagaacaa

SEQ ID NO: 142846 - RNA, 19 nt, Homo sapiens
  misc_RNA (1)...(19): siRNA sense strand
uauacaugcucaaccuuca

SEQ ID NO: 142847 - RNA, 19 nt, Homo sapiens
  misc_RNA (1)...(19): siRNA sense strand
gauguccucugcgcuggaa

SEQ ID NO: 142848 - RNA, 19 nt, Homo sapiens
  misc_RNA (1)...(19): siRNA sense strand
cugggucacugguguuuga

SEQ ID NO: 142849 - RNA, 19 nt, Homo sapiens
  misc_RNA (1)...(19): siRNA sense strand
gagaaagaaauaagauugc

SEQ ID NO: 142850 - RNA, 19 nt, Homo sapiens
  misc_RNA (1)...(19): siRNA sense strand
ugugaaugcugaacugaag

SEQ ID NO: 142851 - RNA, 19 nt, Homo sapiens
  misc_RNA (1)...(19): siRNA sense strand
aagcagcauuugauauaca

SEQ ID NO: 142852 - RNA, 19 nt, Homo sapiens
  misc_RNA (1)...(19): siRNA sense strand
gaagcuggaaagugugaau

SEQ ID NO: 142853 - RNA, 19 nt, Homo sapiens
  misc_RNA (1)...(19): siRNA sense strand
aaggaacauugcagagcua

SEQ ID NO: 142854 - RNA, 19 nt, Homo sapiens
  misc_RNA (1)...(19): siRNA sense strand
ucaaggaagagcugagguu

SEQ ID NO: 142855 - RNA, 19 nt, Homo sapiens
  misc_RNA (1)...(19): siRNA sense strand
cgagguagccccugaagaa

SEQ ID NO: 142856 - RNA, 19 nt, Homo sapiens
  misc_RNA (1)...(19): siRNA sense strand
aaagaggcgacgagaaaga

SEQ ID NO: 142857 - RNA, 19 nt, Homo sapiens
  misc_RNA (1)...(19): siRNA sense strand
aggaagagcugagguuugc

SEQ ID NO: 142858 - RNA, 19 nt, Homo sapiens
  misc_RNA (1)...(19): siRNA sense strand
ugauauacaugcucaaccu

SEQ ID NO: 142859 - RNA, 19 nt, Homo sapiens
  misc_RNA (1)...(19): siRNA sense strand
gacgagaaagaaauaagau

SEQ ID NO: 142860 - RNA, 19 nt, Homo sapiens
  misc_RNA (1)...(19): siRNA sense strand
ggaaagugugaaugcugaa

SEQ ID NO: 142861 - RNA, 19 nt, Homo sapiens
  misc_RNA (1)...(19): siRNA sense strand
gccgaaacaagaagaagga

SEQ ID NO: 142862 - RNA, 19 nt, Homo sapiens
  misc_RNA (1)...(19): siRNA sense strand
cugaagaagaugaaaggaa

SEQ ID NO: 142863 - RNA, 19 nt, Homo sapiens
  misc_RNA (1)...(19): siRNA sense strand
gauauacaugcucaaccuu

SEQ ID NO: 142864 - RNA, 19 nt, Homo sapiens
  misc_RNA (1)...(19): siRNA sense strand
aggcgacgagaaagaaaua

SEQ ID NO: 142865 - RNA, 19 nt, Homo sapiens
  misc_RNA (1)...(19): siRNA sense strand
cuucaucggcccacgugua

SEQ ID NO: 142866 - RNA, 19 nt, Homo sapiens
  misc_RNA (1)...(19): siRNA sense strand
cacugguguuugaggauuu

SEQ ID NO: 142867 - RNA, 19 nt, Homo sapiens
  misc_RNA (1)...(19): siRNA sense strand
gaggcgacgagaaagaaau

SEQ ID NO: 142868 - RNA, 19 nt, Homo sapiens
  misc_RNA (1)...(19): siRNA sense strand
acaagaagaaggagaagac

SEQ ID NO: 142869 - RNA, 19 nt, Homo sapiens
  misc_RNA (1)...(19): siRNA sense strand
ugaagaagaugaaaggaaa

SEQ ID NO: 142870 - RNA, 19 nt, Homo sapiens
  misc_RNA (1)...(19): siRNA sense strand
gcaaagugccgaaacaaga

SEQ ID NO: 142871 - RNA, 19 nt, Homo sapiens
  misc_RNA (1)...(19): siRNA sense strand
gaaacaagaagaaggagaa

SEQ ID NO: 142872 - RNA, 19 nt, Homo sapiens
  misc_RNA (1)...(19): siRNA sense strand
cgagaaagaaauaagauug

SEQ ID NO: 142873 - RNA, 19 nt, Homo sapiens
  misc_RNA (1)...(19): siRNA sense strand
caaagugccgaaacaagaa

SEQ ID NO: 142874 - RNA, 19 nt, Homo sapiens
  misc_RNA (1)...(19): siRNA sense strand
ccucugcgcuggaaucagu

SEQ ID NO: 142875 - RNA, 19 nt, Homo sapiens
  misc_RNA (1)...(19): siRNA sense strand
caaggaagagcugagguuu

SEQ ID NO: 142876 - RNA, 19 nt, Homo sapiens
  misc_RNA (1)...(19): siRNA sense strand
cgacgagaaagaaauaaga

SEQ ID NO: 142877 - RNA, 19 nt, Homo sapiens
  misc_RNA (1)...(19): siRNA sense strand
gcugcaaagugccgaaaca

SEQ ID NO: 142878 - RNA, 19 nt, Homo sapiens
  misc_RNA (1)...(19): siRNA sense strand
ucacugguguuugaggauu

SEQ ID NO: 142879 - RNA, 19 nt, Homo sapiens
  misc_RNA (1)...(19): siRNA sense strand
gguuugccauccagaacaa

SEQ ID NO: 142880 - RNA, 19 nt, Homo sapiens
  misc_RNA (1)...(19): siRNA sense strand
gauguccucugcgcuggaa

SEQ ID NO: 142881 - RNA, 19 nt, Homo sapiens
  misc_RNA (1)...(19): siRNA sense strand
cugggucacugguguuuga

SEQ ID NO: 142882 - RNA, 19 nt, Homo sapiens
  misc_RNA (1)...(19): siRNA sense strand
gagaaagaaauaagauugc

SEQ ID NO: 142883 - RNA, 19 nt, Homo sapiens
  misc_RNA (1)...(19): siRNA sense strand
ucaaggaagagcugagguu

SEQ ID NO: 142884 - RNA, 19 nt, Homo sapiens
  misc_RNA (1)...(19): siRNA sense strand
cgagguagccccugaagaa

SEQ ID NO: 142885 - RNA, 19 nt, Homo sapiens
  misc_RNA (1)...(19): siRNA sense strand
aaagaggcgacgagaaaga

SEQ ID NO: 142886 - RNA, 19 nt, Homo sapiens
  misc_RNA (1)...(19): siRNA sense strand
aggaagagcugagguuugc

SEQ ID NO: 142887 - RNA, 19 nt, Homo sapiens
  misc_RNA (1)...(19): siRNA sense strand
gacgagaaagaaauaagau

SEQ ID NO: 142888 - RNA, 19 nt, Homo sapiens
  misc_RNA (1)...(19): siRNA sense strand
gccgaaacaagaagaagga

SEQ ID NO: 142889 - RNA, 19 nt, Homo sapiens
  misc_RNA (1)...(19): siRNA sense strand
cugaagaagaugaaaggaa

SEQ ID NO: 142890 - RNA, 19 nt, Homo sapiens
  misc_RNA (1)...(19): siRNA sense strand
aggcgacgagaaagaaaua

SEQ ID NO: 142891 - RNA, 19 nt, Homo sapiens
  misc_RNA (1)...(19): siRNA sense strand
cacugguguuugaggauuu

SEQ ID NO: 142892 - RNA, 19 nt, Homo sapiens
  misc_RNA (1)...(19): siRNA sense strand
gaggcgacgagaaagaaau

SEQ ID NO: 142893 - RNA, 19 nt, Homo sapiens
  misc_RNA (1)...(19): siRNA sense strand
acaagaagaaggagaagac

SEQ ID NO: 142894 - RNA, 19 nt, Homo sapiens
  misc_RNA (1)...(19): siRNA sense strand
gcaaagagcuggaaaagaa

SEQ ID NO: 142895 - RNA, 19 nt, Homo sapiens
  misc_RNA (1)...(19): siRNA sense strand
gaucauuccuuuaguuuag

SEQ ID NO: 142896 - RNA, 19 nt, Homo sapiens
  misc_RNA (1)...(19): siRNA sense strand
gauaguggcaucuguauga

SEQ ID NO: 142897 - RNA, 19 nt, Homo sapiens
  misc_RNA (1)...(19): siRNA sense strand
cgacuuggaugcccuguug

SEQ ID NO: 142898 - RNA, 19 nt, Homo sapiens
  misc_RNA (1)...(19): siRNA sense strand
gaagaaagccuaggucucu

SEQ ID NO: 142899 - RNA, 19 nt, Homo sapiens
  misc_RNA (1)...(19): siRNA sense strand
ggguauagaugaccuggaa

SEQ ID NO: 142900 - RNA, 19 nt, Homo sapiens
  misc_RNA (1)...(19): siRNA sense strand
uccaguaccugaaagauuu

SEQ ID NO: 142901 - RNA, 19 nt, Homo sapiens
  misc_RNA (1)...(19): siRNA sense strand
cagauuggauguuggagaa

SEQ ID NO: 142902 - RNA, 19 nt, Homo sapiens
  misc_RNA (1)...(19): siRNA sense strand
ccugaaagauuugauagaa

SEQ ID NO: 142903 - RNA, 19 nt, Homo sapiens
  misc_RNA (1)...(19): siRNA sense strand
ccagaucauuccuuuaguu

SEQ ID NO: 142904 - RNA, 19 nt, Homo sapiens
  misc_RNA (1)...(19): siRNA sense strand
ugacacuugugaucucuuu

SEQ ID NO: 142905 - RNA, 19 nt, Homo sapiens
  misc_RNA (1)...(19): siRNA sense strand
caugaucccucagugcaua

SEQ ID NO: 142906 - RNA, 19 nt, Homo sapiens
  misc_RNA (1)...(19): siRNA sense strand
ugaaggaguucgacuugga

SEQ ID NO: 142907 - RNA, 19 nt, Homo sapiens
  misc_RNA (1)...(19): siRNA sense strand
guuuagagcugggcaguga

SEQ ID NO: 142908 - RNA, 19 nt, Homo sapiens
  misc_RNA (1)...(19): siRNA sense strand
gccuaggucucuuagauga

SEQ ID NO: 142909 - RNA, 19 nt, Homo sapiens
  misc_RNA (1)...(19): siRNA sense strand
ggagauccaguaccugaaa

SEQ ID NO: 142910 - RNA, 19 nt, Homo sapiens
  misc_RNA (1)...(19): siRNA sense strand
guaccugaaagauuugaua

SEQ ID NO: 142911 - RNA, 19 nt, Homo sapiens
  misc_RNA (1)...(19): siRNA sense strand
ggacagauuggauguugga

SEQ ID NO: 142912 - RNA, 19 nt, Homo sapiens
  misc_RNA (1)...(19): siRNA sense strand
gaagaacgaggcucuaaaa

SEQ ID NO: 142913 - RNA, 19 nt, Homo sapiens
  misc_RNA (1)...(19): siRNA sense strand
uggaaaccaugccagauga

SEQ ID NO: 142914 - RNA, 19 nt, Homo sapiens
  misc_RNA (1)...(19): siRNA sense strand
uagaugaccuggaaaccau

SEQ ID NO: 142915 - RNA, 19 nt, Homo sapiens
  misc_RNA (1)...(19): siRNA sense strand
ccaaggagauccaguaccu

SEQ ID NO: 142916 - RNA, 19 nt, Homo sapiens
  misc_RNA (1)...(19): siRNA sense strand
cuaggucucuuagaugauu

SEQ ID NO: 142917 - RNA, 19 nt, Homo sapiens
  misc_RNA (1)...(19): siRNA sense strand
gaugguagcagcaaaagua

SEQ ID NO: 142918 - RNA, 19 nt, Homo sapiens
  misc_RNA (1)...(19): siRNA sense strand
ggaugacacuugugaucuc

SEQ ID NO: 142919 - RNA, 19 nt, Homo sapiens
  misc_RNA (1)...(19): siRNA sense strand
agaaagccuaggucucuua

SEQ ID NO: 142920 - RNA, 19 nt, Homo sapiens
  misc_RNA (1)...(19): siRNA sense strand
aagccuaggucucuuagau

SEQ ID NO: 142921 - RNA, 19 nt, Homo sapiens
  misc_RNA (1)...(19): siRNA sense strand
cggauucccuggccaagga

SEQ ID NO: 142922 - RNA, 19 nt, Homo sapiens
  misc_RNA (1)...(19): siRNA sense strand
cagaucauuccuuuaguuu

SEQ ID NO: 142923 - RNA, 19 nt, Homo sapiens
  misc_RNA (1)...(19): siRNA sense strand
agacagcagccacuaggua

SEQ ID NO: 142924 - RNA, 19 nt, Homo sapiens
  misc_RNA (1)...(19): siRNA sense strand
cgggacagauuggauguug

SEQ ID NO: 142925 - RNA, 19 nt, Homo sapiens
  misc_RNA (1)...(19): siRNA sense strand
uggaugcccuguuggguau

SEQ ID NO: 142926 - RNA, 19 nt, Homo sapiens
  misc_RNA (1)...(19): siRNA sense strand
gaacccaauuggccaucuc

SEQ ID NO: 142927 - RNA, 19 nt, Homo sapiens
  misc_RNA (1)...(19): siRNA sense strand
cuagguaccgccagaagaa

SEQ ID NO: 142928 - RNA, 19 nt, Homo sapiens
  misc_RNA (1)...(19): siRNA sense strand
agaagaugguagcagcaaa

SEQ ID NO: 142929 - RNA, 19 nt, Homo sapiens
  misc_RNA (1)...(19): siRNA sense strand
gaaggaguucgacuuggau

SEQ ID NO: 142930 - RNA, 19 nt, Homo sapiens
  misc_RNA (1)...(19): siRNA sense strand
gaaagccuaggucucuuag

SEQ ID NO: 142931 - RNA, 19 nt, Homo sapiens
  misc_RNA (1)...(19): siRNA sense strand
gagaagaugguagcagcaa

SEQ ID NO: 142932 - RNA, 19 nt, Homo sapiens
  misc_RNA (1)...(19): siRNA sense strand
gucagucccuccaacaaca

SEQ ID NO: 142933 - RNA, 19 nt, Homo sapiens
  misc_RNA (1)...(19): siRNA sense strand
ggccaucucccagaaaguu

SEQ ID NO: 142934 - RNA, 19 nt, Homo sapiens
  misc_RNA (1)...(19): siRNA sense strand
ccaucucccagaaaguuua

SEQ ID NO: 142935 - RNA, 19 nt, Homo sapiens
  misc_RNA (1)...(19): siRNA sense strand
gagauccaguaccugaaag

SEQ ID NO: 142936 - RNA, 19 nt, Homo sapiens
  misc_RNA (1)...(19): siRNA sense strand
ggagguggccaagcacuuc

SEQ ID NO: 142937 - RNA, 19 nt, Homo sapiens
  misc_RNA (1)...(19): siRNA sense strand
gaagaugguagcagcaaaa

SEQ ID NO: 142938 - RNA, 19 nt, Homo sapiens
  misc_RNA (1)...(19): siRNA sense strand
uaaugauaguggcaucugu

SEQ ID NO: 142939 - RNA, 19 nt, Homo sapiens
  misc_RNA (1)...(19): siRNA sense strand
ccacguuggaugacacuug

SEQ ID NO: 142940 - RNA, 19 nt, Homo sapiens
  misc_RNA (1)...(19): siRNA sense strand
gcugggcagugaaguggau

SEQ ID NO: 142941 - RNA, 19 nt, Homo sapiens
  misc_RNA (1)...(19): siRNA sense strand
gaugacacuugugaucucu

SEQ ID NO: 142942 - RNA, 19 nt, Homo sapiens
  misc_RNA (1)...(19): siRNA sense strand
ucccagaaaguuuaacaaa

SEQ ID NO: 142943 - RNA, 19 nt, Homo sapiens
  misc_RNA (1)...(19): siRNA sense strand
agaagaacgaggcucuaaa

SEQ ID NO: 142944 - RNA, 19 nt, Homo sapiens
  misc_RNA (1)...(19): siRNA sense strand
aagaagaacgaggcucuaa

SEQ ID NO: 142945 - RNA, 19 nt, Homo sapiens
  misc_RNA (1)...(19): siRNA sense strand
cacguuggaugacacuugu

SEQ ID NO: 142946 - RNA, 19 nt, Homo sapiens
  misc_RNA (1)...(19): siRNA sense strand
cacuccagaucauuccuuu

SEQ ID NO: 142947 - RNA, 19 nt, Homo sapiens
  misc_RNA (1)...(19): siRNA sense strand
aaugauaguggcaucugua

SEQ ID NO: 142948 - RNA, 19 nt, Homo sapiens
  misc_RNA (1)...(19): siRNA sense strand
ccucccaucuccagguguu

SEQ ID NO: 142949 - RNA, 19 nt, Homo sapiens
  misc_RNA (1)...(19): siRNA sense strand
guaugagcccagaguccua

SEQ ID NO: 142950 - RNA, 19 nt, Homo sapiens
  misc_RNA (1)...(19): siRNA sense strand
cugaaagauuugauagaag

SEQ ID NO: 142951 - RNA, 19 nt, Homo sapiens
  misc_RNA (1)...(19): siRNA sense strand
accaggggcucuccaaaua

SEQ ID NO: 142952 - RNA, 19 nt, Homo sapiens
  misc_RNA (1)...(19): siRNA sense strand
cccagaaaguuuaacaaaa

SEQ ID NO: 142953 - RNA, 19 nt, Homo sapiens
  misc_RNA (1)...(19): siRNA sense strand
aguaaagggugagaaacug

SEQ ID NO: 142954 - RNA, 19 nt, Homo sapiens
  misc_RNA (1)...(19): siRNA sense strand
uaggucucuuagaugauua

SEQ ID NO: 142955 - RNA, 19 nt, Homo sapiens
  misc_RNA (1)...(19): siRNA sense strand
gauuggauguuggagaaaa

SEQ ID NO: 142956 - RNA, 19 nt, Homo sapiens
  misc_RNA (1)...(19): siRNA sense strand
cccagacggugaacccaau

SEQ ID NO: 142957 - RNA, 19 nt, Homo sapiens
  misc_RNA (1)...(19): siRNA sense strand
agacaccccuucagauaau

SEQ ID NO: 142958 - RNA, 19 nt, Homo sapiens
  misc_RNA (1)...(19): siRNA sense strand
gaaagauuugauagaagag

SEQ ID NO: 142959 - RNA, 19 nt, Homo sapiens
  misc_RNA (1)...(19): siRNA sense strand
uggccaaggagauccagua

SEQ ID NO: 142960 - RNA, 19 nt, Homo sapiens
  misc_RNA (1)...(19): siRNA sense strand
aaaaguaaagggugagaaa

SEQ ID NO: 142961 - RNA, 19 nt, Homo sapiens
  misc_RNA (1)...(19): siRNA sense strand
gcaaagagcuggaaaagaa

SEQ ID NO: 142962 - RNA, 19 nt, Homo sapiens
  misc_RNA (1)...(19): siRNA sense strand
gaucauuccuuuaguuuag

SEQ ID NO: 142963 - RNA, 19 nt, Homo sapiens
  misc_RNA (1)...(19): siRNA sense strand
gauaguggcaucuguauga

SEQ ID NO: 142964 - RNA, 19 nt, Homo sapiens
  misc_RNA (1)...(19): siRNA sense strand
cgacuuggaugcccuguug

SEQ ID NO: 142965 - RNA, 19 nt, Homo sapiens
  misc_RNA (1)...(19): siRNA sense strand
gaagaaagccuaggucucu

SEQ ID NO: 142966 - RNA, 19 nt, Homo sapiens
  misc_RNA (1)...(19): siRNA sense strand
ggguauagaugaccuggaa

SEQ ID NO: 142967 - RNA, 19 nt, Homo sapiens
  misc_RNA (1)...(19): siRNA sense strand
uccaguaccugaaagauuu

SEQ ID NO: 142968 - RNA, 19 nt, Homo sapiens
  misc_RNA (1)...(19): siRNA sense strand
cagauuggauguuggagaa

SEQ ID NO: 142969 - RNA, 19 nt, Homo sapiens
  misc_RNA (1)...(19): siRNA sense strand
ccugaaagauuugauagaa

SEQ ID NO: 142970 - RNA, 19 nt, Homo sapiens
  misc_RNA (1)...(19): siRNA sense strand
ccagaucauuccuuuaguu

SEQ ID NO: 142971 - RNA, 19 nt, Homo sapiens
  misc_RNA (1)...(19): siRNA sense strand
ugacacuugugaucucuuu

SEQ ID NO: 142972 - RNA, 19 nt, Homo sapiens
  misc_RNA (1)...(19): siRNA sense strand
caugaucccucagugcaua

SEQ ID NO: 142973 - RNA, 19 nt, Homo sapiens
  misc_RNA (1)...(19): siRNA sense strand
ugaaggaguucgacuugga

SEQ ID NO: 142974 - RNA, 19 nt, Homo sapiens
  misc_RNA (1)...(19): siRNA sense strand
guuuagagcugggcaguga

SEQ ID NO: 142975 - RNA, 19 nt, Homo sapiens
  misc_RNA (1)...(19): siRNA sense strand
gccuaggucucuuagauga

SEQ ID NO: 142976 - RNA, 19 nt, Homo sapiens
  misc_RNA (1)...(19): siRNA sense strand
ggagauccaguaccugaaa

SEQ ID NO: 142977 - RNA, 19 nt, Homo sapiens
  misc_RNA (1)...(19): siRNA sense strand
guaccugaaagauuugaua

SEQ ID NO: 142978 - RNA, 19 nt, Homo sapiens
  misc_RNA (1)...(19): siRNA sense strand
ggacagauuggauguugga

SEQ ID NO: 142979 - RNA, 19 nt, Homo sapiens
  misc_RNA (1)...(19): siRNA sense strand
gaagaacgaggcucuaaaa

SEQ ID NO: 142980 - RNA, 19 nt, Homo sapiens
  misc_RNA (1)...(19): siRNA sense strand
uggaaaccaugccagauga

SEQ ID NO: 142981 - RNA, 19 nt, Homo sapiens
  misc_RNA (1)...(19): siRNA sense strand
uagaugaccuggaaaccau

SEQ ID NO: 142982 - RNA, 19 nt, Homo sapiens
  misc_RNA (1)...(19): siRNA sense strand
ccaaggagauccaguaccu

SEQ ID NO: 142983 - RNA, 19 nt, Homo sapiens
  misc_RNA (1)...(19): siRNA sense strand
cuaggucucuuagaugauu

SEQ ID NO: 142984 - RNA, 19 nt, Homo sapiens
  misc_RNA (1)...(19): siRNA sense strand
gaugguagcagcaaaagua

SEQ ID NO: 142985 - RNA, 19 nt, Homo sapiens
  misc_RNA (1)...(19): siRNA sense strand
ggaugacacuugugaucuc

SEQ ID NO: 142986 - RNA, 19 nt, Homo sapiens
  misc_RNA (1)...(19): siRNA sense strand
agaaagccuaggucucuua

SEQ ID NO: 142987 - RNA, 19 nt, Homo sapiens
  misc_RNA (1)...(19): siRNA sense strand
aagccuaggucucuuagau

SEQ ID NO: 142988 - RNA, 19 nt, Homo sapiens
  misc_RNA (1)...(19): siRNA sense strand
cggauucccuggccaagga

SEQ ID NO: 142989 - RNA, 19 nt, Homo sapiens
  misc_RNA (1)...(19): siRNA sense strand
cagaucauuccuuuaguuu

SEQ ID NO: 142990 - RNA, 19 nt, Homo sapiens
  misc_RNA (1)...(19): siRNA sense strand
agacagcagccacuaggua

SEQ ID NO: 142991 - RNA, 19 nt, Homo sapiens
  misc_RNA (1)...(19): siRNA sense strand
cgggacagauuggauguug

SEQ ID NO: 142992 - RNA, 19 nt, Homo sapiens
  misc_RNA (1)...(19): siRNA sense strand
uggaugcccuguuggguau

SEQ ID NO: 142993 - RNA, 19 nt, Homo sapiens
  misc_RNA (1)...(19): siRNA sense strand
gaacccaauuggccaucuc

SEQ ID NO: 142994 - RNA, 19 nt, Homo sapiens
  misc_RNA (1)...(19): siRNA sense strand
cuagguaccgccagaagaa

SEQ ID NO: 142995 - RNA, 19 nt, Homo sapiens
  misc_RNA (1)...(19): siRNA sense strand
agaagaugguagcagcaaa

SEQ ID NO: 142996 - RNA, 19 nt, Homo sapiens
  misc_RNA (1)...(19): siRNA sense strand
gaaggaguucgacuuggau

SEQ ID NO: 142997 - RNA, 19 nt, Homo sapiens
  misc_RNA (1)...(19): siRNA sense strand
gaaagccuaggucucuuag

SEQ ID NO: 142998 - RNA, 19 nt, Homo sapiens
  misc_RNA (1)...(19): siRNA sense strand
gagaagaugguagcagcaa

SEQ ID NO: 142999 - RNA, 19 nt, Homo sapiens
  misc_RNA (1)...(19): siRNA sense strand
gucagucccuccaacaaca

SEQ ID NO: 143000 - RNA, 19 nt, Homo sapiens
  misc_RNA (1)...(19): siRNA sense strand
ggccaucucccagaaaguu

SEQ ID NO: 143001 - RNA, 19 nt, Homo sapiens
  misc_RNA (1)...(19): siRNA sense strand
ccaucucccagaaaguuua

SEQ ID NO: 143002 - RNA, 19 nt, Homo sapiens
  misc_RNA (1)...(19): siRNA sense strand
gagauccaguaccugaaag

SEQ ID NO: 143003 - RNA, 19 nt, Homo sapiens
  misc_RNA (1)...(19): siRNA sense strand
ggagguggccaagcacuuc

SEQ ID NO: 143004 - RNA, 19 nt, Homo sapiens
  misc_RNA (1)...(19): siRNA sense strand
gaagaugguagcagcaaaa

SEQ ID NO: 143005 - RNA, 19 nt, Homo sapiens
  misc_RNA (1)...(19): siRNA sense strand
uaaugauaguggcaucugu

SEQ ID NO: 143006 - RNA, 19 nt, Homo sapiens
  misc_RNA (1)...(19): siRNA sense strand
ccacguuggaugacacuug

SEQ ID NO: 143007 - RNA, 19 nt, Homo sapiens
  misc_RNA (1)...(19): siRNA sense strand
gcugggcagugaaguggau

SEQ ID NO: 143008 - RNA, 19 nt, Homo sapiens
  misc_RNA (1)...(19): siRNA sense strand
gaugacacuugugaucucu

SEQ ID NO: 143009 - RNA, 19 nt, Homo sapiens
  misc_RNA (1)...(19): siRNA sense strand
ucccagaaaguuuaacaaa

SEQ ID NO: 143010 - RNA, 19 nt, Homo sapiens
  misc_RNA (1)...(19): siRNA sense strand
agaagaacgaggcucuaaa

SEQ ID NO: 143011 - RNA, 19 nt, Homo sapiens
  misc_RNA (1)...(19): siRNA sense strand
aagaagaacgaggcucuaa

SEQ ID NO: 143012 - RNA, 19 nt, Homo sapiens
  misc_RNA (1)...(19): siRNA sense strand
cacguuggaugacacuugu

SEQ ID NO: 143013 - RNA, 19 nt, Homo sapiens
  misc_RNA (1)...(19): siRNA sense strand
cacuccagaucauuccuuu

SEQ ID NO: 143014 - RNA, 19 nt, Homo sapiens
  misc_RNA (1)...(19): siRNA sense strand
aaugauaguggcaucugua

SEQ ID NO: 143015 - RNA, 19 nt, Homo sapiens
  misc_RNA (1)...(19): siRNA sense strand
ccucccaucuccagguguu

SEQ ID NO: 143016 - RNA, 19 nt, Homo sapiens
  misc_RNA (1)...(19): siRNA sense strand
guaugagcccagaguccua

SEQ ID NO: 143017 - RNA, 19 nt, Homo sapiens
  misc_RNA (1)...(19): siRNA sense strand
cugaaagauuugauagaag

SEQ ID NO: 143018 - RNA, 19 nt, Homo sapiens
  misc_RNA (1)...(19): siRNA sense strand
accaggggcucuccaaaua

SEQ ID NO: 143019 - RNA, 19 nt, Homo sapiens
  misc_RNA (1)...(19): siRNA sense strand
cccagaaaguuuaacaaaa

SEQ ID NO: 143020 - RNA, 19 nt, Homo sapiens
  misc_RNA (1)...(19): siRNA sense strand
aguaaagggugagaaacug

SEQ ID NO: 143021 - RNA, 19 nt, Homo sapiens
  misc_RNA (1)...(19): siRNA sense strand
uaggucucuuagaugauua

SEQ ID NO: 143022 - RNA, 19 nt, Homo sapiens
  misc_RNA (1)...(19): siRNA sense strand
gauuggauguuggagaaaa

SEQ ID NO: 143023 - RNA, 19 nt, Homo sapiens
  misc_RNA (1)...(19): siRNA sense strand
cccagacggugaacccaau

SEQ ID NO: 143024 - RNA, 19 nt, Homo sapiens
  misc_RNA (1)...(19): siRNA sense strand
agacaccccuucagauaau

SEQ ID NO: 143025 - RNA, 19 nt, Homo sapiens
  misc_RNA (1)...(19): siRNA sense strand
gaaagauuugauagaagag

SEQ ID NO: 143026 - RNA, 19 nt, Homo sapiens
  misc_RNA (1)...(19): siRNA sense strand
uggccaaggagauccagua

SEQ ID NO: 143027 - RNA, 19 nt, Homo sapiens
  misc_RNA (1)...(19): siRNA sense strand
aaaaguaaagggugagaaa

SEQ ID NO: 143028 - RNA, 19 nt, Homo sapiens
  misc_RNA (1)...(19): siRNA sense strand
gaaagucaaugucgguuua

SEQ ID NO: 143029 - RNA, 19 nt, Homo sapiens
  misc_RNA (1)...(19): siRNA sense strand
caaaguuccugcugauaua

SEQ ID NO: 143030 - RNA, 19 nt, Homo sapiens
  misc_RNA (1)...(19): siRNA sense strand
gagaagaaaugcaccuuga

SEQ ID NO: 143031 - RNA, 19 nt, Homo sapiens
  misc_RNA (1)...(19): siRNA sense strand
aaagucaucucccuuauuu

SEQ ID NO: 143032 - RNA, 19 nt, Homo sapiens
  misc_RNA (1)...(19): siRNA sense strand
gaucagaggugcuauuuac

SEQ ID NO: 143033 - RNA, 19 nt, Homo sapiens
  misc_RNA (1)...(19): siRNA sense strand
caucaaaucuaccacacua

SEQ ID NO: 143034 - RNA, 19 nt, Homo sapiens
  misc_RNA (1)...(19): siRNA sense strand
ggugauacuuguucccuua

SEQ ID NO: 143035 - RNA, 19 nt, Homo sapiens
  misc_RNA (1)...(19): siRNA sense strand
gcauaaagaugauaaacca

SEQ ID NO: 143036 - RNA, 19 nt, Homo sapiens
  misc_RNA (1)...(19): siRNA sense strand
gaaggugaagaaacaauua

SEQ ID NO: 143037 - RNA, 19 nt, Homo sapiens
  misc_RNA (1)...(19): siRNA sense strand
ugaagaaggugaagaaaca

SEQ ID NO: 143038 - RNA, 19 nt, Homo sapiens
  misc_RNA (1)...(19): siRNA sense strand
aaacauugcugcugggaaa

SEQ ID NO: 143039 - RNA, 19 nt, Homo sapiens
  misc_RNA (1)...(19): siRNA sense strand
ggaaagaaaugcugaaaau

SEQ ID NO: 143040 - RNA, 19 nt, Homo sapiens
  misc_RNA (1)...(19): siRNA sense strand
gaucaugucugucauucga

SEQ ID NO: 143041 - RNA, 19 nt, Homo sapiens
  misc_RNA (1)...(19): siRNA sense strand
ucgaagcccuuaaggaaua

SEQ ID NO: 143042 - RNA, 19 nt, Homo sapiens
  misc_RNA (1)...(19): siRNA sense strand
gauauaagguuaacuucca

SEQ ID NO: 143043 - RNA, 19 nt, Homo sapiens
  misc_RNA (1)...(19): siRNA sense strand
gaucuggacaucaugaaua

SEQ ID NO: 143044 - RNA, 19 nt, Homo sapiens
  misc_RNA (1)...(19): siRNA sense strand
gaacaccccuucagcaaaa

SEQ ID NO: 143045 - RNA, 19 nt, Homo sapiens
  misc_RNA (1)...(19): siRNA sense strand
ugaggacucugccaacuuu

SEQ ID NO: 143046 - RNA, 19 nt, Homo sapiens
  misc_RNA (1)...(19): siRNA sense strand
gcaacucagucauuaaaca

SEQ ID NO: 143047 - RNA, 19 nt, Homo sapiens
  misc_RNA (1)...(19): siRNA sense strand
uuugaagacuugcuaguua

SEQ ID NO: 143048 - RNA, 19 nt, Homo sapiens
  misc_RNA (1)...(19): siRNA sense strand
ggacaucaaugagcaagau

SEQ ID NO: 143049 - RNA, 19 nt, Homo sapiens
  misc_RNA (1)...(19): siRNA sense strand
gagaagugcauaaagauga

SEQ ID NO: 143050 - RNA, 19 nt, Homo sapiens
  misc_RNA (1)...(19): siRNA sense strand
gaagggugcuccugaaggu

SEQ ID NO: 143051 - RNA, 19 nt, Homo sapiens
  misc_RNA (1)...(19): siRNA sense strand
aagguuaacuuccaucaaa

SEQ ID NO: 143052 - RNA, 19 nt, Homo sapiens
  misc_RNA (1)...(19): siRNA sense strand
gacagcagcccuuggauuu

SEQ ID NO: 143053 - RNA, 19 nt, Homo sapiens
  misc_RNA (1)...(19): siRNA sense strand
gcaaaggguguguaugaaa

SEQ ID NO: 143054 - RNA, 19 nt, Homo sapiens
  misc_RNA (1)...(19): siRNA sense strand
gacaagacugguacacuua

SEQ ID NO: 143055 - RNA, 19 nt, Homo sapiens
  misc_RNA (1)...(19): siRNA sense strand
ggacaacccggacuuugaa

SEQ ID NO: 143056 - RNA, 19 nt, Homo sapiens
  misc_RNA (1)...(19): siRNA sense strand
caucgaagcccuuaaggaa

SEQ ID NO: 143057 - RNA, 19 nt, Homo sapiens
  misc_RNA (1)...(19): siRNA sense strand
guacuaagguuccuaugac

SEQ ID NO: 143058 - RNA, 19 nt, Homo sapiens
  misc_RNA (1)...(19): siRNA sense strand
caacaaaccagaugucagu

SEQ ID NO: 143059 - RNA, 19 nt, Homo sapiens
  misc_RNA (1)...(19): siRNA sense strand
agacaagacugguacacuu

SEQ ID NO: 143060 - RNA, 19 nt, Homo sapiens
  misc_RNA (1)...(19): siRNA sense strand
gaggugcuauuuacuacuu

SEQ ID NO: 143061 - RNA, 19 nt, Homo sapiens
  misc_RNA (1)...(19): siRNA sense strand
ggaguuaacaccgaaauug

SEQ ID NO: 143062 - RNA, 19 nt, Homo sapiens
  misc_RNA (1)...(19): siRNA sense strand
cauaguuccuggugauauu

SEQ ID NO: 143063 - RNA, 19 nt, Homo sapiens
  misc_RNA (1)...(19): siRNA sense strand
uaacuuccaucaaaucuac

SEQ ID NO: 143064 - RNA, 19 nt, Homo sapiens
  misc_RNA (1)...(19): siRNA sense strand
gaagaucaugucugucauu

SEQ ID NO: 143065 - RNA, 19 nt, Homo sapiens
  misc_RNA (1)...(19): siRNA sense strand
gacaacuucuccaccauug

SEQ ID NO: 143066 - RNA, 19 nt, Homo sapiens
  misc_RNA (1)...(19): siRNA sense strand
ucacuugccuaguagagaa

SEQ ID NO: 143067 - RNA, 19 nt, Homo sapiens
  misc_RNA (1)...(19): siRNA sense strand
guagagaagaugaauguau

SEQ ID NO: 143068 - RNA, 19 nt, Homo sapiens
  misc_RNA (1)...(19): siRNA sense strand
ugacaaaguuccugcugau

SEQ ID NO: 143069 - RNA, 19 nt, Homo sapiens
  misc_RNA (1)...(19): siRNA sense strand
gaauugaagggucuuucua

SEQ ID NO: 143070 - RNA, 19 nt, Homo sapiens
  misc_RNA (1)...(19): siRNA sense strand
gaugauaaaccagugaauu

SEQ ID NO: 143071 - RNA, 19 nt, Homo sapiens
  misc_RNA (1)...(19): siRNA sense strand
ggugcuauuuacuacuuua

SEQ ID NO: 143072 - RNA, 19 nt, Homo sapiens
  misc_RNA (1)...(19): siRNA sense strand
acaacaacaugaaacaguu

SEQ ID NO: 143073 - RNA, 19 nt, Homo sapiens
  misc_RNA (1)...(19): siRNA sense strand
ccacaagucuaaaaucgua

SEQ ID NO: 143074 - RNA, 19 nt, Homo sapiens
  misc_RNA (1)...(19): siRNA sense strand
gaagggucuuucuaaaaua

SEQ ID NO: 143075 - RNA, 19 nt, Homo sapiens
  misc_RNA (1)...(19): siRNA sense strand
ugaauugucaccaguauga

SEQ ID NO: 143076 - RNA, 19 nt, Homo sapiens
  misc_RNA (1)...(19): siRNA sense strand
ccaaagucaucucccuuau

SEQ ID NO: 143077 - RNA, 19 nt, Homo sapiens
  misc_RNA (1)...(19): siRNA sense strand
guaacgcccucaacagcuu

SEQ ID NO: 143078 - RNA, 19 nt, Homo sapiens
  misc_RNA (1)...(19): siRNA sense strand
ccaagcaggacaucaauga

SEQ ID NO: 143079 - RNA, 19 nt, Homo sapiens
  misc_RNA (1)...(19): siRNA sense strand
gauacuuguucccuuaaug

SEQ ID NO: 143080 - RNA, 19 nt, Homo sapiens
  misc_RNA (1)...(19): siRNA sense strand
gcagucuggaucauaaaua

SEQ ID NO: 143081 - RNA, 19 nt, Homo sapiens
  misc_RNA (1)...(19): siRNA sense strand
ggaauaugagccugaaaug

SEQ ID NO: 143082 - RNA, 19 nt, Homo sapiens
  misc_RNA (1)...(19): siRNA sense strand
ggcgcucucuguucuagua

SEQ ID NO: 143083 - RNA, 19 nt, Homo sapiens
  misc_RNA (1)...(19): siRNA sense strand
ugagcaagauguuugugaa

SEQ ID NO: 143084 - RNA, 19 nt, Homo sapiens
  misc_RNA (1)...(19): siRNA sense strand
caauuugugcucuuuguaa

SEQ ID NO: 143085 - RNA, 19 nt, Homo sapiens
  misc_RNA (1)...(19): siRNA sense strand
gaaucugucucugucauca

SEQ ID NO: 143086 - RNA, 19 nt, Homo sapiens
  misc_RNA (1)...(19): siRNA sense strand
gaacccaaaggaaccauug

SEQ ID NO: 143087 - RNA, 19 nt, Homo sapiens
  misc_RNA (1)...(19): siRNA sense strand
agaaacaauuacagccuuu

SEQ ID NO: 143088 - RNA, 19 nt, Homo sapiens
  misc_RNA (1)...(19): siRNA sense strand
gcacugcuguggccaucug

SEQ ID NO: 143089 - RNA, 19 nt, Homo sapiens
  misc_RNA (1)...(19): siRNA sense strand
ggacucugccaacuuuauu

SEQ ID NO: 143090 - RNA, 19 nt, Homo sapiens
  misc_RNA (1)...(19): siRNA sense strand
caaugucgguuuacuguac

SEQ ID NO: 143091 - RNA, 19 nt, Homo sapiens
  misc_RNA (1)...(19): siRNA sense strand
caacagaacaggagagaac

SEQ ID NO: 143092 - RNA, 19 nt, Homo sapiens
  misc_RNA (1)...(19): siRNA sense strand
agacauaguuccuggugau

SEQ ID NO: 143093 - RNA, 19 nt, Homo sapiens
  misc_RNA (1)...(19): siRNA sense strand
ccaaaggaaccauugauca

SEQ ID NO: 143094 - RNA, 19 nt, Homo sapiens
  misc_RNA (1)...(19): siRNA sense strand
ucaaugagcaagauguuug

SEQ ID NO: 143095 - RNA, 19 nt, Homo sapiens
  misc_RNA (1)...(19): siRNA sense strand
caaaggguguguaugaaaa

SEQ ID NO: 143096 - RNA, 19 nt, Homo sapiens
  misc_RNA (1)...(19): siRNA sense strand
caaagucaucucccuuauu

SEQ ID NO: 143097 - RNA, 19 nt, Homo sapiens
  misc_RNA (1)...(19): siRNA sense strand
ugaaaugggcaaaguguau

SEQ ID NO: 143098 - RNA, 19 nt, Homo sapiens
  misc_RNA (1)...(19): siRNA sense strand
cucaacagcuuguccgaaa

SEQ ID NO: 143099 - RNA, 19 nt, Homo sapiens
  misc_RNA (1)...(19): siRNA sense strand
gaaguacuaagguuccuau

SEQ ID NO: 143100 - RNA, 19 nt, Homo sapiens
  misc_RNA (1)...(19): siRNA sense strand
cgaguuaccggcugaagaa

SEQ ID NO: 143101 - RNA, 19 nt, Homo sapiens
  misc_RNA (1)...(19): siRNA sense strand
gccugcaacucagucauua

SEQ ID NO: 143102 - RNA, 19 nt, Homo sapiens
  misc_RNA (1)...(19): siRNA sense strand
ggcaaaggguguguaugaa

SEQ ID NO: 143103 - RNA, 19 nt, Homo sapiens
  misc_RNA (1)...(19): siRNA sense strand
uaaugacucugcuuuggau

SEQ ID NO: 143104 - RNA, 19 nt, Homo sapiens
  misc_RNA (1)...(19): siRNA sense strand
ucagaggugcuauuuacua

SEQ ID NO: 143105 - RNA, 19 nt, Homo sapiens
  misc_RNA (1)...(19): siRNA sense strand
uaaggaauaugagccugaa

SEQ ID NO: 143106 - RNA, 19 nt, Homo sapiens
  misc_RNA (1)...(19): siRNA sense strand
uugaugagauuacagcuau

SEQ ID NO: 143107 - RNA, 19 nt, Homo sapiens
  misc_RNA (1)...(19): siRNA sense strand
ggagaagugcauaaagaug

SEQ ID NO: 143108 - RNA, 19 nt, Homo sapiens
  misc_RNA (1)...(19): siRNA sense strand
uaccauaacuggaucaacu

SEQ ID NO: 143109 - RNA, 19 nt, Homo sapiens
  misc_RNA (1)...(19): siRNA sense strand
cagucuggaucauaaauau

SEQ ID NO: 143110 - RNA, 19 nt, Homo sapiens
  misc_RNA (1)...(19): siRNA sense strand
guucaacccuccugaucug

SEQ ID NO: 143111 - RNA, 19 nt, Homo sapiens
  misc_RNA (1)...(19): siRNA sense strand
caauggcgcucucuguucu

SEQ ID NO: 143112 - RNA, 19 nt, Homo sapiens
  misc_RNA (1)...(19): siRNA sense strand
gaucagcggguggcucuuu

SEQ ID NO: 143113 - RNA, 19 nt, Homo sapiens
  misc_RNA (1)...(19): siRNA sense strand
gcugauauaagguuaacuu

SEQ ID NO: 143114 - RNA, 19 nt, Homo sapiens
  misc_RNA (1)...(19): siRNA sense strand
ucuaccagcugagucauuu

SEQ ID NO: 143115 - RNA, 19 nt, Homo sapiens
  misc_RNA (1)...(19): siRNA sense strand
guccaagaguguccuucua

SEQ ID NO: 143116 - RNA, 19 nt, Homo sapiens
  misc_RNA (1)...(19): siRNA sense strand
ccacugagaagagaagaaa

SEQ ID NO: 143117 - RNA, 19 nt, Homo sapiens
  misc_RNA (1)...(19): siRNA sense strand
uuggagaagugcauaaaga

SEQ ID NO: 143118 - RNA, 19 nt, Homo sapiens
  misc_RNA (1)...(19): siRNA sense strand
cugguacacuuacaacaaa

SEQ ID NO: 143119 - RNA, 19 nt, Homo sapiens
  misc_RNA (1)...(19): siRNA sense strand
ggaucagaggugcuauuua

SEQ ID NO: 143120 - RNA, 19 nt, Homo sapiens
  misc_RNA (1)...(19): siRNA sense strand
gacaauggcgcucucuguu

SEQ ID NO: 143121 - RNA, 19 nt, Homo sapiens
  misc_RNA (1)...(19): siRNA sense strand
ccagcugagucauuuccua

SEQ ID NO: 143122 - RNA, 19 nt, Homo sapiens
  misc_RNA (1)...(19): siRNA sense strand
aaaccuugcuggaacuugu

SEQ ID NO: 143123 - RNA, 19 nt, Homo sapiens
  misc_RNA (1)...(19): siRNA sense strand
gagaagaugaauguauuug

SEQ ID NO: 143124 - RNA, 19 nt, Homo sapiens
  misc_RNA (1)...(19): siRNA sense strand
ggacagaguggaaggugau

SEQ ID NO: 143125 - RNA, 19 nt, Homo sapiens
  misc_RNA (1)...(19): siRNA sense strand
ugaagggucuuucuaaaau

SEQ ID NO: 143126 - RNA, 19 nt, Homo sapiens
  misc_RNA (1)...(19): siRNA sense strand
gaaagccgagauuggcauu

SEQ ID NO: 143127 - RNA, 19 nt, Homo sapiens
  misc_RNA (1)...(19): siRNA sense strand
guuaccggcugaagaagga

SEQ ID NO: 143128 - RNA, 19 nt, Homo sapiens
  misc_RNA (1)...(19): siRNA sense strand
gaaagucaaugucgguuua

SEQ ID NO: 143129 - RNA, 19 nt, Homo sapiens
  misc_RNA (1)...(19): siRNA sense strand
caaaguuccugcugauaua

SEQ ID NO: 143130 - RNA, 19 nt, Homo sapiens
  misc_RNA (1)...(19): siRNA sense strand
gagaagaaaugcaccuuga

SEQ ID NO: 143131 - RNA, 19 nt, Homo sapiens
  misc_RNA (1)...(19): siRNA sense strand
aaagucaucucccuuauuu

SEQ ID NO: 143132 - RNA, 19 nt, Homo sapiens
  misc_RNA (1)...(19): siRNA sense strand
gaucagaggugcuauuuac

SEQ ID NO: 143133 - RNA, 19 nt, Homo sapiens
  misc_RNA (1)...(19): siRNA sense strand
caucaaaucuaccacacua

SEQ ID NO: 143134 - RNA, 19 nt, Homo sapiens
  misc_RNA (1)...(19): siRNA sense strand
ggugauacuuguucccuua

SEQ ID NO: 143135 - RNA, 19 nt, Homo sapiens
  misc_RNA (1)...(19): siRNA sense strand
gcauaaagaugauaaacca

SEQ ID NO: 143136 - RNA, 19 nt, Homo sapiens
  misc_RNA (1)...(19): siRNA sense strand
gaaggugaagaaacaauua

SEQ ID NO: 143137 - RNA, 19 nt, Homo sapiens
  misc_RNA (1)...(19): siRNA sense strand
ugaagaaggugaagaaaca

SEQ ID NO: 143138 - RNA, 19 nt, Homo sapiens
  misc_RNA (1)...(19): siRNA sense strand
aaacauugcugcugggaaa

SEQ ID NO: 143139 - RNA, 19 nt, Homo sapiens
  misc_RNA (1)...(19): siRNA sense strand
ggaaagaaaugcugaaaau

SEQ ID NO: 143140 - RNA, 19 nt, Homo sapiens
  misc_RNA (1)...(19): siRNA sense strand
gaucaugucugucauucga

SEQ ID NO: 143141 - RNA, 19 nt, Homo sapiens
  misc_RNA (1)...(19): siRNA sense strand
ucgaagcccuuaaggaaua

SEQ ID NO: 143142 - RNA, 19 nt, Homo sapiens
  misc_RNA (1)...(19): siRNA sense strand
gauauaagguuaacuucca

SEQ ID NO: 143143 - RNA, 19 nt, Homo sapiens
  misc_RNA (1)...(19): siRNA sense strand
gaucuggacaucaugaaua

SEQ ID NO: 143144 - RNA, 19 nt, Homo sapiens
  misc_RNA (1)...(19): siRNA sense strand
gaacaccccuucagcaaaa

SEQ ID NO: 143145 - RNA, 19 nt, Homo sapiens
  misc_RNA (1)...(19): siRNA sense strand
ugaggacucugccaacuuu

SEQ ID NO: 143146 - RNA, 19 nt, Homo sapiens
  misc_RNA (1)...(19): siRNA sense strand
gcaacucagucauuaaaca

SEQ ID NO: 143147 - RNA, 19 nt, Homo sapiens
  misc_RNA (1)...(19): siRNA sense strand
uuugaagacuugcuaguua

SEQ ID NO: 143148 - RNA, 19 nt, Homo sapiens
  misc_RNA (1)...(19): siRNA sense strand
ggacaucaaugagcaagau

SEQ ID NO: 143149 - RNA, 19 nt, Homo sapiens
  misc_RNA (1)...(19): siRNA sense strand
gagaagugcauaaagauga

SEQ ID NO: 143150 - RNA, 19 nt, Homo sapiens
  misc_RNA (1)...(19): siRNA sense strand
gaagggugcuccugaaggu

SEQ ID NO: 143151 - RNA, 19 nt, Homo sapiens
  misc_RNA (1)...(19): siRNA sense strand
aagguuaacuuccaucaaa

SEQ ID NO: 143152 - RNA, 19 nt, Homo sapiens
  misc_RNA (1)...(19): siRNA sense strand
gacagcagcccuuggauuu

SEQ ID NO: 143153 - RNA, 19 nt, Homo sapiens
  misc_RNA (1)...(19): siRNA sense strand
gcaaaggguguguaugaaa

SEQ ID NO: 143154 - RNA, 19 nt, Homo sapiens
  misc_RNA (1)...(19): siRNA sense strand
gacaagacugguacacuua

SEQ ID NO: 143155 - RNA, 19 nt, Homo sapiens
  misc_RNA (1)...(19): siRNA sense strand
ggacaacccggacuuugaa

SEQ ID NO: 143156 - RNA, 19 nt, Homo sapiens
  misc_RNA (1)...(19): siRNA sense strand
caucgaagcccuuaaggaa

SEQ ID NO: 143157 - RNA, 19 nt, Homo sapiens
  misc_RNA (1)...(19): siRNA sense strand
guacuaagguuccuaugac

SEQ ID NO: 143158 - RNA, 19 nt, Homo sapiens
  misc_RNA (1)...(19): siRNA sense strand
caacaaaccagaugucagu

SEQ ID NO: 143159 - RNA, 19 nt, Homo sapiens
  misc_RNA (1)...(19): siRNA sense strand
agacaagacugguacacuu

SEQ ID NO: 143160 - RNA, 19 nt, Homo sapiens
  misc_RNA (1)...(19): siRNA sense strand
gaggugcuauuuacuacuu

SEQ ID NO: 143161 - RNA, 19 nt, Homo sapiens
  misc_RNA (1)...(19): siRNA sense strand
ggaguuaacaccgaaauug

SEQ ID NO: 143162 - RNA, 19 nt, Homo sapiens
  misc_RNA (1)...(19): siRNA sense strand
cauaguuccuggugauauu

SEQ ID NO: 143163 - RNA, 19 nt, Homo sapiens
  misc_RNA (1)...(19): siRNA sense strand
uaacuuccaucaaaucuac

SEQ ID NO: 143164 - RNA, 19 nt, Homo sapiens
  misc_RNA (1)...(19): siRNA sense strand
gaagaucaugucugucauu

SEQ ID NO: 143165 - RNA, 19 nt, Homo sapiens
  misc_RNA (1)...(19): siRNA sense strand
gacaacuucuccaccauug

SEQ ID NO: 143166 - RNA, 19 nt, Homo sapiens
  misc_RNA (1)...(19): siRNA sense strand
ucacuugccuaguagagaa

SEQ ID NO: 143167 - RNA, 19 nt, Homo sapiens
  misc_RNA (1)...(19): siRNA sense strand
guagagaagaugaauguau

SEQ ID NO: 143168 - RNA, 19 nt, Homo sapiens
  misc_RNA (1)...(19): siRNA sense strand
ugacaaaguuccugcugau

SEQ ID NO: 143169 - RNA, 19 nt, Homo sapiens
  misc_RNA (1)...(19): siRNA sense strand
gaauugaagggucuuucua

SEQ ID NO: 143170 - RNA, 19 nt, Homo sapiens
  misc_RNA (1)...(19): siRNA sense strand
gaugauaaaccagugaauu

SEQ ID NO: 143171 - RNA, 19 nt, Homo sapiens
  misc_RNA (1)...(19): siRNA sense strand
ggugcuauuuacuacuuua

SEQ ID NO: 143172 - RNA, 19 nt, Homo sapiens
  misc_RNA (1)...(19): siRNA sense strand
acaacaacaugaaacaguu

SEQ ID NO: 143173 - RNA, 19 nt, Homo sapiens
  misc_RNA (1)...(19): siRNA sense strand
ccacaagucuaaaaucgua

SEQ ID NO: 143174 - RNA, 19 nt, Homo sapiens
  misc_RNA (1)...(19): siRNA sense strand
gaagggucuuucuaaaaua

SEQ ID NO: 143175 - RNA, 19 nt, Homo sapiens
  misc_RNA (1)...(19): siRNA sense strand
ugaauugucaccaguauga

SEQ ID NO: 143176 - RNA, 19 nt, Homo sapiens
  misc_RNA (1)...(19): siRNA sense strand
ccaaagucaucucccuuau

SEQ ID NO: 143177 - RNA, 19 nt, Homo sapiens
  misc_RNA (1)...(19): siRNA sense strand
guaacgcccucaacagcuu

SEQ ID NO: 143178 - RNA, 19 nt, Homo sapiens
  misc_RNA (1)...(19): siRNA sense strand
ccaagcaggacaucaauga

SEQ ID NO: 143179 - RNA, 19 nt, Homo sapiens
  misc_RNA (1)...(19): siRNA sense strand
gauacuuguucccuuaaug

SEQ ID NO: 143180 - RNA, 19 nt, Homo sapiens
  misc_RNA (1)...(19): siRNA sense strand
gcagucuggaucauaaaua

SEQ ID NO: 143181 - RNA, 19 nt, Homo sapiens
  misc_RNA (1)...(19): siRNA sense strand
ggaauaugagccugaaaug

SEQ ID NO: 143182 - RNA, 19 nt, Homo sapiens
  misc_RNA (1)...(19): siRNA sense strand
ggcgcucucuguucuagua

SEQ ID NO: 143183 - RNA, 19 nt, Homo sapiens
  misc_RNA (1)...(19): siRNA sense strand
ugagcaagauguuugugaa

SEQ ID NO: 143184 - RNA, 19 nt, Homo sapiens
  misc_RNA (1)...(19): siRNA sense strand
caauuugugcucuuuguaa

SEQ ID NO: 143185 - RNA, 19 nt, Homo sapiens
  misc_RNA (1)...(19): siRNA sense strand
gaaucugucucugucauca

SEQ ID NO: 143186 - RNA, 19 nt, Homo sapiens
  misc_RNA (1)...(19): siRNA sense strand
gaacccaaaggaaccauug

SEQ ID NO: 143187 - RNA, 19 nt, Homo sapiens
  misc_RNA (1)...(19): siRNA sense strand
agaaacaauuacagccuuu

SEQ ID NO: 143188 - RNA, 19 nt, Homo sapiens
  misc_RNA (1)...(19): siRNA sense strand
gcacugcuguggccaucug

SEQ ID NO: 143189 - RNA, 19 nt, Homo sapiens
  misc_RNA (1)...(19): siRNA sense strand
ggacucugccaacuuuauu

SEQ ID NO: 143190 - RNA, 19 nt, Homo sapiens
  misc_RNA (1)...(19): siRNA sense strand
caaugucgguuuacuguac

SEQ ID NO: 143191 - RNA, 19 nt, Homo sapiens
  misc_RNA (1)...(19): siRNA sense strand
caacagaacaggagagaac

SEQ ID NO: 143192 - RNA, 19 nt, Homo sapiens
  misc_RNA (1)...(19): siRNA sense strand
agacauaguuccuggugau

SEQ ID NO: 143193 - RNA, 19 nt, Homo sapiens
  misc_RNA (1)...(19): siRNA sense strand
ccaaaggaaccauugauca

SEQ ID NO: 143194 - RNA, 19 nt, Homo sapiens
  misc_RNA (1)...(19): siRNA sense strand
ucaaugagcaagauguuug

SEQ ID NO: 143195 - RNA, 19 nt, Homo sapiens
  misc_RNA (1)...(19): siRNA sense strand
caaaggguguguaugaaaa

SEQ ID NO: 143196 - RNA, 19 nt, Homo sapiens
  misc_RNA (1)...(19): siRNA sense strand
caaagucaucucccuuauu

SEQ ID NO: 143197 - RNA, 19 nt, Homo sapiens
  misc_RNA (1)...(19): siRNA sense strand
ugaaaugggcaaaguguau

SEQ ID NO: 143198 - RNA, 19 nt, Homo sapiens
  misc_RNA (1)...(19): siRNA sense strand
cucaacagcuuguccgaaa

SEQ ID NO: 143199 - RNA, 19 nt, Homo sapiens
  misc_RNA (1)...(19): siRNA sense strand
gaaguacuaagguuccuau

SEQ ID NO: 143200 - RNA, 19 nt, Homo sapiens
  misc_RNA (1)...(19): siRNA sense strand
cgaguuaccggcugaagaa

SEQ ID NO: 143201 - RNA, 19 nt, Homo sapiens
  misc_RNA (1)...(19): siRNA sense strand
gccugcaacucagucauua

SEQ ID NO: 143202 - RNA, 19 nt, Homo sapiens
  misc_RNA (1)...(19): siRNA sense strand
ggcaaaggguguguaugaa

SEQ ID NO: 143203 - RNA, 19 nt, Homo sapiens
  misc_RNA (1)...(19): siRNA sense strand
uaaugacucugcuuuggau

SEQ ID NO: 143204 - RNA, 19 nt, Homo sapiens
  misc_RNA (1)...(19): siRNA sense strand
ucagaggugcuauuuacua

SEQ ID NO: 143205 - RNA, 19 nt, Homo sapiens
  misc_RNA (1)...(19): siRNA sense strand
uaaggaauaugagccugaa

SEQ ID NO: 143206 - RNA, 19 nt, Homo sapiens
  misc_RNA (1)...(19): siRNA sense strand
uugaugagauuacagcuau

SEQ ID NO: 143207 - RNA, 19 nt, Homo sapiens
  misc_RNA (1)...(19): siRNA sense strand
ggagaagugcauaaagaug

SEQ ID NO: 143208 - RNA, 19 nt, Homo sapiens
  misc_RNA (1)...(19): siRNA sense strand
uaccauaacuggaucaacu

SEQ ID NO: 143209 - RNA, 19 nt, Homo sapiens
  misc_RNA (1)...(19): siRNA sense strand
cagucuggaucauaaauau

SEQ ID NO: 143210 - RNA, 19 nt, Homo sapiens
  misc_RNA (1)...(19): siRNA sense strand
guucaacccuccugaucug

SEQ ID NO: 143211 - RNA, 19 nt, Homo sapiens
  misc_RNA (1)...(19): siRNA sense strand
caauggcgcucucuguucu

SEQ ID NO: 143212 - RNA, 19 nt, Homo sapiens
  misc_RNA (1)...(19): siRNA sense strand
gaucagcggguggcucuuu

SEQ ID NO: 143213 - RNA, 19 nt, Homo sapiens
  misc_RNA (1)...(19): siRNA sense strand
gcugauauaagguuaacuu

SEQ ID NO: 143214 - RNA, 19 nt, Homo sapiens
  misc_RNA (1)...(19): siRNA sense strand
ucuaccagcugagucauuu

SEQ ID NO: 143215 - RNA, 19 nt, Homo sapiens
  misc_RNA (1)...(19): siRNA sense strand
guccaagaguguccuucua

SEQ ID NO: 143216 - RNA, 19 nt, Homo sapiens
  misc_RNA (1)...(19): siRNA sense strand
ccacugagaagagaagaaa

SEQ ID NO: 143217 - RNA, 19 nt, Homo sapiens
  misc_RNA (1)...(19): siRNA sense strand
uuggagaagugcauaaaga

SEQ ID NO: 143218 - RNA, 19 nt, Homo sapiens
  misc_RNA (1)...(19): siRNA sense strand
cugguacacuuacaacaaa

SEQ ID NO: 143219 - RNA, 19 nt, Homo sapiens
  misc_RNA (1)...(19): siRNA sense strand
ggaucagaggugcuauuua

SEQ ID NO: 143220 - RNA, 19 nt, Homo sapiens
  misc_RNA (1)...(19): siRNA sense strand
gacaauggcgcucucuguu

SEQ ID NO: 143221 - RNA, 19 nt, Homo sapiens
  misc_RNA (1)...(19): siRNA sense strand
ccagcugagucauuuccua

SEQ ID NO: 143222 - RNA, 19 nt, Homo sapiens
  misc_RNA (1)...(19): siRNA sense strand
aaaccuugcuggaacuugu

SEQ ID NO: 143223 - RNA, 19 nt, Homo sapiens
  misc_RNA (1)...(19): siRNA sense strand
gagaagaugaauguauuug

SEQ ID NO: 143224 - RNA, 19 nt, Homo sapiens
  misc_RNA (1)...(19): siRNA sense strand
ggacagaguggaaggugau

SEQ ID NO: 143225 - RNA, 19 nt, Homo sapiens
  misc_RNA (1)...(19): siRNA sense strand
ugaagggucuuucuaaaau

SEQ ID NO: 143226 - RNA, 19 nt, Homo sapiens
  misc_RNA (1)...(19): siRNA sense strand
gaaagccgagauuggcauu

SEQ ID NO: 143227 - RNA, 19 nt, Homo sapiens
  misc_RNA (1)...(19): siRNA sense strand
guuaccggcugaagaagga

SEQ ID NO: 143228 - RNA, 19 nt, Homo sapiens
  misc_RNA (1)...(19): siRNA sense strand
gaagaccacuugcgaauuu

SEQ ID NO: 143229 - RNA, 19 nt, Homo sapiens
  misc_RNA (1)...(19): siRNA sense strand
ccaaggcugugcuggauua

SEQ ID NO: 143230 - RNA, 19 nt, Homo sapiens
  misc_RNA (1)...(19): siRNA sense strand
gcggaggacuuucuggaua

SEQ ID NO: 143231 - RNA, 19 nt, Homo sapiens
  misc_RNA (1)...(19): siRNA sense strand
caacuucgccaucgucuuu

SEQ ID NO: 143232 - RNA, 19 nt, Homo sapiens
  misc_RNA (1)...(19): siRNA sense strand
gggaaggcaugacaagaaa

SEQ ID NO: 143233 - RNA, 19 nt, Homo sapiens
  misc_RNA (1)...(19): siRNA sense strand
ggacaugaguuccuaugca

SEQ ID NO: 143234 - RNA, 19 nt, Homo sapiens
  misc_RNA (1)...(19): siRNA sense strand
ggaggucucugcugcuaga

SEQ ID NO: 143235 - RNA, 19 nt, Homo sapiens
  misc_RNA (1)...(19): siRNA sense strand
ggagacagccagauucuuc

SEQ ID NO: 143236 - RNA, 19 nt, Homo sapiens
  misc_RNA (1)...(19): siRNA sense strand
gcugaccacugcugaauuc

SEQ ID NO: 143237 - RNA, 19 nt, Homo sapiens
  misc_RNA (1)...(19): siRNA sense strand
ggucaaguuugcccaguau

SEQ ID NO: 143238 - RNA, 19 nt, Homo sapiens
  misc_RNA (1)...(19): siRNA sense strand
gaaaggaccauggagaugu

SEQ ID NO: 143239 - RNA, 19 nt, Homo sapiens
  misc_RNA (1)...(19): siRNA sense strand
gaggauccaucacacagau

SEQ ID NO: 143240 - RNA, 19 nt, Homo sapiens
  misc_RNA (1)...(19): siRNA sense strand
gcaccaaggcgauuguuca

SEQ ID NO: 143241 - RNA, 19 nt, Homo sapiens
  misc_RNA (1)...(19): siRNA sense strand
gaccacugcugaauuccuu

SEQ ID NO: 143242 - RNA, 19 nt, Homo sapiens
  misc_RNA (1)...(19): siRNA sense strand
ugacggacaugaguuccua

SEQ ID NO: 143243 - RNA, 19 nt, Homo sapiens
  misc_RNA (1)...(19): siRNA sense strand
acacagaccuggccaccau

SEQ ID NO: 143244 - RNA, 19 nt, Homo sapiens
  misc_RNA (1)...(19): siRNA sense strand
gccgaggguuuccuggaua

SEQ ID NO: 143245 - RNA, 19 nt, Homo sapiens
  misc_RNA (1)...(19): siRNA sense strand
ggucauggcggaggacuuu

SEQ ID NO: 143246 - RNA, 19 nt, Homo sapiens
  misc_RNA (1)...(19): siRNA sense strand
uggaauuccugcagaaguu

SEQ ID NO: 143247 - RNA, 19 nt, Homo sapiens
  misc_RNA (1)...(19): siRNA sense strand
acagacagcuucacaacag

SEQ ID NO: 143248 - RNA, 19 nt, Homo sapiens
  misc_RNA (1)...(19): siRNA sense strand
ggaagaccacuugcgaauu

SEQ ID NO: 143249 - RNA, 19 nt, Homo sapiens
  misc_RNA (1)...(19): siRNA sense strand
ugcagaaguuugagaagaa

SEQ ID NO: 143250 - RNA, 19 nt, Homo sapiens
  misc_RNA (1)...(19): siRNA sense strand
cuggauauauguacacaga

SEQ ID NO: 143251 - RNA, 19 nt, Homo sapiens
  misc_RNA (1)...(19): siRNA sense strand
gggucaaguuugcccagua

SEQ ID NO: 143252 - RNA, 19 nt, Homo sapiens
  misc_RNA (1)...(19): siRNA sense strand
cggaggacuuucuggauau

SEQ ID NO: 143253 - RNA, 19 nt, Homo sapiens
  misc_RNA (1)...(19): siRNA sense strand
ggacagacagcuucacaac

SEQ ID NO: 143254 - RNA, 19 nt, Homo sapiens
  misc_RNA (1)...(19): siRNA sense strand
ucacagagggacagaucua

SEQ ID NO: 143255 - RNA, 19 nt, Homo sapiens
  misc_RNA (1)...(19): siRNA sense strand
ggaagcugcugcgcaucuu

SEQ ID NO: 143256 - RNA, 19 nt, Homo sapiens
  misc_RNA (1)...(19): siRNA sense strand
agacgggcauuucuccuau

SEQ ID NO: 143257 - RNA, 19 nt, Homo sapiens
  misc_RNA (1)...(19): siRNA sense strand
gaccugcucuaccuggaau

SEQ ID NO: 143258 - RNA, 19 nt, Homo sapiens
  misc_RNA (1)...(19): siRNA sense strand
ugacgggcuucaucacaga

SEQ ID NO: 143259 - RNA, 19 nt, Homo sapiens
  misc_RNA (1)...(19): siRNA sense strand
ggaauuccugcagaaguuu

SEQ ID NO: 143260 - RNA, 19 nt, Homo sapiens
  misc_RNA (1)...(19): siRNA sense strand
gggcauuucuccuauugac

SEQ ID NO: 143261 - RNA, 19 nt, Homo sapiens
  misc_RNA (1)...(19): siRNA sense strand
gacaagaaaggaccaugga

SEQ ID NO: 143262 - RNA, 19 nt, Homo sapiens
  misc_RNA (1)...(19): siRNA sense strand
ggauuaccaugacgacaac

SEQ ID NO: 143263 - RNA, 19 nt, Homo sapiens
  misc_RNA (1)...(19): siRNA sense strand
cugcagaaguuugagaaga

SEQ ID NO: 143264 - RNA, 19 nt, Homo sapiens
  misc_RNA (1)...(19): siRNA sense strand
gcuaugccaucgggaagga

SEQ ID NO: 143265 - RNA, 19 nt, Homo sapiens
  misc_RNA (1)...(19): siRNA sense strand
gcagaaguuugagaagaac

SEQ ID NO: 143266 - RNA, 19 nt, Homo sapiens
  misc_RNA (1)...(19): siRNA sense strand
gacgggcauuucuccuauu

SEQ ID NO: 143267 - RNA, 19 nt, Homo sapiens
  misc_RNA (1)...(19): siRNA sense strand
gcggagaucguccacuuca

SEQ ID NO: 143268 - RNA, 19 nt, Homo sapiens
  misc_RNA (1)...(19): siRNA sense strand
gaaggcaugacaagaaagg

SEQ ID NO: 143269 - RNA, 19 nt, Homo sapiens
  misc_RNA (1)...(19): siRNA sense strand
ggaggacuuucuggauauc

SEQ ID NO: 143270 - RNA, 19 nt, Homo sapiens
  misc_RNA (1)...(19): siRNA sense strand
ccacuucacccucccagau

SEQ ID NO: 143271 - RNA, 19 nt, Homo sapiens
  misc_RNA (1)...(19): siRNA sense strand
ggaggauccaucacacaga

SEQ ID NO: 143272 - RNA, 19 nt, Homo sapiens
  misc_RNA (1)...(19): siRNA sense strand
gaggguuuccuggauauau

SEQ ID NO: 143273 - RNA, 19 nt, Homo sapiens
  misc_RNA (1)...(19): siRNA sense strand
cgggaggucucugcugcua

SEQ ID NO: 143274 - RNA, 19 nt, Homo sapiens
  misc_RNA (1)...(19): siRNA sense strand
ggcgauuguucagguguuu

SEQ ID NO: 143275 - RNA, 19 nt, Homo sapiens
  misc_RNA (1)...(19): siRNA sense strand
aagaccacuugcgaauuua

SEQ ID NO: 143276 - RNA, 19 nt, Homo sapiens
  misc_RNA (1)...(19): siRNA sense strand
aaaggaccauggagauguc

SEQ ID NO: 143277 - RNA, 19 nt, Homo sapiens
  misc_RNA (1)...(19): siRNA sense strand
ccgaggguuuccuggauau

SEQ ID NO: 143278 - RNA, 19 nt, Homo sapiens
  misc_RNA (1)...(19): siRNA sense strand
cagacgggcauuucuccua

SEQ ID NO: 143279 - RNA, 19 nt, Homo sapiens
  misc_RNA (1)...(19): siRNA sense strand
ccuacgaacuccgguguca

SEQ ID NO: 143280 - RNA, 19 nt, Homo sapiens
  misc_RNA (1)...(19): siRNA sense strand
ggaccugcucuaccuggaa

SEQ ID NO: 143281 - RNA, 19 nt, Homo sapiens
  misc_RNA (1)...(19): siRNA sense strand
ugucgcggcugaugaaguc

SEQ ID NO: 143282 - RNA, 19 nt, Homo sapiens
  misc_RNA (1)...(19): siRNA sense strand
cagacagcuucacaacaga

SEQ ID NO: 143283 - RNA, 19 nt, Homo sapiens
  misc_RNA (1)...(19): siRNA sense strand
acagccagauucuucaagu

SEQ ID NO: 143284 - RNA, 19 nt, Homo sapiens
  misc_RNA (1)...(19): siRNA sense strand
ggccaugaaggcaguaguu

SEQ ID NO: 143285 - RNA, 19 nt, Homo sapiens
  misc_RNA (1)...(19): siRNA sense strand
gagacagccagauucuuca

SEQ ID NO: 143286 - RNA, 19 nt, Homo sapiens
  misc_RNA (1)...(19): siRNA sense strand
caucacagagggacagauc

SEQ ID NO: 143287 - RNA, 19 nt, Homo sapiens
  misc_RNA (1)...(19): siRNA sense strand
gacaugcugggucggguuu

SEQ ID NO: 143288 - RNA, 19 nt, Homo sapiens
  misc_RNA (1)...(19): siRNA sense strand
gaauuccugcagaaguuug

SEQ ID NO: 143289 - RNA, 19 nt, Homo sapiens
  misc_RNA (1)...(19): siRNA sense strand
ggacgugcaggccaugaag

SEQ ID NO: 143290 - RNA, 19 nt, Homo sapiens
  misc_RNA (1)...(19): siRNA sense strand
ggacuuucuggauaucaau

SEQ ID NO: 143291 - RNA, 19 nt, Homo sapiens
  misc_RNA (1)...(19): siRNA sense strand
gacagacagcuucacaaca

SEQ ID NO: 143292 - RNA, 19 nt, Homo sapiens
  misc_RNA (1)...(19): siRNA sense strand
aagaaaggaccauggagau

SEQ ID NO: 143293 - RNA, 19 nt, Homo sapiens
  misc_RNA (1)...(19): siRNA sense strand
cuauugacgucaugaacag

SEQ ID NO: 143294 - RNA, 19 nt, Homo sapiens
  misc_RNA (1)...(19): siRNA sense strand
augcggagaucguccacuu

SEQ ID NO: 143295 - RNA, 19 nt, Homo sapiens
  misc_RNA (1)...(19): siRNA sense strand
gcgcugaccacugcugaau

SEQ ID NO: 143296 - RNA, 19 nt, Homo sapiens
  misc_RNA (1)...(19): siRNA sense strand
ugcaggcggucacccgaaa

SEQ ID NO: 143297 - RNA, 19 nt, Homo sapiens
  misc_RNA (1)...(19): siRNA sense strand
acgggcauuucuccuauug

SEQ ID NO: 143298 - RNA, 19 nt, Homo sapiens
  misc_RNA (1)...(19): siRNA sense strand
acauggagacagccagauu

SEQ ID NO: 143299 - RNA, 19 nt, Homo sapiens
  misc_RNA (1)...(19): siRNA sense strand
uggauuaccaugacgacaa

SEQ ID NO: 143300 - RNA, 19 nt, Homo sapiens
  misc_RNA (1)...(19): siRNA sense strand
cagccagauucuucaaguc

SEQ ID NO: 143301 - RNA, 19 nt, Homo sapiens
  misc_RNA (1)...(19): siRNA sense strand
cagcuucacaacagacaga

SEQ ID NO: 143302 - RNA, 19 nt, Homo sapiens
  misc_RNA (1)...(19): siRNA sense strand
uaacagacaugaguucuua

SEQ ID NO: 143303 - RNA, 19 nt, Homo sapiens
  misc_RNA (1)...(19): siRNA sense strand
guaaagaaauccaaagaug

SEQ ID NO: 143304 - RNA, 19 nt, Homo sapiens
  misc_RNA (1)...(19): siRNA sense strand
gagaagggaugaccaggaa

SEQ ID NO: 143305 - RNA, 19 nt, Homo sapiens
  misc_RNA (1)...(19): siRNA sense strand
gacaguaucuggagucaau

SEQ ID NO: 143306 - RNA, 19 nt, Homo sapiens
  misc_RNA (1)...(19): siRNA sense strand
caugaaagcugucguugga

SEQ ID NO: 143307 - RNA, 19 nt, Homo sapiens
  misc_RNA (1)...(19): siRNA sense strand
gaaggaucaugccgaugua

SEQ ID NO: 143308 - RNA, 19 nt, Homo sapiens
  misc_RNA (1)...(19): siRNA sense strand
ugagaaacauguauugguu

SEQ ID NO: 143309 - RNA, 19 nt, Homo sapiens
  misc_RNA (1)...(19): siRNA sense strand
gggagaaacggcucgauua

SEQ ID NO: 143310 - RNA, 19 nt, Homo sapiens
  misc_RNA (1)...(19): siRNA sense strand
gaaauccaaagauguagua

SEQ ID NO: 143311 - RNA, 19 nt, Homo sapiens
  misc_RNA (1)...(19): siRNA sense strand
ccaaagaaaugcugaagag

SEQ ID NO: 143312 - RNA, 19 nt, Homo sapiens
  misc_RNA (1)...(19): siRNA sense strand
agacuugacuggcuacauu

SEQ ID NO: 143313 - RNA, 19 nt, Homo sapiens
  misc_RNA (1)...(19): siRNA sense strand
gaagucugcuauuggagaa

SEQ ID NO: 143314 - RNA, 19 nt, Homo sapiens
  misc_RNA (1)...(19): siRNA sense strand
ggcaguaguucagguauuu

SEQ ID NO: 143315 - RNA, 19 nt, Homo sapiens
  misc_RNA (1)...(19): siRNA sense strand
gagaaacauguauugguua

SEQ ID NO: 143316 - RNA, 19 nt, Homo sapiens
  misc_RNA (1)...(19): siRNA sense strand
acucaaaucccuauucuaa

SEQ ID NO: 143317 - RNA, 19 nt, Homo sapiens
  misc_RNA (1)...(19): siRNA sense strand
gaucuucucuacuuggaau

SEQ ID NO: 143318 - RNA, 19 nt, Homo sapiens
  misc_RNA (1)...(19): siRNA sense strand
ggaaggaucaugccgaugu

SEQ ID NO: 143319 - RNA, 19 nt, Homo sapiens
  misc_RNA (1)...(19): siRNA sense strand
gcagaucuauguggacaga

SEQ ID NO: 143320 - RNA, 19 nt, Homo sapiens
  misc_RNA (1)...(19): siRNA sense strand
aaagagaagugggcaaguu

SEQ ID NO: 143321 - RNA, 19 nt, Homo sapiens
  misc_RNA (1)...(19): siRNA sense strand
cgauguaucuaaccagcua

SEQ ID NO: 143322 - RNA, 19 nt, Homo sapiens
  misc_RNA (1)...(19): siRNA sense strand
uuaaugaagucugcuauug

SEQ ID NO: 143323 - RNA, 19 nt, Homo sapiens
  misc_RNA (1)...(19): siRNA sense strand
cagguuacauguauacaga

SEQ ID NO: 143324 - RNA, 19 nt, Homo sapiens
  misc_RNA (1)...(19): siRNA sense strand
aagaaaugcugaagagaau

SEQ ID NO: 143325 - RNA, 19 nt, Homo sapiens
  misc_RNA (1)...(19): siRNA sense strand
gggaugaacaguauugcua

SEQ ID NO: 143326 - RNA, 19 nt, Homo sapiens
  misc_RNA (1)...(19): siRNA sense strand
aagaagcccuuaccucaga

SEQ ID NO: 143327 - RNA, 19 nt, Homo sapiens
  misc_RNA (1)...(19): siRNA sense strand
agacagauuuauccaccua

SEQ ID NO: 143328 - RNA, 19 nt, Homo sapiens
  misc_RNA (1)...(19): siRNA sense strand
aaagaaaugcugaagagaa

SEQ ID NO: 143329 - RNA, 19 nt, Homo sapiens
  misc_RNA (1)...(19): siRNA sense strand
agguauagaugcuaagaaa

SEQ ID NO: 143330 - RNA, 19 nt, Homo sapiens
  misc_RNA (1)...(19): siRNA sense strand
uaaccaugccuaaugauga

SEQ ID NO: 143331 - RNA, 19 nt, Homo sapiens
  misc_RNA (1)...(19): siRNA sense strand
gaaacugcccgguucuuca

SEQ ID NO: 143332 - RNA, 19 nt, Homo sapiens
  misc_RNA (1)...(19): siRNA sense strand
gagacucugcaaagcauua

SEQ ID NO: 143333 - RNA, 19 nt, Homo sapiens
  misc_RNA (1)...(19): siRNA sense strand
gcagaaaauuccuaucuuc

SEQ ID NO: 143334 - RNA, 19 nt, Homo sapiens
  misc_RNA (1)...(19): siRNA sense strand
gguuacauguauacagauu

SEQ ID NO: 143335 - RNA, 19 nt, Homo sapiens
  misc_RNA (1)...(19): siRNA sense strand
agaaacggcucgauuacuc

SEQ ID NO: 143336 - RNA, 19 nt, Homo sapiens
  misc_RNA (1)...(19): siRNA sense strand
ucgaugggaugaacaguau

SEQ ID NO: 143337 - RNA, 19 nt, Homo sapiens
  misc_RNA (1)...(19): siRNA sense strand
gauugcagcucagaucugu

SEQ ID NO: 143338 - RNA, 19 nt, Homo sapiens
  misc_RNA (1)...(19): siRNA sense strand
caugaguucuuaugcugaa

SEQ ID NO: 143339 - RNA, 19 nt, Homo sapiens
  misc_RNA (1)...(19): siRNA sense strand
gcacaacagacagauuuau

SEQ ID NO: 143340 - RNA, 19 nt, Homo sapiens
  misc_RNA (1)...(19): siRNA sense strand
ucccagguaugcugaaauu

SEQ ID NO: 143341 - RNA, 19 nt, Homo sapiens
  misc_RNA (1)...(19): siRNA sense strand
aaugaagucugcuauugga

SEQ ID NO: 143342 - RNA, 19 nt, Homo sapiens
  misc_RNA (1)...(19): siRNA sense strand
gggcaaguucuggaaguua

SEQ ID NO: 143343 - RNA, 19 nt, Homo sapiens
  misc_RNA (1)...(19): siRNA sense strand
gcuaugcuauuggaaagga

SEQ ID NO: 143344 - RNA, 19 nt, Homo sapiens
  misc_RNA (1)...(19): siRNA sense strand
acagacagcugcacaacag

SEQ ID NO: 143345 - RNA, 19 nt, Homo sapiens
  misc_RNA (1)...(19): siRNA sense strand
gaaaauuccuaucuucucu

SEQ ID NO: 143346 - RNA, 19 nt, Homo sapiens
  misc_RNA (1)...(19): siRNA sense strand
ggucggguauucaauggau

SEQ ID NO: 143347 - RNA, 19 nt, Homo sapiens
  misc_RNA (1)...(19): siRNA sense strand
gaaucuacccagaggaaau

SEQ ID NO: 143348 - RNA, 19 nt, Homo sapiens
  misc_RNA (1)...(19): siRNA sense strand
cuauaugcgugcuaugcua

SEQ ID NO: 143349 - RNA, 19 nt, Homo sapiens
  misc_RNA (1)...(19): siRNA sense strand
gaugggaugaacaguauug

SEQ ID NO: 143350 - RNA, 19 nt, Homo sapiens
  misc_RNA (1)...(19): siRNA sense strand
ggcaaguucuggaaguuag

SEQ ID NO: 143351 - RNA, 19 nt, Homo sapiens
  misc_RNA (1)...(19): siRNA sense strand
gcucaggguccuuacgaaa

SEQ ID NO: 143352 - RNA, 19 nt, Homo sapiens
  misc_RNA (1)...(19): siRNA sense strand
gcccuuaccucagaugauc

SEQ ID NO: 143353 - RNA, 19 nt, Homo sapiens
  misc_RNA (1)...(19): siRNA sense strand
gaaacggcucgauuacuca

SEQ ID NO: 143354 - RNA, 19 nt, Homo sapiens
  misc_RNA (1)...(19): siRNA sense strand
ggagaaacggcucgauuac

SEQ ID NO: 143355 - RNA, 19 nt, Homo sapiens
  misc_RNA (1)...(19): siRNA sense strand
aaccacagcugaauuucug

SEQ ID NO: 143356 - RNA, 19 nt, Homo sapiens
  misc_RNA (1)...(19): siRNA sense strand
agacuuccuugauaucaug

SEQ ID NO: 143357 - RNA, 19 nt, Homo sapiens
  misc_RNA (1)...(19): siRNA sense strand
caaggcaguaguucaggua

SEQ ID NO: 143358 - RNA, 19 nt, Homo sapiens
  misc_RNA (1)...(19): siRNA sense strand
gaaagcugucguuggagaa

SEQ ID NO: 143359 - RNA, 19 nt, Homo sapiens
  misc_RNA (1)...(19): siRNA sense strand
cuucagguauagaugcuaa

SEQ ID NO: 143360 - RNA, 19 nt, Homo sapiens
  misc_RNA (1)...(19): siRNA sense strand
ccagguaugcugaaauugu

SEQ ID NO: 143361 - RNA, 19 nt, Homo sapiens
  misc_RNA (1)...(19): siRNA sense strand
gaaaaucgcacugucuuug

SEQ ID NO: 143362 - RNA, 19 nt, Homo sapiens
  misc_RNA (1)...(19): siRNA sense strand
ucacuaucacgguuaauga

SEQ ID NO: 143363 - RNA, 19 nt, Homo sapiens
  misc_RNA (1)...(19): siRNA sense strand
ucaaaucccuauucuaacc

SEQ ID NO: 143364 - RNA, 19 nt, Homo sapiens
  misc_RNA (1)...(19): siRNA sense strand
ggaaacugcccgguucuuc

SEQ ID NO: 143365 - RNA, 19 nt, Homo sapiens
  misc_RNA (1)...(19): siRNA sense strand
gguaaagaaauccaaagau

SEQ ID NO: 143366 - RNA, 19 nt, Homo sapiens
  misc_RNA (1)...(19): siRNA sense strand
ucuaaccacagcugaauuu

SEQ ID NO: 143367 - RNA, 19 nt, Homo sapiens
  misc_RNA (1)...(19): siRNA sense strand
gagcacccucagcgaauuu

SEQ ID NO: 143368 - RNA, 19 nt, Homo sapiens
  misc_RNA (1)...(19): siRNA sense strand
cagauuuagccacgauaua

SEQ ID NO: 143369 - RNA, 19 nt, Homo sapiens
  misc_RNA (1)...(19): siRNA sense strand
guucuucaaaucugacuuu

SEQ ID NO: 143370 - RNA, 19 nt, Homo sapiens
  misc_RNA (1)...(19): siRNA sense strand
cagguaugcugaaauuguc

SEQ ID NO: 143371 - RNA, 19 nt, Homo sapiens
  misc_RNA (1)...(19): siRNA sense strand
ugcagaaguuugagaggaa

SEQ ID NO: 143372 - RNA, 19 nt, Homo sapiens
  misc_RNA (1)...(19): siRNA sense strand
gaucaugccgauguaucua

SEQ ID NO: 143373 - RNA, 19 nt, Homo sapiens
  misc_RNA (1)...(19): siRNA sense strand
ucaaugugcugcccucacu

SEQ ID NO: 143374 - RNA, 19 nt, Homo sapiens
  misc_RNA (1)...(19): siRNA sense strand
ugaagaaaauggcucaaug

SEQ ID NO: 143375 - RNA, 19 nt, Homo sapiens
  misc_RNA (1)...(19): siRNA sense strand
gccaaucaacccucaaugu

SEQ ID NO: 143376 - RNA, 19 nt, Homo sapiens
  misc_RNA (1)...(19): siRNA sense strand
uaucaugggucagccaauc

SEQ ID NO: 143377 - RNA, 19 nt, Homo sapiens
  misc_RNA (1)...(19): siRNA sense strand
cagagguccuguuguacug

SEQ ID NO: 143378 - RNA, 19 nt, Homo sapiens
  misc_RNA (1)...(19): siRNA sense strand
ccaaucaacccucaauguc

SEQ ID NO: 143379 - RNA, 19 nt, Homo sapiens
  misc_RNA (1)...(19): siRNA sense strand
cugcacaacagacagauuu

SEQ ID NO: 143380 - RNA, 19 nt, Homo sapiens
  misc_RNA (1)...(19): siRNA sense strand
gacuugacuggcuacauua

SEQ ID NO: 143381 - RNA, 19 nt, Homo sapiens
  misc_RNA (1)...(19): siRNA sense strand
uuacucaaaucccuauucu

SEQ ID NO: 143382 - RNA, 19 nt, Homo sapiens
  misc_RNA (1)...(19): siRNA sense strand
ccaaccauugagcgaauua

SEQ ID NO: 143383 - RNA, 19 nt, Homo sapiens
  misc_RNA (1)...(19): siRNA sense strand
gugcuaugcuauuggaaag

SEQ ID NO: 143384 - RNA, 19 nt, Homo sapiens
  misc_RNA (1)...(19): siRNA sense strand
ccagaggaaaugauucaga

SEQ ID NO: 143385 - RNA, 19 nt, Homo sapiens
  misc_RNA (1)...(19): siRNA sense strand
gcagcuacuccgaaucuuc

SEQ ID NO: 143386 - RNA, 19 nt, Homo sapiens
  misc_RNA (1)...(19): siRNA sense strand
ggaugugcaagccaugaaa

SEQ ID NO: 143387 - RNA, 19 nt, Homo sapiens
  misc_RNA (1)...(19): siRNA sense strand
caauuguauuugcugcuau

SEQ ID NO: 143388 - RNA, 19 nt, Homo sapiens
  misc_RNA (1)...(19): siRNA sense strand
caaagaaaugcugaagaga

SEQ ID NO: 143389 - RNA, 19 nt, Homo sapiens
  misc_RNA (1)...(19): siRNA sense strand
ccagcuauaugcgugcuau

SEQ ID NO: 143390 - RNA, 19 nt, Homo sapiens
  misc_RNA (1)...(19): siRNA sense strand
guuaaugaagucugcuauu

SEQ ID NO: 143391 - RNA, 19 nt, Homo sapiens
  misc_RNA (1)...(19): siRNA sense strand
gauuuagccacgauauaug

SEQ ID NO: 143392 - RNA, 19 nt, Homo sapiens
  misc_RNA (1)...(19): siRNA sense strand
agacaugaguucuuaugcu

SEQ ID NO: 143393 - RNA, 19 nt, Homo sapiens
  misc_RNA (1)...(19): siRNA sense strand
gacgagguuuuccagguua

SEQ ID NO: 143394 - RNA, 19 nt, Homo sapiens
  misc_RNA (1)...(19): siRNA sense strand
agucaaugguccacuagug

SEQ ID NO: 143395 - RNA, 19 nt, Homo sapiens
  misc_RNA (1)...(19): siRNA sense strand
agauuuagccacgauauau

SEQ ID NO: 143396 - RNA, 19 nt, Homo sapiens
  misc_RNA (1)...(19): siRNA sense strand
gucaaugguccacuaguga

SEQ ID NO: 143397 - RNA, 19 nt, Homo sapiens
  misc_RNA (1)...(19): siRNA sense strand
guaucuaaccagcuauaug

SEQ ID NO: 143398 - RNA, 19 nt, Homo sapiens
  misc_RNA (1)...(19): siRNA sense strand
caacagacagauuuaucca

SEQ ID NO: 143399 - RNA, 19 nt, Homo sapiens
  misc_RNA (1)...(19): siRNA sense strand
gcucuaaccacagcugaau

SEQ ID NO: 143400 - RNA, 19 nt, Homo sapiens
  misc_RNA (1)...(19): siRNA sense strand
ccggauggcacaaagagaa

SEQ ID NO: 143401 - RNA, 19 nt, Homo sapiens
  misc_RNA (1)...(19): siRNA sense strand
uaucuaaccagcuauaugc

SEQ ID NO: 143402 - RNA, 19 nt, Homo sapiens
  misc_RNA (1)...(19): siRNA sense strand
ucacagaccuacuaaauga

SEQ ID NO: 143403 - RNA, 19 nt, Homo sapiens
  misc_RNA (1)...(19): siRNA sense strand
gagaugaccuuaucacaga

SEQ ID NO: 143404 - RNA, 19 nt, Homo sapiens
  misc_RNA (1)...(19): siRNA sense strand
ugagaaagcagaagaaaua

SEQ ID NO: 143405 - RNA, 19 nt, Homo sapiens
  misc_RNA (1)...(19): siRNA sense strand
gaagaagaguucaacauag

SEQ ID NO: 143406 - RNA, 19 nt, Homo sapiens
  misc_RNA (1)...(19): siRNA sense strand
agacauagcugguggaguu

SEQ ID NO: 143407 - RNA, 19 nt, Homo sapiens
  misc_RNA (1)...(19): siRNA sense strand
gaagaaagagaaacagauu

SEQ ID NO: 143408 - RNA, 19 nt, Homo sapiens
  misc_RNA (1)...(19): siRNA sense strand
gaaagcagaagaaauagau

SEQ ID NO: 143409 - RNA, 19 nt, Homo sapiens
  misc_RNA (1)...(19): siRNA sense strand
gaguugagaucuauaaugg

SEQ ID NO: 143410 - RNA, 19 nt, Homo sapiens
  misc_RNA (1)...(19): siRNA sense strand
gaacaagaagccaaugaga

SEQ ID NO: 143411 - RNA, 19 nt, Homo sapiens
  misc_RNA (1)...(19): siRNA sense strand
cagaagaaauagaugcaaa

SEQ ID NO: 143412 - RNA, 19 nt, Homo sapiens
  misc_RNA (1)...(19): siRNA sense strand
cuaccugccugaagacaua

SEQ ID NO: 143413 - RNA, 19 nt, Homo sapiens
  misc_RNA (1)...(19): siRNA sense strand
agaagaagaguucaacaua

SEQ ID NO: 143414 - RNA, 19 nt, Homo sapiens
  misc_RNA (1)...(19): siRNA sense strand
gcagauaaagcauaugaug

SEQ ID NO: 143415 - RNA, 19 nt, Homo sapiens
  misc_RNA (1)...(19): siRNA sense strand
aagaagaguucaacauaga

SEQ ID NO: 143416 - RNA, 19 nt, Homo sapiens
  misc_RNA (1)...(19): siRNA sense strand
gugcaaacccaaagacuaa

SEQ ID NO: 143417 - RNA, 19 nt, Homo sapiens
  misc_RNA (1)...(19): siRNA sense strand
agaaggcaauuccuaugua

SEQ ID NO: 143418 - RNA, 19 nt, Homo sapiens
  misc_RNA (1)...(19): siRNA sense strand
acaagaagccaaugagaaa

SEQ ID NO: 143419 - RNA, 19 nt, Homo sapiens
  misc_RNA (1)...(19): siRNA sense strand
acccaaagacuaaagauua

SEQ ID NO: 143420 - RNA, 19 nt, Homo sapiens
  misc_RNA (1)...(19): siRNA sense strand
caagauuucccucugguaa

SEQ ID NO: 143421 - RNA, 19 nt, Homo sapiens
  misc_RNA (1)...(19): siRNA sense strand
gaaggcaauuccuauguac

SEQ ID NO: 143422 - RNA, 19 nt, Homo sapiens
  misc_RNA (1)...(19): siRNA sense strand
gaaucaagcgagacucaaa

SEQ ID NO: 143423 - RNA, 19 nt, Homo sapiens
  misc_RNA (1)...(19): siRNA sense strand
cgauguugauguccaaauu

SEQ ID NO: 143424 - RNA, 19 nt, Homo sapiens
  misc_RNA (1)...(19): siRNA sense strand
gagaagaaagagaaacaga

SEQ ID NO: 143425 - RNA, 19 nt, Homo sapiens
  misc_RNA (1)...(19): siRNA sense strand
cccaaagacuaaagauuau

SEQ ID NO: 143426 - RNA, 19 nt, Homo sapiens
  misc_RNA (1)...(19): siRNA sense strand
uaucacagaccuacuaaau

SEQ ID NO: 143427 - RNA, 19 nt, Homo sapiens
  misc_RNA (1)...(19): siRNA sense strand
auucagauguccaauuuga

SEQ ID NO: 143428 - RNA, 19 nt, Homo sapiens
  misc_RNA (1)...(19): siRNA sense strand
agaaagagaaacagauuga

SEQ ID NO: 143429 - RNA, 19 nt, Homo sapiens
  misc_RNA (1)...(19): siRNA sense strand
gaagaguucaacauagaga

SEQ ID NO: 143430 - RNA, 19 nt, Homo sapiens
  misc_RNA (1)...(19): siRNA sense strand
ggaguugagaucuauaaug

SEQ ID NO: 143431 - RNA, 19 nt, Homo sapiens
  misc_RNA (1)...(19): siRNA sense strand
gcagaaggcaauuccuaug

SEQ ID NO: 143432 - RNA, 19 nt, Homo sapiens
  misc_RNA (1)...(19): siRNA sense strand
guacaaaauugccaccaaa

SEQ ID NO: 143433 - RNA, 19 nt, Homo sapiens
  misc_RNA (1)...(19): siRNA sense strand
gugcaaaugccaacaggaa

SEQ ID NO: 143434 - RNA, 19 nt, Homo sapiens
  misc_RNA (1)...(19): siRNA sense strand
gcaaaugccaacaggaagu

SEQ ID NO: 143435 - RNA, 19 nt, Homo sapiens
  misc_RNA (1)...(19): siRNA sense strand
ccaaugagaaagcagaaga

SEQ ID NO: 143436 - RNA, 19 nt, Homo sapiens
  misc_RNA (1)...(19): siRNA sense strand
gagcaagagaugaccuuau

SEQ ID NO: 143437 - RNA, 19 nt, Homo sapiens
  misc_RNA (1)...(19): siRNA sense strand
ggcaauuccuauguacaaa

SEQ ID NO: 143438 - RNA, 19 nt, Homo sapiens
  misc_RNA (1)...(19): siRNA sense strand
aaacgauguugauguccaa

SEQ ID NO: 143439 - RNA, 19 nt, Homo sapiens
  misc_RNA (1)...(19): siRNA sense strand
agagaaaggucggcuugug

SEQ ID NO: 143440 - RNA, 19 nt, Homo sapiens
  misc_RNA (1)...(19): siRNA sense strand
gaaagccggcuggaucuca

SEQ ID NO: 143441 - RNA, 19 nt, Homo sapiens
  misc_RNA (1)...(19): siRNA sense strand
gcugcuggauggacugguu

SEQ ID NO: 143442 - RNA, 19 nt, Homo sapiens
  misc_RNA (1)...(19): siRNA sense strand
agauugagcagcagaagaa

SEQ ID NO: 143443 - RNA, 19 nt, Homo sapiens
  misc_RNA (1)...(19): siRNA sense strand
gugcagaaggcaauuccua

SEQ ID NO: 143444 - RNA, 19 nt, Homo sapiens
  misc_RNA (1)...(19): siRNA sense strand
agcaagagaugaccuuauc

SEQ ID NO: 143445 - RNA, 19 nt, Homo sapiens
  misc_RNA (1)...(19): siRNA sense strand
ucagauguccaauuugaug

SEQ ID NO: 143446 - RNA, 19 nt, Homo sapiens
  misc_RNA (1)...(19): siRNA sense strand
uaaaagauacaaccaggua

SEQ ID NO: 143447 - RNA, 19 nt, Homo sapiens
  misc_RNA (1)...(19): siRNA sense strand
gauguugauguccaaauug

SEQ ID NO: 143448 - RNA, 19 nt, Homo sapiens
  misc_RNA (1)...(19): siRNA sense strand
aagcagauaaagcauauga

SEQ ID NO: 143449 - RNA, 19 nt, Homo sapiens
  misc_RNA (1)...(19): siRNA sense strand
gauuguucguugcaggaaa

SEQ ID NO: 143450 - RNA, 19 nt, Homo sapiens
  misc_RNA (1)...(19): siRNA sense strand
caaaagcagauaaagcaua

SEQ ID NO: 143451 - RNA, 19 nt, Homo sapiens
  misc_RNA (1)...(19): siRNA sense strand
aguccuaccugccugaaga

SEQ ID NO: 143452 - RNA, 19 nt, Homo sapiens
  misc_RNA (1)...(19): siRNA sense strand
gaagaaauagaugcaaagg

SEQ ID NO: 143453 - RNA, 19 nt, Homo sapiens
  misc_RNA (1)...(19): siRNA sense strand
gauguccaauuugaugaau

SEQ ID NO: 143454 - RNA, 19 nt, Homo sapiens
  misc_RNA (1)...(19): siRNA sense strand
gcaagagaugaccuuauca

SEQ ID NO: 143455 - RNA, 19 nt, Homo sapiens
  misc_RNA (1)...(19): siRNA sense strand
ucucauagcccagcagaug

SEQ ID NO: 143456 - RNA, 19 nt, Homo sapiens
  misc_RNA (1)...(19): siRNA sense strand
caaagacuaaagauuaugg

SEQ ID NO: 143457 - RNA, 19 nt, Homo sapiens
  misc_RNA (1)...(19): siRNA sense strand
cagaaggcaauuccuaugu

SEQ ID NO: 143458 - RNA, 19 nt, Homo sapiens
  misc_RNA (1)...(19): siRNA sense strand
caaugagaaagcagaagaa

SEQ ID NO: 143459 - RNA, 19 nt, Homo sapiens
  misc_RNA (1)...(19): siRNA sense strand
caaaugccaacaggaaguu

SEQ ID NO: 143460 - RNA, 19 nt, Homo sapiens
  misc_RNA (1)...(19): siRNA sense strand
cagaagaagaguucaacau

SEQ ID NO: 143461 - RNA, 19 nt, Homo sapiens
  misc_RNA (1)...(19): siRNA sense strand
gaaaggucggcuugugcaa

SEQ ID NO: 143462 - RNA, 19 nt, Homo sapiens
  misc_RNA (1)...(19): siRNA sense strand
gcaaacccaaagacuaaag

SEQ ID NO: 143463 - RNA, 19 nt, Homo sapiens
  misc_RNA (1)...(19): siRNA sense strand
ucagcaaggugguaaaaga

SEQ ID NO: 143464 - RNA, 19 nt, Homo sapiens
  misc_RNA (1)...(19): siRNA sense strand
caaacccaaagacuaaaga

SEQ ID NO: 143465 - RNA, 19 nt, Homo sapiens
  misc_RNA (1)...(19): siRNA sense strand
gcagaagaaauagaugcaa

SEQ ID NO: 143466 - RNA, 19 nt, Homo sapiens
  misc_RNA (1)...(19): siRNA sense strand
gcagaagaagaguucaaca

SEQ ID NO: 143467 - RNA, 19 nt, Homo sapiens
  misc_RNA (1)...(19): siRNA sense strand
caaaggcagaagaagaguu

SEQ ID NO: 143468 - RNA, 19 nt, Homo sapiens
  misc_RNA (1)...(19): siRNA sense strand
aacaagaagccaaugagaa

SEQ ID NO: 143469 - RNA, 19 nt, Homo sapiens
  misc_RNA (1)...(19): siRNA sense strand
guggaguugagaucuauaa

SEQ ID NO: 143470 - RNA, 19 nt, Homo sapiens
  misc_RNA (1)...(19): siRNA sense strand
aaaggcagaagaagaguuc

SEQ ID NO: 143471 - RNA, 19 nt, Homo sapiens
  misc_RNA (1)...(19): siRNA sense strand
gagaaagcagaagaaauag

SEQ ID NO: 143472 - RNA, 19 nt, Homo sapiens
  misc_RNA (1)...(19): siRNA sense strand
caaaguccucagagcaaga

SEQ ID NO: 143473 - RNA, 19 nt, Homo sapiens
  misc_RNA (1)...(19): siRNA sense strand
gaaagagaaacagauugag

SEQ ID NO: 143474 - RNA, 19 nt, Homo sapiens
  misc_RNA (1)...(19): siRNA sense strand
gcagaugaugccagaaguc

SEQ ID NO: 143475 - RNA, 19 nt, Homo sapiens
  misc_RNA (1)...(19): siRNA sense strand
agaagaaagagaaacagau

SEQ ID NO: 143476 - RNA, 19 nt, Homo sapiens
  misc_RNA (1)...(19): siRNA sense strand
ccuacuaaaugaagcaaaa

SEQ ID NO: 143477 - RNA, 19 nt, Homo sapiens
  misc_RNA (1)...(19): siRNA sense strand
ccuuaucacagaccuacua

SEQ ID NO: 143478 - RNA, 19 nt, Homo sapiens
  misc_RNA (1)...(19): siRNA sense strand
cagcagaugaugccagaag

SEQ ID NO: 143479 - RNA, 19 nt, Homo sapiens
  misc_RNA (1)...(19): siRNA sense strand
auguugauguccaaauuga

SEQ ID NO: 143480 - RNA, 19 nt, Homo sapiens
  misc_RNA (1)...(19): siRNA sense strand
agaguucaacauagagaaa

SEQ ID NO: 143481 - RNA, 19 nt, Homo sapiens
  misc_RNA (1)...(19): siRNA sense strand
ugugcaaacccaaagacua

SEQ ID NO: 143482 - RNA, 19 nt, Homo sapiens
  misc_RNA (1)...(19): siRNA sense strand
agaaagcagaagaaauaga

SEQ ID NO: 143483 - RNA, 19 nt, Homo sapiens
  misc_RNA (1)...(19): siRNA sense strand
cugguggaguugagaucua

SEQ ID NO: 143484 - RNA, 19 nt, Homo sapiens
  misc_RNA (1)...(19): siRNA sense strand
ccaaagacuaaagauuaug

SEQ ID NO: 143485 - RNA, 19 nt, Homo sapiens
  misc_RNA (1)...(19): siRNA sense strand
ucuauaauggagaucguaa

SEQ ID NO: 143486 - RNA, 19 nt, Homo sapiens
  misc_RNA (1)...(19): siRNA sense strand
agauuucccucugguaaag

SEQ ID NO: 143487 - RNA, 19 nt, Homo sapiens
  misc_RNA (1)...(19): siRNA sense strand
gcaaggugguaaaagauac

SEQ ID NO: 143488 - RNA, 19 nt, Homo sapiens
  misc_RNA (1)...(19): siRNA sense strand
cagauguccaauuugauga

SEQ ID NO: 143489 - RNA, 19 nt, Homo sapiens
  misc_RNA (1)...(19): siRNA sense strand
aaaggucggcuugugcaaa

SEQ ID NO: 143490 - RNA, 19 nt, Homo sapiens
  misc_RNA (1)...(19): siRNA sense strand
gcaauuccuauguacaaaa

SEQ ID NO: 143491 - RNA, 19 nt, Homo sapiens
  misc_RNA (1)...(19): siRNA sense strand
aaacagagcuuauggcaaa

SEQ ID NO: 143492 - RNA, 19 nt, Homo sapiens
  misc_RNA (1)...(19): siRNA sense strand
gaaaguacggaccauaaua

SEQ ID NO: 143493 - RNA, 19 nt, Homo sapiens
  misc_RNA (1)...(19): siRNA sense strand
gagcagugauuaacgauau

SEQ ID NO: 143494 - RNA, 19 nt, Homo sapiens
  misc_RNA (1)...(19): siRNA sense strand
ggaggucgauuuaguaaca

SEQ ID NO: 143495 - RNA, 19 nt, Homo sapiens
  misc_RNA (1)...(19): siRNA sense strand
gaaacaaaauuggcgauua

SEQ ID NO: 143496 - RNA, 19 nt, Homo sapiens
  misc_RNA (1)...(19): siRNA sense strand
gaaugucccuggccaagga

SEQ ID NO: 143497 - RNA, 19 nt, Homo sapiens
  misc_RNA (1)...(19): siRNA sense strand
ccaaggagcucauauucuc

SEQ ID NO: 143498 - RNA, 19 nt, Homo sapiens
  misc_RNA (1)...(19): siRNA sense strand
guacggaccauaauaauca

SEQ ID NO: 143499 - RNA, 19 nt, Homo sapiens
  misc_RNA (1)...(19): siRNA sense strand
ggauggaggucgauuuagu

SEQ ID NO: 143500 - RNA, 19 nt, Homo sapiens
  misc_RNA (1)...(19): siRNA sense strand
gaggagaaccgaggaauug

SEQ ID NO: 143501 - RNA, 19 nt, Homo sapiens
  misc_RNA (1)...(19): siRNA sense strand
uaagagcagugauuaacga

SEQ ID NO: 143502 - RNA, 19 nt, Homo sapiens
  misc_RNA (1)...(19): siRNA sense strand
gauggaggucgauuuagua

SEQ ID NO: 143503 - RNA, 19 nt, Homo sapiens
  misc_RNA (1)...(19): siRNA sense strand
gcucagaccauuccaacaa

SEQ ID NO: 143504 - RNA, 19 nt, Homo sapiens
  misc_RNA (1)...(19): siRNA sense strand
aaaguacggaccauaauaa

SEQ ID NO: 143505 - RNA, 19 nt, Homo sapiens
  misc_RNA (1)...(19): siRNA sense strand
agaagaagcuuguuaugcu

SEQ ID NO: 143506 - RNA, 19 nt, Homo sapiens
  misc_RNA (1)...(19): siRNA sense strand
gugcugaccuuaaggaaag

SEQ ID NO: 143507 - RNA, 19 nt, Homo sapiens
  misc_RNA (1)...(19): siRNA sense strand
gaauuguggugcuuggaau

SEQ ID NO: 143508 - RNA, 19 nt, Homo sapiens
  misc_RNA (1)...(19): siRNA sense strand
ggaccuggcgagagaguuu

SEQ ID NO: 143509 - RNA, 19 nt, Homo sapiens
  misc_RNA (1)...(19): siRNA sense strand
ccagugaaguugguccuuu

SEQ ID NO: 143510 - RNA, 19 nt, Homo sapiens
  misc_RNA (1)...(19): siRNA sense strand
ccauagaagaagcuuguua

SEQ ID NO: 143511 - RNA, 19 nt, Homo sapiens
  misc_RNA (1)...(19): siRNA sense strand
gcuuugaaaucugauaaga

SEQ ID NO: 143512 - RNA, 19 nt, Homo sapiens
  misc_RNA (1)...(19): siRNA sense strand
ggaggagaaccgaggaauu

SEQ ID NO: 143513 - RNA, 19 nt, Homo sapiens
  misc_RNA (1)...(19): siRNA sense strand
ggaauuguggugcuuggaa

SEQ ID NO: 143514 - RNA, 19 nt, Homo sapiens
  misc_RNA (1)...(19): siRNA sense strand
ggcuacagcucugagauga

SEQ ID NO: 143515 - RNA, 19 nt, Homo sapiens
  misc_RNA (1)...(19): siRNA sense strand
ggaaagagccaaaaugagu

SEQ ID NO: 143516 - RNA, 19 nt, Homo sapiens
  misc_RNA (1)...(19): siRNA sense strand
uaagaaaguacggaccaua

SEQ ID NO: 143517 - RNA, 19 nt, Homo sapiens
  misc_RNA (1)...(19): siRNA sense strand
cauagaagaagcuuguuau

SEQ ID NO: 143518 - RNA, 19 nt, Homo sapiens
  misc_RNA (1)...(19): siRNA sense strand
caaaaugaguuccagugaa

SEQ ID NO: 143519 - RNA, 19 nt, Homo sapiens
  misc_RNA (1)...(19): siRNA sense strand
aagaaaguacggaccauaa

SEQ ID NO: 143520 - RNA, 19 nt, Homo sapiens
  misc_RNA (1)...(19): siRNA sense strand
cuacagcucugagaugaag

SEQ ID NO: 143521 - RNA, 19 nt, Homo sapiens
  misc_RNA (1)...(19): siRNA sense strand
caaaauaagagcagugauu

SEQ ID NO: 143522 - RNA, 19 nt, Homo sapiens
  misc_RNA (1)...(19): siRNA sense strand
gugauuaacgauauugcua

SEQ ID NO: 143523 - RNA, 19 nt, Homo sapiens
  misc_RNA (1)...(19): siRNA sense strand
caauagauggacucgcuuu

SEQ ID NO: 143524 - RNA, 19 nt, Homo sapiens
  misc_RNA (1)...(19): siRNA sense strand
uggaugcuuugaaaucuga

SEQ ID NO: 143525 - RNA, 19 nt, Homo sapiens
  misc_RNA (1)...(19): siRNA sense strand
ggccaaggagcucauauuc

SEQ ID NO: 143526 - RNA, 19 nt, Homo sapiens
  misc_RNA (1)...(19): siRNA sense strand
ccauaauaaucaggaguga

SEQ ID NO: 143527 - RNA, 19 nt, Homo sapiens
  misc_RNA (1)...(19): siRNA sense strand
caaugagaguggcaaaauu

SEQ ID NO: 143528 - RNA, 19 nt, Homo sapiens
  misc_RNA (1)...(19): siRNA sense strand
ggagaaccgaggaauugug

SEQ ID NO: 143529 - RNA, 19 nt, Homo sapiens
  misc_RNA (1)...(19): siRNA sense strand
ccuuggaccuggcgagaga

SEQ ID NO: 143530 - RNA, 19 nt, Homo sapiens
  misc_RNA (1)...(19): siRNA sense strand
uagauggacucgcuuuagg

SEQ ID NO: 143531 - RNA, 19 nt, Homo sapiens
  misc_RNA (1)...(19): siRNA sense strand
gcagugauuaacgauauug

SEQ ID NO: 143532 - RNA, 19 nt, Homo sapiens
  misc_RNA (1)...(19): siRNA sense strand
aguccucgauggcaaagaa

SEQ ID NO: 143533 - RNA, 19 nt, Homo sapiens
  misc_RNA (1)...(19): siRNA sense strand
gcuuuagccugugauauac

SEQ ID NO: 143534 - RNA, 19 nt, Homo sapiens
  misc_RNA (1)...(19): siRNA sense strand
agggauggaggucgauuua

SEQ ID NO: 143535 - RNA, 19 nt, Homo sapiens
  misc_RNA (1)...(19): siRNA sense strand
gaagcuuguuaugcucaga

SEQ ID NO: 143536 - RNA, 19 nt, Homo sapiens
  misc_RNA (1)...(19): siRNA sense strand
ggugcugaccuuaaggaaa

SEQ ID NO: 143537 - RNA, 19 nt, Homo sapiens
  misc_RNA (1)...(19): siRNA sense strand
aggguuagccauagaagaa

SEQ ID NO: 143538 - RNA, 19 nt, Homo sapiens
  misc_RNA (1)...(19): siRNA sense strand
gggcuacagcucugagaug

SEQ ID NO: 143539 - RNA, 19 nt, Homo sapiens
  misc_RNA (1)...(19): siRNA sense strand
cgauauugcuaaucuucca

SEQ ID NO: 143540 - RNA, 19 nt, Homo sapiens
  misc_RNA (1)...(19): siRNA sense strand
gaaagagccaaaaugaguu

SEQ ID NO: 143541 - RNA, 19 nt, Homo sapiens
  misc_RNA (1)...(19): siRNA sense strand
gugcuggugcugaccuuaa

SEQ ID NO: 143542 - RNA, 19 nt, Homo sapiens
  misc_RNA (1)...(19): siRNA sense strand
cucagaccauuccaacaaa

SEQ ID NO: 143543 - RNA, 19 nt, Homo sapiens
  misc_RNA (1)...(19): siRNA sense strand
gcgauugccacgcgccauu

SEQ ID NO: 143544 - RNA, 19 nt, Homo sapiens
  misc_RNA (1)...(19): siRNA sense strand
aaaugggccugguugaaac

SEQ ID NO: 143545 - RNA, 19 nt, Homo sapiens
  misc_RNA (1)...(19): siRNA sense strand
aaaaugaguuccagugaag

SEQ ID NO: 143546 - RNA, 19 nt, Homo sapiens
  misc_RNA (1)...(19): siRNA sense strand
aauagauggacucgcuuua

SEQ ID NO: 143547 - RNA, 19 nt, Homo sapiens
  misc_RNA (1)...(19): siRNA sense strand
aaugagaguggcaaaauua

SEQ ID NO: 143548 - RNA, 19 nt, Homo sapiens
  misc_RNA (1)...(19): siRNA sense strand
gauauacgaguagcagcuu

SEQ ID NO: 143549 - RNA, 19 nt, Homo sapiens
  misc_RNA (1)...(19): siRNA sense strand
agaaaguacggaccauaau

SEQ ID NO: 143550 - RNA, 19 nt, Homo sapiens
  misc_RNA (1)...(19): siRNA sense strand
gcaaugagaguggcaaaau

SEQ ID NO: 143551 - RNA, 19 nt, Homo sapiens
  misc_RNA (1)...(19): siRNA sense strand
auaauaaucaggagugaag

SEQ ID NO: 143552 - RNA, 19 nt, Homo sapiens
  misc_RNA (1)...(19): siRNA sense strand
aaucagccacguucuggaa

SEQ ID NO: 143553 - RNA, 19 nt, Homo sapiens
  misc_RNA (1)...(19): siRNA sense strand
guggaugcuuugaaaucug

SEQ ID NO: 143554 - RNA, 19 nt, Homo sapiens
  misc_RNA (1)...(19): siRNA sense strand
aauaagagcagugauuaac

SEQ ID NO: 143555 - RNA, 19 nt, Homo sapiens
  misc_RNA (1)...(19): siRNA sense strand
ucgcuauaaaggagaauaa

SEQ ID NO: 143556 - RNA, 19 nt, Homo sapiens
  misc_RNA (1)...(19): siRNA sense strand
uagaagaagcuuguuaugc

SEQ ID NO: 143557 - RNA, 19 nt, Homo sapiens
  misc_RNA (1)...(19): siRNA sense strand
gggccugguugaaacaaaa

SEQ ID NO: 143558 - RNA, 19 nt, Homo sapiens
  misc_RNA (1)...(19): siRNA sense strand
uuuaggugguggucuugaa

SEQ ID NO: 143559 - RNA, 19 nt, Homo sapiens
  misc_RNA (1)...(19): siRNA sense strand
ggaaagaggugaacuggua

SEQ ID NO: 143560 - RNA, 19 nt, Homo sapiens
  misc_RNA (1)...(19): siRNA sense strand
ggucagagcuggaggauuu

SEQ ID NO: 143561 - RNA, 19 nt, Homo sapiens
  misc_RNA (1)...(19): siRNA sense strand
gaaagaaggagacccguua

SEQ ID NO: 143562 - RNA, 19 nt, Homo sapiens
  misc_RNA (1)...(19): siRNA sense strand
gugaagagcugaaggagaa

SEQ ID NO: 143563 - RNA, 19 nt, Homo sapiens
  misc_RNA (1)...(19): siRNA sense strand
ggaacugcaugcugaauga

SEQ ID NO: 143564 - RNA, 19 nt, Homo sapiens
  misc_RNA (1)...(19): siRNA sense strand
ccaagaagaucuacaaugg

SEQ ID NO: 143565 - RNA, 19 nt, Homo sapiens
  misc_RNA (1)...(19): siRNA sense strand
ugaacaggaugacuggaua

SEQ ID NO: 143566 - RNA, 19 nt, Homo sapiens
  misc_RNA (1)...(19): siRNA sense strand
gcucaucggugucuguuuc

SEQ ID NO: 143567 - RNA, 19 nt, Homo sapiens
  misc_RNA (1)...(19): siRNA sense strand
uuacagagcugcgggaaga

SEQ ID NO: 143568 - RNA, 19 nt, Homo sapiens
  misc_RNA (1)...(19): siRNA sense strand
caucuuggcucucuuccuu

SEQ ID NO: 143569 - RNA, 19 nt, Homo sapiens
  misc_RNA (1)...(19): siRNA sense strand
ggagacccguuauggagaa

SEQ ID NO: 143570 - RNA, 19 nt, Homo sapiens
  misc_RNA (1)...(19): siRNA sense strand
gacgaaauccucuauguca

SEQ ID NO: 143571 - RNA, 19 nt, Homo sapiens
  misc_RNA (1)...(19): siRNA sense strand
ggaugaggguggagguuau

SEQ ID NO: 143572 - RNA, 19 nt, Homo sapiens
  misc_RNA (1)...(19): siRNA sense strand
gaaggagacccguuaugga

SEQ ID NO: 143573 - RNA, 19 nt, Homo sapiens
  misc_RNA (1)...(19): siRNA sense strand
gaaauccucuaugucaaca

SEQ ID NO: 143574 - RNA, 19 nt, Homo sapiens
  misc_RNA (1)...(19): siRNA sense strand
acagcgagauuuaugacua

SEQ ID NO: 143575 - RNA, 19 nt, Homo sapiens
  misc_RNA (1)...(19): siRNA sense strand
gagaacagcgagauuuaug

SEQ ID NO: 143576 - RNA, 19 nt, Homo sapiens
  misc_RNA (1)...(19): siRNA sense strand
ggagaaguguuugaaccaa

SEQ ID NO: 143577 - RNA, 19 nt, Homo sapiens
  misc_RNA (1)...(19): siRNA sense strand
ggugucagcuccagguuca

SEQ ID NO: 143578 - RNA, 19 nt, Homo sapiens
  misc_RNA (1)...(19): siRNA sense strand
gguaccggcuggcguauca

SEQ ID NO: 143579 - RNA, 19 nt, Homo sapiens
  misc_RNA (1)...(19): siRNA sense strand
ccacugaagcuaccuugaa

SEQ ID NO: 143580 - RNA, 19 nt, Homo sapiens
  misc_RNA (1)...(19): siRNA sense strand
caacccagccagacccuaa

SEQ ID NO: 143581 - RNA, 19 nt, Homo sapiens
  misc_RNA (1)...(19): siRNA sense strand
guggucaucuuaccuuuca

SEQ ID NO: 143582 - RNA, 19 nt, Homo sapiens
  misc_RNA (1)...(19): siRNA sense strand
cagcgagauuuaugacuau

SEQ ID NO: 143583 - RNA, 19 nt, Homo sapiens
  misc_RNA (1)...(19): siRNA sense strand
gcacgcaggcugaagaaag

SEQ ID NO: 143584 - RNA, 19 nt, Homo sapiens
  misc_RNA (1)...(19): siRNA sense strand
ggguggagguuauccugaa

SEQ ID NO: 143585 - RNA, 19 nt, Homo sapiens
  misc_RNA (1)...(19): siRNA sense strand
gcacagccaccaucacagu

SEQ ID NO: 143586 - RNA, 19 nt, Homo sapiens
  misc_RNA (1)...(19): siRNA sense strand
ggcauggaguaucugagua

SEQ ID NO: 143587 - RNA, 19 nt, Homo sapiens
  misc_RNA (1)...(19): siRNA sense strand
ugaagacgaugaagauugc

SEQ ID NO: 143588 - RNA, 19 nt, Homo sapiens
  misc_RNA (1)...(19): siRNA sense strand
ggagaacagcgagauuuau

SEQ ID NO: 143589 - RNA, 19 nt, Homo sapiens
  misc_RNA (1)...(19): siRNA sense strand
gugaagacgaugaagauug

SEQ ID NO: 143590 - RNA, 19 nt, Homo sapiens
  misc_RNA (1)...(19): siRNA sense strand
gugaagcggucugcaugaa

SEQ ID NO: 143591 - RNA, 19 nt, Homo sapiens
  misc_RNA (1)...(19): siRNA sense strand
guuuggagcugugauggaa

SEQ ID NO: 143592 - RNA, 19 nt, Homo sapiens
  misc_RNA (1)...(19): siRNA sense strand
ggauugccauugagagucu

SEQ ID NO: 143593 - RNA, 19 nt, Homo sapiens
  misc_RNA (1)...(19): siRNA sense strand
uggagaacagcgagauuua

SEQ ID NO: 143594 - RNA, 19 nt, Homo sapiens
  misc_RNA (1)...(19): siRNA sense strand
ccaguggcauggaguaucu

SEQ ID NO: 143595 - RNA, 19 nt, Homo sapiens
  misc_RNA (1)...(19): siRNA sense strand
gugaacugguagucaggua

SEQ ID NO: 143596 - RNA, 19 nt, Homo sapiens
  misc_RNA (1)...(19): siRNA sense strand
gggaagauuuggagaacac

SEQ ID NO: 143597 - RNA, 19 nt, Homo sapiens
  misc_RNA (1)...(19): siRNA sense strand
gaacagcgagauuuaugac

SEQ ID NO: 143598 - RNA, 19 nt, Homo sapiens
  misc_RNA (1)...(19): siRNA sense strand
gaacaggaugacuggauag

SEQ ID NO: 143599 - RNA, 19 nt, Homo sapiens
  misc_RNA (1)...(19): siRNA sense strand
gagaagcugcgggauguga

SEQ ID NO: 143600 - RNA, 19 nt, Homo sapiens
  misc_RNA (1)...(19): siRNA sense strand
ggacgacuccauccucaag

SEQ ID NO: 143601 - RNA, 19 nt, Homo sapiens
  misc_RNA (1)...(19): siRNA sense strand
ucaccucccugcagcuuuc

SEQ ID NO: 143602 - RNA, 19 nt, Homo sapiens
  misc_RNA (1)...(19): siRNA sense strand
ggacaguaccaguguuugg

SEQ ID NO: 143603 - RNA, 19 nt, Homo sapiens
  misc_RNA (1)...(19): siRNA sense strand
gaacagccugggcaucagu

SEQ ID NO: 143604 - RNA, 19 nt, Homo sapiens
  misc_RNA (1)...(19): siRNA sense strand
uggaguaucugaguaccaa

SEQ ID NO: 143605 - RNA, 19 nt, Homo sapiens
  misc_RNA (1)...(19): siRNA sense strand
guggagaacagcgagauuu

SEQ ID NO: 143606 - RNA, 19 nt, Homo sapiens
  misc_RNA (1)...(19): siRNA sense strand
cagcaccuguggucaucuu

SEQ ID NO: 143607 - RNA, 19 nt, Homo sapiens
  misc_RNA (1)...(19): siRNA sense strand
cugacgaaauccucuaugu

SEQ ID NO: 143608 - RNA, 19 nt, Homo sapiens
  misc_RNA (1)...(19): siRNA sense strand
gccaggccuucgugcauug

SEQ ID NO: 143609 - RNA, 19 nt, Homo sapiens
  misc_RNA (1)...(19): siRNA sense strand
ccaagaugccagucaagug

SEQ ID NO: 143610 - RNA, 19 nt, Homo sapiens
  misc_RNA (1)...(19): siRNA sense strand
aggagaagcugcgggaugu

SEQ ID NO: 143611 - RNA, 19 nt, Homo sapiens
  misc_RNA (1)...(19): siRNA sense strand
gggugaggaugaacaggau

SEQ ID NO: 143612 - RNA, 19 nt, Homo sapiens
  misc_RNA (1)...(19): siRNA sense strand
cacgcaggcugaagaaagu

SEQ ID NO: 143613 - RNA, 19 nt, Homo sapiens
  misc_RNA (1)...(19): siRNA sense strand
acauagggcuaaggcaaga

SEQ ID NO: 143614 - RNA, 19 nt, Homo sapiens
  misc_RNA (1)...(19): siRNA sense strand
gcgggaagauuuggagaac

SEQ ID NO: 143615 - RNA, 19 nt, Homo sapiens
  misc_RNA (1)...(19): siRNA sense strand
gauggacuguaugccuuga

SEQ ID NO: 143616 - RNA, 19 nt, Homo sapiens
  misc_RNA (1)...(19): siRNA sense strand
caaguggauugccauugag

SEQ ID NO: 143617 - RNA, 19 nt, Homo sapiens
  misc_RNA (1)...(19): siRNA sense strand
acagcuuccuccucuauuc

SEQ ID NO: 143618 - RNA, 19 nt, Homo sapiens
  misc_RNA (1)...(19): siRNA sense strand
gggucuguguccaaucuga

SEQ ID NO: 143619 - RNA, 19 nt, Homo sapiens
  misc_RNA (1)...(19): siRNA sense strand
guaccaagagauucauaca

SEQ ID NO: 143620 - RNA, 19 nt, Homo sapiens
  misc_RNA (1)...(19): siRNA sense strand
gaaccaacaguggaaagag

SEQ ID NO: 143621 - RNA, 19 nt, Homo sapiens
  misc_RNA (1)...(19): siRNA sense strand
gaaguucauggcagacauc

SEQ ID NO: 143622 - RNA, 19 nt, Homo sapiens
  misc_RNA (1)...(19): siRNA sense strand
gcugugaagacgaugaaga

SEQ ID NO: 143623 - RNA, 19 nt, Homo sapiens
  misc_RNA (1)...(19): siRNA sense strand
gaagcugcgggaugugaug

SEQ ID NO: 143624 - RNA, 19 nt, Homo sapiens
  misc_RNA (1)...(19): siRNA sense strand
cagaggugcuaauggacau

SEQ ID NO: 143625 - RNA, 19 nt, Homo sapiens
  misc_RNA (1)...(19): siRNA sense strand
cagagcugcgggaagauuu

SEQ ID NO: 143626 - RNA, 19 nt, Homo sapiens
  misc_RNA (1)...(19): siRNA sense strand
gaguaccaagagauucaua

SEQ ID NO: 143627 - RNA, 19 nt, Homo sapiens
  misc_RNA (1)...(19): siRNA sense strand
gaguaucugaguaccaaga

SEQ ID NO: 143628 - RNA, 19 nt, Homo sapiens
  misc_RNA (1)...(19): siRNA sense strand
ggucaucuuaccuuucaug

SEQ ID NO: 143629 - RNA, 19 nt, Homo sapiens
  misc_RNA (1)...(19): siRNA sense strand
gagccaggccuucgugcau

SEQ ID NO: 143630 - RNA, 19 nt, Homo sapiens
  misc_RNA (1)...(19): siRNA sense strand
cccaggaccggccaaguuu

SEQ ID NO: 143631 - RNA, 19 nt, Homo sapiens
  misc_RNA (1)...(19): siRNA sense strand
ggcuggagggcuugccuua

SEQ ID NO: 143632 - RNA, 19 nt, Homo sapiens
  misc_RNA (1)...(19): siRNA sense strand
guaucugaguaccaagaga

SEQ ID NO: 143633 - RNA, 19 nt, Homo sapiens
  misc_RNA (1)...(19): siRNA sense strand
guaccugcccacucagaug

SEQ ID NO: 143634 - RNA, 19 nt, Homo sapiens
  misc_RNA (1)...(19): siRNA sense strand
acacagcuuccuccucuau

SEQ ID NO: 143635 - RNA, 19 nt, Homo sapiens
  misc_RNA (1)...(19): siRNA sense strand
aaacauggagaccuacaca

SEQ ID NO: 143636 - RNA, 19 nt, Homo sapiens
  misc_RNA (1)...(19): siRNA sense strand
gacccguuauggagaagug

SEQ ID NO: 143637 - RNA, 19 nt, Homo sapiens
  misc_RNA (1)...(19): siRNA sense strand
cuaauggacauagggcuaa

SEQ ID NO: 143638 - RNA, 19 nt, Homo sapiens
  misc_RNA (1)...(19): siRNA sense strand
cagccagacccuaaggauu

SEQ ID NO: 143639 - RNA, 19 nt, Homo sapiens
  misc_RNA (1)...(19): siRNA sense strand
acgaaauccucuaugucaa

SEQ ID NO: 143640 - RNA, 19 nt, Homo sapiens
  misc_RNA (1)...(19): siRNA sense strand
agaacagcgagauuuauga

SEQ ID NO: 143641 - RNA, 19 nt, Homo sapiens
  misc_RNA (1)...(19): siRNA sense strand
gcauggaguaucugaguac

SEQ ID NO: 143642 - RNA, 19 nt, Homo sapiens
  misc_RNA (1)...(19): siRNA sense strand
ucugggagagggagaguuu

SEQ ID NO: 143643 - RNA, 19 nt, Homo sapiens
  misc_RNA (1)...(19): siRNA sense strand
cucagaugcuagugaaguu

SEQ ID NO: 143644 - RNA, 19 nt, Homo sapiens
  misc_RNA (1)...(19): siRNA sense strand
uggaugaggguggagguua

SEQ ID NO: 143645 - RNA, 19 nt, Homo sapiens
  misc_RNA (1)...(19): siRNA sense strand
ucgcggugcugggagcuaa

SEQ ID NO: 143646 - RNA, 19 nt, Homo sapiens
  misc_RNA (1)...(19): siRNA sense strand
ucgccaagaugccagucaa

SEQ ID NO: 143647 - RNA, 19 nt, Homo sapiens
  misc_RNA (1)...(19): siRNA sense strand
cuggugguauguacugcua

SEQ ID NO: 143648 - RNA, 19 nt, Homo sapiens
  misc_RNA (1)...(19): siRNA sense strand
gaccaucccaacgucauga

SEQ ID NO: 143649 - RNA, 19 nt, Homo sapiens
  misc_RNA (1)...(19): siRNA sense strand
agaaggagacccguuaugg

SEQ ID NO: 143650 - RNA, 19 nt, Homo sapiens
  misc_RNA (1)...(19): siRNA sense strand
aaagaaggagacccguuau

SEQ ID NO: 143651 - RNA, 19 nt, Homo sapiens
  misc_RNA (1)...(19): siRNA sense strand
agccagacccuaaggauuc

SEQ ID NO: 143652 - RNA, 19 nt, Homo sapiens
  misc_RNA (1)...(19): siRNA sense strand
cgaaauccucuaugucaac

SEQ ID NO: 143653 - RNA, 19 nt, Homo sapiens
  misc_RNA (1)...(19): siRNA sense strand
gugaggaugaacaggauga

SEQ ID NO: 143654 - RNA, 19 nt, Homo sapiens
  misc_RNA (1)...(19): siRNA sense strand
gggcacgcaggcugaagaa

SEQ ID NO: 143655 - RNA, 19 nt, Homo sapiens
  misc_RNA (1)...(19): siRNA sense strand
cuggagggcuugccuuacu

SEQ ID NO: 143656 - RNA, 19 nt, Homo sapiens
  misc_RNA (1)...(19): siRNA sense strand
uggacuguaugccuugaug

SEQ ID NO: 143657 - RNA, 19 nt, Homo sapiens
  misc_RNA (1)...(19): siRNA sense strand
gcuucgggauggacagauc

SEQ ID NO: 143658 - RNA, 19 nt, Homo sapiens
  misc_RNA (1)...(19): siRNA sense strand
acuucgggcucuccaagaa

SEQ ID NO: 143659 - RNA, 19 nt, Homo sapiens
  misc_RNA (1)...(19): siRNA sense strand
ggaaagaggugaacuggua

SEQ ID NO: 143660 - RNA, 19 nt, Homo sapiens
  misc_RNA (1)...(19): siRNA sense strand
ggucagagcuggaggauuu

SEQ ID NO: 143661 - RNA, 19 nt, Homo sapiens
  misc_RNA (1)...(19): siRNA sense strand
gaaagaaggagacccguua

SEQ ID NO: 143662 - RNA, 19 nt, Homo sapiens
  misc_RNA (1)...(19): siRNA sense strand
gugaagagcugaaggagaa

SEQ ID NO: 143663 - RNA, 19 nt, Homo sapiens
  misc_RNA (1)...(19): siRNA sense strand
ggaacugcaugcugaauga

SEQ ID NO: 143664 - RNA, 19 nt, Homo sapiens
  misc_RNA (1)...(19): siRNA sense strand
ccaagaagaucuacaaugg

SEQ ID NO: 143665 - RNA, 19 nt, Homo sapiens
  misc_RNA (1)...(19): siRNA sense strand
ugaacaggaugacuggaua

SEQ ID NO: 143666 - RNA, 19 nt, Homo sapiens
  misc_RNA (1)...(19): siRNA sense strand
gcucaucggugucuguuuc

SEQ ID NO: 143667 - RNA, 19 nt, Homo sapiens
  misc_RNA (1)...(19): siRNA sense strand
uuacagagcugcgggaaga

SEQ ID NO: 143668 - RNA, 19 nt, Homo sapiens
  misc_RNA (1)...(19): siRNA sense strand
caucuuggcucucuuccuu

SEQ ID NO: 143669 - RNA, 19 nt, Homo sapiens
  misc_RNA (1)...(19): siRNA sense strand
ggagacccguuauggagaa

SEQ ID NO: 143670 - RNA, 19 nt, Homo sapiens
  misc_RNA (1)...(19): siRNA sense strand
gacgaaauccucuauguca

SEQ ID NO: 143671 - RNA, 19 nt, Homo sapiens
  misc_RNA (1)...(19): siRNA sense strand
ggaugaggguggagguuau

SEQ ID NO: 143672 - RNA, 19 nt, Homo sapiens
  misc_RNA (1)...(19): siRNA sense strand
gaaggagacccguuaugga

SEQ ID NO: 143673 - RNA, 19 nt, Homo sapiens
  misc_RNA (1)...(19): siRNA sense strand
gaaauccucuaugucaaca

SEQ ID NO: 143674 - RNA, 19 nt, Homo sapiens
  misc_RNA (1)...(19): siRNA sense strand
acagcgagauuuaugacua

SEQ ID NO: 143675 - RNA, 19 nt, Homo sapiens
  misc_RNA (1)...(19): siRNA sense strand
gagaacagcgagauuuaug

SEQ ID NO: 143676 - RNA, 19 nt, Homo sapiens
  misc_RNA (1)...(19): siRNA sense strand
ggagaaguguuugaaccaa

SEQ ID NO: 143677 - RNA, 19 nt, Homo sapiens
  misc_RNA (1)...(19): siRNA sense strand
ggugucagcuccagguuca

SEQ ID NO: 143678 - RNA, 19 nt, Homo sapiens
  misc_RNA (1)...(19): siRNA sense strand
gguaccggcuggcguauca

SEQ ID NO: 143679 - RNA, 19 nt, Homo sapiens
  misc_RNA (1)...(19): siRNA sense strand
ccacugaagcuaccuugaa

SEQ ID NO: 143680 - RNA, 19 nt, Homo sapiens
  misc_RNA (1)...(19): siRNA sense strand
caacccagccagacccuaa

SEQ ID NO: 143681 - RNA, 19 nt, Homo sapiens
  misc_RNA (1)...(19): siRNA sense strand
guggucaucuuaccuuuca

SEQ ID NO: 143682 - RNA, 19 nt, Homo sapiens
  misc_RNA (1)...(19): siRNA sense strand
cagcgagauuuaugacuau

SEQ ID NO: 143683 - RNA, 19 nt, Homo sapiens
  misc_RNA (1)...(19): siRNA sense strand
gcacgcaggcugaagaaag

SEQ ID NO: 143684 - RNA, 19 nt, Homo sapiens
  misc_RNA (1)...(19): siRNA sense strand
ggguggagguuauccugaa

SEQ ID NO: 143685 - RNA, 19 nt, Homo sapiens
  misc_RNA (1)...(19): siRNA sense strand
gcacagccaccaucacagu

SEQ ID NO: 143686 - RNA, 19 nt, Homo sapiens
  misc_RNA (1)...(19): siRNA sense strand
ggcauggaguaucugagua

SEQ ID NO: 143687 - RNA, 19 nt, Homo sapiens
  misc_RNA (1)...(19): siRNA sense strand
ugaagacgaugaagauugc

SEQ ID NO: 143688 - RNA, 19 nt, Homo sapiens
  misc_RNA (1)...(19): siRNA sense strand
ggagaacagcgagauuuau

SEQ ID NO: 143689 - RNA, 19 nt, Homo sapiens
  misc_RNA (1)...(19): siRNA sense strand
gugaagacgaugaagauug

SEQ ID NO: 143690 - RNA, 19 nt, Homo sapiens
  misc_RNA (1)...(19): siRNA sense strand
gugaagcggucugcaugaa

SEQ ID NO: 143691 - RNA, 19 nt, Homo sapiens
  misc_RNA (1)...(19): siRNA sense strand
guuuggagcugugauggaa

SEQ ID NO: 143692 - RNA, 19 nt, Homo sapiens
  misc_RNA (1)...(19): siRNA sense strand
ggauugccauugagagucu

SEQ ID NO: 143693 - RNA, 19 nt, Homo sapiens
  misc_RNA (1)...(19): siRNA sense strand
uggagaacagcgagauuua

SEQ ID NO: 143694 - RNA, 19 nt, Homo sapiens
  misc_RNA (1)...(19): siRNA sense strand
ccaguggcauggaguaucu

SEQ ID NO: 143695 - RNA, 19 nt, Homo sapiens
  misc_RNA (1)...(19): siRNA sense strand
gugaacugguagucaggua

SEQ ID NO: 143696 - RNA, 19 nt, Homo sapiens
  misc_RNA (1)...(19): siRNA sense strand
gggaagauuuggagaacac

SEQ ID NO: 143697 - RNA, 19 nt, Homo sapiens
  misc_RNA (1)...(19): siRNA sense strand
gaacagcgagauuuaugac

SEQ ID NO: 143698 - RNA, 19 nt, Homo sapiens
  misc_RNA (1)...(19): siRNA sense strand
gaacaggaugacuggauag

SEQ ID NO: 143699 - RNA, 19 nt, Homo sapiens
  misc_RNA (1)...(19): siRNA sense strand
gagaagcugcgggauguga

SEQ ID NO: 143700 - RNA, 19 nt, Homo sapiens
  misc_RNA (1)...(19): siRNA sense strand
ggacgacuccauccucaag

SEQ ID NO: 143701 - RNA, 19 nt, Homo sapiens
  misc_RNA (1)...(19): siRNA sense strand
ucaccucccugcagcuuuc

SEQ ID NO: 143702 - RNA, 19 nt, Homo sapiens
  misc_RNA (1)...(19): siRNA sense strand
ggacaguaccaguguuugg

SEQ ID NO: 143703 - RNA, 19 nt, Homo sapiens
  misc_RNA (1)...(19): siRNA sense strand
gaacagccugggcaucagu

SEQ ID NO: 143704 - RNA, 19 nt, Homo sapiens
  misc_RNA (1)...(19): siRNA sense strand
uggaguaucugaguaccaa

SEQ ID NO: 143705 - RNA, 19 nt, Homo sapiens
  misc_RNA (1)...(19): siRNA sense strand
guggagaacagcgagauuu

SEQ ID NO: 143706 - RNA, 19 nt, Homo sapiens
  misc_RNA (1)...(19): siRNA sense strand
cagcaccuguggucaucuu

SEQ ID NO: 143707 - RNA, 19 nt, Homo sapiens
  misc_RNA (1)...(19): siRNA sense strand
cugacgaaauccucuaugu

SEQ ID NO: 143708 - RNA, 19 nt, Homo sapiens
  misc_RNA (1)...(19): siRNA sense strand
gccaggccuucgugcauug

SEQ ID NO: 143709 - RNA, 19 nt, Homo sapiens
  misc_RNA (1)...(19): siRNA sense strand
ccaagaugccagucaagug

SEQ ID NO: 143710 - RNA, 19 nt, Homo sapiens
  misc_RNA (1)...(19): siRNA sense strand
aggagaagcugcgggaugu

SEQ ID NO: 143711 - RNA, 19 nt, Homo sapiens
  misc_RNA (1)...(19): siRNA sense strand
gggugaggaugaacaggau

SEQ ID NO: 143712 - RNA, 19 nt, Homo sapiens
  misc_RNA (1)...(19): siRNA sense strand
cacgcaggcugaagaaagu

SEQ ID NO: 143713 - RNA, 19 nt, Homo sapiens
  misc_RNA (1)...(19): siRNA sense strand
acauagggcuaaggcaaga

SEQ ID NO: 143714 - RNA, 19 nt, Homo sapiens
  misc_RNA (1)...(19): siRNA sense strand
gcgggaagauuuggagaac

SEQ ID NO: 143715 - RNA, 19 nt, Homo sapiens
  misc_RNA (1)...(19): siRNA sense strand
gauggacuguaugccuuga

SEQ ID NO: 143716 - RNA, 19 nt, Homo sapiens
  misc_RNA (1)...(19): siRNA sense strand
caaguggauugccauugag

SEQ ID NO: 143717 - RNA, 19 nt, Homo sapiens
  misc_RNA (1)...(19): siRNA sense strand
acagcuuccuccucuauuc

SEQ ID NO: 143718 - RNA, 19 nt, Homo sapiens
  misc_RNA (1)...(19): siRNA sense strand
gggucuguguccaaucuga

SEQ ID NO: 143719 - RNA, 19 nt, Homo sapiens
  misc_RNA (1)...(19): siRNA sense strand
guaccaagagauucauaca

SEQ ID NO: 143720 - RNA, 19 nt, Homo sapiens
  misc_RNA (1)...(19): siRNA sense strand
gaaccaacaguggaaagag

SEQ ID NO: 143721 - RNA, 19 nt, Homo sapiens
  misc_RNA (1)...(19): siRNA sense strand
gaaguucauggcagacauc

SEQ ID NO: 143722 - RNA, 19 nt, Homo sapiens
  misc_RNA (1)...(19): siRNA sense strand
gcugugaagacgaugaaga

SEQ ID NO: 143723 - RNA, 19 nt, Homo sapiens
  misc_RNA (1)...(19): siRNA sense strand
gaagcugcgggaugugaug

SEQ ID NO: 143724 - RNA, 19 nt, Homo sapiens
  misc_RNA (1)...(19): siRNA sense strand
cagaggugcuaauggacau

SEQ ID NO: 143725 - RNA, 19 nt, Homo sapiens
  misc_RNA (1)...(19): siRNA sense strand
cagagcugcgggaagauuu

SEQ ID NO: 143726 - RNA, 19 nt, Homo sapiens
  misc_RNA (1)...(19): siRNA sense strand
gaguaccaagagauucaua

SEQ ID NO: 143727 - RNA, 19 nt, Homo sapiens
  misc_RNA (1)...(19): siRNA sense strand
gaguaucugaguaccaaga

SEQ ID NO: 143728 - RNA, 19 nt, Homo sapiens
  misc_RNA (1)...(19): siRNA sense strand
ggucaucuuaccuuucaug

SEQ ID NO: 143729 - RNA, 19 nt, Homo sapiens
  misc_RNA (1)...(19): siRNA sense strand
gagccaggccuucgugcau

SEQ ID NO: 143730 - RNA, 19 nt, Homo sapiens
  misc_RNA (1)...(19): siRNA sense strand
cccaggaccggccaaguuu

SEQ ID NO: 143731 - RNA, 19 nt, Homo sapiens
  misc_RNA (1)...(19): siRNA sense strand
ggcuggagggcuugccuua

SEQ ID NO: 143732 - RNA, 19 nt, Homo sapiens
  misc_RNA (1)...(19): siRNA sense strand
guaucugaguaccaagaga

SEQ ID NO: 143733 - RNA, 19 nt, Homo sapiens
  misc_RNA (1)...(19): siRNA sense strand
guaccugcccacucagaug

SEQ ID NO: 143734 - RNA, 19 nt, Homo sapiens
  misc_RNA (1)...(19): siRNA sense strand
acacagcuuccuccucuau

SEQ ID NO: 143735 - RNA, 19 nt, Homo sapiens
  misc_RNA (1)...(19): siRNA sense strand
aaacauggagaccuacaca

SEQ ID NO: 143736 - RNA, 19 nt, Homo sapiens
  misc_RNA (1)...(19): siRNA sense strand
gacccguuauggagaagug

SEQ ID NO: 143737 - RNA, 19 nt, Homo sapiens
  misc_RNA (1)...(19): siRNA sense strand
cuaauggacauagggcuaa

SEQ ID NO: 143738 - RNA, 19 nt, Homo sapiens
  misc_RNA (1)...(19): siRNA sense strand
cagccagacccuaaggauu

SEQ ID NO: 143739 - RNA, 19 nt, Homo sapiens
  misc_RNA (1)...(19): siRNA sense strand
acgaaauccucuaugucaa

SEQ ID NO: 143740 - RNA, 19 nt, Homo sapiens
  misc_RNA (1)...(19): siRNA sense strand
agaacagcgagauuuauga

SEQ ID NO: 143741 - RNA, 19 nt, Homo sapiens
  misc_RNA (1)...(19): siRNA sense strand
gcauggaguaucugaguac

SEQ ID NO: 143742 - RNA, 19 nt, Homo sapiens
  misc_RNA (1)...(19): siRNA sense strand
ucugggagagggagaguuu

SEQ ID NO: 143743 - RNA, 19 nt, Homo sapiens
  misc_RNA (1)...(19): siRNA sense strand
cucagaugcuagugaaguu

SEQ ID NO: 143744 - RNA, 19 nt, Homo sapiens
  misc_RNA (1)...(19): siRNA sense strand
uggaugaggguggagguua

SEQ ID NO: 143745 - RNA, 19 nt, Homo sapiens
  misc_RNA (1)...(19): siRNA sense strand
ucgcggugcugggagcuaa

SEQ ID NO: 143746 - RNA, 19 nt, Homo sapiens
  misc_RNA (1)...(19): siRNA sense strand
ucgccaagaugccagucaa

SEQ ID NO: 143747 - RNA, 19 nt, Homo sapiens
  misc_RNA (1)...(19): siRNA sense strand
cuggugguauguacugcua

SEQ ID NO: 143748 - RNA, 19 nt, Homo sapiens
  misc_RNA (1)...(19): siRNA sense strand
gaccaucccaacgucauga

SEQ ID NO: 143749 - RNA, 19 nt, Homo sapiens
  misc_RNA (1)...(19): siRNA sense strand
agaaggagacccguuaugg

SEQ ID NO: 143750 - RNA, 19 nt, Homo sapiens
  misc_RNA (1)...(19): siRNA sense strand
aaagaaggagacccguuau

SEQ ID NO: 143751 - RNA, 19 nt, Homo sapiens
  misc_RNA (1)...(19): siRNA sense strand
agccagacccuaaggauuc

SEQ ID NO: 143752 - RNA, 19 nt, Homo sapiens
  misc_RNA (1)...(19): siRNA sense strand
cgaaauccucuaugucaac

SEQ ID NO: 143753 - RNA, 19 nt, Homo sapiens
  misc_RNA (1)...(19): siRNA sense strand
gugaggaugaacaggauga

SEQ ID NO: 143754 - RNA, 19 nt, Homo sapiens
  misc_RNA (1)...(19): siRNA sense strand
gggcacgcaggcugaagaa

SEQ ID NO: 143755 - RNA, 19 nt, Homo sapiens
  misc_RNA (1)...(19): siRNA sense strand
cuggagggcuugccuuacu

SEQ ID NO: 143756 - RNA, 19 nt, Homo sapiens
  misc_RNA (1)...(19): siRNA sense strand
uggacuguaugccuugaug

SEQ ID NO: 143757 - RNA, 19 nt, Homo sapiens
  misc_RNA (1)...(19): siRNA sense strand
gcuucgggauggacagauc

SEQ ID NO: 143758 - RNA, 19 nt, Homo sapiens
  misc_RNA (1)...(19): siRNA sense strand
acuucgggcucuccaagaa

SEQ ID NO: 143759 - RNA, 19 nt, Homo sapiens
  misc_RNA (1)...(19): siRNA sense strand
ggaaggagauccagagauu

SEQ ID NO: 143760 - RNA, 19 nt, Homo sapiens
  misc_RNA (1)...(19): siRNA sense strand
aaagagaugugaugaauag

SEQ ID NO: 143761 - RNA, 19 nt, Homo sapiens
  misc_RNA (1)...(19): siRNA sense strand
gacuaucuauggcuauuua

SEQ ID NO: 143762 - RNA, 19 nt, Homo sapiens
  misc_RNA (1)...(19): siRNA sense strand
ugaggaggcugccaacuuu

SEQ ID NO: 143763 - RNA, 19 nt, Homo sapiens
  misc_RNA (1)...(19): siRNA sense strand
gaaaagagaugugaugaau

SEQ ID NO: 143764 - RNA, 19 nt, Homo sapiens
  misc_RNA (1)...(19): siRNA sense strand
caauuaauauccaccaaug

SEQ ID NO: 143765 - RNA, 19 nt, Homo sapiens
  misc_RNA (1)...(19): siRNA sense strand
ugagugcacuuguugauga

SEQ ID NO: 143766 - RNA, 19 nt, Homo sapiens
  misc_RNA (1)...(19): siRNA sense strand
gaaucaugcuucuucacuu

SEQ ID NO: 143767 - RNA, 19 nt, Homo sapiens
  misc_RNA (1)...(19): siRNA sense strand
acacgcagcugcacaggaa

SEQ ID NO: 143768 - RNA, 19 nt, Homo sapiens
  misc_RNA (1)...(19): siRNA sense strand
gaagagacaugggaagaac

SEQ ID NO: 143769 - RNA, 19 nt, Homo sapiens
  misc_RNA (1)...(19): siRNA sense strand
ccacgguacuuauuaaugg

SEQ ID NO: 143770 - RNA, 19 nt, Homo sapiens
  misc_RNA (1)...(19): siRNA sense strand
gguagucucuguaugucaa

SEQ ID NO: 143771 - RNA, 19 nt, Homo sapiens
  misc_RNA (1)...(19): siRNA sense strand
gacccacgauuugagguua

SEQ ID NO: 143772 - RNA, 19 nt, Homo sapiens
  misc_RNA (1)...(19): siRNA sense strand
aaccagaaguaacagauuu

SEQ ID NO: 143773 - RNA, 19 nt, Homo sapiens
  misc_RNA (1)...(19): siRNA sense strand
acuggacccugcuaucuua

SEQ ID NO: 143774 - RNA, 19 nt, Homo sapiens
  misc_RNA (1)...(19): siRNA sense strand
cagccacgguacuuauuaa

SEQ ID NO: 143775 - RNA, 19 nt, Homo sapiens
  misc_RNA (1)...(19): siRNA sense strand
gaacaacuggacccugcua

SEQ ID NO: 143776 - RNA, 19 nt, Homo sapiens
  misc_RNA (1)...(19): siRNA sense strand
uaggacagcugaagagaca

SEQ ID NO: 143777 - RNA, 19 nt, Homo sapiens
  misc_RNA (1)...(19): siRNA sense strand
gcaaagcacacgcugaaca

SEQ ID NO: 143778 - RNA, 19 nt, Homo sapiens
  misc_RNA (1)...(19): siRNA sense strand
ugacuuagaguuaauagug

SEQ ID NO: 143779 - RNA, 19 nt, Homo sapiens
  misc_RNA (1)...(19): siRNA sense strand
gagaaggugauaagacuau

SEQ ID NO: 143780 - RNA, 19 nt, Homo sapiens
  misc_RNA (1)...(19): siRNA sense strand
gacuuagaguuaauaguga

SEQ ID NO: 143781 - RNA, 19 nt, Homo sapiens
  misc_RNA (1)...(19): siRNA sense strand
gaaaagcuauuaacaagac

SEQ ID NO: 143782 - RNA, 19 nt, Homo sapiens
  misc_RNA (1)...(19): siRNA sense strand
ggucucuucuggucucuga

SEQ ID NO: 143783 - RNA, 19 nt, Homo sapiens
  misc_RNA (1)...(19): siRNA sense strand
ugggugggcugcuugaauu

SEQ ID NO: 143784 - RNA, 19 nt, Homo sapiens
  misc_RNA (1)...(19): siRNA sense strand
ccucaacgacccacgauuu

SEQ ID NO: 143785 - RNA, 19 nt, Homo sapiens
  misc_RNA (1)...(19): siRNA sense strand
agaaguaacagauuuggaa

SEQ ID NO: 143786 - RNA, 19 nt, Homo sapiens
  misc_RNA (1)...(19): siRNA sense strand
aaucaugcuucuucacuug

SEQ ID NO: 143787 - RNA, 19 nt, Homo sapiens
  misc_RNA (1)...(19): siRNA sense strand
gaaggagauccagagauuu

SEQ ID NO: 143788 - RNA, 19 nt, Homo sapiens
  misc_RNA (1)...(19): siRNA sense strand
caaagcacacgcugaacaa

SEQ ID NO: 143789 - RNA, 19 nt, Homo sapiens
  misc_RNA (1)...(19): siRNA sense strand
ccuuucagauggugaguuu

SEQ ID NO: 143790 - RNA, 19 nt, Homo sapiens
  misc_RNA (1)...(19): siRNA sense strand
gaaguaacagauuuggaau

SEQ ID NO: 143791 - RNA, 19 nt, Homo sapiens
  misc_RNA (1)...(19): siRNA sense strand
ggaccugaaucaugcuucu

SEQ ID NO: 143792 - RNA, 19 nt, Homo sapiens
  misc_RNA (1)...(19): siRNA sense strand
gcaccucauuccagaugug

SEQ ID NO: 143793 - RNA, 19 nt, Homo sapiens
  misc_RNA (1)...(19): siRNA sense strand
ggccuuggcuuaccauaac

SEQ ID NO: 143794 - RNA, 19 nt, Homo sapiens
  misc_RNA (1)...(19): siRNA sense strand
ggagaaggugauaagacua

SEQ ID NO: 143795 - RNA, 19 nt, Homo sapiens
  misc_RNA (1)...(19): siRNA sense strand
ccauucugcacaauuaaua

SEQ ID NO: 143796 - RNA, 19 nt, Homo sapiens
  misc_RNA (1)...(19): siRNA sense strand
caacuuuccuuuuggcauu

SEQ ID NO: 143797 - RNA, 19 nt, Homo sapiens
  misc_RNA (1)...(19): siRNA sense strand
ggacagcugaagagacaug

SEQ ID NO: 143798 - RNA, 19 nt, Homo sapiens
  misc_RNA (1)...(19): siRNA sense strand
ucgaggagcucucuuucuc

SEQ ID NO: 143799 - RNA, 19 nt, Homo sapiens
  misc_RNA (1)...(19): siRNA sense strand
gguauaucauggucagauc

SEQ ID NO: 143800 - RNA, 19 nt, Homo sapiens
  misc_RNA (1)...(19): siRNA sense strand
ccgcaaaccagaaguaaca

SEQ ID NO: 143801 - RNA, 19 nt, Homo sapiens
  misc_RNA (1)...(19): siRNA sense strand
gguaauugauuuguuuggu

SEQ ID NO: 143802 - RNA, 19 nt, Homo sapiens
  misc_RNA (1)...(19): siRNA sense strand
cuauagggccaaugaauuc

SEQ ID NO: 143803 - RNA, 19 nt, Homo sapiens
  misc_RNA (1)...(19): siRNA sense strand
auaagacuaucaacagcaa

SEQ ID NO: 143804 - RNA, 19 nt, Homo sapiens
  misc_RNA (1)...(19): siRNA sense strand
gaguacagauuggacuauc

SEQ ID NO: 143805 - RNA, 19 nt, Homo sapiens
  misc_RNA (1)...(19): siRNA sense strand
gcaaaccagaaguaacaga

SEQ ID NO: 143806 - RNA, 19 nt, Homo sapiens
  misc_RNA (1)...(19): siRNA sense strand
ucacagccacgguacuuau

SEQ ID NO: 143807 - RNA, 19 nt, Homo sapiens
  misc_RNA (1)...(19): siRNA sense strand
gcauuccacagguauauca

SEQ ID NO: 143808 - RNA, 19 nt, Homo sapiens
  misc_RNA (1)...(19): siRNA sense strand
ggacuaucuauggcuauuu

SEQ ID NO: 143809 - RNA, 19 nt, Homo sapiens
  misc_RNA (1)...(19): siRNA sense strand
caacuggacccugcuaucu

SEQ ID NO: 143810 - RNA, 19 nt, Homo sapiens
  misc_RNA (1)...(19): siRNA sense strand
ccucuucauuguaggagaa

SEQ ID NO: 143811 - RNA, 19 nt, Homo sapiens
  misc_RNA (1)...(19): siRNA sense strand
ucugaaaccugaaaagcua

SEQ ID NO: 143812 - RNA, 19 nt, Homo sapiens
  misc_RNA (1)...(19): siRNA sense strand
gccagucaauauuuguuuc

SEQ ID NO: 143813 - RNA, 19 nt, Homo sapiens
  misc_RNA (1)...(19): siRNA sense strand
caaaccagaaguaacagau

SEQ ID NO: 143814 - RNA, 19 nt, Homo sapiens
  misc_RNA (1)...(19): siRNA sense strand
acagccacgguacuuauua

SEQ ID NO: 143815 - RNA, 19 nt, Homo sapiens
  misc_RNA (1)...(19): siRNA sense strand
ugucaaggaguacagauug

SEQ ID NO: 143816 - RNA, 19 nt, Homo sapiens
  misc_RNA (1)...(19): siRNA sense strand
gggaccaacuuuccuuuug

SEQ ID NO: 143817 - RNA, 19 nt, Homo sapiens
  misc_RNA (1)...(19): siRNA sense strand
cacaggaacaugcuuggaa

SEQ ID NO: 143818 - RNA, 19 nt, Homo sapiens
  misc_RNA (1)...(19): siRNA sense strand
ggccagucaauauuuguuu

SEQ ID NO: 143819 - RNA, 19 nt, Homo sapiens
  misc_RNA (1)...(19): siRNA sense strand
aaaccagaaguaacagauu

SEQ ID NO: 143820 - RNA, 19 nt, Homo sapiens
  misc_RNA (1)...(19): siRNA sense strand
ugauuuguuuggugguuug

SEQ ID NO: 143821 - RNA, 19 nt, Homo sapiens
  misc_RNA (1)...(19): siRNA sense strand
ugaagagacaugggaagaa

SEQ ID NO: 143822 - RNA, 19 nt, Homo sapiens
  misc_RNA (1)...(19): siRNA sense strand
aggagaaggugauaagacu

SEQ ID NO: 143823 - RNA, 19 nt, Homo sapiens
  misc_RNA (1)...(19): siRNA sense strand
uugaugagccagugcauau

SEQ ID NO: 143824 - RNA, 19 nt, Homo sapiens
  misc_RNA (1)...(19): siRNA sense strand
aaggagauccagagauuuc

SEQ ID NO: 143825 - RNA, 19 nt, Homo sapiens
  misc_RNA (1)...(19): siRNA sense strand
acuauagggccaaugaauu

SEQ ID NO: 143826 - RNA, 19 nt, Homo sapiens
  misc_RNA (1)...(19): siRNA sense strand
gcacaggaacaugcuugga

SEQ ID NO: 143827 - RNA, 19 nt, Homo sapiens
  misc_RNA (1)...(19): siRNA sense strand
caacgacccacgauuugag

SEQ ID NO: 143828 - RNA, 19 nt, Homo sapiens
  misc_RNA (1)...(19): siRNA sense strand
ggaguacagauuggacuau

SEQ ID NO: 143829 - RNA, 19 nt, Homo sapiens
  misc_RNA (1)...(19): siRNA sense strand
cacaauuaauauccaccaa

SEQ ID NO: 143830 - RNA, 19 nt, Homo sapiens
  misc_RNA (1)...(19): siRNA sense strand
gacaugggaagaacaacug

SEQ ID NO: 143831 - RNA, 19 nt, Homo sapiens
  misc_RNA (1)...(19): siRNA sense strand
cugaaaagcuauuaacaag

SEQ ID NO: 143832 - RNA, 19 nt, Homo sapiens
  misc_RNA (1)...(19): siRNA sense strand
cucuguaugucaaggagua

SEQ ID NO: 143833 - RNA, 19 nt, Homo sapiens
  misc_RNA (1)...(19): siRNA sense strand
gccacgguacuuauuaaug

SEQ ID NO: 143834 - RNA, 19 nt, Homo sapiens
  misc_RNA (1)...(19): siRNA sense strand
uggacuaucuauggcuauu

SEQ ID NO: 143835 - RNA, 19 nt, Homo sapiens
  misc_RNA (1)...(19): siRNA sense strand
guaggagaaggugauaaga

SEQ ID NO: 143836 - RNA, 19 nt, Homo sapiens
  misc_RNA (1)...(19): siRNA sense strand
gccauaggacagcugaaga

SEQ ID NO: 143837 - RNA, 19 nt, Homo sapiens
  misc_RNA (1)...(19): siRNA sense strand
gucaaggaguacagauugg

SEQ ID NO: 143838 - RNA, 19 nt, Homo sapiens
  misc_RNA (1)...(19): siRNA sense strand
guugaugagccagugcaua

SEQ ID NO: 143839 - RNA, 19 nt, Homo sapiens
  misc_RNA (1)...(19): siRNA sense strand
gaacuggacuuugagaaga

SEQ ID NO: 143840 - RNA, 19 nt, Homo sapiens
  misc_RNA (1)...(19): siRNA sense strand
gauggaaacuggaaugagu

SEQ ID NO: 143841 - RNA, 19 nt, Homo sapiens
  misc_RNA (1)...(19): siRNA sense strand
ucaacaagcucguguccaa

SEQ ID NO: 143842 - RNA, 19 nt, Homo sapiens
  misc_RNA (1)...(19): siRNA sense strand
gaacacgaccguccugaau

SEQ ID NO: 143843 - RNA, 19 nt, Homo sapiens
  misc_RNA (1)...(19): siRNA sense strand
gcgcuacacucucuacaug

SEQ ID NO: 143844 - RNA, 19 nt, Homo sapiens
  misc_RNA (1)...(19): siRNA sense strand
ccacgugggugaagaagga

SEQ ID NO: 143845 - RNA, 19 nt, Homo sapiens
  misc_RNA (1)...(19): siRNA sense strand
cgaccguccugaauucuaa

SEQ ID NO: 143846 - RNA, 19 nt, Homo sapiens
  misc_RNA (1)...(19): siRNA sense strand
ccaaggaggagcccaagua

SEQ ID NO: 143847 - RNA, 19 nt, Homo sapiens
  misc_RNA (1)...(19): siRNA sense strand
gcuacacucucuacaugaa

SEQ ID NO: 143848 - RNA, 19 nt, Homo sapiens
  misc_RNA (1)...(19): siRNA sense strand
ggagguacauucgcucaga

SEQ ID NO: 143849 - RNA, 19 nt, Homo sapiens
  misc_RNA (1)...(19): siRNA sense strand
gcaccaagaacgagaaugu

SEQ ID NO: 143850 - RNA, 19 nt, Homo sapiens
  misc_RNA (1)...(19): siRNA sense strand
caacuuuggugcugugauc

SEQ ID NO: 143851 - RNA, 19 nt, Homo sapiens
  misc_RNA (1)...(19): siRNA sense strand
augcagaacuggacuuuga

SEQ ID NO: 143852 - RNA, 19 nt, Homo sapiens
  misc_RNA (1)...(19): siRNA sense strand
gaugucugcuugagagaug

SEQ ID NO: 143853 - RNA, 19 nt, Homo sapiens
  misc_RNA (1)...(19): siRNA sense strand
caaaccaaguucugcaaca

SEQ ID NO: 143854 - RNA, 19 nt, Homo sapiens
  misc_RNA (1)...(19): siRNA sense strand
gaucgaguuugcccacaug

SEQ ID NO: 143855 - RNA, 19 nt, Homo sapiens
  misc_RNA (1)...(19): siRNA sense strand
gacaucagcuuccccauga

SEQ ID NO: 143856 - RNA, 19 nt, Homo sapiens
  misc_RNA (1)...(19): siRNA sense strand
acacgaccguccugaauuc

SEQ ID NO: 143857 - RNA, 19 nt, Homo sapiens
  misc_RNA (1)...(19): siRNA sense strand
ugaggaacaugacagagau

SEQ ID NO: 143858 - RNA, 19 nt, Homo sapiens
  misc_RNA (1)...(19): siRNA sense strand
ugaaaugccgugugguuga

SEQ ID NO: 143859 - RNA, 19 nt, Homo sapiens
  misc_RNA (1)...(19): siRNA sense strand
cccaugagaucugugauga

SEQ ID NO: 143860 - RNA, 19 nt, Homo sapiens
  misc_RNA (1)...(19): siRNA sense strand
gcacacccuuggagaucga

SEQ ID NO: 143861 - RNA, 19 nt, Homo sapiens
  misc_RNA (1)...(19): siRNA sense strand
cgaguuugcccacauguau

SEQ ID NO: 143862 - RNA, 19 nt, Homo sapiens
  misc_RNA (1)...(19): siRNA sense strand
cagcagacgcccaacaaga

SEQ ID NO: 143863 - RNA, 19 nt, Homo sapiens
  misc_RNA (1)...(19): siRNA sense strand
gagaaugucgccaccuugu

SEQ ID NO: 143864 - RNA, 19 nt, Homo sapiens
  misc_RNA (1)...(19): siRNA sense strand
ccaaugcccucauccucau

SEQ ID NO: 143865 - RNA, 19 nt, Homo sapiens
  misc_RNA (1)...(19): siRNA sense strand
cauaccaggugacagacaa

SEQ ID NO: 143866 - RNA, 19 nt, Homo sapiens
  misc_RNA (1)...(19): siRNA sense strand
ccaccaaccagaccuguau

SEQ ID NO: 143867 - RNA, 19 nt, Homo sapiens
  misc_RNA (1)...(19): siRNA sense strand
ggaacacgaccguccugaa

SEQ ID NO: 143868 - RNA, 19 nt, Homo sapiens
  misc_RNA (1)...(19): siRNA sense strand
gacagaggccgaugaagca

SEQ ID NO: 143869 - RNA, 19 nt, Homo sapiens
  misc_RNA (1)...(19): siRNA sense strand
gaaaugccgugugguugac

SEQ ID NO: 143870 - RNA, 19 nt, Homo sapiens
  misc_RNA (1)...(19): siRNA sense strand
ccaggacgcugugaaaugc

SEQ ID NO: 143871 - RNA, 19 nt, Homo sapiens
  misc_RNA (1)...(19): siRNA sense strand
ggaaaguucuucggcuacu

SEQ ID NO: 143872 - RNA, 19 nt, Homo sapiens
  misc_RNA (1)...(19): siRNA sense strand
gaguuugcccacauguaua

SEQ ID NO: 143873 - RNA, 19 nt, Homo sapiens
  misc_RNA (1)...(19): siRNA sense strand
gaaugucgccaccuugucu

SEQ ID NO: 143874 - RNA, 19 nt, Homo sapiens
  misc_RNA (1)...(19): siRNA sense strand
cauccgcuguguuuccauu

SEQ ID NO: 143875 - RNA, 19 nt, Homo sapiens
  misc_RNA (1)...(19): siRNA sense strand
gaagcggcaccaagacaug

SEQ ID NO: 143876 - RNA, 19 nt, Homo sapiens
  misc_RNA (1)...(19): siRNA sense strand
caaguacagcauccacauu

SEQ ID NO: 143877 - RNA, 19 nt, Homo sapiens
  misc_RNA (1)...(19): siRNA sense strand
gcuccgcccucuuccagau

SEQ ID NO: 143878 - RNA, 19 nt, Homo sapiens
  misc_RNA (1)...(19): siRNA sense strand
ccacgcuggugcagggaaa

SEQ ID NO: 143879 - RNA, 19 nt, Homo sapiens
  misc_RNA (1)...(19): siRNA sense strand
gcagaacuggacuuugaga

SEQ ID NO: 143880 - RNA, 19 nt, Homo sapiens
  misc_RNA (1)...(19): siRNA sense strand
ggacgggaccagcuacagu

SEQ ID NO: 143881 - RNA, 19 nt, Homo sapiens
  misc_RNA (1)...(19): siRNA sense strand
gguacagcaccaugaacua

SEQ ID NO: 143882 - RNA, 19 nt, Homo sapiens
  misc_RNA (1)...(19): siRNA sense strand
cagcagcgcacgcgugaau

SEQ ID NO: 143883 - RNA, 19 nt, Homo sapiens
  misc_RNA (1)...(19): siRNA sense strand
gcauccacauugaccagau

SEQ ID NO: 143884 - RNA, 19 nt, Homo sapiens
  misc_RNA (1)...(19): siRNA sense strand
ucauugggauccugguguu

SEQ ID NO: 143885 - RNA, 19 nt, Homo sapiens
  misc_RNA (1)...(19): siRNA sense strand
ggccauuucugugggauuc

SEQ ID NO: 143886 - RNA, 19 nt, Homo sapiens
  misc_RNA (1)...(19): siRNA sense strand
ccaccuacauccgcugugu

SEQ ID NO: 143887 - RNA, 19 nt, Homo sapiens
  misc_RNA (1)...(19): siRNA sense strand
aaaccaaguucugcaacau

SEQ ID NO: 143888 - RNA, 19 nt, Homo sapiens
  misc_RNA (1)...(19): siRNA sense strand
cagcggagaaggacaagga

SEQ ID NO: 143889 - RNA, 19 nt, Homo sapiens
  misc_RNA (1)...(19): siRNA sense strand
gaagucgcgguaugcagaa

SEQ ID NO: 143890 - RNA, 19 nt, Homo sapiens
  misc_RNA (1)...(19): siRNA sense strand
uccaucaucuccuccaaug

SEQ ID NO: 143891 - RNA, 19 nt, Homo sapiens
  misc_RNA (1)...(19): siRNA sense strand
accaaguucugcaacauug

SEQ ID NO: 143892 - RNA, 19 nt, Homo sapiens
  misc_RNA (1)...(19): siRNA sense strand
gaacaugacagagauuuuc

SEQ ID NO: 143893 - RNA, 19 nt, Homo sapiens
  misc_RNA (1)...(19): siRNA sense strand
caacaagcucguguccaaa

SEQ ID NO: 143894 - RNA, 19 nt, Homo sapiens
  misc_RNA (1)...(19): siRNA sense strand
gcacugguuguggccauuu

SEQ ID NO: 143895 - RNA, 19 nt, Homo sapiens
  misc_RNA (1)...(19): siRNA sense strand
cagcggagccacugacauc

SEQ ID NO: 143896 - RNA, 19 nt, Homo sapiens
  misc_RNA (1)...(19): siRNA sense strand
ggacguacagaacuuuguc

SEQ ID NO: 143897 - RNA, 19 nt, Homo sapiens
  misc_RNA (1)...(19): siRNA sense strand
ggaagcggcaccaagacau

SEQ ID NO: 143898 - RNA, 19 nt, Homo sapiens
  misc_RNA (1)...(19): siRNA sense strand
gaacuuuguccagauccuu

SEQ ID NO: 143899 - RNA, 19 nt, Homo sapiens
  misc_RNA (1)...(19): siRNA sense strand
acagaacuuuguccagauc

SEQ ID NO: 143900 - RNA, 19 nt, Homo sapiens
  misc_RNA (1)...(19): siRNA sense strand
gcugacagaggccgaugaa

SEQ ID NO: 143901 - RNA, 19 nt, Homo sapiens
  misc_RNA (1)...(19): siRNA sense strand
cugagaagcaaaccaaguu

SEQ ID NO: 143902 - RNA, 19 nt, Homo sapiens
  misc_RNA (1)...(19): siRNA sense strand
acaagcucguguccaaaga

SEQ ID NO: 143903 - RNA, 19 nt, Homo sapiens
  misc_RNA (1)...(19): siRNA sense strand
gaucugugaugaggacaac

SEQ ID NO: 143904 - RNA, 19 nt, Homo sapiens
  misc_RNA (1)...(19): siRNA sense strand
gucgccaccuugucuguga

SEQ ID NO: 143905 - RNA, 19 nt, Homo sapiens
  misc_RNA (1)...(19): siRNA sense strand
ugagggcccugagaagcaa

SEQ ID NO: 143906 - RNA, 19 nt, Homo sapiens
  misc_RNA (1)...(19): siRNA sense strand
guacagcaccaugaacuac

SEQ ID NO: 143907 - RNA, 19 nt, Homo sapiens
  misc_RNA (1)...(19): siRNA sense strand
guucugucauccucaucaa

SEQ ID NO: 143908 - RNA, 19 nt, Homo sapiens
  misc_RNA (1)...(19): siRNA sense strand
gugaccggcucuccaccuu

SEQ ID NO: 143909 - RNA, 19 nt, Homo sapiens
  misc_RNA (1)...(19): siRNA sense strand
uacagaacuuuguccagau

SEQ ID NO: 143910 - RNA, 19 nt, Homo sapiens
  misc_RNA (1)...(19): siRNA sense strand
uccauugacuacagaaaca

SEQ ID NO: 143911 - RNA, 19 nt, Homo sapiens
  misc_RNA (1)...(19): siRNA sense strand
gcccugagaagcaaaccaa

SEQ ID NO: 143912 - RNA, 19 nt, Homo sapiens
  misc_RNA (1)...(19): siRNA sense strand
guaugcagaacuggacuuu

SEQ ID NO: 143913 - RNA, 19 nt, Homo sapiens
  misc_RNA (1)...(19): siRNA sense strand
acgagaaugucgccaccuu

SEQ ID NO: 143914 - RNA, 19 nt, Homo sapiens
  misc_RNA (1)...(19): siRNA sense strand
aguacagcauccacauuga

SEQ ID NO: 143915 - RNA, 19 nt, Homo sapiens
  misc_RNA (1)...(19): siRNA sense strand
aaguacagcauccacauug

SEQ ID NO: 143916 - RNA, 19 nt, Homo sapiens
  misc_RNA (1)...(19): siRNA sense strand
ucacggacaagaagcugaa

SEQ ID NO: 143917 - RNA, 19 nt, Homo sapiens
  misc_RNA (1)...(19): siRNA sense strand
caacgccacaggacucauc

SEQ ID NO: 143918 - RNA, 19 nt, Homo sapiens
  misc_RNA (1)...(19): siRNA sense strand
ucaugcuggucaucaucua

SEQ ID NO: 143919 - RNA, 19 nt, Homo sapiens
  misc_RNA (1)...(19): siRNA sense strand
gcuguggcguguccucucu

SEQ ID NO: 143920 - RNA, 19 nt, Homo sapiens
  misc_RNA (1)...(19): siRNA sense strand
gaggaacaugacagagauu

SEQ ID NO: 143921 - RNA, 19 nt, Homo sapiens
  misc_RNA (1)...(19): siRNA sense strand
gugaugaggacaacuuugg

SEQ ID NO: 143922 - RNA, 19 nt, Homo sapiens
  misc_RNA (1)...(19): siRNA sense strand
gcgcacacccuuggagauc

SEQ ID NO: 143923 - RNA, 19 nt, Homo sapiens
  misc_RNA (1)...(19): siRNA sense strand
gugcugugaucuggaagga

SEQ ID NO: 143924 - RNA, 19 nt, Homo sapiens
  misc_RNA (1)...(19): siRNA sense strand
ggacuuuguggacgucauc

SEQ ID NO: 143925 - RNA, 19 nt, Homo sapiens
  misc_RNA (1)...(19): siRNA sense strand
ccaaguacagcauccacau

SEQ ID NO: 143926 - RNA, 19 nt, Homo sapiens
  misc_RNA (1)...(19): siRNA sense strand
caaggaggagcccaaguac

SEQ ID NO: 143927 - RNA, 19 nt, Homo sapiens
  misc_RNA (1)...(19): siRNA sense strand
ugugaaaugccgugugguu

SEQ ID NO: 143928 - RNA, 19 nt, Homo sapiens
  misc_RNA (1)...(19): siRNA sense strand
gcacuguauccuccguaga

SEQ ID NO: 143929 - RNA, 19 nt, Homo sapiens
  misc_RNA (1)...(19): siRNA sense strand
aaaggguacagcaccauga

SEQ ID NO: 143930 - RNA, 19 nt, Homo sapiens
  misc_RNA (1)...(19): siRNA sense strand
cugaggaacaugacagaga

SEQ ID NO: 143931 - RNA, 19 nt, Homo sapiens
  misc_RNA (1)...(19): siRNA sense strand
ucccugcgguccacagaug

SEQ ID NO: 143932 - RNA, 19 nt, Homo sapiens
  misc_RNA (1)...(19): siRNA sense strand
gaucuccgugacugugaaa

SEQ ID NO: 143933 - RNA, 19 nt, Homo sapiens
  misc_RNA (1)...(19): siRNA sense strand
ugaagcauccguguuugug

SEQ ID NO: 143934 - RNA, 19 nt, Homo sapiens
  misc_RNA (1)...(19): siRNA sense strand
ggacuuugagaagaucaug

SEQ ID NO: 143935 - RNA, 19 nt, Homo sapiens
  misc_RNA (1)...(19): siRNA sense strand
gauccucuucgcugucuuc

SEQ ID NO: 143936 - RNA, 19 nt, Homo sapiens
  misc_RNA (1)...(19): siRNA sense strand
caacaacucuagccaauuc

SEQ ID NO: 143937 - RNA, 19 nt, Homo sapiens
  misc_RNA (1)...(19): siRNA sense strand
cgaaagaaauuacgguauu

SEQ ID NO: 143938 - RNA, 19 nt, Homo sapiens
  misc_RNA (1)...(19): siRNA sense strand
gcaaugaucuguucacaac

SEQ ID NO: 143939 - RNA, 19 nt, Homo sapiens
  misc_RNA (1)...(19): siRNA sense strand
guccugagcugcagacuaa

SEQ ID NO: 143940 - RNA, 19 nt, Homo sapiens
  misc_RNA (1)...(19): siRNA sense strand
gaaagaaauuacgguauuc

SEQ ID NO: 143941 - RNA, 19 nt, Homo sapiens
  misc_RNA (1)...(19): siRNA sense strand
gagcagcaaugaucuguuc

SEQ ID NO: 143942 - RNA, 19 nt, Homo sapiens
  misc_RNA (1)...(19): siRNA sense strand
gagaagcgguggagugugu

SEQ ID NO: 143943 - RNA, 19 nt, Homo sapiens
  misc_RNA (1)...(19): siRNA sense strand
gaagaggaaccgaaaguga

SEQ ID NO: 143944 - RNA, 19 nt, Homo sapiens
  misc_RNA (1)...(19): siRNA sense strand
agacuaagcucugcaguau

SEQ ID NO: 143945 - RNA, 19 nt, Homo sapiens
  misc_RNA (1)...(19): siRNA sense strand
ggaucuggcuugucaaaca

SEQ ID NO: 143946 - RNA, 19 nt, Homo sapiens
  misc_RNA (1)...(19): siRNA sense strand
gaugaguccuccuacuuug

SEQ ID NO: 143947 - RNA, 19 nt, Homo sapiens
  misc_RNA (1)...(19): siRNA sense strand
gcgcagggcuuugucauca

SEQ ID NO: 143948 - RNA, 19 nt, Homo sapiens
  misc_RNA (1)...(19): siRNA sense strand
ggccaacccuguuuacaug

SEQ ID NO: 143949 - RNA, 19 nt, Homo sapiens
  misc_RNA (1)...(19): siRNA sense strand
cagaaucccuauggaauga

SEQ ID NO: 143950 - RNA, 19 nt, Homo sapiens
  misc_RNA (1)...(19): siRNA sense strand
gaaggccagugguuagaau

SEQ ID NO: 143951 - RNA, 19 nt, Homo sapiens
  misc_RNA (1)...(19): siRNA sense strand
caaccgagaugagauaugg

SEQ ID NO: 143952 - RNA, 19 nt, Homo sapiens
  misc_RNA (1)...(19): siRNA sense strand
gaucggugcuguacucuac

SEQ ID NO: 143953 - RNA, 19 nt, Homo sapiens
  misc_RNA (1)...(19): siRNA sense strand
gcucuucucuguggacauu

SEQ ID NO: 143954 - RNA, 19 nt, Homo sapiens
  misc_RNA (1)...(19): siRNA sense strand
ggccgugucuguuggcuuu

SEQ ID NO: 143955 - RNA, 19 nt, Homo sapiens
  misc_RNA (1)...(19): siRNA sense strand
gaaacggcauucagaacuc

SEQ ID NO: 143956 - RNA, 19 nt, Homo sapiens
  misc_RNA (1)...(19): siRNA sense strand
auucagaccuggacuuuga

SEQ ID NO: 143957 - RNA, 19 nt, Homo sapiens
  misc_RNA (1)...(19): siRNA sense strand
ggaaucaucgucuucaaca

SEQ ID NO: 143958 - RNA, 19 nt, Homo sapiens
  misc_RNA (1)...(19): siRNA sense strand
ggagcaccuucaaaucuau

SEQ ID NO: 143959 - RNA, 19 nt, Homo sapiens
  misc_RNA (1)...(19): siRNA sense strand
gccgagagguccaggaugu

SEQ ID NO: 143960 - RNA, 19 nt, Homo sapiens
  misc_RNA (1)...(19): siRNA sense strand
ucacaaccgagaugagaua

SEQ ID NO: 143961 - RNA, 19 nt, Homo sapiens
  misc_RNA (1)...(19): siRNA sense strand
gcagauccugucagacuuu

SEQ ID NO: 143962 - RNA, 19 nt, Homo sapiens
  misc_RNA (1)...(19): siRNA sense strand
uggagcaccuucaaaucua

SEQ ID NO: 143963 - RNA, 19 nt, Homo sapiens
  misc_RNA (1)...(19): siRNA sense strand
gcccuagccuuccgcuuug

SEQ ID NO: 143964 - RNA, 19 nt, Homo sapiens
  misc_RNA (1)...(19): siRNA sense strand
gaaucaucgucuucaacaa

SEQ ID NO: 143965 - RNA, 19 nt, Homo sapiens
  misc_RNA (1)...(19): siRNA sense strand
caacagcgcagccggaagu

SEQ ID NO: 143966 - RNA, 19 nt, Homo sapiens
  misc_RNA (1)...(19): siRNA sense strand
ucucagcuguguccaguga

SEQ ID NO: 143967 - RNA, 19 nt, Homo sapiens
  misc_RNA (1)...(19): siRNA sense strand
gguggaaggccagugguua

SEQ ID NO: 143968 - RNA, 19 nt, Homo sapiens
  misc_RNA (1)...(19): siRNA sense strand
gugaagccuuguagugaga

SEQ ID NO: 143969 - RNA, 19 nt, Homo sapiens
  misc_RNA (1)...(19): siRNA sense strand
ggaaacggcauucagaacu

SEQ ID NO: 143970 - RNA, 19 nt, Homo sapiens
  misc_RNA (1)...(19): siRNA sense strand
gaacaugcucaucggaauc

SEQ ID NO: 143971 - RNA, 19 nt, Homo sapiens
  misc_RNA (1)...(19): siRNA sense strand
acuaagcucugcaguaugg

SEQ ID NO: 143972 - RNA, 19 nt, Homo sapiens
  misc_RNA (1)...(19): siRNA sense strand
gaggugaagccuuguagug

SEQ ID NO: 143973 - RNA, 19 nt, Homo sapiens
  misc_RNA (1)...(19): siRNA sense strand
ggacuacuccagagcagau

SEQ ID NO: 143974 - RNA, 19 nt, Homo sapiens
  misc_RNA (1)...(19): siRNA sense strand
ugaacaugcucaucggaau

SEQ ID NO: 143975 - RNA, 19 nt, Homo sapiens
  misc_RNA (1)...(19): siRNA sense strand
gucgaggucuugcucauca

SEQ ID NO: 143976 - RNA, 19 nt, Homo sapiens
  misc_RNA (1)...(19): siRNA sense strand
ucacugcugugcacugcuu

SEQ ID NO: 143977 - RNA, 19 nt, Homo sapiens
  misc_RNA (1)...(19): siRNA sense strand
ucugaacgcuccaucaucu

SEQ ID NO: 143978 - RNA, 19 nt, Homo sapiens
  misc_RNA (1)...(19): siRNA sense strand
gagcucuccuacaucauca

SEQ ID NO: 143979 - RNA, 19 nt, Homo sapiens
  misc_RNA (1)...(19): siRNA sense strand
ugaugaguccuccuacuuu

SEQ ID NO: 143980 - RNA, 19 nt, Homo sapiens
  misc_RNA (1)...(19): siRNA sense strand
aacaacaacucuagccaau

SEQ ID NO: 143981 - RNA, 19 nt, Homo sapiens
  misc_RNA (1)...(19): siRNA sense strand
cagcaccuguccaccuuug

SEQ ID NO: 143982 - RNA, 19 nt, Homo sapiens
  misc_RNA (1)...(19): siRNA sense strand
gccagcaccuguccaccuu

SEQ ID NO: 143983 - RNA, 19 nt, Homo sapiens
  misc_RNA (1)...(19): siRNA sense strand
gcacuucgacaagaacuuc

SEQ ID NO: 143984 - RNA, 19 nt, Homo sapiens
  misc_RNA (1)...(19): siRNA sense strand
gauccugucagacuuugaa

SEQ ID NO: 143985 - RNA, 19 nt, Homo sapiens
  misc_RNA (1)...(19): siRNA sense strand
cgccaucuaugccgccuuu

SEQ ID NO: 143986 - RNA, 19 nt, Homo sapiens
  misc_RNA (1)...(19): siRNA sense strand
gcccucggcugaugaugug

SEQ ID NO: 143987 - RNA, 19 nt, Homo sapiens
  misc_RNA (1)...(19): siRNA sense strand
ccagaaucccuauggaaug

SEQ ID NO: 143988 - RNA, 19 nt, Homo sapiens
  misc_RNA (1)...(19): siRNA sense strand
gagcuggagcaccuucaaa

SEQ ID NO: 143989 - RNA, 19 nt, Homo sapiens
  misc_RNA (1)...(19): siRNA sense strand
gcgaaagaaauuacgguau

SEQ ID NO: 143990 - RNA, 19 nt, Homo sapiens
  misc_RNA (1)...(19): siRNA sense strand
ggaagaggaaccgaaagug

SEQ ID NO: 143991 - RNA, 19 nt, Homo sapiens
  misc_RNA (1)...(19): siRNA sense strand
ggguggagguggugaggau

SEQ ID NO: 143992 - RNA, 19 nt, Homo sapiens
  misc_RNA (1)...(19): siRNA sense strand
gaucuggcuugucaaacag

SEQ ID NO: 143993 - RNA, 19 nt, Homo sapiens
  misc_RNA (1)...(19): siRNA sense strand
ggauguggaucuggcuugu

SEQ ID NO: 143994 - RNA, 19 nt, Homo sapiens
  misc_RNA (1)...(19): siRNA sense strand
ggugggcgaugcucucaag

SEQ ID NO: 143995 - RNA, 19 nt, Homo sapiens
  misc_RNA (1)...(19): siRNA sense strand
gcccacacccuguccaaug

SEQ ID NO: 143996 - RNA, 19 nt, Homo sapiens
  misc_RNA (1)...(19): siRNA sense strand
guauucagaccuggacuuu

SEQ ID NO: 143997 - RNA, 19 nt, Homo sapiens
  misc_RNA (1)...(19): siRNA sense strand
ucacccugcucgccaucua

SEQ ID NO: 143998 - RNA, 19 nt, Homo sapiens
  misc_RNA (1)...(19): siRNA sense strand
gaguaccgcuaccuguauc

SEQ ID NO: 143999 - RNA, 19 nt, Homo sapiens
  misc_RNA (1)...(19): siRNA sense strand
ggaaggccagugguuagaa

SEQ ID NO: 144000 - RNA, 19 nt, Homo sapiens
  misc_RNA (1)...(19): siRNA sense strand
cggcgcaccuacuauagug

SEQ ID NO: 144001 - RNA, 19 nt, Homo sapiens
  misc_RNA (1)...(19): siRNA sense strand
accacgagcucaaccagaa

SEQ ID NO: 144002 - RNA, 19 nt, Homo sapiens
  misc_RNA (1)...(19): siRNA sense strand
agaaauuacgguauucaga

SEQ ID NO: 144003 - RNA, 19 nt, Homo sapiens
  misc_RNA (1)...(19): siRNA sense strand
ggaacgccauggccucacu

SEQ ID NO: 144004 - RNA, 19 nt, Homo sapiens
  misc_RNA (1)...(19): siRNA sense strand
ccacuaccuggucaacuuu

SEQ ID NO: 144005 - RNA, 19 nt, Homo sapiens
  misc_RNA (1)...(19): siRNA sense strand
ucacugacaccuuuaagag

SEQ ID NO: 144006 - RNA, 19 nt, Homo sapiens
  misc_RNA (1)...(19): siRNA sense strand
cagcaaugaucuguucaca

SEQ ID NO: 144007 - RNA, 19 nt, Homo sapiens
  misc_RNA (1)...(19): siRNA sense strand
caacccuguuuacaugugu

SEQ ID NO: 144008 - RNA, 19 nt, Homo sapiens
  misc_RNA (1)...(19): siRNA sense strand
gcagggcuuugucaucacu

SEQ ID NO: 144009 - RNA, 19 nt, Homo sapiens
  misc_RNA (1)...(19): siRNA sense strand
gggaccugcucuucucugu

SEQ ID NO: 144010 - RNA, 19 nt, Homo sapiens
  misc_RNA (1)...(19): siRNA sense strand
aagaggaaccgaaagugaa

SEQ ID NO: 144011 - RNA, 19 nt, Homo sapiens
  misc_RNA (1)...(19): siRNA sense strand
ucuccuacaucaucaaugg

SEQ ID NO: 144012 - RNA, 19 nt, Homo sapiens
  misc_RNA (1)...(19): siRNA sense strand
caacuccgcgcagggcuuu

SEQ ID NO: 144013 - RNA, 19 nt, Homo sapiens
  misc_RNA (1)...(19): siRNA sense strand
gcaagggcgugugcaccau

SEQ ID NO: 144014 - RNA, 19 nt, Homo sapiens
  misc_RNA (1)...(19): siRNA sense strand
guccaccuuugcuguacua

SEQ ID NO: 144015 - RNA, 19 nt, Homo sapiens
  misc_RNA (1)...(19): siRNA sense strand
gaggaggugaagccuugua

SEQ ID NO: 144016 - RNA, 19 nt, Homo sapiens
  misc_RNA (1)...(19): siRNA sense strand
cggagcgugugcaccgaua

SEQ ID NO: 144017 - RNA, 19 nt, Homo sapiens
  misc_RNA (1)...(19): siRNA sense strand
gggagaagcgguggagugu

SEQ ID NO: 144018 - RNA, 19 nt, Homo sapiens
  misc_RNA (1)...(19): siRNA sense strand
uguccagccuuccaugaga

SEQ ID NO: 144019 - RNA, 19 nt, Homo sapiens
  misc_RNA (1)...(19): siRNA sense strand
guucacaaccgagaugaga

SEQ ID NO: 144020 - RNA, 19 nt, Homo sapiens
  misc_RNA (1)...(19): siRNA sense strand
ccaacccuguuuacaugug

SEQ ID NO: 144021 - RNA, 19 nt, Homo sapiens
  misc_RNA (1)...(19): siRNA sense strand
ccucuuugcugucuucaac

SEQ ID NO: 144022 - RNA, 19 nt, Homo sapiens
  misc_RNA (1)...(19): siRNA sense strand
gugaucggcugugcagugu

SEQ ID NO: 144023 - RNA, 19 nt, Homo sapiens
  misc_RNA (1)...(19): siRNA sense strand
agaggaaccgaaagugaaa

SEQ ID NO: 144024 - RNA, 19 nt, Homo sapiens
  misc_RNA (1)...(19): siRNA sense strand
gccgaggucugcagaugag

SEQ ID NO: 144025 - RNA, 19 nt, Homo sapiens
  misc_RNA (1)...(19): siRNA sense strand
uccaggauguggugaagug

SEQ ID NO: 144026 - RNA, 19 nt, Homo sapiens
  misc_RNA (1)...(19): siRNA sense strand
ugaacgcuccaucaucuug

SEQ ID NO: 144027 - RNA, 19 nt, Homo sapiens
  misc_RNA (1)...(19): siRNA sense strand
gagcccgucucagcugugu

SEQ ID NO: 144028 - RNA, 19 nt, Homo sapiens
  misc_RNA (1)...(19): siRNA sense strand
caccaucacgggcacacua

SEQ ID NO: 144029 - RNA, 19 nt, Homo sapiens
  misc_RNA (1)...(19): siRNA sense strand
gauacgguacauccagcua

SEQ ID NO: 144030 - RNA, 19 nt, Homo sapiens
  misc_RNA (1)...(19): siRNA sense strand
gcagggaugaguacgugau

SEQ ID NO: 144031 - RNA, 19 nt, Homo sapiens
  misc_RNA (1)...(19): siRNA sense strand
gcuccaucaucuugcugaa

SEQ ID NO: 144032 - RNA, 19 nt, Homo sapiens
  misc_RNA (1)...(19): siRNA sense strand
ggagguucauaaaaucuga

SEQ ID NO: 144033 - RNA, 19 nt, Homo sapiens
  misc_RNA (1)...(19): siRNA sense strand
ggagacugggacacugaaa

SEQ ID NO: 144034 - RNA, 19 nt, Homo sapiens
  misc_RNA (1)...(19): siRNA sense strand
ugaguaccgcuaccuguau

SEQ ID NO: 144035 - RNA, 19 nt, Homo sapiens
  misc_RNA (1)...(19): siRNA sense strand
ucaacaacaacaacucuag

SEQ ID NO: 144036 - RNA, 19 nt, Homo sapiens
  misc_RNA (1)...(19): siRNA sense strand
gcaagaaacucagaagaua

SEQ ID NO: 144037 - RNA, 19 nt, Homo sapiens
  misc_RNA (1)...(19): siRNA sense strand
ggacacggcuuauaagaaa

SEQ ID NO: 144038 - RNA, 19 nt, Homo sapiens
  misc_RNA (1)...(19): siRNA sense strand
gaaagugacuauauuguga

SEQ ID NO: 144039 - RNA, 19 nt, Homo sapiens
  misc_RNA (1)...(19): siRNA sense strand
gaacuuguguaucaccuua

SEQ ID NO: 144040 - RNA, 19 nt, Homo sapiens
  misc_RNA (1)...(19): siRNA sense strand
gauaaacgcuccauauugu

SEQ ID NO: 144041 - RNA, 19 nt, Homo sapiens
  misc_RNA (1)...(19): siRNA sense strand
gaaacuggaucaacgauau

SEQ ID NO: 144042 - RNA, 19 nt, Homo sapiens
  misc_RNA (1)...(19): siRNA sense strand
ggacagauuucgggauaua

SEQ ID NO: 144043 - RNA, 19 nt, Homo sapiens
  misc_RNA (1)...(19): siRNA sense strand
gaugggagaucauacaauu

SEQ ID NO: 144044 - RNA, 19 nt, Homo sapiens
  misc_RNA (1)...(19): siRNA sense strand
gcggagaacuguguacuua

SEQ ID NO: 144045 - RNA, 19 nt, Homo sapiens
  misc_RNA (1)...(19): siRNA sense strand
gacaucaacuuuccaauga

SEQ ID NO: 144046 - RNA, 19 nt, Homo sapiens
  misc_RNA (1)...(19): siRNA sense strand
gagauggaauccuagauaa

SEQ ID NO: 144047 - RNA, 19 nt, Homo sapiens
  misc_RNA (1)...(19): siRNA sense strand
ggaacuauuucaagaacua

SEQ ID NO: 144048 - RNA, 19 nt, Homo sapiens
  misc_RNA (1)...(19): siRNA sense strand
caucauaagccuuguaaua

SEQ ID NO: 144049 - RNA, 19 nt, Homo sapiens
  misc_RNA (1)...(19): siRNA sense strand
gauggaaagugacuauauu

SEQ ID NO: 144050 - RNA, 19 nt, Homo sapiens
  misc_RNA (1)...(19): siRNA sense strand
caagaugcauaucaaauga

SEQ ID NO: 144051 - RNA, 19 nt, Homo sapiens
  misc_RNA (1)...(19): siRNA sense strand
gaaauguaguggcuaguau

SEQ ID NO: 144052 - RNA, 19 nt, Homo sapiens
  misc_RNA (1)...(19): siRNA sense strand
gaucaguucuucauaagga

SEQ ID NO: 144053 - RNA, 19 nt, Homo sapiens
  misc_RNA (1)...(19): siRNA sense strand
gcuaagcuauucaacauug

SEQ ID NO: 144054 - RNA, 19 nt, Homo sapiens
  misc_RNA (1)...(19): siRNA sense strand
ggagaacuguguacuuaug

SEQ ID NO: 144055 - RNA, 19 nt, Homo sapiens
  misc_RNA (1)...(19): siRNA sense strand
gcaagagggugacuuucaa

SEQ ID NO: 144056 - RNA, 19 nt, Homo sapiens
  misc_RNA (1)...(19): siRNA sense strand
caacuaauuucccaggauu

SEQ ID NO: 144057 - RNA, 19 nt, Homo sapiens
  misc_RNA (1)...(19): siRNA sense strand
ggaacacuuucuaggauuu

SEQ ID NO: 144058 - RNA, 19 nt, Homo sapiens
  misc_RNA (1)...(19): siRNA sense strand
ucagcaaccuagagaaaua

SEQ ID NO: 144059 - RNA, 19 nt, Homo sapiens
  misc_RNA (1)...(19): siRNA sense strand
gaagaugcacaacagauuu

SEQ ID NO: 144060 - RNA, 19 nt, Homo sapiens
  misc_RNA (1)...(19): siRNA sense strand
ucaaugaguucuuuagaga

SEQ ID NO: 144061 - RNA, 19 nt, Homo sapiens
  misc_RNA (1)...(19): siRNA sense strand
gaagauaggguaguaauuc

SEQ ID NO: 144062 - RNA, 19 nt, Homo sapiens
  misc_RNA (1)...(19): siRNA sense strand
ucuaucaucucauccaaua

SEQ ID NO: 144063 - RNA, 19 nt, Homo sapiens
  misc_RNA (1)...(19): siRNA sense strand
gaagaggcauauggaacua

SEQ ID NO: 144064 - RNA, 19 nt, Homo sapiens
  misc_RNA (1)...(19): siRNA sense strand
gcucaaaugugccaagugu

SEQ ID NO: 144065 - RNA, 19 nt, Homo sapiens
  misc_RNA (1)...(19): siRNA sense strand
ggacagacucagacacaua

SEQ ID NO: 144066 - RNA, 19 nt, Homo sapiens
  misc_RNA (1)...(19): siRNA sense strand
cauaagccuuguaauauug

SEQ ID NO: 144067 - RNA, 19 nt, Homo sapiens
  misc_RNA (1)...(19): siRNA sense strand
caaaguaaacccugaauuc

SEQ ID NO: 144068 - RNA, 19 nt, Homo sapiens
  misc_RNA (1)...(19): siRNA sense strand
gaaaggcuauugcacuaca

SEQ ID NO: 144069 - RNA, 19 nt, Homo sapiens
  misc_RNA (1)...(19): siRNA sense strand
gcaguggucuuucuugcuu

SEQ ID NO: 144070 - RNA, 19 nt, Homo sapiens
  misc_RNA (1)...(19): siRNA sense strand
gaaucaaggguuugcaaua

SEQ ID NO: 144071 - RNA, 19 nt, Homo sapiens
  misc_RNA (1)...(19): siRNA sense strand
ggagaagugucugaauuug

SEQ ID NO: 144072 - RNA, 19 nt, Homo sapiens
  misc_RNA (1)...(19): siRNA sense strand
guaaccugcugauuuauau

SEQ ID NO: 144073 - RNA, 19 nt, Homo sapiens
  misc_RNA (1)...(19): siRNA sense strand
agauagaacuagcucauuu

SEQ ID NO: 144074 - RNA, 19 nt, Homo sapiens
  misc_RNA (1)...(19): siRNA sense strand
aaucaaggguuugcaauaa

SEQ ID NO: 144075 - RNA, 19 nt, Homo sapiens
  misc_RNA (1)...(19): siRNA sense strand
ccucugaguuggaugauaa

SEQ ID NO: 144076 - RNA, 19 nt, Homo sapiens
  misc_RNA (1)...(19): siRNA sense strand
guaauggaccaguucaaua

SEQ ID NO: 144077 - RNA, 19 nt, Homo sapiens
  misc_RNA (1)...(19): siRNA sense strand
aaagaaugauggaaaguga

SEQ ID NO: 144078 - RNA, 19 nt, Homo sapiens
  misc_RNA (1)...(19): siRNA sense strand
caagaaagaaugauggaaa

SEQ ID NO: 144079 - RNA, 19 nt, Homo sapiens
  misc_RNA (1)...(19): siRNA sense strand
gggcuaagcuauucaacau

SEQ ID NO: 144080 - RNA, 19 nt, Homo sapiens
  misc_RNA (1)...(19): siRNA sense strand
cuuaaugacuggaaaugua

SEQ ID NO: 144081 - RNA, 19 nt, Homo sapiens
  misc_RNA (1)...(19): siRNA sense strand
uaacagggcagcaauguga

SEQ ID NO: 144082 - RNA, 19 nt, Homo sapiens
  misc_RNA (1)...(19): siRNA sense strand
aaccagaacuuguguauca

SEQ ID NO: 144083 - RNA, 19 nt, Homo sapiens
  misc_RNA (1)...(19): siRNA sense strand
ccaccuaucuccugguuau

SEQ ID NO: 144084 - RNA, 19 nt, Homo sapiens
  misc_RNA (1)...(19): siRNA sense strand
gcaggacuaucaagaagug

SEQ ID NO: 144085 - RNA, 19 nt, Homo sapiens
  misc_RNA (1)...(19): siRNA sense strand
gcaagaugcauaucaaaug

SEQ ID NO: 144086 - RNA, 19 nt, Homo sapiens
  misc_RNA (1)...(19): siRNA sense strand
aaauaugcccugaggauua

SEQ ID NO: 144087 - RNA, 19 nt, Homo sapiens
  misc_RNA (1)...(19): siRNA sense strand
caauaacacugcccucugu

SEQ ID NO: 144088 - RNA, 19 nt, Homo sapiens
  misc_RNA (1)...(19): siRNA sense strand
ucaguaggcuucaccagaa

SEQ ID NO: 144089 - RNA, 19 nt, Homo sapiens
  misc_RNA (1)...(19): siRNA sense strand
acccaagucugcaaucuua

SEQ ID NO: 144090 - RNA, 19 nt, Homo sapiens
  misc_RNA (1)...(19): siRNA sense strand
aggaacauaugcagaauuu

SEQ ID NO: 144091 - RNA, 19 nt, Homo sapiens
  misc_RNA (1)...(19): siRNA sense strand
gcaccugcccucagcauuu

SEQ ID NO: 144092 - RNA, 19 nt, Homo sapiens
  misc_RNA (1)...(19): siRNA sense strand
guucguaaccugcugauuu

SEQ ID NO: 144093 - RNA, 19 nt, Homo sapiens
  misc_RNA (1)...(19): siRNA sense strand
gaggacuacucuaugcuuu

SEQ ID NO: 144094 - RNA, 19 nt, Homo sapiens
  misc_RNA (1)...(19): siRNA sense strand
ugagagauccauaauacua

SEQ ID NO: 144095 - RNA, 19 nt, Homo sapiens
  misc_RNA (1)...(19): siRNA sense strand
gaaucccuauuguguauug

SEQ ID NO: 144096 - RNA, 19 nt, Homo sapiens
  misc_RNA (1)...(19): siRNA sense strand
ggaagaugcacaacagauu

SEQ ID NO: 144097 - RNA, 19 nt, Homo sapiens
  misc_RNA (1)...(19): siRNA sense strand
ucaaauaguuagcaaccuu

SEQ ID NO: 144098 - RNA, 19 nt, Homo sapiens
  misc_RNA (1)...(19): siRNA sense strand
guaaauaaccagccuucaa

SEQ ID NO: 144099 - RNA, 19 nt, Homo sapiens
  misc_RNA (1)...(19): siRNA sense strand
gagaaauaaucauggaauc

SEQ ID NO: 144100 - RNA, 19 nt, Homo sapiens
  misc_RNA (1)...(19): siRNA sense strand
gcacauguucgguuacuug

SEQ ID NO: 144101 - RNA, 19 nt, Homo sapiens
  misc_RNA (1)...(19): siRNA sense strand
gggagaagugucugaauuu

SEQ ID NO: 144102 - RNA, 19 nt, Homo sapiens
  misc_RNA (1)...(19): siRNA sense strand
ucaacgauaucaaugaguu

SEQ ID NO: 144103 - RNA, 19 nt, Homo sapiens
  misc_RNA (1)...(19): siRNA sense strand
gcaaggcuuuguuauaguc

SEQ ID NO: 144104 - RNA, 19 nt, Homo sapiens
  misc_RNA (1)...(19): siRNA sense strand
ggaaauguaguggcuagua

SEQ ID NO: 144105 - RNA, 19 nt, Homo sapiens
  misc_RNA (1)...(19): siRNA sense strand
gcgaagaagugagaagaug

SEQ ID NO: 144106 - RNA, 19 nt, Homo sapiens
  misc_RNA (1)...(19): siRNA sense strand
gaucaacgauaucaaugag

SEQ ID NO: 144107 - RNA, 19 nt, Homo sapiens
  misc_RNA (1)...(19): siRNA sense strand
gaacauaugcagaauuugc

SEQ ID NO: 144108 - RNA, 19 nt, Homo sapiens
  misc_RNA (1)...(19): siRNA sense strand
gcuauugcacuacaaagua

SEQ ID NO: 144109 - RNA, 19 nt, Homo sapiens
  misc_RNA (1)...(19): siRNA sense strand
gcaaucauauauggcugua

SEQ ID NO: 144110 - RNA, 19 nt, Homo sapiens
  misc_RNA (1)...(19): siRNA sense strand
gcacaaccaccacugcauu

SEQ ID NO: 144111 - RNA, 19 nt, Homo sapiens
  misc_RNA (1)...(19): siRNA sense strand
gaucguauucuguaaguga

SEQ ID NO: 144112 - RNA, 19 nt, Homo sapiens
  misc_RNA (1)...(19): siRNA sense strand
gaaauaugcccugaggauu

SEQ ID NO: 144113 - RNA, 19 nt, Homo sapiens
  misc_RNA (1)...(19): siRNA sense strand
ugaaggaccugaaacacau

SEQ ID NO: 144114 - RNA, 19 nt, Homo sapiens
  misc_RNA (1)...(19): siRNA sense strand
auucagaccuugacuuuga

SEQ ID NO: 144115 - RNA, 19 nt, Homo sapiens
  misc_RNA (1)...(19): siRNA sense strand
ggaaagugacuauauugug

SEQ ID NO: 144116 - RNA, 19 nt, Homo sapiens
  misc_RNA (1)...(19): siRNA sense strand
cauaguccauccucaagaa

SEQ ID NO: 144117 - RNA, 19 nt, Homo sapiens
  misc_RNA (1)...(19): siRNA sense strand
acacagagccggucagaug

SEQ ID NO: 144118 - RNA, 19 nt, Homo sapiens
  misc_RNA (1)...(19): siRNA sense strand
aauaaggccugaacccaaa

SEQ ID NO: 144119 - RNA, 19 nt, Homo sapiens
  misc_RNA (1)...(19): siRNA sense strand
gaaugggacucagcagaga

SEQ ID NO: 144120 - RNA, 19 nt, Homo sapiens
  misc_RNA (1)...(19): siRNA sense strand
ccaguuugguugccaugua

SEQ ID NO: 144121 - RNA, 19 nt, Homo sapiens
  misc_RNA (1)...(19): siRNA sense strand
gagaaggucaugcauacaa

SEQ ID NO: 144122 - RNA, 19 nt, Homo sapiens
  misc_RNA (1)...(19): siRNA sense strand
uaaauaaccagccuucaau

SEQ ID NO: 144123 - RNA, 19 nt, Homo sapiens
  misc_RNA (1)...(19): siRNA sense strand
gaaguucuguaaauaacca

SEQ ID NO: 144124 - RNA, 19 nt, Homo sapiens
  misc_RNA (1)...(19): siRNA sense strand
gagcuuagcaauccauguu

SEQ ID NO: 144125 - RNA, 19 nt, Homo sapiens
  misc_RNA (1)...(19): siRNA sense strand
gagagauccauaauacuaa

SEQ ID NO: 144126 - RNA, 19 nt, Homo sapiens
  misc_RNA (1)...(19): siRNA sense strand
ucacuccggugucaucaaa

SEQ ID NO: 144127 - RNA, 19 nt, Homo sapiens
  misc_RNA (1)...(19): siRNA sense strand
uaacagacaucaacuuucc

SEQ ID NO: 144128 - RNA, 19 nt, Homo sapiens
  misc_RNA (1)...(19): siRNA sense strand
uaaugcaggugauugaaga

SEQ ID NO: 144129 - RNA, 19 nt, Homo sapiens
  misc_RNA (1)...(19): siRNA sense strand
uuagcaaccuucuagauga

SEQ ID NO: 144130 - RNA, 19 nt, Homo sapiens
  misc_RNA (1)...(19): siRNA sense strand
uuaagagaaucaaggguuu

SEQ ID NO: 144131 - RNA, 19 nt, Homo sapiens
  misc_RNA (1)...(19): siRNA sense strand
cgauaucaaugaguucuuu

SEQ ID NO: 144132 - RNA, 19 nt, Homo sapiens
  misc_RNA (1)...(19): siRNA sense strand
gaaggaggacuacucuaug

SEQ ID NO: 144133 - RNA, 19 nt, Homo sapiens
  misc_RNA (1)...(19): siRNA sense strand
ggagguacauacgcucuga

SEQ ID NO: 144134 - RNA, 19 nt, Homo sapiens
  misc_RNA (1)...(19): siRNA sense strand
gcgaugcccugcaccuuau

SEQ ID NO: 144135 - RNA, 19 nt, Homo sapiens
  misc_RNA (1)...(19): siRNA sense strand
gaacuuagagcaacaucuc

SEQ ID NO: 144136 - RNA, 19 nt, Homo sapiens
  misc_RNA (1)...(19): siRNA sense strand
gagagaagcccuacaaaug

SEQ ID NO: 144137 - RNA, 19 nt, Homo sapiens
  misc_RNA (1)...(19): siRNA sense strand
gaagaggcacgaagugaua

SEQ ID NO: 144138 - RNA, 19 nt, Homo sapiens
  misc_RNA (1)...(19): siRNA sense strand
gcaguggccuguucuauag

SEQ ID NO: 144139 - RNA, 19 nt, Homo sapiens
  misc_RNA (1)...(19): siRNA sense strand
gagagaaaccuuaccauug

SEQ ID NO: 144140 - RNA, 19 nt, Homo sapiens
  misc_RNA (1)...(19): siRNA sense strand
gagaacaaccugccacuga

SEQ ID NO: 144141 - RNA, 19 nt, Homo sapiens
  misc_RNA (1)...(19): siRNA sense strand
agagaaaccuuaccauugu

SEQ ID NO: 144142 - RNA, 19 nt, Homo sapiens
  misc_RNA (1)...(19): siRNA sense strand
ggagagaaaccuuaccauu

SEQ ID NO: 144143 - RNA, 19 nt, Homo sapiens
  misc_RNA (1)...(19): siRNA sense strand
guacacaucucggcucaau

SEQ ID NO: 144144 - RNA, 19 nt, Homo sapiens
  misc_RNA (1)...(19): siRNA sense strand
ccacaccgccagccucuua

SEQ ID NO: 144145 - RNA, 19 nt, Homo sapiens
  misc_RNA (1)...(19): siRNA sense strand
ugacaaacccuacaagugu

SEQ ID NO: 144146 - RNA, 19 nt, Homo sapiens
  misc_RNA (1)...(19): siRNA sense strand
ggagagaagcccuacaaau

SEQ ID NO: 144147 - RNA, 19 nt, Homo sapiens
  misc_RNA (1)...(19): siRNA sense strand
acacaucucggcucaauuu

SEQ ID NO: 144148 - RNA, 19 nt, Homo sapiens
  misc_RNA (1)...(19): siRNA sense strand
caucaagccuccucgugaa

SEQ ID NO: 144149 - RNA, 19 nt, Homo sapiens
  misc_RNA (1)...(19): siRNA sense strand
ugacaaggccagcaaagaa

SEQ ID NO: 144150 - RNA, 19 nt, Homo sapiens
  misc_RNA (1)...(19): siRNA sense strand
gagaaacccuaucguugca

SEQ ID NO: 144151 - RNA, 19 nt, Homo sapiens
  misc_RNA (1)...(19): siRNA sense strand
uuacagaccaguugaaaug

SEQ ID NO: 144152 - RNA, 19 nt, Homo sapiens
  misc_RNA (1)...(19): siRNA sense strand
gucgagacaucuugacuga

SEQ ID NO: 144153 - RNA, 19 nt, Homo sapiens
  misc_RNA (1)...(19): siRNA sense strand
gauguucuucucaaccuua

SEQ ID NO: 144154 - RNA, 19 nt, Homo sapiens
  misc_RNA (1)...(19): siRNA sense strand
cagcaaagaagaagagaga

SEQ ID NO: 144155 - RNA, 19 nt, Homo sapiens
  misc_RNA (1)...(19): siRNA sense strand
ccagugauguucuucucaa

SEQ ID NO: 144156 - RNA, 19 nt, Homo sapiens
  misc_RNA (1)...(19): siRNA sense strand
gaagaaauacaaguucauc

SEQ ID NO: 144157 - RNA, 19 nt, Homo sapiens
  misc_RNA (1)...(19): siRNA sense strand
gcaacuggaagaaauacaa

SEQ ID NO: 144158 - RNA, 19 nt, Homo sapiens
  misc_RNA (1)...(19): siRNA sense strand
ugacagcuguauccaguuc

SEQ ID NO: 144159 - RNA, 19 nt, Homo sapiens
  misc_RNA (1)...(19): siRNA sense strand
gagaaaccuuaccauugug

SEQ ID NO: 144160 - RNA, 19 nt, Homo sapiens
  misc_RNA (1)...(19): siRNA sense strand
ggugagaaacccuaucguu

SEQ ID NO: 144161 - RNA, 19 nt, Homo sapiens
  misc_RNA (1)...(19): siRNA sense strand
acacaggagagaaaccuua

SEQ ID NO: 144162 - RNA, 19 nt, Homo sapiens
  misc_RNA (1)...(19): siRNA sense strand
gcagauggagcauguugug

SEQ ID NO: 144163 - RNA, 19 nt, Homo sapiens
  misc_RNA (1)...(19): siRNA sense strand
caaggaaacaaucccagaa

SEQ ID NO: 144164 - RNA, 19 nt, Homo sapiens
  misc_RNA (1)...(19): siRNA sense strand
gugaagaguuccucaacag

SEQ ID NO: 144165 - RNA, 19 nt, Homo sapiens
  misc_RNA (1)...(19): siRNA sense strand
cuauguaccugcagaugga

SEQ ID NO: 144166 - RNA, 19 nt, Homo sapiens
  misc_RNA (1)...(19): siRNA sense strand
gaagcccuaucccugugaa

SEQ ID NO: 144167 - RNA, 19 nt, Homo sapiens
  misc_RNA (1)...(19): siRNA sense strand
ucuauagcaucuuuacaga

SEQ ID NO: 144168 - RNA, 19 nt, Homo sapiens
  misc_RNA (1)...(19): siRNA sense strand
ggaaacaaucccagaagag

SEQ ID NO: 144169 - RNA, 19 nt, Homo sapiens
  misc_RNA (1)...(19): siRNA sense strand
uggaagaaauacaaguuca

SEQ ID NO: 144170 - RNA, 19 nt, Homo sapiens
  misc_RNA (1)...(19): siRNA sense strand
ccuguucuauagcaucuuu

SEQ ID NO: 144171 - RNA, 19 nt, Homo sapiens
  misc_RNA (1)...(19): siRNA sense strand
aaaugcaaccuuaguguga

SEQ ID NO: 144172 - RNA, 19 nt, Homo sapiens
  misc_RNA (1)...(19): siRNA sense strand
gucgugaggugguggagaa

SEQ ID NO: 144173 - RNA, 19 nt, Homo sapiens
  misc_RNA (1)...(19): siRNA sense strand
aggaaacaaucccagaaga

SEQ ID NO: 144174 - RNA, 19 nt, Homo sapiens
  misc_RNA (1)...(19): siRNA sense strand
gauguugucauuguuguga

SEQ ID NO: 144175 - RNA, 19 nt, Homo sapiens
  misc_RNA (1)...(19): siRNA sense strand
gcagacccacagugacaaa

SEQ ID NO: 144176 - RNA, 19 nt, Homo sapiens
  misc_RNA (1)...(19): siRNA sense strand
ccacucaccacucuacaug

SEQ ID NO: 144177 - RNA, 19 nt, Homo sapiens
  misc_RNA (1)...(19): siRNA sense strand
gugaggugguggagaacaa

SEQ ID NO: 144178 - RNA, 19 nt, Homo sapiens
  misc_RNA (1)...(19): siRNA sense strand
cagaagaggcacgaaguga

SEQ ID NO: 144179 - RNA, 19 nt, Homo sapiens
  misc_RNA (1)...(19): siRNA sense strand
cugcggagccagauuugua

SEQ ID NO: 144180 - RNA, 19 nt, Homo sapiens
  misc_RNA (1)...(19): siRNA sense strand
ggaagaaauacaaguucau

SEQ ID NO: 144181 - RNA, 19 nt, Homo sapiens
  misc_RNA (1)...(19): siRNA sense strand
gaugagauugcccugcauu

SEQ ID NO: 144182 - RNA, 19 nt, Homo sapiens
  misc_RNA (1)...(19): siRNA sense strand
ccagccggcucaauaacau

SEQ ID NO: 144183 - RNA, 19 nt, Homo sapiens
  misc_RNA (1)...(19): siRNA sense strand
agaaguguaaccugcauuu

SEQ ID NO: 144184 - RNA, 19 nt, Homo sapiens
  misc_RNA (1)...(19): siRNA sense strand
gugacaaacccuacaagug

SEQ ID NO: 144185 - RNA, 19 nt, Homo sapiens
  misc_RNA (1)...(19): siRNA sense strand
cagaccaguugaaaugcaa

SEQ ID NO: 144186 - RNA, 19 nt, Homo sapiens
  misc_RNA (1)...(19): siRNA sense strand
gaagagccaccugcgaauc

SEQ ID NO: 144187 - RNA, 19 nt, Homo sapiens
  misc_RNA (1)...(19): siRNA sense strand
ugcaguggccuguucuaua

SEQ ID NO: 144188 - RNA, 19 nt, Homo sapiens
  misc_RNA (1)...(19): siRNA sense strand
gccugcaacuggaagaaau

SEQ ID NO: 144189 - RNA, 19 nt, Homo sapiens
  misc_RNA (1)...(19): siRNA sense strand
ugaaaugcaaccuuagugu

SEQ ID NO: 144190 - RNA, 19 nt, Homo sapiens
  misc_RNA (1)...(19): siRNA sense strand
gagauugcccugcauuucg

SEQ ID NO: 144191 - RNA, 19 nt, Homo sapiens
  misc_RNA (1)...(19): siRNA sense strand
ggacuccaccaucccacaa

SEQ ID NO: 144192 - RNA, 19 nt, Homo sapiens
  misc_RNA (1)...(19): siRNA sense strand
caaccuuagugugaucaau

SEQ ID NO: 144193 - RNA, 19 nt, Homo sapiens
  misc_RNA (1)...(19): siRNA sense strand
uauccacacuggugagaag

SEQ ID NO: 144194 - RNA, 19 nt, Homo sapiens
  misc_RNA (1)...(19): siRNA sense strand
cgugaagaguuccucaaca

SEQ ID NO: 144195 - RNA, 19 nt, Homo sapiens
  misc_RNA (1)...(19): siRNA sense strand
uuagugugaucaaucuaga

SEQ ID NO: 144196 - RNA, 19 nt, Homo sapiens
  misc_RNA (1)...(19): siRNA sense strand
gacaaggccagcaaagaag

SEQ ID NO: 144197 - RNA, 19 nt, Homo sapiens
  misc_RNA (1)...(19): siRNA sense strand
gagugugacugccgcuucu

SEQ ID NO: 144198 - RNA, 19 nt, Homo sapiens
  misc_RNA (1)...(19): siRNA sense strand
gaaguguaaccugcauuuc

SEQ ID NO: 144199 - RNA, 19 nt, Homo sapiens
  misc_RNA (1)...(19): siRNA sense strand
aaagccagcugcgacuuca

SEQ ID NO: 144200 - RNA, 19 nt, Homo sapiens
  misc_RNA (1)...(19): siRNA sense strand
ugugagccgugagcaguuu

SEQ ID NO: 144201 - RNA, 19 nt, Homo sapiens
  misc_RNA (1)...(19): siRNA sense strand
gaaaacccacacucgaauu

SEQ ID NO: 144202 - RNA, 19 nt, Homo sapiens
  misc_RNA (1)...(19): siRNA sense strand
caucuuuacagaccaguug

SEQ ID NO: 144203 - RNA, 19 nt, Homo sapiens
  misc_RNA (1)...(19): siRNA sense strand
ccaaagccugcaacuggaa

SEQ ID NO: 144204 - RNA, 19 nt, Homo sapiens
  misc_RNA (1)...(19): siRNA sense strand
gacugauguugucauuguu

SEQ ID NO: 144205 - RNA, 19 nt, Homo sapiens
  misc_RNA (1)...(19): siRNA sense strand
caaccucgccagccacaag

SEQ ID NO: 144206 - RNA, 19 nt, Homo sapiens
  misc_RNA (1)...(19): siRNA sense strand
ggcaacaucauggcuguga

SEQ ID NO: 144207 - RNA, 19 nt, Homo sapiens
  misc_RNA (1)...(19): siRNA sense strand
ugagaaguguaaccugcau

SEQ ID NO: 144208 - RNA, 19 nt, Homo sapiens
  misc_RNA (1)...(19): siRNA sense strand
agagaagcccuacaaaugc

SEQ ID NO: 144209 - RNA, 19 nt, Homo sapiens
  misc_RNA (1)...(19): siRNA sense strand
cauggagccugagaaccuu

SEQ ID NO: 144210 - RNA, 19 nt, Homo sapiens
  misc_RNA (1)...(19): siRNA sense strand
ugccggaaguuuauuaagg

SEQ ID NO: 144211 - RNA, 19 nt, Homo sapiens
  misc_RNA (1)...(19): siRNA sense strand
caaggccagcaaagaagaa

SEQ ID NO: 144212 - RNA, 19 nt, Homo sapiens
  misc_RNA (1)...(19): siRNA sense strand
cgggcacucccaugugaua

SEQ ID NO: 144213 - RNA, 19 nt, Homo sapiens
  misc_RNA (1)...(19): siRNA sense strand
caacuggaagaaauacaag

SEQ ID NO: 144214 - RNA, 19 nt, Homo sapiens
  misc_RNA (1)...(19): siRNA sense strand
agauugcccugcauuucga

SEQ ID NO: 144215 - RNA, 19 nt, Homo sapiens
  misc_RNA (1)...(19): siRNA sense strand
ugagauugcccugcauuuc

SEQ ID NO: 144216 - RNA, 19 nt, Homo sapiens
  misc_RNA (1)...(19): siRNA sense strand
ccagaagaggcacgaagug

SEQ ID NO: 144217 - RNA, 19 nt, Homo sapiens
  misc_RNA (1)...(19): siRNA sense strand
gugacaaggccagcaaaga

SEQ ID NO: 144218 - RNA, 19 nt, Homo sapiens
  misc_RNA (1)...(19): siRNA sense strand
gagaaguguaaccugcauu

SEQ ID NO: 144219 - RNA, 19 nt, Homo sapiens
  misc_RNA (1)...(19): siRNA sense strand
acaaguucaucgugcucaa

SEQ ID NO: 144220 - RNA, 19 nt, Homo sapiens
  misc_RNA (1)...(19): siRNA sense strand
acagaccaguugaaaugca

SEQ ID NO: 144221 - RNA, 19 nt, Homo sapiens
  misc_RNA (1)...(19): siRNA sense strand
guucuucucaaccuuaauc

SEQ ID NO: 144222 - RNA, 19 nt, Homo sapiens
  misc_RNA (1)...(19): siRNA sense strand
ccaugccagugauguucuu

SEQ ID NO: 144223 - RNA, 19 nt, Homo sapiens
  misc_RNA (1)...(19): siRNA sense strand
ccacguucccugaggagau

SEQ ID NO: 144224 - RNA, 19 nt, Homo sapiens
  misc_RNA (1)...(19): siRNA sense strand
ccugcaacuggaagaaaua

SEQ ID NO: 144225 - RNA, 19 nt, Homo sapiens
  misc_RNA (1)...(19): siRNA sense strand
ggccuguucuauagcaucu

SEQ ID NO: 144226 - RNA, 19 nt, Homo sapiens
  misc_RNA (1)...(19): siRNA sense strand
gagagaagcccuacaaaug

SEQ ID NO: 144227 - RNA, 19 nt, Homo sapiens
  misc_RNA (1)...(19): siRNA sense strand
gaagaggcacgaagugaua

SEQ ID NO: 144228 - RNA, 19 nt, Homo sapiens
  misc_RNA (1)...(19): siRNA sense strand
gcaguggccuguucuauag

SEQ ID NO: 144229 - RNA, 19 nt, Homo sapiens
  misc_RNA (1)...(19): siRNA sense strand
gagagaaaccuuaccauug

SEQ ID NO: 144230 - RNA, 19 nt, Homo sapiens
  misc_RNA (1)...(19): siRNA sense strand
gagaacaaccugccacuga

SEQ ID NO: 144231 - RNA, 19 nt, Homo sapiens
  misc_RNA (1)...(19): siRNA sense strand
agagaaaccuuaccauugu

SEQ ID NO: 144232 - RNA, 19 nt, Homo sapiens
  misc_RNA (1)...(19): siRNA sense strand
ggagagaaaccuuaccauu

SEQ ID NO: 144233 - RNA, 19 nt, Homo sapiens
  misc_RNA (1)...(19): siRNA sense strand
guacacaucucggcucaau

SEQ ID NO: 144234 - RNA, 19 nt, Homo sapiens
  misc_RNA (1)...(19): siRNA sense strand
ccacaccgccagccucuua

SEQ ID NO: 144235 - RNA, 19 nt, Homo sapiens
  misc_RNA (1)...(19): siRNA sense strand
ugacaaacccuacaagugu

SEQ ID NO: 144236 - RNA, 19 nt, Homo sapiens
  misc_RNA (1)...(19): siRNA sense strand
ggagagaagcccuacaaau

SEQ ID NO: 144237 - RNA, 19 nt, Homo sapiens
  misc_RNA (1)...(19): siRNA sense strand
acacaucucggcucaauuu

SEQ ID NO: 144238 - RNA, 19 nt, Homo sapiens
  misc_RNA (1)...(19): siRNA sense strand
caucaagccuccucgugaa

SEQ ID NO: 144239 - RNA, 19 nt, Homo sapiens
  misc_RNA (1)...(19): siRNA sense strand
ugacaaggccagcaaagaa

SEQ ID NO: 144240 - RNA, 19 nt, Homo sapiens
  misc_RNA (1)...(19): siRNA sense strand
gagaaacccuaucguugca

SEQ ID NO: 144241 - RNA, 19 nt, Homo sapiens
  misc_RNA (1)...(19): siRNA sense strand
uuacagaccaguugaaaug

SEQ ID NO: 144242 - RNA, 19 nt, Homo sapiens
  misc_RNA (1)...(19): siRNA sense strand
gucgagacaucuugacuga

SEQ ID NO: 144243 - RNA, 19 nt, Homo sapiens
  misc_RNA (1)...(19): siRNA sense strand
gauguucuucucaaccuua

SEQ ID NO: 144244 - RNA, 19 nt, Homo sapiens
  misc_RNA (1)...(19): siRNA sense strand
cagcaaagaagaagagaga

SEQ ID NO: 144245 - RNA, 19 nt, Homo sapiens
  misc_RNA (1)...(19): siRNA sense strand
ccagugauguucuucucaa

SEQ ID NO: 144246 - RNA, 19 nt, Homo sapiens
  misc_RNA (1)...(19): siRNA sense strand
gaagaaauacaaguucauc

SEQ ID NO: 144247 - RNA, 19 nt, Homo sapiens
  misc_RNA (1)...(19): siRNA sense strand
gcaacuggaagaaauacaa

SEQ ID NO: 144248 - RNA, 19 nt, Homo sapiens
  misc_RNA (1)...(19): siRNA sense strand
ugacagcuguauccaguuc

SEQ ID NO: 144249 - RNA, 19 nt, Homo sapiens
  misc_RNA (1)...(19): siRNA sense strand
gagaaaccuuaccauugug

SEQ ID NO: 144250 - RNA, 19 nt, Homo sapiens
  misc_RNA (1)...(19): siRNA sense strand
ggugagaaacccuaucguu

SEQ ID NO: 144251 - RNA, 19 nt, Homo sapiens
  misc_RNA (1)...(19): siRNA sense strand
acacaggagagaaaccuua

SEQ ID NO: 144252 - RNA, 19 nt, Homo sapiens
  misc_RNA (1)...(19): siRNA sense strand
gcagauggagcauguugug

SEQ ID NO: 144253 - RNA, 19 nt, Homo sapiens
  misc_RNA (1)...(19): siRNA sense strand
caaggaaacaaucccagaa

SEQ ID NO: 144254 - RNA, 19 nt, Homo sapiens
  misc_RNA (1)...(19): siRNA sense strand
gugaagaguuccucaacag

SEQ ID NO: 144255 - RNA, 19 nt, Homo sapiens
  misc_RNA (1)...(19): siRNA sense strand
cuauguaccugcagaugga

SEQ ID NO: 144256 - RNA, 19 nt, Homo sapiens
  misc_RNA (1)...(19): siRNA sense strand
gaagcccuaucccugugaa

SEQ ID NO: 144257 - RNA, 19 nt, Homo sapiens
  misc_RNA (1)...(19): siRNA sense strand
ucuauagcaucuuuacaga

SEQ ID NO: 144258 - RNA, 19 nt, Homo sapiens
  misc_RNA (1)...(19): siRNA sense strand
ggaaacaaucccagaagag

SEQ ID NO: 144259 - RNA, 19 nt, Homo sapiens
  misc_RNA (1)...(19): siRNA sense strand
uggaagaaauacaaguuca

SEQ ID NO: 144260 - RNA, 19 nt, Homo sapiens
  misc_RNA (1)...(19): siRNA sense strand
ccuguucuauagcaucuuu

SEQ ID NO: 144261 - RNA, 19 nt, Homo sapiens
  misc_RNA (1)...(19): siRNA sense strand
aaaugcaaccuuaguguga

SEQ ID NO: 144262 - RNA, 19 nt, Homo sapiens
  misc_RNA (1)...(19): siRNA sense strand
gucgugaggugguggagaa

SEQ ID NO: 144263 - RNA, 19 nt, Homo sapiens
  misc_RNA (1)...(19): siRNA sense strand
aggaaacaaucccagaaga

SEQ ID NO: 144264 - RNA, 19 nt, Homo sapiens
  misc_RNA (1)...(19): siRNA sense strand
gauguugucauuguuguga

SEQ ID NO: 144265 - RNA, 19 nt, Homo sapiens
  misc_RNA (1)...(19): siRNA sense strand
gcagacccacagugacaaa

SEQ ID NO: 144266 - RNA, 19 nt, Homo sapiens
  misc_RNA (1)...(19): siRNA sense strand
ccacucaccacucuacaug

SEQ ID NO: 144267 - RNA, 19 nt, Homo sapiens
  misc_RNA (1)...(19): siRNA sense strand
gugaggugguggagaacaa

SEQ ID NO: 144268 - RNA, 19 nt, Homo sapiens
  misc_RNA (1)...(19): siRNA sense strand
cagaagaggcacgaaguga

SEQ ID NO: 144269 - RNA, 19 nt, Homo sapiens
  misc_RNA (1)...(19): siRNA sense strand
cugcggagccagauuugua

SEQ ID NO: 144270 - RNA, 19 nt, Homo sapiens
  misc_RNA (1)...(19): siRNA sense strand
ggaagaaauacaaguucau

SEQ ID NO: 144271 - RNA, 19 nt, Homo sapiens
  misc_RNA (1)...(19): siRNA sense strand
gaugagauugcccugcauu

SEQ ID NO: 144272 - RNA, 19 nt, Homo sapiens
  misc_RNA (1)...(19): siRNA sense strand
ccagccggcucaauaacau

SEQ ID NO: 144273 - RNA, 19 nt, Homo sapiens
  misc_RNA (1)...(19): siRNA sense strand
agaaguguaaccugcauuu

SEQ ID NO: 144274 - RNA, 19 nt, Homo sapiens
  misc_RNA (1)...(19): siRNA sense strand
gugacaaacccuacaagug

SEQ ID NO: 144275 - RNA, 19 nt, Homo sapiens
  misc_RNA (1)...(19): siRNA sense strand
cagaccaguugaaaugcaa

SEQ ID NO: 144276 - RNA, 19 nt, Homo sapiens
  misc_RNA (1)...(19): siRNA sense strand
gaagagccaccugcgaauc

SEQ ID NO: 144277 - RNA, 19 nt, Homo sapiens
  misc_RNA (1)...(19): siRNA sense strand
ugcaguggccuguucuaua

SEQ ID NO: 144278 - RNA, 19 nt, Homo sapiens
  misc_RNA (1)...(19): siRNA sense strand
gccugcaacuggaagaaau

SEQ ID NO: 144279 - RNA, 19 nt, Homo sapiens
  misc_RNA (1)...(19): siRNA sense strand
ugaaaugcaaccuuagugu

SEQ ID NO: 144280 - RNA, 19 nt, Homo sapiens
  misc_RNA (1)...(19): siRNA sense strand
gagauugcccugcauuucg

SEQ ID NO: 144281 - RNA, 19 nt, Homo sapiens
  misc_RNA (1)...(19): siRNA sense strand
ggacuccaccaucccacaa

SEQ ID NO: 144282 - RNA, 19 nt, Homo sapiens
  misc_RNA (1)...(19): siRNA sense strand
caaccuuagugugaucaau

SEQ ID NO: 144283 - RNA, 19 nt, Homo sapiens
  misc_RNA (1)...(19): siRNA sense strand
uauccacacuggugagaag

SEQ ID NO: 144284 - RNA, 19 nt, Homo sapiens
  misc_RNA (1)...(19): siRNA sense strand
cgugaagaguuccucaaca

SEQ ID NO: 144285 - RNA, 19 nt, Homo sapiens
  misc_RNA (1)...(19): siRNA sense strand
uuagugugaucaaucuaga

SEQ ID NO: 144286 - RNA, 19 nt, Homo sapiens
  misc_RNA (1)...(19): siRNA sense strand
gacaaggccagcaaagaag

SEQ ID NO: 144287 - RNA, 19 nt, Homo sapiens
  misc_RNA (1)...(19): siRNA sense strand
gagugugacugccgcuucu

SEQ ID NO: 144288 - RNA, 19 nt, Homo sapiens
  misc_RNA (1)...(19): siRNA sense strand
gaaguguaaccugcauuuc

SEQ ID NO: 144289 - RNA, 19 nt, Homo sapiens
  misc_RNA (1)...(19): siRNA sense strand
aaagccagcugcgacuuca

SEQ ID NO: 144290 - RNA, 19 nt, Homo sapiens
  misc_RNA (1)...(19): siRNA sense strand
ugugagccgugagcaguuu

SEQ ID NO: 144291 - RNA, 19 nt, Homo sapiens
  misc_RNA (1)...(19): siRNA sense strand
gaaaacccacacucgaauu

SEQ ID NO: 144292 - RNA, 19 nt, Homo sapiens
  misc_RNA (1)...(19): siRNA sense strand
caucuuuacagaccaguug

SEQ ID NO: 144293 - RNA, 19 nt, Homo sapiens
  misc_RNA (1)...(19): siRNA sense strand
ccaaagccugcaacuggaa

SEQ ID NO: 144294 - RNA, 19 nt, Homo sapiens
  misc_RNA (1)...(19): siRNA sense strand
gacugauguugucauuguu

SEQ ID NO: 144295 - RNA, 19 nt, Homo sapiens
  misc_RNA (1)...(19): siRNA sense strand
caaccucgccagccacaag

SEQ ID NO: 144296 - RNA, 19 nt, Homo sapiens
  misc_RNA (1)...(19): siRNA sense strand
ggcaacaucauggcuguga

SEQ ID NO: 144297 - RNA, 19 nt, Homo sapiens
  misc_RNA (1)...(19): siRNA sense strand
ugagaaguguaaccugcau

SEQ ID NO: 144298 - RNA, 19 nt, Homo sapiens
  misc_RNA (1)...(19): siRNA sense strand
agagaagcccuacaaaugc

SEQ ID NO: 144299 - RNA, 19 nt, Homo sapiens
  misc_RNA (1)...(19): siRNA sense strand
cauggagccugagaaccuu

SEQ ID NO: 144300 - RNA, 19 nt, Homo sapiens
  misc_RNA (1)...(19): siRNA sense strand
ugccggaaguuuauuaagg

SEQ ID NO: 144301 - RNA, 19 nt, Homo sapiens
  misc_RNA (1)...(19): siRNA sense strand
caaggccagcaaagaagaa

SEQ ID NO: 144302 - RNA, 19 nt, Homo sapiens
  misc_RNA (1)...(19): siRNA sense strand
cgggcacucccaugugaua

SEQ ID NO: 144303 - RNA, 19 nt, Homo sapiens
  misc_RNA (1)...(19): siRNA sense strand
caacuggaagaaauacaag

SEQ ID NO: 144304 - RNA, 19 nt, Homo sapiens
  misc_RNA (1)...(19): siRNA sense strand
agauugcccugcauuucga

SEQ ID NO: 144305 - RNA, 19 nt, Homo sapiens
  misc_RNA (1)...(19): siRNA sense strand
ugagauugcccugcauuuc

SEQ ID NO: 144306 - RNA, 19 nt, Homo sapiens
  misc_RNA (1)...(19): siRNA sense strand
ccagaagaggcacgaagug

SEQ ID NO: 144307 - RNA, 19 nt, Homo sapiens
  misc_RNA (1)...(19): siRNA sense strand
gugacaaggccagcaaaga

SEQ ID NO: 144308 - RNA, 19 nt, Homo sapiens
  misc_RNA (1)...(19): siRNA sense strand
gagaaguguaaccugcauu

SEQ ID NO: 144309 - RNA, 19 nt, Homo sapiens
  misc_RNA (1)...(19): siRNA sense strand
acaaguucaucgugcucaa

SEQ ID NO: 144310 - RNA, 19 nt, Homo sapiens
  misc_RNA (1)...(19): siRNA sense strand
acagaccaguugaaaugca

SEQ ID NO: 144311 - RNA, 19 nt, Homo sapiens
  misc_RNA (1)...(19): siRNA sense strand
guucuucucaaccuuaauc

SEQ ID NO: 144312 - RNA, 19 nt, Homo sapiens
  misc_RNA (1)...(19): siRNA sense strand
ccaugccagugauguucuu

SEQ ID NO: 144313 - RNA, 19 nt, Homo sapiens
  misc_RNA (1)...(19): siRNA sense strand
ccacguucccugaggagau

SEQ ID NO: 144314 - RNA, 19 nt, Homo sapiens
  misc_RNA (1)...(19): siRNA sense strand
ccugcaacuggaagaaaua

SEQ ID NO: 144315 - RNA, 19 nt, Homo sapiens
  misc_RNA (1)...(19): siRNA sense strand
ggccuguucuauagcaucu

SEQ ID NO: 144316 - RNA, 19 nt, Homo sapiens
  misc_RNA (1)...(19): siRNA sense strand
ggaaggaggucuacaucaa

SEQ ID NO: 144317 - RNA, 19 nt, Homo sapiens
  misc_RNA (1)...(19): siRNA sense strand
ugaucaagcucaagaauaa

SEQ ID NO: 144318 - RNA, 19 nt, Homo sapiens
  misc_RNA (1)...(19): siRNA sense strand
agaauaagcugaaauaugg

SEQ ID NO: 144319 - RNA, 19 nt, Homo sapiens
  misc_RNA (1)...(19): siRNA sense strand
cgaagcagcucaaugaaau

SEQ ID NO: 144320 - RNA, 19 nt, Homo sapiens
  misc_RNA (1)...(19): siRNA sense strand
gaugaaagccagucucuga

SEQ ID NO: 144321 - RNA, 19 nt, Homo sapiens
  misc_RNA (1)...(19): siRNA sense strand
ggagauagaaguaguccua

SEQ ID NO: 144322 - RNA, 19 nt, Homo sapiens
  misc_RNA (1)...(19): siRNA sense strand
gggaacaacucgagcuuug

SEQ ID NO: 144323 - RNA, 19 nt, Homo sapiens
  misc_RNA (1)...(19): siRNA sense strand
acacguaccugcagaucua

SEQ ID NO: 144324 - RNA, 19 nt, Homo sapiens
  misc_RNA (1)...(19): siRNA sense strand
uugagaagguggcaaguua

SEQ ID NO: 144325 - RNA, 19 nt, Homo sapiens
  misc_RNA (1)...(19): siRNA sense strand
ucacgaagcagcucaauga

SEQ ID NO: 144326 - RNA, 19 nt, Homo sapiens
  misc_RNA (1)...(19): siRNA sense strand
ccucaugacugauggauug

SEQ ID NO: 144327 - RNA, 19 nt, Homo sapiens
  misc_RNA (1)...(19): siRNA sense strand
gccaagauauggucuagug

SEQ ID NO: 144328 - RNA, 19 nt, Homo sapiens
  misc_RNA (1)...(19): siRNA sense strand
ggauuuggguuuucuauaa

SEQ ID NO: 144329 - RNA, 19 nt, Homo sapiens
  misc_RNA (1)...(19): siRNA sense strand
gaaagacaaugagcaacau

SEQ ID NO: 144330 - RNA, 19 nt, Homo sapiens
  misc_RNA (1)...(19): siRNA sense strand
gaacaucuaccuggugcua

SEQ ID NO: 144331 - RNA, 19 nt, Homo sapiens
  misc_RNA (1)...(19): siRNA sense strand
gaaaggcagcugugagaga

SEQ ID NO: 144332 - RNA, 19 nt, Homo sapiens
  misc_RNA (1)...(19): siRNA sense strand
gccaagaucucagucauuc

SEQ ID NO: 144333 - RNA, 19 nt, Homo sapiens
  misc_RNA (1)...(19): siRNA sense strand
ggagcacccugaagacuca

SEQ ID NO: 144334 - RNA, 19 nt, Homo sapiens
  misc_RNA (1)...(19): siRNA sense strand
ggccgaagcuuuccugucu

SEQ ID NO: 144335 - RNA, 19 nt, Homo sapiens
  misc_RNA (1)...(19): siRNA sense strand
gggcuguggugucugagua

SEQ ID NO: 144336 - RNA, 19 nt, Homo sapiens
  misc_RNA (1)...(19): siRNA sense strand
gcagcucaaugaaaucaau

SEQ ID NO: 144337 - RNA, 19 nt, Homo sapiens
  misc_RNA (1)...(19): siRNA sense strand
caagaaagacaaugagcaa

SEQ ID NO: 144338 - RNA, 19 nt, Homo sapiens
  misc_RNA (1)...(19): siRNA sense strand
gcaauccacuguccaagac

SEQ ID NO: 144339 - RNA, 19 nt, Homo sapiens
  misc_RNA (1)...(19): siRNA sense strand
ggauaucaaagcucuguuu

SEQ ID NO: 144340 - RNA, 19 nt, Homo sapiens
  misc_RNA (1)...(19): siRNA sense strand
ggacccaauuacugucauu

SEQ ID NO: 144341 - RNA, 19 nt, Homo sapiens
  misc_RNA (1)...(19): siRNA sense strand
acaggaaggguaccgauua

SEQ ID NO: 144342 - RNA, 19 nt, Homo sapiens
  misc_RNA (1)...(19): siRNA sense strand
gaacaacagaagcggaaga

SEQ ID NO: 144343 - RNA, 19 nt, Homo sapiens
  misc_RNA (1)...(19): siRNA sense strand
gcccgagacuuucacauca

SEQ ID NO: 144344 - RNA, 19 nt, Homo sapiens
  misc_RNA (1)...(19): siRNA sense strand
gcucaagaauaagcugaaa

SEQ ID NO: 144345 - RNA, 19 nt, Homo sapiens
  misc_RNA (1)...(19): siRNA sense strand
ggaccuggagauagaagua

SEQ ID NO: 144346 - RNA, 19 nt, Homo sapiens
  misc_RNA (1)...(19): siRNA sense strand
gaagauguuuucuaccaaa

SEQ ID NO: 144347 - RNA, 19 nt, Homo sapiens
  misc_RNA (1)...(19): siRNA sense strand
gaagcagacagcaguaaug

SEQ ID NO: 144348 - RNA, 19 nt, Homo sapiens
  misc_RNA (1)...(19): siRNA sense strand
aaucgcaccugccaaguga

SEQ ID NO: 144349 - RNA, 19 nt, Homo sapiens
  misc_RNA (1)...(19): siRNA sense strand
ugaaauauggccagacuau

SEQ ID NO: 144350 - RNA, 19 nt, Homo sapiens
  misc_RNA (1)...(19): siRNA sense strand
aggauuaucuggaugucua

SEQ ID NO: 144351 - RNA, 19 nt, Homo sapiens
  misc_RNA (1)...(19): siRNA sense strand
caacuucacaggagccaaa

SEQ ID NO: 144352 - RNA, 19 nt, Homo sapiens
  misc_RNA (1)...(19): siRNA sense strand
gaagcgggaccuggagaua

SEQ ID NO: 144353 - RNA, 19 nt, Homo sapiens
  misc_RNA (1)...(19): siRNA sense strand
caagugaacaucaaugcuu

SEQ ID NO: 144354 - RNA, 19 nt, Homo sapiens
  misc_RNA (1)...(19): siRNA sense strand
gaaccaagugaacaucaau

SEQ ID NO: 144355 - RNA, 19 nt, Homo sapiens
  misc_RNA (1)...(19): siRNA sense strand
gaacaacucgagcuuugag

SEQ ID NO: 144356 - RNA, 19 nt, Homo sapiens
  misc_RNA (1)...(19): siRNA sense strand
gcugaaauauggccagacu

SEQ ID NO: 144357 - RNA, 19 nt, Homo sapiens
  misc_RNA (1)...(19): siRNA sense strand
cuacaacauuaaugggaaa

SEQ ID NO: 144358 - RNA, 19 nt, Homo sapiens
  misc_RNA (1)...(19): siRNA sense strand
ugacagcagcacauuguuu

SEQ ID NO: 144359 - RNA, 19 nt, Homo sapiens
  misc_RNA (1)...(19): siRNA sense strand
caaagucaaggauauggaa

SEQ ID NO: 144360 - RNA, 19 nt, Homo sapiens
  misc_RNA (1)...(19): siRNA sense strand
gccaagacuccuucaugua

SEQ ID NO: 144361 - RNA, 19 nt, Homo sapiens
  misc_RNA (1)...(19): siRNA sense strand
aaauauggccagacuauca

SEQ ID NO: 144362 - RNA, 19 nt, Homo sapiens
  misc_RNA (1)...(19): siRNA sense strand
ccugaagacucaagaccaa

SEQ ID NO: 144363 - RNA, 19 nt, Homo sapiens
  misc_RNA (1)...(19): siRNA sense strand
caaugugagugaugagauc

SEQ ID NO: 144364 - RNA, 19 nt, Homo sapiens
  misc_RNA (1)...(19): siRNA sense strand
gaaggaggucuacaucaag

SEQ ID NO: 144365 - RNA, 19 nt, Homo sapiens
  misc_RNA (1)...(19): siRNA sense strand
cagacuaucaggcccauuu

SEQ ID NO: 144366 - RNA, 19 nt, Homo sapiens
  misc_RNA (1)...(19): siRNA sense strand
uagaaguaguccuauuuca

SEQ ID NO: 144367 - RNA, 19 nt, Homo sapiens
  misc_RNA (1)...(19): siRNA sense strand
gugaugagaucucuuucca

SEQ ID NO: 144368 - RNA, 19 nt, Homo sapiens
  misc_RNA (1)...(19): siRNA sense strand
ugagugaugagaucucuuu

SEQ ID NO: 144369 - RNA, 19 nt, Homo sapiens
  misc_RNA (1)...(19): siRNA sense strand
gagaagguggcaaguuaug

SEQ ID NO: 144370 - RNA, 19 nt, Homo sapiens
  misc_RNA (1)...(19): siRNA sense strand
aagugaacaucaaugcuuu

SEQ ID NO: 144371 - RNA, 19 nt, Homo sapiens
  misc_RNA (1)...(19): siRNA sense strand
gaccauagaaggagucgau

SEQ ID NO: 144372 - RNA, 19 nt, Homo sapiens
  misc_RNA (1)...(19): siRNA sense strand
caaggaacacucaaucaag

SEQ ID NO: 144373 - RNA, 19 nt, Homo sapiens
  misc_RNA (1)...(19): siRNA sense strand
caaagucaaggacaucuca

SEQ ID NO: 144374 - RNA, 19 nt, Homo sapiens
  misc_RNA (1)...(19): siRNA sense strand
ccaagacuccuucauguac

SEQ ID NO: 144375 - RNA, 19 nt, Homo sapiens
  misc_RNA (1)...(19): siRNA sense strand
aguaguggaugucugcaaa

SEQ ID NO: 144376 - RNA, 19 nt, Homo sapiens
  misc_RNA (1)...(19): siRNA sense strand
aaggaggucuacaucaaga

SEQ ID NO: 144377 - RNA, 19 nt, Homo sapiens
  misc_RNA (1)...(19): siRNA sense strand
gacaaggaacacucaauca

SEQ ID NO: 144378 - RNA, 19 nt, Homo sapiens
  misc_RNA (1)...(19): siRNA sense strand
ugaaccaagugaacaucaa

SEQ ID NO: 144379 - RNA, 19 nt, Homo sapiens
  misc_RNA (1)...(19): siRNA sense strand
ugccaagacuccuucaugu

SEQ ID NO: 144380 - RNA, 19 nt, Homo sapiens
  misc_RNA (1)...(19): siRNA sense strand
aagaugaggauuuggguuu

SEQ ID NO: 144381 - RNA, 19 nt, Homo sapiens
  misc_RNA (1)...(19): siRNA sense strand
ucacaucaaccucuuucaa

SEQ ID NO: 144382 - RNA, 19 nt, Homo sapiens
  misc_RNA (1)...(19): siRNA sense strand
ccugaugcccuuuaucuug

SEQ ID NO: 144383 - RNA, 19 nt, Homo sapiens
  misc_RNA (1)...(19): siRNA sense strand
gcuauacauuggcaaggau

SEQ ID NO: 144384 - RNA, 19 nt, Homo sapiens
  misc_RNA (1)...(19): siRNA sense strand
ccacugcuaugacgguuac

SEQ ID NO: 144385 - RNA, 19 nt, Homo sapiens
  misc_RNA (1)...(19): siRNA sense strand
ggaacaacucgagcuuuga

SEQ ID NO: 144386 - RNA, 19 nt, Homo sapiens
  misc_RNA (1)...(19): siRNA sense strand
gugcagagcaauccacugu

SEQ ID NO: 144387 - RNA, 19 nt, Homo sapiens
  misc_RNA (1)...(19): siRNA sense strand
gacagcagcacauuguuuc

SEQ ID NO: 144388 - RNA, 19 nt, Homo sapiens
  misc_RNA (1)...(19): siRNA sense strand
uguggugucugaguacuuu

SEQ ID NO: 144389 - RNA, 19 nt, Homo sapiens
  misc_RNA (1)...(19): siRNA sense strand
ggucaaagugucugaagca

SEQ ID NO: 144390 - RNA, 19 nt, Homo sapiens
  misc_RNA (1)...(19): siRNA sense strand
gaagguggcaaguuauggu

SEQ ID NO: 144391 - RNA, 19 nt, Homo sapiens
  misc_RNA (1)...(19): siRNA sense strand
ggugugaagccaagauaug

SEQ ID NO: 144392 - RNA, 19 nt, Homo sapiens
  misc_RNA (1)...(19): siRNA sense strand
acaaggaacacucaaucaa

SEQ ID NO: 144393 - RNA, 19 nt, Homo sapiens
  misc_RNA (1)...(19): siRNA sense strand
ucuaccaaaugaucgauga

SEQ ID NO: 144394 - RNA, 19 nt, Homo sapiens
  misc_RNA (1)...(19): siRNA sense strand
gauguuuucuaccaaauga

SEQ ID NO: 144395 - RNA, 19 nt, Homo sapiens
  misc_RNA (1)...(19): siRNA sense strand
gaagaccacaaguugaagu

SEQ ID NO: 144396 - RNA, 19 nt, Homo sapiens
  misc_RNA (1)...(19): siRNA sense strand
gacagagaccauagaagga

SEQ ID NO: 144397 - RNA, 19 nt, Homo sapiens
  misc_RNA (1)...(19): siRNA sense strand
gaaacuccaagaugaggau

SEQ ID NO: 144398 - RNA, 19 nt, Homo sapiens
  misc_RNA (1)...(19): siRNA sense strand
aagaaaggcagcugugaga

SEQ ID NO: 144399 - RNA, 19 nt, Homo sapiens
  misc_RNA (1)...(19): siRNA sense strand
ugacaaggaacacucaauc

SEQ ID NO: 144400 - RNA, 19 nt, Homo sapiens
  misc_RNA (1)...(19): siRNA sense strand
gaagccaagauauggucua

SEQ ID NO: 144401 - RNA, 19 nt, Homo sapiens
  misc_RNA (1)...(19): siRNA sense strand
ggaggucuacaucaagaau

SEQ ID NO: 144402 - RNA, 19 nt, Homo sapiens
  misc_RNA (1)...(19): siRNA sense strand
uuaugaagaccacaaguug

SEQ ID NO: 144403 - RNA, 19 nt, Homo sapiens
  misc_RNA (1)...(19): siRNA sense strand
gaaggugggcagccaguac

SEQ ID NO: 144404 - RNA, 19 nt, Homo sapiens
  misc_RNA (1)...(19): siRNA sense strand
acaucaaccucuuucaagu

SEQ ID NO: 144405 - RNA, 19 nt, Homo sapiens
  misc_RNA (1)...(19): siRNA sense strand
gaaauauggccagacuauc

SEQ ID NO: 144406 - RNA, 19 nt, Homo sapiens
  misc_RNA (1)...(19): siRNA sense strand
ggacacgagagcuguaugg

SEQ ID NO: 144407 - RNA, 19 nt, Homo sapiens
  misc_RNA (1)...(19): siRNA sense strand
gccaguaccgccuugaaga

SEQ ID NO: 144408 - RNA, 19 nt, Homo sapiens
  misc_RNA (1)...(19): siRNA sense strand
caggcuccaugaacaucua

SEQ ID NO: 144409 - RNA, 19 nt, Homo sapiens
  misc_RNA (1)...(19): siRNA sense strand
cugaucaagcucaagaaua

SEQ ID NO: 144410 - RNA, 19 nt, Homo sapiens
  misc_RNA (1)...(19): siRNA sense strand
caggaaggguaccgauuac

SEQ ID NO: 144411 - RNA, 19 nt, Homo sapiens
  misc_RNA (1)...(19): siRNA sense strand
agaaagacaaugagcaaca

SEQ ID NO: 144412 - RNA, 19 nt, Homo sapiens
  misc_RNA (1)...(19): siRNA sense strand
gggacuugcuauacauugg

SEQ ID NO: 144413 - RNA, 19 nt, Homo sapiens
  misc_RNA (1)...(19): siRNA sense strand
cagacugggucacgaagca

SEQ ID NO: 144414 - RNA, 19 nt, Homo sapiens
  misc_RNA (1)...(19): siRNA sense strand
gagucucuguggcaugguu

SEQ ID NO: 144415 - RNA, 19 nt, Homo sapiens
  misc_RNA (1)...(19): siRNA sense strand
guaaucagcuggggaguag

SEQ ID NO: 144416 - RNA, 19 nt, Homo sapiens
  misc_RNA (1)...(19): siRNA sense strand
gaagauaucugggcaggaa

SEQ ID NO: 144417 - RNA, 19 nt, Homo sapiens
  misc_RNA (1)...(19): siRNA sense strand
ugaaggagaugcuuuggua

SEQ ID NO: 144418 - RNA, 19 nt, Homo sapiens
  misc_RNA (1)...(19): siRNA sense strand
gcaacuaugucuuagagaa

SEQ ID NO: 144419 - RNA, 19 nt, Homo sapiens
  misc_RNA (1)...(19): siRNA sense strand
gaacguggacuucuugauu

SEQ ID NO: 144420 - RNA, 19 nt, Homo sapiens
  misc_RNA (1)...(19): siRNA sense strand
gagugaaacugaagucaaa

SEQ ID NO: 144421 - RNA, 19 nt, Homo sapiens
  misc_RNA (1)...(19): siRNA sense strand
gauuggagauggaggguuu

SEQ ID NO: 144422 - RNA, 19 nt, Homo sapiens
  misc_RNA (1)...(19): siRNA sense strand
gcaggagcauccaucauug

SEQ ID NO: 144423 - RNA, 19 nt, Homo sapiens
  misc_RNA (1)...(19): siRNA sense strand
acaaguggcugaugaagga

SEQ ID NO: 144424 - RNA, 19 nt, Homo sapiens
  misc_RNA (1)...(19): siRNA sense strand
ggugugaacugccacuuug

SEQ ID NO: 144425 - RNA, 19 nt, Homo sapiens
  misc_RNA (1)...(19): siRNA sense strand
cagugaagcucaugaagga

SEQ ID NO: 144426 - RNA, 19 nt, Homo sapiens
  misc_RNA (1)...(19): siRNA sense strand
cgacaucgcccgacaagug

SEQ ID NO: 144427 - RNA, 19 nt, Homo sapiens
  misc_RNA (1)...(19): siRNA sense strand
auacaacccuucaauguca

SEQ ID NO: 144428 - RNA, 19 nt, Homo sapiens
  misc_RNA (1)...(19): siRNA sense strand
ucagacaccuucauaccuu

SEQ ID NO: 144429 - RNA, 19 nt, Homo sapiens
  misc_RNA (1)...(19): siRNA sense strand
acugaaagcucaccugaug

SEQ ID NO: 144430 - RNA, 19 nt, Homo sapiens
  misc_RNA (1)...(19): siRNA sense strand
agaaagaagccacaacuga

SEQ ID NO: 144431 - RNA, 19 nt, Homo sapiens
  misc_RNA (1)...(19): siRNA sense strand
guugaaaccuugauagcau

SEQ ID NO: 144432 - RNA, 19 nt, Homo sapiens
  misc_RNA (1)...(19): siRNA sense strand
gggcaacuaugucuuagag

SEQ ID NO: 144433 - RNA, 19 nt, Homo sapiens
  misc_RNA (1)...(19): siRNA sense strand
ucaucgaucucccagaauu

SEQ ID NO: 144434 - RNA, 19 nt, Homo sapiens
  misc_RNA (1)...(19): siRNA sense strand
caagaagggcauccuagaa

SEQ ID NO: 144435 - RNA, 19 nt, Homo sapiens
  misc_RNA (1)...(19): siRNA sense strand
uuuaaaugcuggagagauu

SEQ ID NO: 144436 - RNA, 19 nt, Homo sapiens
  misc_RNA (1)...(19): siRNA sense strand
gcagcaaccaugugcauug

SEQ ID NO: 144437 - RNA, 19 nt, Homo sapiens
  misc_RNA (1)...(19): siRNA sense strand
gauggaggguuugucuuug

SEQ ID NO: 144438 - RNA, 19 nt, Homo sapiens
  misc_RNA (1)...(19): siRNA sense strand
gaagcugugugggcaguug

SEQ ID NO: 144439 - RNA, 19 nt, Homo sapiens
  misc_RNA (1)...(19): siRNA sense strand
cagacaccuucauaccuua

SEQ ID NO: 144440 - RNA, 19 nt, Homo sapiens
  misc_RNA (1)...(19): siRNA sense strand
gaagugguuuggacaugca

SEQ ID NO: 144441 - RNA, 19 nt, Homo sapiens
  misc_RNA (1)...(19): siRNA sense strand
gaaggaauacugggagaau

SEQ ID NO: 144442 - RNA, 19 nt, Homo sapiens
  misc_RNA (1)...(19): siRNA sense strand
ccauacaacccuucaaugu

SEQ ID NO: 144443 - RNA, 19 nt, Homo sapiens
  misc_RNA (1)...(19): siRNA sense strand
aguuagaggucuuuaugaa

SEQ ID NO: 144444 - RNA, 19 nt, Homo sapiens
  misc_RNA (1)...(19): siRNA sense strand
gcagaaagaagccacaacu

SEQ ID NO: 144445 - RNA, 19 nt, Homo sapiens
  misc_RNA (1)...(19): siRNA sense strand
caagggccaggaaggaaua

SEQ ID NO: 144446 - RNA, 19 nt, Homo sapiens
  misc_RNA (1)...(19): siRNA sense strand
ggaggcugcccaacugaaa

SEQ ID NO: 144447 - RNA, 19 nt, Homo sapiens
  misc_RNA (1)...(19): siRNA sense strand
gcaguucgccagcuucauc

SEQ ID NO: 144448 - RNA, 19 nt, Homo sapiens
  misc_RNA (1)...(19): siRNA sense strand
gggaagugguuuggacaug

SEQ ID NO: 144449 - RNA, 19 nt, Homo sapiens
  misc_RNA (1)...(19): siRNA sense strand
gggcauccuagaacguuua

SEQ ID NO: 144450 - RNA, 19 nt, Homo sapiens
  misc_RNA (1)...(19): siRNA sense strand
ugagucagacaccuucaua

SEQ ID NO: 144451 - RNA, 19 nt, Homo sapiens
  misc_RNA (1)...(19): siRNA sense strand
gcaggaggagugagucaga

SEQ ID NO: 144452 - RNA, 19 nt, Homo sapiens
  misc_RNA (1)...(19): siRNA sense strand
cuucauaccuuagcugcaa

SEQ ID NO: 144453 - RNA, 19 nt, Homo sapiens
  misc_RNA (1)...(19): siRNA sense strand
ccaagaagggcauccuaga

SEQ ID NO: 144454 - RNA, 19 nt, Homo sapiens
  misc_RNA (1)...(19): siRNA sense strand
ggagauggaggguuugucu

SEQ ID NO: 144455 - RNA, 19 nt, Homo sapiens
  misc_RNA (1)...(19): siRNA sense strand
gcaagggccaggaaggaau

SEQ ID NO: 144456 - RNA, 19 nt, Homo sapiens
  misc_RNA (1)...(19): siRNA sense strand
caacaagcagggauucauc

SEQ ID NO: 144457 - RNA, 19 nt, Homo sapiens
  misc_RNA (1)...(19): siRNA sense strand
gcccuuggcuuaccacacu

SEQ ID NO: 144458 - RNA, 19 nt, Homo sapiens
  misc_RNA (1)...(19): siRNA sense strand
cauccuagaacguuuaaau

SEQ ID NO: 144459 - RNA, 19 nt, Homo sapiens
  misc_RNA (1)...(19): siRNA sense strand
gaagacaagcuggagaaca

SEQ ID NO: 144460 - RNA, 19 nt, Homo sapiens
  misc_RNA (1)...(19): siRNA sense strand
gauuugagcccuaccacau

SEQ ID NO: 144461 - RNA, 19 nt, Homo sapiens
  misc_RNA (1)...(19): siRNA sense strand
gagcaagggccaggaagga

SEQ ID NO: 144462 - RNA, 19 nt, Homo sapiens
  misc_RNA (1)...(19): siRNA sense strand
aagacaagcuggagaacag

SEQ ID NO: 144463 - RNA, 19 nt, Homo sapiens
  misc_RNA (1)...(19): siRNA sense strand
gagaagaggggcuacguaa

SEQ ID NO: 144464 - RNA, 19 nt, Homo sapiens
  misc_RNA (1)...(19): siRNA sense strand
cuggagagauugugauugg

SEQ ID NO: 144465 - RNA, 19 nt, Homo sapiens
  misc_RNA (1)...(19): siRNA sense strand
aacguggacuucuugauug

SEQ ID NO: 144466 - RNA, 19 nt, Homo sapiens
  misc_RNA (1)...(19): siRNA sense strand
ugaagaagaacguggacuu

SEQ ID NO: 144467 - RNA, 19 nt, Homo sapiens
  misc_RNA (1)...(19): siRNA sense strand
caaacgucaugcagaccuu

SEQ ID NO: 144468 - RNA, 19 nt, Homo sapiens
  misc_RNA (1)...(19): siRNA sense strand
auucaucgaucucccagaa

SEQ ID NO: 144469 - RNA, 19 nt, Homo sapiens
  misc_RNA (1)...(19): siRNA sense strand
gcaguugaaaccuugauag

SEQ ID NO: 144470 - RNA, 19 nt, Homo sapiens
  misc_RNA (1)...(19): siRNA sense strand
gcugcaagagugaaacuga

SEQ ID NO: 144471 - RNA, 19 nt, Homo sapiens
  misc_RNA (1)...(19): siRNA sense strand
ggagugagucagacaccuu

SEQ ID NO: 144472 - RNA, 19 nt, Homo sapiens
  misc_RNA (1)...(19): siRNA sense strand
aaacagugaagcucaugaa

SEQ ID NO: 144473 - RNA, 19 nt, Homo sapiens
  misc_RNA (1)...(19): siRNA sense strand
gugaagacaagcuggagaa

SEQ ID NO: 144474 - RNA, 19 nt, Homo sapiens
  misc_RNA (1)...(19): siRNA sense strand
gggagaaucuucggauagc

SEQ ID NO: 144475 - RNA, 19 nt, Homo sapiens
  misc_RNA (1)...(19): siRNA sense strand
agauggaggguuugucuuu

SEQ ID NO: 144476 - RNA, 19 nt, Homo sapiens
  misc_RNA (1)...(19): siRNA sense strand
cugcaagagugaaacugaa

SEQ ID NO: 144477 - RNA, 19 nt, Homo sapiens
  misc_RNA (1)...(19): siRNA sense strand
gaagaggggcuacguaaag

SEQ ID NO: 144478 - RNA, 19 nt, Homo sapiens
  misc_RNA (1)...(19): siRNA sense strand
cuugauagcauccgguaaa

SEQ ID NO: 144479 - RNA, 19 nt, Homo sapiens
  misc_RNA (1)...(19): siRNA sense strand
acaguuagaggucuuuaug

SEQ ID NO: 144480 - RNA, 19 nt, Homo sapiens
  misc_RNA (1)...(19): siRNA sense strand
caacaguuagaggucuuua

SEQ ID NO: 144481 - RNA, 19 nt, Homo sapiens
  misc_RNA (1)...(19): siRNA sense strand
aaguauuucugcaacaguu

SEQ ID NO: 144482 - RNA, 19 nt, Homo sapiens
  misc_RNA (1)...(19): siRNA sense strand
ggaaggaauacugggagaa

SEQ ID NO: 144483 - RNA, 19 nt, Homo sapiens
  misc_RNA (1)...(19): siRNA sense strand
gccaccagaugggauauuc

SEQ ID NO: 144484 - RNA, 19 nt, Homo sapiens
  misc_RNA (1)...(19): siRNA sense strand
gcaacaagcagggauucau

SEQ ID NO: 144485 - RNA, 19 nt, Homo sapiens
  misc_RNA (1)...(19): siRNA sense strand
gauugugauuggagaugga

SEQ ID NO: 144486 - RNA, 19 nt, Homo sapiens
  misc_RNA (1)...(19): siRNA sense strand
gcagugcgccuggugaaag

SEQ ID NO: 144487 - RNA, 19 nt, Homo sapiens
  misc_RNA (1)...(19): siRNA sense strand
cccgacaaguggcugauga

SEQ ID NO: 144488 - RNA, 19 nt, Homo sapiens
  misc_RNA (1)...(19): siRNA sense strand
cugggagaaucuucggaua

SEQ ID NO: 144489 - RNA, 19 nt, Homo sapiens
  misc_RNA (1)...(19): siRNA sense strand
ggagcacccagaagcaguu

SEQ ID NO: 144490 - RNA, 19 nt, Homo sapiens
  misc_RNA (1)...(19): siRNA sense strand
caacuaugucuuagagaag

SEQ ID NO: 144491 - RNA, 19 nt, Homo sapiens
  misc_RNA (1)...(19): siRNA sense strand
ggccauacaacccuucaau

SEQ ID NO: 144492 - RNA, 19 nt, Homo sapiens
  misc_RNA (1)...(19): siRNA sense strand
ccuagaacguuuaaaugcu

SEQ ID NO: 144493 - RNA, 19 nt, Homo sapiens
  misc_RNA (1)...(19): siRNA sense strand
cuucuugauugcagaguau

SEQ ID NO: 144494 - RNA, 19 nt, Homo sapiens
  misc_RNA (1)...(19): siRNA sense strand
cauacaacccuucaauguc

SEQ ID NO: 144495 - RNA, 19 nt, Homo sapiens
  misc_RNA (1)...(19): siRNA sense strand
caugugcauuggcccagaa

SEQ ID NO: 144496 - RNA, 19 nt, Homo sapiens
  misc_RNA (1)...(19): siRNA sense strand
cagcaaccaugugcauugg

SEQ ID NO: 144497 - RNA, 19 nt, Homo sapiens
  misc_RNA (1)...(19): siRNA sense strand
gauagcauccgguaaaccu

SEQ ID NO: 144498 - RNA, 19 nt, Homo sapiens
  misc_RNA (1)...(19): siRNA sense strand
gcaagagugaaacugaagu

SEQ ID NO: 144499 - RNA, 19 nt, Homo sapiens
  misc_RNA (1)...(19): siRNA sense strand
ggcgggugcuguggauuug

SEQ ID NO: 144500 - RNA, 19 nt, Homo sapiens
  misc_RNA (1)...(19): siRNA sense strand
gcaacaguuagaggucuuu

SEQ ID NO: 144501 - RNA, 19 nt, Homo sapiens
  misc_RNA (1)...(19): siRNA sense strand
gcagaccuucaccuucuau

SEQ ID NO: 144502 - RNA, 19 nt, Homo sapiens
  misc_RNA (1)...(19): siRNA sense strand
gcaggaagucaaugaagcu

SEQ ID NO: 144503 - RNA, 19 nt, Homo sapiens
  misc_RNA (1)...(19): siRNA sense strand
ggaauacugggagaaucuu

SEQ ID NO: 144504 - RNA, 19 nt, Homo sapiens
  misc_RNA (1)...(19): siRNA sense strand
ugaugaaggagaugcuuug

SEQ ID NO: 144505 - RNA, 19 nt, Homo sapiens
  misc_RNA (1)...(19): siRNA sense strand
augcagaccuucaccuucu

SEQ ID NO: 144506 - RNA, 19 nt, Homo sapiens
  misc_RNA (1)...(19): siRNA sense strand
gggagugaccaaaggaaca

SEQ ID NO: 144507 - RNA, 19 nt, Homo sapiens
  misc_RNA (1)...(19): siRNA sense strand
gccauacaacccuucaaug

SEQ ID NO: 144508 - RNA, 19 nt, Homo sapiens
  misc_RNA (1)...(19): siRNA sense strand
ccagagaggccuacaaccu

SEQ ID NO: 144509 - RNA, 19 nt, Homo sapiens
  misc_RNA (1)...(19): siRNA sense strand
gaagggcauccuagaacgu

SEQ ID NO: 144510 - RNA, 19 nt, Homo sapiens
  misc_RNA (1)...(19): siRNA sense strand
caccagaugggauauucaa

SEQ ID NO: 144511 - RNA, 19 nt, Homo sapiens
  misc_RNA (1)...(19): siRNA sense strand
agcaggagcauccaucauu

SEQ ID NO: 144512 - RNA, 19 nt, Homo sapiens
  misc_RNA (1)...(19): siRNA sense strand
gugcauuggcccagaagga

SEQ ID NO: 144513 - RNA, 19 nt, Homo sapiens
  misc_RNA (1)...(19): siRNA sense strand
ccagcuucaucgagaguuc

SEQ ID NO: 144514 - RNA, 19 nt, Homo sapiens
  misc_RNA (1)...(19): siRNA sense strand
ugaacacguugaagaagcu

SEQ ID NO: 144515 - RNA, 19 nt, Homo sapiens
  misc_RNA (1)...(19): siRNA sense strand
gaauacugggagaaucuuc

SEQ ID NO: 144516 - RNA, 19 nt, Homo sapiens
  misc_RNA (1)...(19): siRNA sense strand
ggacagauuggacaacuau

SEQ ID NO: 144517 - RNA, 19 nt, Homo sapiens
  misc_RNA (1)...(19): siRNA sense strand
caagagaaccaagcagaaa

SEQ ID NO: 144518 - RNA, 19 nt, Homo sapiens
  misc_RNA (1)...(19): siRNA sense strand
ccaccucucucaccacguu

SEQ ID NO: 144519 - RNA, 19 nt, Homo sapiens
  misc_RNA (1)...(19): siRNA sense strand
ugacgaagcugggcuguac

SEQ ID NO: 144520 - RNA, 19 nt, Homo sapiens
  misc_RNA (1)...(19): siRNA sense strand
ccacggagaccuuccuguu

SEQ ID NO: 144521 - RNA, 19 nt, Homo sapiens
  misc_RNA (1)...(19): siRNA sense strand
cagaaacgcaugccugguu

SEQ ID NO: 144522 - RNA, 19 nt, Homo sapiens
  misc_RNA (1)...(19): siRNA sense strand
ugaaggccguggacaauac

SEQ ID NO: 144523 - RNA, 19 nt, Homo sapiens
  misc_RNA (1)...(19): siRNA sense strand
acagauuggacaacuauaa

SEQ ID NO: 144524 - RNA, 19 nt, Homo sapiens
  misc_RNA (1)...(19): siRNA sense strand
ugauugcccugcacaaagu

SEQ ID NO: 144525 - RNA, 19 nt, Homo sapiens
  misc_RNA (1)...(19): siRNA sense strand
gcaggagcagucucucuga

SEQ ID NO: 144526 - RNA, 19 nt, Homo sapiens
  misc_RNA (1)...(19): siRNA sense strand
ccaagagaaccaagcagaa

SEQ ID NO: 144527 - RNA, 19 nt, Homo sapiens
  misc_RNA (1)...(19): siRNA sense strand
ccaaggccaucacaacaac

SEQ ID NO: 144528 - RNA, 19 nt, Homo sapiens
  misc_RNA (1)...(19): siRNA sense strand
gcgugaaguuccgcaguga

SEQ ID NO: 144529 - RNA, 19 nt, Homo sapiens
  misc_RNA (1)...(19): siRNA sense strand
ugucgcggcuccugacgaa

SEQ ID NO: 144530 - RNA, 19 nt, Homo sapiens
  misc_RNA (1)...(19): siRNA sense strand
ccucauggccuccuucaag

SEQ ID NO: 144531 - RNA, 19 nt, Homo sapiens
  misc_RNA (1)...(19): siRNA sense strand
gccaaggccaucacaacaa

SEQ ID NO: 144532 - RNA, 19 nt, Homo sapiens
  misc_RNA (1)...(19): siRNA sense strand
gcaguuccacggagaccuu

SEQ ID NO: 144533 - RNA, 19 nt, Homo sapiens
  misc_RNA (1)...(19): siRNA sense strand
gcugaaggccguggacaau

SEQ ID NO: 144534 - RNA, 19 nt, Homo sapiens
  misc_RNA (1)...(19): siRNA sense strand
ugacaagcaucuucuuccu

SEQ ID NO: 144535 - RNA, 19 nt, Homo sapiens
  misc_RNA (1)...(19): siRNA sense strand
gucuucaucuugcccuuug

SEQ ID NO: 144536 - RNA, 19 nt, Homo sapiens
  misc_RNA (1)...(19): siRNA sense strand
gagcagucucucugaguca

SEQ ID NO: 144537 - RNA, 19 nt, Homo sapiens
  misc_RNA (1)...(19): siRNA sense strand
gauuggacaacuauaacga

SEQ ID NO: 144538 - RNA, 19 nt, Homo sapiens
  misc_RNA (1)...(19): siRNA sense strand
uggacagauuggacaacua

SEQ ID NO: 144539 - RNA, 19 nt, Homo sapiens
  misc_RNA (1)...(19): siRNA sense strand
ggugacaagcaucuucuuc

SEQ ID NO: 144540 - RNA, 19 nt, Homo sapiens
  misc_RNA (1)...(19): siRNA sense strand
cuccuugccuugccagaga

SEQ ID NO: 144541 - RNA, 19 nt, Homo sapiens
  misc_RNA (1)...(19): siRNA sense strand
gaaacgcaugccugguuca

SEQ ID NO: 144542 - RNA, 19 nt, Homo sapiens
  misc_RNA (1)...(19): siRNA sense strand
gugauugcccugcacaaag

SEQ ID NO: 144543 - RNA, 19 nt, Homo sapiens
  misc_RNA (1)...(19): siRNA sense strand
cccgauuccucuaccaugu

SEQ ID NO: 144544 - RNA, 19 nt, Homo sapiens
  misc_RNA (1)...(19): siRNA sense strand
caagagaaccaagcagaaa

SEQ ID NO: 144545 - RNA, 19 nt, Homo sapiens
  misc_RNA (1)...(19): siRNA sense strand
ccaccucucucaccacguu

SEQ ID NO: 144546 - RNA, 19 nt, Homo sapiens
  misc_RNA (1)...(19): siRNA sense strand
ugacgaagcugggcuguac

SEQ ID NO: 144547 - RNA, 19 nt, Homo sapiens
  misc_RNA (1)...(19): siRNA sense strand
ccacggagaccuuccuguu

SEQ ID NO: 144548 - RNA, 19 nt, Homo sapiens
  misc_RNA (1)...(19): siRNA sense strand
cagaaacgcaugccugguu

SEQ ID NO: 144549 - RNA, 19 nt, Homo sapiens
  misc_RNA (1)...(19): siRNA sense strand
ugaaggccguggacaauac

SEQ ID NO: 144550 - RNA, 19 nt, Homo sapiens
  misc_RNA (1)...(19): siRNA sense strand
ugauugcccugcacaaagu

SEQ ID NO: 144551 - RNA, 19 nt, Homo sapiens
  misc_RNA (1)...(19): siRNA sense strand
gcaggagcagucucucuga

SEQ ID NO: 144552 - RNA, 19 nt, Homo sapiens
  misc_RNA (1)...(19): siRNA sense strand
ccaagagaaccaagcagaa

SEQ ID NO: 144553 - RNA, 19 nt, Homo sapiens
  misc_RNA (1)...(19): siRNA sense strand
ccaaggccaucacaacaac

SEQ ID NO: 144554 - RNA, 19 nt, Homo sapiens
  misc_RNA (1)...(19): siRNA sense strand
gcgugaaguuccgcaguga

SEQ ID NO: 144555 - RNA, 19 nt, Homo sapiens
  misc_RNA (1)...(19): siRNA sense strand
ugucgcggcuccugacgaa

SEQ ID NO: 144556 - RNA, 19 nt, Homo sapiens
  misc_RNA (1)...(19): siRNA sense strand
gcaguuccacggagaccuu

SEQ ID NO: 144557 - RNA, 19 nt, Homo sapiens
  misc_RNA (1)...(19): siRNA sense strand
gccaaggccaucacaacaa

SEQ ID NO: 144558 - RNA, 19 nt, Homo sapiens
  misc_RNA (1)...(19): siRNA sense strand
gcugaaggccguggacaau

SEQ ID NO: 144559 - RNA, 19 nt, Homo sapiens
  misc_RNA (1)...(19): siRNA sense strand
ugacaagcaucuucuuccu

SEQ ID NO: 144560 - RNA, 19 nt, Homo sapiens
  misc_RNA (1)...(19): siRNA sense strand
gucuucaucuugcccuuug

SEQ ID NO: 144561 - RNA, 19 nt, Homo sapiens
  misc_RNA (1)...(19): siRNA sense strand
gagcagucucucugaguca

SEQ ID NO: 144562 - RNA, 19 nt, Homo sapiens
  misc_RNA (1)...(19): siRNA sense strand
ggugacaagcaucuucuuc

SEQ ID NO: 144563 - RNA, 19 nt, Homo sapiens
  misc_RNA (1)...(19): siRNA sense strand
cuccuugccuugccagaga

SEQ ID NO: 144564 - RNA, 19 nt, Homo sapiens
  misc_RNA (1)...(19): siRNA sense strand
gaaacgcaugccugguuca

SEQ ID NO: 144565 - RNA, 19 nt, Homo sapiens
  misc_RNA (1)...(19): siRNA sense strand
gugauugcccugcacaaag

SEQ ID NO: 144566 - RNA, 19 nt, Homo sapiens
  misc_RNA (1)...(19): siRNA sense strand
cccgauuccucuaccaugu

SEQ ID NO: 144567 - RNA, 19 nt, Homo sapiens
  misc_RNA (1)...(19): siRNA sense strand
gaagaaauacagaaacaug

SEQ ID NO: 144568 - RNA, 19 nt, Homo sapiens
  misc_RNA (1)...(19): siRNA sense strand
ccucugaacuccuacauga

SEQ ID NO: 144569 - RNA, 19 nt, Homo sapiens
  misc_RNA (1)...(19): siRNA sense strand
guaagaagcacgagcugua

SEQ ID NO: 144570 - RNA, 19 nt, Homo sapiens
  misc_RNA (1)...(19): siRNA sense strand
gaacaagcagcccuucaug

SEQ ID NO: 144571 - RNA, 19 nt, Homo sapiens
  misc_RNA (1)...(19): siRNA sense strand
gagugugccuucccucuga

SEQ ID NO: 144572 - RNA, 19 nt, Homo sapiens
  misc_RNA (1)...(19): siRNA sense strand
gggaacgcuucgacaauga

SEQ ID NO: 144573 - RNA, 19 nt, Homo sapiens
  misc_RNA (1)...(19): siRNA sense strand
gcaaacagcgcagccagaa

SEQ ID NO: 144574 - RNA, 19 nt, Homo sapiens
  misc_RNA (1)...(19): siRNA sense strand
gaggugcacucgagcuuca

SEQ ID NO: 144575 - RNA, 19 nt, Homo sapiens
  misc_RNA (1)...(19): siRNA sense strand
caugguggcuuucuucaag

SEQ ID NO: 144576 - RNA, 19 nt, Homo sapiens
  misc_RNA (1)...(19): siRNA sense strand
gaguuccgguuugaucuuu

SEQ ID NO: 144577 - RNA, 19 nt, Homo sapiens
  misc_RNA (1)...(19): siRNA sense strand
gcuccaacgucauccugaa

SEQ ID NO: 144578 - RNA, 19 nt, Homo sapiens
  misc_RNA (1)...(19): siRNA sense strand
gcuccaagacgcccaagaa

SEQ ID NO: 144579 - RNA, 19 nt, Homo sapiens
  misc_RNA (1)...(19): siRNA sense strand
caucgagaguuccgguuug

SEQ ID NO: 144580 - RNA, 19 nt, Homo sapiens
  misc_RNA (1)...(19): siRNA sense strand
aaugagacguuccggauca

SEQ ID NO: 144581 - RNA, 19 nt, Homo sapiens
  misc_RNA (1)...(19): siRNA sense strand
cugaagaaauacagaaaca

SEQ ID NO: 144582 - RNA, 19 nt, Homo sapiens
  misc_RNA (1)...(19): siRNA sense strand
cuacaaggccgucuucagu

SEQ ID NO: 144583 - RNA, 19 nt, Homo sapiens
  misc_RNA (1)...(19): siRNA sense strand
ccaacgucauccugaagaa

SEQ ID NO: 144584 - RNA, 19 nt, Homo sapiens
  misc_RNA (1)...(19): siRNA sense strand
cguggaacaugacaaggaa

SEQ ID NO: 144585 - RNA, 19 nt, Homo sapiens
  misc_RNA (1)...(19): siRNA sense strand
caacucggcacccauguuc

SEQ ID NO: 144586 - RNA, 19 nt, Homo sapiens
  misc_RNA (1)...(19): siRNA sense strand
gaacaugacaaggaauucu

SEQ ID NO: 144587 - RNA, 19 nt, Homo sapiens
  misc_RNA (1)...(19): siRNA sense strand
cgggaacgcuucgacaaug

SEQ ID NO: 144588 - RNA, 19 nt, Homo sapiens
  misc_RNA (1)...(19): siRNA sense strand
ccaagacgcccaagaacca

SEQ ID NO: 144589 - RNA, 19 nt, Homo sapiens
  misc_RNA (1)...(19): siRNA sense strand
uacaaggccgucuucagua

SEQ ID NO: 144590 - RNA, 19 nt, Homo sapiens
  misc_RNA (1)...(19): siRNA sense strand
caacgucauccugaagaaa

SEQ ID NO: 144591 - RNA, 19 nt, Homo sapiens
  misc_RNA (1)...(19): siRNA sense strand
gaacgcuucgacaaugaga

SEQ ID NO: 144592 - RNA, 19 nt, Homo sapiens
  misc_RNA (1)...(19): siRNA sense strand
cuaccaccaucgagaguuc

SEQ ID NO: 144593 - RNA, 19 nt, Homo sapiens
  misc_RNA (1)...(19): siRNA sense strand
acaaggccgucuucaguac

SEQ ID NO: 144594 - RNA, 19 nt, Homo sapiens
  misc_RNA (1)...(19): siRNA sense strand
uaagaagcacgagcuguau

SEQ ID NO: 144595 - RNA, 19 nt, Homo sapiens
  misc_RNA (1)...(19): siRNA sense strand
gaucuacaaggacuacauc

SEQ ID NO: 144596 - RNA, 19 nt, Homo sapiens
  misc_RNA (1)...(19): siRNA sense strand
cagggaaucggaucucuuc

SEQ ID NO: 144597 - RNA, 19 nt, Homo sapiens
  misc_RNA (1)...(19): siRNA sense strand
ccugcaagauagccauuuc

SEQ ID NO: 144598 - RNA, 19 nt, Homo sapiens
  misc_RNA (1)...(19): siRNA sense strand
ggagaugcagcgcgagauc

SEQ ID NO: 144599 - RNA, 19 nt, Homo sapiens
  misc_RNA (1)...(19): siRNA sense strand
ugcagacgcugguccacuu

SEQ ID NO: 144600 - RNA, 19 nt, Homo sapiens
  misc_RNA (1)...(19): siRNA sense strand
gcugguguuugacaucaca

SEQ ID NO: 144601 - RNA, 19 nt, Homo sapiens
  misc_RNA (1)...(19): siRNA sense strand
agggcuggcugguguuuga

SEQ ID NO: 144602 - RNA, 19 nt, Homo sapiens
  misc_RNA (1)...(19): siRNA sense strand
gcagggaaucggaucucuu

SEQ ID NO: 144603 - RNA, 19 nt, Homo sapiens
  misc_RNA (1)...(19): siRNA sense strand
cgagaguuccgguuugauc

SEQ ID NO: 144604 - RNA, 19 nt, Homo sapiens
  misc_RNA (1)...(19): siRNA sense strand
ggagggcuggcugguguuu

SEQ ID NO: 144605 - RNA, 19 nt, Homo sapiens
  misc_RNA (1)...(19): siRNA sense strand
ucaaccucguggaacauga

SEQ ID NO: 144606 - RNA, 19 nt, Homo sapiens
  misc_RNA (1)...(19): siRNA sense strand
acgucauccugaagaaaua

SEQ ID NO: 144607 - RNA, 19 nt, Homo sapiens
  misc_RNA (1)...(19): siRNA sense strand
gcagccgaauuccggaucu

SEQ ID NO: 144608 - RNA, 19 nt, Homo sapiens
  misc_RNA (1)...(19): siRNA sense strand
ggaacaugacaaggaauuc

SEQ ID NO: 144609 - RNA, 19 nt, Homo sapiens
  misc_RNA (1)...(19): siRNA sense strand
ccaucuccguccucuacuu

SEQ ID NO: 144610 - RNA, 19 nt, Homo sapiens
  misc_RNA (1)...(19): siRNA sense strand
acaagcagcccuucauggu

SEQ ID NO: 144611 - RNA, 19 nt, Homo sapiens
  misc_RNA (1)...(19): siRNA sense strand
ccaucgagaguuccgguuu

SEQ ID NO: 144612 - RNA, 19 nt, Homo sapiens
  misc_RNA (1)...(19): siRNA sense strand
uggaacaugacaaggaauu

SEQ ID NO: 144613 - RNA, 19 nt, Homo sapiens
  misc_RNA (1)...(19): siRNA sense strand
uggccagccugcaagauag

SEQ ID NO: 144614 - RNA, 19 nt, Homo sapiens
  misc_RNA (1)...(19): siRNA sense strand
cagccgaauuccggaucua

SEQ ID NO: 144615 - RNA, 19 nt, Homo sapiens
  misc_RNA (1)...(19): siRNA sense strand
ggucaugagcuucgucaac

SEQ ID NO: 144616 - RNA, 19 nt, Homo sapiens
  misc_RNA (1)...(19): siRNA sense strand
cuggccagccugcaagaua

SEQ ID NO: 144617 - RNA, 19 nt, Homo sapiens
  misc_RNA (1)...(19): siRNA sense strand
gagaguuccgguuugaucu

SEQ ID NO: 144618 - RNA, 19 nt, Homo sapiens
  misc_RNA (1)...(19): siRNA sense strand
agccagaaccgcuccaaga

SEQ ID NO: 144619 - RNA, 19 nt, Homo sapiens
  misc_RNA (1)...(19): siRNA sense strand
ccacuggacuccugcauga

SEQ ID NO: 144620 - RNA, 19 nt, Homo sapiens
  misc_RNA (1)...(19): siRNA sense strand
ccucugugcucuacuauga

SEQ ID NO: 144621 - RNA, 19 nt, Homo sapiens
  misc_RNA (1)...(19): siRNA sense strand
ggucacagcugcggaguuc

SEQ ID NO: 144622 - RNA, 19 nt, Homo sapiens
  misc_RNA (1)...(19): siRNA sense strand
ccaccucugugcucuacua

SEQ ID NO: 144623 - RNA, 19 nt, Homo sapiens
  misc_RNA (1)...(19): siRNA sense strand
gucaugagcuucguuaaca

SEQ ID NO: 144624 - RNA, 19 nt, Homo sapiens
  misc_RNA (1)...(19): siRNA sense strand
gcuuugaccugacccagau

SEQ ID NO: 144625 - RNA, 19 nt, Homo sapiens
  misc_RNA (1)...(19): siRNA sense strand
uaugacagcagcaacaaug

SEQ ID NO: 144626 - RNA, 19 nt, Homo sapiens
  misc_RNA (1)...(19): siRNA sense strand
cuacucggccuauuacugu

SEQ ID NO: 144627 - RNA, 19 nt, Homo sapiens
  misc_RNA (1)...(19): siRNA sense strand
gcgcaagcaccgcaacaug

SEQ ID NO: 144628 - RNA, 19 nt, Homo sapiens
  misc_RNA (1)...(19): siRNA sense strand
gcaagcaccgcaacauggu

SEQ ID NO: 144629 - RNA, 19 nt, Homo sapiens
  misc_RNA (1)...(19): siRNA sense strand
gcauccaccugcucaacag

SEQ ID NO: 144630 - RNA, 19 nt, Homo sapiens
  misc_RNA (1)...(19): siRNA sense strand
gccucuauguggagacuga

SEQ ID NO: 144631 - RNA, 19 nt, Homo sapiens
  misc_RNA (1)...(19): siRNA sense strand
ggucaugagcuucguuaac

SEQ ID NO: 144632 - RNA, 19 nt, Homo sapiens
  misc_RNA (1)...(19): siRNA sense strand
gcuacucggccuauuacug

SEQ ID NO: 144633 - RNA, 19 nt, Homo sapiens
  misc_RNA (1)...(19): siRNA sense strand
gcuggcuggugcuggaugu

SEQ ID NO: 144634 - RNA, 19 nt, Homo sapiens
  misc_RNA (1)...(19): siRNA sense strand
ggacauaccugcugugaaa

SEQ ID NO: 144635 - RNA, 19 nt, Homo sapiens
  misc_RNA (1)...(19): siRNA sense strand
gaacgacacucgaaauaug

SEQ ID NO: 144636 - RNA, 19 nt, Homo sapiens
  misc_RNA (1)...(19): siRNA sense strand
gaugaaggcuccucccaaa

SEQ ID NO: 144637 - RNA, 19 nt, Homo sapiens
  misc_RNA (1)...(19): siRNA sense strand
aaacagaucuugcguaugc

SEQ ID NO: 144638 - RNA, 19 nt, Homo sapiens
  misc_RNA (1)...(19): siRNA sense strand
ggacagagaccgacaacga

SEQ ID NO: 144639 - RNA, 19 nt, Homo sapiens
  misc_RNA (1)...(19): siRNA sense strand
cgaagaaacuaaacagauc

SEQ ID NO: 144640 - RNA, 19 nt, Homo sapiens
  misc_RNA (1)...(19): siRNA sense strand
cuaaacagaucuugcguau

SEQ ID NO: 144641 - RNA, 19 nt, Homo sapiens
  misc_RNA (1)...(19): siRNA sense strand
gaagagagagacagacgaa

SEQ ID NO: 144642 - RNA, 19 nt, Homo sapiens
  misc_RNA (1)...(19): siRNA sense strand
ggacauggagguggacaua

SEQ ID NO: 144643 - RNA, 19 nt, Homo sapiens
  misc_RNA (1)...(19): siRNA sense strand
agaaguaacugucaagaag

SEQ ID NO: 144644 - RNA, 19 nt, Homo sapiens
  misc_RNA (1)...(19): siRNA sense strand
aaagggaacugggauaaga

SEQ ID NO: 144645 - RNA, 19 nt, Homo sapiens
  misc_RNA (1)...(19): siRNA sense strand
gacaugggaccuucucaua

SEQ ID NO: 144646 - RNA, 19 nt, Homo sapiens
  misc_RNA (1)...(19): siRNA sense strand
ugacgaaccagauguuaaa

SEQ ID NO: 144647 - RNA, 19 nt, Homo sapiens
  misc_RNA (1)...(19): siRNA sense strand
gaagaggaacugcuguuuc

SEQ ID NO: 144648 - RNA, 19 nt, Homo sapiens
  misc_RNA (1)...(19): siRNA sense strand
gaaagaccgagaagccaaa

SEQ ID NO: 144649 - RNA, 19 nt, Homo sapiens
  misc_RNA (1)...(19): siRNA sense strand
caugggaccuucucauauc

SEQ ID NO: 144650 - RNA, 19 nt, Homo sapiens
  misc_RNA (1)...(19): siRNA sense strand
ggaagaggaacugcuguuu

SEQ ID NO: 144651 - RNA, 19 nt, Homo sapiens
  misc_RNA (1)...(19): siRNA sense strand
gagagagacagacgaagaa

SEQ ID NO: 144652 - RNA, 19 nt, Homo sapiens
  misc_RNA (1)...(19): siRNA sense strand
cagaagugauccagucuca

SEQ ID NO: 144653 - RNA, 19 nt, Homo sapiens
  misc_RNA (1)...(19): siRNA sense strand
caucaagccuaucaagaca

SEQ ID NO: 144654 - RNA, 19 nt, Homo sapiens
  misc_RNA (1)...(19): siRNA sense strand
ggaacgacacucgaaauau

SEQ ID NO: 144655 - RNA, 19 nt, Homo sapiens
  misc_RNA (1)...(19): siRNA sense strand
ggaggaagaggccaagaug

SEQ ID NO: 144656 - RNA, 19 nt, Homo sapiens
  misc_RNA (1)...(19): siRNA sense strand
gaaagaggagccacgagau

SEQ ID NO: 144657 - RNA, 19 nt, Homo sapiens
  misc_RNA (1)...(19): siRNA sense strand
caaggaagagcccaaggaa

SEQ ID NO: 144658 - RNA, 19 nt, Homo sapiens
  misc_RNA (1)...(19): siRNA sense strand
gaaggcuccucccaaagca

SEQ ID NO: 144659 - RNA, 19 nt, Homo sapiens
  misc_RNA (1)...(19): siRNA sense strand
ggacagguggugcucauca

SEQ ID NO: 144660 - RNA, 19 nt, Homo sapiens
  misc_RNA (1)...(19): siRNA sense strand
gucggaagaucaaggaaga

SEQ ID NO: 144661 - RNA, 19 nt, Homo sapiens
  misc_RNA (1)...(19): siRNA sense strand
aagaggaacugcuguuucu

SEQ ID NO: 144662 - RNA, 19 nt, Homo sapiens
  misc_RNA (1)...(19): siRNA sense strand
gaagaaguaacugucaaga

SEQ ID NO: 144663 - RNA, 19 nt, Homo sapiens
  misc_RNA (1)...(19): siRNA sense strand
ggaagagcccaaggaagaa

SEQ ID NO: 144664 - RNA, 19 nt, Homo sapiens
  misc_RNA (1)...(19): siRNA sense strand
ucaagccuaucaagacaga

SEQ ID NO: 144665 - RNA, 19 nt, Homo sapiens
  misc_RNA (1)...(19): siRNA sense strand
agacagacgaagaaacuaa

SEQ ID NO: 144666 - RNA, 19 nt, Homo sapiens
  misc_RNA (1)...(19): siRNA sense strand
aggaagagcccaaggaaga

SEQ ID NO: 144667 - RNA, 19 nt, Homo sapiens
  misc_RNA (1)...(19): siRNA sense strand
ggacaucaagccuaucaag

SEQ ID NO: 144668 - RNA, 19 nt, Homo sapiens
  misc_RNA (1)...(19): siRNA sense strand
gggauaagacaguggaugu

SEQ ID NO: 144669 - RNA, 19 nt, Homo sapiens
  misc_RNA (1)...(19): siRNA sense strand
ucucauaucaucaacauca

SEQ ID NO: 144670 - RNA, 19 nt, Homo sapiens
  misc_RNA (1)...(19): siRNA sense strand
gaagaaacuaaacagaucu

SEQ ID NO: 144671 - RNA, 19 nt, Homo sapiens
  misc_RNA (1)...(19): siRNA sense strand
gaggaagaggccaagauga

SEQ ID NO: 144672 - RNA, 19 nt, Homo sapiens
  misc_RNA (1)...(19): siRNA sense strand
ggaagaaaaugacgaacca

SEQ ID NO: 144673 - RNA, 19 nt, Homo sapiens
  misc_RNA (1)...(19): siRNA sense strand
gauaagacaguggaugugu

SEQ ID NO: 144674 - RNA, 19 nt, Homo sapiens
  misc_RNA (1)...(19): siRNA sense strand
gacagguggugcucaucaa

SEQ ID NO: 144675 - RNA, 19 nt, Homo sapiens
  misc_RNA (1)...(19): siRNA sense strand
gacagacgaagaaacuaaa

SEQ ID NO: 144676 - RNA, 19 nt, Homo sapiens
  misc_RNA (1)...(19): siRNA sense strand
gaggaacgacacucgaaau

SEQ ID NO: 144677 - RNA, 19 nt, Homo sapiens
  misc_RNA (1)...(19): siRNA sense strand
agaccgagaagccaaauug

SEQ ID NO: 144678 - RNA, 19 nt, Homo sapiens
  misc_RNA (1)...(19): siRNA sense strand
ggaagaaguaacugucaag

SEQ ID NO: 144679 - RNA, 19 nt, Homo sapiens
  misc_RNA (1)...(19): siRNA sense strand
gacaucaagccuaucaaga

SEQ ID NO: 144680 - RNA, 19 nt, Homo sapiens
  misc_RNA (1)...(19): siRNA sense strand
ggaagaggccaagaugaag

SEQ ID NO: 144681 - RNA, 19 nt, Homo sapiens
  misc_RNA (1)...(19): siRNA sense strand
agagagagacagacgaaga

SEQ ID NO: 144682 - RNA, 19 nt, Homo sapiens
  misc_RNA (1)...(19): siRNA sense strand
gaaaaugacgaaccagaug

SEQ ID NO: 144683 - RNA, 19 nt, Homo sapiens
  misc_RNA (1)...(19): siRNA sense strand
gaccuucucauaucaucaa

SEQ ID NO: 144684 - RNA, 19 nt, Homo sapiens
  misc_RNA (1)...(19): siRNA sense strand
gcaggagaaagaccgagaa

SEQ ID NO: 144685 - RNA, 19 nt, Homo sapiens
  misc_RNA (1)...(19): siRNA sense strand
ucaucaagcaggagaaaga

SEQ ID NO: 144686 - RNA, 19 nt, Homo sapiens
  misc_RNA (1)...(19): siRNA sense strand
aggaagaggccaagaugaa

SEQ ID NO: 144687 - RNA, 19 nt, Homo sapiens
  misc_RNA (1)...(19): siRNA sense strand
gccacgagaugaggaggaa

SEQ ID NO: 144688 - RNA, 19 nt, Homo sapiens
  misc_RNA (1)...(19): siRNA sense strand
aggaacgacacucgaaaua

SEQ ID NO: 144689 - RNA, 19 nt, Homo sapiens
  misc_RNA (1)...(19): siRNA sense strand
cccaggacaucaagccuau

SEQ ID NO: 144690 - RNA, 19 nt, Homo sapiens
  misc_RNA (1)...(19): siRNA sense strand
gaaccagauguuaaaccuu

SEQ ID NO: 144691 - RNA, 19 nt, Homo sapiens
  misc_RNA (1)...(19): siRNA sense strand
cgaaccagauguuaaaccu

SEQ ID NO: 144692 - RNA, 19 nt, Homo sapiens
  misc_RNA (1)...(19): siRNA sense strand
gaaggagaagcgugaaagg

SEQ ID NO: 144693 - RNA, 19 nt, Homo sapiens
  misc_RNA (1)...(19): siRNA sense strand
gacgaagaaacuaaacaga

SEQ ID NO: 144694 - RNA, 19 nt, Homo sapiens
  misc_RNA (1)...(19): siRNA sense strand
aaguaacugucaagaagga

SEQ ID NO: 144695 - RNA, 19 nt, Homo sapiens
  misc_RNA (1)...(19): siRNA sense strand
cagucucacuccaucuuug

SEQ ID NO: 144696 - RNA, 19 nt, Homo sapiens
  misc_RNA (1)...(19): siRNA sense strand
uaucaucagucggaagauc

SEQ ID NO: 144697 - RNA, 19 nt, Homo sapiens
  misc_RNA (1)...(19): siRNA sense strand
aaagaggagccacgagaug

SEQ ID NO: 144698 - RNA, 19 nt, Homo sapiens
  misc_RNA (1)...(19): siRNA sense strand
ccaaggaagaggacaugga

SEQ ID NO: 144699 - RNA, 19 nt, Homo sapiens
  misc_RNA (1)...(19): siRNA sense strand
ucaaggaagagcccaagga

SEQ ID NO: 144700 - RNA, 19 nt, Homo sapiens
  misc_RNA (1)...(19): siRNA sense strand
ccaaggaagaaguaacugu

SEQ ID NO: 144701 - RNA, 19 nt, Homo sapiens
  misc_RNA (1)...(19): siRNA sense strand
gcucaucaagcaggagaaa

SEQ ID NO: 144702 - RNA, 19 nt, Homo sapiens
  misc_RNA (1)...(19): siRNA sense strand
aagaaguaacugucaagaa

SEQ ID NO: 144703 - RNA, 19 nt, Homo sapiens
  misc_RNA (1)...(19): siRNA sense strand
aggaagaaguaacugucaa

SEQ ID NO: 144704 - RNA, 19 nt, Homo sapiens
  misc_RNA (1)...(19): siRNA sense strand
uaccugcugugaaagugaa

SEQ ID NO: 144705 - RNA, 19 nt, Homo sapiens
  misc_RNA (1)...(19): siRNA sense strand
gaagagcccaaggaagaag

SEQ ID NO: 144706 - RNA, 19 nt, Homo sapiens
  misc_RNA (1)...(19): siRNA sense strand
uacccuggcugaccugaca

SEQ ID NO: 144707 - RNA, 19 nt, Homo sapiens
  misc_RNA (1)...(19): siRNA sense strand
aagaggagccacgagauga

SEQ ID NO: 144708 - RNA, 19 nt, Homo sapiens
  misc_RNA (1)...(19): siRNA sense strand
cuucucauaucaucaacau

SEQ ID NO: 144709 - RNA, 19 nt, Homo sapiens
  misc_RNA (1)...(19): siRNA sense strand
gggaccuucucauaucauc

SEQ ID NO: 144710 - RNA, 19 nt, Homo sapiens
  misc_RNA (1)...(19): siRNA sense strand
gagacagacgaagaaacua

SEQ ID NO: 144711 - RNA, 19 nt, Homo sapiens
  misc_RNA (1)...(19): siRNA sense strand
gaagggugcaacuccucuu

SEQ ID NO: 144712 - RNA, 19 nt, Homo sapiens
  misc_RNA (1)...(19): siRNA sense strand
uaacugucaagaaggagaa

SEQ ID NO: 144713 - RNA, 19 nt, Homo sapiens
  misc_RNA (1)...(19): siRNA sense strand
caggacaucaagccuauca

SEQ ID NO: 144714 - RNA, 19 nt, Homo sapiens
  misc_RNA (1)...(19): siRNA sense strand
ugaggaacgacacucgaaa

SEQ ID NO: 144715 - RNA, 19 nt, Homo sapiens
  misc_RNA (1)...(19): siRNA sense strand
agagacagacgaagaaacu

SEQ ID NO: 144716 - RNA, 19 nt, Homo sapiens
  misc_RNA (1)...(19): siRNA sense strand
ggaucacaaacaccgguaa

SEQ ID NO: 144717 - RNA, 19 nt, Homo sapiens
  misc_RNA (1)...(19): siRNA sense strand
ccucuuggaucacaaacac

SEQ ID NO: 144718 - RNA, 19 nt, Homo sapiens
  misc_RNA (1)...(19): siRNA sense strand
gggucagguuggcaagcua

SEQ ID NO: 144719 - RNA, 19 nt, Homo sapiens
  misc_RNA (1)...(19): siRNA sense strand
ggauaagacaguggaugug

SEQ ID NO: 144720 - RNA, 19 nt, Homo sapiens
  misc_RNA (1)...(19): siRNA sense strand
acaugggaccuucucauau

SEQ ID NO: 144721 - RNA, 19 nt, Homo sapiens
  misc_RNA (1)...(19): siRNA sense strand
aauaucaucagucggaaga

SEQ ID NO: 144722 - RNA, 19 nt, Homo sapiens
  misc_RNA (1)...(19): siRNA sense strand
acgaagaaacuaaacagau

SEQ ID NO: 144723 - RNA, 19 nt, Homo sapiens
  misc_RNA (1)...(19): siRNA sense strand
ugggacacgugaagcacaa

SEQ ID NO: 144724 - RNA, 19 nt, Homo sapiens
  misc_RNA (1)...(19): siRNA sense strand
aaugacgaaccagauguua

SEQ ID NO: 144725 - RNA, 19 nt, Homo sapiens
  misc_RNA (1)...(19): siRNA sense strand
uggcagagaaugcuuguac

SEQ ID NO: 144726 - RNA, 19 nt, Homo sapiens
  misc_RNA (1)...(19): siRNA sense strand
ccagucucacuccaucuuu

SEQ ID NO: 144727 - RNA, 19 nt, Homo sapiens
  misc_RNA (1)...(19): siRNA sense strand
cauaccugcugugaaagug

SEQ ID NO: 144728 - RNA, 19 nt, Homo sapiens
  misc_RNA (1)...(19): siRNA sense strand
gaaagaagcuguggaaaua

SEQ ID NO: 144729 - RNA, 19 nt, Homo sapiens
  misc_RNA (1)...(19): siRNA sense strand
ggaaauagcuaaugagaaa

SEQ ID NO: 144730 - RNA, 19 nt, Homo sapiens
  misc_RNA (1)...(19): siRNA sense strand
gaagacagcacccauuuaa

SEQ ID NO: 144731 - RNA, 19 nt, Homo sapiens
  misc_RNA (1)...(19): siRNA sense strand
cagaacagcucauuucaaa

SEQ ID NO: 144732 - RNA, 19 nt, Homo sapiens
  misc_RNA (1)...(19): siRNA sense strand
gaauaugcaugucaaagaa

SEQ ID NO: 144733 - RNA, 19 nt, Homo sapiens
  misc_RNA (1)...(19): siRNA sense strand
gaaauaaccgggacaaaga

SEQ ID NO: 144734 - RNA, 19 nt, Homo sapiens
  misc_RNA (1)...(19): siRNA sense strand
agacacagcucaaaccuaa

SEQ ID NO: 144735 - RNA, 19 nt, Homo sapiens
  misc_RNA (1)...(19): siRNA sense strand
gaagagcaauccaucauca

SEQ ID NO: 144736 - RNA, 19 nt, Homo sapiens
  misc_RNA (1)...(19): siRNA sense strand
gaccaaaucuauaguugaa

SEQ ID NO: 144737 - RNA, 19 nt, Homo sapiens
  misc_RNA (1)...(19): siRNA sense strand
ggaauagccuugguacaaa

SEQ ID NO: 144738 - RNA, 19 nt, Homo sapiens
  misc_RNA (1)...(19): siRNA sense strand
cagcuuaccuucugaaaga

SEQ ID NO: 144739 - RNA, 19 nt, Homo sapiens
  misc_RNA (1)...(19): siRNA sense strand
gacagcagcuucuuaacuu

SEQ ID NO: 144740 - RNA, 19 nt, Homo sapiens
  misc_RNA (1)...(19): siRNA sense strand
ucaaagaaaugcacacaug

SEQ ID NO: 144741 - RNA, 19 nt, Homo sapiens
  misc_RNA (1)...(19): siRNA sense strand
ugaaagauguggcuaagga

SEQ ID NO: 144742 - RNA, 19 nt, Homo sapiens
  misc_RNA (1)...(19): siRNA sense strand
caggaaagguguuggauca

SEQ ID NO: 144743 - RNA, 19 nt, Homo sapiens
  misc_RNA (1)...(19): siRNA sense strand
gagaccaaaucuauaguug

SEQ ID NO: 144744 - RNA, 19 nt, Homo sapiens
  misc_RNA (1)...(19): siRNA sense strand
gaucacuggugcaucauga

SEQ ID NO: 144745 - RNA, 19 nt, Homo sapiens
  misc_RNA (1)...(19): siRNA sense strand
guggagggcuguaaugcua

SEQ ID NO: 144746 - RNA, 19 nt, Homo sapiens
  misc_RNA (1)...(19): siRNA sense strand
ggagagaccaaaucuauag

SEQ ID NO: 144747 - RNA, 19 nt, Homo sapiens
  misc_RNA (1)...(19): siRNA sense strand
caaccagccuucccaaaca

SEQ ID NO: 144748 - RNA, 19 nt, Homo sapiens
  misc_RNA (1)...(19): siRNA sense strand
ccaauguaguguuugauau

SEQ ID NO: 144749 - RNA, 19 nt, Homo sapiens
  misc_RNA (1)...(19): siRNA sense strand
acuggacacuucaggauua

SEQ ID NO: 144750 - RNA, 19 nt, Homo sapiens
  misc_RNA (1)...(19): siRNA sense strand
gagaguagcagccauucuu

SEQ ID NO: 144751 - RNA, 19 nt, Homo sapiens
  misc_RNA (1)...(19): siRNA sense strand
gagcaggccacacacaauu

SEQ ID NO: 144752 - RNA, 19 nt, Homo sapiens
  misc_RNA (1)...(19): siRNA sense strand
cagcucagaugaagacaug

SEQ ID NO: 144753 - RNA, 19 nt, Homo sapiens
  misc_RNA (1)...(19): siRNA sense strand
ggacacuucaggauuauau

SEQ ID NO: 144754 - RNA, 19 nt, Homo sapiens
  misc_RNA (1)...(19): siRNA sense strand
ccaguccaauguaguguuu

SEQ ID NO: 144755 - RNA, 19 nt, Homo sapiens
  misc_RNA (1)...(19): siRNA sense strand
gaacagcucauuucaaacg

SEQ ID NO: 144756 - RNA, 19 nt, Homo sapiens
  misc_RNA (1)...(19): siRNA sense strand
ugacaaaggcacccucaaa

SEQ ID NO: 144757 - RNA, 19 nt, Homo sapiens
  misc_RNA (1)...(19): siRNA sense strand
gaccggcucuucagugugu

SEQ ID NO: 144758 - RNA, 19 nt, Homo sapiens
  misc_RNA (1)...(19): siRNA sense strand
uaaggaagccuaucaggau

SEQ ID NO: 144759 - RNA, 19 nt, Homo sapiens
  misc_RNA (1)...(19): siRNA sense strand
gcuguacucugaacuguag

SEQ ID NO: 144760 - RNA, 19 nt, Homo sapiens
  misc_RNA (1)...(19): siRNA sense strand
gagcauacaccagcauuga

SEQ ID NO: 144761 - RNA, 19 nt, Homo sapiens
  misc_RNA (1)...(19): siRNA sense strand
gaauagccuugguacaaag

SEQ ID NO: 144762 - RNA, 19 nt, Homo sapiens
  misc_RNA (1)...(19): siRNA sense strand
caacauugucacuaaguuu

SEQ ID NO: 144763 - RNA, 19 nt, Homo sapiens
  misc_RNA (1)...(19): siRNA sense strand
cgaaugggcagucugguuu

SEQ ID NO: 144764 - RNA, 19 nt, Homo sapiens
  misc_RNA (1)...(19): siRNA sense strand
caucgugaaucaguaauug

SEQ ID NO: 144765 - RNA, 19 nt, Homo sapiens
  misc_RNA (1)...(19): siRNA sense strand
gaaugggcagucugguuua

SEQ ID NO: 144766 - RNA, 19 nt, Homo sapiens
  misc_RNA (1)...(19): siRNA sense strand
caaaggaacaagucgaaug

SEQ ID NO: 144767 - RNA, 19 nt, Homo sapiens
  misc_RNA (1)...(19): siRNA sense strand
ggagcagcauguacaguca

SEQ ID NO: 144768 - RNA, 19 nt, Homo sapiens
  misc_RNA (1)...(19): siRNA sense strand
caaaagacauacaguaaca

SEQ ID NO: 144769 - RNA, 19 nt, Homo sapiens
  misc_RNA (1)...(19): siRNA sense strand
acaagaauaugcaugucaa

SEQ ID NO: 144770 - RNA, 19 nt, Homo sapiens
  misc_RNA (1)...(19): siRNA sense strand
caagccagguggagauugu

SEQ ID NO: 144771 - RNA, 19 nt, Homo sapiens
  misc_RNA (1)...(19): siRNA sense strand
gggcuguaaugcuaccuuu

SEQ ID NO: 144772 - RNA, 19 nt, Homo sapiens
  misc_RNA (1)...(19): siRNA sense strand
ugacuuucaugcugccuuu

SEQ ID NO: 144773 - RNA, 19 nt, Homo sapiens
  misc_RNA (1)...(19): siRNA sense strand
aagaagaaauccaggaagu

SEQ ID NO: 144774 - RNA, 19 nt, Homo sapiens
  misc_RNA (1)...(19): siRNA sense strand
ggaaagguguuggaucacu

SEQ ID NO: 144775 - RNA, 19 nt, Homo sapiens
  misc_RNA (1)...(19): siRNA sense strand
ugugacaucugcaagaaga

SEQ ID NO: 144776 - RNA, 19 nt, Homo sapiens
  misc_RNA (1)...(19): siRNA sense strand
gacacaaccucagcucaga

SEQ ID NO: 144777 - RNA, 19 nt, Homo sapiens
  misc_RNA (1)...(19): siRNA sense strand
cuacaaugccguccacuug

SEQ ID NO: 144778 - RNA, 19 nt, Homo sapiens
  misc_RNA (1)...(19): siRNA sense strand
ccacaccauuucagguuga

SEQ ID NO: 144779 - RNA, 19 nt, Homo sapiens
  misc_RNA (1)...(19): siRNA sense strand
gaagcaagaugagguucuc

SEQ ID NO: 144780 - RNA, 19 nt, Homo sapiens
  misc_RNA (1)...(19): siRNA sense strand
gagaggaauagccuuggua

SEQ ID NO: 144781 - RNA, 19 nt, Homo sapiens
  misc_RNA (1)...(19): siRNA sense strand
ccacagcaaauguagauau

SEQ ID NO: 144782 - RNA, 19 nt, Homo sapiens
  misc_RNA (1)...(19): siRNA sense strand
gaacucauggcaauucaag

SEQ ID NO: 144783 - RNA, 19 nt, Homo sapiens
  misc_RNA (1)...(19): siRNA sense strand
aagaugagguucuccagau

SEQ ID NO: 144784 - RNA, 19 nt, Homo sapiens
  misc_RNA (1)...(19): siRNA sense strand
gcucugagaacuacaagug

SEQ ID NO: 144785 - RNA, 19 nt, Homo sapiens
  misc_RNA (1)...(19): siRNA sense strand
gaaagauguggcuaaggaa

SEQ ID NO: 144786 - RNA, 19 nt, Homo sapiens
  misc_RNA (1)...(19): siRNA sense strand
ggagaguagugaagaucau

SEQ ID NO: 144787 - RNA, 19 nt, Homo sapiens
  misc_RNA (1)...(19): siRNA sense strand
agaaagaagcuguggaaau

SEQ ID NO: 144788 - RNA, 19 nt, Homo sapiens
  misc_RNA (1)...(19): siRNA sense strand
acaaugccguccacuugaa

SEQ ID NO: 144789 - RNA, 19 nt, Homo sapiens
  misc_RNA (1)...(19): siRNA sense strand
caggaagcauuggagagua

SEQ ID NO: 144790 - RNA, 19 nt, Homo sapiens
  misc_RNA (1)...(19): siRNA sense strand
uagcaaggcagauagaaga

SEQ ID NO: 144791 - RNA, 19 nt, Homo sapiens
  misc_RNA (1)...(19): siRNA sense strand
gacaaagaccucaggaaca

SEQ ID NO: 144792 - RNA, 19 nt, Homo sapiens
  misc_RNA (1)...(19): siRNA sense strand
cauggcaauucaagagaaa

SEQ ID NO: 144793 - RNA, 19 nt, Homo sapiens
  misc_RNA (1)...(19): siRNA sense strand
cagcaagccucccagacau

SEQ ID NO: 144794 - RNA, 19 nt, Homo sapiens
  misc_RNA (1)...(19): siRNA sense strand
gcacgugggucagcaugca

SEQ ID NO: 144795 - RNA, 19 nt, Homo sapiens
  misc_RNA (1)...(19): siRNA sense strand
caacaagccagguggagau

SEQ ID NO: 144796 - RNA, 19 nt, Homo sapiens
  misc_RNA (1)...(19): siRNA sense strand
gcccugccaucgugaauca

SEQ ID NO: 144797 - RNA, 19 nt, Homo sapiens
  misc_RNA (1)...(19): siRNA sense strand
guguucagcucccuaagga

SEQ ID NO: 144798 - RNA, 19 nt, Homo sapiens
  misc_RNA (1)...(19): siRNA sense strand
agacagcacccauuuaagu

SEQ ID NO: 144799 - RNA, 19 nt, Homo sapiens
  misc_RNA (1)...(19): siRNA sense strand
ggacuggacacuucaggau

SEQ ID NO: 144800 - RNA, 19 nt, Homo sapiens
  misc_RNA (1)...(19): siRNA sense strand
ucugucaucuucaaaggaa

SEQ ID NO: 144801 - RNA, 19 nt, Homo sapiens
  misc_RNA (1)...(19): siRNA sense strand
ggaaguccaguaugccuau

SEQ ID NO: 144802 - RNA, 19 nt, Homo sapiens
  misc_RNA (1)...(19): siRNA sense strand
ccaagaagaaauccaggaa

SEQ ID NO: 144803 - RNA, 19 nt, Homo sapiens
  misc_RNA (1)...(19): siRNA sense strand
acaaagaccucaggaacag

SEQ ID NO: 144804 - RNA, 19 nt, Homo sapiens
  misc_RNA (1)...(19): siRNA sense strand
agagcaauccaucaucaua

SEQ ID NO: 144805 - RNA, 19 nt, Homo sapiens
  misc_RNA (1)...(19): siRNA sense strand
gcagucugguuuacccaau

SEQ ID NO: 144806 - RNA, 19 nt, Homo sapiens
  misc_RNA (1)...(19): siRNA sense strand
agaagacagcacccauuua

SEQ ID NO: 144807 - RNA, 19 nt, Homo sapiens
  misc_RNA (1)...(19): siRNA sense strand
aagaagacagcacccauuu

SEQ ID NO: 144808 - RNA, 19 nt, Homo sapiens
  misc_RNA (1)...(19): siRNA sense strand
guccggaugcuauuacuaa

SEQ ID NO: 144809 - RNA, 19 nt, Homo sapiens
  misc_RNA (1)...(19): siRNA sense strand
guagauaucagggcuuuca

SEQ ID NO: 144810 - RNA, 19 nt, Homo sapiens
  misc_RNA (1)...(19): siRNA sense strand
uaaaccaccgucaguguga

SEQ ID NO: 144811 - RNA, 19 nt, Homo sapiens
  misc_RNA (1)...(19): siRNA sense strand
aaacagacacagccagaau

SEQ ID NO: 144812 - RNA, 19 nt, Homo sapiens
  misc_RNA (1)...(19): siRNA sense strand
gaaacagacacagccagaa

SEQ ID NO: 144813 - RNA, 19 nt, Homo sapiens
  misc_RNA (1)...(19): siRNA sense strand
agaauaugcaugucaaaga

SEQ ID NO: 144814 - RNA, 19 nt, Homo sapiens
  misc_RNA (1)...(19): siRNA sense strand
gcaaggcagauagaagaaa

SEQ ID NO: 144815 - RNA, 19 nt, Homo sapiens
  misc_RNA (1)...(19): siRNA sense strand
caguaugccuaucaaaaua

SEQ ID NO: 144816 - RNA, 19 nt, Homo sapiens
  misc_RNA (1)...(19): siRNA sense strand
gcacaugccaaugaacaga

SEQ ID NO: 144817 - RNA, 19 nt, Homo sapiens
  misc_RNA (1)...(19): siRNA sense strand
uaaacuguccggaugcuau

SEQ ID NO: 144818 - RNA, 19 nt, Homo sapiens
  misc_RNA (1)...(19): siRNA sense strand
ucauggcaauucaagagaa

SEQ ID NO: 144819 - RNA, 19 nt, Homo sapiens
  misc_RNA (1)...(19): siRNA sense strand
cagucugguuuacccaaua

SEQ ID NO: 144820 - RNA, 19 nt, Homo sapiens
  misc_RNA (1)...(19): siRNA sense strand
caaggcagauagaagaaaa

SEQ ID NO: 144821 - RNA, 19 nt, Homo sapiens
  misc_RNA (1)...(19): siRNA sense strand
gagggagacugagcauaca

SEQ ID NO: 144822 - RNA, 19 nt, Homo sapiens
  misc_RNA (1)...(19): siRNA sense strand
agagaaagaagcuguggaa

SEQ ID NO: 144823 - RNA, 19 nt, Homo sapiens
  misc_RNA (1)...(19): siRNA sense strand
uugaugcccuucccaagaa

SEQ ID NO: 144824 - RNA, 19 nt, Homo sapiens
  misc_RNA (1)...(19): siRNA sense strand
caucgaaggguguaacaug

SEQ ID NO: 144825 - RNA, 19 nt, Homo sapiens
  misc_RNA (1)...(19): siRNA sense strand
gcauacaccagcauugauc

SEQ ID NO: 144826 - RNA, 19 nt, Homo sapiens
  misc_RNA (1)...(19): siRNA sense strand
cccauaaccugucaucucu

SEQ ID NO: 144827 - RNA, 19 nt, Homo sapiens
  misc_RNA (1)...(19): siRNA sense strand
ggaagccuaucaggaugug

SEQ ID NO: 144828 - RNA, 19 nt, Homo sapiens
  misc_RNA (1)...(19): siRNA sense strand
gcaaaucacugaaguacua

SEQ ID NO: 144829 - RNA, 19 nt, Homo sapiens
  misc_RNA (1)...(19): siRNA sense strand
gaaaguguguucagaauca

SEQ ID NO: 144830 - RNA, 19 nt, Homo sapiens
  misc_RNA (1)...(19): siRNA sense strand
gaacuuauuugguugaaug

SEQ ID NO: 144831 - RNA, 19 nt, Homo sapiens
  misc_RNA (1)...(19): siRNA sense strand
ggaaagagaugauuugcau

SEQ ID NO: 144832 - RNA, 19 nt, Homo sapiens
  misc_RNA (1)...(19): siRNA sense strand
ccaaagaagcuacugauua

SEQ ID NO: 144833 - RNA, 19 nt, Homo sapiens
  misc_RNA (1)...(19): siRNA sense strand
gaaggacuaugaauuacaa

SEQ ID NO: 144834 - RNA, 19 nt, Homo sapiens
  misc_RNA (1)...(19): siRNA sense strand
agacaaagcucaugauauc

SEQ ID NO: 144835 - RNA, 19 nt, Homo sapiens
  misc_RNA (1)...(19): siRNA sense strand
cagcagaucucauuauuca

SEQ ID NO: 144836 - RNA, 19 nt, Homo sapiens
  misc_RNA (1)...(19): siRNA sense strand
caaagaagcuacugauuac

SEQ ID NO: 144837 - RNA, 19 nt, Homo sapiens
  misc_RNA (1)...(19): siRNA sense strand
gaacaugaaccaagucuau

SEQ ID NO: 144838 - RNA, 19 nt, Homo sapiens
  misc_RNA (1)...(19): siRNA sense strand
caagaggaaucaguuuaua

SEQ ID NO: 144839 - RNA, 19 nt, Homo sapiens
  misc_RNA (1)...(19): siRNA sense strand
caaaugacagcaccucuua

SEQ ID NO: 144840 - RNA, 19 nt, Homo sapiens
  misc_RNA (1)...(19): siRNA sense strand
caaagacgaugaauguguu

SEQ ID NO: 144841 - RNA, 19 nt, Homo sapiens
  misc_RNA (1)...(19): siRNA sense strand
uaaauuugcuggugauuca

SEQ ID NO: 144842 - RNA, 19 nt, Homo sapiens
  misc_RNA (1)...(19): siRNA sense strand
agaaauugcuggguauaua

SEQ ID NO: 144843 - RNA, 19 nt, Homo sapiens
  misc_RNA (1)...(19): siRNA sense strand
aggaaucacucaaaguuua

SEQ ID NO: 144844 - RNA, 19 nt, Homo sapiens
  misc_RNA (1)...(19): siRNA sense strand
gaacagacaaagcucauga

SEQ ID NO: 144845 - RNA, 19 nt, Homo sapiens
  misc_RNA (1)...(19): siRNA sense strand
gguauauacuugaauguga

SEQ ID NO: 144846 - RNA, 19 nt, Homo sapiens
  misc_RNA (1)...(19): siRNA sense strand
uaaaucaguucaggagaua

SEQ ID NO: 144847 - RNA, 19 nt, Homo sapiens
  misc_RNA (1)...(19): siRNA sense strand
gaauuugaaucuagucuca

SEQ ID NO: 144848 - RNA, 19 nt, Homo sapiens
  misc_RNA (1)...(19): siRNA sense strand
gaaauuauggccuuaagga

SEQ ID NO: 144849 - RNA, 19 nt, Homo sapiens
  misc_RNA (1)...(19): siRNA sense strand
ccaggcagaucaauuggua

SEQ ID NO: 144850 - RNA, 19 nt, Homo sapiens
  misc_RNA (1)...(19): siRNA sense strand
aaacuaaacugugugaaga

SEQ ID NO: 144851 - RNA, 19 nt, Homo sapiens
  misc_RNA (1)...(19): siRNA sense strand
caauguggcuucaauaaag

SEQ ID NO: 144852 - RNA, 19 nt, Homo sapiens
  misc_RNA (1)...(19): siRNA sense strand
uaaacugacuuaugcagaa

SEQ ID NO: 144853 - RNA, 19 nt, Homo sapiens
  misc_RNA (1)...(19): siRNA sense strand
agaagcuacugauuacuua

SEQ ID NO: 144854 - RNA, 19 nt, Homo sapiens
  misc_RNA (1)...(19): siRNA sense strand
gcagaacaguacucagcua

SEQ ID NO: 144855 - RNA, 19 nt, Homo sapiens
  misc_RNA (1)...(19): siRNA sense strand
ugaagaagaagcaguuaua

SEQ ID NO: 144856 - RNA, 19 nt, Homo sapiens
  misc_RNA (1)...(19): siRNA sense strand
uagcaaaccuaaugggaaa

SEQ ID NO: 144857 - RNA, 19 nt, Homo sapiens
  misc_RNA (1)...(19): siRNA sense strand
gaguagagccaaauucauu

SEQ ID NO: 144858 - RNA, 19 nt, Homo sapiens
  misc_RNA (1)...(19): siRNA sense strand
gaauugagcaacaguauca

SEQ ID NO: 144859 - RNA, 19 nt, Homo sapiens
  misc_RNA (1)...(19): siRNA sense strand
caacugaagccaaggaauu

SEQ ID NO: 144860 - RNA, 19 nt, Homo sapiens
  misc_RNA (1)...(19): siRNA sense strand
gaauuggguugaugagaug

SEQ ID NO: 144861 - RNA, 19 nt, Homo sapiens
  misc_RNA (1)...(19): siRNA sense strand
ggagugcaguuucagaaug

SEQ ID NO: 144862 - RNA, 19 nt, Homo sapiens
  misc_RNA (1)...(19): siRNA sense strand
caugguagauucacaacaa

SEQ ID NO: 144863 - RNA, 19 nt, Homo sapiens
  misc_RNA (1)...(19): siRNA sense strand
gcaauggagaucugaagua

SEQ ID NO: 144864 - RNA, 19 nt, Homo sapiens
  misc_RNA (1)...(19): siRNA sense strand
uaaacugugugaagaagaa

SEQ ID NO: 144865 - RNA, 19 nt, Homo sapiens
  misc_RNA (1)...(19): siRNA sense strand
ccaggaaucccaagucuuu

SEQ ID NO: 144866 - RNA, 19 nt, Homo sapiens
  misc_RNA (1)...(19): siRNA sense strand
ucccuaaccucuucuagua

SEQ ID NO: 144867 - RNA, 19 nt, Homo sapiens
  misc_RNA (1)...(19): siRNA sense strand
gaacaggagaaacuaaaga

SEQ ID NO: 144868 - RNA, 19 nt, Homo sapiens
  misc_RNA (1)...(19): siRNA sense strand
cagaauguccugacucuuu

SEQ ID NO: 144869 - RNA, 19 nt, Homo sapiens
  misc_RNA (1)...(19): siRNA sense strand
gagcaacaguaucagaaug

SEQ ID NO: 144870 - RNA, 19 nt, Homo sapiens
  misc_RNA (1)...(19): siRNA sense strand
caggauuaguuccaaauuu

SEQ ID NO: 144871 - RNA, 19 nt, Homo sapiens
  misc_RNA (1)...(19): siRNA sense strand
gcagaucaauugguacaga

SEQ ID NO: 144872 - RNA, 19 nt, Homo sapiens
  misc_RNA (1)...(19): siRNA sense strand
gaccuaaggacucgauaua

SEQ ID NO: 144873 - RNA, 19 nt, Homo sapiens
  misc_RNA (1)...(19): siRNA sense strand
gcaauguggcuucaauaaa

SEQ ID NO: 144874 - RNA, 19 nt, Homo sapiens
  misc_RNA (1)...(19): siRNA sense strand
ccaaauucauugcaaacuu

SEQ ID NO: 144875 - RNA, 19 nt, Homo sapiens
  misc_RNA (1)...(19): siRNA sense strand
guacucagcuacagugaag

SEQ ID NO: 144876 - RNA, 19 nt, Homo sapiens
  misc_RNA (1)...(19): siRNA sense strand
gcagauugacaacagguua

SEQ ID NO: 144877 - RNA, 19 nt, Homo sapiens
  misc_RNA (1)...(19): siRNA sense strand
ugggaacaaucacaaauaa

SEQ ID NO: 144878 - RNA, 19 nt, Homo sapiens
  misc_RNA (1)...(19): siRNA sense strand
gcaagaggaaucaguuuau

SEQ ID NO: 144879 - RNA, 19 nt, Homo sapiens
  misc_RNA (1)...(19): siRNA sense strand
gagugcaguuucagaauga

SEQ ID NO: 144880 - RNA, 19 nt, Homo sapiens
  misc_RNA (1)...(19): siRNA sense strand
gagcagcuacuucuagaaa

SEQ ID NO: 144881 - RNA, 19 nt, Homo sapiens
  misc_RNA (1)...(19): siRNA sense strand
guacagauucuuauugaug

SEQ ID NO: 144882 - RNA, 19 nt, Homo sapiens
  misc_RNA (1)...(19): siRNA sense strand
gaaccaagucuauucuaug

SEQ ID NO: 144883 - RNA, 19 nt, Homo sapiens
  misc_RNA (1)...(19): siRNA sense strand
ggaacaaucacaaauaagu

SEQ ID NO: 144884 - RNA, 19 nt, Homo sapiens
  misc_RNA (1)...(19): siRNA sense strand
ggaaucaguuuauaaucuc

SEQ ID NO: 144885 - RNA, 19 nt, Homo sapiens
  misc_RNA (1)...(19): siRNA sense strand
gcaguauuaucaagaacuu

SEQ ID NO: 144886 - RNA, 19 nt, Homo sapiens
  misc_RNA (1)...(19): siRNA sense strand
guugaaagccauuuagaaa

SEQ ID NO: 144887 - RNA, 19 nt, Homo sapiens
  misc_RNA (1)...(19): siRNA sense strand
gcucagauuugccaagugu

SEQ ID NO: 144888 - RNA, 19 nt, Homo sapiens
  misc_RNA (1)...(19): siRNA sense strand
gagccaaauucauugcaaa

SEQ ID NO: 144889 - RNA, 19 nt, Homo sapiens
  misc_RNA (1)...(19): siRNA sense strand
gcaaaacucuugaauacau

SEQ ID NO: 144890 - RNA, 19 nt, Homo sapiens
  misc_RNA (1)...(19): siRNA sense strand
gagaugauuugcaugaaag

SEQ ID NO: 144891 - RNA, 19 nt, Homo sapiens
  misc_RNA (1)...(19): siRNA sense strand
uuacaaagacgaugaaugu

SEQ ID NO: 144892 - RNA, 19 nt, Homo sapiens
  misc_RNA (1)...(19): siRNA sense strand
ugagagaacuugaucaaaa

SEQ ID NO: 144893 - RNA, 19 nt, Homo sapiens
  misc_RNA (1)...(19): siRNA sense strand
gaaacuaaacugugugaag

SEQ ID NO: 144894 - RNA, 19 nt, Homo sapiens
  misc_RNA (1)...(19): siRNA sense strand
ggaaucacucaaaguuuaa

SEQ ID NO: 144895 - RNA, 19 nt, Homo sapiens
  misc_RNA (1)...(19): siRNA sense strand
gaacaguacucagcuacag

SEQ ID NO: 144896 - RNA, 19 nt, Homo sapiens
  misc_RNA (1)...(19): siRNA sense strand
gaacaaucacaaauaagug

SEQ ID NO: 144897 - RNA, 19 nt, Homo sapiens
  misc_RNA (1)...(19): siRNA sense strand
gaaguacagcugugauaga

SEQ ID NO: 144898 - RNA, 19 nt, Homo sapiens
  misc_RNA (1)...(19): siRNA sense strand
gcuuaugacuggagugaga

SEQ ID NO: 144899 - RNA, 19 nt, Homo sapiens
  misc_RNA (1)...(19): siRNA sense strand
gacagcaccucuuaaacug

SEQ ID NO: 144900 - RNA, 19 nt, Homo sapiens
  misc_RNA (1)...(19): siRNA sense strand
gggcugacccagaguuuaa

SEQ ID NO: 144901 - RNA, 19 nt, Homo sapiens
  misc_RNA (1)...(19): siRNA sense strand
gaaaaccccuucuaaaguc

SEQ ID NO: 144902 - RNA, 19 nt, Homo sapiens
  misc_RNA (1)...(19): siRNA sense strand
agugaaggacuaugaauua

SEQ ID NO: 144903 - RNA, 19 nt, Homo sapiens
  misc_RNA (1)...(19): siRNA sense strand
gaaacuacucagagaaaga

SEQ ID NO: 144904 - RNA, 19 nt, Homo sapiens
  misc_RNA (1)...(19): siRNA sense strand
uggaacgacuuaaagauga

SEQ ID NO: 144905 - RNA, 19 nt, Homo sapiens
  misc_RNA (1)...(19): siRNA sense strand
cuacaucucugaaguucga

SEQ ID NO: 144906 - RNA, 19 nt, Homo sapiens
  misc_RNA (1)...(19): siRNA sense strand
gagagaaacaccaacauag

SEQ ID NO: 144907 - RNA, 19 nt, Homo sapiens
  misc_RNA (1)...(19): siRNA sense strand
ugaauuggguugaugagau

SEQ ID NO: 144908 - RNA, 19 nt, Homo sapiens
  misc_RNA (1)...(19): siRNA sense strand
gaaauuuguucaggaucuu

SEQ ID NO: 144909 - RNA, 19 nt, Homo sapiens
  misc_RNA (1)...(19): siRNA sense strand
aaauuucaguucaggagua

SEQ ID NO: 144910 - RNA, 19 nt, Homo sapiens
  misc_RNA (1)...(19): siRNA sense strand
caaauaagugugaggaguu

SEQ ID NO: 144911 - RNA, 19 nt, Homo sapiens
  misc_RNA (1)...(19): siRNA sense strand
uaacacaacuggaaaagga

SEQ ID NO: 144912 - RNA, 19 nt, Homo sapiens
  misc_RNA (1)...(19): siRNA sense strand
gagauaaccauuuacaaag

SEQ ID NO: 144913 - RNA, 19 nt, Homo sapiens
  misc_RNA (1)...(19): siRNA sense strand
ucaaagcuaucugugacua

SEQ ID NO: 144914 - RNA, 19 nt, Homo sapiens
  misc_RNA (1)...(19): siRNA sense strand
aaacuucuauuccgaucaa

SEQ ID NO: 144915 - RNA, 19 nt, Homo sapiens
  misc_RNA (1)...(19): siRNA sense strand
ugagagaaacaccaacaua

SEQ ID NO: 144916 - RNA, 19 nt, Homo sapiens
  misc_RNA (1)...(19): siRNA sense strand
caaagaagcuaaaaucagu

SEQ ID NO: 144917 - RNA, 19 nt, Homo sapiens
  misc_RNA (1)...(19): siRNA sense strand
aggaggaaguugcuuauga

SEQ ID NO: 144918 - RNA, 19 nt, Homo sapiens
  misc_RNA (1)...(19): siRNA sense strand
aggagaaacuaaagaaaga

SEQ ID NO: 144919 - RNA, 19 nt, Homo sapiens
  misc_RNA (1)...(19): siRNA sense strand
gaagaucggcugauuagac

SEQ ID NO: 144920 - RNA, 19 nt, Homo sapiens
  misc_RNA (1)...(19): siRNA sense strand
gauauaacacaacuggaaa

SEQ ID NO: 144921 - RNA, 19 nt, Homo sapiens
  misc_RNA (1)...(19): siRNA sense strand
guacagcaaaggacgcaua

SEQ ID NO: 144922 - RNA, 19 nt, Homo sapiens
  misc_RNA (1)...(19): siRNA sense strand
gaggaugaguugcagaaag

SEQ ID NO: 144923 - RNA, 19 nt, Homo sapiens
  misc_RNA (1)...(19): siRNA sense strand
caauggagaucugaaguag

SEQ ID NO: 144924 - RNA, 19 nt, Homo sapiens
  misc_RNA (1)...(19): siRNA sense strand
ugaaccaagucuauucuau

SEQ ID NO: 144925 - RNA, 19 nt, Homo sapiens
  misc_RNA (1)...(19): siRNA sense strand
cuacagacaaauugagaua

SEQ ID NO: 144926 - RNA, 19 nt, Homo sapiens
  misc_RNA (1)...(19): siRNA sense strand
gcaguggagcuggaucuua

SEQ ID NO: 144927 - RNA, 19 nt, Homo sapiens
  misc_RNA (1)...(19): siRNA sense strand
ucacucucaugacacaaua

SEQ ID NO: 144928 - RNA, 19 nt, Homo sapiens
  misc_RNA (1)...(19): siRNA sense strand
gcaaaucacugaaguacua

SEQ ID NO: 144929 - RNA, 19 nt, Homo sapiens
  misc_RNA (1)...(19): siRNA sense strand
gaaaguguguucagaauca

SEQ ID NO: 144930 - RNA, 19 nt, Homo sapiens
  misc_RNA (1)...(19): siRNA sense strand
gaacuuauuugguugaaug

SEQ ID NO: 144931 - RNA, 19 nt, Homo sapiens
  misc_RNA (1)...(19): siRNA sense strand
ggaaagagaugauuugcau

SEQ ID NO: 144932 - RNA, 19 nt, Homo sapiens
  misc_RNA (1)...(19): siRNA sense strand
ccaaagaagcuacugauua

SEQ ID NO: 144933 - RNA, 19 nt, Homo sapiens
  misc_RNA (1)...(19): siRNA sense strand
gaaggacuaugaauuacaa

SEQ ID NO: 144934 - RNA, 19 nt, Homo sapiens
  misc_RNA (1)...(19): siRNA sense strand
agacaaagcucaugauauc

SEQ ID NO: 144935 - RNA, 19 nt, Homo sapiens
  misc_RNA (1)...(19): siRNA sense strand
cagcagaucucauuauuca

SEQ ID NO: 144936 - RNA, 19 nt, Homo sapiens
  misc_RNA (1)...(19): siRNA sense strand
caaagaagcuacugauuac

SEQ ID NO: 144937 - RNA, 19 nt, Homo sapiens
  misc_RNA (1)...(19): siRNA sense strand
gaacaugaaccaagucuau

SEQ ID NO: 144938 - RNA, 19 nt, Homo sapiens
  misc_RNA (1)...(19): siRNA sense strand
caagaggaaucaguuuaua

SEQ ID NO: 144939 - RNA, 19 nt, Homo sapiens
  misc_RNA (1)...(19): siRNA sense strand
caaaugacagcaccucuua

SEQ ID NO: 144940 - RNA, 19 nt, Homo sapiens
  misc_RNA (1)...(19): siRNA sense strand
caaagacgaugaauguguu

SEQ ID NO: 144941 - RNA, 19 nt, Homo sapiens
  misc_RNA (1)...(19): siRNA sense strand
uaaauuugcuggugauuca

SEQ ID NO: 144942 - RNA, 19 nt, Homo sapiens
  misc_RNA (1)...(19): siRNA sense strand
agaaauugcuggguauaua

SEQ ID NO: 144943 - RNA, 19 nt, Homo sapiens
  misc_RNA (1)...(19): siRNA sense strand
aggaaucacucaaaguuua

SEQ ID NO: 144944 - RNA, 19 nt, Homo sapiens
  misc_RNA (1)...(19): siRNA sense strand
gaacagacaaagcucauga

SEQ ID NO: 144945 - RNA, 19 nt, Homo sapiens
  misc_RNA (1)...(19): siRNA sense strand
gguauauacuugaauguga

SEQ ID NO: 144946 - RNA, 19 nt, Homo sapiens
  misc_RNA (1)...(19): siRNA sense strand
uaaaucaguucaggagaua

SEQ ID NO: 144947 - RNA, 19 nt, Homo sapiens
  misc_RNA (1)...(19): siRNA sense strand
gaauuugaaucuagucuca

SEQ ID NO: 144948 - RNA, 19 nt, Homo sapiens
  misc_RNA (1)...(19): siRNA sense strand
gaaauuauggccuuaagga

SEQ ID NO: 144949 - RNA, 19 nt, Homo sapiens
  misc_RNA (1)...(19): siRNA sense strand
ccaggcagaucaauuggua

SEQ ID NO: 144950 - RNA, 19 nt, Homo sapiens
  misc_RNA (1)...(19): siRNA sense strand
aaacuaaacugugugaaga

SEQ ID NO: 144951 - RNA, 19 nt, Homo sapiens
  misc_RNA (1)...(19): siRNA sense strand
caauguggcuucaauaaag

SEQ ID NO: 144952 - RNA, 19 nt, Homo sapiens
  misc_RNA (1)...(19): siRNA sense strand
uaaacugacuuaugcagaa

SEQ ID NO: 144953 - RNA, 19 nt, Homo sapiens
  misc_RNA (1)...(19): siRNA sense strand
agaagcuacugauuacuua

SEQ ID NO: 144954 - RNA, 19 nt, Homo sapiens
  misc_RNA (1)...(19): siRNA sense strand
gcagaacaguacucagcua

SEQ ID NO: 144955 - RNA, 19 nt, Homo sapiens
  misc_RNA (1)...(19): siRNA sense strand
ugaagaagaagcaguuaua

SEQ ID NO: 144956 - RNA, 19 nt, Homo sapiens
  misc_RNA (1)...(19): siRNA sense strand
uagcaaaccuaaugggaaa

SEQ ID NO: 144957 - RNA, 19 nt, Homo sapiens
  misc_RNA (1)...(19): siRNA sense strand
gaguagagccaaauucauu

SEQ ID NO: 144958 - RNA, 19 nt, Homo sapiens
  misc_RNA (1)...(19): siRNA sense strand
gaauugagcaacaguauca

SEQ ID NO: 144959 - RNA, 19 nt, Homo sapiens
  misc_RNA (1)...(19): siRNA sense strand
caacugaagccaaggaauu

SEQ ID NO: 144960 - RNA, 19 nt, Homo sapiens
  misc_RNA (1)...(19): siRNA sense strand
gaauuggguugaugagaug

SEQ ID NO: 144961 - RNA, 19 nt, Homo sapiens
  misc_RNA (1)...(19): siRNA sense strand
ggagugcaguuucagaaug

SEQ ID NO: 144962 - RNA, 19 nt, Homo sapiens
  misc_RNA (1)...(19): siRNA sense strand
caugguagauucacaacaa

SEQ ID NO: 144963 - RNA, 19 nt, Homo sapiens
  misc_RNA (1)...(19): siRNA sense strand
gcaauggagaucugaagua

SEQ ID NO: 144964 - RNA, 19 nt, Homo sapiens
  misc_RNA (1)...(19): siRNA sense strand
uaaacugugugaagaagaa

SEQ ID NO: 144965 - RNA, 19 nt, Homo sapiens
  misc_RNA (1)...(19): siRNA sense strand
ccaggaaucccaagucuuu

SEQ ID NO: 144966 - RNA, 19 nt, Homo sapiens
  misc_RNA (1)...(19): siRNA sense strand
ucccuaaccucuucuagua

SEQ ID NO: 144967 - RNA, 19 nt, Homo sapiens
  misc_RNA (1)...(19): siRNA sense strand
gaacaggagaaacuaaaga

SEQ ID NO: 144968 - RNA, 19 nt, Homo sapiens
  misc_RNA (1)...(19): siRNA sense strand
cagaauguccugacucuuu

SEQ ID NO: 144969 - RNA, 19 nt, Homo sapiens
  misc_RNA (1)...(19): siRNA sense strand
gagcaacaguaucagaaug

SEQ ID NO: 144970 - RNA, 19 nt, Homo sapiens
  misc_RNA (1)...(19): siRNA sense strand
caggauuaguuccaaauuu

SEQ ID NO: 144971 - RNA, 19 nt, Homo sapiens
  misc_RNA (1)...(19): siRNA sense strand
gcagaucaauugguacaga

SEQ ID NO: 144972 - RNA, 19 nt, Homo sapiens
  misc_RNA (1)...(19): siRNA sense strand
gaccuaaggacucgauaua

SEQ ID NO: 144973 - RNA, 19 nt, Homo sapiens
  misc_RNA (1)...(19): siRNA sense strand
gcaauguggcuucaauaaa

SEQ ID NO: 144974 - RNA, 19 nt, Homo sapiens
  misc_RNA (1)...(19): siRNA sense strand
ccaaauucauugcaaacuu

SEQ ID NO: 144975 - RNA, 19 nt, Homo sapiens
  misc_RNA (1)...(19): siRNA sense strand
guacucagcuacagugaag

SEQ ID NO: 144976 - RNA, 19 nt, Homo sapiens
  misc_RNA (1)...(19): siRNA sense strand
gcagauugacaacagguua

SEQ ID NO: 144977 - RNA, 19 nt, Homo sapiens
  misc_RNA (1)...(19): siRNA sense strand
ugggaacaaucacaaauaa

SEQ ID NO: 144978 - RNA, 19 nt, Homo sapiens
  misc_RNA (1)...(19): siRNA sense strand
gcaagaggaaucaguuuau

SEQ ID NO: 144979 - RNA, 19 nt, Homo sapiens
  misc_RNA (1)...(19): siRNA sense strand
gagugcaguuucagaauga

SEQ ID NO: 144980 - RNA, 19 nt, Homo sapiens
  misc_RNA (1)...(19): siRNA sense strand
gagcagcuacuucuagaaa

SEQ ID NO: 144981 - RNA, 19 nt, Homo sapiens
  misc_RNA (1)...(19): siRNA sense strand
guacagauucuuauugaug

SEQ ID NO: 144982 - RNA, 19 nt, Homo sapiens
  misc_RNA (1)...(19): siRNA sense strand
gaaccaagucuauucuaug

SEQ ID NO: 144983 - RNA, 19 nt, Homo sapiens
  misc_RNA (1)...(19): siRNA sense strand
ggaacaaucacaaauaagu

SEQ ID NO: 144984 - RNA, 19 nt, Homo sapiens
  misc_RNA (1)...(19): siRNA sense strand
ggaaucaguuuauaaucuc

SEQ ID NO: 144985 - RNA, 19 nt, Homo sapiens
  misc_RNA (1)...(19): siRNA sense strand
gcaguauuaucaagaacuu

SEQ ID NO: 144986 - RNA, 19 nt, Homo sapiens
  misc_RNA (1)...(19): siRNA sense strand
guugaaagccauuuagaaa

SEQ ID NO: 144987 - RNA, 19 nt, Homo sapiens
  misc_RNA (1)...(19): siRNA sense strand
gcucagauuugccaagugu

SEQ ID NO: 144988 - RNA, 19 nt, Homo sapiens
  misc_RNA (1)...(19): siRNA sense strand
gagccaaauucauugcaaa

SEQ ID NO: 144989 - RNA, 19 nt, Homo sapiens
  misc_RNA (1)...(19): siRNA sense strand
gcaaaacucuugaauacau

SEQ ID NO: 144990 - RNA, 19 nt, Homo sapiens
  misc_RNA (1)...(19): siRNA sense strand
gagaugauuugcaugaaag

SEQ ID NO: 144991 - RNA, 19 nt, Homo sapiens
  misc_RNA (1)...(19): siRNA sense strand
uuacaaagacgaugaaugu

SEQ ID NO: 144992 - RNA, 19 nt, Homo sapiens
  misc_RNA (1)...(19): siRNA sense strand
ugagagaacuugaucaaaa

SEQ ID NO: 144993 - RNA, 19 nt, Homo sapiens
  misc_RNA (1)...(19): siRNA sense strand
gaaacuaaacugugugaag

SEQ ID NO: 144994 - RNA, 19 nt, Homo sapiens
  misc_RNA (1)...(19): siRNA sense strand
ggaaucacucaaaguuuaa

SEQ ID NO: 144995 - RNA, 19 nt, Homo sapiens
  misc_RNA (1)...(19): siRNA sense strand
gaacaguacucagcuacag

SEQ ID NO: 144996 - RNA, 19 nt, Homo sapiens
  misc_RNA (1)...(19): siRNA sense strand
gaacaaucacaaauaagug

SEQ ID NO: 144997 - RNA, 19 nt, Homo sapiens
  misc_RNA (1)...(19): siRNA sense strand
gaaguacagcugugauaga

SEQ ID NO: 144998 - RNA, 19 nt, Homo sapiens
  misc_RNA (1)...(19): siRNA sense strand
gcuuaugacuggagugaga

SEQ ID NO: 144999 - RNA, 19 nt, Homo sapiens
  misc_RNA (1)...(19): siRNA sense strand
gacagcaccucuuaaacug

SEQ ID NO: 145000 - RNA, 19 nt, Homo sapiens
  misc_RNA (1)...(19): siRNA sense strand
gggcugacccagaguuuaa

SEQ ID NO: 145001 - RNA, 19 nt, Homo sapiens
  misc_RNA (1)...(19): siRNA sense strand
gaaaaccccuucuaaaguc

SEQ ID NO: 145002 - RNA, 19 nt, Homo sapiens
  misc_RNA (1)...(19): siRNA sense strand
agugaaggacuaugaauua

SEQ ID NO: 145003 - RNA, 19 nt, Homo sapiens
  misc_RNA (1)...(19): siRNA sense strand
gaaacuacucagagaaaga

SEQ ID NO: 145004 - RNA, 19 nt, Homo sapiens
  misc_RNA (1)...(19): siRNA sense strand
uggaacgacuuaaagauga

SEQ ID NO: 145005 - RNA, 19 nt, Homo sapiens
  misc_RNA (1)...(19): siRNA sense strand
cuacaucucugaaguucga

SEQ ID NO: 145006 - RNA, 19 nt, Homo sapiens
  misc_RNA (1)...(19): siRNA sense strand
gagagaaacaccaacauag

SEQ ID NO: 145007 - RNA, 19 nt, Homo sapiens
  misc_RNA (1)...(19): siRNA sense strand
ugaauuggguugaugagau

SEQ ID NO: 145008 - RNA, 19 nt, Homo sapiens
  misc_RNA (1)...(19): siRNA sense strand
gaaauuuguucaggaucuu

SEQ ID NO: 145009 - RNA, 19 nt, Homo sapiens
  misc_RNA (1)...(19): siRNA sense strand
aaauuucaguucaggagua

SEQ ID NO: 145010 - RNA, 19 nt, Homo sapiens
  misc_RNA (1)...(19): siRNA sense strand
caaauaagugugaggaguu

SEQ ID NO: 145011 - RNA, 19 nt, Homo sapiens
  misc_RNA (1)...(19): siRNA sense strand
uaacacaacuggaaaagga

SEQ ID NO: 145012 - RNA, 19 nt, Homo sapiens
  misc_RNA (1)...(19): siRNA sense strand
gagauaaccauuuacaaag

SEQ ID NO: 145013 - RNA, 19 nt, Homo sapiens
  misc_RNA (1)...(19): siRNA sense strand
ucaaagcuaucugugacua

SEQ ID NO: 145014 - RNA, 19 nt, Homo sapiens
  misc_RNA (1)...(19): siRNA sense strand
aaacuucuauuccgaucaa

SEQ ID NO: 145015 - RNA, 19 nt, Homo sapiens
  misc_RNA (1)...(19): siRNA sense strand
ugagagaaacaccaacaua

SEQ ID NO: 145016 - RNA, 19 nt, Homo sapiens
  misc_RNA (1)...(19): siRNA sense strand
caaagaagcuaaaaucagu

SEQ ID NO: 145017 - RNA, 19 nt, Homo sapiens
  misc_RNA (1)...(19): siRNA sense strand
aggaggaaguugcuuauga

SEQ ID NO: 145018 - RNA, 19 nt, Homo sapiens
  misc_RNA (1)...(19): siRNA sense strand
aggagaaacuaaagaaaga

SEQ ID NO: 145019 - RNA, 19 nt, Homo sapiens
  misc_RNA (1)...(19): siRNA sense strand
gaagaucggcugauuagac

SEQ ID NO: 145020 - RNA, 19 nt, Homo sapiens
  misc_RNA (1)...(19): siRNA sense strand
gauauaacacaacuggaaa

SEQ ID NO: 145021 - RNA, 19 nt, Homo sapiens
  misc_RNA (1)...(19): siRNA sense strand
guacagcaaaggacgcaua

SEQ ID NO: 145022 - RNA, 19 nt, Homo sapiens
  misc_RNA (1)...(19): siRNA sense strand
gaggaugaguugcagaaag

SEQ ID NO: 145023 - RNA, 19 nt, Homo sapiens
  misc_RNA (1)...(19): siRNA sense strand
caauggagaucugaaguag

SEQ ID NO: 145024 - RNA, 19 nt, Homo sapiens
  misc_RNA (1)...(19): siRNA sense strand
ugaaccaagucuauucuau

SEQ ID NO: 145025 - RNA, 19 nt, Homo sapiens
  misc_RNA (1)...(19): siRNA sense strand
cuacagacaaauugagaua

SEQ ID NO: 145026 - RNA, 19 nt, Homo sapiens
  misc_RNA (1)...(19): siRNA sense strand
gcaguggagcuggaucuua

SEQ ID NO: 145027 - RNA, 19 nt, Homo sapiens
  misc_RNA (1)...(19): siRNA sense strand
ucacucucaugacacaaua

SEQ ID NO: 145028 - RNA, 19 nt, Homo sapiens
  misc_RNA (1)...(19): siRNA sense strand
gcaaaucacugaaguacua

SEQ ID NO: 145029 - RNA, 19 nt, Homo sapiens
  misc_RNA (1)...(19): siRNA sense strand
gaaaguguguucagaauca

SEQ ID NO: 145030 - RNA, 19 nt, Homo sapiens
  misc_RNA (1)...(19): siRNA sense strand
gaacuuauuugguugaaug

SEQ ID NO: 145031 - RNA, 19 nt, Homo sapiens
  misc_RNA (1)...(19): siRNA sense strand
ggaaagagaugauuugcau

SEQ ID NO: 145032 - RNA, 19 nt, Homo sapiens
  misc_RNA (1)...(19): siRNA sense strand
ccaaagaagcuacugauua

SEQ ID NO: 145033 - RNA, 19 nt, Homo sapiens
  misc_RNA (1)...(19): siRNA sense strand
gaaggacuaugaauuacaa

SEQ ID NO: 145034 - RNA, 19 nt, Homo sapiens
  misc_RNA (1)...(19): siRNA sense strand
agacaaagcucaugauauc

SEQ ID NO: 145035 - RNA, 19 nt, Homo sapiens
  misc_RNA (1)...(19): siRNA sense strand
cagcagaucucauuauuca

SEQ ID NO: 145036 - RNA, 19 nt, Homo sapiens
  misc_RNA (1)...(19): siRNA sense strand
caaagaagcuacugauuac

SEQ ID NO: 145037 - RNA, 19 nt, Homo sapiens
  misc_RNA (1)...(19): siRNA sense strand
gaacaugaaccaagucuau

SEQ ID NO: 145038 - RNA, 19 nt, Homo sapiens
  misc_RNA (1)...(19): siRNA sense strand
caagaggaaucaguuuaua

SEQ ID NO: 145039 - RNA, 19 nt, Homo sapiens
  misc_RNA (1)...(19): siRNA sense strand
caaaugacagcaccucuua

SEQ ID NO: 145040 - RNA, 19 nt, Homo sapiens
  misc_RNA (1)...(19): siRNA sense strand
caaagacgaugaauguguu

SEQ ID NO: 145041 - RNA, 19 nt, Homo sapiens
  misc_RNA (1)...(19): siRNA sense strand
uaaauuugcuggugauuca

SEQ ID NO: 145042 - RNA, 19 nt, Homo sapiens
  misc_RNA (1)...(19): siRNA sense strand
agaaauugcuggguauaua

SEQ ID NO: 145043 - RNA, 19 nt, Homo sapiens
  misc_RNA (1)...(19): siRNA sense strand
aggaaucacucaaaguuua

SEQ ID NO: 145044 - RNA, 19 nt, Homo sapiens
  misc_RNA (1)...(19): siRNA sense strand
gaacagacaaagcucauga

SEQ ID NO: 145045 - RNA, 19 nt, Homo sapiens
  misc_RNA (1)...(19): siRNA sense strand
gguauauacuugaauguga

SEQ ID NO: 145046 - RNA, 19 nt, Homo sapiens
  misc_RNA (1)...(19): siRNA sense strand
uaaaucaguucaggagaua

SEQ ID NO: 145047 - RNA, 19 nt, Homo sapiens
  misc_RNA (1)...(19): siRNA sense strand
gaauuugaaucuagucuca

SEQ ID NO: 145048 - RNA, 19 nt, Homo sapiens
  misc_RNA (1)...(19): siRNA sense strand
gaaauuauggccuuaagga

SEQ ID NO: 145049 - RNA, 19 nt, Homo sapiens
  misc_RNA (1)...(19): siRNA sense strand
ccaggcagaucaauuggua

SEQ ID NO: 145050 - RNA, 19 nt, Homo sapiens
  misc_RNA (1)...(19): siRNA sense strand
aaacuaaacugugugaaga

SEQ ID NO: 145051 - RNA, 19 nt, Homo sapiens
  misc_RNA (1)...(19): siRNA sense strand
caauguggcuucaauaaag

SEQ ID NO: 145052 - RNA, 19 nt, Homo sapiens
  misc_RNA (1)...(19): siRNA sense strand
uaaacugacuuaugcagaa

SEQ ID NO: 145053 - RNA, 19 nt, Homo sapiens
  misc_RNA (1)...(19): siRNA sense strand
agaagcuacugauuacuua

SEQ ID NO: 145054 - RNA, 19 nt, Homo sapiens
  misc_RNA (1)...(19): siRNA sense strand
gcagaacaguacucagcua

SEQ ID NO: 145055 - RNA, 19 nt, Homo sapiens
  misc_RNA (1)...(19): siRNA sense strand
ugaagaagaagcaguuaua

SEQ ID NO: 145056 - RNA, 19 nt, Homo sapiens
  misc_RNA (1)...(19): siRNA sense strand
uagcaaaccuaaugggaaa

SEQ ID NO: 145057 - RNA, 19 nt, Homo sapiens
  misc_RNA (1)...(19): siRNA sense strand
gaguagagccaaauucauu

SEQ ID NO: 145058 - RNA, 19 nt, Homo sapiens
  misc_RNA (1)...(19): siRNA sense strand
gaauugagcaacaguauca

SEQ ID NO: 145059 - RNA, 19 nt, Homo sapiens
  misc_RNA (1)...(19): siRNA sense strand
caacugaagccaaggaauu

SEQ ID NO: 145060 - RNA, 19 nt, Homo sapiens
  misc_RNA (1)...(19): siRNA sense strand
gaauuggguugaugagaug

SEQ ID NO: 145061 - RNA, 19 nt, Homo sapiens
  misc_RNA (1)...(19): siRNA sense strand
ggagugcaguuucagaaug

SEQ ID NO: 145062 - RNA, 19 nt, Homo sapiens
  misc_RNA (1)...(19): siRNA sense strand
caugguagauucacaacaa

SEQ ID NO: 145063 - RNA, 19 nt, Homo sapiens
  misc_RNA (1)...(19): siRNA sense strand
gcaauggagaucugaagua

SEQ ID NO: 145064 - RNA, 19 nt, Homo sapiens
  misc_RNA (1)...(19): siRNA sense strand
uaaacugugugaagaagaa

SEQ ID NO: 145065 - RNA, 19 nt, Homo sapiens
  misc_RNA (1)...(19): siRNA sense strand
ccaggaaucccaagucuuu

SEQ ID NO: 145066 - RNA, 19 nt, Homo sapiens
  misc_RNA (1)...(19): siRNA sense strand
ucccuaaccucuucuagua

SEQ ID NO: 145067 - RNA, 19 nt, Homo sapiens
  misc_RNA (1)...(19): siRNA sense strand
gaacaggagaaacuaaaga

SEQ ID NO: 145068 - RNA, 19 nt, Homo sapiens
  misc_RNA (1)...(19): siRNA sense strand
cagaauguccugacucuuu

SEQ ID NO: 145069 - RNA, 19 nt, Homo sapiens
  misc_RNA (1)...(19): siRNA sense strand
gagcaacaguaucagaaug

SEQ ID NO: 145070 - RNA, 19 nt, Homo sapiens
  misc_RNA (1)...(19): siRNA sense strand
caggauuaguuccaaauuu

SEQ ID NO: 145071 - RNA, 19 nt, Homo sapiens
  misc_RNA (1)...(19): siRNA sense strand
gcagaucaauugguacaga

SEQ ID NO: 145072 - RNA, 19 nt, Homo sapiens
  misc_RNA (1)...(19): siRNA sense strand
gaccuaaggacucgauaua

SEQ ID NO: 145073 - RNA, 19 nt, Homo sapiens
  misc_RNA (1)...(19): siRNA sense strand
gcaauguggcuucaauaaa

SEQ ID NO: 145074 - RNA, 19 nt, Homo sapiens
  misc_RNA (1)...(19): siRNA sense strand
ccaaauucauugcaaacuu

SEQ ID NO: 145075 - RNA, 19 nt, Homo sapiens
  misc_RNA (1)...(19): siRNA sense strand
guacucagcuacagugaag

SEQ ID NO: 145076 - RNA, 19 nt, Homo sapiens
  misc_RNA (1)...(19): siRNA sense strand
gcagauugacaacagguua

SEQ ID NO: 145077 - RNA, 19 nt, Homo sapiens
  misc_RNA (1)...(19): siRNA sense strand
ugggaacaaucacaaauaa

SEQ ID NO: 145078 - RNA, 19 nt, Homo sapiens
  misc_RNA (1)...(19): siRNA sense strand
gcaagaggaaucaguuuau

SEQ ID NO: 145079 - RNA, 19 nt, Homo sapiens
  misc_RNA (1)...(19): siRNA sense strand
gagugcaguuucagaauga

SEQ ID NO: 145080 - RNA, 19 nt, Homo sapiens
  misc_RNA (1)...(19): siRNA sense strand
gagcagcuacuucuagaaa

SEQ ID NO: 145081 - RNA, 19 nt, Homo sapiens
  misc_RNA (1)...(19): siRNA sense strand
guacagauucuuauugaug

SEQ ID NO: 145082 - RNA, 19 nt, Homo sapiens
  misc_RNA (1)...(19): siRNA sense strand
gaaccaagucuauucuaug

SEQ ID NO: 145083 - RNA, 19 nt, Homo sapiens
  misc_RNA (1)...(19): siRNA sense strand
ggaacaaucacaaauaagu

SEQ ID NO: 145084 - RNA, 19 nt, Homo sapiens
  misc_RNA (1)...(19): siRNA sense strand
ggaaucaguuuauaaucuc

SEQ ID NO: 145085 - RNA, 19 nt, Homo sapiens
  misc_RNA (1)...(19): siRNA sense strand
gcaguauuaucaagaacuu

SEQ ID NO: 145086 - RNA, 19 nt, Homo sapiens
  misc_RNA (1)...(19): siRNA sense strand
guugaaagccauuuagaaa

SEQ ID NO: 145087 - RNA, 19 nt, Homo sapiens
  misc_RNA (1)...(19): siRNA sense strand
gcucagauuugccaagugu

SEQ ID NO: 145088 - RNA, 19 nt, Homo sapiens
  misc_RNA (1)...(19): siRNA sense strand
gagccaaauucauugcaaa

SEQ ID NO: 145089 - RNA, 19 nt, Homo sapiens
  misc_RNA (1)...(19): siRNA sense strand
gcaaaacucuugaauacau

SEQ ID NO: 145090 - RNA, 19 nt, Homo sapiens
  misc_RNA (1)...(19): siRNA sense strand
gagaugauuugcaugaaag

SEQ ID NO: 145091 - RNA, 19 nt, Homo sapiens
  misc_RNA (1)...(19): siRNA sense strand
uuacaaagacgaugaaugu

SEQ ID NO: 145092 - RNA, 19 nt, Homo sapiens
  misc_RNA (1)...(19): siRNA sense strand
ugagagaacuugaucaaaa

SEQ ID NO: 145093 - RNA, 19 nt, Homo sapiens
  misc_RNA (1)...(19): siRNA sense strand
gaaacuaaacugugugaag

SEQ ID NO: 145094 - RNA, 19 nt, Homo sapiens
  misc_RNA (1)...(19): siRNA sense strand
ggaaucacucaaaguuuaa

SEQ ID NO: 145095 - RNA, 19 nt, Homo sapiens
  misc_RNA (1)...(19): siRNA sense strand
gaacaguacucagcuacag

SEQ ID NO: 145096 - RNA, 19 nt, Homo sapiens
  misc_RNA (1)...(19): siRNA sense strand
gaacaaucacaaauaagug

SEQ ID NO: 145097 - RNA, 19 nt, Homo sapiens
  misc_RNA (1)...(19): siRNA sense strand
gaaguacagcugugauaga

SEQ ID NO: 145098 - RNA, 19 nt, Homo sapiens
  misc_RNA (1)...(19): siRNA sense strand
gcuuaugacuggagugaga

SEQ ID NO: 145099 - RNA, 19 nt, Homo sapiens
  misc_RNA (1)...(19): siRNA sense strand
gacagcaccucuuaaacug

SEQ ID NO: 145100 - RNA, 19 nt, Homo sapiens
  misc_RNA (1)...(19): siRNA sense strand
gggcugacccagaguuuaa

SEQ ID NO: 145101 - RNA, 19 nt, Homo sapiens
  misc_RNA (1)...(19): siRNA sense strand
gaaaaccccuucuaaaguc

SEQ ID NO: 145102 - RNA, 19 nt, Homo sapiens
  misc_RNA (1)...(19): siRNA sense strand
agugaaggacuaugaauua

SEQ ID NO: 145103 - RNA, 19 nt, Homo sapiens
  misc_RNA (1)...(19): siRNA sense strand
gaaacuacucagagaaaga

SEQ ID NO: 145104 - RNA, 19 nt, Homo sapiens
  misc_RNA (1)...(19): siRNA sense strand
uggaacgacuuaaagauga

SEQ ID NO: 145105 - RNA, 19 nt, Homo sapiens
  misc_RNA (1)...(19): siRNA sense strand
cuacaucucugaaguucga

SEQ ID NO: 145106 - RNA, 19 nt, Homo sapiens
  misc_RNA (1)...(19): siRNA sense strand
gagagaaacaccaacauag

SEQ ID NO: 145107 - RNA, 19 nt, Homo sapiens
  misc_RNA (1)...(19): siRNA sense strand
ugaauuggguugaugagau

SEQ ID NO: 145108 - RNA, 19 nt, Homo sapiens
  misc_RNA (1)...(19): siRNA sense strand
gaaauuuguucaggaucuu

SEQ ID NO: 145109 - RNA, 19 nt, Homo sapiens
  misc_RNA (1)...(19): siRNA sense strand
aaauuucaguucaggagua

SEQ ID NO: 145110 - RNA, 19 nt, Homo sapiens
  misc_RNA (1)...(19): siRNA sense strand
caaauaagugugaggaguu

SEQ ID NO: 145111 - RNA, 19 nt, Homo sapiens
  misc_RNA (1)...(19): siRNA sense strand
uaacacaacuggaaaagga

SEQ ID NO: 145112 - RNA, 19 nt, Homo sapiens
  misc_RNA (1)...(19): siRNA sense strand
gagauaaccauuuacaaag

SEQ ID NO: 145113 - RNA, 19 nt, Homo sapiens
  misc_RNA (1)...(19): siRNA sense strand
ucaaagcuaucugugacua

SEQ ID NO: 145114 - RNA, 19 nt, Homo sapiens
  misc_RNA (1)...(19): siRNA sense strand
aaacuucuauuccgaucaa

SEQ ID NO: 145115 - RNA, 19 nt, Homo sapiens
  misc_RNA (1)...(19): siRNA sense strand
ugagagaaacaccaacaua

SEQ ID NO: 145116 - RNA, 19 nt, Homo sapiens
  misc_RNA (1)...(19): siRNA sense strand
caaagaagcuaaaaucagu

SEQ ID NO: 145117 - RNA, 19 nt, Homo sapiens
  misc_RNA (1)...(19): siRNA sense strand
aggaggaaguugcuuauga

SEQ ID NO: 145118 - RNA, 19 nt, Homo sapiens
  misc_RNA (1)...(19): siRNA sense strand
aggagaaacuaaagaaaga

SEQ ID NO: 145119 - RNA, 19 nt, Homo sapiens
  misc_RNA (1)...(19): siRNA sense strand
gaagaucggcugauuagac

SEQ ID NO: 145120 - RNA, 19 nt, Homo sapiens
  misc_RNA (1)...(19): siRNA sense strand
gauauaacacaacuggaaa

SEQ ID NO: 145121 - RNA, 19 nt, Homo sapiens
  misc_RNA (1)...(19): siRNA sense strand
guacagcaaaggacgcaua

SEQ ID NO: 145122 - RNA, 19 nt, Homo sapiens
  misc_RNA (1)...(19): siRNA sense strand
gaggaugaguugcagaaag

SEQ ID NO: 145123 - RNA, 19 nt, Homo sapiens
  misc_RNA (1)...(19): siRNA sense strand
caauggagaucugaaguag

SEQ ID NO: 145124 - RNA, 19 nt, Homo sapiens
  misc_RNA (1)...(19): siRNA sense strand
ugaaccaagucuauucuau

SEQ ID NO: 145125 - RNA, 19 nt, Homo sapiens
  misc_RNA (1)...(19): siRNA sense strand
cuacagacaaauugagaua

SEQ ID NO: 145126 - RNA, 19 nt, Homo sapiens
  misc_RNA (1)...(19): siRNA sense strand
gcaguggagcuggaucuua

SEQ ID NO: 145127 - RNA, 19 nt, Homo sapiens
  misc_RNA (1)...(19): siRNA sense strand
ucacucucaugacacaaua

SEQ ID NO: 145128 - RNA, 19 nt, Homo sapiens
  misc_RNA (1)...(19): siRNA sense strand
gcaaaucacugaaguacua

SEQ ID NO: 145129 - RNA, 19 nt, Homo sapiens
  misc_RNA (1)...(19): siRNA sense strand
gaaaguguguucagaauca

SEQ ID NO: 145130 - RNA, 19 nt, Homo sapiens
  misc_RNA (1)...(19): siRNA sense strand
gaacuuauuugguugaaug

SEQ ID NO: 145131 - RNA, 19 nt, Homo sapiens
  misc_RNA (1)...(19): siRNA sense strand
ggaaagagaugauuugcau

SEQ ID NO: 145132 - RNA, 19 nt, Homo sapiens
  misc_RNA (1)...(19): siRNA sense strand
ccaaagaagcuacugauua

SEQ ID NO: 145133 - RNA, 19 nt, Homo sapiens
  misc_RNA (1)...(19): siRNA sense strand
gaaggacuaugaauuacaa

SEQ ID NO: 145134 - RNA, 19 nt, Homo sapiens
  misc_RNA (1)...(19): siRNA sense strand
agacaaagcucaugauauc

SEQ ID NO: 145135 - RNA, 19 nt, Homo sapiens
  misc_RNA (1)...(19): siRNA sense strand
cagcagaucucauuauuca

SEQ ID NO: 145136 - RNA, 19 nt, Homo sapiens
  misc_RNA (1)...(19): siRNA sense strand
caaagaagcuacugauuac

SEQ ID NO: 145137 - RNA, 19 nt, Homo sapiens
  misc_RNA (1)...(19): siRNA sense strand
gaacaugaaccaagucuau

SEQ ID NO: 145138 - RNA, 19 nt, Homo sapiens
  misc_RNA (1)...(19): siRNA sense strand
caagaggaaucaguuuaua

SEQ ID NO: 145139 - RNA, 19 nt, Homo sapiens
  misc_RNA (1)...(19): siRNA sense strand
caaaugacagcaccucuua

SEQ ID NO: 145140 - RNA, 19 nt, Homo sapiens
  misc_RNA (1)...(19): siRNA sense strand
caaagacgaugaauguguu

SEQ ID NO: 145141 - RNA, 19 nt, Homo sapiens
  misc_RNA (1)...(19): siRNA sense strand
uaaauuugcuggugauuca

SEQ ID NO: 145142 - RNA, 19 nt, Homo sapiens
  misc_RNA (1)...(19): siRNA sense strand
agaaauugcuggguauaua

SEQ ID NO: 145143 - RNA, 19 nt, Homo sapiens
  misc_RNA (1)...(19): siRNA sense strand
aggaaucacucaaaguuua

SEQ ID NO: 145144 - RNA, 19 nt, Homo sapiens
  misc_RNA (1)...(19): siRNA sense strand
gaacagacaaagcucauga

SEQ ID NO: 145145 - RNA, 19 nt, Homo sapiens
  misc_RNA (1)...(19): siRNA sense strand
gguauauacuugaauguga

SEQ ID NO: 145146 - RNA, 19 nt, Homo sapiens
  misc_RNA (1)...(19): siRNA sense strand
uaaaucaguucaggagaua

SEQ ID NO: 145147 - RNA, 19 nt, Homo sapiens
  misc_RNA (1)...(19): siRNA sense strand
gaauuugaaucuagucuca

SEQ ID NO: 145148 - RNA, 19 nt, Homo sapiens
  misc_RNA (1)...(19): siRNA sense strand
gaaauuauggccuuaagga

SEQ ID NO: 145149 - RNA, 19 nt, Homo sapiens
  misc_RNA (1)...(19): siRNA sense strand
ccaggcagaucaauuggua

SEQ ID NO: 145150 - RNA, 19 nt, Homo sapiens
  misc_RNA (1)...(19): siRNA sense strand
aaacuaaacugugugaaga

SEQ ID NO: 145151 - RNA, 19 nt, Homo sapiens
  misc_RNA (1)...(19): siRNA sense strand
caauguggcuucaauaaag

SEQ ID NO: 145152 - RNA, 19 nt, Homo sapiens
  misc_RNA (1)...(19): siRNA sense strand
uaaacugacuuaugcagaa

SEQ ID NO: 145153 - RNA, 19 nt, Homo sapiens
  misc_RNA (1)...(19): siRNA sense strand
agaagcuacugauuacuua

SEQ ID NO: 145154 - RNA, 19 nt, Homo sapiens
  misc_RNA (1)...(19): siRNA sense strand
gcagaacaguacucagcua

SEQ ID NO: 145155 - RNA, 19 nt, Homo sapiens
  misc_RNA (1)...(19): siRNA sense strand
ugaagaagaagcaguuaua

SEQ ID NO: 145156 - RNA, 19 nt, Homo sapiens
  misc_RNA (1)...(19): siRNA sense strand
uagcaaaccuaaugggaaa

SEQ ID NO: 145157 - RNA, 19 nt, Homo sapiens
  misc_RNA (1)...(19): siRNA sense strand
gaguagagccaaauucauu

SEQ ID NO: 145158 - RNA, 19 nt, Homo sapiens
  misc_RNA (1)...(19): siRNA sense strand
gaauugagcaacaguauca

SEQ ID NO: 145159 - RNA, 19 nt, Homo sapiens
  misc_RNA (1)...(19): siRNA sense strand
caacugaagccaaggaauu

SEQ ID NO: 145160 - RNA, 19 nt, Homo sapiens
  misc_RNA (1)...(19): siRNA sense strand
gaauuggguugaugagaug

SEQ ID NO: 145161 - RNA, 19 nt, Homo sapiens
  misc_RNA (1)...(19): siRNA sense strand
ggagugcaguuucagaaug

SEQ ID NO: 145162 - RNA, 19 nt, Homo sapiens
  misc_RNA (1)...(19): siRNA sense strand
caugguagauucacaacaa

SEQ ID NO: 145163 - RNA, 19 nt, Homo sapiens
  misc_RNA (1)...(19): siRNA sense strand
gcaauggagaucugaagua

SEQ ID NO: 145164 - RNA, 19 nt, Homo sapiens
  misc_RNA (1)...(19): siRNA sense strand
uaaacugugugaagaagaa

SEQ ID NO: 145165 - RNA, 19 nt, Homo sapiens
  misc_RNA (1)...(19): siRNA sense strand
ccaggaaucccaagucuuu

SEQ ID NO: 145166 - RNA, 19 nt, Homo sapiens
  misc_RNA (1)...(19): siRNA sense strand
ucccuaaccucuucuagua

SEQ ID NO: 145167 - RNA, 19 nt, Homo sapiens
  misc_RNA (1)...(19): siRNA sense strand
gaacaggagaaacuaaaga

SEQ ID NO: 145168 - RNA, 19 nt, Homo sapiens
  misc_RNA (1)...(19): siRNA sense strand
cagaauguccugacucuuu

SEQ ID NO: 145169 - RNA, 19 nt, Homo sapiens
  misc_RNA (1)...(19): siRNA sense strand
gagcaacaguaucagaaug

SEQ ID NO: 145170 - RNA, 19 nt, Homo sapiens
  misc_RNA (1)...(19): siRNA sense strand
caggauuaguuccaaauuu

SEQ ID NO: 145171 - RNA, 19 nt, Homo sapiens
  misc_RNA (1)...(19): siRNA sense strand
gcagaucaauugguacaga

SEQ ID NO: 145172 - RNA, 19 nt, Homo sapiens
  misc_RNA (1)...(19): siRNA sense strand
gaccuaaggacucgauaua

SEQ ID NO: 145173 - RNA, 19 nt, Homo sapiens
  misc_RNA (1)...(19): siRNA sense strand
gcaauguggcuucaauaaa

SEQ ID NO: 145174 - RNA, 19 nt, Homo sapiens
  misc_RNA (1)...(19): siRNA sense strand
ccaaauucauugcaaacuu

SEQ ID NO: 145175 - RNA, 19 nt, Homo sapiens
  misc_RNA (1)...(19): siRNA sense strand
guacucagcuacagugaag

SEQ ID NO: 145176 - RNA, 19 nt, Homo sapiens
  misc_RNA (1)...(19): siRNA sense strand
gcagauugacaacagguua

SEQ ID NO: 145177 - RNA, 19 nt, Homo sapiens
  misc_RNA (1)...(19): siRNA sense strand
ugggaacaaucacaaauaa

SEQ ID NO: 145178 - RNA, 19 nt, Homo sapiens
  misc_RNA (1)...(19): siRNA sense strand
gcaagaggaaucaguuuau

SEQ ID NO: 145179 - RNA, 19 nt, Homo sapiens
  misc_RNA (1)...(19): siRNA sense strand
gagugcaguuucagaauga

SEQ ID NO: 145180 - RNA, 19 nt, Homo sapiens
  misc_RNA (1)...(19): siRNA sense strand
gagcagcuacuucuagaaa

SEQ ID NO: 145181 - RNA, 19 nt, Homo sapiens
  misc_RNA (1)...(19): siRNA sense strand
guacagauucuuauugaug

SEQ ID NO: 145182 - RNA, 19 nt, Homo sapiens
  misc_RNA (1)...(19): siRNA sense strand
gaaccaagucuauucuaug

SEQ ID NO: 145183 - RNA, 19 nt, Homo sapiens
  misc_RNA (1)...(19): siRNA sense strand
ggaacaaucacaaauaagu

SEQ ID NO: 145184 - RNA, 19 nt, Homo sapiens
  misc_RNA (1)...(19): siRNA sense strand
ggaaucaguuuauaaucuc

SEQ ID NO: 145185 - RNA, 19 nt, Homo sapiens
  misc_RNA (1)...(19): siRNA sense strand
gcaguauuaucaagaacuu

SEQ ID NO: 145186 - RNA, 19 nt, Homo sapiens
  misc_RNA (1)...(19): siRNA sense strand
guugaaagccauuuagaaa

SEQ ID NO: 145187 - RNA, 19 nt, Homo sapiens
  misc_RNA (1)...(19): siRNA sense strand
gcucagauuugccaagugu

SEQ ID NO: 145188 - RNA, 19 nt, Homo sapiens
  misc_RNA (1)...(19): siRNA sense strand
gagccaaauucauugcaaa

SEQ ID NO: 145189 - RNA, 19 nt, Homo sapiens
  misc_RNA (1)...(19): siRNA sense strand
gcaaaacucuugaauacau

SEQ ID NO: 145190 - RNA, 19 nt, Homo sapiens
  misc_RNA (1)...(19): siRNA sense strand
gagaugauuugcaugaaag

SEQ ID NO: 145191 - RNA, 19 nt, Homo sapiens
  misc_RNA (1)...(19): siRNA sense strand
uuacaaagacgaugaaugu

SEQ ID NO: 145192 - RNA, 19 nt, Homo sapiens
  misc_RNA (1)...(19): siRNA sense strand
ugagagaacuugaucaaaa

SEQ ID NO: 145193 - RNA, 19 nt, Homo sapiens
  misc_RNA (1)...(19): siRNA sense strand
gaaacuaaacugugugaag

SEQ ID NO: 145194 - RNA, 19 nt, Homo sapiens
  misc_RNA (1)...(19): siRNA sense strand
ggaaucacucaaaguuuaa

SEQ ID NO: 145195 - RNA, 19 nt, Homo sapiens
  misc_RNA (1)...(19): siRNA sense strand
gaacaguacucagcuacag

SEQ ID NO: 145196 - RNA, 19 nt, Homo sapiens
  misc_RNA (1)...(19): siRNA sense strand
gaacaaucacaaauaagug

SEQ ID NO: 145197 - RNA, 19 nt, Homo sapiens
  misc_RNA (1)...(19): siRNA sense strand
gaaguacagcugugauaga

SEQ ID NO: 145198 - RNA, 19 nt, Homo sapiens
  misc_RNA (1)...(19): siRNA sense strand
gcuuaugacuggagugaga

SEQ ID NO: 145199 - RNA, 19 nt, Homo sapiens
  misc_RNA (1)...(19): siRNA sense strand
gacagcaccucuuaaacug

SEQ ID NO: 145200 - RNA, 19 nt, Homo sapiens
  misc_RNA (1)...(19): siRNA sense strand
gggcugacccagaguuuaa

SEQ ID NO: 145201 - RNA, 19 nt, Homo sapiens
  misc_RNA (1)...(19): siRNA sense strand
gaaaaccccuucuaaaguc

SEQ ID NO: 145202 - RNA, 19 nt, Homo sapiens
  misc_RNA (1)...(19): siRNA sense strand
agugaaggacuaugaauua

SEQ ID NO: 145203 - RNA, 19 nt, Homo sapiens
  misc_RNA (1)...(19): siRNA sense strand
gaaacuacucagagaaaga

SEQ ID NO: 145204 - RNA, 19 nt, Homo sapiens
  misc_RNA (1)...(19): siRNA sense strand
uggaacgacuuaaagauga

SEQ ID NO: 145205 - RNA, 19 nt, Homo sapiens
  misc_RNA (1)...(19): siRNA sense strand
cuacaucucugaaguucga

SEQ ID NO: 145206 - RNA, 19 nt, Homo sapiens
  misc_RNA (1)...(19): siRNA sense strand
gagagaaacaccaacauag

SEQ ID NO: 145207 - RNA, 19 nt, Homo sapiens
  misc_RNA (1)...(19): siRNA sense strand
ugaauuggguugaugagau

SEQ ID NO: 145208 - RNA, 19 nt, Homo sapiens
  misc_RNA (1)...(19): siRNA sense strand
gaaauuuguucaggaucuu

SEQ ID NO: 145209 - RNA, 19 nt, Homo sapiens
  misc_RNA (1)...(19): siRNA sense strand
aaauuucaguucaggagua

SEQ ID NO: 145210 - RNA, 19 nt, Homo sapiens
  misc_RNA (1)...(19): siRNA sense strand
caaauaagugugaggaguu

SEQ ID NO: 145211 - RNA, 19 nt, Homo sapiens
  misc_RNA (1)...(19): siRNA sense strand
uaacacaacuggaaaagga

SEQ ID NO: 145212 - RNA, 19 nt, Homo sapiens
  misc_RNA (1)...(19): siRNA sense strand
gagauaaccauuuacaaag

SEQ ID NO: 145213 - RNA, 19 nt, Homo sapiens
  misc_RNA (1)...(19): siRNA sense strand
ucaaagcuaucugugacua

SEQ ID NO: 145214 - RNA, 19 nt, Homo sapiens
  misc_RNA (1)...(19): siRNA sense strand
aaacuucuauuccgaucaa

SEQ ID NO: 145215 - RNA, 19 nt, Homo sapiens
  misc_RNA (1)...(19): siRNA sense strand
ugagagaaacaccaacaua

SEQ ID NO: 145216 - RNA, 19 nt, Homo sapiens
  misc_RNA (1)...(19): siRNA sense strand
caaagaagcuaaaaucagu

SEQ ID NO: 145217 - RNA, 19 nt, Homo sapiens
  misc_RNA (1)...(19): siRNA sense strand
aggaggaaguugcuuauga

SEQ ID NO: 145218 - RNA, 19 nt, Homo sapiens
  misc_RNA (1)...(19): siRNA sense strand
aggagaaacuaaagaaaga

SEQ ID NO: 145219 - RNA, 19 nt, Homo sapiens
  misc_RNA (1)...(19): siRNA sense strand
gaagaucggcugauuagac

SEQ ID NO: 145220 - RNA, 19 nt, Homo sapiens
  misc_RNA (1)...(19): siRNA sense strand
gauauaacacaacuggaaa

SEQ ID NO: 145221 - RNA, 19 nt, Homo sapiens
  misc_RNA (1)...(19): siRNA sense strand
guacagcaaaggacgcaua

SEQ ID NO: 145222 - RNA, 19 nt, Homo sapiens
  misc_RNA (1)...(19): siRNA sense strand
gaggaugaguugcagaaag

SEQ ID NO: 145223 - RNA, 19 nt, Homo sapiens
  misc_RNA (1)...(19): siRNA sense strand
caauggagaucugaaguag

SEQ ID NO: 145224 - RNA, 19 nt, Homo sapiens
  misc_RNA (1)...(19): siRNA sense strand
ugaaccaagucuauucuau

SEQ ID NO: 145225 - RNA, 19 nt, Homo sapiens
  misc_RNA (1)...(19): siRNA sense strand
cuacagacaaauugagaua

SEQ ID NO: 145226 - RNA, 19 nt, Homo sapiens
  misc_RNA (1)...(19): siRNA sense strand
gcaguggagcuggaucuua

SEQ ID NO: 145227 - RNA, 19 nt, Homo sapiens
  misc_RNA (1)...(19): siRNA sense strand
ucacucucaugacacaaua

SEQ ID NO: 145228 - RNA, 19 nt, Homo sapiens
  misc_RNA (1)...(19): siRNA sense strand
gaacugaagcacucaaaua

SEQ ID NO: 145229 - RNA, 19 nt, Homo sapiens
  misc_RNA (1)...(19): siRNA sense strand
gagaugacaugauuccaaa

SEQ ID NO: 145230 - RNA, 19 nt, Homo sapiens
  misc_RNA (1)...(19): siRNA sense strand
ucagacagcuuuaagauca

SEQ ID NO: 145231 - RNA, 19 nt, Homo sapiens
  misc_RNA (1)...(19): siRNA sense strand
ccuccaagcugcaaccuua

SEQ ID NO: 145232 - RNA, 19 nt, Homo sapiens
  misc_RNA (1)...(19): siRNA sense strand
gaaagugaccaauucugua

SEQ ID NO: 145233 - RNA, 19 nt, Homo sapiens
  misc_RNA (1)...(19): siRNA sense strand
ggaucaagauuccugacua

SEQ ID NO: 145234 - RNA, 19 nt, Homo sapiens
  misc_RNA (1)...(19): siRNA sense strand
gcgagaaagugaccaauuc

SEQ ID NO: 145235 - RNA, 19 nt, Homo sapiens
  misc_RNA (1)...(19): siRNA sense strand
ccaaaggaguccaaauuuc

SEQ ID NO: 145236 - RNA, 19 nt, Homo sapiens
  misc_RNA (1)...(19): siRNA sense strand
caagauuccugacuacuca

SEQ ID NO: 145237 - RNA, 19 nt, Homo sapiens
  misc_RNA (1)...(19): siRNA sense strand
cugaagcacucaaauauug

SEQ ID NO: 145238 - RNA, 19 nt, Homo sapiens
  misc_RNA (1)...(19): siRNA sense strand
gaagaugacccuuagagau

SEQ ID NO: 145239 - RNA, 19 nt, Homo sapiens
  misc_RNA (1)...(19): siRNA sense strand
agaaggagcugaagaggau

SEQ ID NO: 145240 - RNA, 19 nt, Homo sapiens
  misc_RNA (1)...(19): siRNA sense strand
ccuuagagaugacaugauu

SEQ ID NO: 145241 - RNA, 19 nt, Homo sapiens
  misc_RNA (1)...(19): siRNA sense strand
ccaagaaguuucccaacau

SEQ ID NO: 145242 - RNA, 19 nt, Homo sapiens
  misc_RNA (1)...(19): siRNA sense strand
caagaaguuucccaacaug

SEQ ID NO: 145243 - RNA, 19 nt, Homo sapiens
  misc_RNA (1)...(19): siRNA sense strand
gcauggacauccgugaauu

SEQ ID NO: 145244 - RNA, 19 nt, Homo sapiens
  misc_RNA (1)...(19): siRNA sense strand
ccaccggccuuaccuucua

SEQ ID NO: 145245 - RNA, 19 nt, Homo sapiens
  misc_RNA (1)...(19): siRNA sense strand
gaucaagauuccugacuac

SEQ ID NO: 145246 - RNA, 19 nt, Homo sapiens
  misc_RNA (1)...(19): siRNA sense strand
gccaagaaguuucccaaca

SEQ ID NO: 145247 - RNA, 19 nt, Homo sapiens
  misc_RNA (1)...(19): siRNA sense strand
ggccuuaaguucuccauca

SEQ ID NO: 145248 - RNA, 19 nt, Homo sapiens
  misc_RNA (1)...(19): siRNA sense strand
uagaaggcauguccauuuc

SEQ ID NO: 145249 - RNA, 19 nt, Homo sapiens
  misc_RNA (1)...(19): siRNA sense strand
gcuguucggugcagacguu

SEQ ID NO: 145250 - RNA, 19 nt, Homo sapiens
  misc_RNA (1)...(19): siRNA sense strand
gcagccacaucaacagugu

SEQ ID NO: 145251 - RNA, 19 nt, Homo sapiens
  misc_RNA (1)...(19): siRNA sense strand
ugcaggauaucaugaacua

SEQ ID NO: 145252 - RNA, 19 nt, Homo sapiens
  misc_RNA (1)...(19): siRNA sense strand
gacccuggauguacagaug

SEQ ID NO: 145253 - RNA, 19 nt, Homo sapiens
  misc_RNA (1)...(19): siRNA sense strand
gaucugaagcugggcagua

SEQ ID NO: 145254 - RNA, 19 nt, Homo sapiens
  misc_RNA (1)...(19): siRNA sense strand
uugaauugcugcaggauau

SEQ ID NO: 145255 - RNA, 19 nt, Homo sapiens
  misc_RNA (1)...(19): siRNA sense strand
uaacgagaaacuacagaaa

SEQ ID NO: 145256 - RNA, 19 nt, Homo sapiens
  misc_RNA (1)...(19): siRNA sense strand
gcccaggguuaacgagaaa

SEQ ID NO: 145257 - RNA, 19 nt, Homo sapiens
  misc_RNA (1)...(19): siRNA sense strand
gagcugaagaggaucaaga

SEQ ID NO: 145258 - RNA, 19 nt, Homo sapiens
  misc_RNA (1)...(19): siRNA sense strand
auagaaggcauguccauuu

SEQ ID NO: 145259 - RNA, 19 nt, Homo sapiens
  misc_RNA (1)...(19): siRNA sense strand
ccaauucuguauccuccaa

SEQ ID NO: 145260 - RNA, 19 nt, Homo sapiens
  misc_RNA (1)...(19): siRNA sense strand
gauccaacucuuccacaaa

SEQ ID NO: 145261 - RNA, 19 nt, Homo sapiens
  misc_RNA (1)...(19): siRNA sense strand
gcacaucucaaagagcaaa

SEQ ID NO: 145262 - RNA, 19 nt, Homo sapiens
  misc_RNA (1)...(19): siRNA sense strand
ugacuacucagacagcuuu

SEQ ID NO: 145263 - RNA, 19 nt, Homo sapiens
  misc_RNA (1)...(19): siRNA sense strand
cgagaugggugucccugau

SEQ ID NO: 145264 - RNA, 19 nt, Homo sapiens
  misc_RNA (1)...(19): siRNA sense strand
gaagauacagauccauguc

SEQ ID NO: 145265 - RNA, 19 nt, Homo sapiens
  misc_RNA (1)...(19): siRNA sense strand
caacgccaauaucaagauc

SEQ ID NO: 145266 - RNA, 19 nt, Homo sapiens
  misc_RNA (1)...(19): siRNA sense strand
ggaaauggaaggcacaaaa

SEQ ID NO: 145267 - RNA, 19 nt, Homo sapiens
  misc_RNA (1)...(19): siRNA sense strand
uaagcauggugcccaaugu

SEQ ID NO: 145268 - RNA, 19 nt, Homo sapiens
  misc_RNA (1)...(19): siRNA sense strand
gauaucaugaacuacauug

SEQ ID NO: 145269 - RNA, 19 nt, Homo sapiens
  misc_RNA (1)...(19): siRNA sense strand
caaaggaguccaaauuucg

SEQ ID NO: 145270 - RNA, 19 nt, Homo sapiens
  misc_RNA (1)...(19): siRNA sense strand
ccacaauccaccucccuuu

SEQ ID NO: 145271 - RNA, 19 nt, Homo sapiens
  misc_RNA (1)...(19): siRNA sense strand
aaagugaccaauucuguau

SEQ ID NO: 145272 - RNA, 19 nt, Homo sapiens
  misc_RNA (1)...(19): siRNA sense strand
aagaugacccuuagagaug

SEQ ID NO: 145273 - RNA, 19 nt, Homo sapiens
  misc_RNA (1)...(19): siRNA sense strand
ccaagcugcaaccuuauuu

SEQ ID NO: 145274 - RNA, 19 nt, Homo sapiens
  misc_RNA (1)...(19): siRNA sense strand
caaugugggccuuaaguuc

SEQ ID NO: 145275 - RNA, 19 nt, Homo sapiens
  misc_RNA (1)...(19): siRNA sense strand
guccaaauuucgacugaca

SEQ ID NO: 145276 - RNA, 19 nt, Homo sapiens
  misc_RNA (1)...(19): siRNA sense strand
uccaaaggaguccaaauuu

SEQ ID NO: 145277 - RNA, 19 nt, Homo sapiens
  misc_RNA (1)...(19): siRNA sense strand
ucagacuacuucuucaaca

SEQ ID NO: 145278 - RNA, 19 nt, Homo sapiens
  misc_RNA (1)...(19): siRNA sense strand
cagcaacgccaauaucaag

SEQ ID NO: 145279 - RNA, 19 nt, Homo sapiens
  misc_RNA (1)...(19): siRNA sense strand
ugaagaggaucaagauucc

SEQ ID NO: 145280 - RNA, 19 nt, Homo sapiens
  misc_RNA (1)...(19): siRNA sense strand
gaaguuucccaacaugaag

SEQ ID NO: 145281 - RNA, 19 nt, Homo sapiens
  misc_RNA (1)...(19): siRNA sense strand
caacaugaagauacagauc

SEQ ID NO: 145282 - RNA, 19 nt, Homo sapiens
  misc_RNA (1)...(19): siRNA sense strand
agaugacccuuagagauga

SEQ ID NO: 145283 - RNA, 19 nt, Homo sapiens
  misc_RNA (1)...(19): siRNA sense strand
gaguccagcucuacaacgu

SEQ ID NO: 145284 - RNA, 19 nt, Homo sapiens
  misc_RNA (1)...(19): siRNA sense strand
ggaacugaagcacucaaau

SEQ ID NO: 145285 - RNA, 19 nt, Homo sapiens
  misc_RNA (1)...(19): siRNA sense strand
gaauuccagcuucccaguu

SEQ ID NO: 145286 - RNA, 19 nt, Homo sapiens
  misc_RNA (1)...(19): siRNA sense strand
gcgcuucgaaacaagauga

SEQ ID NO: 145287 - RNA, 19 nt, Homo sapiens
  misc_RNA (1)...(19): siRNA sense strand
gcaacgccaauaucaagau

SEQ ID NO: 145288 - RNA, 19 nt, Homo sapiens
  misc_RNA (1)...(19): siRNA sense strand
ccaaugugggccuuaaguu

SEQ ID NO: 145289 - RNA, 19 nt, Homo sapiens
  misc_RNA (1)...(19): siRNA sense strand
cuucccaguucccagauaa

SEQ ID NO: 145290 - RNA, 19 nt, Homo sapiens
  misc_RNA (1)...(19): siRNA sense strand
ugagguggccaagaaguuu

SEQ ID NO: 145291 - RNA, 19 nt, Homo sapiens
  misc_RNA (1)...(19): siRNA sense strand
ugaagaugacccuuagaga

SEQ ID NO: 145292 - RNA, 19 nt, Homo sapiens
  misc_RNA (1)...(19): siRNA sense strand
agucugcgcuucgaaacaa

SEQ ID NO: 145293 - RNA, 19 nt, Homo sapiens
  misc_RNA (1)...(19): siRNA sense strand
gcuucccucuuccugauug

SEQ ID NO: 145294 - RNA, 19 nt, Homo sapiens
  misc_RNA (1)...(19): siRNA sense strand
ggauaucaugaacuacauu

SEQ ID NO: 145295 - RNA, 19 nt, Homo sapiens
  misc_RNA (1)...(19): siRNA sense strand
caggauaucaugaacuaca

SEQ ID NO: 145296 - RNA, 19 nt, Homo sapiens
  misc_RNA (1)...(19): siRNA sense strand
ugauccaacucuuccacaa

SEQ ID NO: 145297 - RNA, 19 nt, Homo sapiens
  misc_RNA (1)...(19): siRNA sense strand
cugaagaggaucaagauuc

SEQ ID NO: 145298 - RNA, 19 nt, Homo sapiens
  misc_RNA (1)...(19): siRNA sense strand
acgagaaacuacagaaagg

SEQ ID NO: 145299 - RNA, 19 nt, Homo sapiens
  misc_RNA (1)...(19): siRNA sense strand
gcuucccaguucccagaua

SEQ ID NO: 145300 - RNA, 19 nt, Homo sapiens
  misc_RNA (1)...(19): siRNA sense strand
agaaguuucccaacaugaa

SEQ ID NO: 145301 - RNA, 19 nt, Homo sapiens
  misc_RNA (1)...(19): siRNA sense strand
cauuucggcugaucugaag

SEQ ID NO: 145302 - RNA, 19 nt, Homo sapiens
  misc_RNA (1)...(19): siRNA sense strand
gagaugggugucccugaug

SEQ ID NO: 145303 - RNA, 19 nt, Homo sapiens
  misc_RNA (1)...(19): siRNA sense strand
ccucucagacuacuucuuc

SEQ ID NO: 145304 - RNA, 19 nt, Homo sapiens
  misc_RNA (1)...(19): siRNA sense strand
uggcuggaaucaacuaugg

SEQ ID NO: 145305 - RNA, 19 nt, Homo sapiens
  misc_RNA (1)...(19): siRNA sense strand
caucagcaacgccaauauc

SEQ ID NO: 145306 - RNA, 19 nt, Homo sapiens
  misc_RNA (1)...(19): siRNA sense strand
uuccaaaggaguccaaauu

SEQ ID NO: 145307 - RNA, 19 nt, Homo sapiens
  misc_RNA (1)...(19): siRNA sense strand
gcauagaaggcauguccau

SEQ ID NO: 145308 - RNA, 19 nt, Homo sapiens
  misc_RNA (1)...(19): siRNA sense strand
ggaaggggcauuauagcuu

SEQ ID NO: 145309 - RNA, 19 nt, Homo sapiens
  misc_RNA (1)...(19): siRNA sense strand
gaauugcugcaggauauca

SEQ ID NO: 145310 - RNA, 19 nt, Homo sapiens
  misc_RNA (1)...(19): siRNA sense strand
cagacagcuuuaagaucaa

SEQ ID NO: 145311 - RNA, 19 nt, Homo sapiens
  misc_RNA (1)...(19): siRNA sense strand
gaugacaugauuccaaagg

SEQ ID NO: 145312 - RNA, 19 nt, Homo sapiens
  misc_RNA (1)...(19): siRNA sense strand
agagaugacaugauuccaa

SEQ ID NO: 145313 - RNA, 19 nt, Homo sapiens
  misc_RNA (1)...(19): siRNA sense strand
cggcugagacccuggaugu

SEQ ID NO: 145314 - RNA, 19 nt, Homo sapiens
  misc_RNA (1)...(19): siRNA sense strand
caagaucagcgggaaaugg

SEQ ID NO: 145315 - RNA, 19 nt, Homo sapiens
  misc_RNA (1)...(19): siRNA sense strand
guugaauugcugcaggaua

SEQ ID NO: 145316 - RNA, 19 nt, Homo sapiens
  misc_RNA (1)...(19): siRNA sense strand
aacugaagcacucaaauau

SEQ ID NO: 145317 - RNA, 19 nt, Homo sapiens
  misc_RNA (1)...(19): siRNA sense strand
cagcauggacauccgugaa

SEQ ID NO: 145318 - RNA, 19 nt, Homo sapiens
  misc_RNA (1)...(19): siRNA sense strand
gauacagauccaugucuca

SEQ ID NO: 145319 - RNA, 19 nt, Homo sapiens
  misc_RNA (1)...(19): siRNA sense strand
aauuccagcuucccaguuc

SEQ ID NO: 145320 - RNA, 19 nt, Homo sapiens
  misc_RNA (1)...(19): siRNA sense strand
gcugagacccuggauguac

SEQ ID NO: 145321 - RNA, 19 nt, Homo sapiens
  misc_RNA (1)...(19): siRNA sense strand
gcugaagaggaucaagauu

SEQ ID NO: 145322 - RNA, 19 nt, Homo sapiens
  misc_RNA (1)...(19): siRNA sense strand
cauagaaggcauguccauu

SEQ ID NO: 145323 - RNA, 19 nt, Homo sapiens
  misc_RNA (1)...(19): siRNA sense strand
ggaaggcacaaaagagauu

SEQ ID NO: 145324 - RNA, 19 nt, Homo sapiens
  misc_RNA (1)...(19): siRNA sense strand
ggcaugcacacaacugguu

SEQ ID NO: 145325 - RNA, 19 nt, Homo sapiens
  misc_RNA (1)...(19): siRNA sense strand
ugaagauacagauccaugu

SEQ ID NO: 145326 - RNA, 19 nt, Homo sapiens
  misc_RNA (1)...(19): siRNA sense strand
gcaaccuuauuuccagacu

SEQ ID NO: 145327 - RNA, 19 nt, Homo sapiens
  misc_RNA (1)...(19): siRNA sense strand
uggcuucccucuuccugau

SEQ ID NO: 145328 - RNA, 19 nt, Homo sapiens
  misc_RNA (1)...(19): siRNA sense strand
gcgaguaguucacauaaua

SEQ ID NO: 145329 - RNA, 19 nt, Homo sapiens
  misc_RNA (1)...(19): siRNA sense strand
gaaaggcacucaacagaau

SEQ ID NO: 145330 - RNA, 19 nt, Homo sapiens
  misc_RNA (1)...(19): siRNA sense strand
gaauauagcuguuucuucu

SEQ ID NO: 145331 - RNA, 19 nt, Homo sapiens
  misc_RNA (1)...(19): siRNA sense strand
gaaauguucccuaaguuua

SEQ ID NO: 145332 - RNA, 19 nt, Homo sapiens
  misc_RNA (1)...(19): siRNA sense strand
gcaguuaagucugaauaua

SEQ ID NO: 145333 - RNA, 19 nt, Homo sapiens
  misc_RNA (1)...(19): siRNA sense strand
gaccacaccuucacaugua

SEQ ID NO: 145334 - RNA, 19 nt, Homo sapiens
  misc_RNA (1)...(19): siRNA sense strand
caaaucaacuucaguaucu

SEQ ID NO: 145335 - RNA, 19 nt, Homo sapiens
  misc_RNA (1)...(19): siRNA sense strand
gagaugacauuguucuuau

SEQ ID NO: 145336 - RNA, 19 nt, Homo sapiens
  misc_RNA (1)...(19): siRNA sense strand
guaaugaaauccucagaug

SEQ ID NO: 145337 - RNA, 19 nt, Homo sapiens
  misc_RNA (1)...(19): siRNA sense strand
gaacaggcgucacacagau

SEQ ID NO: 145338 - RNA, 19 nt, Homo sapiens
  misc_RNA (1)...(19): siRNA sense strand
gaacuucacucacagaaaa

SEQ ID NO: 145339 - RNA, 19 nt, Homo sapiens
  misc_RNA (1)...(19): siRNA sense strand
gaaaauggauaaccaagaa

SEQ ID NO: 145340 - RNA, 19 nt, Homo sapiens
  misc_RNA (1)...(19): siRNA sense strand
caagaaugcuucaggaugu

SEQ ID NO: 145341 - RNA, 19 nt, Homo sapiens
  misc_RNA (1)...(19): siRNA sense strand
guagagagaacacuaauga

SEQ ID NO: 145342 - RNA, 19 nt, Homo sapiens
  misc_RNA (1)...(19): siRNA sense strand
caagauaaauccaaacucu

SEQ ID NO: 145343 - RNA, 19 nt, Homo sapiens
  misc_RNA (1)...(19): siRNA sense strand
gauaggauauugugugcaa

SEQ ID NO: 145344 - RNA, 19 nt, Homo sapiens
  misc_RNA (1)...(19): siRNA sense strand
cuaaagagcauguaaagaa

SEQ ID NO: 145345 - RNA, 19 nt, Homo sapiens
  misc_RNA (1)...(19): siRNA sense strand
caaaugaggcuaaaggaaa

SEQ ID NO: 145346 - RNA, 19 nt, Homo sapiens
  misc_RNA (1)...(19): siRNA sense strand
caacuucaguaucuacaaa

SEQ ID NO: 145347 - RNA, 19 nt, Homo sapiens
  misc_RNA (1)...(19): siRNA sense strand
ggagaugacauuguucuua

SEQ ID NO: 145348 - RNA, 19 nt, Homo sapiens
  misc_RNA (1)...(19): siRNA sense strand
caaaugauucuccuucuaa

SEQ ID NO: 145349 - RNA, 19 nt, Homo sapiens
  misc_RNA (1)...(19): siRNA sense strand
aaucagaaauguucccuaa

SEQ ID NO: 145350 - RNA, 19 nt, Homo sapiens
  misc_RNA (1)...(19): siRNA sense strand
ucucaaagaccgugauuua

SEQ ID NO: 145351 - RNA, 19 nt, Homo sapiens
  misc_RNA (1)...(19): siRNA sense strand
aagaagcgcuuggagaaua

SEQ ID NO: 145352 - RNA, 19 nt, Homo sapiens
  misc_RNA (1)...(19): siRNA sense strand
gggaauggauugacuguag

SEQ ID NO: 145353 - RNA, 19 nt, Homo sapiens
  misc_RNA (1)...(19): siRNA sense strand
cgacaaacagcuauuauug

SEQ ID NO: 145354 - RNA, 19 nt, Homo sapiens
  misc_RNA (1)...(19): siRNA sense strand
gauaugacccuucaaagug

SEQ ID NO: 145355 - RNA, 19 nt, Homo sapiens
  misc_RNA (1)...(19): siRNA sense strand
gagaagagcagaaagaaca

SEQ ID NO: 145356 - RNA, 19 nt, Homo sapiens
  misc_RNA (1)...(19): siRNA sense strand
cuaaaccuaugaacuauga

SEQ ID NO: 145357 - RNA, 19 nt, Homo sapiens
  misc_RNA (1)...(19): siRNA sense strand
gaagauaaugcuaaaccua

SEQ ID NO: 145358 - RNA, 19 nt, Homo sapiens
  misc_RNA (1)...(19): siRNA sense strand
gaaagcagauacaacaacu

SEQ ID NO: 145359 - RNA, 19 nt, Homo sapiens
  misc_RNA (1)...(19): siRNA sense strand
caucagaagcucaagauaa

SEQ ID NO: 145360 - RNA, 19 nt, Homo sapiens
  misc_RNA (1)...(19): siRNA sense strand
gaugagcucuucaaccaau

SEQ ID NO: 145361 - RNA, 19 nt, Homo sapiens
  misc_RNA (1)...(19): siRNA sense strand
gacacaaccucugccaaua

SEQ ID NO: 145362 - RNA, 19 nt, Homo sapiens
  misc_RNA (1)...(19): siRNA sense strand
gaaagcaucaacacuaaga

SEQ ID NO: 145363 - RNA, 19 nt, Homo sapiens
  misc_RNA (1)...(19): siRNA sense strand
aagaaaugcuugcaaagaa

SEQ ID NO: 145364 - RNA, 19 nt, Homo sapiens
  misc_RNA (1)...(19): siRNA sense strand
caacaacuccugcaacuuc

SEQ ID NO: 145365 - RNA, 19 nt, Homo sapiens
  misc_RNA (1)...(19): siRNA sense strand
ccaaaugauucuccuucua

SEQ ID NO: 145366 - RNA, 19 nt, Homo sapiens
  misc_RNA (1)...(19): siRNA sense strand
ucaaauggcauaacuguga

SEQ ID NO: 145367 - RNA, 19 nt, Homo sapiens
  misc_RNA (1)...(19): siRNA sense strand
gaacucauacggaagcauu

SEQ ID NO: 145368 - RNA, 19 nt, Homo sapiens
  misc_RNA (1)...(19): siRNA sense strand
gaaaguagcagcagugacu

SEQ ID NO: 145369 - RNA, 19 nt, Homo sapiens
  misc_RNA (1)...(19): siRNA sense strand
aaacagauaucacagaaac

SEQ ID NO: 145370 - RNA, 19 nt, Homo sapiens
  misc_RNA (1)...(19): siRNA sense strand
cagaugagcucuucaacca

SEQ ID NO: 145371 - RNA, 19 nt, Homo sapiens
  misc_RNA (1)...(19): siRNA sense strand
gaaaccaucagguguaaug

SEQ ID NO: 145372 - RNA, 19 nt, Homo sapiens
  misc_RNA (1)...(19): siRNA sense strand
ucacacagauaggauauug

SEQ ID NO: 145373 - RNA, 19 nt, Homo sapiens
  misc_RNA (1)...(19): siRNA sense strand
ucagaaauguucccuaagu

SEQ ID NO: 145374 - RNA, 19 nt, Homo sapiens
  misc_RNA (1)...(19): siRNA sense strand
gaacucuucugaugauucu

SEQ ID NO: 145375 - RNA, 19 nt, Homo sapiens
  misc_RNA (1)...(19): siRNA sense strand
ugacaaaucaacuucagua

SEQ ID NO: 145376 - RNA, 19 nt, Homo sapiens
  misc_RNA (1)...(19): siRNA sense strand
ccaaguaccuuuccguaag

SEQ ID NO: 145377 - RNA, 19 nt, Homo sapiens
  misc_RNA (1)...(19): siRNA sense strand
uagagaagcuguuuaugca

SEQ ID NO: 145378 - RNA, 19 nt, Homo sapiens
  misc_RNA (1)...(19): siRNA sense strand
acacaacgauguuagaauc

SEQ ID NO: 145379 - RNA, 19 nt, Homo sapiens
  misc_RNA (1)...(19): siRNA sense strand
ggaauggauugacuguaga

SEQ ID NO: 145380 - RNA, 19 nt, Homo sapiens
  misc_RNA (1)...(19): siRNA sense strand
guuagaaucugaaugucaa

SEQ ID NO: 145381 - RNA, 19 nt, Homo sapiens
  misc_RNA (1)...(19): siRNA sense strand
gaggaaagcagauacaaca

SEQ ID NO: 145382 - RNA, 19 nt, Homo sapiens
  misc_RNA (1)...(19): siRNA sense strand
gacuuaagcucuucagaca

SEQ ID NO: 145383 - RNA, 19 nt, Homo sapiens
  misc_RNA (1)...(19): siRNA sense strand
agauagagauagacuuuga

SEQ ID NO: 145384 - RNA, 19 nt, Homo sapiens
  misc_RNA (1)...(19): siRNA sense strand
agaaaugcuugcaaagaaa

SEQ ID NO: 145385 - RNA, 19 nt, Homo sapiens
  misc_RNA (1)...(19): siRNA sense strand
gaaaauaugccaaagaaug

SEQ ID NO: 145386 - RNA, 19 nt, Homo sapiens
  misc_RNA (1)...(19): siRNA sense strand
guacagaaggauauaaaga

SEQ ID NO: 145387 - RNA, 19 nt, Homo sapiens
  misc_RNA (1)...(19): siRNA sense strand
agaguaugccuuuauguua

SEQ ID NO: 145388 - RNA, 19 nt, Homo sapiens
  misc_RNA (1)...(19): siRNA sense strand
gagaguaugccuuuauguu

SEQ ID NO: 145389 - RNA, 19 nt, Homo sapiens
  misc_RNA (1)...(19): siRNA sense strand
gauugaaccuguugagagu

SEQ ID NO: 145390 - RNA, 19 nt, Homo sapiens
  misc_RNA (1)...(19): siRNA sense strand
gaacaauuaaggcacugua

SEQ ID NO: 145391 - RNA, 19 nt, Homo sapiens
  misc_RNA (1)...(19): siRNA sense strand
uguggagacuguuaaagua

SEQ ID NO: 145392 - RNA, 19 nt, Homo sapiens
  misc_RNA (1)...(19): siRNA sense strand
gcaaaugaggcuaaaggaa

SEQ ID NO: 145393 - RNA, 19 nt, Homo sapiens
  misc_RNA (1)...(19): siRNA sense strand
gauguuagaaucugaaugu

SEQ ID NO: 145394 - RNA, 19 nt, Homo sapiens
  misc_RNA (1)...(19): siRNA sense strand
caacgauguuagaaucuga

SEQ ID NO: 145395 - RNA, 19 nt, Homo sapiens
  misc_RNA (1)...(19): siRNA sense strand
caucaacacuaagagaauu

SEQ ID NO: 145396 - RNA, 19 nt, Homo sapiens
  misc_RNA (1)...(19): siRNA sense strand
ggaaacaacaguucauugg

SEQ ID NO: 145397 - RNA, 19 nt, Homo sapiens
  misc_RNA (1)...(19): siRNA sense strand
cugaaagcaucaacacuaa

SEQ ID NO: 145398 - RNA, 19 nt, Homo sapiens
  misc_RNA (1)...(19): siRNA sense strand
gaagaugaagauaaugcua

SEQ ID NO: 145399 - RNA, 19 nt, Homo sapiens
  misc_RNA (1)...(19): siRNA sense strand
gcaauuccaauccugauga

SEQ ID NO: 145400 - RNA, 19 nt, Homo sapiens
  misc_RNA (1)...(19): siRNA sense strand
cagaaauguucccuaaguu

SEQ ID NO: 145401 - RNA, 19 nt, Homo sapiens
  misc_RNA (1)...(19): siRNA sense strand
caagagaaaucagccaaag

SEQ ID NO: 145402 - RNA, 19 nt, Homo sapiens
  misc_RNA (1)...(19): siRNA sense strand
gugaaaccaucagguguaa

SEQ ID NO: 145403 - RNA, 19 nt, Homo sapiens
  misc_RNA (1)...(19): siRNA sense strand
ugagauagagauagacuuu

SEQ ID NO: 145404 - RNA, 19 nt, Homo sapiens
  misc_RNA (1)...(19): siRNA sense strand
uaacaagccuggagaugac

SEQ ID NO: 145405 - RNA, 19 nt, Homo sapiens
  misc_RNA (1)...(19): siRNA sense strand
cugaacagcucucaaaugg

SEQ ID NO: 145406 - RNA, 19 nt, Homo sapiens
  misc_RNA (1)...(19): siRNA sense strand
cagauucucagcaacaaua

SEQ ID NO: 145407 - RNA, 19 nt, Homo sapiens
  misc_RNA (1)...(19): siRNA sense strand
cgauggaucuuggaacuau

SEQ ID NO: 145408 - RNA, 19 nt, Homo sapiens
  misc_RNA (1)...(19): siRNA sense strand
gaaaagcagccauagaaaa

SEQ ID NO: 145409 - RNA, 19 nt, Homo sapiens
  misc_RNA (1)...(19): siRNA sense strand
caaaacagauaucacagaa

SEQ ID NO: 145410 - RNA, 19 nt, Homo sapiens
  misc_RNA (1)...(19): siRNA sense strand
gaguaugccuuuauguuac

SEQ ID NO: 145411 - RNA, 19 nt, Homo sapiens
  misc_RNA (1)...(19): siRNA sense strand
ggcacaagcucuagagaag

SEQ ID NO: 145412 - RNA, 19 nt, Homo sapiens
  misc_RNA (1)...(19): siRNA sense strand
caaagugacauuaugacaa

SEQ ID NO: 145413 - RNA, 19 nt, Homo sapiens
  misc_RNA (1)...(19): siRNA sense strand
agagauagacuuugaaaca

SEQ ID NO: 145414 - RNA, 19 nt, Homo sapiens
  misc_RNA (1)...(19): siRNA sense strand
gaguuaagcgucuugcaaa

SEQ ID NO: 145415 - RNA, 19 nt, Homo sapiens
  misc_RNA (1)...(19): siRNA sense strand
gcaguuaaagcaaguagug

SEQ ID NO: 145416 - RNA, 19 nt, Homo sapiens
  misc_RNA (1)...(19): siRNA sense strand
aucagaagcucaagauaaa

SEQ ID NO: 145417 - RNA, 19 nt, Homo sapiens
  misc_RNA (1)...(19): siRNA sense strand
caucagguguaaugaaauc

SEQ ID NO: 145418 - RNA, 19 nt, Homo sapiens
  misc_RNA (1)...(19): siRNA sense strand
caccaccaauuagcauuua

SEQ ID NO: 145419 - RNA, 19 nt, Homo sapiens
  misc_RNA (1)...(19): siRNA sense strand
cuaagaaagagaccauuaa

SEQ ID NO: 145420 - RNA, 19 nt, Homo sapiens
  misc_RNA (1)...(19): siRNA sense strand
caacaguucauuggucuaa

SEQ ID NO: 145421 - RNA, 19 nt, Homo sapiens
  misc_RNA (1)...(19): siRNA sense strand
agagaaaucagccaaagaa

SEQ ID NO: 145422 - RNA, 19 nt, Homo sapiens
  misc_RNA (1)...(19): siRNA sense strand
caaguacaauccuccagau

SEQ ID NO: 145423 - RNA, 19 nt, Homo sapiens
  misc_RNA (1)...(19): siRNA sense strand
ugcggcagauguuagauua

SEQ ID NO: 145424 - RNA, 19 nt, Homo sapiens
  misc_RNA (1)...(19): siRNA sense strand
uaacuacuaugacguuguc

SEQ ID NO: 145425 - RNA, 19 nt, Homo sapiens
  misc_RNA (1)...(19): siRNA sense strand
cauacugccugaaggaaga

SEQ ID NO: 145426 - RNA, 19 nt, Homo sapiens
  misc_RNA (1)...(19): siRNA sense strand
ucagagggaucuugggaau

SEQ ID NO: 145427 - RNA, 19 nt, Homo sapiens
  misc_RNA (1)...(19): siRNA sense strand
auacuacccuuguucauca

SEQ ID NO: 145428 - RNA, 19 nt, Homo sapiens
  misc_RNA (1)...(19): siRNA sense strand
gaagaaagaagaagaaaug

SEQ ID NO: 145429 - RNA, 19 nt, Homo sapiens
  misc_RNA (1)...(19): siRNA sense strand
gaaagaagaagaaauggaa

SEQ ID NO: 145430 - RNA, 19 nt, Homo sapiens
  misc_RNA (1)...(19): siRNA sense strand
ugagagaguugacuuguuu

SEQ ID NO: 145431 - RNA, 19 nt, Homo sapiens
  misc_RNA (1)...(19): siRNA sense strand
gaaagaagaaagaagaaga

SEQ ID NO: 145432 - RNA, 19 nt, Homo sapiens
  misc_RNA (1)...(19): siRNA sense strand
ccagaaguccugaaacuaa

SEQ ID NO: 145433 - RNA, 19 nt, Homo sapiens
  misc_RNA (1)...(19): siRNA sense strand
gaaacucuggguaaagaua

SEQ ID NO: 145434 - RNA, 19 nt, Homo sapiens
  misc_RNA (1)...(19): siRNA sense strand
uaacuccuaucaaugaaga

SEQ ID NO: 145435 - RNA, 19 nt, Homo sapiens
  misc_RNA (1)...(19): siRNA sense strand
ggaaaggccacuucucuag

SEQ ID NO: 145436 - RNA, 19 nt, Homo sapiens
  misc_RNA (1)...(19): siRNA sense strand
gaugggaauuccaccagaa

SEQ ID NO: 145437 - RNA, 19 nt, Homo sapiens
  misc_RNA (1)...(19): siRNA sense strand
gaagagacaaauauugcuu

SEQ ID NO: 145438 - RNA, 19 nt, Homo sapiens
  misc_RNA (1)...(19): siRNA sense strand
ggagacagaggacagauuc

SEQ ID NO: 145439 - RNA, 19 nt, Homo sapiens
  misc_RNA (1)...(19): siRNA sense strand
ccaagcaauacaagcauua

SEQ ID NO: 145440 - RNA, 19 nt, Homo sapiens
  misc_RNA (1)...(19): siRNA sense strand
gauagcaguuaugguaguu

SEQ ID NO: 145441 - RNA, 19 nt, Homo sapiens
  misc_RNA (1)...(19): siRNA sense strand
cagaaguccugaaacuaau

SEQ ID NO: 145442 - RNA, 19 nt, Homo sapiens
  misc_RNA (1)...(19): siRNA sense strand
aagaagaaauggaaacucu

SEQ ID NO: 145443 - RNA, 19 nt, Homo sapiens
  misc_RNA (1)...(19): siRNA sense strand
uggaaacucuggguaaaga

SEQ ID NO: 145444 - RNA, 19 nt, Homo sapiens
  misc_RNA (1)...(19): siRNA sense strand
gugagagaguugacuuguu

SEQ ID NO: 145445 - RNA, 19 nt, Homo sapiens
  misc_RNA (1)...(19): siRNA sense strand
gaggaaaacugugcagcua

SEQ ID NO: 145446 - RNA, 19 nt, Homo sapiens
  misc_RNA (1)...(19): siRNA sense strand
uuugauagcaguuauggua

SEQ ID NO: 145447 - RNA, 19 nt, Homo sapiens
  misc_RNA (1)...(19): siRNA sense strand
caccagaaguccugaaacu

SEQ ID NO: 145448 - RNA, 19 nt, Homo sapiens
  misc_RNA (1)...(19): siRNA sense strand
ucuggugauuuguuugaua

SEQ ID NO: 145449 - RNA, 19 nt, Homo sapiens
  misc_RNA (1)...(19): siRNA sense strand
gcagcuaccaccacacaau

SEQ ID NO: 145450 - RNA, 19 nt, Homo sapiens
  misc_RNA (1)...(19): siRNA sense strand
aaauggaaacucuggguaa

SEQ ID NO: 145451 - RNA, 19 nt, Homo sapiens
  misc_RNA (1)...(19): siRNA sense strand
aauggaaacucuggguaaa

SEQ ID NO: 145452 - RNA, 19 nt, Homo sapiens
  misc_RNA (1)...(19): siRNA sense strand
gguaaagauauaacuccua

SEQ ID NO: 145453 - RNA, 19 nt, Homo sapiens
  misc_RNA (1)...(19): siRNA sense strand
aagcauuacugcaucaaag

SEQ ID NO: 145454 - RNA, 19 nt, Homo sapiens
  misc_RNA (1)...(19): siRNA sense strand
ggaaacgucguaaaagaaa

SEQ ID NO: 145455 - RNA, 19 nt, Homo sapiens
  misc_RNA (1)...(19): siRNA sense strand
gcggaaaggccacuucucu

SEQ ID NO: 145456 - RNA, 19 nt, Homo sapiens
  misc_RNA (1)...(19): siRNA sense strand
aaaggccacuucucuaggu

SEQ ID NO: 145457 - RNA, 19 nt, Homo sapiens
  misc_RNA (1)...(19): siRNA sense strand
agauucuggugauuuguuu

SEQ ID NO: 145458 - RNA, 19 nt, Homo sapiens
  misc_RNA (1)...(19): siRNA sense strand
gaagauauugaagagacaa

SEQ ID NO: 145459 - RNA, 19 nt, Homo sapiens
  misc_RNA (1)...(19): siRNA sense strand
cggaaaggccacuucucua

SEQ ID NO: 145460 - RNA, 19 nt, Homo sapiens
  misc_RNA (1)...(19): siRNA sense strand
cccaagcaauacaagcauu

SEQ ID NO: 145461 - RNA, 19 nt, Homo sapiens
  misc_RNA (1)...(19): siRNA sense strand
ugaagauauugaagagaca

SEQ ID NO: 145462 - RNA, 19 nt, Homo sapiens
  misc_RNA (1)...(19): siRNA sense strand
gaagaagaaauggaaacuc

SEQ ID NO: 145463 - RNA, 19 nt, Homo sapiens
  misc_RNA (1)...(19): siRNA sense strand
gagcaaggugugagagagu

SEQ ID NO: 145464 - RNA, 19 nt, Homo sapiens
  misc_RNA (1)...(19): siRNA sense strand
caagcauuacugcaucaaa

SEQ ID NO: 145465 - RNA, 19 nt, Homo sapiens
  misc_RNA (1)...(19): siRNA sense strand
ugauagcaguuaugguagu

SEQ ID NO: 145466 - RNA, 19 nt, Homo sapiens
  misc_RNA (1)...(19): siRNA sense strand
ugaugaaggcuacauugga

SEQ ID NO: 145467 - RNA, 19 nt, Homo sapiens
  misc_RNA (1)...(19): siRNA sense strand
gcaaggugugagagaguug

SEQ ID NO: 145468 - RNA, 19 nt, Homo sapiens
  misc_RNA (1)...(19): siRNA sense strand
agaaagaagaagaaaugga

SEQ ID NO: 145469 - RNA, 19 nt, Homo sapiens
  misc_RNA (1)...(19): siRNA sense strand
ugacuuguuuuaccuaaga

SEQ ID NO: 145470 - RNA, 19 nt, Homo sapiens
  misc_RNA (1)...(19): siRNA sense strand
ggugauuuguuugauagca

SEQ ID NO: 145471 - RNA, 19 nt, Homo sapiens
  misc_RNA (1)...(19): siRNA sense strand
gaaguccugaaacuaaugg

SEQ ID NO: 145472 - RNA, 19 nt, Homo sapiens
  misc_RNA (1)...(19): siRNA sense strand
aaacucuggguaaagauau

SEQ ID NO: 145473 - RNA, 19 nt, Homo sapiens
  misc_RNA (1)...(19): siRNA sense strand
cuggugauuuguuugauag

SEQ ID NO: 145474 - RNA, 19 nt, Homo sapiens
  misc_RNA (1)...(19): siRNA sense strand
uacaagcauuacugcauca

SEQ ID NO: 145475 - RNA, 19 nt, Homo sapiens
  misc_RNA (1)...(19): siRNA sense strand
gggaauuccaccagaaguc

SEQ ID NO: 145476 - RNA, 19 nt, Homo sapiens
  misc_RNA (1)...(19): siRNA sense strand
ucggaaacgucguaaaaga

SEQ ID NO: 145477 - RNA, 19 nt, Homo sapiens
  misc_RNA (1)...(19): siRNA sense strand
ggugugagagaguugacuu

SEQ ID NO: 145478 - RNA, 19 nt, Homo sapiens
  misc_RNA (1)...(19): siRNA sense strand
ggaaacucuggguaaagau

SEQ ID NO: 145479 - RNA, 19 nt, Homo sapiens
  misc_RNA (1)...(19): siRNA sense strand
uagcaguuaugguaguuuu

SEQ ID NO: 145480 - RNA, 19 nt, Homo sapiens
  misc_RNA (1)...(19): siRNA sense strand
gaaguguccuacagaauug

SEQ ID NO: 145481 - RNA, 19 nt, Homo sapiens
  misc_RNA (1)...(19): siRNA sense strand
uaaaauggauccucugauu

SEQ ID NO: 145482 - RNA, 19 nt, Homo sapiens
  misc_RNA (1)...(19): siRNA sense strand
gcagaacauuauaaacauc

SEQ ID NO: 145483 - RNA, 19 nt, Homo sapiens
  misc_RNA (1)...(19): siRNA sense strand
ugaaguguccuacagaauu

SEQ ID NO: 145484 - RNA, 19 nt, Homo sapiens
  misc_RNA (1)...(19): siRNA sense strand
guauucgcaucaaccauaa

SEQ ID NO: 145485 - RNA, 19 nt, Homo sapiens
  misc_RNA (1)...(19): siRNA sense strand
ggcagaacauuauaaacau

SEQ ID NO: 145486 - RNA, 19 nt, Homo sapiens
  misc_RNA (1)...(19): siRNA sense strand
gcacagcggauuggacuga

SEQ ID NO: 145487 - RNA, 19 nt, Homo sapiens
  misc_RNA (1)...(19): siRNA sense strand
cuacagaauuggagaggau

SEQ ID NO: 145488 - RNA, 19 nt, Homo sapiens
  misc_RNA (1)...(19): siRNA sense strand
uaugaaguguccuacagaa

SEQ ID NO: 145489 - RNA, 19 nt, Homo sapiens
  misc_RNA (1)...(19): siRNA sense strand
ccaucugugugcuguauga

SEQ ID NO: 145490 - RNA, 19 nt, Homo sapiens
  misc_RNA (1)...(19): siRNA sense strand
gcagaacgagcccuuccaa

SEQ ID NO: 145491 - RNA, 19 nt, Homo sapiens
  misc_RNA (1)...(19): siRNA sense strand
ggaucggguuaccguugua

SEQ ID NO: 145492 - RNA, 19 nt, Homo sapiens
  misc_RNA (1)...(19): siRNA sense strand
uaaggaggaacuucucuug

SEQ ID NO: 145493 - RNA, 19 nt, Homo sapiens
  misc_RNA (1)...(19): siRNA sense strand
uguauucgcaucaaccaua

SEQ ID NO: 145494 - RNA, 19 nt, Homo sapiens
  misc_RNA (1)...(19): siRNA sense strand
uggcagaacauuauaaaca

SEQ ID NO: 145495 - RNA, 19 nt, Homo sapiens
  misc_RNA (1)...(19): siRNA sense strand
gcaggagguagcacucaaa

SEQ ID NO: 145496 - RNA, 19 nt, Homo sapiens
  misc_RNA (1)...(19): siRNA sense strand
gcuggcagaacauuauaaa

SEQ ID NO: 145497 - RNA, 19 nt, Homo sapiens
  misc_RNA (1)...(19): siRNA sense strand
gggaucggguuaccguugu

SEQ ID NO: 145498 - RNA, 19 nt, Homo sapiens
  misc_RNA (1)...(19): siRNA sense strand
ucaggcuucucccaaguga

SEQ ID NO: 145499 - RNA, 19 nt, Homo sapiens
  misc_RNA (1)...(19): siRNA sense strand
acaauaugaugacuguauc

SEQ ID NO: 145500 - RNA, 19 nt, Homo sapiens
  misc_RNA (1)...(19): siRNA sense strand
ggagguagcacucaaaaca

SEQ ID NO: 145501 - RNA, 19 nt, Homo sapiens
  misc_RNA (1)...(19): siRNA sense strand
ccaaguuucuccgcaccaa

SEQ ID NO: 145502 - RNA, 19 nt, Homo sapiens
  misc_RNA (1)...(19): siRNA sense strand
ccuaugaaguguccuacag

SEQ ID NO: 145503 - RNA, 19 nt, Homo sapiens
  misc_RNA (1)...(19): siRNA sense strand
acuacaauaugaugacugu

SEQ ID NO: 145504 - RNA, 19 nt, Homo sapiens
  misc_RNA (1)...(19): siRNA sense strand
guaaggaggaacuucucuu

SEQ ID NO: 145505 - RNA, 19 nt, Homo sapiens
  misc_RNA (1)...(19): siRNA sense strand
aaauggauccucugauugg

SEQ ID NO: 145506 - RNA, 19 nt, Homo sapiens
  misc_RNA (1)...(19): siRNA sense strand
guucaggcuucucccaagu

SEQ ID NO: 145507 - RNA, 19 nt, Homo sapiens
  misc_RNA (1)...(19): siRNA sense strand
gaugacuguaucagguuaa

SEQ ID NO: 145508 - RNA, 19 nt, Homo sapiens
  misc_RNA (1)...(19): siRNA sense strand
cagaacgagcccuuccaaa

SEQ ID NO: 145509 - RNA, 19 nt, Homo sapiens
  misc_RNA (1)...(19): siRNA sense strand
agcgacagcugcagaccuu

SEQ ID NO: 145510 - RNA, 19 nt, Homo sapiens
  misc_RNA (1)...(19): siRNA sense strand
aaucagcuguaaggaggaa

SEQ ID NO: 145511 - RNA, 19 nt, Homo sapiens
  misc_RNA (1)...(19): siRNA sense strand
agaacgagcccuuccaaaa

SEQ ID NO: 145512 - RNA, 19 nt, Homo sapiens
  misc_RNA (1)...(19): siRNA sense strand
cgacagcugcagaccuuca

SEQ ID NO: 145513 - RNA, 19 nt, Homo sapiens
  misc_RNA (1)...(19): siRNA sense strand
guccuucaucuccaaguuu

SEQ ID NO: 145514 - RNA, 19 nt, Homo sapiens
  misc_RNA (1)...(19): siRNA sense strand
ggagagaaguuuccaucua

SEQ ID NO: 145515 - RNA, 19 nt, Homo sapiens
  misc_RNA (1)...(19): siRNA sense strand
ggagaagaaaguagaaaua

SEQ ID NO: 145516 - RNA, 19 nt, Homo sapiens
  misc_RNA (1)...(19): siRNA sense strand
gggagaaugugaugaagaa

SEQ ID NO: 145517 - RNA, 19 nt, Homo sapiens
  misc_RNA (1)...(19): siRNA sense strand
uggaagaacucaaauggaa

SEQ ID NO: 145518 - RNA, 19 nt, Homo sapiens
  misc_RNA (1)...(19): siRNA sense strand
guucugggcuguagaguug

SEQ ID NO: 145519 - RNA, 19 nt, Homo sapiens
  misc_RNA (1)...(19): siRNA sense strand
caacaugaaugauggaucu

SEQ ID NO: 145520 - RNA, 19 nt, Homo sapiens
  misc_RNA (1)...(19): siRNA sense strand
gagagaaguuuccaucuac

SEQ ID NO: 145521 - RNA, 19 nt, Homo sapiens
  misc_RNA (1)...(19): siRNA sense strand
cagacacucuccauucuaa

SEQ ID NO: 145522 - RNA, 19 nt, Homo sapiens
  misc_RNA (1)...(19): siRNA sense strand
ugauggaucugauaucuau

SEQ ID NO: 145523 - RNA, 19 nt, Homo sapiens
  misc_RNA (1)...(19): siRNA sense strand
cagagacacuucuacgaaa

SEQ ID NO: 145524 - RNA, 19 nt, Homo sapiens
  misc_RNA (1)...(19): siRNA sense strand
ucaagagaauggagaaauc

SEQ ID NO: 145525 - RNA, 19 nt, Homo sapiens
  misc_RNA (1)...(19): siRNA sense strand
gaggauccguggcgucaga

SEQ ID NO: 145526 - RNA, 19 nt, Homo sapiens
  misc_RNA (1)...(19): siRNA sense strand
gcaccucagugggauggua

SEQ ID NO: 145527 - RNA, 19 nt, Homo sapiens
  misc_RNA (1)...(19): siRNA sense strand
ggaagauucacgucagaaa

SEQ ID NO: 145528 - RNA, 19 nt, Homo sapiens
  misc_RNA (1)...(19): siRNA sense strand
gagagaggaggaaugaauu

SEQ ID NO: 145529 - RNA, 19 nt, Homo sapiens
  misc_RNA (1)...(19): siRNA sense strand
gcaggaagccgagcagaug

SEQ ID NO: 145530 - RNA, 19 nt, Homo sapiens
  misc_RNA (1)...(19): siRNA sense strand
gaagaaaguagaaauaucc

SEQ ID NO: 145531 - RNA, 19 nt, Homo sapiens
  misc_RNA (1)...(19): siRNA sense strand
ggauggaagcuacgaagaa

SEQ ID NO: 145532 - RNA, 19 nt, Homo sapiens
  misc_RNA (1)...(19): siRNA sense strand
ggaagaacucaaauggaaa

SEQ ID NO: 145533 - RNA, 19 nt, Homo sapiens
  misc_RNA (1)...(19): siRNA sense strand
cuaaggagaucccauuguc

SEQ ID NO: 145534 - RNA, 19 nt, Homo sapiens
  misc_RNA (1)...(19): siRNA sense strand
ccgagcagaugcccgagua

SEQ ID NO: 145535 - RNA, 19 nt, Homo sapiens
  misc_RNA (1)...(19): siRNA sense strand
gcuguagaguuguauggaa

SEQ ID NO: 145536 - RNA, 19 nt, Homo sapiens
  misc_RNA (1)...(19): siRNA sense strand
gaaauauccauaccagcuu

SEQ ID NO: 145537 - RNA, 19 nt, Homo sapiens
  misc_RNA (1)...(19): siRNA sense strand
guaugcaaguucaagagaa

SEQ ID NO: 145538 - RNA, 19 nt, Homo sapiens
  misc_RNA (1)...(19): siRNA sense strand
gauggaagcuacgaagaag

SEQ ID NO: 145539 - RNA, 19 nt, Homo sapiens
  misc_RNA (1)...(19): siRNA sense strand
gaaguuuccaucuacauca

SEQ ID NO: 145540 - RNA, 19 nt, Homo sapiens
  misc_RNA (1)...(19): siRNA sense strand
guagggagaaugugaugaa

SEQ ID NO: 145541 - RNA, 19 nt, Homo sapiens
  misc_RNA (1)...(19): siRNA sense strand
gcagacacucuccauucua

SEQ ID NO: 145542 - RNA, 19 nt, Homo sapiens
  misc_RNA (1)...(19): siRNA sense strand
ggauucagcucccuuugac

SEQ ID NO: 145543 - RNA, 19 nt, Homo sapiens
  misc_RNA (1)...(19): siRNA sense strand
ucacaucaguaugcaaguu

SEQ ID NO: 145544 - RNA, 19 nt, Homo sapiens
  misc_RNA (1)...(19): siRNA sense strand
aagagagacuccuggaaga

SEQ ID NO: 145545 - RNA, 19 nt, Homo sapiens
  misc_RNA (1)...(19): siRNA sense strand
ccagagagaggaggaauga

SEQ ID NO: 145546 - RNA, 19 nt, Homo sapiens
  misc_RNA (1)...(19): siRNA sense strand
gagacuauacaacgaaaga

SEQ ID NO: 145547 - RNA, 19 nt, Homo sapiens
  misc_RNA (1)...(19): siRNA sense strand
ucagagacacuucuacgaa

SEQ ID NO: 145548 - RNA, 19 nt, Homo sapiens
  misc_RNA (1)...(19): siRNA sense strand
gacaggagaagaaaguaga

SEQ ID NO: 145549 - RNA, 19 nt, Homo sapiens
  misc_RNA (1)...(19): siRNA sense strand
ccuauggucuagcgguaaa

SEQ ID NO: 145550 - RNA, 19 nt, Homo sapiens
  misc_RNA (1)...(19): siRNA sense strand
gaacuuccaagggagagaa

SEQ ID NO: 145551 - RNA, 19 nt, Homo sapiens
  misc_RNA (1)...(19): siRNA sense strand
cugaccaucugcccaauug

SEQ ID NO: 145552 - RNA, 19 nt, Homo sapiens
  misc_RNA (1)...(19): siRNA sense strand
gaagaacucaaauggaaaa

SEQ ID NO: 145553 - RNA, 19 nt, Homo sapiens
  misc_RNA (1)...(19): siRNA sense strand
ggacaggagaagaaaguag

SEQ ID NO: 145554 - RNA, 19 nt, Homo sapiens
  misc_RNA (1)...(19): siRNA sense strand
aagaagcccuggugcaucu

SEQ ID NO: 145555 - RNA, 19 nt, Homo sapiens
  misc_RNA (1)...(19): siRNA sense strand
gagaaugugaugaagaaag

SEQ ID NO: 145556 - RNA, 19 nt, Homo sapiens
  misc_RNA (1)...(19): siRNA sense strand
gaaacugccugagaaaaca

SEQ ID NO: 145557 - RNA, 19 nt, Homo sapiens
  misc_RNA (1)...(19): siRNA sense strand
uaugcaaguucaagagaau

SEQ ID NO: 145558 - RNA, 19 nt, Homo sapiens
  misc_RNA (1)...(19): siRNA sense strand
uauacuuucuccaauguca

SEQ ID NO: 145559 - RNA, 19 nt, Homo sapiens
  misc_RNA (1)...(19): siRNA sense strand
guagaguuguauggaaaug

SEQ ID NO: 145560 - RNA, 19 nt, Homo sapiens
  misc_RNA (1)...(19): siRNA sense strand
agaaugugaugaagaaagg

SEQ ID NO: 145561 - RNA, 19 nt, Homo sapiens
  misc_RNA (1)...(19): siRNA sense strand
cuacgcugguuccgaaaga

SEQ ID NO: 145562 - RNA, 19 nt, Homo sapiens
  misc_RNA (1)...(19): siRNA sense strand
caccauuggguccauauuu

SEQ ID NO: 145563 - RNA, 19 nt, Homo sapiens
  misc_RNA (1)...(19): siRNA sense strand
aagaagguuuguucacugu

SEQ ID NO: 145564 - RNA, 19 nt, Homo sapiens
  misc_RNA (1)...(19): siRNA sense strand
gacaucuccuucuacaaca

SEQ ID NO: 145565 - RNA, 19 nt, Homo sapiens
  misc_RNA (1)...(19): siRNA sense strand
ucuaggacuucucaccauu

SEQ ID NO: 145566 - RNA, 19 nt, Homo sapiens
  misc_RNA (1)...(19): siRNA sense strand
caggugcaguggagaacuu

SEQ ID NO: 145567 - RNA, 19 nt, Homo sapiens
  misc_RNA (1)...(19): siRNA sense strand
gagagggucacagucauug

SEQ ID NO: 145568 - RNA, 19 nt, Homo sapiens
  misc_RNA (1)...(19): siRNA sense strand
ucuauacuuucuccaaugu

SEQ ID NO: 145569 - RNA, 19 nt, Homo sapiens
  misc_RNA (1)...(19): siRNA sense strand
ugaaugauggaucugauau

SEQ ID NO: 145570 - RNA, 19 nt, Homo sapiens
  misc_RNA (1)...(19): siRNA sense strand
cuguagaguuguauggaaa

SEQ ID NO: 145571 - RNA, 19 nt, Homo sapiens
  misc_RNA (1)...(19): siRNA sense strand
gaagauucacgucagaaac

SEQ ID NO: 145572 - RNA, 19 nt, Homo sapiens
  misc_RNA (1)...(19): siRNA sense strand
aaggcugacucccuggaua

SEQ ID NO: 145573 - RNA, 19 nt, Homo sapiens
  misc_RNA (1)...(19): siRNA sense strand
agagagaggaggaaugaau

SEQ ID NO: 145574 - RNA, 19 nt, Homo sapiens
  misc_RNA (1)...(19): siRNA sense strand
gcuaaugcccaggaccuuu

SEQ ID NO: 145575 - RNA, 19 nt, Homo sapiens
  misc_RNA (1)...(19): siRNA sense strand
gggucacagucauugcuaa

SEQ ID NO: 145576 - RNA, 19 nt, Homo sapiens
  misc_RNA (1)...(19): siRNA sense strand
uaaagagagacuccuggaa

SEQ ID NO: 145577 - RNA, 19 nt, Homo sapiens
  misc_RNA (1)...(19): siRNA sense strand
ggauuuuccuagacuauga

SEQ ID NO: 145578 - RNA, 19 nt, Homo sapiens
  misc_RNA (1)...(19): siRNA sense strand
caugaaugauggaucugau

SEQ ID NO: 145579 - RNA, 19 nt, Homo sapiens
  misc_RNA (1)...(19): siRNA sense strand
gaauccugaugaagaaggu

SEQ ID NO: 145580 - RNA, 19 nt, Homo sapiens
  misc_RNA (1)...(19): siRNA sense strand
aaugauggaucugauaucu

SEQ ID NO: 145581 - RNA, 19 nt, Homo sapiens
  misc_RNA (1)...(19): siRNA sense strand
ccugaugguucuaggacuu

SEQ ID NO: 145582 - RNA, 19 nt, Homo sapiens
  misc_RNA (1)...(19): siRNA sense strand
cgaagaagcccuggugcau

SEQ ID NO: 145583 - RNA, 19 nt, Homo sapiens
  misc_RNA (1)...(19): siRNA sense strand
agacaucuccuucuacaac

SEQ ID NO: 145584 - RNA, 19 nt, Homo sapiens
  misc_RNA (1)...(19): siRNA sense strand
ugaugaagaagguuuguuc

SEQ ID NO: 145585 - RNA, 19 nt, Homo sapiens
  misc_RNA (1)...(19): siRNA sense strand
gaaugauggaucugauauc

SEQ ID NO: 145586 - RNA, 19 nt, Homo sapiens
  misc_RNA (1)...(19): siRNA sense strand
uggagacuauacaacgaaa

SEQ ID NO: 145587 - RNA, 19 nt, Homo sapiens
  misc_RNA (1)...(19): siRNA sense strand
ucacuuggagacuauacaa

SEQ ID NO: 145588 - RNA, 19 nt, Homo sapiens
  misc_RNA (1)...(19): siRNA sense strand
uggcugcucugggcucuga

SEQ ID NO: 145589 - RNA, 19 nt, Homo sapiens
  misc_RNA (1)...(19): siRNA sense strand
cuacaucagaguccaggaa

SEQ ID NO: 145590 - RNA, 19 nt, Homo sapiens
  misc_RNA (1)...(19): siRNA sense strand
gaugcagacacucuccauu

SEQ ID NO: 145591 - RNA, 19 nt, Homo sapiens
  misc_RNA (1)...(19): siRNA sense strand
ugagagggucacagucauu

SEQ ID NO: 145592 - RNA, 19 nt, Homo sapiens
  misc_RNA (1)...(19): siRNA sense strand
gaagcccuggugcaucuga

SEQ ID NO: 145593 - RNA, 19 nt, Homo sapiens
  misc_RNA (1)...(19): siRNA sense strand
agagaaguuuccaucuaca

SEQ ID NO: 145594 - RNA, 19 nt, Homo sapiens
  misc_RNA (1)...(19): siRNA sense strand
gaucaucagagacacuucu

SEQ ID NO: 145595 - RNA, 19 nt, Homo sapiens
  misc_RNA (1)...(19): siRNA sense strand
caagagaauggagaaaucu

SEQ ID NO: 145596 - RNA, 19 nt, Homo sapiens
  misc_RNA (1)...(19): siRNA sense strand
ggucacagucauugcuaau

SEQ ID NO: 145597 - RNA, 19 nt, Homo sapiens
  misc_RNA (1)...(19): siRNA sense strand
gaugucugcucacccucau

SEQ ID NO: 145598 - RNA, 19 nt, Homo sapiens
  misc_RNA (1)...(19): siRNA sense strand
uuuccuagacuaugaauca

SEQ ID NO: 145599 - RNA, 19 nt, Homo sapiens
  misc_RNA (1)...(19): siRNA sense strand
gagaaaacagagagauuug

SEQ ID NO: 145600 - RNA, 19 nt, Homo sapiens
  misc_RNA (1)...(19): siRNA sense strand
aacgaaagacccagagaga

SEQ ID NO: 145601 - RNA, 19 nt, Homo sapiens
  misc_RNA (1)...(19): siRNA sense strand
ccugcuacauccagaaucu

SEQ ID NO: 145602 - RNA, 19 nt, Homo sapiens
  misc_RNA (1)...(19): siRNA sense strand
gagaaguuuccaucuacau

SEQ ID NO: 145603 - RNA, 19 nt, Homo sapiens
  misc_RNA (1)...(19): siRNA sense strand
ccaccucuuucuuuaugag

SEQ ID NO: 145604 - RNA, 19 nt, Homo sapiens
  misc_RNA (1)...(19): siRNA sense strand
ccugagagggucacaguca

SEQ ID NO: 145605 - RNA, 19 nt, Homo sapiens
  misc_RNA (1)...(19): siRNA sense strand
ucugggcuguagaguugua

SEQ ID NO: 145606 - RNA, 19 nt, Homo sapiens
  misc_RNA (1)...(19): siRNA sense strand
gacuaugaaucaggagaca

SEQ ID NO: 145607 - RNA, 19 nt, Homo sapiens
  misc_RNA (1)...(19): siRNA sense strand
ggagaaugugaugaagaaa

SEQ ID NO: 145608 - RNA, 19 nt, Homo sapiens
  misc_RNA (1)...(19): siRNA sense strand
ugagaaaacagagagauuu

SEQ ID NO: 145609 - RNA, 19 nt, Homo sapiens
  misc_RNA (1)...(19): siRNA sense strand
acucuccauucuaagcuaa

SEQ ID NO: 145610 - RNA, 19 nt, Homo sapiens
  misc_RNA (1)...(19): siRNA sense strand
ggaggauggaagcuacgaa

SEQ ID NO: 145611 - RNA, 19 nt, Homo sapiens
  misc_RNA (1)...(19): siRNA sense strand
gaauggguucugggcugua

SEQ ID NO: 145612 - RNA, 19 nt, Homo sapiens
  misc_RNA (1)...(19): siRNA sense strand
uaacuuggaucaucuguaa

SEQ ID NO: 145613 - RNA, 19 nt, Homo sapiens
  misc_RNA (1)...(19): siRNA sense strand
ggacaacgauaaccgauca

SEQ ID NO: 145614 - RNA, 19 nt, Homo sapiens
  misc_RNA (1)...(19): siRNA sense strand
ucacguagcucacuggaau

SEQ ID NO: 145615 - RNA, 19 nt, Homo sapiens
  misc_RNA (1)...(19): siRNA sense strand
cagagcagcuggcacaauu

SEQ ID NO: 145616 - RNA, 19 nt, Homo sapiens
  misc_RNA (1)...(19): siRNA sense strand
gcuacaggcucuuucaguu

SEQ ID NO: 145617 - RNA, 19 nt, Homo sapiens
  misc_RNA (1)...(19): siRNA sense strand
gcugaugguuuggcaguua

SEQ ID NO: 145618 - RNA, 19 nt, Homo sapiens
  misc_RNA (1)...(19): siRNA sense strand
ugacucauccuccucuuua

SEQ ID NO: 145619 - RNA, 19 nt, Homo sapiens
  misc_RNA (1)...(19): siRNA sense strand
caaauauucugccgagcuu

SEQ ID NO: 145620 - RNA, 19 nt, Homo sapiens
  misc_RNA (1)...(19): siRNA sense strand
gggcauucuuuccauguaa

SEQ ID NO: 145621 - RNA, 19 nt, Homo sapiens
  misc_RNA (1)...(19): siRNA sense strand
caaaugagcaugguucaga

SEQ ID NO: 145622 - RNA, 19 nt, Homo sapiens
  misc_RNA (1)...(19): siRNA sense strand
gaacagugagagcuucauu

SEQ ID NO: 145623 - RNA, 19 nt, Homo sapiens
  misc_RNA (1)...(19): siRNA sense strand
aaacaugacaccucucuga

SEQ ID NO: 145624 - RNA, 19 nt, Homo sapiens
  misc_RNA (1)...(19): siRNA sense strand
ccucaaaggcugaugguuu

SEQ ID NO: 145625 - RNA, 19 nt, Homo sapiens
  misc_RNA (1)...(19): siRNA sense strand
ccagugaaaccaaacauga

SEQ ID NO: 145626 - RNA, 19 nt, Homo sapiens
  misc_RNA (1)...(19): siRNA sense strand
acccaaagcugcagaaagu

SEQ ID NO: 145627 - RNA, 19 nt, Homo sapiens
  misc_RNA (1)...(19): siRNA sense strand
guaaggagagcaucagugu

SEQ ID NO: 145628 - RNA, 19 nt, Homo sapiens
  misc_RNA (1)...(19): siRNA sense strand
uacaguggauggagucaaa

SEQ ID NO: 145629 - RNA, 19 nt, Homo sapiens
  misc_RNA (1)...(19): siRNA sense strand
gaguguaacuuggaucauc

SEQ ID NO: 145630 - RNA, 19 nt, Homo sapiens
  misc_RNA (1)...(19): siRNA sense strand
acaccucucugaaaccuau

SEQ ID NO: 145631 - RNA, 19 nt, Homo sapiens
  misc_RNA (1)...(19): siRNA sense strand
uggauggagucaaauauuc

SEQ ID NO: 145632 - RNA, 19 nt, Homo sapiens
  misc_RNA (1)...(19): siRNA sense strand
ucacuggaauucugcaaag

SEQ ID NO: 145633 - RNA, 19 nt, Homo sapiens
  misc_RNA (1)...(19): siRNA sense strand
caugacaccucucugaaac

SEQ ID NO: 145634 - RNA, 19 nt, Homo sapiens
  misc_RNA (1)...(19): siRNA sense strand
aaaugagcaugguucagaa

SEQ ID NO: 145635 - RNA, 19 nt, Homo sapiens
  misc_RNA (1)...(19): siRNA sense strand
ggcauucuuuccauguaaa

SEQ ID NO: 145636 - RNA, 19 nt, Homo sapiens
  misc_RNA (1)...(19): siRNA sense strand
caacccagccacagccaaa

SEQ ID NO: 145637 - RNA, 19 nt, Homo sapiens
  misc_RNA (1)...(19): siRNA sense strand
guagcucacuggaauucug

SEQ ID NO: 145638 - RNA, 19 nt, Homo sapiens
  misc_RNA (1)...(19): siRNA sense strand
gcagccuucuaucaaaugu

SEQ ID NO: 145639 - RNA, 19 nt, Homo sapiens
  misc_RNA (1)...(19): siRNA sense strand
agugagagcuucauuuuga

SEQ ID NO: 145640 - RNA, 19 nt, Homo sapiens
  misc_RNA (1)...(19): siRNA sense strand
guggauggagucaaauauu

SEQ ID NO: 145641 - RNA, 19 nt, Homo sapiens
  misc_RNA (1)...(19): siRNA sense strand
gagaguguaacuuggauca

SEQ ID NO: 145642 - RNA, 19 nt, Homo sapiens
  misc_RNA (1)...(19): siRNA sense strand
uaaaaccagugaaaccaaa

SEQ ID NO: 145643 - RNA, 19 nt, Homo sapiens
  misc_RNA (1)...(19): siRNA sense strand
ccacagccaaagaaauuau

SEQ ID NO: 145644 - RNA, 19 nt, Homo sapiens
  misc_RNA (1)...(19): siRNA sense strand
aaggagagcaucaguguca

SEQ ID NO: 145645 - RNA, 19 nt, Homo sapiens
  misc_RNA (1)...(19): siRNA sense strand
cuauuagugucuccuacaa

SEQ ID NO: 145646 - RNA, 19 nt, Homo sapiens
  misc_RNA (1)...(19): siRNA sense strand
ccgcagccuucuaucaaau

SEQ ID NO: 145647 - RNA, 19 nt, Homo sapiens
  misc_RNA (1)...(19): siRNA sense strand
gagcaagcuguaucccauu

SEQ ID NO: 145648 - RNA, 19 nt, Homo sapiens
  misc_RNA (1)...(19): siRNA sense strand
gccaaagaaauuaucaaug

SEQ ID NO: 145649 - RNA, 19 nt, Homo sapiens
  misc_RNA (1)...(19): siRNA sense strand
cugaagggcagaacaguga

SEQ ID NO: 145650 - RNA, 19 nt, Homo sapiens
  misc_RNA (1)...(19): siRNA sense strand
aaaugguccugaacaaugg

SEQ ID NO: 145651 - RNA, 19 nt, Homo sapiens
  misc_RNA (1)...(19): siRNA sense strand
ggaauucugcaaaguacuc

SEQ ID NO: 145652 - RNA, 19 nt, Homo sapiens
  misc_RNA (1)...(19): siRNA sense strand
gaagggcagaacagugaga

SEQ ID NO: 145653 - RNA, 19 nt, Homo sapiens
  misc_RNA (1)...(19): siRNA sense strand
caauuccgcagccuucuau

SEQ ID NO: 145654 - RNA, 19 nt, Homo sapiens
  misc_RNA (1)...(19): siRNA sense strand
gaugcccuccaagcaauua

SEQ ID NO: 145655 - RNA, 19 nt, Homo sapiens
  misc_RNA (1)...(19): siRNA sense strand
agccacagccaaagaaauu

SEQ ID NO: 145656 - RNA, 19 nt, Homo sapiens
  misc_RNA (1)...(19): siRNA sense strand
guaacuuggaucaucugua

SEQ ID NO: 145657 - RNA, 19 nt, Homo sapiens
  misc_RNA (1)...(19): siRNA sense strand
ggaccuacccuggcucucu

SEQ ID NO: 145658 - RNA, 19 nt, Homo sapiens
  misc_RNA (1)...(19): siRNA sense strand
agccuucuaucaaauguug

SEQ ID NO: 145659 - RNA, 19 nt, Homo sapiens
  misc_RNA (1)...(19): siRNA sense strand
uuuaugagaguguaacuug

SEQ ID NO: 145660 - RNA, 19 nt, Homo sapiens
  misc_RNA (1)...(19): siRNA sense strand
ucucugaaaccuauuagug

SEQ ID NO: 145661 - RNA, 19 nt, Homo sapiens
  misc_RNA (1)...(19): siRNA sense strand
ugacagcuacaggcucuuu

SEQ ID NO: 145662 - RNA, 19 nt, Homo sapiens
  misc_RNA (1)...(19): siRNA sense strand
acaugacaccucucugaaa

SEQ ID NO: 145663 - RNA, 19 nt, Homo sapiens
  misc_RNA (1)...(19): siRNA sense strand
gcaucagugucagcucaga

SEQ ID NO: 145664 - RNA, 19 nt, Homo sapiens
  misc_RNA (1)...(19): siRNA sense strand
gacucauccuccucuuuau

SEQ ID NO: 145665 - RNA, 19 nt, Homo sapiens
  misc_RNA (1)...(19): siRNA sense strand
cuacucuccuuccuucauc

SEQ ID NO: 145666 - RNA, 19 nt, Homo sapiens
  misc_RNA (1)...(19): siRNA sense strand
ggauggagucaaauauucu

SEQ ID NO: 145667 - RNA, 19 nt, Homo sapiens
  misc_RNA (1)...(19): siRNA sense strand
caguggauggagucaaaua

SEQ ID NO: 145668 - RNA, 19 nt, Homo sapiens
  misc_RNA (1)...(19): siRNA sense strand
gccacagccaaagaaauua

SEQ ID NO: 145669 - RNA, 19 nt, Homo sapiens
  misc_RNA (1)...(19): siRNA sense strand
ccaaagcugcagaaaguac

SEQ ID NO: 145670 - RNA, 19 nt, Homo sapiens
  misc_RNA (1)...(19): siRNA sense strand
ggugguccuuucucugaca

SEQ ID NO: 145671 - RNA, 19 nt, Homo sapiens
  misc_RNA (1)...(19): siRNA sense strand
caauggagcaagcuguauc

SEQ ID NO: 145672 - RNA, 19 nt, Homo sapiens
  misc_RNA (1)...(19): siRNA sense strand
ccaaacaugacaccucucu

SEQ ID NO: 145673 - RNA, 19 nt, Homo sapiens
  misc_RNA (1)...(19): siRNA sense strand
gagccccauucacaaauuu

SEQ ID NO: 145674 - RNA, 19 nt, Homo sapiens
  misc_RNA (1)...(19): siRNA sense strand
caaacgagccccauucaca

SEQ ID NO: 145675 - RNA, 19 nt, Homo sapiens
  misc_RNA (1)...(19): siRNA sense strand
caaauguugaaggugauaa

SEQ ID NO: 145676 - RNA, 19 nt, Homo sapiens
  misc_RNA (1)...(19): siRNA sense strand
acuggaauucugcaaagua

SEQ ID NO: 145677 - RNA, 19 nt, Homo sapiens
  misc_RNA (1)...(19): siRNA sense strand
uaugagaguguaacuugga

SEQ ID NO: 145678 - RNA, 19 nt, Homo sapiens
  misc_RNA (1)...(19): siRNA sense strand
cugcagaaaguacuugaug

SEQ ID NO: 145679 - RNA, 19 nt, Homo sapiens
  misc_RNA (1)...(19): siRNA sense strand
uccgcagccuucuaucaaa

SEQ ID NO: 145680 - RNA, 19 nt, Homo sapiens
  misc_RNA (1)...(19): siRNA sense strand
uugaugcccuccaagcaau

SEQ ID NO: 145681 - RNA, 19 nt, Homo sapiens
  misc_RNA (1)...(19): siRNA sense strand
agcaagcuguaucccauug

SEQ ID NO: 145682 - RNA, 19 nt, Homo sapiens
  misc_RNA (1)...(19): siRNA sense strand
caacccaaagcugcagaaa

SEQ ID NO: 145683 - RNA, 19 nt, Homo sapiens
  misc_RNA (1)...(19): siRNA sense strand
aacaauggagcaagcugua

SEQ ID NO: 145684 - RNA, 19 nt, Homo sapiens
  misc_RNA (1)...(19): siRNA sense strand
ugcugaagcugccucaaag

SEQ ID NO: 145685 - RNA, 19 nt, Homo sapiens
  misc_RNA (1)...(19): siRNA sense strand
gaacaacuaucgcccacuu

SEQ ID NO: 145686 - RNA, 19 nt, Homo sapiens
  misc_RNA (1)...(19): siRNA sense strand
gagaaugguuuggcuguga

SEQ ID NO: 145687 - RNA, 19 nt, Homo sapiens
  misc_RNA (1)...(19): siRNA sense strand
caagccagcucucugcauu

SEQ ID NO: 145688 - RNA, 19 nt, Homo sapiens
  misc_RNA (1)...(19): siRNA sense strand
ggaauucugugaaauacca

SEQ ID NO: 145689 - RNA, 19 nt, Homo sapiens
  misc_RNA (1)...(19): siRNA sense strand
gaaaaccacuacagacuga

SEQ ID NO: 145690 - RNA, 19 nt, Homo sapiens
  misc_RNA (1)...(19): siRNA sense strand
gcauuuaguucacuggaau

SEQ ID NO: 145691 - RNA, 19 nt, Homo sapiens
  misc_RNA (1)...(19): siRNA sense strand
gaaggagcccguugaagug

SEQ ID NO: 145692 - RNA, 19 nt, Homo sapiens
  misc_RNA (1)...(19): siRNA sense strand
ggagggacagcgucuauga

SEQ ID NO: 145693 - RNA, 19 nt, Homo sapiens
  misc_RNA (1)...(19): siRNA sense strand
gaacacuggcuaccucuuc

SEQ ID NO: 145694 - RNA, 19 nt, Homo sapiens
  misc_RNA (1)...(19): siRNA sense strand
ggacaucuugccggaaaua

SEQ ID NO: 145695 - RNA, 19 nt, Homo sapiens
  misc_RNA (1)...(19): siRNA sense strand
guggacaucuugccggaaa

SEQ ID NO: 145696 - RNA, 19 nt, Homo sapiens
  misc_RNA (1)...(19): siRNA sense strand
agaagaugauggugaacaa

SEQ ID NO: 145697 - RNA, 19 nt, Homo sapiens
  misc_RNA (1)...(19): siRNA sense strand
gggaggaacacuuggaaga

SEQ ID NO: 145698 - RNA, 19 nt, Homo sapiens
  misc_RNA (1)...(19): siRNA sense strand
gcauggcaaaccagcaaua

SEQ ID NO: 145699 - RNA, 19 nt, Homo sapiens
  misc_RNA (1)...(19): siRNA sense strand
acccggcagucuccuauua

SEQ ID NO: 145700 - RNA, 19 nt, Homo sapiens
  misc_RNA (1)...(19): siRNA sense strand
agaaggagcccguugaagu

SEQ ID NO: 145701 - RNA, 19 nt, Homo sapiens
  misc_RNA (1)...(19): siRNA sense strand
aggagaagaugauggugaa

SEQ ID NO: 145702 - RNA, 19 nt, Homo sapiens
  misc_RNA (1)...(19): siRNA sense strand
gcagucuccuauuaacauc

SEQ ID NO: 145703 - RNA, 19 nt, Homo sapiens
  misc_RNA (1)...(19): siRNA sense strand
agaugauggugaacaacua

SEQ ID NO: 145704 - RNA, 19 nt, Homo sapiens
  misc_RNA (1)...(19): siRNA sense strand
acuacagacugaagcaauu

SEQ ID NO: 145705 - RNA, 19 nt, Homo sapiens
  misc_RNA (1)...(19): siRNA sense strand
caaaccagcaauaacacuu

SEQ ID NO: 145706 - RNA, 19 nt, Homo sapiens
  misc_RNA (1)...(19): siRNA sense strand
aaaccagcaauaacacuuu

SEQ ID NO: 145707 - RNA, 19 nt, Homo sapiens
  misc_RNA (1)...(19): siRNA sense strand
uggcaaaccagcaauaaca

SEQ ID NO: 145708 - RNA, 19 nt, Homo sapiens
  misc_RNA (1)...(19): siRNA sense strand
gaugauggugaacaacuau

SEQ ID NO: 145709 - RNA, 19 nt, Homo sapiens
  misc_RNA (1)...(19): siRNA sense strand
gugaagaggagaagaugau

SEQ ID NO: 145710 - RNA, 19 nt, Homo sapiens
  misc_RNA (1)...(19): siRNA sense strand
gaaugguuuggcugugaua

SEQ ID NO: 145711 - RNA, 19 nt, Homo sapiens
  misc_RNA (1)...(19): siRNA sense strand
uuaguucacuggaauucug

SEQ ID NO: 145712 - RNA, 19 nt, Homo sapiens
  misc_RNA (1)...(19): siRNA sense strand
uggaagaccucagcuuucu

SEQ ID NO: 145713 - RNA, 19 nt, Homo sapiens
  misc_RNA (1)...(19): siRNA sense strand
ccagaaggagcccguugaa

SEQ ID NO: 145714 - RNA, 19 nt, Homo sapiens
  misc_RNA (1)...(19): siRNA sense strand
gagaagaugauggugaaca

SEQ ID NO: 145715 - RNA, 19 nt, Homo sapiens
  misc_RNA (1)...(19): siRNA sense strand
gcacccggcagucuccuau

SEQ ID NO: 145716 - RNA, 19 nt, Homo sapiens
  misc_RNA (1)...(19): siRNA sense strand
acuggaauucugugaaaua

SEQ ID NO: 145717 - RNA, 19 nt, Homo sapiens
  misc_RNA (1)...(19): siRNA sense strand
accgaggcaucaggaauua

SEQ ID NO: 145718 - RNA, 19 nt, Homo sapiens
  misc_RNA (1)...(19): siRNA sense strand
caccgaggcaucaggaauu

SEQ ID NO: 145719 - RNA, 19 nt, Homo sapiens
  misc_RNA (1)...(19): siRNA sense strand
cauccugccuguacaucug

SEQ ID NO: 145720 - RNA, 19 nt, Homo sapiens
  misc_RNA (1)...(19): siRNA sense strand
ccucagcuuucuccuucuu

SEQ ID NO: 145721 - RNA, 19 nt, Homo sapiens
  misc_RNA (1)...(19): siRNA sense strand
cauggcaaaccagcaauaa

SEQ ID NO: 145722 - RNA, 19 nt, Homo sapiens
  misc_RNA (1)...(19): siRNA sense strand
cuacagacugaagcaauuu

SEQ ID NO: 145723 - RNA, 19 nt, Homo sapiens
  misc_RNA (1)...(19): siRNA sense strand
cacucagggucuccuauga

SEQ ID NO: 145724 - RNA, 19 nt, Homo sapiens
  misc_RNA (1)...(19): siRNA sense strand
aaccagcaauaacacuuug

SEQ ID NO: 145725 - RNA, 19 nt, Homo sapiens
  misc_RNA (1)...(19): siRNA sense strand
ccagggcgaugguguucuc

SEQ ID NO: 145726 - RNA, 19 nt, Homo sapiens
  misc_RNA (1)...(19): siRNA sense strand
ggcagucuccuauuaacau

SEQ ID NO: 145727 - RNA, 19 nt, Homo sapiens
  misc_RNA (1)...(19): siRNA sense strand
cuuggaagaccucagcuuu

SEQ ID NO: 145728 - RNA, 19 nt, Homo sapiens
  misc_RNA (1)...(19): siRNA sense strand
caacuaucgcccacuucaa

SEQ ID NO: 145729 - RNA, 19 nt, Homo sapiens
  misc_RNA (1)...(19): siRNA sense strand
gaagcugucgugggagaga

SEQ ID NO: 145730 - RNA, 19 nt, Homo sapiens
  misc_RNA (1)...(19): siRNA sense strand
ccacucagggucuccuaug

SEQ ID NO: 145731 - RNA, 19 nt, Homo sapiens
  misc_RNA (1)...(19): siRNA sense strand
gcaaaccagcaauaacacu

SEQ ID NO: 145732 - RNA, 19 nt, Homo sapiens
  misc_RNA (1)...(19): siRNA sense strand
ggugaagaggagaagauga

SEQ ID NO: 145733 - RNA, 19 nt, Homo sapiens
  misc_RNA (1)...(19): siRNA sense strand
gugcauggcaaaccagcaa

SEQ ID NO: 145734 - RNA, 19 nt, Homo sapiens
  misc_RNA (1)...(19): siRNA sense strand
gagcugcauuuaguucacu

SEQ ID NO: 145735 - RNA, 19 nt, Homo sapiens
  misc_RNA (1)...(19): siRNA sense strand
ccagcucucugcauuucgu

SEQ ID NO: 145736 - RNA, 19 nt, Homo sapiens
  misc_RNA (1)...(19): siRNA sense strand
uuucugcacuuggugaaga

SEQ ID NO: 145737 - RNA, 19 nt, Homo sapiens
  misc_RNA (1)...(19): siRNA sense strand
ccaccgaggcaucaggaau

SEQ ID NO: 145738 - RNA, 19 nt, Homo sapiens
  misc_RNA (1)...(19): siRNA sense strand
agaaugguuuggcugugau

SEQ ID NO: 145739 - RNA, 19 nt, Homo sapiens
  misc_RNA (1)...(19): siRNA sense strand
ggaggaacacuuggaagac

SEQ ID NO: 145740 - RNA, 19 nt, Homo sapiens
  misc_RNA (1)...(19): siRNA sense strand
cgaggcaucaggaauuagu

SEQ ID NO: 145741 - RNA, 19 nt, Homo sapiens
  misc_RNA (1)...(19): siRNA sense strand
gaaaggcucuggcaugaug

SEQ ID NO: 145742 - RNA, 19 nt, Homo sapiens
  misc_RNA (1)...(19): siRNA sense strand
ccaaugagcucaagggauu

SEQ ID NO: 145743 - RNA, 19 nt, Homo sapiens
  misc_RNA (1)...(19): siRNA sense strand
gcaaggaccuggagauugu

SEQ ID NO: 145744 - RNA, 19 nt, Homo sapiens
  misc_RNA (1)...(19): siRNA sense strand
ggaauacacccaaaccaua

SEQ ID NO: 145745 - RNA, 19 nt, Homo sapiens
  misc_RNA (1)...(19): siRNA sense strand
ggaaauggguauauugaag

SEQ ID NO: 145746 - RNA, 19 nt, Homo sapiens
  misc_RNA (1)...(19): siRNA sense strand
ugaaggaucuguacgagaa

SEQ ID NO: 145747 - RNA, 19 nt, Homo sapiens
  misc_RNA (1)...(19): siRNA sense strand
gaaagagcgucauguccuu

SEQ ID NO: 145748 - RNA, 19 nt, Homo sapiens
  misc_RNA (1)...(19): siRNA sense strand
gauagaagcggcuacauug

SEQ ID NO: 145749 - RNA, 19 nt, Homo sapiens
  misc_RNA (1)...(19): siRNA sense strand
gaacggggauggcaaauug

SEQ ID NO: 145750 - RNA, 19 nt, Homo sapiens
  misc_RNA (1)...(19): siRNA sense strand
guaaagagcuagaaaacuu

SEQ ID NO: 145751 - RNA, 19 nt, Homo sapiens
  misc_RNA (1)...(19): siRNA sense strand
gagaaaagaugaaggaguu

SEQ ID NO: 145752 - RNA, 19 nt, Homo sapiens
  misc_RNA (1)...(19): siRNA sense strand
ggaaaucaauauucaacag

SEQ ID NO: 145753 - RNA, 19 nt, Homo sapiens
  misc_RNA (1)...(19): siRNA sense strand
gcucuggcaugaugucaaa

SEQ ID NO: 145754 - RNA, 19 nt, Homo sapiens
  misc_RNA (1)...(19): siRNA sense strand
ggauagaagcggcuacauu

SEQ ID NO: 145755 - RNA, 19 nt, Homo sapiens
  misc_RNA (1)...(19): siRNA sense strand
gaagguaaagagcuagaaa

SEQ ID NO: 145756 - RNA, 19 nt, Homo sapiens
  misc_RNA (1)...(19): siRNA sense strand
ggaaauauggaagcacuuu

SEQ ID NO: 145757 - RNA, 19 nt, Homo sapiens
  misc_RNA (1)...(19): siRNA sense strand
uucaacagcucaccaacua

SEQ ID NO: 145758 - RNA, 19 nt, Homo sapiens
  misc_RNA (1)...(19): siRNA sense strand
uggcagagcuggcgcagau

SEQ ID NO: 145759 - RNA, 19 nt, Homo sapiens
  misc_RNA (1)...(19): siRNA sense strand
agacggaaauggguauauu

SEQ ID NO: 145760 - RNA, 19 nt, Homo sapiens
  misc_RNA (1)...(19): siRNA sense strand
agcccaagcuccaggaaua

SEQ ID NO: 145761 - RNA, 19 nt, Homo sapiens
  misc_RNA (1)...(19): siRNA sense strand
gcaaauugggccucucaga

SEQ ID NO: 145762 - RNA, 19 nt, Homo sapiens
  misc_RNA (1)...(19): siRNA sense strand
cuacggauguuugacuuga

SEQ ID NO: 145763 - RNA, 19 nt, Homo sapiens
  misc_RNA (1)...(19): siRNA sense strand
aggaaaggcucuggcauga

SEQ ID NO: 145764 - RNA, 19 nt, Homo sapiens
  misc_RNA (1)...(19): siRNA sense strand
gaauacacccaaaccauac

SEQ ID NO: 145765 - RNA, 19 nt, Homo sapiens
  misc_RNA (1)...(19): siRNA sense strand
gaaauauggaagcacuuug

SEQ ID NO: 145766 - RNA, 19 nt, Homo sapiens
  misc_RNA (1)...(19): siRNA sense strand
uauugaagguaaagagcua

SEQ ID NO: 145767 - RNA, 19 nt, Homo sapiens
  misc_RNA (1)...(19): siRNA sense strand
agacaggaguggcuacauc

SEQ ID NO: 145768 - RNA, 19 nt, Homo sapiens
  misc_RNA (1)...(19): siRNA sense strand
ucaagggauuccugucaga

SEQ ID NO: 145769 - RNA, 19 nt, Homo sapiens
  misc_RNA (1)...(19): siRNA sense strand
caacagcucaccaacuaca

SEQ ID NO: 145770 - RNA, 19 nt, Homo sapiens
  misc_RNA (1)...(19): siRNA sense strand
gcucaagggauuccuguca

SEQ ID NO: 145771 - RNA, 19 nt, Homo sapiens
  misc_RNA (1)...(19): siRNA sense strand
aaauauggaagcacuuuga

SEQ ID NO: 145772 - RNA, 19 nt, Homo sapiens
  misc_RNA (1)...(19): siRNA sense strand
agugacaacuuuggagaaa

SEQ ID NO: 145773 - RNA, 19 nt, Homo sapiens
  misc_RNA (1)...(19): siRNA sense strand
caaaccauacuacggaugu

SEQ ID NO: 145774 - RNA, 19 nt, Homo sapiens
  misc_RNA (1)...(19): siRNA sense strand
aggaguucaugcagaagua

SEQ ID NO: 145775 - RNA, 19 nt, Homo sapiens
  misc_RNA (1)...(19): siRNA sense strand
gacggaaauggguauauug

SEQ ID NO: 145776 - RNA, 19 nt, Homo sapiens
  misc_RNA (1)...(19): siRNA sense strand
gaaggaucuguacgagaaa

SEQ ID NO: 145777 - RNA, 19 nt, Homo sapiens
  misc_RNA (1)...(19): siRNA sense strand
auggguauauugaagguaa

SEQ ID NO: 145778 - RNA, 19 nt, Homo sapiens
  misc_RNA (1)...(19): siRNA sense strand
gagugacaacuuuggagaa

SEQ ID NO: 145779 - RNA, 19 nt, Homo sapiens
  misc_RNA (1)...(19): siRNA sense strand
gcagacggaaauggguaua

SEQ ID NO: 145780 - RNA, 19 nt, Homo sapiens
  misc_RNA (1)...(19): siRNA sense strand
cuacagaaagagcgucaug

SEQ ID NO: 145781 - RNA, 19 nt, Homo sapiens
  misc_RNA (1)...(19): siRNA sense strand
gcaugaugucaaagaguga

SEQ ID NO: 145782 - RNA, 19 nt, Homo sapiens
  misc_RNA (1)...(19): siRNA sense strand
ggaaaggcucuggcaugau

SEQ ID NO: 145783 - RNA, 19 nt, Homo sapiens
  misc_RNA (1)...(19): siRNA sense strand
aaauggguauauugaaggu

SEQ ID NO: 145784 - RNA, 19 nt, Homo sapiens
  misc_RNA (1)...(19): siRNA sense strand
ccgcaaggaccuggagauu

SEQ ID NO: 145785 - RNA, 19 nt, Homo sapiens
  misc_RNA (1)...(19): siRNA sense strand
gcucaccaacuacagaaag

SEQ ID NO: 145786 - RNA, 19 nt, Homo sapiens
  misc_RNA (1)...(19): siRNA sense strand
cggaaauggguauauugaa

SEQ ID NO: 145787 - RNA, 19 nt, Homo sapiens
  misc_RNA (1)...(19): siRNA sense strand
ugacgagcaugagcuggau

SEQ ID NO: 145788 - RNA, 19 nt, Homo sapiens
  misc_RNA (1)...(19): siRNA sense strand
caggaguggcuacaucgaa

SEQ ID NO: 145789 - RNA, 19 nt, Homo sapiens
  misc_RNA (1)...(19): siRNA sense strand
aaacucagaugggaaaauc

SEQ ID NO: 145790 - RNA, 19 nt, Homo sapiens
  misc_RNA (1)...(19): siRNA sense strand
acagaaagagcgucauguc

SEQ ID NO: 145791 - RNA, 19 nt, Homo sapiens
  misc_RNA (1)...(19): siRNA sense strand
acggaaauggguauauuga

SEQ ID NO: 145792 - RNA, 19 nt, Homo sapiens
  misc_RNA (1)...(19): siRNA sense strand
aaaccauacuacggauguu

SEQ ID NO: 145793 - RNA, 19 nt, Homo sapiens
  misc_RNA (1)...(19): siRNA sense strand
gcuccagcgccgaguuuau

SEQ ID NO: 145794 - RNA, 19 nt, Homo sapiens
  misc_RNA (1)...(19): siRNA sense strand
cagcucaccaacuacagaa

SEQ ID NO: 145795 - RNA, 19 nt, Homo sapiens
  misc_RNA (1)...(19): siRNA sense strand
gaaaggcucuggcaugaug

SEQ ID NO: 145796 - RNA, 19 nt, Homo sapiens
  misc_RNA (1)...(19): siRNA sense strand
ccaaugagcucaagggauu

SEQ ID NO: 145797 - RNA, 19 nt, Homo sapiens
  misc_RNA (1)...(19): siRNA sense strand
ggaauacacccaaaccaua

SEQ ID NO: 145798 - RNA, 19 nt, Homo sapiens
  misc_RNA (1)...(19): siRNA sense strand
ggaaauggguauauugaag

SEQ ID NO: 145799 - RNA, 19 nt, Homo sapiens
  misc_RNA (1)...(19): siRNA sense strand
gaacggggauggcaaauug

SEQ ID NO: 145800 - RNA, 19 nt, Homo sapiens
  misc_RNA (1)...(19): siRNA sense strand
guaaagagcuagaaaacuu

SEQ ID NO: 145801 - RNA, 19 nt, Homo sapiens
  misc_RNA (1)...(19): siRNA sense strand
gagaaaagaugaaggaguu

SEQ ID NO: 145802 - RNA, 19 nt, Homo sapiens
  misc_RNA (1)...(19): siRNA sense strand
gcucuggcaugaugucaaa

SEQ ID NO: 145803 - RNA, 19 nt, Homo sapiens
  misc_RNA (1)...(19): siRNA sense strand
gaagguaaagagcuagaaa

SEQ ID NO: 145804 - RNA, 19 nt, Homo sapiens
  misc_RNA (1)...(19): siRNA sense strand
ggaaauauggaagcacuuu

SEQ ID NO: 145805 - RNA, 19 nt, Homo sapiens
  misc_RNA (1)...(19): siRNA sense strand
agacggaaauggguauauu

SEQ ID NO: 145806 - RNA, 19 nt, Homo sapiens
  misc_RNA (1)...(19): siRNA sense strand
uggcagagcuggcgcagau

SEQ ID NO: 145807 - RNA, 19 nt, Homo sapiens
  misc_RNA (1)...(19): siRNA sense strand
agcccaagcuccaggaaua

SEQ ID NO: 145808 - RNA, 19 nt, Homo sapiens
  misc_RNA (1)...(19): siRNA sense strand
gcaaauugggccucucaga

SEQ ID NO: 145809 - RNA, 19 nt, Homo sapiens
  misc_RNA (1)...(19): siRNA sense strand
cuacggauguuugacuuga

SEQ ID NO: 145810 - RNA, 19 nt, Homo sapiens
  misc_RNA (1)...(19): siRNA sense strand
gaaauauggaagcacuuug

SEQ ID NO: 145811 - RNA, 19 nt, Homo sapiens
  misc_RNA (1)...(19): siRNA sense strand
gaauacacccaaaccauac

SEQ ID NO: 145812 - RNA, 19 nt, Homo sapiens
  misc_RNA (1)...(19): siRNA sense strand
aggaaaggcucuggcauga

SEQ ID NO: 145813 - RNA, 19 nt, Homo sapiens
  misc_RNA (1)...(19): siRNA sense strand
uauugaagguaaagagcua

SEQ ID NO: 145814 - RNA, 19 nt, Homo sapiens
  misc_RNA (1)...(19): siRNA sense strand
agacaggaguggcuacauc

SEQ ID NO: 145815 - RNA, 19 nt, Homo sapiens
  misc_RNA (1)...(19): siRNA sense strand
ucaagggauuccugucaga

SEQ ID NO: 145816 - RNA, 19 nt, Homo sapiens
  misc_RNA (1)...(19): siRNA sense strand
gcucaagggauuccuguca

SEQ ID NO: 145817 - RNA, 19 nt, Homo sapiens
  misc_RNA (1)...(19): siRNA sense strand
aaauauggaagcacuuuga

SEQ ID NO: 145818 - RNA, 19 nt, Homo sapiens
  misc_RNA (1)...(19): siRNA sense strand
agugacaacuuuggagaaa

SEQ ID NO: 145819 - RNA, 19 nt, Homo sapiens
  misc_RNA (1)...(19): siRNA sense strand
caaaccauacuacggaugu

SEQ ID NO: 145820 - RNA, 19 nt, Homo sapiens
  misc_RNA (1)...(19): siRNA sense strand
aggaguucaugcagaagua

SEQ ID NO: 145821 - RNA, 19 nt, Homo sapiens
  misc_RNA (1)...(19): siRNA sense strand
gacggaaauggguauauug

SEQ ID NO: 145822 - RNA, 19 nt, Homo sapiens
  misc_RNA (1)...(19): siRNA sense strand
auggguauauugaagguaa

SEQ ID NO: 145823 - RNA, 19 nt, Homo sapiens
  misc_RNA (1)...(19): siRNA sense strand
gagugacaacuuuggagaa

SEQ ID NO: 145824 - RNA, 19 nt, Homo sapiens
  misc_RNA (1)...(19): siRNA sense strand
gcagacggaaauggguaua

SEQ ID NO: 145825 - RNA, 19 nt, Homo sapiens
  misc_RNA (1)...(19): siRNA sense strand
ggaaaggcucuggcaugau

SEQ ID NO: 145826 - RNA, 19 nt, Homo sapiens
  misc_RNA (1)...(19): siRNA sense strand
gcaugaugucaaagaguga

SEQ ID NO: 145827 - RNA, 19 nt, Homo sapiens
  misc_RNA (1)...(19): siRNA sense strand
cggaaauggguauauugaa

SEQ ID NO: 145828 - RNA, 19 nt, Homo sapiens
  misc_RNA (1)...(19): siRNA sense strand
aaauggguauauugaaggu

SEQ ID NO: 145829 - RNA, 19 nt, Homo sapiens
  misc_RNA (1)...(19): siRNA sense strand
caggaguggcuacaucgaa

SEQ ID NO: 145830 - RNA, 19 nt, Homo sapiens
  misc_RNA (1)...(19): siRNA sense strand
aaacucagaugggaaaauc

SEQ ID NO: 145831 - RNA, 19 nt, Homo sapiens
  misc_RNA (1)...(19): siRNA sense strand
aaaccauacuacggauguu

SEQ ID NO: 145832 - RNA, 19 nt, Homo sapiens
  misc_RNA (1)...(19): siRNA sense strand
acggaaauggguauauuga

SEQ ID NO: 145833 - RNA, 19 nt, Homo sapiens
  misc_RNA (1)...(19): siRNA sense strand
gcuccagcgccgaguuuau

SEQ ID NO: 145834 - RNA, 19 nt, Homo sapiens
  misc_RNA (1)...(19): siRNA sense strand
gaaaggcucuggcaugaug

SEQ ID NO: 145835 - RNA, 19 nt, Homo sapiens
  misc_RNA (1)...(19): siRNA sense strand
ccaaugagcucaagggauu

SEQ ID NO: 145836 - RNA, 19 nt, Homo sapiens
  misc_RNA (1)...(19): siRNA sense strand
ggaauacacccaaaccaua

SEQ ID NO: 145837 - RNA, 19 nt, Homo sapiens
  misc_RNA (1)...(19): siRNA sense strand
ggaaauggguauauugaag

SEQ ID NO: 145838 - RNA, 19 nt, Homo sapiens
  misc_RNA (1)...(19): siRNA sense strand
gauagaagcggcuacauug

SEQ ID NO: 145839 - RNA, 19 nt, Homo sapiens
  misc_RNA (1)...(19): siRNA sense strand
gaacggggauggcaaauug

SEQ ID NO: 145840 - RNA, 19 nt, Homo sapiens
  misc_RNA (1)...(19): siRNA sense strand
guaaagagcuagaaaacuu

SEQ ID NO: 145841 - RNA, 19 nt, Homo sapiens
  misc_RNA (1)...(19): siRNA sense strand
gagaaaagaugaaggaguu

SEQ ID NO: 145842 - RNA, 19 nt, Homo sapiens
  misc_RNA (1)...(19): siRNA sense strand
gcucuggcaugaugucaaa

SEQ ID NO: 145843 - RNA, 19 nt, Homo sapiens
  misc_RNA (1)...(19): siRNA sense strand
ggauagaagcggcuacauu

SEQ ID NO: 145844 - RNA, 19 nt, Homo sapiens
  misc_RNA (1)...(19): siRNA sense strand
gaagguaaagagcuagaaa

SEQ ID NO: 145845 - RNA, 19 nt, Homo sapiens
  misc_RNA (1)...(19): siRNA sense strand
ggaaauauggaagcacuuu

SEQ ID NO: 145846 - RNA, 19 nt, Homo sapiens
  misc_RNA (1)...(19): siRNA sense strand
agacggaaauggguauauu

SEQ ID NO: 145847 - RNA, 19 nt, Homo sapiens
  misc_RNA (1)...(19): siRNA sense strand
uggcagagcuggcgcagau

SEQ ID NO: 145848 - RNA, 19 nt, Homo sapiens
  misc_RNA (1)...(19): siRNA sense strand
agcccaagcuccaggaaua

SEQ ID NO: 145849 - RNA, 19 nt, Homo sapiens
  misc_RNA (1)...(19): siRNA sense strand
gcaaauugggccucucaga

SEQ ID NO: 145850 - RNA, 19 nt, Homo sapiens
  misc_RNA (1)...(19): siRNA sense strand
cuacggauguuugacuuga

SEQ ID NO: 145851 - RNA, 19 nt, Homo sapiens
  misc_RNA (1)...(19): siRNA sense strand
aggaaaggcucuggcauga

SEQ ID NO: 145852 - RNA, 19 nt, Homo sapiens
  misc_RNA (1)...(19): siRNA sense strand
gaauacacccaaaccauac

SEQ ID NO: 145853 - RNA, 19 nt, Homo sapiens
  misc_RNA (1)...(19): siRNA sense strand
gaaauauggaagcacuuug

SEQ ID NO: 145854 - RNA, 19 nt, Homo sapiens
  misc_RNA (1)...(19): siRNA sense strand
uauugaagguaaagagcua

SEQ ID NO: 145855 - RNA, 19 nt, Homo sapiens
  misc_RNA (1)...(19): siRNA sense strand
agacaggaguggcuacauc

SEQ ID NO: 145856 - RNA, 19 nt, Homo sapiens
  misc_RNA (1)...(19): siRNA sense strand
ucaagggauuccugucaga

SEQ ID NO: 145857 - RNA, 19 nt, Homo sapiens
  misc_RNA (1)...(19): siRNA sense strand
gcucaagggauuccuguca

SEQ ID NO: 145858 - RNA, 19 nt, Homo sapiens
  misc_RNA (1)...(19): siRNA sense strand
aaauauggaagcacuuuga

SEQ ID NO: 145859 - RNA, 19 nt, Homo sapiens
  misc_RNA (1)...(19): siRNA sense strand
agugacaacuuuggagaaa

SEQ ID NO: 145860 - RNA, 19 nt, Homo sapiens
  misc_RNA (1)...(19): siRNA sense strand
caaaccauacuacggaugu

SEQ ID NO: 145861 - RNA, 19 nt, Homo sapiens
  misc_RNA (1)...(19): siRNA sense strand
aggaguucaugcagaagua

SEQ ID NO: 145862 - RNA, 19 nt, Homo sapiens
  misc_RNA (1)...(19): siRNA sense strand
auggguauauugaagguaa

SEQ ID NO: 145863 - RNA, 19 nt, Homo sapiens
  misc_RNA (1)...(19): siRNA sense strand
gacggaaauggguauauug

SEQ ID NO: 145864 - RNA, 19 nt, Homo sapiens
  misc_RNA (1)...(19): siRNA sense strand
gagugacaacuuuggagaa

SEQ ID NO: 145865 - RNA, 19 nt, Homo sapiens
  misc_RNA (1)...(19): siRNA sense strand
gcagacggaaauggguaua

SEQ ID NO: 145866 - RNA, 19 nt, Homo sapiens
  misc_RNA (1)...(19): siRNA sense strand
ggaaaggcucuggcaugau

SEQ ID NO: 145867 - RNA, 19 nt, Homo sapiens
  misc_RNA (1)...(19): siRNA sense strand
gcaugaugucaaagaguga

SEQ ID NO: 145868 - RNA, 19 nt, Homo sapiens
  misc_RNA (1)...(19): siRNA sense strand
caggaguggcuacaucgaa

SEQ ID NO: 145869 - RNA, 19 nt, Homo sapiens
  misc_RNA (1)...(19): siRNA sense strand
ugacgagcaugagcuggau

SEQ ID NO: 145870 - RNA, 19 nt, Homo sapiens
  misc_RNA (1)...(19): siRNA sense strand
cggaaauggguauauugaa

SEQ ID NO: 145871 - RNA, 19 nt, Homo sapiens
  misc_RNA (1)...(19): siRNA sense strand
aaauggguauauugaaggu

SEQ ID NO: 145872 - RNA, 19 nt, Homo sapiens
  misc_RNA (1)...(19): siRNA sense strand
aaacucagaugggaaaauc

SEQ ID NO: 145873 - RNA, 19 nt, Homo sapiens
  misc_RNA (1)...(19): siRNA sense strand
acggaaauggguauauuga

SEQ ID NO: 145874 - RNA, 19 nt, Homo sapiens
  misc_RNA (1)...(19): siRNA sense strand
aaaccauacuacggauguu

SEQ ID NO: 145875 - RNA, 19 nt, Homo sapiens
  misc_RNA (1)...(19): siRNA sense strand
gcuccagcgccgaguuuau

SEQ ID NO: 145876 - RNA, 19 nt, Homo sapiens
  misc_RNA (1)...(19): siRNA sense strand
ggaaacagcugauuaguga

SEQ ID NO: 145877 - RNA, 19 nt, Homo sapiens
  misc_RNA (1)...(19): siRNA sense strand
ggagaaagcugcucaugaa

SEQ ID NO: 145878 - RNA, 19 nt, Homo sapiens
  misc_RNA (1)...(19): siRNA sense strand
gucaugaacugcuugauua

SEQ ID NO: 145879 - RNA, 19 nt, Homo sapiens
  misc_RNA (1)...(19): siRNA sense strand
aaauuggacucguucauua

SEQ ID NO: 145880 - RNA, 19 nt, Homo sapiens
  misc_RNA (1)...(19): siRNA sense strand
gaagauaaagacaacagua

SEQ ID NO: 145881 - RNA, 19 nt, Homo sapiens
  misc_RNA (1)...(19): siRNA sense strand
gaagaagcaaugaagcuaa

SEQ ID NO: 145882 - RNA, 19 nt, Homo sapiens
  misc_RNA (1)...(19): siRNA sense strand
guacaugggauuauacaaa

SEQ ID NO: 145883 - RNA, 19 nt, Homo sapiens
  misc_RNA (1)...(19): siRNA sense strand
gaaagcugcucaugaacuc

SEQ ID NO: 145884 - RNA, 19 nt, Homo sapiens
  misc_RNA (1)...(19): siRNA sense strand
caaagcagcaggacaguga

SEQ ID NO: 145885 - RNA, 19 nt, Homo sapiens
  misc_RNA (1)...(19): siRNA sense strand
gauaaagacaacaguacua

SEQ ID NO: 145886 - RNA, 19 nt, Homo sapiens
  misc_RNA (1)...(19): siRNA sense strand
gaagaagaaagucaaacaa

SEQ ID NO: 145887 - RNA, 19 nt, Homo sapiens
  misc_RNA (1)...(19): siRNA sense strand
guccauauuugcuccauuu

SEQ ID NO: 145888 - RNA, 19 nt, Homo sapiens
  misc_RNA (1)...(19): siRNA sense strand
ggauggaaauacaacagaa

SEQ ID NO: 145889 - RNA, 19 nt, Homo sapiens
  misc_RNA (1)...(19): siRNA sense strand
acuaacagcugcacuucua

SEQ ID NO: 145890 - RNA, 19 nt, Homo sapiens
  misc_RNA (1)...(19): siRNA sense strand
ggaagaagaaagucaaaca

SEQ ID NO: 145891 - RNA, 19 nt, Homo sapiens
  misc_RNA (1)...(19): siRNA sense strand
cuaaggaaacagcugauua

SEQ ID NO: 145892 - RNA, 19 nt, Homo sapiens
  misc_RNA (1)...(19): siRNA sense strand
caaugaagcuaaggaaaca

SEQ ID NO: 145893 - RNA, 19 nt, Homo sapiens
  misc_RNA (1)...(19): siRNA sense strand
gagacaaauuggacucguu

SEQ ID NO: 145894 - RNA, 19 nt, Homo sapiens
  misc_RNA (1)...(19): siRNA sense strand
cauauuugcuccauuucuu

SEQ ID NO: 145895 - RNA, 19 nt, Homo sapiens
  misc_RNA (1)...(19): siRNA sense strand
ucaagaggauggaaauaca

SEQ ID NO: 145896 - RNA, 19 nt, Homo sapiens
  misc_RNA (1)...(19): siRNA sense strand
gcaguaccuuuccagauuc

SEQ ID NO: 145897 - RNA, 19 nt, Homo sapiens
  misc_RNA (1)...(19): siRNA sense strand
gggaauuccugccgaagug

SEQ ID NO: 145898 - RNA, 19 nt, Homo sapiens
  misc_RNA (1)...(19): siRNA sense strand
caaauuggacucguucauu

SEQ ID NO: 145899 - RNA, 19 nt, Homo sapiens
  misc_RNA (1)...(19): siRNA sense strand
gaauuugacucuuuucgaa

SEQ ID NO: 145900 - RNA, 19 nt, Homo sapiens
  misc_RNA (1)...(19): siRNA sense strand
ggaaauacaacagaagaau

SEQ ID NO: 145901 - RNA, 19 nt, Homo sapiens
  misc_RNA (1)...(19): siRNA sense strand
gccauggccuagagcagua

SEQ ID NO: 145902 - RNA, 19 nt, Homo sapiens
  misc_RNA (1)...(19): siRNA sense strand
gcaaugaagcuaaggaaac

SEQ ID NO: 145903 - RNA, 19 nt, Homo sapiens
  misc_RNA (1)...(19): siRNA sense strand
aaacagcugauuagugaaa

SEQ ID NO: 145904 - RNA, 19 nt, Homo sapiens
  misc_RNA (1)...(19): siRNA sense strand
gaucaauggauaccuauag

SEQ ID NO: 145905 - RNA, 19 nt, Homo sapiens
  misc_RNA (1)...(19): siRNA sense strand
agcaguaccuuuccagauu

SEQ ID NO: 145906 - RNA, 19 nt, Homo sapiens
  misc_RNA (1)...(19): siRNA sense strand
uaaggaaacagcugauuag

SEQ ID NO: 145907 - RNA, 19 nt, Homo sapiens
  misc_RNA (1)...(19): siRNA sense strand
ggugggaugugcucuucuu

SEQ ID NO: 145908 - RNA, 19 nt, Homo sapiens
  misc_RNA (1)...(19): siRNA sense strand
cagcugcacuucuauuguc

SEQ ID NO: 145909 - RNA, 19 nt, Homo sapiens
  misc_RNA (1)...(19): siRNA sense strand
gaguagugcugggugauuc

SEQ ID NO: 145910 - RNA, 19 nt, Homo sapiens
  misc_RNA (1)...(19): siRNA sense strand
augaacugcuugauuauug

SEQ ID NO: 145911 - RNA, 19 nt, Homo sapiens
  misc_RNA (1)...(19): siRNA sense strand
cgaagaagcaaugaagcua

SEQ ID NO: 145912 - RNA, 19 nt, Homo sapiens
  misc_RNA (1)...(19): siRNA sense strand
uaacagcugcacuucuauu

SEQ ID NO: 145913 - RNA, 19 nt, Homo sapiens
  misc_RNA (1)...(19): siRNA sense strand
aaagacaacaguacuaaca

SEQ ID NO: 145914 - RNA, 19 nt, Homo sapiens
  misc_RNA (1)...(19): siRNA sense strand
cagcguuccuuccguuuca

SEQ ID NO: 145915 - RNA, 19 nt, Homo sapiens
  misc_RNA (1)...(19): siRNA sense strand
ugcaaauacuuguccauau

SEQ ID NO: 145916 - RNA, 19 nt, Homo sapiens
  misc_RNA (1)...(19): siRNA sense strand
ccaccugagugcaguagug

SEQ ID NO: 145917 - RNA, 19 nt, Homo sapiens
  misc_RNA (1)...(19): siRNA sense strand
ccaacugggagacaaauug

SEQ ID NO: 145918 - RNA, 19 nt, Homo sapiens
  misc_RNA (1)...(19): siRNA sense strand
gagcaguaccuuuccagau

SEQ ID NO: 145919 - RNA, 19 nt, Homo sapiens
  misc_RNA (1)...(19): siRNA sense strand
gcagcaggacagugauaaa

SEQ ID NO: 145920 - RNA, 19 nt, Homo sapiens
  misc_RNA (1)...(19): siRNA sense strand
uugcguacaugggauuaua

SEQ ID NO: 145921 - RNA, 19 nt, Homo sapiens
  misc_RNA (1)...(19): siRNA sense strand
gaagcaaugaagcuaagga

SEQ ID NO: 145922 - RNA, 19 nt, Homo sapiens
  misc_RNA (1)...(19): siRNA sense strand
caauggauaccuauagcaa

SEQ ID NO: 145923 - RNA, 19 nt, Homo sapiens
  misc_RNA (1)...(19): siRNA sense strand
gaacagaggggaccugaca

SEQ ID NO: 145924 - RNA, 19 nt, Homo sapiens
  misc_RNA (1)...(19): siRNA sense strand
caagaggauggaaauacaa

SEQ ID NO: 145925 - RNA, 19 nt, Homo sapiens
  misc_RNA (1)...(19): siRNA sense strand
agaucucugugucuacuuu

SEQ ID NO: 145926 - RNA, 19 nt, Homo sapiens
  misc_RNA (1)...(19): siRNA sense strand
cggagaaagcugcucauga

SEQ ID NO: 145927 - RNA, 19 nt, Homo sapiens
  misc_RNA (1)...(19): siRNA sense strand
gggaugugcucuucuugcu

SEQ ID NO: 145928 - RNA, 19 nt, Homo sapiens
  misc_RNA (1)...(19): siRNA sense strand
ugucaugaacugcuugauu

SEQ ID NO: 145929 - RNA, 19 nt, Homo sapiens
  misc_RNA (1)...(19): siRNA sense strand
ggagucagagcuuuuguuu

SEQ ID NO: 145930 - RNA, 19 nt, Homo sapiens
  misc_RNA (1)...(19): siRNA sense strand
cagauucgaagaagcaaug

SEQ ID NO: 145931 - RNA, 19 nt, Homo sapiens
  misc_RNA (1)...(19): siRNA sense strand
aagaagcaaugaagcuaag

SEQ ID NO: 145932 - RNA, 19 nt, Homo sapiens
  misc_RNA (1)...(19): siRNA sense strand
gcugggugauucagucagu

SEQ ID NO: 145933 - RNA, 19 nt, Homo sapiens
  misc_RNA (1)...(19): siRNA sense strand
guacuaacagcugcacuuc

SEQ ID NO: 145934 - RNA, 19 nt, Homo sapiens
  misc_RNA (1)...(19): siRNA sense strand
caguagugaugucaaccuu

SEQ ID NO: 145935 - RNA, 19 nt, Homo sapiens
  misc_RNA (1)...(19): siRNA sense strand
gcuaaggaaacagcugauu

SEQ ID NO: 145936 - RNA, 19 nt, Homo sapiens
  misc_RNA (1)...(19): siRNA sense strand
gauaaaucgaucaauggau

SEQ ID NO: 145937 - RNA, 19 nt, Homo sapiens
  misc_RNA (1)...(19): siRNA sense strand
caugaacugcuugauuauu

SEQ ID NO: 145938 - RNA, 19 nt, Homo sapiens
  misc_RNA (1)...(19): siRNA sense strand
caacugggagacaaauugg

SEQ ID NO: 145939 - RNA, 19 nt, Homo sapiens
  misc_RNA (1)...(19): siRNA sense strand
ugaacugcuugauuauugg

SEQ ID NO: 145940 - RNA, 19 nt, Homo sapiens
  misc_RNA (1)...(19): siRNA sense strand
ggaauuccugccgaaguga

SEQ ID NO: 145941 - RNA, 19 nt, Homo sapiens
  misc_RNA (1)...(19): siRNA sense strand
gcggaagaagaaagucaaa

SEQ ID NO: 145942 - RNA, 19 nt, Homo sapiens
  misc_RNA (1)...(19): siRNA sense strand
gccuagagcaguaccuuuc

SEQ ID NO: 145943 - RNA, 19 nt, Homo sapiens
  misc_RNA (1)...(19): siRNA sense strand
uugcaaauacuuguccaua

SEQ ID NO: 145944 - RNA, 19 nt, Homo sapiens
  misc_RNA (1)...(19): siRNA sense strand
guaccuuuccagauucgaa

SEQ ID NO: 145945 - RNA, 19 nt, Homo sapiens
  misc_RNA (1)...(19): siRNA sense strand
cuccauuucuuacuuuaca

SEQ ID NO: 145946 - RNA, 19 nt, Homo sapiens
  misc_RNA (1)...(19): siRNA sense strand
gaaacagcugauuagugaa

SEQ ID NO: 145947 - RNA, 19 nt, Homo sapiens
  misc_RNA (1)...(19): siRNA sense strand
ggauaccuauagcaaaaug

SEQ ID NO: 145948 - RNA, 19 nt, Homo sapiens
  misc_RNA (1)...(19): siRNA sense strand
cuuuacaacuugcguacau

SEQ ID NO: 145949 - RNA, 19 nt, Homo sapiens
  misc_RNA (1)...(19): siRNA sense strand
uugcuccauuucuuacuuu

SEQ ID NO: 145950 - RNA, 19 nt, Homo sapiens
  misc_RNA (1)...(19): siRNA sense strand
gauggaaauacaacagaag

SEQ ID NO: 145951 - RNA, 19 nt, Homo sapiens
  misc_RNA (1)...(19): siRNA sense strand
gcgcaucaaccggaucaug

SEQ ID NO: 145952 - RNA, 19 nt, Homo sapiens
  misc_RNA (1)...(19): siRNA sense strand
gugcaguagugaugucaac

SEQ ID NO: 145953 - RNA, 19 nt, Homo sapiens
  misc_RNA (1)...(19): siRNA sense strand
acaaauauuuucccaagag

SEQ ID NO: 145954 - RNA, 19 nt, Homo sapiens
  misc_RNA (1)...(19): siRNA sense strand
aagcagcaggacagugaua

SEQ ID NO: 145955 - RNA, 19 nt, Homo sapiens
  misc_RNA (1)...(19): siRNA sense strand
gcgcggaagaagaaaguca

SEQ ID NO: 145956 - RNA, 19 nt, Homo sapiens
  misc_RNA (1)...(19): siRNA sense strand
ccagucaagaggauggaaa

SEQ ID NO: 145957 - RNA, 19 nt, Homo sapiens
  misc_RNA (1)...(19): siRNA sense strand
ggagcugcgucggagaaag

SEQ ID NO: 145958 - RNA, 19 nt, Homo sapiens
  misc_RNA (1)...(19): siRNA sense strand
gauucagucaguacaggaa

SEQ ID NO: 145959 - RNA, 19 nt, Homo sapiens
  misc_RNA (1)...(19): siRNA sense strand
caauagagcucgaccuuau

SEQ ID NO: 145960 - RNA, 19 nt, Homo sapiens
  misc_RNA (1)...(19): siRNA sense strand
gcaugaagauggagaauuc

SEQ ID NO: 145961 - RNA, 19 nt, Homo sapiens
  misc_RNA (1)...(19): siRNA sense strand
gaaacgcuauucaagauau

SEQ ID NO: 145962 - RNA, 19 nt, Homo sapiens
  misc_RNA (1)...(19): siRNA sense strand
aaagaaagcugacuaccaa

SEQ ID NO: 145963 - RNA, 19 nt, Homo sapiens
  misc_RNA (1)...(19): siRNA sense strand
cgagaauacuggaacaaua

SEQ ID NO: 145964 - RNA, 19 nt, Homo sapiens
  misc_RNA (1)...(19): siRNA sense strand
ccgaggagguugaaaguaa

SEQ ID NO: 145965 - RNA, 19 nt, Homo sapiens
  misc_RNA (1)...(19): siRNA sense strand
ggaacuacccgaacacauu

SEQ ID NO: 145966 - RNA, 19 nt, Homo sapiens
  misc_RNA (1)...(19): siRNA sense strand
ggacagggcgguggaauga

SEQ ID NO: 145967 - RNA, 19 nt, Homo sapiens
  misc_RNA (1)...(19): siRNA sense strand
ggagaucucugccuuugag

SEQ ID NO: 145968 - RNA, 19 nt, Homo sapiens
  misc_RNA (1)...(19): siRNA sense strand
ggagaauucuggaugucuu

SEQ ID NO: 145969 - RNA, 19 nt, Homo sapiens
  misc_RNA (1)...(19): siRNA sense strand
uaacggaagccuacagaaa

SEQ ID NO: 145970 - RNA, 19 nt, Homo sapiens
  misc_RNA (1)...(19): siRNA sense strand
uagcaaagcgccaagauau

SEQ ID NO: 145971 - RNA, 19 nt, Homo sapiens
  misc_RNA (1)...(19): siRNA sense strand
gaagaagcagguuucaaga

SEQ ID NO: 145972 - RNA, 19 nt, Homo sapiens
  misc_RNA (1)...(19): siRNA sense strand
agaagcagguuucaagaug

SEQ ID NO: 145973 - RNA, 19 nt, Homo sapiens
  misc_RNA (1)...(19): siRNA sense strand
ggaaacgcuauucaagaua

SEQ ID NO: 145974 - RNA, 19 nt, Homo sapiens
  misc_RNA (1)...(19): siRNA sense strand
ccgaacacauucuggauga

SEQ ID NO: 145975 - RNA, 19 nt, Homo sapiens
  misc_RNA (1)...(19): siRNA sense strand
gcggagaucucugccuuug

SEQ ID NO: 145976 - RNA, 19 nt, Homo sapiens
  misc_RNA (1)...(19): siRNA sense strand
cuaccaagcugucgaugau

SEQ ID NO: 145977 - RNA, 19 nt, Homo sapiens
  misc_RNA (1)...(19): siRNA sense strand
caacauccaccucagcaaa

SEQ ID NO: 145978 - RNA, 19 nt, Homo sapiens
  misc_RNA (1)...(19): siRNA sense strand
gaucaacggaugcuaugaa

SEQ ID NO: 145979 - RNA, 19 nt, Homo sapiens
  misc_RNA (1)...(19): siRNA sense strand
gaacuacccgaacacauuc

SEQ ID NO: 145980 - RNA, 19 nt, Homo sapiens
  misc_RNA (1)...(19): siRNA sense strand
gauggagaauucuggaugu

SEQ ID NO: 145981 - RNA, 19 nt, Homo sapiens
  misc_RNA (1)...(19): siRNA sense strand
uacaagaaguggaaacuca

SEQ ID NO: 145982 - RNA, 19 nt, Homo sapiens
  misc_RNA (1)...(19): siRNA sense strand
gagaauacuggaacaauag

SEQ ID NO: 145983 - RNA, 19 nt, Homo sapiens
  misc_RNA (1)...(19): siRNA sense strand
gcagcuggaucccgagaau

SEQ ID NO: 145984 - RNA, 19 nt, Homo sapiens
  misc_RNA (1)...(19): siRNA sense strand
gcggaaggcauuagaagaa

SEQ ID NO: 145985 - RNA, 19 nt, Homo sapiens
  misc_RNA (1)...(19): siRNA sense strand
ugaaggaguucuacauucu

SEQ ID NO: 145986 - RNA, 19 nt, Homo sapiens
  misc_RNA (1)...(19): siRNA sense strand
uggaaacgcuauucaagau

SEQ ID NO: 145987 - RNA, 19 nt, Homo sapiens
  misc_RNA (1)...(19): siRNA sense strand
gaagaugggcgaggacaug

SEQ ID NO: 145988 - RNA, 19 nt, Homo sapiens
  misc_RNA (1)...(19): siRNA sense strand
gaaaucgaggccaaucuug

SEQ ID NO: 145989 - RNA, 19 nt, Homo sapiens
  misc_RNA (1)...(19): siRNA sense strand
gaaguggaaacucaccaaa

SEQ ID NO: 145990 - RNA, 19 nt, Homo sapiens
  misc_RNA (1)...(19): siRNA sense strand
uaccaugaauuccuaugaa

SEQ ID NO: 145991 - RNA, 19 nt, Homo sapiens
  misc_RNA (1)...(19): siRNA sense strand
caagaucaacggaugcuau

SEQ ID NO: 145992 - RNA, 19 nt, Homo sapiens
  misc_RNA (1)...(19): siRNA sense strand
gcucagacaccuucaucaa

SEQ ID NO: 145993 - RNA, 19 nt, Homo sapiens
  misc_RNA (1)...(19): siRNA sense strand
cagcgaggaugacauugau

SEQ ID NO: 145994 - RNA, 19 nt, Homo sapiens
  misc_RNA (1)...(19): siRNA sense strand
uacauucucuggacgaaga

SEQ ID NO: 145995 - RNA, 19 nt, Homo sapiens
  misc_RNA (1)...(19): siRNA sense strand
gcugaaggaguucuacauu

SEQ ID NO: 145996 - RNA, 19 nt, Homo sapiens
  misc_RNA (1)...(19): siRNA sense strand
gagaaggcauacgccaaga

SEQ ID NO: 145997 - RNA, 19 nt, Homo sapiens
  misc_RNA (1)...(19): siRNA sense strand
gcgaggaugacauugauga

SEQ ID NO: 145998 - RNA, 19 nt, Homo sapiens
  misc_RNA (1)...(19): siRNA sense strand
ccacugagggcuucgaaga

SEQ ID NO: 145999 - RNA, 19 nt, Homo sapiens
  misc_RNA (1)...(19): siRNA sense strand
gaaggcauacgccaagauc

SEQ ID NO: 146000 - RNA, 19 nt, Homo sapiens
  misc_RNA (1)...(19): siRNA sense strand
gaccagcucaucaucgauu

SEQ ID NO: 146001 - RNA, 19 nt, Homo sapiens
  misc_RNA (1)...(19): siRNA sense strand
ugcccaagcuggaacacua

SEQ ID NO: 146002 - RNA, 19 nt, Homo sapiens
  misc_RNA (1)...(19): siRNA sense strand
ggaugacauugaugaugga

SEQ ID NO: 146003 - RNA, 19 nt, Homo sapiens
  misc_RNA (1)...(19): siRNA sense strand
caccuugaaugaagaaauc

SEQ ID NO: 146004 - RNA, 19 nt, Homo sapiens
  misc_RNA (1)...(19): siRNA sense strand
caugaauuccuaugaaaug

SEQ ID NO: 146005 - RNA, 19 nt, Homo sapiens
  misc_RNA (1)...(19): siRNA sense strand
ggaagccuacagaaacuga

SEQ ID NO: 146006 - RNA, 19 nt, Homo sapiens
  misc_RNA (1)...(19): siRNA sense strand
agucaucguugcucgguuu

SEQ ID NO: 146007 - RNA, 19 nt, Homo sapiens
  misc_RNA (1)...(19): siRNA sense strand
ggucugguaccaugaauuc

SEQ ID NO: 146008 - RNA, 19 nt, Homo sapiens
  misc_RNA (1)...(19): siRNA sense strand
caucggcuuuggcaucuau

SEQ ID NO: 146009 - RNA, 19 nt, Homo sapiens
  misc_RNA (1)...(19): siRNA sense strand
gcgaggacaugcacaccau

SEQ ID NO: 146010 - RNA, 19 nt, Homo sapiens
  misc_RNA (1)...(19): siRNA sense strand
gagaauucuggaugucuuu

SEQ ID NO: 146011 - RNA, 19 nt, Homo sapiens
  misc_RNA (1)...(19): siRNA sense strand
guaccaugaauuccuauga

SEQ ID NO: 146012 - RNA, 19 nt, Homo sapiens
  misc_RNA (1)...(19): siRNA sense strand
caagaugcccugucaacuc

SEQ ID NO: 146013 - RNA, 19 nt, Homo sapiens
  misc_RNA (1)...(19): siRNA sense strand
cugaaggaguucuacauuc

SEQ ID NO: 146014 - RNA, 19 nt, Homo sapiens
  misc_RNA (1)...(19): siRNA sense strand
agaagaagcagguuucaag

SEQ ID NO: 146015 - RNA, 19 nt, Homo sapiens
  misc_RNA (1)...(19): siRNA sense strand
ccagcgauaccuacaagaa

SEQ ID NO: 146016 - RNA, 19 nt, Homo sapiens
  misc_RNA (1)...(19): siRNA sense strand
aauuaugguugacaugcua

SEQ ID NO: 146017 - RNA, 19 nt, Homo sapiens
  misc_RNA (1)...(19): siRNA sense strand
caacaaggauggggauuuc

SEQ ID NO: 146018 - RNA, 19 nt, Homo sapiens
  misc_RNA (1)...(19): siRNA sense strand
aaacuaugcagggaucuuu

SEQ ID NO: 146019 - RNA, 19 nt, Homo sapiens
  misc_RNA (1)...(19): siRNA sense strand
gaccagacggcaugaagau

SEQ ID NO: 146020 - RNA, 19 nt, Homo sapiens
  misc_RNA (1)...(19): siRNA sense strand
cuagcaaagcgccaagaua

SEQ ID NO: 146021 - RNA, 19 nt, Homo sapiens
  misc_RNA (1)...(19): siRNA sense strand
ugaaaucgaggccaaucuu

SEQ ID NO: 146022 - RNA, 19 nt, Homo sapiens
  misc_RNA (1)...(19): siRNA sense strand
gacguugacaggucuggua

SEQ ID NO: 146023 - RNA, 19 nt, Homo sapiens
  misc_RNA (1)...(19): siRNA sense strand
gaucuuucacuuccaguuc

SEQ ID NO: 146024 - RNA, 19 nt, Homo sapiens
  misc_RNA (1)...(19): siRNA sense strand
gaggaugacauugaugaug

SEQ ID NO: 146025 - RNA, 19 nt, Homo sapiens
  misc_RNA (1)...(19): siRNA sense strand
agacuucaccggaggcauu

SEQ ID NO: 146026 - RNA, 19 nt, Homo sapiens
  misc_RNA (1)...(19): siRNA sense strand
guuucaagaugcccuguca

SEQ ID NO: 146027 - RNA, 19 nt, Homo sapiens
  misc_RNA (1)...(19): siRNA sense strand
accaugaauuccuaugaaa

SEQ ID NO: 146028 - RNA, 19 nt, Homo sapiens
  misc_RNA (1)...(19): siRNA sense strand
gacacucucaccagcgaua

SEQ ID NO: 146029 - RNA, 19 nt, Homo sapiens
  misc_RNA (1)...(19): siRNA sense strand
gaacacauucuggaugaac

SEQ ID NO: 146030 - RNA, 19 nt, Homo sapiens
  misc_RNA (1)...(19): siRNA sense strand
acaauagagcucgaccuua

SEQ ID NO: 146031 - RNA, 19 nt, Homo sapiens
  misc_RNA (1)...(19): siRNA sense strand
accaagcugucgaugauga

SEQ ID NO: 146032 - RNA, 19 nt, Homo sapiens
  misc_RNA (1)...(19): siRNA sense strand
cggaggccaucacguuuca

SEQ ID NO: 146033 - RNA, 19 nt, Homo sapiens
  misc_RNA (1)...(19): siRNA sense strand
uggagguggugguggauga

SEQ ID NO: 146034 - RNA, 19 nt, Homo sapiens
  misc_RNA (1)...(19): siRNA sense strand
ccuuugagcugcagaccau

SEQ ID NO: 146035 - RNA, 19 nt, Homo sapiens
  misc_RNA (1)...(19): siRNA sense strand
uaagugggcagaccaacau

SEQ ID NO: 146036 - RNA, 19 nt, Homo sapiens
  misc_RNA (1)...(19): siRNA sense strand
caccagcgauaccuacaag

SEQ ID NO: 146037 - RNA, 19 nt, Homo sapiens
  misc_RNA (1)...(19): siRNA sense strand
caagcuggaacacuauaga

SEQ ID NO: 146038 - RNA, 19 nt, Homo sapiens
  misc_RNA (1)...(19): siRNA sense strand
acagggcgguggaaugaca

SEQ ID NO: 146039 - RNA, 19 nt, Homo sapiens
  misc_RNA (1)...(19): siRNA sense strand
uguucaagaucauccagaa

SEQ ID NO: 146040 - RNA, 19 nt, Homo sapiens
  misc_RNA (1)...(19): siRNA sense strand
gagcucgaccuuaucucuu

SEQ ID NO: 146041 - RNA, 19 nt, Homo sapiens
  misc_RNA (1)...(19): siRNA sense strand
gcuggaaacgcuauucaag

SEQ ID NO: 146042 - RNA, 19 nt, Homo sapiens
  misc_RNA (1)...(19): siRNA sense strand
gaaggcauuagaagaagca

SEQ ID NO: 146043 - RNA, 19 nt, Homo sapiens
  misc_RNA (1)...(19): siRNA sense strand
gcaaaauuaugguugacau

SEQ ID NO: 146044 - RNA, 19 nt, Homo sapiens
  misc_RNA (1)...(19): siRNA sense strand
ucagcgaggaugacauuga

SEQ ID NO: 146045 - RNA, 19 nt, Homo sapiens
  misc_RNA (1)...(19): siRNA sense strand
ccugucaacuccaccaagu

SEQ ID NO: 146046 - RNA, 19 nt, Homo sapiens
  misc_RNA (1)...(19): siRNA sense strand
cagacggcaugaagaugga

SEQ ID NO: 146047 - RNA, 19 nt, Homo sapiens
  misc_RNA (1)...(19): siRNA sense strand
augcagggaucuuucacuu

SEQ ID NO: 146048 - RNA, 19 nt, Homo sapiens
  misc_RNA (1)...(19): siRNA sense strand
gcugagugguaugaguuga

SEQ ID NO: 146049 - RNA, 19 nt, Homo sapiens
  misc_RNA (1)...(19): siRNA sense strand
aaucgaggccaaucuugaa

SEQ ID NO: 146050 - RNA, 19 nt, Homo sapiens
  misc_RNA (1)...(19): siRNA sense strand
aaaucgaggccaaucuuga

SEQ ID NO: 146051 - RNA, 19 nt, Homo sapiens
  misc_RNA (1)...(19): siRNA sense strand
gagccgaggagguugaaag

SEQ ID NO: 146052 - RNA, 19 nt, Homo sapiens
  misc_RNA (1)...(19): siRNA sense strand
cugguaccaugaauuccua

SEQ ID NO: 146053 - RNA, 19 nt, Homo sapiens
  misc_RNA (1)...(19): siRNA sense strand
accgagaaaucgacguuga

SEQ ID NO: 146054 - RNA, 19 nt, Homo sapiens
  misc_RNA (1)...(19): siRNA sense strand
ugguugacaugcuagauuc

SEQ ID NO: 146055 - RNA, 19 nt, Homo sapiens
  misc_RNA (1)...(19): siRNA sense strand
cugcagaccauccugagaa

SEQ ID NO: 146056 - RNA, 19 nt, Homo sapiens
  misc_RNA (1)...(19): siRNA sense strand
ggaugaacccucaguaccu

SEQ ID NO: 146057 - RNA, 19 nt, Homo sapiens
  misc_RNA (1)...(19): siRNA sense strand
cgaacacauucuggaugaa

SEQ ID NO: 146058 - RNA, 19 nt, Homo sapiens
  misc_RNA (1)...(19): siRNA sense strand
ggaugucuuucagugacuu

SEQ ID NO: 146059 - RNA, 19 nt, Homo sapiens
  misc_RNA (1)...(19): siRNA sense strand
gagcaucucuauaacauga

SEQ ID NO: 146060 - RNA, 19 nt, Homo sapiens
  misc_RNA (1)...(19): siRNA sense strand
ugaaugagcaucucuauaa

SEQ ID NO: 146061 - RNA, 19 nt, Homo sapiens
  misc_RNA (1)...(19): siRNA sense strand
ccacagaacucaugaacau

SEQ ID NO: 146062 - RNA, 19 nt, Homo sapiens
  misc_RNA (1)...(19): siRNA sense strand
acacauuacuccaacauug

SEQ ID NO: 146063 - RNA, 19 nt, Homo sapiens
  misc_RNA (1)...(19): siRNA sense strand
gaacauggauuuugacaac

SEQ ID NO: 146064 - RNA, 19 nt, Homo sapiens
  misc_RNA (1)...(19): siRNA sense strand
gaaagugggaacauggauu

SEQ ID NO: 146065 - RNA, 19 nt, Homo sapiens
  misc_RNA (1)...(19): siRNA sense strand
ggcugcagcugacuaugua

SEQ ID NO: 146066 - RNA, 19 nt, Homo sapiens
  misc_RNA (1)...(19): siRNA sense strand
guucgacacugaccgauca

SEQ ID NO: 146067 - RNA, 19 nt, Homo sapiens
  misc_RNA (1)...(19): siRNA sense strand
ggacaaauccaggugaaca

SEQ ID NO: 146068 - RNA, 19 nt, Homo sapiens
  misc_RNA (1)...(19): siRNA sense strand
gaaugagcaucucuauaac

SEQ ID NO: 146069 - RNA, 19 nt, Homo sapiens
  misc_RNA (1)...(19): siRNA sense strand
gaacucaugaacauucuca

SEQ ID NO: 146070 - RNA, 19 nt, Homo sapiens
  misc_RNA (1)...(19): siRNA sense strand
gaacauucucaauaagguu

SEQ ID NO: 146071 - RNA, 19 nt, Homo sapiens
  misc_RNA (1)...(19): siRNA sense strand
ucagggaccauuugcagua

SEQ ID NO: 146072 - RNA, 19 nt, Homo sapiens
  misc_RNA (1)...(19): siRNA sense strand
cauguuccgugccuucaaa

SEQ ID NO: 146073 - RNA, 19 nt, Homo sapiens
  misc_RNA (1)...(19): siRNA sense strand
cugguuaacucguucuuga

SEQ ID NO: 146074 - RNA, 19 nt, Homo sapiens
  misc_RNA (1)...(19): siRNA sense strand
acccugaucugaagacuga

SEQ ID NO: 146075 - RNA, 19 nt, Homo sapiens
  misc_RNA (1)...(19): siRNA sense strand
aaagugggaacauggauuu

SEQ ID NO: 146076 - RNA, 19 nt, Homo sapiens
  misc_RNA (1)...(19): siRNA sense strand
aaagauggcacuggacaaa

SEQ ID NO: 146077 - RNA, 19 nt, Homo sapiens
  misc_RNA (1)...(19): siRNA sense strand
gugaggagguccggcaguu

SEQ ID NO: 146078 - RNA, 19 nt, Homo sapiens
  misc_RNA (1)...(19): siRNA sense strand
cgacgcuacucagaugaaa

SEQ ID NO: 146079 - RNA, 19 nt, Homo sapiens
  misc_RNA (1)...(19): siRNA sense strand
ugaacauucucaauaaggu

SEQ ID NO: 146080 - RNA, 19 nt, Homo sapiens
  misc_RNA (1)...(19): siRNA sense strand
gaucauccgacgcuacuca

SEQ ID NO: 146081 - RNA, 19 nt, Homo sapiens
  misc_RNA (1)...(19): siRNA sense strand
gcaguuccggagacucuuu

SEQ ID NO: 146082 - RNA, 19 nt, Homo sapiens
  misc_RNA (1)...(19): siRNA sense strand
cucaugaacauucucaaua

SEQ ID NO: 146083 - RNA, 19 nt, Homo sapiens
  misc_RNA (1)...(19): siRNA sense strand
ggaggucagcgccacagaa

SEQ ID NO: 146084 - RNA, 19 nt, Homo sapiens
  misc_RNA (1)...(19): siRNA sense strand
caugaacauucucaauaag

SEQ ID NO: 146085 - RNA, 19 nt, Homo sapiens
  misc_RNA (1)...(19): siRNA sense strand
agauggcacuggacaaauc

SEQ ID NO: 146086 - RNA, 19 nt, Homo sapiens
  misc_RNA (1)...(19): siRNA sense strand
ggccauauacaaacaguuc

SEQ ID NO: 146087 - RNA, 19 nt, Homo sapiens
  misc_RNA (1)...(19): siRNA sense strand
gcacacauuacuccaacau

SEQ ID NO: 146088 - RNA, 19 nt, Homo sapiens
  misc_RNA (1)...(19): siRNA sense strand
acagaacucaugaacauuc

SEQ ID NO: 146089 - RNA, 19 nt, Homo sapiens
  misc_RNA (1)...(19): siRNA sense strand
gcaucucuauaacaugauc

SEQ ID NO: 146090 - RNA, 19 nt, Homo sapiens
  misc_RNA (1)...(19): siRNA sense strand
gaucugaagacugaugguu

SEQ ID NO: 146091 - RNA, 19 nt, Homo sapiens
  misc_RNA (1)...(19): siRNA sense strand
ggcaggccauauacaaaca

SEQ ID NO: 146092 - RNA, 19 nt, Homo sapiens
  misc_RNA (1)...(19): siRNA sense strand
cacauuacuccaacauuga

SEQ ID NO: 146093 - RNA, 19 nt, Homo sapiens
  misc_RNA (1)...(19): siRNA sense strand
gggaccauuugcaguagug

SEQ ID NO: 146094 - RNA, 19 nt, Homo sapiens
  misc_RNA (1)...(19): siRNA sense strand
ggucagcgccacagaacuc

SEQ ID NO: 146095 - RNA, 19 nt, Homo sapiens
  misc_RNA (1)...(19): siRNA sense strand
acacgacacccugaucuga

SEQ ID NO: 146096 - RNA, 19 nt, Homo sapiens
  misc_RNA (1)...(19): siRNA sense strand
caaagauggcacuggacaa

SEQ ID NO: 146097 - RNA, 19 nt, Homo sapiens
  misc_RNA (1)...(19): siRNA sense strand
ugaacucccaggugccuuu

SEQ ID NO: 146098 - RNA, 19 nt, Homo sapiens
  misc_RNA (1)...(19): siRNA sense strand
gcugggcuuugaggaauuc

SEQ ID NO: 146099 - RNA, 19 nt, Homo sapiens
  misc_RNA (1)...(19): siRNA sense strand
ggagucaucagcgccauca

SEQ ID NO: 146100 - RNA, 19 nt, Homo sapiens
  misc_RNA (1)...(19): siRNA sense strand
ucugaagacugaugguuuu

SEQ ID NO: 146101 - RNA, 19 nt, Homo sapiens
  misc_RNA (1)...(19): siRNA sense strand
gugggaacauggauuuuga

SEQ ID NO: 146102 - RNA, 19 nt, Homo sapiens
  misc_RNA (1)...(19): siRNA sense strand
agaugaaagugggaacaug

SEQ ID NO: 146103 - RNA, 19 nt, Homo sapiens
  misc_RNA (1)...(19): siRNA sense strand
gcagcaugguggccgugau

SEQ ID NO: 146104 - RNA, 19 nt, Homo sapiens
  misc_RNA (1)...(19): siRNA sense strand
augagcaucucuauaacau

SEQ ID NO: 146105 - RNA, 19 nt, Homo sapiens
  misc_RNA (1)...(19): siRNA sense strand
gaacggccaugcgcauccu

SEQ ID NO: 146106 - RNA, 19 nt, Homo sapiens
  misc_RNA (1)...(19): siRNA sense strand
cauccuaggcggagucauc

SEQ ID NO: 146107 - RNA, 19 nt, Homo sapiens
  misc_RNA (1)...(19): siRNA sense strand
gaccgaucagggaccauuu

SEQ ID NO: 146108 - RNA, 19 nt, Homo sapiens
  misc_RNA (1)...(19): siRNA sense strand
gacaaauccaggugaacau

SEQ ID NO: 146109 - RNA, 19 nt, Homo sapiens
  misc_RNA (1)...(19): siRNA sense strand
cugaaugagcaucucuaua

SEQ ID NO: 146110 - RNA, 19 nt, Homo sapiens
  misc_RNA (1)...(19): siRNA sense strand
gaacucccaggugccuuug

SEQ ID NO: 146111 - RNA, 19 nt, Homo sapiens
  misc_RNA (1)...(19): siRNA sense strand
gguuaacucguucuugaag

SEQ ID NO: 146112 - RNA, 19 nt, Homo sapiens
  misc_RNA (1)...(19): siRNA sense strand
gaggucagcgccacagaac

SEQ ID NO: 146113 - RNA, 19 nt, Homo sapiens
  misc_RNA (1)...(19): siRNA sense strand
cuaaacaccucaacgauga

SEQ ID NO: 146114 - RNA, 19 nt, Homo sapiens
  misc_RNA (1)...(19): siRNA sense strand
gcaguuguaccaugcauua

SEQ ID NO: 146115 - RNA, 19 nt, Homo sapiens
  misc_RNA (1)...(19): siRNA sense strand
auuaagagcuuccugauug

SEQ ID NO: 146116 - RNA, 19 nt, Homo sapiens
  misc_RNA (1)...(19): siRNA sense strand
gcacaucugggcaguugua

SEQ ID NO: 146117 - RNA, 19 nt, Homo sapiens
  misc_RNA (1)...(19): siRNA sense strand
caacuugcagaaagaaaua

SEQ ID NO: 146118 - RNA, 19 nt, Homo sapiens
  misc_RNA (1)...(19): siRNA sense strand
gaacagggcaacaucuaca

SEQ ID NO: 146119 - RNA, 19 nt, Homo sapiens
  misc_RNA (1)...(19): siRNA sense strand
gcaucaacuugcagaaaga

SEQ ID NO: 146120 - RNA, 19 nt, Homo sapiens
  misc_RNA (1)...(19): siRNA sense strand
gcacucaucuggggcauuu

SEQ ID NO: 146121 - RNA, 19 nt, Homo sapiens
  misc_RNA (1)...(19): siRNA sense strand
cagacgagcugagcgagaa

SEQ ID NO: 146122 - RNA, 19 nt, Homo sapiens
  misc_RNA (1)...(19): siRNA sense strand
gggaaaauauucagcaaug

SEQ ID NO: 146123 - RNA, 19 nt, Homo sapiens
  misc_RNA (1)...(19): siRNA sense strand
guuguaccaugcauuaaga

SEQ ID NO: 146124 - RNA, 19 nt, Homo sapiens
  misc_RNA (1)...(19): siRNA sense strand
cagaagggacacacaguuu

SEQ ID NO: 146125 - RNA, 19 nt, Homo sapiens
  misc_RNA (1)...(19): siRNA sense strand
caagauugacuuugaagau

SEQ ID NO: 146126 - RNA, 19 nt, Homo sapiens
  misc_RNA (1)...(19): siRNA sense strand
gcauuuacuucgccauucu

SEQ ID NO: 146127 - RNA, 19 nt, Homo sapiens
  misc_RNA (1)...(19): siRNA sense strand
gggaacagggcaacaucua

SEQ ID NO: 146128 - RNA, 19 nt, Homo sapiens
  misc_RNA (1)...(19): siRNA sense strand
cuuugaagcuguugggaaa

SEQ ID NO: 146129 - RNA, 19 nt, Homo sapiens
  misc_RNA (1)...(19): siRNA sense strand
uuaagagcuuccugauuga

SEQ ID NO: 146130 - RNA, 19 nt, Homo sapiens
  misc_RNA (1)...(19): siRNA sense strand
gcaauguccgcaucaacuu

SEQ ID NO: 146131 - RNA, 19 nt, Homo sapiens
  misc_RNA (1)...(19): siRNA sense strand
aagauugacuuugaagaug

SEQ ID NO: 146132 - RNA, 19 nt, Homo sapiens
  misc_RNA (1)...(19): siRNA sense strand
ugauugagauucagugcau

SEQ ID NO: 146133 - RNA, 19 nt, Homo sapiens
  misc_RNA (1)...(19): siRNA sense strand
gcgagaagcaaguguacga

SEQ ID NO: 146134 - RNA, 19 nt, Homo sapiens
  misc_RNA (1)...(19): siRNA sense strand
uaccaugcauuaagagcuu

SEQ ID NO: 146135 - RNA, 19 nt, Homo sapiens
  misc_RNA (1)...(19): siRNA sense strand
ucuacaagcccaacaacaa

SEQ ID NO: 146136 - RNA, 19 nt, Homo sapiens
  misc_RNA (1)...(19): siRNA sense strand
ccagaagggacacacaguu

SEQ ID NO: 146137 - RNA, 19 nt, Homo sapiens
  misc_RNA (1)...(19): siRNA sense strand
gauugacuuugaagaugug

SEQ ID NO: 146138 - RNA, 19 nt, Homo sapiens
  misc_RNA (1)...(19): siRNA sense strand
ugacuuugaagaugugauu

SEQ ID NO: 146139 - RNA, 19 nt, Homo sapiens
  misc_RNA (1)...(19): siRNA sense strand
agauugacuuugaagaugu

SEQ ID NO: 146140 - RNA, 19 nt, Homo sapiens
  misc_RNA (1)...(19): siRNA sense strand
gaaccagaagggacacaca

SEQ ID NO: 146141 - RNA, 19 nt, Homo sapiens
  misc_RNA (1)...(19): siRNA sense strand
gugcaucagccgugucuau

SEQ ID NO: 146142 - RNA, 19 nt, Homo sapiens
  misc_RNA (1)...(19): siRNA sense strand
gcauuaagagcuuccugau

SEQ ID NO: 146143 - RNA, 19 nt, Homo sapiens
  misc_RNA (1)...(19): siRNA sense strand
cuugcugucugcccucuuu

SEQ ID NO: 146144 - RNA, 19 nt, Homo sapiens
  misc_RNA (1)...(19): siRNA sense strand
gcaucagccgugucuauuc

SEQ ID NO: 146145 - RNA, 19 nt, Homo sapiens
  misc_RNA (1)...(19): siRNA sense strand
gggcauuuacuucgccauu

SEQ ID NO: 146146 - RNA, 19 nt, Homo sapiens
  misc_RNA (1)...(19): siRNA sense strand
cauuaagagcuuccugauu

SEQ ID NO: 146147 - RNA, 19 nt, Homo sapiens
  misc_RNA (1)...(19): siRNA sense strand
cgcaucaacuugcagaaag

SEQ ID NO: 146148 - RNA, 19 nt, Homo sapiens
  misc_RNA (1)...(19): siRNA sense strand
gaagggacacacaguuuug

SEQ ID NO: 146149 - RNA, 19 nt, Homo sapiens
  misc_RNA (1)...(19): siRNA sense strand
ggaacagggcaacaucuac

SEQ ID NO: 146150 - RNA, 19 nt, Homo sapiens
  misc_RNA (1)...(19): siRNA sense strand
ggcauuuacuucgccauuc

SEQ ID NO: 146151 - RNA, 19 nt, Homo sapiens
  misc_RNA (1)...(19): siRNA sense strand
ugagcgagaagcaagugua

SEQ ID NO: 146152 - RNA, 19 nt, Homo sapiens
  misc_RNA (1)...(19): siRNA sense strand
ggaaaauauucagcaaugu

SEQ ID NO: 146153 - RNA, 19 nt, Homo sapiens
  misc_RNA (1)...(19): siRNA sense strand
cgucugugacccacucuuu

SEQ ID NO: 146154 - RNA, 19 nt, Homo sapiens
  misc_RNA (1)...(19): siRNA sense strand
cuacaagcccaacaacaag

SEQ ID NO: 146155 - RNA, 19 nt, Homo sapiens
  misc_RNA (1)...(19): siRNA sense strand
caucagccgugucuauucc

SEQ ID NO: 146156 - RNA, 19 nt, Homo sapiens
  misc_RNA (1)...(19): siRNA sense strand
gcauuuggaaggccagcuu

SEQ ID NO: 146157 - RNA, 19 nt, Homo sapiens
  misc_RNA (1)...(19): siRNA sense strand
ucaacuugcagaaagaaau

SEQ ID NO: 146158 - RNA, 19 nt, Homo sapiens
  misc_RNA (1)...(19): siRNA sense strand
caauguccgcaucaacuug

SEQ ID NO: 146159 - RNA, 19 nt, Homo sapiens
  misc_RNA (1)...(19): siRNA sense strand
gaaaauauucagcaauguc

SEQ ID NO: 146160 - RNA, 19 nt, Homo sapiens
  misc_RNA (1)...(19): siRNA sense strand
gagcuuccugauugagauu

SEQ ID NO: 146161 - RNA, 19 nt, Homo sapiens
  misc_RNA (1)...(19): siRNA sense strand
gaagaugugauugcagaac

SEQ ID NO: 146162 - RNA, 19 nt, Homo sapiens
  misc_RNA (1)...(19): siRNA sense strand
ucugugacccacucuuuga

SEQ ID NO: 146163 - RNA, 19 nt, Homo sapiens
  misc_RNA (1)...(19): siRNA sense strand
gagcgagaagcaaguguac

SEQ ID NO: 146164 - RNA, 19 nt, Homo sapiens
  misc_RNA (1)...(19): siRNA sense strand
uuacuucgccauucucucu

SEQ ID NO: 146165 - RNA, 19 nt, Homo sapiens
  misc_RNA (1)...(19): siRNA sense strand
ccgcaucaacuugcagaaa

SEQ ID NO: 146166 - RNA, 19 nt, Homo sapiens
  misc_RNA (1)...(19): siRNA sense strand
ucagcaauguccgcaucaa

SEQ ID NO: 146167 - RNA, 19 nt, Homo sapiens
  misc_RNA (1)...(19): siRNA sense strand
caucugggcaguuguacca

SEQ ID NO: 146168 - RNA, 19 nt, Homo sapiens
  misc_RNA (1)...(19): siRNA sense strand
gagaguaugucgacuuaga

SEQ ID NO: 146169 - RNA, 19 nt, Homo sapiens
  misc_RNA (1)...(19): siRNA sense strand
gaacagcgacaaacaccua

SEQ ID NO: 146170 - RNA, 19 nt, Homo sapiens
  misc_RNA (1)...(19): siRNA sense strand
gagaaggacacgcgaauuu

SEQ ID NO: 146171 - RNA, 19 nt, Homo sapiens
  misc_RNA (1)...(19): siRNA sense strand
ccgagaguaugucgacuua

SEQ ID NO: 146172 - RNA, 19 nt, Homo sapiens
  misc_RNA (1)...(19): siRNA sense strand
gaaggacacgcgaauuuga

SEQ ID NO: 146173 - RNA, 19 nt, Homo sapiens
  misc_RNA (1)...(19): siRNA sense strand
gcaggaggaugcauuagca

SEQ ID NO: 146174 - RNA, 19 nt, Homo sapiens
  misc_RNA (1)...(19): siRNA sense strand
ggauugaucuccaaagacu

SEQ ID NO: 146175 - RNA, 19 nt, Homo sapiens
  misc_RNA (1)...(19): siRNA sense strand
gagaagcaggcaagguaua

SEQ ID NO: 146176 - RNA, 19 nt, Homo sapiens
  misc_RNA (1)...(19): siRNA sense strand
uggaaaggcuggauugauc

SEQ ID NO: 146177 - RNA, 19 nt, Homo sapiens
  misc_RNA (1)...(19): siRNA sense strand
uuugaaggcucccaugauu

SEQ ID NO: 146178 - RNA, 19 nt, Homo sapiens
  misc_RNA (1)...(19): siRNA sense strand
gaauggagucuguguuauc

SEQ ID NO: 146179 - RNA, 19 nt, Homo sapiens
  misc_RNA (1)...(19): siRNA sense strand
aagagaagcaggcaaggua

SEQ ID NO: 146180 - RNA, 19 nt, Homo sapiens
  misc_RNA (1)...(19): siRNA sense strand
gaagaggcucggagaagga

SEQ ID NO: 146181 - RNA, 19 nt, Homo sapiens
  misc_RNA (1)...(19): siRNA sense strand
gcaggcaagguauauuuga

SEQ ID NO: 146182 - RNA, 19 nt, Homo sapiens
  misc_RNA (1)...(19): siRNA sense strand
gcgagugugagauuaagua

SEQ ID NO: 146183 - RNA, 19 nt, Homo sapiens
  misc_RNA (1)...(19): siRNA sense strand
guaugucgacuuagaaaga

SEQ ID NO: 146184 - RNA, 19 nt, Homo sapiens
  misc_RNA (1)...(19): siRNA sense strand
cugaauggagucuguguua

SEQ ID NO: 146185 - RNA, 19 nt, Homo sapiens
  misc_RNA (1)...(19): siRNA sense strand
caggcaagguauauuugaa

SEQ ID NO: 146186 - RNA, 19 nt, Homo sapiens
  misc_RNA (1)...(19): siRNA sense strand
acacgcgaauuugaagaua

SEQ ID NO: 146187 - RNA, 19 nt, Homo sapiens
  misc_RNA (1)...(19): siRNA sense strand
ccagcaggaggaugcauua

SEQ ID NO: 146188 - RNA, 19 nt, Homo sapiens
  misc_RNA (1)...(19): siRNA sense strand
ggagaaggacacgcgaauu

SEQ ID NO: 146189 - RNA, 19 nt, Homo sapiens
  misc_RNA (1)...(19): siRNA sense strand
gcacaacaggccuuugaag

SEQ ID NO: 146190 - RNA, 19 nt, Homo sapiens
  misc_RNA (1)...(19): siRNA sense strand
gaguaugucgacuuagaaa

SEQ ID NO: 146191 - RNA, 19 nt, Homo sapiens
  misc_RNA (1)...(19): siRNA sense strand
aagcaggcaagguauauuu

SEQ ID NO: 146192 - RNA, 19 nt, Homo sapiens
  misc_RNA (1)...(19): siRNA sense strand
gaagcaggcaagguauauu

SEQ ID NO: 146193 - RNA, 19 nt, Homo sapiens
  misc_RNA (1)...(19): siRNA sense strand
uagcacaacaggccuuuga

SEQ ID NO: 146194 - RNA, 19 nt, Homo sapiens
  misc_RNA (1)...(19): siRNA sense strand
ggaggaugcauuagcacaa

SEQ ID NO: 146195 - RNA, 19 nt, Homo sapiens
  misc_RNA (1)...(19): siRNA sense strand
gagucuguguuaucuggaa

SEQ ID NO: 146196 - RNA, 19 nt, Homo sapiens
  misc_RNA (1)...(19): siRNA sense strand
ugaauggagucuguguuau

SEQ ID NO: 146197 - RNA, 19 nt, Homo sapiens
  misc_RNA (1)...(19): siRNA sense strand
cacaacaggccuuugaaga

SEQ ID NO: 146198 - RNA, 19 nt, Homo sapiens
  misc_RNA (1)...(19): siRNA sense strand
gagccgcgagugugagauu

SEQ ID NO: 146199 - RNA, 19 nt, Homo sapiens
  misc_RNA (1)...(19): siRNA sense strand
cgacuuagaaagagaagca

SEQ ID NO: 146200 - RNA, 19 nt, Homo sapiens
  misc_RNA (1)...(19): siRNA sense strand
acgcgaauuugaagauaga

SEQ ID NO: 146201 - RNA, 19 nt, Homo sapiens
  misc_RNA (1)...(19): siRNA sense strand
ggacacgcgaauuugaaga

SEQ ID NO: 146202 - RNA, 19 nt, Homo sapiens
  misc_RNA (1)...(19): siRNA sense strand
gggagaacagcgacaaaca

SEQ ID NO: 146203 - RNA, 19 nt, Homo sapiens
  misc_RNA (1)...(19): siRNA sense strand
ccaaagacuggaugguaug

SEQ ID NO: 146204 - RNA, 19 nt, Homo sapiens
  misc_RNA (1)...(19): siRNA sense strand
ggaaaggcuggauugaucu

SEQ ID NO: 146205 - RNA, 19 nt, Homo sapiens
  misc_RNA (1)...(19): siRNA sense strand
gaagcugagccgcgagugu

SEQ ID NO: 146206 - RNA, 19 nt, Homo sapiens
  misc_RNA (1)...(19): siRNA sense strand
ggucucaucgggaggaaau

SEQ ID NO: 146207 - RNA, 19 nt, Homo sapiens
  misc_RNA (1)...(19): siRNA sense strand
gaggaugcauuagcacaac

SEQ ID NO: 146208 - RNA, 19 nt, Homo sapiens
  misc_RNA (1)...(19): siRNA sense strand
uaugggcugucuggaguuu

SEQ ID NO: 146209 - RNA, 19 nt, Homo sapiens
  misc_RNA (1)...(19): siRNA sense strand
gcucggaaaucgcuuuugu

SEQ ID NO: 146210 - RNA, 19 nt, Homo sapiens
  misc_RNA (1)...(19): siRNA sense strand
ugaaggcucccaugauucu

SEQ ID NO: 146211 - RNA, 19 nt, Homo sapiens
  misc_RNA (1)...(19): siRNA sense strand
gcagggagaacagcgacaa

SEQ ID NO: 146212 - RNA, 19 nt, Homo sapiens
  misc_RNA (1)...(19): siRNA sense strand
ugggcugucuggaguuuga

SEQ ID NO: 146213 - RNA, 19 nt, Homo sapiens
  misc_RNA (1)...(19): siRNA sense strand
agaaggacacgcgaauuug

SEQ ID NO: 146214 - RNA, 19 nt, Homo sapiens
  misc_RNA (1)...(19): siRNA sense strand
ggagaacagcgacaaacac

SEQ ID NO: 146215 - RNA, 19 nt, Homo sapiens
  misc_RNA (1)...(19): siRNA sense strand
gaauuugaagauagagaca

SEQ ID NO: 146216 - RNA, 19 nt, Homo sapiens
  misc_RNA (1)...(19): siRNA sense strand
acaacaggccuuugaagag

SEQ ID NO: 146217 - RNA, 19 nt, Homo sapiens
  misc_RNA (1)...(19): siRNA sense strand
aauggagucuguguuaucu

SEQ ID NO: 146218 - RNA, 19 nt, Homo sapiens
  misc_RNA (1)...(19): siRNA sense strand
agaagcaggcaagguauau

SEQ ID NO: 146219 - RNA, 19 nt, Homo sapiens
  misc_RNA (1)...(19): siRNA sense strand
gacacgcgaauuugaagau

SEQ ID NO: 146220 - RNA, 19 nt, Homo sapiens
  misc_RNA (1)...(19): siRNA sense strand
gaaaggcuggauugaucuc

SEQ ID NO: 146221 - RNA, 19 nt, Homo sapiens
  misc_RNA (1)...(19): siRNA sense strand
acaccuagccgagaguaug

SEQ ID NO: 146222 - RNA, 19 nt, Homo sapiens
  misc_RNA (1)...(19): siRNA sense strand
gagaguaugucgacuuaga

SEQ ID NO: 146223 - RNA, 19 nt, Homo sapiens
  misc_RNA (1)...(19): siRNA sense strand
gaacagcgacaaacaccua

SEQ ID NO: 146224 - RNA, 19 nt, Homo sapiens
  misc_RNA (1)...(19): siRNA sense strand
gagaaggacacgcgaauuu

SEQ ID NO: 146225 - RNA, 19 nt, Homo sapiens
  misc_RNA (1)...(19): siRNA sense strand
ccgagaguaugucgacuua

SEQ ID NO: 146226 - RNA, 19 nt, Homo sapiens
  misc_RNA (1)...(19): siRNA sense strand
gaaggacacgcgaauuuga

SEQ ID NO: 146227 - RNA, 19 nt, Homo sapiens
  misc_RNA (1)...(19): siRNA sense strand
gcaggaggaugcauuagca

SEQ ID NO: 146228 - RNA, 19 nt, Homo sapiens
  misc_RNA (1)...(19): siRNA sense strand
ggauugaucuccaaagacu

SEQ ID NO: 146229 - RNA, 19 nt, Homo sapiens
  misc_RNA (1)...(19): siRNA sense strand
gagaagcaggcaagguaua

SEQ ID NO: 146230 - RNA, 19 nt, Homo sapiens
  misc_RNA (1)...(19): siRNA sense strand
uggaaaggcuggauugauc

SEQ ID NO: 146231 - RNA, 19 nt, Homo sapiens
  misc_RNA (1)...(19): siRNA sense strand
caauuuaggugguggugau

SEQ ID NO: 146232 - RNA, 19 nt, Homo sapiens
  misc_RNA (1)...(19): siRNA sense strand
uuugaaggcucccaugauu

SEQ ID NO: 146233 - RNA, 19 nt, Homo sapiens
  misc_RNA (1)...(19): siRNA sense strand
gaauggagucuguguuauc

SEQ ID NO: 146234 - RNA, 19 nt, Homo sapiens
  misc_RNA (1)...(19): siRNA sense strand
aagagaagcaggcaaggua

SEQ ID NO: 146235 - RNA, 19 nt, Homo sapiens
  misc_RNA (1)...(19): siRNA sense strand
gaagaggcucggagaagga

SEQ ID NO: 146236 - RNA, 19 nt, Homo sapiens
  misc_RNA (1)...(19): siRNA sense strand
gcaggcaagguauauuuga

SEQ ID NO: 146237 - RNA, 19 nt, Homo sapiens
  misc_RNA (1)...(19): siRNA sense strand
gcgagugugagauuaagua

SEQ ID NO: 146238 - RNA, 19 nt, Homo sapiens
  misc_RNA (1)...(19): siRNA sense strand
ggugaugaccucaaacuuc

SEQ ID NO: 146239 - RNA, 19 nt, Homo sapiens
  misc_RNA (1)...(19): siRNA sense strand
guaugucgacuuagaaaga

SEQ ID NO: 146240 - RNA, 19 nt, Homo sapiens
  misc_RNA (1)...(19): siRNA sense strand
cugaauggagucuguguua

SEQ ID NO: 146241 - RNA, 19 nt, Homo sapiens
  misc_RNA (1)...(19): siRNA sense strand
caggcaagguauauuugaa

SEQ ID NO: 146242 - RNA, 19 nt, Homo sapiens
  misc_RNA (1)...(19): siRNA sense strand
acacgcgaauuugaagaua

SEQ ID NO: 146243 - RNA, 19 nt, Homo sapiens
  misc_RNA (1)...(19): siRNA sense strand
ccagcaggaggaugcauua

SEQ ID NO: 146244 - RNA, 19 nt, Homo sapiens
  misc_RNA (1)...(19): siRNA sense strand
ggagaaggacacgcgaauu

SEQ ID NO: 146245 - RNA, 19 nt, Homo sapiens
  misc_RNA (1)...(19): siRNA sense strand
gcacaacaggccuuugaag

SEQ ID NO: 146246 - RNA, 19 nt, Homo sapiens
  misc_RNA (1)...(19): siRNA sense strand
gaguaugucgacuuagaaa

SEQ ID NO: 146247 - RNA, 19 nt, Homo sapiens
  misc_RNA (1)...(19): siRNA sense strand
aagcaggcaagguauauuu

SEQ ID NO: 146248 - RNA, 19 nt, Homo sapiens
  misc_RNA (1)...(19): siRNA sense strand
gaagcaggcaagguauauu

SEQ ID NO: 146249 - RNA, 19 nt, Homo sapiens
  misc_RNA (1)...(19): siRNA sense strand
uagcacaacaggccuuuga

SEQ ID NO: 146250 - RNA, 19 nt, Homo sapiens
  misc_RNA (1)...(19): siRNA sense strand
ggaggaugcauuagcacaa

SEQ ID NO: 146251 - RNA, 19 nt, Homo sapiens
  misc_RNA (1)...(19): siRNA sense strand
gagucuguguuaucuggaa

SEQ ID NO: 146252 - RNA, 19 nt, Homo sapiens
  misc_RNA (1)...(19): siRNA sense strand
ugaauggagucuguguuau

SEQ ID NO: 146253 - RNA, 19 nt, Homo sapiens
  misc_RNA (1)...(19): siRNA sense strand
cacaacaggccuuugaaga

SEQ ID NO: 146254 - RNA, 19 nt, Homo sapiens
  misc_RNA (1)...(19): siRNA sense strand
gagccgcgagugugagauu

SEQ ID NO: 146255 - RNA, 19 nt, Homo sapiens
  misc_RNA (1)...(19): siRNA sense strand
cgacuuagaaagagaagca

SEQ ID NO: 146256 - RNA, 19 nt, Homo sapiens
  misc_RNA (1)...(19): siRNA sense strand
acgcgaauuugaagauaga

SEQ ID NO: 146257 - RNA, 19 nt, Homo sapiens
  misc_RNA (1)...(19): siRNA sense strand
ggacacgcgaauuugaaga

SEQ ID NO: 146258 - RNA, 19 nt, Homo sapiens
  misc_RNA (1)...(19): siRNA sense strand
gggagaacagcgacaaaca

SEQ ID NO: 146259 - RNA, 19 nt, Homo sapiens
  misc_RNA (1)...(19): siRNA sense strand
ccaaagacuggaugguaug

SEQ ID NO: 146260 - RNA, 19 nt, Homo sapiens
  misc_RNA (1)...(19): siRNA sense strand
ggaaaggcuggauugaucu

SEQ ID NO: 146261 - RNA, 19 nt, Homo sapiens
  misc_RNA (1)...(19): siRNA sense strand
uaugggcugucuggaguuu

SEQ ID NO: 146262 - RNA, 19 nt, Homo sapiens
  misc_RNA (1)...(19): siRNA sense strand
gaagcugagccgcgagugu

SEQ ID NO: 146263 - RNA, 19 nt, Homo sapiens
  misc_RNA (1)...(19): siRNA sense strand
ggucucaucgggaggaaau

SEQ ID NO: 146264 - RNA, 19 nt, Homo sapiens
  misc_RNA (1)...(19): siRNA sense strand
gaggaugcauuagcacaac

SEQ ID NO: 146265 - RNA, 19 nt, Homo sapiens
  misc_RNA (1)...(19): siRNA sense strand
gcucggaaaucgcuuuugu

SEQ ID NO: 146266 - RNA, 19 nt, Homo sapiens
  misc_RNA (1)...(19): siRNA sense strand
ugaaggcucccaugauucu

SEQ ID NO: 146267 - RNA, 19 nt, Homo sapiens
  misc_RNA (1)...(19): siRNA sense strand
ugggcugucuggaguuuga

SEQ ID NO: 146268 - RNA, 19 nt, Homo sapiens
  misc_RNA (1)...(19): siRNA sense strand
gcagggagaacagcgacaa

SEQ ID NO: 146269 - RNA, 19 nt, Homo sapiens
  misc_RNA (1)...(19): siRNA sense strand
uaguccugguuccaauuua

SEQ ID NO: 146270 - RNA, 19 nt, Homo sapiens
  misc_RNA (1)...(19): siRNA sense strand
gaugaccucaaacuucguu

SEQ ID NO: 146271 - RNA, 19 nt, Homo sapiens
  misc_RNA (1)...(19): siRNA sense strand
agaaggacacgcgaauuug

SEQ ID NO: 146272 - RNA, 19 nt, Homo sapiens
  misc_RNA (1)...(19): siRNA sense strand
ggagaacagcgacaaacac

SEQ ID NO: 146273 - RNA, 19 nt, Homo sapiens
  misc_RNA (1)...(19): siRNA sense strand
gaauuugaagauagagaca

SEQ ID NO: 146274 - RNA, 19 nt, Homo sapiens
  misc_RNA (1)...(19): siRNA sense strand
acaacaggccuuugaagag

SEQ ID NO: 146275 - RNA, 19 nt, Homo sapiens
  misc_RNA (1)...(19): siRNA sense strand
ugaccucaaacuucguuaa

SEQ ID NO: 146276 - RNA, 19 nt, Homo sapiens
  misc_RNA (1)...(19): siRNA sense strand
aauggagucuguguuaucu

SEQ ID NO: 146277 - RNA, 19 nt, Homo sapiens
  misc_RNA (1)...(19): siRNA sense strand
cuaguccugguuccaauuu

SEQ ID NO: 146278 - RNA, 19 nt, Homo sapiens
  misc_RNA (1)...(19): siRNA sense strand
agaagcaggcaagguauau

SEQ ID NO: 146279 - RNA, 19 nt, Homo sapiens
  misc_RNA (1)...(19): siRNA sense strand
gacacgcgaauuugaagau

SEQ ID NO: 146280 - RNA, 19 nt, Homo sapiens
  misc_RNA (1)...(19): siRNA sense strand
gaaaggcuggauugaucuc

SEQ ID NO: 146281 - RNA, 19 nt, Homo sapiens
  misc_RNA (1)...(19): siRNA sense strand
acaccuagccgagaguaug

SEQ ID NO: 146282 - RNA, 19 nt, Homo sapiens
  misc_RNA (1)...(19): siRNA sense strand
caucaaaggugguccauaa

SEQ ID NO: 146283 - RNA, 19 nt, Homo sapiens
  misc_RNA (1)...(19): siRNA sense strand
gcagacagaucaacagcua

SEQ ID NO: 146284 - RNA, 19 nt, Homo sapiens
  misc_RNA (1)...(19): siRNA sense strand
gcaaauuucucacgcauca

SEQ ID NO: 146285 - RNA, 19 nt, Homo sapiens
  misc_RNA (1)...(19): siRNA sense strand
caacagcuaugucaagaau

SEQ ID NO: 146286 - RNA, 19 nt, Homo sapiens
  misc_RNA (1)...(19): siRNA sense strand
cagcagacaucaagcacua

SEQ ID NO: 146287 - RNA, 19 nt, Homo sapiens
  misc_RNA (1)...(19): siRNA sense strand
gcaaugccuuguuucuuga

SEQ ID NO: 146288 - RNA, 19 nt, Homo sapiens
  misc_RNA (1)...(19): siRNA sense strand
gagaugugcuggaggaaau

SEQ ID NO: 146289 - RNA, 19 nt, Homo sapiens
  misc_RNA (1)...(19): siRNA sense strand
gacaccagcuuagaaauga

SEQ ID NO: 146290 - RNA, 19 nt, Homo sapiens
  misc_RNA (1)...(19): siRNA sense strand
acagcuaugucaagaauaa

SEQ ID NO: 146291 - RNA, 19 nt, Homo sapiens
  misc_RNA (1)...(19): siRNA sense strand
ucagaggucuuggcuauga

SEQ ID NO: 146292 - RNA, 19 nt, Homo sapiens
  misc_RNA (1)...(19): siRNA sense strand
caccaucucuggagucuau

SEQ ID NO: 146293 - RNA, 19 nt, Homo sapiens
  misc_RNA (1)...(19): siRNA sense strand
ggucaacuauaucuucuuc

SEQ ID NO: 146294 - RNA, 19 nt, Homo sapiens
  misc_RNA (1)...(19): siRNA sense strand
caaugggacugucuucuuc

SEQ ID NO: 146295 - RNA, 19 nt, Homo sapiens
  misc_RNA (1)...(19): siRNA sense strand
ccauaaagcugugcugcaa

SEQ ID NO: 146296 - RNA, 19 nt, Homo sapiens
  misc_RNA (1)...(19): siRNA sense strand
ucaccaaccaggcaaauuu

SEQ ID NO: 146297 - RNA, 19 nt, Homo sapiens
  misc_RNA (1)...(19): siRNA sense strand
gcaaugggacugucuucuu

SEQ ID NO: 146298 - RNA, 19 nt, Homo sapiens
  misc_RNA (1)...(19): siRNA sense strand
gagcaucuccauggccuua

SEQ ID NO: 146299 - RNA, 19 nt, Homo sapiens
  misc_RNA (1)...(19): siRNA sense strand
gcaccugcaccaacucuuu

SEQ ID NO: 146300 - RNA, 19 nt, Homo sapiens
  misc_RNA (1)...(19): siRNA sense strand
ggucuuggcuaugaauuuc

SEQ ID NO: 146301 - RNA, 19 nt, Homo sapiens
  misc_RNA (1)...(19): siRNA sense strand
ccuaucaucuugcguuuca

SEQ ID NO: 146302 - RNA, 19 nt, Homo sapiens
  misc_RNA (1)...(19): siRNA sense strand
gaacaugaguaaccaucac

SEQ ID NO: 146303 - RNA, 19 nt, Homo sapiens
  misc_RNA (1)...(19): siRNA sense strand
agucagaggucuuggcuau

SEQ ID NO: 146304 - RNA, 19 nt, Homo sapiens
  misc_RNA (1)...(19): siRNA sense strand
gaaaauugucgacuuguuu

SEQ ID NO: 146305 - RNA, 19 nt, Homo sapiens
  misc_RNA (1)...(19): siRNA sense strand
cagcugaagucaucaaagg

SEQ ID NO: 146306 - RNA, 19 nt, Homo sapiens
  misc_RNA (1)...(19): siRNA sense strand
uggaguugcuggagucauu

SEQ ID NO: 146307 - RNA, 19 nt, Homo sapiens
  misc_RNA (1)...(19): siRNA sense strand
aaagucagacaccagcuua

SEQ ID NO: 146308 - RNA, 19 nt, Homo sapiens
  misc_RNA (1)...(19): siRNA sense strand
caaaggugguccauaaagc

SEQ ID NO: 146309 - RNA, 19 nt, Homo sapiens
  misc_RNA (1)...(19): siRNA sense strand
gaucaacagcuaugucaag

SEQ ID NO: 146310 - RNA, 19 nt, Homo sapiens
  misc_RNA (1)...(19): siRNA sense strand
gaaggugcccaugauguug

SEQ ID NO: 146311 - RNA, 19 nt, Homo sapiens
  misc_RNA (1)...(19): siRNA sense strand
ucagacaccagcuuagaaa

SEQ ID NO: 146312 - RNA, 19 nt, Homo sapiens
  misc_RNA (1)...(19): siRNA sense strand
ggaaaauugucgacuuguu

SEQ ID NO: 146313 - RNA, 19 nt, Homo sapiens
  misc_RNA (1)...(19): siRNA sense strand
uaacgcugcuuaugugaac

SEQ ID NO: 146314 - RNA, 19 nt, Homo sapiens
  misc_RNA (1)...(19): siRNA sense strand
aaccagcccuucaucauca

SEQ ID NO: 146315 - RNA, 19 nt, Homo sapiens
  misc_RNA (1)...(19): siRNA sense strand
agacaacuguggugaaggu

SEQ ID NO: 146316 - RNA, 19 nt, Homo sapiens
  misc_RNA (1)...(19): siRNA sense strand
cgagacaacuguggugaag

SEQ ID NO: 146317 - RNA, 19 nt, Homo sapiens
  misc_RNA (1)...(19): siRNA sense strand
gcaacagccagcagacaga

SEQ ID NO: 146318 - RNA, 19 nt, Homo sapiens
  misc_RNA (1)...(19): siRNA sense strand
gggcauugcagacuuguuc

SEQ ID NO: 146319 - RNA, 19 nt, Homo sapiens
  misc_RNA (1)...(19): siRNA sense strand
caaccaggcaaauuucuca

SEQ ID NO: 146320 - RNA, 19 nt, Homo sapiens
  misc_RNA (1)...(19): siRNA sense strand
acaucaagcacuacuauga

SEQ ID NO: 146321 - RNA, 19 nt, Homo sapiens
  misc_RNA (1)...(19): siRNA sense strand
ugaaggugcccaugauguu

SEQ ID NO: 146322 - RNA, 19 nt, Homo sapiens
  misc_RNA (1)...(19): siRNA sense strand
ggagaugugcuggaggaaa

SEQ ID NO: 146323 - RNA, 19 nt, Homo sapiens
  misc_RNA (1)...(19): siRNA sense strand
caaccagcccuucaucauc

SEQ ID NO: 146324 - RNA, 19 nt, Homo sapiens
  misc_RNA (1)...(19): siRNA sense strand
gcaccagggaggagaacuu

SEQ ID NO: 146325 - RNA, 19 nt, Homo sapiens
  misc_RNA (1)...(19): siRNA sense strand
agacaucaagcacuacuau

SEQ ID NO: 146326 - RNA, 19 nt, Homo sapiens
  misc_RNA (1)...(19): siRNA sense strand
gggaagaugaacacaguca

SEQ ID NO: 146327 - RNA, 19 nt, Homo sapiens
  misc_RNA (1)...(19): siRNA sense strand
agacaccagcuuagaaaug

SEQ ID NO: 146328 - RNA, 19 nt, Homo sapiens
  misc_RNA (1)...(19): siRNA sense strand
cguccaagccuaucaucuu

SEQ ID NO: 146329 - RNA, 19 nt, Homo sapiens
  misc_RNA (1)...(19): siRNA sense strand
ggggaaaauugucgacuug

SEQ ID NO: 146330 - RNA, 19 nt, Homo sapiens
  misc_RNA (1)...(19): siRNA sense strand
cagaucaacagcuauguca

SEQ ID NO: 146331 - RNA, 19 nt, Homo sapiens
  misc_RNA (1)...(19): siRNA sense strand
agacagaucaacagcuaug

SEQ ID NO: 146332 - RNA, 19 nt, Homo sapiens
  misc_RNA (1)...(19): siRNA sense strand
cccuaaaccugacguccaa

SEQ ID NO: 146333 - RNA, 19 nt, Homo sapiens
  misc_RNA (1)...(19): siRNA sense strand
gauccuaacgcugcuuaug

SEQ ID NO: 146334 - RNA, 19 nt, Homo sapiens
  misc_RNA (1)...(19): siRNA sense strand
agucgagcaccaucaguua

SEQ ID NO: 146335 - RNA, 19 nt, Homo sapiens
  misc_RNA (1)...(19): siRNA sense strand
caaagucagacaccagcuu

SEQ ID NO: 146336 - RNA, 19 nt, Homo sapiens
  misc_RNA (1)...(19): siRNA sense strand
ucaaaggugguccauaaag

SEQ ID NO: 146337 - RNA, 19 nt, Homo sapiens
  misc_RNA (1)...(19): siRNA sense strand
ugaacuacgugggcaaugg

SEQ ID NO: 146338 - RNA, 19 nt, Homo sapiens
  misc_RNA (1)...(19): siRNA sense strand
caccaucaguuaccuucau

SEQ ID NO: 146339 - RNA, 19 nt, Homo sapiens
  misc_RNA (1)...(19): siRNA sense strand
caagcacuacuaugaguca

SEQ ID NO: 146340 - RNA, 19 nt, Homo sapiens
  misc_RNA (1)...(19): siRNA sense strand
aagcugugcugcaacucaa

SEQ ID NO: 146341 - RNA, 19 nt, Homo sapiens
  misc_RNA (1)...(19): siRNA sense strand
gcaccuaguggccuugagu

SEQ ID NO: 146342 - RNA, 19 nt, Homo sapiens
  misc_RNA (1)...(19): siRNA sense strand
uugcagacuuguucaccaa

SEQ ID NO: 146343 - RNA, 19 nt, Homo sapiens
  misc_RNA (1)...(19): siRNA sense strand
cagccaacguugacuuugc

SEQ ID NO: 146344 - RNA, 19 nt, Homo sapiens
  misc_RNA (1)...(19): siRNA sense strand
cagaggucuuggcuaugaa

SEQ ID NO: 146345 - RNA, 19 nt, Homo sapiens
  misc_RNA (1)...(19): siRNA sense strand
gugaaggugcccaugaugu

SEQ ID NO: 146346 - RNA, 19 nt, Homo sapiens
  misc_RNA (1)...(19): siRNA sense strand
cauggacacagcccuuuga

SEQ ID NO: 146347 - RNA, 19 nt, Homo sapiens
  misc_RNA (1)...(19): siRNA sense strand
gccagcuggugcagaugaa

SEQ ID NO: 146348 - RNA, 19 nt, Homo sapiens
  misc_RNA (1)...(19): siRNA sense strand
auaaagcugugcugcaacu

SEQ ID NO: 146349 - RNA, 19 nt, Homo sapiens
  misc_RNA (1)...(19): siRNA sense strand
uccuaacgcugcuuaugug

SEQ ID NO: 146350 - RNA, 19 nt, Homo sapiens
  misc_RNA (1)...(19): siRNA sense strand
ggaccuguacauuccaaag

SEQ ID NO: 146351 - RNA, 19 nt, Homo sapiens
  misc_RNA (1)...(19): siRNA sense strand
ucaaccagcccuucaucau

SEQ ID NO: 146352 - RNA, 19 nt, Homo sapiens
  misc_RNA (1)...(19): siRNA sense strand
gucagacaccagcuuagaa

SEQ ID NO: 146353 - RNA, 19 nt, Homo sapiens
  misc_RNA (1)...(19): siRNA sense strand
caucaagcacuacuaugag

SEQ ID NO: 146354 - RNA, 19 nt, Homo sapiens
  misc_RNA (1)...(19): siRNA sense strand
ggugaaggugcccaugaug

SEQ ID NO: 146355 - RNA, 19 nt, Homo sapiens
  misc_RNA (1)...(19): siRNA sense strand
gaacguaucuagcaucaug

SEQ ID NO: 146356 - RNA, 19 nt, Homo sapiens
  misc_RNA (1)...(19): siRNA sense strand
ggagaguggugaacguauc

SEQ ID NO: 146357 - RNA, 19 nt, Homo sapiens
  misc_RNA (1)...(19): siRNA sense strand
gaucccacacccuuucaua

SEQ ID NO: 146358 - RNA, 19 nt, Homo sapiens
  misc_RNA (1)...(19): siRNA sense strand
ccacacccuuucauauuca

SEQ ID NO: 146359 - RNA, 19 nt, Homo sapiens
  misc_RNA (1)...(19): siRNA sense strand
aagcugaagugacgaugaa

SEQ ID NO: 146360 - RNA, 19 nt, Homo sapiens
  misc_RNA (1)...(19): siRNA sense strand
gugaacguaucuagcauca

SEQ ID NO: 146361 - RNA, 19 nt, Homo sapiens
  misc_RNA (1)...(19): siRNA sense strand
agaagggagugcaccagaa

SEQ ID NO: 146362 - RNA, 19 nt, Homo sapiens
  misc_RNA (1)...(19): siRNA sense strand
gagaagagaguugaacagu

SEQ ID NO: 146363 - RNA, 19 nt, Homo sapiens
  misc_RNA (1)...(19): siRNA sense strand
gaagggagugcaccagaag

SEQ ID NO: 146364 - RNA, 19 nt, Homo sapiens
  misc_RNA (1)...(19): siRNA sense strand
gagcgucagagcccuuaaa

SEQ ID NO: 146365 - RNA, 19 nt, Homo sapiens
  misc_RNA (1)...(19): siRNA sense strand
cccacacccuuucauauuc

SEQ ID NO: 146366 - RNA, 19 nt, Homo sapiens
  misc_RNA (1)...(19): siRNA sense strand
caagagcccagaagaaggu

SEQ ID NO: 146367 - RNA, 19 nt, Homo sapiens
  misc_RNA (1)...(19): siRNA sense strand
ccaccaagagcccagaaga

SEQ ID NO: 146368 - RNA, 19 nt, Homo sapiens
  misc_RNA (1)...(19): siRNA sense strand
caauuuguuucagagaaga

SEQ ID NO: 146369 - RNA, 19 nt, Homo sapiens
  misc_RNA (1)...(19): siRNA sense strand
acagaauuacucccucuaa

SEQ ID NO: 146370 - RNA, 19 nt, Homo sapiens
  misc_RNA (1)...(19): siRNA sense strand
cagaaguuccgcagugaga

SEQ ID NO: 146371 - RNA, 19 nt, Homo sapiens
  misc_RNA (1)...(19): siRNA sense strand
gaagugacgaugaaaacaa

SEQ ID NO: 146372 - RNA, 19 nt, Homo sapiens
  misc_RNA (1)...(19): siRNA sense strand
caccaagagcccagaagaa

SEQ ID NO: 146373 - RNA, 19 nt, Homo sapiens
  misc_RNA (1)...(19): siRNA sense strand
ucccacacccuuucauauu

SEQ ID NO: 146374 - RNA, 19 nt, Homo sapiens
  misc_RNA (1)...(19): siRNA sense strand
caagcugaagugacgauga

SEQ ID NO: 146375 - RNA, 19 nt, Homo sapiens
  misc_RNA (1)...(19): siRNA sense strand
ggacccaaggccaccaaga

SEQ ID NO: 146376 - RNA, 19 nt, Homo sapiens
  misc_RNA (1)...(19): siRNA sense strand
ucaccguucuguccaggau

SEQ ID NO: 146377 - RNA, 19 nt, Homo sapiens
  misc_RNA (1)...(19): siRNA sense strand
gcugaucccacacccuuuc

SEQ ID NO: 146378 - RNA, 19 nt, Homo sapiens
  misc_RNA (1)...(19): siRNA sense strand
cagagaagagaguugaaca

SEQ ID NO: 146379 - RNA, 19 nt, Homo sapiens
  misc_RNA (1)...(19): siRNA sense strand
ucgacgaucugcagagcau

SEQ ID NO: 146380 - RNA, 19 nt, Homo sapiens
  misc_RNA (1)...(19): siRNA sense strand
gacccaaggccaccaagag

SEQ ID NO: 146381 - RNA, 19 nt, Homo sapiens
  misc_RNA (1)...(19): siRNA sense strand
gggagaguggugaacguau

SEQ ID NO: 146382 - RNA, 19 nt, Homo sapiens
  misc_RNA (1)...(19): siRNA sense strand
guggugaacguaucuagca

SEQ ID NO: 146383 - RNA, 19 nt, Homo sapiens
  misc_RNA (1)...(19): siRNA sense strand
ggaagucacuggaaacaug

SEQ ID NO: 146384 - RNA, 19 nt, Homo sapiens
  misc_RNA (1)...(19): siRNA sense strand
guacaugacugucuccauu

SEQ ID NO: 146385 - RNA, 19 nt, Homo sapiens
  misc_RNA (1)...(19): siRNA sense strand
caacauuaccugucauaua

SEQ ID NO: 146386 - RNA, 19 nt, Homo sapiens
  misc_RNA (1)...(19): siRNA sense strand
caccaacucuacaacauua

SEQ ID NO: 146387 - RNA, 19 nt, Homo sapiens
  misc_RNA (1)...(19): siRNA sense strand
gaaauguacccuccagaaa

SEQ ID NO: 146388 - RNA, 19 nt, Homo sapiens
  misc_RNA (1)...(19): siRNA sense strand
ccaaauaccugauggaacu

SEQ ID NO: 146389 - RNA, 19 nt, Homo sapiens
  misc_RNA (1)...(19): siRNA sense strand
uaacuauguuggacuauga

SEQ ID NO: 146390 - RNA, 19 nt, Homo sapiens
  misc_RNA (1)...(19): siRNA sense strand
gcaccuggcuaagaaugua

SEQ ID NO: 146391 - RNA, 19 nt, Homo sapiens
  misc_RNA (1)...(19): siRNA sense strand
ugagacaacuugaggaaga

SEQ ID NO: 146392 - RNA, 19 nt, Homo sapiens
  misc_RNA (1)...(19): siRNA sense strand
ucagacagauggaaaugaa

SEQ ID NO: 146393 - RNA, 19 nt, Homo sapiens
  misc_RNA (1)...(19): siRNA sense strand
gcaagcaaauaugaagaaa

SEQ ID NO: 146394 - RNA, 19 nt, Homo sapiens
  misc_RNA (1)...(19): siRNA sense strand
ggacauugguaacaaaguc

SEQ ID NO: 146395 - RNA, 19 nt, Homo sapiens
  misc_RNA (1)...(19): siRNA sense strand
caugagagccauccuaauu

SEQ ID NO: 146396 - RNA, 19 nt, Homo sapiens
  misc_RNA (1)...(19): siRNA sense strand
gcugaauucugcacuaguu

SEQ ID NO: 146397 - RNA, 19 nt, Homo sapiens
  misc_RNA (1)...(19): siRNA sense strand
gaaaugaagauucuaagag

SEQ ID NO: 146398 - RNA, 19 nt, Homo sapiens
  misc_RNA (1)...(19): siRNA sense strand
ugagagccauccuaauuga

SEQ ID NO: 146399 - RNA, 19 nt, Homo sapiens
  misc_RNA (1)...(19): siRNA sense strand
ggaaaugaagauucuaaga

SEQ ID NO: 146400 - RNA, 19 nt, Homo sapiens
  misc_RNA (1)...(19): siRNA sense strand
gcacuuuccuccuucucaa

SEQ ID NO: 146401 - RNA, 19 nt, Homo sapiens
  misc_RNA (1)...(19): siRNA sense strand
uaacaaagucagugaacaa

SEQ ID NO: 146402 - RNA, 19 nt, Homo sapiens
  misc_RNA (1)...(19): siRNA sense strand
ggcuuucucugauguaauu

SEQ ID NO: 146403 - RNA, 19 nt, Homo sapiens
  misc_RNA (1)...(19): siRNA sense strand
ggacuuacaaagcacauga

SEQ ID NO: 146404 - RNA, 19 nt, Homo sapiens
  misc_RNA (1)...(19): siRNA sense strand
aauguacccuccagaaauu

SEQ ID NO: 146405 - RNA, 19 nt, Homo sapiens
  misc_RNA (1)...(19): siRNA sense strand
gaaucucuucuuccaguua

SEQ ID NO: 146406 - RNA, 19 nt, Homo sapiens
  misc_RNA (1)...(19): siRNA sense strand
ugcacuaguucaagauuua

SEQ ID NO: 146407 - RNA, 19 nt, Homo sapiens
  misc_RNA (1)...(19): siRNA sense strand
ccacaucgaagcaugcuaa

SEQ ID NO: 146408 - RNA, 19 nt, Homo sapiens
  misc_RNA (1)...(19): siRNA sense strand
ugauguaauucuugcagua

SEQ ID NO: 146409 - RNA, 19 nt, Homo sapiens
  misc_RNA (1)...(19): siRNA sense strand
gaucgguucaugcagaaua

SEQ ID NO: 146410 - RNA, 19 nt, Homo sapiens
  misc_RNA (1)...(19): siRNA sense strand
caaaucagacagauggaaa

SEQ ID NO: 146411 - RNA, 19 nt, Homo sapiens
  misc_RNA (1)...(19): siRNA sense strand
uuacaaagcacaugacugu

SEQ ID NO: 146412 - RNA, 19 nt, Homo sapiens
  misc_RNA (1)...(19): siRNA sense strand
ugauggaacuaacuauguu

SEQ ID NO: 146413 - RNA, 19 nt, Homo sapiens
  misc_RNA (1)...(19): siRNA sense strand
cuaauugacuggcuaguac

SEQ ID NO: 146414 - RNA, 19 nt, Homo sapiens
  misc_RNA (1)...(19): siRNA sense strand
aacauuaccugucauauac

SEQ ID NO: 146415 - RNA, 19 nt, Homo sapiens
  misc_RNA (1)...(19): siRNA sense strand
ggacugaggccaagaacag

SEQ ID NO: 146416 - RNA, 19 nt, Homo sapiens
  misc_RNA (1)...(19): siRNA sense strand
caacauggcaggcgcaaag

SEQ ID NO: 146417 - RNA, 19 nt, Homo sapiens
  misc_RNA (1)...(19): siRNA sense strand
caugguaaaucaaggacuu

SEQ ID NO: 146418 - RNA, 19 nt, Homo sapiens
  misc_RNA (1)...(19): siRNA sense strand
caucgaagcaugcuaagau

SEQ ID NO: 146419 - RNA, 19 nt, Homo sapiens
  misc_RNA (1)...(19): siRNA sense strand
gaagucacuggaaacauga

SEQ ID NO: 146420 - RNA, 19 nt, Homo sapiens
  misc_RNA (1)...(19): siRNA sense strand
gaagauucuaagagcuuua

SEQ ID NO: 146421 - RNA, 19 nt, Homo sapiens
  misc_RNA (1)...(19): siRNA sense strand
gccagaaccugagccagaa

SEQ ID NO: 146422 - RNA, 19 nt, Homo sapiens
  misc_RNA (1)...(19): siRNA sense strand
cuaagagcuuuaaacuuug

SEQ ID NO: 146423 - RNA, 19 nt, Homo sapiens
  misc_RNA (1)...(19): siRNA sense strand
gaaaauaaggcgaagauca

SEQ ID NO: 146424 - RNA, 19 nt, Homo sapiens
  misc_RNA (1)...(19): siRNA sense strand
auaauugugugcccaagaa

SEQ ID NO: 146425 - RNA, 19 nt, Homo sapiens
  misc_RNA (1)...(19): siRNA sense strand
gcuaguacagguucaaaug

SEQ ID NO: 146426 - RNA, 19 nt, Homo sapiens
  misc_RNA (1)...(19): siRNA sense strand
guaacaaagucagugaaca

SEQ ID NO: 146427 - RNA, 19 nt, Homo sapiens
  misc_RNA (1)...(19): siRNA sense strand
gcuaagaucagcacucuac

SEQ ID NO: 146428 - RNA, 19 nt, Homo sapiens
  misc_RNA (1)...(19): siRNA sense strand
gacaccaacucuacaacau

SEQ ID NO: 146429 - RNA, 19 nt, Homo sapiens
  misc_RNA (1)...(19): siRNA sense strand
gauguaauucuugcaguaa

SEQ ID NO: 146430 - RNA, 19 nt, Homo sapiens
  misc_RNA (1)...(19): siRNA sense strand
aaccugagccuguuaaaga

SEQ ID NO: 146431 - RNA, 19 nt, Homo sapiens
  misc_RNA (1)...(19): siRNA sense strand
accaggaacucgaaaauua

SEQ ID NO: 146432 - RNA, 19 nt, Homo sapiens
  misc_RNA (1)...(19): siRNA sense strand
ggacaccaacucuacaaca

SEQ ID NO: 146433 - RNA, 19 nt, Homo sapiens
  misc_RNA (1)...(19): siRNA sense strand
gaauggacaccaacucuac

SEQ ID NO: 146434 - RNA, 19 nt, Homo sapiens
  misc_RNA (1)...(19): siRNA sense strand
guagugaauaugugaaaga

SEQ ID NO: 146435 - RNA, 19 nt, Homo sapiens
  misc_RNA (1)...(19): siRNA sense strand
gaaauuggugacuuugcuu

SEQ ID NO: 146436 - RNA, 19 nt, Homo sapiens
  misc_RNA (1)...(19): siRNA sense strand
uccagaaauuggugacuuu

SEQ ID NO: 146437 - RNA, 19 nt, Homo sapiens
  misc_RNA (1)...(19): siRNA sense strand
ggaagagcaagcagucaga

SEQ ID NO: 146438 - RNA, 19 nt, Homo sapiens
  misc_RNA (1)...(19): siRNA sense strand
ugaagauucuaagagcuuu

SEQ ID NO: 146439 - RNA, 19 nt, Homo sapiens
  misc_RNA (1)...(19): siRNA sense strand
ccaaggcuguggcaaaggu

SEQ ID NO: 146440 - RNA, 19 nt, Homo sapiens
  misc_RNA (1)...(19): siRNA sense strand
agaauguagucaugguaaa

SEQ ID NO: 146441 - RNA, 19 nt, Homo sapiens
  misc_RNA (1)...(19): siRNA sense strand
gcacugaaaauucuggaua

SEQ ID NO: 146442 - RNA, 19 nt, Homo sapiens
  misc_RNA (1)...(19): siRNA sense strand
ugauguggaugcagaagau

SEQ ID NO: 146443 - RNA, 19 nt, Homo sapiens
  misc_RNA (1)...(19): siRNA sense strand
gaauguagucaugguaaau

SEQ ID NO: 146444 - RNA, 19 nt, Homo sapiens
  misc_RNA (1)...(19): siRNA sense strand
aaacaugagagccauccua

SEQ ID NO: 146445 - RNA, 19 nt, Homo sapiens
  misc_RNA (1)...(19): siRNA sense strand
acaaguaugccacaucgaa

SEQ ID NO: 146446 - RNA, 19 nt, Homo sapiens
  misc_RNA (1)...(19): siRNA sense strand
gccagaaccugagccuguu

SEQ ID NO: 146447 - RNA, 19 nt, Homo sapiens
  misc_RNA (1)...(19): siRNA sense strand
uaagaauguagucauggua

SEQ ID NO: 146448 - RNA, 19 nt, Homo sapiens
  misc_RNA (1)...(19): siRNA sense strand
uaagagcuuuaaacuuugg

SEQ ID NO: 146449 - RNA, 19 nt, Homo sapiens
  misc_RNA (1)...(19): siRNA sense strand
aaauguacccuccagaaau

SEQ ID NO: 146450 - RNA, 19 nt, Homo sapiens
  misc_RNA (1)...(19): siRNA sense strand
uggugucacugccauguuu

SEQ ID NO: 146451 - RNA, 19 nt, Homo sapiens
  misc_RNA (1)...(19): siRNA sense strand
agaaauguacccuccagaa

SEQ ID NO: 146452 - RNA, 19 nt, Homo sapiens
  misc_RNA (1)...(19): siRNA sense strand
ccaaaaugccuaugaagaa

SEQ ID NO: 146453 - RNA, 19 nt, Homo sapiens
  misc_RNA (1)...(19): siRNA sense strand
ggcuaagaauguagucaug

SEQ ID NO: 146454 - RNA, 19 nt, Homo sapiens
  misc_RNA (1)...(19): siRNA sense strand
ugcagcaccuggcuaagaa

SEQ ID NO: 146455 - RNA, 19 nt, Homo sapiens
  misc_RNA (1)...(19): siRNA sense strand
ucuacaacauuaccuguca

SEQ ID NO: 146456 - RNA, 19 nt, Homo sapiens
  misc_RNA (1)...(19): siRNA sense strand
cagaagaagaccuguguca

SEQ ID NO: 146457 - RNA, 19 nt, Homo sapiens
  misc_RNA (1)...(19): siRNA sense strand
ucacugccauguuuauugc

SEQ ID NO: 146458 - RNA, 19 nt, Homo sapiens
  misc_RNA (1)...(19): siRNA sense strand
gaacagcucuuggggacau

SEQ ID NO: 146459 - RNA, 19 nt, Homo sapiens
  misc_RNA (1)...(19): siRNA sense strand
cuaagaauguagucauggu

SEQ ID NO: 146460 - RNA, 19 nt, Homo sapiens
  misc_RNA (1)...(19): siRNA sense strand
gucauauacugaagaaucu

SEQ ID NO: 146461 - RNA, 19 nt, Homo sapiens
  misc_RNA (1)...(19): siRNA sense strand
augacugucuccauuauug

SEQ ID NO: 146462 - RNA, 19 nt, Homo sapiens
  misc_RNA (1)...(19): siRNA sense strand
gagcaagcagucagaccaa

SEQ ID NO: 146463 - RNA, 19 nt, Homo sapiens
  misc_RNA (1)...(19): siRNA sense strand
ccugucauauacugaagaa

SEQ ID NO: 146464 - RNA, 19 nt, Homo sapiens
  misc_RNA (1)...(19): siRNA sense strand
gcaccaaaucagacagaug

SEQ ID NO: 146465 - RNA, 19 nt, Homo sapiens
  misc_RNA (1)...(19): siRNA sense strand
ugacugacaacacuuauac

SEQ ID NO: 146466 - RNA, 19 nt, Homo sapiens
  misc_RNA (1)...(19): siRNA sense strand
acaugacugucuccauuau

SEQ ID NO: 146467 - RNA, 19 nt, Homo sapiens
  misc_RNA (1)...(19): siRNA sense strand
uacaugacugucuccauua

SEQ ID NO: 146468 - RNA, 19 nt, Homo sapiens
  misc_RNA (1)...(19): siRNA sense strand
gaaccugagccuguuaaag

SEQ ID NO: 146469 - RNA, 19 nt, Homo sapiens
  misc_RNA (1)...(19): siRNA sense strand
cugcacuaguucaagauuu

SEQ ID NO: 146470 - RNA, 19 nt, Homo sapiens
  misc_RNA (1)...(19): siRNA sense strand
acagcugaauucugcacua

SEQ ID NO: 146471 - RNA, 19 nt, Homo sapiens
  misc_RNA (1)...(19): siRNA sense strand
ugucauauacugaagaauc

SEQ ID NO: 146472 - RNA, 19 nt, Homo sapiens
  misc_RNA (1)...(19): siRNA sense strand
ugaauggacaccaacucua

SEQ ID NO: 146473 - RNA, 19 nt, Homo sapiens
  misc_RNA (1)...(19): siRNA sense strand
ugaaaauucuggauaaugg

SEQ ID NO: 146474 - RNA, 19 nt, Homo sapiens
  misc_RNA (1)...(19): siRNA sense strand
gucgggaagucacuggaaa

SEQ ID NO: 146475 - RNA, 19 nt, Homo sapiens
  misc_RNA (1)...(19): siRNA sense strand
ggagcugauccaaaccuuu

SEQ ID NO: 146476 - RNA, 19 nt, Homo sapiens
  misc_RNA (1)...(19): siRNA sense strand
ccagaaccugagccuguua

SEQ ID NO: 146477 - RNA, 19 nt, Homo sapiens
  misc_RNA (1)...(19): siRNA sense strand
aagaauguagucaugguaa

SEQ ID NO: 146478 - RNA, 19 nt, Homo sapiens
  misc_RNA (1)...(19): siRNA sense strand
acuaugacauggugcacuu

SEQ ID NO: 146479 - RNA, 19 nt, Homo sapiens
  misc_RNA (1)...(19): siRNA sense strand
agauggaaaugaagauucu

SEQ ID NO: 146480 - RNA, 19 nt, Homo sapiens
  misc_RNA (1)...(19): siRNA sense strand
agacagauggaaaugaaga

SEQ ID NO: 146481 - RNA, 19 nt, Homo sapiens
  misc_RNA (1)...(19): siRNA sense strand
cugacaacacuuauacuaa

SEQ ID NO: 146482 - RNA, 19 nt, Homo sapiens
  misc_RNA (1)...(19): siRNA sense strand
gagccuauuuugguugaua

SEQ ID NO: 146483 - RNA, 19 nt, Homo sapiens
  misc_RNA (1)...(19): siRNA sense strand
ugacugagcugcuggcuaa

SEQ ID NO: 146484 - RNA, 19 nt, Homo sapiens
  misc_RNA (1)...(19): siRNA sense strand
ugaauuaccuggaccguuu

SEQ ID NO: 146485 - RNA, 19 nt, Homo sapiens
  misc_RNA (1)...(19): siRNA sense strand
cggagaagcugugcauuua

SEQ ID NO: 146486 - RNA, 19 nt, Homo sapiens
  misc_RNA (1)...(19): siRNA sense strand
gaacagaagugcgaagaag

SEQ ID NO: 146487 - RNA, 19 nt, Homo sapiens
  misc_RNA (1)...(19): siRNA sense strand
gagaagcugugcauuuaca

SEQ ID NO: 146488 - RNA, 19 nt, Homo sapiens
  misc_RNA (1)...(19): siRNA sense strand
gcggagaagcugugcauuu

SEQ ID NO: 146489 - RNA, 19 nt, Homo sapiens
  misc_RNA (1)...(19): siRNA sense strand
cuacagacgugcgggauau

SEQ ID NO: 146490 - RNA, 19 nt, Homo sapiens
  misc_RNA (1)...(19): siRNA sense strand
ggacauccaacccuacaug

SEQ ID NO: 146491 - RNA, 19 nt, Homo sapiens
  misc_RNA (1)...(19): siRNA sense strand
ucaagugcgugcagaagga

SEQ ID NO: 146492 - RNA, 19 nt, Homo sapiens
  misc_RNA (1)...(19): siRNA sense strand
caacacagacguggauugu

SEQ ID NO: 146493 - RNA, 19 nt, Homo sapiens
  misc_RNA (1)...(19): siRNA sense strand
gcagugcuccuacuucaag

SEQ ID NO: 146494 - RNA, 19 nt, Homo sapiens
  misc_RNA (1)...(19): siRNA sense strand
gcaagcaugcucagaccuu

SEQ ID NO: 146495 - RNA, 19 nt, Homo sapiens
  misc_RNA (1)...(19): siRNA sense strand
ggaacagaagugcgaagaa

SEQ ID NO: 146496 - RNA, 19 nt, Homo sapiens
  misc_RNA (1)...(19): siRNA sense strand
gcauguuccuggccuccaa

SEQ ID NO: 146497 - RNA, 19 nt, Homo sapiens
  misc_RNA (1)...(19): siRNA sense strand
ccgcagugcuccuacuuca

SEQ ID NO: 146498 - RNA, 19 nt, Homo sapiens
  misc_RNA (1)...(19): siRNA sense strand
gaccuucauugcucugugu

SEQ ID NO: 146499 - RNA, 19 nt, Homo sapiens
  misc_RNA (1)...(19): siRNA sense strand
gcaguaccgucaggaccaa

SEQ ID NO: 146500 - RNA, 19 nt, Homo sapiens
  misc_RNA (1)...(19): siRNA sense strand
gaaccuggcagcugucacu

SEQ ID NO: 146501 - RNA, 19 nt, Homo sapiens
  misc_RNA (1)...(19): siRNA sense strand
caacgugacggauccaagu

SEQ ID NO: 146502 - RNA, 19 nt, Homo sapiens
  misc_RNA (1)...(19): siRNA sense strand
gaugaucgcaacuggaagu

SEQ ID NO: 146503 - RNA, 19 nt, Homo sapiens
  misc_RNA (1)...(19): siRNA sense strand
gaagucccaucugcaacuc

SEQ ID NO: 146504 - RNA, 19 nt, Homo sapiens
  misc_RNA (1)...(19): siRNA sense strand
aggcggugcuccucaauag

SEQ ID NO: 146505 - RNA, 19 nt, Homo sapiens
  misc_RNA (1)...(19): siRNA sense strand
gagcugcuggcuaagauca

SEQ ID NO: 146506 - RNA, 19 nt, Homo sapiens
  misc_RNA (1)...(19): siRNA sense strand
gcagcugucacuccucaug

SEQ ID NO: 146507 - RNA, 19 nt, Homo sapiens
  misc_RNA (1)...(19): siRNA sense strand
gcauuuacaccgacaacuc

SEQ ID NO: 146508 - RNA, 19 nt, Homo sapiens
  misc_RNA (1)...(19): siRNA sense strand
ccagcaggaugaggaagug

SEQ ID NO: 146509 - RNA, 19 nt, Homo sapiens
  misc_RNA (1)...(19): siRNA sense strand
uggcuaagaucaccaacac

SEQ ID NO: 146510 - RNA, 19 nt, Homo sapiens
  misc_RNA (1)...(19): siRNA sense strand
uuaccuggaccguuucuug

SEQ ID NO: 146511 - RNA, 19 nt, Homo sapiens
  misc_RNA (1)...(19): siRNA sense strand
ggagaagcugugcauuuac

SEQ ID NO: 146512 - RNA, 19 nt, Homo sapiens
  misc_RNA (1)...(19): siRNA sense strand
gacguggauugucucaaag

SEQ ID NO: 146513 - RNA, 19 nt, Homo sapiens
  misc_RNA (1)...(19): siRNA sense strand
ugacuucauugagcacauc

SEQ ID NO: 146514 - RNA, 19 nt, Homo sapiens
  misc_RNA (1)...(19): siRNA sense strand
ccaacacagacguggauug

SEQ ID NO: 146515 - RNA, 19 nt, Homo sapiens
  misc_RNA (1)...(19): siRNA sense strand
gcuggaggucugugaggaa

SEQ ID NO: 146516 - RNA, 19 nt, Homo sapiens
  misc_RNA (1)...(19): siRNA sense strand
cagcugucacuccucauga

SEQ ID NO: 146517 - RNA, 19 nt, Homo sapiens
  misc_RNA (1)...(19): siRNA sense strand
ggaccuggcugcugugauu

SEQ ID NO: 146518 - RNA, 19 nt, Homo sapiens
  misc_RNA (1)...(19): siRNA sense strand
ggaagaugcuggcuuacug

SEQ ID NO: 146519 - RNA, 19 nt, Homo sapiens
  misc_RNA (1)...(19): siRNA sense strand
gauuauaccuuugccaugu

SEQ ID NO: 146520 - RNA, 19 nt, Homo sapiens
  misc_RNA (1)...(19): siRNA sense strand
gaccagcacuccuacagau

SEQ ID NO: 146521 - RNA, 19 nt, Homo sapiens
  misc_RNA (1)...(19): siRNA sense strand
ugcggaagaugcuggcuua

SEQ ID NO: 146522 - RNA, 19 nt, Homo sapiens
  misc_RNA (1)...(19): siRNA sense strand
gcaugcugcuggccuccaa

SEQ ID NO: 146523 - RNA, 19 nt, Homo sapiens
  misc_RNA (1)...(19): siRNA sense strand
ugcuacagauuauaccuuu

SEQ ID NO: 146524 - RNA, 19 nt, Homo sapiens
  misc_RNA (1)...(19): siRNA sense strand
cgacaggccuuggucaaaa

SEQ ID NO: 146525 - RNA, 19 nt, Homo sapiens
  misc_RNA (1)...(19): siRNA sense strand
gcagcgcugugaggaggaa

SEQ ID NO: 146526 - RNA, 19 nt, Homo sapiens
  misc_RNA (1)...(19): siRNA sense strand
gcuacagauuauaccuuug

SEQ ID NO: 146527 - RNA, 19 nt, Homo sapiens
  misc_RNA (1)...(19): siRNA sense strand
gugaggagcagcgcuguga

SEQ ID NO: 146528 - RNA, 19 nt, Homo sapiens
  misc_RNA (1)...(19): siRNA sense strand
agggaucacuggcacugaa

SEQ ID NO: 146529 - RNA, 19 nt, Homo sapiens
  misc_RNA (1)...(19): siRNA sense strand
gaucgccacgggcagcauu

SEQ ID NO: 146530 - RNA, 19 nt, Homo sapiens
  misc_RNA (1)...(19): siRNA sense strand
ggagaucaagccgcacaug

SEQ ID NO: 146531 - RNA, 19 nt, Homo sapiens
  misc_RNA (1)...(19): siRNA sense strand
ccagcacuccuacagaugu

SEQ ID NO: 146532 - RNA, 19 nt, Homo sapiens
  misc_RNA (1)...(19): siRNA sense strand
auuauaccuuugccaugua

SEQ ID NO: 146533 - RNA, 19 nt, Homo sapiens
  misc_RNA (1)...(19): siRNA sense strand
cuggaucgcuaccugucuu

SEQ ID NO: 146534 - RNA, 19 nt, Homo sapiens
  misc_RNA (1)...(19): siRNA sense strand
ucacaaagcauccauauug

SEQ ID NO: 146535 - RNA, 19 nt, Homo sapiens
  misc_RNA (1)...(19): siRNA sense strand
gaagucauguuuacagugu

SEQ ID NO: 146536 - RNA, 19 nt, Homo sapiens
  misc_RNA (1)...(19): siRNA sense strand
guaaagagauccugaccau

SEQ ID NO: 146537 - RNA, 19 nt, Homo sapiens
  misc_RNA (1)...(19): siRNA sense strand
ccaguugugugcugcauua

SEQ ID NO: 146538 - RNA, 19 nt, Homo sapiens
  misc_RNA (1)...(19): siRNA sense strand
gcagaggacucacaaagca

SEQ ID NO: 146539 - RNA, 19 nt, Homo sapiens
  misc_RNA (1)...(19): siRNA sense strand
uagccuaccucuacaauga

SEQ ID NO: 146540 - RNA, 19 nt, Homo sapiens
  misc_RNA (1)...(19): siRNA sense strand
gcagcugucuuuagccaaa

SEQ ID NO: 146541 - RNA, 19 nt, Homo sapiens
  misc_RNA (1)...(19): siRNA sense strand
gcacccgguuuaucaguaa

SEQ ID NO: 146542 - RNA, 19 nt, Homo sapiens
  misc_RNA (1)...(19): siRNA sense strand
gacaagcgcuauggagaaa

SEQ ID NO: 146543 - RNA, 19 nt, Homo sapiens
  misc_RNA (1)...(19): siRNA sense strand
ugaaggaccugguggacaa

SEQ ID NO: 146544 - RNA, 19 nt, Homo sapiens
  misc_RNA (1)...(19): siRNA sense strand
gggaagcgcagcugucuuu

SEQ ID NO: 146545 - RNA, 19 nt, Homo sapiens
  misc_RNA (1)...(19): siRNA sense strand
ggacaagcgcuauggagaa

SEQ ID NO: 146546 - RNA, 19 nt, Homo sapiens
  misc_RNA (1)...(19): siRNA sense strand
gcggauaaaccuaugcaua

SEQ ID NO: 146547 - RNA, 19 nt, Homo sapiens
  misc_RNA (1)...(19): siRNA sense strand
gacagaggcagcuucguua

SEQ ID NO: 146548 - RNA, 19 nt, Homo sapiens
  misc_RNA (1)...(19): siRNA sense strand
gggcauagccuaccucuac

SEQ ID NO: 146549 - RNA, 19 nt, Homo sapiens
  misc_RNA (1)...(19): siRNA sense strand
gagaucgucugccagcuau

SEQ ID NO: 146550 - RNA, 19 nt, Homo sapiens
  misc_RNA (1)...(19): siRNA sense strand
ggauaaaccuaugcauaca

SEQ ID NO: 146551 - RNA, 19 nt, Homo sapiens
  misc_RNA (1)...(19): siRNA sense strand
gaaguugccaccaugaaug

SEQ ID NO: 146552 - RNA, 19 nt, Homo sapiens
  misc_RNA (1)...(19): siRNA sense strand
aggaagaggugcugagcua

SEQ ID NO: 146553 - RNA, 19 nt, Homo sapiens
  misc_RNA (1)...(19): siRNA sense strand
gccaaagccugugcaaaug

SEQ ID NO: 146554 - RNA, 19 nt, Homo sapiens
  misc_RNA (1)...(19): siRNA sense strand
gaucgucuccgccuuggaa

SEQ ID NO: 146555 - RNA, 19 nt, Homo sapiens
  misc_RNA (1)...(19): siRNA sense strand
caacaggugaagcggauaa

SEQ ID NO: 146556 - RNA, 19 nt, Homo sapiens
  misc_RNA (1)...(19): siRNA sense strand
gaucgucugccagcuauuu

SEQ ID NO: 146557 - RNA, 19 nt, Homo sapiens
  misc_RNA (1)...(19): siRNA sense strand
ucaaugacacaaugaggua

SEQ ID NO: 146558 - RNA, 19 nt, Homo sapiens
  misc_RNA (1)...(19): siRNA sense strand
guaggugugccaaguguuu

SEQ ID NO: 146559 - RNA, 19 nt, Homo sapiens
  misc_RNA (1)...(19): siRNA sense strand
ggaaguugccaccaugaau

SEQ ID NO: 146560 - RNA, 19 nt, Homo sapiens
  misc_RNA (1)...(19): siRNA sense strand
gaaccugaagcucuuugaa

SEQ ID NO: 146561 - RNA, 19 nt, Homo sapiens
  misc_RNA (1)...(19): siRNA sense strand
caagcgcuauggagaaauc

SEQ ID NO: 146562 - RNA, 19 nt, Homo sapiens
  misc_RNA (1)...(19): siRNA sense strand
ccuacaaagcgaagaauaa

SEQ ID NO: 146563 - RNA, 19 nt, Homo sapiens
  misc_RNA (1)...(19): siRNA sense strand
ucaccggauucuccuauga

SEQ ID NO: 146564 - RNA, 19 nt, Homo sapiens
  misc_RNA (1)...(19): siRNA sense strand
gaaggagggcgacgugaca

SEQ ID NO: 146565 - RNA, 19 nt, Homo sapiens
  misc_RNA (1)...(19): siRNA sense strand
ugaaagggcugcugaaaag

SEQ ID NO: 146566 - RNA, 19 nt, Homo sapiens
  misc_RNA (1)...(19): siRNA sense strand
ggacugcugcucuggcuau

SEQ ID NO: 146567 - RNA, 19 nt, Homo sapiens
  misc_RNA (1)...(19): siRNA sense strand
guugugugcugcauuagga

SEQ ID NO: 146568 - RNA, 19 nt, Homo sapiens
  misc_RNA (1)...(19): siRNA sense strand
gggacucaaugacacaaug

SEQ ID NO: 146569 - RNA, 19 nt, Homo sapiens
  misc_RNA (1)...(19): siRNA sense strand
gugccaaguguuucuguua

SEQ ID NO: 146570 - RNA, 19 nt, Homo sapiens
  misc_RNA (1)...(19): siRNA sense strand
gccaggaagucauguuuac

SEQ ID NO: 146571 - RNA, 19 nt, Homo sapiens
  misc_RNA (1)...(19): siRNA sense strand
agaacagccuccaggaaga

SEQ ID NO: 146572 - RNA, 19 nt, Homo sapiens
  misc_RNA (1)...(19): siRNA sense strand
gaagaggugcugagcuaca

SEQ ID NO: 146573 - RNA, 19 nt, Homo sapiens
  misc_RNA (1)...(19): siRNA sense strand
ggacucaaugacacaauga

SEQ ID NO: 146574 - RNA, 19 nt, Homo sapiens
  misc_RNA (1)...(19): siRNA sense strand
ugagguacauucugaucga

SEQ ID NO: 146575 - RNA, 19 nt, Homo sapiens
  misc_RNA (1)...(19): siRNA sense strand
ggccaggaagucauguuua

SEQ ID NO: 146576 - RNA, 19 nt, Homo sapiens
  misc_RNA (1)...(19): siRNA sense strand
uuucgaagcugcugugaag

SEQ ID NO: 146577 - RNA, 19 nt, Homo sapiens
  misc_RNA (1)...(19): siRNA sense strand
cauuaggagugacacaaga

SEQ ID NO: 146578 - RNA, 19 nt, Homo sapiens
  misc_RNA (1)...(19): siRNA sense strand
acaaagcgaagaauaagga

SEQ ID NO: 146579 - RNA, 19 nt, Homo sapiens
  misc_RNA (1)...(19): siRNA sense strand
acgaggaccuggugagaau

SEQ ID NO: 146580 - RNA, 19 nt, Homo sapiens
  misc_RNA (1)...(19): siRNA sense strand
ggcgaugccuccacagcuu

SEQ ID NO: 146581 - RNA, 19 nt, Homo sapiens
  misc_RNA (1)...(19): siRNA sense strand
agacagaggcagcuucguu

SEQ ID NO: 146582 - RNA, 19 nt, Homo sapiens
  misc_RNA (1)...(19): siRNA sense strand
cccgaaaccugaccaucuu

SEQ ID NO: 146583 - RNA, 19 nt, Homo sapiens
  misc_RNA (1)...(19): siRNA sense strand
ugugggaccucaccggauu

SEQ ID NO: 146584 - RNA, 19 nt, Homo sapiens
  misc_RNA (1)...(19): siRNA sense strand
cagaagggacucaaugaca

SEQ ID NO: 146585 - RNA, 19 nt, Homo sapiens
  misc_RNA (1)...(19): siRNA sense strand
gaagcgcagcugucuuuag

SEQ ID NO: 146586 - RNA, 19 nt, Homo sapiens
  misc_RNA (1)...(19): siRNA sense strand
cugcugcucuggcuaugaa

SEQ ID NO: 146587 - RNA, 19 nt, Homo sapiens
  misc_RNA (1)...(19): siRNA sense strand
gaggaccuggugagaauga

SEQ ID NO: 146588 - RNA, 19 nt, Homo sapiens
  misc_RNA (1)...(19): siRNA sense strand
gaagggacucaaugacaca

SEQ ID NO: 146589 - RNA, 19 nt, Homo sapiens
  misc_RNA (1)...(19): siRNA sense strand
ggaagcgcagcugucuuua

SEQ ID NO: 146590 - RNA, 19 nt, Homo sapiens
  misc_RNA (1)...(19): siRNA sense strand
ugaagcggauaaaccuaug

SEQ ID NO: 146591 - RNA, 19 nt, Homo sapiens
  misc_RNA (1)...(19): siRNA sense strand
gccaaguguuucuguuauc

SEQ ID NO: 146592 - RNA, 19 nt, Homo sapiens
  misc_RNA (1)...(19): siRNA sense strand
ucacggacaacacuuacaa

SEQ ID NO: 146593 - RNA, 19 nt, Homo sapiens
  misc_RNA (1)...(19): siRNA sense strand
agaagugaauggccugaag

SEQ ID NO: 146594 - RNA, 19 nt, Homo sapiens
  misc_RNA (1)...(19): siRNA sense strand
cggauaaaccuaugcauac

SEQ ID NO: 146595 - RNA, 19 nt, Homo sapiens
  misc_RNA (1)...(19): siRNA sense strand
ggucaucugcacccgguuu

SEQ ID NO: 146596 - RNA, 19 nt, Homo sapiens
  misc_RNA (1)...(19): siRNA sense strand
aaugaaggccugucugugu

SEQ ID NO: 146597 - RNA, 19 nt, Homo sapiens
  misc_RNA (1)...(19): siRNA sense strand
auaaaccuaugcauacaca

SEQ ID NO: 146598 - RNA, 19 nt, Homo sapiens
  misc_RNA (1)...(19): siRNA sense strand
ugccaaguguuucuguuau

SEQ ID NO: 146599 - RNA, 19 nt, Homo sapiens
  misc_RNA (1)...(19): siRNA sense strand
gugaagcggauaaaccuau

SEQ ID NO: 146600 - RNA, 19 nt, Homo sapiens
  misc_RNA (1)...(19): siRNA sense strand
gagaaaucagccaggaaga

SEQ ID NO: 146601 - RNA, 19 nt, Homo sapiens
  misc_RNA (1)...(19): siRNA sense strand
guacgaggaccuggugaga

SEQ ID NO: 146602 - RNA, 19 nt, Homo sapiens
  misc_RNA (1)...(19): siRNA sense strand
ugagaucgucugccagcua

SEQ ID NO: 146603 - RNA, 19 nt, Homo sapiens
  misc_RNA (1)...(19): siRNA sense strand
gugagagcuuccagugaga

SEQ ID NO: 146604 - RNA, 19 nt, Homo sapiens
  misc_RNA (1)...(19): siRNA sense strand
ggacuggaggugagagcuu

SEQ ID NO: 146605 - RNA, 19 nt, Homo sapiens
  misc_RNA (1)...(19): siRNA sense strand
gccugucugugucugauga

SEQ ID NO: 146606 - RNA, 19 nt, Homo sapiens
  misc_RNA (1)...(19): siRNA sense strand
gugaggaggaggacaugaa

SEQ ID NO: 146607 - RNA, 19 nt, Homo sapiens
  misc_RNA (1)...(19): siRNA sense strand
gugcagaagggacucaaug

SEQ ID NO: 146608 - RNA, 19 nt, Homo sapiens
  misc_RNA (1)...(19): siRNA sense strand
agccaaagccugugcaaau

SEQ ID NO: 146609 - RNA, 19 nt, Homo sapiens
  misc_RNA (1)...(19): siRNA sense strand
cacaaagcauccauauugc

SEQ ID NO: 146610 - RNA, 19 nt, Homo sapiens
  misc_RNA (1)...(19): siRNA sense strand
gcacagugacucgcacaca

SEQ ID NO: 146611 - RNA, 19 nt, Homo sapiens
  misc_RNA (1)...(19): siRNA sense strand
aaguguuucuguuauccua

SEQ ID NO: 146612 - RNA, 19 nt, Homo sapiens
  misc_RNA (1)...(19): siRNA sense strand
ucaccguggucuaccugaa

SEQ ID NO: 146613 - RNA, 19 nt, Homo sapiens
  misc_RNA (1)...(19): siRNA sense strand
ggaaccugaagcucuuuga

SEQ ID NO: 146614 - RNA, 19 nt, Homo sapiens
  misc_RNA (1)...(19): siRNA sense strand
cgaaaccugaccaucuuga

SEQ ID NO: 146615 - RNA, 19 nt, Homo sapiens
  misc_RNA (1)...(19): siRNA sense strand
cuacaaagcgaagaauaag

SEQ ID NO: 146616 - RNA, 19 nt, Homo sapiens
  misc_RNA (1)...(19): siRNA sense strand
ccucauucccugcgucuug

SEQ ID NO: 146617 - RNA, 19 nt, Homo sapiens
  misc_RNA (1)...(19): siRNA sense strand
gcaccugaccguggagugu

SEQ ID NO: 146618 - RNA, 19 nt, Homo sapiens
  misc_RNA (1)...(19): siRNA sense strand
aaccugaagcucuuugaaa

SEQ ID NO: 146619 - RNA, 19 nt, Homo sapiens
  misc_RNA (1)...(19): siRNA sense strand
ugagucuguucgaggauga

SEQ ID NO: 146620 - RNA, 19 nt, Homo sapiens
  misc_RNA (1)...(19): siRNA sense strand
aagcgcagcugucuuuagc

SEQ ID NO: 146621 - RNA, 19 nt, Homo sapiens
  misc_RNA (1)...(19): siRNA sense strand
ggcauagccuaccucuaca

SEQ ID NO: 146622 - RNA, 19 nt, Homo sapiens
  misc_RNA (1)...(19): siRNA sense strand
ugccaggaauccagugaug

SEQ ID NO: 146623 - RNA, 19 nt, Homo sapiens
  misc_RNA (1)...(19): siRNA sense strand
guaaacaacaagucuucuc

SEQ ID NO: 146624 - RNA, 19 nt, Homo sapiens
  misc_RNA (1)...(19): siRNA sense strand
gcagaagggacucaaugac

SEQ ID NO: 146625 - RNA, 19 nt, Homo sapiens
  misc_RNA (1)...(19): siRNA sense strand
gcauuaggagugacacaag

SEQ ID NO: 146626 - RNA, 19 nt, Homo sapiens
  misc_RNA (1)...(19): siRNA sense strand
ucgacuggcugguggaagu

SEQ ID NO: 146627 - RNA, 19 nt, Homo sapiens
  misc_RNA (1)...(19): siRNA sense strand
guucgaggaugaggagaag

SEQ ID NO: 146628 - RNA, 19 nt, Homo sapiens
  misc_RNA (1)...(19): siRNA sense strand
gcauagccuaccucuacaa

SEQ ID NO: 146629 - RNA, 19 nt, Homo sapiens
  misc_RNA (1)...(19): siRNA sense strand
gacaaccacgccagugugu

SEQ ID NO: 146630 - RNA, 19 nt, Homo sapiens
  misc_RNA (1)...(19): siRNA sense strand
caguaaacaacaagucuuc

SEQ ID NO: 146631 - RNA, 19 nt, Homo sapiens
  misc_RNA (1)...(19): siRNA sense strand
acaaugaaggccugucugu

SEQ ID NO: 146632 - RNA, 19 nt, Homo sapiens
  misc_RNA (1)...(19): siRNA sense strand
agaggcagcuucguuacca

SEQ ID NO: 146633 - RNA, 19 nt, Homo sapiens
  misc_RNA (1)...(19): siRNA sense strand
gagaaugaugggcgagauc

SEQ ID NO: 146634 - RNA, 19 nt, Homo sapiens
  misc_RNA (1)...(19): siRNA sense strand
gcaaugggcuggucguguu

SEQ ID NO: 146635 - RNA, 19 nt, Homo sapiens
  misc_RNA (1)...(19): siRNA sense strand
ggucuucgguguccacuuu

SEQ ID NO: 146636 - RNA, 19 nt, Homo sapiens
  misc_RNA (1)...(19): siRNA sense strand
gcaacgaucucuucaagcu

SEQ ID NO: 146637 - RNA, 19 nt, Homo sapiens
  misc_RNA (1)...(19): siRNA sense strand
gcgaugcgaugcucucuca

SEQ ID NO: 146638 - RNA, 19 nt, Homo sapiens
  misc_RNA (1)...(19): siRNA sense strand
ucaagaggcucaagaccau

SEQ ID NO: 146639 - RNA, 19 nt, Homo sapiens
  misc_RNA (1)...(19): siRNA sense strand
acacuuuguucgagucuuu

SEQ ID NO: 146640 - RNA, 19 nt, Homo sapiens
  misc_RNA (1)...(19): siRNA sense strand
ggcaugcuccuacuucuuu

SEQ ID NO: 146641 - RNA, 19 nt, Homo sapiens
  misc_RNA (1)...(19): siRNA sense strand
gcaacaaggccaucaaggu

SEQ ID NO: 146642 - RNA, 19 nt, Homo sapiens
  misc_RNA (1)...(19): siRNA sense strand
gagcuucuguuaccuuguc

SEQ ID NO: 146643 - RNA, 19 nt, Homo sapiens
  misc_RNA (1)...(19): siRNA sense strand
cgucaacccuuucuuguac

SEQ ID NO: 146644 - RNA, 19 nt, Homo sapiens
  misc_RNA (1)...(19): siRNA sense strand
gcaccugugagcucaguaa

SEQ ID NO: 146645 - RNA, 19 nt, Homo sapiens
  misc_RNA (1)...(19): siRNA sense strand
uaucauguacuccaucauu

SEQ ID NO: 146646 - RNA, 19 nt, Homo sapiens
  misc_RNA (1)...(19): siRNA sense strand
guguugaccuauaucuauu

SEQ ID NO: 146647 - RNA, 19 nt, Homo sapiens
  misc_RNA (1)...(19): siRNA sense strand
uguacuccaucauuuguuu

SEQ ID NO: 146648 - RNA, 19 nt, Homo sapiens
  misc_RNA (1)...(19): siRNA sense strand
gcucaucuuugccaucuac

SEQ ID NO: 146649 - RNA, 19 nt, Homo sapiens
  misc_RNA (1)...(19): siRNA sense strand
ggugguggcucuccuuguc

SEQ ID NO: 146650 - RNA, 19 nt, Homo sapiens
  misc_RNA (1)...(19): siRNA sense strand
ccgcaacgaucucuucaag

SEQ ID NO: 146651 - RNA, 19 nt, Homo sapiens
  misc_RNA (1)...(19): siRNA sense strand
gcuccaggcacgcaacuuu

SEQ ID NO: 146652 - RNA, 19 nt, Homo sapiens
  misc_RNA (1)...(19): siRNA sense strand
gaaggacgugcggaacuuu

SEQ ID NO: 146653 - RNA, 19 nt, Homo sapiens
  misc_RNA (1)...(19): siRNA sense strand
cagagcuccuguacaguga

SEQ ID NO: 146654 - RNA, 19 nt, Homo sapiens
  misc_RNA (1)...(19): siRNA sense strand
ggacgugcggaacuuuaaa

SEQ ID NO: 146655 - RNA, 19 nt, Homo sapiens
  misc_RNA (1)...(19): siRNA sense strand
ucaagaccaugaccgauac

SEQ ID NO: 146656 - RNA, 19 nt, Homo sapiens
  misc_RNA (1)...(19): siRNA sense strand
gugggcaucuggauacuag

SEQ ID NO: 146657 - RNA, 19 nt, Homo sapiens
  misc_RNA (1)...(19): siRNA sense strand
gccaugagcuucuguuacc

SEQ ID NO: 146658 - RNA, 19 nt, Homo sapiens
  misc_RNA (1)...(19): siRNA sense strand
ucuucaagcucuucaagga

SEQ ID NO: 146659 - RNA, 19 nt, Homo sapiens
  misc_RNA (1)...(19): siRNA sense strand
gcgucaacccuuucuugua

SEQ ID NO: 146660 - RNA, 19 nt, Homo sapiens
  misc_RNA (1)...(19): siRNA sense strand
ucccagagcuccuguacag

SEQ ID NO: 146661 - RNA, 19 nt, Homo sapiens
  misc_RNA (1)...(19): siRNA sense strand
gcugcugcgucaacccuuu

SEQ ID NO: 146662 - RNA, 19 nt, Homo sapiens
  misc_RNA (1)...(19): siRNA sense strand
agaaggacgugcggaacuu

SEQ ID NO: 146663 - RNA, 19 nt, Homo sapiens
  misc_RNA (1)...(19): siRNA sense strand
ccugugagcucaguaagca

SEQ ID NO: 146664 - RNA, 19 nt, Homo sapiens
  misc_RNA (1)...(19): siRNA sense strand
guggccaacuucaacauca

SEQ ID NO: 146665 - RNA, 19 nt, Homo sapiens
  misc_RNA (1)...(19): siRNA sense strand
guaugccugugucaagaug

SEQ ID NO: 146666 - RNA, 19 nt, Homo sapiens
  misc_RNA (1)...(19): siRNA sense strand
ucuguuaccuugucaucau

SEQ ID NO: 146667 - RNA, 19 nt, Homo sapiens
  misc_RNA (1)...(19): siRNA sense strand
gagcauguggaggccuuua

SEQ ID NO: 146668 - RNA, 19 nt, Homo sapiens
  misc_RNA (1)...(19): siRNA sense strand
gcaugcuccuacuucuuug

SEQ ID NO: 146669 - RNA, 19 nt, Homo sapiens
  misc_RNA (1)...(19): siRNA sense strand
cguguugaccuauaucuau

SEQ ID NO: 146670 - RNA, 19 nt, Homo sapiens
  misc_RNA (1)...(19): siRNA sense strand
ggucacggacgauuacauc

SEQ ID NO: 146671 - RNA, 19 nt, Homo sapiens
  misc_RNA (1)...(19): siRNA sense strand
ccuaucauguacuccauca

SEQ ID NO: 146672 - RNA, 19 nt, Homo sapiens
  misc_RNA (1)...(19): siRNA sense strand
guugaccuauaucuauuuc

SEQ ID NO: 146673 - RNA, 19 nt, Homo sapiens
  misc_RNA (1)...(19): siRNA sense strand
cucaagaccaugaccgaua

SEQ ID NO: 146674 - RNA, 19 nt, Homo sapiens
  misc_RNA (1)...(19): siRNA sense strand
gaugaggucacggacgauu

SEQ ID NO: 146675 - RNA, 19 nt, Homo sapiens
  misc_RNA (1)...(19): siRNA sense strand
cccagacgguggccaacuu

SEQ ID NO: 146676 - RNA, 19 nt, Homo sapiens
  misc_RNA (1)...(19): siRNA sense strand
aucauguacuccaucauuu

SEQ ID NO: 146677 - RNA, 19 nt, Homo sapiens
  misc_RNA (1)...(19): siRNA sense strand
ucauguacuccaucauuug

SEQ ID NO: 146678 - RNA, 19 nt, Homo sapiens
  misc_RNA (1)...(19): siRNA sense strand
gcauguggaggccuuuauc

SEQ ID NO: 146679 - RNA, 19 nt, Homo sapiens
  misc_RNA (1)...(19): siRNA sense strand
ggucguggucuucauaguc

SEQ ID NO: 146680 - RNA, 19 nt, Homo sapiens
  misc_RNA (1)...(19): siRNA sense strand
caacuuugagcgcaacaag

SEQ ID NO: 146681 - RNA, 19 nt, Homo sapiens
  misc_RNA (1)...(19): siRNA sense strand
guuccucccuaucauguac

SEQ ID NO: 146682 - RNA, 19 nt, Homo sapiens
  misc_RNA (1)...(19): siRNA sense strand
gucguggucuucauagucu

SEQ ID NO: 146683 - RNA, 19 nt, Homo sapiens
  misc_RNA (1)...(19): siRNA sense strand
ccagauggugaucggcuuu

SEQ ID NO: 146684 - RNA, 19 nt, Homo sapiens
  misc_RNA (1)...(19): siRNA sense strand
cauguacuccaucauuugu

SEQ ID NO: 146685 - RNA, 19 nt, Homo sapiens
  misc_RNA (1)...(19): siRNA sense strand
cuucaucggcgucaaguuc

SEQ ID NO: 146686 - RNA, 19 nt, Homo sapiens
  misc_RNA (1)...(19): siRNA sense strand
aaggacgugcggaacuuua

SEQ ID NO: 146687 - RNA, 19 nt, Homo sapiens
  misc_RNA (1)...(19): siRNA sense strand
aagcucaucuuugccaucu

SEQ ID NO: 146688 - RNA, 19 nt, Homo sapiens
  misc_RNA (1)...(19): siRNA sense strand
ggccaaguccugggucuuc

SEQ ID NO: 146689 - RNA, 19 nt, Homo sapiens
  misc_RNA (1)...(19): siRNA sense strand
ucuuccagcugcccuacaa

SEQ ID NO: 146690 - RNA, 19 nt, Homo sapiens
  misc_RNA (1)...(19): siRNA sense strand
gaggagcagcagugagcaa

SEQ ID NO: 146691 - RNA, 19 nt, Homo sapiens
  misc_RNA (1)...(19): siRNA sense strand
caacaaccuuauuuccaua

SEQ ID NO: 146692 - RNA, 19 nt, Homo sapiens
  misc_RNA (1)...(19): siRNA sense strand
gaggagagcugggacuaug

SEQ ID NO: 146693 - RNA, 19 nt, Homo sapiens
  misc_RNA (1)...(19): siRNA sense strand
agaaguggcugcacaacaa

SEQ ID NO: 146694 - RNA, 19 nt, Homo sapiens
  misc_RNA (1)...(19): siRNA sense strand
ucaugacgcucucgauauu

SEQ ID NO: 146695 - RNA, 19 nt, Homo sapiens
  misc_RNA (1)...(19): siRNA sense strand
caacgacuccacaauccua

SEQ ID NO: 146696 - RNA, 19 nt, Homo sapiens
  misc_RNA (1)...(19): siRNA sense strand
acaaccggcucgcucgaua

SEQ ID NO: 146697 - RNA, 19 nt, Homo sapiens
  misc_RNA (1)...(19): siRNA sense strand
agaaaaccauccaaaagua

SEQ ID NO: 146698 - RNA, 19 nt, Homo sapiens
  misc_RNA (1)...(19): siRNA sense strand
ccacaauccuagauaaggu

SEQ ID NO: 146699 - RNA, 19 nt, Homo sapiens
  misc_RNA (1)...(19): siRNA sense strand
acaacaaccuuauuuccau

SEQ ID NO: 146700 - RNA, 19 nt, Homo sapiens
  misc_RNA (1)...(19): siRNA sense strand
guucaugacgcucucgaua

SEQ ID NO: 146701 - RNA, 19 nt, Homo sapiens
  misc_RNA (1)...(19): siRNA sense strand
cugcagaucugguccaaag

SEQ ID NO: 146702 - RNA, 19 nt, Homo sapiens
  misc_RNA (1)...(19): siRNA sense strand
cgauauuccugugcagaaa

SEQ ID NO: 146703 - RNA, 19 nt, Homo sapiens
  misc_RNA (1)...(19): siRNA sense strand
gccucagccucaucaagua

SEQ ID NO: 146704 - RNA, 19 nt, Homo sapiens
  misc_RNA (1)...(19): siRNA sense strand
gaccaacgacuccacaauc

SEQ ID NO: 146705 - RNA, 19 nt, Homo sapiens
  misc_RNA (1)...(19): siRNA sense strand
caaccuuauuuccauagug

SEQ ID NO: 146706 - RNA, 19 nt, Homo sapiens
  misc_RNA (1)...(19): siRNA sense strand
ggaugcugcugcuccuguu

SEQ ID NO: 146707 - RNA, 19 nt, Homo sapiens
  misc_RNA (1)...(19): siRNA sense strand
caucaaguacuuccucuuc

SEQ ID NO: 146708 - RNA, 19 nt, Homo sapiens
  misc_RNA (1)...(19): siRNA sense strand
gcacaacaaccuuauuucc

SEQ ID NO: 146709 - RNA, 19 nt, Homo sapiens
  misc_RNA (1)...(19): siRNA sense strand
gcaucuggauccucaucga

SEQ ID NO: 146710 - RNA, 19 nt, Homo sapiens
  misc_RNA (1)...(19): siRNA sense strand
ccaaaguccuggccaucuc

SEQ ID NO: 146711 - RNA, 19 nt, Homo sapiens
  misc_RNA (1)...(19): siRNA sense strand
acuccacaauccuagauaa

SEQ ID NO: 146712 - RNA, 19 nt, Homo sapiens
  misc_RNA (1)...(19): siRNA sense strand
gcagaucugguccaaaguc

SEQ ID NO: 146713 - RNA, 19 nt, Homo sapiens
  misc_RNA (1)...(19): siRNA sense strand
gagaaaaccauccaaaagu

SEQ ID NO: 146714 - RNA, 19 nt, Homo sapiens
  misc_RNA (1)...(19): siRNA sense strand
cugcacaacaaccuuauuu

SEQ ID NO: 146715 - RNA, 19 nt, Homo sapiens
  misc_RNA (1)...(19): siRNA sense strand
ggccaucucaggaaucuuc

SEQ ID NO: 146716 - RNA, 19 nt, Homo sapiens
  misc_RNA (1)...(19): siRNA sense strand
caaguacuuccucuucguu

SEQ ID NO: 146717 - RNA, 19 nt, Homo sapiens
  misc_RNA (1)...(19): siRNA sense strand
ggagagcugggacuaugug

SEQ ID NO: 146718 - RNA, 19 nt, Homo sapiens
  misc_RNA (1)...(19): siRNA sense strand
ucaaguacuuccucuucgu

SEQ ID NO: 146719 - RNA, 19 nt, Homo sapiens
  misc_RNA (1)...(19): siRNA sense strand
gaauccucaucuccacuca

SEQ ID NO: 146720 - RNA, 19 nt, Homo sapiens
  misc_RNA (1)...(19): siRNA sense strand
gggacuaugugcaguucca

SEQ ID NO: 146721 - RNA, 19 nt, Homo sapiens
  misc_RNA (1)...(19): siRNA sense strand
gcgggacgucguagagaaa

SEQ ID NO: 146722 - RNA, 19 nt, Homo sapiens
  misc_RNA (1)...(19): siRNA sense strand
ucucaggaaucuucaccau

SEQ ID NO: 146723 - RNA, 19 nt, Homo sapiens
  misc_RNA (1)...(19): siRNA sense strand
caaaguccuggccaucuca

SEQ ID NO: 146724 - RNA, 19 nt, Homo sapiens
  misc_RNA (1)...(19): siRNA sense strand
uggcugcacaacaaccuua

SEQ ID NO: 146725 - RNA, 19 nt, Homo sapiens
  misc_RNA (1)...(19): siRNA sense strand
gaaaccuggaccacgucua

SEQ ID NO: 146726 - RNA, 19 nt, Homo sapiens
  misc_RNA (1)...(19): siRNA sense strand
gaccagcuucguguccuuu

SEQ ID NO: 146727 - RNA, 19 nt, Homo sapiens
  misc_RNA (1)...(19): siRNA sense strand
cagaaguggcugcacaaca

SEQ ID NO: 146728 - RNA, 19 nt, Homo sapiens
  misc_RNA (1)...(19): siRNA sense strand
cgaccaacgacuccacaau

SEQ ID NO: 146729 - RNA, 19 nt, Homo sapiens
  misc_RNA (1)...(19): siRNA sense strand
cacaacaaccuuauuucca

SEQ ID NO: 146730 - RNA, 19 nt, Homo sapiens
  misc_RNA (1)...(19): siRNA sense strand
caacagaccugaguucuua

SEQ ID NO: 146731 - RNA, 19 nt, Homo sapiens
  misc_RNA (1)...(19): siRNA sense strand
gaucaaagccuggaacaua

SEQ ID NO: 146732 - RNA, 19 nt, Homo sapiens
  misc_RNA (1)...(19): siRNA sense strand
gaaacuugcugacauguau

SEQ ID NO: 146733 - RNA, 19 nt, Homo sapiens
  misc_RNA (1)...(19): siRNA sense strand
ggacaaauaacuacaauug

SEQ ID NO: 146734 - RNA, 19 nt, Homo sapiens
  misc_RNA (1)...(19): siRNA sense strand
uuacagcacuugauuauga

SEQ ID NO: 146735 - RNA, 19 nt, Homo sapiens
  misc_RNA (1)...(19): siRNA sense strand
gaacaggguagacaucaua

SEQ ID NO: 146736 - RNA, 19 nt, Homo sapiens
  misc_RNA (1)...(19): siRNA sense strand
ccaaucaacuugccagaaa

SEQ ID NO: 146737 - RNA, 19 nt, Homo sapiens
  misc_RNA (1)...(19): siRNA sense strand
gcacaugcaguagauauua

SEQ ID NO: 146738 - RNA, 19 nt, Homo sapiens
  misc_RNA (1)...(19): siRNA sense strand
ggaaggcaaucccacauau

SEQ ID NO: 146739 - RNA, 19 nt, Homo sapiens
  misc_RNA (1)...(19): siRNA sense strand
ugacaauccuccagaguuu

SEQ ID NO: 146740 - RNA, 19 nt, Homo sapiens
  misc_RNA (1)...(19): siRNA sense strand
gaacgcugcagaucuauuu

SEQ ID NO: 146741 - RNA, 19 nt, Homo sapiens
  misc_RNA (1)...(19): siRNA sense strand
gcaacaguauacguuaaua

SEQ ID NO: 146742 - RNA, 19 nt, Homo sapiens
  misc_RNA (1)...(19): siRNA sense strand
ugaagaagguggaggagaa

SEQ ID NO: 146743 - RNA, 19 nt, Homo sapiens
  misc_RNA (1)...(19): siRNA sense strand
gaagaugauguaagagaua

SEQ ID NO: 146744 - RNA, 19 nt, Homo sapiens
  misc_RNA (1)...(19): siRNA sense strand
gcagaucuauuuacuugau

SEQ ID NO: 146745 - RNA, 19 nt, Homo sapiens
  misc_RNA (1)...(19): siRNA sense strand
ggacccagaucgauauaug

SEQ ID NO: 146746 - RNA, 19 nt, Homo sapiens
  misc_RNA (1)...(19): siRNA sense strand
cagcagaaguugaagaaau

SEQ ID NO: 146747 - RNA, 19 nt, Homo sapiens
  misc_RNA (1)...(19): siRNA sense strand
caggaacgcugcagaucua

SEQ ID NO: 146748 - RNA, 19 nt, Homo sapiens
  misc_RNA (1)...(19): siRNA sense strand
gaaauaguguucccaagac

SEQ ID NO: 146749 - RNA, 19 nt, Homo sapiens
  misc_RNA (1)...(19): siRNA sense strand
gaaguucccaucauaauca

SEQ ID NO: 146750 - RNA, 19 nt, Homo sapiens
  misc_RNA (1)...(19): siRNA sense strand
ugacaugaaugacaacaga

SEQ ID NO: 146751 - RNA, 19 nt, Homo sapiens
  misc_RNA (1)...(19): siRNA sense strand
gauauaugcccaagacaaa

SEQ ID NO: 146752 - RNA, 19 nt, Homo sapiens
  misc_RNA (1)...(19): siRNA sense strand
cauaguagcuaaucuaacu

SEQ ID NO: 146753 - RNA, 19 nt, Homo sapiens
  misc_RNA (1)...(19): siRNA sense strand
uaagaucauucgccaagaa

SEQ ID NO: 146754 - RNA, 19 nt, Homo sapiens
  misc_RNA (1)...(19): siRNA sense strand
gugagaagcuuuccacucu

SEQ ID NO: 146755 - RNA, 19 nt, Homo sapiens
  misc_RNA (1)...(19): siRNA sense strand
ggucaaaccaaucgacuuu

SEQ ID NO: 146756 - RNA, 19 nt, Homo sapiens
  misc_RNA (1)...(19): siRNA sense strand
gaaggagucagcagaaguu

SEQ ID NO: 146757 - RNA, 19 nt, Homo sapiens
  misc_RNA (1)...(19): siRNA sense strand
cugcagaucuauuuacuug

SEQ ID NO: 146758 - RNA, 19 nt, Homo sapiens
  misc_RNA (1)...(19): siRNA sense strand
aaacagcaacgacggguua

SEQ ID NO: 146759 - RNA, 19 nt, Homo sapiens
  misc_RNA (1)...(19): siRNA sense strand
agcagaaguugaagaaaua

SEQ ID NO: 146760 - RNA, 19 nt, Homo sapiens
  misc_RNA (1)...(19): siRNA sense strand
ccacagcuccaccauauga

SEQ ID NO: 146761 - RNA, 19 nt, Homo sapiens
  misc_RNA (1)...(19): siRNA sense strand
gaccgagaaucaccaaaug

SEQ ID NO: 146762 - RNA, 19 nt, Homo sapiens
  misc_RNA (1)...(19): siRNA sense strand
uaucugauccugccaauug

SEQ ID NO: 146763 - RNA, 19 nt, Homo sapiens
  misc_RNA (1)...(19): siRNA sense strand
ggaacgcaguguacagaau

SEQ ID NO: 146764 - RNA, 19 nt, Homo sapiens
  misc_RNA (1)...(19): siRNA sense strand
ccacauauggccuuucaaa

SEQ ID NO: 146765 - RNA, 19 nt, Homo sapiens
  misc_RNA (1)...(19): siRNA sense strand
gacagccucuucucaaugu

SEQ ID NO: 146766 - RNA, 19 nt, Homo sapiens
  misc_RNA (1)...(19): siRNA sense strand
gagaagaagaccaggacua

SEQ ID NO: 146767 - RNA, 19 nt, Homo sapiens
  misc_RNA (1)...(19): siRNA sense strand
guaauccucccaaaucaaa

SEQ ID NO: 146768 - RNA, 19 nt, Homo sapiens
  misc_RNA (1)...(19): siRNA sense strand
gaacaggaacgcugcagau

SEQ ID NO: 146769 - RNA, 19 nt, Homo sapiens
  misc_RNA (1)...(19): siRNA sense strand
cuacuuuccuugcuucuga

SEQ ID NO: 146770 - RNA, 19 nt, Homo sapiens
  misc_RNA (1)...(19): siRNA sense strand
gaagagagacugggucauc

SEQ ID NO: 146771 - RNA, 19 nt, Homo sapiens
  misc_RNA (1)...(19): siRNA sense strand
ggagucagcagaaguugaa

SEQ ID NO: 146772 - RNA, 19 nt, Homo sapiens
  misc_RNA (1)...(19): siRNA sense strand
ggacuaugauuaccugaac

SEQ ID NO: 146773 - RNA, 19 nt, Homo sapiens
  misc_RNA (1)...(19): siRNA sense strand
gugcaacaguauacguuaa

SEQ ID NO: 146774 - RNA, 19 nt, Homo sapiens
  misc_RNA (1)...(19): siRNA sense strand
uuaaagcggcugacaauga

SEQ ID NO: 146775 - RNA, 19 nt, Homo sapiens
  misc_RNA (1)...(19): siRNA sense strand
uccagaagaugauguaaga

SEQ ID NO: 146776 - RNA, 19 nt, Homo sapiens
  misc_RNA (1)...(19): siRNA sense strand
ggucaucccuccaaucaac

SEQ ID NO: 146777 - RNA, 19 nt, Homo sapiens
  misc_RNA (1)...(19): siRNA sense strand
ucuugaagcugguaucuau

SEQ ID NO: 146778 - RNA, 19 nt, Homo sapiens
  misc_RNA (1)...(19): siRNA sense strand
gcacaguggccaccuacaa

SEQ ID NO: 146779 - RNA, 19 nt, Homo sapiens
  misc_RNA (1)...(19): siRNA sense strand
aagaagaccaggacuauga

SEQ ID NO: 146780 - RNA, 19 nt, Homo sapiens
  misc_RNA (1)...(19): siRNA sense strand
gaccaucacucggcuuaau

SEQ ID NO: 146781 - RNA, 19 nt, Homo sapiens
  misc_RNA (1)...(19): siRNA sense strand
uaucuccagugacuauuaa

SEQ ID NO: 146782 - RNA, 19 nt, Homo sapiens
  misc_RNA (1)...(19): siRNA sense strand
gcacuugauuaugacauug

SEQ ID NO: 146783 - RNA, 19 nt, Homo sapiens
  misc_RNA (1)...(19): siRNA sense strand
gaagauggcaugguguaug

SEQ ID NO: 146784 - RNA, 19 nt, Homo sapiens
  misc_RNA (1)...(19): siRNA sense strand
gugagcaggacuaugauua

SEQ ID NO: 146785 - RNA, 19 nt, Homo sapiens
  misc_RNA (1)...(19): siRNA sense strand
caaugagacuggugacauc

SEQ ID NO: 146786 - RNA, 19 nt, Homo sapiens
  misc_RNA (1)...(19): siRNA sense strand
gcaaguggcaguaaaauug

SEQ ID NO: 146787 - RNA, 19 nt, Homo sapiens
  misc_RNA (1)...(19): siRNA sense strand
gugaauggacaaauaacua

SEQ ID NO: 146788 - RNA, 19 nt, Homo sapiens
  misc_RNA (1)...(19): siRNA sense strand
ccaaucgacuuugaaacaa

SEQ ID NO: 146789 - RNA, 19 nt, Homo sapiens
  misc_RNA (1)...(19): siRNA sense strand
ccaaguuccugauauaugc

SEQ ID NO: 146790 - RNA, 19 nt, Homo sapiens
  misc_RNA (1)...(19): siRNA sense strand
uccuugagcucccuuaauu

SEQ ID NO: 146791 - RNA, 19 nt, Homo sapiens
  misc_RNA (1)...(19): siRNA sense strand
uaauugauccagaagauga

SEQ ID NO: 146792 - RNA, 19 nt, Homo sapiens
  misc_RNA (1)...(19): siRNA sense strand
ggaccgagaaucaccaaau

SEQ ID NO: 146793 - RNA, 19 nt, Homo sapiens
  misc_RNA (1)...(19): siRNA sense strand
gaucauucgccaagaagaa

SEQ ID NO: 146794 - RNA, 19 nt, Homo sapiens
  misc_RNA (1)...(19): siRNA sense strand
caucauaguagcuaaucua

SEQ ID NO: 146795 - RNA, 19 nt, Homo sapiens
  misc_RNA (1)...(19): siRNA sense strand
caggguagacaucauagua

SEQ ID NO: 146796 - RNA, 19 nt, Homo sapiens
  misc_RNA (1)...(19): siRNA sense strand
cacaugcaguagauauuaa

SEQ ID NO: 146797 - RNA, 19 nt, Homo sapiens
  misc_RNA (1)...(19): siRNA sense strand
ggacagccucuucucaaug

SEQ ID NO: 146798 - RNA, 19 nt, Homo sapiens
  misc_RNA (1)...(19): siRNA sense strand
cccaacauguuuacaauca

SEQ ID NO: 146799 - RNA, 19 nt, Homo sapiens
  misc_RNA (1)...(19): siRNA sense strand
guggugagcaggacuauga

SEQ ID NO: 146800 - RNA, 19 nt, Homo sapiens
  misc_RNA (1)...(19): siRNA sense strand
ccauaugacucccuguuag

SEQ ID NO: 146801 - RNA, 19 nt, Homo sapiens
  misc_RNA (1)...(19): siRNA sense strand
gaccaggacuaugacuuga

SEQ ID NO: 146802 - RNA, 19 nt, Homo sapiens
  misc_RNA (1)...(19): siRNA sense strand
ggguaauccucccaaauca

SEQ ID NO: 146803 - RNA, 19 nt, Homo sapiens
  misc_RNA (1)...(19): siRNA sense strand
gacaauggaauuccuccua

SEQ ID NO: 146804 - RNA, 19 nt, Homo sapiens
  misc_RNA (1)...(19): siRNA sense strand
gagggcacaugcaguagau

SEQ ID NO: 146805 - RNA, 19 nt, Homo sapiens
  misc_RNA (1)...(19): siRNA sense strand
acaauggaauuccuccuau

SEQ ID NO: 146806 - RNA, 19 nt, Homo sapiens
  misc_RNA (1)...(19): siRNA sense strand
aaauagauccugugaaugg

SEQ ID NO: 146807 - RNA, 19 nt, Homo sapiens
  misc_RNA (1)...(19): siRNA sense strand
caacauguuuacaaucaac

SEQ ID NO: 146808 - RNA, 19 nt, Homo sapiens
  misc_RNA (1)...(19): siRNA sense strand
ucccuuaauuccucaagua

SEQ ID NO: 146809 - RNA, 19 nt, Homo sapiens
  misc_RNA (1)...(19): siRNA sense strand
gcugguaucuaugaaguuc

SEQ ID NO: 146810 - RNA, 19 nt, Homo sapiens
  misc_RNA (1)...(19): siRNA sense strand
gaacgcaguguacagaauc

SEQ ID NO: 146811 - RNA, 19 nt, Homo sapiens
  misc_RNA (1)...(19): siRNA sense strand
uguagaggcuucuggugaa

SEQ ID NO: 146812 - RNA, 19 nt, Homo sapiens
  misc_RNA (1)...(19): siRNA sense strand
gcuuuccacucucuucuga

SEQ ID NO: 146813 - RNA, 19 nt, Homo sapiens
  misc_RNA (1)...(19): siRNA sense strand
cagugacuauuaagagaaa

SEQ ID NO: 146814 - RNA, 19 nt, Homo sapiens
  misc_RNA (1)...(19): siRNA sense strand
guagaggcuucuggugaaa

SEQ ID NO: 146815 - RNA, 19 nt, Homo sapiens
  misc_RNA (1)...(19): siRNA sense strand
uguuuacagugcagucuua

SEQ ID NO: 146816 - RNA, 19 nt, Homo sapiens
  misc_RNA (1)...(19): siRNA sense strand
uaaagcggcugacaaugac

SEQ ID NO: 146817 - RNA, 19 nt, Homo sapiens
  misc_RNA (1)...(19): siRNA sense strand
cagaagaugauguaagaga

SEQ ID NO: 146818 - RNA, 19 nt, Homo sapiens
  misc_RNA (1)...(19): siRNA sense strand
caauggaauuccuccuaug

SEQ ID NO: 146819 - RNA, 19 nt, Homo sapiens
  misc_RNA (1)...(19): siRNA sense strand
ccaagacaauucaguaagc

SEQ ID NO: 146820 - RNA, 19 nt, Homo sapiens
  misc_RNA (1)...(19): siRNA sense strand
gaaggcaaucccacauaug

SEQ ID NO: 146821 - RNA, 19 nt, Homo sapiens
  misc_RNA (1)...(19): siRNA sense strand
gguacagaaucgugucuca

SEQ ID NO: 146822 - RNA, 19 nt, Homo sapiens
  misc_RNA (1)...(19): siRNA sense strand
agaaauaguguucccaaga

SEQ ID NO: 146823 - RNA, 19 nt, Homo sapiens
  misc_RNA (1)...(19): siRNA sense strand
caucaagccugugggaauc

SEQ ID NO: 146824 - RNA, 19 nt, Homo sapiens
  misc_RNA (1)...(19): siRNA sense strand
gcagagacuugcgaaacuc

SEQ ID NO: 146825 - RNA, 19 nt, Homo sapiens
  misc_RNA (1)...(19): siRNA sense strand
caaugccccucaaguguua

SEQ ID NO: 146826 - RNA, 19 nt, Homo sapiens
  misc_RNA (1)...(19): siRNA sense strand
ggauguuuguccuuacugu

SEQ ID NO: 146827 - RNA, 19 nt, Homo sapiens
  misc_RNA (1)...(19): siRNA sense strand
aaaccaaucgacuuugaaa

SEQ ID NO: 146828 - RNA, 19 nt, Homo sapiens
  misc_RNA (1)...(19): siRNA sense strand
cagaaucaguggcggagau

SEQ ID NO: 146829 - RNA, 19 nt, Homo sapiens
  misc_RNA (1)...(19): siRNA sense strand
uaucgaaggaugugcauga

SEQ ID NO: 146830 - RNA, 19 nt, Homo sapiens
  misc_RNA (1)...(19): siRNA sense strand
ggaugaauaugaagaugaa

SEQ ID NO: 146831 - RNA, 19 nt, Homo sapiens
  misc_RNA (1)...(19): siRNA sense strand
gcacaaggucccagcauca

SEQ ID NO: 146832 - RNA, 19 nt, Homo sapiens
  misc_RNA (1)...(19): siRNA sense strand
ggacgacugcuccauguau

SEQ ID NO: 146833 - RNA, 19 nt, Homo sapiens
  misc_RNA (1)...(19): siRNA sense strand
caaggucccagcaucauug

SEQ ID NO: 146834 - RNA, 19 nt, Homo sapiens
  misc_RNA (1)...(19): siRNA sense strand
gggaugaauaugaagauga

SEQ ID NO: 146835 - RNA, 19 nt, Homo sapiens
  misc_RNA (1)...(19): siRNA sense strand
gacgacugcuccauguaug

SEQ ID NO: 146836 - RNA, 19 nt, Homo sapiens
  misc_RNA (1)...(19): siRNA sense strand
ggacgcugcugcuguucag

SEQ ID NO: 146837 - RNA, 19 nt, Homo sapiens
  misc_RNA (1)...(19): siRNA sense strand
gaugaaaaccuuuaugaag

SEQ ID NO: 146838 - RNA, 19 nt, Homo sapiens
  misc_RNA (1)...(19): siRNA sense strand
gaugugggcagccucaaca

SEQ ID NO: 146839 - RNA, 19 nt, Homo sapiens
  misc_RNA (1)...(19): siRNA sense strand
accaagaaccgaaucauca

SEQ ID NO: 146840 - RNA, 19 nt, Homo sapiens
  misc_RNA (1)...(19): siRNA sense strand
gugggcagccucaacauag

SEQ ID NO: 146841 - RNA, 19 nt, Homo sapiens
  misc_RNA (1)...(19): siRNA sense strand
uuccaaugcccgcacaaua

SEQ ID NO: 146842 - RNA, 19 nt, Homo sapiens
  misc_RNA (1)...(19): siRNA sense strand
ggaaacgauggcagaacga

SEQ ID NO: 146843 - RNA, 19 nt, Homo sapiens
  misc_RNA (1)...(19): siRNA sense strand
cugggacgcugcugcuguu

SEQ ID NO: 146844 - RNA, 19 nt, Homo sapiens
  misc_RNA (1)...(19): siRNA sense strand
uccaaugcccgcacaauag

SEQ ID NO: 146845 - RNA, 19 nt, Homo sapiens
  misc_RNA (1)...(19): siRNA sense strand
ccagggcaccuaccaggau

SEQ ID NO: 146846 - RNA, 19 nt, Homo sapiens
  misc_RNA (1)...(19): siRNA sense strand
caagaaccgaaucaucaca

SEQ ID NO: 146847 - RNA, 19 nt, Homo sapiens
  misc_RNA (1)...(19): siRNA sense strand
gcacaauagcagcaacaac

SEQ ID NO: 146848 - RNA, 19 nt, Homo sapiens
  misc_RNA (1)...(19): siRNA sense strand
gcaccaagaaccgaaucau

SEQ ID NO: 146849 - RNA, 19 nt, Homo sapiens
  misc_RNA (1)...(19): siRNA sense strand
ggaugaauaugaagaugaa

SEQ ID NO: 146850 - RNA, 19 nt, Homo sapiens
  misc_RNA (1)...(19): siRNA sense strand
gcacaaggucccagcauca

SEQ ID NO: 146851 - RNA, 19 nt, Homo sapiens
  misc_RNA (1)...(19): siRNA sense strand
ggacgacugcuccauguau

SEQ ID NO: 146852 - RNA, 19 nt, Homo sapiens
  misc_RNA (1)...(19): siRNA sense strand
caaggucccagcaucauug

SEQ ID NO: 146853 - RNA, 19 nt, Homo sapiens
  misc_RNA (1)...(19): siRNA sense strand
gggaugaauaugaagauga

SEQ ID NO: 146854 - RNA, 19 nt, Homo sapiens
  misc_RNA (1)...(19): siRNA sense strand
gacgacugcuccauguaug

SEQ ID NO: 146855 - RNA, 19 nt, Homo sapiens
  misc_RNA (1)...(19): siRNA sense strand
ggacgcugcugcuguucag

SEQ ID NO: 146856 - RNA, 19 nt, Homo sapiens
  misc_RNA (1)...(19): siRNA sense strand
gaugaaaaccuuuaugaag

SEQ ID NO: 146857 - RNA, 19 nt, Homo sapiens
  misc_RNA (1)...(19): siRNA sense strand
gaugugggcagccucaaca

SEQ ID NO: 146858 - RNA, 19 nt, Homo sapiens
  misc_RNA (1)...(19): siRNA sense strand
accaagaaccgaaucauca

SEQ ID NO: 146859 - RNA, 19 nt, Homo sapiens
  misc_RNA (1)...(19): siRNA sense strand
gugggcagccucaacauag

SEQ ID NO: 146860 - RNA, 19 nt, Homo sapiens
  misc_RNA (1)...(19): siRNA sense strand
uuccaaugcccgcacaaua

SEQ ID NO: 146861 - RNA, 19 nt, Homo sapiens
  misc_RNA (1)...(19): siRNA sense strand
ggaaacgauggcagaacga

SEQ ID NO: 146862 - RNA, 19 nt, Homo sapiens
  misc_RNA (1)...(19): siRNA sense strand
cugggacgcugcugcuguu

SEQ ID NO: 146863 - RNA, 19 nt, Homo sapiens
  misc_RNA (1)...(19): siRNA sense strand
uccaaugcccgcacaauag

SEQ ID NO: 146864 - RNA, 19 nt, Homo sapiens
  misc_RNA (1)...(19): siRNA sense strand
ccagggcaccuaccaggau

SEQ ID NO: 146865 - RNA, 19 nt, Homo sapiens
  misc_RNA (1)...(19): siRNA sense strand
caagaaccgaaucaucaca

SEQ ID NO: 146866 - RNA, 19 nt, Homo sapiens
  misc_RNA (1)...(19): siRNA sense strand
gcacaauagcagcaacaac

SEQ ID NO: 146867 - RNA, 19 nt, Homo sapiens
  misc_RNA (1)...(19): siRNA sense strand
gcaccaagaaccgaaucau

SEQ ID NO: 146868 - RNA, 19 nt, Homo sapiens
  misc_RNA (1)...(19): siRNA sense strand
gagaacaccugucaagaug

SEQ ID NO: 146869 - RNA, 19 nt, Homo sapiens
  misc_RNA (1)...(19): siRNA sense strand
gaagcucacucagaaguuu

SEQ ID NO: 146870 - RNA, 19 nt, Homo sapiens
  misc_RNA (1)...(19): siRNA sense strand
gaagugggccugccuaguu

SEQ ID NO: 146871 - RNA, 19 nt, Homo sapiens
  misc_RNA (1)...(19): siRNA sense strand
gaacaccugucaagaugug

SEQ ID NO: 146872 - RNA, 19 nt, Homo sapiens
  misc_RNA (1)...(19): siRNA sense strand
ccacccagcugcucucaaa

SEQ ID NO: 146873 - RNA, 19 nt, Homo sapiens
  misc_RNA (1)...(19): siRNA sense strand
ccugugaccuucaucauuu

SEQ ID NO: 146874 - RNA, 19 nt, Homo sapiens
  misc_RNA (1)...(19): siRNA sense strand
ugaaaucaauccagacaug

SEQ ID NO: 146875 - RNA, 19 nt, Homo sapiens
  misc_RNA (1)...(19): siRNA sense strand
gacacggaaucccgaauaa

SEQ ID NO: 146876 - RNA, 19 nt, Homo sapiens
  misc_RNA (1)...(19): siRNA sense strand
acacagagcugacccugau

SEQ ID NO: 146877 - RNA, 19 nt, Homo sapiens
  misc_RNA (1)...(19): siRNA sense strand
gaaccugcauuccaagaag

SEQ ID NO: 146878 - RNA, 19 nt, Homo sapiens
  misc_RNA (1)...(19): siRNA sense strand
gagcaaguacucagaauuc

SEQ ID NO: 146879 - RNA, 19 nt, Homo sapiens
  misc_RNA (1)...(19): siRNA sense strand
gugcugaccuauguguuua

SEQ ID NO: 146880 - RNA, 19 nt, Homo sapiens
  misc_RNA (1)...(19): siRNA sense strand
gccagacgcuuucccgauu

SEQ ID NO: 146881 - RNA, 19 nt, Homo sapiens
  misc_RNA (1)...(19): siRNA sense strand
caagaagguucgggaagaa

SEQ ID NO: 146882 - RNA, 19 nt, Homo sapiens
  misc_RNA (1)...(19): siRNA sense strand
ggacaagaacgucacuaug

SEQ ID NO: 146883 - RNA, 19 nt, Homo sapiens
  misc_RNA (1)...(19): siRNA sense strand
uccagaaugucaucaaauu

SEQ ID NO: 146884 - RNA, 19 nt, Homo sapiens
  misc_RNA (1)...(19): siRNA sense strand
gccaagagccugccuaaag

SEQ ID NO: 146885 - RNA, 19 nt, Homo sapiens
  misc_RNA (1)...(19): siRNA sense strand
ccaagagccugccuaaagg

SEQ ID NO: 146886 - RNA, 19 nt, Homo sapiens
  misc_RNA (1)...(19): siRNA sense strand
gaaaucaauccagacauga

SEQ ID NO: 146887 - RNA, 19 nt, Homo sapiens
  misc_RNA (1)...(19): siRNA sense strand
gacaagaacgucacuaugg

SEQ ID NO: 146888 - RNA, 19 nt, Homo sapiens
  misc_RNA (1)...(19): siRNA sense strand
cauccagaaugucaucaaa

SEQ ID NO: 146889 - RNA, 19 nt, Homo sapiens
  misc_RNA (1)...(19): siRNA sense strand
acaagaagguucgggaaga

SEQ ID NO: 146890 - RNA, 19 nt, Homo sapiens
  misc_RNA (1)...(19): siRNA sense strand
gaacuccucgugugucaau

SEQ ID NO: 146891 - RNA, 19 nt, Homo sapiens
  misc_RNA (1)...(19): siRNA sense strand
ggagcuuggugcugaccua

SEQ ID NO: 146892 - RNA, 19 nt, Homo sapiens
  misc_RNA (1)...(19): siRNA sense strand
gggcagagacuccaagaca

SEQ ID NO: 146893 - RNA, 19 nt, Homo sapiens
  misc_RNA (1)...(19): siRNA sense strand
gugaagauaugacuuucuc

SEQ ID NO: 146894 - RNA, 19 nt, Homo sapiens
  misc_RNA (1)...(19): siRNA sense strand
gaggagauauaugaaagca

SEQ ID NO: 146895 - RNA, 19 nt, Homo sapiens
  misc_RNA (1)...(19): siRNA sense strand
ggcagagacuccaagacaa

SEQ ID NO: 146896 - RNA, 19 nt, Homo sapiens
  misc_RNA (1)...(19): siRNA sense strand
cgagaacaccugucaagau

SEQ ID NO: 146897 - RNA, 19 nt, Homo sapiens
  misc_RNA (1)...(19): siRNA sense strand
ggagcaaguacucagaauu

SEQ ID NO: 146898 - RNA, 19 nt, Homo sapiens
  misc_RNA (1)...(19): siRNA sense strand
gaacuggaggagauauaug

SEQ ID NO: 146899 - RNA, 19 nt, Homo sapiens
  misc_RNA (1)...(19): siRNA sense strand
auccagacaugaagaaauu

SEQ ID NO: 146900 - RNA, 19 nt, Homo sapiens
  misc_RNA (1)...(19): siRNA sense strand
gcuuggugcugaccuaugu

SEQ ID NO: 146901 - RNA, 19 nt, Homo sapiens
  misc_RNA (1)...(19): siRNA sense strand
gaaagugucaugcggaaaa

SEQ ID NO: 146902 - RNA, 19 nt, Homo sapiens
  misc_RNA (1)...(19): siRNA sense strand
cagcauccgugguguccaa

SEQ ID NO: 146903 - RNA, 19 nt, Homo sapiens
  misc_RNA (1)...(19): siRNA sense strand
gagcagcgcacgcaugaag

SEQ ID NO: 146904 - RNA, 19 nt, Homo sapiens
  misc_RNA (1)...(19): siRNA sense strand
ucaacaccguggguucaua

SEQ ID NO: 146905 - RNA, 19 nt, Homo sapiens
  misc_RNA (1)...(19): siRNA sense strand
ucaaauugguggaugaacu

SEQ ID NO: 146906 - RNA, 19 nt, Homo sapiens
  misc_RNA (1)...(19): siRNA sense strand
ucgaaggccuggagcucua

SEQ ID NO: 146907 - RNA, 19 nt, Homo sapiens
  misc_RNA (1)...(19): siRNA sense strand
gcagagacuccaagacaag

SEQ ID NO: 146908 - RNA, 19 nt, Homo sapiens
  misc_RNA (1)...(19): siRNA sense strand
ggugcugaccuauguguuu

SEQ ID NO: 146909 - RNA, 19 nt, Homo sapiens
  misc_RNA (1)...(19): siRNA sense strand
ccagacaugaagaaauuaa

SEQ ID NO: 146910 - RNA, 19 nt, Homo sapiens
  misc_RNA (1)...(19): siRNA sense strand
uccagaacaugacgacauu

SEQ ID NO: 146911 - RNA, 19 nt, Homo sapiens
  misc_RNA (1)...(19): siRNA sense strand
agacacggaaucccgaaua

SEQ ID NO: 146912 - RNA, 19 nt, Homo sapiens
  misc_RNA (1)...(19): siRNA sense strand
gggagcaaguacucagaau

SEQ ID NO: 146913 - RNA, 19 nt, Homo sapiens
  misc_RNA (1)...(19): siRNA sense strand
gccuggagcucuacuuucu

SEQ ID NO: 146914 - RNA, 19 nt, Homo sapiens
  misc_RNA (1)...(19): siRNA sense strand
gcacgcaugaagcugaauu

SEQ ID NO: 146915 - RNA, 19 nt, Homo sapiens
  misc_RNA (1)...(19): siRNA sense strand
gcgcacgcaugaagcugaa

SEQ ID NO: 146916 - RNA, 19 nt, Homo sapiens
  misc_RNA (1)...(19): siRNA sense strand
ggagacuugugacgacauc

SEQ ID NO: 146917 - RNA, 19 nt, Homo sapiens
  misc_RNA (1)...(19): siRNA sense strand
cagaacuccucguguguca

SEQ ID NO: 146918 - RNA, 19 nt, Homo sapiens
  misc_RNA (1)...(19): siRNA sense strand
cagagcagcgcacgcauga

SEQ ID NO: 146919 - RNA, 19 nt, Homo sapiens
  misc_RNA (1)...(19): siRNA sense strand
ugaccuauguguuuaccau

SEQ ID NO: 146920 - RNA, 19 nt, Homo sapiens
  misc_RNA (1)...(19): siRNA sense strand
ucgcgcagcucuuccuguu

SEQ ID NO: 146921 - RNA, 19 nt, Homo sapiens
  misc_RNA (1)...(19): siRNA sense strand
uugaagauaucaugaggau

SEQ ID NO: 146922 - RNA, 19 nt, Homo sapiens
  misc_RNA (1)...(19): siRNA sense strand
gggacaagaacgucacuau

SEQ ID NO: 146923 - RNA, 19 nt, Homo sapiens
  misc_RNA (1)...(19): siRNA sense strand
uggaggagauauaugaaag

SEQ ID NO: 146924 - RNA, 19 nt, Homo sapiens
  misc_RNA (1)...(19): siRNA sense strand
ggaagcucacucagaaguu

SEQ ID NO: 146925 - RNA, 19 nt, Homo sapiens
  misc_RNA (1)...(19): siRNA sense strand
gagcagcuuugcgauccuu

SEQ ID NO: 146926 - RNA, 19 nt, Homo sapiens
  misc_RNA (1)...(19): siRNA sense strand
ccacaacaacaccaaggaa

SEQ ID NO: 146927 - RNA, 19 nt, Homo sapiens
  misc_RNA (1)...(19): siRNA sense strand
ccuugaaccugcauuccaa

SEQ ID NO: 146928 - RNA, 19 nt, Homo sapiens
  misc_RNA (1)...(19): siRNA sense strand
gugcaacaccgucgaaagu

SEQ ID NO: 146929 - RNA, 19 nt, Homo sapiens
  misc_RNA (1)...(19): siRNA sense strand
agaagguucgggaagaaua

SEQ ID NO: 146930 - RNA, 19 nt, Homo sapiens
  misc_RNA (1)...(19): siRNA sense strand
gggcugcaccugggucuuu

SEQ ID NO: 146931 - RNA, 19 nt, Homo sapiens
  misc_RNA (1)...(19): siRNA sense strand
cuggagcucuacuuucuug

SEQ ID NO: 146932 - RNA, 19 nt, Homo sapiens
  misc_RNA (1)...(19): siRNA sense strand
ccagaaugucaucaaauug

SEQ ID NO: 146933 - RNA, 19 nt, Homo sapiens
  misc_RNA (1)...(19): siRNA sense strand
gcagccaccugagcagcuu

SEQ ID NO: 146934 - RNA, 19 nt, Homo sapiens
  misc_RNA (1)...(19): siRNA sense strand
gaggucaccauccagaaug

SEQ ID NO: 146935 - RNA, 19 nt, Homo sapiens
  misc_RNA (1)...(19): siRNA sense strand
gacuggcgcugucacucuu

SEQ ID NO: 146936 - RNA, 19 nt, Homo sapiens
  misc_RNA (1)...(19): siRNA sense strand
cgauccuuauggcucauua

SEQ ID NO: 146937 - RNA, 19 nt, Homo sapiens
  misc_RNA (1)...(19): siRNA sense strand
caaauugguggaugaacug

SEQ ID NO: 146938 - RNA, 19 nt, Homo sapiens
  misc_RNA (1)...(19): siRNA sense strand
cagaaugucaucaaauugg

SEQ ID NO: 146939 - RNA, 19 nt, Homo sapiens
  misc_RNA (1)...(19): siRNA sense strand
guccacagccagacgcuuu

SEQ ID NO: 146940 - RNA, 19 nt, Homo sapiens
  misc_RNA (1)...(19): siRNA sense strand
ccagacgcuuucccgauuc

SEQ ID NO: 146941 - RNA, 19 nt, Homo sapiens
  misc_RNA (1)...(19): siRNA sense strand
ggacuggcgcugucacucu

SEQ ID NO: 146942 - RNA, 19 nt, Homo sapiens
  misc_RNA (1)...(19): siRNA sense strand
aagccgaacuggaggagau

SEQ ID NO: 146943 - RNA, 19 nt, Homo sapiens
  misc_RNA (1)...(19): siRNA sense strand
ggcaucagaguccggcaua

SEQ ID NO: 146944 - RNA, 19 nt, Homo sapiens
  misc_RNA (1)...(19): siRNA sense strand
cgucucggcugccaucuac

SEQ ID NO: 146945 - RNA, 19 nt, Homo sapiens
  misc_RNA (1)...(19): siRNA sense strand
gcaucagaguccggcauau

SEQ ID NO: 146946 - RNA, 19 nt, Homo sapiens
  misc_RNA (1)...(19): siRNA sense strand
ggaccugugaccuucauca

SEQ ID NO: 146947 - RNA, 19 nt, Homo sapiens
  misc_RNA (1)...(19): siRNA sense strand
gcgagaacaccugucaaga

SEQ ID NO: 146948 - RNA, 19 nt, Homo sapiens
  misc_RNA (1)...(19): siRNA sense strand
gaagguucgggaagaauac

SEQ ID NO: 146949 - RNA, 19 nt, Homo sapiens
  misc_RNA (1)...(19): siRNA sense strand
caucaacgagugugcaaca

SEQ ID NO: 146950 - RNA, 19 nt, Homo sapiens
  misc_RNA (1)...(19): siRNA sense strand
ggaaucccgaauaaccaaa

SEQ ID NO: 146951 - RNA, 19 nt, Homo sapiens
  misc_RNA (1)...(19): siRNA sense strand
caucagaguccggcauaug

SEQ ID NO: 146952 - RNA, 19 nt, Homo sapiens
  misc_RNA (1)...(19): siRNA sense strand
aagugggccugccuaguug

SEQ ID NO: 146953 - RNA, 19 nt, Homo sapiens
  misc_RNA (1)...(19): siRNA sense strand
ggagcucuacuuucuugug

SEQ ID NO: 146954 - RNA, 19 nt, Homo sapiens
  misc_RNA (1)...(19): siRNA sense strand
acuggaagcugacccugau

SEQ ID NO: 146955 - RNA, 19 nt, Homo sapiens
  misc_RNA (1)...(19): siRNA sense strand
ucugugaagauaugacuuu

SEQ ID NO: 146956 - RNA, 19 nt, Homo sapiens
  misc_RNA (1)...(19): siRNA sense strand
ccaagaagcaagccgaacu

SEQ ID NO: 146957 - RNA, 19 nt, Homo sapiens
  misc_RNA (1)...(19): siRNA sense strand
caacaacaccaaggaacuc

SEQ ID NO: 146958 - RNA, 19 nt, Homo sapiens
  misc_RNA (1)...(19): siRNA sense strand
cgaacuggaggagauauau

SEQ ID NO: 146959 - RNA, 19 nt, Homo sapiens
  misc_RNA (1)...(19): siRNA sense strand
caagaagcaagccgaacug

SEQ ID NO: 146960 - RNA, 19 nt, Homo sapiens
  misc_RNA (1)...(19): siRNA sense strand
cagccgaggucaccaucca

SEQ ID NO: 146961 - RNA, 19 nt, Homo sapiens
  misc_RNA (1)...(19): siRNA sense strand
ucaauccagacaugaagaa

SEQ ID NO: 146962 - RNA, 19 nt, Homo sapiens
  misc_RNA (1)...(19): siRNA sense strand
aaaucaauccagacaugaa

SEQ ID NO: 146963 - RNA, 19 nt, Homo sapiens
  misc_RNA (1)...(19): siRNA sense strand
ugaggauccuggccaagag

SEQ ID NO: 146964 - RNA, 19 nt, Homo sapiens
  misc_RNA (1)...(19): siRNA sense strand
cgaggucaccauccagaau

SEQ ID NO: 146965 - RNA, 19 nt, Homo sapiens
  misc_RNA (1)...(19): siRNA sense strand
ccgcgucuuucucgcauuc

SEQ ID NO: 146966 - RNA, 19 nt, Homo sapiens
  misc_RNA (1)...(19): siRNA sense strand
agaaugucaucaaauuggu

SEQ ID NO: 146967 - RNA, 19 nt, Homo sapiens
  misc_RNA (1)...(19): siRNA sense strand
caacaccguggguucauac

SEQ ID NO: 146968 - RNA, 19 nt, Homo sapiens
  misc_RNA (1)...(19): siRNA sense strand
gagaacaccugucaagaug

SEQ ID NO: 146969 - RNA, 19 nt, Homo sapiens
  misc_RNA (1)...(19): siRNA sense strand
gaagcucacucagaaguuu

SEQ ID NO: 146970 - RNA, 19 nt, Homo sapiens
  misc_RNA (1)...(19): siRNA sense strand
gaagugggccugccuaguu

SEQ ID NO: 146971 - RNA, 19 nt, Homo sapiens
  misc_RNA (1)...(19): siRNA sense strand
gaacaccugucaagaugug

SEQ ID NO: 146972 - RNA, 19 nt, Homo sapiens
  misc_RNA (1)...(19): siRNA sense strand
ccacccagcugcucucaaa

SEQ ID NO: 146973 - RNA, 19 nt, Homo sapiens
  misc_RNA (1)...(19): siRNA sense strand
ccugugaccuucaucauuu

SEQ ID NO: 146974 - RNA, 19 nt, Homo sapiens
  misc_RNA (1)...(19): siRNA sense strand
ugaaaucaauccagacaug

SEQ ID NO: 146975 - RNA, 19 nt, Homo sapiens
  misc_RNA (1)...(19): siRNA sense strand
gacacggaaucccgaauaa

SEQ ID NO: 146976 - RNA, 19 nt, Homo sapiens
  misc_RNA (1)...(19): siRNA sense strand
acacagagcugacccugau

SEQ ID NO: 146977 - RNA, 19 nt, Homo sapiens
  misc_RNA (1)...(19): siRNA sense strand
gaaccugcauuccaagaag

SEQ ID NO: 146978 - RNA, 19 nt, Homo sapiens
  misc_RNA (1)...(19): siRNA sense strand
gagcaaguacucagaauuc

SEQ ID NO: 146979 - RNA, 19 nt, Homo sapiens
  misc_RNA (1)...(19): siRNA sense strand
gugcugaccuauguguuua

SEQ ID NO: 146980 - RNA, 19 nt, Homo sapiens
  misc_RNA (1)...(19): siRNA sense strand
gccagacgcuuucccgauu

SEQ ID NO: 146981 - RNA, 19 nt, Homo sapiens
  misc_RNA (1)...(19): siRNA sense strand
caagaagguucgggaagaa

SEQ ID NO: 146982 - RNA, 19 nt, Homo sapiens
  misc_RNA (1)...(19): siRNA sense strand
ggacaagaacgucacuaug

SEQ ID NO: 146983 - RNA, 19 nt, Homo sapiens
  misc_RNA (1)...(19): siRNA sense strand
uccagaaugucaucaaauu

SEQ ID NO: 146984 - RNA, 19 nt, Homo sapiens
  misc_RNA (1)...(19): siRNA sense strand
gccaagagccugccuaaag

SEQ ID NO: 146985 - RNA, 19 nt, Homo sapiens
  misc_RNA (1)...(19): siRNA sense strand
ccaagagccugccuaaagg

SEQ ID NO: 146986 - RNA, 19 nt, Homo sapiens
  misc_RNA (1)...(19): siRNA sense strand
gaaaucaauccagacauga

SEQ ID NO: 146987 - RNA, 19 nt, Homo sapiens
  misc_RNA (1)...(19): siRNA sense strand
gacaagaacgucacuaugg

SEQ ID NO: 146988 - RNA, 19 nt, Homo sapiens
  misc_RNA (1)...(19): siRNA sense strand
cauccagaaugucaucaaa

SEQ ID NO: 146989 - RNA, 19 nt, Homo sapiens
  misc_RNA (1)...(19): siRNA sense strand
acaagaagguucgggaaga

SEQ ID NO: 146990 - RNA, 19 nt, Homo sapiens
  misc_RNA (1)...(19): siRNA sense strand
gaacuccucgugugucaau

SEQ ID NO: 146991 - RNA, 19 nt, Homo sapiens
  misc_RNA (1)...(19): siRNA sense strand
ggagcuuggugcugaccua

SEQ ID NO: 146992 - RNA, 19 nt, Homo sapiens
  misc_RNA (1)...(19): siRNA sense strand
gggcagagacuccaagaca

SEQ ID NO: 146993 - RNA, 19 nt, Homo sapiens
  misc_RNA (1)...(19): siRNA sense strand
gugaagauaugacuuucuc

SEQ ID NO: 146994 - RNA, 19 nt, Homo sapiens
  misc_RNA (1)...(19): siRNA sense strand
gaggagauauaugaaagca

SEQ ID NO: 146995 - RNA, 19 nt, Homo sapiens
  misc_RNA (1)...(19): siRNA sense strand
ggcagagacuccaagacaa

SEQ ID NO: 146996 - RNA, 19 nt, Homo sapiens
  misc_RNA (1)...(19): siRNA sense strand
cgagaacaccugucaagau

SEQ ID NO: 146997 - RNA, 19 nt, Homo sapiens
  misc_RNA (1)...(19): siRNA sense strand
ggagcaaguacucagaauu

SEQ ID NO: 146998 - RNA, 19 nt, Homo sapiens
  misc_RNA (1)...(19): siRNA sense strand
gaacuggaggagauauaug

SEQ ID NO: 146999 - RNA, 19 nt, Homo sapiens
  misc_RNA (1)...(19): siRNA sense strand
auccagacaugaagaaauu

SEQ ID NO: 147000 - RNA, 19 nt, Homo sapiens
  misc_RNA (1)...(19): siRNA sense strand
gcuuggugcugaccuaugu

SEQ ID NO: 147001 - RNA, 19 nt, Homo sapiens
  misc_RNA (1)...(19): siRNA sense strand
gaaagugucaugcggaaaa

SEQ ID NO: 147002 - RNA, 19 nt, Homo sapiens
  misc_RNA (1)...(19): siRNA sense strand
cagcauccgugguguccaa

SEQ ID NO: 147003 - RNA, 19 nt, Homo sapiens
  misc_RNA (1)...(19): siRNA sense strand
gagcagcgcacgcaugaag

SEQ ID NO: 147004 - RNA, 19 nt, Homo sapiens
  misc_RNA (1)...(19): siRNA sense strand
ucaacaccguggguucaua

SEQ ID NO: 147005 - RNA, 19 nt, Homo sapiens
  misc_RNA (1)...(19): siRNA sense strand
ucaaauugguggaugaacu

SEQ ID NO: 147006 - RNA, 19 nt, Homo sapiens
  misc_RNA (1)...(19): siRNA sense strand
ucgaaggccuggagcucua

SEQ ID NO: 147007 - RNA, 19 nt, Homo sapiens
  misc_RNA (1)...(19): siRNA sense strand
gcagagacuccaagacaag

SEQ ID NO: 147008 - RNA, 19 nt, Homo sapiens
  misc_RNA (1)...(19): siRNA sense strand
ggugcugaccuauguguuu

SEQ ID NO: 147009 - RNA, 19 nt, Homo sapiens
  misc_RNA (1)...(19): siRNA sense strand
ccagacaugaagaaauuaa

SEQ ID NO: 147010 - RNA, 19 nt, Homo sapiens
  misc_RNA (1)...(19): siRNA sense strand
uccagaacaugacgacauu

SEQ ID NO: 147011 - RNA, 19 nt, Homo sapiens
  misc_RNA (1)...(19): siRNA sense strand
agacacggaaucccgaaua

SEQ ID NO: 147012 - RNA, 19 nt, Homo sapiens
  misc_RNA (1)...(19): siRNA sense strand
gggagcaaguacucagaau

SEQ ID NO: 147013 - RNA, 19 nt, Homo sapiens
  misc_RNA (1)...(19): siRNA sense strand
gccuggagcucuacuuucu

SEQ ID NO: 147014 - RNA, 19 nt, Homo sapiens
  misc_RNA (1)...(19): siRNA sense strand
gcacgcaugaagcugaauu

SEQ ID NO: 147015 - RNA, 19 nt, Homo sapiens
  misc_RNA (1)...(19): siRNA sense strand
gcgcacgcaugaagcugaa

SEQ ID NO: 147016 - RNA, 19 nt, Homo sapiens
  misc_RNA (1)...(19): siRNA sense strand
ggagacuugugacgacauc

SEQ ID NO: 147017 - RNA, 19 nt, Homo sapiens
  misc_RNA (1)...(19): siRNA sense strand
cagaacuccucguguguca

SEQ ID NO: 147018 - RNA, 19 nt, Homo sapiens
  misc_RNA (1)...(19): siRNA sense strand
cagagcagcgcacgcauga

SEQ ID NO: 147019 - RNA, 19 nt, Homo sapiens
  misc_RNA (1)...(19): siRNA sense strand
ugaccuauguguuuaccau

SEQ ID NO: 147020 - RNA, 19 nt, Homo sapiens
  misc_RNA (1)...(19): siRNA sense strand
ucgcgcagcucuuccuguu

SEQ ID NO: 147021 - RNA, 19 nt, Homo sapiens
  misc_RNA (1)...(19): siRNA sense strand
uugaagauaucaugaggau

SEQ ID NO: 147022 - RNA, 19 nt, Homo sapiens
  misc_RNA (1)...(19): siRNA sense strand
gggacaagaacgucacuau

SEQ ID NO: 147023 - RNA, 19 nt, Homo sapiens
  misc_RNA (1)...(19): siRNA sense strand
uggaggagauauaugaaag

SEQ ID NO: 147024 - RNA, 19 nt, Homo sapiens
  misc_RNA (1)...(19): siRNA sense strand
ggaagcucacucagaaguu

SEQ ID NO: 147025 - RNA, 19 nt, Homo sapiens
  misc_RNA (1)...(19): siRNA sense strand
gagcagcuuugcgauccuu

SEQ ID NO: 147026 - RNA, 19 nt, Homo sapiens
  misc_RNA (1)...(19): siRNA sense strand
ccacaacaacaccaaggaa

SEQ ID NO: 147027 - RNA, 19 nt, Homo sapiens
  misc_RNA (1)...(19): siRNA sense strand
ccuugaaccugcauuccaa

SEQ ID NO: 147028 - RNA, 19 nt, Homo sapiens
  misc_RNA (1)...(19): siRNA sense strand
gugcaacaccgucgaaagu

SEQ ID NO: 147029 - RNA, 19 nt, Homo sapiens
  misc_RNA (1)...(19): siRNA sense strand
agaagguucgggaagaaua

SEQ ID NO: 147030 - RNA, 19 nt, Homo sapiens
  misc_RNA (1)...(19): siRNA sense strand
gggcugcaccugggucuuu

SEQ ID NO: 147031 - RNA, 19 nt, Homo sapiens
  misc_RNA (1)...(19): siRNA sense strand
cuggagcucuacuuucuug

SEQ ID NO: 147032 - RNA, 19 nt, Homo sapiens
  misc_RNA (1)...(19): siRNA sense strand
ccagaaugucaucaaauug

SEQ ID NO: 147033 - RNA, 19 nt, Homo sapiens
  misc_RNA (1)...(19): siRNA sense strand
gcagccaccugagcagcuu

SEQ ID NO: 147034 - RNA, 19 nt, Homo sapiens
  misc_RNA (1)...(19): siRNA sense strand
gaggucaccauccagaaug

SEQ ID NO: 147035 - RNA, 19 nt, Homo sapiens
  misc_RNA (1)...(19): siRNA sense strand
gacuggcgcugucacucuu

SEQ ID NO: 147036 - RNA, 19 nt, Homo sapiens
  misc_RNA (1)...(19): siRNA sense strand
cgauccuuauggcucauua

SEQ ID NO: 147037 - RNA, 19 nt, Homo sapiens
  misc_RNA (1)...(19): siRNA sense strand
caaauugguggaugaacug

SEQ ID NO: 147038 - RNA, 19 nt, Homo sapiens
  misc_RNA (1)...(19): siRNA sense strand
cagaaugucaucaaauugg

SEQ ID NO: 147039 - RNA, 19 nt, Homo sapiens
  misc_RNA (1)...(19): siRNA sense strand
guccacagccagacgcuuu

SEQ ID NO: 147040 - RNA, 19 nt, Homo sapiens
  misc_RNA (1)...(19): siRNA sense strand
ccagacgcuuucccgauuc

SEQ ID NO: 147041 - RNA, 19 nt, Homo sapiens
  misc_RNA (1)...(19): siRNA sense strand
ggacuggcgcugucacucu

SEQ ID NO: 147042 - RNA, 19 nt, Homo sapiens
  misc_RNA (1)...(19): siRNA sense strand
aagccgaacuggaggagau

SEQ ID NO: 147043 - RNA, 19 nt, Homo sapiens
  misc_RNA (1)...(19): siRNA sense strand
ggcaucagaguccggcaua

SEQ ID NO: 147044 - RNA, 19 nt, Homo sapiens
  misc_RNA (1)...(19): siRNA sense strand
cgucucggcugccaucuac

SEQ ID NO: 147045 - RNA, 19 nt, Homo sapiens
  misc_RNA (1)...(19): siRNA sense strand
gcaucagaguccggcauau

SEQ ID NO: 147046 - RNA, 19 nt, Homo sapiens
  misc_RNA (1)...(19): siRNA sense strand
ggaccugugaccuucauca

SEQ ID NO: 147047 - RNA, 19 nt, Homo sapiens
  misc_RNA (1)...(19): siRNA sense strand
gcgagaacaccugucaaga

SEQ ID NO: 147048 - RNA, 19 nt, Homo sapiens
  misc_RNA (1)...(19): siRNA sense strand
gaagguucgggaagaauac

SEQ ID NO: 147049 - RNA, 19 nt, Homo sapiens
  misc_RNA (1)...(19): siRNA sense strand
caucaacgagugugcaaca

SEQ ID NO: 147050 - RNA, 19 nt, Homo sapiens
  misc_RNA (1)...(19): siRNA sense strand
ggaaucccgaauaaccaaa

SEQ ID NO: 147051 - RNA, 19 nt, Homo sapiens
  misc_RNA (1)...(19): siRNA sense strand
caucagaguccggcauaug

SEQ ID NO: 147052 - RNA, 19 nt, Homo sapiens
  misc_RNA (1)...(19): siRNA sense strand
aagugggccugccuaguug

SEQ ID NO: 147053 - RNA, 19 nt, Homo sapiens
  misc_RNA (1)...(19): siRNA sense strand
ggagcucuacuuucuugug

SEQ ID NO: 147054 - RNA, 19 nt, Homo sapiens
  misc_RNA (1)...(19): siRNA sense strand
acuggaagcugacccugau

SEQ ID NO: 147055 - RNA, 19 nt, Homo sapiens
  misc_RNA (1)...(19): siRNA sense strand
ucugugaagauaugacuuu

SEQ ID NO: 147056 - RNA, 19 nt, Homo sapiens
  misc_RNA (1)...(19): siRNA sense strand
ccaagaagcaagccgaacu

SEQ ID NO: 147057 - RNA, 19 nt, Homo sapiens
  misc_RNA (1)...(19): siRNA sense strand
caacaacaccaaggaacuc

SEQ ID NO: 147058 - RNA, 19 nt, Homo sapiens
  misc_RNA (1)...(19): siRNA sense strand
cgaacuggaggagauauau

SEQ ID NO: 147059 - RNA, 19 nt, Homo sapiens
  misc_RNA (1)...(19): siRNA sense strand
caagaagcaagccgaacug

SEQ ID NO: 147060 - RNA, 19 nt, Homo sapiens
  misc_RNA (1)...(19): siRNA sense strand
cagccgaggucaccaucca

SEQ ID NO: 147061 - RNA, 19 nt, Homo sapiens
  misc_RNA (1)...(19): siRNA sense strand
ucaauccagacaugaagaa

SEQ ID NO: 147062 - RNA, 19 nt, Homo sapiens
  misc_RNA (1)...(19): siRNA sense strand
aaaucaauccagacaugaa

SEQ ID NO: 147063 - RNA, 19 nt, Homo sapiens
  misc_RNA (1)...(19): siRNA sense strand
ugaggauccuggccaagag

SEQ ID NO: 147064 - RNA, 19 nt, Homo sapiens
  misc_RNA (1)...(19): siRNA sense strand
cgaggucaccauccagaau

SEQ ID NO: 147065 - RNA, 19 nt, Homo sapiens
  misc_RNA (1)...(19): siRNA sense strand
ccgcgucuuucucgcauuc

SEQ ID NO: 147066 - RNA, 19 nt, Homo sapiens
  misc_RNA (1)...(19): siRNA sense strand
agaaugucaucaaauuggu

SEQ ID NO: 147067 - RNA, 19 nt, Homo sapiens
  misc_RNA (1)...(19): siRNA sense strand
caacaccguggguucauac

SEQ ID NO: 147068 - RNA, 19 nt, Homo sapiens
  misc_RNA (1)...(19): siRNA sense strand
gaagggagcauguagcuaa

SEQ ID NO: 147069 - RNA, 19 nt, Homo sapiens
  misc_RNA (1)...(19): siRNA sense strand
gaagagagguuuugaauuc

SEQ ID NO: 147070 - RNA, 19 nt, Homo sapiens
  misc_RNA (1)...(19): siRNA sense strand
gaacacacaugcaggacuu

SEQ ID NO: 147071 - RNA, 19 nt, Homo sapiens
  misc_RNA (1)...(19): siRNA sense strand
ggacuuaaaccauuggaua

SEQ ID NO: 147072 - RNA, 19 nt, Homo sapiens
  misc_RNA (1)...(19): siRNA sense strand
cuaauaauguccacuauga

SEQ ID NO: 147073 - RNA, 19 nt, Homo sapiens
  misc_RNA (1)...(19): siRNA sense strand
agaaacagaugaugaagaa

SEQ ID NO: 147074 - RNA, 19 nt, Homo sapiens
  misc_RNA (1)...(19): siRNA sense strand
gugaauaucaucccacuua

SEQ ID NO: 147075 - RNA, 19 nt, Homo sapiens
  misc_RNA (1)...(19): siRNA sense strand
ugaaagaaauccaagaaca

SEQ ID NO: 147076 - RNA, 19 nt, Homo sapiens
  misc_RNA (1)...(19): siRNA sense strand
cgacauuaaucaacucauu

SEQ ID NO: 147077 - RNA, 19 nt, Homo sapiens
  misc_RNA (1)...(19): siRNA sense strand
gagaugcaguggauaauag

SEQ ID NO: 147078 - RNA, 19 nt, Homo sapiens
  misc_RNA (1)...(19): siRNA sense strand
ugaagaagauggagaugga

SEQ ID NO: 147079 - RNA, 19 nt, Homo sapiens
  misc_RNA (1)...(19): siRNA sense strand
gagcagguguuugagauga

SEQ ID NO: 147080 - RNA, 19 nt, Homo sapiens
  misc_RNA (1)...(19): siRNA sense strand
gaaagucgacauuaaucaa

SEQ ID NO: 147081 - RNA, 19 nt, Homo sapiens
  misc_RNA (1)...(19): siRNA sense strand
gaggaaugccaacaguuua

SEQ ID NO: 147082 - RNA, 19 nt, Homo sapiens
  misc_RNA (1)...(19): siRNA sense strand
gcacaaagaauuggaggaa

SEQ ID NO: 147083 - RNA, 19 nt, Homo sapiens
  misc_RNA (1)...(19): siRNA sense strand
caaagaaggugguguucag

SEQ ID NO: 147084 - RNA, 19 nt, Homo sapiens
  misc_RNA (1)...(19): siRNA sense strand
gaaagaaauccaagaacau

SEQ ID NO: 147085 - RNA, 19 nt, Homo sapiens
  misc_RNA (1)...(19): siRNA sense strand
gaaagaagggagcauguag

SEQ ID NO: 147086 - RNA, 19 nt, Homo sapiens
  misc_RNA (1)...(19): siRNA sense strand
cauuauuccucacagauuu

SEQ ID NO: 147087 - RNA, 19 nt, Homo sapiens
  misc_RNA (1)...(19): siRNA sense strand
gaagcucaacaacguauuu

SEQ ID NO: 147088 - RNA, 19 nt, Homo sapiens
  misc_RNA (1)...(19): siRNA sense strand
gagaugaaggucaaagaaa

SEQ ID NO: 147089 - RNA, 19 nt, Homo sapiens
  misc_RNA (1)...(19): siRNA sense strand
gaagauaagaacacacaug

SEQ ID NO: 147090 - RNA, 19 nt, Homo sapiens
  misc_RNA (1)...(19): siRNA sense strand
gcaguguuguuuauacuuc

SEQ ID NO: 147091 - RNA, 19 nt, Homo sapiens
  misc_RNA (1)...(19): siRNA sense strand
ggagaugcaguggauaaua

SEQ ID NO: 147092 - RNA, 19 nt, Homo sapiens
  misc_RNA (1)...(19): siRNA sense strand
cuaccuaaaugcagaauca

SEQ ID NO: 147093 - RNA, 19 nt, Homo sapiens
  misc_RNA (1)...(19): siRNA sense strand
ggaacaauccaaaguuuua

SEQ ID NO: 147094 - RNA, 19 nt, Homo sapiens
  misc_RNA (1)...(19): siRNA sense strand
ggguauugcugaaguugaa

SEQ ID NO: 147095 - RNA, 19 nt, Homo sapiens
  misc_RNA (1)...(19): siRNA sense strand
uugcagcugugacuuauaa

SEQ ID NO: 147096 - RNA, 19 nt, Homo sapiens
  misc_RNA (1)...(19): siRNA sense strand
ugaaggcuaugugggauuu

SEQ ID NO: 147097 - RNA, 19 nt, Homo sapiens
  misc_RNA (1)...(19): siRNA sense strand
ggaagcacagcacaaagaa

SEQ ID NO: 147098 - RNA, 19 nt, Homo sapiens
  misc_RNA (1)...(19): siRNA sense strand
gcacaaauggaagaagaaa

SEQ ID NO: 147099 - RNA, 19 nt, Homo sapiens
  misc_RNA (1)...(19): siRNA sense strand
aaacagaugaugaagaaga

SEQ ID NO: 147100 - RNA, 19 nt, Homo sapiens
  misc_RNA (1)...(19): siRNA sense strand
ugaauucacgcuuauggua

SEQ ID NO: 147101 - RNA, 19 nt, Homo sapiens
  misc_RNA (1)...(19): siRNA sense strand
ggaaagucgacauuaauca

SEQ ID NO: 147102 - RNA, 19 nt, Homo sapiens
  misc_RNA (1)...(19): siRNA sense strand
auaaagggcagcugacuaa

SEQ ID NO: 147103 - RNA, 19 nt, Homo sapiens
  misc_RNA (1)...(19): siRNA sense strand
ggagauggagcagguguuu

SEQ ID NO: 147104 - RNA, 19 nt, Homo sapiens
  misc_RNA (1)...(19): siRNA sense strand
uaugagaacuacagaagca

SEQ ID NO: 147105 - RNA, 19 nt, Homo sapiens
  misc_RNA (1)...(19): siRNA sense strand
gaacaacagaacucuucaa

SEQ ID NO: 147106 - RNA, 19 nt, Homo sapiens
  misc_RNA (1)...(19): siRNA sense strand
acaaauggaagaagaaaga

SEQ ID NO: 147107 - RNA, 19 nt, Homo sapiens
  misc_RNA (1)...(19): siRNA sense strand
agaaggugguguucaguug

SEQ ID NO: 147108 - RNA, 19 nt, Homo sapiens
  misc_RNA (1)...(19): siRNA sense strand
ccaaaucaaguauacagaa

SEQ ID NO: 147109 - RNA, 19 nt, Homo sapiens
  misc_RNA (1)...(19): siRNA sense strand
aagcacagcacaaagaauu

SEQ ID NO: 147110 - RNA, 19 nt, Homo sapiens
  misc_RNA (1)...(19): siRNA sense strand
gcugugguagguaguaaua

SEQ ID NO: 147111 - RNA, 19 nt, Homo sapiens
  misc_RNA (1)...(19): siRNA sense strand
cuuaaaccauuggauauug

SEQ ID NO: 147112 - RNA, 19 nt, Homo sapiens
  misc_RNA (1)...(19): siRNA sense strand
uggcacaaauggaagaaga

SEQ ID NO: 147113 - RNA, 19 nt, Homo sapiens
  misc_RNA (1)...(19): siRNA sense strand
ccagaggaaugccaacagu

SEQ ID NO: 147114 - RNA, 19 nt, Homo sapiens
  misc_RNA (1)...(19): siRNA sense strand
ugaauaucaucccacuuau

SEQ ID NO: 147115 - RNA, 19 nt, Homo sapiens
  misc_RNA (1)...(19): siRNA sense strand
agaggaaugccaacaguuu

SEQ ID NO: 147116 - RNA, 19 nt, Homo sapiens
  misc_RNA (1)...(19): siRNA sense strand
uugggaaagucgacauuaa

SEQ ID NO: 147117 - RNA, 19 nt, Homo sapiens
  misc_RNA (1)...(19): siRNA sense strand
ggaaugccaacaguuuaaa

SEQ ID NO: 147118 - RNA, 19 nt, Homo sapiens
  misc_RNA (1)...(19): siRNA sense strand
uaaauuugaggacuaccua

SEQ ID NO: 147119 - RNA, 19 nt, Homo sapiens
  misc_RNA (1)...(19): siRNA sense strand
uugccaaucucccaaauca

SEQ ID NO: 147120 - RNA, 19 nt, Homo sapiens
  misc_RNA (1)...(19): siRNA sense strand
gaaaagaacaagaagaaag

SEQ ID NO: 147121 - RNA, 19 nt, Homo sapiens
  misc_RNA (1)...(19): siRNA sense strand
gcauguagcuaaaaugaag

SEQ ID NO: 147122 - RNA, 19 nt, Homo sapiens
  misc_RNA (1)...(19): siRNA sense strand
cgagugaacagacgucaga

SEQ ID NO: 147123 - RNA, 19 nt, Homo sapiens
  misc_RNA (1)...(19): siRNA sense strand
agauggagauggagaugga

SEQ ID NO: 147124 - RNA, 19 nt, Homo sapiens
  misc_RNA (1)...(19): siRNA sense strand
acaaagaauuggaggaaaa

SEQ ID NO: 147125 - RNA, 19 nt, Homo sapiens
  misc_RNA (1)...(19): siRNA sense strand
gcaguggauaauaguaauu

SEQ ID NO: 147126 - RNA, 19 nt, Homo sapiens
  misc_RNA (1)...(19): siRNA sense strand
cacaaagaauuggaggaaa

SEQ ID NO: 147127 - RNA, 19 nt, Homo sapiens
  misc_RNA (1)...(19): siRNA sense strand
gggaaagucgacauuaauc

SEQ ID NO: 147128 - RNA, 19 nt, Homo sapiens
  misc_RNA (1)...(19): siRNA sense strand
gaagauggagauggagaug

SEQ ID NO: 147129 - RNA, 19 nt, Homo sapiens
  misc_RNA (1)...(19): siRNA sense strand
uuaugaagcguuugcauga

SEQ ID NO: 147130 - RNA, 19 nt, Homo sapiens
  misc_RNA (1)...(19): siRNA sense strand
gacuuaaaccauuggauau

SEQ ID NO: 147131 - RNA, 19 nt, Homo sapiens
  misc_RNA (1)...(19): siRNA sense strand
caacagaagaaccuugaag

SEQ ID NO: 147132 - RNA, 19 nt, Homo sapiens
  misc_RNA (1)...(19): siRNA sense strand
accauuggauauugaguuu

SEQ ID NO: 147133 - RNA, 19 nt, Homo sapiens
  misc_RNA (1)...(19): siRNA sense strand
uagaacaacagaacucuuc

SEQ ID NO: 147134 - RNA, 19 nt, Homo sapiens
  misc_RNA (1)...(19): siRNA sense strand
augcaggacuugaaagaug

SEQ ID NO: 147135 - RNA, 19 nt, Homo sapiens
  misc_RNA (1)...(19): siRNA sense strand
aacagaugaugaagaagaa

SEQ ID NO: 147136 - RNA, 19 nt, Homo sapiens
  misc_RNA (1)...(19): siRNA sense strand
caaagcagacacacucaca

SEQ ID NO: 147137 - RNA, 19 nt, Homo sapiens
  misc_RNA (1)...(19): siRNA sense strand
augaagcguuugcaugaaa

SEQ ID NO: 147138 - RNA, 19 nt, Homo sapiens
  misc_RNA (1)...(19): siRNA sense strand
aaacugggaagcucaacaa

SEQ ID NO: 147139 - RNA, 19 nt, Homo sapiens
  misc_RNA (1)...(19): siRNA sense strand
ugagaugaaggucaaagaa

SEQ ID NO: 147140 - RNA, 19 nt, Homo sapiens
  misc_RNA (1)...(19): siRNA sense strand
ccucacagauuuguauucu

SEQ ID NO: 147141 - RNA, 19 nt, Homo sapiens
  misc_RNA (1)...(19): siRNA sense strand
agauggagcagguguuuga

SEQ ID NO: 147142 - RNA, 19 nt, Homo sapiens
  misc_RNA (1)...(19): siRNA sense strand
gcagcugugacuuauaaug

SEQ ID NO: 147143 - RNA, 19 nt, Homo sapiens
  misc_RNA (1)...(19): siRNA sense strand
gagaacuacagaagcagaa

SEQ ID NO: 147144 - RNA, 19 nt, Homo sapiens
  misc_RNA (1)...(19): siRNA sense strand
acacaugcaggacuugaaa

SEQ ID NO: 147145 - RNA, 19 nt, Homo sapiens
  misc_RNA (1)...(19): siRNA sense strand
ggugcaguguuguuuauac

SEQ ID NO: 147146 - RNA, 19 nt, Homo sapiens
  misc_RNA (1)...(19): siRNA sense strand
ggcagccuguuaucgacua

SEQ ID NO: 147147 - RNA, 19 nt, Homo sapiens
  misc_RNA (1)...(19): siRNA sense strand
uuugaggacuaccuaaaug

SEQ ID NO: 147148 - RNA, 19 nt, Homo sapiens
  misc_RNA (1)...(19): siRNA sense strand
ucaguucgaggaugagaaa

SEQ ID NO: 147149 - RNA, 19 nt, Homo sapiens
  misc_RNA (1)...(19): siRNA sense strand
gccaaucucccaaaucaag

SEQ ID NO: 147150 - RNA, 19 nt, Homo sapiens
  misc_RNA (1)...(19): siRNA sense strand
agaaagaagggagcaugua

SEQ ID NO: 147151 - RNA, 19 nt, Homo sapiens
  misc_RNA (1)...(19): siRNA sense strand
aauaauguccacuaugaga

SEQ ID NO: 147152 - RNA, 19 nt, Homo sapiens
  misc_RNA (1)...(19): siRNA sense strand
cagaaacagaugaugaaga

SEQ ID NO: 147153 - RNA, 19 nt, Homo sapiens
  misc_RNA (1)...(19): siRNA sense strand
uucaggacauggacuuaaa

SEQ ID NO: 147154 - RNA, 19 nt, Homo sapiens
  misc_RNA (1)...(19): siRNA sense strand
caaucucccaaaucaagua

SEQ ID NO: 147155 - RNA, 19 nt, Homo sapiens
  misc_RNA (1)...(19): siRNA sense strand
gagcauguagcuaaaauga

SEQ ID NO: 147156 - RNA, 19 nt, Homo sapiens
  misc_RNA (1)...(19): siRNA sense strand
aagggcagcugacuaagag

SEQ ID NO: 147157 - RNA, 19 nt, Homo sapiens
  misc_RNA (1)...(19): siRNA sense strand
ggugaacauugugauuuua

SEQ ID NO: 147158 - RNA, 19 nt, Homo sapiens
  misc_RNA (1)...(19): siRNA sense strand
aaaggaccguuuaccucuu

SEQ ID NO: 147159 - RNA, 19 nt, Homo sapiens
  misc_RNA (1)...(19): siRNA sense strand
aaucaaagaaggugguguu

SEQ ID NO: 147160 - RNA, 19 nt, Homo sapiens
  misc_RNA (1)...(19): siRNA sense strand
gggaagcucaacaacguau

SEQ ID NO: 147161 - RNA, 19 nt, Homo sapiens
  misc_RNA (1)...(19): siRNA sense strand
gaagcacagcacaaagaau

SEQ ID NO: 147162 - RNA, 19 nt, Homo sapiens
  misc_RNA (1)...(19): siRNA sense strand
aaagggcagcugacuaaga

SEQ ID NO: 147163 - RNA, 19 nt, Homo sapiens
  misc_RNA (1)...(19): siRNA sense strand
uaugaagcguuugcaugaa

SEQ ID NO: 147164 - RNA, 19 nt, Homo sapiens
  misc_RNA (1)...(19): siRNA sense strand
aaggaccguuuaccucuug

SEQ ID NO: 147165 - RNA, 19 nt, Homo sapiens
  misc_RNA (1)...(19): siRNA sense strand
agaugaaggucaaagaaaa

SEQ ID NO: 147166 - RNA, 19 nt, Homo sapiens
  misc_RNA (1)...(19): siRNA sense strand
gcagguguuugagaugaag

SEQ ID NO: 147167 - RNA, 19 nt, Homo sapiens
  misc_RNA (1)...(19): siRNA sense strand
uggagcagguguuugagau

SEQ ID NO: 147168 - RNA, 19 nt, Homo sapiens
  misc_RNA (1)...(19): siRNA sense strand
guacagaucuccagaagua

SEQ ID NO: 147169 - RNA, 19 nt, Homo sapiens
  misc_RNA (1)...(19): siRNA sense strand
gaucaacucuucaggauuu

SEQ ID NO: 147170 - RNA, 19 nt, Homo sapiens
  misc_RNA (1)...(19): siRNA sense strand
ccauggaucugaagaaaua

SEQ ID NO: 147171 - RNA, 19 nt, Homo sapiens
  misc_RNA (1)...(19): siRNA sense strand
gguuauaucucaucuuuga

SEQ ID NO: 147172 - RNA, 19 nt, Homo sapiens
  misc_RNA (1)...(19): siRNA sense strand
guacauggauucuucacuu

SEQ ID NO: 147173 - RNA, 19 nt, Homo sapiens
  misc_RNA (1)...(19): siRNA sense strand
gaagguaccuauggaguug

SEQ ID NO: 147174 - RNA, 19 nt, Homo sapiens
  misc_RNA (1)...(19): siRNA sense strand
ggccagaaguggaaucuuu

SEQ ID NO: 147175 - RNA, 19 nt, Homo sapiens
  misc_RNA (1)...(19): siRNA sense strand
cagguuauaucucaucuuu

SEQ ID NO: 147176 - RNA, 19 nt, Homo sapiens
  misc_RNA (1)...(19): siRNA sense strand
gaguauaggcaccauauuu

SEQ ID NO: 147177 - RNA, 19 nt, Homo sapiens
  misc_RNA (1)...(19): siRNA sense strand
ccuauggaguuguguauaa

SEQ ID NO: 147178 - RNA, 19 nt, Homo sapiens
  misc_RNA (1)...(19): siRNA sense strand
ucgggaaauuucucuauua

SEQ ID NO: 147179 - RNA, 19 nt, Homo sapiens
  misc_RNA (1)...(19): siRNA sense strand
guauaaggguagacacaaa

SEQ ID NO: 147180 - RNA, 19 nt, Homo sapiens
  misc_RNA (1)...(19): siRNA sense strand
caaacgaauuucuggcaaa

SEQ ID NO: 147181 - RNA, 19 nt, Homo sapiens
  misc_RNA (1)...(19): siRNA sense strand
cgggaaauuucucuauuaa

SEQ ID NO: 147182 - RNA, 19 nt, Homo sapiens
  misc_RNA (1)...(19): siRNA sense strand
caccauauuugcugaacua

SEQ ID NO: 147183 - RNA, 19 nt, Homo sapiens
  misc_RNA (1)...(19): siRNA sense strand
agaaauugaucaacucuuc

SEQ ID NO: 147184 - RNA, 19 nt, Homo sapiens
  misc_RNA (1)...(19): siRNA sense strand
gcacugaaucauccauauu

SEQ ID NO: 147185 - RNA, 19 nt, Homo sapiens
  misc_RNA (1)...(19): siRNA sense strand
ccaaauauagucagucuuc

SEQ ID NO: 147186 - RNA, 19 nt, Homo sapiens
  misc_RNA (1)...(19): siRNA sense strand
gcaacuaagaaaccacuuu

SEQ ID NO: 147187 - RNA, 19 nt, Homo sapiens
  misc_RNA (1)...(19): siRNA sense strand
uaugcaggauuccagguua

SEQ ID NO: 147188 - RNA, 19 nt, Homo sapiens
  misc_RNA (1)...(19): siRNA sense strand
gauuccagguuauaucuca

SEQ ID NO: 147189 - RNA, 19 nt, Homo sapiens
  misc_RNA (1)...(19): siRNA sense strand
ugaacuagcaacuaagaaa

SEQ ID NO: 147190 - RNA, 19 nt, Homo sapiens
  misc_RNA (1)...(19): siRNA sense strand
gccagaaguggaaucuuua

SEQ ID NO: 147191 - RNA, 19 nt, Homo sapiens
  misc_RNA (1)...(19): siRNA sense strand
gauccagccaaacgaauuu

SEQ ID NO: 147192 - RNA, 19 nt, Homo sapiens
  misc_RNA (1)...(19): siRNA sense strand
guacugcaauucgggaaau

SEQ ID NO: 147193 - RNA, 19 nt, Homo sapiens
  misc_RNA (1)...(19): siRNA sense strand
ccaguugacauuuggagua

SEQ ID NO: 147194 - RNA, 19 nt, Homo sapiens
  misc_RNA (1)...(19): siRNA sense strand
gucaguacauggauucuuc

SEQ ID NO: 147195 - RNA, 19 nt, Homo sapiens
  misc_RNA (1)...(19): siRNA sense strand
cugaagaaauacuuggauu

SEQ ID NO: 147196 - RNA, 19 nt, Homo sapiens
  misc_RNA (1)...(19): siRNA sense strand
acuagaaagugaagaggaa

SEQ ID NO: 147197 - RNA, 19 nt, Homo sapiens
  misc_RNA (1)...(19): siRNA sense strand
gaaauugaucaacucuuca

SEQ ID NO: 147198 - RNA, 19 nt, Homo sapiens
  misc_RNA (1)...(19): siRNA sense strand
guugacauuuggaguauag

SEQ ID NO: 147199 - RNA, 19 nt, Homo sapiens
  misc_RNA (1)...(19): siRNA sense strand
cauggauucuucacuuguu

SEQ ID NO: 147200 - RNA, 19 nt, Homo sapiens
  misc_RNA (1)...(19): siRNA sense strand
aaaucagacuagaaaguga

SEQ ID NO: 147201 - RNA, 19 nt, Homo sapiens
  misc_RNA (1)...(19): siRNA sense strand
gaacuagcaacuaagaaac

SEQ ID NO: 147202 - RNA, 19 nt, Homo sapiens
  misc_RNA (1)...(19): siRNA sense strand
caaauauagucagucuuca

SEQ ID NO: 147203 - RNA, 19 nt, Homo sapiens
  misc_RNA (1)...(19): siRNA sense strand
cacugaaucauccauauuu

SEQ ID NO: 147204 - RNA, 19 nt, Homo sapiens
  misc_RNA (1)...(19): siRNA sense strand
ggcacugaaucauccauau

SEQ ID NO: 147205 - RNA, 19 nt, Homo sapiens
  misc_RNA (1)...(19): siRNA sense strand
gaaauacuuggauucuauc

SEQ ID NO: 147206 - RNA, 19 nt, Homo sapiens
  misc_RNA (1)...(19): siRNA sense strand
ccuagcaucccaugucaaa

SEQ ID NO: 147207 - RNA, 19 nt, Homo sapiens
  misc_RNA (1)...(19): siRNA sense strand
aaucuaugauccagccaaa

SEQ ID NO: 147208 - RNA, 19 nt, Homo sapiens
  misc_RNA (1)...(19): siRNA sense strand
gcuuggauuugcucucgaa

SEQ ID NO: 147209 - RNA, 19 nt, Homo sapiens
  misc_RNA (1)...(19): siRNA sense strand
gcugaacuagcaacuaaga

SEQ ID NO: 147210 - RNA, 19 nt, Homo sapiens
  misc_RNA (1)...(19): siRNA sense strand
aacuacaggucaaguggua

SEQ ID NO: 147211 - RNA, 19 nt, Homo sapiens
  misc_RNA (1)...(19): siRNA sense strand
uauagucagucuucaggau

SEQ ID NO: 147212 - RNA, 19 nt, Homo sapiens
  misc_RNA (1)...(19): siRNA sense strand
uggagaagguaccuaugga

SEQ ID NO: 147213 - RNA, 19 nt, Homo sapiens
  misc_RNA (1)...(19): siRNA sense strand
uacauggauucuucacuug

SEQ ID NO: 147214 - RNA, 19 nt, Homo sapiens
  misc_RNA (1)...(19): siRNA sense strand
caguugacauuuggaguau

SEQ ID NO: 147215 - RNA, 19 nt, Homo sapiens
  misc_RNA (1)...(19): siRNA sense strand
ggaguauaggcaccauauu

SEQ ID NO: 147216 - RNA, 19 nt, Homo sapiens
  misc_RNA (1)...(19): siRNA sense strand
ccauggggauucagaaauu

SEQ ID NO: 147217 - RNA, 19 nt, Homo sapiens
  misc_RNA (1)...(19): siRNA sense strand
ucaagugguagccaugaaa

SEQ ID NO: 147218 - RNA, 19 nt, Homo sapiens
  misc_RNA (1)...(19): siRNA sense strand
guaguaacacucugguaca

SEQ ID NO: 147219 - RNA, 19 nt, Homo sapiens
  misc_RNA (1)...(19): siRNA sense strand
ugaagaaauacuuggauuc

SEQ ID NO: 147220 - RNA, 19 nt, Homo sapiens
  misc_RNA (1)...(19): siRNA sense strand
gcaggauuccagguuauau

SEQ ID NO: 147221 - RNA, 19 nt, Homo sapiens
  misc_RNA (1)...(19): siRNA sense strand
guaccuauggaguugugua

SEQ ID NO: 147222 - RNA, 19 nt, Homo sapiens
  misc_RNA (1)...(19): siRNA sense strand
uggaaucuuuacaggacua

SEQ ID NO: 147223 - RNA, 19 nt, Homo sapiens
  misc_RNA (1)...(19): siRNA sense strand
caacuaagaaaccacuuuu

SEQ ID NO: 147224 - RNA, 19 nt, Homo sapiens
  misc_RNA (1)...(19): siRNA sense strand
acagaucuccagaaguauu

SEQ ID NO: 147225 - RNA, 19 nt, Homo sapiens
  misc_RNA (1)...(19): siRNA sense strand
aguauaggcaccauauuug

SEQ ID NO: 147226 - RNA, 19 nt, Homo sapiens
  misc_RNA (1)...(19): siRNA sense strand
gaaaccaggaagccuagca

SEQ ID NO: 147227 - RNA, 19 nt, Homo sapiens
  misc_RNA (1)...(19): siRNA sense strand
ggggucagcucguuacuca

SEQ ID NO: 147228 - RNA, 19 nt, Homo sapiens
  misc_RNA (1)...(19): siRNA sense strand
uugaucaacucuucaggau

SEQ ID NO: 147229 - RNA, 19 nt, Homo sapiens
  misc_RNA (1)...(19): siRNA sense strand
gucaagugguagccaugaa

SEQ ID NO: 147230 - RNA, 19 nt, Homo sapiens
  misc_RNA (1)...(19): siRNA sense strand
uuccauggaucugaagaaa

SEQ ID NO: 147231 - RNA, 19 nt, Homo sapiens
  misc_RNA (1)...(19): siRNA sense strand
agaagguaccuauggaguu

SEQ ID NO: 147232 - RNA, 19 nt, Homo sapiens
  misc_RNA (1)...(19): siRNA sense strand
ggaugaaaauggcuuggau

SEQ ID NO: 147233 - RNA, 19 nt, Homo sapiens
  misc_RNA (1)...(19): siRNA sense strand
gcacucccaauaaugaagu

SEQ ID NO: 147234 - RNA, 19 nt, Homo sapiens
  misc_RNA (1)...(19): siRNA sense strand
ggauucagaaauugaucaa

SEQ ID NO: 147235 - RNA, 19 nt, Homo sapiens
  misc_RNA (1)...(19): siRNA sense strand
auggauucuucacuuguua

SEQ ID NO: 147236 - RNA, 19 nt, Homo sapiens
  misc_RNA (1)...(19): siRNA sense strand
ggucagcucguuacucaac

SEQ ID NO: 147237 - RNA, 19 nt, Homo sapiens
  misc_RNA (1)...(19): siRNA sense strand
ggucaagugguagccauga

SEQ ID NO: 147238 - RNA, 19 nt, Homo sapiens
  misc_RNA (1)...(19): siRNA sense strand
gcaaaauggcacugaauca

SEQ ID NO: 147239 - RNA, 19 nt, Homo sapiens
  misc_RNA (1)...(19): siRNA sense strand
acacaaaacuacaggucaa

SEQ ID NO: 147240 - RNA, 19 nt, Homo sapiens
  misc_RNA (1)...(19): siRNA sense strand
gcaccauauuugcugaacu

SEQ ID NO: 147241 - RNA, 19 nt, Homo sapiens
  misc_RNA (1)...(19): siRNA sense strand
aaacgaauuucuggcaaaa

SEQ ID NO: 147242 - RNA, 19 nt, Homo sapiens
  misc_RNA (1)...(19): siRNA sense strand
cagaucuccagaaguauug

SEQ ID NO: 147243 - RNA, 19 nt, Homo sapiens
  misc_RNA (1)...(19): siRNA sense strand
aaugaaguguggccagaag

SEQ ID NO: 147244 - RNA, 19 nt, Homo sapiens
  misc_RNA (1)...(19): siRNA sense strand
uagucagucuucaggaugu

SEQ ID NO: 147245 - RNA, 19 nt, Homo sapiens
  misc_RNA (1)...(19): siRNA sense strand
gggcacucccaauaaugaa

SEQ ID NO: 147246 - RNA, 19 nt, Homo sapiens
  misc_RNA (1)...(19): siRNA sense strand
ugauccagccaaacgaauu

SEQ ID NO: 147247 - RNA, 19 nt, Homo sapiens
  misc_RNA (1)...(19): siRNA sense strand
ccuggucaguacauggauu

SEQ ID NO: 147248 - RNA, 19 nt, Homo sapiens
  misc_RNA (1)...(19): siRNA sense strand
gggauucagaaauugauca

SEQ ID NO: 147249 - RNA, 19 nt, Homo sapiens
  misc_RNA (1)...(19): siRNA sense strand
uucgggaaauuucucuauu

SEQ ID NO: 147250 - RNA, 19 nt, Homo sapiens
  misc_RNA (1)...(19): siRNA sense strand
uggaguauaggcaccauau

SEQ ID NO: 147251 - RNA, 19 nt, Homo sapiens
  misc_RNA (1)...(19): siRNA sense strand
ugguacagaucuccagaag

SEQ ID NO: 147252 - RNA, 19 nt, Homo sapiens
  misc_RNA (1)...(19): siRNA sense strand
guacagaucuccagaagua

SEQ ID NO: 147253 - RNA, 19 nt, Homo sapiens
  misc_RNA (1)...(19): siRNA sense strand
gaucaacucuucaggauuu

SEQ ID NO: 147254 - RNA, 19 nt, Homo sapiens
  misc_RNA (1)...(19): siRNA sense strand
ccauggaucugaagaaaua

SEQ ID NO: 147255 - RNA, 19 nt, Homo sapiens
  misc_RNA (1)...(19): siRNA sense strand
gguuauaucucaucuuuga

SEQ ID NO: 147256 - RNA, 19 nt, Homo sapiens
  misc_RNA (1)...(19): siRNA sense strand
guacauggauucuucacuu

SEQ ID NO: 147257 - RNA, 19 nt, Homo sapiens
  misc_RNA (1)...(19): siRNA sense strand
gaagguaccuauggaguug

SEQ ID NO: 147258 - RNA, 19 nt, Homo sapiens
  misc_RNA (1)...(19): siRNA sense strand
ggccagaaguggaaucuuu

SEQ ID NO: 147259 - RNA, 19 nt, Homo sapiens
  misc_RNA (1)...(19): siRNA sense strand
cagguuauaucucaucuuu

SEQ ID NO: 147260 - RNA, 19 nt, Homo sapiens
  misc_RNA (1)...(19): siRNA sense strand
gaguauaggcaccauauuu

SEQ ID NO: 147261 - RNA, 19 nt, Homo sapiens
  misc_RNA (1)...(19): siRNA sense strand
ccuauggaguuguguauaa

SEQ ID NO: 147262 - RNA, 19 nt, Homo sapiens
  misc_RNA (1)...(19): siRNA sense strand
ucgggaaauuucucuauua

SEQ ID NO: 147263 - RNA, 19 nt, Homo sapiens
  misc_RNA (1)...(19): siRNA sense strand
guauaaggguagacacaaa

SEQ ID NO: 147264 - RNA, 19 nt, Homo sapiens
  misc_RNA (1)...(19): siRNA sense strand
caaacgaauuucuggcaaa

SEQ ID NO: 147265 - RNA, 19 nt, Homo sapiens
  misc_RNA (1)...(19): siRNA sense strand
cgggaaauuucucuauuaa

SEQ ID NO: 147266 - RNA, 19 nt, Homo sapiens
  misc_RNA (1)...(19): siRNA sense strand
caccauauuugcugaacua

SEQ ID NO: 147267 - RNA, 19 nt, Homo sapiens
  misc_RNA (1)...(19): siRNA sense strand
agaaauugaucaacucuuc

SEQ ID NO: 147268 - RNA, 19 nt, Homo sapiens
  misc_RNA (1)...(19): siRNA sense strand
gcacugaaucauccauauu

SEQ ID NO: 147269 - RNA, 19 nt, Homo sapiens
  misc_RNA (1)...(19): siRNA sense strand
ccaaauauagucagucuuc

SEQ ID NO: 147270 - RNA, 19 nt, Homo sapiens
  misc_RNA (1)...(19): siRNA sense strand
gcaacuaagaaaccacuuu

SEQ ID NO: 147271 - RNA, 19 nt, Homo sapiens
  misc_RNA (1)...(19): siRNA sense strand
uaugcaggauuccagguua

SEQ ID NO: 147272 - RNA, 19 nt, Homo sapiens
  misc_RNA (1)...(19): siRNA sense strand
gauuccagguuauaucuca

SEQ ID NO: 147273 - RNA, 19 nt, Homo sapiens
  misc_RNA (1)...(19): siRNA sense strand
ugaacuagcaacuaagaaa

SEQ ID NO: 147274 - RNA, 19 nt, Homo sapiens
  misc_RNA (1)...(19): siRNA sense strand
gccagaaguggaaucuuua

SEQ ID NO: 147275 - RNA, 19 nt, Homo sapiens
  misc_RNA (1)...(19): siRNA sense strand
gauccagccaaacgaauuu

SEQ ID NO: 147276 - RNA, 19 nt, Homo sapiens
  misc_RNA (1)...(19): siRNA sense strand
guacugcaauucgggaaau

SEQ ID NO: 147277 - RNA, 19 nt, Homo sapiens
  misc_RNA (1)...(19): siRNA sense strand
ccaguugacauuuggagua

SEQ ID NO: 147278 - RNA, 19 nt, Homo sapiens
  misc_RNA (1)...(19): siRNA sense strand
gucaguacauggauucuuc

SEQ ID NO: 147279 - RNA, 19 nt, Homo sapiens
  misc_RNA (1)...(19): siRNA sense strand
cugaagaaauacuuggauu

SEQ ID NO: 147280 - RNA, 19 nt, Homo sapiens
  misc_RNA (1)...(19): siRNA sense strand
acuagaaagugaagaggaa

SEQ ID NO: 147281 - RNA, 19 nt, Homo sapiens
  misc_RNA (1)...(19): siRNA sense strand
gaaauugaucaacucuuca

SEQ ID NO: 147282 - RNA, 19 nt, Homo sapiens
  misc_RNA (1)...(19): siRNA sense strand
guugacauuuggaguauag

SEQ ID NO: 147283 - RNA, 19 nt, Homo sapiens
  misc_RNA (1)...(19): siRNA sense strand
cauggauucuucacuuguu

SEQ ID NO: 147284 - RNA, 19 nt, Homo sapiens
  misc_RNA (1)...(19): siRNA sense strand
aaaucagacuagaaaguga

SEQ ID NO: 147285 - RNA, 19 nt, Homo sapiens
  misc_RNA (1)...(19): siRNA sense strand
gaacuagcaacuaagaaac

SEQ ID NO: 147286 - RNA, 19 nt, Homo sapiens
  misc_RNA (1)...(19): siRNA sense strand
caaauauagucagucuuca

SEQ ID NO: 147287 - RNA, 19 nt, Homo sapiens
  misc_RNA (1)...(19): siRNA sense strand
cacugaaucauccauauuu

SEQ ID NO: 147288 - RNA, 19 nt, Homo sapiens
  misc_RNA (1)...(19): siRNA sense strand
ggcacugaaucauccauau

SEQ ID NO: 147289 - RNA, 19 nt, Homo sapiens
  misc_RNA (1)...(19): siRNA sense strand
gaaauacuuggauucuauc

SEQ ID NO: 147290 - RNA, 19 nt, Homo sapiens
  misc_RNA (1)...(19): siRNA sense strand
ccuagcaucccaugucaaa

SEQ ID NO: 147291 - RNA, 19 nt, Homo sapiens
  misc_RNA (1)...(19): siRNA sense strand
aaucuaugauccagccaaa

SEQ ID NO: 147292 - RNA, 19 nt, Homo sapiens
  misc_RNA (1)...(19): siRNA sense strand
gcuuggauuugcucucgaa

SEQ ID NO: 147293 - RNA, 19 nt, Homo sapiens
  misc_RNA (1)...(19): siRNA sense strand
gcugaacuagcaacuaaga

SEQ ID NO: 147294 - RNA, 19 nt, Homo sapiens
  misc_RNA (1)...(19): siRNA sense strand
aacuacaggucaaguggua

SEQ ID NO: 147295 - RNA, 19 nt, Homo sapiens
  misc_RNA (1)...(19): siRNA sense strand
uauagucagucuucaggau

SEQ ID NO: 147296 - RNA, 19 nt, Homo sapiens
  misc_RNA (1)...(19): siRNA sense strand
uggagaagguaccuaugga

SEQ ID NO: 147297 - RNA, 19 nt, Homo sapiens
  misc_RNA (1)...(19): siRNA sense strand
uacauggauucuucacuug

SEQ ID NO: 147298 - RNA, 19 nt, Homo sapiens
  misc_RNA (1)...(19): siRNA sense strand
caguugacauuuggaguau

SEQ ID NO: 147299 - RNA, 19 nt, Homo sapiens
  misc_RNA (1)...(19): siRNA sense strand
ggaguauaggcaccauauu

SEQ ID NO: 147300 - RNA, 19 nt, Homo sapiens
  misc_RNA (1)...(19): siRNA sense strand
ccauggggauucagaaauu

SEQ ID NO: 147301 - RNA, 19 nt, Homo sapiens
  misc_RNA (1)...(19): siRNA sense strand
ucaagugguagccaugaaa

SEQ ID NO: 147302 - RNA, 19 nt, Homo sapiens
  misc_RNA (1)...(19): siRNA sense strand
guaguaacacucugguaca

SEQ ID NO: 147303 - RNA, 19 nt, Homo sapiens
  misc_RNA (1)...(19): siRNA sense strand
ugaagaaauacuuggauuc

SEQ ID NO: 147304 - RNA, 19 nt, Homo sapiens
  misc_RNA (1)...(19): siRNA sense strand
gcaggauuccagguuauau

SEQ ID NO: 147305 - RNA, 19 nt, Homo sapiens
  misc_RNA (1)...(19): siRNA sense strand
guaccuauggaguugugua

SEQ ID NO: 147306 - RNA, 19 nt, Homo sapiens
  misc_RNA (1)...(19): siRNA sense strand
uggaaucuuuacaggacua

SEQ ID NO: 147307 - RNA, 19 nt, Homo sapiens
  misc_RNA (1)...(19): siRNA sense strand
caacuaagaaaccacuuuu

SEQ ID NO: 147308 - RNA, 19 nt, Homo sapiens
  misc_RNA (1)...(19): siRNA sense strand
acagaucuccagaaguauu

SEQ ID NO: 147309 - RNA, 19 nt, Homo sapiens
  misc_RNA (1)...(19): siRNA sense strand
aguauaggcaccauauuug

SEQ ID NO: 147310 - RNA, 19 nt, Homo sapiens
  misc_RNA (1)...(19): siRNA sense strand
gaaaccaggaagccuagca

SEQ ID NO: 147311 - RNA, 19 nt, Homo sapiens
  misc_RNA (1)...(19): siRNA sense strand
ggggucagcucguuacuca

SEQ ID NO: 147312 - RNA, 19 nt, Homo sapiens
  misc_RNA (1)...(19): siRNA sense strand
uugaucaacucuucaggau

SEQ ID NO: 147313 - RNA, 19 nt, Homo sapiens
  misc_RNA (1)...(19): siRNA sense strand
gucaagugguagccaugaa

SEQ ID NO: 147314 - RNA, 19 nt, Homo sapiens
  misc_RNA (1)...(19): siRNA sense strand
uuccauggaucugaagaaa

SEQ ID NO: 147315 - RNA, 19 nt, Homo sapiens
  misc_RNA (1)...(19): siRNA sense strand
agaagguaccuauggaguu

SEQ ID NO: 147316 - RNA, 19 nt, Homo sapiens
  misc_RNA (1)...(19): siRNA sense strand
ggaugaaaauggcuuggau

SEQ ID NO: 147317 - RNA, 19 nt, Homo sapiens
  misc_RNA (1)...(19): siRNA sense strand
gcacucccaauaaugaagu

SEQ ID NO: 147318 - RNA, 19 nt, Homo sapiens
  misc_RNA (1)...(19): siRNA sense strand
ggauucagaaauugaucaa

SEQ ID NO: 147319 - RNA, 19 nt, Homo sapiens
  misc_RNA (1)...(19): siRNA sense strand
auggauucuucacuuguua

SEQ ID NO: 147320 - RNA, 19 nt, Homo sapiens
  misc_RNA (1)...(19): siRNA sense strand
ggucagcucguuacucaac

SEQ ID NO: 147321 - RNA, 19 nt, Homo sapiens
  misc_RNA (1)...(19): siRNA sense strand
ggucaagugguagccauga

SEQ ID NO: 147322 - RNA, 19 nt, Homo sapiens
  misc_RNA (1)...(19): siRNA sense strand
gcaaaauggcacugaauca

SEQ ID NO: 147323 - RNA, 19 nt, Homo sapiens
  misc_RNA (1)...(19): siRNA sense strand
acacaaaacuacaggucaa

SEQ ID NO: 147324 - RNA, 19 nt, Homo sapiens
  misc_RNA (1)...(19): siRNA sense strand
gcaccauauuugcugaacu

SEQ ID NO: 147325 - RNA, 19 nt, Homo sapiens
  misc_RNA (1)...(19): siRNA sense strand
aaacgaauuucuggcaaaa

SEQ ID NO: 147326 - RNA, 19 nt, Homo sapiens
  misc_RNA (1)...(19): siRNA sense strand
cagaucuccagaaguauug

SEQ ID NO: 147327 - RNA, 19 nt, Homo sapiens
  misc_RNA (1)...(19): siRNA sense strand
aaugaaguguggccagaag

SEQ ID NO: 147328 - RNA, 19 nt, Homo sapiens
  misc_RNA (1)...(19): siRNA sense strand
uagucagucuucaggaugu

SEQ ID NO: 147329 - RNA, 19 nt, Homo sapiens
  misc_RNA (1)...(19): siRNA sense strand
gggcacucccaauaaugaa

SEQ ID NO: 147330 - RNA, 19 nt, Homo sapiens
  misc_RNA (1)...(19): siRNA sense strand
ugauccagccaaacgaauu

SEQ ID NO: 147331 - RNA, 19 nt, Homo sapiens
  misc_RNA (1)...(19): siRNA sense strand
ccuggucaguacauggauu

SEQ ID NO: 147332 - RNA, 19 nt, Homo sapiens
  misc_RNA (1)...(19): siRNA sense strand
gggauucagaaauugauca

SEQ ID NO: 147333 - RNA, 19 nt, Homo sapiens
  misc_RNA (1)...(19): siRNA sense strand
uucgggaaauuucucuauu

SEQ ID NO: 147334 - RNA, 19 nt, Homo sapiens
  misc_RNA (1)...(19): siRNA sense strand
uggaguauaggcaccauau

SEQ ID NO: 147335 - RNA, 19 nt, Homo sapiens
  misc_RNA (1)...(19): siRNA sense strand
ugguacagaucuccagaag

SEQ ID NO: 147336 - RNA, 19 nt, Homo sapiens
  misc_RNA (1)...(19): siRNA sense strand
gagagaaucugaagaauga

SEQ ID NO: 147337 - RNA, 19 nt, Homo sapiens
  misc_RNA (1)...(19): siRNA sense strand
gaaauuauggcaucuguuu

SEQ ID NO: 147338 - RNA, 19 nt, Homo sapiens
  misc_RNA (1)...(19): siRNA sense strand
ggaaacaucaggauuuaaa

SEQ ID NO: 147339 - RNA, 19 nt, Homo sapiens
  misc_RNA (1)...(19): siRNA sense strand
aagaagaccugaagaaguu

SEQ ID NO: 147340 - RNA, 19 nt, Homo sapiens
  misc_RNA (1)...(19): siRNA sense strand
auacaucucuccagaaauu

SEQ ID NO: 147341 - RNA, 19 nt, Homo sapiens
  misc_RNA (1)...(19): siRNA sense strand
aaauacaucucuccagaaa

SEQ ID NO: 147342 - RNA, 19 nt, Homo sapiens
  misc_RNA (1)...(19): siRNA sense strand
aaaugaagccuuugaguuu

SEQ ID NO: 147343 - RNA, 19 nt, Homo sapiens
  misc_RNA (1)...(19): siRNA sense strand
ugaaagagauagcagugaa

SEQ ID NO: 147344 - RNA, 19 nt, Homo sapiens
  misc_RNA (1)...(19): siRNA sense strand
acaaggaguucuuuaugaa

SEQ ID NO: 147345 - RNA, 19 nt, Homo sapiens
  misc_RNA (1)...(19): siRNA sense strand
gcagugaaccagggaauuu

SEQ ID NO: 147346 - RNA, 19 nt, Homo sapiens
  misc_RNA (1)...(19): siRNA sense strand
uacaaggaguucuuuauga

SEQ ID NO: 147347 - RNA, 19 nt, Homo sapiens
  misc_RNA (1)...(19): siRNA sense strand
gcacauggaagaagagguu

SEQ ID NO: 147348 - RNA, 19 nt, Homo sapiens
  misc_RNA (1)...(19): siRNA sense strand
aagaagagguugaagacuu

SEQ ID NO: 147349 - RNA, 19 nt, Homo sapiens
  misc_RNA (1)...(19): siRNA sense strand
gagaucgccuggguaauga

SEQ ID NO: 147350 - RNA, 19 nt, Homo sapiens
  misc_RNA (1)...(19): siRNA sense strand
acaguaaucugcagagaau

SEQ ID NO: 147351 - RNA, 19 nt, Homo sapiens
  misc_RNA (1)...(19): siRNA sense strand
caaccucauuaaagaguuu

SEQ ID NO: 147352 - RNA, 19 nt, Homo sapiens
  misc_RNA (1)...(19): siRNA sense strand
aaugaagccuuugaguuua

SEQ ID NO: 147353 - RNA, 19 nt, Homo sapiens
  misc_RNA (1)...(19): siRNA sense strand
ccacgaggacuuuaaagaa

SEQ ID NO: 147354 - RNA, 19 nt, Homo sapiens
  misc_RNA (1)...(19): siRNA sense strand
ugggaaacaucaggauuua

SEQ ID NO: 147355 - RNA, 19 nt, Homo sapiens
  misc_RNA (1)...(19): siRNA sense strand
caugagaacuacaaaccuu

SEQ ID NO: 147356 - RNA, 19 nt, Homo sapiens
  misc_RNA (1)...(19): siRNA sense strand
ggagagaaucugaagaaug

SEQ ID NO: 147357 - RNA, 19 nt, Homo sapiens
  misc_RNA (1)...(19): siRNA sense strand
ccacuacccugagcuguau

SEQ ID NO: 147358 - RNA, 19 nt, Homo sapiens
  misc_RNA (1)...(19): siRNA sense strand
gauacaaggaguucuuuau

SEQ ID NO: 147359 - RNA, 19 nt, Homo sapiens
  misc_RNA (1)...(19): siRNA sense strand
ucagguuucugucuagauu

SEQ ID NO: 147360 - RNA, 19 nt, Homo sapiens
  misc_RNA (1)...(19): siRNA sense strand
gggcagugauuaugagcaa

SEQ ID NO: 147361 - RNA, 19 nt, Homo sapiens
  misc_RNA (1)...(19): siRNA sense strand
gaacuacaaaccuugacaa

SEQ ID NO: 147362 - RNA, 19 nt, Homo sapiens
  misc_RNA (1)...(19): siRNA sense strand
gcaagcgugucauuguugu

SEQ ID NO: 147363 - RNA, 19 nt, Homo sapiens
  misc_RNA (1)...(19): siRNA sense strand
caacaguaaucugcagaga

SEQ ID NO: 147364 - RNA, 19 nt, Homo sapiens
  misc_RNA (1)...(19): siRNA sense strand
cuccaaggguuaucucuuu

SEQ ID NO: 147365 - RNA, 19 nt, Homo sapiens
  misc_RNA (1)...(19): siRNA sense strand
cugauucucuugaccauga

SEQ ID NO: 147366 - RNA, 19 nt, Homo sapiens
  misc_RNA (1)...(19): siRNA sense strand
gcaccacgaggacuuuaaa

SEQ ID NO: 147367 - RNA, 19 nt, Homo sapiens
  misc_RNA (1)...(19): siRNA sense strand
ccaaaggaaccauugagaa

SEQ ID NO: 147368 - RNA, 19 nt, Homo sapiens
  misc_RNA (1)...(19): siRNA sense strand
gaggagccauucugauucu

SEQ ID NO: 147369 - RNA, 19 nt, Homo sapiens
  misc_RNA (1)...(19): siRNA sense strand
gucgauacccauaugaaua

SEQ ID NO: 147370 - RNA, 19 nt, Homo sapiens
  misc_RNA (1)...(19): siRNA sense strand
ggauacaaggaguucuuua

SEQ ID NO: 147371 - RNA, 19 nt, Homo sapiens
  misc_RNA (1)...(19): siRNA sense strand
gaacuugcacauggaagaa

SEQ ID NO: 147372 - RNA, 19 nt, Homo sapiens
  misc_RNA (1)...(19): siRNA sense strand
ggaagaagagguugaagac

SEQ ID NO: 147373 - RNA, 19 nt, Homo sapiens
  misc_RNA (1)...(19): siRNA sense strand
gucaacagauucagguuuc

SEQ ID NO: 147374 - RNA, 19 nt, Homo sapiens
  misc_RNA (1)...(19): siRNA sense strand
ccuaugagaagaauacauu

SEQ ID NO: 147375 - RNA, 19 nt, Homo sapiens
  misc_RNA (1)...(19): siRNA sense strand
uuaaagaagaccugaagaa

SEQ ID NO: 147376 - RNA, 19 nt, Homo sapiens
  misc_RNA (1)...(19): siRNA sense strand
caaggaguucuuuaugaaa

SEQ ID NO: 147377 - RNA, 19 nt, Homo sapiens
  misc_RNA (1)...(19): siRNA sense strand
uugccaaccucauuaaaga

SEQ ID NO: 147378 - RNA, 19 nt, Homo sapiens
  misc_RNA (1)...(19): siRNA sense strand
caaguuugccaaccucauu

SEQ ID NO: 147379 - RNA, 19 nt, Homo sapiens
  misc_RNA (1)...(19): siRNA sense strand
gaagaggagccauucugau

SEQ ID NO: 147380 - RNA, 19 nt, Homo sapiens
  misc_RNA (1)...(19): siRNA sense strand
gauguacagucgucugaag

SEQ ID NO: 147381 - RNA, 19 nt, Homo sapiens
  misc_RNA (1)...(19): siRNA sense strand
caucaagggugcagugaac

SEQ ID NO: 147382 - RNA, 19 nt, Homo sapiens
  misc_RNA (1)...(19): siRNA sense strand
ucauacaguugcugggaaa

SEQ ID NO: 147383 - RNA, 19 nt, Homo sapiens
  misc_RNA (1)...(19): siRNA sense strand
gguuaucucuuucauacag

SEQ ID NO: 147384 - RNA, 19 nt, Homo sapiens
  misc_RNA (1)...(19): siRNA sense strand
aagaggagccauucugauu

SEQ ID NO: 147385 - RNA, 19 nt, Homo sapiens
  misc_RNA (1)...(19): siRNA sense strand
caaaggaaccauugagaac

SEQ ID NO: 147386 - RNA, 19 nt, Homo sapiens
  misc_RNA (1)...(19): siRNA sense strand
gaagaacaacaguaaucug

SEQ ID NO: 147387 - RNA, 19 nt, Homo sapiens
  misc_RNA (1)...(19): siRNA sense strand
agagagaucgccuggguaa

SEQ ID NO: 147388 - RNA, 19 nt, Homo sapiens
  misc_RNA (1)...(19): siRNA sense strand
gcgugucauuguuguguuu

SEQ ID NO: 147389 - RNA, 19 nt, Homo sapiens
  misc_RNA (1)...(19): siRNA sense strand
caaaagcuguugggaugua

SEQ ID NO: 147390 - RNA, 19 nt, Homo sapiens
  misc_RNA (1)...(19): siRNA sense strand
ggacagcuccucucgucau

SEQ ID NO: 147391 - RNA, 19 nt, Homo sapiens
  misc_RNA (1)...(19): siRNA sense strand
cacgaggacuuuaaagaag

SEQ ID NO: 147392 - RNA, 19 nt, Homo sapiens
  misc_RNA (1)...(19): siRNA sense strand
gagauguacagucgucuga

SEQ ID NO: 147393 - RNA, 19 nt, Homo sapiens
  misc_RNA (1)...(19): siRNA sense strand
ugaagaggagccauucuga

SEQ ID NO: 147394 - RNA, 19 nt, Homo sapiens
  misc_RNA (1)...(19): siRNA sense strand
ugaagaaguuccgcaccaa

SEQ ID NO: 147395 - RNA, 19 nt, Homo sapiens
  misc_RNA (1)...(19): siRNA sense strand
aaagaagaccugaagaagu

SEQ ID NO: 147396 - RNA, 19 nt, Homo sapiens
  misc_RNA (1)...(19): siRNA sense strand
uaaagaagaccugaagaag

SEQ ID NO: 147397 - RNA, 19 nt, Homo sapiens
  misc_RNA (1)...(19): siRNA sense strand
gaggugaagaacaacagua

SEQ ID NO: 147398 - RNA, 19 nt, Homo sapiens
  misc_RNA (1)...(19): siRNA sense strand
gagccauucugauucucuu

SEQ ID NO: 147399 - RNA, 19 nt, Homo sapiens
  misc_RNA (1)...(19): siRNA sense strand
gugaagaacaacaguaauc

SEQ ID NO: 147400 - RNA, 19 nt, Homo sapiens
  misc_RNA (1)...(19): siRNA sense strand
uggcaagcgugucauuguu

SEQ ID NO: 147401 - RNA, 19 nt, Homo sapiens
  misc_RNA (1)...(19): siRNA sense strand
cccaaagagucaacuaauc

SEQ ID NO: 147402 - RNA, 19 nt, Homo sapiens
  misc_RNA (1)...(19): siRNA sense strand
agauucagguuucugucua

SEQ ID NO: 147403 - RNA, 19 nt, Homo sapiens
  misc_RNA (1)...(19): siRNA sense strand
cacuggaggugaagaacaa

SEQ ID NO: 147404 - RNA, 19 nt, Homo sapiens
  misc_RNA (1)...(19): siRNA sense strand
gaaaauccuaugagaagaa

SEQ ID NO: 147405 - RNA, 19 nt, Homo sapiens
  misc_RNA (1)...(19): siRNA sense strand
guacaaagaggaggaagag

SEQ ID NO: 147406 - RNA, 19 nt, Homo sapiens
  misc_RNA (1)...(19): siRNA sense strand
gcccagcucggaaugcuuu

SEQ ID NO: 147407 - RNA, 19 nt, Homo sapiens
  misc_RNA (1)...(19): siRNA sense strand
ggauguaguccagcucuga

SEQ ID NO: 147408 - RNA, 19 nt, Homo sapiens
  misc_RNA (1)...(19): siRNA sense strand
gaagaagcccauuguaccu

SEQ ID NO: 147409 - RNA, 19 nt, Homo sapiens
  misc_RNA (1)...(19): siRNA sense strand
cagccacuuugucugauga

SEQ ID NO: 147410 - RNA, 19 nt, Homo sapiens
  misc_RNA (1)...(19): siRNA sense strand
gaguuuaagaagccaguaa

SEQ ID NO: 147411 - RNA, 19 nt, Homo sapiens
  misc_RNA (1)...(19): siRNA sense strand
augaagccuuugaguuuaa

SEQ ID NO: 147412 - RNA, 19 nt, Homo sapiens
  misc_RNA (1)...(19): siRNA sense strand
ccauuggacaguaaagaaa

SEQ ID NO: 147413 - RNA, 19 nt, Homo sapiens
  misc_RNA (1)...(19): siRNA sense strand
aggguuaucucuuucauac

SEQ ID NO: 147414 - RNA, 19 nt, Homo sapiens
  misc_RNA (1)...(19): siRNA sense strand
ggaaccauugagaacauuu

SEQ ID NO: 147415 - RNA, 19 nt, Homo sapiens
  misc_RNA (1)...(19): siRNA sense strand
ccagagaaggcccaugaga

SEQ ID NO: 147416 - RNA, 19 nt, Homo sapiens
  misc_RNA (1)...(19): siRNA sense strand
ccaccuggaaguacaaaga

SEQ ID NO: 147417 - RNA, 19 nt, Homo sapiens
  misc_RNA (1)...(19): siRNA sense strand
caaccgaugcaagcuguuu

SEQ ID NO: 147418 - RNA, 19 nt, Homo sapiens
  misc_RNA (1)...(19): siRNA sense strand
gacagcuccucucgucaug

SEQ ID NO: 147419 - RNA, 19 nt, Homo sapiens
  misc_RNA (1)...(19): siRNA sense strand
auacauucccuaccucaaa

SEQ ID NO: 147420 - RNA, 19 nt, Homo sapiens
  misc_RNA (1)...(19): siRNA sense strand
gauucagguuucugucuag

SEQ ID NO: 147421 - RNA, 19 nt, Homo sapiens
  misc_RNA (1)...(19): siRNA sense strand
acgaggacuuuaaagaaga

SEQ ID NO: 147422 - RNA, 19 nt, Homo sapiens
  misc_RNA (1)...(19): siRNA sense strand
agagaucgccuggguaaug

SEQ ID NO: 147423 - RNA, 19 nt, Homo sapiens
  misc_RNA (1)...(19): siRNA sense strand
gaaguacaaagaggaggaa

SEQ ID NO: 147424 - RNA, 19 nt, Homo sapiens
  misc_RNA (1)...(19): siRNA sense strand
gccauuggacaguaaagaa

SEQ ID NO: 147425 - RNA, 19 nt, Homo sapiens
  misc_RNA (1)...(19): siRNA sense strand
ucuugaccaugacaucuuu

SEQ ID NO: 147426 - RNA, 19 nt, Homo sapiens
  misc_RNA (1)...(19): siRNA sense strand
guacagucgucugaagaag

SEQ ID NO: 147427 - RNA, 19 nt, Homo sapiens
  misc_RNA (1)...(19): siRNA sense strand
gcaagagggagauguacag

SEQ ID NO: 147428 - RNA, 19 nt, Homo sapiens
  misc_RNA (1)...(19): siRNA sense strand
caaggguuaucucuuucau

SEQ ID NO: 147429 - RNA, 19 nt, Homo sapiens
  misc_RNA (1)...(19): siRNA sense strand
gaaugcuuuccucaaauga

SEQ ID NO: 147430 - RNA, 19 nt, Homo sapiens
  misc_RNA (1)...(19): siRNA sense strand
gacugucgauacccauaug

SEQ ID NO: 147431 - RNA, 19 nt, Homo sapiens
  misc_RNA (1)...(19): siRNA sense strand
ugacaucuuucagcucauc

SEQ ID NO: 147432 - RNA, 19 nt, Homo sapiens
  misc_RNA (1)...(19): siRNA sense strand
auacaaggaguucuuuaug

SEQ ID NO: 147433 - RNA, 19 nt, Homo sapiens
  misc_RNA (1)...(19): siRNA sense strand
ccaaccucauuaaagaguu

SEQ ID NO: 147434 - RNA, 19 nt, Homo sapiens
  misc_RNA (1)...(19): siRNA sense strand
gaaggcccaugagacucuu

SEQ ID NO: 147435 - RNA, 19 nt, Homo sapiens
  misc_RNA (1)...(19): siRNA sense strand
cgagggaggccacaucaag

SEQ ID NO: 147436 - RNA, 19 nt, Homo sapiens
  misc_RNA (1)...(19): siRNA sense strand
gagcagaaguggccuauau

SEQ ID NO: 147437 - RNA, 19 nt, Homo sapiens
  misc_RNA (1)...(19): siRNA sense strand
cagaagagauuucagauga

SEQ ID NO: 147438 - RNA, 19 nt, Homo sapiens
  misc_RNA (1)...(19): siRNA sense strand
ccagggagccuuaaacuua

SEQ ID NO: 147439 - RNA, 19 nt, Homo sapiens
  misc_RNA (1)...(19): siRNA sense strand
gaaccaguauccugcauug

SEQ ID NO: 147440 - RNA, 19 nt, Homo sapiens
  misc_RNA (1)...(19): siRNA sense strand
gaaacuugguggacaguga

SEQ ID NO: 147441 - RNA, 19 nt, Homo sapiens
  misc_RNA (1)...(19): siRNA sense strand
aggaagggcuuauguuuaa

SEQ ID NO: 147442 - RNA, 19 nt, Homo sapiens
  misc_RNA (1)...(19): siRNA sense strand
gcaaauuucuuggugauuc

SEQ ID NO: 147443 - RNA, 19 nt, Homo sapiens
  misc_RNA (1)...(19): siRNA sense strand
ccagagcuauauauccuua

SEQ ID NO: 147444 - RNA, 19 nt, Homo sapiens
  misc_RNA (1)...(19): siRNA sense strand
ggagagagacacuuccuuu

SEQ ID NO: 147445 - RNA, 19 nt, Homo sapiens
  misc_RNA (1)...(19): siRNA sense strand
gaacuccagugggcaaauu

SEQ ID NO: 147446 - RNA, 19 nt, Homo sapiens
  misc_RNA (1)...(19): siRNA sense strand
gaacucuucucauccacaa

SEQ ID NO: 147447 - RNA, 19 nt, Homo sapiens
  misc_RNA (1)...(19): siRNA sense strand
gagagagacacuuccuuua

SEQ ID NO: 147448 - RNA, 19 nt, Homo sapiens
  misc_RNA (1)...(19): siRNA sense strand
aggaagaacuguuuaacuu

SEQ ID NO: 147449 - RNA, 19 nt, Homo sapiens
  misc_RNA (1)...(19): siRNA sense strand
gagaagaccaggcagaaga

SEQ ID NO: 147450 - RNA, 19 nt, Homo sapiens
  misc_RNA (1)...(19): siRNA sense strand
gggcuuauguuuaaagaag

SEQ ID NO: 147451 - RNA, 19 nt, Homo sapiens
  misc_RNA (1)...(19): siRNA sense strand
cuacggaacucuucucauc

SEQ ID NO: 147452 - RNA, 19 nt, Homo sapiens
  misc_RNA (1)...(19): siRNA sense strand
acaggucucugaaccagua

SEQ ID NO: 147453 - RNA, 19 nt, Homo sapiens
  misc_RNA (1)...(19): siRNA sense strand
caggaagggcuuauguuua

SEQ ID NO: 147454 - RNA, 19 nt, Homo sapiens
  misc_RNA (1)...(19): siRNA sense strand
gguggacagugaaaugaaa

SEQ ID NO: 147455 - RNA, 19 nt, Homo sapiens
  misc_RNA (1)...(19): siRNA sense strand
gauugucgcuauccauaug

SEQ ID NO: 147456 - RNA, 19 nt, Homo sapiens
  misc_RNA (1)...(19): siRNA sense strand
gacaacacaauaccagaua

SEQ ID NO: 147457 - RNA, 19 nt, Homo sapiens
  misc_RNA (1)...(19): siRNA sense strand
accaagaucugaaguaugu

SEQ ID NO: 147458 - RNA, 19 nt, Homo sapiens
  misc_RNA (1)...(19): siRNA sense strand
ccugaaagaucaagaagca

SEQ ID NO: 147459 - RNA, 19 nt, Homo sapiens
  misc_RNA (1)...(19): siRNA sense strand
cacaauaccagauaaaguu

SEQ ID NO: 147460 - RNA, 19 nt, Homo sapiens
  misc_RNA (1)...(19): siRNA sense strand
ugaaagaucaagaagcaaa

SEQ ID NO: 147461 - RNA, 19 nt, Homo sapiens
  misc_RNA (1)...(19): siRNA sense strand
gaaguuccagggucugauu

SEQ ID NO: 147462 - RNA, 19 nt, Homo sapiens
  misc_RNA (1)...(19): siRNA sense strand
ggaagggcuuauguuuaaa

SEQ ID NO: 147463 - RNA, 19 nt, Homo sapiens
  misc_RNA (1)...(19): siRNA sense strand
caacacaauaccagauaaa

SEQ ID NO: 147464 - RNA, 19 nt, Homo sapiens
  misc_RNA (1)...(19): siRNA sense strand
ucaggaagggcuuauguuu

SEQ ID NO: 147465 - RNA, 19 nt, Homo sapiens
  misc_RNA (1)...(19): siRNA sense strand
ggaaacaccaagaucugaa

SEQ ID NO: 147466 - RNA, 19 nt, Homo sapiens
  misc_RNA (1)...(19): siRNA sense strand
gggcaaauuucuuggugau

SEQ ID NO: 147467 - RNA, 19 nt, Homo sapiens
  misc_RNA (1)...(19): siRNA sense strand
gccuuaaacuuauauaguc

SEQ ID NO: 147468 - RNA, 19 nt, Homo sapiens
  misc_RNA (1)...(19): siRNA sense strand
cagggagccuuaaacuuau

SEQ ID NO: 147469 - RNA, 19 nt, Homo sapiens
  misc_RNA (1)...(19): siRNA sense strand
gcaaaggugagcagaagug

SEQ ID NO: 147470 - RNA, 19 nt, Homo sapiens
  misc_RNA (1)...(19): siRNA sense strand
gaacaggccaagacugaag

SEQ ID NO: 147471 - RNA, 19 nt, Homo sapiens
  misc_RNA (1)...(19): siRNA sense strand
gagaauaaucaucguguuc

SEQ ID NO: 147472 - RNA, 19 nt, Homo sapiens
  misc_RNA (1)...(19): siRNA sense strand
cuguuuaacuucuuucuga

SEQ ID NO: 147473 - RNA, 19 nt, Homo sapiens
  misc_RNA (1)...(19): siRNA sense strand
acaccaagaucugaaguau

SEQ ID NO: 147474 - RNA, 19 nt, Homo sapiens
  misc_RNA (1)...(19): siRNA sense strand
gcagaagagauuucagaug

SEQ ID NO: 147475 - RNA, 19 nt, Homo sapiens
  misc_RNA (1)...(19): siRNA sense strand
acaacacaauaccagauaa

SEQ ID NO: 147476 - RNA, 19 nt, Homo sapiens
  misc_RNA (1)...(19): siRNA sense strand
cagaugaauuaauggaguu

SEQ ID NO: 147477 - RNA, 19 nt, Homo sapiens
  misc_RNA (1)...(19): siRNA sense strand
gaagcaaaggugagcagaa

SEQ ID NO: 147478 - RNA, 19 nt, Homo sapiens
  misc_RNA (1)...(19): siRNA sense strand
ggacaacacaauaccagau

SEQ ID NO: 147479 - RNA, 19 nt, Homo sapiens
  misc_RNA (1)...(19): siRNA sense strand
ggacagugaaaugaaauau

SEQ ID NO: 147480 - RNA, 19 nt, Homo sapiens
  misc_RNA (1)...(19): siRNA sense strand
agaaacaguggcugccuua

SEQ ID NO: 147481 - RNA, 19 nt, Homo sapiens
  misc_RNA (1)...(19): siRNA sense strand
gaauaaucaucguguucca

SEQ ID NO: 147482 - RNA, 19 nt, Homo sapiens
  misc_RNA (1)...(19): siRNA sense strand
guacuacccagagcuauau

SEQ ID NO: 147483 - RNA, 19 nt, Homo sapiens
  misc_RNA (1)...(19): siRNA sense strand
gagagacacuuccuuuacc

SEQ ID NO: 147484 - RNA, 19 nt, Homo sapiens
  misc_RNA (1)...(19): siRNA sense strand
caaauuucuuggugauucu

SEQ ID NO: 147485 - RNA, 19 nt, Homo sapiens
  misc_RNA (1)...(19): siRNA sense strand
acacauccagggagccuua

SEQ ID NO: 147486 - RNA, 19 nt, Homo sapiens
  misc_RNA (1)...(19): siRNA sense strand
ugucauugauugucgcuau

SEQ ID NO: 147487 - RNA, 19 nt, Homo sapiens
  misc_RNA (1)...(19): siRNA sense strand
ccagugggcaaauuucuug

SEQ ID NO: 147488 - RNA, 19 nt, Homo sapiens
  misc_RNA (1)...(19): siRNA sense strand
gggagcagauugcccuucu

SEQ ID NO: 147489 - RNA, 19 nt, Homo sapiens
  misc_RNA (1)...(19): siRNA sense strand
ccaguauccugcauuguac

SEQ ID NO: 147490 - RNA, 19 nt, Homo sapiens
  misc_RNA (1)...(19): siRNA sense strand
agaagcccaucgucccuuu

SEQ ID NO: 147491 - RNA, 19 nt, Homo sapiens
  misc_RNA (1)...(19): siRNA sense strand
gggaaacaccaagaucuga

SEQ ID NO: 147492 - RNA, 19 nt, Homo sapiens
  misc_RNA (1)...(19): siRNA sense strand
aagcaaaggugagcagaag

SEQ ID NO: 147493 - RNA, 19 nt, Homo sapiens
  misc_RNA (1)...(19): siRNA sense strand
gaagggcuuauguuuaaag

SEQ ID NO: 147494 - RNA, 19 nt, Homo sapiens
  misc_RNA (1)...(19): siRNA sense strand
gaaagaucaagaagcaaag

SEQ ID NO: 147495 - RNA, 19 nt, Homo sapiens
  misc_RNA (1)...(19): siRNA sense strand
ggacacccagaagagaaua

SEQ ID NO: 147496 - RNA, 19 nt, Homo sapiens
  misc_RNA (1)...(19): siRNA sense strand
ucugcaaaccuaagcauuu

SEQ ID NO: 147497 - RNA, 19 nt, Homo sapiens
  misc_RNA (1)...(19): siRNA sense strand
cuacagagacuucuuucca

SEQ ID NO: 147498 - RNA, 19 nt, Homo sapiens
  misc_RNA (1)...(19): siRNA sense strand
gaaguaugucaacccagaa

SEQ ID NO: 147499 - RNA, 19 nt, Homo sapiens
  misc_RNA (1)...(19): siRNA sense strand
gaaacaccaagaucugaag

SEQ ID NO: 147500 - RNA, 19 nt, Homo sapiens
  misc_RNA (1)...(19): siRNA sense strand
gcucaggaagggcuuaugu

SEQ ID NO: 147501 - RNA, 19 nt, Homo sapiens
  misc_RNA (1)...(19): siRNA sense strand
uccagggucugauugagaa

SEQ ID NO: 147502 - RNA, 19 nt, Homo sapiens
  misc_RNA (1)...(19): siRNA sense strand
agagaauaaucaucguguu

SEQ ID NO: 147503 - RNA, 19 nt, Homo sapiens
  misc_RNA (1)...(19): siRNA sense strand
agaccaggcagaagagauu

SEQ ID NO: 147504 - RNA, 19 nt, Homo sapiens
  misc_RNA (1)...(19): siRNA sense strand
gcuacugcccuaugcauca

SEQ ID NO: 147505 - RNA, 19 nt, Homo sapiens
  misc_RNA (1)...(19): siRNA sense strand
caagaucugaaguauguca

SEQ ID NO: 147506 - RNA, 19 nt, Homo sapiens
  misc_RNA (1)...(19): siRNA sense strand
gacauuacuaucacucaga

SEQ ID NO: 147507 - RNA, 19 nt, Homo sapiens
  misc_RNA (1)...(19): siRNA sense strand
ccagaugucccuagaacuc

SEQ ID NO: 147508 - RNA, 19 nt, Homo sapiens
  misc_RNA (1)...(19): siRNA sense strand
guccagaugucccuagaac

SEQ ID NO: 147509 - RNA, 19 nt, Homo sapiens
  misc_RNA (1)...(19): siRNA sense strand
agauugcccuucuggugaa

SEQ ID NO: 147510 - RNA, 19 nt, Homo sapiens
  misc_RNA (1)...(19): siRNA sense strand
accaguauccugcauugua

SEQ ID NO: 147511 - RNA, 19 nt, Homo sapiens
  misc_RNA (1)...(19): siRNA sense strand
gcagaaguggccuauaucg

SEQ ID NO: 147512 - RNA, 19 nt, Homo sapiens
  misc_RNA (1)...(19): siRNA sense strand
auucaaggacaacacaaua

SEQ ID NO: 147513 - RNA, 19 nt, Homo sapiens
  misc_RNA (1)...(19): siRNA sense strand
ggaccacaagacugaguug

SEQ ID NO: 147514 - RNA, 19 nt, Homo sapiens
  misc_RNA (1)...(19): siRNA sense strand
agggagccuuaaacuuaua

SEQ ID NO: 147515 - RNA, 19 nt, Homo sapiens
  misc_RNA (1)...(19): siRNA sense strand
ccauuacuacuguuccaaa

SEQ ID NO: 147516 - RNA, 19 nt, Homo sapiens
  misc_RNA (1)...(19): siRNA sense strand
uguacuacccagagcuaua

SEQ ID NO: 147517 - RNA, 19 nt, Homo sapiens
  misc_RNA (1)...(19): siRNA sense strand
agagagacacuuccuuuac

SEQ ID NO: 147518 - RNA, 19 nt, Homo sapiens
  misc_RNA (1)...(19): siRNA sense strand
acacaauaccagauaaagu

SEQ ID NO: 147519 - RNA, 19 nt, Homo sapiens
  misc_RNA (1)...(19): siRNA sense strand
uugaacaggccaagacuga

SEQ ID NO: 147520 - RNA, 19 nt, Homo sapiens
  misc_RNA (1)...(19): siRNA sense strand
gaagaccaggcagaagaga

SEQ ID NO: 147521 - RNA, 19 nt, Homo sapiens
  misc_RNA (1)...(19): siRNA sense strand
acauuacuaucacucagau

SEQ ID NO: 147522 - RNA, 19 nt, Homo sapiens
  misc_RNA (1)...(19): siRNA sense strand
guaugucaacccagaaaca

SEQ ID NO: 147523 - RNA, 19 nt, Homo sapiens
  misc_RNA (1)...(19): siRNA sense strand
ggagaagaccaggcagaag

SEQ ID NO: 147524 - RNA, 19 nt, Homo sapiens
  misc_RNA (1)...(19): siRNA sense strand
cggcuacagagacuucuuu

SEQ ID NO: 147525 - RNA, 19 nt, Homo sapiens
  misc_RNA (1)...(19): siRNA sense strand
gucaggaagaacuguuuaa

SEQ ID NO: 147526 - RNA, 19 nt, Homo sapiens
  misc_RNA (1)...(19): siRNA sense strand
gagccuuaaacuuauauag

SEQ ID NO: 147527 - RNA, 19 nt, Homo sapiens
  misc_RNA (1)...(19): siRNA sense strand
cucagaugcuggaggaaga

SEQ ID NO: 147528 - RNA, 19 nt, Homo sapiens
  misc_RNA (1)...(19): siRNA sense strand
ggcuuauguuuaaagaaga

SEQ ID NO: 147529 - RNA, 19 nt, Homo sapiens
  misc_RNA (1)...(19): siRNA sense strand
gaacuguuuaacuucuuuc

SEQ ID NO: 147530 - RNA, 19 nt, Homo sapiens
  misc_RNA (1)...(19): siRNA sense strand
gagcuacugcccuaugcau

SEQ ID NO: 147531 - RNA, 19 nt, Homo sapiens
  misc_RNA (1)...(19): siRNA sense strand
acugugaauucuccucaga

SEQ ID NO: 147532 - RNA, 19 nt, Homo sapiens
  misc_RNA (1)...(19): siRNA sense strand
gccaaggaaagcucaggaa

SEQ ID NO: 147533 - RNA, 19 nt, Homo sapiens
  misc_RNA (1)...(19): siRNA sense strand
aaaggcggcuacagagacu

SEQ ID NO: 147534 - RNA, 19 nt, Homo sapiens
  misc_RNA (1)...(19): siRNA sense strand
aaacuugguggacagugaa

SEQ ID NO: 147535 - RNA, 19 nt, Homo sapiens
  misc_RNA (1)...(19): siRNA sense strand
uugauugucgcuauccaua

SEQ ID NO: 147536 - RNA, 19 nt, Homo sapiens
  misc_RNA (1)...(19): siRNA sense strand
gagcagaaguggccuauau

SEQ ID NO: 147537 - RNA, 19 nt, Homo sapiens
  misc_RNA (1)...(19): siRNA sense strand
cagaagagauuucagauga

SEQ ID NO: 147538 - RNA, 19 nt, Homo sapiens
  misc_RNA (1)...(19): siRNA sense strand
ccagggagccuuaaacuua

SEQ ID NO: 147539 - RNA, 19 nt, Homo sapiens
  misc_RNA (1)...(19): siRNA sense strand
gaaccaguauccugcauug

SEQ ID NO: 147540 - RNA, 19 nt, Homo sapiens
  misc_RNA (1)...(19): siRNA sense strand
gaaacuugguggacaguga

SEQ ID NO: 147541 - RNA, 19 nt, Homo sapiens
  misc_RNA (1)...(19): siRNA sense strand
aggaagggcuuauguuuaa

SEQ ID NO: 147542 - RNA, 19 nt, Homo sapiens
  misc_RNA (1)...(19): siRNA sense strand
gcaaauuucuuggugauuc

SEQ ID NO: 147543 - RNA, 19 nt, Homo sapiens
  misc_RNA (1)...(19): siRNA sense strand
ccagagcuauauauccuua

SEQ ID NO: 147544 - RNA, 19 nt, Homo sapiens
  misc_RNA (1)...(19): siRNA sense strand
ggagagagacacuuccuuu

SEQ ID NO: 147545 - RNA, 19 nt, Homo sapiens
  misc_RNA (1)...(19): siRNA sense strand
gaacuccagugggcaaauu

SEQ ID NO: 147546 - RNA, 19 nt, Homo sapiens
  misc_RNA (1)...(19): siRNA sense strand
gaacucuucucauccacaa

SEQ ID NO: 147547 - RNA, 19 nt, Homo sapiens
  misc_RNA (1)...(19): siRNA sense strand
gagagagacacuuccuuua

SEQ ID NO: 147548 - RNA, 19 nt, Homo sapiens
  misc_RNA (1)...(19): siRNA sense strand
aggaagaacuguuuaacuu

SEQ ID NO: 147549 - RNA, 19 nt, Homo sapiens
  misc_RNA (1)...(19): siRNA sense strand
gagaagaccaggcagaaga

SEQ ID NO: 147550 - RNA, 19 nt, Homo sapiens
  misc_RNA (1)...(19): siRNA sense strand
gggcuuauguuuaaagaag

SEQ ID NO: 147551 - RNA, 19 nt, Homo sapiens
  misc_RNA (1)...(19): siRNA sense strand
cuacggaacucuucucauc

SEQ ID NO: 147552 - RNA, 19 nt, Homo sapiens
  misc_RNA (1)...(19): siRNA sense strand
acaggucucugaaccagua

SEQ ID NO: 147553 - RNA, 19 nt, Homo sapiens
  misc_RNA (1)...(19): siRNA sense strand
caggaagggcuuauguuua

SEQ ID NO: 147554 - RNA, 19 nt, Homo sapiens
  misc_RNA (1)...(19): siRNA sense strand
gguggacagugaaaugaaa

SEQ ID NO: 147555 - RNA, 19 nt, Homo sapiens
  misc_RNA (1)...(19): siRNA sense strand
gauugucgcuauccauaug

SEQ ID NO: 147556 - RNA, 19 nt, Homo sapiens
  misc_RNA (1)...(19): siRNA sense strand
gacaacacaauaccagaua

SEQ ID NO: 147557 - RNA, 19 nt, Homo sapiens
  misc_RNA (1)...(19): siRNA sense strand
accaagaucugaaguaugu

SEQ ID NO: 147558 - RNA, 19 nt, Homo sapiens
  misc_RNA (1)...(19): siRNA sense strand
ccugaaagaucaagaagca

SEQ ID NO: 147559 - RNA, 19 nt, Homo sapiens
  misc_RNA (1)...(19): siRNA sense strand
cacaauaccagauaaaguu

SEQ ID NO: 147560 - RNA, 19 nt, Homo sapiens
  misc_RNA (1)...(19): siRNA sense strand
ugaaagaucaagaagcaaa

SEQ ID NO: 147561 - RNA, 19 nt, Homo sapiens
  misc_RNA (1)...(19): siRNA sense strand
gaaguuccagggucugauu

SEQ ID NO: 147562 - RNA, 19 nt, Homo sapiens
  misc_RNA (1)...(19): siRNA sense strand
ggaagggcuuauguuuaaa

SEQ ID NO: 147563 - RNA, 19 nt, Homo sapiens
  misc_RNA (1)...(19): siRNA sense strand
caacacaauaccagauaaa

SEQ ID NO: 147564 - RNA, 19 nt, Homo sapiens
  misc_RNA (1)...(19): siRNA sense strand
ucaggaagggcuuauguuu

SEQ ID NO: 147565 - RNA, 19 nt, Homo sapiens
  misc_RNA (1)...(19): siRNA sense strand
ggaaacaccaagaucugaa

SEQ ID NO: 147566 - RNA, 19 nt, Homo sapiens
  misc_RNA (1)...(19): siRNA sense strand
gggcaaauuucuuggugau

SEQ ID NO: 147567 - RNA, 19 nt, Homo sapiens
  misc_RNA (1)...(19): siRNA sense strand
gccuuaaacuuauauaguc

SEQ ID NO: 147568 - RNA, 19 nt, Homo sapiens
  misc_RNA (1)...(19): siRNA sense strand
cagggagccuuaaacuuau

SEQ ID NO: 147569 - RNA, 19 nt, Homo sapiens
  misc_RNA (1)...(19): siRNA sense strand
gcaaaggugagcagaagug

SEQ ID NO: 147570 - RNA, 19 nt, Homo sapiens
  misc_RNA (1)...(19): siRNA sense strand
gaacaggccaagacugaag

SEQ ID NO: 147571 - RNA, 19 nt, Homo sapiens
  misc_RNA (1)...(19): siRNA sense strand
gagaauaaucaucguguuc

SEQ ID NO: 147572 - RNA, 19 nt, Homo sapiens
  misc_RNA (1)...(19): siRNA sense strand
cuguuuaacuucuuucuga

SEQ ID NO: 147573 - RNA, 19 nt, Homo sapiens
  misc_RNA (1)...(19): siRNA sense strand
acaccaagaucugaaguau

SEQ ID NO: 147574 - RNA, 19 nt, Homo sapiens
  misc_RNA (1)...(19): siRNA sense strand
gcagaagagauuucagaug

SEQ ID NO: 147575 - RNA, 19 nt, Homo sapiens
  misc_RNA (1)...(19): siRNA sense strand
acaacacaauaccagauaa

SEQ ID NO: 147576 - RNA, 19 nt, Homo sapiens
  misc_RNA (1)...(19): siRNA sense strand
cagaugaauuaauggaguu

SEQ ID NO: 147577 - RNA, 19 nt, Homo sapiens
  misc_RNA (1)...(19): siRNA sense strand
gaagcaaaggugagcagaa

SEQ ID NO: 147578 - RNA, 19 nt, Homo sapiens
  misc_RNA (1)...(19): siRNA sense strand
ggacaacacaauaccagau

SEQ ID NO: 147579 - RNA, 19 nt, Homo sapiens
  misc_RNA (1)...(19): siRNA sense strand
ggacagugaaaugaaauau

SEQ ID NO: 147580 - RNA, 19 nt, Homo sapiens
  misc_RNA (1)...(19): siRNA sense strand
agaaacaguggcugccuua

SEQ ID NO: 147581 - RNA, 19 nt, Homo sapiens
  misc_RNA (1)...(19): siRNA sense strand
gaauaaucaucguguucca

SEQ ID NO: 147582 - RNA, 19 nt, Homo sapiens
  misc_RNA (1)...(19): siRNA sense strand
guacuacccagagcuauau

SEQ ID NO: 147583 - RNA, 19 nt, Homo sapiens
  misc_RNA (1)...(19): siRNA sense strand
gagagacacuuccuuuacc

SEQ ID NO: 147584 - RNA, 19 nt, Homo sapiens
  misc_RNA (1)...(19): siRNA sense strand
caaauuucuuggugauucu

SEQ ID NO: 147585 - RNA, 19 nt, Homo sapiens
  misc_RNA (1)...(19): siRNA sense strand
acacauccagggagccuua

SEQ ID NO: 147586 - RNA, 19 nt, Homo sapiens
  misc_RNA (1)...(19): siRNA sense strand
ugucauugauugucgcuau

SEQ ID NO: 147587 - RNA, 19 nt, Homo sapiens
  misc_RNA (1)...(19): siRNA sense strand
ccagugggcaaauuucuug

SEQ ID NO: 147588 - RNA, 19 nt, Homo sapiens
  misc_RNA (1)...(19): siRNA sense strand
gggagcagauugcccuucu

SEQ ID NO: 147589 - RNA, 19 nt, Homo sapiens
  misc_RNA (1)...(19): siRNA sense strand
ccaguauccugcauuguac

SEQ ID NO: 147590 - RNA, 19 nt, Homo sapiens
  misc_RNA (1)...(19): siRNA sense strand
agaagcccaucgucccuuu

SEQ ID NO: 147591 - RNA, 19 nt, Homo sapiens
  misc_RNA (1)...(19): siRNA sense strand
gggaaacaccaagaucuga

SEQ ID NO: 147592 - RNA, 19 nt, Homo sapiens
  misc_RNA (1)...(19): siRNA sense strand
aagcaaaggugagcagaag

SEQ ID NO: 147593 - RNA, 19 nt, Homo sapiens
  misc_RNA (1)...(19): siRNA sense strand
gaagggcuuauguuuaaag

SEQ ID NO: 147594 - RNA, 19 nt, Homo sapiens
  misc_RNA (1)...(19): siRNA sense strand
gaaagaucaagaagcaaag

SEQ ID NO: 147595 - RNA, 19 nt, Homo sapiens
  misc_RNA (1)...(19): siRNA sense strand
ggacacccagaagagaaua

SEQ ID NO: 147596 - RNA, 19 nt, Homo sapiens
  misc_RNA (1)...(19): siRNA sense strand
ucugcaaaccuaagcauuu

SEQ ID NO: 147597 - RNA, 19 nt, Homo sapiens
  misc_RNA (1)...(19): siRNA sense strand
cuacagagacuucuuucca

SEQ ID NO: 147598 - RNA, 19 nt, Homo sapiens
  misc_RNA (1)...(19): siRNA sense strand
gaaguaugucaacccagaa

SEQ ID NO: 147599 - RNA, 19 nt, Homo sapiens
  misc_RNA (1)...(19): siRNA sense strand
gaaacaccaagaucugaag

SEQ ID NO: 147600 - RNA, 19 nt, Homo sapiens
  misc_RNA (1)...(19): siRNA sense strand
gcucaggaagggcuuaugu

SEQ ID NO: 147601 - RNA, 19 nt, Homo sapiens
  misc_RNA (1)...(19): siRNA sense strand
uccagggucugauugagaa

SEQ ID NO: 147602 - RNA, 19 nt, Homo sapiens
  misc_RNA (1)...(19): siRNA sense strand
agagaauaaucaucguguu

SEQ ID NO: 147603 - RNA, 19 nt, Homo sapiens
  misc_RNA (1)...(19): siRNA sense strand
agaccaggcagaagagauu

SEQ ID NO: 147604 - RNA, 19 nt, Homo sapiens
  misc_RNA (1)...(19): siRNA sense strand
gcuacugcccuaugcauca

SEQ ID NO: 147605 - RNA, 19 nt, Homo sapiens
  misc_RNA (1)...(19): siRNA sense strand
caagaucugaaguauguca

SEQ ID NO: 147606 - RNA, 19 nt, Homo sapiens
  misc_RNA (1)...(19): siRNA sense strand
gacauuacuaucacucaga

SEQ ID NO: 147607 - RNA, 19 nt, Homo sapiens
  misc_RNA (1)...(19): siRNA sense strand
ccagaugucccuagaacuc

SEQ ID NO: 147608 - RNA, 19 nt, Homo sapiens
  misc_RNA (1)...(19): siRNA sense strand
guccagaugucccuagaac

SEQ ID NO: 147609 - RNA, 19 nt, Homo sapiens
  misc_RNA (1)...(19): siRNA sense strand
agauugcccuucuggugaa

SEQ ID NO: 147610 - RNA, 19 nt, Homo sapiens
  misc_RNA (1)...(19): siRNA sense strand
accaguauccugcauugua

SEQ ID NO: 147611 - RNA, 19 nt, Homo sapiens
  misc_RNA (1)...(19): siRNA sense strand
gcagaaguggccuauaucg

SEQ ID NO: 147612 - RNA, 19 nt, Homo sapiens
  misc_RNA (1)...(19): siRNA sense strand
auucaaggacaacacaaua

SEQ ID NO: 147613 - RNA, 19 nt, Homo sapiens
  misc_RNA (1)...(19): siRNA sense strand
ggaccacaagacugaguug

SEQ ID NO: 147614 - RNA, 19 nt, Homo sapiens
  misc_RNA (1)...(19): siRNA sense strand
agggagccuuaaacuuaua

SEQ ID NO: 147615 - RNA, 19 nt, Homo sapiens
  misc_RNA (1)...(19): siRNA sense strand
ccauuacuacuguuccaaa

SEQ ID NO: 147616 - RNA, 19 nt, Homo sapiens
  misc_RNA (1)...(19): siRNA sense strand
uguacuacccagagcuaua

SEQ ID NO: 147617 - RNA, 19 nt, Homo sapiens
  misc_RNA (1)...(19): siRNA sense strand
agagagacacuuccuuuac

SEQ ID NO: 147618 - RNA, 19 nt, Homo sapiens
  misc_RNA (1)...(19): siRNA sense strand
acacaauaccagauaaagu

SEQ ID NO: 147619 - RNA, 19 nt, Homo sapiens
  misc_RNA (1)...(19): siRNA sense strand
uugaacaggccaagacuga

SEQ ID NO: 147620 - RNA, 19 nt, Homo sapiens
  misc_RNA (1)...(19): siRNA sense strand
gaagaccaggcagaagaga

SEQ ID NO: 147621 - RNA, 19 nt, Homo sapiens
  misc_RNA (1)...(19): siRNA sense strand
acauuacuaucacucagau

SEQ ID NO: 147622 - RNA, 19 nt, Homo sapiens
  misc_RNA (1)...(19): siRNA sense strand
guaugucaacccagaaaca

SEQ ID NO: 147623 - RNA, 19 nt, Homo sapiens
  misc_RNA (1)...(19): siRNA sense strand
ggagaagaccaggcagaag

SEQ ID NO: 147624 - RNA, 19 nt, Homo sapiens
  misc_RNA (1)...(19): siRNA sense strand
cggcuacagagacuucuuu

SEQ ID NO: 147625 - RNA, 19 nt, Homo sapiens
  misc_RNA (1)...(19): siRNA sense strand
gucaggaagaacuguuuaa

SEQ ID NO: 147626 - RNA, 19 nt, Homo sapiens
  misc_RNA (1)...(19): siRNA sense strand
gagccuuaaacuuauauag

SEQ ID NO: 147627 - RNA, 19 nt, Homo sapiens
  misc_RNA (1)...(19): siRNA sense strand
cucagaugcuggaggaaga

SEQ ID NO: 147628 - RNA, 19 nt, Homo sapiens
  misc_RNA (1)...(19): siRNA sense strand
ggcuuauguuuaaagaaga

SEQ ID NO: 147629 - RNA, 19 nt, Homo sapiens
  misc_RNA (1)...(19): siRNA sense strand
gaacuguuuaacuucuuuc

SEQ ID NO: 147630 - RNA, 19 nt, Homo sapiens
  misc_RNA (1)...(19): siRNA sense strand
gagcuacugcccuaugcau

SEQ ID NO: 147631 - RNA, 19 nt, Homo sapiens
  misc_RNA (1)...(19): siRNA sense strand
acugugaauucuccucaga

SEQ ID NO: 147632 - RNA, 19 nt, Homo sapiens
  misc_RNA (1)...(19): siRNA sense strand
gccaaggaaagcucaggaa

SEQ ID NO: 147633 - RNA, 19 nt, Homo sapiens
  misc_RNA (1)...(19): siRNA sense strand
aaaggcggcuacagagacu

SEQ ID NO: 147634 - RNA, 19 nt, Homo sapiens
  misc_RNA (1)...(19): siRNA sense strand
aaacuugguggacagugaa

SEQ ID NO: 147635 - RNA, 19 nt, Homo sapiens
  misc_RNA (1)...(19): siRNA sense strand
uugauugucgcuauccaua

SEQ ID NO: 147636 - RNA, 19 nt, Homo sapiens
  misc_RNA (1)...(19): siRNA sense strand
gaaacgacaucgagaagaa

SEQ ID NO: 147637 - RNA, 19 nt, Homo sapiens
  misc_RNA (1)...(19): siRNA sense strand
gcaaaugucucggaaagaa

SEQ ID NO: 147638 - RNA, 19 nt, Homo sapiens
  misc_RNA (1)...(19): siRNA sense strand
gaaaacagaugaaauugug

SEQ ID NO: 147639 - RNA, 19 nt, Homo sapiens
  misc_RNA (1)...(19): siRNA sense strand
gcauggagaucacaauaag

SEQ ID NO: 147640 - RNA, 19 nt, Homo sapiens
  misc_RNA (1)...(19): siRNA sense strand
gagcaccagugaagaauca

SEQ ID NO: 147641 - RNA, 19 nt, Homo sapiens
  misc_RNA (1)...(19): siRNA sense strand
ugaaacaccugcacgacaa

SEQ ID NO: 147642 - RNA, 19 nt, Homo sapiens
  misc_RNA (1)...(19): siRNA sense strand
gaaaaggacucuuggaaag

SEQ ID NO: 147643 - RNA, 19 nt, Homo sapiens
  misc_RNA (1)...(19): siRNA sense strand
uaaagcggcugaagaugga

SEQ ID NO: 147644 - RNA, 19 nt, Homo sapiens
  misc_RNA (1)...(19): siRNA sense strand
agaaaugagugaagaugaa

SEQ ID NO: 147645 - RNA, 19 nt, Homo sapiens
  misc_RNA (1)...(19): siRNA sense strand
gagugaagaugaagaacga

SEQ ID NO: 147646 - RNA, 19 nt, Homo sapiens
  misc_RNA (1)...(19): siRNA sense strand
gcagcaacauggacaagau

SEQ ID NO: 147647 - RNA, 19 nt, Homo sapiens
  misc_RNA (1)...(19): siRNA sense strand
gaagggagcaccagugaag

SEQ ID NO: 147648 - RNA, 19 nt, Homo sapiens
  misc_RNA (1)...(19): siRNA sense strand
ggaaggaacaagaggagaa

SEQ ID NO: 147649 - RNA, 19 nt, Homo sapiens
  misc_RNA (1)...(19): siRNA sense strand
ggaguggucuacagagcaa

SEQ ID NO: 147650 - RNA, 19 nt, Homo sapiens
  misc_RNA (1)...(19): siRNA sense strand
gaagaugaagaacgagaaa

SEQ ID NO: 147651 - RNA, 19 nt, Homo sapiens
  misc_RNA (1)...(19): siRNA sense strand
gcacgaacgucggaaacga

SEQ ID NO: 147652 - RNA, 19 nt, Homo sapiens
  misc_RNA (1)...(19): siRNA sense strand
gagaagacucuauggaaga

SEQ ID NO: 147653 - RNA, 19 nt, Homo sapiens
  misc_RNA (1)...(19): siRNA sense strand
cagcaaaugucucggaaag

SEQ ID NO: 147654 - RNA, 19 nt, Homo sapiens
  misc_RNA (1)...(19): siRNA sense strand
cagaaaagaugaaaagaga

SEQ ID NO: 147655 - RNA, 19 nt, Homo sapiens
  misc_RNA (1)...(19): siRNA sense strand
gaagaaaugagugaagaug

SEQ ID NO: 147656 - RNA, 19 nt, Homo sapiens
  misc_RNA (1)...(19): siRNA sense strand
agaaguaagugaggaagaa

SEQ ID NO: 147657 - RNA, 19 nt, Homo sapiens
  misc_RNA (1)...(19): siRNA sense strand
ggaagacagaggagaagaa

SEQ ID NO: 147658 - RNA, 19 nt, Homo sapiens
  misc_RNA (1)...(19): siRNA sense strand
gaaggaacaagaggagaaa

SEQ ID NO: 147659 - RNA, 19 nt, Homo sapiens
  misc_RNA (1)...(19): siRNA sense strand
ugacagagggcgacuaugu

SEQ ID NO: 147660 - RNA, 19 nt, Homo sapiens
  misc_RNA (1)...(19): siRNA sense strand
ggagaaagcagagauaaaa

SEQ ID NO: 147661 - RNA, 19 nt, Homo sapiens
  misc_RNA (1)...(19): siRNA sense strand
gagaagaacaggauaaagc

SEQ ID NO: 147662 - RNA, 19 nt, Homo sapiens
  misc_RNA (1)...(19): siRNA sense strand
gaggagaaagcagagauaa

SEQ ID NO: 147663 - RNA, 19 nt, Homo sapiens
  misc_RNA (1)...(19): siRNA sense strand
ugaagaagcagaggaagaa

SEQ ID NO: 147664 - RNA, 19 nt, Homo sapiens
  misc_RNA (1)...(19): siRNA sense strand
gagcauuccaggagagaaa

SEQ ID NO: 147665 - RNA, 19 nt, Homo sapiens
  misc_RNA (1)...(19): siRNA sense strand
aaggagggcuucccgauca

SEQ ID NO: 147666 - RNA, 19 nt, Homo sapiens
  misc_RNA (1)...(19): siRNA sense strand
gcuucgaccucaugaacaa

SEQ ID NO: 147667 - RNA, 19 nt, Homo sapiens
  misc_RNA (1)...(19): siRNA sense strand
gaaguaagugaggaagaaa

SEQ ID NO: 147668 - RNA, 19 nt, Homo sapiens
  misc_RNA (1)...(19): siRNA sense strand
caacaucgucaccguuaga

SEQ ID NO: 147669 - RNA, 19 nt, Homo sapiens
  misc_RNA (1)...(19): siRNA sense strand
ugagggagaucaacaccau

SEQ ID NO: 147670 - RNA, 19 nt, Homo sapiens
  misc_RNA (1)...(19): siRNA sense strand
aaaggacucuuggaaagug

SEQ ID NO: 147671 - RNA, 19 nt, Homo sapiens
  misc_RNA (1)...(19): siRNA sense strand
gcucuaaagcggcugaaga

SEQ ID NO: 147672 - RNA, 19 nt, Homo sapiens
  misc_RNA (1)...(19): siRNA sense strand
ggcugaagauggagaagga

SEQ ID NO: 147673 - RNA, 19 nt, Homo sapiens
  misc_RNA (1)...(19): siRNA sense strand
agacagaggagaagaagau

SEQ ID NO: 147674 - RNA, 19 nt, Homo sapiens
  misc_RNA (1)...(19): siRNA sense strand
gaucaacaccauccucaag

SEQ ID NO: 147675 - RNA, 19 nt, Homo sapiens
  misc_RNA (1)...(19): siRNA sense strand
gaugaaauuguggcucuaa

SEQ ID NO: 147676 - RNA, 19 nt, Homo sapiens
  misc_RNA (1)...(19): siRNA sense strand
gaaucaggcucagguucug

SEQ ID NO: 147677 - RNA, 19 nt, Homo sapiens
  misc_RNA (1)...(19): siRNA sense strand
gaggugaagacccugauga

SEQ ID NO: 147678 - RNA, 19 nt, Homo sapiens
  misc_RNA (1)...(19): siRNA sense strand
ggaggaggaggaagaggaa

SEQ ID NO: 147679 - RNA, 19 nt, Homo sapiens
  misc_RNA (1)...(19): siRNA sense strand
ggaaacgacaucgagaaga

SEQ ID NO: 147680 - RNA, 19 nt, Homo sapiens
  misc_RNA (1)...(19): siRNA sense strand
agucagaaaucgaucagau

SEQ ID NO: 147681 - RNA, 19 nt, Homo sapiens
  misc_RNA (1)...(19): siRNA sense strand
ucacgucgcugagggagau

SEQ ID NO: 147682 - RNA, 19 nt, Homo sapiens
  misc_RNA (1)...(19): siRNA sense strand
gaaauuguggcucuaaagc

SEQ ID NO: 147683 - RNA, 19 nt, Homo sapiens
  misc_RNA (1)...(19): siRNA sense strand
gucaguggguugcaucuuc

SEQ ID NO: 147684 - RNA, 19 nt, Homo sapiens
  misc_RNA (1)...(19): siRNA sense strand
ugaagacccugaugaucca

SEQ ID NO: 147685 - RNA, 19 nt, Homo sapiens
  misc_RNA (1)...(19): siRNA sense strand
gaagacagaggagaagaag

SEQ ID NO: 147686 - RNA, 19 nt, Homo sapiens
  misc_RNA (1)...(19): siRNA sense strand
gaagaacgagaaaaugaaa

SEQ ID NO: 147687 - RNA, 19 nt, Homo sapiens
  misc_RNA (1)...(19): siRNA sense strand
ggaagaaaugagugaagau

SEQ ID NO: 147688 - RNA, 19 nt, Homo sapiens
  misc_RNA (1)...(19): siRNA sense strand
agacagaagagaagggaaa

SEQ ID NO: 147689 - RNA, 19 nt, Homo sapiens
  misc_RNA (1)...(19): siRNA sense strand
gaaugggaaagacagaaga

SEQ ID NO: 147690 - RNA, 19 nt, Homo sapiens
  misc_RNA (1)...(19): siRNA sense strand
caaaugucucggaaagaaa

SEQ ID NO: 147691 - RNA, 19 nt, Homo sapiens
  misc_RNA (1)...(19): siRNA sense strand
gaggagaagaagaugauuc

SEQ ID NO: 147692 - RNA, 19 nt, Homo sapiens
  misc_RNA (1)...(19): siRNA sense strand
gcaacauggacaagaucua

SEQ ID NO: 147693 - RNA, 19 nt, Homo sapiens
  misc_RNA (1)...(19): siRNA sense strand
aggaagaaaugagugaaga

SEQ ID NO: 147694 - RNA, 19 nt, Homo sapiens
  misc_RNA (1)...(19): siRNA sense strand
auaaggaacuccccguaua

SEQ ID NO: 147695 - RNA, 19 nt, Homo sapiens
  misc_RNA (1)...(19): siRNA sense strand
gagugaagaagcagaggaa

SEQ ID NO: 147696 - RNA, 19 nt, Homo sapiens
  misc_RNA (1)...(19): siRNA sense strand
ggaagucagaaaucgauca

SEQ ID NO: 147697 - RNA, 19 nt, Homo sapiens
  misc_RNA (1)...(19): siRNA sense strand
cccaacaucgucaccguua

SEQ ID NO: 147698 - RNA, 19 nt, Homo sapiens
  misc_RNA (1)...(19): siRNA sense strand
gggaaagacagaagagaag

SEQ ID NO: 147699 - RNA, 19 nt, Homo sapiens
  misc_RNA (1)...(19): siRNA sense strand
caaaagacaagaaaacaga

SEQ ID NO: 147700 - RNA, 19 nt, Homo sapiens
  misc_RNA (1)...(19): siRNA sense strand
gaucgaggagggcaccuau

SEQ ID NO: 147701 - RNA, 19 nt, Homo sapiens
  misc_RNA (1)...(19): siRNA sense strand
gaaaugagugaagaugaag

SEQ ID NO: 147702 - RNA, 19 nt, Homo sapiens
  misc_RNA (1)...(19): siRNA sense strand
ggaagaggaggaggaggaa

SEQ ID NO: 147703 - RNA, 19 nt, Homo sapiens
  misc_RNA (1)...(19): siRNA sense strand
caugcuagagugaaagaaa

SEQ ID NO: 147704 - RNA, 19 nt, Homo sapiens
  misc_RNA (1)...(19): siRNA sense strand
gaagagaaaauggaagaaa

SEQ ID NO: 147705 - RNA, 19 nt, Homo sapiens
  misc_RNA (1)...(19): siRNA sense strand
ggaaugggaaagacagaag

SEQ ID NO: 147706 - RNA, 19 nt, Homo sapiens
  misc_RNA (1)...(19): siRNA sense strand
cgucaccguuagagagauu

SEQ ID NO: 147707 - RNA, 19 nt, Homo sapiens
  misc_RNA (1)...(19): siRNA sense strand
gugaagaagcagaggaaga

SEQ ID NO: 147708 - RNA, 19 nt, Homo sapiens
  misc_RNA (1)...(19): siRNA sense strand
cgaagaaguaagugaggaa

SEQ ID NO: 147709 - RNA, 19 nt, Homo sapiens
  misc_RNA (1)...(19): siRNA sense strand
caacauggacaagaucuac

SEQ ID NO: 147710 - RNA, 19 nt, Homo sapiens
  misc_RNA (1)...(19): siRNA sense strand
ggaacaagaggagaaagca

SEQ ID NO: 147711 - RNA, 19 nt, Homo sapiens
  misc_RNA (1)...(19): siRNA sense strand
gaaacgaaggaaggaacaa

SEQ ID NO: 147712 - RNA, 19 nt, Homo sapiens
  misc_RNA (1)...(19): siRNA sense strand
ggaagggagcaccagugaa

SEQ ID NO: 147713 - RNA, 19 nt, Homo sapiens
  misc_RNA (1)...(19): siRNA sense strand
cagaggagaagaagaugau

SEQ ID NO: 147714 - RNA, 19 nt, Homo sapiens
  misc_RNA (1)...(19): siRNA sense strand
guaagugaggaagaaauga

SEQ ID NO: 147715 - RNA, 19 nt, Homo sapiens
  misc_RNA (1)...(19): siRNA sense strand
gcagaaucaggcucagguu

SEQ ID NO: 147716 - RNA, 19 nt, Homo sapiens
  misc_RNA (1)...(19): siRNA sense strand
cagaagagaagggaaaugg

SEQ ID NO: 147717 - RNA, 19 nt, Homo sapiens
  misc_RNA (1)...(19): siRNA sense strand
aggacggccucaagcauga

SEQ ID NO: 147718 - RNA, 19 nt, Homo sapiens
  misc_RNA (1)...(19): siRNA sense strand
gcaccuauggaguggucua

SEQ ID NO: 147719 - RNA, 19 nt, Homo sapiens
  misc_RNA (1)...(19): siRNA sense strand
gacagagggcgacuaugug

SEQ ID NO: 147720 - RNA, 19 nt, Homo sapiens
  misc_RNA (1)...(19): siRNA sense strand
aagaaaugagugaagauga

SEQ ID NO: 147721 - RNA, 19 nt, Homo sapiens
  misc_RNA (1)...(19): siRNA sense strand
ggaaauggcaagggagcau

SEQ ID NO: 147722 - RNA, 19 nt, Homo sapiens
  misc_RNA (1)...(19): siRNA sense strand
agaggagaaagcagagaua

SEQ ID NO: 147723 - RNA, 19 nt, Homo sapiens
  misc_RNA (1)...(19): siRNA sense strand
gaagauggagaaggagaag

SEQ ID NO: 147724 - RNA, 19 nt, Homo sapiens
  misc_RNA (1)...(19): siRNA sense strand
gaggagaccggcagcaacu

SEQ ID NO: 147725 - RNA, 19 nt, Homo sapiens
  misc_RNA (1)...(19): siRNA sense strand
agaaagagagcacgaacgu

SEQ ID NO: 147726 - RNA, 19 nt, Homo sapiens
  misc_RNA (1)...(19): siRNA sense strand
gaggaagaaaugagugaag

SEQ ID NO: 147727 - RNA, 19 nt, Homo sapiens
  misc_RNA (1)...(19): siRNA sense strand
gcagagauaaaacgcuuaa

SEQ ID NO: 147728 - RNA, 19 nt, Homo sapiens
  misc_RNA (1)...(19): siRNA sense strand
ugggaaagacagaagagaa

SEQ ID NO: 147729 - RNA, 19 nt, Homo sapiens
  misc_RNA (1)...(19): siRNA sense strand
ucccagcagucaagaagau

SEQ ID NO: 147730 - RNA, 19 nt, Homo sapiens
  misc_RNA (1)...(19): siRNA sense strand
agaagcagaggaagaagug

SEQ ID NO: 147731 - RNA, 19 nt, Homo sapiens
  misc_RNA (1)...(19): siRNA sense strand
uauggaagacagaggagaa

SEQ ID NO: 147732 - RNA, 19 nt, Homo sapiens
  misc_RNA (1)...(19): siRNA sense strand
ugaagaugaagaacgagaa

SEQ ID NO: 147733 - RNA, 19 nt, Homo sapiens
  misc_RNA (1)...(19): siRNA sense strand
gugaggaagaaaugaguga

SEQ ID NO: 147734 - RNA, 19 nt, Homo sapiens
  misc_RNA (1)...(19): siRNA sense strand
gaacuccccguauagaaga

SEQ ID NO: 147735 - RNA, 19 nt, Homo sapiens
  misc_RNA (1)...(19): siRNA sense strand
ugaaaaggacucuuggaaa

SEQ ID NO: 147736 - RNA, 19 nt, Homo sapiens
  misc_RNA (1)...(19): siRNA sense strand
gaaacgacaucgagaagaa

SEQ ID NO: 147737 - RNA, 19 nt, Homo sapiens
  misc_RNA (1)...(19): siRNA sense strand
gcaaaugucucggaaagaa

SEQ ID NO: 147738 - RNA, 19 nt, Homo sapiens
  misc_RNA (1)...(19): siRNA sense strand
gaaaacagaugaaauugug

SEQ ID NO: 147739 - RNA, 19 nt, Homo sapiens
  misc_RNA (1)...(19): siRNA sense strand
gcauggagaucacaauaag

SEQ ID NO: 147740 - RNA, 19 nt, Homo sapiens
  misc_RNA (1)...(19): siRNA sense strand
gagcaccagugaagaauca

SEQ ID NO: 147741 - RNA, 19 nt, Homo sapiens
  misc_RNA (1)...(19): siRNA sense strand
ugaaacaccugcacgacaa

SEQ ID NO: 147742 - RNA, 19 nt, Homo sapiens
  misc_RNA (1)...(19): siRNA sense strand
gaaaaggacucuuggaaag

SEQ ID NO: 147743 - RNA, 19 nt, Homo sapiens
  misc_RNA (1)...(19): siRNA sense strand
uaaagcggcugaagaugga

SEQ ID NO: 147744 - RNA, 19 nt, Homo sapiens
  misc_RNA (1)...(19): siRNA sense strand
agaaaugagugaagaugaa

SEQ ID NO: 147745 - RNA, 19 nt, Homo sapiens
  misc_RNA (1)...(19): siRNA sense strand
gagugaagaugaagaacga

SEQ ID NO: 147746 - RNA, 19 nt, Homo sapiens
  misc_RNA (1)...(19): siRNA sense strand
gcagcaacauggacaagau

SEQ ID NO: 147747 - RNA, 19 nt, Homo sapiens
  misc_RNA (1)...(19): siRNA sense strand
gaagggagcaccagugaag

SEQ ID NO: 147748 - RNA, 19 nt, Homo sapiens
  misc_RNA (1)...(19): siRNA sense strand
ggaaggaacaagaggagaa

SEQ ID NO: 147749 - RNA, 19 nt, Homo sapiens
  misc_RNA (1)...(19): siRNA sense strand
ggaguggucuacagagcaa

SEQ ID NO: 147750 - RNA, 19 nt, Homo sapiens
  misc_RNA (1)...(19): siRNA sense strand
gaagaugaagaacgagaaa

SEQ ID NO: 147751 - RNA, 19 nt, Homo sapiens
  misc_RNA (1)...(19): siRNA sense strand
gcacgaacgucggaaacga

SEQ ID NO: 147752 - RNA, 19 nt, Homo sapiens
  misc_RNA (1)...(19): siRNA sense strand
gagaagacucuauggaaga

SEQ ID NO: 147753 - RNA, 19 nt, Homo sapiens
  misc_RNA (1)...(19): siRNA sense strand
cagcaaaugucucggaaag

SEQ ID NO: 147754 - RNA, 19 nt, Homo sapiens
  misc_RNA (1)...(19): siRNA sense strand
cagaaaagaugaaaagaga

SEQ ID NO: 147755 - RNA, 19 nt, Homo sapiens
  misc_RNA (1)...(19): siRNA sense strand
gaagaaaugagugaagaug

SEQ ID NO: 147756 - RNA, 19 nt, Homo sapiens
  misc_RNA (1)...(19): siRNA sense strand
agaaguaagugaggaagaa

SEQ ID NO: 147757 - RNA, 19 nt, Homo sapiens
  misc_RNA (1)...(19): siRNA sense strand
ggaagacagaggagaagaa

SEQ ID NO: 147758 - RNA, 19 nt, Homo sapiens
  misc_RNA (1)...(19): siRNA sense strand
gaaggaacaagaggagaaa

SEQ ID NO: 147759 - RNA, 19 nt, Homo sapiens
  misc_RNA (1)...(19): siRNA sense strand
ugacagagggcgacuaugu

SEQ ID NO: 147760 - RNA, 19 nt, Homo sapiens
  misc_RNA (1)...(19): siRNA sense strand
ggagaaagcagagauaaaa

SEQ ID NO: 147761 - RNA, 19 nt, Homo sapiens
  misc_RNA (1)...(19): siRNA sense strand
gagaagaacaggauaaagc

SEQ ID NO: 147762 - RNA, 19 nt, Homo sapiens
  misc_RNA (1)...(19): siRNA sense strand
gaggagaaagcagagauaa

SEQ ID NO: 147763 - RNA, 19 nt, Homo sapiens
  misc_RNA (1)...(19): siRNA sense strand
ugaagaagcagaggaagaa

SEQ ID NO: 147764 - RNA, 19 nt, Homo sapiens
  misc_RNA (1)...(19): siRNA sense strand
gagcauuccaggagagaaa

SEQ ID NO: 147765 - RNA, 19 nt, Homo sapiens
  misc_RNA (1)...(19): siRNA sense strand
aaggagggcuucccgauca

SEQ ID NO: 147766 - RNA, 19 nt, Homo sapiens
  misc_RNA (1)...(19): siRNA sense strand
gcuucgaccucaugaacaa

SEQ ID NO: 147767 - RNA, 19 nt, Homo sapiens
  misc_RNA (1)...(19): siRNA sense strand
gaaguaagugaggaagaaa

SEQ ID NO: 147768 - RNA, 19 nt, Homo sapiens
  misc_RNA (1)...(19): siRNA sense strand
caacaucgucaccguuaga

SEQ ID NO: 147769 - RNA, 19 nt, Homo sapiens
  misc_RNA (1)...(19): siRNA sense strand
ugagggagaucaacaccau

SEQ ID NO: 147770 - RNA, 19 nt, Homo sapiens
  misc_RNA (1)...(19): siRNA sense strand
aaaggacucuuggaaagug

SEQ ID NO: 147771 - RNA, 19 nt, Homo sapiens
  misc_RNA (1)...(19): siRNA sense strand
gcucuaaagcggcugaaga

SEQ ID NO: 147772 - RNA, 19 nt, Homo sapiens
  misc_RNA (1)...(19): siRNA sense strand
ggcugaagauggagaagga

SEQ ID NO: 147773 - RNA, 19 nt, Homo sapiens
  misc_RNA (1)...(19): siRNA sense strand
agacagaggagaagaagau

SEQ ID NO: 147774 - RNA, 19 nt, Homo sapiens
  misc_RNA (1)...(19): siRNA sense strand
gaucaacaccauccucaag

SEQ ID NO: 147775 - RNA, 19 nt, Homo sapiens
  misc_RNA (1)...(19): siRNA sense strand
gaugaaauuguggcucuaa

SEQ ID NO: 147776 - RNA, 19 nt, Homo sapiens
  misc_RNA (1)...(19): siRNA sense strand
gaaucaggcucagguucug

SEQ ID NO: 147777 - RNA, 19 nt, Homo sapiens
  misc_RNA (1)...(19): siRNA sense strand
gaggugaagacccugauga

SEQ ID NO: 147778 - RNA, 19 nt, Homo sapiens
  misc_RNA (1)...(19): siRNA sense strand
ggaggaggaggaagaggaa

SEQ ID NO: 147779 - RNA, 19 nt, Homo sapiens
  misc_RNA (1)...(19): siRNA sense strand
ggaaacgacaucgagaaga

SEQ ID NO: 147780 - RNA, 19 nt, Homo sapiens
  misc_RNA (1)...(19): siRNA sense strand
agucagaaaucgaucagau

SEQ ID NO: 147781 - RNA, 19 nt, Homo sapiens
  misc_RNA (1)...(19): siRNA sense strand
ucacgucgcugagggagau

SEQ ID NO: 147782 - RNA, 19 nt, Homo sapiens
  misc_RNA (1)...(19): siRNA sense strand
gaaauuguggcucuaaagc

SEQ ID NO: 147783 - RNA, 19 nt, Homo sapiens
  misc_RNA (1)...(19): siRNA sense strand
gucaguggguugcaucuuc

SEQ ID NO: 147784 - RNA, 19 nt, Homo sapiens
  misc_RNA (1)...(19): siRNA sense strand
ugaagacccugaugaucca

SEQ ID NO: 147785 - RNA, 19 nt, Homo sapiens
  misc_RNA (1)...(19): siRNA sense strand
gaagacagaggagaagaag

SEQ ID NO: 147786 - RNA, 19 nt, Homo sapiens
  misc_RNA (1)...(19): siRNA sense strand
gaagaacgagaaaaugaaa

SEQ ID NO: 147787 - RNA, 19 nt, Homo sapiens
  misc_RNA (1)...(19): siRNA sense strand
ggaagaaaugagugaagau

SEQ ID NO: 147788 - RNA, 19 nt, Homo sapiens
  misc_RNA (1)...(19): siRNA sense strand
agacagaagagaagggaaa

SEQ ID NO: 147789 - RNA, 19 nt, Homo sapiens
  misc_RNA (1)...(19): siRNA sense strand
gaaugggaaagacagaaga

SEQ ID NO: 147790 - RNA, 19 nt, Homo sapiens
  misc_RNA (1)...(19): siRNA sense strand
caaaugucucggaaagaaa

SEQ ID NO: 147791 - RNA, 19 nt, Homo sapiens
  misc_RNA (1)...(19): siRNA sense strand
gaggagaagaagaugauuc

SEQ ID NO: 147792 - RNA, 19 nt, Homo sapiens
  misc_RNA (1)...(19): siRNA sense strand
gcaacauggacaagaucua

SEQ ID NO: 147793 - RNA, 19 nt, Homo sapiens
  misc_RNA (1)...(19): siRNA sense strand
aggaagaaaugagugaaga

SEQ ID NO: 147794 - RNA, 19 nt, Homo sapiens
  misc_RNA (1)...(19): siRNA sense strand
auaaggaacuccccguaua

SEQ ID NO: 147795 - RNA, 19 nt, Homo sapiens
  misc_RNA (1)...(19): siRNA sense strand
gagugaagaagcagaggaa

SEQ ID NO: 147796 - RNA, 19 nt, Homo sapiens
  misc_RNA (1)...(19): siRNA sense strand
ggaagucagaaaucgauca

SEQ ID NO: 147797 - RNA, 19 nt, Homo sapiens
  misc_RNA (1)...(19): siRNA sense strand
cccaacaucgucaccguua

SEQ ID NO: 147798 - RNA, 19 nt, Homo sapiens
  misc_RNA (1)...(19): siRNA sense strand
gggaaagacagaagagaag

SEQ ID NO: 147799 - RNA, 19 nt, Homo sapiens
  misc_RNA (1)...(19): siRNA sense strand
caaaagacaagaaaacaga

SEQ ID NO: 147800 - RNA, 19 nt, Homo sapiens
  misc_RNA (1)...(19): siRNA sense strand
gaucgaggagggcaccuau

SEQ ID NO: 147801 - RNA, 19 nt, Homo sapiens
  misc_RNA (1)...(19): siRNA sense strand
gaaaugagugaagaugaag

SEQ ID NO: 147802 - RNA, 19 nt, Homo sapiens
  misc_RNA (1)...(19): siRNA sense strand
ggaagaggaggaggaggaa

SEQ ID NO: 147803 - RNA, 19 nt, Homo sapiens
  misc_RNA (1)...(19): siRNA sense strand
caugcuagagugaaagaaa

SEQ ID NO: 147804 - RNA, 19 nt, Homo sapiens
  misc_RNA (1)...(19): siRNA sense strand
gaagagaaaauggaagaaa

SEQ ID NO: 147805 - RNA, 19 nt, Homo sapiens
  misc_RNA (1)...(19): siRNA sense strand
ggaaugggaaagacagaag

SEQ ID NO: 147806 - RNA, 19 nt, Homo sapiens
  misc_RNA (1)...(19): siRNA sense strand
cgucaccguuagagagauu

SEQ ID NO: 147807 - RNA, 19 nt, Homo sapiens
  misc_RNA (1)...(19): siRNA sense strand
gugaagaagcagaggaaga

SEQ ID NO: 147808 - RNA, 19 nt, Homo sapiens
  misc_RNA (1)...(19): siRNA sense strand
cgaagaaguaagugaggaa

SEQ ID NO: 147809 - RNA, 19 nt, Homo sapiens
  misc_RNA (1)...(19): siRNA sense strand
caacauggacaagaucuac

SEQ ID NO: 147810 - RNA, 19 nt, Homo sapiens
  misc_RNA (1)...(19): siRNA sense strand
ggaacaagaggagaaagca

SEQ ID NO: 147811 - RNA, 19 nt, Homo sapiens
  misc_RNA (1)...(19): siRNA sense strand
gaaacgaaggaaggaacaa

SEQ ID NO: 147812 - RNA, 19 nt, Homo sapiens
  misc_RNA (1)...(19): siRNA sense strand
ggaagggagcaccagugaa

SEQ ID NO: 147813 - RNA, 19 nt, Homo sapiens
  misc_RNA (1)...(19): siRNA sense strand
cagaggagaagaagaugau

SEQ ID NO: 147814 - RNA, 19 nt, Homo sapiens
  misc_RNA (1)...(19): siRNA sense strand
guaagugaggaagaaauga

SEQ ID NO: 147815 - RNA, 19 nt, Homo sapiens
  misc_RNA (1)...(19): siRNA sense strand
gcagaaucaggcucagguu

SEQ ID NO: 147816 - RNA, 19 nt, Homo sapiens
  misc_RNA (1)...(19): siRNA sense strand
cagaagagaagggaaaugg

SEQ ID NO: 147817 - RNA, 19 nt, Homo sapiens
  misc_RNA (1)...(19): siRNA sense strand
aggacggccucaagcauga

SEQ ID NO: 147818 - RNA, 19 nt, Homo sapiens
  misc_RNA (1)...(19): siRNA sense strand
gcaccuauggaguggucua

SEQ ID NO: 147819 - RNA, 19 nt, Homo sapiens
  misc_RNA (1)...(19): siRNA sense strand
gacagagggcgacuaugug

SEQ ID NO: 147820 - RNA, 19 nt, Homo sapiens
  misc_RNA (1)...(19): siRNA sense strand
aagaaaugagugaagauga

SEQ ID NO: 147821 - RNA, 19 nt, Homo sapiens
  misc_RNA (1)...(19): siRNA sense strand
ggaaauggcaagggagcau

SEQ ID NO: 147822 - RNA, 19 nt, Homo sapiens
  misc_RNA (1)...(19): siRNA sense strand
agaggagaaagcagagaua

SEQ ID NO: 147823 - RNA, 19 nt, Homo sapiens
  misc_RNA (1)...(19): siRNA sense strand
gaagauggagaaggagaag

SEQ ID NO: 147824 - RNA, 19 nt, Homo sapiens
  misc_RNA (1)...(19): siRNA sense strand
gaggagaccggcagcaacu

SEQ ID NO: 147825 - RNA, 19 nt, Homo sapiens
  misc_RNA (1)...(19): siRNA sense strand
agaaagagagcacgaacgu

SEQ ID NO: 147826 - RNA, 19 nt, Homo sapiens
  misc_RNA (1)...(19): siRNA sense strand
gaggaagaaaugagugaag

SEQ ID NO: 147827 - RNA, 19 nt, Homo sapiens
  misc_RNA (1)...(19): siRNA sense strand
gcagagauaaaacgcuuaa

SEQ ID NO: 147828 - RNA, 19 nt, Homo sapiens
  misc_RNA (1)...(19): siRNA sense strand
ugggaaagacagaagagaa

SEQ ID NO: 147829 - RNA, 19 nt, Homo sapiens
  misc_RNA (1)...(19): siRNA sense strand
ucccagcagucaagaagau

SEQ ID NO: 147830 - RNA, 19 nt, Homo sapiens
  misc_RNA (1)...(19): siRNA sense strand
agaagcagaggaagaagug

SEQ ID NO: 147831 - RNA, 19 nt, Homo sapiens
  misc_RNA (1)...(19): siRNA sense strand
uauggaagacagaggagaa

SEQ ID NO: 147832 - RNA, 19 nt, Homo sapiens
  misc_RNA (1)...(19): siRNA sense strand
ugaagaugaagaacgagaa

SEQ ID NO: 147833 - RNA, 19 nt, Homo sapiens
  misc_RNA (1)...(19): siRNA sense strand
gugaggaagaaaugaguga

SEQ ID NO: 147834 - RNA, 19 nt, Homo sapiens
  misc_RNA (1)...(19): siRNA sense strand
gaacuccccguauagaaga

SEQ ID NO: 147835 - RNA, 19 nt, Homo sapiens
  misc_RNA (1)...(19): siRNA sense strand
ugaaaaggacucuuggaaa

SEQ ID NO: 147836 - RNA, 19 nt, Homo sapiens
  misc_RNA (1)...(19): siRNA sense strand
gaaaacagaugaaauugug

SEQ ID NO: 147837 - RNA, 19 nt, Homo sapiens
  misc_RNA (1)...(19): siRNA sense strand
gagcaccagugaagaauca

SEQ ID NO: 147838 - RNA, 19 nt, Homo sapiens
  misc_RNA (1)...(19): siRNA sense strand
ugaaacaccugcacgacaa

SEQ ID NO: 147839 - RNA, 19 nt, Homo sapiens
  misc_RNA (1)...(19): siRNA sense strand
uaaagcggcugaagaugga

SEQ ID NO: 147840 - RNA, 19 nt, Homo sapiens
  misc_RNA (1)...(19): siRNA sense strand
agaaaugagugaagaugaa

SEQ ID NO: 147841 - RNA, 19 nt, Homo sapiens
  misc_RNA (1)...(19): siRNA sense strand
gagugaagaugaagaacga

SEQ ID NO: 147842 - RNA, 19 nt, Homo sapiens
  misc_RNA (1)...(19): siRNA sense strand
gcagcaacauggacaagau

SEQ ID NO: 147843 - RNA, 19 nt, Homo sapiens
  misc_RNA (1)...(19): siRNA sense strand
gaagggagcaccagugaag

SEQ ID NO: 147844 - RNA, 19 nt, Homo sapiens
  misc_RNA (1)...(19): siRNA sense strand
gaagaugaagaacgagaaa

SEQ ID NO: 147845 - RNA, 19 nt, Homo sapiens
  misc_RNA (1)...(19): siRNA sense strand
ggaguggucuacagagcaa

SEQ ID NO: 147846 - RNA, 19 nt, Homo sapiens
  misc_RNA (1)...(19): siRNA sense strand
gaagaaaugagugaagaug

SEQ ID NO: 147847 - RNA, 19 nt, Homo sapiens
  misc_RNA (1)...(19): siRNA sense strand
agaaguaagugaggaagaa

SEQ ID NO: 147848 - RNA, 19 nt, Homo sapiens
  misc_RNA (1)...(19): siRNA sense strand
ugacagagggcgacuaugu

SEQ ID NO: 147849 - RNA, 19 nt, Homo sapiens
  misc_RNA (1)...(19): siRNA sense strand
ugaagaagcagaggaagaa

SEQ ID NO: 147850 - RNA, 19 nt, Homo sapiens
  misc_RNA (1)...(19): siRNA sense strand
aaggagggcuucccgauca

SEQ ID NO: 147851 - RNA, 19 nt, Homo sapiens
  misc_RNA (1)...(19): siRNA sense strand
gcuucgaccucaugaacaa

SEQ ID NO: 147852 - RNA, 19 nt, Homo sapiens
  misc_RNA (1)...(19): siRNA sense strand
gaaguaagugaggaagaaa

SEQ ID NO: 147853 - RNA, 19 nt, Homo sapiens
  misc_RNA (1)...(19): siRNA sense strand
caacaucgucaccguuaga

SEQ ID NO: 147854 - RNA, 19 nt, Homo sapiens
  misc_RNA (1)...(19): siRNA sense strand
ugagggagaucaacaccau

SEQ ID NO: 147855 - RNA, 19 nt, Homo sapiens
  misc_RNA (1)...(19): siRNA sense strand
gcucuaaagcggcugaaga

SEQ ID NO: 147856 - RNA, 19 nt, Homo sapiens
  misc_RNA (1)...(19): siRNA sense strand
ggcugaagauggagaagga

SEQ ID NO: 147857 - RNA, 19 nt, Homo sapiens
  misc_RNA (1)...(19): siRNA sense strand
gaugaaauuguggcucuaa

SEQ ID NO: 147858 - RNA, 19 nt, Homo sapiens
  misc_RNA (1)...(19): siRNA sense strand
gaucaacaccauccucaag

SEQ ID NO: 147859 - RNA, 19 nt, Homo sapiens
  misc_RNA (1)...(19): siRNA sense strand
ggaggaggaggaagaggaa

SEQ ID NO: 147860 - RNA, 19 nt, Homo sapiens
  misc_RNA (1)...(19): siRNA sense strand
gaggugaagacccugauga

SEQ ID NO: 147861 - RNA, 19 nt, Homo sapiens
  misc_RNA (1)...(19): siRNA sense strand
gaaucaggcucagguucug

SEQ ID NO: 147862 - RNA, 19 nt, Homo sapiens
  misc_RNA (1)...(19): siRNA sense strand
ucacgucgcugagggagau

SEQ ID NO: 147863 - RNA, 19 nt, Homo sapiens
  misc_RNA (1)...(19): siRNA sense strand
agucagaaaucgaucagau

SEQ ID NO: 147864 - RNA, 19 nt, Homo sapiens
  misc_RNA (1)...(19): siRNA sense strand
gaaauuguggcucuaaagc

SEQ ID NO: 147865 - RNA, 19 nt, Homo sapiens
  misc_RNA (1)...(19): siRNA sense strand
gucaguggguugcaucuuc

SEQ ID NO: 147866 - RNA, 19 nt, Homo sapiens
  misc_RNA (1)...(19): siRNA sense strand
ugaagacccugaugaucca

SEQ ID NO: 147867 - RNA, 19 nt, Homo sapiens
  misc_RNA (1)...(19): siRNA sense strand
ggaagaaaugagugaagau

SEQ ID NO: 147868 - RNA, 19 nt, Homo sapiens
  misc_RNA (1)...(19): siRNA sense strand
gaagaacgagaaaaugaaa

SEQ ID NO: 147869 - RNA, 19 nt, Homo sapiens
  misc_RNA (1)...(19): siRNA sense strand
aggaagaaaugagugaaga

SEQ ID NO: 147870 - RNA, 19 nt, Homo sapiens
  misc_RNA (1)...(19): siRNA sense strand
gcaacauggacaagaucua

SEQ ID NO: 147871 - RNA, 19 nt, Homo sapiens
  misc_RNA (1)...(19): siRNA sense strand
gagugaagaagcagaggaa

SEQ ID NO: 147872 - RNA, 19 nt, Homo sapiens
  misc_RNA (1)...(19): siRNA sense strand
ggaagucagaaaucgauca

SEQ ID NO: 147873 - RNA, 19 nt, Homo sapiens
  misc_RNA (1)...(19): siRNA sense strand
cccaacaucgucaccguua

SEQ ID NO: 147874 - RNA, 19 nt, Homo sapiens
  misc_RNA (1)...(19): siRNA sense strand
gaaaugagugaagaugaag

SEQ ID NO: 147875 - RNA, 19 nt, Homo sapiens
  misc_RNA (1)...(19): siRNA sense strand
ggaagaggaggaggaggaa

SEQ ID NO: 147876 - RNA, 19 nt, Homo sapiens
  misc_RNA (1)...(19): siRNA sense strand
caaaagacaagaaaacaga

SEQ ID NO: 147877 - RNA, 19 nt, Homo sapiens
  misc_RNA (1)...(19): siRNA sense strand
gaucgaggagggcaccuau

SEQ ID NO: 147878 - RNA, 19 nt, Homo sapiens
  misc_RNA (1)...(19): siRNA sense strand
cgaagaaguaagugaggaa

SEQ ID NO: 147879 - RNA, 19 nt, Homo sapiens
  misc_RNA (1)...(19): siRNA sense strand
cgucaccguuagagagauu

SEQ ID NO: 147880 - RNA, 19 nt, Homo sapiens
  misc_RNA (1)...(19): siRNA sense strand
gugaagaagcagaggaaga

SEQ ID NO: 147881 - RNA, 19 nt, Homo sapiens
  misc_RNA (1)...(19): siRNA sense strand
caacauggacaagaucuac

SEQ ID NO: 147882 - RNA, 19 nt, Homo sapiens
  misc_RNA (1)...(19): siRNA sense strand
ggaagggagcaccagugaa

SEQ ID NO: 147883 - RNA, 19 nt, Homo sapiens
  misc_RNA (1)...(19): siRNA sense strand
gcagaaucaggcucagguu

SEQ ID NO: 147884 - RNA, 19 nt, Homo sapiens
  misc_RNA (1)...(19): siRNA sense strand
guaagugaggaagaaauga

SEQ ID NO: 147885 - RNA, 19 nt, Homo sapiens
  misc_RNA (1)...(19): siRNA sense strand
aagaaaugagugaagauga

SEQ ID NO: 147886 - RNA, 19 nt, Homo sapiens
  misc_RNA (1)...(19): siRNA sense strand
aggacggccucaagcauga

SEQ ID NO: 147887 - RNA, 19 nt, Homo sapiens
  misc_RNA (1)...(19): siRNA sense strand
gcaccuauggaguggucua

SEQ ID NO: 147888 - RNA, 19 nt, Homo sapiens
  misc_RNA (1)...(19): siRNA sense strand
gacagagggcgacuaugug

SEQ ID NO: 147889 - RNA, 19 nt, Homo sapiens
  misc_RNA (1)...(19): siRNA sense strand
gaggagaccggcagcaacu

SEQ ID NO: 147890 - RNA, 19 nt, Homo sapiens
  misc_RNA (1)...(19): siRNA sense strand
gaagauggagaaggagaag

SEQ ID NO: 147891 - RNA, 19 nt, Homo sapiens
  misc_RNA (1)...(19): siRNA sense strand
gaggaagaaaugagugaag

SEQ ID NO: 147892 - RNA, 19 nt, Homo sapiens
  misc_RNA (1)...(19): siRNA sense strand
ugaagaugaagaacgagaa

SEQ ID NO: 147893 - RNA, 19 nt, Homo sapiens
  misc_RNA (1)...(19): siRNA sense strand
ucccagcagucaagaagau

SEQ ID NO: 147894 - RNA, 19 nt, Homo sapiens
  misc_RNA (1)...(19): siRNA sense strand
agaagcagaggaagaagug

SEQ ID NO: 147895 - RNA, 19 nt, Homo sapiens
  misc_RNA (1)...(19): siRNA sense strand
gugaggaagaaaugaguga

SEQ ID NO: 147896 - RNA, 19 nt, Homo sapiens
  misc_RNA (1)...(19): siRNA sense strand
gcaccagugaagaaucaga

SEQ ID NO: 147897 - RNA, 19 nt, Homo sapiens
  misc_RNA (1)...(19): siRNA sense strand
ugaagauggagaaggagaa

SEQ ID NO: 147898 - RNA, 19 nt, Homo sapiens
  misc_RNA (1)...(19): siRNA sense strand
aagaggaggaggaggaaga

SEQ ID NO: 147899 - RNA, 19 nt, Homo sapiens
  misc_RNA (1)...(19): siRNA sense strand
acaagguguucaaggaucu

SEQ ID NO: 147900 - RNA, 19 nt, Homo sapiens
  misc_RNA (1)...(19): siRNA sense strand
gaguacggauccccucuga

SEQ ID NO: 147901 - RNA, 19 nt, Homo sapiens
  misc_RNA (1)...(19): siRNA sense strand
ccaacaucgucaccguuag

SEQ ID NO: 147902 - RNA, 19 nt, Homo sapiens
  misc_RNA (1)...(19): siRNA sense strand
gaagucagaaaucgaucag

SEQ ID NO: 147903 - RNA, 19 nt, Homo sapiens
  misc_RNA (1)...(19): siRNA sense strand
ggugaagacccugaugauc

SEQ ID NO: 147904 - RNA, 19 nt, Homo sapiens
  misc_RNA (1)...(19): siRNA sense strand
ugaaauuguggcucuaaag

SEQ ID NO: 147905 - RNA, 19 nt, Homo sapiens
  misc_RNA (1)...(19): siRNA sense strand
gggcuucgaccucaugaac

SEQ ID NO: 147906 - RNA, 19 nt, Homo sapiens
  misc_RNA (1)...(19): siRNA sense strand
ggaggugaagacccugaug

SEQ ID NO: 147907 - RNA, 19 nt, Homo sapiens
  misc_RNA (1)...(19): siRNA sense strand
ggagaccggcagcaacucu

SEQ ID NO: 147908 - RNA, 19 nt, Homo sapiens
  misc_RNA (1)...(19): siRNA sense strand
gaaacgacaucgagaagaa

SEQ ID NO: 147909 - RNA, 19 nt, Homo sapiens
  misc_RNA (1)...(19): siRNA sense strand
gcaaaugucucggaaagaa

SEQ ID NO: 147910 - RNA, 19 nt, Homo sapiens
  misc_RNA (1)...(19): siRNA sense strand
gaaaacagaugaaauugug

SEQ ID NO: 147911 - RNA, 19 nt, Homo sapiens
  misc_RNA (1)...(19): siRNA sense strand
gcauggagaucacaauaag

SEQ ID NO: 147912 - RNA, 19 nt, Homo sapiens
  misc_RNA (1)...(19): siRNA sense strand
gagcaccagugaagaauca

SEQ ID NO: 147913 - RNA, 19 nt, Homo sapiens
  misc_RNA (1)...(19): siRNA sense strand
ugaaacaccugcacgacaa

SEQ ID NO: 147914 - RNA, 19 nt, Homo sapiens
  misc_RNA (1)...(19): siRNA sense strand
uaaagcggcugaagaugga

SEQ ID NO: 147915 - RNA, 19 nt, Homo sapiens
  misc_RNA (1)...(19): siRNA sense strand
agaaaugagugaagaugaa

SEQ ID NO: 147916 - RNA, 19 nt, Homo sapiens
  misc_RNA (1)...(19): siRNA sense strand
gagugaagaugaagaacga

SEQ ID NO: 147917 - RNA, 19 nt, Homo sapiens
  misc_RNA (1)...(19): siRNA sense strand
gcagcaacauggacaagau

SEQ ID NO: 147918 - RNA, 19 nt, Homo sapiens
  misc_RNA (1)...(19): siRNA sense strand
gaagggagcaccagugaag

SEQ ID NO: 147919 - RNA, 19 nt, Homo sapiens
  misc_RNA (1)...(19): siRNA sense strand
gagaagacucuauggaaga

SEQ ID NO: 147920 - RNA, 19 nt, Homo sapiens
  misc_RNA (1)...(19): siRNA sense strand
ggaguggucuacagagcaa

SEQ ID NO: 147921 - RNA, 19 nt, Homo sapiens
  misc_RNA (1)...(19): siRNA sense strand
gaagaugaagaacgagaaa

SEQ ID NO: 147922 - RNA, 19 nt, Homo sapiens
  misc_RNA (1)...(19): siRNA sense strand
gcacgaacgucggaaacga

SEQ ID NO: 147923 - RNA, 19 nt, Homo sapiens
  misc_RNA (1)...(19): siRNA sense strand
cagcaaaugucucggaaag

SEQ ID NO: 147924 - RNA, 19 nt, Homo sapiens
  misc_RNA (1)...(19): siRNA sense strand
cagaaaagaugaaaagaga

SEQ ID NO: 147925 - RNA, 19 nt, Homo sapiens
  misc_RNA (1)...(19): siRNA sense strand
gaagaaaugagugaagaug

SEQ ID NO: 147926 - RNA, 19 nt, Homo sapiens
  misc_RNA (1)...(19): siRNA sense strand
agaaguaagugaggaagaa

SEQ ID NO: 147927 - RNA, 19 nt, Homo sapiens
  misc_RNA (1)...(19): siRNA sense strand
ggaagacagaggagaagaa

SEQ ID NO: 147928 - RNA, 19 nt, Homo sapiens
  misc_RNA (1)...(19): siRNA sense strand
ugacagagggcgacuaugu

SEQ ID NO: 147929 - RNA, 19 nt, Homo sapiens
  misc_RNA (1)...(19): siRNA sense strand
gagaagaacaggauaaagc

SEQ ID NO: 147930 - RNA, 19 nt, Homo sapiens
  misc_RNA (1)...(19): siRNA sense strand
gagcauuccaggagagaaa

SEQ ID NO: 147931 - RNA, 19 nt, Homo sapiens
  misc_RNA (1)...(19): siRNA sense strand
ugaagaagcagaggaagaa

SEQ ID NO: 147932 - RNA, 19 nt, Homo sapiens
  misc_RNA (1)...(19): siRNA sense strand
aaggagggcuucccgauca

SEQ ID NO: 147933 - RNA, 19 nt, Homo sapiens
  misc_RNA (1)...(19): siRNA sense strand
gcuucgaccucaugaacaa

SEQ ID NO: 147934 - RNA, 19 nt, Homo sapiens
  misc_RNA (1)...(19): siRNA sense strand
gaaguaagugaggaagaaa

SEQ ID NO: 147935 - RNA, 19 nt, Homo sapiens
  misc_RNA (1)...(19): siRNA sense strand
caacaucgucaccguuaga

SEQ ID NO: 147936 - RNA, 19 nt, Homo sapiens
  misc_RNA (1)...(19): siRNA sense strand
ugagggagaucaacaccau

SEQ ID NO: 147937 - RNA, 19 nt, Homo sapiens
  misc_RNA (1)...(19): siRNA sense strand
gcucuaaagcggcugaaga

SEQ ID NO: 147938 - RNA, 19 nt, Homo sapiens
  misc_RNA (1)...(19): siRNA sense strand
ggcugaagauggagaagga

SEQ ID NO: 147939 - RNA, 19 nt, Homo sapiens
  misc_RNA (1)...(19): siRNA sense strand
agacagaggagaagaagau

SEQ ID NO: 147940 - RNA, 19 nt, Homo sapiens
  misc_RNA (1)...(19): siRNA sense strand
gaucaacaccauccucaag

SEQ ID NO: 147941 - RNA, 19 nt, Homo sapiens
  misc_RNA (1)...(19): siRNA sense strand
gaugaaauuguggcucuaa

SEQ ID NO: 147942 - RNA, 19 nt, Homo sapiens
  misc_RNA (1)...(19): siRNA sense strand
gaaucaggcucagguucug

SEQ ID NO: 147943 - RNA, 19 nt, Homo sapiens
  misc_RNA (1)...(19): siRNA sense strand
gaggugaagacccugauga

SEQ ID NO: 147944 - RNA, 19 nt, Homo sapiens
  misc_RNA (1)...(19): siRNA sense strand
ggaggaggaggaagaggaa

SEQ ID NO: 147945 - RNA, 19 nt, Homo sapiens
  misc_RNA (1)...(19): siRNA sense strand
ggaaacgacaucgagaaga

SEQ ID NO: 147946 - RNA, 19 nt, Homo sapiens
  misc_RNA (1)...(19): siRNA sense strand
agucagaaaucgaucagau

SEQ ID NO: 147947 - RNA, 19 nt, Homo sapiens
  misc_RNA (1)...(19): siRNA sense strand
ucacgucgcugagggagau

SEQ ID NO: 147948 - RNA, 19 nt, Homo sapiens
  misc_RNA (1)...(19): siRNA sense strand
gaaauuguggcucuaaagc

SEQ ID NO: 147949 - RNA, 19 nt, Homo sapiens
  misc_RNA (1)...(19): siRNA sense strand
gucaguggguugcaucuuc

SEQ ID NO: 147950 - RNA, 19 nt, Homo sapiens
  misc_RNA (1)...(19): siRNA sense strand
ugaagacccugaugaucca

SEQ ID NO: 147951 - RNA, 19 nt, Homo sapiens
  misc_RNA (1)...(19): siRNA sense strand
caaaugucucggaaagaaa

SEQ ID NO: 147952 - RNA, 19 nt, Homo sapiens
  misc_RNA (1)...(19): siRNA sense strand
gaagaacgagaaaaugaaa

SEQ ID NO: 147953 - RNA, 19 nt, Homo sapiens
  misc_RNA (1)...(19): siRNA sense strand
ggaagaaaugagugaagau

SEQ ID NO: 147954 - RNA, 19 nt, Homo sapiens
  misc_RNA (1)...(19): siRNA sense strand
gaagacagaggagaagaag

SEQ ID NO: 147955 - RNA, 19 nt, Homo sapiens
  misc_RNA (1)...(19): siRNA sense strand
agacagaagagaagggaaa

SEQ ID NO: 147956 - RNA, 19 nt, Homo sapiens
  misc_RNA (1)...(19): siRNA sense strand
gaaugggaaagacagaaga

SEQ ID NO: 147957 - RNA, 19 nt, Homo sapiens
  misc_RNA (1)...(19): siRNA sense strand
aggaagaaaugagugaaga

SEQ ID NO: 147958 - RNA, 19 nt, Homo sapiens
  misc_RNA (1)...(19): siRNA sense strand
gaggagaagaagaugauuc

SEQ ID NO: 147959 - RNA, 19 nt, Homo sapiens
  misc_RNA (1)...(19): siRNA sense strand
gcaacauggacaagaucua

SEQ ID NO: 147960 - RNA, 19 nt, Homo sapiens
  misc_RNA (1)...(19): siRNA sense strand
auaaggaacuccccguaua

SEQ ID NO: 147961 - RNA, 19 nt, Homo sapiens
  misc_RNA (1)...(19): siRNA sense strand
gagugaagaagcagaggaa

SEQ ID NO: 147962 - RNA, 19 nt, Homo sapiens
  misc_RNA (1)...(19): siRNA sense strand
ggaagucagaaaucgauca

SEQ ID NO: 147963 - RNA, 19 nt, Homo sapiens
  misc_RNA (1)...(19): siRNA sense strand
cccaacaucgucaccguua

SEQ ID NO: 147964 - RNA, 19 nt, Homo sapiens
  misc_RNA (1)...(19): siRNA sense strand
gggaaagacagaagagaag

SEQ ID NO: 147965 - RNA, 19 nt, Homo sapiens
  misc_RNA (1)...(19): siRNA sense strand
caaaagacaagaaaacaga

SEQ ID NO: 147966 - RNA, 19 nt, Homo sapiens
  misc_RNA (1)...(19): siRNA sense strand
gaucgaggagggcaccuau

SEQ ID NO: 147967 - RNA, 19 nt, Homo sapiens
  misc_RNA (1)...(19): siRNA sense strand
gaaaugagugaagaugaag

SEQ ID NO: 147968 - RNA, 19 nt, Homo sapiens
  misc_RNA (1)...(19): siRNA sense strand
ggaagaggaggaggaggaa

SEQ ID NO: 147969 - RNA, 19 nt, Homo sapiens
  misc_RNA (1)...(19): siRNA sense strand
caugcuagagugaaagaaa

SEQ ID NO: 147970 - RNA, 19 nt, Homo sapiens
  misc_RNA (1)...(19): siRNA sense strand
gaagagaaaauggaagaaa

SEQ ID NO: 147971 - RNA, 19 nt, Homo sapiens
  misc_RNA (1)...(19): siRNA sense strand
ggaaugggaaagacagaag

SEQ ID NO: 147972 - RNA, 19 nt, Homo sapiens
  misc_RNA (1)...(19): siRNA sense strand
cgucaccguuagagagauu

SEQ ID NO: 147973 - RNA, 19 nt, Homo sapiens
  misc_RNA (1)...(19): siRNA sense strand
gugaagaagcagaggaaga

SEQ ID NO: 147974 - RNA, 19 nt, Homo sapiens
  misc_RNA (1)...(19): siRNA sense strand
cgaagaaguaagugaggaa

SEQ ID NO: 147975 - RNA, 19 nt, Homo sapiens
  misc_RNA (1)...(19): siRNA sense strand
caacauggacaagaucuac

SEQ ID NO: 147976 - RNA, 19 nt, Homo sapiens
  misc_RNA (1)...(19): siRNA sense strand
ggaagggagcaccagugaa

SEQ ID NO: 147977 - RNA, 19 nt, Homo sapiens
  misc_RNA (1)...(19): siRNA sense strand
gcagaaucaggcucagguu

SEQ ID NO: 147978 - RNA, 19 nt, Homo sapiens
  misc_RNA (1)...(19): siRNA sense strand
cagaggagaagaagaugau

SEQ ID NO: 147979 - RNA, 19 nt, Homo sapiens
  misc_RNA (1)...(19): siRNA sense strand
guaagugaggaagaaauga

SEQ ID NO: 147980 - RNA, 19 nt, Homo sapiens
  misc_RNA (1)...(19): siRNA sense strand
cagaagagaagggaaaugg

SEQ ID NO: 147981 - RNA, 19 nt, Homo sapiens
  misc_RNA (1)...(19): siRNA sense strand
aggacggccucaagcauga

SEQ ID NO: 147982 - RNA, 19 nt, Homo sapiens
  misc_RNA (1)...(19): siRNA sense strand
gcaccuauggaguggucua

SEQ ID NO: 147983 - RNA, 19 nt, Homo sapiens
  misc_RNA (1)...(19): siRNA sense strand
gacagagggcgacuaugug

SEQ ID NO: 147984 - RNA, 19 nt, Homo sapiens
  misc_RNA (1)...(19): siRNA sense strand
aagaaaugagugaagauga

SEQ ID NO: 147985 - RNA, 19 nt, Homo sapiens
  misc_RNA (1)...(19): siRNA sense strand
ggaaauggcaagggagcau

SEQ ID NO: 147986 - RNA, 19 nt, Homo sapiens
  misc_RNA (1)...(19): siRNA sense strand
gaagauggagaaggagaag

SEQ ID NO: 147987 - RNA, 19 nt, Homo sapiens
  misc_RNA (1)...(19): siRNA sense strand
gaggagaccggcagcaacu

SEQ ID NO: 147988 - RNA, 19 nt, Homo sapiens
  misc_RNA (1)...(19): siRNA sense strand
gaggaagaaaugagugaag

SEQ ID NO: 147989 - RNA, 19 nt, Homo sapiens
  misc_RNA (1)...(19): siRNA sense strand
agaaagagagcacgaacgu

SEQ ID NO: 147990 - RNA, 19 nt, Homo sapiens
  misc_RNA (1)...(19): siRNA sense strand
ugggaaagacagaagagaa

SEQ ID NO: 147991 - RNA, 19 nt, Homo sapiens
  misc_RNA (1)...(19): siRNA sense strand
ucccagcagucaagaagau

SEQ ID NO: 147992 - RNA, 19 nt, Homo sapiens
  misc_RNA (1)...(19): siRNA sense strand
uauggaagacagaggagaa

SEQ ID NO: 147993 - RNA, 19 nt, Homo sapiens
  misc_RNA (1)...(19): siRNA sense strand
agaagcagaggaagaagug

SEQ ID NO: 147994 - RNA, 19 nt, Homo sapiens
  misc_RNA (1)...(19): siRNA sense strand
ugaagaugaagaacgagaa

SEQ ID NO: 147995 - RNA, 19 nt, Homo sapiens
  misc_RNA (1)...(19): siRNA sense strand
gugaggaagaaaugaguga

SEQ ID NO: 147996 - RNA, 19 nt, Homo sapiens
  misc_RNA (1)...(19): siRNA sense strand
gaacuccccguauagaaga

SEQ ID NO: 147997 - RNA, 19 nt, Homo sapiens
  misc_RNA (1)...(19): siRNA sense strand
gcaccagugaagaaucaga

SEQ ID NO: 147998 - RNA, 19 nt, Homo sapiens
  misc_RNA (1)...(19): siRNA sense strand
gaugaaaagagaaaagaga

SEQ ID NO: 147999 - RNA, 19 nt, Homo sapiens
  misc_RNA (1)...(19): siRNA sense strand
caucgagaagaacaggaua

SEQ ID NO: 148000 - RNA, 19 nt, Homo sapiens
  misc_RNA (1)...(19): siRNA sense strand
aagaggaggaggaggaaga

SEQ ID NO: 148001 - RNA, 19 nt, Homo sapiens
  misc_RNA (1)...(19): siRNA sense strand
acaagguguucaaggaucu

SEQ ID NO: 148002 - RNA, 19 nt, Homo sapiens
  misc_RNA (1)...(19): siRNA sense strand
gaguacggauccccucuga

SEQ ID NO: 148003 - RNA, 19 nt, Homo sapiens
  misc_RNA (1)...(19): siRNA sense strand
ugaagauggagaaggagaa

SEQ ID NO: 148004 - RNA, 19 nt, Homo sapiens
  misc_RNA (1)...(19): siRNA sense strand
ccaacaucgucaccguuag

SEQ ID NO: 148005 - RNA, 19 nt, Homo sapiens
  misc_RNA (1)...(19): siRNA sense strand
gaagucagaaaucgaucag

SEQ ID NO: 148006 - RNA, 19 nt, Homo sapiens
  misc_RNA (1)...(19): siRNA sense strand
ggugaagacccugaugauc

SEQ ID NO: 148007 - RNA, 19 nt, Homo sapiens
  misc_RNA (1)...(19): siRNA sense strand
gggcuucgaccucaugaac

SEQ ID NO: 148008 - RNA, 19 nt, Homo sapiens
  misc_RNA (1)...(19): siRNA sense strand
gaaacgacaucgagaagaa

SEQ ID NO: 148009 - RNA, 19 nt, Homo sapiens
  misc_RNA (1)...(19): siRNA sense strand
gcaaaugucucggaaagaa

SEQ ID NO: 148010 - RNA, 19 nt, Homo sapiens
  misc_RNA (1)...(19): siRNA sense strand
gaaaacagaugaaauugug

SEQ ID NO: 148011 - RNA, 19 nt, Homo sapiens
  misc_RNA (1)...(19): siRNA sense strand
gcauggagaucacaauaag

SEQ ID NO: 148012 - RNA, 19 nt, Homo sapiens
  misc_RNA (1)...(19): siRNA sense strand
gagcaccagugaagaauca

SEQ ID NO: 148013 - RNA, 19 nt, Homo sapiens
  misc_RNA (1)...(19): siRNA sense strand
ugaaacaccugcacgacaa

SEQ ID NO: 148014 - RNA, 19 nt, Homo sapiens
  misc_RNA (1)...(19): siRNA sense strand
uaaagcggcugaagaugga

SEQ ID NO: 148015 - RNA, 19 nt, Homo sapiens
  misc_RNA (1)...(19): siRNA sense strand
agaaaugagugaagaugaa

SEQ ID NO: 148016 - RNA, 19 nt, Homo sapiens
  misc_RNA (1)...(19): siRNA sense strand
gagugaagaugaagaacga

SEQ ID NO: 148017 - RNA, 19 nt, Homo sapiens
  misc_RNA (1)...(19): siRNA sense strand
gcagcaacauggacaagau

SEQ ID NO: 148018 - RNA, 19 nt, Homo sapiens
  misc_RNA (1)...(19): siRNA sense strand
gaagggagcaccagugaag

SEQ ID NO: 148019 - RNA, 19 nt, Homo sapiens
  misc_RNA (1)...(19): siRNA sense strand
gagaagacucuauggaaga

SEQ ID NO: 148020 - RNA, 19 nt, Homo sapiens
  misc_RNA (1)...(19): siRNA sense strand
ggaguggucuacagagcaa

SEQ ID NO: 148021 - RNA, 19 nt, Homo sapiens
  misc_RNA (1)...(19): siRNA sense strand
gaagaugaagaacgagaaa

SEQ ID NO: 148022 - RNA, 19 nt, Homo sapiens
  misc_RNA (1)...(19): siRNA sense strand
gcacgaacgucggaaacga

SEQ ID NO: 148023 - RNA, 19 nt, Homo sapiens
  misc_RNA (1)...(19): siRNA sense strand
cagcaaaugucucggaaag

SEQ ID NO: 148024 - RNA, 19 nt, Homo sapiens
  misc_RNA (1)...(19): siRNA sense strand
cagaaaagaugaaaagaga

SEQ ID NO: 148025 - RNA, 19 nt, Homo sapiens
  misc_RNA (1)...(19): siRNA sense strand
gaagaaaugagugaagaug

SEQ ID NO: 148026 - RNA, 19 nt, Homo sapiens
  misc_RNA (1)...(19): siRNA sense strand
agaaguaagugaggaagaa

SEQ ID NO: 148027 - RNA, 19 nt, Homo sapiens
  misc_RNA (1)...(19): siRNA sense strand
ggaagacagaggagaagaa

SEQ ID NO: 148028 - RNA, 19 nt, Homo sapiens
  misc_RNA (1)...(19): siRNA sense strand
ugacagagggcgacuaugu

SEQ ID NO: 148029 - RNA, 19 nt, Homo sapiens
  misc_RNA (1)...(19): siRNA sense strand
gagaagaacaggauaaagc

SEQ ID NO: 148030 - RNA, 19 nt, Homo sapiens
  misc_RNA (1)...(19): siRNA sense strand
gagcauuccaggagagaaa

SEQ ID NO: 148031 - RNA, 19 nt, Homo sapiens
  misc_RNA (1)...(19): siRNA sense strand
ugaagaagcagaggaagaa

SEQ ID NO: 148032 - RNA, 19 nt, Homo sapiens
  misc_RNA (1)...(19): siRNA sense strand
aaggagggcuucccgauca

SEQ ID NO: 148033 - RNA, 19 nt, Homo sapiens
  misc_RNA (1)...(19): siRNA sense strand
gcuucgaccucaugaacaa

SEQ ID NO: 148034 - RNA, 19 nt, Homo sapiens
  misc_RNA (1)...(19): siRNA sense strand
gaaguaagugaggaagaaa

SEQ ID NO: 148035 - RNA, 19 nt, Homo sapiens
  misc_RNA (1)...(19): siRNA sense strand
caacaucgucaccguuaga

SEQ ID NO: 148036 - RNA, 19 nt, Homo sapiens
  misc_RNA (1)...(19): siRNA sense strand
ugagggagaucaacaccau

SEQ ID NO: 148037 - RNA, 19 nt, Homo sapiens
  misc_RNA (1)...(19): siRNA sense strand
gcucuaaagcggcugaaga

SEQ ID NO: 148038 - RNA, 19 nt, Homo sapiens
  misc_RNA (1)...(19): siRNA sense strand
ggcugaagauggagaagga

SEQ ID NO: 148039 - RNA, 19 nt, Homo sapiens
  misc_RNA (1)...(19): siRNA sense strand
agacagaggagaagaagau

SEQ ID NO: 148040 - RNA, 19 nt, Homo sapiens
  misc_RNA (1)...(19): siRNA sense strand
gaucaacaccauccucaag

SEQ ID NO: 148041 - RNA, 19 nt, Homo sapiens
  misc_RNA (1)...(19): siRNA sense strand
gaugaaauuguggcucuaa

SEQ ID NO: 148042 - RNA, 19 nt, Homo sapiens
  misc_RNA (1)...(19): siRNA sense strand
gaaucaggcucagguucug

SEQ ID NO: 148043 - RNA, 19 nt, Homo sapiens
  misc_RNA (1)...(19): siRNA sense strand
gaggugaagacccugauga

SEQ ID NO: 148044 - RNA, 19 nt, Homo sapiens
  misc_RNA (1)...(19): siRNA sense strand
ggaggaggaggaagaggaa

SEQ ID NO: 148045 - RNA, 19 nt, Homo sapiens
  misc_RNA (1)...(19): siRNA sense strand
ggaaacgacaucgagaaga

SEQ ID NO: 148046 - RNA, 19 nt, Homo sapiens
  misc_RNA (1)...(19): siRNA sense strand
agucagaaaucgaucagau

SEQ ID NO: 148047 - RNA, 19 nt, Homo sapiens
  misc_RNA (1)...(19): siRNA sense strand
ucacgucgcugagggagau

SEQ ID NO: 148048 - RNA, 19 nt, Homo sapiens
  misc_RNA (1)...(19): siRNA sense strand
gaaauuguggcucuaaagc

SEQ ID NO: 148049 - RNA, 19 nt, Homo sapiens
  misc_RNA (1)...(19): siRNA sense strand
gucaguggguugcaucuuc

SEQ ID NO: 148050 - RNA, 19 nt, Homo sapiens
  misc_RNA (1)...(19): siRNA sense strand
ugaagacccugaugaucca

SEQ ID NO: 148051 - RNA, 19 nt, Homo sapiens
  misc_RNA (1)...(19): siRNA sense strand
caaaugucucggaaagaaa

SEQ ID NO: 148052 - RNA, 19 nt, Homo sapiens
  misc_RNA (1)...(19): siRNA sense strand
gaagaacgagaaaaugaaa

SEQ ID NO: 148053 - RNA, 19 nt, Homo sapiens
  misc_RNA (1)...(19): siRNA sense strand
ggaagaaaugagugaagau

SEQ ID NO: 148054 - RNA, 19 nt, Homo sapiens
  misc_RNA (1)...(19): siRNA sense strand
gaagacagaggagaagaag

SEQ ID NO: 148055 - RNA, 19 nt, Homo sapiens
  misc_RNA (1)...(19): siRNA sense strand
agacagaagagaagggaaa

SEQ ID NO: 148056 - RNA, 19 nt, Homo sapiens
  misc_RNA (1)...(19): siRNA sense strand
gaaugggaaagacagaaga

SEQ ID NO: 148057 - RNA, 19 nt, Homo sapiens
  misc_RNA (1)...(19): siRNA sense strand
aggaagaaaugagugaaga

SEQ ID NO: 148058 - RNA, 19 nt, Homo sapiens
  misc_RNA (1)...(19): siRNA sense strand
gaggagaagaagaugauuc

SEQ ID NO: 148059 - RNA, 19 nt, Homo sapiens
  misc_RNA (1)...(19): siRNA sense strand
gcaacauggacaagaucua

SEQ ID NO: 148060 - RNA, 19 nt, Homo sapiens
  misc_RNA (1)...(19): siRNA sense strand
auaaggaacuccccguaua

SEQ ID NO: 148061 - RNA, 19 nt, Homo sapiens
  misc_RNA (1)...(19): siRNA sense strand
gagugaagaagcagaggaa

SEQ ID NO: 148062 - RNA, 19 nt, Homo sapiens
  misc_RNA (1)...(19): siRNA sense strand
ggaagucagaaaucgauca

SEQ ID NO: 148063 - RNA, 19 nt, Homo sapiens
  misc_RNA (1)...(19): siRNA sense strand
cccaacaucgucaccguua

SEQ ID NO: 148064 - RNA, 19 nt, Homo sapiens
  misc_RNA (1)...(19): siRNA sense strand
gggaaagacagaagagaag

SEQ ID NO: 148065 - RNA, 19 nt, Homo sapiens
  misc_RNA (1)...(19): siRNA sense strand
caaaagacaagaaaacaga

SEQ ID NO: 148066 - RNA, 19 nt, Homo sapiens
  misc_RNA (1)...(19): siRNA sense strand
gaucgaggagggcaccuau

SEQ ID NO: 148067 - RNA, 19 nt, Homo sapiens
  misc_RNA (1)...(19): siRNA sense strand
gaaaugagugaagaugaag

SEQ ID NO: 148068 - RNA, 19 nt, Homo sapiens
  misc_RNA (1)...(19): siRNA sense strand
ggaagaggaggaggaggaa

SEQ ID NO: 148069 - RNA, 19 nt, Homo sapiens
  misc_RNA (1)...(19): siRNA sense strand
caugcuagagugaaagaaa

SEQ ID NO: 148070 - RNA, 19 nt, Homo sapiens
  misc_RNA (1)...(19): siRNA sense strand
gaagagaaaauggaagaaa

SEQ ID NO: 148071 - RNA, 19 nt, Homo sapiens
  misc_RNA (1)...(19): siRNA sense strand
ggaaugggaaagacagaag

SEQ ID NO: 148072 - RNA, 19 nt, Homo sapiens
  misc_RNA (1)...(19): siRNA sense strand
cgucaccguuagagagauu

SEQ ID NO: 148073 - RNA, 19 nt, Homo sapiens
  misc_RNA (1)...(19): siRNA sense strand
gugaagaagcagaggaaga

SEQ ID NO: 148074 - RNA, 19 nt, Homo sapiens
  misc_RNA (1)...(19): siRNA sense strand
cgaagaaguaagugaggaa

SEQ ID NO: 148075 - RNA, 19 nt, Homo sapiens
  misc_RNA (1)...(19): siRNA sense strand
caacauggacaagaucuac

SEQ ID NO: 148076 - RNA, 19 nt, Homo sapiens
  misc_RNA (1)...(19): siRNA sense strand
ggaagggagcaccagugaa

SEQ ID NO: 148077 - RNA, 19 nt, Homo sapiens
  misc_RNA (1)...(19): siRNA sense strand
gcagaaucaggcucagguu

SEQ ID NO: 148078 - RNA, 19 nt, Homo sapiens
  misc_RNA (1)...(19): siRNA sense strand
cagaggagaagaagaugau

SEQ ID NO: 148079 - RNA, 19 nt, Homo sapiens
  misc_RNA (1)...(19): siRNA sense strand
guaagugaggaagaaauga

SEQ ID NO: 148080 - RNA, 19 nt, Homo sapiens
  misc_RNA (1)...(19): siRNA sense strand
cagaagagaagggaaaugg

SEQ ID NO: 148081 - RNA, 19 nt, Homo sapiens
  misc_RNA (1)...(19): siRNA sense strand
aggacggccucaagcauga

SEQ ID NO: 148082 - RNA, 19 nt, Homo sapiens
  misc_RNA (1)...(19): siRNA sense strand
gcaccuauggaguggucua

SEQ ID NO: 148083 - RNA, 19 nt, Homo sapiens
  misc_RNA (1)...(19): siRNA sense strand
gacagagggcgacuaugug

SEQ ID NO: 148084 - RNA, 19 nt, Homo sapiens
  misc_RNA (1)...(19): siRNA sense strand
aagaaaugagugaagauga

SEQ ID NO: 148085 - RNA, 19 nt, Homo sapiens
  misc_RNA (1)...(19): siRNA sense strand
ggaaauggcaagggagcau

SEQ ID NO: 148086 - RNA, 19 nt, Homo sapiens
  misc_RNA (1)...(19): siRNA sense strand
gaagauggagaaggagaag

SEQ ID NO: 148087 - RNA, 19 nt, Homo sapiens
  misc_RNA (1)...(19): siRNA sense strand
gaggagaccggcagcaacu

SEQ ID NO: 148088 - RNA, 19 nt, Homo sapiens
  misc_RNA (1)...(19): siRNA sense strand
gaggaagaaaugagugaag

SEQ ID NO: 148089 - RNA, 19 nt, Homo sapiens
  misc_RNA (1)...(19): siRNA sense strand
agaaagagagcacgaacgu

SEQ ID NO: 148090 - RNA, 19 nt, Homo sapiens
  misc_RNA (1)...(19): siRNA sense strand
ugggaaagacagaagagaa

SEQ ID NO: 148091 - RNA, 19 nt, Homo sapiens
  misc_RNA (1)...(19): siRNA sense strand
ucccagcagucaagaagau

SEQ ID NO: 148092 - RNA, 19 nt, Homo sapiens
  misc_RNA (1)...(19): siRNA sense strand
uauggaagacagaggagaa

SEQ ID NO: 148093 - RNA, 19 nt, Homo sapiens
  misc_RNA (1)...(19): siRNA sense strand
agaagcagaggaagaagug

SEQ ID NO: 148094 - RNA, 19 nt, Homo sapiens
  misc_RNA (1)...(19): siRNA sense strand
ugaagaugaagaacgagaa

SEQ ID NO: 148095 - RNA, 19 nt, Homo sapiens
  misc_RNA (1)...(19): siRNA sense strand
gugaggaagaaaugaguga

SEQ ID NO: 148096 - RNA, 19 nt, Homo sapiens
  misc_RNA (1)...(19): siRNA sense strand
gaacuccccguauagaaga

SEQ ID NO: 148097 - RNA, 19 nt, Homo sapiens
  misc_RNA (1)...(19): siRNA sense strand
gcaccagugaagaaucaga

SEQ ID NO: 148098 - RNA, 19 nt, Homo sapiens
  misc_RNA (1)...(19): siRNA sense strand
gaugaaaagagaaaagaga

SEQ ID NO: 148099 - RNA, 19 nt, Homo sapiens
  misc_RNA (1)...(19): siRNA sense strand
caucgagaagaacaggaua

SEQ ID NO: 148100 - RNA, 19 nt, Homo sapiens
  misc_RNA (1)...(19): siRNA sense strand
aagaggaggaggaggaaga

SEQ ID NO: 148101 - RNA, 19 nt, Homo sapiens
  misc_RNA (1)...(19): siRNA sense strand
acaagguguucaaggaucu

SEQ ID NO: 148102 - RNA, 19 nt, Homo sapiens
  misc_RNA (1)...(19): siRNA sense strand
gaguacggauccccucuga

SEQ ID NO: 148103 - RNA, 19 nt, Homo sapiens
  misc_RNA (1)...(19): siRNA sense strand
ugaagauggagaaggagaa

SEQ ID NO: 148104 - RNA, 19 nt, Homo sapiens
  misc_RNA (1)...(19): siRNA sense strand
ccaacaucgucaccguuag

SEQ ID NO: 148105 - RNA, 19 nt, Homo sapiens
  misc_RNA (1)...(19): siRNA sense strand
gaagucagaaaucgaucag

SEQ ID NO: 148106 - RNA, 19 nt, Homo sapiens
  misc_RNA (1)...(19): siRNA sense strand
ggugaagacccugaugauc

SEQ ID NO: 148107 - RNA, 19 nt, Homo sapiens
  misc_RNA (1)...(19): siRNA sense strand
gggcuucgaccucaugaac

SEQ ID NO: 148108 - RNA, 19 nt, Homo sapiens
  misc_RNA (1)...(19): siRNA sense strand
gaaaacagaugaaauugug

SEQ ID NO: 148109 - RNA, 19 nt, Homo sapiens
  misc_RNA (1)...(19): siRNA sense strand
gagcaccagugaagaauca

SEQ ID NO: 148110 - RNA, 19 nt, Homo sapiens
  misc_RNA (1)...(19): siRNA sense strand
ugaaacaccugcacgacaa

SEQ ID NO: 148111 - RNA, 19 nt, Homo sapiens
  misc_RNA (1)...(19): siRNA sense strand
uaaagcggcugaagaugga

SEQ ID NO: 148112 - RNA, 19 nt, Homo sapiens
  misc_RNA (1)...(19): siRNA sense strand
agaaaugagugaagaugaa

SEQ ID NO: 148113 - RNA, 19 nt, Homo sapiens
  misc_RNA (1)...(19): siRNA sense strand
gagugaagaugaagaacga

SEQ ID NO: 148114 - RNA, 19 nt, Homo sapiens
  misc_RNA (1)...(19): siRNA sense strand
gcagcaacauggacaagau

SEQ ID NO: 148115 - RNA, 19 nt, Homo sapiens
  misc_RNA (1)...(19): siRNA sense strand
gaagggagcaccagugaag

SEQ ID NO: 148116 - RNA, 19 nt, Homo sapiens
  misc_RNA (1)...(19): siRNA sense strand
gaagaugaagaacgagaaa

SEQ ID NO: 148117 - RNA, 19 nt, Homo sapiens
  misc_RNA (1)...(19): siRNA sense strand
ggaguggucuacagagcaa

SEQ ID NO: 148118 - RNA, 19 nt, Homo sapiens
  misc_RNA (1)...(19): siRNA sense strand
gaagaaaugagugaagaug

SEQ ID NO: 148119 - RNA, 19 nt, Homo sapiens
  misc_RNA (1)...(19): siRNA sense strand
agaaguaagugaggaagaa

SEQ ID NO: 148120 - RNA, 19 nt, Homo sapiens
  misc_RNA (1)...(19): siRNA sense strand
ugacagagggcgacuaugu

SEQ ID NO: 148121 - RNA, 19 nt, Homo sapiens
  misc_RNA (1)...(19): siRNA sense strand
ugaagaagcagaggaagaa

SEQ ID NO: 148122 - RNA, 19 nt, Homo sapiens
  misc_RNA (1)...(19): siRNA sense strand
aaggagggcuucccgauca

SEQ ID NO: 148123 - RNA, 19 nt, Homo sapiens
  misc_RNA (1)...(19): siRNA sense strand
gcuucgaccucaugaacaa

SEQ ID NO: 148124 - RNA, 19 nt, Homo sapiens
  misc_RNA (1)...(19): siRNA sense strand
gaaguaagugaggaagaaa

SEQ ID NO: 148125 - RNA, 19 nt, Homo sapiens
  misc_RNA (1)...(19): siRNA sense strand
caacaucgucaccguuaga

SEQ ID NO: 148126 - RNA, 19 nt, Homo sapiens
  misc_RNA (1)...(19): siRNA sense strand
ugagggagaucaacaccau

SEQ ID NO: 148127 - RNA, 19 nt, Homo sapiens
  misc_RNA (1)...(19): siRNA sense strand
gcucuaaagcggcugaaga

SEQ ID NO: 148128 - RNA, 19 nt, Homo sapiens
  misc_RNA (1)...(19): siRNA sense strand
ggcugaagauggagaagga

SEQ ID NO: 148129 - RNA, 19 nt, Homo sapiens
  misc_RNA (1)...(19): siRNA sense strand
gaugaaauuguggcucuaa

SEQ ID NO: 148130 - RNA, 19 nt, Homo sapiens
  misc_RNA (1)...(19): siRNA sense strand
gaucaacaccauccucaag

SEQ ID NO: 148131 - RNA, 19 nt, Homo sapiens
  misc_RNA (1)...(19): siRNA sense strand
ggaggaggaggaagaggaa

SEQ ID NO: 148132 - RNA, 19 nt, Homo sapiens
  misc_RNA (1)...(19): siRNA sense strand
gaggugaagacccugauga

SEQ ID NO: 148133 - RNA, 19 nt, Homo sapiens
  misc_RNA (1)...(19): siRNA sense strand
gaaucaggcucagguucug

SEQ ID NO: 148134 - RNA, 19 nt, Homo sapiens
  misc_RNA (1)...(19): siRNA sense strand
ucacgucgcugagggagau

SEQ ID NO: 148135 - RNA, 19 nt, Homo sapiens
  misc_RNA (1)...(19): siRNA sense strand
agucagaaaucgaucagau

SEQ ID NO: 148136 - RNA, 19 nt, Homo sapiens
  misc_RNA (1)...(19): siRNA sense strand
gaaauuguggcucuaaagc

SEQ ID NO: 148137 - RNA, 19 nt, Homo sapiens
  misc_RNA (1)...(19): siRNA sense strand
gucaguggguugcaucuuc

SEQ ID NO: 148138 - RNA, 19 nt, Homo sapiens
  misc_RNA (1)...(19): siRNA sense strand
ugaagacccugaugaucca

SEQ ID NO: 148139 - RNA, 19 nt, Homo sapiens
  misc_RNA (1)...(19): siRNA sense strand
ggaagaaaugagugaagau

SEQ ID NO: 148140 - RNA, 19 nt, Homo sapiens
  misc_RNA (1)...(19): siRNA sense strand
gaagaacgagaaaaugaaa

SEQ ID NO: 148141 - RNA, 19 nt, Homo sapiens
  misc_RNA (1)...(19): siRNA sense strand
aggaagaaaugagugaaga

SEQ ID NO: 148142 - RNA, 19 nt, Homo sapiens
  misc_RNA (1)...(19): siRNA sense strand
gcaacauggacaagaucua

SEQ ID NO: 148143 - RNA, 19 nt, Homo sapiens
  misc_RNA (1)...(19): siRNA sense strand
gagugaagaagcagaggaa

SEQ ID NO: 148144 - RNA, 19 nt, Homo sapiens
  misc_RNA (1)...(19): siRNA sense strand
ggaagucagaaaucgauca

SEQ ID NO: 148145 - RNA, 19 nt, Homo sapiens
  misc_RNA (1)...(19): siRNA sense strand
cccaacaucgucaccguua

SEQ ID NO: 148146 - RNA, 19 nt, Homo sapiens
  misc_RNA (1)...(19): siRNA sense strand
gaaaugagugaagaugaag

SEQ ID NO: 148147 - RNA, 19 nt, Homo sapiens
  misc_RNA (1)...(19): siRNA sense strand
ggaagaggaggaggaggaa

SEQ ID NO: 148148 - RNA, 19 nt, Homo sapiens
  misc_RNA (1)...(19): siRNA sense strand
caaaagacaagaaaacaga

SEQ ID NO: 148149 - RNA, 19 nt, Homo sapiens
  misc_RNA (1)...(19): siRNA sense strand
gaucgaggagggcaccuau

SEQ ID NO: 148150 - RNA, 19 nt, Homo sapiens
  misc_RNA (1)...(19): siRNA sense strand
gaagagaaaauggaagaaa

SEQ ID NO: 148151 - RNA, 19 nt, Homo sapiens
  misc_RNA (1)...(19): siRNA sense strand
cgaagaaguaagugaggaa

SEQ ID NO: 148152 - RNA, 19 nt, Homo sapiens
  misc_RNA (1)...(19): siRNA sense strand
cgucaccguuagagagauu

SEQ ID NO: 148153 - RNA, 19 nt, Homo sapiens
  misc_RNA (1)...(19): siRNA sense strand
gugaagaagcagaggaaga

SEQ ID NO: 148154 - RNA, 19 nt, Homo sapiens
  misc_RNA (1)...(19): siRNA sense strand
caacauggacaagaucuac

SEQ ID NO: 148155 - RNA, 19 nt, Homo sapiens
  misc_RNA (1)...(19): siRNA sense strand
ggaagggagcaccagugaa

SEQ ID NO: 148156 - RNA, 19 nt, Homo sapiens
  misc_RNA (1)...(19): siRNA sense strand
guaagugaggaagaaauga

SEQ ID NO: 148157 - RNA, 19 nt, Homo sapiens
  misc_RNA (1)...(19): siRNA sense strand
gcagaaucaggcucagguu

SEQ ID NO: 148158 - RNA, 19 nt, Homo sapiens
  misc_RNA (1)...(19): siRNA sense strand
aagaaaugagugaagauga

SEQ ID NO: 148159 - RNA, 19 nt, Homo sapiens
  misc_RNA (1)...(19): siRNA sense strand
aggacggccucaagcauga

SEQ ID NO: 148160 - RNA, 19 nt, Homo sapiens
  misc_RNA (1)...(19): siRNA sense strand
gcaccuauggaguggucua

SEQ ID NO: 148161 - RNA, 19 nt, Homo sapiens
  misc_RNA (1)...(19): siRNA sense strand
gacagagggcgacuaugug

SEQ ID NO: 148162 - RNA, 19 nt, Homo sapiens
  misc_RNA (1)...(19): siRNA sense strand
gaggagaccggcagcaacu

SEQ ID NO: 148163 - RNA, 19 nt, Homo sapiens
  misc_RNA (1)...(19): siRNA sense strand
gaagauggagaaggagaag

SEQ ID NO: 148164 - RNA, 19 nt, Homo sapiens
  misc_RNA (1)...(19): siRNA sense strand
gaggaagaaaugagugaag

SEQ ID NO: 148165 - RNA, 19 nt, Homo sapiens
  misc_RNA (1)...(19): siRNA sense strand
gugaggaagaaaugaguga

SEQ ID NO: 148166 - RNA, 19 nt, Homo sapiens
  misc_RNA (1)...(19): siRNA sense strand
ucccagcagucaagaagau

SEQ ID NO: 148167 - RNA, 19 nt, Homo sapiens
  misc_RNA (1)...(19): siRNA sense strand
agaagcagaggaagaagug

SEQ ID NO: 148168 - RNA, 19 nt, Homo sapiens
  misc_RNA (1)...(19): siRNA sense strand
ugaagaugaagaacgagaa

SEQ ID NO: 148169 - RNA, 19 nt, Homo sapiens
  misc_RNA (1)...(19): siRNA sense strand
gcaccagugaagaaucaga

SEQ ID NO: 148170 - RNA, 19 nt, Homo sapiens
  misc_RNA (1)...(19): siRNA sense strand
aagaggaggaggaggaaga

SEQ ID NO: 148171 - RNA, 19 nt, Homo sapiens
  misc_RNA (1)...(19): siRNA sense strand
acaagguguucaaggaucu

SEQ ID NO: 148172 - RNA, 19 nt, Homo sapiens
  misc_RNA (1)...(19): siRNA sense strand
gaguacggauccccucuga

SEQ ID NO: 148173 - RNA, 19 nt, Homo sapiens
  misc_RNA (1)...(19): siRNA sense strand
ugaagauggagaaggagaa

SEQ ID NO: 148174 - RNA, 19 nt, Homo sapiens
  misc_RNA (1)...(19): siRNA sense strand
ccaacaucgucaccguuag

SEQ ID NO: 148175 - RNA, 19 nt, Homo sapiens
  misc_RNA (1)...(19): siRNA sense strand
gaagucagaaaucgaucag

SEQ ID NO: 148176 - RNA, 19 nt, Homo sapiens
  misc_RNA (1)...(19): siRNA sense strand
ggugaagacccugaugauc

SEQ ID NO: 148177 - RNA, 19 nt, Homo sapiens
  misc_RNA (1)...(19): siRNA sense strand
ugaaauuguggcucuaaag

SEQ ID NO: 148178 - RNA, 19 nt, Homo sapiens
  misc_RNA (1)...(19): siRNA sense strand
gggcuucgaccucaugaac

SEQ ID NO: 148179 - RNA, 19 nt, Homo sapiens
  misc_RNA (1)...(19): siRNA sense strand
ggagaccggcagcaacucu

SEQ ID NO: 148180 - RNA, 19 nt, Homo sapiens
  misc_RNA (1)...(19): siRNA sense strand
ggaggugaagacccugaug

SEQ ID NO: 148181 - RNA, 19 nt, Homo sapiens
  misc_RNA (1)...(19): siRNA sense strand
gaaacgacaucgagaagaa

SEQ ID NO: 148182 - RNA, 19 nt, Homo sapiens
  misc_RNA (1)...(19): siRNA sense strand
gcaaaugucucggaaagaa

SEQ ID NO: 148183 - RNA, 19 nt, Homo sapiens
  misc_RNA (1)...(19): siRNA sense strand
gaaaacagaugaaauugug

SEQ ID NO: 148184 - RNA, 19 nt, Homo sapiens
  misc_RNA (1)...(19): siRNA sense strand
gcauggagaucacaauaag

SEQ ID NO: 148185 - RNA, 19 nt, Homo sapiens
  misc_RNA (1)...(19): siRNA sense strand
gagcaccagugaagaauca

SEQ ID NO: 148186 - RNA, 19 nt, Homo sapiens
  misc_RNA (1)...(19): siRNA sense strand
ugaaacaccugcacgacaa

SEQ ID NO: 148187 - RNA, 19 nt, Homo sapiens
  misc_RNA (1)...(19): siRNA sense strand
gaaaaggacucuuggaaag

SEQ ID NO: 148188 - RNA, 19 nt, Homo sapiens
  misc_RNA (1)...(19): siRNA sense strand
uaaagcggcugaagaugga

SEQ ID NO: 148189 - RNA, 19 nt, Homo sapiens
  misc_RNA (1)...(19): siRNA sense strand
agaaaugagugaagaugaa

SEQ ID NO: 148190 - RNA, 19 nt, Homo sapiens
  misc_RNA (1)...(19): siRNA sense strand
gagugaagaugaagaacga

SEQ ID NO: 148191 - RNA, 19 nt, Homo sapiens
  misc_RNA (1)...(19): siRNA sense strand
gcagcaacauggacaagau

SEQ ID NO: 148192 - RNA, 19 nt, Homo sapiens
  misc_RNA (1)...(19): siRNA sense strand
gaagggagcaccagugaag

SEQ ID NO: 148193 - RNA, 19 nt, Homo sapiens
  misc_RNA (1)...(19): siRNA sense strand
ggaaggaacaagaggagaa

SEQ ID NO: 148194 - RNA, 19 nt, Homo sapiens
  misc_RNA (1)...(19): siRNA sense strand
ggaguggucuacagagcaa

SEQ ID NO: 148195 - RNA, 19 nt, Homo sapiens
  misc_RNA (1)...(19): siRNA sense strand
gaagaugaagaacgagaaa

SEQ ID NO: 148196 - RNA, 19 nt, Homo sapiens
  misc_RNA (1)...(19): siRNA sense strand
gcacgaacgucggaaacga

SEQ ID NO: 148197 - RNA, 19 nt, Homo sapiens
  misc_RNA (1)...(19): siRNA sense strand
gagaagacucuauggaaga

SEQ ID NO: 148198 - RNA, 19 nt, Homo sapiens
  misc_RNA (1)...(19): siRNA sense strand
cagcaaaugucucggaaag

SEQ ID NO: 148199 - RNA, 19 nt, Homo sapiens
  misc_RNA (1)...(19): siRNA sense strand
cagaaaagaugaaaagaga

SEQ ID NO: 148200 - RNA, 19 nt, Homo sapiens
  misc_RNA (1)...(19): siRNA sense strand
gaagaaaugagugaagaug

SEQ ID NO: 148201 - RNA, 19 nt, Homo sapiens
  misc_RNA (1)...(19): siRNA sense strand
agaaguaagugaggaagaa

SEQ ID NO: 148202 - RNA, 19 nt, Homo sapiens
  misc_RNA (1)...(19): siRNA sense strand
ggaagacagaggagaagaa

SEQ ID NO: 148203 - RNA, 19 nt, Homo sapiens
  misc_RNA (1)...(19): siRNA sense strand
gaaggaacaagaggagaaa

SEQ ID NO: 148204 - RNA, 19 nt, Homo sapiens
  misc_RNA (1)...(19): siRNA sense strand
ugacagagggcgacuaugu

SEQ ID NO: 148205 - RNA, 19 nt, Homo sapiens
  misc_RNA (1)...(19): siRNA sense strand
ggagaaagcagagauaaaa

SEQ ID NO: 148206 - RNA, 19 nt, Homo sapiens
  misc_RNA (1)...(19): siRNA sense strand
gagaagaacaggauaaagc

SEQ ID NO: 148207 - RNA, 19 nt, Homo sapiens
  misc_RNA (1)...(19): siRNA sense strand
gaggagaaagcagagauaa

SEQ ID NO: 148208 - RNA, 19 nt, Homo sapiens
  misc_RNA (1)...(19): siRNA sense strand
ugaagaagcagaggaagaa

SEQ ID NO: 148209 - RNA, 19 nt, Homo sapiens
  misc_RNA (1)...(19): siRNA sense strand
gagcauuccaggagagaaa

SEQ ID NO: 148210 - RNA, 19 nt, Homo sapiens
  misc_RNA (1)...(19): siRNA sense strand
aaggagggcuucccgauca

SEQ ID NO: 148211 - RNA, 19 nt, Homo sapiens
  misc_RNA (1)...(19): siRNA sense strand
gcuucgaccucaugaacaa

SEQ ID NO: 148212 - RNA, 19 nt, Homo sapiens
  misc_RNA (1)...(19): siRNA sense strand
gaaguaagugaggaagaaa

SEQ ID NO: 148213 - RNA, 19 nt, Homo sapiens
  misc_RNA (1)...(19): siRNA sense strand
caacaucgucaccguuaga

SEQ ID NO: 148214 - RNA, 19 nt, Homo sapiens
  misc_RNA (1)...(19): siRNA sense strand
ugagggagaucaacaccau

SEQ ID NO: 148215 - RNA, 19 nt, Homo sapiens
  misc_RNA (1)...(19): siRNA sense strand
aaaggacucuuggaaagug

SEQ ID NO: 148216 - RNA, 19 nt, Homo sapiens
  misc_RNA (1)...(19): siRNA sense strand
gcucuaaagcggcugaaga

SEQ ID NO: 148217 - RNA, 19 nt, Homo sapiens
  misc_RNA (1)...(19): siRNA sense strand
ggcugaagauggagaagga

SEQ ID NO: 148218 - RNA, 19 nt, Homo sapiens
  misc_RNA (1)...(19): siRNA sense strand
agacagaggagaagaagau

SEQ ID NO: 148219 - RNA, 19 nt, Homo sapiens
  misc_RNA (1)...(19): siRNA sense strand
gaucaacaccauccucaag

SEQ ID NO: 148220 - RNA, 19 nt, Homo sapiens
  misc_RNA (1)...(19): siRNA sense strand
gaugaaauuguggcucuaa

SEQ ID NO: 148221 - RNA, 19 nt, Homo sapiens
  misc_RNA (1)...(19): siRNA sense strand
gaaucaggcucagguucug

SEQ ID NO: 148222 - RNA, 19 nt, Homo sapiens
  misc_RNA (1)...(19): siRNA sense strand
gaggugaagacccugauga

SEQ ID NO: 148223 - RNA, 19 nt, Homo sapiens
  misc_RNA (1)...(19): siRNA sense strand
ggaggaggaggaagaggaa

SEQ ID NO: 148224 - RNA, 19 nt, Homo sapiens
  misc_RNA (1)...(19): siRNA sense strand
ggaaacgacaucgagaaga

SEQ ID NO: 148225 - RNA, 19 nt, Homo sapiens
  misc_RNA (1)...(19): siRNA sense strand
agucagaaaucgaucagau

SEQ ID NO: 148226 - RNA, 19 nt, Homo sapiens
  misc_RNA (1)...(19): siRNA sense strand
ucacgucgcugagggagau

SEQ ID NO: 148227 - RNA, 19 nt, Homo sapiens
  misc_RNA (1)...(19): siRNA sense strand
gaaauuguggcucuaaagc

SEQ ID NO: 148228 - RNA, 19 nt, Homo sapiens
  misc_RNA (1)...(19): siRNA sense strand
gucaguggguugcaucuuc

SEQ ID NO: 148229 - RNA, 19 nt, Homo sapiens
  misc_RNA (1)...(19): siRNA sense strand
ugaagacccugaugaucca

SEQ ID NO: 148230 - RNA, 19 nt, Homo sapiens
  misc_RNA (1)...(19): siRNA sense strand
gaagacagaggagaagaag

SEQ ID NO: 148231 - RNA, 19 nt, Homo sapiens
  misc_RNA (1)...(19): siRNA sense strand
gaagaacgagaaaaugaaa

SEQ ID NO: 148232 - RNA, 19 nt, Homo sapiens
  misc_RNA (1)...(19): siRNA sense strand
ggaagaaaugagugaagau

SEQ ID NO: 148233 - RNA, 19 nt, Homo sapiens
  misc_RNA (1)...(19): siRNA sense strand
agacagaagagaagggaaa

SEQ ID NO: 148234 - RNA, 19 nt, Homo sapiens
  misc_RNA (1)...(19): siRNA sense strand
gaaugggaaagacagaaga

SEQ ID NO: 148235 - RNA, 19 nt, Homo sapiens
  misc_RNA (1)...(19): siRNA sense strand
caaaugucucggaaagaaa

SEQ ID NO: 148236 - RNA, 19 nt, Homo sapiens
  misc_RNA (1)...(19): siRNA sense strand
gaggagaagaagaugauuc

SEQ ID NO: 148237 - RNA, 19 nt, Homo sapiens
  misc_RNA (1)...(19): siRNA sense strand
gcaacauggacaagaucua

SEQ ID NO: 148238 - RNA, 19 nt, Homo sapiens
  misc_RNA (1)...(19): siRNA sense strand
aggaagaaaugagugaaga

SEQ ID NO: 148239 - RNA, 19 nt, Homo sapiens
  misc_RNA (1)...(19): siRNA sense strand
auaaggaacuccccguaua

SEQ ID NO: 148240 - RNA, 19 nt, Homo sapiens
  misc_RNA (1)...(19): siRNA sense strand
gagugaagaagcagaggaa

SEQ ID NO: 148241 - RNA, 19 nt, Homo sapiens
  misc_RNA (1)...(19): siRNA sense strand
ggaagucagaaaucgauca

SEQ ID NO: 148242 - RNA, 19 nt, Homo sapiens
  misc_RNA (1)...(19): siRNA sense strand
cccaacaucgucaccguua

SEQ ID NO: 148243 - RNA, 19 nt, Homo sapiens
  misc_RNA (1)...(19): siRNA sense strand
gggaaagacagaagagaag

SEQ ID NO: 148244 - RNA, 19 nt, Homo sapiens
  misc_RNA (1)...(19): siRNA sense strand
caaaagacaagaaaacaga

SEQ ID NO: 148245 - RNA, 19 nt, Homo sapiens
  misc_RNA (1)...(19): siRNA sense strand
gaucgaggagggcaccuau

SEQ ID NO: 148246 - RNA, 19 nt, Homo sapiens
  misc_RNA (1)...(19): siRNA sense strand
gaaaugagugaagaugaag

SEQ ID NO: 148247 - RNA, 19 nt, Homo sapiens
  misc_RNA (1)...(19): siRNA sense strand
ggaagaggaggaggaggaa

SEQ ID NO: 148248 - RNA, 19 nt, Homo sapiens
  misc_RNA (1)...(19): siRNA sense strand
caugcuagagugaaagaaa

SEQ ID NO: 148249 - RNA, 19 nt, Homo sapiens
  misc_RNA (1)...(19): siRNA sense strand
gaagagaaaauggaagaaa

SEQ ID NO: 148250 - RNA, 19 nt, Homo sapiens
  misc_RNA (1)...(19): siRNA sense strand
ggaaugggaaagacagaag

SEQ ID NO: 148251 - RNA, 19 nt, Homo sapiens
  misc_RNA (1)...(19): siRNA sense strand
cgucaccguuagagagauu

SEQ ID NO: 148252 - RNA, 19 nt, Homo sapiens
  misc_RNA (1)...(19): siRNA sense strand
gugaagaagcagaggaaga

SEQ ID NO: 148253 - RNA, 19 nt, Homo sapiens
  misc_RNA (1)...(19): siRNA sense strand
cgaagaaguaagugaggaa

SEQ ID NO: 148254 - RNA, 19 nt, Homo sapiens
  misc_RNA (1)...(19): siRNA sense strand
caacauggacaagaucuac

SEQ ID NO: 148255 - RNA, 19 nt, Homo sapiens
  misc_RNA (1)...(19): siRNA sense strand
ggaacaagaggagaaagca

SEQ ID NO: 148256 - RNA, 19 nt, Homo sapiens
  misc_RNA (1)...(19): siRNA sense strand
gaaacgaaggaaggaacaa

SEQ ID NO: 148257 - RNA, 19 nt, Homo sapiens
  misc_RNA (1)...(19): siRNA sense strand
ggaagggagcaccagugaa

SEQ ID NO: 148258 - RNA, 19 nt, Homo sapiens
  misc_RNA (1)...(19): siRNA sense strand
cagaggagaagaagaugau

SEQ ID NO: 148259 - RNA, 19 nt, Homo sapiens
  misc_RNA (1)...(19): siRNA sense strand
guaagugaggaagaaauga

SEQ ID NO: 148260 - RNA, 19 nt, Homo sapiens
  misc_RNA (1)...(19): siRNA sense strand
gcagaaucaggcucagguu

SEQ ID NO: 148261 - RNA, 19 nt, Homo sapiens
  misc_RNA (1)...(19): siRNA sense strand
cagaagagaagggaaaugg

SEQ ID NO: 148262 - RNA, 19 nt, Homo sapiens
  misc_RNA (1)...(19): siRNA sense strand
aggacggccucaagcauga

SEQ ID NO: 148263 - RNA, 19 nt, Homo sapiens
  misc_RNA (1)...(19): siRNA sense strand
gcaccuauggaguggucua

SEQ ID NO: 148264 - RNA, 19 nt, Homo sapiens
  misc_RNA (1)...(19): siRNA sense strand
gacagagggcgacuaugug

SEQ ID NO: 148265 - RNA, 19 nt, Homo sapiens
  misc_RNA (1)...(19): siRNA sense strand
aagaaaugagugaagauga

SEQ ID NO: 148266 - RNA, 19 nt, Homo sapiens
  misc_RNA (1)...(19): siRNA sense strand
ggaaauggcaagggagcau

SEQ ID NO: 148267 - RNA, 19 nt, Homo sapiens
  misc_RNA (1)...(19): siRNA sense strand
agaggagaaagcagagaua

SEQ ID NO: 148268 - RNA, 19 nt, Homo sapiens
  misc_RNA (1)...(19): siRNA sense strand
gaagauggagaaggagaag

SEQ ID NO: 148269 - RNA, 19 nt, Homo sapiens
  misc_RNA (1)...(19): siRNA sense strand
gaggagaccggcagcaacu

SEQ ID NO: 148270 - RNA, 19 nt, Homo sapiens
  misc_RNA (1)...(19): siRNA sense strand
agaaagagagcacgaacgu

SEQ ID NO: 148271 - RNA, 19 nt, Homo sapiens
  misc_RNA (1)...(19): siRNA sense strand
gaggaagaaaugagugaag

SEQ ID NO: 148272 - RNA, 19 nt, Homo sapiens
  misc_RNA (1)...(19): siRNA sense strand
gcagagauaaaacgcuuaa

SEQ ID NO: 148273 - RNA, 19 nt, Homo sapiens
  misc_RNA (1)...(19): siRNA sense strand
ugggaaagacagaagagaa

SEQ ID NO: 148274 - RNA, 19 nt, Homo sapiens
  misc_RNA (1)...(19): siRNA sense strand
ucccagcagucaagaagau

SEQ ID NO: 148275 - RNA, 19 nt, Homo sapiens
  misc_RNA (1)...(19): siRNA sense strand
agaagcagaggaagaagug

SEQ ID NO: 148276 - RNA, 19 nt, Homo sapiens
  misc_RNA (1)...(19): siRNA sense strand
uauggaagacagaggagaa

SEQ ID NO: 148277 - RNA, 19 nt, Homo sapiens
  misc_RNA (1)...(19): siRNA sense strand
ugaagaugaagaacgagaa

SEQ ID NO: 148278 - RNA, 19 nt, Homo sapiens
  misc_RNA (1)...(19): siRNA sense strand
gugaggaagaaaugaguga

SEQ ID NO: 148279 - RNA, 19 nt, Homo sapiens
  misc_RNA (1)...(19): siRNA sense strand
gaacuccccguauagaaga

SEQ ID NO: 148280 - RNA, 19 nt, Homo sapiens
  misc_RNA (1)...(19): siRNA sense strand
ugaaaaggacucuuggaaa

SEQ ID NO: 148281 - RNA, 19 nt, Homo sapiens
  misc_RNA (1)...(19): siRNA sense strand
gaaacgacaucgagaagaa

SEQ ID NO: 148282 - RNA, 19 nt, Homo sapiens
  misc_RNA (1)...(19): siRNA sense strand
gcaaaugucucggaaagaa

SEQ ID NO: 148283 - RNA, 19 nt, Homo sapiens
  misc_RNA (1)...(19): siRNA sense strand
gaaaacagaugaaauugug

SEQ ID NO: 148284 - RNA, 19 nt, Homo sapiens
  misc_RNA (1)...(19): siRNA sense strand
gcauggagaucacaauaag

SEQ ID NO: 148285 - RNA, 19 nt, Homo sapiens
  misc_RNA (1)...(19): siRNA sense strand
gagcaccagugaagaauca

SEQ ID NO: 148286 - RNA, 19 nt, Homo sapiens
  misc_RNA (1)...(19): siRNA sense strand
ugaaacaccugcacgacaa

SEQ ID NO: 148287 - RNA, 19 nt, Homo sapiens
  misc_RNA (1)...(19): siRNA sense strand
gaaaaggacucuuggaaag

SEQ ID NO: 148288 - RNA, 19 nt, Homo sapiens
  misc_RNA (1)...(19): siRNA sense strand
uaaagcggcugaagaugga

SEQ ID NO: 148289 - RNA, 19 nt, Homo sapiens
  misc_RNA (1)...(19): siRNA sense strand
agaaaugagugaagaugaa

SEQ ID NO: 148290 - RNA, 19 nt, Homo sapiens
  misc_RNA (1)...(19): siRNA sense strand
gagugaagaugaagaacga

SEQ ID NO: 148291 - RNA, 19 nt, Homo sapiens
  misc_RNA (1)...(19): siRNA sense strand
gcagcaacauggacaagau

SEQ ID NO: 148292 - RNA, 19 nt, Homo sapiens
  misc_RNA (1)...(19): siRNA sense strand
gaagggagcaccagugaag

SEQ ID NO: 148293 - RNA, 19 nt, Homo sapiens
  misc_RNA (1)...(19): siRNA sense strand
ggaaggaacaagaggagaa

SEQ ID NO: 148294 - RNA, 19 nt, Homo sapiens
  misc_RNA (1)...(19): siRNA sense strand
ggaguggucuacagagcaa

SEQ ID NO: 148295 - RNA, 19 nt, Homo sapiens
  misc_RNA (1)...(19): siRNA sense strand
gaagaugaagaacgagaaa

SEQ ID NO: 148296 - RNA, 19 nt, Homo sapiens
  misc_RNA (1)...(19): siRNA sense strand
gcacgaacgucggaaacga

SEQ ID NO: 148297 - RNA, 19 nt, Homo sapiens
  misc_RNA (1)...(19): siRNA sense strand
gagaagacucuauggaaga

SEQ ID NO: 148298 - RNA, 19 nt, Homo sapiens
  misc_RNA (1)...(19): siRNA sense strand
cagcaaaugucucggaaag

SEQ ID NO: 148299 - RNA, 19 nt, Homo sapiens
  misc_RNA (1)...(19): siRNA sense strand
cagaaaagaugaaaagaga

SEQ ID NO: 148300 - RNA, 19 nt, Homo sapiens
  misc_RNA (1)...(19): siRNA sense strand
gaagaaaugagugaagaug

SEQ ID NO: 148301 - RNA, 19 nt, Homo sapiens
  misc_RNA (1)...(19): siRNA sense strand
agaaguaagugaggaagaa

SEQ ID NO: 148302 - RNA, 19 nt, Homo sapiens
  misc_RNA (1)...(19): siRNA sense strand
ggaagacagaggagaagaa

SEQ ID NO: 148303 - RNA, 19 nt, Homo sapiens
  misc_RNA (1)...(19): siRNA sense strand
gaaggaacaagaggagaaa

SEQ ID NO: 148304 - RNA, 19 nt, Homo sapiens
  misc_RNA (1)...(19): siRNA sense strand
ugacagagggcgacuaugu

SEQ ID NO: 148305 - RNA, 19 nt, Homo sapiens
  misc_RNA (1)...(19): siRNA sense strand
ggagaaagcagagauaaaa

SEQ ID NO: 148306 - RNA, 19 nt, Homo sapiens
  misc_RNA (1)...(19): siRNA sense strand
gagaagaacaggauaaagc

SEQ ID NO: 148307 - RNA, 19 nt, Homo sapiens
  misc_RNA (1)...(19): siRNA sense strand
gaggagaaagcagagauaa

SEQ ID NO: 148308 - RNA, 19 nt, Homo sapiens
  misc_RNA (1)...(19): siRNA sense strand
ugaagaagcagaggaagaa

SEQ ID NO: 148309 - RNA, 19 nt, Homo sapiens
  misc_RNA (1)...(19): siRNA sense strand
gagcauuccaggagagaaa

SEQ ID NO: 148310 - RNA, 19 nt, Homo sapiens
  misc_RNA (1)...(19): siRNA sense strand
aaggagggcuucccgauca

SEQ ID NO: 148311 - RNA, 19 nt, Homo sapiens
  misc_RNA (1)...(19): siRNA sense strand
gcuucgaccucaugaacaa

SEQ ID NO: 148312 - RNA, 19 nt, Homo sapiens
  misc_RNA (1)...(19): siRNA sense strand
gaaguaagugaggaagaaa

SEQ ID NO: 148313 - RNA, 19 nt, Homo sapiens
  misc_RNA (1)...(19): siRNA sense strand
caacaucgucaccguuaga

SEQ ID NO: 148314 - RNA, 19 nt, Homo sapiens
  misc_RNA (1)...(19): siRNA sense strand
ugagggagaucaacaccau

SEQ ID NO: 148315 - RNA, 19 nt, Homo sapiens
  misc_RNA (1)...(19): siRNA sense strand
aaaggacucuuggaaagug

SEQ ID NO: 148316 - RNA, 19 nt, Homo sapiens
  misc_RNA (1)...(19): siRNA sense strand
gcucuaaagcggcugaaga

SEQ ID NO: 148317 - RNA, 19 nt, Homo sapiens
  misc_RNA (1)...(19): siRNA sense strand
ggcugaagauggagaagga

SEQ ID NO: 148318 - RNA, 19 nt, Homo sapiens
  misc_RNA (1)...(19): siRNA sense strand
agacagaggagaagaagau

SEQ ID NO: 148319 - RNA, 19 nt, Homo sapiens
  misc_RNA (1)...(19): siRNA sense strand
gaucaacaccauccucaag

SEQ ID NO: 148320 - RNA, 19 nt, Homo sapiens
  misc_RNA (1)...(19): siRNA sense strand
gaugaaauuguggcucuaa

SEQ ID NO: 148321 - RNA, 19 nt, Homo sapiens
  misc_RNA (1)...(19): siRNA sense strand
gaaucaggcucagguucug

SEQ ID NO: 148322 - RNA, 19 nt, Homo sapiens
  misc_RNA (1)...(19): siRNA sense strand
gaggugaagacccugauga

SEQ ID NO: 148323 - RNA, 19 nt, Homo sapiens
  misc_RNA (1)...(19): siRNA sense strand
ggaggaggaggaagaggaa

SEQ ID NO: 148324 - RNA, 19 nt, Homo sapiens
  misc_RNA (1)...(19): siRNA sense strand
ggaaacgacaucgagaaga

SEQ ID NO: 148325 - RNA, 19 nt, Homo sapiens
  misc_RNA (1)...(19): siRNA sense strand
agucagaaaucgaucagau

SEQ ID NO: 148326 - RNA, 19 nt, Homo sapiens
  misc_RNA (1)...(19): siRNA sense strand
ucacgucgcugagggagau

SEQ ID NO: 148327 - RNA, 19 nt, Homo sapiens
  misc_RNA (1)...(19): siRNA sense strand
gaaauuguggcucuaaagc

SEQ ID NO: 148328 - RNA, 19 nt, Homo sapiens
  misc_RNA (1)...(19): siRNA sense strand
gucaguggguugcaucuuc

SEQ ID NO: 148329 - RNA, 19 nt, Homo sapiens
  misc_RNA (1)...(19): siRNA sense strand
ugaagacccugaugaucca

SEQ ID NO: 148330 - RNA, 19 nt, Homo sapiens
  misc_RNA (1)...(19): siRNA sense strand
gaagacagaggagaagaag

SEQ ID NO: 148331 - RNA, 19 nt, Homo sapiens
  misc_RNA (1)...(19): siRNA sense strand
gaagaacgagaaaaugaaa

SEQ ID NO: 148332 - RNA, 19 nt, Homo sapiens
  misc_RNA (1)...(19): siRNA sense strand
ggaagaaaugagugaagau

SEQ ID NO: 148333 - RNA, 19 nt, Homo sapiens
  misc_RNA (1)...(19): siRNA sense strand
agacagaagagaagggaaa

SEQ ID NO: 148334 - RNA, 19 nt, Homo sapiens
  misc_RNA (1)...(19): siRNA sense strand
gaaugggaaagacagaaga

SEQ ID NO: 148335 - RNA, 19 nt, Homo sapiens
  misc_RNA (1)...(19): siRNA sense strand
caaaugucucggaaagaaa

SEQ ID NO: 148336 - RNA, 19 nt, Homo sapiens
  misc_RNA (1)...(19): siRNA sense strand
gaggagaagaagaugauuc

SEQ ID NO: 148337 - RNA, 19 nt, Homo sapiens
  misc_RNA (1)...(19): siRNA sense strand
gcaacauggacaagaucua

SEQ ID NO: 148338 - RNA, 19 nt, Homo sapiens
  misc_RNA (1)...(19): siRNA sense strand
aggaagaaaugagugaaga

SEQ ID NO: 148339 - RNA, 19 nt, Homo sapiens
  misc_RNA (1)...(19): siRNA sense strand
auaaggaacuccccguaua

SEQ ID NO: 148340 - RNA, 19 nt, Homo sapiens
  misc_RNA (1)...(19): siRNA sense strand
gagugaagaagcagaggaa

SEQ ID NO: 148341 - RNA, 19 nt, Homo sapiens
  misc_RNA (1)...(19): siRNA sense strand
ggaagucagaaaucgauca

SEQ ID NO: 148342 - RNA, 19 nt, Homo sapiens
  misc_RNA (1)...(19): siRNA sense strand
cccaacaucgucaccguua

SEQ ID NO: 148343 - RNA, 19 nt, Homo sapiens
  misc_RNA (1)...(19): siRNA sense strand
gggaaagacagaagagaag

SEQ ID NO: 148344 - RNA, 19 nt, Homo sapiens
  misc_RNA (1)...(19): siRNA sense strand
caaaagacaagaaaacaga

SEQ ID NO: 148345 - RNA, 19 nt, Homo sapiens
  misc_RNA (1)...(19): siRNA sense strand
gaucgaggagggcaccuau

SEQ ID NO: 148346 - RNA, 19 nt, Homo sapiens
  misc_RNA (1)...(19): siRNA sense strand
gaaaugagugaagaugaag

SEQ ID NO: 148347 - RNA, 19 nt, Homo sapiens
  misc_RNA (1)...(19): siRNA sense strand
ggaagaggaggaggaggaa

SEQ ID NO: 148348 - RNA, 19 nt, Homo sapiens
  misc_RNA (1)...(19): siRNA sense strand
caugcuagagugaaagaaa

SEQ ID NO: 148349 - RNA, 19 nt, Homo sapiens
  misc_RNA (1)...(19): siRNA sense strand
gaagagaaaauggaagaaa

SEQ ID NO: 148350 - RNA, 19 nt, Homo sapiens
  misc_RNA (1)...(19): siRNA sense strand
ggaaugggaaagacagaag

SEQ ID NO: 148351 - RNA, 19 nt, Homo sapiens
  misc_RNA (1)...(19): siRNA sense strand
cgucaccguuagagagauu

SEQ ID NO: 148352 - RNA, 19 nt, Homo sapiens
  misc_RNA (1)...(19): siRNA sense strand
gugaagaagcagaggaaga

SEQ ID NO: 148353 - RNA, 19 nt, Homo sapiens
  misc_RNA (1)...(19): siRNA sense strand
cgaagaaguaagugaggaa

SEQ ID NO: 148354 - RNA, 19 nt, Homo sapiens
  misc_RNA (1)...(19): siRNA sense strand
caacauggacaagaucuac

SEQ ID NO: 148355 - RNA, 19 nt, Homo sapiens
  misc_RNA (1)...(19): siRNA sense strand
ggaacaagaggagaaagca

SEQ ID NO: 148356 - RNA, 19 nt, Homo sapiens
  misc_RNA (1)...(19): siRNA sense strand
gaaacgaaggaaggaacaa

SEQ ID NO: 148357 - RNA, 19 nt, Homo sapiens
  misc_RNA (1)...(19): siRNA sense strand
ggaagggagcaccagugaa

SEQ ID NO: 148358 - RNA, 19 nt, Homo sapiens
  misc_RNA (1)...(19): siRNA sense strand
cagaggagaagaagaugau

SEQ ID NO: 148359 - RNA, 19 nt, Homo sapiens
  misc_RNA (1)...(19): siRNA sense strand
guaagugaggaagaaauga

SEQ ID NO: 148360 - RNA, 19 nt, Homo sapiens
  misc_RNA (1)...(19): siRNA sense strand
gcagaaucaggcucagguu

SEQ ID NO: 148361 - RNA, 19 nt, Homo sapiens
  misc_RNA (1)...(19): siRNA sense strand
cagaagagaagggaaaugg

SEQ ID NO: 148362 - RNA, 19 nt, Homo sapiens
  misc_RNA (1)...(19): siRNA sense strand
aggacggccucaagcauga

SEQ ID NO: 148363 - RNA, 19 nt, Homo sapiens
  misc_RNA (1)...(19): siRNA sense strand
gcaccuauggaguggucua

SEQ ID NO: 148364 - RNA, 19 nt, Homo sapiens
  misc_RNA (1)...(19): siRNA sense strand
gacagagggcgacuaugug

SEQ ID NO: 148365 - RNA, 19 nt, Homo sapiens
  misc_RNA (1)...(19): siRNA sense strand
aagaaaugagugaagauga

SEQ ID NO: 148366 - RNA, 19 nt, Homo sapiens
  misc_RNA (1)...(19): siRNA sense strand
ggaaauggcaagggagcau

SEQ ID NO: 148367 - RNA, 19 nt, Homo sapiens
  misc_RNA (1)...(19): siRNA sense strand
agaggagaaagcagagaua

SEQ ID NO: 148368 - RNA, 19 nt, Homo sapiens
  misc_RNA (1)...(19): siRNA sense strand
gaagauggagaaggagaag

SEQ ID NO: 148369 - RNA, 19 nt, Homo sapiens
  misc_RNA (1)...(19): siRNA sense strand
gaggagaccggcagcaacu

SEQ ID NO: 148370 - RNA, 19 nt, Homo sapiens
  misc_RNA (1)...(19): siRNA sense strand
agaaagagagcacgaacgu

SEQ ID NO: 148371 - RNA, 19 nt, Homo sapiens
  misc_RNA (1)...(19): siRNA sense strand
gaggaagaaaugagugaag

SEQ ID NO: 148372 - RNA, 19 nt, Homo sapiens
  misc_RNA (1)...(19): siRNA sense strand
gcagagauaaaacgcuuaa

SEQ ID NO: 148373 - RNA, 19 nt, Homo sapiens
  misc_RNA (1)...(19): siRNA sense strand
ugggaaagacagaagagaa

SEQ ID NO: 148374 - RNA, 19 nt, Homo sapiens
  misc_RNA (1)...(19): siRNA sense strand
ucccagcagucaagaagau

SEQ ID NO: 148375 - RNA, 19 nt, Homo sapiens
  misc_RNA (1)...(19): siRNA sense strand
agaagcagaggaagaagug

SEQ ID NO: 148376 - RNA, 19 nt, Homo sapiens
  misc_RNA (1)...(19): siRNA sense strand
uauggaagacagaggagaa

SEQ ID NO: 148377 - RNA, 19 nt, Homo sapiens
  misc_RNA (1)...(19): siRNA sense strand
ugaagaugaagaacgagaa

SEQ ID NO: 148378 - RNA, 19 nt, Homo sapiens
  misc_RNA (1)...(19): siRNA sense strand
gugaggaagaaaugaguga

SEQ ID NO: 148379 - RNA, 19 nt, Homo sapiens
  misc_RNA (1)...(19): siRNA sense strand
gaacuccccguauagaaga

SEQ ID NO: 148380 - RNA, 19 nt, Homo sapiens
  misc_RNA (1)...(19): siRNA sense strand
ugaaaaggacucuuggaaa

SEQ ID NO: 148381 - RNA, 19 nt, Homo sapiens
  misc_RNA (1)...(19): siRNA sense strand
ggagaaccauauacucuug

SEQ ID NO: 148382 - RNA, 19 nt, Homo sapiens
  misc_RNA (1)...(19): siRNA sense strand
gaauauguaccgacuguuu

SEQ ID NO: 148383 - RNA, 19 nt, Homo sapiens
  misc_RNA (1)...(19): siRNA sense strand
aaacaugucuccugauauc

SEQ ID NO: 148384 - RNA, 19 nt, Homo sapiens
  misc_RNA (1)...(19): siRNA sense strand
ucaaguauguggaguguuc

SEQ ID NO: 148385 - RNA, 19 nt, Homo sapiens
  misc_RNA (1)...(19): siRNA sense strand
uaaaacaugucuccugaua

SEQ ID NO: 148386 - RNA, 19 nt, Homo sapiens
  misc_RNA (1)...(19): siRNA sense strand
ccugaaggcugucaaguau

SEQ ID NO: 148387 - RNA, 19 nt, Homo sapiens
  misc_RNA (1)...(19): siRNA sense strand
gauuacgaccgcugaguua

SEQ ID NO: 148388 - RNA, 19 nt, Homo sapiens
  misc_RNA (1)...(19): siRNA sense strand
ugaaggcugucaaguaugu

SEQ ID NO: 148389 - RNA, 19 nt, Homo sapiens
  misc_RNA (1)...(19): siRNA sense strand
cgauggugcuguugguaaa

SEQ ID NO: 148390 - RNA, 19 nt, Homo sapiens
  misc_RNA (1)...(19): siRNA sense strand
gcagucacaguuaugauug

SEQ ID NO: 148391 - RNA, 19 nt, Homo sapiens
  misc_RNA (1)...(19): siRNA sense strand
ccgcugaguuauccacaaa

SEQ ID NO: 148392 - RNA, 19 nt, Homo sapiens
  misc_RNA (1)...(19): siRNA sense strand
gaugaccccucuacuauug

SEQ ID NO: 148393 - RNA, 19 nt, Homo sapiens
  misc_RNA (1)...(19): siRNA sense strand
ucaguggucucuccaucuu

SEQ ID NO: 148394 - RNA, 19 nt, Homo sapiens
  misc_RNA (1)...(19): siRNA sense strand
cggaauauguaccgacugu

SEQ ID NO: 148395 - RNA, 19 nt, Homo sapiens
  misc_RNA (1)...(19): siRNA sense strand
gcugaguuauccacaaaca

SEQ ID NO: 148396 - RNA, 19 nt, Homo sapiens
  misc_RNA (1)...(19): siRNA sense strand
acucaccacuguccaaaga

SEQ ID NO: 148397 - RNA, 19 nt, Homo sapiens
  misc_RNA (1)...(19): siRNA sense strand
ugaguuauccacaaacaga

SEQ ID NO: 148398 - RNA, 19 nt, Homo sapiens
  misc_RNA (1)...(19): siRNA sense strand
acagauguauuucuagucu

SEQ ID NO: 148399 - RNA, 19 nt, Homo sapiens
  misc_RNA (1)...(19): siRNA sense strand
gcgauggugcuguugguaa

SEQ ID NO: 148400 - RNA, 19 nt, Homo sapiens
  misc_RNA (1)...(19): siRNA sense strand
gcagacaauuaaguguguu

SEQ ID NO: 148401 - RNA, 19 nt, Homo sapiens
  misc_RNA (1)...(19): siRNA sense strand
gagaugaccccucuacuau

SEQ ID NO: 148402 - RNA, 19 nt, Homo sapiens
  misc_RNA (1)...(19): siRNA sense strand
ccugauauccuacacaaca

SEQ ID NO: 148403 - RNA, 19 nt, Homo sapiens
  misc_RNA (1)...(19): siRNA sense strand
gaacaaacagaagccuauc

SEQ ID NO: 148404 - RNA, 19 nt, Homo sapiens
  misc_RNA (1)...(19): siRNA sense strand
caugucuccugauauccua

SEQ ID NO: 148405 - RNA, 19 nt, Homo sapiens
  misc_RNA (1)...(19): siRNA sense strand
ccauauacucuuggacuuu

SEQ ID NO: 148406 - RNA, 19 nt, Homo sapiens
  misc_RNA (1)...(19): siRNA sense strand
aaagugggugccugagaua

SEQ ID NO: 148407 - RNA, 19 nt, Homo sapiens
  misc_RNA (1)...(19): siRNA sense strand
uccacaaacagauguauuu

SEQ ID NO: 148408 - RNA, 19 nt, Homo sapiens
  misc_RNA (1)...(19): siRNA sense strand
agauguauuucuagucugu

SEQ ID NO: 148409 - RNA, 19 nt, Homo sapiens
  misc_RNA (1)...(19): siRNA sense strand
ccucuacuauugagaaacu

SEQ ID NO: 148410 - RNA, 19 nt, Homo sapiens
  misc_RNA (1)...(19): siRNA sense strand
ggucucuccaucuucauuu

SEQ ID NO: 148411 - RNA, 19 nt, Homo sapiens
  misc_RNA (1)...(19): siRNA sense strand
uaacucaccacuguccaaa

SEQ ID NO: 148412 - RNA, 19 nt, Homo sapiens
  misc_RNA (1)...(19): siRNA sense strand
agaacaaacagaagccuau

SEQ ID NO: 148413 - RNA, 19 nt, Homo sapiens
  misc_RNA (1)...(19): siRNA sense strand
cauauacucuuggacuuuu

SEQ ID NO: 148414 - RNA, 19 nt, Homo sapiens
  misc_RNA (1)...(19): siRNA sense strand
caauuaaguguguuguugu

SEQ ID NO: 148415 - RNA, 19 nt, Homo sapiens
  misc_RNA (1)...(19): siRNA sense strand
ccacaaacagauguauuuc

SEQ ID NO: 148416 - RNA, 19 nt, Homo sapiens
  misc_RNA (1)...(19): siRNA sense strand
acuaugcagucacaguuau

SEQ ID NO: 148417 - RNA, 19 nt, Homo sapiens
  misc_RNA (1)...(19): siRNA sense strand
guggagaaccauauacucu

SEQ ID NO: 148418 - RNA, 19 nt, Homo sapiens
  misc_RNA (1)...(19): siRNA sense strand
aauuaaguguguuguugug

SEQ ID NO: 148419 - RNA, 19 nt, Homo sapiens
  misc_RNA (1)...(19): siRNA sense strand
ugucaaguauguggagugu

SEQ ID NO: 148420 - RNA, 19 nt, Homo sapiens
  misc_RNA (1)...(19): siRNA sense strand
gaaaagugggugccugaga

SEQ ID NO: 148421 - RNA, 19 nt, Homo sapiens
  misc_RNA (1)...(19): siRNA sense strand
cuccugauauccuacacaa

SEQ ID NO: 148422 - RNA, 19 nt, Homo sapiens
  misc_RNA (1)...(19): siRNA sense strand
gggcgauggugcuguuggu

SEQ ID NO: 148423 - RNA, 19 nt, Homo sapiens
  misc_RNA (1)...(19): siRNA sense strand
acuccuuucuugcuuguug

SEQ ID NO: 148424 - RNA, 19 nt, Homo sapiens
  misc_RNA (1)...(19): siRNA sense strand
caaacagauguauuucuag

SEQ ID NO: 148425 - RNA, 19 nt, Homo sapiens
  misc_RNA (1)...(19): siRNA sense strand
agaaccauauacucuugga

SEQ ID NO: 148426 - RNA, 19 nt, Homo sapiens
  misc_RNA (1)...(19): siRNA sense strand
cugauauccuacacaacaa

SEQ ID NO: 148427 - RNA, 19 nt, Homo sapiens
  misc_RNA (1)...(19): siRNA sense strand
gccuaucacuccagagacu

SEQ ID NO: 148428 - RNA, 19 nt, Homo sapiens
  misc_RNA (1)...(19): siRNA sense strand
ccuacacaacaaacaaauu

SEQ ID NO: 148429 - RNA, 19 nt, Homo sapiens
  misc_RNA (1)...(19): siRNA sense strand
ucaccacuguccaaagacu

SEQ ID NO: 148430 - RNA, 19 nt, Homo sapiens
  misc_RNA (1)...(19): siRNA sense strand
aaaagugggugccugagau

SEQ ID NO: 148431 - RNA, 19 nt, Homo sapiens
  misc_RNA (1)...(19): siRNA sense strand
aguggucucuccaucuuca

SEQ ID NO: 148432 - RNA, 19 nt, Homo sapiens
  misc_RNA (1)...(19): siRNA sense strand
ggagaaccauauacucuug

SEQ ID NO: 148433 - RNA, 19 nt, Homo sapiens
  misc_RNA (1)...(19): siRNA sense strand
gaauauguaccgacuguuu

SEQ ID NO: 148434 - RNA, 19 nt, Homo sapiens
  misc_RNA (1)...(19): siRNA sense strand
aaacaugucuccugauauc

SEQ ID NO: 148435 - RNA, 19 nt, Homo sapiens
  misc_RNA (1)...(19): siRNA sense strand
ucaaguauguggaguguuc

SEQ ID NO: 148436 - RNA, 19 nt, Homo sapiens
  misc_RNA (1)...(19): siRNA sense strand
uaaaacaugucuccugaua

SEQ ID NO: 148437 - RNA, 19 nt, Homo sapiens
  misc_RNA (1)...(19): siRNA sense strand
ccugaaggcugucaaguau

SEQ ID NO: 148438 - RNA, 19 nt, Homo sapiens
  misc_RNA (1)...(19): siRNA sense strand
gauuacgaccgcugaguua

SEQ ID NO: 148439 - RNA, 19 nt, Homo sapiens
  misc_RNA (1)...(19): siRNA sense strand
ugaaggcugucaaguaugu

SEQ ID NO: 148440 - RNA, 19 nt, Homo sapiens
  misc_RNA (1)...(19): siRNA sense strand
cgauggugcuguugguaaa

SEQ ID NO: 148441 - RNA, 19 nt, Homo sapiens
  misc_RNA (1)...(19): siRNA sense strand
gcagucacaguuaugauug

SEQ ID NO: 148442 - RNA, 19 nt, Homo sapiens
  misc_RNA (1)...(19): siRNA sense strand
ccgcugaguuauccacaaa

SEQ ID NO: 148443 - RNA, 19 nt, Homo sapiens
  misc_RNA (1)...(19): siRNA sense strand
gaugaccccucuacuauug

SEQ ID NO: 148444 - RNA, 19 nt, Homo sapiens
  misc_RNA (1)...(19): siRNA sense strand
ucaguggucucuccaucuu

SEQ ID NO: 148445 - RNA, 19 nt, Homo sapiens
  misc_RNA (1)...(19): siRNA sense strand
cggaauauguaccgacugu

SEQ ID NO: 148446 - RNA, 19 nt, Homo sapiens
  misc_RNA (1)...(19): siRNA sense strand
gcugaguuauccacaaaca

SEQ ID NO: 148447 - RNA, 19 nt, Homo sapiens
  misc_RNA (1)...(19): siRNA sense strand
acucaccacuguccaaaga

SEQ ID NO: 148448 - RNA, 19 nt, Homo sapiens
  misc_RNA (1)...(19): siRNA sense strand
ugaguuauccacaaacaga

SEQ ID NO: 148449 - RNA, 19 nt, Homo sapiens
  misc_RNA (1)...(19): siRNA sense strand
acagauguauuucuagucu

SEQ ID NO: 148450 - RNA, 19 nt, Homo sapiens
  misc_RNA (1)...(19): siRNA sense strand
gcgauggugcuguugguaa

SEQ ID NO: 148451 - RNA, 19 nt, Homo sapiens
  misc_RNA (1)...(19): siRNA sense strand
gcagacaauuaaguguguu

SEQ ID NO: 148452 - RNA, 19 nt, Homo sapiens
  misc_RNA (1)...(19): siRNA sense strand
gagaugaccccucuacuau

SEQ ID NO: 148453 - RNA, 19 nt, Homo sapiens
  misc_RNA (1)...(19): siRNA sense strand
ccugauauccuacacaaca

SEQ ID NO: 148454 - RNA, 19 nt, Homo sapiens
  misc_RNA (1)...(19): siRNA sense strand
gaacaaacagaagccuauc

SEQ ID NO: 148455 - RNA, 19 nt, Homo sapiens
  misc_RNA (1)...(19): siRNA sense strand
caugucuccugauauccua

SEQ ID NO: 148456 - RNA, 19 nt, Homo sapiens
  misc_RNA (1)...(19): siRNA sense strand
ccauauacucuuggacuuu

SEQ ID NO: 148457 - RNA, 19 nt, Homo sapiens
  misc_RNA (1)...(19): siRNA sense strand
aaagugggugccugagaua

SEQ ID NO: 148458 - RNA, 19 nt, Homo sapiens
  misc_RNA (1)...(19): siRNA sense strand
uccacaaacagauguauuu

SEQ ID NO: 148459 - RNA, 19 nt, Homo sapiens
  misc_RNA (1)...(19): siRNA sense strand
agauguauuucuagucugu

SEQ ID NO: 148460 - RNA, 19 nt, Homo sapiens
  misc_RNA (1)...(19): siRNA sense strand
ccucuacuauugagaaacu

SEQ ID NO: 148461 - RNA, 19 nt, Homo sapiens
  misc_RNA (1)...(19): siRNA sense strand
ggucucuccaucuucauuu

SEQ ID NO: 148462 - RNA, 19 nt, Homo sapiens
  misc_RNA (1)...(19): siRNA sense strand
uaacucaccacuguccaaa

SEQ ID NO: 148463 - RNA, 19 nt, Homo sapiens
  misc_RNA (1)...(19): siRNA sense strand
agaacaaacagaagccuau

SEQ ID NO: 148464 - RNA, 19 nt, Homo sapiens
  misc_RNA (1)...(19): siRNA sense strand
cauauacucuuggacuuuu

SEQ ID NO: 148465 - RNA, 19 nt, Homo sapiens
  misc_RNA (1)...(19): siRNA sense strand
caauuaaguguguuguugu

SEQ ID NO: 148466 - RNA, 19 nt, Homo sapiens
  misc_RNA (1)...(19): siRNA sense strand
ccacaaacagauguauuuc

SEQ ID NO: 148467 - RNA, 19 nt, Homo sapiens
  misc_RNA (1)...(19): siRNA sense strand
acuaugcagucacaguuau

SEQ ID NO: 148468 - RNA, 19 nt, Homo sapiens
  misc_RNA (1)...(19): siRNA sense strand
guggagaaccauauacucu

SEQ ID NO: 148469 - RNA, 19 nt, Homo sapiens
  misc_RNA (1)...(19): siRNA sense strand
aauuaaguguguuguugug

SEQ ID NO: 148470 - RNA, 19 nt, Homo sapiens
  misc_RNA (1)...(19): siRNA sense strand
ugucaaguauguggagugu

SEQ ID NO: 148471 - RNA, 19 nt, Homo sapiens
  misc_RNA (1)...(19): siRNA sense strand
gaaaagugggugccugaga

SEQ ID NO: 148472 - RNA, 19 nt, Homo sapiens
  misc_RNA (1)...(19): siRNA sense strand
cuccugauauccuacacaa

SEQ ID NO: 148473 - RNA, 19 nt, Homo sapiens
  misc_RNA (1)...(19): siRNA sense strand
gggcgauggugcuguuggu

SEQ ID NO: 148474 - RNA, 19 nt, Homo sapiens
  misc_RNA (1)...(19): siRNA sense strand
acuccuuucuugcuuguug

SEQ ID NO: 148475 - RNA, 19 nt, Homo sapiens
  misc_RNA (1)...(19): siRNA sense strand
caaacagauguauuucuag

SEQ ID NO: 148476 - RNA, 19 nt, Homo sapiens
  misc_RNA (1)...(19): siRNA sense strand
agaaccauauacucuugga

SEQ ID NO: 148477 - RNA, 19 nt, Homo sapiens
  misc_RNA (1)...(19): siRNA sense strand
cugauauccuacacaacaa

SEQ ID NO: 148478 - RNA, 19 nt, Homo sapiens
  misc_RNA (1)...(19): siRNA sense strand
gccuaucacuccagagacu

SEQ ID NO: 148479 - RNA, 19 nt, Homo sapiens
  misc_RNA (1)...(19): siRNA sense strand
ccuacacaacaaacaaauu

SEQ ID NO: 148480 - RNA, 19 nt, Homo sapiens
  misc_RNA (1)...(19): siRNA sense strand
ucaccacuguccaaagacu

SEQ ID NO: 148481 - RNA, 19 nt, Homo sapiens
  misc_RNA (1)...(19): siRNA sense strand
aaaagugggugccugagau

SEQ ID NO: 148482 - RNA, 19 nt, Homo sapiens
  misc_RNA (1)...(19): siRNA sense strand
aguggucucuccaucuuca

SEQ ID NO: 148483 - RNA, 19 nt, Homo sapiens
  misc_RNA (1)...(19): siRNA sense strand
ugaaucagcucaagucuaa

SEQ ID NO: 148484 - RNA, 19 nt, Homo sapiens
  misc_RNA (1)...(19): siRNA sense strand
gggaggagauugccaagua

SEQ ID NO: 148485 - RNA, 19 nt, Homo sapiens
  misc_RNA (1)...(19): siRNA sense strand
ugacaaugcucccauguuu

SEQ ID NO: 148486 - RNA, 19 nt, Homo sapiens
  misc_RNA (1)...(19): siRNA sense strand
gaaaucggcaacuuuauaa

SEQ ID NO: 148487 - RNA, 19 nt, Homo sapiens
  misc_RNA (1)...(19): siRNA sense strand
gaaagaagcggaagaucaa

SEQ ID NO: 148488 - RNA, 19 nt, Homo sapiens
  misc_RNA (1)...(19): siRNA sense strand
gaugaaaucggcaacuuua

SEQ ID NO: 148489 - RNA, 19 nt, Homo sapiens
  misc_RNA (1)...(19): siRNA sense strand
gaaggucacugaaggaaag

SEQ ID NO: 148490 - RNA, 19 nt, Homo sapiens
  misc_RNA (1)...(19): siRNA sense strand
ggaaaggaauccauugaag

SEQ ID NO: 148491 - RNA, 19 nt, Homo sapiens
  misc_RNA (1)...(19): siRNA sense strand
caagagagauugggugguu

SEQ ID NO: 148492 - RNA, 19 nt, Homo sapiens
  misc_RNA (1)...(19): siRNA sense strand
gaaaggaauccauugaaga

SEQ ID NO: 148493 - RNA, 19 nt, Homo sapiens
  misc_RNA (1)...(19): siRNA sense strand
gcucaagucuaauaaagau

SEQ ID NO: 148494 - RNA, 19 nt, Homo sapiens
  misc_RNA (1)...(19): siRNA sense strand
ggaacaacaucuaugaagu

SEQ ID NO: 148495 - RNA, 19 nt, Homo sapiens
  misc_RNA (1)...(19): siRNA sense strand
gaaugaggcaccuguguuu

SEQ ID NO: 148496 - RNA, 19 nt, Homo sapiens
  misc_RNA (1)...(19): siRNA sense strand
gauagagacaccaagauuu

SEQ ID NO: 148497 - RNA, 19 nt, Homo sapiens
  misc_RNA (1)...(19): siRNA sense strand
agaccaagauuacgauuau

SEQ ID NO: 148498 - RNA, 19 nt, Homo sapiens
  misc_RNA (1)...(19): siRNA sense strand
ugaaaucggcaacuuuaua

SEQ ID NO: 148499 - RNA, 19 nt, Homo sapiens
  misc_RNA (1)...(19): siRNA sense strand
ucaagaagcuggcagacau

SEQ ID NO: 148500 - RNA, 19 nt, Homo sapiens
  misc_RNA (1)...(19): siRNA sense strand
gcugguuguuguugaauaa

SEQ ID NO: 148501 - RNA, 19 nt, Homo sapiens
  misc_RNA (1)...(19): siRNA sense strand
gagacaggcugguuguugu

SEQ ID NO: 148502 - RNA, 19 nt, Homo sapiens
  misc_RNA (1)...(19): siRNA sense strand
gaacaacaucuaugaaguc

SEQ ID NO: 148503 - RNA, 19 nt, Homo sapiens
  misc_RNA (1)...(19): siRNA sense strand
ggaggagauugccaaguau

SEQ ID NO: 148504 - RNA, 19 nt, Homo sapiens
  misc_RNA (1)...(19): siRNA sense strand
gaccacaagcccaaguuua

SEQ ID NO: 148505 - RNA, 19 nt, Homo sapiens
  misc_RNA (1)...(19): siRNA sense strand
gacaacgucuucuacuaug

SEQ ID NO: 148506 - RNA, 19 nt, Homo sapiens
  misc_RNA (1)...(19): siRNA sense strand
gugacaacgucuucuacua

SEQ ID NO: 148507 - RNA, 19 nt, Homo sapiens
  misc_RNA (1)...(19): siRNA sense strand
gaaggaaaggaauccauug

SEQ ID NO: 148508 - RNA, 19 nt, Homo sapiens
  misc_RNA (1)...(19): siRNA sense strand
ugaagaaguuccugaagca

SEQ ID NO: 148509 - RNA, 19 nt, Homo sapiens
  misc_RNA (1)...(19): siRNA sense strand
cagaagacccugacaagga

SEQ ID NO: 148510 - RNA, 19 nt, Homo sapiens
  misc_RNA (1)...(19): siRNA sense strand
ccaggaaggguuuggauuu

SEQ ID NO: 148511 - RNA, 19 nt, Homo sapiens
  misc_RNA (1)...(19): siRNA sense strand
gcacugauaaugaugacuu

SEQ ID NO: 148512 - RNA, 19 nt, Homo sapiens
  misc_RNA (1)...(19): siRNA sense strand
ggagauccuugaugccaau

SEQ ID NO: 148513 - RNA, 19 nt, Homo sapiens
  misc_RNA (1)...(19): siRNA sense strand
ggaaagaaggucacugaag

SEQ ID NO: 148514 - RNA, 19 nt, Homo sapiens
  misc_RNA (1)...(19): siRNA sense strand
gaccucauguucaccauuc

SEQ ID NO: 148515 - RNA, 19 nt, Homo sapiens
  misc_RNA (1)...(19): siRNA sense strand
gaagaugacacccgugaca

SEQ ID NO: 148516 - RNA, 19 nt, Homo sapiens
  misc_RNA (1)...(19): siRNA sense strand
ggaauccauugaagaucuu

SEQ ID NO: 148517 - RNA, 19 nt, Homo sapiens
  misc_RNA (1)...(19): siRNA sense strand
gcgaagaggaccaggacua

SEQ ID NO: 148518 - RNA, 19 nt, Homo sapiens
  misc_RNA (1)...(19): siRNA sense strand
ugaagcaggauacauauga

SEQ ID NO: 148519 - RNA, 19 nt, Homo sapiens
  misc_RNA (1)...(19): siRNA sense strand
cauaugacgugcaccuuuc

SEQ ID NO: 148520 - RNA, 19 nt, Homo sapiens
  misc_RNA (1)...(19): siRNA sense strand
cagcucaagucuaauaaag

SEQ ID NO: 148521 - RNA, 19 nt, Homo sapiens
  misc_RNA (1)...(19): siRNA sense strand
ggagacaggcugguuguug

SEQ ID NO: 148522 - RNA, 19 nt, Homo sapiens
  misc_RNA (1)...(19): siRNA sense strand
gaagacacaagagagauug

SEQ ID NO: 148523 - RNA, 19 nt, Homo sapiens
  misc_RNA (1)...(19): siRNA sense strand
ugacaacgucuucuacuau

SEQ ID NO: 148524 - RNA, 19 nt, Homo sapiens
  misc_RNA (1)...(19): siRNA sense strand
uccaauaucugucccugaa

SEQ ID NO: 148525 - RNA, 19 nt, Homo sapiens
  misc_RNA (1)...(19): siRNA sense strand
ggugguugcuccaauaucu

SEQ ID NO: 148526 - RNA, 19 nt, Homo sapiens
  misc_RNA (1)...(19): siRNA sense strand
aaucagcucaagucuaaua

SEQ ID NO: 148527 - RNA, 19 nt, Homo sapiens
  misc_RNA (1)...(19): siRNA sense strand
caggaaagaaggucacuga

SEQ ID NO: 148528 - RNA, 19 nt, Homo sapiens
  misc_RNA (1)...(19): siRNA sense strand
gaccaggacuaugacauca

SEQ ID NO: 148529 - RNA, 19 nt, Homo sapiens
  misc_RNA (1)...(19): siRNA sense strand
acaaugcucccauguuuga

SEQ ID NO: 148530 - RNA, 19 nt, Homo sapiens
  misc_RNA (1)...(19): siRNA sense strand
agaaagaagcggaagauca

SEQ ID NO: 148531 - RNA, 19 nt, Homo sapiens
  misc_RNA (1)...(19): siRNA sense strand
cagaugaaaucggcaacuu

SEQ ID NO: 148532 - RNA, 19 nt, Homo sapiens
  misc_RNA (1)...(19): siRNA sense strand
ugaggaacaacaucuauga

SEQ ID NO: 148533 - RNA, 19 nt, Homo sapiens
  misc_RNA (1)...(19): siRNA sense strand
ggaaggguuuggauuuuga

SEQ ID NO: 148534 - RNA, 19 nt, Homo sapiens
  misc_RNA (1)...(19): siRNA sense strand
gagggugucuucgcuguag

SEQ ID NO: 148535 - RNA, 19 nt, Homo sapiens
  misc_RNA (1)...(19): siRNA sense strand
ggaccaggacuaugacauc

SEQ ID NO: 148536 - RNA, 19 nt, Homo sapiens
  misc_RNA (1)...(19): siRNA sense strand
guuuagcacugauaaugau

SEQ ID NO: 148537 - RNA, 19 nt, Homo sapiens
  misc_RNA (1)...(19): siRNA sense strand
aaaggaauccauugaagau

SEQ ID NO: 148538 - RNA, 19 nt, Homo sapiens
  misc_RNA (1)...(19): siRNA sense strand
gaagcuggcagacauguac

SEQ ID NO: 148539 - RNA, 19 nt, Homo sapiens
  misc_RNA (1)...(19): siRNA sense strand
aagaggaccaggacuauga

SEQ ID NO: 148540 - RNA, 19 nt, Homo sapiens
  misc_RNA (1)...(19): siRNA sense strand
gaggaugagcaguuuguga

SEQ ID NO: 148541 - RNA, 19 nt, Homo sapiens
  misc_RNA (1)...(19): siRNA sense strand
gaaguacgaggcccaugug

SEQ ID NO: 148542 - RNA, 19 nt, Homo sapiens
  misc_RNA (1)...(19): siRNA sense strand
acaauggggugguugcuua

SEQ ID NO: 148543 - RNA, 19 nt, Homo sapiens
  misc_RNA (1)...(19): siRNA sense strand
aaagauagagacaccaaga

SEQ ID NO: 148544 - RNA, 19 nt, Homo sapiens
  misc_RNA (1)...(19): siRNA sense strand
gaacccuucugcuaacacu

SEQ ID NO: 148545 - RNA, 19 nt, Homo sapiens
  misc_RNA (1)...(19): siRNA sense strand
gaagcaggauacauaugac

SEQ ID NO: 148546 - RNA, 19 nt, Homo sapiens
  misc_RNA (1)...(19): siRNA sense strand
cgaagacacaagagagauu

SEQ ID NO: 148547 - RNA, 19 nt, Homo sapiens
  misc_RNA (1)...(19): siRNA sense strand
gaggaacaacaucuaugaa

SEQ ID NO: 148548 - RNA, 19 nt, Homo sapiens
  misc_RNA (1)...(19): siRNA sense strand
ugaaggaaaggaauccauu

SEQ ID NO: 148549 - RNA, 19 nt, Homo sapiens
  misc_RNA (1)...(19): siRNA sense strand
gcgagacaguccaggaaag

SEQ ID NO: 148550 - RNA, 19 nt, Homo sapiens
  misc_RNA (1)...(19): siRNA sense strand
ugaaggcggcuaacacaga

SEQ ID NO: 148551 - RNA, 19 nt, Homo sapiens
  misc_RNA (1)...(19): siRNA sense strand
gaagaggaccaggacuaug

SEQ ID NO: 148552 - RNA, 19 nt, Homo sapiens
  misc_RNA (1)...(19): siRNA sense strand
aggcccagcucacagauga

SEQ ID NO: 148553 - RNA, 19 nt, Homo sapiens
  misc_RNA (1)...(19): siRNA sense strand
guugcuuacuccauccaua

SEQ ID NO: 148554 - RNA, 19 nt, Homo sapiens
  misc_RNA (1)...(19): siRNA sense strand
caauaucugucccugaaaa

SEQ ID NO: 148555 - RNA, 19 nt, Homo sapiens
  misc_RNA (1)...(19): siRNA sense strand
ugacuucacugugcggaau

SEQ ID NO: 148556 - RNA, 19 nt, Homo sapiens
  misc_RNA (1)...(19): siRNA sense strand
agauagagacaccaagauu

SEQ ID NO: 148557 - RNA, 19 nt, Homo sapiens
  misc_RNA (1)...(19): siRNA sense strand
cgaccaagaccaagauuac

SEQ ID NO: 148558 - RNA, 19 nt, Homo sapiens
  misc_RNA (1)...(19): siRNA sense strand
ccacacgaccucauguuca

SEQ ID NO: 148559 - RNA, 19 nt, Homo sapiens
  misc_RNA (1)...(19): siRNA sense strand
agaaugcagugggccauga

SEQ ID NO: 148560 - RNA, 19 nt, Homo sapiens
  misc_RNA (1)...(19): siRNA sense strand
caacgaggaaggugacaca

SEQ ID NO: 148561 - RNA, 19 nt, Homo sapiens
  misc_RNA (1)...(19): siRNA sense strand
ggcugguuguuguugaaua

SEQ ID NO: 148562 - RNA, 19 nt, Homo sapiens
  misc_RNA (1)...(19): siRNA sense strand
aagagcagcugacggugau

SEQ ID NO: 148563 - RNA, 19 nt, Homo sapiens
  misc_RNA (1)...(19): siRNA sense strand
ggacccacacgaccucaug

SEQ ID NO: 148564 - RNA, 19 nt, Homo sapiens
  misc_RNA (1)...(19): siRNA sense strand
cgaccagaaugaccacaag

SEQ ID NO: 148565 - RNA, 19 nt, Homo sapiens
  misc_RNA (1)...(19): siRNA sense strand
ugaaugaggcaccuguguu

SEQ ID NO: 148566 - RNA, 19 nt, Homo sapiens
  misc_RNA (1)...(19): siRNA sense strand
cgaagaggaccaggacuau

SEQ ID NO: 148567 - RNA, 19 nt, Homo sapiens
  misc_RNA (1)...(19): siRNA sense strand
ugccaaguaugagcucuuu

SEQ ID NO: 148568 - RNA, 19 nt, Homo sapiens
  misc_RNA (1)...(19): siRNA sense strand
ccacguggaggaugugaau

SEQ ID NO: 148569 - RNA, 19 nt, Homo sapiens
  misc_RNA (1)...(19): siRNA sense strand
gacaaugcucccauguuug

SEQ ID NO: 148570 - RNA, 19 nt, Homo sapiens
  misc_RNA (1)...(19): siRNA sense strand
caucgugaccgaccagaau

SEQ ID NO: 148571 - RNA, 19 nt, Homo sapiens
  misc_RNA (1)...(19): siRNA sense strand
gcacacccuguacguugaa

SEQ ID NO: 148572 - RNA, 19 nt, Homo sapiens
  misc_RNA (1)...(19): siRNA sense strand
ucggcaacuuuauaauuga

SEQ ID NO: 148573 - RNA, 19 nt, Homo sapiens
  misc_RNA (1)...(19): siRNA sense strand
gacgugcaccuuucucugu

SEQ ID NO: 148574 - RNA, 19 nt, Homo sapiens
  misc_RNA (1)...(19): siRNA sense strand
aucggcaacuuuauaauug

SEQ ID NO: 148575 - RNA, 19 nt, Homo sapiens
  misc_RNA (1)...(19): siRNA sense strand
caggcugguuguuguugaa

SEQ ID NO: 148576 - RNA, 19 nt, Homo sapiens
  misc_RNA (1)...(19): siRNA sense strand
aagaccaagauuacgauua

SEQ ID NO: 148577 - RNA, 19 nt, Homo sapiens
  misc_RNA (1)...(19): siRNA sense strand
ggacggcagaggucaacga

SEQ ID NO: 148578 - RNA, 19 nt, Homo sapiens
  misc_RNA (1)...(19): siRNA sense strand
cacgggaacccuucugcua

SEQ ID NO: 148579 - RNA, 19 nt, Homo sapiens
  misc_RNA (1)...(19): siRNA sense strand
gcuaccgcauccugagaga

SEQ ID NO: 148580 - RNA, 19 nt, Homo sapiens
  misc_RNA (1)...(19): siRNA sense strand
gccacgcugugucagagaa

SEQ ID NO: 148581 - RNA, 19 nt, Homo sapiens
  misc_RNA (1)...(19): siRNA sense strand
gaggagauugccaaguaug

SEQ ID NO: 148582 - RNA, 19 nt, Homo sapiens
  misc_RNA (1)...(19): siRNA sense strand
acauaugacgugcaccuuu

SEQ ID NO: 148583 - RNA, 19 nt, Homo sapiens
  misc_RNA (1)...(19): siRNA sense strand
ggaaggaaaucucaacuau

SEQ ID NO: 148584 - RNA, 19 nt, Homo sapiens
  misc_RNA (1)...(19): siRNA sense strand
gagagaaaguucagcagua

SEQ ID NO: 148585 - RNA, 19 nt, Homo sapiens
  misc_RNA (1)...(19): siRNA sense strand
ccacagauauggaaggaaa

SEQ ID NO: 148586 - RNA, 19 nt, Homo sapiens
  misc_RNA (1)...(19): siRNA sense strand
caacgaggcucccuacuuc

SEQ ID NO: 148587 - RNA, 19 nt, Homo sapiens
  misc_RNA (1)...(19): siRNA sense strand
gcauuaaucucccaaaaua

SEQ ID NO: 148588 - RNA, 19 nt, Homo sapiens
  misc_RNA (1)...(19): siRNA sense strand
gcgacaacauccucaagua

SEQ ID NO: 148589 - RNA, 19 nt, Homo sapiens
  misc_RNA (1)...(19): siRNA sense strand
ggacaugaauggcaacaag

SEQ ID NO: 148590 - RNA, 19 nt, Homo sapiens
  misc_RNA (1)...(19): siRNA sense strand
cagaauauguucaccauca

SEQ ID NO: 148591 - RNA, 19 nt, Homo sapiens
  misc_RNA (1)...(19): siRNA sense strand
ugacagaugugaaugacaa

SEQ ID NO: 148592 - RNA, 19 nt, Homo sapiens
  misc_RNA (1)...(19): siRNA sense strand
cggaagaacuggaccauca

SEQ ID NO: 148593 - RNA, 19 nt, Homo sapiens
  misc_RNA (1)...(19): siRNA sense strand
cgacaucggugacuucauc

SEQ ID NO: 148594 - RNA, 19 nt, Homo sapiens
  misc_RNA (1)...(19): siRNA sense strand
ugacaacccgccagaauuu

SEQ ID NO: 148595 - RNA, 19 nt, Homo sapiens
  misc_RNA (1)...(19): siRNA sense strand
ucaagaagcuggcggacau

SEQ ID NO: 148596 - RNA, 19 nt, Homo sapiens
  misc_RNA (1)...(19): siRNA sense strand
aaggaaaucucaacuaugg

SEQ ID NO: 148597 - RNA, 19 nt, Homo sapiens
  misc_RNA (1)...(19): siRNA sense strand
caacacguccaucaucaaa

SEQ ID NO: 148598 - RNA, 19 nt, Homo sapiens
  misc_RNA (1)...(19): siRNA sense strand
gaagcuggcggacauguau

SEQ ID NO: 148599 - RNA, 19 nt, Homo sapiens
  misc_RNA (1)...(19): siRNA sense strand
ccaucgaccuguacaucua

SEQ ID NO: 148600 - RNA, 19 nt, Homo sapiens
  misc_RNA (1)...(19): siRNA sense strand
acaacauccucaaguauga

SEQ ID NO: 148601 - RNA, 19 nt, Homo sapiens
  misc_RNA (1)...(19): siRNA sense strand
gcgagaagcccaaccugaa

SEQ ID NO: 148602 - RNA, 19 nt, Homo sapiens
  misc_RNA (1)...(19): siRNA sense strand
gaaggaaaucucaacuaug

SEQ ID NO: 148603 - RNA, 19 nt, Homo sapiens
  misc_RNA (1)...(19): siRNA sense strand
cgacaaagacaaugacauc

SEQ ID NO: 148604 - RNA, 19 nt, Homo sapiens
  misc_RNA (1)...(19): siRNA sense strand
ggaccaagacuacgauuac

SEQ ID NO: 148605 - RNA, 19 nt, Homo sapiens
  misc_RNA (1)...(19): siRNA sense strand
gaucuuacaacuagagaga

SEQ ID NO: 148606 - RNA, 19 nt, Homo sapiens
  misc_RNA (1)...(19): siRNA sense strand
guauggagguggugaagag

SEQ ID NO: 148607 - RNA, 19 nt, Homo sapiens
  misc_RNA (1)...(19): siRNA sense strand
cagagcccgucccagaaua

SEQ ID NO: 148608 - RNA, 19 nt, Homo sapiens
  misc_RNA (1)...(19): siRNA sense strand
gacaacauccucaaguaug

SEQ ID NO: 148609 - RNA, 19 nt, Homo sapiens
  misc_RNA (1)...(19): siRNA sense strand
caacagcauggacuucaaa

SEQ ID NO: 148610 - RNA, 19 nt, Homo sapiens
  misc_RNA (1)...(19): siRNA sense strand
gcaaggcuggguucucuga

SEQ ID NO: 148611 - RNA, 19 nt, Homo sapiens
  misc_RNA (1)...(19): siRNA sense strand
gcaguacacagucaucguu

SEQ ID NO: 148612 - RNA, 19 nt, Homo sapiens
  misc_RNA (1)...(19): siRNA sense strand
cagcgagacuggagauauc

SEQ ID NO: 148613 - RNA, 19 nt, Homo sapiens
  misc_RNA (1)...(19): siRNA sense strand
cgagcuggcugcacaucaa

SEQ ID NO: 148614 - RNA, 19 nt, Homo sapiens
  misc_RNA (1)...(19): siRNA sense strand
ggacacaagccgcagaaag

SEQ ID NO: 148615 - RNA, 19 nt, Homo sapiens
  misc_RNA (1)...(19): siRNA sense strand
gugagucccucuacaccaa

SEQ ID NO: 148616 - RNA, 19 nt, Homo sapiens
  misc_RNA (1)...(19): siRNA sense strand
acacguccaucaucaaagu

SEQ ID NO: 148617 - RNA, 19 nt, Homo sapiens
  misc_RNA (1)...(19): siRNA sense strand
cgacaacauccucaaguau

SEQ ID NO: 148618 - RNA, 19 nt, Homo sapiens
  misc_RNA (1)...(19): siRNA sense strand
agaaggagcgccacacgaa

SEQ ID NO: 148619 - RNA, 19 nt, Homo sapiens
  misc_RNA (1)...(19): siRNA sense strand
ugaaggcagucgacuacga

SEQ ID NO: 148620 - RNA, 19 nt, Homo sapiens
  misc_RNA (1)...(19): siRNA sense strand
ggacacaauaugagaccaa

SEQ ID NO: 148621 - RNA, 19 nt, Homo sapiens
  misc_RNA (1)...(19): siRNA sense strand
gggaccaagacuacgauua

SEQ ID NO: 148622 - RNA, 19 nt, Homo sapiens
  misc_RNA (1)...(19): siRNA sense strand
gcgaggaggaccaggacua

SEQ ID NO: 148623 - RNA, 19 nt, Homo sapiens
  misc_RNA (1)...(19): siRNA sense strand
gagcuuucaugcugacagu

SEQ ID NO: 148624 - RNA, 19 nt, Homo sapiens
  misc_RNA (1)...(19): siRNA sense strand
gcacagaccccguaaccaa

SEQ ID NO: 148625 - RNA, 19 nt, Homo sapiens
  misc_RNA (1)...(19): siRNA sense strand
gacaacccgccagaauuua

SEQ ID NO: 148626 - RNA, 19 nt, Homo sapiens
  misc_RNA (1)...(19): siRNA sense strand
gauauggaaggaaaucuca

SEQ ID NO: 148627 - RNA, 19 nt, Homo sapiens
  misc_RNA (1)...(19): siRNA sense strand
guucagcaguacacaguca

SEQ ID NO: 148628 - RNA, 19 nt, Homo sapiens
  misc_RNA (1)...(19): siRNA sense strand
ccaacagcauggacuucaa

SEQ ID NO: 148629 - RNA, 19 nt, Homo sapiens
  misc_RNA (1)...(19): siRNA sense strand
uaaugaggaucuuacaacu

SEQ ID NO: 148630 - RNA, 19 nt, Homo sapiens
  misc_RNA (1)...(19): siRNA sense strand
agacuacgauuaccucaac

SEQ ID NO: 148631 - RNA, 19 nt, Homo sapiens
  misc_RNA (1)...(19): siRNA sense strand
augaggaucuuacaacuag

SEQ ID NO: 148632 - RNA, 19 nt, Homo sapiens
  misc_RNA (1)...(19): siRNA sense strand
gaauccagauguccuucca

SEQ ID NO: 148633 - RNA, 19 nt, Homo sapiens
  misc_RNA (1)...(19): siRNA sense strand
ucucaacuauggccucuca

SEQ ID NO: 148634 - RNA, 19 nt, Homo sapiens
  misc_RNA (1)...(19): siRNA sense strand
caaccgcccugaguucauc

SEQ ID NO: 148635 - RNA, 19 nt, Homo sapiens
  misc_RNA (1)...(19): siRNA sense strand
ggaccaaggggacacaaua

SEQ ID NO: 148636 - RNA, 19 nt, Homo sapiens
  misc_RNA (1)...(19): siRNA sense strand
gaugauuacacggcauuaa

SEQ ID NO: 148637 - RNA, 19 nt, Homo sapiens
  misc_RNA (1)...(19): siRNA sense strand
ggaugaagcggcgagagaa

SEQ ID NO: 148638 - RNA, 19 nt, Homo sapiens
  misc_RNA (1)...(19): siRNA sense strand
ccaggcaccuacgugauga

SEQ ID NO: 148639 - RNA, 19 nt, Homo sapiens
  misc_RNA (1)...(19): siRNA sense strand
ccauggaggucuucagcau

SEQ ID NO: 148640 - RNA, 19 nt, Homo sapiens
  misc_RNA (1)...(19): siRNA sense strand
gacacaagccgcagaaagg

SEQ ID NO: 148641 - RNA, 19 nt, Homo sapiens
  misc_RNA (1)...(19): siRNA sense strand
cgacuacgagcucaacaga

SEQ ID NO: 148642 - RNA, 19 nt, Homo sapiens
  misc_RNA (1)...(19): siRNA sense strand
gaggauccgguccgacaaa

SEQ ID NO: 148643 - RNA, 19 nt, Homo sapiens
  misc_RNA (1)...(19): siRNA sense strand
ccgggacccuccagaucua

SEQ ID NO: 148644 - RNA, 19 nt, Homo sapiens
  misc_RNA (1)...(19): siRNA sense strand
ucaacgaggcucccuacuu

SEQ ID NO: 148645 - RNA, 19 nt, Homo sapiens
  misc_RNA (1)...(19): siRNA sense strand
gcccugaguucaucaacca

SEQ ID NO: 148646 - RNA, 19 nt, Homo sapiens
  misc_RNA (1)...(19): siRNA sense strand
gacuggagauaucgucaca

SEQ ID NO: 148647 - RNA, 19 nt, Homo sapiens
  misc_RNA (1)...(19): siRNA sense strand
ggccacagauauggaagga

SEQ ID NO: 148648 - RNA, 19 nt, Homo sapiens
  misc_RNA (1)...(19): siRNA sense strand
ccaucaacgugcccgagaa

SEQ ID NO: 148649 - RNA, 19 nt, Homo sapiens
  misc_RNA (1)...(19): siRNA sense strand
ccaaggaggcgcagaucug

SEQ ID NO: 148650 - RNA, 19 nt, Homo sapiens
  misc_RNA (1)...(19): siRNA sense strand
agaauauguucaccaucaa

SEQ ID NO: 148651 - RNA, 19 nt, Homo sapiens
  misc_RNA (1)...(19): siRNA sense strand
auggaggucuucagcauug

SEQ ID NO: 148652 - RNA, 19 nt, Homo sapiens
  misc_RNA (1)...(19): siRNA sense strand
ucaacuauggccucucaaa

SEQ ID NO: 148653 - RNA, 19 nt, Homo sapiens
  misc_RNA (1)...(19): siRNA sense strand
agagaaaguucagcaguac

SEQ ID NO: 148654 - RNA, 19 nt, Homo sapiens
  misc_RNA (1)...(19): siRNA sense strand
ugacaaccgcccugaguuc

SEQ ID NO: 148655 - RNA, 19 nt, Homo sapiens
  misc_RNA (1)...(19): siRNA sense strand
caacagcgagacuggagau

SEQ ID NO: 148656 - RNA, 19 nt, Homo sapiens
  misc_RNA (1)...(19): siRNA sense strand
gaccgugagucccucuaca

SEQ ID NO: 148657 - RNA, 19 nt, Homo sapiens
  misc_RNA (1)...(19): siRNA sense strand
caacuagagagaccugcaa

SEQ ID NO: 148658 - RNA, 19 nt, Homo sapiens
  misc_RNA (1)...(19): siRNA sense strand
ccaugguccugcuguuugu

SEQ ID NO: 148659 - RNA, 19 nt, Homo sapiens
  misc_RNA (1)...(19): siRNA sense strand
cgcagcagcucgugaggau

SEQ ID NO: 148660 - RNA, 19 nt, Homo sapiens
  misc_RNA (1)...(19): siRNA sense strand
ggugaaggcagucgacuac

SEQ ID NO: 148661 - RNA, 19 nt, Homo sapiens
  misc_RNA (1)...(19): siRNA sense strand
gguccgacaaagacaauga

SEQ ID NO: 148662 - RNA, 19 nt, Homo sapiens
  misc_RNA (1)...(19): siRNA sense strand
ccagacagcagagaaaugg

SEQ ID NO: 148663 - RNA, 19 nt, Homo sapiens
  misc_RNA (1)...(19): siRNA sense strand
uccaacacguccaucauca

SEQ ID NO: 148664 - RNA, 19 nt, Homo sapiens
  misc_RNA (1)...(19): siRNA sense strand
gcccauaaugaggaucuua

SEQ ID NO: 148665 - RNA, 19 nt, Homo sapiens
  misc_RNA (1)...(19): siRNA sense strand
cuggagauaucgucacagu

SEQ ID NO: 148666 - RNA, 19 nt, Homo sapiens
  misc_RNA (1)...(19): siRNA sense strand
gcuggguucucugaagaug

SEQ ID NO: 148667 - RNA, 19 nt, Homo sapiens
  misc_RNA (1)...(19): siRNA sense strand
gucaaggugugcccaugug

SEQ ID NO: 148668 - RNA, 19 nt, Homo sapiens
  misc_RNA (1)...(19): siRNA sense strand
gauacucaaagcugucaga

SEQ ID NO: 148669 - RNA, 19 nt, Homo sapiens
  misc_RNA (1)...(19): siRNA sense strand
uggaaggaaaucucaacua

SEQ ID NO: 148670 - RNA, 19 nt, Homo sapiens
  misc_RNA (1)...(19): siRNA sense strand
acaagccgcagaaaggaaa

SEQ ID NO: 148671 - RNA, 19 nt, Homo sapiens
  misc_RNA (1)...(19): siRNA sense strand
cauaaugaggaucuuacaa

SEQ ID NO: 148672 - RNA, 19 nt, Homo sapiens
  misc_RNA (1)...(19): siRNA sense strand
ucuucgagcugcccuuugu

SEQ ID NO: 148673 - RNA, 19 nt, Homo sapiens
  misc_RNA (1)...(19): siRNA sense strand
gaaugacaacccgccagaa

SEQ ID NO: 148674 - RNA, 19 nt, Homo sapiens
  misc_RNA (1)...(19): siRNA sense strand
uggguucucugaagaugau

SEQ ID NO: 148675 - RNA, 19 nt, Homo sapiens
  misc_RNA (1)...(19): siRNA sense strand
gccaggcaccuacgugaug

SEQ ID NO: 148676 - RNA, 19 nt, Homo sapiens
  misc_RNA (1)...(19): siRNA sense strand
gcuccaagccaggcaccua

SEQ ID NO: 148677 - RNA, 19 nt, Homo sapiens
  misc_RNA (1)...(19): siRNA sense strand
gaccaucacccgccugaac

SEQ ID NO: 148678 - RNA, 19 nt, Homo sapiens
  misc_RNA (1)...(19): siRNA sense strand
caacuauggccucucaaac

SEQ ID NO: 148679 - RNA, 19 nt, Homo sapiens
  misc_RNA (1)...(19): siRNA sense strand
ggugacagaugugaaugac

SEQ ID NO: 148680 - RNA, 19 nt, Homo sapiens
  misc_RNA (1)...(19): siRNA sense strand
caucguggccauccucauc

SEQ ID NO: 148681 - RNA, 19 nt, Homo sapiens
  misc_RNA (1)...(19): siRNA sense strand
gcuuucaugcugacaguga

SEQ ID NO: 148682 - RNA, 19 nt, Homo sapiens
  misc_RNA (1)...(19): siRNA sense strand
aaugaggaucuuacaacua

SEQ ID NO: 148683 - RNA, 19 nt, Homo sapiens
  misc_RNA (1)...(19): siRNA sense strand
gggaggagcugcuguauua

SEQ ID NO: 148684 - RNA, 19 nt, Homo sapiens
  misc_RNA (1)...(19): siRNA sense strand
gcacauugaugaagagaaa

SEQ ID NO: 148685 - RNA, 19 nt, Homo sapiens
  misc_RNA (1)...(19): siRNA sense strand
ggaaccagaugcacauuga

SEQ ID NO: 148686 - RNA, 19 nt, Homo sapiens
  misc_RNA (1)...(19): siRNA sense strand
agaaagaacuggacagaga

SEQ ID NO: 148687 - RNA, 19 nt, Homo sapiens
  misc_RNA (1)...(19): siRNA sense strand
ccaugaagccucuggauua

SEQ ID NO: 148688 - RNA, 19 nt, Homo sapiens
  misc_RNA (1)...(19): siRNA sense strand
gagagaagcaggccaggua

SEQ ID NO: 148689 - RNA, 19 nt, Homo sapiens
  misc_RNA (1)...(19): siRNA sense strand
ugaagccucuggauuauga

SEQ ID NO: 148690 - RNA, 19 nt, Homo sapiens
  misc_RNA (1)...(19): siRNA sense strand
ccaggacgcuuucaccauu

SEQ ID NO: 148691 - RNA, 19 nt, Homo sapiens
  misc_RNA (1)...(19): siRNA sense strand
ccaaguaccugcucaaagg

SEQ ID NO: 148692 - RNA, 19 nt, Homo sapiens
  misc_RNA (1)...(19): siRNA sense strand
caacaucacagucaaguau

SEQ ID NO: 148693 - RNA, 19 nt, Homo sapiens
  misc_RNA (1)...(19): siRNA sense strand
aaacagagcccaggucauu

SEQ ID NO: 148694 - RNA, 19 nt, Homo sapiens
  misc_RNA (1)...(19): siRNA sense strand
ccaccucacugcugucauu

SEQ ID NO: 148695 - RNA, 19 nt, Homo sapiens
  misc_RNA (1)...(19): siRNA sense strand
augaauacauccagcaaua

SEQ ID NO: 148696 - RNA, 19 nt, Homo sapiens
  misc_RNA (1)...(19): siRNA sense strand
ugacguggauuacgacuuc

SEQ ID NO: 148697 - RNA, 19 nt, Homo sapiens
  misc_RNA (1)...(19): siRNA sense strand
agacaucaaugacaacuuc

SEQ ID NO: 148698 - RNA, 19 nt, Homo sapiens
  misc_RNA (1)...(19): siRNA sense strand
gaaagaacuggacagagaa

SEQ ID NO: 148699 - RNA, 19 nt, Homo sapiens
  misc_RNA (1)...(19): siRNA sense strand
gagaauaugugggcaaggu

SEQ ID NO: 148700 - RNA, 19 nt, Homo sapiens
  misc_RNA (1)...(19): siRNA sense strand
ggacauaacaccacgaaac

SEQ ID NO: 148701 - RNA, 19 nt, Homo sapiens
  misc_RNA (1)...(19): siRNA sense strand
ggaccucagucaucucugu

SEQ ID NO: 148702 - RNA, 19 nt, Homo sapiens
  misc_RNA (1)...(19): siRNA sense strand
gagcccaggucauuaucaa

SEQ ID NO: 148703 - RNA, 19 nt, Homo sapiens
  misc_RNA (1)...(19): siRNA sense strand
aaagagagauuggauuugg

SEQ ID NO: 148704 - RNA, 19 nt, Homo sapiens
  misc_RNA (1)...(19): siRNA sense strand
gcaagagcgugccggagau

SEQ ID NO: 148705 - RNA, 19 nt, Homo sapiens
  misc_RNA (1)...(19): siRNA sense strand
gcaaguccacauugaaguu

SEQ ID NO: 148706 - RNA, 19 nt, Homo sapiens
  misc_RNA (1)...(19): siRNA sense strand
ucacggauaaucacgauaa

SEQ ID NO: 148707 - RNA, 19 nt, Homo sapiens
  misc_RNA (1)...(19): siRNA sense strand
ggacaaggacacuggugaa

SEQ ID NO: 148708 - RNA, 19 nt, Homo sapiens
  misc_RNA (1)...(19): siRNA sense strand
gcaauagacaaggacauaa

SEQ ID NO: 148709 - RNA, 19 nt, Homo sapiens
  misc_RNA (1)...(19): siRNA sense strand
cgauaauucuggacguauu

SEQ ID NO: 148710 - RNA, 19 nt, Homo sapiens
  misc_RNA (1)...(19): siRNA sense strand
agaaccggaugaccaagua

SEQ ID NO: 148711 - RNA, 19 nt, Homo sapiens
  misc_RNA (1)...(19): siRNA sense strand
gcucaaaggagaauaugug

SEQ ID NO: 148712 - RNA, 19 nt, Homo sapiens
  misc_RNA (1)...(19): siRNA sense strand
gaauacauccagcaauaca

SEQ ID NO: 148713 - RNA, 19 nt, Homo sapiens
  misc_RNA (1)...(19): siRNA sense strand
caugaagccucuggauuau

SEQ ID NO: 148714 - RNA, 19 nt, Homo sapiens
  misc_RNA (1)...(19): siRNA sense strand
ggagacguguucgccauug

SEQ ID NO: 148715 - RNA, 19 nt, Homo sapiens
  misc_RNA (1)...(19): siRNA sense strand
gagcauccaggcaguggua

SEQ ID NO: 148716 - RNA, 19 nt, Homo sapiens
  misc_RNA (1)...(19): siRNA sense strand
caaaagagagauuggauuu

SEQ ID NO: 148717 - RNA, 19 nt, Homo sapiens
  misc_RNA (1)...(19): siRNA sense strand
gagauuggauuuggaacca

SEQ ID NO: 148718 - RNA, 19 nt, Homo sapiens
  misc_RNA (1)...(19): siRNA sense strand
agaagaagccucugauugg

SEQ ID NO: 148719 - RNA, 19 nt, Homo sapiens
  misc_RNA (1)...(19): siRNA sense strand
gagacguguucgccauuga

SEQ ID NO: 148720 - RNA, 19 nt, Homo sapiens
  misc_RNA (1)...(19): siRNA sense strand
acgagcagcuggucaccua

SEQ ID NO: 148721 - RNA, 19 nt, Homo sapiens
  misc_RNA (1)...(19): siRNA sense strand
gcagaucuccgcaauagac

SEQ ID NO: 148722 - RNA, 19 nt, Homo sapiens
  misc_RNA (1)...(19): siRNA sense strand
ggccaguucuuccgaguca

SEQ ID NO: 148723 - RNA, 19 nt, Homo sapiens
  misc_RNA (1)...(19): siRNA sense strand
acgcaucgguuguucaaug

SEQ ID NO: 148724 - RNA, 19 nt, Homo sapiens
  misc_RNA (1)...(19): siRNA sense strand
cugcagaucuccgcaauag

SEQ ID NO: 148725 - RNA, 19 nt, Homo sapiens
  misc_RNA (1)...(19): siRNA sense strand
ccacgccucugucauguac

SEQ ID NO: 148726 - RNA, 19 nt, Homo sapiens
  misc_RNA (1)...(19): siRNA sense strand
ugaucgaggugaagaagga

SEQ ID NO: 148727 - RNA, 19 nt, Homo sapiens
  misc_RNA (1)...(19): siRNA sense strand
gauaacacggccaacauca

SEQ ID NO: 148728 - RNA, 19 nt, Homo sapiens
  misc_RNA (1)...(19): siRNA sense strand
gaauacugagaacaacuuu

SEQ ID NO: 148729 - RNA, 19 nt, Homo sapiens
  misc_RNA (1)...(19): siRNA sense strand
ucugugggcucucuguuug

SEQ ID NO: 148730 - RNA, 19 nt, Homo sapiens
  misc_RNA (1)...(19): siRNA sense strand
gcaacgagcagggcgaguu

SEQ ID NO: 148731 - RNA, 19 nt, Homo sapiens
  misc_RNA (1)...(19): siRNA sense strand
ugcaagacaucaaugacaa

SEQ ID NO: 148732 - RNA, 19 nt, Homo sapiens
  misc_RNA (1)...(19): siRNA sense strand
uaacacggccaacaucaca

SEQ ID NO: 148733 - RNA, 19 nt, Homo sapiens
  misc_RNA (1)...(19): siRNA sense strand
cagcuucaccaucaaaguu

SEQ ID NO: 148734 - RNA, 19 nt, Homo sapiens
  misc_RNA (1)...(19): siRNA sense strand
aagaauccauugugcaagu

SEQ ID NO: 148735 - RNA, 19 nt, Homo sapiens
  misc_RNA (1)...(19): siRNA sense strand
gcgacuaccaggacgcuuu

SEQ ID NO: 148736 - RNA, 19 nt, Homo sapiens
  misc_RNA (1)...(19): siRNA sense strand
gaccacgccucugucaugu

SEQ ID NO: 148737 - RNA, 19 nt, Homo sapiens
  misc_RNA (1)...(19): siRNA sense strand
gcaagaaugccaaguaccu

SEQ ID NO: 148738 - RNA, 19 nt, Homo sapiens
  misc_RNA (1)...(19): siRNA sense strand
gauuacgacuuccuuaacg

SEQ ID NO: 148739 - RNA, 19 nt, Homo sapiens
  misc_RNA (1)...(19): siRNA sense strand
ggcagugguagccaucuua

SEQ ID NO: 148740 - RNA, 19 nt, Homo sapiens
  misc_RNA (1)...(19): siRNA sense strand
gaacuggacagagaagucu

SEQ ID NO: 148741 - RNA, 19 nt, Homo sapiens
  misc_RNA (1)...(19): siRNA sense strand
gacaaggacacuggugaaa

SEQ ID NO: 148742 - RNA, 19 nt, Homo sapiens
  misc_RNA (1)...(19): siRNA sense strand
acgacacgcugcacaucua

SEQ ID NO: 148743 - RNA, 19 nt, Homo sapiens
  misc_RNA (1)...(19): siRNA sense strand
ggacaccaccagcuacgau

SEQ ID NO: 148744 - RNA, 19 nt, Homo sapiens
  misc_RNA (1)...(19): siRNA sense strand
agucaaguaugggcaguuu

SEQ ID NO: 148745 - RNA, 19 nt, Homo sapiens
  misc_RNA (1)...(19): siRNA sense strand
acuuuacccucacggauaa

SEQ ID NO: 148746 - RNA, 19 nt, Homo sapiens
  misc_RNA (1)...(19): siRNA sense strand
cagaccaaguacacauuug

SEQ ID NO: 148747 - RNA, 19 nt, Homo sapiens
  misc_RNA (1)...(19): siRNA sense strand
ccagaccaaguacacauuu

SEQ ID NO: 148748 - RNA, 19 nt, Homo sapiens
  misc_RNA (1)...(19): siRNA sense strand
ggagaccacgccucuguca

SEQ ID NO: 148749 - RNA, 19 nt, Homo sapiens
  misc_RNA (1)...(19): siRNA sense strand
ccucacugcugucauugug

SEQ ID NO: 148750 - RNA, 19 nt, Homo sapiens
  misc_RNA (1)...(19): siRNA sense strand
caaguccacauugaaguuu

SEQ ID NO: 148751 - RNA, 19 nt, Homo sapiens
  misc_RNA (1)...(19): siRNA sense strand
ccaccgugcuggucacucu

SEQ ID NO: 148752 - RNA, 19 nt, Homo sapiens
  misc_RNA (1)...(19): siRNA sense strand
gaugcuggcugagcuguac

SEQ ID NO: 148753 - RNA, 19 nt, Homo sapiens
  misc_RNA (1)...(19): siRNA sense strand
uaggcaagaucaagucaag

SEQ ID NO: 148754 - RNA, 19 nt, Homo sapiens
  misc_RNA (1)...(19): siRNA sense strand
ccacaacgagggcaucauc

SEQ ID NO: 148755 - RNA, 19 nt, Homo sapiens
  misc_RNA (1)...(19): siRNA sense strand
cgcaauagacaaggacaua

SEQ ID NO: 148756 - RNA, 19 nt, Homo sapiens
  misc_RNA (1)...(19): siRNA sense strand
agaugcacauugaugaaga

SEQ ID NO: 148757 - RNA, 19 nt, Homo sapiens
  misc_RNA (1)...(19): siRNA sense strand
gaucaagucaagcgugagu

SEQ ID NO: 148758 - RNA, 19 nt, Homo sapiens
  misc_RNA (1)...(19): siRNA sense strand
gagacuccuuccagcuuca

SEQ ID NO: 148759 - RNA, 19 nt, Homo sapiens
  misc_RNA (1)...(19): siRNA sense strand
guggucaucucagacaaug

SEQ ID NO: 148760 - RNA, 19 nt, Homo sapiens
  misc_RNA (1)...(19): siRNA sense strand
caacgagggcaucaucaag

SEQ ID NO: 148761 - RNA, 19 nt, Homo sapiens
  misc_RNA (1)...(19): siRNA sense strand
caggacgcuuucaccauug

SEQ ID NO: 148762 - RNA, 19 nt, Homo sapiens
  misc_RNA (1)...(19): siRNA sense strand
cgacaacuggccuguguuc

SEQ ID NO: 148763 - RNA, 19 nt, Homo sapiens
  misc_RNA (1)...(19): siRNA sense strand
ccagaugcacauugaugaa

SEQ ID NO: 148764 - RNA, 19 nt, Homo sapiens
  misc_RNA (1)...(19): siRNA sense strand
gacaaugggaugccaaguc

SEQ ID NO: 148765 - RNA, 19 nt, Homo sapiens
  misc_RNA (1)...(19): siRNA sense strand
ugagaaagaacuggacaga

SEQ ID NO: 148766 - RNA, 19 nt, Homo sapiens
  misc_RNA (1)...(19): siRNA sense strand
ugacaagggccaguucuuc

SEQ ID NO: 148767 - RNA, 19 nt, Homo sapiens
  misc_RNA (1)...(19): siRNA sense strand
agaagcaggccagguauga

SEQ ID NO: 148768 - RNA, 19 nt, Homo sapiens
  misc_RNA (1)...(19): siRNA sense strand
gagaagcaggccagguaug

SEQ ID NO: 148769 - RNA, 19 nt, Homo sapiens
  misc_RNA (1)...(19): siRNA sense strand
acucugacguggauuacga

SEQ ID NO: 148770 - RNA, 19 nt, Homo sapiens
  misc_RNA (1)...(19): siRNA sense strand
aagcgugagucgcaagaau

SEQ ID NO: 148771 - RNA, 19 nt, Homo sapiens
  misc_RNA (1)...(19): siRNA sense strand
ugaauacugagaacaacuu

SEQ ID NO: 148772 - RNA, 19 nt, Homo sapiens
  misc_RNA (1)...(19): siRNA sense strand
caucauguaggcaagauca

SEQ ID NO: 148773 - RNA, 19 nt, Homo sapiens
  misc_RNA (1)...(19): siRNA sense strand
ucgcaagaaugccaaguac

SEQ ID NO: 148774 - RNA, 19 nt, Homo sapiens
  misc_RNA (1)...(19): siRNA sense strand
aacgacaacuggccugugu

SEQ ID NO: 148775 - RNA, 19 nt, Homo sapiens
  misc_RNA (1)...(19): siRNA sense strand
ggauuacgacuuccuuaac

SEQ ID NO: 148776 - RNA, 19 nt, Homo sapiens
  misc_RNA (1)...(19): siRNA sense strand
cgagggcuccgaguccaua

SEQ ID NO: 148777 - RNA, 19 nt, Homo sapiens
  misc_RNA (1)...(19): siRNA sense strand
caacgagcagggcgaguuc

SEQ ID NO: 148778 - RNA, 19 nt, Homo sapiens
  misc_RNA (1)...(19): siRNA sense strand
acagagcccaggucauuau

SEQ ID NO: 148779 - RNA, 19 nt, Homo sapiens
  misc_RNA (1)...(19): siRNA sense strand
agaccacgccucugucaug

SEQ ID NO: 148780 - RNA, 19 nt, Homo sapiens
  misc_RNA (1)...(19): siRNA sense strand
gaugcacauugaugaagag

SEQ ID NO: 148781 - RNA, 19 nt, Homo sapiens
  misc_RNA (1)...(19): siRNA sense strand
gcccaggucauuaucaaca

SEQ ID NO: 148782 - RNA, 19 nt, Homo sapiens
  misc_RNA (1)...(19): siRNA sense strand
uggauuacgacuuccuuaa

SEQ ID NO: 148783 - RNA, 19 nt, Homo sapiens
  misc_RNA (1)...(19): siRNA sense strand
gcaccaagaucucaagaaa

SEQ ID NO: 148784 - RNA, 19 nt, Homo sapiens
  misc_RNA (1)...(19): siRNA sense strand
gagcuuaaccauccuaaua

SEQ ID NO: 148785 - RNA, 19 nt, Homo sapiens
  misc_RNA (1)...(19): siRNA sense strand
uuacuucuaugccugauua

SEQ ID NO: 148786 - RNA, 19 nt, Homo sapiens
  misc_RNA (1)...(19): siRNA sense strand
accaagaucucaagaaauu

SEQ ID NO: 148787 - RNA, 19 nt, Homo sapiens
  misc_RNA (1)...(19): siRNA sense strand
guacaaagccagaaacaag

SEQ ID NO: 148788 - RNA, 19 nt, Homo sapiens
  misc_RNA (1)...(19): siRNA sense strand
gagaggugguggcgcuuaa

SEQ ID NO: 148789 - RNA, 19 nt, Homo sapiens
  misc_RNA (1)...(19): siRNA sense strand
gcuuaaccauccuaauauu

SEQ ID NO: 148790 - RNA, 19 nt, Homo sapiens
  misc_RNA (1)...(19): siRNA sense strand
gaagauggacggagcuugu

SEQ ID NO: 148791 - RNA, 19 nt, Homo sapiens
  misc_RNA (1)...(19): siRNA sense strand
ggccaggaguuacuucuau

SEQ ID NO: 148792 - RNA, 19 nt, Homo sapiens
  misc_RNA (1)...(19): siRNA sense strand
gaccagcucuuccggaucu

SEQ ID NO: 148793 - RNA, 19 nt, Homo sapiens
  misc_RNA (1)...(19): siRNA sense strand
ggaugucauucacacagaa

SEQ ID NO: 148794 - RNA, 19 nt, Homo sapiens
  misc_RNA (1)...(19): siRNA sense strand
gcuagcagacuuuggacua

SEQ ID NO: 148795 - RNA, 19 nt, Homo sapiens
  misc_RNA (1)...(19): siRNA sense strand
uaucgcaaaugcugcacua

SEQ ID NO: 148796 - RNA, 19 nt, Homo sapiens
  misc_RNA (1)...(19): siRNA sense strand
caagaucucaagaaauuca

SEQ ID NO: 148797 - RNA, 19 nt, Homo sapiens
  misc_RNA (1)...(19): siRNA sense strand
ggugguggcgcuuaagaaa

SEQ ID NO: 148798 - RNA, 19 nt, Homo sapiens
  misc_RNA (1)...(19): siRNA sense strand
caagcuagcagacuuugga

SEQ ID NO: 148799 - RNA, 19 nt, Homo sapiens
  misc_RNA (1)...(19): siRNA sense strand
ccaucaagcuagcagacuu

SEQ ID NO: 148800 - RNA, 19 nt, Homo sapiens
  misc_RNA (1)...(19): siRNA sense strand
ggagaggugguggcgcuua

SEQ ID NO: 148801 - RNA, 19 nt, Homo sapiens
  misc_RNA (1)...(19): siRNA sense strand
caucaagagcuaucuguuc

SEQ ID NO: 148802 - RNA, 19 nt, Homo sapiens
  misc_RNA (1)...(19): siRNA sense strand
gaccuuaaaccucagaauc

SEQ ID NO: 148803 - RNA, 19 nt, Homo sapiens
  misc_RNA (1)...(19): siRNA sense strand
ccuauucccuggagauucu

SEQ ID NO: 148804 - RNA, 19 nt, Homo sapiens
  misc_RNA (1)...(19): siRNA sense strand
gccaggaguuacuucuaug

SEQ ID NO: 148805 - RNA, 19 nt, Homo sapiens
  misc_RNA (1)...(19): siRNA sense strand
cccuggagauucugagauu

SEQ ID NO: 148806 - RNA, 19 nt, Homo sapiens
  misc_RNA (1)...(19): siRNA sense strand
cgcaaaugcugcacuacga

SEQ ID NO: 148807 - RNA, 19 nt, Homo sapiens
  misc_RNA (1)...(19): siRNA sense strand
uugaauuucugcaccaaga

SEQ ID NO: 148808 - RNA, 19 nt, Homo sapiens
  misc_RNA (1)...(19): siRNA sense strand
guacugccauccgagagau

SEQ ID NO: 148809 - RNA, 19 nt, Homo sapiens
  misc_RNA (1)...(19): siRNA sense strand
gagucccuguucguacuua

SEQ ID NO: 148810 - RNA, 19 nt, Homo sapiens
  misc_RNA (1)...(19): siRNA sense strand
caucaagcuagcagacuuu

SEQ ID NO: 148811 - RNA, 19 nt, Homo sapiens
  misc_RNA (1)...(19): siRNA sense strand
gaaucugcuuauuaacaca

SEQ ID NO: 148812 - RNA, 19 nt, Homo sapiens
  misc_RNA (1)...(19): siRNA sense strand
aaauaaacucuaccugguu

SEQ ID NO: 148813 - RNA, 19 nt, Homo sapiens
  misc_RNA (1)...(19): siRNA sense strand
uaaccauccuaauauuguc

SEQ ID NO: 148814 - RNA, 19 nt, Homo sapiens
  misc_RNA (1)...(19): siRNA sense strand
ggccuagcuuucugccauu

SEQ ID NO: 148815 - RNA, 19 nt, Homo sapiens
  misc_RNA (1)...(19): siRNA sense strand
gauggacggagcuuguuau

SEQ ID NO: 148816 - RNA, 19 nt, Homo sapiens
  misc_RNA (1)...(19): siRNA sense strand
ggagcuuguuaucgcaaau

SEQ ID NO: 148817 - RNA, 19 nt, Homo sapiens
  misc_RNA (1)...(19): siRNA sense strand
agaucucucugcuuaagga

SEQ ID NO: 148818 - RNA, 19 nt, Homo sapiens
  misc_RNA (1)...(19): siRNA sense strand
ggaugccucugcucucacu

SEQ ID NO: 148819 - RNA, 19 nt, Homo sapiens
  misc_RNA (1)...(19): siRNA sense strand
ggaugugaccaagccagua

SEQ ID NO: 148820 - RNA, 19 nt, Homo sapiens
  misc_RNA (1)...(19): siRNA sense strand
aaauccgccuggacacuga

SEQ ID NO: 148821 - RNA, 19 nt, Homo sapiens
  misc_RNA (1)...(19): siRNA sense strand
gaugucauucacacagaaa

SEQ ID NO: 148822 - RNA, 19 nt, Homo sapiens
  misc_RNA (1)...(19): siRNA sense strand
cugauuacaagccaaguuu

SEQ ID NO: 148823 - RNA, 19 nt, Homo sapiens
  misc_RNA (1)...(19): siRNA sense strand
gaauuucugcaccaagauc

SEQ ID NO: 148824 - RNA, 19 nt, Homo sapiens
  misc_RNA (1)...(19): siRNA sense strand
gaggugguggcgcuuaaga

SEQ ID NO: 148825 - RNA, 19 nt, Homo sapiens
  misc_RNA (1)...(19): siRNA sense strand
acaaagccagaaacaaguu

SEQ ID NO: 148826 - RNA, 19 nt, Homo sapiens
  misc_RNA (1)...(19): siRNA sense strand
caaagccagaaacaaguug

SEQ ID NO: 148827 - RNA, 19 nt, Homo sapiens
  misc_RNA (1)...(19): siRNA sense strand
agaaucugcuuauuaacac

SEQ ID NO: 148828 - RNA, 19 nt, Homo sapiens
  misc_RNA (1)...(19): siRNA sense strand
ucaagcugcuggaugucau

SEQ ID NO: 148829 - RNA, 19 nt, Homo sapiens
  misc_RNA (1)...(19): siRNA sense strand
gaugugaccaagccaguac

SEQ ID NO: 148830 - RNA, 19 nt, Homo sapiens
  misc_RNA (1)...(19): siRNA sense strand
uggaugucauucacacaga

SEQ ID NO: 148831 - RNA, 19 nt, Homo sapiens
  misc_RNA (1)...(19): siRNA sense strand
cuucuaugccugauuacaa

SEQ ID NO: 148832 - RNA, 19 nt, Homo sapiens
  misc_RNA (1)...(19): siRNA sense strand
agauggacggagcuuguua

SEQ ID NO: 148833 - RNA, 19 nt, Homo sapiens
  misc_RNA (1)...(19): siRNA sense strand
gcaccaagaucucaagaaa

SEQ ID NO: 148834 - RNA, 19 nt, Homo sapiens
  misc_RNA (1)...(19): siRNA sense strand
gagcuuaaccauccuaaua

SEQ ID NO: 148835 - RNA, 19 nt, Homo sapiens
  misc_RNA (1)...(19): siRNA sense strand
uuacuucuaugccugauua

SEQ ID NO: 148836 - RNA, 19 nt, Homo sapiens
  misc_RNA (1)...(19): siRNA sense strand
accaagaucucaagaaauu

SEQ ID NO: 148837 - RNA, 19 nt, Homo sapiens
  misc_RNA (1)...(19): siRNA sense strand
guacaaagccagaaacaag

SEQ ID NO: 148838 - RNA, 19 nt, Homo sapiens
  misc_RNA (1)...(19): siRNA sense strand
gagaggugguggcgcuuaa

SEQ ID NO: 148839 - RNA, 19 nt, Homo sapiens
  misc_RNA (1)...(19): siRNA sense strand
gcuuaaccauccuaauauu

SEQ ID NO: 148840 - RNA, 19 nt, Homo sapiens
  misc_RNA (1)...(19): siRNA sense strand
gaagauggacggagcuugu

SEQ ID NO: 148841 - RNA, 19 nt, Homo sapiens
  misc_RNA (1)...(19): siRNA sense strand
ggccaggaguuacuucuau

SEQ ID NO: 148842 - RNA, 19 nt, Homo sapiens
  misc_RNA (1)...(19): siRNA sense strand
gaccagcucuuccggaucu

SEQ ID NO: 148843 - RNA, 19 nt, Homo sapiens
  misc_RNA (1)...(19): siRNA sense strand
ggaugucauucacacagaa

SEQ ID NO: 148844 - RNA, 19 nt, Homo sapiens
  misc_RNA (1)...(19): siRNA sense strand
gcuagcagacuuuggacua

SEQ ID NO: 148845 - RNA, 19 nt, Homo sapiens
  misc_RNA (1)...(19): siRNA sense strand
uaucgcaaaugcugcacua

SEQ ID NO: 148846 - RNA, 19 nt, Homo sapiens
  misc_RNA (1)...(19): siRNA sense strand
caagaucucaagaaauuca

SEQ ID NO: 148847 - RNA, 19 nt, Homo sapiens
  misc_RNA (1)...(19): siRNA sense strand
ggugguggcgcuuaagaaa

SEQ ID NO: 148848 - RNA, 19 nt, Homo sapiens
  misc_RNA (1)...(19): siRNA sense strand
caagcuagcagacuuugga

SEQ ID NO: 148849 - RNA, 19 nt, Homo sapiens
  misc_RNA (1)...(19): siRNA sense strand
ccaucaagcuagcagacuu

SEQ ID NO: 148850 - RNA, 19 nt, Homo sapiens
  misc_RNA (1)...(19): siRNA sense strand
ggagaggugguggcgcuua

SEQ ID NO: 148851 - RNA, 19 nt, Homo sapiens
  misc_RNA (1)...(19): siRNA sense strand
caucaagagcuaucuguuc

SEQ ID NO: 148852 - RNA, 19 nt, Homo sapiens
  misc_RNA (1)...(19): siRNA sense strand
gaccuuaaaccucagaauc

SEQ ID NO: 148853 - RNA, 19 nt, Homo sapiens
  misc_RNA (1)...(19): siRNA sense strand
ccuauucccuggagauucu

SEQ ID NO: 148854 - RNA, 19 nt, Homo sapiens
  misc_RNA (1)...(19): siRNA sense strand
gccaggaguuacuucuaug

SEQ ID NO: 148855 - RNA, 19 nt, Homo sapiens
  misc_RNA (1)...(19): siRNA sense strand
cccuggagauucugagauu

SEQ ID NO: 148856 - RNA, 19 nt, Homo sapiens
  misc_RNA (1)...(19): siRNA sense strand
cgcaaaugcugcacuacga

SEQ ID NO: 148857 - RNA, 19 nt, Homo sapiens
  misc_RNA (1)...(19): siRNA sense strand
uugaauuucugcaccaaga

SEQ ID NO: 148858 - RNA, 19 nt, Homo sapiens
  misc_RNA (1)...(19): siRNA sense strand
guacugccauccgagagau

SEQ ID NO: 148859 - RNA, 19 nt, Homo sapiens
  misc_RNA (1)...(19): siRNA sense strand
gagucccuguucguacuua

SEQ ID NO: 148860 - RNA, 19 nt, Homo sapiens
  misc_RNA (1)...(19): siRNA sense strand
caucaagcuagcagacuuu

SEQ ID NO: 148861 - RNA, 19 nt, Homo sapiens
  misc_RNA (1)...(19): siRNA sense strand
gaaucugcuuauuaacaca

SEQ ID NO: 148862 - RNA, 19 nt, Homo sapiens
  misc_RNA (1)...(19): siRNA sense strand
aaauaaacucuaccugguu

SEQ ID NO: 148863 - RNA, 19 nt, Homo sapiens
  misc_RNA (1)...(19): siRNA sense strand
uaaccauccuaauauuguc

SEQ ID NO: 148864 - RNA, 19 nt, Homo sapiens
  misc_RNA (1)...(19): siRNA sense strand
ggccuagcuuucugccauu

SEQ ID NO: 148865 - RNA, 19 nt, Homo sapiens
  misc_RNA (1)...(19): siRNA sense strand
gauggacggagcuuguuau

SEQ ID NO: 148866 - RNA, 19 nt, Homo sapiens
  misc_RNA (1)...(19): siRNA sense strand
ggagcuuguuaucgcaaau

SEQ ID NO: 148867 - RNA, 19 nt, Homo sapiens
  misc_RNA (1)...(19): siRNA sense strand
agaucucucugcuuaagga

SEQ ID NO: 148868 - RNA, 19 nt, Homo sapiens
  misc_RNA (1)...(19): siRNA sense strand
ggaugccucugcucucacu

SEQ ID NO: 148869 - RNA, 19 nt, Homo sapiens
  misc_RNA (1)...(19): siRNA sense strand
ggaugugaccaagccagua

SEQ ID NO: 148870 - RNA, 19 nt, Homo sapiens
  misc_RNA (1)...(19): siRNA sense strand
aaauccgccuggacacuga

SEQ ID NO: 148871 - RNA, 19 nt, Homo sapiens
  misc_RNA (1)...(19): siRNA sense strand
gaugucauucacacagaaa

SEQ ID NO: 148872 - RNA, 19 nt, Homo sapiens
  misc_RNA (1)...(19): siRNA sense strand
cugauuacaagccaaguuu

SEQ ID NO: 148873 - RNA, 19 nt, Homo sapiens
  misc_RNA (1)...(19): siRNA sense strand
gaauuucugcaccaagauc

SEQ ID NO: 148874 - RNA, 19 nt, Homo sapiens
  misc_RNA (1)...(19): siRNA sense strand
gaggugguggcgcuuaaga

SEQ ID NO: 148875 - RNA, 19 nt, Homo sapiens
  misc_RNA (1)...(19): siRNA sense strand
acaaagccagaaacaaguu

SEQ ID NO: 148876 - RNA, 19 nt, Homo sapiens
  misc_RNA (1)...(19): siRNA sense strand
caaagccagaaacaaguug

SEQ ID NO: 148877 - RNA, 19 nt, Homo sapiens
  misc_RNA (1)...(19): siRNA sense strand
agaaucugcuuauuaacac

SEQ ID NO: 148878 - RNA, 19 nt, Homo sapiens
  misc_RNA (1)...(19): siRNA sense strand
ucaagcugcuggaugucau

SEQ ID NO: 148879 - RNA, 19 nt, Homo sapiens
  misc_RNA (1)...(19): siRNA sense strand
gaugugaccaagccaguac

SEQ ID NO: 148880 - RNA, 19 nt, Homo sapiens
  misc_RNA (1)...(19): siRNA sense strand
uggaugucauucacacaga

SEQ ID NO: 148881 - RNA, 19 nt, Homo sapiens
  misc_RNA (1)...(19): siRNA sense strand
cuucuaugccugauuacaa

SEQ ID NO: 148882 - RNA, 19 nt, Homo sapiens
  misc_RNA (1)...(19): siRNA sense strand
agauggacggagcuuguua

SEQ ID NO: 148883 - RNA, 19 nt, Homo sapiens
  misc_RNA (1)...(19): siRNA sense strand
ggacauagaucagaagcua

SEQ ID NO: 148884 - RNA, 19 nt, Homo sapiens
  misc_RNA (1)...(19): siRNA sense strand
gaacagaggccuuagaaca

SEQ ID NO: 148885 - RNA, 19 nt, Homo sapiens
  misc_RNA (1)...(19): siRNA sense strand
caauagagcuuauacacau

SEQ ID NO: 148886 - RNA, 19 nt, Homo sapiens
  misc_RNA (1)...(19): siRNA sense strand
caucaaagccuacauguug

SEQ ID NO: 148887 - RNA, 19 nt, Homo sapiens
  misc_RNA (1)...(19): siRNA sense strand
gcuaagucauccaaauaua

SEQ ID NO: 148888 - RNA, 19 nt, Homo sapiens
  misc_RNA (1)...(19): siRNA sense strand
gagcuaagucauccaaaua

SEQ ID NO: 148889 - RNA, 19 nt, Homo sapiens
  misc_RNA (1)...(19): siRNA sense strand
ggaaacugaucuagagguu

SEQ ID NO: 148890 - RNA, 19 nt, Homo sapiens
  misc_RNA (1)...(19): siRNA sense strand
cauacaaggcuuauucuua

SEQ ID NO: 148891 - RNA, 19 nt, Homo sapiens
  misc_RNA (1)...(19): siRNA sense strand
aaacugaucuagagguuau

SEQ ID NO: 148892 - RNA, 19 nt, Homo sapiens
  misc_RNA (1)...(19): siRNA sense strand
gggcaaagcguuaugagaa

SEQ ID NO: 148893 - RNA, 19 nt, Homo sapiens
  misc_RNA (1)...(19): siRNA sense strand
ggagacgacuuacuagauc

SEQ ID NO: 148894 - RNA, 19 nt, Homo sapiens
  misc_RNA (1)...(19): siRNA sense strand
caacauuggauccuacaua

SEQ ID NO: 148895 - RNA, 19 nt, Homo sapiens
  misc_RNA (1)...(19): siRNA sense strand
uguguagucuuccagauua

SEQ ID NO: 148896 - RNA, 19 nt, Homo sapiens
  misc_RNA (1)...(19): siRNA sense strand
gcuguuggcuguauauuag

SEQ ID NO: 148897 - RNA, 19 nt, Homo sapiens
  misc_RNA (1)...(19): siRNA sense strand
caaggaggauugcccaaga

SEQ ID NO: 148898 - RNA, 19 nt, Homo sapiens
  misc_RNA (1)...(19): siRNA sense strand
ggagcuaagucauccaaau

SEQ ID NO: 148899 - RNA, 19 nt, Homo sapiens
  misc_RNA (1)...(19): siRNA sense strand
caaauugucgccauuaaga

SEQ ID NO: 148900 - RNA, 19 nt, Homo sapiens
  misc_RNA (1)...(19): siRNA sense strand
gaugacucuucaaggauua

SEQ ID NO: 148901 - RNA, 19 nt, Homo sapiens
  misc_RNA (1)...(19): siRNA sense strand
gaucagcuaacaagaauau

SEQ ID NO: 148902 - RNA, 19 nt, Homo sapiens
  misc_RNA (1)...(19): siRNA sense strand
caaccaaauugucgccauu

SEQ ID NO: 148903 - RNA, 19 nt, Homo sapiens
  misc_RNA (1)...(19): siRNA sense strand
ggaauaccuuugcaucaca

SEQ ID NO: 148904 - RNA, 19 nt, Homo sapiens
  misc_RNA (1)...(19): siRNA sense strand
gaaaagaacagaggccuua

SEQ ID NO: 148905 - RNA, 19 nt, Homo sapiens
  misc_RNA (1)...(19): siRNA sense strand
aaauagaaccgccuuaaga

SEQ ID NO: 148906 - RNA, 19 nt, Homo sapiens
  misc_RNA (1)...(19): siRNA sense strand
auagggaucugaaaccaaa

SEQ ID NO: 148907 - RNA, 19 nt, Homo sapiens
  misc_RNA (1)...(19): siRNA sense strand
aaauccagcuuuggcaaua

SEQ ID NO: 148908 - RNA, 19 nt, Homo sapiens
  misc_RNA (1)...(19): siRNA sense strand
cgacuuacuagaucucaua

SEQ ID NO: 148909 - RNA, 19 nt, Homo sapiens
  misc_RNA (1)...(19): siRNA sense strand
gccaggagauucagaccuu

SEQ ID NO: 148910 - RNA, 19 nt, Homo sapiens
  misc_RNA (1)...(19): siRNA sense strand
aaucaaacuuggacauaga

SEQ ID NO: 148911 - RNA, 19 nt, Homo sapiens
  misc_RNA (1)...(19): siRNA sense strand
gaaacugaucuagagguua

SEQ ID NO: 148912 - RNA, 19 nt, Homo sapiens
  misc_RNA (1)...(19): siRNA sense strand
gaagcuaaagaugguauaa

SEQ ID NO: 148913 - RNA, 19 nt, Homo sapiens
  misc_RNA (1)...(19): siRNA sense strand
uauggaaacugaucuagag

SEQ ID NO: 148914 - RNA, 19 nt, Homo sapiens
  misc_RNA (1)...(19): siRNA sense strand
ugaugacucuucaaggauu

SEQ ID NO: 148915 - RNA, 19 nt, Homo sapiens
  misc_RNA (1)...(19): siRNA sense strand
ggacauguguagucuucca

SEQ ID NO: 148916 - RNA, 19 nt, Homo sapiens
  misc_RNA (1)...(19): siRNA sense strand
cuuacuagaucucauacaa

SEQ ID NO: 148917 - RNA, 19 nt, Homo sapiens
  misc_RNA (1)...(19): siRNA sense strand
cagcuaacaagaauauuug

SEQ ID NO: 148918 - RNA, 19 nt, Homo sapiens
  misc_RNA (1)...(19): siRNA sense strand
uauaauuggucuccuugau

SEQ ID NO: 148919 - RNA, 19 nt, Homo sapiens
  misc_RNA (1)...(19): siRNA sense strand
gaacaguggccggacaugu

SEQ ID NO: 148920 - RNA, 19 nt, Homo sapiens
  misc_RNA (1)...(19): siRNA sense strand
auauuagccuugucuuuga

SEQ ID NO: 148921 - RNA, 19 nt, Homo sapiens
  misc_RNA (1)...(19): siRNA sense strand
uaauccaugugcucgaauu

SEQ ID NO: 148922 - RNA, 19 nt, Homo sapiens
  misc_RNA (1)...(19): siRNA sense strand
ggcaaagcguuaugagaag

SEQ ID NO: 148923 - RNA, 19 nt, Homo sapiens
  misc_RNA (1)...(19): siRNA sense strand
aauauuagccuugucuuug

SEQ ID NO: 148924 - RNA, 19 nt, Homo sapiens
  misc_RNA (1)...(19): siRNA sense strand
gaauaccuuugcaucacau

SEQ ID NO: 148925 - RNA, 19 nt, Homo sapiens
  misc_RNA (1)...(19): siRNA sense strand
gcacaccaacugaggaaca

SEQ ID NO: 148926 - RNA, 19 nt, Homo sapiens
  misc_RNA (1)...(19): siRNA sense strand
gaguuacuauuuggagcua

SEQ ID NO: 148927 - RNA, 19 nt, Homo sapiens
  misc_RNA (1)...(19): siRNA sense strand
gaucugaaaccaaacaacu

SEQ ID NO: 148928 - RNA, 19 nt, Homo sapiens
  misc_RNA (1)...(19): siRNA sense strand
gaaaauggaguucuaaaac

SEQ ID NO: 148929 - RNA, 19 nt, Homo sapiens
  misc_RNA (1)...(19): siRNA sense strand
gaggauugcccaagaaacu

SEQ ID NO: 148930 - RNA, 19 nt, Homo sapiens
  misc_RNA (1)...(19): siRNA sense strand
gacaguuugccaccguuua

SEQ ID NO: 148931 - RNA, 19 nt, Homo sapiens
  misc_RNA (1)...(19): siRNA sense strand
aaaucaaacuuggacauag

SEQ ID NO: 148932 - RNA, 19 nt, Homo sapiens
  misc_RNA (1)...(19): siRNA sense strand
uaaaggagcaaucaaaucc

SEQ ID NO: 148933 - RNA, 19 nt, Homo sapiens
  misc_RNA (1)...(19): siRNA sense strand
uagcagaguuacuucuaag

SEQ ID NO: 148934 - RNA, 19 nt, Homo sapiens
  misc_RNA (1)...(19): siRNA sense strand
ggcuguuggcuguauauua

SEQ ID NO: 148935 - RNA, 19 nt, Homo sapiens
  misc_RNA (1)...(19): siRNA sense strand
gcuaggauguaugguguag

SEQ ID NO: 148936 - RNA, 19 nt, Homo sapiens
  misc_RNA (1)...(19): siRNA sense strand
acauagaucagaagcuaaa

SEQ ID NO: 148937 - RNA, 19 nt, Homo sapiens
  misc_RNA (1)...(19): siRNA sense strand
ggacaguuugccaccguuu

SEQ ID NO: 148938 - RNA, 19 nt, Homo sapiens
  misc_RNA (1)...(19): siRNA sense strand
ccggacauguguagucuuc

SEQ ID NO: 148939 - RNA, 19 nt, Homo sapiens
  misc_RNA (1)...(19): siRNA sense strand
uugaucagcuaacaagaau

SEQ ID NO: 148940 - RNA, 19 nt, Homo sapiens
  misc_RNA (1)...(19): siRNA sense strand
gagauucagaccuugauca

SEQ ID NO: 148941 - RNA, 19 nt, Homo sapiens
  misc_RNA (1)...(19): siRNA sense strand
ccaauagagcuuauacaca

SEQ ID NO: 148942 - RNA, 19 nt, Homo sapiens
  misc_RNA (1)...(19): siRNA sense strand
aacauuggauccuacauag

SEQ ID NO: 148943 - RNA, 19 nt, Homo sapiens
  misc_RNA (1)...(19): siRNA sense strand
agaaccgccuuaagagaga

SEQ ID NO: 148944 - RNA, 19 nt, Homo sapiens
  misc_RNA (1)...(19): siRNA sense strand
gacaccaucacacaucaaa

SEQ ID NO: 148945 - RNA, 19 nt, Homo sapiens
  misc_RNA (1)...(19): siRNA sense strand
auaaauagaaccgccuuaa

SEQ ID NO: 148946 - RNA, 19 nt, Homo sapiens
  misc_RNA (1)...(19): siRNA sense strand
aagaacagaggccuuagaa

SEQ ID NO: 148947 - RNA, 19 nt, Homo sapiens
  misc_RNA (1)...(19): siRNA sense strand
ucucauacaaggcuuauuc

SEQ ID NO: 148948 - RNA, 19 nt, Homo sapiens
  misc_RNA (1)...(19): siRNA sense strand
gagacgacuuacuagaucu

SEQ ID NO: 148949 - RNA, 19 nt, Homo sapiens
  misc_RNA (1)...(19): siRNA sense strand
uaaauagaaccgccuuaag

SEQ ID NO: 148950 - RNA, 19 nt, Homo sapiens
  misc_RNA (1)...(19): siRNA sense strand
uaggauguaugguguaggu

SEQ ID NO: 148951 - RNA, 19 nt, Homo sapiens
  misc_RNA (1)...(19): siRNA sense strand
gcaggagacgacuuacuag

SEQ ID NO: 148952 - RNA, 19 nt, Homo sapiens
  misc_RNA (1)...(19): siRNA sense strand
aaggaggauugcccaagaa

SEQ ID NO: 148953 - RNA, 19 nt, Homo sapiens
  misc_RNA (1)...(19): siRNA sense strand
gcacugaaaaugaaguauu

SEQ ID NO: 148954 - RNA, 19 nt, Homo sapiens
  misc_RNA (1)...(19): siRNA sense strand
accaaauugucgccauuaa

SEQ ID NO: 148955 - RNA, 19 nt, Homo sapiens
  misc_RNA (1)...(19): siRNA sense strand
acagaggccuuagaacaag

SEQ ID NO: 148956 - RNA, 19 nt, Homo sapiens
  misc_RNA (1)...(19): siRNA sense strand
guuaugagaagcuggacuu

SEQ ID NO: 148957 - RNA, 19 nt, Homo sapiens
  misc_RNA (1)...(19): siRNA sense strand
uuacaaggccagagauaag

SEQ ID NO: 148958 - RNA, 19 nt, Homo sapiens
  misc_RNA (1)...(19): siRNA sense strand
gggcacaccaacugaggaa

SEQ ID NO: 148959 - RNA, 19 nt, Homo sapiens
  misc_RNA (1)...(19): siRNA sense strand
guggacaugugggcuguug

SEQ ID NO: 148960 - RNA, 19 nt, Homo sapiens
  misc_RNA (1)...(19): siRNA sense strand
caaacuuggacauagauca

SEQ ID NO: 148961 - RNA, 19 nt, Homo sapiens
  misc_RNA (1)...(19): siRNA sense strand
gacauagaucagaagcuaa

SEQ ID NO: 148962 - RNA, 19 nt, Homo sapiens
  misc_RNA (1)...(19): siRNA sense strand
aacagaggccuuagaacaa

SEQ ID NO: 148963 - RNA, 19 nt, Homo sapiens
  misc_RNA (1)...(19): siRNA sense strand
ucugaaaccaaacaacuug

SEQ ID NO: 148964 - RNA, 19 nt, Homo sapiens
  misc_RNA (1)...(19): siRNA sense strand
gcugacaccaucacacauc

SEQ ID NO: 148965 - RNA, 19 nt, Homo sapiens
  misc_RNA (1)...(19): siRNA sense strand
aaagaacagaggccuuaga

SEQ ID NO: 148966 - RNA, 19 nt, Homo sapiens
  misc_RNA (1)...(19): siRNA sense strand
aauccagcuuuggcaauaa

SEQ ID NO: 148967 - RNA, 19 nt, Homo sapiens
  misc_RNA (1)...(19): siRNA sense strand
gaaccgccuuaagagagau

SEQ ID NO: 148968 - RNA, 19 nt, Homo sapiens
  misc_RNA (1)...(19): siRNA sense strand
acacaucaaagccuacaug

SEQ ID NO: 148969 - RNA, 19 nt, Homo sapiens
  misc_RNA (1)...(19): siRNA sense strand
guuuacaaggccagagaua

SEQ ID NO: 148970 - RNA, 19 nt, Homo sapiens
  misc_RNA (1)...(19): siRNA sense strand
uagaucagaagcuaaagau

SEQ ID NO: 148971 - RNA, 19 nt, Homo sapiens
  misc_RNA (1)...(19): siRNA sense strand
uuaaaggagcaaucaaauc

SEQ ID NO: 148972 - RNA, 19 nt, Homo sapiens
  misc_RNA (1)...(19): siRNA sense strand
ggccacacaggcacugaaa

SEQ ID NO: 148973 - RNA, 19 nt, Homo sapiens
  misc_RNA (1)...(19): siRNA sense strand
agcaggagacgacuuacua

SEQ ID NO: 148974 - RNA, 19 nt, Homo sapiens
  misc_RNA (1)...(19): siRNA sense strand
ccaaauugucgccauuaag

SEQ ID NO: 148975 - RNA, 19 nt, Homo sapiens
  misc_RNA (1)...(19): siRNA sense strand
uauaaauagaaccgccuua

SEQ ID NO: 148976 - RNA, 19 nt, Homo sapiens
  misc_RNA (1)...(19): siRNA sense strand
cuguauauuagcagaguua

SEQ ID NO: 148977 - RNA, 19 nt, Homo sapiens
  misc_RNA (1)...(19): siRNA sense strand
uuacaggagcuaagucauc

SEQ ID NO: 148978 - RNA, 19 nt, Homo sapiens
  misc_RNA (1)...(19): siRNA sense strand
ugcagcaggagacgacuua

SEQ ID NO: 148979 - RNA, 19 nt, Homo sapiens
  misc_RNA (1)...(19): siRNA sense strand
aauugucgccauuaagaaa

SEQ ID NO: 148980 - RNA, 19 nt, Homo sapiens
  misc_RNA (1)...(19): siRNA sense strand
cuuaaaggagcaaucaaau

SEQ ID NO: 148981 - RNA, 19 nt, Homo sapiens
  misc_RNA (1)...(19): siRNA sense strand
ggccaacaccuggauguca

SEQ ID NO: 148982 - RNA, 19 nt, Homo sapiens
  misc_RNA (1)...(19): siRNA sense strand
caggagacgacuuacuaga

SEQ ID NO: 148983 - RNA, 19 nt, Homo sapiens
  misc_RNA (1)...(19): siRNA sense strand
caauccaucuggcaguuca

SEQ ID NO: 148984 - RNA, 19 nt, Homo sapiens
  misc_RNA (1)...(19): siRNA sense strand
guaccaguccaguccauga

SEQ ID NO: 148985 - RNA, 19 nt, Homo sapiens
  misc_RNA (1)...(19): siRNA sense strand
gcacggggcugaugucaac

SEQ ID NO: 148986 - RNA, 19 nt, Homo sapiens
  misc_RNA (1)...(19): siRNA sense strand
gaugucaacgugccugaug

SEQ ID NO: 148987 - RNA, 19 nt, Homo sapiens
  misc_RNA (1)...(19): siRNA sense strand
agacggcgcugcaggucau

SEQ ID NO: 148988 - RNA, 19 nt, Homo sapiens
  misc_RNA (1)...(19): siRNA sense strand
ucuggcagcugaaucugau

SEQ ID NO: 148989 - RNA, 19 nt, Homo sapiens
  misc_RNA (1)...(19): siRNA sense strand
ggagcuggcacugcagaga

SEQ ID NO: 148990 - RNA, 19 nt, Homo sapiens
  misc_RNA (1)...(19): siRNA sense strand
caauccaucuggcaguuca

SEQ ID NO: 148991 - RNA, 19 nt, Homo sapiens
  misc_RNA (1)...(19): siRNA sense strand
guaccaguccaguccauga

SEQ ID NO: 148992 - RNA, 19 nt, Homo sapiens
  misc_RNA (1)...(19): siRNA sense strand
gcacggggcugaugucaac

SEQ ID NO: 148993 - RNA, 19 nt, Homo sapiens
  misc_RNA (1)...(19): siRNA sense strand
gaugucaacgugccugaug

SEQ ID NO: 148994 - RNA, 19 nt, Homo sapiens
  misc_RNA (1)...(19): siRNA sense strand
agacggcgcugcaggucau

SEQ ID NO: 148995 - RNA, 19 nt, Homo sapiens
  misc_RNA (1)...(19): siRNA sense strand
ucuggcagcugaaucugau

SEQ ID NO: 148996 - RNA, 19 nt, Homo sapiens
  misc_RNA (1)...(19): siRNA sense strand
ggagcuggcacugcagaga

SEQ ID NO: 148997 - RNA, 19 nt, Homo sapiens
  misc_RNA (1)...(19): siRNA sense strand
ggaauuaaguguacucaaa

SEQ ID NO: 148998 - RNA, 19 nt, Homo sapiens
  misc_RNA (1)...(19): siRNA sense strand
ucaaucagcucaaagaaga

SEQ ID NO: 148999 - RNA, 19 nt, Homo sapiens
  misc_RNA (1)...(19): siRNA sense strand
ggaauuaguguuauccaua

SEQ ID NO: 149000 - RNA, 19 nt, Homo sapiens
  misc_RNA (1)...(19): siRNA sense strand
ucaaauugcugaccaagga

SEQ ID NO: 149001 - RNA, 19 nt, Homo sapiens
  misc_RNA (1)...(19): siRNA sense strand
gaacggaauuaguguuauc

SEQ ID NO: 149002 - RNA, 19 nt, Homo sapiens
  misc_RNA (1)...(19): siRNA sense strand
ggaacaacauggcugugaa

SEQ ID NO: 149003 - RNA, 19 nt, Homo sapiens
  misc_RNA (1)...(19): siRNA sense strand
gcagaaagcacaagacaca

SEQ ID NO: 149004 - RNA, 19 nt, Homo sapiens
  misc_RNA (1)...(19): siRNA sense strand
gaacaacauggcugugaaa

SEQ ID NO: 149005 - RNA, 19 nt, Homo sapiens
  misc_RNA (1)...(19): siRNA sense strand
gaauuaguguuauccauac

SEQ ID NO: 149006 - RNA, 19 nt, Homo sapiens
  misc_RNA (1)...(19): siRNA sense strand
gagagucaaucagcucaaa

SEQ ID NO: 149007 - RNA, 19 nt, Homo sapiens
  misc_RNA (1)...(19): siRNA sense strand
gacagcagauggcgacaau

SEQ ID NO: 149008 - RNA, 19 nt, Homo sapiens
  misc_RNA (1)...(19): siRNA sense strand
gugaacggaauuaguguua

SEQ ID NO: 149009 - RNA, 19 nt, Homo sapiens
  misc_RNA (1)...(19): siRNA sense strand
gaccaaggaauuaagugua

SEQ ID NO: 149010 - RNA, 19 nt, Homo sapiens
  misc_RNA (1)...(19): siRNA sense strand
gcccauggaucgaaacagu

SEQ ID NO: 149011 - RNA, 19 nt, Homo sapiens
  misc_RNA (1)...(19): siRNA sense strand
gacaacguacaguccauua

SEQ ID NO: 149012 - RNA, 19 nt, Homo sapiens
  misc_RNA (1)...(19): siRNA sense strand
gcacacaaccuugcagaca

SEQ ID NO: 149013 - RNA, 19 nt, Homo sapiens
  misc_RNA (1)...(19): siRNA sense strand
ucgaaacagugacgaguau

SEQ ID NO: 149014 - RNA, 19 nt, Homo sapiens
  misc_RNA (1)...(19): siRNA sense strand
caaccuugcagacaacgua

SEQ ID NO: 149015 - RNA, 19 nt, Homo sapiens
  misc_RNA (1)...(19): siRNA sense strand
gcucaaagaagagaaugaa

SEQ ID NO: 149016 - RNA, 19 nt, Homo sapiens
  misc_RNA (1)...(19): siRNA sense strand
gcaagcagaaagcacaaga

SEQ ID NO: 149017 - RNA, 19 nt, Homo sapiens
  misc_RNA (1)...(19): siRNA sense strand
gaauuaaguguacucaaag

SEQ ID NO: 149018 - RNA, 19 nt, Homo sapiens
  misc_RNA (1)...(19): siRNA sense strand
cacacaaccuugcagacaa

SEQ ID NO: 149019 - RNA, 19 nt, Homo sapiens
  misc_RNA (1)...(19): siRNA sense strand
cgacaaugcaggacaguag

SEQ ID NO: 149020 - RNA, 19 nt, Homo sapiens
  misc_RNA (1)...(19): siRNA sense strand
agcaagauaucgcagcaaa

SEQ ID NO: 149021 - RNA, 19 nt, Homo sapiens
  misc_RNA (1)...(19): siRNA sense strand
gagucaaucagcucaaaga

SEQ ID NO: 149022 - RNA, 19 nt, Homo sapiens
  misc_RNA (1)...(19): siRNA sense strand
ccauggaucgaaacaguga

SEQ ID NO: 149023 - RNA, 19 nt, Homo sapiens
  misc_RNA (1)...(19): siRNA sense strand
ugaacggaauuaguguuau

SEQ ID NO: 149024 - RNA, 19 nt, Homo sapiens
  misc_RNA (1)...(19): siRNA sense strand
gaaacagugacgaguaucg

SEQ ID NO: 149025 - RNA, 19 nt, Homo sapiens
  misc_RNA (1)...(19): siRNA sense strand
gaaaauacgacagcagaug

SEQ ID NO: 149026 - RNA, 19 nt, Homo sapiens
  misc_RNA (1)...(19): siRNA sense strand
aaaucaaauugcugaccaa

SEQ ID NO: 149027 - RNA, 19 nt, Homo sapiens
  misc_RNA (1)...(19): siRNA sense strand
aaugaacgguuggaagcaa

SEQ ID NO: 149028 - RNA, 19 nt, Homo sapiens
  misc_RNA (1)...(19): siRNA sense strand
acacaaccuugcagacaac

SEQ ID NO: 149029 - RNA, 19 nt, Homo sapiens
  misc_RNA (1)...(19): siRNA sense strand
aagacacacugcagagagu

SEQ ID NO: 149030 - RNA, 19 nt, Homo sapiens
  misc_RNA (1)...(19): siRNA sense strand
ugaccaaggaauuaagugu

SEQ ID NO: 149031 - RNA, 19 nt, Homo sapiens
  misc_RNA (1)...(19): siRNA sense strand
caacguacaguccauuagc

SEQ ID NO: 149032 - RNA, 19 nt, Homo sapiens
  misc_RNA (1)...(19): siRNA sense strand
cggaauuaguguuauccau

SEQ ID NO: 149033 - RNA, 19 nt, Homo sapiens
  misc_RNA (1)...(19): siRNA sense strand
gcacaugccagcggcuuac

SEQ ID NO: 149034 - RNA, 19 nt, Homo sapiens
  misc_RNA (1)...(19): siRNA sense strand
caaauugcugaccaaggaa

SEQ ID NO: 149035 - RNA, 19 nt, Homo sapiens
  misc_RNA (1)...(19): siRNA sense strand
gaaugaacgguuggaagca

SEQ ID NO: 149036 - RNA, 19 nt, Homo sapiens
  misc_RNA (1)...(19): siRNA sense strand
gccgagagaggaacaacau

SEQ ID NO: 149037 - RNA, 19 nt, Homo sapiens
  misc_RNA (1)...(19): siRNA sense strand
cagcagauggcgacaaugc

SEQ ID NO: 149038 - RNA, 19 nt, Homo sapiens
  misc_RNA (1)...(19): siRNA sense strand
ggugaacggaauuaguguu

SEQ ID NO: 149039 - RNA, 19 nt, Homo sapiens
  misc_RNA (1)...(19): siRNA sense strand
gcacacaccucuugauaag

SEQ ID NO: 149040 - RNA, 19 nt, Homo sapiens
  misc_RNA (1)...(19): siRNA sense strand
gcaagagaaauauguguua

SEQ ID NO: 149041 - RNA, 19 nt, Homo sapiens
  misc_RNA (1)...(19): siRNA sense strand
gagcacacaccucuugaua

SEQ ID NO: 149042 - RNA, 19 nt, Homo sapiens
  misc_RNA (1)...(19): siRNA sense strand
acacaccucuugauaagga

SEQ ID NO: 149043 - RNA, 19 nt, Homo sapiens
  misc_RNA (1)...(19): siRNA sense strand
gagacaagguuggcuaaag

SEQ ID NO: 149044 - RNA, 19 nt, Homo sapiens
  misc_RNA (1)...(19): siRNA sense strand
uaaaggagauccgaaagcu

SEQ ID NO: 149045 - RNA, 19 nt, Homo sapiens
  misc_RNA (1)...(19): siRNA sense strand
uuacaugcaggccgaguua

SEQ ID NO: 149046 - RNA, 19 nt, Homo sapiens
  misc_RNA (1)...(19): siRNA sense strand
agacaagguuggcuaaagg

SEQ ID NO: 149047 - RNA, 19 nt, Homo sapiens
  misc_RNA (1)...(19): siRNA sense strand
agaggcagcagaagcauuu

SEQ ID NO: 149048 - RNA, 19 nt, Homo sapiens
  misc_RNA (1)...(19): siRNA sense strand
gcaagcccaggcccuauug

SEQ ID NO: 149049 - RNA, 19 nt, Homo sapiens
  misc_RNA (1)...(19): siRNA sense strand
guuacucucuucccaaagg

SEQ ID NO: 149050 - RNA, 19 nt, Homo sapiens
  misc_RNA (1)...(19): siRNA sense strand
ggcaagagaaauauguguu

SEQ ID NO: 149051 - RNA, 19 nt, Homo sapiens
  misc_RNA (1)...(19): siRNA sense strand
ggagacaagguuggcuaaa

SEQ ID NO: 149052 - RNA, 19 nt, Homo sapiens
  misc_RNA (1)...(19): siRNA sense strand
ccgccuggcaagagaaaua

SEQ ID NO: 149053 - RNA, 19 nt, Homo sapiens
  misc_RNA (1)...(19): siRNA sense strand
aagguuggcuaaaggagau

SEQ ID NO: 149054 - RNA, 19 nt, Homo sapiens
  misc_RNA (1)...(19): siRNA sense strand
aagcauuucuaguucaucu

SEQ ID NO: 149055 - RNA, 19 nt, Homo sapiens
  misc_RNA (1)...(19): siRNA sense strand
ccuauuggcccuacaagag

SEQ ID NO: 149056 - RNA, 19 nt, Homo sapiens
  misc_RNA (1)...(19): siRNA sense strand
acgccuaucuccucaccuu

SEQ ID NO: 149057 - RNA, 19 nt, Homo sapiens
  misc_RNA (1)...(19): siRNA sense strand
ggcuaaaggagauccgaaa

SEQ ID NO: 149058 - RNA, 19 nt, Homo sapiens
  misc_RNA (1)...(19): siRNA sense strand
ucagccgccuggcaagaga

SEQ ID NO: 149059 - RNA, 19 nt, Homo sapiens
  misc_RNA (1)...(19): siRNA sense strand
acaagaggcagcagaagca

SEQ ID NO: 149060 - RNA, 19 nt, Homo sapiens
  misc_RNA (1)...(19): siRNA sense strand
gacaagguuggcuaaagga

SEQ ID NO: 149061 - RNA, 19 nt, Homo sapiens
  misc_RNA (1)...(19): siRNA sense strand
ggcaagcccaggcccuauu

SEQ ID NO: 149062 - RNA, 19 nt, Homo sapiens
  misc_RNA (1)...(19): siRNA sense strand
gagauccgaaagcuucaga

SEQ ID NO: 149063 - RNA, 19 nt, Homo sapiens
  misc_RNA (1)...(19): siRNA sense strand
gcuaaaggagauccgaaag

SEQ ID NO: 149064 - RNA, 19 nt, Homo sapiens
  misc_RNA (1)...(19): siRNA sense strand
cccaaaggaugugcaacug

SEQ ID NO: 149065 - RNA, 19 nt, Homo sapiens
  misc_RNA (1)...(19): siRNA sense strand
gcauuucuaguucaucucu

SEQ ID NO: 149066 - RNA, 19 nt, Homo sapiens
  misc_RNA (1)...(19): siRNA sense strand
ggacauagccgccugcuuu

SEQ ID NO: 149067 - RNA, 19 nt, Homo sapiens
  misc_RNA (1)...(19): siRNA sense strand
ggaagaggaugaugaagau

SEQ ID NO: 149068 - RNA, 19 nt, Homo sapiens
  misc_RNA (1)...(19): siRNA sense strand
gcacgauccugaagaacaa

SEQ ID NO: 149069 - RNA, 19 nt, Homo sapiens
  misc_RNA (1)...(19): siRNA sense strand
ggaagaggacgaugaggaa

SEQ ID NO: 149070 - RNA, 19 nt, Homo sapiens
  misc_RNA (1)...(19): siRNA sense strand
ggaggagggugauguugau

SEQ ID NO: 149071 - RNA, 19 nt, Homo sapiens
  misc_RNA (1)...(19): siRNA sense strand
ggaggaagagggugaagga

SEQ ID NO: 149072 - RNA, 19 nt, Homo sapiens
  misc_RNA (1)...(19): siRNA sense strand
ggagggugauguugauagu

SEQ ID NO: 149073 - RNA, 19 nt, Homo sapiens
  misc_RNA (1)...(19): siRNA sense strand
ccgaauggcugcagagucu

SEQ ID NO: 149074 - RNA, 19 nt, Homo sapiens
  misc_RNA (1)...(19): siRNA sense strand
ugagcacgauccugaagaa

SEQ ID NO: 149075 - RNA, 19 nt, Homo sapiens
  misc_RNA (1)...(19): siRNA sense strand
ggaagaagaggaggaggaa

SEQ ID NO: 149076 - RNA, 19 nt, Homo sapiens
  misc_RNA (1)...(19): siRNA sense strand
gggaggccauggcuuacuu

SEQ ID NO: 149077 - RNA, 19 nt, Homo sapiens
  misc_RNA (1)...(19): siRNA sense strand
aagaagaggaggaagauga

SEQ ID NO: 149078 - RNA, 19 nt, Homo sapiens
  misc_RNA (1)...(19): siRNA sense strand
caucaccacuucccucaag

SEQ ID NO: 149079 - RNA, 19 nt, Homo sapiens
  misc_RNA (1)...(19): siRNA sense strand
cgggagaagucacggauca

SEQ ID NO: 149080 - RNA, 19 nt, Homo sapiens
  misc_RNA (1)...(19): siRNA sense strand
ggaggaggagggugauguu

SEQ ID NO: 149081 - RNA, 19 nt, Homo sapiens
  misc_RNA (1)...(19): siRNA sense strand
agaggaugaugaagaugaa

SEQ ID NO: 149082 - RNA, 19 nt, Homo sapiens
  misc_RNA (1)...(19): siRNA sense strand
agggugauguugauaguga

SEQ ID NO: 149083 - RNA, 19 nt, Homo sapiens
  misc_RNA (1)...(19): siRNA sense strand
ucaagggcaucauccucaa

SEQ ID NO: 149084 - RNA, 19 nt, Homo sapiens
  misc_RNA (1)...(19): siRNA sense strand
ugaggaagaggaugaugaa

SEQ ID NO: 149085 - RNA, 19 nt, Homo sapiens
  misc_RNA (1)...(19): siRNA sense strand
cggaggcccugcacuuugu

SEQ ID NO: 149086 - RNA, 19 nt, Homo sapiens
  misc_RNA (1)...(19): siRNA sense strand
agacgacgaugaugaugag

SEQ ID NO: 149087 - RNA, 19 nt, Homo sapiens
  misc_RNA (1)...(19): siRNA sense strand
aacacgaucugguucaugu

SEQ ID NO: 149088 - RNA, 19 nt, Homo sapiens
  misc_RNA (1)...(19): siRNA sense strand
ucacggaggcccugcacuu

SEQ ID NO: 149089 - RNA, 19 nt, Homo sapiens
  misc_RNA (1)...(19): siRNA sense strand
aagaagaggaggaggaaga

SEQ ID NO: 149090 - RNA, 19 nt, Homo sapiens
  misc_RNA (1)...(19): siRNA sense strand
caagagugagggagaggaa

SEQ ID NO: 149091 - RNA, 19 nt, Homo sapiens
  misc_RNA (1)...(19): siRNA sense strand
ugauagugaugaagaagag

SEQ ID NO: 149092 - RNA, 19 nt, Homo sapiens
  misc_RNA (1)...(19): siRNA sense strand
ggaggaggaggaggaagaa

SEQ ID NO: 149093 - RNA, 19 nt, Homo sapiens
  misc_RNA (1)...(19): siRNA sense strand
ugaagacgacgaugaugau

SEQ ID NO: 149094 - RNA, 19 nt, Homo sapiens
  misc_RNA (1)...(19): siRNA sense strand
ggagaagucacggaucauc

SEQ ID NO: 149095 - RNA, 19 nt, Homo sapiens
  misc_RNA (1)...(19): siRNA sense strand
ugaggaggauggugaugag

SEQ ID NO: 149096 - RNA, 19 nt, Homo sapiens
  misc_RNA (1)...(19): siRNA sense strand
ggaggaggaggaagaagag

SEQ ID NO: 149097 - RNA, 19 nt, Homo sapiens
  misc_RNA (1)...(19): siRNA sense strand
gaagacgacgaugaugaug

SEQ ID NO: 149098 - RNA, 19 nt, Homo sapiens
  misc_RNA (1)...(19): siRNA sense strand
aagaggaugaugaagauga

SEQ ID NO: 149099 - RNA, 19 nt, Homo sapiens
  misc_RNA (1)...(19): siRNA sense strand
gugaggaagaggacgauga

SEQ ID NO: 149100 - RNA, 19 nt, Homo sapiens
  misc_RNA (1)...(19): siRNA sense strand
ggcgggagcacuacugguu

SEQ ID NO: 149101 - RNA, 19 nt, Homo sapiens
  misc_RNA (1)...(19): siRNA sense strand
aggaagaggaugaugaaga

SEQ ID NO: 149102 - RNA, 19 nt, Homo sapiens
  misc_RNA (1)...(19): siRNA sense strand
ggacgaugaggaagaggau

SEQ ID NO: 149103 - RNA, 19 nt, Homo sapiens
  misc_RNA (1)...(19): siRNA sense strand
gaagcccagugcccuacuc

SEQ ID NO: 149104 - RNA, 19 nt, Homo sapiens
  misc_RNA (1)...(19): siRNA sense strand
gaagaagaggaggaagaug

SEQ ID NO: 149105 - RNA, 19 nt, Homo sapiens
  misc_RNA (1)...(19): siRNA sense strand
aguggagccuucggacaua

SEQ ID NO: 149106 - RNA, 19 nt, Homo sapiens
  misc_RNA (1)...(19): siRNA sense strand
gaggagggugauguugaua

SEQ ID NO: 149107 - RNA, 19 nt, Homo sapiens
  misc_RNA (1)...(19): siRNA sense strand
ggaggccauggcuuacuuu

SEQ ID NO: 149108 - RNA, 19 nt, Homo sapiens
  misc_RNA (1)...(19): siRNA sense strand
ugauguugauagugaugaa

SEQ ID NO: 149109 - RNA, 19 nt, Homo sapiens
  misc_RNA (1)...(19): siRNA sense strand
ugaagaagaggaggaagau

SEQ ID NO: 149110 - RNA, 19 nt, Homo sapiens
  misc_RNA (1)...(19): siRNA sense strand
aagaugaagacgacgauga

SEQ ID NO: 149111 - RNA, 19 nt, Homo sapiens
  misc_RNA (1)...(19): siRNA sense strand
ccagugcccuacucugcau

SEQ ID NO: 149112 - RNA, 19 nt, Homo sapiens
  misc_RNA (1)...(19): siRNA sense strand
gagccacauccuccacuug

SEQ ID NO: 149113 - RNA, 19 nt, Homo sapiens
  misc_RNA (1)...(19): siRNA sense strand
ggaggaggaggaggaggaa

SEQ ID NO: 149114 - RNA, 19 nt, Homo sapiens
  misc_RNA (1)...(19): siRNA sense strand
guucaugugaccaggaaga

SEQ ID NO: 149115 - RNA, 19 nt, Homo sapiens
  misc_RNA (1)...(19): siRNA sense strand
gacauagccgccugcuuuc

SEQ ID NO: 149116 - RNA, 19 nt, Homo sapiens
  misc_RNA (1)...(19): siRNA sense strand
ggcgggaguucgaggucuu

SEQ ID NO: 149117 - RNA, 19 nt, Homo sapiens
  misc_RNA (1)...(19): siRNA sense strand
gaagaggaugaugaagaug

SEQ ID NO: 149118 - RNA, 19 nt, Homo sapiens
  misc_RNA (1)...(19): siRNA sense strand
gccaggccaugcugcucaa

SEQ ID NO: 149119 - RNA, 19 nt, Homo sapiens
  misc_RNA (1)...(19): siRNA sense strand
gaugaagacgacgaugaug

SEQ ID NO: 149120 - RNA, 19 nt, Homo sapiens
  misc_RNA (1)...(19): siRNA sense strand
gaggaggagggugauguug

SEQ ID NO: 149121 - RNA, 19 nt, Homo sapiens
  misc_RNA (1)...(19): siRNA sense strand
ccacuuggaacacgaucug

SEQ ID NO: 149122 - RNA, 19 nt, Homo sapiens
  misc_RNA (1)...(19): siRNA sense strand
guacagagguuucaguuaa

SEQ ID NO: 149123 - RNA, 19 nt, Homo sapiens
  misc_RNA (1)...(19): siRNA sense strand
gccaguagaucuuggauua

SEQ ID NO: 149124 - RNA, 19 nt, Homo sapiens
  misc_RNA (1)...(19): siRNA sense strand
gcgaauagauuaucaagga

SEQ ID NO: 149125 - RNA, 19 nt, Homo sapiens
  misc_RNA (1)...(19): siRNA sense strand
gaaaucacauccaaaguca

SEQ ID NO: 149126 - RNA, 19 nt, Homo sapiens
  misc_RNA (1)...(19): siRNA sense strand
ugacaaacauucccauaaa

SEQ ID NO: 149127 - RNA, 19 nt, Homo sapiens
  misc_RNA (1)...(19): siRNA sense strand
gaacagaauccaucacaaa

SEQ ID NO: 149128 - RNA, 19 nt, Homo sapiens
  misc_RNA (1)...(19): siRNA sense strand
gaggagagcgaauagauua

SEQ ID NO: 149129 - RNA, 19 nt, Homo sapiens
  misc_RNA (1)...(19): siRNA sense strand
acaagaagcucaaagaaug

SEQ ID NO: 149130 - RNA, 19 nt, Homo sapiens
  misc_RNA (1)...(19): siRNA sense strand
ccauaaaccucacccagua

SEQ ID NO: 149131 - RNA, 19 nt, Homo sapiens
  misc_RNA (1)...(19): siRNA sense strand
ucaaagaaauucagacaga

SEQ ID NO: 149132 - RNA, 19 nt, Homo sapiens
  misc_RNA (1)...(19): siRNA sense strand
gguagaaagucaagagaaa

SEQ ID NO: 149133 - RNA, 19 nt, Homo sapiens
  misc_RNA (1)...(19): siRNA sense strand
gcucaaagaaugaagauaa

SEQ ID NO: 149134 - RNA, 19 nt, Homo sapiens
  misc_RNA (1)...(19): siRNA sense strand
gaaagaaugauguggauga

SEQ ID NO: 149135 - RNA, 19 nt, Homo sapiens
  misc_RNA (1)...(19): siRNA sense strand
gaagagaugggaaaugauu

SEQ ID NO: 149136 - RNA, 19 nt, Homo sapiens
  misc_RNA (1)...(19): siRNA sense strand
gcauaagacuucaguuuua

SEQ ID NO: 149137 - RNA, 19 nt, Homo sapiens
  misc_RNA (1)...(19): siRNA sense strand
gaaagaagccucucuacag

SEQ ID NO: 149138 - RNA, 19 nt, Homo sapiens
  misc_RNA (1)...(19): siRNA sense strand
ggaagagcaugaagagaug

SEQ ID NO: 149139 - RNA, 19 nt, Homo sapiens
  misc_RNA (1)...(19): siRNA sense strand
gaagaaagaagccucucua

SEQ ID NO: 149140 - RNA, 19 nt, Homo sapiens
  misc_RNA (1)...(19): siRNA sense strand
caagagaacacguuugaaa

SEQ ID NO: 149141 - RNA, 19 nt, Homo sapiens
  misc_RNA (1)...(19): siRNA sense strand
cagaauccaucacaaacua

SEQ ID NO: 149142 - RNA, 19 nt, Homo sapiens
  misc_RNA (1)...(19): siRNA sense strand
gagcauaagacuucaguuu

SEQ ID NO: 149143 - RNA, 19 nt, Homo sapiens
  misc_RNA (1)...(19): siRNA sense strand
gaugaaauuuccagauguu

SEQ ID NO: 149144 - RNA, 19 nt, Homo sapiens
  misc_RNA (1)...(19): siRNA sense strand
caagacgaauuucaaagaa

SEQ ID NO: 149145 - RNA, 19 nt, Homo sapiens
  misc_RNA (1)...(19): siRNA sense strand
gaaauucaacgacaagcua

SEQ ID NO: 149146 - RNA, 19 nt, Homo sapiens
  misc_RNA (1)...(19): siRNA sense strand
cagugaagcugaugaagaa

SEQ ID NO: 149147 - RNA, 19 nt, Homo sapiens
  misc_RNA (1)...(19): siRNA sense strand
aaaaggaucugucuugaua

SEQ ID NO: 149148 - RNA, 19 nt, Homo sapiens
  misc_RNA (1)...(19): siRNA sense strand
ggauacaaguuaugcuuug

SEQ ID NO: 149149 - RNA, 19 nt, Homo sapiens
  misc_RNA (1)...(19): siRNA sense strand
agaaugauguggaugauga

SEQ ID NO: 149150 - RNA, 19 nt, Homo sapiens
  misc_RNA (1)...(19): siRNA sense strand
acaaaucagucaucuaaga

SEQ ID NO: 149151 - RNA, 19 nt, Homo sapiens
  misc_RNA (1)...(19): siRNA sense strand
gaagaaaauucauggcuaa

SEQ ID NO: 149152 - RNA, 19 nt, Homo sapiens
  misc_RNA (1)...(19): siRNA sense strand
gaaacaagagagauuauuc

SEQ ID NO: 149153 - RNA, 19 nt, Homo sapiens
  misc_RNA (1)...(19): siRNA sense strand
gauauuaggaccacaagaa

SEQ ID NO: 149154 - RNA, 19 nt, Homo sapiens
  misc_RNA (1)...(19): siRNA sense strand
ugaagcugaugaagaauuu

SEQ ID NO: 149155 - RNA, 19 nt, Homo sapiens
  misc_RNA (1)...(19): siRNA sense strand
gaaaugaauuaccaaugca

SEQ ID NO: 149156 - RNA, 19 nt, Homo sapiens
  misc_RNA (1)...(19): siRNA sense strand
cuuccaggcucaauaauaa

SEQ ID NO: 149157 - RNA, 19 nt, Homo sapiens
  misc_RNA (1)...(19): siRNA sense strand
ucaggaggauucgugauua

SEQ ID NO: 149158 - RNA, 19 nt, Homo sapiens
  misc_RNA (1)...(19): siRNA sense strand
agagagagacuuacacuuu

SEQ ID NO: 149159 - RNA, 19 nt, Homo sapiens
  misc_RNA (1)...(19): siRNA sense strand
gaugggaaaugauuguguu

SEQ ID NO: 149160 - RNA, 19 nt, Homo sapiens
  misc_RNA (1)...(19): siRNA sense strand
guugauagaggaugaauuu

SEQ ID NO: 149161 - RNA, 19 nt, Homo sapiens
  misc_RNA (1)...(19): siRNA sense strand
gcaaagagugccagaaauc

SEQ ID NO: 149162 - RNA, 19 nt, Homo sapiens
  misc_RNA (1)...(19): siRNA sense strand
caaagaaauucagacagaa

SEQ ID NO: 149163 - RNA, 19 nt, Homo sapiens
  misc_RNA (1)...(19): siRNA sense strand
caucacauauuacccaaga

SEQ ID NO: 149164 - RNA, 19 nt, Homo sapiens
  misc_RNA (1)...(19): siRNA sense strand
uaaauaugcugccuucaag

SEQ ID NO: 149165 - RNA, 19 nt, Homo sapiens
  misc_RNA (1)...(19): siRNA sense strand
caaagucaguuccaguuuc

SEQ ID NO: 149166 - RNA, 19 nt, Homo sapiens
  misc_RNA (1)...(19): siRNA sense strand
gacauuggauacacccuuu

SEQ ID NO: 149167 - RNA, 19 nt, Homo sapiens
  misc_RNA (1)...(19): siRNA sense strand
cagaauagaauacgagauu

SEQ ID NO: 149168 - RNA, 19 nt, Homo sapiens
  misc_RNA (1)...(19): siRNA sense strand
agaagccucucuacaguuu

SEQ ID NO: 149169 - RNA, 19 nt, Homo sapiens
  misc_RNA (1)...(19): siRNA sense strand
aaauacaccugacucgaaa

SEQ ID NO: 149170 - RNA, 19 nt, Homo sapiens
  misc_RNA (1)...(19): siRNA sense strand
ggauuacaauaccaagaaa

SEQ ID NO: 149171 - RNA, 19 nt, Homo sapiens
  misc_RNA (1)...(19): siRNA sense strand
gaauccagucccauuguua

SEQ ID NO: 149172 - RNA, 19 nt, Homo sapiens
  misc_RNA (1)...(19): siRNA sense strand
guaaauaugcugccuucaa

SEQ ID NO: 149173 - RNA, 19 nt, Homo sapiens
  misc_RNA (1)...(19): siRNA sense strand
gaucaucucagaauagaau

SEQ ID NO: 149174 - RNA, 19 nt, Homo sapiens
  misc_RNA (1)...(19): siRNA sense strand
gcagaagacagcaacuaaa

SEQ ID NO: 149175 - RNA, 19 nt, Homo sapiens
  misc_RNA (1)...(19): siRNA sense strand
gagcaaggccagaauguuc

SEQ ID NO: 149176 - RNA, 19 nt, Homo sapiens
  misc_RNA (1)...(19): siRNA sense strand
gaaguucagaugacucaaa

SEQ ID NO: 149177 - RNA, 19 nt, Homo sapiens
  misc_RNA (1)...(19): siRNA sense strand
cuaaagugauaccaaagaa

SEQ ID NO: 149178 - RNA, 19 nt, Homo sapiens
  misc_RNA (1)...(19): siRNA sense strand
aaagaagccucucuacagu

SEQ ID NO: 149179 - RNA, 19 nt, Homo sapiens
  misc_RNA (1)...(19): siRNA sense strand
uaaaggcaaccaaagagua

SEQ ID NO: 149180 - RNA, 19 nt, Homo sapiens
  misc_RNA (1)...(19): siRNA sense strand
gagagagacuuacacuuuu

SEQ ID NO: 149181 - RNA, 19 nt, Homo sapiens
  misc_RNA (1)...(19): siRNA sense strand
ccagaaacaagagagauua

SEQ ID NO: 149182 - RNA, 19 nt, Homo sapiens
  misc_RNA (1)...(19): siRNA sense strand
ggaaguucauggaaguuca

SEQ ID NO: 149183 - RNA, 19 nt, Homo sapiens
  misc_RNA (1)...(19): siRNA sense strand
aaacaguacuggauacaag

SEQ ID NO: 149184 - RNA, 19 nt, Homo sapiens
  misc_RNA (1)...(19): siRNA sense strand
caaaaucagugccuaauuc

SEQ ID NO: 149185 - RNA, 19 nt, Homo sapiens
  misc_RNA (1)...(19): siRNA sense strand
cgaaguugauagaggauga

SEQ ID NO: 149186 - RNA, 19 nt, Homo sapiens
  misc_RNA (1)...(19): siRNA sense strand
gauacaaguuaugcuuuga

SEQ ID NO: 149187 - RNA, 19 nt, Homo sapiens
  misc_RNA (1)...(19): siRNA sense strand
uaaaccagcugaagaacag

SEQ ID NO: 149188 - RNA, 19 nt, Homo sapiens
  misc_RNA (1)...(19): siRNA sense strand
ucaggaucaucucagaaua

SEQ ID NO: 149189 - RNA, 19 nt, Homo sapiens
  misc_RNA (1)...(19): siRNA sense strand
gagagcgaauagauuauca

SEQ ID NO: 149190 - RNA, 19 nt, Homo sapiens
  misc_RNA (1)...(19): siRNA sense strand
agacuuggcuaagaagaaa

SEQ ID NO: 149191 - RNA, 19 nt, Homo sapiens
  misc_RNA (1)...(19): siRNA sense strand
gaaauauggaagagcauga

SEQ ID NO: 149192 - RNA, 19 nt, Homo sapiens
  misc_RNA (1)...(19): siRNA sense strand
caaaucagucaucuaagaa

SEQ ID NO: 149193 - RNA, 19 nt, Homo sapiens
  misc_RNA (1)...(19): siRNA sense strand
gaagguauacaagacauug

SEQ ID NO: 149194 - RNA, 19 nt, Homo sapiens
  misc_RNA (1)...(19): siRNA sense strand
ggaucugucuugauaacga

SEQ ID NO: 149195 - RNA, 19 nt, Homo sapiens
  misc_RNA (1)...(19): siRNA sense strand
ccaaagaguacagaaguuu

SEQ ID NO: 149196 - RNA, 19 nt, Homo sapiens
  misc_RNA (1)...(19): siRNA sense strand
ccaagacgaauuucaaaga

SEQ ID NO: 149197 - RNA, 19 nt, Homo sapiens
  misc_RNA (1)...(19): siRNA sense strand
ggaccaagagaacacguuu

SEQ ID NO: 149198 - RNA, 19 nt, Homo sapiens
  misc_RNA (1)...(19): siRNA sense strand
caacagagucaaacuugga

SEQ ID NO: 149199 - RNA, 19 nt, Homo sapiens
  misc_RNA (1)...(19): siRNA sense strand
agaaaugaauuaccaaugc

SEQ ID NO: 149200 - RNA, 19 nt, Homo sapiens
  misc_RNA (1)...(19): siRNA sense strand
uaaaguaucagaugaagag

SEQ ID NO: 149201 - RNA, 19 nt, Homo sapiens
  misc_RNA (1)...(19): siRNA sense strand
ugaggaaaguguucuucuu

SEQ ID NO: 149202 - RNA, 19 nt, Homo sapiens
  misc_RNA (1)...(19): siRNA sense strand
guaaaggacccagaaacaa

SEQ ID NO: 149203 - RNA, 19 nt, Homo sapiens
  misc_RNA (1)...(19): siRNA sense strand
gguaaaggacccagaaaca

SEQ ID NO: 149204 - RNA, 19 nt, Homo sapiens
  misc_RNA (1)...(19): siRNA sense strand
cauuaugacugcacagaau

SEQ ID NO: 149205 - RNA, 19 nt, Homo sapiens
  misc_RNA (1)...(19): siRNA sense strand
gacuucaacugucacgaaa

SEQ ID NO: 149206 - RNA, 19 nt, Homo sapiens
  misc_RNA (1)...(19): siRNA sense strand
cauguaauauaccaacaga

SEQ ID NO: 149207 - RNA, 19 nt, Homo sapiens
  misc_RNA (1)...(19): siRNA sense strand
gcaacuaaaggcaaccaaa

SEQ ID NO: 149208 - RNA, 19 nt, Homo sapiens
  misc_RNA (1)...(19): siRNA sense strand
gggacagucuaaagaugaa

SEQ ID NO: 149209 - RNA, 19 nt, Homo sapiens
  misc_RNA (1)...(19): siRNA sense strand
ugauaacgaugaaagaaag

SEQ ID NO: 149210 - RNA, 19 nt, Homo sapiens
  misc_RNA (1)...(19): siRNA sense strand
cgaauagauuaucaaggaa

SEQ ID NO: 149211 - RNA, 19 nt, Homo sapiens
  misc_RNA (1)...(19): siRNA sense strand
gcugaagguucuggaggua

SEQ ID NO: 149212 - RNA, 19 nt, Homo sapiens
  misc_RNA (1)...(19): siRNA sense strand
ggcagaagacagcaacuaa

SEQ ID NO: 149213 - RNA, 19 nt, Homo sapiens
  misc_RNA (1)...(19): siRNA sense strand
augaagagaugggaaauga

SEQ ID NO: 149214 - RNA, 19 nt, Homo sapiens
  misc_RNA (1)...(19): siRNA sense strand
gaauguucuggaaaucuua

SEQ ID NO: 149215 - RNA, 19 nt, Homo sapiens
  misc_RNA (1)...(19): siRNA sense strand
ggaccuuccaggcucaaua

SEQ ID NO: 149216 - RNA, 19 nt, Homo sapiens
  misc_RNA (1)...(19): siRNA sense strand
caagaagcucaaagaauga

SEQ ID NO: 149217 - RNA, 19 nt, Homo sapiens
  misc_RNA (1)...(19): siRNA sense strand
ggagaguccuguuuauagc

SEQ ID NO: 149218 - RNA, 19 nt, Homo sapiens
  misc_RNA (1)...(19): siRNA sense strand
gcaaaaggacuauaaaaca

SEQ ID NO: 149219 - RNA, 19 nt, Homo sapiens
  misc_RNA (1)...(19): siRNA sense strand
gaucaguucaggcccauga

SEQ ID NO: 149220 - RNA, 19 nt, Homo sapiens
  misc_RNA (1)...(19): siRNA sense strand
gacaaacauucccauaaac

SEQ ID NO: 149221 - RNA, 19 nt, Homo sapiens
  misc_RNA (1)...(19): siRNA sense strand
ugaggaaguucauggaagu

SEQ ID NO: 149222 - RNA, 19 nt, Homo sapiens
  misc_RNA (1)...(19): siRNA sense strand
gaagacagcucaaauaaua

SEQ ID NO: 149223 - RNA, 19 nt, Homo sapiens
  misc_RNA (1)...(19): siRNA sense strand
gaacaguccuuaaauauga

SEQ ID NO: 149224 - RNA, 19 nt, Homo sapiens
  misc_RNA (1)...(19): siRNA sense strand
caacaaagcuacuaaauca

SEQ ID NO: 149225 - RNA, 19 nt, Homo sapiens
  misc_RNA (1)...(19): siRNA sense strand
gaaagaagaugucaauaug

SEQ ID NO: 149226 - RNA, 19 nt, Homo sapiens
  misc_RNA (1)...(19): siRNA sense strand
gaaggaaacugaaauauca

SEQ ID NO: 149227 - RNA, 19 nt, Homo sapiens
  misc_RNA (1)...(19): siRNA sense strand
ggaaagaagugcuaccaua

SEQ ID NO: 149228 - RNA, 19 nt, Homo sapiens
  misc_RNA (1)...(19): siRNA sense strand
gaccaaagcuuaacucuga

SEQ ID NO: 149229 - RNA, 19 nt, Homo sapiens
  misc_RNA (1)...(19): siRNA sense strand
cguauuaucugcacaauua

SEQ ID NO: 149230 - RNA, 19 nt, Homo sapiens
  misc_RNA (1)...(19): siRNA sense strand
caagaacaguccuuaaaua

SEQ ID NO: 149231 - RNA, 19 nt, Homo sapiens
  misc_RNA (1)...(19): siRNA sense strand
ggaaagaaaugacacaguu

SEQ ID NO: 149232 - RNA, 19 nt, Homo sapiens
  misc_RNA (1)...(19): siRNA sense strand
gaaaagugcucuagaauaa

SEQ ID NO: 149233 - RNA, 19 nt, Homo sapiens
  misc_RNA (1)...(19): siRNA sense strand
gaaaugagaucuguaacaa

SEQ ID NO: 149234 - RNA, 19 nt, Homo sapiens
  misc_RNA (1)...(19): siRNA sense strand
gaagagcuccauauaauaa

SEQ ID NO: 149235 - RNA, 19 nt, Homo sapiens
  misc_RNA (1)...(19): siRNA sense strand
gaacaagaggaaacuauua

SEQ ID NO: 149236 - RNA, 19 nt, Homo sapiens
  misc_RNA (1)...(19): siRNA sense strand
ggaaagggaccaauucaua

SEQ ID NO: 149237 - RNA, 19 nt, Homo sapiens
  misc_RNA (1)...(19): siRNA sense strand
ggaaagagauacaagacaa

SEQ ID NO: 149238 - RNA, 19 nt, Homo sapiens
  misc_RNA (1)...(19): siRNA sense strand
gaaaugaaaucuguagcua

SEQ ID NO: 149239 - RNA, 19 nt, Homo sapiens
  misc_RNA (1)...(19): siRNA sense strand
ugaaggaucuguuaaggua

SEQ ID NO: 149240 - RNA, 19 nt, Homo sapiens
  misc_RNA (1)...(19): siRNA sense strand
gcaggaaacuauugacaaa

SEQ ID NO: 149241 - RNA, 19 nt, Homo sapiens
  misc_RNA (1)...(19): siRNA sense strand
gcagcaaacuuuagaagaa

SEQ ID NO: 149242 - RNA, 19 nt, Homo sapiens
  misc_RNA (1)...(19): siRNA sense strand
gagaaugaaucaggaaaua

SEQ ID NO: 149243 - RNA, 19 nt, Homo sapiens
  misc_RNA (1)...(19): siRNA sense strand
gaucgugucuuucauggua

SEQ ID NO: 149244 - RNA, 19 nt, Homo sapiens
  misc_RNA (1)...(19): siRNA sense strand
gaaacaacaucaagaaaca

SEQ ID NO: 149245 - RNA, 19 nt, Homo sapiens
  misc_RNA (1)...(19): siRNA sense strand
gaagaauacuccuuauguu

SEQ ID NO: 149246 - RNA, 19 nt, Homo sapiens
  misc_RNA (1)...(19): siRNA sense strand
gagaagaugucaauaggaa

SEQ ID NO: 149247 - RNA, 19 nt, Homo sapiens
  misc_RNA (1)...(19): siRNA sense strand
gaagaucauuugggaguua

SEQ ID NO: 149248 - RNA, 19 nt, Homo sapiens
  misc_RNA (1)...(19): siRNA sense strand
gaacauauaaggcuagaaa

SEQ ID NO: 149249 - RNA, 19 nt, Homo sapiens
  misc_RNA (1)...(19): siRNA sense strand
gaauuucucuuacguguau

SEQ ID NO: 149250 - RNA, 19 nt, Homo sapiens
  misc_RNA (1)...(19): siRNA sense strand
gaagaaaugagaucuguaa

SEQ ID NO: 149251 - RNA, 19 nt, Homo sapiens
  misc_RNA (1)...(19): siRNA sense strand
gaguagaguucaagguuua

SEQ ID NO: 149252 - RNA, 19 nt, Homo sapiens
  misc_RNA (1)...(19): siRNA sense strand
uuaagaagcuacaggaaua

SEQ ID NO: 149253 - RNA, 19 nt, Homo sapiens
  misc_RNA (1)...(19): siRNA sense strand
caacuacacagucgaauua

SEQ ID NO: 149254 - RNA, 19 nt, Homo sapiens
  misc_RNA (1)...(19): siRNA sense strand
gcaaaugaacaucaacuua

SEQ ID NO: 149255 - RNA, 19 nt, Homo sapiens
  misc_RNA (1)...(19): siRNA sense strand
gaauugacauuggaacaua

SEQ ID NO: 149256 - RNA, 19 nt, Homo sapiens
  misc_RNA (1)...(19): siRNA sense strand
aaggaaggcuguaauauaa

SEQ ID NO: 149257 - RNA, 19 nt, Homo sapiens
  misc_RNA (1)...(19): siRNA sense strand
caaauaaacccuuaacuug

SEQ ID NO: 149258 - RNA, 19 nt, Homo sapiens
  misc_RNA (1)...(19): siRNA sense strand
ugaagaaacugaaguaugu

SEQ ID NO: 149259 - RNA, 19 nt, Homo sapiens
  misc_RNA (1)...(19): siRNA sense strand
caacaacacuggcaagaau

SEQ ID NO: 149260 - RNA, 19 nt, Homo sapiens
  misc_RNA (1)...(19): siRNA sense strand
gaacaacuacgaacagaaa

SEQ ID NO: 149261 - RNA, 19 nt, Homo sapiens
  misc_RNA (1)...(19): siRNA sense strand
ggaaagagacaaccuuaaa

SEQ ID NO: 149262 - RNA, 19 nt, Homo sapiens
  misc_RNA (1)...(19): siRNA sense strand
gcaacaacuucuuaaugua

SEQ ID NO: 149263 - RNA, 19 nt, Homo sapiens
  misc_RNA (1)...(19): siRNA sense strand
gaaaugcucuugagucucu

SEQ ID NO: 149264 - RNA, 19 nt, Homo sapiens
  misc_RNA (1)...(19): siRNA sense strand
gaacaaagaauugacauug

SEQ ID NO: 149265 - RNA, 19 nt, Homo sapiens
  misc_RNA (1)...(19): siRNA sense strand
caagauaccucagugauau

SEQ ID NO: 149266 - RNA, 19 nt, Homo sapiens
  misc_RNA (1)...(19): siRNA sense strand
ugaaagccuugaagaaaua

SEQ ID NO: 149267 - RNA, 19 nt, Homo sapiens
  misc_RNA (1)...(19): siRNA sense strand
caagaacaauuacgaaaug

SEQ ID NO: 149268 - RNA, 19 nt, Homo sapiens
  misc_RNA (1)...(19): siRNA sense strand
gaacggaauuuacaagauc

SEQ ID NO: 149269 - RNA, 19 nt, Homo sapiens
  misc_RNA (1)...(19): siRNA sense strand
caaggaaggcuguaauaua

SEQ ID NO: 149270 - RNA, 19 nt, Homo sapiens
  misc_RNA (1)...(19): siRNA sense strand
ugaaaucacugaaagagaa

SEQ ID NO: 149271 - RNA, 19 nt, Homo sapiens
  misc_RNA (1)...(19): siRNA sense strand
gagaagacagcucaaauaa

SEQ ID NO: 149272 - RNA, 19 nt, Homo sapiens
  misc_RNA (1)...(19): siRNA sense strand
guaacacucuugauacauu

SEQ ID NO: 149273 - RNA, 19 nt, Homo sapiens
  misc_RNA (1)...(19): siRNA sense strand
gauaggauuugucaaguga

SEQ ID NO: 149274 - RNA, 19 nt, Homo sapiens
  misc_RNA (1)...(19): siRNA sense strand
ccaagaaacuauugaugaa

SEQ ID NO: 149275 - RNA, 19 nt, Homo sapiens
  misc_RNA (1)...(19): siRNA sense strand
ggaaauaguuaaucucucu

SEQ ID NO: 149276 - RNA, 19 nt, Homo sapiens
  misc_RNA (1)...(19): siRNA sense strand
gaagugaaaucuauaacca

SEQ ID NO: 149277 - RNA, 19 nt, Homo sapiens
  misc_RNA (1)...(19): siRNA sense strand
gagcuaagccauauaaaga

SEQ ID NO: 149278 - RNA, 19 nt, Homo sapiens
  misc_RNA (1)...(19): siRNA sense strand
gcaugaagcuaaagaaagu

SEQ ID NO: 149279 - RNA, 19 nt, Homo sapiens
  misc_RNA (1)...(19): siRNA sense strand
caacagaguuugaggaaag

SEQ ID NO: 149280 - RNA, 19 nt, Homo sapiens
  misc_RNA (1)...(19): siRNA sense strand
gaaacugaaguauguguua

SEQ ID NO: 149281 - RNA, 19 nt, Homo sapiens
  misc_RNA (1)...(19): siRNA sense strand
ucaagaaagucaagaagaa

SEQ ID NO: 149282 - RNA, 19 nt, Homo sapiens
  misc_RNA (1)...(19): siRNA sense strand
cuaaacaccuggaaacuga

SEQ ID NO: 149283 - RNA, 19 nt, Homo sapiens
  misc_RNA (1)...(19): siRNA sense strand
ugaaagaacuugcaacuac

SEQ ID NO: 149284 - RNA, 19 nt, Homo sapiens
  misc_RNA (1)...(19): siRNA sense strand
caagaaagacuaaaugaga

SEQ ID NO: 149285 - RNA, 19 nt, Homo sapiens
  misc_RNA (1)...(19): siRNA sense strand
gaacuaagaagaagcguau

SEQ ID NO: 149286 - RNA, 19 nt, Homo sapiens
  misc_RNA (1)...(19): siRNA sense strand
gaaaauagaccuagagaaa

SEQ ID NO: 149287 - RNA, 19 nt, Homo sapiens
  misc_RNA (1)...(19): siRNA sense strand
gaagagauacucagagaug

SEQ ID NO: 149288 - RNA, 19 nt, Homo sapiens
  misc_RNA (1)...(19): siRNA sense strand
uaagagggauuguuucaga

SEQ ID NO: 149289 - RNA, 19 nt, Homo sapiens
  misc_RNA (1)...(19): siRNA sense strand
ggagaaagaugaccuacag

SEQ ID NO: 149290 - RNA, 19 nt, Homo sapiens
  misc_RNA (1)...(19): siRNA sense strand
gaagaagcguaucugagaa

SEQ ID NO: 149291 - RNA, 19 nt, Homo sapiens
  misc_RNA (1)...(19): siRNA sense strand
ggaaggcuguaauauaaau

SEQ ID NO: 149292 - RNA, 19 nt, Homo sapiens
  misc_RNA (1)...(19): siRNA sense strand
ugaaguauguguuaagcua

SEQ ID NO: 149293 - RNA, 19 nt, Homo sapiens
  misc_RNA (1)...(19): siRNA sense strand
ugaugaagcucuccugaaa

SEQ ID NO: 149294 - RNA, 19 nt, Homo sapiens
  misc_RNA (1)...(19): siRNA sense strand
gaaagaagugcuaccauau

SEQ ID NO: 149295 - RNA, 19 nt, Homo sapiens
  misc_RNA (1)...(19): siRNA sense strand
gaaagugaguucccuagca

SEQ ID NO: 149296 - RNA, 19 nt, Homo sapiens
  misc_RNA (1)...(19): siRNA sense strand
gaacaagauccaagagauu

SEQ ID NO: 149297 - RNA, 19 nt, Homo sapiens
  misc_RNA (1)...(19): siRNA sense strand
gaaagaacuugcaacuaca

SEQ ID NO: 149298 - RNA, 19 nt, Homo sapiens
  misc_RNA (1)...(19): siRNA sense strand
caucagaaauggcuuugaa

SEQ ID NO: 149299 - RNA, 19 nt, Homo sapiens
  misc_RNA (1)...(19): siRNA sense strand
cagaauaauugccauaaug

SEQ ID NO: 149300 - RNA, 19 nt, Homo sapiens
  misc_RNA (1)...(19): siRNA sense strand
cgacagaaccaccaaguaa

SEQ ID NO: 149301 - RNA, 19 nt, Homo sapiens
  misc_RNA (1)...(19): siRNA sense strand
gagcaggcauuauggagaa

SEQ ID NO: 149302 - RNA, 19 nt, Homo sapiens
  misc_RNA (1)...(19): siRNA sense strand
gaaauggcuuugaaaugga

SEQ ID NO: 149303 - RNA, 19 nt, Homo sapiens
  misc_RNA (1)...(19): siRNA sense strand
cagaagaaguuguauauac

SEQ ID NO: 149304 - RNA, 19 nt, Homo sapiens
  misc_RNA (1)...(19): siRNA sense strand
gaaguuauaaggcuauuga

SEQ ID NO: 149305 - RNA, 19 nt, Homo sapiens
  misc_RNA (1)...(19): siRNA sense strand
gagaaacuauaacuagaga

SEQ ID NO: 149306 - RNA, 19 nt, Homo sapiens
  misc_RNA (1)...(19): siRNA sense strand
ugagugagauggagcaauu

SEQ ID NO: 149307 - RNA, 19 nt, Homo sapiens
  misc_RNA (1)...(19): siRNA sense strand
gauagcaaguuaacacgaa

SEQ ID NO: 149308 - RNA, 19 nt, Homo sapiens
  misc_RNA (1)...(19): siRNA sense strand
caacagcaccuuauggaaa

SEQ ID NO: 149309 - RNA, 19 nt, Homo sapiens
  misc_RNA (1)...(19): siRNA sense strand
aaaguaagaugcucgaguu

SEQ ID NO: 149310 - RNA, 19 nt, Homo sapiens
  misc_RNA (1)...(19): siRNA sense strand
gcucagaaacuuaaugaaa

SEQ ID NO: 149311 - RNA, 19 nt, Homo sapiens
  misc_RNA (1)...(19): siRNA sense strand
gauauucacgauacuguua

SEQ ID NO: 149312 - RNA, 19 nt, Homo sapiens
  misc_RNA (1)...(19): siRNA sense strand
aaacucaccucccuuauag

SEQ ID NO: 149313 - RNA, 19 nt, Homo sapiens
  misc_RNA (1)...(19): siRNA sense strand
gcaacuacauacaagcaaa

SEQ ID NO: 149314 - RNA, 19 nt, Homo sapiens
  misc_RNA (1)...(19): siRNA sense strand
uaagugagauagaauggaa

SEQ ID NO: 149315 - RNA, 19 nt, Homo sapiens
  misc_RNA (1)...(19): siRNA sense strand
gaaaguacagaaugagaaa

SEQ ID NO: 149316 - RNA, 19 nt, Homo sapiens
  misc_RNA (1)...(19): siRNA sense strand
gaauuggaaggaaagauua

SEQ ID NO: 149317 - RNA, 19 nt, Homo sapiens
  misc_RNA (1)...(19): siRNA sense strand
auacaaggcuacaauggua

SEQ ID NO: 149318 - RNA, 19 nt, Homo sapiens
  misc_RNA (1)...(19): siRNA sense strand
gaacagcagagaagaauca

SEQ ID NO: 149319 - RNA, 19 nt, Homo sapiens
  misc_RNA (1)...(19): siRNA sense strand
acacucaaaugaugccuua

SEQ ID NO: 149320 - RNA, 19 nt, Homo sapiens
  misc_RNA (1)...(19): siRNA sense strand
aaacgugaaugaacugaaa

SEQ ID NO: 149321 - RNA, 19 nt, Homo sapiens
  misc_RNA (1)...(19): siRNA sense strand
gaacauauggaaacagaga

SEQ ID NO: 149322 - RNA, 19 nt, Homo sapiens
  misc_RNA (1)...(19): siRNA sense strand
gaagagagaagacauauuc

SEQ ID NO: 149323 - RNA, 19 nt, Homo sapiens
  misc_RNA (1)...(19): siRNA sense strand
gaagacauauucuacacuu

SEQ ID NO: 149324 - RNA, 19 nt, Homo sapiens
  misc_RNA (1)...(19): siRNA sense strand
gcaaagaaacacaaacaaa

SEQ ID NO: 149325 - RNA, 19 nt, Homo sapiens
  misc_RNA (1)...(19): siRNA sense strand
gauauguugucauggauuu

SEQ ID NO: 149326 - RNA, 19 nt, Homo sapiens
  misc_RNA (1)...(19): siRNA sense strand
ggacuauguugaccucuau

SEQ ID NO: 149327 - RNA, 19 nt, Homo sapiens
  misc_RNA (1)...(19): siRNA sense strand
gcaaacugcuggauuucug

SEQ ID NO: 149328 - RNA, 19 nt, Homo sapiens
  misc_RNA (1)...(19): siRNA sense strand
gcuaaaugauggucacuuc

SEQ ID NO: 149329 - RNA, 19 nt, Homo sapiens
  misc_RNA (1)...(19): siRNA sense strand
gcaaccagguagaauguca

SEQ ID NO: 149330 - RNA, 19 nt, Homo sapiens
  misc_RNA (1)...(19): siRNA sense strand
gauaugaaaguucuagaug

SEQ ID NO: 149331 - RNA, 19 nt, Homo sapiens
  misc_RNA (1)...(19): siRNA sense strand
cuguagaggucaccaaauu

SEQ ID NO: 149332 - RNA, 19 nt, Homo sapiens
  misc_RNA (1)...(19): siRNA sense strand
gagagaacauccagguuuu

SEQ ID NO: 149333 - RNA, 19 nt, Homo sapiens
  misc_RNA (1)...(19): siRNA sense strand
gguagaaugucauccuuac

SEQ ID NO: 149334 - RNA, 19 nt, Homo sapiens
  misc_RNA (1)...(19): siRNA sense strand
caaagaaacacaaacaaac

SEQ ID NO: 149335 - RNA, 19 nt, Homo sapiens
  misc_RNA (1)...(19): siRNA sense strand
guguaaggaugcaggauug

SEQ ID NO: 149336 - RNA, 19 nt, Homo sapiens
  misc_RNA (1)...(19): siRNA sense strand
caucagaggauaugaaagu

SEQ ID NO: 149337 - RNA, 19 nt, Homo sapiens
  misc_RNA (1)...(19): siRNA sense strand
ggucuaaacagaaauuauc

SEQ ID NO: 149338 - RNA, 19 nt, Homo sapiens
  misc_RNA (1)...(19): siRNA sense strand
ggucaccaaauuagcaaua

SEQ ID NO: 149339 - RNA, 19 nt, Homo sapiens
  misc_RNA (1)...(19): siRNA sense strand
gacaucagaggauaugaaa

SEQ ID NO: 149340 - RNA, 19 nt, Homo sapiens
  misc_RNA (1)...(19): siRNA sense strand
agagagaacauccagguuu

SEQ ID NO: 149341 - RNA, 19 nt, Homo sapiens
  misc_RNA (1)...(19): siRNA sense strand
caaauuagcaauagaagcu

SEQ ID NO: 149342 - RNA, 19 nt, Homo sapiens
  misc_RNA (1)...(19): siRNA sense strand
gagcagcggaucagagaga

SEQ ID NO: 149343 - RNA, 19 nt, Homo sapiens
  misc_RNA (1)...(19): siRNA sense strand
cagaggauaugaaaguucu

SEQ ID NO: 149344 - RNA, 19 nt, Homo sapiens
  misc_RNA (1)...(19): siRNA sense strand
guagaggucaccaaauuag

SEQ ID NO: 149345 - RNA, 19 nt, Homo sapiens
  misc_RNA (1)...(19): siRNA sense strand
caacaagccaggacucaag

SEQ ID NO: 149346 - RNA, 19 nt, Homo sapiens
  misc_RNA (1)...(19): siRNA sense strand
gacauauucuacacuucaa

SEQ ID NO: 149347 - RNA, 19 nt, Homo sapiens
  misc_RNA (1)...(19): siRNA sense strand
uaugaaaguucuagauggu

SEQ ID NO: 149348 - RNA, 19 nt, Homo sapiens
  misc_RNA (1)...(19): siRNA sense strand
ccaaauaucagcguguaga

SEQ ID NO: 149349 - RNA, 19 nt, Homo sapiens
  misc_RNA (1)...(19): siRNA sense strand
ucaccaaauuagcaauaga

SEQ ID NO: 149350 - RNA, 19 nt, Homo sapiens
  misc_RNA (1)...(19): siRNA sense strand
ggaggacccaguucuuugu

SEQ ID NO: 149351 - RNA, 19 nt, Homo sapiens
  misc_RNA (1)...(19): siRNA sense strand
uguagaggucaccaaauua

SEQ ID NO: 149352 - RNA, 19 nt, Homo sapiens
  misc_RNA (1)...(19): siRNA sense strand
ggaccauccugauuaucca

SEQ ID NO: 149353 - RNA, 19 nt, Homo sapiens
  misc_RNA (1)...(19): siRNA sense strand
ggauaugaaaguucuagau

SEQ ID NO: 149354 - RNA, 19 nt, Homo sapiens
  misc_RNA (1)...(19): siRNA sense strand
caguugacaucagaggaua

SEQ ID NO: 149355 - RNA, 19 nt, Homo sapiens
  misc_RNA (1)...(19): siRNA sense strand
ggacuggccauccgaagca

SEQ ID NO: 149356 - RNA, 19 nt, Homo sapiens
  misc_RNA (1)...(19): siRNA sense strand
guugaccucuaucuucuuc

SEQ ID NO: 149357 - RNA, 19 nt, Homo sapiens
  misc_RNA (1)...(19): siRNA sense strand
gauggucuaaacagaaauu

SEQ ID NO: 149358 - RNA, 19 nt, Homo sapiens
  misc_RNA (1)...(19): siRNA sense strand
gggaggucauggagaagug

SEQ ID NO: 149359 - RNA, 19 nt, Homo sapiens
  misc_RNA (1)...(19): siRNA sense strand
ugacaucagaggauaugaa

SEQ ID NO: 149360 - RNA, 19 nt, Homo sapiens
  misc_RNA (1)...(19): siRNA sense strand
uagcaaagaaacacaaaca

SEQ ID NO: 149361 - RNA, 19 nt, Homo sapiens
  misc_RNA (1)...(19): siRNA sense strand
agacauauucuacacuuca

SEQ ID NO: 149362 - RNA, 19 nt, Homo sapiens
  misc_RNA (1)...(19): siRNA sense strand
ccauccugauuauccauuu

SEQ ID NO: 149363 - RNA, 19 nt, Homo sapiens
  misc_RNA (1)...(19): siRNA sense strand
cagguagaaugucauccuu

SEQ ID NO: 149364 - RNA, 19 nt, Homo sapiens
  misc_RNA (1)...(19): siRNA sense strand
agccaggacucaaguacaa

SEQ ID NO: 149365 - RNA, 19 nt, Homo sapiens
  misc_RNA (1)...(19): siRNA sense strand
uuggaaagcucacugaaaa

SEQ ID NO: 149366 - RNA, 19 nt, Homo sapiens
  misc_RNA (1)...(19): siRNA sense strand
gaacccaacgacauaaacu

SEQ ID NO: 149367 - RNA, 19 nt, Homo sapiens
  misc_RNA (1)...(19): siRNA sense strand
caccaaauuagcaauagaa

SEQ ID NO: 149368 - RNA, 19 nt, Homo sapiens
  misc_RNA (1)...(19): siRNA sense strand
ucccaaauaucagcgugua

SEQ ID NO: 149369 - RNA, 19 nt, Homo sapiens
  misc_RNA (1)...(19): siRNA sense strand
ggagaaguguaaggaugca

SEQ ID NO: 149370 - RNA, 19 nt, Homo sapiens
  misc_RNA (1)...(19): siRNA sense strand
ggugagacgccacuaccaa

SEQ ID NO: 149371 - RNA, 19 nt, Homo sapiens
  misc_RNA (1)...(19): siRNA sense strand
uggacuauguugaccucua

SEQ ID NO: 149372 - RNA, 19 nt, Homo sapiens
  misc_RNA (1)...(19): siRNA sense strand
gugagacgccacuaccaaa

SEQ ID NO: 149373 - RNA, 19 nt, Homo sapiens
  misc_RNA (1)...(19): siRNA sense strand
accucuaucuucuucauuu

SEQ ID NO: 149374 - RNA, 19 nt, Homo sapiens
  misc_RNA (1)...(19): siRNA sense strand
gauuauccauuuucagaug

SEQ ID NO: 149375 - RNA, 19 nt, Homo sapiens
  misc_RNA (1)...(19): siRNA sense strand
gaauuccaguugacaucag

SEQ ID NO: 149376 - RNA, 19 nt, Homo sapiens
  misc_RNA (1)...(19): siRNA sense strand
caaccagccuuggaaagcu

SEQ ID NO: 149377 - RNA, 19 nt, Homo sapiens
  misc_RNA (1)...(19): siRNA sense strand
uuaucgauauguugucaug

SEQ ID NO: 149378 - RNA, 19 nt, Homo sapiens
  misc_RNA (1)...(19): siRNA sense strand
gggaacccaacgacauaaa

SEQ ID NO: 149379 - RNA, 19 nt, Homo sapiens
  misc_RNA (1)...(19): siRNA sense strand
uauguugaccucuaucuuc

SEQ ID NO: 149380 - RNA, 19 nt, Homo sapiens
  misc_RNA (1)...(19): siRNA sense strand
auucuacacuucaaagcuu

SEQ ID NO: 149381 - RNA, 19 nt, Homo sapiens
  misc_RNA (1)...(19): siRNA sense strand
uggccaagagcuacaauga

SEQ ID NO: 149382 - RNA, 19 nt, Homo sapiens
  misc_RNA (1)...(19): siRNA sense strand
gugaagagagaagacauau

SEQ ID NO: 149383 - RNA, 19 nt, Homo sapiens
  misc_RNA (1)...(19): siRNA sense strand
ugaccucuaucuucuucau

SEQ ID NO: 149384 - RNA, 19 nt, Homo sapiens
  misc_RNA (1)...(19): siRNA sense strand
ucacuucaugcccguauug

SEQ ID NO: 149385 - RNA, 19 nt, Homo sapiens
  misc_RNA (1)...(19): siRNA sense strand
ugucauggauuuucuuaug

SEQ ID NO: 149386 - RNA, 19 nt, Homo sapiens
  misc_RNA (1)...(19): siRNA sense strand
aacuucaacuggacuaugu

SEQ ID NO: 149387 - RNA, 19 nt, Homo sapiens
  misc_RNA (1)...(19): siRNA sense strand
ugaagagagaagacauauu

SEQ ID NO: 149388 - RNA, 19 nt, Homo sapiens
  misc_RNA (1)...(19): siRNA sense strand
cccaguucuuugugccuua

SEQ ID NO: 149389 - RNA, 19 nt, Homo sapiens
  misc_RNA (1)...(19): siRNA sense strand
gaugcaggauuggccaagu

SEQ ID NO: 149390 - RNA, 19 nt, Homo sapiens
  misc_RNA (1)...(19): siRNA sense strand
gaggucaccaaauuagcaa

SEQ ID NO: 149391 - RNA, 19 nt, Homo sapiens
  misc_RNA (1)...(19): siRNA sense strand
gcuuuggugcacuuucuuu

SEQ ID NO: 149392 - RNA, 19 nt, Homo sapiens
  misc_RNA (1)...(19): siRNA sense strand
gaggauaugaaaguucuag

SEQ ID NO: 149393 - RNA, 19 nt, Homo sapiens
  misc_RNA (1)...(19): siRNA sense strand
cgacacaguggaucucucu

SEQ ID NO: 149394 - RNA, 19 nt, Homo sapiens
  misc_RNA (1)...(19): siRNA sense strand
ccucuaucuucuucauuuc

SEQ ID NO: 149395 - RNA, 19 nt, Homo sapiens
  misc_RNA (1)...(19): siRNA sense strand
uuggugcacuuucuuucaa

SEQ ID NO: 149396 - RNA, 19 nt, Homo sapiens
  misc_RNA (1)...(19): siRNA sense strand
aaaagacauuguucugguu

SEQ ID NO: 149397 - RNA, 19 nt, Homo sapiens
  misc_RNA (1)...(19): siRNA sense strand
ccaguugacaucagaggau

SEQ ID NO: 149398 - RNA, 19 nt, Homo sapiens
  misc_RNA (1)...(19): siRNA sense strand
ggaacccaacgacauaaac

SEQ ID NO: 149399 - RNA, 19 nt, Homo sapiens
  misc_RNA (1)...(19): siRNA sense strand
cuuggaaagcucacugaaa

SEQ ID NO: 149400 - RNA, 19 nt, Homo sapiens
  misc_RNA (1)...(19): siRNA sense strand
uggaggacccaguucuuug

SEQ ID NO: 149401 - RNA, 19 nt, Homo sapiens
  misc_RNA (1)...(19): siRNA sense strand
aguacaagccugucugcaa

SEQ ID NO: 149402 - RNA, 19 nt, Homo sapiens
  misc_RNA (1)...(19): siRNA sense strand
gaggucauggagaagugua

SEQ ID NO: 149403 - RNA, 19 nt, Homo sapiens
  misc_RNA (1)...(19): siRNA sense strand
aagcuuuggugcacuuucu

SEQ ID NO: 149404 - RNA, 19 nt, Homo sapiens
  misc_RNA (1)...(19): siRNA sense strand
ggaaagagcuggacagaaa

SEQ ID NO: 149405 - RNA, 19 nt, Homo sapiens
  misc_RNA (1)...(19): siRNA sense strand
gaagauagcugagaaauuc

SEQ ID NO: 149406 - RNA, 19 nt, Homo sapiens
  misc_RNA (1)...(19): siRNA sense strand
gaagcuagguuucaagaua

SEQ ID NO: 149407 - RNA, 19 nt, Homo sapiens
  misc_RNA (1)...(19): siRNA sense strand
gagaagaaauaaaggguua

SEQ ID NO: 149408 - RNA, 19 nt, Homo sapiens
  misc_RNA (1)...(19): siRNA sense strand
gaaguaagauuguuaagag

SEQ ID NO: 149409 - RNA, 19 nt, Homo sapiens
  misc_RNA (1)...(19): siRNA sense strand
ggaagaaccugaauaugga

SEQ ID NO: 149410 - RNA, 19 nt, Homo sapiens
  misc_RNA (1)...(19): siRNA sense strand
ggacagggcugaccagaca

SEQ ID NO: 149411 - RNA, 19 nt, Homo sapiens
  misc_RNA (1)...(19): siRNA sense strand
gaagagacaacaugaauga

SEQ ID NO: 149412 - RNA, 19 nt, Homo sapiens
  misc_RNA (1)...(19): siRNA sense strand
caauauagcucccaucaca

SEQ ID NO: 149413 - RNA, 19 nt, Homo sapiens
  misc_RNA (1)...(19): siRNA sense strand
ggacagaaauuaucucaac

SEQ ID NO: 149414 - RNA, 19 nt, Homo sapiens
  misc_RNA (1)...(19): siRNA sense strand
gaagaagucagcugaguuu

SEQ ID NO: 149415 - RNA, 19 nt, Homo sapiens
  misc_RNA (1)...(19): siRNA sense strand
gaaagaagagacaacauga

SEQ ID NO: 149416 - RNA, 19 nt, Homo sapiens
  misc_RNA (1)...(19): siRNA sense strand
gaaccacaaugaaggaaug

SEQ ID NO: 149417 - RNA, 19 nt, Homo sapiens
  misc_RNA (1)...(19): siRNA sense strand
gaagauagcagugaagaga

SEQ ID NO: 149418 - RNA, 19 nt, Homo sapiens
  misc_RNA (1)...(19): siRNA sense strand
cuacagggcuucagaggaa

SEQ ID NO: 149419 - RNA, 19 nt, Homo sapiens
  misc_RNA (1)...(19): siRNA sense strand
ggaagaaucugaggaaggu

SEQ ID NO: 149420 - RNA, 19 nt, Homo sapiens
  misc_RNA (1)...(19): siRNA sense strand
gaaaagacgucaaagacaa

SEQ ID NO: 149421 - RNA, 19 nt, Homo sapiens
  misc_RNA (1)...(19): siRNA sense strand
ccaagucucugaagaagug

SEQ ID NO: 149422 - RNA, 19 nt, Homo sapiens
  misc_RNA (1)...(19): siRNA sense strand
ggaggaaucugaggaguca

SEQ ID NO: 149423 - RNA, 19 nt, Homo sapiens
  misc_RNA (1)...(19): siRNA sense strand
aaacuuggcugcaauggau

SEQ ID NO: 149424 - RNA, 19 nt, Homo sapiens
  misc_RNA (1)...(19): siRNA sense strand
ggaggaagcuagguuucaa

SEQ ID NO: 149425 - RNA, 19 nt, Homo sapiens
  misc_RNA (1)...(19): siRNA sense strand
ucaaaugccuugucgaagu

SEQ ID NO: 149426 - RNA, 19 nt, Homo sapiens
  misc_RNA (1)...(19): siRNA sense strand
gagacaacaugaaugacaa

SEQ ID NO: 149427 - RNA, 19 nt, Homo sapiens
  misc_RNA (1)...(19): siRNA sense strand
uaagauggcacauggauau

SEQ ID NO: 149428 - RNA, 19 nt, Homo sapiens
  misc_RNA (1)...(19): siRNA sense strand
caacuacggugaggaagga

SEQ ID NO: 149429 - RNA, 19 nt, Homo sapiens
  misc_RNA (1)...(19): siRNA sense strand
aaaaugagcugaccuugaa

SEQ ID NO: 149430 - RNA, 19 nt, Homo sapiens
  misc_RNA (1)...(19): siRNA sense strand
aagcuagguuucaagauaa

SEQ ID NO: 149431 - RNA, 19 nt, Homo sapiens
  misc_RNA (1)...(19): siRNA sense strand
gugacucgcugcaucauug

SEQ ID NO: 149432 - RNA, 19 nt, Homo sapiens
  misc_RNA (1)...(19): siRNA sense strand
ggaaagggacgccaucaca

SEQ ID NO: 149433 - RNA, 19 nt, Homo sapiens
  misc_RNA (1)...(19): siRNA sense strand
gaagucagcugaguuucca

SEQ ID NO: 149434 - RNA, 19 nt, Homo sapiens
  misc_RNA (1)...(19): siRNA sense strand
gcacauggauauggugaag

SEQ ID NO: 149435 - RNA, 19 nt, Homo sapiens
  misc_RNA (1)...(19): siRNA sense strand
ccacgugccuauuucaugu

SEQ ID NO: 149436 - RNA, 19 nt, Homo sapiens
  misc_RNA (1)...(19): siRNA sense strand
gaagugaagacacgccauu

SEQ ID NO: 149437 - RNA, 19 nt, Homo sapiens
  misc_RNA (1)...(19): siRNA sense strand
gaagagaaacaccuugaag

SEQ ID NO: 149438 - RNA, 19 nt, Homo sapiens
  misc_RNA (1)...(19): siRNA sense strand
uaacaggaaccacaaugaa

SEQ ID NO: 149439 - RNA, 19 nt, Homo sapiens
  misc_RNA (1)...(19): siRNA sense strand
ggaagaagucagcugaguu

SEQ ID NO: 149440 - RNA, 19 nt, Homo sapiens
  misc_RNA (1)...(19): siRNA sense strand
gagcagccauuuugaaaga

SEQ ID NO: 149441 - RNA, 19 nt, Homo sapiens
  misc_RNA (1)...(19): siRNA sense strand
cagcugaguuuccagacuu

SEQ ID NO: 149442 - RNA, 19 nt, Homo sapiens
  misc_RNA (1)...(19): siRNA sense strand
caaaugccuugucgaaguc

SEQ ID NO: 149443 - RNA, 19 nt, Homo sapiens
  misc_RNA (1)...(19): siRNA sense strand
acauggauauggugaagaa

SEQ ID NO: 149444 - RNA, 19 nt, Homo sapiens
  misc_RNA (1)...(19): siRNA sense strand
agauagcagugaagagaaa

SEQ ID NO: 149445 - RNA, 19 nt, Homo sapiens
  misc_RNA (1)...(19): siRNA sense strand
ggagccacgugccuauuuc

SEQ ID NO: 149446 - RNA, 19 nt, Homo sapiens
  misc_RNA (1)...(19): siRNA sense strand
gauaagauggcacauggau

SEQ ID NO: 149447 - RNA, 19 nt, Homo sapiens
  misc_RNA (1)...(19): siRNA sense strand
uacagaagauagcugagaa

SEQ ID NO: 149448 - RNA, 19 nt, Homo sapiens
  misc_RNA (1)...(19): siRNA sense strand
ugaaagaagagacaacaug

SEQ ID NO: 149449 - RNA, 19 nt, Homo sapiens
  misc_RNA (1)...(19): siRNA sense strand
gcaaggaggcauccacaag

SEQ ID NO: 149450 - RNA, 19 nt, Homo sapiens
  misc_RNA (1)...(19): siRNA sense strand
gacaaagagacaacugaaa

SEQ ID NO: 149451 - RNA, 19 nt, Homo sapiens
  misc_RNA (1)...(19): siRNA sense strand
gugccuauuucaugucuga

SEQ ID NO: 149452 - RNA, 19 nt, Homo sapiens
  misc_RNA (1)...(19): siRNA sense strand
gauaacaggaaccacaaug

SEQ ID NO: 149453 - RNA, 19 nt, Homo sapiens
  misc_RNA (1)...(19): siRNA sense strand
ugaggaaggugaggaagau

SEQ ID NO: 149454 - RNA, 19 nt, Homo sapiens
  misc_RNA (1)...(19): siRNA sense strand
uggaccagcuccuucacua

SEQ ID NO: 149455 - RNA, 19 nt, Homo sapiens
  misc_RNA (1)...(19): siRNA sense strand
gaaaaugagcugaccuuga

SEQ ID NO: 149456 - RNA, 19 nt, Homo sapiens
  misc_RNA (1)...(19): siRNA sense strand
gaaagagcuggacagaaau

SEQ ID NO: 149457 - RNA, 19 nt, Homo sapiens
  misc_RNA (1)...(19): siRNA sense strand
gaagaaagugaggaagaga

SEQ ID NO: 149458 - RNA, 19 nt, Homo sapiens
  misc_RNA (1)...(19): siRNA sense strand
ugaagacacgccauucuga

SEQ ID NO: 149459 - RNA, 19 nt, Homo sapiens
  misc_RNA (1)...(19): siRNA sense strand
gcaauggauuuggaacuac

SEQ ID NO: 149460 - RNA, 19 nt, Homo sapiens
  misc_RNA (1)...(19): siRNA sense strand
cagaaauuaucucaacuac

SEQ ID NO: 149461 - RNA, 19 nt, Homo sapiens
  misc_RNA (1)...(19): siRNA sense strand
agaggaagaaccugaauau

SEQ ID NO: 149462 - RNA, 19 nt, Homo sapiens
  misc_RNA (1)...(19): siRNA sense strand
gaagccaggaagaaucuga

SEQ ID NO: 149463 - RNA, 19 nt, Homo sapiens
  misc_RNA (1)...(19): siRNA sense strand
ugcaauggauuuggaacua

SEQ ID NO: 149464 - RNA, 19 nt, Homo sapiens
  misc_RNA (1)...(19): siRNA sense strand
gaaaagaggaagagauuag

SEQ ID NO: 149465 - RNA, 19 nt, Homo sapiens
  misc_RNA (1)...(19): siRNA sense strand
gggagccacgugccuauuu

SEQ ID NO: 149466 - RNA, 19 nt, Homo sapiens
  misc_RNA (1)...(19): siRNA sense strand
ccaggaagaaucugaggaa

SEQ ID NO: 149467 - RNA, 19 nt, Homo sapiens
  misc_RNA (1)...(19): siRNA sense strand
gaaaagagggaccaccauu

SEQ ID NO: 149468 - RNA, 19 nt, Homo sapiens
  misc_RNA (1)...(19): siRNA sense strand
gagcuggacagaaauuauc

SEQ ID NO: 149469 - RNA, 19 nt, Homo sapiens
  misc_RNA (1)...(19): siRNA sense strand
aaagagggaccaccauuca

SEQ ID NO: 149470 - RNA, 19 nt, Homo sapiens
  misc_RNA (1)...(19): siRNA sense strand
ggagggagagaacuaucaa

SEQ ID NO: 149471 - RNA, 19 nt, Homo sapiens
  misc_RNA (1)...(19): siRNA sense strand
caauggauuuggaacuaca

SEQ ID NO: 149472 - RNA, 19 nt, Homo sapiens
  misc_RNA (1)...(19): siRNA sense strand
ugaagaaagugaggaagag

SEQ ID NO: 149473 - RNA, 19 nt, Homo sapiens
  misc_RNA (1)...(19): siRNA sense strand
gagaaacuaccccagcuua

SEQ ID NO: 149474 - RNA, 19 nt, Homo sapiens
  misc_RNA (1)...(19): siRNA sense strand
gaaccugaauauggagaag

SEQ ID NO: 149475 - RNA, 19 nt, Homo sapiens
  misc_RNA (1)...(19): siRNA sense strand
cagaggaagaaccugaaua

SEQ ID NO: 149476 - RNA, 19 nt, Homo sapiens
  misc_RNA (1)...(19): siRNA sense strand
ggacauccaaggcccaaca

SEQ ID NO: 149477 - RNA, 19 nt, Homo sapiens
  misc_RNA (1)...(19): siRNA sense strand
gugaagaaagugaggaaga

SEQ ID NO: 149478 - RNA, 19 nt, Homo sapiens
  misc_RNA (1)...(19): siRNA sense strand
gauauggugaagaaaguga

SEQ ID NO: 149479 - RNA, 19 nt, Homo sapiens
  misc_RNA (1)...(19): siRNA sense strand
gauggcacauggauauggu

SEQ ID NO: 149480 - RNA, 19 nt, Homo sapiens
  misc_RNA (1)...(19): siRNA sense strand
uuuccagacuucuaugauu

SEQ ID NO: 149481 - RNA, 19 nt, Homo sapiens
  misc_RNA (1)...(19): siRNA sense strand
aagaagagacaacaugaau

SEQ ID NO: 149482 - RNA, 19 nt, Homo sapiens
  misc_RNA (1)...(19): siRNA sense strand
gugaagagaaacaccuuga

SEQ ID NO: 149483 - RNA, 19 nt, Homo sapiens
  misc_RNA (1)...(19): siRNA sense strand
aggaagaaccugaauaugg

SEQ ID NO: 149484 - RNA, 19 nt, Homo sapiens
  misc_RNA (1)...(19): siRNA sense strand
cagccaagucucugaagaa

SEQ ID NO: 149485 - RNA, 19 nt, Homo sapiens
  misc_RNA (1)...(19): siRNA sense strand
ucucaaaugccuugucgaa

SEQ ID NO: 149486 - RNA, 19 nt, Homo sapiens
  misc_RNA (1)...(19): siRNA sense strand
agagacaacugaaaaugaa

SEQ ID NO: 149487 - RNA, 19 nt, Homo sapiens
  misc_RNA (1)...(19): siRNA sense strand
agaagauagcugagaaauu

SEQ ID NO: 149488 - RNA, 19 nt, Homo sapiens
  misc_RNA (1)...(19): siRNA sense strand
gaccagcuccuucacuaca

SEQ ID NO: 149489 - RNA, 19 nt, Homo sapiens
  misc_RNA (1)...(19): siRNA sense strand
guuaagagacccagcugau

SEQ ID NO: 149490 - RNA, 19 nt, Homo sapiens
  misc_RNA (1)...(19): siRNA sense strand
gaagagcagccauuuugaa

SEQ ID NO: 149491 - RNA, 19 nt, Homo sapiens
  misc_RNA (1)...(19): siRNA sense strand
ggaugaggaggacaagaga

SEQ ID NO: 149492 - RNA, 19 nt, Homo sapiens
  misc_RNA (1)...(19): siRNA sense strand
agacaaagagacaacugaa

SEQ ID NO: 149493 - RNA, 19 nt, Homo sapiens
  misc_RNA (1)...(19): siRNA sense strand
aagagaaacaccuugaaga

SEQ ID NO: 149494 - RNA, 19 nt, Homo sapiens
  misc_RNA (1)...(19): siRNA sense strand
aaagggacgccaucacaga

SEQ ID NO: 149495 - RNA, 19 nt, Homo sapiens
  misc_RNA (1)...(19): siRNA sense strand
aaagaagagacaacaugaa

SEQ ID NO: 149496 - RNA, 19 nt, Homo sapiens
  misc_RNA (1)...(19): siRNA sense strand
gacagaaauuaucucaacu

SEQ ID NO: 149497 - RNA, 19 nt, Homo sapiens
  misc_RNA (1)...(19): siRNA sense strand
aaagagcuggacagaaauu

SEQ ID NO: 149498 - RNA, 19 nt, Homo sapiens
  misc_RNA (1)...(19): siRNA sense strand
gggaagauagcagugaaga

SEQ ID NO: 149499 - RNA, 19 nt, Homo sapiens
  misc_RNA (1)...(19): siRNA sense strand
gauuuggaacuacagaaga

SEQ ID NO: 149500 - RNA, 19 nt, Homo sapiens
  misc_RNA (1)...(19): siRNA sense strand
cgucaaagacaaagagaca

SEQ ID NO: 149501 - RNA, 19 nt, Homo sapiens
  misc_RNA (1)...(19): siRNA sense strand
gaauacagggcuccaagac

SEQ ID NO: 149502 - RNA, 19 nt, Homo sapiens
  misc_RNA (1)...(19): siRNA sense strand
gaggaagaaccugaauaug

SEQ ID NO: 149503 - RNA, 19 nt, Homo sapiens
  misc_RNA (1)...(19): siRNA sense strand
uggauauggugaagaaagu

SEQ ID NO: 149504 - RNA, 19 nt, Homo sapiens
  misc_RNA (1)...(19): siRNA sense strand
gcucaaaugugcaguauaa

SEQ ID NO: 149505 - RNA, 19 nt, Homo sapiens
  misc_RNA (1)...(19): siRNA sense strand
gcacacaguuucagauaaa

SEQ ID NO: 149506 - RNA, 19 nt, Homo sapiens
  misc_RNA (1)...(19): siRNA sense strand
ggacaacguugaagagauu

SEQ ID NO: 149507 - RNA, 19 nt, Homo sapiens
  misc_RNA (1)...(19): siRNA sense strand
gagcagaugucuuuaauag

SEQ ID NO: 149508 - RNA, 19 nt, Homo sapiens
  misc_RNA (1)...(19): siRNA sense strand
ggaagaaaguacuguugua

SEQ ID NO: 149509 - RNA, 19 nt, Homo sapiens
  misc_RNA (1)...(19): siRNA sense strand
caaagaaucuggacgaugu

SEQ ID NO: 149510 - RNA, 19 nt, Homo sapiens
  misc_RNA (1)...(19): siRNA sense strand
gaaagccaguuaucauauu

SEQ ID NO: 149511 - RNA, 19 nt, Homo sapiens
  misc_RNA (1)...(19): siRNA sense strand
gaaauaggauuacuuacuc

SEQ ID NO: 149512 - RNA, 19 nt, Homo sapiens
  misc_RNA (1)...(19): siRNA sense strand
caagaaggaugaaacuauu

SEQ ID NO: 149513 - RNA, 19 nt, Homo sapiens
  misc_RNA (1)...(19): siRNA sense strand
gcagaugucuuuaauagca

SEQ ID NO: 149514 - RNA, 19 nt, Homo sapiens
  misc_RNA (1)...(19): siRNA sense strand
gaggaaacaugcucaaaug

SEQ ID NO: 149515 - RNA, 19 nt, Homo sapiens
  misc_RNA (1)...(19): siRNA sense strand
gaaggcaggagguuuaaua

SEQ ID NO: 149516 - RNA, 19 nt, Homo sapiens
  misc_RNA (1)...(19): siRNA sense strand
ggcaggagguuuaauauug

SEQ ID NO: 149517 - RNA, 19 nt, Homo sapiens
  misc_RNA (1)...(19): siRNA sense strand
gcaggagguuuaauauuga

SEQ ID NO: 149518 - RNA, 19 nt, Homo sapiens
  misc_RNA (1)...(19): siRNA sense strand
gaaggacaccuaucuggua

SEQ ID NO: 149519 - RNA, 19 nt, Homo sapiens
  misc_RNA (1)...(19): siRNA sense strand
acaccuaucugguacauuu

SEQ ID NO: 149520 - RNA, 19 nt, Homo sapiens
  misc_RNA (1)...(19): siRNA sense strand
gcaaggaacucaccauggu

SEQ ID NO: 149521 - RNA, 19 nt, Homo sapiens
  misc_RNA (1)...(19): siRNA sense strand
caagcaagcugaaacacuu

SEQ ID NO: 149522 - RNA, 19 nt, Homo sapiens
  misc_RNA (1)...(19): siRNA sense strand
gcaagaaggaugaaacuau

SEQ ID NO: 149523 - RNA, 19 nt, Homo sapiens
  misc_RNA (1)...(19): siRNA sense strand
gaaaugagcaugcugucaa

SEQ ID NO: 149524 - RNA, 19 nt, Homo sapiens
  misc_RNA (1)...(19): siRNA sense strand
gccaggagcuugugcugua

SEQ ID NO: 149525 - RNA, 19 nt, Homo sapiens
  misc_RNA (1)...(19): siRNA sense strand
gaagaaagccaguuaucau

SEQ ID NO: 149526 - RNA, 19 nt, Homo sapiens
  misc_RNA (1)...(19): siRNA sense strand
gaaaagaggaugcuaauga

SEQ ID NO: 149527 - RNA, 19 nt, Homo sapiens
  misc_RNA (1)...(19): siRNA sense strand
ucucaaggauugcuaauug

SEQ ID NO: 149528 - RNA, 19 nt, Homo sapiens
  misc_RNA (1)...(19): siRNA sense strand
gcagaucucuagggcagua

SEQ ID NO: 149529 - RNA, 19 nt, Homo sapiens
  misc_RNA (1)...(19): siRNA sense strand
acagaucagucuauacuaa

SEQ ID NO: 149530 - RNA, 19 nt, Homo sapiens
  misc_RNA (1)...(19): siRNA sense strand
ggucaaagaauaaaugcua

SEQ ID NO: 149531 - RNA, 19 nt, Homo sapiens
  misc_RNA (1)...(19): siRNA sense strand
aaucagauguuagucguua

SEQ ID NO: 149532 - RNA, 19 nt, Homo sapiens
  misc_RNA (1)...(19): siRNA sense strand
ucacuaggauucuugcauu

SEQ ID NO: 149533 - RNA, 19 nt, Homo sapiens
  misc_RNA (1)...(19): siRNA sense strand
aaagaaggcaggagguuua

SEQ ID NO: 149534 - RNA, 19 nt, Homo sapiens
  misc_RNA (1)...(19): siRNA sense strand
ucacugaaguucuggauuc

SEQ ID NO: 149535 - RNA, 19 nt, Homo sapiens
  misc_RNA (1)...(19): siRNA sense strand
auacagagauuucacuaga

SEQ ID NO: 149536 - RNA, 19 nt, Homo sapiens
  misc_RNA (1)...(19): siRNA sense strand
ggaagacaguuaccuuucu

SEQ ID NO: 149537 - RNA, 19 nt, Homo sapiens
  misc_RNA (1)...(19): siRNA sense strand
gggcaguacucauuacaga

SEQ ID NO: 149538 - RNA, 19 nt, Homo sapiens
  misc_RNA (1)...(19): siRNA sense strand
agaaguaacugauguagag

SEQ ID NO: 149539 - RNA, 19 nt, Homo sapiens
  misc_RNA (1)...(19): siRNA sense strand
caggagaucuuuccaacug

SEQ ID NO: 149540 - RNA, 19 nt, Homo sapiens
  misc_RNA (1)...(19): siRNA sense strand
uagaaucaguggugaagaa

SEQ ID NO: 149541 - RNA, 19 nt, Homo sapiens
  misc_RNA (1)...(19): siRNA sense strand
gcagcugcauguucaagaa

SEQ ID NO: 149542 - RNA, 19 nt, Homo sapiens
  misc_RNA (1)...(19): siRNA sense strand
gaagaaaguacuguuguau

SEQ ID NO: 149543 - RNA, 19 nt, Homo sapiens
  misc_RNA (1)...(19): siRNA sense strand
ggagaucuuuccaacugaa

SEQ ID NO: 149544 - RNA, 19 nt, Homo sapiens
  misc_RNA (1)...(19): siRNA sense strand
aaucaguggugaagaaauu

SEQ ID NO: 149545 - RNA, 19 nt, Homo sapiens
  misc_RNA (1)...(19): siRNA sense strand
gguggaaucuauugucuuc

SEQ ID NO: 149546 - RNA, 19 nt, Homo sapiens
  misc_RNA (1)...(19): siRNA sense strand
gaaaagugauacagagauu

SEQ ID NO: 149547 - RNA, 19 nt, Homo sapiens
  misc_RNA (1)...(19): siRNA sense strand
gaacucaccaugguugaaa

SEQ ID NO: 149548 - RNA, 19 nt, Homo sapiens
  misc_RNA (1)...(19): siRNA sense strand
gaagacaguuaccuuucug

SEQ ID NO: 149549 - RNA, 19 nt, Homo sapiens
  misc_RNA (1)...(19): siRNA sense strand
uaaggccgaugaaccaauu

SEQ ID NO: 149550 - RNA, 19 nt, Homo sapiens
  misc_RNA (1)...(19): siRNA sense strand
gaaauuauucacuccguau

SEQ ID NO: 149551 - RNA, 19 nt, Homo sapiens
  misc_RNA (1)...(19): siRNA sense strand
ggacagguuugcccgaauc

SEQ ID NO: 149552 - RNA, 19 nt, Homo sapiens
  misc_RNA (1)...(19): siRNA sense strand
gcacucaauugcaaugaca

SEQ ID NO: 149553 - RNA, 19 nt, Homo sapiens
  misc_RNA (1)...(19): siRNA sense strand
ggaaggaaagguagaacaa

SEQ ID NO: 149554 - RNA, 19 nt, Homo sapiens
  misc_RNA (1)...(19): siRNA sense strand
uaacugauguagaggaauc

SEQ ID NO: 149555 - RNA, 19 nt, Homo sapiens
  misc_RNA (1)...(19): siRNA sense strand
gagaagacuuagaaucagu

SEQ ID NO: 149556 - RNA, 19 nt, Homo sapiens
  misc_RNA (1)...(19): siRNA sense strand
cagagcagaugucuuuaau

SEQ ID NO: 149557 - RNA, 19 nt, Homo sapiens
  misc_RNA (1)...(19): siRNA sense strand
gcuguauucucaaggauug

SEQ ID NO: 149558 - RNA, 19 nt, Homo sapiens
  misc_RNA (1)...(19): siRNA sense strand
agcagaagcucguauaaug

SEQ ID NO: 149559 - RNA, 19 nt, Homo sapiens
  misc_RNA (1)...(19): siRNA sense strand
agaggaugcuaaugaaauu

SEQ ID NO: 149560 - RNA, 19 nt, Homo sapiens
  misc_RNA (1)...(19): siRNA sense strand
agaaaguacuguuguaugg

SEQ ID NO: 149561 - RNA, 19 nt, Homo sapiens
  misc_RNA (1)...(19): siRNA sense strand
gcaauuauagaucacuuug

SEQ ID NO: 149562 - RNA, 19 nt, Homo sapiens
  misc_RNA (1)...(19): siRNA sense strand
caauugcaaugacaucaga

SEQ ID NO: 149563 - RNA, 19 nt, Homo sapiens
  misc_RNA (1)...(19): siRNA sense strand
gaaccaauuagaaauagga

SEQ ID NO: 149564 - RNA, 19 nt, Homo sapiens
  misc_RNA (1)...(19): siRNA sense strand
gcgacgaaaugccugcaaa

SEQ ID NO: 149565 - RNA, 19 nt, Homo sapiens
  misc_RNA (1)...(19): siRNA sense strand
ucuauugucuucgucauaa

SEQ ID NO: 149566 - RNA, 19 nt, Homo sapiens
  misc_RNA (1)...(19): siRNA sense strand
aagaaagccaguuaucaua

SEQ ID NO: 149567 - RNA, 19 nt, Homo sapiens
  misc_RNA (1)...(19): siRNA sense strand
cauuacagaucagucuaua

SEQ ID NO: 149568 - RNA, 19 nt, Homo sapiens
  misc_RNA (1)...(19): siRNA sense strand
ugaaagcaaaucuacagua

SEQ ID NO: 149569 - RNA, 19 nt, Homo sapiens
  misc_RNA (1)...(19): siRNA sense strand
gaaaaguauuguggagaua

SEQ ID NO: 149570 - RNA, 19 nt, Homo sapiens
  misc_RNA (1)...(19): siRNA sense strand
uauaauggcuugccuucca

SEQ ID NO: 149571 - RNA, 19 nt, Homo sapiens
  misc_RNA (1)...(19): siRNA sense strand
aaacuuguaugcacacagu

SEQ ID NO: 149572 - RNA, 19 nt, Homo sapiens
  misc_RNA (1)...(19): siRNA sense strand
aagagaagacuuagaauca

SEQ ID NO: 149573 - RNA, 19 nt, Homo sapiens
  misc_RNA (1)...(19): siRNA sense strand
cggacaaucuucccacaga

SEQ ID NO: 149574 - RNA, 19 nt, Homo sapiens
  misc_RNA (1)...(19): siRNA sense strand
uacaauagauggucuuaac

SEQ ID NO: 149575 - RNA, 19 nt, Homo sapiens
  misc_RNA (1)...(19): siRNA sense strand
ucagaaucaucuugcacua

SEQ ID NO: 149576 - RNA, 19 nt, Homo sapiens
  misc_RNA (1)...(19): siRNA sense strand
gauguuagucguuauguag

SEQ ID NO: 149577 - RNA, 19 nt, Homo sapiens
  misc_RNA (1)...(19): siRNA sense strand
gagauaaagaugaaagcaa

SEQ ID NO: 149578 - RNA, 19 nt, Homo sapiens
  misc_RNA (1)...(19): siRNA sense strand
gcaaaacacacucagaaaa

SEQ ID NO: 149579 - RNA, 19 nt, Homo sapiens
  misc_RNA (1)...(19): siRNA sense strand
uggaaccaauaauguagua

SEQ ID NO: 149580 - RNA, 19 nt, Homo sapiens
  misc_RNA (1)...(19): siRNA sense strand
caagagaagacuuagaauc

SEQ ID NO: 149581 - RNA, 19 nt, Homo sapiens
  misc_RNA (1)...(19): siRNA sense strand
aaagacagauuuagaucag

SEQ ID NO: 149582 - RNA, 19 nt, Homo sapiens
  misc_RNA (1)...(19): siRNA sense strand
agaaucaucuugcacuaca

SEQ ID NO: 149583 - RNA, 19 nt, Homo sapiens
  misc_RNA (1)...(19): siRNA sense strand
caaaacugcuguauucuca

SEQ ID NO: 149584 - RNA, 19 nt, Homo sapiens
  misc_RNA (1)...(19): siRNA sense strand
ggaaaaguauuguggagau

SEQ ID NO: 149585 - RNA, 19 nt, Homo sapiens
  misc_RNA (1)...(19): siRNA sense strand
gauuggugcucugcagaaa

SEQ ID NO: 149586 - RNA, 19 nt, Homo sapiens
  misc_RNA (1)...(19): siRNA sense strand
agaaauaaacgaggaagaa

SEQ ID NO: 149587 - RNA, 19 nt, Homo sapiens
  misc_RNA (1)...(19): siRNA sense strand
ggacaccuaucugguacau

SEQ ID NO: 149588 - RNA, 19 nt, Homo sapiens
  misc_RNA (1)...(19): siRNA sense strand
agaggguucugcauauuga

SEQ ID NO: 149589 - RNA, 19 nt, Homo sapiens
  misc_RNA (1)...(19): siRNA sense strand
cucccaaccuucaacauuu

SEQ ID NO: 149590 - RNA, 19 nt, Homo sapiens
  misc_RNA (1)...(19): siRNA sense strand
ccagagcagaugucuuuaa

SEQ ID NO: 149591 - RNA, 19 nt, Homo sapiens
  misc_RNA (1)...(19): siRNA sense strand
ggauauggaggacaacguu

SEQ ID NO: 149592 - RNA, 19 nt, Homo sapiens
  misc_RNA (1)...(19): siRNA sense strand
ccaaauccagaagacauua

SEQ ID NO: 149593 - RNA, 19 nt, Homo sapiens
  misc_RNA (1)...(19): siRNA sense strand
gaauuauguucuucaacca

SEQ ID NO: 149594 - RNA, 19 nt, Homo sapiens
  misc_RNA (1)...(19): siRNA sense strand
ggacgauguaaagcaauua

SEQ ID NO: 149595 - RNA, 19 nt, Homo sapiens
  misc_RNA (1)...(19): siRNA sense strand
uguaggaugugugcaguuu

SEQ ID NO: 149596 - RNA, 19 nt, Homo sapiens
  misc_RNA (1)...(19): siRNA sense strand
agaguuugaugugguuaua

SEQ ID NO: 149597 - RNA, 19 nt, Homo sapiens
  misc_RNA (1)...(19): siRNA sense strand
uaaagaaggcaggagguuu

SEQ ID NO: 149598 - RNA, 19 nt, Homo sapiens
  misc_RNA (1)...(19): siRNA sense strand
ccgaugaaccaauuagaaa

SEQ ID NO: 149599 - RNA, 19 nt, Homo sapiens
  misc_RNA (1)...(19): siRNA sense strand
agauggagauaaagaugaa

SEQ ID NO: 149600 - RNA, 19 nt, Homo sapiens
  misc_RNA (1)...(19): siRNA sense strand
ugucaaaacugcuguauuc

SEQ ID NO: 149601 - RNA, 19 nt, Homo sapiens
  misc_RNA (1)...(19): siRNA sense strand
ugacauguucaucuucuaa

SEQ ID NO: 149602 - RNA, 19 nt, Homo sapiens
  misc_RNA (1)...(19): siRNA sense strand
gcaguacucauuacagauc

SEQ ID NO: 149603 - RNA, 19 nt, Homo sapiens
  misc_RNA (1)...(19): siRNA sense strand
caaaugugcaguauaagca

SEQ ID NO: 149604 - RNA, 19 nt, Homo sapiens
  misc_RNA (1)...(19): siRNA sense strand
ggaaugagcgccuaggaua

SEQ ID NO: 149605 - RNA, 19 nt, Homo sapiens
  misc_RNA (1)...(19): siRNA sense strand
gaucagagguugagcuugu

SEQ ID NO: 149606 - RNA, 19 nt, Homo sapiens
  misc_RNA (1)...(19): siRNA sense strand
gauaagacauuucucaucu

SEQ ID NO: 149607 - RNA, 19 nt, Homo sapiens
  misc_RNA (1)...(19): siRNA sense strand
ggagagaggccaagauauu

SEQ ID NO: 149608 - RNA, 19 nt, Homo sapiens
  misc_RNA (1)...(19): siRNA sense strand
guacgacauuuccaacaua

SEQ ID NO: 149609 - RNA, 19 nt, Homo sapiens
  misc_RNA (1)...(19): siRNA sense strand
caacauagauagaauuggu

SEQ ID NO: 149610 - RNA, 19 nt, Homo sapiens
  misc_RNA (1)...(19): siRNA sense strand
gagagaggccaagauauua

SEQ ID NO: 149611 - RNA, 19 nt, Homo sapiens
  misc_RNA (1)...(19): siRNA sense strand
gaugaccacuuucuguuug

SEQ ID NO: 149612 - RNA, 19 nt, Homo sapiens
  misc_RNA (1)...(19): siRNA sense strand
gaagggagguagagaacgu

SEQ ID NO: 149613 - RNA, 19 nt, Homo sapiens
  misc_RNA (1)...(19): siRNA sense strand
gcgauucugucguggacua

SEQ ID NO: 149614 - RNA, 19 nt, Homo sapiens
  misc_RNA (1)...(19): siRNA sense strand
gcugggaguucauguggaa

SEQ ID NO: 149615 - RNA, 19 nt, Homo sapiens
  misc_RNA (1)...(19): siRNA sense strand
ggaguccuaugagguguuu

SEQ ID NO: 149616 - RNA, 19 nt, Homo sapiens
  misc_RNA (1)...(19): siRNA sense strand
gcacacaacggaucuggau

SEQ ID NO: 149617 - RNA, 19 nt, Homo sapiens
  misc_RNA (1)...(19): siRNA sense strand
gaggaucacaccaggguaa

SEQ ID NO: 149618 - RNA, 19 nt, Homo sapiens
  misc_RNA (1)...(19): siRNA sense strand
agacauuucucaucuggau

SEQ ID NO: 149619 - RNA, 19 nt, Homo sapiens
  misc_RNA (1)...(19): siRNA sense strand
gguugagcuuguucagaua

SEQ ID NO: 149620 - RNA, 19 nt, Homo sapiens
  misc_RNA (1)...(19): siRNA sense strand
uuucucaucuggauaaaug

SEQ ID NO: 149621 - RNA, 19 nt, Homo sapiens
  misc_RNA (1)...(19): siRNA sense strand
ggauaaaugaggaggauca

SEQ ID NO: 149622 - RNA, 19 nt, Homo sapiens
  misc_RNA (1)...(19): siRNA sense strand
cagcaaggacccacgcuuu

SEQ ID NO: 149623 - RNA, 19 nt, Homo sapiens
  misc_RNA (1)...(19): siRNA sense strand
gagcugguguccacguuag

SEQ ID NO: 149624 - RNA, 19 nt, Homo sapiens
  misc_RNA (1)...(19): siRNA sense strand
aggguaaucucaauggaaa

SEQ ID NO: 149625 - RNA, 19 nt, Homo sapiens
  misc_RNA (1)...(19): siRNA sense strand
ucccaaagcucagcaagga

SEQ ID NO: 149626 - RNA, 19 nt, Homo sapiens
  misc_RNA (1)...(19): siRNA sense strand
ggaucuggaugcaucaaag

SEQ ID NO: 149627 - RNA, 19 nt, Homo sapiens
  misc_RNA (1)...(19): siRNA sense strand
gggaaucuggcauaauuau

SEQ ID NO: 149628 - RNA, 19 nt, Homo sapiens
  misc_RNA (1)...(19): siRNA sense strand
agucaucgauggagucaau

SEQ ID NO: 149629 - RNA, 19 nt, Homo sapiens
  misc_RNA (1)...(19): siRNA sense strand
agauagaauuggucgauca

SEQ ID NO: 149630 - RNA, 19 nt, Homo sapiens
  misc_RNA (1)...(19): siRNA sense strand
gacccacgcuuuucuaaga

SEQ ID NO: 149631 - RNA, 19 nt, Homo sapiens
  misc_RNA (1)...(19): siRNA sense strand
gacauuuccaacauagaua

SEQ ID NO: 149632 - RNA, 19 nt, Homo sapiens
  misc_RNA (1)...(19): siRNA sense strand
caaugcuucucugcuguuu

SEQ ID NO: 149633 - RNA, 19 nt, Homo sapiens
  misc_RNA (1)...(19): siRNA sense strand
gagcgccuaggauacauuu

SEQ ID NO: 149634 - RNA, 19 nt, Homo sapiens
  misc_RNA (1)...(19): siRNA sense strand
gcaaugcuucucugcuguu

SEQ ID NO: 149635 - RNA, 19 nt, Homo sapiens
  misc_RNA (1)...(19): siRNA sense strand
gccaguaucuuuucuaagu

SEQ ID NO: 149636 - RNA, 19 nt, Homo sapiens
  misc_RNA (1)...(19): siRNA sense strand
cgacauuuccaacauagau

SEQ ID NO: 149637 - RNA, 19 nt, Homo sapiens
  misc_RNA (1)...(19): siRNA sense strand
gaaguagaacgguuaaucc

SEQ ID NO: 149638 - RNA, 19 nt, Homo sapiens
  misc_RNA (1)...(19): siRNA sense strand
guagagaacguggccauca

SEQ ID NO: 149639 - RNA, 19 nt, Homo sapiens
  misc_RNA (1)...(19): siRNA sense strand
gaucuggaugcaucaaaga

SEQ ID NO: 149640 - RNA, 19 nt, Homo sapiens
  misc_RNA (1)...(19): siRNA sense strand
agagaggccaagauauuaa

SEQ ID NO: 149641 - RNA, 19 nt, Homo sapiens
  misc_RNA (1)...(19): siRNA sense strand
gccaguguccccuuuauua

SEQ ID NO: 149642 - RNA, 19 nt, Homo sapiens
  misc_RNA (1)...(19): siRNA sense strand
cgaugaccacuuucuguuu

SEQ ID NO: 149643 - RNA, 19 nt, Homo sapiens
  misc_RNA (1)...(19): siRNA sense strand
acuacaagcuguccgagau

SEQ ID NO: 149644 - RNA, 19 nt, Homo sapiens
  misc_RNA (1)...(19): siRNA sense strand
uagaacgguuaauccaaga

SEQ ID NO: 149645 - RNA, 19 nt, Homo sapiens
  misc_RNA (1)...(19): siRNA sense strand
uaagacacaacggcuauga

SEQ ID NO: 149646 - RNA, 19 nt, Homo sapiens
  misc_RNA (1)...(19): siRNA sense strand
gaaccuuggaacaggacua

SEQ ID NO: 149647 - RNA, 19 nt, Homo sapiens
  misc_RNA (1)...(19): siRNA sense strand
ccuaggcuauuuccuccaa

SEQ ID NO: 149648 - RNA, 19 nt, Homo sapiens
  misc_RNA (1)...(19): siRNA sense strand
ggcaauaugaaacgaguau

SEQ ID NO: 149649 - RNA, 19 nt, Homo sapiens
  misc_RNA (1)...(19): siRNA sense strand
gaucacaccaggguaaucu

SEQ ID NO: 149650 - RNA, 19 nt, Homo sapiens
  misc_RNA (1)...(19): siRNA sense strand
gaccacuuucuguuugaua

SEQ ID NO: 149651 - RNA, 19 nt, Homo sapiens
  misc_RNA (1)...(19): siRNA sense strand
uacaagcuguccgagauga

SEQ ID NO: 149652 - RNA, 19 nt, Homo sapiens
  misc_RNA (1)...(19): siRNA sense strand
acaccaggguaaucucaau

SEQ ID NO: 149653 - RNA, 19 nt, Homo sapiens
  misc_RNA (1)...(19): siRNA sense strand
acauuucucaucuggauaa

SEQ ID NO: 149654 - RNA, 19 nt, Homo sapiens
  misc_RNA (1)...(19): siRNA sense strand
ccaggguaaucucaaugga

SEQ ID NO: 149655 - RNA, 19 nt, Homo sapiens
  misc_RNA (1)...(19): siRNA sense strand
ucaucgauggagucaauua

SEQ ID NO: 149656 - RNA, 19 nt, Homo sapiens
  misc_RNA (1)...(19): siRNA sense strand
agguugagcuuguucagau

SEQ ID NO: 149657 - RNA, 19 nt, Homo sapiens
  misc_RNA (1)...(19): siRNA sense strand
aaagaaguagaacgguuaa

SEQ ID NO: 149658 - RNA, 19 nt, Homo sapiens
  misc_RNA (1)...(19): siRNA sense strand
aaaagaaguagaacgguua

SEQ ID NO: 149659 - RNA, 19 nt, Homo sapiens
  misc_RNA (1)...(19): siRNA sense strand
cuggaugcaucaaagauca

SEQ ID NO: 149660 - RNA, 19 nt, Homo sapiens
  misc_RNA (1)...(19): siRNA sense strand
gaaugagcgccuaggauac

SEQ ID NO: 149661 - RNA, 19 nt, Homo sapiens
  misc_RNA (1)...(19): siRNA sense strand
accacuuucuguuugauaa

SEQ ID NO: 149662 - RNA, 19 nt, Homo sapiens
  misc_RNA (1)...(19): siRNA sense strand
ucagauagucaucgaugga

SEQ ID NO: 149663 - RNA, 19 nt, Homo sapiens
  misc_RNA (1)...(19): siRNA sense strand
aaaaggaggcaauaugaaa

SEQ ID NO: 149664 - RNA, 19 nt, Homo sapiens
  misc_RNA (1)...(19): siRNA sense strand
uaaagacugugggcauggu

SEQ ID NO: 149665 - RNA, 19 nt, Homo sapiens
  misc_RNA (1)...(19): siRNA sense strand
uguacgacauuuccaacau

SEQ ID NO: 149666 - RNA, 19 nt, Homo sapiens
  misc_RNA (1)...(19): siRNA sense strand
gaaccggcagaaagugugu

SEQ ID NO: 149667 - RNA, 19 nt, Homo sapiens
  misc_RNA (1)...(19): siRNA sense strand
gaccuguccuucgaaccuu

SEQ ID NO: 149668 - RNA, 19 nt, Homo sapiens
  misc_RNA (1)...(19): siRNA sense strand
gcaagcacaacaacugcau

SEQ ID NO: 149669 - RNA, 19 nt, Homo sapiens
  misc_RNA (1)...(19): siRNA sense strand
ggccaccccuucauaaaga

SEQ ID NO: 149670 - RNA, 19 nt, Homo sapiens
  misc_RNA (1)...(19): siRNA sense strand
cuaacuggccgcaaugcuu

SEQ ID NO: 149671 - RNA, 19 nt, Homo sapiens
  misc_RNA (1)...(19): siRNA sense strand
gcaguucgacgagcauuac

SEQ ID NO: 149672 - RNA, 19 nt, Homo sapiens
  misc_RNA (1)...(19): siRNA sense strand
gagaggccaagauauuaag

SEQ ID NO: 149673 - RNA, 19 nt, Homo sapiens
  misc_RNA (1)...(19): siRNA sense strand
gagcuuguucagauaguca

SEQ ID NO: 149674 - RNA, 19 nt, Homo sapiens
  misc_RNA (1)...(19): siRNA sense strand
gaacgguuaauccaagaac

SEQ ID NO: 149675 - RNA, 19 nt, Homo sapiens
  misc_RNA (1)...(19): siRNA sense strand
agaaguagaacgguuaauc

SEQ ID NO: 149676 - RNA, 19 nt, Homo sapiens
  misc_RNA (1)...(19): siRNA sense strand
ggcaguucgacgagcauua

SEQ ID NO: 149677 - RNA, 19 nt, Homo sapiens
  misc_RNA (1)...(19): siRNA sense strand
caggguaaucucaauggaa

SEQ ID NO: 149678 - RNA, 19 nt, Homo sapiens
  misc_RNA (1)...(19): siRNA sense strand
ugauaagacauuucucauc

SEQ ID NO: 149679 - RNA, 19 nt, Homo sapiens
  misc_RNA (1)...(19): siRNA sense strand
gagcgaagggagguagaga

SEQ ID NO: 149680 - RNA, 19 nt, Homo sapiens
  misc_RNA (1)...(19): siRNA sense strand
aggggaaucuggcauaauu

SEQ ID NO: 149681 - RNA, 19 nt, Homo sapiens
  misc_RNA (1)...(19): siRNA sense strand
uacgacauuuccaacauag

SEQ ID NO: 149682 - RNA, 19 nt, Homo sapiens
  misc_RNA (1)...(19): siRNA sense strand
cgagcugguguccacguua

SEQ ID NO: 149683 - RNA, 19 nt, Homo sapiens
  misc_RNA (1)...(19): siRNA sense strand
gagguugagcuuguucaga

SEQ ID NO: 149684 - RNA, 19 nt, Homo sapiens
  misc_RNA (1)...(19): siRNA sense strand
ucaucaaacuaagacacaa

SEQ ID NO: 149685 - RNA, 19 nt, Homo sapiens
  misc_RNA (1)...(19): siRNA sense strand
gcgaagggagguagagaac

SEQ ID NO: 149686 - RNA, 19 nt, Homo sapiens
  misc_RNA (1)...(19): siRNA sense strand
ucgaugaccacuuucuguu

SEQ ID NO: 149687 - RNA, 19 nt, Homo sapiens
  misc_RNA (1)...(19): siRNA sense strand
uagccaagcuggucccuaa

SEQ ID NO: 149688 - RNA, 19 nt, Homo sapiens
  misc_RNA (1)...(19): siRNA sense strand
ccaagaaaccaaagaaaug

SEQ ID NO: 149689 - RNA, 19 nt, Homo sapiens
  misc_RNA (1)...(19): siRNA sense strand
ggaggaaucuuggcguuca

SEQ ID NO: 149690 - RNA, 19 nt, Homo sapiens
  misc_RNA (1)...(19): siRNA sense strand
caagaaaccaaagaaauga

SEQ ID NO: 149691 - RNA, 19 nt, Homo sapiens
  misc_RNA (1)...(19): siRNA sense strand
uccauuauaugauccauga

SEQ ID NO: 149692 - RNA, 19 nt, Homo sapiens
  misc_RNA (1)...(19): siRNA sense strand
gaaucugaauggaggaauc

SEQ ID NO: 149693 - RNA, 19 nt, Homo sapiens
  misc_RNA (1)...(19): siRNA sense strand
uaugauccaugaaccagaa

SEQ ID NO: 149694 - RNA, 19 nt, Homo sapiens
  misc_RNA (1)...(19): siRNA sense strand
accagaaccucacaucuug

SEQ ID NO: 149695 - RNA, 19 nt, Homo sapiens
  misc_RNA (1)...(19): siRNA sense strand
ucugaugucugaaucugaa

SEQ ID NO: 149696 - RNA, 19 nt, Homo sapiens
  misc_RNA (1)...(19): siRNA sense strand
cgacgaggaguuugaguau

SEQ ID NO: 149697 - RNA, 19 nt, Homo sapiens
  misc_RNA (1)...(19): siRNA sense strand
gaaccagaaccucacaucu

SEQ ID NO: 149698 - RNA, 19 nt, Homo sapiens
  misc_RNA (1)...(19): siRNA sense strand
gaguuugaguaucgacaug

SEQ ID NO: 149699 - RNA, 19 nt, Homo sapiens
  misc_RNA (1)...(19): siRNA sense strand
ccaaggacauagccaagcu

SEQ ID NO: 149700 - RNA, 19 nt, Homo sapiens
  misc_RNA (1)...(19): siRNA sense strand
cccaagaaaccaaagaaau

SEQ ID NO: 149701 - RNA, 19 nt, Homo sapiens
  misc_RNA (1)...(19): siRNA sense strand
aaccagaaccucacaucuu

SEQ ID NO: 149702 - RNA, 19 nt, Homo sapiens
  misc_RNA (1)...(19): siRNA sense strand
acgaggaguuugaguaucg

SEQ ID NO: 149703 - RNA, 19 nt, Homo sapiens
  misc_RNA (1)...(19): siRNA sense strand
ccacuacccaagaaaccaa

SEQ ID NO: 149704 - RNA, 19 nt, Homo sapiens
  misc_RNA (1)...(19): siRNA sense strand
gacgaggaguuugaguauc

SEQ ID NO: 149705 - RNA, 19 nt, Homo sapiens
  misc_RNA (1)...(19): siRNA sense strand
auacgacgacgaggaguuu

SEQ ID NO: 149706 - RNA, 19 nt, Homo sapiens
  misc_RNA (1)...(19): siRNA sense strand
cgcacaaacaaauuuacua

SEQ ID NO: 149707 - RNA, 19 nt, Homo sapiens
  misc_RNA (1)...(19): siRNA sense strand
ccagagaacuuuccaaaca

SEQ ID NO: 149708 - RNA, 19 nt, Homo sapiens
  misc_RNA (1)...(19): siRNA sense strand
guaccggcauguuauguua

SEQ ID NO: 149709 - RNA, 19 nt, Homo sapiens
  misc_RNA (1)...(19): siRNA sense strand
ccacauauucuucucuuua

SEQ ID NO: 149710 - RNA, 19 nt, Homo sapiens
  misc_RNA (1)...(19): siRNA sense strand
cagagaacuuuccaaacaa

SEQ ID NO: 149711 - RNA, 19 nt, Homo sapiens
  misc_RNA (1)...(19): siRNA sense strand
acaagcagaucuacuacuc

SEQ ID NO: 149712 - RNA, 19 nt, Homo sapiens
  misc_RNA (1)...(19): siRNA sense strand
cacauauucuucucuuuag

SEQ ID NO: 149713 - RNA, 19 nt, Homo sapiens
  misc_RNA (1)...(19): siRNA sense strand
gagccagaaccacauauuc

SEQ ID NO: 149714 - RNA, 19 nt, Homo sapiens
  misc_RNA (1)...(19): siRNA sense strand
agucuaggcuggguucauu

SEQ ID NO: 149715 - RNA, 19 nt, Homo sapiens
  misc_RNA (1)...(19): siRNA sense strand
cgacgaacacuacgaguac

SEQ ID NO: 149716 - RNA, 19 nt, Homo sapiens
  misc_RNA (1)...(19): siRNA sense strand
uacgaguaccggcauguua

SEQ ID NO: 149717 - RNA, 19 nt, Homo sapiens
  misc_RNA (1)...(19): siRNA sense strand
gaggaguggaggagacuug

SEQ ID NO: 149718 - RNA, 19 nt, Homo sapiens
  misc_RNA (1)...(19): siRNA sense strand
agagaacuuuccaaacaag

SEQ ID NO: 149719 - RNA, 19 nt, Homo sapiens
  misc_RNA (1)...(19): siRNA sense strand
uagacgaccucuuccaaaa

SEQ ID NO: 149720 - RNA, 19 nt, Homo sapiens
  misc_RNA (1)...(19): siRNA sense strand
cccacaagcagaucuacua

SEQ ID NO: 149721 - RNA, 19 nt, Homo sapiens
  misc_RNA (1)...(19): siRNA sense strand
uauguuacccagagaacuu

SEQ ID NO: 149722 - RNA, 19 nt, Homo sapiens
  misc_RNA (1)...(19): siRNA sense strand
caugagccagaaccacaua

SEQ ID NO: 149723 - RNA, 19 nt, Homo sapiens
  misc_RNA (1)...(19): siRNA sense strand
aaccacauauucuucucuu

SEQ ID NO: 149724 - RNA, 19 nt, Homo sapiens
  misc_RNA (1)...(19): siRNA sense strand
gaaccacauauucuucucu

SEQ ID NO: 149725 - RNA, 19 nt, Homo sapiens
  misc_RNA (1)...(19): siRNA sense strand
ucgacgaacacuacgagua

SEQ ID NO: 149726 - RNA, 19 nt, Homo sapiens
  misc_RNA (1)...(19): siRNA sense strand
aggcuggguucauuacaug

SEQ ID NO: 149727 - RNA, 19 nt, Homo sapiens
  misc_RNA (1)...(19): siRNA sense strand
uuagacgaccucuuccaaa

SEQ ID NO: 149728 - RNA, 19 nt, Homo sapiens
  misc_RNA (1)...(19): siRNA sense strand
uaggcuggguucauuacau

SEQ ID NO: 149729 - RNA, 19 nt, Homo sapiens
  misc_RNA (1)...(19): siRNA sense strand
ugagccagaaccacauauu

SEQ ID NO: 149730 - RNA, 19 nt, Homo sapiens
  misc_RNA (1)...(19): siRNA sense strand
guacauggcugaacucuuc

SEQ ID NO: 149731 - RNA, 19 nt, Homo sapiens
  misc_RNA (1)...(19): siRNA sense strand
guggguagcugaugcauuu

SEQ ID NO: 149732 - RNA, 19 nt, Homo sapiens
  misc_RNA (1)...(19): siRNA sense strand
gcaauuccaucauguacuu

SEQ ID NO: 149733 - RNA, 19 nt, Homo sapiens
  misc_RNA (1)...(19): siRNA sense strand
ccagcgagcucauuucuga

SEQ ID NO: 149734 - RNA, 19 nt, Homo sapiens
  misc_RNA (1)...(19): siRNA sense strand
gaacugauucucgcaauaa

SEQ ID NO: 149735 - RNA, 19 nt, Homo sapiens
  misc_RNA (1)...(19): siRNA sense strand
ggaacugauucucgcaaua

SEQ ID NO: 149736 - RNA, 19 nt, Homo sapiens
  misc_RNA (1)...(19): siRNA sense strand
uuucugagcuguucaauga

SEQ ID NO: 149737 - RNA, 19 nt, Homo sapiens
  misc_RNA (1)...(19): siRNA sense strand
ggucggagcugcuggugaa

SEQ ID NO: 149738 - RNA, 19 nt, Homo sapiens
  misc_RNA (1)...(19): siRNA sense strand
uagaagaggucaguuacua

SEQ ID NO: 149739 - RNA, 19 nt, Homo sapiens
  misc_RNA (1)...(19): siRNA sense strand
ccgaauccaucauguuuaa

SEQ ID NO: 149740 - RNA, 19 nt, Homo sapiens
  misc_RNA (1)...(19): siRNA sense strand
cuggaaaccugauggauuu

SEQ ID NO: 149741 - RNA, 19 nt, Homo sapiens
  misc_RNA (1)...(19): siRNA sense strand
ggucaucauguuugaauua

SEQ ID NO: 149742 - RNA, 19 nt, Homo sapiens
  misc_RNA (1)...(19): siRNA sense strand
ccaaguacagcaagaauga

SEQ ID NO: 149743 - RNA, 19 nt, Homo sapiens
  misc_RNA (1)...(19): siRNA sense strand
ggaaagaaggcaucuacga

SEQ ID NO: 149744 - RNA, 19 nt, Homo sapiens
  misc_RNA (1)...(19): siRNA sense strand
gaugagccguucccugaug

SEQ ID NO: 149745 - RNA, 19 nt, Homo sapiens
  misc_RNA (1)...(19): siRNA sense strand
agaggucaguuacuacuuu

SEQ ID NO: 149746 - RNA, 19 nt, Homo sapiens
  misc_RNA (1)...(19): siRNA sense strand
gcacugaucuucaaaaucg

SEQ ID NO: 149747 - RNA, 19 nt, Homo sapiens
  misc_RNA (1)...(19): siRNA sense strand
aaucgucguuaccauauuu

SEQ ID NO: 149748 - RNA, 19 nt, Homo sapiens
  misc_RNA (1)...(19): siRNA sense strand
uggaaacggugguggauau

SEQ ID NO: 149749 - RNA, 19 nt, Homo sapiens
  misc_RNA (1)...(19): siRNA sense strand
uggagucucuguugccuuu

SEQ ID NO: 149750 - RNA, 19 nt, Homo sapiens
  misc_RNA (1)...(19): siRNA sense strand
ucaaggagaccgacuacaa

SEQ ID NO: 149751 - RNA, 19 nt, Homo sapiens
  misc_RNA (1)...(19): siRNA sense strand
uggagacgcucaucaagga

SEQ ID NO: 149752 - RNA, 19 nt, Homo sapiens
  misc_RNA (1)...(19): siRNA sense strand
acaggaagaucaccagcaa

SEQ ID NO: 149753 - RNA, 19 nt, Homo sapiens
  misc_RNA (1)...(19): siRNA sense strand
ccagagauaaagaccauuu

SEQ ID NO: 149754 - RNA, 19 nt, Homo sapiens
  misc_RNA (1)...(19): siRNA sense strand
guggagcccuugagucuuc

SEQ ID NO: 149755 - RNA, 19 nt, Homo sapiens
  misc_RNA (1)...(19): siRNA sense strand
ggaaguggacccugcuaau

SEQ ID NO: 149756 - RNA, 19 nt, Homo sapiens
  misc_RNA (1)...(19): siRNA sense strand
ugccaucacugccaucauu

SEQ ID NO: 149757 - RNA, 19 nt, Homo sapiens
  misc_RNA (1)...(19): siRNA sense strand
guggauaucuuccggaaac

SEQ ID NO: 149758 - RNA, 19 nt, Homo sapiens
  misc_RNA (1)...(19): siRNA sense strand
gagcaaggaguccauaugg

SEQ ID NO: 149759 - RNA, 19 nt, Homo sapiens
  misc_RNA (1)...(19): siRNA sense strand
gaauagccgucucguucuc

SEQ ID NO: 149760 - RNA, 19 nt, Homo sapiens
  misc_RNA (1)...(19): siRNA sense strand
gaaguggacccugcuaauc

SEQ ID NO: 149761 - RNA, 19 nt, Homo sapiens
  misc_RNA (1)...(19): siRNA sense strand
gggcgcugcuguuugcauu

SEQ ID NO: 149762 - RNA, 19 nt, Homo sapiens
  misc_RNA (1)...(19): siRNA sense strand
ugauggauuuccucgauga

SEQ ID NO: 149763 - RNA, 19 nt, Homo sapiens
  misc_RNA (1)...(19): siRNA sense strand
aaacggugguggauaucuu

SEQ ID NO: 149764 - RNA, 19 nt, Homo sapiens
  misc_RNA (1)...(19): siRNA sense strand
cugauucucgcaauaaaua

SEQ ID NO: 149765 - RNA, 19 nt, Homo sapiens
  misc_RNA (1)...(19): siRNA sense strand
gcguguauuugcaccauau

SEQ ID NO: 149766 - RNA, 19 nt, Homo sapiens
  misc_RNA (1)...(19): siRNA sense strand
ugacucggccuguggauga

SEQ ID NO: 149767 - RNA, 19 nt, Homo sapiens
  misc_RNA (1)...(19): siRNA sense strand
guuaccauauuuaccuuug

SEQ ID NO: 149768 - RNA, 19 nt, Homo sapiens
  misc_RNA (1)...(19): siRNA sense strand
auaaauaacgccagacaga

SEQ ID NO: 149769 - RNA, 19 nt, Homo sapiens
  misc_RNA (1)...(19): siRNA sense strand
caaaaucgucguuaccaua

SEQ ID NO: 149770 - RNA, 19 nt, Homo sapiens
  misc_RNA (1)...(19): siRNA sense strand
caguguugcuggacuucua

SEQ ID NO: 149771 - RNA, 19 nt, Homo sapiens
  misc_RNA (1)...(19): siRNA sense strand
ugagacauauggcccagau

SEQ ID NO: 149772 - RNA, 19 nt, Homo sapiens
  misc_RNA (1)...(19): siRNA sense strand
gcccacauccacuuaaaug

SEQ ID NO: 149773 - RNA, 19 nt, Homo sapiens
  misc_RNA (1)...(19): siRNA sense strand
gaggucaguuacuacuuuc

SEQ ID NO: 149774 - RNA, 19 nt, Homo sapiens
  misc_RNA (1)...(19): siRNA sense strand
gaagaggucaguuacuacu

SEQ ID NO: 149775 - RNA, 19 nt, Homo sapiens
  misc_RNA (1)...(19): siRNA sense strand
guaguguccuccggucuga

SEQ ID NO: 149776 - RNA, 19 nt, Homo sapiens
  misc_RNA (1)...(19): siRNA sense strand
auauuuaccuuuggcauga

SEQ ID NO: 149777 - RNA, 19 nt, Homo sapiens
  misc_RNA (1)...(19): siRNA sense strand
gggaacugauucucgcaau

SEQ ID NO: 149778 - RNA, 19 nt, Homo sapiens
  misc_RNA (1)...(19): siRNA sense strand
acgcugagauccaucaauc

SEQ ID NO: 149779 - RNA, 19 nt, Homo sapiens
  misc_RNA (1)...(19): siRNA sense strand
cgccagggcuguacgcaau

SEQ ID NO: 149780 - RNA, 19 nt, Homo sapiens
  misc_RNA (1)...(19): siRNA sense strand
ccugauggauuuccucgau

SEQ ID NO: 149781 - RNA, 19 nt, Homo sapiens
  misc_RNA (1)...(19): siRNA sense strand
cggagcugcuggugaauca

SEQ ID NO: 149782 - RNA, 19 nt, Homo sapiens
  misc_RNA (1)...(19): siRNA sense strand
ugacgugaaggacgaguuu

SEQ ID NO: 149783 - RNA, 19 nt, Homo sapiens
  misc_RNA (1)...(19): siRNA sense strand
cggcuggugucgguguuua

SEQ ID NO: 149784 - RNA, 19 nt, Homo sapiens
  misc_RNA (1)...(19): siRNA sense strand
uaccagagauaaagaccau

SEQ ID NO: 149785 - RNA, 19 nt, Homo sapiens
  misc_RNA (1)...(19): siRNA sense strand
uaugggaguucaucaagag

SEQ ID NO: 149786 - RNA, 19 nt, Homo sapiens
  misc_RNA (1)...(19): siRNA sense strand
ugugagcaauuccaucaug

SEQ ID NO: 149787 - RNA, 19 nt, Homo sapiens
  misc_RNA (1)...(19): siRNA sense strand
caauaaauaacgccagaca

SEQ ID NO: 149788 - RNA, 19 nt, Homo sapiens
  misc_RNA (1)...(19): siRNA sense strand
caagagcaaggaguccaua

SEQ ID NO: 149789 - RNA, 19 nt, Homo sapiens
  misc_RNA (1)...(19): siRNA sense strand
guauagccaugagcagugu

SEQ ID NO: 149790 - RNA, 19 nt, Homo sapiens
  misc_RNA (1)...(19): siRNA sense strand
gugagcaauuccaucaugu

SEQ ID NO: 149791 - RNA, 19 nt, Homo sapiens
  misc_RNA (1)...(19): siRNA sense strand
gacagacacaggaagauca

SEQ ID NO: 149792 - RNA, 19 nt, Homo sapiens
  misc_RNA (1)...(19): siRNA sense strand
ccgagcgccucauuggauu

SEQ ID NO: 149793 - RNA, 19 nt, Homo sapiens
  misc_RNA (1)...(19): siRNA sense strand
ggaauagccgucucguucu

SEQ ID NO: 149794 - RNA, 19 nt, Homo sapiens
  misc_RNA (1)...(19): siRNA sense strand
gccagugcuuacauucuga

SEQ ID NO: 149795 - RNA, 19 nt, Homo sapiens
  misc_RNA (1)...(19): siRNA sense strand
gagcaauuccaucauguac

SEQ ID NO: 149796 - RNA, 19 nt, Homo sapiens
  misc_RNA (1)...(19): siRNA sense strand
ccagaggagggaacugauu

SEQ ID NO: 149797 - RNA, 19 nt, Homo sapiens
  misc_RNA (1)...(19): siRNA sense strand
gggaaguggacccugcuaa

SEQ ID NO: 149798 - RNA, 19 nt, Homo sapiens
  misc_RNA (1)...(19): siRNA sense strand
uugagcggcuuuaucauca

SEQ ID NO: 149799 - RNA, 19 nt, Homo sapiens
  misc_RNA (1)...(19): siRNA sense strand
gucuagaagaggucaguua

SEQ ID NO: 149800 - RNA, 19 nt, Homo sapiens
  misc_RNA (1)...(19): siRNA sense strand
gcgaugaguggcucuggaa

SEQ ID NO: 149801 - RNA, 19 nt, Homo sapiens
  misc_RNA (1)...(19): siRNA sense strand
gcucugugacuacaucaau

SEQ ID NO: 149802 - RNA, 19 nt, Homo sapiens
  misc_RNA (1)...(19): siRNA sense strand
gcaggauggugggaauugg

SEQ ID NO: 149803 - RNA, 19 nt, Homo sapiens
  misc_RNA (1)...(19): siRNA sense strand
ggaugacggaccugaagga

SEQ ID NO: 149804 - RNA, 19 nt, Homo sapiens
  misc_RNA (1)...(19): siRNA sense strand
aaaaggauguucugagaca

SEQ ID NO: 149805 - RNA, 19 nt, Homo sapiens
  misc_RNA (1)...(19): siRNA sense strand
gaccacacuccgauggaaa

SEQ ID NO: 149806 - RNA, 19 nt, Homo sapiens
  misc_RNA (1)...(19): siRNA sense strand
ugagcaauuccaucaugua

SEQ ID NO: 149807 - RNA, 19 nt, Homo sapiens
  misc_RNA (1)...(19): siRNA sense strand
gcugaugcauuugggaaag

SEQ ID NO: 149808 - RNA, 19 nt, Homo sapiens
  misc_RNA (1)...(19): siRNA sense strand
ggacccugcuaaucaagac

SEQ ID NO: 149809 - RNA, 19 nt, Homo sapiens
  misc_RNA (1)...(19): siRNA sense strand
gagauaaagaccauuuuga

SEQ ID NO: 149810 - RNA, 19 nt, Homo sapiens
  misc_RNA (1)...(19): siRNA sense strand
gggugccagugcuuacauu

SEQ ID NO: 149811 - RNA, 19 nt, Homo sapiens
  misc_RNA (1)...(19): siRNA sense strand
ggagacuucuuggcaucau

SEQ ID NO: 149812 - RNA, 19 nt, Homo sapiens
  misc_RNA (1)...(19): siRNA sense strand
agaccacacuccgauggaa

SEQ ID NO: 149813 - RNA, 19 nt, Homo sapiens
  misc_RNA (1)...(19): siRNA sense strand
caaggagaccgacuacaac

SEQ ID NO: 149814 - RNA, 19 nt, Homo sapiens
  misc_RNA (1)...(19): siRNA sense strand
ucuggaaaccugauggauu

SEQ ID NO: 149815 - RNA, 19 nt, Homo sapiens
  misc_RNA (1)...(19): siRNA sense strand
caucauguuugaauuaacc

SEQ ID NO: 149816 - RNA, 19 nt, Homo sapiens
  misc_RNA (1)...(19): siRNA sense strand
ccagcucugugacuacauc

SEQ ID NO: 149817 - RNA, 19 nt, Homo sapiens
  misc_RNA (1)...(19): siRNA sense strand
ggacguaugaggacuucca

SEQ ID NO: 149818 - RNA, 19 nt, Homo sapiens
  misc_RNA (1)...(19): siRNA sense strand
ccaauuggaggcgugcuuu

SEQ ID NO: 149819 - RNA, 19 nt, Homo sapiens
  misc_RNA (1)...(19): siRNA sense strand
uaugggcgcugcuguuugc

SEQ ID NO: 149820 - RNA, 19 nt, Homo sapiens
  misc_RNA (1)...(19): siRNA sense strand
aggaagaucaccagcaaga

SEQ ID NO: 149821 - RNA, 19 nt, Homo sapiens
  misc_RNA (1)...(19): siRNA sense strand
gcccagaggagggaacuga

SEQ ID NO: 149822 - RNA, 19 nt, Homo sapiens
  misc_RNA (1)...(19): siRNA sense strand
cgaggcccacauccacuua

SEQ ID NO: 149823 - RNA, 19 nt, Homo sapiens
  misc_RNA (1)...(19): siRNA sense strand
cauugguggucaucauguu

SEQ ID NO: 149824 - RNA, 19 nt, Homo sapiens
  misc_RNA (1)...(19): siRNA sense strand
uggagcagcuggccuacca

SEQ ID NO: 149825 - RNA, 19 nt, Homo sapiens
  misc_RNA (1)...(19): siRNA sense strand
gcaagaaugagggcaagag

SEQ ID NO: 149826 - RNA, 19 nt, Homo sapiens
  misc_RNA (1)...(19): siRNA sense strand
gcaccagcgagcucauuuc

SEQ ID NO: 149827 - RNA, 19 nt, Homo sapiens
  misc_RNA (1)...(19): siRNA sense strand
uagugcacguggcuuguug

SEQ ID NO: 149828 - RNA, 19 nt, Homo sapiens
  misc_RNA (1)...(19): siRNA sense strand
cagaggagggaacugauuc

SEQ ID NO: 149829 - RNA, 19 nt, Homo sapiens
  misc_RNA (1)...(19): siRNA sense strand
aaaucgucguuaccauauu

SEQ ID NO: 149830 - RNA, 19 nt, Homo sapiens
  misc_RNA (1)...(19): siRNA sense strand
ggugagcucugcaugaaua

SEQ ID NO: 149831 - RNA, 19 nt, Homo sapiens
  misc_RNA (1)...(19): siRNA sense strand
ucuaugggauuuacuacaa

SEQ ID NO: 149832 - RNA, 19 nt, Homo sapiens
  misc_RNA (1)...(19): siRNA sense strand
ugaauagugcccaguguaa

SEQ ID NO: 149833 - RNA, 19 nt, Homo sapiens
  misc_RNA (1)...(19): siRNA sense strand
gagcucugcaugaauagug

SEQ ID NO: 149834 - RNA, 19 nt, Homo sapiens
  misc_RNA (1)...(19): siRNA sense strand
caucaccaacaccaacuuu

SEQ ID NO: 149835 - RNA, 19 nt, Homo sapiens
  misc_RNA (1)...(19): siRNA sense strand
caugaauagugcccagugu

SEQ ID NO: 149836 - RNA, 19 nt, Homo sapiens
  misc_RNA (1)...(19): siRNA sense strand
acggugagcucugcaugaa

SEQ ID NO: 149837 - RNA, 19 nt, Homo sapiens
  misc_RNA (1)...(19): siRNA sense strand
gaauagugcccaguguaag

SEQ ID NO: 149838 - RNA, 19 nt, Homo sapiens
  misc_RNA (1)...(19): siRNA sense strand
caagacgcucuaugggauu

SEQ ID NO: 149839 - RNA, 19 nt, Homo sapiens
  misc_RNA (1)...(19): siRNA sense strand
aagacgcucuaugggauuu

SEQ ID NO: 149840 - RNA, 19 nt, Homo sapiens
  misc_RNA (1)...(19): siRNA sense strand
aauagugcccaguguaaga

SEQ ID NO: 149841 - RNA, 19 nt, Homo sapiens
  misc_RNA (1)...(19): siRNA sense strand
uaugggauuuacuacaagu

SEQ ID NO: 149842 - RNA, 19 nt, Homo sapiens
  misc_RNA (1)...(19): siRNA sense strand
gaagaagccuuuguaaaug

SEQ ID NO: 149843 - RNA, 19 nt, Homo sapiens
  misc_RNA (1)...(19): siRNA sense strand
uaaaggagcuagaagaaug

SEQ ID NO: 149844 - RNA, 19 nt, Homo sapiens
  misc_RNA (1)...(19): siRNA sense strand
gaaaguauccguaaaugga

SEQ ID NO: 149845 - RNA, 19 nt, Homo sapiens
  misc_RNA (1)...(19): siRNA sense strand
agaagaagccuuuguaaau

SEQ ID NO: 149846 - RNA, 19 nt, Homo sapiens
  misc_RNA (1)...(19): siRNA sense strand
ggaaaguaaugguccaaca

SEQ ID NO: 149847 - RNA, 19 nt, Homo sapiens
  misc_RNA (1)...(19): siRNA sense strand
gcagaagaagccuuuguaa

SEQ ID NO: 149848 - RNA, 19 nt, Homo sapiens
  misc_RNA (1)...(19): siRNA sense strand
gagagaagaacaaauggaa

SEQ ID NO: 149849 - RNA, 19 nt, Homo sapiens
  misc_RNA (1)...(19): siRNA sense strand
aagaagccuuuguaaauga

SEQ ID NO: 149850 - RNA, 19 nt, Homo sapiens
  misc_RNA (1)...(19): siRNA sense strand
gcaagcaggccaaagaugu

SEQ ID NO: 149851 - RNA, 19 nt, Homo sapiens
  misc_RNA (1)...(19): siRNA sense strand
caauaaaggagcuagaaga

SEQ ID NO: 149852 - RNA, 19 nt, Homo sapiens
  misc_RNA (1)...(19): siRNA sense strand
cagaagaagccuuuguaaa

SEQ ID NO: 149853 - RNA, 19 nt, Homo sapiens
  misc_RNA (1)...(19): siRNA sense strand
ggacgagcagcuacagaaa

SEQ ID NO: 149854 - RNA, 19 nt, Homo sapiens
  misc_RNA (1)...(19): siRNA sense strand
ggugaauacuaccaggaaa

SEQ ID NO: 149855 - RNA, 19 nt, Homo sapiens
  misc_RNA (1)...(19): siRNA sense strand
ggaaagaaaaggcaauaaa

SEQ ID NO: 149856 - RNA, 19 nt, Homo sapiens
  misc_RNA (1)...(19): siRNA sense strand
cuagaagaaugguaugcaa

SEQ ID NO: 149857 - RNA, 19 nt, Homo sapiens
  misc_RNA (1)...(19): siRNA sense strand
agacaguuaugcagcuauu

SEQ ID NO: 149858 - RNA, 19 nt, Homo sapiens
  misc_RNA (1)...(19): siRNA sense strand
ggagcuagaagaaugguau

SEQ ID NO: 149859 - RNA, 19 nt, Homo sapiens
  misc_RNA (1)...(19): siRNA sense strand
ggaugcuguugauggagua

SEQ ID NO: 149860 - RNA, 19 nt, Homo sapiens
  misc_RNA (1)...(19): siRNA sense strand
ccaauucucggaagcaaga

SEQ ID NO: 149861 - RNA, 19 nt, Homo sapiens
  misc_RNA (1)...(19): siRNA sense strand
ggagagaagaacaaaugga

SEQ ID NO: 149862 - RNA, 19 nt, Homo sapiens
  misc_RNA (1)...(19): siRNA sense strand
gaaaguaaugguccaacag

SEQ ID NO: 149863 - RNA, 19 nt, Homo sapiens
  misc_RNA (1)...(19): siRNA sense strand
aauaaaggagcuagaagaa

SEQ ID NO: 149864 - RNA, 19 nt, Homo sapiens
  misc_RNA (1)...(19): siRNA sense strand
ggaagcccuugaugccaau

SEQ ID NO: 149865 - RNA, 19 nt, Homo sapiens
  misc_RNA (1)...(19): siRNA sense strand
aguaaugaauggugaauac

SEQ ID NO: 149866 - RNA, 19 nt, Homo sapiens
  misc_RNA (1)...(19): siRNA sense strand
gaagaaugguaugcaagac

SEQ ID NO: 149867 - RNA, 19 nt, Homo sapiens
  misc_RNA (1)...(19): siRNA sense strand
uaaauggagagaagaacaa

SEQ ID NO: 149868 - RNA, 19 nt, Homo sapiens
  misc_RNA (1)...(19): siRNA sense strand
guaaauggagagaagaaca

SEQ ID NO: 149869 - RNA, 19 nt, Homo sapiens
  misc_RNA (1)...(19): siRNA sense strand
gcagcaagagagcgagauu

SEQ ID NO: 149870 - RNA, 19 nt, Homo sapiens
  misc_RNA (1)...(19): siRNA sense strand
gaaagaaaaggcaauaaag

SEQ ID NO: 149871 - RNA, 19 nt, Homo sapiens
  misc_RNA (1)...(19): siRNA sense strand
gcaauaaaggagcuagaag

SEQ ID NO: 149872 - RNA, 19 nt, Homo sapiens
  misc_RNA (1)...(19): siRNA sense strand
acaaauggaacgcuuggaa

SEQ ID NO: 149873 - RNA, 19 nt, Homo sapiens
  misc_RNA (1)...(19): siRNA sense strand
uuucacaaguggaucgauu

SEQ ID NO: 149874 - RNA, 19 nt, Homo sapiens
  misc_RNA (1)...(19): siRNA sense strand
aaaguaaugguccaacaga

SEQ ID NO: 149875 - RNA, 19 nt, Homo sapiens
  misc_RNA (1)...(19): siRNA sense strand
cuagcaagcaggccaaaga

SEQ ID NO: 149876 - RNA, 19 nt, Homo sapiens
  misc_RNA (1)...(19): siRNA sense strand
agaagaaugguaugcaaga

SEQ ID NO: 149877 - RNA, 19 nt, Homo sapiens
  misc_RNA (1)...(19): siRNA sense strand
cugaaaguauccguaaaug

SEQ ID NO: 149878 - RNA, 19 nt, Homo sapiens
  misc_RNA (1)...(19): siRNA sense strand
uuaugcagcuauuucacaa

SEQ ID NO: 149879 - RNA, 19 nt, Homo sapiens
  misc_RNA (1)...(19): siRNA sense strand
gaguaaugaauggugaaua

SEQ ID NO: 149880 - RNA, 19 nt, Homo sapiens
  misc_RNA (1)...(19): siRNA sense strand
ggcaauaaaggagcuagaa

SEQ ID NO: 149881 - RNA, 19 nt, Homo sapiens
  misc_RNA (1)...(19): siRNA sense strand
guugauggaguaaugaaug

SEQ ID NO: 149882 - RNA, 19 nt, Homo sapiens
  misc_RNA (1)...(19): siRNA sense strand
aaugaauggugaauacuac

SEQ ID NO: 149883 - RNA, 19 nt, Homo sapiens
  misc_RNA (1)...(19): siRNA sense strand
gccugaaaguauccguaaa

SEQ ID NO: 149884 - RNA, 19 nt, Homo sapiens
  misc_RNA (1)...(19): siRNA sense strand
ggcagcagaagaagccuuu

SEQ ID NO: 149885 - RNA, 19 nt, Homo sapiens
  misc_RNA (1)...(19): siRNA sense strand
ccugaaaguauccguaaau

SEQ ID NO: 149886 - RNA, 19 nt, Homo sapiens
  misc_RNA (1)...(19): siRNA sense strand
acagacaguuaugcagcua

SEQ ID NO: 149887 - RNA, 19 nt, Homo sapiens
  misc_RNA (1)...(19): siRNA sense strand
ggaguaaugaauggugaau

SEQ ID NO: 149888 - RNA, 19 nt, Homo sapiens
  misc_RNA (1)...(19): siRNA sense strand
cagcagaagaagccuuugu

SEQ ID NO: 149889 - RNA, 19 nt, Homo sapiens
  misc_RNA (1)...(19): siRNA sense strand
acaguuaugcagcuauuuc

SEQ ID NO: 149890 - RNA, 19 nt, Homo sapiens
  misc_RNA (1)...(19): siRNA sense strand
gaaaacaaaagcaaacaac

SEQ ID NO: 149891 - RNA, 19 nt, Homo sapiens
  misc_RNA (1)...(19): siRNA sense strand
guuaugcagcuauuucaca

SEQ ID NO: 149892 - RNA, 19 nt, Homo sapiens
  misc_RNA (1)...(19): siRNA sense strand
ugaaaguauccguaaaugg

SEQ ID NO: 149893 - RNA, 19 nt, Homo sapiens
  misc_RNA (1)...(19): siRNA sense strand
caagcaggccaaagauguc

SEQ ID NO: 149894 - RNA, 19 nt, Homo sapiens
  misc_RNA (1)...(19): siRNA sense strand
gagcuagaagaaugguaug

SEQ ID NO: 149895 - RNA, 19 nt, Homo sapiens
  misc_RNA (1)...(19): siRNA sense strand
gaagaagccuuuguaaaug

SEQ ID NO: 149896 - RNA, 19 nt, Homo sapiens
  misc_RNA (1)...(19): siRNA sense strand
uaaaggagcuagaagaaug

SEQ ID NO: 149897 - RNA, 19 nt, Homo sapiens
  misc_RNA (1)...(19): siRNA sense strand
gaaaguauccguaaaugga

SEQ ID NO: 149898 - RNA, 19 nt, Homo sapiens
  misc_RNA (1)...(19): siRNA sense strand
agaagaagccuuuguaaau

SEQ ID NO: 149899 - RNA, 19 nt, Homo sapiens
  misc_RNA (1)...(19): siRNA sense strand
ggaaaguaaugguccaaca

SEQ ID NO: 149900 - RNA, 19 nt, Homo sapiens
  misc_RNA (1)...(19): siRNA sense strand
gcagaagaagccuuuguaa

SEQ ID NO: 149901 - RNA, 19 nt, Homo sapiens
  misc_RNA (1)...(19): siRNA sense strand
gagagaagaacaaauggaa

SEQ ID NO: 149902 - RNA, 19 nt, Homo sapiens
  misc_RNA (1)...(19): siRNA sense strand
aagaagccuuuguaaauga

SEQ ID NO: 149903 - RNA, 19 nt, Homo sapiens
  misc_RNA (1)...(19): siRNA sense strand
gcaagcaggccaaagaugu

SEQ ID NO: 149904 - RNA, 19 nt, Homo sapiens
  misc_RNA (1)...(19): siRNA sense strand
caauaaaggagcuagaaga

SEQ ID NO: 149905 - RNA, 19 nt, Homo sapiens
  misc_RNA (1)...(19): siRNA sense strand
cagaagaagccuuuguaaa

SEQ ID NO: 149906 - RNA, 19 nt, Homo sapiens
  misc_RNA (1)...(19): siRNA sense strand
ggacgagcagcuacagaaa

SEQ ID NO: 149907 - RNA, 19 nt, Homo sapiens
  misc_RNA (1)...(19): siRNA sense strand
ggugaauacuaccaggaaa

SEQ ID NO: 149908 - RNA, 19 nt, Homo sapiens
  misc_RNA (1)...(19): siRNA sense strand
ggaaagaaaaggcaauaaa

SEQ ID NO: 149909 - RNA, 19 nt, Homo sapiens
  misc_RNA (1)...(19): siRNA sense strand
cuagaagaaugguaugcaa

SEQ ID NO: 149910 - RNA, 19 nt, Homo sapiens
  misc_RNA (1)...(19): siRNA sense strand
agacaguuaugcagcuauu

SEQ ID NO: 149911 - RNA, 19 nt, Homo sapiens
  misc_RNA (1)...(19): siRNA sense strand
ggagcuagaagaaugguau

SEQ ID NO: 149912 - RNA, 19 nt, Homo sapiens
  misc_RNA (1)...(19): siRNA sense strand
ggaugcuguugauggagua

SEQ ID NO: 149913 - RNA, 19 nt, Homo sapiens
  misc_RNA (1)...(19): siRNA sense strand
ccaauucucggaagcaaga

SEQ ID NO: 149914 - RNA, 19 nt, Homo sapiens
  misc_RNA (1)...(19): siRNA sense strand
ggagagaagaacaaaugga

SEQ ID NO: 149915 - RNA, 19 nt, Homo sapiens
  misc_RNA (1)...(19): siRNA sense strand
gaaaguaaugguccaacag

SEQ ID NO: 149916 - RNA, 19 nt, Homo sapiens
  misc_RNA (1)...(19): siRNA sense strand
aauaaaggagcuagaagaa

SEQ ID NO: 149917 - RNA, 19 nt, Homo sapiens
  misc_RNA (1)...(19): siRNA sense strand
ggaagcccuugaugccaau

SEQ ID NO: 149918 - RNA, 19 nt, Homo sapiens
  misc_RNA (1)...(19): siRNA sense strand
aguaaugaauggugaauac

SEQ ID NO: 149919 - RNA, 19 nt, Homo sapiens
  misc_RNA (1)...(19): siRNA sense strand
gaagaaugguaugcaagac

SEQ ID NO: 149920 - RNA, 19 nt, Homo sapiens
  misc_RNA (1)...(19): siRNA sense strand
uaaauggagagaagaacaa

SEQ ID NO: 149921 - RNA, 19 nt, Homo sapiens
  misc_RNA (1)...(19): siRNA sense strand
guaaauggagagaagaaca

SEQ ID NO: 149922 - RNA, 19 nt, Homo sapiens
  misc_RNA (1)...(19): siRNA sense strand
gcagcaagagagcgagauu

SEQ ID NO: 149923 - RNA, 19 nt, Homo sapiens
  misc_RNA (1)...(19): siRNA sense strand
gaaagaaaaggcaauaaag

SEQ ID NO: 149924 - RNA, 19 nt, Homo sapiens
  misc_RNA (1)...(19): siRNA sense strand
gcaauaaaggagcuagaag

SEQ ID NO: 149925 - RNA, 19 nt, Homo sapiens
  misc_RNA (1)...(19): siRNA sense strand
acaaauggaacgcuuggaa

SEQ ID NO: 149926 - RNA, 19 nt, Homo sapiens
  misc_RNA (1)...(19): siRNA sense strand
uuucacaaguggaucgauu

SEQ ID NO: 149927 - RNA, 19 nt, Homo sapiens
  misc_RNA (1)...(19): siRNA sense strand
aaaguaaugguccaacaga

SEQ ID NO: 149928 - RNA, 19 nt, Homo sapiens
  misc_RNA (1)...(19): siRNA sense strand
cuagcaagcaggccaaaga

SEQ ID NO: 149929 - RNA, 19 nt, Homo sapiens
  misc_RNA (1)...(19): siRNA sense strand
agaagaaugguaugcaaga

SEQ ID NO: 149930 - RNA, 19 nt, Homo sapiens
  misc_RNA (1)...(19): siRNA sense strand
cugaaaguauccguaaaug

SEQ ID NO: 149931 - RNA, 19 nt, Homo sapiens
  misc_RNA (1)...(19): siRNA sense strand
uuaugcagcuauuucacaa

SEQ ID NO: 149932 - RNA, 19 nt, Homo sapiens
  misc_RNA (1)...(19): siRNA sense strand
gaguaaugaauggugaaua

SEQ ID NO: 149933 - RNA, 19 nt, Homo sapiens
  misc_RNA (1)...(19): siRNA sense strand
ggcaauaaaggagcuagaa

SEQ ID NO: 149934 - RNA, 19 nt, Homo sapiens
  misc_RNA (1)...(19): siRNA sense strand
guugauggaguaaugaaug

SEQ ID NO: 149935 - RNA, 19 nt, Homo sapiens
  misc_RNA (1)...(19): siRNA sense strand
aaugaauggugaauacuac

SEQ ID NO: 149936 - RNA, 19 nt, Homo sapiens
  misc_RNA (1)...(19): siRNA sense strand
gccugaaaguauccguaaa

SEQ ID NO: 149937 - RNA, 19 nt, Homo sapiens
  misc_RNA (1)...(19): siRNA sense strand
ggcagcagaagaagccuuu

SEQ ID NO: 149938 - RNA, 19 nt, Homo sapiens
  misc_RNA (1)...(19): siRNA sense strand
ccugaaaguauccguaaau

SEQ ID NO: 149939 - RNA, 19 nt, Homo sapiens
  misc_RNA (1)...(19): siRNA sense strand
acagacaguuaugcagcua

SEQ ID NO: 149940 - RNA, 19 nt, Homo sapiens
  misc_RNA (1)...(19): siRNA sense strand
ggaguaaugaauggugaau

SEQ ID NO: 149941 - RNA, 19 nt, Homo sapiens
  misc_RNA (1)...(19): siRNA sense strand
cagcagaagaagccuuugu

SEQ ID NO: 149942 - RNA, 19 nt, Homo sapiens
  misc_RNA (1)...(19): siRNA sense strand
acaguuaugcagcuauuuc

SEQ ID NO: 149943 - RNA, 19 nt, Homo sapiens
  misc_RNA (1)...(19): siRNA sense strand
gaaaacaaaagcaaacaac

SEQ ID NO: 149944 - RNA, 19 nt, Homo sapiens
  misc_RNA (1)...(19): siRNA sense strand
guuaugcagcuauuucaca

SEQ ID NO: 149945 - RNA, 19 nt, Homo sapiens
  misc_RNA (1)...(19): siRNA sense strand
ugaaaguauccguaaaugg

SEQ ID NO: 149946 - RNA, 19 nt, Homo sapiens
  misc_RNA (1)...(19): siRNA sense strand
caagcaggccaaagauguc

SEQ ID NO: 149947 - RNA, 19 nt, Homo sapiens
  misc_RNA (1)...(19): siRNA sense strand
gagcuagaagaaugguaug

SEQ ID NO: 149948 - RNA, 19 nt, Homo sapiens
  misc_RNA (1)...(19): siRNA sense strand
gagcgagauugcaggcaua

SEQ ID NO: 149949 - RNA, 19 nt, Homo sapiens
  misc_RNA (1)...(19): siRNA sense strand
caucuaaggucacggaaca

SEQ ID NO: 149950 - RNA, 19 nt, Homo sapiens
  misc_RNA (1)...(19): siRNA sense strand
gcgccagagugaacaagua

SEQ ID NO: 149951 - RNA, 19 nt, Homo sapiens
  misc_RNA (1)...(19): siRNA sense strand
gaagguggcccagcuaugu

SEQ ID NO: 149952 - RNA, 19 nt, Homo sapiens
  misc_RNA (1)...(19): siRNA sense strand
ggaaccagcgccagaguga

SEQ ID NO: 149953 - RNA, 19 nt, Homo sapiens
  misc_RNA (1)...(19): siRNA sense strand
gugaacaaguagagaagaa

SEQ ID NO: 149954 - RNA, 19 nt, Homo sapiens
  misc_RNA (1)...(19): siRNA sense strand
cgaggaggcuuucgugaag

SEQ ID NO: 149955 - RNA, 19 nt, Homo sapiens
  misc_RNA (1)...(19): siRNA sense strand
gagaagaacaagaucaaca

SEQ ID NO: 149956 - RNA, 19 nt, Homo sapiens
  misc_RNA (1)...(19): siRNA sense strand
gggagaaggccaagaagga

SEQ ID NO: 149957 - RNA, 19 nt, Homo sapiens
  misc_RNA (1)...(19): siRNA sense strand
gaacaaguagagaagaaca

SEQ ID NO: 149958 - RNA, 19 nt, Homo sapiens
  misc_RNA (1)...(19): siRNA sense strand
gcacagagugggagaaggu

SEQ ID NO: 149959 - RNA, 19 nt, Homo sapiens
  misc_RNA (1)...(19): siRNA sense strand
gcagcaagcagugcaaaga

SEQ ID NO: 149960 - RNA, 19 nt, Homo sapiens
  misc_RNA (1)...(19): siRNA sense strand
gcaagcagugcaaagaugu

SEQ ID NO: 149961 - RNA, 19 nt, Homo sapiens
  misc_RNA (1)...(19): siRNA sense strand
ggagaagguggcccagcua

SEQ ID NO: 149962 - RNA, 19 nt, Homo sapiens
  misc_RNA (1)...(19): siRNA sense strand
guagagaagaacaagauca

SEQ ID NO: 149963 - RNA, 19 nt, Homo sapiens
  misc_RNA (1)...(19): siRNA sense strand
gagauugcaggcauagaga

SEQ ID NO: 149964 - RNA, 19 nt, Homo sapiens
  misc_RNA (1)...(19): siRNA sense strand
ggccaacgguccugcugau

SEQ ID NO: 149965 - RNA, 19 nt, Homo sapiens
  misc_RNA (1)...(19): siRNA sense strand
agaagaacaagaucaacaa

SEQ ID NO: 149966 - RNA, 19 nt, Homo sapiens
  misc_RNA (1)...(19): siRNA sense strand
uaaggucacggaacaggaa

SEQ ID NO: 149967 - RNA, 19 nt, Homo sapiens
  misc_RNA (1)...(19): siRNA sense strand
gagaagguggcccagcuau

SEQ ID NO: 149968 - RNA, 19 nt, Homo sapiens
  misc_RNA (1)...(19): siRNA sense strand
uagagaagaacaagaucaa

SEQ ID NO: 149969 - RNA, 19 nt, Homo sapiens
  misc_RNA (1)...(19): siRNA sense strand
gaagaacaagaucaacaac

SEQ ID NO: 149970 - RNA, 19 nt, Homo sapiens
  misc_RNA (1)...(19): siRNA sense strand
ccagcuaugugacuucaac

SEQ ID NO: 149971 - RNA, 19 nt, Homo sapiens
  misc_RNA (1)...(19): siRNA sense strand
gcugaugacuuuggcuucu

SEQ ID NO: 149972 - RNA, 19 nt, Homo sapiens
  misc_RNA (1)...(19): siRNA sense strand
caauggagauguguuucag

SEQ ID NO: 149973 - RNA, 19 nt, Homo sapiens
  misc_RNA (1)...(19): siRNA sense strand
agaggaaacggcugcaaga

SEQ ID NO: 149974 - RNA, 19 nt, Homo sapiens
  misc_RNA (1)...(19): siRNA sense strand
ggcgagaggagcagaggaa

SEQ ID NO: 149975 - RNA, 19 nt, Homo sapiens
  misc_RNA (1)...(19): siRNA sense strand
gagcagcaagcagugcaaa

SEQ ID NO: 149976 - RNA, 19 nt, Homo sapiens
  misc_RNA (1)...(19): siRNA sense strand
gcccagcuaugugacuuca

SEQ ID NO: 149977 - RNA, 19 nt, Homo sapiens
  misc_RNA (1)...(19): siRNA sense strand
ccgaggaggcuuucgugaa

SEQ ID NO: 149978 - RNA, 19 nt, Homo sapiens
  misc_RNA (1)...(19): siRNA sense strand
ucaauggagauguguuuca

SEQ ID NO: 149979 - RNA, 19 nt, Homo sapiens
  misc_RNA (1)...(19): siRNA sense strand
caaguagagaagaacaaga

SEQ ID NO: 149980 - RNA, 19 nt, Homo sapiens
  misc_RNA (1)...(19): siRNA sense strand
agagugaacaaguagagaa

SEQ ID NO: 149981 - RNA, 19 nt, Homo sapiens
  misc_RNA (1)...(19): siRNA sense strand
ugaugacuuuggcuucuuc

SEQ ID NO: 149982 - RNA, 19 nt, Homo sapiens
  misc_RNA (1)...(19): siRNA sense strand
ccugagagcauccgcaagu

SEQ ID NO: 149983 - RNA, 19 nt, Homo sapiens
  misc_RNA (1)...(19): siRNA sense strand
gaaccagcgccagagugaa

SEQ ID NO: 149984 - RNA, 19 nt, Homo sapiens
  misc_RNA (1)...(19): siRNA sense strand
ggcgggagaaggccaagaa

SEQ ID NO: 149985 - RNA, 19 nt, Homo sapiens
  misc_RNA (1)...(19): siRNA sense strand
gagaggagcagaggaaacg

SEQ ID NO: 149986 - RNA, 19 nt, Homo sapiens
  misc_RNA (1)...(19): siRNA sense strand
cgagauugcaggcauagag

SEQ ID NO: 149987 - RNA, 19 nt, Homo sapiens
  misc_RNA (1)...(19): siRNA sense strand
agcaagcagugcaaagaug

SEQ ID NO: 149988 - RNA, 19 nt, Homo sapiens
  misc_RNA (1)...(19): siRNA sense strand
cagcaagcagugcaaagau

SEQ ID NO: 149989 - RNA, 19 nt, Homo sapiens
  misc_RNA (1)...(19): siRNA sense strand
agucaauggagauguguuu

SEQ ID NO: 149990 - RNA, 19 nt, Homo sapiens
  misc_RNA (1)...(19): siRNA sense strand
gaccacagucaauggagau

SEQ ID NO: 149991 - RNA, 19 nt, Homo sapiens
  misc_RNA (1)...(19): siRNA sense strand
gagcgagauugcaggcaua

SEQ ID NO: 149992 - RNA, 19 nt, Homo sapiens
  misc_RNA (1)...(19): siRNA sense strand
caucuaaggucacggaaca

SEQ ID NO: 149993 - RNA, 19 nt, Homo sapiens
  misc_RNA (1)...(19): siRNA sense strand
gcgccagagugaacaagua

SEQ ID NO: 149994 - RNA, 19 nt, Homo sapiens
  misc_RNA (1)...(19): siRNA sense strand
gaagguggcccagcuaugu

SEQ ID NO: 149995 - RNA, 19 nt, Homo sapiens
  misc_RNA (1)...(19): siRNA sense strand
ggaaccagcgccagaguga

SEQ ID NO: 149996 - RNA, 19 nt, Homo sapiens
  misc_RNA (1)...(19): siRNA sense strand
gugaacaaguagagaagaa

SEQ ID NO: 149997 - RNA, 19 nt, Homo sapiens
  misc_RNA (1)...(19): siRNA sense strand
cgaggaggcuuucgugaag

SEQ ID NO: 149998 - RNA, 19 nt, Homo sapiens
  misc_RNA (1)...(19): siRNA sense strand
gagaagaacaagaucaaca

SEQ ID NO: 149999 - RNA, 19 nt, Homo sapiens
  misc_RNA (1)...(19): siRNA sense strand
gggagaaggccaagaagga

SEQ ID NO: 150000 - RNA, 19 nt, Homo sapiens
  misc_RNA (1)...(19): siRNA sense strand
gaacaaguagagaagaaca

SEQ ID NO: 150001 - RNA, 19 nt, Homo sapiens
  misc_RNA (1)...(19): siRNA sense strand
gcacagagugggagaaggu

SEQ ID NO: 150002 - RNA, 19 nt, Homo sapiens
  misc_RNA (1)...(19): siRNA sense strand
gcagcaagcagugcaaaga

SEQ ID NO: 150003 - RNA, 19 nt, Homo sapiens
  misc_RNA (1)...(19): siRNA sense strand
gcaagcagugcaaagaugu

SEQ ID NO: 150004 - RNA, 19 nt, Homo sapiens
  misc_RNA (1)...(19): siRNA sense strand
ggagaagguggcccagcua

SEQ ID NO: 150005 - RNA, 19 nt, Homo sapiens
  misc_RNA (1)...(19): siRNA sense strand
guagagaagaacaagauca

SEQ ID NO: 150006 - RNA, 19 nt, Homo sapiens
  misc_RNA (1)...(19): siRNA sense strand
gagauugcaggcauagaga

SEQ ID NO: 150007 - RNA, 19 nt, Homo sapiens
  misc_RNA (1)...(19): siRNA sense strand
ggccaacgguccugcugau

SEQ ID NO: 150008 - RNA, 19 nt, Homo sapiens
  misc_RNA (1)...(19): siRNA sense strand
agaagaacaagaucaacaa

SEQ ID NO: 150009 - RNA, 19 nt, Homo sapiens
  misc_RNA (1)...(19): siRNA sense strand
uaaggucacggaacaggaa

SEQ ID NO: 150010 - RNA, 19 nt, Homo sapiens
  misc_RNA (1)...(19): siRNA sense strand
gagaagguggcccagcuau

SEQ ID NO: 150011 - RNA, 19 nt, Homo sapiens
  misc_RNA (1)...(19): siRNA sense strand
uagagaagaacaagaucaa

SEQ ID NO: 150012 - RNA, 19 nt, Homo sapiens
  misc_RNA (1)...(19): siRNA sense strand
gaagaacaagaucaacaac

SEQ ID NO: 150013 - RNA, 19 nt, Homo sapiens
  misc_RNA (1)...(19): siRNA sense strand
ccagcuaugugacuucaac

SEQ ID NO: 150014 - RNA, 19 nt, Homo sapiens
  misc_RNA (1)...(19): siRNA sense strand
gcugaugacuuuggcuucu

SEQ ID NO: 150015 - RNA, 19 nt, Homo sapiens
  misc_RNA (1)...(19): siRNA sense strand
caauggagauguguuucag

SEQ ID NO: 150016 - RNA, 19 nt, Homo sapiens
  misc_RNA (1)...(19): siRNA sense strand
agaggaaacggcugcaaga

SEQ ID NO: 150017 - RNA, 19 nt, Homo sapiens
  misc_RNA (1)...(19): siRNA sense strand
ggcgagaggagcagaggaa

SEQ ID NO: 150018 - RNA, 19 nt, Homo sapiens
  misc_RNA (1)...(19): siRNA sense strand
gagcagcaagcagugcaaa

SEQ ID NO: 150019 - RNA, 19 nt, Homo sapiens
  misc_RNA (1)...(19): siRNA sense strand
gcccagcuaugugacuuca

SEQ ID NO: 150020 - RNA, 19 nt, Homo sapiens
  misc_RNA (1)...(19): siRNA sense strand
ccgaggaggcuuucgugaa

SEQ ID NO: 150021 - RNA, 19 nt, Homo sapiens
  misc_RNA (1)...(19): siRNA sense strand
ucaauggagauguguuuca

SEQ ID NO: 150022 - RNA, 19 nt, Homo sapiens
  misc_RNA (1)...(19): siRNA sense strand
caaguagagaagaacaaga

SEQ ID NO: 150023 - RNA, 19 nt, Homo sapiens
  misc_RNA (1)...(19): siRNA sense strand
agagugaacaaguagagaa

SEQ ID NO: 150024 - RNA, 19 nt, Homo sapiens
  misc_RNA (1)...(19): siRNA sense strand
ugaugacuuuggcuucuuc

SEQ ID NO: 150025 - RNA, 19 nt, Homo sapiens
  misc_RNA (1)...(19): siRNA sense strand
ccugagagcauccgcaagu

SEQ ID NO: 150026 - RNA, 19 nt, Homo sapiens
  misc_RNA (1)...(19): siRNA sense strand
gaaccagcgccagagugaa

SEQ ID NO: 150027 - RNA, 19 nt, Homo sapiens
  misc_RNA (1)...(19): siRNA sense strand
ggcgggagaaggccaagaa

SEQ ID NO: 150028 - RNA, 19 nt, Homo sapiens
  misc_RNA (1)...(19): siRNA sense strand
gagaggagcagaggaaacg

SEQ ID NO: 150029 - RNA, 19 nt, Homo sapiens
  misc_RNA (1)...(19): siRNA sense strand
cgagauugcaggcauagag

SEQ ID NO: 150030 - RNA, 19 nt, Homo sapiens
  misc_RNA (1)...(19): siRNA sense strand
agcaagcagugcaaagaug

SEQ ID NO: 150031 - RNA, 19 nt, Homo sapiens
  misc_RNA (1)...(19): siRNA sense strand
cagcaagcagugcaaagau

SEQ ID NO: 150032 - RNA, 19 nt, Homo sapiens
  misc_RNA (1)...(19): siRNA sense strand
agucaauggagauguguuu

SEQ ID NO: 150033 - RNA, 19 nt, Homo sapiens
  misc_RNA (1)...(19): siRNA sense strand
gaccacagucaauggagau

SEQ ID NO: 150034 - RNA, 19 nt, Homo sapiens
  misc_RNA (1)...(19): siRNA sense strand
gcagagaaguuguuuguga

SEQ ID NO: 150035 - RNA, 19 nt, Homo sapiens
  misc_RNA (1)...(19): siRNA sense strand
gcaaagugauccaguguuu

SEQ ID NO: 150036 - RNA, 19 nt, Homo sapiens
  misc_RNA (1)...(19): siRNA sense strand
gcaguguacuuccuucuua

SEQ ID NO: 150037 - RNA, 19 nt, Homo sapiens
  misc_RNA (1)...(19): siRNA sense strand
aaaccaaccucuggaauua

SEQ ID NO: 150038 - RNA, 19 nt, Homo sapiens
  misc_RNA (1)...(19): siRNA sense strand
gcacacgggucauggagua

SEQ ID NO: 150039 - RNA, 19 nt, Homo sapiens
  misc_RNA (1)...(19): siRNA sense strand
gagagacgguccagaaauu

SEQ ID NO: 150040 - RNA, 19 nt, Homo sapiens
  misc_RNA (1)...(19): siRNA sense strand
gggaggaucuaguuaaauu

SEQ ID NO: 150041 - RNA, 19 nt, Homo sapiens
  misc_RNA (1)...(19): siRNA sense strand
gcacaggaaucuacagaau

SEQ ID NO: 150042 - RNA, 19 nt, Homo sapiens
  misc_RNA (1)...(19): siRNA sense strand
ccgaguggcuugucaauuu

SEQ ID NO: 150043 - RNA, 19 nt, Homo sapiens
  misc_RNA (1)...(19): siRNA sense strand
guaagcaacuccuagagaa

SEQ ID NO: 150044 - RNA, 19 nt, Homo sapiens
  misc_RNA (1)...(19): siRNA sense strand
gaggaggccuucaccguuu

SEQ ID NO: 150045 - RNA, 19 nt, Homo sapiens
  misc_RNA (1)...(19): siRNA sense strand
gaaagcaguagauguguuu

SEQ ID NO: 150046 - RNA, 19 nt, Homo sapiens
  misc_RNA (1)...(19): siRNA sense strand
gagaggauaugccgagaga

SEQ ID NO: 150047 - RNA, 19 nt, Homo sapiens
  misc_RNA (1)...(19): siRNA sense strand
gagagaaugccuacuauga

SEQ ID NO: 150048 - RNA, 19 nt, Homo sapiens
  misc_RNA (1)...(19): siRNA sense strand
gcacaucauugaaguugga

SEQ ID NO: 150049 - RNA, 19 nt, Homo sapiens
  misc_RNA (1)...(19): siRNA sense strand
gagagagaaugccuacuau

SEQ ID NO: 150050 - RNA, 19 nt, Homo sapiens
  misc_RNA (1)...(19): siRNA sense strand
agaaguggcugaaagaaga

SEQ ID NO: 150051 - RNA, 19 nt, Homo sapiens
  misc_RNA (1)...(19): siRNA sense strand
gcacaggucacgaucauug

SEQ ID NO: 150052 - RNA, 19 nt, Homo sapiens
  misc_RNA (1)...(19): siRNA sense strand
gauccucccuguucgcuuu

SEQ ID NO: 150053 - RNA, 19 nt, Homo sapiens
  misc_RNA (1)...(19): siRNA sense strand
caaccaacgugcuucagaa

SEQ ID NO: 150054 - RNA, 19 nt, Homo sapiens
  misc_RNA (1)...(19): siRNA sense strand
cagccgaccugccuaauga

SEQ ID NO: 150055 - RNA, 19 nt, Homo sapiens
  misc_RNA (1)...(19): siRNA sense strand
gagaaugccuacuaugaca

SEQ ID NO: 150056 - RNA, 19 nt, Homo sapiens
  misc_RNA (1)...(19): siRNA sense strand
guccagaaauuccagagua

SEQ ID NO: 150057 - RNA, 19 nt, Homo sapiens
  misc_RNA (1)...(19): siRNA sense strand
acaaaggccucuucuacuu

SEQ ID NO: 150058 - RNA, 19 nt, Homo sapiens
  misc_RNA (1)...(19): siRNA sense strand
caaugcagcucuacucugu

SEQ ID NO: 150059 - RNA, 19 nt, Homo sapiens
  misc_RNA (1)...(19): siRNA sense strand
gaccacaccuggacaguca

SEQ ID NO: 150060 - RNA, 19 nt, Homo sapiens
  misc_RNA (1)...(19): siRNA sense strand
ggacaucauuaccaagguu

SEQ ID NO: 150061 - RNA, 19 nt, Homo sapiens
  misc_RNA (1)...(19): siRNA sense strand
gggacgacccuuccucuua

SEQ ID NO: 150062 - RNA, 19 nt, Homo sapiens
  misc_RNA (1)...(19): siRNA sense strand
ggaccgggcauaugaguuu

SEQ ID NO: 150063 - RNA, 19 nt, Homo sapiens
  misc_RNA (1)...(19): siRNA sense strand
gaagauaguucuggauaac

SEQ ID NO: 150064 - RNA, 19 nt, Homo sapiens
  misc_RNA (1)...(19): siRNA sense strand
gcacuacaccgaccucuau

SEQ ID NO: 150065 - RNA, 19 nt, Homo sapiens
  misc_RNA (1)...(19): siRNA sense strand
cauggaaucugacaaguuc

SEQ ID NO: 150066 - RNA, 19 nt, Homo sapiens
  misc_RNA (1)...(19): siRNA sense strand
uggaggagcugaugugcua

SEQ ID NO: 150067 - RNA, 19 nt, Homo sapiens
  misc_RNA (1)...(19): siRNA sense strand
gccaucaacuccuauauca

SEQ ID NO: 150068 - RNA, 19 nt, Homo sapiens
  misc_RNA (1)...(19): siRNA sense strand
agacauggcuguuggagau

SEQ ID NO: 150069 - RNA, 19 nt, Homo sapiens
  misc_RNA (1)...(19): siRNA sense strand
guugguggcugaaguagaa

SEQ ID NO: 150070 - RNA, 19 nt, Homo sapiens
  misc_RNA (1)...(19): siRNA sense strand
caauuucuuuggcuccuua

SEQ ID NO: 150071 - RNA, 19 nt, Homo sapiens
  misc_RNA (1)...(19): siRNA sense strand
ccaugaagauguuugauag

SEQ ID NO: 150072 - RNA, 19 nt, Homo sapiens
  misc_RNA (1)...(19): siRNA sense strand
ccacaaguuugauaugaau

SEQ ID NO: 150073 - RNA, 19 nt, Homo sapiens
  misc_RNA (1)...(19): siRNA sense strand
gcagagagugccaucauga

SEQ ID NO: 150074 - RNA, 19 nt, Homo sapiens
  misc_RNA (1)...(19): siRNA sense strand
ucaaggacaucauuaccaa

SEQ ID NO: 150075 - RNA, 19 nt, Homo sapiens
  misc_RNA (1)...(19): siRNA sense strand
ggacgacccuuccucuuac

SEQ ID NO: 150076 - RNA, 19 nt, Homo sapiens
  misc_RNA (1)...(19): siRNA sense strand
agaaagauuuggugaagga

SEQ ID NO: 150077 - RNA, 19 nt, Homo sapiens
  misc_RNA (1)...(19): siRNA sense strand
ugacaugagugacccaaug

SEQ ID NO: 150078 - RNA, 19 nt, Homo sapiens
  misc_RNA (1)...(19): siRNA sense strand
gcucugggcucacguccuu

SEQ ID NO: 150079 - RNA, 19 nt, Homo sapiens
  misc_RNA (1)...(19): siRNA sense strand
cuaaugaacugauugaacu

SEQ ID NO: 150080 - RNA, 19 nt, Homo sapiens
  misc_RNA (1)...(19): siRNA sense strand
gcccagacauggugcuuga

SEQ ID NO: 150081 - RNA, 19 nt, Homo sapiens
  misc_RNA (1)...(19): siRNA sense strand
ugauugaacugcuggagaa

SEQ ID NO: 150082 - RNA, 19 nt, Homo sapiens
  misc_RNA (1)...(19): siRNA sense strand
caaaccaaccucuggaauu

SEQ ID NO: 150083 - RNA, 19 nt, Homo sapiens
  misc_RNA (1)...(19): siRNA sense strand
uccaugaccuuguccuaua

SEQ ID NO: 150084 - RNA, 19 nt, Homo sapiens
  misc_RNA (1)...(19): siRNA sense strand
ucaaggagguggagaggau

SEQ ID NO: 150085 - RNA, 19 nt, Homo sapiens
  misc_RNA (1)...(19): siRNA sense strand
ggacugaugaguaccagaa

SEQ ID NO: 150086 - RNA, 19 nt, Homo sapiens
  misc_RNA (1)...(19): siRNA sense strand
acagagcccugcaguucua

SEQ ID NO: 150087 - RNA, 19 nt, Homo sapiens
  misc_RNA (1)...(19): siRNA sense strand
ccagaaagauuuggugaag

SEQ ID NO: 150088 - RNA, 19 nt, Homo sapiens
  misc_RNA (1)...(19): siRNA sense strand
agagguacauugagaucua

SEQ ID NO: 150089 - RNA, 19 nt, Homo sapiens
  misc_RNA (1)...(19): siRNA sense strand
gaccuuguccuauauuuau

SEQ ID NO: 150090 - RNA, 19 nt, Homo sapiens
  misc_RNA (1)...(19): siRNA sense strand
uuggaugccuugaagaaua

SEQ ID NO: 150091 - RNA, 19 nt, Homo sapiens
  misc_RNA (1)...(19): siRNA sense strand
gcgcagauccucccuguuc

SEQ ID NO: 150092 - RNA, 19 nt, Homo sapiens
  misc_RNA (1)...(19): siRNA sense strand
ugagagagaaugccuacua

SEQ ID NO: 150093 - RNA, 19 nt, Homo sapiens
  misc_RNA (1)...(19): siRNA sense strand
gaaggagggucaguucaag

SEQ ID NO: 150094 - RNA, 19 nt, Homo sapiens
  misc_RNA (1)...(19): siRNA sense strand
ggaaggagggucaguucaa

SEQ ID NO: 150095 - RNA, 19 nt, Homo sapiens
  misc_RNA (1)...(19): siRNA sense strand
ggaaggaggugugcuuugc

SEQ ID NO: 150096 - RNA, 19 nt, Homo sapiens
  misc_RNA (1)...(19): siRNA sense strand
caucaacuccuauaucaga

SEQ ID NO: 150097 - RNA, 19 nt, Homo sapiens
  misc_RNA (1)...(19): siRNA sense strand
aaagaaagcaguagaugug

SEQ ID NO: 150098 - RNA, 19 nt, Homo sapiens
  misc_RNA (1)...(19): siRNA sense strand
ugacagagaaggaggacua

SEQ ID NO: 150099 - RNA, 19 nt, Homo sapiens
  misc_RNA (1)...(19): siRNA sense strand
ccagagagacgguccagaa

SEQ ID NO: 150100 - RNA, 19 nt, Homo sapiens
  misc_RNA (1)...(19): siRNA sense strand
agaaguugcugcagugguu

SEQ ID NO: 150101 - RNA, 19 nt, Homo sapiens
  misc_RNA (1)...(19): siRNA sense strand
gagcugguguuccucuaug

SEQ ID NO: 150102 - RNA, 19 nt, Homo sapiens
  misc_RNA (1)...(19): siRNA sense strand
guacuuccuucuuauugga

SEQ ID NO: 150103 - RNA, 19 nt, Homo sapiens
  misc_RNA (1)...(19): siRNA sense strand
gaauuaauccagcuaacau

SEQ ID NO: 150104 - RNA, 19 nt, Homo sapiens
  misc_RNA (1)...(19): siRNA sense strand
gagaaguuguuugugagaa

SEQ ID NO: 150105 - RNA, 19 nt, Homo sapiens
  misc_RNA (1)...(19): siRNA sense strand
ucugacaaguucauaugua

SEQ ID NO: 150106 - RNA, 19 nt, Homo sapiens
  misc_RNA (1)...(19): siRNA sense strand
gcaaaugugccaagcaaag

SEQ ID NO: 150107 - RNA, 19 nt, Homo sapiens
  misc_RNA (1)...(19): siRNA sense strand
gauuggagcuaaacauggu

SEQ ID NO: 150108 - RNA, 19 nt, Homo sapiens
  misc_RNA (1)...(19): siRNA sense strand
ccucuuaccuggaaguugu

SEQ ID NO: 150109 - RNA, 19 nt, Homo sapiens
  misc_RNA (1)...(19): siRNA sense strand
gauccugacugccaucaag

SEQ ID NO: 150110 - RNA, 19 nt, Homo sapiens
  misc_RNA (1)...(19): siRNA sense strand
cagaggagcucggagacuu

SEQ ID NO: 150111 - RNA, 19 nt, Homo sapiens
  misc_RNA (1)...(19): siRNA sense strand
ugaggaagauaacauugug

SEQ ID NO: 150112 - RNA, 19 nt, Homo sapiens
  misc_RNA (1)...(19): siRNA sense strand
gggcagagaaguuguuugu

SEQ ID NO: 150113 - RNA, 19 nt, Homo sapiens
  misc_RNA (1)...(19): siRNA sense strand
ucaaccaccugcugacaga

SEQ ID NO: 150114 - RNA, 19 nt, Homo sapiens
  misc_RNA (1)...(19): siRNA sense strand
acaaaccacugcucaucaa

SEQ ID NO: 150115 - RNA, 19 nt, Homo sapiens
  misc_RNA (1)...(19): siRNA sense strand
gcagguggccucuaaguac

SEQ ID NO: 150116 - RNA, 19 nt, Homo sapiens
  misc_RNA (1)...(19): siRNA sense strand
uggaugccuugaagaauaa

SEQ ID NO: 150117 - RNA, 19 nt, Homo sapiens
  misc_RNA (1)...(19): siRNA sense strand
agaaguuguuugugagaaa

SEQ ID NO: 150118 - RNA, 19 nt, Homo sapiens
  misc_RNA (1)...(19): siRNA sense strand
cugccaagcugcucuauag

SEQ ID NO: 150119 - RNA, 19 nt, Homo sapiens
  misc_RNA (1)...(19): siRNA sense strand
gaagccaucaacuccuaua

SEQ ID NO: 150120 - RNA, 19 nt, Homo sapiens
  misc_RNA (1)...(19): siRNA sense strand
aagcccagcuccagaaaga

SEQ ID NO: 150121 - RNA, 19 nt, Homo sapiens
  misc_RNA (1)...(19): siRNA sense strand
acaggaaucuacagaaucu

SEQ ID NO: 150122 - RNA, 19 nt, Homo sapiens
  misc_RNA (1)...(19): siRNA sense strand
ccaggaucguggcuacuuu

SEQ ID NO: 150123 - RNA, 19 nt, Homo sapiens
  misc_RNA (1)...(19): siRNA sense strand
gaugugcuauuaccaggau

SEQ ID NO: 150124 - RNA, 19 nt, Homo sapiens
  misc_RNA (1)...(19): siRNA sense strand
cagaggcacagaaugauuu

SEQ ID NO: 150125 - RNA, 19 nt, Homo sapiens
  misc_RNA (1)...(19): siRNA sense strand
acaacaagagugugaauga

SEQ ID NO: 150126 - RNA, 19 nt, Homo sapiens
  misc_RNA (1)...(19): siRNA sense strand
cugcagagguacauugaga

SEQ ID NO: 150127 - RNA, 19 nt, Homo sapiens
  misc_RNA (1)...(19): siRNA sense strand
gaagaucaguccggaacag

SEQ ID NO: 150128 - RNA, 19 nt, Homo sapiens
  misc_RNA (1)...(19): siRNA sense strand
cuagagaaguggcugaaag

SEQ ID NO: 150129 - RNA, 19 nt, Homo sapiens
  misc_RNA (1)...(19): siRNA sense strand
caaaguauggcuaucuuca

SEQ ID NO: 150130 - RNA, 19 nt, Homo sapiens
  misc_RNA (1)...(19): siRNA sense strand
gaucacaaaguauggcuau

SEQ ID NO: 150131 - RNA, 19 nt, Homo sapiens
  misc_RNA (1)...(19): siRNA sense strand
gcaguucuauuuggauuac

SEQ ID NO: 150132 - RNA, 19 nt, Homo sapiens
  misc_RNA (1)...(19): siRNA sense strand
cuucgcagcuugucucuuc

SEQ ID NO: 150133 - RNA, 19 nt, Homo sapiens
  misc_RNA (1)...(19): siRNA sense strand
caacaagagugugaaugag

SEQ ID NO: 150134 - RNA, 19 nt, Homo sapiens
  misc_RNA (1)...(19): siRNA sense strand
gcagagaaguuguuuguga

SEQ ID NO: 150135 - RNA, 19 nt, Homo sapiens
  misc_RNA (1)...(19): siRNA sense strand
gcaaagugauccaguguuu

SEQ ID NO: 150136 - RNA, 19 nt, Homo sapiens
  misc_RNA (1)...(19): siRNA sense strand
gcaguguacuuccuucuua

SEQ ID NO: 150137 - RNA, 19 nt, Homo sapiens
  misc_RNA (1)...(19): siRNA sense strand
aaaccaaccucuggaauua

SEQ ID NO: 150138 - RNA, 19 nt, Homo sapiens
  misc_RNA (1)...(19): siRNA sense strand
gcacacgggucauggagua

SEQ ID NO: 150139 - RNA, 19 nt, Homo sapiens
  misc_RNA (1)...(19): siRNA sense strand
gagagacgguccagaaauu

SEQ ID NO: 150140 - RNA, 19 nt, Homo sapiens
  misc_RNA (1)...(19): siRNA sense strand
gggaggaucuaguuaaauu

SEQ ID NO: 150141 - RNA, 19 nt, Homo sapiens
  misc_RNA (1)...(19): siRNA sense strand
gcacaggaaucuacagaau

SEQ ID NO: 150142 - RNA, 19 nt, Homo sapiens
  misc_RNA (1)...(19): siRNA sense strand
ccgaguggcuugucaauuu

SEQ ID NO: 150143 - RNA, 19 nt, Homo sapiens
  misc_RNA (1)...(19): siRNA sense strand
guaagcaacuccuagagaa

SEQ ID NO: 150144 - RNA, 19 nt, Homo sapiens
  misc_RNA (1)...(19): siRNA sense strand
gaggaggccuucaccguuu

SEQ ID NO: 150145 - RNA, 19 nt, Homo sapiens
  misc_RNA (1)...(19): siRNA sense strand
gaaagcaguagauguguuu

SEQ ID NO: 150146 - RNA, 19 nt, Homo sapiens
  misc_RNA (1)...(19): siRNA sense strand
gagaggauaugccgagaga

SEQ ID NO: 150147 - RNA, 19 nt, Homo sapiens
  misc_RNA (1)...(19): siRNA sense strand
gagagaaugccuacuauga

SEQ ID NO: 150148 - RNA, 19 nt, Homo sapiens
  misc_RNA (1)...(19): siRNA sense strand
gcacaucauugaaguugga

SEQ ID NO: 150149 - RNA, 19 nt, Homo sapiens
  misc_RNA (1)...(19): siRNA sense strand
gagagagaaugccuacuau

SEQ ID NO: 150150 - RNA, 19 nt, Homo sapiens
  misc_RNA (1)...(19): siRNA sense strand
agaaguggcugaaagaaga

SEQ ID NO: 150151 - RNA, 19 nt, Homo sapiens
  misc_RNA (1)...(19): siRNA sense strand
gcacaggucacgaucauug

SEQ ID NO: 150152 - RNA, 19 nt, Homo sapiens
  misc_RNA (1)...(19): siRNA sense strand
gauccucccuguucgcuuu

SEQ ID NO: 150153 - RNA, 19 nt, Homo sapiens
  misc_RNA (1)...(19): siRNA sense strand
caaccaacgugcuucagaa

SEQ ID NO: 150154 - RNA, 19 nt, Homo sapiens
  misc_RNA (1)...(19): siRNA sense strand
cagccgaccugccuaauga

SEQ ID NO: 150155 - RNA, 19 nt, Homo sapiens
  misc_RNA (1)...(19): siRNA sense strand
gagaaugccuacuaugaca

SEQ ID NO: 150156 - RNA, 19 nt, Homo sapiens
  misc_RNA (1)...(19): siRNA sense strand
guccagaaauuccagagua

SEQ ID NO: 150157 - RNA, 19 nt, Homo sapiens
  misc_RNA (1)...(19): siRNA sense strand
acaaaggccucuucuacuu

SEQ ID NO: 150158 - RNA, 19 nt, Homo sapiens
  misc_RNA (1)...(19): siRNA sense strand
caaugcagcucuacucugu

SEQ ID NO: 150159 - RNA, 19 nt, Homo sapiens
  misc_RNA (1)...(19): siRNA sense strand
gaccacaccuggacaguca

SEQ ID NO: 150160 - RNA, 19 nt, Homo sapiens
  misc_RNA (1)...(19): siRNA sense strand
ggacaucauuaccaagguu

SEQ ID NO: 150161 - RNA, 19 nt, Homo sapiens
  misc_RNA (1)...(19): siRNA sense strand
gggacgacccuuccucuua

SEQ ID NO: 150162 - RNA, 19 nt, Homo sapiens
  misc_RNA (1)...(19): siRNA sense strand
ggaccgggcauaugaguuu

SEQ ID NO: 150163 - RNA, 19 nt, Homo sapiens
  misc_RNA (1)...(19): siRNA sense strand
gaagauaguucuggauaac

SEQ ID NO: 150164 - RNA, 19 nt, Homo sapiens
  misc_RNA (1)...(19): siRNA sense strand
gcacuacaccgaccucuau

SEQ ID NO: 150165 - RNA, 19 nt, Homo sapiens
  misc_RNA (1)...(19): siRNA sense strand
cauggaaucugacaaguuc

SEQ ID NO: 150166 - RNA, 19 nt, Homo sapiens
  misc_RNA (1)...(19): siRNA sense strand
uggaggagcugaugugcua

SEQ ID NO: 150167 - RNA, 19 nt, Homo sapiens
  misc_RNA (1)...(19): siRNA sense strand
gccaucaacuccuauauca

SEQ ID NO: 150168 - RNA, 19 nt, Homo sapiens
  misc_RNA (1)...(19): siRNA sense strand
agacauggcuguuggagau

SEQ ID NO: 150169 - RNA, 19 nt, Homo sapiens
  misc_RNA (1)...(19): siRNA sense strand
guugguggcugaaguagaa

SEQ ID NO: 150170 - RNA, 19 nt, Homo sapiens
  misc_RNA (1)...(19): siRNA sense strand
caauuucuuuggcuccuua

SEQ ID NO: 150171 - RNA, 19 nt, Homo sapiens
  misc_RNA (1)...(19): siRNA sense strand
ccaugaagauguuugauag

SEQ ID NO: 150172 - RNA, 19 nt, Homo sapiens
  misc_RNA (1)...(19): siRNA sense strand
ccacaaguuugauaugaau

SEQ ID NO: 150173 - RNA, 19 nt, Homo sapiens
  misc_RNA (1)...(19): siRNA sense strand
gcagagagugccaucauga

SEQ ID NO: 150174 - RNA, 19 nt, Homo sapiens
  misc_RNA (1)...(19): siRNA sense strand
ucaaggacaucauuaccaa

SEQ ID NO: 150175 - RNA, 19 nt, Homo sapiens
  misc_RNA (1)...(19): siRNA sense strand
ggacgacccuuccucuuac

SEQ ID NO: 150176 - RNA, 19 nt, Homo sapiens
  misc_RNA (1)...(19): siRNA sense strand
agaaagauuuggugaagga

SEQ ID NO: 150177 - RNA, 19 nt, Homo sapiens
  misc_RNA (1)...(19): siRNA sense strand
ugacaugagugacccaaug

SEQ ID NO: 150178 - RNA, 19 nt, Homo sapiens
  misc_RNA (1)...(19): siRNA sense strand
gcucugggcucacguccuu

SEQ ID NO: 150179 - RNA, 19 nt, Homo sapiens
  misc_RNA (1)...(19): siRNA sense strand
cuaaugaacugauugaacu

SEQ ID NO: 150180 - RNA, 19 nt, Homo sapiens
  misc_RNA (1)...(19): siRNA sense strand
gcccagacauggugcuuga

SEQ ID NO: 150181 - RNA, 19 nt, Homo sapiens
  misc_RNA (1)...(19): siRNA sense strand
ugauugaacugcuggagaa

SEQ ID NO: 150182 - RNA, 19 nt, Homo sapiens
  misc_RNA (1)...(19): siRNA sense strand
caaaccaaccucuggaauu

SEQ ID NO: 150183 - RNA, 19 nt, Homo sapiens
  misc_RNA (1)...(19): siRNA sense strand
uccaugaccuuguccuaua

SEQ ID NO: 150184 - RNA, 19 nt, Homo sapiens
  misc_RNA (1)...(19): siRNA sense strand
ucaaggagguggagaggau

SEQ ID NO: 150185 - RNA, 19 nt, Homo sapiens
  misc_RNA (1)...(19): siRNA sense strand
ggacugaugaguaccagaa

SEQ ID NO: 150186 - RNA, 19 nt, Homo sapiens
  misc_RNA (1)...(19): siRNA sense strand
acagagcccugcaguucua

SEQ ID NO: 150187 - RNA, 19 nt, Homo sapiens
  misc_RNA (1)...(19): siRNA sense strand
ccagaaagauuuggugaag

SEQ ID NO: 150188 - RNA, 19 nt, Homo sapiens
  misc_RNA (1)...(19): siRNA sense strand
agagguacauugagaucua

SEQ ID NO: 150189 - RNA, 19 nt, Homo sapiens
  misc_RNA (1)...(19): siRNA sense strand
gaccuuguccuauauuuau

SEQ ID NO: 150190 - RNA, 19 nt, Homo sapiens
  misc_RNA (1)...(19): siRNA sense strand
uuggaugccuugaagaaua

SEQ ID NO: 150191 - RNA, 19 nt, Homo sapiens
  misc_RNA (1)...(19): siRNA sense strand
gcgcagauccucccuguuc

SEQ ID NO: 150192 - RNA, 19 nt, Homo sapiens
  misc_RNA (1)...(19): siRNA sense strand
ugagagagaaugccuacua

SEQ ID NO: 150193 - RNA, 19 nt, Homo sapiens
  misc_RNA (1)...(19): siRNA sense strand
gaaggagggucaguucaag

SEQ ID NO: 150194 - RNA, 19 nt, Homo sapiens
  misc_RNA (1)...(19): siRNA sense strand
ggaaggagggucaguucaa

SEQ ID NO: 150195 - RNA, 19 nt, Homo sapiens
  misc_RNA (1)...(19): siRNA sense strand
ggaaggaggugugcuuugc

SEQ ID NO: 150196 - RNA, 19 nt, Homo sapiens
  misc_RNA (1)...(19): siRNA sense strand
caucaacuccuauaucaga

SEQ ID NO: 150197 - RNA, 19 nt, Homo sapiens
  misc_RNA (1)...(19): siRNA sense strand
aaagaaagcaguagaugug

SEQ ID NO: 150198 - RNA, 19 nt, Homo sapiens
  misc_RNA (1)...(19): siRNA sense strand
ccagagagacgguccagaa

SEQ ID NO: 150199 - RNA, 19 nt, Homo sapiens
  misc_RNA (1)...(19): siRNA sense strand
agaaguugcugcagugguu

SEQ ID NO: 150200 - RNA, 19 nt, Homo sapiens
  misc_RNA (1)...(19): siRNA sense strand
gagcugguguuccucuaug

SEQ ID NO: 150201 - RNA, 19 nt, Homo sapiens
  misc_RNA (1)...(19): siRNA sense strand
guacuuccuucuuauugga

SEQ ID NO: 150202 - RNA, 19 nt, Homo sapiens
  misc_RNA (1)...(19): siRNA sense strand
gaauuaauccagcuaacau

SEQ ID NO: 150203 - RNA, 19 nt, Homo sapiens
  misc_RNA (1)...(19): siRNA sense strand
gagaaguuguuugugagaa

SEQ ID NO: 150204 - RNA, 19 nt, Homo sapiens
  misc_RNA (1)...(19): siRNA sense strand
ucugacaaguucauaugua

SEQ ID NO: 150205 - RNA, 19 nt, Homo sapiens
  misc_RNA (1)...(19): siRNA sense strand
gcaaaugugccaagcaaag

SEQ ID NO: 150206 - RNA, 19 nt, Homo sapiens
  misc_RNA (1)...(19): siRNA sense strand
gauuggagcuaaacauggu

SEQ ID NO: 150207 - RNA, 19 nt, Homo sapiens
  misc_RNA (1)...(19): siRNA sense strand
ccucuuaccuggaaguugu

SEQ ID NO: 150208 - RNA, 19 nt, Homo sapiens
  misc_RNA (1)...(19): siRNA sense strand
gauccugacugccaucaag

SEQ ID NO: 150209 - RNA, 19 nt, Homo sapiens
  misc_RNA (1)...(19): siRNA sense strand
cagaggagcucggagacuu

SEQ ID NO: 150210 - RNA, 19 nt, Homo sapiens
  misc_RNA (1)...(19): siRNA sense strand
ugaggaagauaacauugug

SEQ ID NO: 150211 - RNA, 19 nt, Homo sapiens
  misc_RNA (1)...(19): siRNA sense strand
gggcagagaaguuguuugu

SEQ ID NO: 150212 - RNA, 19 nt, Homo sapiens
  misc_RNA (1)...(19): siRNA sense strand
ucaaccaccugcugacaga

SEQ ID NO: 150213 - RNA, 19 nt, Homo sapiens
  misc_RNA (1)...(19): siRNA sense strand
acaaaccacugcucaucaa

SEQ ID NO: 150214 - RNA, 19 nt, Homo sapiens
  misc_RNA (1)...(19): siRNA sense strand
gcagguggccucuaaguac

SEQ ID NO: 150215 - RNA, 19 nt, Homo sapiens
  misc_RNA (1)...(19): siRNA sense strand
uggaugccuugaagaauaa

SEQ ID NO: 150216 - RNA, 19 nt, Homo sapiens
  misc_RNA (1)...(19): siRNA sense strand
agaaguuguuugugagaaa

SEQ ID NO: 150217 - RNA, 19 nt, Homo sapiens
  misc_RNA (1)...(19): siRNA sense strand
cugccaagcugcucuauag

SEQ ID NO: 150218 - RNA, 19 nt, Homo sapiens
  misc_RNA (1)...(19): siRNA sense strand
gaagccaucaacuccuaua

SEQ ID NO: 150219 - RNA, 19 nt, Homo sapiens
  misc_RNA (1)...(19): siRNA sense strand
aagcccagcuccagaaaga

SEQ ID NO: 150220 - RNA, 19 nt, Homo sapiens
  misc_RNA (1)...(19): siRNA sense strand
acaggaaucuacagaaucu

SEQ ID NO: 150221 - RNA, 19 nt, Homo sapiens
  misc_RNA (1)...(19): siRNA sense strand
ccaggaucguggcuacuuu

SEQ ID NO: 150222 - RNA, 19 nt, Homo sapiens
  misc_RNA (1)...(19): siRNA sense strand
gaugugcuauuaccaggau

SEQ ID NO: 150223 - RNA, 19 nt, Homo sapiens
  misc_RNA (1)...(19): siRNA sense strand
cagaggcacagaaugauuu

SEQ ID NO: 150224 - RNA, 19 nt, Homo sapiens
  misc_RNA (1)...(19): siRNA sense strand
acaacaagagugugaauga

SEQ ID NO: 150225 - RNA, 19 nt, Homo sapiens
  misc_RNA (1)...(19): siRNA sense strand
cugcagagguacauugaga

SEQ ID NO: 150226 - RNA, 19 nt, Homo sapiens
  misc_RNA (1)...(19): siRNA sense strand
gaagaucaguccggaacag

SEQ ID NO: 150227 - RNA, 19 nt, Homo sapiens
  misc_RNA (1)...(19): siRNA sense strand
cuagagaaguggcugaaag

SEQ ID NO: 150228 - RNA, 19 nt, Homo sapiens
  misc_RNA (1)...(19): siRNA sense strand
caaaguauggcuaucuuca

SEQ ID NO: 150229 - RNA, 19 nt, Homo sapiens
  misc_RNA (1)...(19): siRNA sense strand
gaucacaaaguauggcuau

SEQ ID NO: 150230 - RNA, 19 nt, Homo sapiens
  misc_RNA (1)...(19): siRNA sense strand
ggucagcucaauaaacuug

SEQ ID NO: 150231 - RNA, 19 nt, Homo sapiens
  misc_RNA (1)...(19): siRNA sense strand
cuucgcagcuugucucuuc

SEQ ID NO: 150232 - RNA, 19 nt, Homo sapiens
  misc_RNA (1)...(19): siRNA sense strand
caacaagagugugaaugag

SEQ ID NO: 150233 - RNA, 19 nt, Homo sapiens
  misc_RNA (1)...(19): siRNA sense strand
gcaguucuauuuggauuac

SEQ ID NO: 150234 - RNA, 19 nt, Homo sapiens
  misc_RNA (1)...(19): siRNA sense strand
gaagagacaucuaugauca

SEQ ID NO: 150235 - RNA, 19 nt, Homo sapiens
  misc_RNA (1)...(19): siRNA sense strand
gcaaguauaugaucccaaa

SEQ ID NO: 150236 - RNA, 19 nt, Homo sapiens
  misc_RNA (1)...(19): siRNA sense strand
caaaguugcuucccagaaa

SEQ ID NO: 150237 - RNA, 19 nt, Homo sapiens
  misc_RNA (1)...(19): siRNA sense strand
caagauugcuuccaaguau

SEQ ID NO: 150238 - RNA, 19 nt, Homo sapiens
  misc_RNA (1)...(19): siRNA sense strand
guggacaacucgacaauuu

SEQ ID NO: 150239 - RNA, 19 nt, Homo sapiens
  misc_RNA (1)...(19): siRNA sense strand
gaagccacaugacauauuc

SEQ ID NO: 150240 - RNA, 19 nt, Homo sapiens
  misc_RNA (1)...(19): siRNA sense strand
cagaauacccugaugagua

SEQ ID NO: 150241 - RNA, 19 nt, Homo sapiens
  misc_RNA (1)...(19): siRNA sense strand
ggacuaggaggcaucuuua

SEQ ID NO: 150242 - RNA, 19 nt, Homo sapiens
  misc_RNA (1)...(19): siRNA sense strand
ggagaauauuggcaacuuu

SEQ ID NO: 150243 - RNA, 19 nt, Homo sapiens
  misc_RNA (1)...(19): siRNA sense strand
gagaauauuggcaacuuua

SEQ ID NO: 150244 - RNA, 19 nt, Homo sapiens
  misc_RNA (1)...(19): siRNA sense strand
ggaguuaaguaugcagaaa

SEQ ID NO: 150245 - RNA, 19 nt, Homo sapiens
  misc_RNA (1)...(19): siRNA sense strand
accaaggcauugauuauua

SEQ ID NO: 150246 - RNA, 19 nt, Homo sapiens
  misc_RNA (1)...(19): siRNA sense strand
gcagaugggcacuaauaaa

SEQ ID NO: 150247 - RNA, 19 nt, Homo sapiens
  misc_RNA (1)...(19): siRNA sense strand
gaugggcacuaauaaagga

SEQ ID NO: 150248 - RNA, 19 nt, Homo sapiens
  misc_RNA (1)...(19): siRNA sense strand
gaucagaagcuaacauuac

SEQ ID NO: 150249 - RNA, 19 nt, Homo sapiens
  misc_RNA (1)...(19): siRNA sense strand
agaacaagauugcuuccaa

SEQ ID NO: 150250 - RNA, 19 nt, Homo sapiens
  misc_RNA (1)...(19): siRNA sense strand
gaaaggaaugaguguguau

SEQ ID NO: 150251 - RNA, 19 nt, Homo sapiens
  misc_RNA (1)...(19): siRNA sense strand
acagauggguaccaacaaa

SEQ ID NO: 150252 - RNA, 19 nt, Homo sapiens
  misc_RNA (1)...(19): siRNA sense strand
ggccucaguuggagaauau

SEQ ID NO: 150253 - RNA, 19 nt, Homo sapiens
  misc_RNA (1)...(19): siRNA sense strand
gaugggaaccaacaaaugu

SEQ ID NO: 150254 - RNA, 19 nt, Homo sapiens
  misc_RNA (1)...(19): siRNA sense strand
aggcagguaugacagcuua

SEQ ID NO: 150255 - RNA, 19 nt, Homo sapiens
  misc_RNA (1)...(19): siRNA sense strand
gcagaugggaaccaacaaa

SEQ ID NO: 150256 - RNA, 19 nt, Homo sapiens
  misc_RNA (1)...(19): siRNA sense strand
ccaaggcauugauuauuag

SEQ ID NO: 150257 - RNA, 19 nt, Homo sapiens
  misc_RNA (1)...(19): siRNA sense strand
ccaaggaacaggaacaaau

SEQ ID NO: 150258 - RNA, 19 nt, Homo sapiens
  misc_RNA (1)...(19): siRNA sense strand
gaccaaggcauugauuauu

SEQ ID NO: 150259 - RNA, 19 nt, Homo sapiens
  misc_RNA (1)...(19): siRNA sense strand
acaaaugguucggaaauca

SEQ ID NO: 150260 - RNA, 19 nt, Homo sapiens
  misc_RNA (1)...(19): siRNA sense strand
caaggaacaggaacaaaug

SEQ ID NO: 150261 - RNA, 19 nt, Homo sapiens
  misc_RNA (1)...(19): siRNA sense strand
ccauugacauuggaguuaa

SEQ ID NO: 150262 - RNA, 19 nt, Homo sapiens
  misc_RNA (1)...(19): siRNA sense strand
gcgaguaccaggaugacua

SEQ ID NO: 150263 - RNA, 19 nt, Homo sapiens
  misc_RNA (1)...(19): siRNA sense strand
agaaaggaaugagugugua

SEQ ID NO: 150264 - RNA, 19 nt, Homo sapiens
  misc_RNA (1)...(19): siRNA sense strand
agacaucuaugaucagaag

SEQ ID NO: 150265 - RNA, 19 nt, Homo sapiens
  misc_RNA (1)...(19): siRNA sense strand
cuaggaggcaucuuuauga

SEQ ID NO: 150266 - RNA, 19 nt, Homo sapiens
  misc_RNA (1)...(19): siRNA sense strand
gaagucaagaacaagauug

SEQ ID NO: 150267 - RNA, 19 nt, Homo sapiens
  misc_RNA (1)...(19): siRNA sense strand
gaccagaccacaauuaguc

SEQ ID NO: 150268 - RNA, 19 nt, Homo sapiens
  misc_RNA (1)...(19): siRNA sense strand
ggaacaggaacaaaugguu

SEQ ID NO: 150269 - RNA, 19 nt, Homo sapiens
  misc_RNA (1)...(19): siRNA sense strand
ccagaagagacaucuauga

SEQ ID NO: 150270 - RNA, 19 nt, Homo sapiens
  misc_RNA (1)...(19): siRNA sense strand
ugacauauucgaagcaaau

SEQ ID NO: 150271 - RNA, 19 nt, Homo sapiens
  misc_RNA (1)...(19): siRNA sense strand
caacggaagccaaggaaca

SEQ ID NO: 150272 - RNA, 19 nt, Homo sapiens
  misc_RNA (1)...(19): siRNA sense strand
gggacuaggaggcaucuuu

SEQ ID NO: 150273 - RNA, 19 nt, Homo sapiens
  misc_RNA (1)...(19): siRNA sense strand
ucugcgaacuuauaaacaa

SEQ ID NO: 150274 - RNA, 19 nt, Homo sapiens
  misc_RNA (1)...(19): siRNA sense strand
uauaugaucccaaauacug

SEQ ID NO: 150275 - RNA, 19 nt, Homo sapiens
  misc_RNA (1)...(19): siRNA sense strand
gaucuucgcaauuggauag

SEQ ID NO: 150276 - RNA, 19 nt, Homo sapiens
  misc_RNA (1)...(19): siRNA sense strand
gaagaggugacaggcauga

SEQ ID NO: 150277 - RNA, 19 nt, Homo sapiens
  misc_RNA (1)...(19): siRNA sense strand
gacaauuucccuacagaug

SEQ ID NO: 150278 - RNA, 19 nt, Homo sapiens
  misc_RNA (1)...(19): siRNA sense strand
aaagcuggccaaaguguaa

SEQ ID NO: 150279 - RNA, 19 nt, Homo sapiens
  misc_RNA (1)...(19): siRNA sense strand
cgaccaaggcauugauuau

SEQ ID NO: 150280 - RNA, 19 nt, Homo sapiens
  misc_RNA (1)...(19): siRNA sense strand
cagaaccugucauucacaa

SEQ ID NO: 150281 - RNA, 19 nt, Homo sapiens
  misc_RNA (1)...(19): siRNA sense strand
cugcagaugggcacuaaua

SEQ ID NO: 150282 - RNA, 19 nt, Homo sapiens
  misc_RNA (1)...(19): siRNA sense strand
ccauacaaccauugacauu

SEQ ID NO: 150283 - RNA, 19 nt, Homo sapiens
  misc_RNA (1)...(19): siRNA sense strand
gcgaccaaggcauugauua

SEQ ID NO: 150284 - RNA, 19 nt, Homo sapiens
  misc_RNA (1)...(19): siRNA sense strand
gaaacaugacccagguuca

SEQ ID NO: 150285 - RNA, 19 nt, Homo sapiens
  misc_RNA (1)...(19): siRNA sense strand
caucuaugaucagaagcua

SEQ ID NO: 150286 - RNA, 19 nt, Homo sapiens
  misc_RNA (1)...(19): siRNA sense strand
cagaagagacaucuaugau

SEQ ID NO: 150287 - RNA, 19 nt, Homo sapiens
  misc_RNA (1)...(19): siRNA sense strand
acaaaaggauuccauacaa

SEQ ID NO: 150288 - RNA, 19 nt, Homo sapiens
  misc_RNA (1)...(19): siRNA sense strand
ugacauuggaguuaaguau

SEQ ID NO: 150289 - RNA, 19 nt, Homo sapiens
  misc_RNA (1)...(19): siRNA sense strand
ccagagauuaccaauauag

SEQ ID NO: 150290 - RNA, 19 nt, Homo sapiens
  misc_RNA (1)...(19): siRNA sense strand
gcaucuuuaugaucccaaa

SEQ ID NO: 150291 - RNA, 19 nt, Homo sapiens
  misc_RNA (1)...(19): siRNA sense strand
caacuuccagcugggcuua

SEQ ID NO: 150292 - RNA, 19 nt, Homo sapiens
  misc_RNA (1)...(19): siRNA sense strand
cagaugggcacuaauaaag

SEQ ID NO: 150293 - RNA, 19 nt, Homo sapiens
  misc_RNA (1)...(19): siRNA sense strand
ccccagagauuaccaauau

SEQ ID NO: 150294 - RNA, 19 nt, Homo sapiens
  misc_RNA (1)...(19): siRNA sense strand
agagacaucuaugaucaga

SEQ ID NO: 150295 - RNA, 19 nt, Homo sapiens
  misc_RNA (1)...(19): siRNA sense strand
caacgaguccucacugaac

SEQ ID NO: 150296 - RNA, 19 nt, Homo sapiens
  misc_RNA (1)...(19): siRNA sense strand
cauccucugcgaacuuaua

SEQ ID NO: 150297 - RNA, 19 nt, Homo sapiens
  misc_RNA (1)...(19): siRNA sense strand
auacaaccauugacauugg

SEQ ID NO: 150298 - RNA, 19 nt, Homo sapiens
  misc_RNA (1)...(19): siRNA sense strand
gguaugaagccacaugaca

SEQ ID NO: 150299 - RNA, 19 nt, Homo sapiens
  misc_RNA (1)...(19): siRNA sense strand
gucaacgaguccucacuga

SEQ ID NO: 150300 - RNA, 19 nt, Homo sapiens
  misc_RNA (1)...(19): siRNA sense strand
cagaaaggaaugagugugu

SEQ ID NO: 150301 - RNA, 19 nt, Homo sapiens
  misc_RNA (1)...(19): siRNA sense strand
acaagauugcuuccaagua

SEQ ID NO: 150302 - RNA, 19 nt, Homo sapiens
  misc_RNA (1)...(19): siRNA sense strand
ugacccagguucagacuac

SEQ ID NO: 150303 - RNA, 19 nt, Homo sapiens
  misc_RNA (1)...(19): siRNA sense strand
cggccgaagucaagaacaa

SEQ ID NO: 150304 - RNA, 19 nt, Homo sapiens
  misc_RNA (1)...(19): siRNA sense strand
uaggaggcaucuuuaugau

SEQ ID NO: 150305 - RNA, 19 nt, Homo sapiens
  misc_RNA (1)...(19): siRNA sense strand
ugaagccacaugacauauu

SEQ ID NO: 150306 - RNA, 19 nt, Homo sapiens
  misc_RNA (1)...(19): siRNA sense strand
uggagaauauuggcaacuu

SEQ ID NO: 150307 - RNA, 19 nt, Homo sapiens
  misc_RNA (1)...(19): siRNA sense strand
ggaagccaaggaacaggaa

SEQ ID NO: 150308 - RNA, 19 nt, Homo sapiens
  misc_RNA (1)...(19): siRNA sense strand
gauggguaccaacaaaguu

SEQ ID NO: 150309 - RNA, 19 nt, Homo sapiens
  misc_RNA (1)...(19): siRNA sense strand
cagccaggcagggauguua

SEQ ID NO: 150310 - RNA, 19 nt, Homo sapiens
  misc_RNA (1)...(19): siRNA sense strand
gacauuggaguuaaguaug

SEQ ID NO: 150311 - RNA, 19 nt, Homo sapiens
  misc_RNA (1)...(19): siRNA sense strand
caugacauauucgaagcaa

SEQ ID NO: 150312 - RNA, 19 nt, Homo sapiens
  misc_RNA (1)...(19): siRNA sense strand
cgaagucaagaacaagauu

SEQ ID NO: 150313 - RNA, 19 nt, Homo sapiens
  misc_RNA (1)...(19): siRNA sense strand
cccagagauuaccaauaua

SEQ ID NO: 150314 - RNA, 19 nt, Homo sapiens
  misc_RNA (1)...(19): siRNA sense strand
ugacaggcaugagcauugg

SEQ ID NO: 150315 - RNA, 19 nt, Homo sapiens
  misc_RNA (1)...(19): siRNA sense strand
ccagguaccagaagagaca

SEQ ID NO: 150316 - RNA, 19 nt, Homo sapiens
  misc_RNA (1)...(19): siRNA sense strand
guaugaagccacaugacau

SEQ ID NO: 150317 - RNA, 19 nt, Homo sapiens
  misc_RNA (1)...(19): siRNA sense strand
cauacaaccauugacauug

SEQ ID NO: 150318 - RNA, 19 nt, Homo sapiens
  misc_RNA (1)...(19): siRNA sense strand
uuaccaauauagcgaccaa

SEQ ID NO: 150319 - RNA, 19 nt, Homo sapiens
  misc_RNA (1)...(19): siRNA sense strand
gugacaggcaugagcauug

SEQ ID NO: 150320 - RNA, 19 nt, Homo sapiens
  misc_RNA (1)...(19): siRNA sense strand
cuacagauggguaccaaca

SEQ ID NO: 150321 - RNA, 19 nt, Homo sapiens
  misc_RNA (1)...(19): siRNA sense strand
cauuacagccgguggacaa

SEQ ID NO: 150322 - RNA, 19 nt, Homo sapiens
  misc_RNA (1)...(19): siRNA sense strand
uaccagaagagacaucuau

SEQ ID NO: 150323 - RNA, 19 nt, Homo sapiens
  misc_RNA (1)...(19): siRNA sense strand
ugaucagaagcuaacauua

SEQ ID NO: 150324 - RNA, 19 nt, Homo sapiens
  misc_RNA (1)...(19): siRNA sense strand
gcagaauacccugaugagu

SEQ ID NO: 150325 - RNA, 19 nt, Homo sapiens
  misc_RNA (1)...(19): siRNA sense strand
aaaguugcuucccagaaag

SEQ ID NO: 150326 - RNA, 19 nt, Homo sapiens
  misc_RNA (1)...(19): siRNA sense strand
ggacaacucgacaauuucc

SEQ ID NO: 150327 - RNA, 19 nt, Homo sapiens
  misc_RNA (1)...(19): siRNA sense strand
cagaugggaaccaacaaau

SEQ ID NO: 150328 - RNA, 19 nt, Homo sapiens
  misc_RNA (1)...(19): siRNA sense strand
ucacaacggaagccaagga

SEQ ID NO: 150329 - RNA, 19 nt, Homo sapiens
  misc_RNA (1)...(19): siRNA sense strand
ucgacaauuucccuacaga

SEQ ID NO: 150330 - RNA, 19 nt, Homo sapiens
  misc_RNA (1)...(19): siRNA sense strand
caucauccucugcgaacuu

SEQ ID NO: 150331 - RNA, 19 nt, Homo sapiens
  misc_RNA (1)...(19): siRNA sense strand
auacugugcugcuccuaca

SEQ ID NO: 150332 - RNA, 19 nt, Homo sapiens
  misc_RNA (1)...(19): siRNA sense strand
gcucucggccgaagucaag

SEQ ID NO: 150333 - RNA, 19 nt, Homo sapiens
  misc_RNA (1)...(19): siRNA sense strand
agaagagacaucuaugauc

SEQ ID NO: 150334 - RNA, 19 nt, Homo sapiens
  misc_RNA (1)...(19): siRNA sense strand
ggacauagaguguuucaug

SEQ ID NO: 150335 - RNA, 19 nt, Homo sapiens
  misc_RNA (1)...(19): siRNA sense strand
gaugaaaccuaccugaugu

SEQ ID NO: 150336 - RNA, 19 nt, Homo sapiens
  misc_RNA (1)...(19): siRNA sense strand
gcgagaaacugcaaucugu

SEQ ID NO: 150337 - RNA, 19 nt, Homo sapiens
  misc_RNA (1)...(19): siRNA sense strand
gcacaaacacgcaaacaau

SEQ ID NO: 150338 - RNA, 19 nt, Homo sapiens
  misc_RNA (1)...(19): siRNA sense strand
ucacagccaucgacaggua

SEQ ID NO: 150339 - RNA, 19 nt, Homo sapiens
  misc_RNA (1)...(19): siRNA sense strand
ggucaagauugccaaggua

SEQ ID NO: 150340 - RNA, 19 nt, Homo sapiens
  misc_RNA (1)...(19): siRNA sense strand
gacauuagguuagccaaga

SEQ ID NO: 150341 - RNA, 19 nt, Homo sapiens
  misc_RNA (1)...(19): siRNA sense strand
ugaacaagcucauuaagac

SEQ ID NO: 150342 - RNA, 19 nt, Homo sapiens
  misc_RNA (1)...(19): siRNA sense strand
caugguguaugaugucuuu

SEQ ID NO: 150343 - RNA, 19 nt, Homo sapiens
  misc_RNA (1)...(19): siRNA sense strand
ccacugaccuccuguacgu

SEQ ID NO: 150344 - RNA, 19 nt, Homo sapiens
  misc_RNA (1)...(19): siRNA sense strand
caagagcacggucaagauu

SEQ ID NO: 150345 - RNA, 19 nt, Homo sapiens
  misc_RNA (1)...(19): siRNA sense strand
caacguguuucuguucaaa

SEQ ID NO: 150346 - RNA, 19 nt, Homo sapiens
  misc_RNA (1)...(19): siRNA sense strand
gaccauagccauugugauc

SEQ ID NO: 150347 - RNA, 19 nt, Homo sapiens
  misc_RNA (1)...(19): siRNA sense strand
uuaagacgguguuugcauu

SEQ ID NO: 150348 - RNA, 19 nt, Homo sapiens
  misc_RNA (1)...(19): siRNA sense strand
gauccuagauggccuugca

SEQ ID NO: 150349 - RNA, 19 nt, Homo sapiens
  misc_RNA (1)...(19): siRNA sense strand
aaaccuaccugauguucug

SEQ ID NO: 150350 - RNA, 19 nt, Homo sapiens
  misc_RNA (1)...(19): siRNA sense strand
ucauggacauagaguguuu

SEQ ID NO: 150351 - RNA, 19 nt, Homo sapiens
  misc_RNA (1)...(19): siRNA sense strand
gagcauguuucccucuugu

SEQ ID NO: 150352 - RNA, 19 nt, Homo sapiens
  misc_RNA (1)...(19): siRNA sense strand
cuagauggccuugcagaua

SEQ ID NO: 150353 - RNA, 19 nt, Homo sapiens
  misc_RNA (1)...(19): siRNA sense strand
gcaacguguuucuguucaa

SEQ ID NO: 150354 - RNA, 19 nt, Homo sapiens
  misc_RNA (1)...(19): siRNA sense strand
ggagcauguuucccucuug

SEQ ID NO: 150355 - RNA, 19 nt, Homo sapiens
  misc_RNA (1)...(19): siRNA sense strand
ucuaugcucugaggaguaa

SEQ ID NO: 150356 - RNA, 19 nt, Homo sapiens
  misc_RNA (1)...(19): siRNA sense strand
acauguauauucucuggaa

SEQ ID NO: 150357 - RNA, 19 nt, Homo sapiens
  misc_RNA (1)...(19): siRNA sense strand
gaacugcgagaaacugcaa

SEQ ID NO: 150358 - RNA, 19 nt, Homo sapiens
  misc_RNA (1)...(19): siRNA sense strand
ccgcauggacauuagguua

SEQ ID NO: 150359 - RNA, 19 nt, Homo sapiens
  misc_RNA (1)...(19): siRNA sense strand
gcauguuucccucuuguga

SEQ ID NO: 150360 - RNA, 19 nt, Homo sapiens
  misc_RNA (1)...(19): siRNA sense strand
uagauggccuugcagauac

SEQ ID NO: 150361 - RNA, 19 nt, Homo sapiens
  misc_RNA (1)...(19): siRNA sense strand
ggagaacuucauggacaua

SEQ ID NO: 150362 - RNA, 19 nt, Homo sapiens
  misc_RNA (1)...(19): siRNA sense strand
acagguacauauccauuca

SEQ ID NO: 150363 - RNA, 19 nt, Homo sapiens
  misc_RNA (1)...(19): siRNA sense strand
cgacagguacauauccauu

SEQ ID NO: 150364 - RNA, 19 nt, Homo sapiens
  misc_RNA (1)...(19): siRNA sense strand
gggagaacuucauggacau

SEQ ID NO: 150365 - RNA, 19 nt, Homo sapiens
  misc_RNA (1)...(19): siRNA sense strand
gaacuucauggacauagag

SEQ ID NO: 150366 - RNA, 19 nt, Homo sapiens
  misc_RNA (1)...(19): siRNA sense strand
cugcgcagccucuggauaa

SEQ ID NO: 150367 - RNA, 19 nt, Homo sapiens
  misc_RNA (1)...(19): siRNA sense strand
ugaugaaaccuaccugaug

SEQ ID NO: 150368 - RNA, 19 nt, Homo sapiens
  misc_RNA (1)...(19): siRNA sense strand
ucaguacgaagacaucaaa

SEQ ID NO: 150369 - RNA, 19 nt, Homo sapiens
  misc_RNA (1)...(19): siRNA sense strand
caagcccgcauggacauua

SEQ ID NO: 150370 - RNA, 19 nt, Homo sapiens
  misc_RNA (1)...(19): siRNA sense strand
gggcuggaacugcgagaaa

SEQ ID NO: 150371 - RNA, 19 nt, Homo sapiens
  misc_RNA (1)...(19): siRNA sense strand
gauguggaccauagccauu

SEQ ID NO: 150372 - RNA, 19 nt, Homo sapiens
  misc_RNA (1)...(19): siRNA sense strand
uacgugggcucaaaugaca

SEQ ID NO: 150373 - RNA, 19 nt, Homo sapiens
  misc_RNA (1)...(19): siRNA sense strand
caaacaaugcagccagugu

SEQ ID NO: 150374 - RNA, 19 nt, Homo sapiens
  misc_RNA (1)...(19): siRNA sense strand
cggacugccugcacaaaca

SEQ ID NO: 150375 - RNA, 19 nt, Homo sapiens
  misc_RNA (1)...(19): siRNA sense strand
cacaaacacgcaaacaaug

SEQ ID NO: 150376 - RNA, 19 nt, Homo sapiens
  misc_RNA (1)...(19): siRNA sense strand
cagcguggcacccagaaga

SEQ ID NO: 150377 - RNA, 19 nt, Homo sapiens
  misc_RNA (1)...(19): siRNA sense strand
ucauugacuuccacguguu

SEQ ID NO: 150378 - RNA, 19 nt, Homo sapiens
  misc_RNA (1)...(19): siRNA sense strand
gcaaagauagccgcaacgu

SEQ ID NO: 150379 - RNA, 19 nt, Homo sapiens
  misc_RNA (1)...(19): siRNA sense strand
agaacuucauggacauaga

SEQ ID NO: 150380 - RNA, 19 nt, Homo sapiens
  misc_RNA (1)...(19): siRNA sense strand
gcguacauguauauucucu

SEQ ID NO: 150381 - RNA, 19 nt, Homo sapiens
  misc_RNA (1)...(19): siRNA sense strand
ccagcguacugcuucuguu

SEQ ID NO: 150382 - RNA, 19 nt, Homo sapiens
  misc_RNA (1)...(19): siRNA sense strand
gucuacagcuucauugacu

SEQ ID NO: 150383 - RNA, 19 nt, Homo sapiens
  misc_RNA (1)...(19): siRNA sense strand
ucaagagcacggucaagau

SEQ ID NO: 150384 - RNA, 19 nt, Homo sapiens
  misc_RNA (1)...(19): siRNA sense strand
cgagaaacugcaaucuguu

SEQ ID NO: 150385 - RNA, 19 nt, Homo sapiens
  misc_RNA (1)...(19): siRNA sense strand
gccgcaacguguuucuguu

SEQ ID NO: 150386 - RNA, 19 nt, Homo sapiens
  misc_RNA (1)...(19): siRNA sense strand
gucaagauugccaagguaa

SEQ ID NO: 150387 - RNA, 19 nt, Homo sapiens
  misc_RNA (1)...(19): siRNA sense strand
gcauggacauuagguuagc

SEQ ID NO: 150388 - RNA, 19 nt, Homo sapiens
  misc_RNA (1)...(19): siRNA sense strand
ugccugauguggaccauag

SEQ ID NO: 150389 - RNA, 19 nt, Homo sapiens
  misc_RNA (1)...(19): siRNA sense strand
gacagguacauauccauuc

SEQ ID NO: 150390 - RNA, 19 nt, Homo sapiens
  misc_RNA (1)...(19): siRNA sense strand
ggucacggccuccuucacu

SEQ ID NO: 150391 - RNA, 19 nt, Homo sapiens
  misc_RNA (1)...(19): siRNA sense strand
caaacacgcaaacaaugca

SEQ ID NO: 150392 - RNA, 19 nt, Homo sapiens
  misc_RNA (1)...(19): siRNA sense strand
agaagagcaucaucaucca

SEQ ID NO: 150393 - RNA, 19 nt, Homo sapiens
  misc_RNA (1)...(19): siRNA sense strand
ccacgccguccgcaugauu

SEQ ID NO: 150394 - RNA, 19 nt, Homo sapiens
  misc_RNA (1)...(19): siRNA sense strand
ccacguguuccaccgcaaa

SEQ ID NO: 150395 - RNA, 19 nt, Homo sapiens
  misc_RNA (1)...(19): siRNA sense strand
guacgugggcucaaaugac

SEQ ID NO: 150396 - RNA, 19 nt, Homo sapiens
  misc_RNA (1)...(19): siRNA sense strand
cccaucaucuaugcucuga

SEQ ID NO: 150397 - RNA, 19 nt, Homo sapiens
  misc_RNA (1)...(19): siRNA sense strand
uaagacgguguuugcauuc

SEQ ID NO: 150398 - RNA, 19 nt, Homo sapiens
  misc_RNA (1)...(19): siRNA sense strand
gcguacugcuucuguucau

SEQ ID NO: 150399 - RNA, 19 nt, Homo sapiens
  misc_RNA (1)...(19): siRNA sense strand
gaaaccuaccugauguucu

SEQ ID NO: 150400 - RNA, 19 nt, Homo sapiens
  misc_RNA (1)...(19): siRNA sense strand
guguuccaccgcaaagaua

SEQ ID NO: 150401 - RNA, 19 nt, Homo sapiens
  misc_RNA (1)...(19): siRNA sense strand
gacauucaguacgaagaca

SEQ ID NO: 150402 - RNA, 19 nt, Homo sapiens
  misc_RNA (1)...(19): siRNA sense strand
ccaagguaaccaugucugu

SEQ ID NO: 150403 - RNA, 19 nt, Homo sapiens
  misc_RNA (1)...(19): siRNA sense strand
cggagcauguuucccucuu

SEQ ID NO: 150404 - RNA, 19 nt, Homo sapiens
  misc_RNA (1)...(19): siRNA sense strand
augcguacauguauauucu

SEQ ID NO: 150405 - RNA, 19 nt, Homo sapiens
  misc_RNA (1)...(19): siRNA sense strand
gcccucugcuugcaaucau

SEQ ID NO: 150406 - RNA, 19 nt, Homo sapiens
  misc_RNA (1)...(19): siRNA sense strand
ggagaaugaggagaacauc

SEQ ID NO: 150407 - RNA, 19 nt, Homo sapiens
  misc_RNA (1)...(19): siRNA sense strand
ccagaagagcaucaucauc

SEQ ID NO: 150408 - RNA, 19 nt, Homo sapiens
  misc_RNA (1)...(19): siRNA sense strand
ggacauagaguguuucaug

SEQ ID NO: 150409 - RNA, 19 nt, Homo sapiens
  misc_RNA (1)...(19): siRNA sense strand
gaugaaaccuaccugaugu

SEQ ID NO: 150410 - RNA, 19 nt, Homo sapiens
  misc_RNA (1)...(19): siRNA sense strand
gcgagaaacugcaaucugu

SEQ ID NO: 150411 - RNA, 19 nt, Homo sapiens
  misc_RNA (1)...(19): siRNA sense strand
gcacaaacacgcaaacaau

SEQ ID NO: 150412 - RNA, 19 nt, Homo sapiens
  misc_RNA (1)...(19): siRNA sense strand
ucacagccaucgacaggua

SEQ ID NO: 150413 - RNA, 19 nt, Homo sapiens
  misc_RNA (1)...(19): siRNA sense strand
gacauuagguuagccaaga

SEQ ID NO: 150414 - RNA, 19 nt, Homo sapiens
  misc_RNA (1)...(19): siRNA sense strand
ugaacaagcucauuaagac

SEQ ID NO: 150415 - RNA, 19 nt, Homo sapiens
  misc_RNA (1)...(19): siRNA sense strand
caugguguaugaugucuuu

SEQ ID NO: 150416 - RNA, 19 nt, Homo sapiens
  misc_RNA (1)...(19): siRNA sense strand
caacguguuucuguucaaa

SEQ ID NO: 150417 - RNA, 19 nt, Homo sapiens
  misc_RNA (1)...(19): siRNA sense strand
ccacugaccuccuguacgu

SEQ ID NO: 150418 - RNA, 19 nt, Homo sapiens
  misc_RNA (1)...(19): siRNA sense strand
gaccauagccauugugauc

SEQ ID NO: 150419 - RNA, 19 nt, Homo sapiens
  misc_RNA (1)...(19): siRNA sense strand
uuaagacgguguuugcauu

SEQ ID NO: 150420 - RNA, 19 nt, Homo sapiens
  misc_RNA (1)...(19): siRNA sense strand
aaaccuaccugauguucug

SEQ ID NO: 150421 - RNA, 19 nt, Homo sapiens
  misc_RNA (1)...(19): siRNA sense strand
ucauggacauagaguguuu

SEQ ID NO: 150422 - RNA, 19 nt, Homo sapiens
  misc_RNA (1)...(19): siRNA sense strand
gagcauguuucccucuugu

SEQ ID NO: 150423 - RNA, 19 nt, Homo sapiens
  misc_RNA (1)...(19): siRNA sense strand
gcaacguguuucuguucaa

SEQ ID NO: 150424 - RNA, 19 nt, Homo sapiens
  misc_RNA (1)...(19): siRNA sense strand
ggagcauguuucccucuug

SEQ ID NO: 150425 - RNA, 19 nt, Homo sapiens
  misc_RNA (1)...(19): siRNA sense strand
ucuaugcucugaggaguaa

SEQ ID NO: 150426 - RNA, 19 nt, Homo sapiens
  misc_RNA (1)...(19): siRNA sense strand
acauguauauucucuggaa

SEQ ID NO: 150427 - RNA, 19 nt, Homo sapiens
  misc_RNA (1)...(19): siRNA sense strand
gaacugcgagaaacugcaa

SEQ ID NO: 150428 - RNA, 19 nt, Homo sapiens
  misc_RNA (1)...(19): siRNA sense strand
ccgcauggacauuagguua

SEQ ID NO: 150429 - RNA, 19 nt, Homo sapiens
  misc_RNA (1)...(19): siRNA sense strand
gcauguuucccucuuguga

SEQ ID NO: 150430 - RNA, 19 nt, Homo sapiens
  misc_RNA (1)...(19): siRNA sense strand
ggagaacuucauggacaua

SEQ ID NO: 150431 - RNA, 19 nt, Homo sapiens
  misc_RNA (1)...(19): siRNA sense strand
acagguacauauccauuca

SEQ ID NO: 150432 - RNA, 19 nt, Homo sapiens
  misc_RNA (1)...(19): siRNA sense strand
cgacagguacauauccauu

SEQ ID NO: 150433 - RNA, 19 nt, Homo sapiens
  misc_RNA (1)...(19): siRNA sense strand
gggagaacuucauggacau

SEQ ID NO: 150434 - RNA, 19 nt, Homo sapiens
  misc_RNA (1)...(19): siRNA sense strand
gaacuucauggacauagag

SEQ ID NO: 150435 - RNA, 19 nt, Homo sapiens
  misc_RNA (1)...(19): siRNA sense strand
cugcgcagccucuggauaa

SEQ ID NO: 150436 - RNA, 19 nt, Homo sapiens
  misc_RNA (1)...(19): siRNA sense strand
ugaugaaaccuaccugaug

SEQ ID NO: 150437 - RNA, 19 nt, Homo sapiens
  misc_RNA (1)...(19): siRNA sense strand
ucaguacgaagacaucaaa

SEQ ID NO: 150438 - RNA, 19 nt, Homo sapiens
  misc_RNA (1)...(19): siRNA sense strand
caagcccgcauggacauua

SEQ ID NO: 150439 - RNA, 19 nt, Homo sapiens
  misc_RNA (1)...(19): siRNA sense strand
gggcuggaacugcgagaaa

SEQ ID NO: 150440 - RNA, 19 nt, Homo sapiens
  misc_RNA (1)...(19): siRNA sense strand
gauguggaccauagccauu

SEQ ID NO: 150441 - RNA, 19 nt, Homo sapiens
  misc_RNA (1)...(19): siRNA sense strand
uacgugggcucaaaugaca

SEQ ID NO: 150442 - RNA, 19 nt, Homo sapiens
  misc_RNA (1)...(19): siRNA sense strand
caaacaaugcagccagugu

SEQ ID NO: 150443 - RNA, 19 nt, Homo sapiens
  misc_RNA (1)...(19): siRNA sense strand
cggacugccugcacaaaca

SEQ ID NO: 150444 - RNA, 19 nt, Homo sapiens
  misc_RNA (1)...(19): siRNA sense strand
cacaaacacgcaaacaaug

SEQ ID NO: 150445 - RNA, 19 nt, Homo sapiens
  misc_RNA (1)...(19): siRNA sense strand
cagcguggcacccagaaga

SEQ ID NO: 150446 - RNA, 19 nt, Homo sapiens
  misc_RNA (1)...(19): siRNA sense strand
ucauugacuuccacguguu

SEQ ID NO: 150447 - RNA, 19 nt, Homo sapiens
  misc_RNA (1)...(19): siRNA sense strand
gcaaagauagccgcaacgu

SEQ ID NO: 150448 - RNA, 19 nt, Homo sapiens
  misc_RNA (1)...(19): siRNA sense strand
agaacuucauggacauaga

SEQ ID NO: 150449 - RNA, 19 nt, Homo sapiens
  misc_RNA (1)...(19): siRNA sense strand
gcguacauguauauucucu

SEQ ID NO: 150450 - RNA, 19 nt, Homo sapiens
  misc_RNA (1)...(19): siRNA sense strand
ccagcguacugcuucuguu

SEQ ID NO: 150451 - RNA, 19 nt, Homo sapiens
  misc_RNA (1)...(19): siRNA sense strand
gucuacagcuucauugacu

SEQ ID NO: 150452 - RNA, 19 nt, Homo sapiens
  misc_RNA (1)...(19): siRNA sense strand
cgagaaacugcaaucuguu

SEQ ID NO: 150453 - RNA, 19 nt, Homo sapiens
  misc_RNA (1)...(19): siRNA sense strand
gccgcaacguguuucuguu

SEQ ID NO: 150454 - RNA, 19 nt, Homo sapiens
  misc_RNA (1)...(19): siRNA sense strand
gucaagauugccaagguaa

SEQ ID NO: 150455 - RNA, 19 nt, Homo sapiens
  misc_RNA (1)...(19): siRNA sense strand
gcauggacauuagguuagc

SEQ ID NO: 150456 - RNA, 19 nt, Homo sapiens
  misc_RNA (1)...(19): siRNA sense strand
ugccugauguggaccauag

SEQ ID NO: 150457 - RNA, 19 nt, Homo sapiens
  misc_RNA (1)...(19): siRNA sense strand
gacagguacauauccauuc

SEQ ID NO: 150458 - RNA, 19 nt, Homo sapiens
  misc_RNA (1)...(19): siRNA sense strand
ggucacggccuccuucacu

SEQ ID NO: 150459 - RNA, 19 nt, Homo sapiens
  misc_RNA (1)...(19): siRNA sense strand
caaacacgcaaacaaugca

SEQ ID NO: 150460 - RNA, 19 nt, Homo sapiens
  misc_RNA (1)...(19): siRNA sense strand
agaagagcaucaucaucca

SEQ ID NO: 150461 - RNA, 19 nt, Homo sapiens
  misc_RNA (1)...(19): siRNA sense strand
ccacgccguccgcaugauu

SEQ ID NO: 150462 - RNA, 19 nt, Homo sapiens
  misc_RNA (1)...(19): siRNA sense strand
ccacguguuccaccgcaaa

SEQ ID NO: 150463 - RNA, 19 nt, Homo sapiens
  misc_RNA (1)...(19): siRNA sense strand
guacgugggcucaaaugac

SEQ ID NO: 150464 - RNA, 19 nt, Homo sapiens
  misc_RNA (1)...(19): siRNA sense strand
cccaucaucuaugcucuga

SEQ ID NO: 150465 - RNA, 19 nt, Homo sapiens
  misc_RNA (1)...(19): siRNA sense strand
uaagacgguguuugcauuc

SEQ ID NO: 150466 - RNA, 19 nt, Homo sapiens
  misc_RNA (1)...(19): siRNA sense strand
gcguacugcuucuguucau

SEQ ID NO: 150467 - RNA, 19 nt, Homo sapiens
  misc_RNA (1)...(19): siRNA sense strand
gaaaccuaccugauguucu

SEQ ID NO: 150468 - RNA, 19 nt, Homo sapiens
  misc_RNA (1)...(19): siRNA sense strand
guguuccaccgcaaagaua

SEQ ID NO: 150469 - RNA, 19 nt, Homo sapiens
  misc_RNA (1)...(19): siRNA sense strand
gacauucaguacgaagaca

SEQ ID NO: 150470 - RNA, 19 nt, Homo sapiens
  misc_RNA (1)...(19): siRNA sense strand
ccaagguaaccaugucugu

SEQ ID NO: 150471 - RNA, 19 nt, Homo sapiens
  misc_RNA (1)...(19): siRNA sense strand
cggagcauguuucccucuu

SEQ ID NO: 150472 - RNA, 19 nt, Homo sapiens
  misc_RNA (1)...(19): siRNA sense strand
ggagaaugaggagaacauc

SEQ ID NO: 150473 - RNA, 19 nt, Homo sapiens
  misc_RNA (1)...(19): siRNA sense strand
gcccucugcuugcaaucau

SEQ ID NO: 150474 - RNA, 19 nt, Homo sapiens
  misc_RNA (1)...(19): siRNA sense strand
ccagaagagcaucaucauc

SEQ ID NO: 150475 - RNA, 19 nt, Homo sapiens
  misc_RNA (1)...(19): siRNA sense strand
augcguacauguauauucu

SEQ ID NO: 150476 - RNA, 19 nt, Homo sapiens
  misc_RNA (1)...(19): siRNA sense strand
gaacguggcugugcucuau

SEQ ID NO: 150477 - RNA, 19 nt, Homo sapiens
  misc_RNA (1)...(19): siRNA sense strand
ggucaacccugucaucuau

SEQ ID NO: 150478 - RNA, 19 nt, Homo sapiens
  misc_RNA (1)...(19): siRNA sense strand
gacagaggcugaugggaaa

SEQ ID NO: 150479 - RNA, 19 nt, Homo sapiens
  misc_RNA (1)...(19): siRNA sense strand
gcaugcagcuuugugaauu

SEQ ID NO: 150480 - RNA, 19 nt, Homo sapiens
  misc_RNA (1)...(19): siRNA sense strand
ggaaucaucuacaccuaug

SEQ ID NO: 150481 - RNA, 19 nt, Homo sapiens
  misc_RNA (1)...(19): siRNA sense strand
guucaucgccuuccucuuu

SEQ ID NO: 150482 - RNA, 19 nt, Homo sapiens
  misc_RNA (1)...(19): siRNA sense strand
ugacagagauagccaaugg

SEQ ID NO: 150483 - RNA, 19 nt, Homo sapiens
  misc_RNA (1)...(19): siRNA sense strand
ccaacccuaugaaggauua

SEQ ID NO: 150484 - RNA, 19 nt, Homo sapiens
  misc_RNA (1)...(19): siRNA sense strand
gaucuagaccucucugauu

SEQ ID NO: 150485 - RNA, 19 nt, Homo sapiens
  misc_RNA (1)...(19): siRNA sense strand
ccucauaccuguucauugg

SEQ ID NO: 150486 - RNA, 19 nt, Homo sapiens
  misc_RNA (1)...(19): siRNA sense strand
gaugugagguuggccaaga

SEQ ID NO: 150487 - RNA, 19 nt, Homo sapiens
  misc_RNA (1)...(19): siRNA sense strand
uaugaaggauuacaugauc

SEQ ID NO: 150488 - RNA, 19 nt, Homo sapiens
  misc_RNA (1)...(19): siRNA sense strand
ugaccgccauugaccgaua

SEQ ID NO: 150489 - RNA, 19 nt, Homo sapiens
  misc_RNA (1)...(19): siRNA sense strand
cgaaugaggcuggauguga

SEQ ID NO: 150490 - RNA, 19 nt, Homo sapiens
  misc_RNA (1)...(19): siRNA sense strand
ggaaggcccaucagcaugu

SEQ ID NO: 150491 - RNA, 19 nt, Homo sapiens
  misc_RNA (1)...(19): siRNA sense strand
caugcagcuuugugaauuu

SEQ ID NO: 150492 - RNA, 19 nt, Homo sapiens
  misc_RNA (1)...(19): siRNA sense strand
ucucagcacuagucuccua

SEQ ID NO: 150493 - RNA, 19 nt, Homo sapiens
  misc_RNA (1)...(19): siRNA sense strand
uaagugcccuggagaacgu

SEQ ID NO: 150494 - RNA, 19 nt, Homo sapiens
  misc_RNA (1)...(19): siRNA sense strand
ggucuuugcaugcagcuuu

SEQ ID NO: 150495 - RNA, 19 nt, Homo sapiens
  misc_RNA (1)...(19): siRNA sense strand
ccaggaauggcccgaauga

SEQ ID NO: 150496 - RNA, 19 nt, Homo sapiens
  misc_RNA (1)...(19): siRNA sense strand
cuauccaccuuccuacaaa

SEQ ID NO: 150497 - RNA, 19 nt, Homo sapiens
  misc_RNA (1)...(19): siRNA sense strand
gcuauccaccuuccuacaa

SEQ ID NO: 150498 - RNA, 19 nt, Homo sapiens
  misc_RNA (1)...(19): siRNA sense strand
gaaggcccaucagcaugug

SEQ ID NO: 150499 - RNA, 19 nt, Homo sapiens
  misc_RNA (1)...(19): siRNA sense strand
gaagcccucauaccuguuc

SEQ ID NO: 150500 - RNA, 19 nt, Homo sapiens
  misc_RNA (1)...(19): siRNA sense strand
gcuguguugugcacucuuc

SEQ ID NO: 150501 - RNA, 19 nt, Homo sapiens
  misc_RNA (1)...(19): siRNA sense strand
ccggaaucaucuacaccua

SEQ ID NO: 150502 - RNA, 19 nt, Homo sapiens
  misc_RNA (1)...(19): siRNA sense strand
gcucugcucacccguggaa

SEQ ID NO: 150503 - RNA, 19 nt, Homo sapiens
  misc_RNA (1)...(19): siRNA sense strand
cuacaccuaugggcauguu

SEQ ID NO: 150504 - RNA, 19 nt, Homo sapiens
  misc_RNA (1)...(19): siRNA sense strand
gcugugcuccucaucuguu

SEQ ID NO: 150505 - RNA, 19 nt, Homo sapiens
  misc_RNA (1)...(19): siRNA sense strand
ggaggaaugcugggugaca

SEQ ID NO: 150506 - RNA, 19 nt, Homo sapiens
  misc_RNA (1)...(19): siRNA sense strand
gcauguggccagcuugucu

SEQ ID NO: 150507 - RNA, 19 nt, Homo sapiens
  misc_RNA (1)...(19): siRNA sense strand
gaagauuggcagcgugacu

SEQ ID NO: 150508 - RNA, 19 nt, Homo sapiens
  misc_RNA (1)...(19): siRNA sense strand
aucuagaccucucugauug

SEQ ID NO: 150509 - RNA, 19 nt, Homo sapiens
  misc_RNA (1)...(19): siRNA sense strand
ccuaugaaggauuacauga

SEQ ID NO: 150510 - RNA, 19 nt, Homo sapiens
  misc_RNA (1)...(19): siRNA sense strand
gaauuuccauguuuuccau

SEQ ID NO: 150511 - RNA, 19 nt, Homo sapiens
  misc_RNA (1)...(19): siRNA sense strand
caucauguggguccucuca

SEQ ID NO: 150512 - RNA, 19 nt, Homo sapiens
  misc_RNA (1)...(19): siRNA sense strand
cuucugggccugcuaagug

SEQ ID NO: 150513 - RNA, 19 nt, Homo sapiens
  misc_RNA (1)...(19): siRNA sense strand
ggucagaggcaaaagaaga

SEQ ID NO: 150514 - RNA, 19 nt, Homo sapiens
  misc_RNA (1)...(19): siRNA sense strand
gcagcuuugugaauuucca

SEQ ID NO: 150515 - RNA, 19 nt, Homo sapiens
  misc_RNA (1)...(19): siRNA sense strand
uggcugugcucuaucugau

SEQ ID NO: 150516 - RNA, 19 nt, Homo sapiens
  misc_RNA (1)...(19): siRNA sense strand
gcagcgugacuaugaccuu

SEQ ID NO: 150517 - RNA, 19 nt, Homo sapiens
  misc_RNA (1)...(19): siRNA sense strand
guggccagauuccagagau

SEQ ID NO: 150518 - RNA, 19 nt, Homo sapiens
  misc_RNA (1)...(19): siRNA sense strand
gaaagaugcuggaauauac

SEQ ID NO: 150519 - RNA, 19 nt, Homo sapiens
  misc_RNA (1)...(19): siRNA sense strand
acagaaagaugcuggaaua

SEQ ID NO: 150520 - RNA, 19 nt, Homo sapiens
  misc_RNA (1)...(19): siRNA sense strand
gaggaaaccuuguuaucaa

SEQ ID NO: 150521 - RNA, 19 nt, Homo sapiens
  misc_RNA (1)...(19): siRNA sense strand
gaagagcagccaaucaaua

SEQ ID NO: 150522 - RNA, 19 nt, Homo sapiens
  misc_RNA (1)...(19): siRNA sense strand
ggauaaacaucaagcaaga

SEQ ID NO: 150523 - RNA, 19 nt, Homo sapiens
  misc_RNA (1)...(19): siRNA sense strand
gaauggugcuucucuguga

SEQ ID NO: 150524 - RNA, 19 nt, Homo sapiens
  misc_RNA (1)...(19): siRNA sense strand
agaagaagcugcaaacaga

SEQ ID NO: 150525 - RNA, 19 nt, Homo sapiens
  misc_RNA (1)...(19): siRNA sense strand
gaugguagcuuggaaauca

SEQ ID NO: 150526 - RNA, 19 nt, Homo sapiens
  misc_RNA (1)...(19): siRNA sense strand
ucaaaugaaucuacaguga

SEQ ID NO: 150527 - RNA, 19 nt, Homo sapiens
  misc_RNA (1)...(19): siRNA sense strand
ggacaauucuucagcuuca

SEQ ID NO: 150528 - RNA, 19 nt, Homo sapiens
  misc_RNA (1)...(19): siRNA sense strand
gaaaugaauccuaugaaga

SEQ ID NO: 150529 - RNA, 19 nt, Homo sapiens
  misc_RNA (1)...(19): siRNA sense strand
gaauuaagacuguaugaug

SEQ ID NO: 150530 - RNA, 19 nt, Homo sapiens
  misc_RNA (1)...(19): siRNA sense strand
gaaacaugcuggaagauac

SEQ ID NO: 150531 - RNA, 19 nt, Homo sapiens
  misc_RNA (1)...(19): siRNA sense strand
ggauguauaugcauugaug

SEQ ID NO: 150532 - RNA, 19 nt, Homo sapiens
  misc_RNA (1)...(19): siRNA sense strand
gagaauagaagacauuaga

SEQ ID NO: 150533 - RNA, 19 nt, Homo sapiens
  misc_RNA (1)...(19): siRNA sense strand
ggucagucaucuugugaua

SEQ ID NO: 150534 - RNA, 19 nt, Homo sapiens
  misc_RNA (1)...(19): siRNA sense strand
gaaaugcgcagcugaaaca

SEQ ID NO: 150535 - RNA, 19 nt, Homo sapiens
  misc_RNA (1)...(19): siRNA sense strand
cagaguggcuugucaauag

SEQ ID NO: 150536 - RNA, 19 nt, Homo sapiens
  misc_RNA (1)...(19): siRNA sense strand
caacaacccugacaaacag

SEQ ID NO: 150537 - RNA, 19 nt, Homo sapiens
  misc_RNA (1)...(19): siRNA sense strand
ugagauaucuguucauugg

SEQ ID NO: 150538 - RNA, 19 nt, Homo sapiens
  misc_RNA (1)...(19): siRNA sense strand
ggaauauacuacuguuuag

SEQ ID NO: 150539 - RNA, 19 nt, Homo sapiens
  misc_RNA (1)...(19): siRNA sense strand
guggaaagcuaucagauuc

SEQ ID NO: 150540 - RNA, 19 nt, Homo sapiens
  misc_RNA (1)...(19): siRNA sense strand
gaaagcccaucccuacaau

SEQ ID NO: 150541 - RNA, 19 nt, Homo sapiens
  misc_RNA (1)...(19): siRNA sense strand
gaucuucaauauucagcua

SEQ ID NO: 150542 - RNA, 19 nt, Homo sapiens
  misc_RNA (1)...(19): siRNA sense strand
gcuaucagauucgguauug

SEQ ID NO: 150543 - RNA, 19 nt, Homo sapiens
  misc_RNA (1)...(19): siRNA sense strand
caacagaaguagguguaaa

SEQ ID NO: 150544 - RNA, 19 nt, Homo sapiens
  misc_RNA (1)...(19): siRNA sense strand
gcugaaacaugcuggaaga

SEQ ID NO: 150545 - RNA, 19 nt, Homo sapiens
  misc_RNA (1)...(19): siRNA sense strand
ggugauaauugaaugcaaa

SEQ ID NO: 150546 - RNA, 19 nt, Homo sapiens
  misc_RNA (1)...(19): siRNA sense strand
gaagggugauaauugaaug

SEQ ID NO: 150547 - RNA, 19 nt, Homo sapiens
  misc_RNA (1)...(19): siRNA sense strand
ucagaugacuggaaagaug

SEQ ID NO: 150548 - RNA, 19 nt, Homo sapiens
  misc_RNA (1)...(19): siRNA sense strand
gcacagugauggaggagau

SEQ ID NO: 150549 - RNA, 19 nt, Homo sapiens
  misc_RNA (1)...(19): siRNA sense strand
gcaaacagaguucaaguca

SEQ ID NO: 150550 - RNA, 19 nt, Homo sapiens
  misc_RNA (1)...(19): siRNA sense strand
caagagcaguggacuuaau

SEQ ID NO: 150551 - RNA, 19 nt, Homo sapiens
  misc_RNA (1)...(19): siRNA sense strand
gaucaucaguucaguaagg

SEQ ID NO: 150552 - RNA, 19 nt, Homo sapiens
  misc_RNA (1)...(19): siRNA sense strand
guggaagggugauaauuga

SEQ ID NO: 150553 - RNA, 19 nt, Homo sapiens
  misc_RNA (1)...(19): siRNA sense strand
ucacaaacacuccauagaa

SEQ ID NO: 150554 - RNA, 19 nt, Homo sapiens
  misc_RNA (1)...(19): siRNA sense strand
ggaaaggaauggugcuucu

SEQ ID NO: 150555 - RNA, 19 nt, Homo sapiens
  misc_RNA (1)...(19): siRNA sense strand
ccacugcauuucaaguuaa

SEQ ID NO: 150556 - RNA, 19 nt, Homo sapiens
  misc_RNA (1)...(19): siRNA sense strand
ggaggaaaccuuguuauca

SEQ ID NO: 150557 - RNA, 19 nt, Homo sapiens
  misc_RNA (1)...(19): siRNA sense strand
ggaguggugucucaaguca

SEQ ID NO: 150558 - RNA, 19 nt, Homo sapiens
  misc_RNA (1)...(19): siRNA sense strand
gauauaagguacucuacag

SEQ ID NO: 150559 - RNA, 19 nt, Homo sapiens
  misc_RNA (1)...(19): siRNA sense strand
agacuauucuuucagauga

SEQ ID NO: 150560 - RNA, 19 nt, Homo sapiens
  misc_RNA (1)...(19): siRNA sense strand
ucaacaacauuacaaggaa

SEQ ID NO: 150561 - RNA, 19 nt, Homo sapiens
  misc_RNA (1)...(19): siRNA sense strand
ggaagaugguagcuuggaa

SEQ ID NO: 150562 - RNA, 19 nt, Homo sapiens
  misc_RNA (1)...(19): siRNA sense strand
ggaaagcccaucccuacaa

SEQ ID NO: 150563 - RNA, 19 nt, Homo sapiens
  misc_RNA (1)...(19): siRNA sense strand
gauaaacggcgauuugugu

SEQ ID NO: 150564 - RNA, 19 nt, Homo sapiens
  misc_RNA (1)...(19): siRNA sense strand
ggacguugaucucacaagu

SEQ ID NO: 150565 - RNA, 19 nt, Homo sapiens
  misc_RNA (1)...(19): siRNA sense strand
gauccuggcugcuaaaggu

SEQ ID NO: 150566 - RNA, 19 nt, Homo sapiens
  misc_RNA (1)...(19): siRNA sense strand
ucaaggauguauaugcauu

SEQ ID NO: 150567 - RNA, 19 nt, Homo sapiens
  misc_RNA (1)...(19): siRNA sense strand
caaagagcguguucagcaa

SEQ ID NO: 150568 - RNA, 19 nt, Homo sapiens
  misc_RNA (1)...(19): siRNA sense strand
gaggaaaggauaaacauca

SEQ ID NO: 150569 - RNA, 19 nt, Homo sapiens
  misc_RNA (1)...(19): siRNA sense strand
gauccuacgcgaauuauau

SEQ ID NO: 150570 - RNA, 19 nt, Homo sapiens
  misc_RNA (1)...(19): siRNA sense strand
ugaaaugaauccuaugaag

SEQ ID NO: 150571 - RNA, 19 nt, Homo sapiens
  misc_RNA (1)...(19): siRNA sense strand
ucagucaucuugugauaau

SEQ ID NO: 150572 - RNA, 19 nt, Homo sapiens
  misc_RNA (1)...(19): siRNA sense strand
guuuacaaauggagaauga

SEQ ID NO: 150573 - RNA, 19 nt, Homo sapiens
  misc_RNA (1)...(19): siRNA sense strand
acagagagcugaccauaac

SEQ ID NO: 150574 - RNA, 19 nt, Homo sapiens
  misc_RNA (1)...(19): siRNA sense strand
gaagaugguagcuuggaaa

SEQ ID NO: 150575 - RNA, 19 nt, Homo sapiens
  misc_RNA (1)...(19): siRNA sense strand
gaaggcaucuaugaaugug

SEQ ID NO: 150576 - RNA, 19 nt, Homo sapiens
  misc_RNA (1)...(19): siRNA sense strand
acaagacgcucccagugaa

SEQ ID NO: 150577 - RNA, 19 nt, Homo sapiens
  misc_RNA (1)...(19): siRNA sense strand
agaaagaugcuggaauaua

SEQ ID NO: 150578 - RNA, 19 nt, Homo sapiens
  misc_RNA (1)...(19): siRNA sense strand
caaagagaauauucacuac

SEQ ID NO: 150579 - RNA, 19 nt, Homo sapiens
  misc_RNA (1)...(19): siRNA sense strand
ggguagaacacaucaauga

SEQ ID NO: 150580 - RNA, 19 nt, Homo sapiens
  misc_RNA (1)...(19): siRNA sense strand
gcagcagaauacucauuug

SEQ ID NO: 150581 - RNA, 19 nt, Homo sapiens
  misc_RNA (1)...(19): siRNA sense strand
gccaaucaauaccauuuau

SEQ ID NO: 150582 - RNA, 19 nt, Homo sapiens
  misc_RNA (1)...(19): siRNA sense strand
caacaacauuacaaggaau

SEQ ID NO: 150583 - RNA, 19 nt, Homo sapiens
  misc_RNA (1)...(19): siRNA sense strand
gaacccuuguuaucacaga

SEQ ID NO: 150584 - RNA, 19 nt, Homo sapiens
  misc_RNA (1)...(19): siRNA sense strand
aaacagagagcugaccaua

SEQ ID NO: 150585 - RNA, 19 nt, Homo sapiens
  misc_RNA (1)...(19): siRNA sense strand
guaggaggaaaccuuguua

SEQ ID NO: 150586 - RNA, 19 nt, Homo sapiens
  misc_RNA (1)...(19): siRNA sense strand
ugaggaagacaaaggauuu

SEQ ID NO: 150587 - RNA, 19 nt, Homo sapiens
  misc_RNA (1)...(19): siRNA sense strand
gcauuuaagccauuugaug

SEQ ID NO: 150588 - RNA, 19 nt, Homo sapiens
  misc_RNA (1)...(19): siRNA sense strand
ggaaaucaacaacauuaca

SEQ ID NO: 150589 - RNA, 19 nt, Homo sapiens
  misc_RNA (1)...(19): siRNA sense strand
gguggaagggugauaauug

SEQ ID NO: 150590 - RNA, 19 nt, Homo sapiens
  misc_RNA (1)...(19): siRNA sense strand
acacagagguggacauagg

SEQ ID NO: 150591 - RNA, 19 nt, Homo sapiens
  misc_RNA (1)...(19): siRNA sense strand
gcugagaacauuagaggaa

SEQ ID NO: 150592 - RNA, 19 nt, Homo sapiens
  misc_RNA (1)...(19): siRNA sense strand
guucaaggauguauaugca

SEQ ID NO: 150593 - RNA, 19 nt, Homo sapiens
  misc_RNA (1)...(19): siRNA sense strand
ucacagauccuacgcgaau

SEQ ID NO: 150594 - RNA, 19 nt, Homo sapiens
  misc_RNA (1)...(19): siRNA sense strand
caaauucaucccacucauu

SEQ ID NO: 150595 - RNA, 19 nt, Homo sapiens
  misc_RNA (1)...(19): siRNA sense strand
cacaaacacuccauagaag

SEQ ID NO: 150596 - RNA, 19 nt, Homo sapiens
  misc_RNA (1)...(19): siRNA sense strand
gcacuggaacccuuguuau

SEQ ID NO: 150597 - RNA, 19 nt, Homo sapiens
  misc_RNA (1)...(19): siRNA sense strand
aggaaucacuggaaggaaa

SEQ ID NO: 150598 - RNA, 19 nt, Homo sapiens
  misc_RNA (1)...(19): siRNA sense strand
gggcuguucuuaagaucuu

SEQ ID NO: 150599 - RNA, 19 nt, Homo sapiens
  misc_RNA (1)...(19): siRNA sense strand
aaucuacagugacgggaua

SEQ ID NO: 150600 - RNA, 19 nt, Homo sapiens
  misc_RNA (1)...(19): siRNA sense strand
gcacugcccagacaauugu

SEQ ID NO: 150601 - RNA, 19 nt, Homo sapiens
  misc_RNA (1)...(19): siRNA sense strand
ugaaacaugcuggaagaua

SEQ ID NO: 150602 - RNA, 19 nt, Homo sapiens
  misc_RNA (1)...(19): siRNA sense strand
gcaagaauuuauguucaag

SEQ ID NO: 150603 - RNA, 19 nt, Homo sapiens
  misc_RNA (1)...(19): siRNA sense strand
gcaaauucaucccacucau

SEQ ID NO: 150604 - RNA, 19 nt, Homo sapiens
  misc_RNA (1)...(19): siRNA sense strand
gguucacgcuauauaauca

SEQ ID NO: 150605 - RNA, 19 nt, Homo sapiens
  misc_RNA (1)...(19): siRNA sense strand
aaauguggcuccuucagau

SEQ ID NO: 150606 - RNA, 19 nt, Homo sapiens
  misc_RNA (1)...(19): siRNA sense strand
ugccuuggaucucacauuu

SEQ ID NO: 150607 - RNA, 19 nt, Homo sapiens
  misc_RNA (1)...(19): siRNA sense strand
cggaauguaucagugcaua

SEQ ID NO: 150608 - RNA, 19 nt, Homo sapiens
  misc_RNA (1)...(19): siRNA sense strand
caagcaagaauuuauguuc

SEQ ID NO: 150609 - RNA, 19 nt, Homo sapiens
  misc_RNA (1)...(19): siRNA sense strand
uccaauaccugaacgaaca

SEQ ID NO: 150610 - RNA, 19 nt, Homo sapiens
  misc_RNA (1)...(19): siRNA sense strand
gaucaugucguugcacuau

SEQ ID NO: 150611 - RNA, 19 nt, Homo sapiens
  misc_RNA (1)...(19): siRNA sense strand
ggaagggugauaauugaau

SEQ ID NO: 150612 - RNA, 19 nt, Homo sapiens
  misc_RNA (1)...(19): siRNA sense strand
gugcauagcugaaaacaca

SEQ ID NO: 150613 - RNA, 19 nt, Homo sapiens
  misc_RNA (1)...(19): siRNA sense strand
ggacauaggcagugaucuc

SEQ ID NO: 150614 - RNA, 19 nt, Homo sapiens
  misc_RNA (1)...(19): siRNA sense strand
gcuggaauauacuacuguu

SEQ ID NO: 150615 - RNA, 19 nt, Homo sapiens
  misc_RNA (1)...(19): siRNA sense strand
ggaaaagucucacucaacu

SEQ ID NO: 150616 - RNA, 19 nt, Homo sapiens
  misc_RNA (1)...(19): siRNA sense strand
gucaaggccuucaacaaca

SEQ ID NO: 150617 - RNA, 19 nt, Homo sapiens
  misc_RNA (1)...(19): siRNA sense strand
ucaaggccuucaacaacaa

SEQ ID NO: 150618 - RNA, 19 nt, Homo sapiens
  misc_RNA (1)...(19): siRNA sense strand
gaaagaugcuggaauauac

SEQ ID NO: 150619 - RNA, 19 nt, Homo sapiens
  misc_RNA (1)...(19): siRNA sense strand
acagaaagaugcuggaaua

SEQ ID NO: 150620 - RNA, 19 nt, Homo sapiens
  misc_RNA (1)...(19): siRNA sense strand
gaggaaaccuuguuaucaa

SEQ ID NO: 150621 - RNA, 19 nt, Homo sapiens
  misc_RNA (1)...(19): siRNA sense strand
gaagagcagccaaucaaua

SEQ ID NO: 150622 - RNA, 19 nt, Homo sapiens
  misc_RNA (1)...(19): siRNA sense strand
ggauaaacaucaagcaaga

SEQ ID NO: 150623 - RNA, 19 nt, Homo sapiens
  misc_RNA (1)...(19): siRNA sense strand
gaauggugcuucucuguga

SEQ ID NO: 150624 - RNA, 19 nt, Homo sapiens
  misc_RNA (1)...(19): siRNA sense strand
agaagaagcugcaaacaga

SEQ ID NO: 150625 - RNA, 19 nt, Homo sapiens
  misc_RNA (1)...(19): siRNA sense strand
gaugguagcuuggaaauca

SEQ ID NO: 150626 - RNA, 19 nt, Homo sapiens
  misc_RNA (1)...(19): siRNA sense strand
ucaaaugaaucuacaguga

SEQ ID NO: 150627 - RNA, 19 nt, Homo sapiens
  misc_RNA (1)...(19): siRNA sense strand
ggacaauucuucagcuuca

SEQ ID NO: 150628 - RNA, 19 nt, Homo sapiens
  misc_RNA (1)...(19): siRNA sense strand
gaaaugaauccuaugaaga

SEQ ID NO: 150629 - RNA, 19 nt, Homo sapiens
  misc_RNA (1)...(19): siRNA sense strand
gaauuaagacuguaugaug

SEQ ID NO: 150630 - RNA, 19 nt, Homo sapiens
  misc_RNA (1)...(19): siRNA sense strand
gaaacaugcuggaagauac

SEQ ID NO: 150631 - RNA, 19 nt, Homo sapiens
  misc_RNA (1)...(19): siRNA sense strand
ggauguauaugcauugaug

SEQ ID NO: 150632 - RNA, 19 nt, Homo sapiens
  misc_RNA (1)...(19): siRNA sense strand
gagaauagaagacauuaga

SEQ ID NO: 150633 - RNA, 19 nt, Homo sapiens
  misc_RNA (1)...(19): siRNA sense strand
ggucagucaucuugugaua

SEQ ID NO: 150634 - RNA, 19 nt, Homo sapiens
  misc_RNA (1)...(19): siRNA sense strand
gaaaugcgcagcugaaaca

SEQ ID NO: 150635 - RNA, 19 nt, Homo sapiens
  misc_RNA (1)...(19): siRNA sense strand
cagaguggcuugucaauag

SEQ ID NO: 150636 - RNA, 19 nt, Homo sapiens
  misc_RNA (1)...(19): siRNA sense strand
caacaacccugacaaacag

SEQ ID NO: 150637 - RNA, 19 nt, Homo sapiens
  misc_RNA (1)...(19): siRNA sense strand
ugagauaucuguucauugg

SEQ ID NO: 150638 - RNA, 19 nt, Homo sapiens
  misc_RNA (1)...(19): siRNA sense strand
ggaauauacuacuguuuag

SEQ ID NO: 150639 - RNA, 19 nt, Homo sapiens
  misc_RNA (1)...(19): siRNA sense strand
guggaaagcuaucagauuc

SEQ ID NO: 150640 - RNA, 19 nt, Homo sapiens
  misc_RNA (1)...(19): siRNA sense strand
gaaagcccaucccuacaau

SEQ ID NO: 150641 - RNA, 19 nt, Homo sapiens
  misc_RNA (1)...(19): siRNA sense strand
gaucuucaauauucagcua

SEQ ID NO: 150642 - RNA, 19 nt, Homo sapiens
  misc_RNA (1)...(19): siRNA sense strand
gcuaucagauucgguauug

SEQ ID NO: 150643 - RNA, 19 nt, Homo sapiens
  misc_RNA (1)...(19): siRNA sense strand
caacagaaguagguguaaa

SEQ ID NO: 150644 - RNA, 19 nt, Homo sapiens
  misc_RNA (1)...(19): siRNA sense strand
gcugaaacaugcuggaaga

SEQ ID NO: 150645 - RNA, 19 nt, Homo sapiens
  misc_RNA (1)...(19): siRNA sense strand
ggugauaauugaaugcaaa

SEQ ID NO: 150646 - RNA, 19 nt, Homo sapiens
  misc_RNA (1)...(19): siRNA sense strand
gaagggugauaauugaaug

SEQ ID NO: 150647 - RNA, 19 nt, Homo sapiens
  misc_RNA (1)...(19): siRNA sense strand
ucagaugacuggaaagaug

SEQ ID NO: 150648 - RNA, 19 nt, Homo sapiens
  misc_RNA (1)...(19): siRNA sense strand
gcacagugauggaggagau

SEQ ID NO: 150649 - RNA, 19 nt, Homo sapiens
  misc_RNA (1)...(19): siRNA sense strand
gcaaacagaguucaaguca

SEQ ID NO: 150650 - RNA, 19 nt, Homo sapiens
  misc_RNA (1)...(19): siRNA sense strand
caagagcaguggacuuaau

SEQ ID NO: 150651 - RNA, 19 nt, Homo sapiens
  misc_RNA (1)...(19): siRNA sense strand
gaucaucaguucaguaagg

SEQ ID NO: 150652 - RNA, 19 nt, Homo sapiens
  misc_RNA (1)...(19): siRNA sense strand
guggaagggugauaauuga

SEQ ID NO: 150653 - RNA, 19 nt, Homo sapiens
  misc_RNA (1)...(19): siRNA sense strand
ucacaaacacuccauagaa

SEQ ID NO: 150654 - RNA, 19 nt, Homo sapiens
  misc_RNA (1)...(19): siRNA sense strand
ggaaaggaauggugcuucu

SEQ ID NO: 150655 - RNA, 19 nt, Homo sapiens
  misc_RNA (1)...(19): siRNA sense strand
ccacugcauuucaaguuaa

SEQ ID NO: 150656 - RNA, 19 nt, Homo sapiens
  misc_RNA (1)...(19): siRNA sense strand
ggaggaaaccuuguuauca

SEQ ID NO: 150657 - RNA, 19 nt, Homo sapiens
  misc_RNA (1)...(19): siRNA sense strand
ggaguggugucucaaguca

SEQ ID NO: 150658 - RNA, 19 nt, Homo sapiens
  misc_RNA (1)...(19): siRNA sense strand
gauauaagguacucuacag

SEQ ID NO: 150659 - RNA, 19 nt, Homo sapiens
  misc_RNA (1)...(19): siRNA sense strand
agacuauucuuucagauga

SEQ ID NO: 150660 - RNA, 19 nt, Homo sapiens
  misc_RNA (1)...(19): siRNA sense strand
ucaacaacauuacaaggaa

SEQ ID NO: 150661 - RNA, 19 nt, Homo sapiens
  misc_RNA (1)...(19): siRNA sense strand
ggaagaugguagcuuggaa

SEQ ID NO: 150662 - RNA, 19 nt, Homo sapiens
  misc_RNA (1)...(19): siRNA sense strand
ggaaagcccaucccuacaa

SEQ ID NO: 150663 - RNA, 19 nt, Homo sapiens
  misc_RNA (1)...(19): siRNA sense strand
gauaaacggcgauuugugu

SEQ ID NO: 150664 - RNA, 19 nt, Homo sapiens
  misc_RNA (1)...(19): siRNA sense strand
ggacguugaucucacaagu

SEQ ID NO: 150665 - RNA, 19 nt, Homo sapiens
  misc_RNA (1)...(19): siRNA sense strand
gauccuggcugcuaaaggu

SEQ ID NO: 150666 - RNA, 19 nt, Homo sapiens
  misc_RNA (1)...(19): siRNA sense strand
ucaaggauguauaugcauu

SEQ ID NO: 150667 - RNA, 19 nt, Homo sapiens
  misc_RNA (1)...(19): siRNA sense strand
caaagagcguguucagcaa

SEQ ID NO: 150668 - RNA, 19 nt, Homo sapiens
  misc_RNA (1)...(19): siRNA sense strand
gaggaaaggauaaacauca

SEQ ID NO: 150669 - RNA, 19 nt, Homo sapiens
  misc_RNA (1)...(19): siRNA sense strand
gauccuacgcgaauuauau

SEQ ID NO: 150670 - RNA, 19 nt, Homo sapiens
  misc_RNA (1)...(19): siRNA sense strand
ugaaaugaauccuaugaag

SEQ ID NO: 150671 - RNA, 19 nt, Homo sapiens
  misc_RNA (1)...(19): siRNA sense strand
ucagucaucuugugauaau

SEQ ID NO: 150672 - RNA, 19 nt, Homo sapiens
  misc_RNA (1)...(19): siRNA sense strand
guuuacaaauggagaauga

SEQ ID NO: 150673 - RNA, 19 nt, Homo sapiens
  misc_RNA (1)...(19): siRNA sense strand
acagagagcugaccauaac

SEQ ID NO: 150674 - RNA, 19 nt, Homo sapiens
  misc_RNA (1)...(19): siRNA sense strand
gaagaugguagcuuggaaa

SEQ ID NO: 150675 - RNA, 19 nt, Homo sapiens
  misc_RNA (1)...(19): siRNA sense strand
gaaggcaucuaugaaugug

SEQ ID NO: 150676 - RNA, 19 nt, Homo sapiens
  misc_RNA (1)...(19): siRNA sense strand
acaagacgcucccagugaa

SEQ ID NO: 150677 - RNA, 19 nt, Homo sapiens
  misc_RNA (1)...(19): siRNA sense strand
agaaagaugcuggaauaua

SEQ ID NO: 150678 - RNA, 19 nt, Homo sapiens
  misc_RNA (1)...(19): siRNA sense strand
caaagagaauauucacuac

SEQ ID NO: 150679 - RNA, 19 nt, Homo sapiens
  misc_RNA (1)...(19): siRNA sense strand
ggguagaacacaucaauga

SEQ ID NO: 150680 - RNA, 19 nt, Homo sapiens
  misc_RNA (1)...(19): siRNA sense strand
gcagcagaauacucauuug

SEQ ID NO: 150681 - RNA, 19 nt, Homo sapiens
  misc_RNA (1)...(19): siRNA sense strand
gccaaucaauaccauuuau

SEQ ID NO: 150682 - RNA, 19 nt, Homo sapiens
  misc_RNA (1)...(19): siRNA sense strand
caacaacauuacaaggaau

SEQ ID NO: 150683 - RNA, 19 nt, Homo sapiens
  misc_RNA (1)...(19): siRNA sense strand
gaacccuuguuaucacaga

SEQ ID NO: 150684 - RNA, 19 nt, Homo sapiens
  misc_RNA (1)...(19): siRNA sense strand
aaacagagagcugaccaua

SEQ ID NO: 150685 - RNA, 19 nt, Homo sapiens
  misc_RNA (1)...(19): siRNA sense strand
guaggaggaaaccuuguua

SEQ ID NO: 150686 - RNA, 19 nt, Homo sapiens
  misc_RNA (1)...(19): siRNA sense strand
ugaggaagacaaaggauuu

SEQ ID NO: 150687 - RNA, 19 nt, Homo sapiens
  misc_RNA (1)...(19): siRNA sense strand
gcauuuaagccauuugaug

SEQ ID NO: 150688 - RNA, 19 nt, Homo sapiens
  misc_RNA (1)...(19): siRNA sense strand
ggaaaucaacaacauuaca

SEQ ID NO: 150689 - RNA, 19 nt, Homo sapiens
  misc_RNA (1)...(19): siRNA sense strand
gguggaagggugauaauug

SEQ ID NO: 150690 - RNA, 19 nt, Homo sapiens
  misc_RNA (1)...(19): siRNA sense strand
acacagagguggacauagg

SEQ ID NO: 150691 - RNA, 19 nt, Homo sapiens
  misc_RNA (1)...(19): siRNA sense strand
gcugagaacauuagaggaa

SEQ ID NO: 150692 - RNA, 19 nt, Homo sapiens
  misc_RNA (1)...(19): siRNA sense strand
guucaaggauguauaugca

SEQ ID NO: 150693 - RNA, 19 nt, Homo sapiens
  misc_RNA (1)...(19): siRNA sense strand
ucacagauccuacgcgaau

SEQ ID NO: 150694 - RNA, 19 nt, Homo sapiens
  misc_RNA (1)...(19): siRNA sense strand
caaauucaucccacucauu

SEQ ID NO: 150695 - RNA, 19 nt, Homo sapiens
  misc_RNA (1)...(19): siRNA sense strand
cacaaacacuccauagaag

SEQ ID NO: 150696 - RNA, 19 nt, Homo sapiens
  misc_RNA (1)...(19): siRNA sense strand
gcacuggaacccuuguuau

SEQ ID NO: 150697 - RNA, 19 nt, Homo sapiens
  misc_RNA (1)...(19): siRNA sense strand
aggaaucacuggaaggaaa

SEQ ID NO: 150698 - RNA, 19 nt, Homo sapiens
  misc_RNA (1)...(19): siRNA sense strand
gggcuguucuuaagaucuu

SEQ ID NO: 150699 - RNA, 19 nt, Homo sapiens
  misc_RNA (1)...(19): siRNA sense strand
aaucuacagugacgggaua

SEQ ID NO: 150700 - RNA, 19 nt, Homo sapiens
  misc_RNA (1)...(19): siRNA sense strand
gcacugcccagacaauugu

SEQ ID NO: 150701 - RNA, 19 nt, Homo sapiens
  misc_RNA (1)...(19): siRNA sense strand
ugaaacaugcuggaagaua

SEQ ID NO: 150702 - RNA, 19 nt, Homo sapiens
  misc_RNA (1)...(19): siRNA sense strand
gcaagaauuuauguucaag

SEQ ID NO: 150703 - RNA, 19 nt, Homo sapiens
  misc_RNA (1)...(19): siRNA sense strand
gcaaauucaucccacucau

SEQ ID NO: 150704 - RNA, 19 nt, Homo sapiens
  misc_RNA (1)...(19): siRNA sense strand
gguucacgcuauauaauca

SEQ ID NO: 150705 - RNA, 19 nt, Homo sapiens
  misc_RNA (1)...(19): siRNA sense strand
aaauguggcuccuucagau

SEQ ID NO: 150706 - RNA, 19 nt, Homo sapiens
  misc_RNA (1)...(19): siRNA sense strand
ugccuuggaucucacauuu

SEQ ID NO: 150707 - RNA, 19 nt, Homo sapiens
  misc_RNA (1)...(19): siRNA sense strand
cggaauguaucagugcaua

SEQ ID NO: 150708 - RNA, 19 nt, Homo sapiens
  misc_RNA (1)...(19): siRNA sense strand
caagcaagaauuuauguuc

SEQ ID NO: 150709 - RNA, 19 nt, Homo sapiens
  misc_RNA (1)...(19): siRNA sense strand
uccaauaccugaacgaaca

SEQ ID NO: 150710 - RNA, 19 nt, Homo sapiens
  misc_RNA (1)...(19): siRNA sense strand
gaucaugucguugcacuau

SEQ ID NO: 150711 - RNA, 19 nt, Homo sapiens
  misc_RNA (1)...(19): siRNA sense strand
ggaagggugauaauugaau

SEQ ID NO: 150712 - RNA, 19 nt, Homo sapiens
  misc_RNA (1)...(19): siRNA sense strand
gugcauagcugaaaacaca

SEQ ID NO: 150713 - RNA, 19 nt, Homo sapiens
  misc_RNA (1)...(19): siRNA sense strand
ggacauaggcagugaucuc

SEQ ID NO: 150714 - RNA, 19 nt, Homo sapiens
  misc_RNA (1)...(19): siRNA sense strand
gcuggaauauacuacuguu

SEQ ID NO: 150715 - RNA, 19 nt, Homo sapiens
  misc_RNA (1)...(19): siRNA sense strand
ggaaaagucucacucaacu

SEQ ID NO: 150716 - RNA, 19 nt, Homo sapiens
  misc_RNA (1)...(19): siRNA sense strand
gucaaggccuucaacaaca

SEQ ID NO: 150717 - RNA, 19 nt, Homo sapiens
  misc_RNA (1)...(19): siRNA sense strand
ucaaggccuucaacaacaa

SEQ ID NO: 150718 - RNA, 19 nt, Homo sapiens
  misc_RNA (1)...(19): siRNA sense strand
ggagauuccuucaaaguuu

SEQ ID NO: 150719 - RNA, 19 nt, Homo sapiens
  misc_RNA (1)...(19): siRNA sense strand
gggagaagauggagaaauu

SEQ ID NO: 150720 - RNA, 19 nt, Homo sapiens
  misc_RNA (1)...(19): siRNA sense strand
gaacaaggauuuuggauga

SEQ ID NO: 150721 - RNA, 19 nt, Homo sapiens
  misc_RNA (1)...(19): siRNA sense strand
gcaaauugguguugagguu

SEQ ID NO: 150722 - RNA, 19 nt, Homo sapiens
  misc_RNA (1)...(19): siRNA sense strand
gaacgugggucagcaggua

SEQ ID NO: 150723 - RNA, 19 nt, Homo sapiens
  misc_RNA (1)...(19): siRNA sense strand
gagauuccuucaaaguuua

SEQ ID NO: 150724 - RNA, 19 nt, Homo sapiens
  misc_RNA (1)...(19): siRNA sense strand
aaagggacauccugguuua

SEQ ID NO: 150725 - RNA, 19 nt, Homo sapiens
  misc_RNA (1)...(19): siRNA sense strand
gaaguugguuuagugaauu

SEQ ID NO: 150726 - RNA, 19 nt, Homo sapiens
  misc_RNA (1)...(19): siRNA sense strand
ucugguagauggagauuua

SEQ ID NO: 150727 - RNA, 19 nt, Homo sapiens
  misc_RNA (1)...(19): siRNA sense strand
ggaaguugguuuagugaau

SEQ ID NO: 150728 - RNA, 19 nt, Homo sapiens
  misc_RNA (1)...(19): siRNA sense strand
aaagggagaucgaggguuu

SEQ ID NO: 150729 - RNA, 19 nt, Homo sapiens
  misc_RNA (1)...(19): siRNA sense strand
gcaagcagaugcagaugau

SEQ ID NO: 150730 - RNA, 19 nt, Homo sapiens
  misc_RNA (1)...(19): siRNA sense strand
gaggauacacuauaugaaa

SEQ ID NO: 150731 - RNA, 19 nt, Homo sapiens
  misc_RNA (1)...(19): siRNA sense strand
uaugggaccuccuggcuua

SEQ ID NO: 150732 - RNA, 19 nt, Homo sapiens
  misc_RNA (1)...(19): siRNA sense strand
ucaauucccugaaacaaga

SEQ ID NO: 150733 - RNA, 19 nt, Homo sapiens
  misc_RNA (1)...(19): siRNA sense strand
guugggagaucaccuguuu

SEQ ID NO: 150734 - RNA, 19 nt, Homo sapiens
  misc_RNA (1)...(19): siRNA sense strand
gaauacaacuauggaacaa

SEQ ID NO: 150735 - RNA, 19 nt, Homo sapiens
  misc_RNA (1)...(19): siRNA sense strand
gcacaaacagaaagaauuc

SEQ ID NO: 150736 - RNA, 19 nt, Homo sapiens
  misc_RNA (1)...(19): siRNA sense strand
gaaguucggauuugaaguu

SEQ ID NO: 150737 - RNA, 19 nt, Homo sapiens
  misc_RNA (1)...(19): siRNA sense strand
ggaagcaggugcagaaggu

SEQ ID NO: 150738 - RNA, 19 nt, Homo sapiens
  misc_RNA (1)...(19): siRNA sense strand
caagggaucuaaaggugaa

SEQ ID NO: 150739 - RNA, 19 nt, Homo sapiens
  misc_RNA (1)...(19): siRNA sense strand
gaaauagacggcagggauu

SEQ ID NO: 150740 - RNA, 19 nt, Homo sapiens
  misc_RNA (1)...(19): siRNA sense strand
gaucaaguaccuauuguug

SEQ ID NO: 150741 - RNA, 19 nt, Homo sapiens
  misc_RNA (1)...(19): siRNA sense strand
gaagaaaacugugacaaug

SEQ ID NO: 150742 - RNA, 19 nt, Homo sapiens
  misc_RNA (1)...(19): siRNA sense strand
cauaugaaauuuccaaugg

SEQ ID NO: 150743 - RNA, 19 nt, Homo sapiens
  misc_RNA (1)...(19): siRNA sense strand
gggaguagcuggcaaacca

SEQ ID NO: 150744 - RNA, 19 nt, Homo sapiens
  misc_RNA (1)...(19): siRNA sense strand
auacuuagauguugaagga

SEQ ID NO: 150745 - RNA, 19 nt, Homo sapiens
  misc_RNA (1)...(19): siRNA sense strand
ugacaagggugaagaugga

SEQ ID NO: 150746 - RNA, 19 nt, Homo sapiens
  misc_RNA (1)...(19): siRNA sense strand
gaguaagaauuucaucaug

SEQ ID NO: 150747 - RNA, 19 nt, Homo sapiens
  misc_RNA (1)...(19): siRNA sense strand
uuacagaguuucaaagcaa

SEQ ID NO: 150748 - RNA, 19 nt, Homo sapiens
  misc_RNA (1)...(19): siRNA sense strand
ggacauccugguuuaauug

SEQ ID NO: 150749 - RNA, 19 nt, Homo sapiens
  misc_RNA (1)...(19): siRNA sense strand
uggcuuaccuggucucaaa

SEQ ID NO: 150750 - RNA, 19 nt, Homo sapiens
  misc_RNA (1)...(19): siRNA sense strand
caaauccaguugaagaaau

SEQ ID NO: 150751 - RNA, 19 nt, Homo sapiens
  misc_RNA (1)...(19): siRNA sense strand
cgaaaccacuugauagaag

SEQ ID NO: 150752 - RNA, 19 nt, Homo sapiens
  misc_RNA (1)...(19): siRNA sense strand
ccaggaaguugguuuagug

SEQ ID NO: 150753 - RNA, 19 nt, Homo sapiens
  misc_RNA (1)...(19): siRNA sense strand
gagcaauuguugauaccaa

SEQ ID NO: 150754 - RNA, 19 nt, Homo sapiens
  misc_RNA (1)...(19): siRNA sense strand
gggacauccugguuuaauu

SEQ ID NO: 150755 - RNA, 19 nt, Homo sapiens
  misc_RNA (1)...(19): siRNA sense strand
gggagcagauggugucaga

SEQ ID NO: 150756 - RNA, 19 nt, Homo sapiens
  misc_RNA (1)...(19): siRNA sense strand
gaaaggacagaaaggagaa

SEQ ID NO: 150757 - RNA, 19 nt, Homo sapiens
  misc_RNA (1)...(19): siRNA sense strand
caagguugcucaggagauu

SEQ ID NO: 150758 - RNA, 19 nt, Homo sapiens
  misc_RNA (1)...(19): siRNA sense strand
gauggugaauauuggauug

SEQ ID NO: 150759 - RNA, 19 nt, Homo sapiens
  misc_RNA (1)...(19): siRNA sense strand
gaggagaaguuggucaaau

SEQ ID NO: 150760 - RNA, 19 nt, Homo sapiens
  misc_RNA (1)...(19): siRNA sense strand
cuucagaacuguuaacauc

SEQ ID NO: 150761 - RNA, 19 nt, Homo sapiens
  misc_RNA (1)...(19): siRNA sense strand
ggauucugaucuucuggua

SEQ ID NO: 150762 - RNA, 19 nt, Homo sapiens
  misc_RNA (1)...(19): siRNA sense strand
gaagcuggcccacgagguu

SEQ ID NO: 150763 - RNA, 19 nt, Homo sapiens
  misc_RNA (1)...(19): siRNA sense strand
caagguaucucagggaaag

SEQ ID NO: 150764 - RNA, 19 nt, Homo sapiens
  misc_RNA (1)...(19): siRNA sense strand
aggagaaguuggucaaauu

SEQ ID NO: 150765 - RNA, 19 nt, Homo sapiens
  misc_RNA (1)...(19): siRNA sense strand
gaagugagagagcaauugu

SEQ ID NO: 150766 - RNA, 19 nt, Homo sapiens
  misc_RNA (1)...(19): siRNA sense strand
uaacaacccucgcauugac

SEQ ID NO: 150767 - RNA, 19 nt, Homo sapiens
  misc_RNA (1)...(19): siRNA sense strand
gauacugcuuacagaguuu

SEQ ID NO: 150768 - RNA, 19 nt, Homo sapiens
  misc_RNA (1)...(19): siRNA sense strand
ggagaaguuggucaaauug

SEQ ID NO: 150769 - RNA, 19 nt, Homo sapiens
  misc_RNA (1)...(19): siRNA sense strand
gcagauggaggaagaggaa

SEQ ID NO: 150770 - RNA, 19 nt, Homo sapiens
  misc_RNA (1)...(19): siRNA sense strand
ggagaucgaggguuugaug

SEQ ID NO: 150771 - RNA, 19 nt, Homo sapiens
  misc_RNA (1)...(19): siRNA sense strand
cacaagguccuauuggaua

SEQ ID NO: 150772 - RNA, 19 nt, Homo sapiens
  misc_RNA (1)...(19): siRNA sense strand
auacaacuauggaacaaug

SEQ ID NO: 150773 - RNA, 19 nt, Homo sapiens
  misc_RNA (1)...(19): siRNA sense strand
ggugagacuugcauuuauc

SEQ ID NO: 150774 - RNA, 19 nt, Homo sapiens
  misc_RNA (1)...(19): siRNA sense strand
ggaauggaagaaauauuug

SEQ ID NO: 150775 - RNA, 19 nt, Homo sapiens
  misc_RNA (1)...(19): siRNA sense strand
gcagaugcagaugauaaua

SEQ ID NO: 150776 - RNA, 19 nt, Homo sapiens
  misc_RNA (1)...(19): siRNA sense strand
gcaaucagcguggagaaga

SEQ ID NO: 150777 - RNA, 19 nt, Homo sapiens
  misc_RNA (1)...(19): siRNA sense strand
ugacuuuggugaucagaau

SEQ ID NO: 150778 - RNA, 19 nt, Homo sapiens
  misc_RNA (1)...(19): siRNA sense strand
cagcauaugacuacuguga

SEQ ID NO: 150779 - RNA, 19 nt, Homo sapiens
  misc_RNA (1)...(19): siRNA sense strand
gaaaagacugucauugaaa

SEQ ID NO: 150780 - RNA, 19 nt, Homo sapiens
  misc_RNA (1)...(19): siRNA sense strand
ugaaaagacugucauugaa

SEQ ID NO: 150781 - RNA, 19 nt, Homo sapiens
  misc_RNA (1)...(19): siRNA sense strand
gcagaagguccuccuggaa

SEQ ID NO: 150782 - RNA, 19 nt, Homo sapiens
  misc_RNA (1)...(19): siRNA sense strand
gggugcaccuggacugaaa

SEQ ID NO: 150783 - RNA, 19 nt, Homo sapiens
  misc_RNA (1)...(19): siRNA sense strand
gcacuagauuuucacaauu

SEQ ID NO: 150784 - RNA, 19 nt, Homo sapiens
  misc_RNA (1)...(19): siRNA sense strand
agaauuugguccaggugua

SEQ ID NO: 150785 - RNA, 19 nt, Homo sapiens
  misc_RNA (1)...(19): siRNA sense strand
auggaacaauggaaaguua

SEQ ID NO: 150786 - RNA, 19 nt, Homo sapiens
  misc_RNA (1)...(19): siRNA sense strand
ucaggaaccucagauagau

SEQ ID NO: 150787 - RNA, 19 nt, Homo sapiens
  misc_RNA (1)...(19): siRNA sense strand
uaacgggagaggauuauga

SEQ ID NO: 150788 - RNA, 19 nt, Homo sapiens
  misc_RNA (1)...(19): siRNA sense strand
caucauggccaaaggagaa

SEQ ID NO: 150789 - RNA, 19 nt, Homo sapiens
  misc_RNA (1)...(19): siRNA sense strand
guggugagacuugcauuua

SEQ ID NO: 150790 - RNA, 19 nt, Homo sapiens
  misc_RNA (1)...(19): siRNA sense strand
agacaagggugaaauuggu

SEQ ID NO: 150791 - RNA, 19 nt, Homo sapiens
  misc_RNA (1)...(19): siRNA sense strand
gauguuaccguuccguuau

SEQ ID NO: 150792 - RNA, 19 nt, Homo sapiens
  misc_RNA (1)...(19): siRNA sense strand
gaacuuucccagaagacuu

SEQ ID NO: 150793 - RNA, 19 nt, Homo sapiens
  misc_RNA (1)...(19): siRNA sense strand
ugaaguugguccuguuugu

SEQ ID NO: 150794 - RNA, 19 nt, Homo sapiens
  misc_RNA (1)...(19): siRNA sense strand
ggaguaagaauuucaucau

SEQ ID NO: 150795 - RNA, 19 nt, Homo sapiens
  misc_RNA (1)...(19): siRNA sense strand
guaacaacccucgcauuga

SEQ ID NO: 150796 - RNA, 19 nt, Homo sapiens
  misc_RNA (1)...(19): siRNA sense strand
cggugagacugguccaaua

SEQ ID NO: 150797 - RNA, 19 nt, Homo sapiens
  misc_RNA (1)...(19): siRNA sense strand
ccacgaaaccacuugauag

SEQ ID NO: 150798 - RNA, 19 nt, Homo sapiens
  misc_RNA (1)...(19): siRNA sense strand
gagcaugguauucagcaaa

SEQ ID NO: 150799 - RNA, 19 nt, Homo sapiens
  misc_RNA (1)...(19): siRNA sense strand
cggcagggauucugaucuu

SEQ ID NO: 150800 - RNA, 19 nt, Homo sapiens
  misc_RNA (1)...(19): siRNA sense strand
gagcauaugaaauuuccaa

SEQ ID NO: 150801 - RNA, 19 nt, Homo sapiens
  misc_RNA (1)...(19): siRNA sense strand
cagaagguccuccuggaaa

SEQ ID NO: 150802 - RNA, 19 nt, Homo sapiens
  misc_RNA (1)...(19): siRNA sense strand
ccagcaggauuacgugguu

SEQ ID NO: 150803 - RNA, 19 nt, Homo sapiens
  misc_RNA (1)...(19): siRNA sense strand
ggaagauggcccugaagga

SEQ ID NO: 150804 - RNA, 19 nt, Homo sapiens
  misc_RNA (1)...(19): siRNA sense strand
ggagagaaaggacagaaag

SEQ ID NO: 150805 - RNA, 19 nt, Homo sapiens
  misc_RNA (1)...(19): siRNA sense strand
gaaguggcaucggguagca

SEQ ID NO: 150806 - RNA, 19 nt, Homo sapiens
  misc_RNA (1)...(19): siRNA sense strand
ugacauuccugaaacuucu

SEQ ID NO: 150807 - RNA, 19 nt, Homo sapiens
  misc_RNA (1)...(19): siRNA sense strand
ggagacaagggugaaauug

SEQ ID NO: 150808 - RNA, 19 nt, Homo sapiens
  misc_RNA (1)...(19): siRNA sense strand
aaccaucucugcucaggaa

SEQ ID NO: 150809 - RNA, 19 nt, Homo sapiens
  misc_RNA (1)...(19): siRNA sense strand
ugacuacugugagcauuau

SEQ ID NO: 150810 - RNA, 19 nt, Homo sapiens
  misc_RNA (1)...(19): siRNA sense strand
caaucagcguggagaagaa

SEQ ID NO: 150811 - RNA, 19 nt, Homo sapiens
  misc_RNA (1)...(19): siRNA sense strand
gagauuuaggcgaauauga

SEQ ID NO: 150812 - RNA, 19 nt, Homo sapiens
  misc_RNA (1)...(19): siRNA sense strand
gcauaugaaauuuccaaug

SEQ ID NO: 150813 - RNA, 19 nt, Homo sapiens
  misc_RNA (1)...(19): siRNA sense strand
aagcagaugcagaugauaa

SEQ ID NO: 150814 - RNA, 19 nt, Homo sapiens
  misc_RNA (1)...(19): siRNA sense strand
gggugaaccuggagaagca

SEQ ID NO: 150815 - RNA, 19 nt, Homo sapiens
  misc_RNA (1)...(19): siRNA sense strand
agauggaccagcaggauua

SEQ ID NO: 150816 - RNA, 19 nt, Homo sapiens
  misc_RNA (1)...(19): siRNA sense strand
gaagaugguuuuccaggau

SEQ ID NO: 150817 - RNA, 19 nt, Homo sapiens
  misc_RNA (1)...(19): siRNA sense strand
gguacuauguugauguuac

SEQ ID NO: 150818 - RNA, 19 nt, Homo sapiens
  misc_RNA (1)...(19): siRNA sense strand
ggagauuccuucaaaguuu

SEQ ID NO: 150819 - RNA, 19 nt, Homo sapiens
  misc_RNA (1)...(19): siRNA sense strand
gggagaagauggagaaauu

SEQ ID NO: 150820 - RNA, 19 nt, Homo sapiens
  misc_RNA (1)...(19): siRNA sense strand
gaacaaggauuuuggauga

SEQ ID NO: 150821 - RNA, 19 nt, Homo sapiens
  misc_RNA (1)...(19): siRNA sense strand
gcaaauugguguugagguu

SEQ ID NO: 150822 - RNA, 19 nt, Homo sapiens
  misc_RNA (1)...(19): siRNA sense strand
gaacgugggucagcaggua

SEQ ID NO: 150823 - RNA, 19 nt, Homo sapiens
  misc_RNA (1)...(19): siRNA sense strand
gagauuccuucaaaguuua

SEQ ID NO: 150824 - RNA, 19 nt, Homo sapiens
  misc_RNA (1)...(19): siRNA sense strand
aaagggacauccugguuua

SEQ ID NO: 150825 - RNA, 19 nt, Homo sapiens
  misc_RNA (1)...(19): siRNA sense strand
gaaguugguuuagugaauu

SEQ ID NO: 150826 - RNA, 19 nt, Homo sapiens
  misc_RNA (1)...(19): siRNA sense strand
ucugguagauggagauuua

SEQ ID NO: 150827 - RNA, 19 nt, Homo sapiens
  misc_RNA (1)...(19): siRNA sense strand
ggaaguugguuuagugaau

SEQ ID NO: 150828 - RNA, 19 nt, Homo sapiens
  misc_RNA (1)...(19): siRNA sense strand
aaagggagaucgaggguuu

SEQ ID NO: 150829 - RNA, 19 nt, Homo sapiens
  misc_RNA (1)...(19): siRNA sense strand
gcaagcagaugcagaugau

SEQ ID NO: 150830 - RNA, 19 nt, Homo sapiens
  misc_RNA (1)...(19): siRNA sense strand
gaggauacacuauaugaaa

SEQ ID NO: 150831 - RNA, 19 nt, Homo sapiens
  misc_RNA (1)...(19): siRNA sense strand
uaugggaccuccuggcuua

SEQ ID NO: 150832 - RNA, 19 nt, Homo sapiens
  misc_RNA (1)...(19): siRNA sense strand
ucaauucccugaaacaaga

SEQ ID NO: 150833 - RNA, 19 nt, Homo sapiens
  misc_RNA (1)...(19): siRNA sense strand
guugggagaucaccuguuu

SEQ ID NO: 150834 - RNA, 19 nt, Homo sapiens
  misc_RNA (1)...(19): siRNA sense strand
gaauacaacuauggaacaa

SEQ ID NO: 150835 - RNA, 19 nt, Homo sapiens
  misc_RNA (1)...(19): siRNA sense strand
gcacaaacagaaagaauuc

SEQ ID NO: 150836 - RNA, 19 nt, Homo sapiens
  misc_RNA (1)...(19): siRNA sense strand
gaaguucggauuugaaguu

SEQ ID NO: 150837 - RNA, 19 nt, Homo sapiens
  misc_RNA (1)...(19): siRNA sense strand
ggaagcaggugcagaaggu

SEQ ID NO: 150838 - RNA, 19 nt, Homo sapiens
  misc_RNA (1)...(19): siRNA sense strand
caagggaucuaaaggugaa

SEQ ID NO: 150839 - RNA, 19 nt, Homo sapiens
  misc_RNA (1)...(19): siRNA sense strand
gaaauagacggcagggauu

SEQ ID NO: 150840 - RNA, 19 nt, Homo sapiens
  misc_RNA (1)...(19): siRNA sense strand
gaucaaguaccuauuguug

SEQ ID NO: 150841 - RNA, 19 nt, Homo sapiens
  misc_RNA (1)...(19): siRNA sense strand
gaagaaaacugugacaaug

SEQ ID NO: 150842 - RNA, 19 nt, Homo sapiens
  misc_RNA (1)...(19): siRNA sense strand
cauaugaaauuuccaaugg

SEQ ID NO: 150843 - RNA, 19 nt, Homo sapiens
  misc_RNA (1)...(19): siRNA sense strand
gggaguagcuggcaaacca

SEQ ID NO: 150844 - RNA, 19 nt, Homo sapiens
  misc_RNA (1)...(19): siRNA sense strand
auacuuagauguugaagga

SEQ ID NO: 150845 - RNA, 19 nt, Homo sapiens
  misc_RNA (1)...(19): siRNA sense strand
ugacaagggugaagaugga

SEQ ID NO: 150846 - RNA, 19 nt, Homo sapiens
  misc_RNA (1)...(19): siRNA sense strand
gaguaagaauuucaucaug

SEQ ID NO: 150847 - RNA, 19 nt, Homo sapiens
  misc_RNA (1)...(19): siRNA sense strand
uuacagaguuucaaagcaa

SEQ ID NO: 150848 - RNA, 19 nt, Homo sapiens
  misc_RNA (1)...(19): siRNA sense strand
ggacauccugguuuaauug

SEQ ID NO: 150849 - RNA, 19 nt, Homo sapiens
  misc_RNA (1)...(19): siRNA sense strand
uggcuuaccuggucucaaa

SEQ ID NO: 150850 - RNA, 19 nt, Homo sapiens
  misc_RNA (1)...(19): siRNA sense strand
caaauccaguugaagaaau

SEQ ID NO: 150851 - RNA, 19 nt, Homo sapiens
  misc_RNA (1)...(19): siRNA sense strand
cgaaaccacuugauagaag

SEQ ID NO: 150852 - RNA, 19 nt, Homo sapiens
  misc_RNA (1)...(19): siRNA sense strand
ccaggaaguugguuuagug

SEQ ID NO: 150853 - RNA, 19 nt, Homo sapiens
  misc_RNA (1)...(19): siRNA sense strand
gagcaauuguugauaccaa

SEQ ID NO: 150854 - RNA, 19 nt, Homo sapiens
  misc_RNA (1)...(19): siRNA sense strand
gggacauccugguuuaauu

SEQ ID NO: 150855 - RNA, 19 nt, Homo sapiens
  misc_RNA (1)...(19): siRNA sense strand
gggagcagauggugucaga

SEQ ID NO: 150856 - RNA, 19 nt, Homo sapiens
  misc_RNA (1)...(19): siRNA sense strand
gaaaggacagaaaggagaa

SEQ ID NO: 150857 - RNA, 19 nt, Homo sapiens
  misc_RNA (1)...(19): siRNA sense strand
caagguugcucaggagauu

SEQ ID NO: 150858 - RNA, 19 nt, Homo sapiens
  misc_RNA (1)...(19): siRNA sense strand
gauggugaauauuggauug

SEQ ID NO: 150859 - RNA, 19 nt, Homo sapiens
  misc_RNA (1)...(19): siRNA sense strand
gaggagaaguuggucaaau

SEQ ID NO: 150860 - RNA, 19 nt, Homo sapiens
  misc_RNA (1)...(19): siRNA sense strand
cuucagaacuguuaacauc

SEQ ID NO: 150861 - RNA, 19 nt, Homo sapiens
  misc_RNA (1)...(19): siRNA sense strand
ggauucugaucuucuggua

SEQ ID NO: 150862 - RNA, 19 nt, Homo sapiens
  misc_RNA (1)...(19): siRNA sense strand
gaagcuggcccacgagguu

SEQ ID NO: 150863 - RNA, 19 nt, Homo sapiens
  misc_RNA (1)...(19): siRNA sense strand
caagguaucucagggaaag

SEQ ID NO: 150864 - RNA, 19 nt, Homo sapiens
  misc_RNA (1)...(19): siRNA sense strand
aggagaaguuggucaaauu

SEQ ID NO: 150865 - RNA, 19 nt, Homo sapiens
  misc_RNA (1)...(19): siRNA sense strand
gaagugagagagcaauugu

SEQ ID NO: 150866 - RNA, 19 nt, Homo sapiens
  misc_RNA (1)...(19): siRNA sense strand
uaacaacccucgcauugac

SEQ ID NO: 150867 - RNA, 19 nt, Homo sapiens
  misc_RNA (1)...(19): siRNA sense strand
gauacugcuuacagaguuu

SEQ ID NO: 150868 - RNA, 19 nt, Homo sapiens
  misc_RNA (1)...(19): siRNA sense strand
ggagaaguuggucaaauug

SEQ ID NO: 150869 - RNA, 19 nt, Homo sapiens
  misc_RNA (1)...(19): siRNA sense strand
gcagauggaggaagaggaa

SEQ ID NO: 150870 - RNA, 19 nt, Homo sapiens
  misc_RNA (1)...(19): siRNA sense strand
ggagaucgaggguuugaug

SEQ ID NO: 150871 - RNA, 19 nt, Homo sapiens
  misc_RNA (1)...(19): siRNA sense strand
cacaagguccuauuggaua

SEQ ID NO: 150872 - RNA, 19 nt, Homo sapiens
  misc_RNA (1)...(19): siRNA sense strand
auacaacuauggaacaaug

SEQ ID NO: 150873 - RNA, 19 nt, Homo sapiens
  misc_RNA (1)...(19): siRNA sense strand
ggugagacuugcauuuauc

SEQ ID NO: 150874 - RNA, 19 nt, Homo sapiens
  misc_RNA (1)...(19): siRNA sense strand
ggaauggaagaaauauuug

SEQ ID NO: 150875 - RNA, 19 nt, Homo sapiens
  misc_RNA (1)...(19): siRNA sense strand
gcagaugcagaugauaaua

SEQ ID NO: 150876 - RNA, 19 nt, Homo sapiens
  misc_RNA (1)...(19): siRNA sense strand
gcaaucagcguggagaaga

SEQ ID NO: 150877 - RNA, 19 nt, Homo sapiens
  misc_RNA (1)...(19): siRNA sense strand
ugacuuuggugaucagaau

SEQ ID NO: 150878 - RNA, 19 nt, Homo sapiens
  misc_RNA (1)...(19): siRNA sense strand
cagcauaugacuacuguga

SEQ ID NO: 150879 - RNA, 19 nt, Homo sapiens
  misc_RNA (1)...(19): siRNA sense strand
gaaaagacugucauugaaa

SEQ ID NO: 150880 - RNA, 19 nt, Homo sapiens
  misc_RNA (1)...(19): siRNA sense strand
ugaaaagacugucauugaa

SEQ ID NO: 150881 - RNA, 19 nt, Homo sapiens
  misc_RNA (1)...(19): siRNA sense strand
gcagaagguccuccuggaa

SEQ ID NO: 150882 - RNA, 19 nt, Homo sapiens
  misc_RNA (1)...(19): siRNA sense strand
gggugcaccuggacugaaa

SEQ ID NO: 150883 - RNA, 19 nt, Homo sapiens
  misc_RNA (1)...(19): siRNA sense strand
gcacuagauuuucacaauu

SEQ ID NO: 150884 - RNA, 19 nt, Homo sapiens
  misc_RNA (1)...(19): siRNA sense strand
agaauuugguccaggugua

SEQ ID NO: 150885 - RNA, 19 nt, Homo sapiens
  misc_RNA (1)...(19): siRNA sense strand
auggaacaauggaaaguua

SEQ ID NO: 150886 - RNA, 19 nt, Homo sapiens
  misc_RNA (1)...(19): siRNA sense strand
ucaggaaccucagauagau

SEQ ID NO: 150887 - RNA, 19 nt, Homo sapiens
  misc_RNA (1)...(19): siRNA sense strand
uaacgggagaggauuauga

SEQ ID NO: 150888 - RNA, 19 nt, Homo sapiens
  misc_RNA (1)...(19): siRNA sense strand
caucauggccaaaggagaa

SEQ ID NO: 150889 - RNA, 19 nt, Homo sapiens
  misc_RNA (1)...(19): siRNA sense strand
guggugagacuugcauuua

SEQ ID NO: 150890 - RNA, 19 nt, Homo sapiens
  misc_RNA (1)...(19): siRNA sense strand
agacaagggugaaauuggu

SEQ ID NO: 150891 - RNA, 19 nt, Homo sapiens
  misc_RNA (1)...(19): siRNA sense strand
gauguuaccguuccguuau

SEQ ID NO: 150892 - RNA, 19 nt, Homo sapiens
  misc_RNA (1)...(19): siRNA sense strand
gaacuuucccagaagacuu

SEQ ID NO: 150893 - RNA, 19 nt, Homo sapiens
  misc_RNA (1)...(19): siRNA sense strand
ugaaguugguccuguuugu

SEQ ID NO: 150894 - RNA, 19 nt, Homo sapiens
  misc_RNA (1)...(19): siRNA sense strand
ggaguaagaauuucaucau

SEQ ID NO: 150895 - RNA, 19 nt, Homo sapiens
  misc_RNA (1)...(19): siRNA sense strand
guaacaacccucgcauuga

SEQ ID NO: 150896 - RNA, 19 nt, Homo sapiens
  misc_RNA (1)...(19): siRNA sense strand
cggugagacugguccaaua

SEQ ID NO: 150897 - RNA, 19 nt, Homo sapiens
  misc_RNA (1)...(19): siRNA sense strand
ccacgaaaccacuugauag

SEQ ID NO: 150898 - RNA, 19 nt, Homo sapiens
  misc_RNA (1)...(19): siRNA sense strand
gagcaugguauucagcaaa

SEQ ID NO: 150899 - RNA, 19 nt, Homo sapiens
  misc_RNA (1)...(19): siRNA sense strand
cggcagggauucugaucuu

SEQ ID NO: 150900 - RNA, 19 nt, Homo sapiens
  misc_RNA (1)...(19): siRNA sense strand
gagcauaugaaauuuccaa

SEQ ID NO: 150901 - RNA, 19 nt, Homo sapiens
  misc_RNA (1)...(19): siRNA sense strand
cagaagguccuccuggaaa

SEQ ID NO: 150902 - RNA, 19 nt, Homo sapiens
  misc_RNA (1)...(19): siRNA sense strand
ccagcaggauuacgugguu

SEQ ID NO: 150903 - RNA, 19 nt, Homo sapiens
  misc_RNA (1)...(19): siRNA sense strand
ggaagauggcccugaagga

SEQ ID NO: 150904 - RNA, 19 nt, Homo sapiens
  misc_RNA (1)...(19): siRNA sense strand
ggagagaaaggacagaaag

SEQ ID NO: 150905 - RNA, 19 nt, Homo sapiens
  misc_RNA (1)...(19): siRNA sense strand
gaaguggcaucggguagca

SEQ ID NO: 150906 - RNA, 19 nt, Homo sapiens
  misc_RNA (1)...(19): siRNA sense strand
ugacauuccugaaacuucu

SEQ ID NO: 150907 - RNA, 19 nt, Homo sapiens
  misc_RNA (1)...(19): siRNA sense strand
ggagacaagggugaaauug

SEQ ID NO: 150908 - RNA, 19 nt, Homo sapiens
  misc_RNA (1)...(19): siRNA sense strand
aaccaucucugcucaggaa

SEQ ID NO: 150909 - RNA, 19 nt, Homo sapiens
  misc_RNA (1)...(19): siRNA sense strand
ugacuacugugagcauuau

SEQ ID NO: 150910 - RNA, 19 nt, Homo sapiens
  misc_RNA (1)...(19): siRNA sense strand
caaucagcguggagaagaa

SEQ ID NO: 150911 - RNA, 19 nt, Homo sapiens
  misc_RNA (1)...(19): siRNA sense strand
gagauuuaggcgaauauga

SEQ ID NO: 150912 - RNA, 19 nt, Homo sapiens
  misc_RNA (1)...(19): siRNA sense strand
gcauaugaaauuuccaaug

SEQ ID NO: 150913 - RNA, 19 nt, Homo sapiens
  misc_RNA (1)...(19): siRNA sense strand
aagcagaugcagaugauaa

SEQ ID NO: 150914 - RNA, 19 nt, Homo sapiens
  misc_RNA (1)...(19): siRNA sense strand
gggugaaccuggagaagca

SEQ ID NO: 150915 - RNA, 19 nt, Homo sapiens
  misc_RNA (1)...(19): siRNA sense strand
agauggaccagcaggauua

SEQ ID NO: 150916 - RNA, 19 nt, Homo sapiens
  misc_RNA (1)...(19): siRNA sense strand
gaagaugguuuuccaggau

SEQ ID NO: 150917 - RNA, 19 nt, Homo sapiens
  misc_RNA (1)...(19): siRNA sense strand
gguacuauguugauguuac

SEQ ID NO: 150918 - RNA, 19 nt, Homo sapiens
  misc_RNA (1)...(19): siRNA sense strand
ggagauuccuucaaaguuu

SEQ ID NO: 150919 - RNA, 19 nt, Homo sapiens
  misc_RNA (1)...(19): siRNA sense strand
gggagaagauggagaaauu

SEQ ID NO: 150920 - RNA, 19 nt, Homo sapiens
  misc_RNA (1)...(19): siRNA sense strand
gaacaaggauuuuggauga

SEQ ID NO: 150921 - RNA, 19 nt, Homo sapiens
  misc_RNA (1)...(19): siRNA sense strand
gcaaauugguguugagguu

SEQ ID NO: 150922 - RNA, 19 nt, Homo sapiens
  misc_RNA (1)...(19): siRNA sense strand
gaacgugggucagcaggua

SEQ ID NO: 150923 - RNA, 19 nt, Homo sapiens
  misc_RNA (1)...(19): siRNA sense strand
gagauuccuucaaaguuua

SEQ ID NO: 150924 - RNA, 19 nt, Homo sapiens
  misc_RNA (1)...(19): siRNA sense strand
aaagggacauccugguuua

SEQ ID NO: 150925 - RNA, 19 nt, Homo sapiens
  misc_RNA (1)...(19): siRNA sense strand
gaaguugguuuagugaauu

SEQ ID NO: 150926 - RNA, 19 nt, Homo sapiens
  misc_RNA (1)...(19): siRNA sense strand
ucugguagauggagauuua

SEQ ID NO: 150927 - RNA, 19 nt, Homo sapiens
  misc_RNA (1)...(19): siRNA sense strand
ggaaguugguuuagugaau

SEQ ID NO: 150928 - RNA, 19 nt, Homo sapiens
  misc_RNA (1)...(19): siRNA sense strand
aaagggagaucgaggguuu

SEQ ID NO: 150929 - RNA, 19 nt, Homo sapiens
  misc_RNA (1)...(19): siRNA sense strand
gcaagcagaugcagaugau

SEQ ID NO: 150930 - RNA, 19 nt, Homo sapiens
  misc_RNA (1)...(19): siRNA sense strand
gaggauacacuauaugaaa

SEQ ID NO: 150931 - RNA, 19 nt, Homo sapiens
  misc_RNA (1)...(19): siRNA sense strand
uaugggaccuccuggcuua

SEQ ID NO: 150932 - RNA, 19 nt, Homo sapiens
  misc_RNA (1)...(19): siRNA sense strand
ucaauucccugaaacaaga

SEQ ID NO: 150933 - RNA, 19 nt, Homo sapiens
  misc_RNA (1)...(19): siRNA sense strand
guugggagaucaccuguuu

SEQ ID NO: 150934 - RNA, 19 nt, Homo sapiens
  misc_RNA (1)...(19): siRNA sense strand
gaauacaacuauggaacaa

SEQ ID NO: 150935 - RNA, 19 nt, Homo sapiens
  misc_RNA (1)...(19): siRNA sense strand
gcacaaacagaaagaauuc

SEQ ID NO: 150936 - RNA, 19 nt, Homo sapiens
  misc_RNA (1)...(19): siRNA sense strand
gaaguucggauuugaaguu

SEQ ID NO: 150937 - RNA, 19 nt, Homo sapiens
  misc_RNA (1)...(19): siRNA sense strand
ggaagcaggugcagaaggu

SEQ ID NO: 150938 - RNA, 19 nt, Homo sapiens
  misc_RNA (1)...(19): siRNA sense strand
caagggaucuaaaggugaa

SEQ ID NO: 150939 - RNA, 19 nt, Homo sapiens
  misc_RNA (1)...(19): siRNA sense strand
gaaauagacggcagggauu

SEQ ID NO: 150940 - RNA, 19 nt, Homo sapiens
  misc_RNA (1)...(19): siRNA sense strand
gaucaaguaccuauuguug

SEQ ID NO: 150941 - RNA, 19 nt, Homo sapiens
  misc_RNA (1)...(19): siRNA sense strand
gaagaaaacugugacaaug

SEQ ID NO: 150942 - RNA, 19 nt, Homo sapiens
  misc_RNA (1)...(19): siRNA sense strand
cauaugaaauuuccaaugg

SEQ ID NO: 150943 - RNA, 19 nt, Homo sapiens
  misc_RNA (1)...(19): siRNA sense strand
gggaguagcuggcaaacca

SEQ ID NO: 150944 - RNA, 19 nt, Homo sapiens
  misc_RNA (1)...(19): siRNA sense strand
auacuuagauguugaagga

SEQ ID NO: 150945 - RNA, 19 nt, Homo sapiens
  misc_RNA (1)...(19): siRNA sense strand
ugacaagggugaagaugga

SEQ ID NO: 150946 - RNA, 19 nt, Homo sapiens
  misc_RNA (1)...(19): siRNA sense strand
gaguaagaauuucaucaug

SEQ ID NO: 150947 - RNA, 19 nt, Homo sapiens
  misc_RNA (1)...(19): siRNA sense strand
uuacagaguuucaaagcaa

SEQ ID NO: 150948 - RNA, 19 nt, Homo sapiens
  misc_RNA (1)...(19): siRNA sense strand
ggacauccugguuuaauug

SEQ ID NO: 150949 - RNA, 19 nt, Homo sapiens
  misc_RNA (1)...(19): siRNA sense strand
uggcuuaccuggucucaaa

SEQ ID NO: 150950 - RNA, 19 nt, Homo sapiens
  misc_RNA (1)...(19): siRNA sense strand
caaauccaguugaagaaau

SEQ ID NO: 150951 - RNA, 19 nt, Homo sapiens
  misc_RNA (1)...(19): siRNA sense strand
cgaaaccacuugauagaag

SEQ ID NO: 150952 - RNA, 19 nt, Homo sapiens
  misc_RNA (1)...(19): siRNA sense strand
ccaggaaguugguuuagug

SEQ ID NO: 150953 - RNA, 19 nt, Homo sapiens
  misc_RNA (1)...(19): siRNA sense strand
gagcaauuguugauaccaa

SEQ ID NO: 150954 - RNA, 19 nt, Homo sapiens
  misc_RNA (1)...(19): siRNA sense strand
gggacauccugguuuaauu

SEQ ID NO: 150955 - RNA, 19 nt, Homo sapiens
  misc_RNA (1)...(19): siRNA sense strand
gggagcagauggugucaga

SEQ ID NO: 150956 - RNA, 19 nt, Homo sapiens
  misc_RNA (1)...(19): siRNA sense strand
gaaaggacagaaaggagaa

SEQ ID NO: 150957 - RNA, 19 nt, Homo sapiens
  misc_RNA (1)...(19): siRNA sense strand
caagguugcucaggagauu

SEQ ID NO: 150958 - RNA, 19 nt, Homo sapiens
  misc_RNA (1)...(19): siRNA sense strand
gauggugaauauuggauug

SEQ ID NO: 150959 - RNA, 19 nt, Homo sapiens
  misc_RNA (1)...(19): siRNA sense strand
gaggagaaguuggucaaau

SEQ ID NO: 150960 - RNA, 19 nt, Homo sapiens
  misc_RNA (1)...(19): siRNA sense strand
cuucagaacuguuaacauc

SEQ ID NO: 150961 - RNA, 19 nt, Homo sapiens
  misc_RNA (1)...(19): siRNA sense strand
ggauucugaucuucuggua

SEQ ID NO: 150962 - RNA, 19 nt, Homo sapiens
  misc_RNA (1)...(19): siRNA sense strand
gaagcuggcccacgagguu

SEQ ID NO: 150963 - RNA, 19 nt, Homo sapiens
  misc_RNA (1)...(19): siRNA sense strand
caagguaucucagggaaag

SEQ ID NO: 150964 - RNA, 19 nt, Homo sapiens
  misc_RNA (1)...(19): siRNA sense strand
aggagaaguuggucaaauu

SEQ ID NO: 150965 - RNA, 19 nt, Homo sapiens
  misc_RNA (1)...(19): siRNA sense strand
gaagugagagagcaauugu

SEQ ID NO: 150966 - RNA, 19 nt, Homo sapiens
  misc_RNA (1)...(19): siRNA sense strand
uaacaacccucgcauugac

SEQ ID NO: 150967 - RNA, 19 nt, Homo sapiens
  misc_RNA (1)...(19): siRNA sense strand
gauacugcuuacagaguuu

SEQ ID NO: 150968 - RNA, 19 nt, Homo sapiens
  misc_RNA (1)...(19): siRNA sense strand
ggagaaguuggucaaauug

SEQ ID NO: 150969 - RNA, 19 nt, Homo sapiens
  misc_RNA (1)...(19): siRNA sense strand
gcagauggaggaagaggaa

SEQ ID NO: 150970 - RNA, 19 nt, Homo sapiens
  misc_RNA (1)...(19): siRNA sense strand
ggagaucgaggguuugaug

SEQ ID NO: 150971 - RNA, 19 nt, Homo sapiens
  misc_RNA (1)...(19): siRNA sense strand
cacaagguccuauuggaua

SEQ ID NO: 150972 - RNA, 19 nt, Homo sapiens
  misc_RNA (1)...(19): siRNA sense strand
auacaacuauggaacaaug

SEQ ID NO: 150973 - RNA, 19 nt, Homo sapiens
  misc_RNA (1)...(19): siRNA sense strand
ggugagacuugcauuuauc

SEQ ID NO: 150974 - RNA, 19 nt, Homo sapiens
  misc_RNA (1)...(19): siRNA sense strand
ggaauggaagaaauauuug

SEQ ID NO: 150975 - RNA, 19 nt, Homo sapiens
  misc_RNA (1)...(19): siRNA sense strand
gcagaugcagaugauaaua

SEQ ID NO: 150976 - RNA, 19 nt, Homo sapiens
  misc_RNA (1)...(19): siRNA sense strand
gcaaucagcguggagaaga

SEQ ID NO: 150977 - RNA, 19 nt, Homo sapiens
  misc_RNA (1)...(19): siRNA sense strand
ugacuuuggugaucagaau

SEQ ID NO: 150978 - RNA, 19 nt, Homo sapiens
  misc_RNA (1)...(19): siRNA sense strand
cagcauaugacuacuguga

SEQ ID NO: 150979 - RNA, 19 nt, Homo sapiens
  misc_RNA (1)...(19): siRNA sense strand
gaaaagacugucauugaaa

SEQ ID NO: 150980 - RNA, 19 nt, Homo sapiens
  misc_RNA (1)...(19): siRNA sense strand
ugaaaagacugucauugaa

SEQ ID NO: 150981 - RNA, 19 nt, Homo sapiens
  misc_RNA (1)...(19): siRNA sense strand
gcagaagguccuccuggaa

SEQ ID NO: 150982 - RNA, 19 nt, Homo sapiens
  misc_RNA (1)...(19): siRNA sense strand
gggugcaccuggacugaaa

SEQ ID NO: 150983 - RNA, 19 nt, Homo sapiens
  misc_RNA (1)...(19): siRNA sense strand
gcacuagauuuucacaauu

SEQ ID NO: 150984 - RNA, 19 nt, Homo sapiens
  misc_RNA (1)...(19): siRNA sense strand
agaauuugguccaggugua

SEQ ID NO: 150985 - RNA, 19 nt, Homo sapiens
  misc_RNA (1)...(19): siRNA sense strand
auggaacaauggaaaguua

SEQ ID NO: 150986 - RNA, 19 nt, Homo sapiens
  misc_RNA (1)...(19): siRNA sense strand
ucaggaaccucagauagau

SEQ ID NO: 150987 - RNA, 19 nt, Homo sapiens
  misc_RNA (1)...(19): siRNA sense strand
uaacgggagaggauuauga

SEQ ID NO: 150988 - RNA, 19 nt, Homo sapiens
  misc_RNA (1)...(19): siRNA sense strand
caucauggccaaaggagaa

SEQ ID NO: 150989 - RNA, 19 nt, Homo sapiens
  misc_RNA (1)...(19): siRNA sense strand
guggugagacuugcauuua

SEQ ID NO: 150990 - RNA, 19 nt, Homo sapiens
  misc_RNA (1)...(19): siRNA sense strand
agacaagggugaaauuggu

SEQ ID NO: 150991 - RNA, 19 nt, Homo sapiens
  misc_RNA (1)...(19): siRNA sense strand
gauguuaccguuccguuau

SEQ ID NO: 150992 - RNA, 19 nt, Homo sapiens
  misc_RNA (1)...(19): siRNA sense strand
gaacuuucccagaagacuu

SEQ ID NO: 150993 - RNA, 19 nt, Homo sapiens
  misc_RNA (1)...(19): siRNA sense strand
ugaaguugguccuguuugu

SEQ ID NO: 150994 - RNA, 19 nt, Homo sapiens
  misc_RNA (1)...(19): siRNA sense strand
ggaguaagaauuucaucau

SEQ ID NO: 150995 - RNA, 19 nt, Homo sapiens
  misc_RNA (1)...(19): siRNA sense strand
guaacaacccucgcauuga

SEQ ID NO: 150996 - RNA, 19 nt, Homo sapiens
  misc_RNA (1)...(19): siRNA sense strand
cggugagacugguccaaua

SEQ ID NO: 150997 - RNA, 19 nt, Homo sapiens
  misc_RNA (1)...(19): siRNA sense strand
ccacgaaaccacuugauag

SEQ ID NO: 150998 - RNA, 19 nt, Homo sapiens
  misc_RNA (1)...(19): siRNA sense strand
gagcaugguauucagcaaa

SEQ ID NO: 150999 - RNA, 19 nt, Homo sapiens
  misc_RNA (1)...(19): siRNA sense strand
cggcagggauucugaucuu

SEQ ID NO: 151000 - RNA, 19 nt, Homo sapiens
  misc_RNA (1)...(19): siRNA sense strand
gagcauaugaaauuuccaa

SEQ ID NO: 151001 - RNA, 19 nt, Homo sapiens
  misc_RNA (1)...(19): siRNA sense strand
cagaagguccuccuggaaa

SEQ ID NO: 151002 - RNA, 19 nt, Homo sapiens
  misc_RNA (1)...(19): siRNA sense strand
ccagcaggauuacgugguu

SEQ ID NO: 151003 - RNA, 19 nt, Homo sapiens
  misc_RNA (1)...(19): siRNA sense strand
ggaagauggcccugaagga

SEQ ID NO: 151004 - RNA, 19 nt, Homo sapiens
  misc_RNA (1)...(19): siRNA sense strand
ggagagaaaggacagaaag

SEQ ID NO: 151005 - RNA, 19 nt, Homo sapiens
  misc_RNA (1)...(19): siRNA sense strand
gaaguggcaucggguagca

SEQ ID NO: 151006 - RNA, 19 nt, Homo sapiens
  misc_RNA (1)...(19): siRNA sense strand
ugacauuccugaaacuucu

SEQ ID NO: 151007 - RNA, 19 nt, Homo sapiens
  misc_RNA (1)...(19): siRNA sense strand
ggagacaagggugaaauug

SEQ ID NO: 151008 - RNA, 19 nt, Homo sapiens
  misc_RNA (1)...(19): siRNA sense strand
aaccaucucugcucaggaa

SEQ ID NO: 151009 - RNA, 19 nt, Homo sapiens
  misc_RNA (1)...(19): siRNA sense strand
ugacuacugugagcauuau

SEQ ID NO: 151010 - RNA, 19 nt, Homo sapiens
  misc_RNA (1)...(19): siRNA sense strand
caaucagcguggagaagaa

SEQ ID NO: 151011 - RNA, 19 nt, Homo sapiens
  misc_RNA (1)...(19): siRNA sense strand
gagauuuaggcgaauauga

SEQ ID NO: 151012 - RNA, 19 nt, Homo sapiens
  misc_RNA (1)...(19): siRNA sense strand
gcauaugaaauuuccaaug

SEQ ID NO: 151013 - RNA, 19 nt, Homo sapiens
  misc_RNA (1)...(19): siRNA sense strand
aagcagaugcagaugauaa

SEQ ID NO: 151014 - RNA, 19 nt, Homo sapiens
  misc_RNA (1)...(19): siRNA sense strand
gggugaaccuggagaagca

SEQ ID NO: 151015 - RNA, 19 nt, Homo sapiens
  misc_RNA (1)...(19): siRNA sense strand
agauggaccagcaggauua

SEQ ID NO: 151016 - RNA, 19 nt, Homo sapiens
  misc_RNA (1)...(19): siRNA sense strand
gaagaugguuuuccaggau

SEQ ID NO: 151017 - RNA, 19 nt, Homo sapiens
  misc_RNA (1)...(19): siRNA sense strand
gguacuauguugauguuac

SEQ ID NO: 151018 - RNA, 19 nt, Homo sapiens
  misc_RNA (1)...(19): siRNA sense strand
gcacccagcuauugaauga

SEQ ID NO: 151019 - RNA, 19 nt, Homo sapiens
  misc_RNA (1)...(19): siRNA sense strand
guccagagcucaucacuuu

SEQ ID NO: 151020 - RNA, 19 nt, Homo sapiens
  misc_RNA (1)...(19): siRNA sense strand
cggaguagcugagaucuua

SEQ ID NO: 151021 - RNA, 19 nt, Homo sapiens
  misc_RNA (1)...(19): siRNA sense strand
ggacuuggauucgaggaua

SEQ ID NO: 151022 - RNA, 19 nt, Homo sapiens
  misc_RNA (1)...(19): siRNA sense strand
gaaagcgcauuugguuaua

SEQ ID NO: 151023 - RNA, 19 nt, Homo sapiens
  misc_RNA (1)...(19): siRNA sense strand
cuacagggcucgagagauu

SEQ ID NO: 151024 - RNA, 19 nt, Homo sapiens
  misc_RNA (1)...(19): siRNA sense strand
gcagaaagcgcauuugguu

SEQ ID NO: 151025 - RNA, 19 nt, Homo sapiens
  misc_RNA (1)...(19): siRNA sense strand
gaagagcguuuacgagcaa

SEQ ID NO: 151026 - RNA, 19 nt, Homo sapiens
  misc_RNA (1)...(19): siRNA sense strand
caagaucuguccaccauug

SEQ ID NO: 151027 - RNA, 19 nt, Homo sapiens
  misc_RNA (1)...(19): siRNA sense strand
gaagacaguuuaacaacag

SEQ ID NO: 151028 - RNA, 19 nt, Homo sapiens
  misc_RNA (1)...(19): siRNA sense strand
gcauacagcugugcuaauc

SEQ ID NO: 151029 - RNA, 19 nt, Homo sapiens
  misc_RNA (1)...(19): siRNA sense strand
ggaccaacccucucuaugu

SEQ ID NO: 151030 - RNA, 19 nt, Homo sapiens
  misc_RNA (1)...(19): siRNA sense strand
ggauggaccugcuggugaa

SEQ ID NO: 151031 - RNA, 19 nt, Homo sapiens
  misc_RNA (1)...(19): siRNA sense strand
ccaauauacuccuuugaug

SEQ ID NO: 151032 - RNA, 19 nt, Homo sapiens
  misc_RNA (1)...(19): siRNA sense strand
gacagacgcuaggaaguaa

SEQ ID NO: 151033 - RNA, 19 nt, Homo sapiens
  misc_RNA (1)...(19): siRNA sense strand
cacaguggcuccugaaaga

SEQ ID NO: 151034 - RNA, 19 nt, Homo sapiens
  misc_RNA (1)...(19): siRNA sense strand
ggacauaaaggagaauuug

SEQ ID NO: 151035 - RNA, 19 nt, Homo sapiens
  misc_RNA (1)...(19): siRNA sense strand
gcuauugaaugaacccaaa

SEQ ID NO: 151036 - RNA, 19 nt, Homo sapiens
  misc_RNA (1)...(19): siRNA sense strand
gagaacaugugggaaugaa

SEQ ID NO: 151037 - RNA, 19 nt, Homo sapiens
  misc_RNA (1)...(19): siRNA sense strand
gcaggaggcagacggagua

SEQ ID NO: 151038 - RNA, 19 nt, Homo sapiens
  misc_RNA (1)...(19): siRNA sense strand
ggaagcacccagcuauuga

SEQ ID NO: 151039 - RNA, 19 nt, Homo sapiens
  misc_RNA (1)...(19): siRNA sense strand
gaaaccuggucacagcauu

SEQ ID NO: 151040 - RNA, 19 nt, Homo sapiens
  misc_RNA (1)...(19): siRNA sense strand
gaaccucaagggccaagua

SEQ ID NO: 151041 - RNA, 19 nt, Homo sapiens
  misc_RNA (1)...(19): siRNA sense strand
aaacaagggucuggugaga

SEQ ID NO: 151042 - RNA, 19 nt, Homo sapiens
  misc_RNA (1)...(19): siRNA sense strand
ugaucuagcuuaccugaga

SEQ ID NO: 151043 - RNA, 19 nt, Homo sapiens
  misc_RNA (1)...(19): siRNA sense strand
ccacggaggucaguucaau

SEQ ID NO: 151044 - RNA, 19 nt, Homo sapiens
  misc_RNA (1)...(19): siRNA sense strand
gaccaacccucucuauguc

SEQ ID NO: 151045 - RNA, 19 nt, Homo sapiens
  misc_RNA (1)...(19): siRNA sense strand
ggaggucaguucaauaugc

SEQ ID NO: 151046 - RNA, 19 nt, Homo sapiens
  misc_RNA (1)...(19): siRNA sense strand
gagauacagccuucccaua

SEQ ID NO: 151047 - RNA, 19 nt, Homo sapiens
  misc_RNA (1)...(19): siRNA sense strand
gcauuuggcugcucugaac

SEQ ID NO: 151048 - RNA, 19 nt, Homo sapiens
  misc_RNA (1)...(19): siRNA sense strand
gaacaugugggaaugaaag

SEQ ID NO: 151049 - RNA, 19 nt, Homo sapiens
  misc_RNA (1)...(19): siRNA sense strand
cuggugagauccugaauga

SEQ ID NO: 151050 - RNA, 19 nt, Homo sapiens
  misc_RNA (1)...(19): siRNA sense strand
aauggcagcuuccuuaugu

SEQ ID NO: 151051 - RNA, 19 nt, Homo sapiens
  misc_RNA (1)...(19): siRNA sense strand
ugacagacgcuaggaagua

SEQ ID NO: 151052 - RNA, 19 nt, Homo sapiens
  misc_RNA (1)...(19): siRNA sense strand
gauacagccuucccauagu

SEQ ID NO: 151053 - RNA, 19 nt, Homo sapiens
  misc_RNA (1)...(19): siRNA sense strand
ugaagacaguuuaacaaca

SEQ ID NO: 151054 - RNA, 19 nt, Homo sapiens
  misc_RNA (1)...(19): siRNA sense strand
auucuuaucuucccauuug

SEQ ID NO: 151055 - RNA, 19 nt, Homo sapiens
  misc_RNA (1)...(19): siRNA sense strand
gcauuugguuauagaagga

SEQ ID NO: 151056 - RNA, 19 nt, Homo sapiens
  misc_RNA (1)...(19): siRNA sense strand
caauaucacccauggauuc

SEQ ID NO: 151057 - RNA, 19 nt, Homo sapiens
  misc_RNA (1)...(19): siRNA sense strand
gaagccugcucugcauuug

SEQ ID NO: 151058 - RNA, 19 nt, Homo sapiens
  misc_RNA (1)...(19): siRNA sense strand
ggugagauccugaaugaca

SEQ ID NO: 151059 - RNA, 19 nt, Homo sapiens
  misc_RNA (1)...(19): siRNA sense strand
gaaaagaauuuagcagcaa

SEQ ID NO: 151060 - RNA, 19 nt, Homo sapiens
  misc_RNA (1)...(19): siRNA sense strand
ugagacacuuucugaacaa

SEQ ID NO: 151061 - RNA, 19 nt, Homo sapiens
  misc_RNA (1)...(19): siRNA sense strand
guggauaacuacugugaag

SEQ ID NO: 151062 - RNA, 19 nt, Homo sapiens
  misc_RNA (1)...(19): siRNA sense strand
cagaaagcgcauuugguua

SEQ ID NO: 151063 - RNA, 19 nt, Homo sapiens
  misc_RNA (1)...(19): siRNA sense strand
ggagcaagagggccuaaug

SEQ ID NO: 151064 - RNA, 19 nt, Homo sapiens
  misc_RNA (1)...(19): siRNA sense strand
agaaagcgcauuugguuau

SEQ ID NO: 151065 - RNA, 19 nt, Homo sapiens
  misc_RNA (1)...(19): siRNA sense strand
gacacuuucugaacaacuu

SEQ ID NO: 151066 - RNA, 19 nt, Homo sapiens
  misc_RNA (1)...(19): siRNA sense strand
gaagaguccucggcaucug

SEQ ID NO: 151067 - RNA, 19 nt, Homo sapiens
  misc_RNA (1)...(19): siRNA sense strand
ccaccaaacccuauuucaa

SEQ ID NO: 151068 - RNA, 19 nt, Homo sapiens
  misc_RNA (1)...(19): siRNA sense strand
uguuagagauggcuggaaa

SEQ ID NO: 151069 - RNA, 19 nt, Homo sapiens
  misc_RNA (1)...(19): siRNA sense strand
ggauggagccaguauugug

SEQ ID NO: 151070 - RNA, 19 nt, Homo sapiens
  misc_RNA (1)...(19): siRNA sense strand
gaagcacccagcuauugaa

SEQ ID NO: 151071 - RNA, 19 nt, Homo sapiens
  misc_RNA (1)...(19): siRNA sense strand
acaagggucuggugagauc

SEQ ID NO: 151072 - RNA, 19 nt, Homo sapiens
  misc_RNA (1)...(19): siRNA sense strand
ccucaaggguaccaaagga

SEQ ID NO: 151073 - RNA, 19 nt, Homo sapiens
  misc_RNA (1)...(19): siRNA sense strand
uaacaucaaaggagccauu

SEQ ID NO: 151074 - RNA, 19 nt, Homo sapiens
  misc_RNA (1)...(19): siRNA sense strand
uagcuuaccugagacacuu

SEQ ID NO: 151075 - RNA, 19 nt, Homo sapiens
  misc_RNA (1)...(19): siRNA sense strand
gauggucgagacauaauga

SEQ ID NO: 151076 - RNA, 19 nt, Homo sapiens
  misc_RNA (1)...(19): siRNA sense strand
ugaggaaagcagagagaua

SEQ ID NO: 151077 - RNA, 19 nt, Homo sapiens
  misc_RNA (1)...(19): siRNA sense strand
uggaugacaugcugcagaa

SEQ ID NO: 151078 - RNA, 19 nt, Homo sapiens
  misc_RNA (1)...(19): siRNA sense strand
ggagcugugugacccugaa

SEQ ID NO: 151079 - RNA, 19 nt, Homo sapiens
  misc_RNA (1)...(19): siRNA sense strand
gaggucaguucaauaugca

SEQ ID NO: 151080 - RNA, 19 nt, Homo sapiens
  misc_RNA (1)...(19): siRNA sense strand
aaagagaacaugugggaau

SEQ ID NO: 151081 - RNA, 19 nt, Homo sapiens
  misc_RNA (1)...(19): siRNA sense strand
gaucuguccaccauuguga

SEQ ID NO: 151082 - RNA, 19 nt, Homo sapiens
  misc_RNA (1)...(19): siRNA sense strand
ugagaagccugcucugcau

SEQ ID NO: 151083 - RNA, 19 nt, Homo sapiens
  misc_RNA (1)...(19): siRNA sense strand
gguuauagaaggaacauuc

SEQ ID NO: 151084 - RNA, 19 nt, Homo sapiens
  misc_RNA (1)...(19): siRNA sense strand
gcacaaugggacuuggauu

SEQ ID NO: 151085 - RNA, 19 nt, Homo sapiens
  misc_RNA (1)...(19): siRNA sense strand
ggucaguucaauaugcaua

SEQ ID NO: 151086 - RNA, 19 nt, Homo sapiens
  misc_RNA (1)...(19): siRNA sense strand
gaggaaagcagagagauac

SEQ ID NO: 151087 - RNA, 19 nt, Homo sapiens
  misc_RNA (1)...(19): siRNA sense strand
cuauuucaagugccaauua

SEQ ID NO: 151088 - RNA, 19 nt, Homo sapiens
  misc_RNA (1)...(19): siRNA sense strand
caccaaacccuauuucaag

SEQ ID NO: 151089 - RNA, 19 nt, Homo sapiens
  misc_RNA (1)...(19): siRNA sense strand
cccaaacucuccagaccaa

SEQ ID NO: 151090 - RNA, 19 nt, Homo sapiens
  misc_RNA (1)...(19): siRNA sense strand
auuaauggcagcuuccuua

SEQ ID NO: 151091 - RNA, 19 nt, Homo sapiens
  misc_RNA (1)...(19): siRNA sense strand
ucacugacgccuuccagaa

SEQ ID NO: 151092 - RNA, 19 nt, Homo sapiens
  misc_RNA (1)...(19): siRNA sense strand
uugaagacauggaacuuuc

SEQ ID NO: 151093 - RNA, 19 nt, Homo sapiens
  misc_RNA (1)...(19): siRNA sense strand
ggauaacuacugugaagca

SEQ ID NO: 151094 - RNA, 19 nt, Homo sapiens
  misc_RNA (1)...(19): siRNA sense strand
gcauucuuaucuucccauu

SEQ ID NO: 151095 - RNA, 19 nt, Homo sapiens
  misc_RNA (1)...(19): siRNA sense strand
caaaggaccaccaggacau

SEQ ID NO: 151096 - RNA, 19 nt, Homo sapiens
  misc_RNA (1)...(19): siRNA sense strand
gggacagccuggaguugau

SEQ ID NO: 151097 - RNA, 19 nt, Homo sapiens
  misc_RNA (1)...(19): siRNA sense strand
gaucacuccagcucaaaga

SEQ ID NO: 151098 - RNA, 19 nt, Homo sapiens
  misc_RNA (1)...(19): siRNA sense strand
ugacauugcugaagaaaag

SEQ ID NO: 151099 - RNA, 19 nt, Homo sapiens
  misc_RNA (1)...(19): siRNA sense strand
cauggaacuuucuggugaa

SEQ ID NO: 151100 - RNA, 19 nt, Homo sapiens
  misc_RNA (1)...(19): siRNA sense strand
gucgagacauaaugacaga

SEQ ID NO: 151101 - RNA, 19 nt, Homo sapiens
  misc_RNA (1)...(19): siRNA sense strand
gggugaaccuggaaugcau

SEQ ID NO: 151102 - RNA, 19 nt, Homo sapiens
  misc_RNA (1)...(19): siRNA sense strand
caaagaagcaaaaguugaa

SEQ ID NO: 151103 - RNA, 19 nt, Homo sapiens
  misc_RNA (1)...(19): siRNA sense strand
gugcuaaucggcuaauugu

SEQ ID NO: 151104 - RNA, 19 nt, Homo sapiens
  misc_RNA (1)...(19): siRNA sense strand
caagugccaauuaugagaa

SEQ ID NO: 151105 - RNA, 19 nt, Homo sapiens
  misc_RNA (1)...(19): siRNA sense strand
ccaccuggagcugugauua

SEQ ID NO: 151106 - RNA, 19 nt, Homo sapiens
  misc_RNA (1)...(19): siRNA sense strand
ggaacuuucuggugaaccu

SEQ ID NO: 151107 - RNA, 19 nt, Homo sapiens
  misc_RNA (1)...(19): siRNA sense strand
cuaccgagcauucuuaucu

SEQ ID NO: 151108 - RNA, 19 nt, Homo sapiens
  misc_RNA (1)...(19): siRNA sense strand
gagggacagcacugaguuu

SEQ ID NO: 151109 - RNA, 19 nt, Homo sapiens
  misc_RNA (1)...(19): siRNA sense strand
aagcagugaagacaguuua

SEQ ID NO: 151110 - RNA, 19 nt, Homo sapiens
  misc_RNA (1)...(19): siRNA sense strand
gauaacuacugugaagcau

SEQ ID NO: 151111 - RNA, 19 nt, Homo sapiens
  misc_RNA (1)...(19): siRNA sense strand
ugcaagaucuguccaccau

SEQ ID NO: 151112 - RNA, 19 nt, Homo sapiens
  misc_RNA (1)...(19): siRNA sense strand
cugagacacuuucugaaca

SEQ ID NO: 151113 - RNA, 19 nt, Homo sapiens
  misc_RNA (1)...(19): siRNA sense strand
gagcaagagggccuaaugg

SEQ ID NO: 151114 - RNA, 19 nt, Homo sapiens
  misc_RNA (1)...(19): siRNA sense strand
agaaggaacauucaucuac

SEQ ID NO: 151115 - RNA, 19 nt, Homo sapiens
  misc_RNA (1)...(19): siRNA sense strand
ccucaagggccaaguacuu

SEQ ID NO: 151116 - RNA, 19 nt, Homo sapiens
  misc_RNA (1)...(19): siRNA sense strand
caccuaccgagcauucuua

SEQ ID NO: 151117 - RNA, 19 nt, Homo sapiens
  misc_RNA (1)...(19): siRNA sense strand
uuucaagugccaauuauga

SEQ ID NO: 151118 - RNA, 19 nt, Homo sapiens
  misc_RNA (1)...(19): siRNA sense strand
gaacagcaccuccuuaaga

SEQ ID NO: 151119 - RNA, 19 nt, Homo sapiens
  misc_RNA (1)...(19): siRNA sense strand
ggagagaucugugucauug

SEQ ID NO: 151120 - RNA, 19 nt, Homo sapiens
  misc_RNA (1)...(19): siRNA sense strand
gaacugggauccuuaccaa

SEQ ID NO: 151121 - RNA, 19 nt, Homo sapiens
  misc_RNA (1)...(19): siRNA sense strand
guaagaggauugccuggua

SEQ ID NO: 151122 - RNA, 19 nt, Homo sapiens
  misc_RNA (1)...(19): siRNA sense strand
gcaaauggguauccacaga

SEQ ID NO: 151123 - RNA, 19 nt, Homo sapiens
  misc_RNA (1)...(19): siRNA sense strand
ggaaggcccuggugggaaa

SEQ ID NO: 151124 - RNA, 19 nt, Homo sapiens
  misc_RNA (1)...(19): siRNA sense strand
ugggagacauggugaauua

SEQ ID NO: 151125 - RNA, 19 nt, Homo sapiens
  misc_RNA (1)...(19): siRNA sense strand
gggcaagccugucucguuu

SEQ ID NO: 151126 - RNA, 19 nt, Homo sapiens
  misc_RNA (1)...(19): siRNA sense strand
gaggagggcugcugugaga

SEQ ID NO: 151127 - RNA, 19 nt, Homo sapiens
  misc_RNA (1)...(19): siRNA sense strand
ggacauugguauuggcauu

SEQ ID NO: 151128 - RNA, 19 nt, Homo sapiens
  misc_RNA (1)...(19): siRNA sense strand
gagacauggugaauuauga

SEQ ID NO: 151129 - RNA, 19 nt, Homo sapiens
  misc_RNA (1)...(19): siRNA sense strand
gcaggaaggacucaaauug

SEQ ID NO: 151130 - RNA, 19 nt, Homo sapiens
  misc_RNA (1)...(19): siRNA sense strand
gcaagccugucucguuuga

SEQ ID NO: 151131 - RNA, 19 nt, Homo sapiens
  misc_RNA (1)...(19): siRNA sense strand
caagguaacuccggugaga

SEQ ID NO: 151132 - RNA, 19 nt, Homo sapiens
  misc_RNA (1)...(19): siRNA sense strand
gaagacgugguaucuguuu

SEQ ID NO: 151133 - RNA, 19 nt, Homo sapiens
  misc_RNA (1)...(19): siRNA sense strand
gggagacccuggcuuuguu

SEQ ID NO: 151134 - RNA, 19 nt, Homo sapiens
  misc_RNA (1)...(19): siRNA sense strand
ugacacuacugcugaagaa

SEQ ID NO: 151135 - RNA, 19 nt, Homo sapiens
  misc_RNA (1)...(19): siRNA sense strand
gaaaucaagagguucauca

SEQ ID NO: 151136 - RNA, 19 nt, Homo sapiens
  misc_RNA (1)...(19): siRNA sense strand
caacgugacuggcuucaac

SEQ ID NO: 151137 - RNA, 19 nt, Homo sapiens
  misc_RNA (1)...(19): siRNA sense strand
gaagggugaugcugggaau

SEQ ID NO: 151138 - RNA, 19 nt, Homo sapiens
  misc_RNA (1)...(19): siRNA sense strand
cgacucagccucaugaaga

SEQ ID NO: 151139 - RNA, 19 nt, Homo sapiens
  misc_RNA (1)...(19): siRNA sense strand
caggguaccucguggagaa

SEQ ID NO: 151140 - RNA, 19 nt, Homo sapiens
  misc_RNA (1)...(19): siRNA sense strand
gaagggcgaccagggauuu

SEQ ID NO: 151141 - RNA, 19 nt, Homo sapiens
  misc_RNA (1)...(19): siRNA sense strand
ggacucaaauuggaacaca

SEQ ID NO: 151142 - RNA, 19 nt, Homo sapiens
  misc_RNA (1)...(19): siRNA sense strand
gcaaggcuggccacuguaa

SEQ ID NO: 151143 - RNA, 19 nt, Homo sapiens
  misc_RNA (1)...(19): siRNA sense strand
gcaguacccacccaugaaa

SEQ ID NO: 151144 - RNA, 19 nt, Homo sapiens
  misc_RNA (1)...(19): siRNA sense strand
ggcaaugacuguguucgaa

SEQ ID NO: 151145 - RNA, 19 nt, Homo sapiens
  misc_RNA (1)...(19): siRNA sense strand
ggugaauuaugaugaaauc

SEQ ID NO: 151146 - RNA, 19 nt, Homo sapiens
  misc_RNA (1)...(19): siRNA sense strand
ucaaggagaccucaucuuc

SEQ ID NO: 151147 - RNA, 19 nt, Homo sapiens
  misc_RNA (1)...(19): siRNA sense strand
gggagacccuggcauccaa

SEQ ID NO: 151148 - RNA, 19 nt, Homo sapiens
  misc_RNA (1)...(19): siRNA sense strand
gaaacacacccaccagaag

SEQ ID NO: 151149 - RNA, 19 nt, Homo sapiens
  misc_RNA (1)...(19): siRNA sense strand
gaaagcagggauucuaugg

SEQ ID NO: 151150 - RNA, 19 nt, Homo sapiens
  misc_RNA (1)...(19): siRNA sense strand
gagggcugcugugagauuu

SEQ ID NO: 151151 - RNA, 19 nt, Homo sapiens
  misc_RNA (1)...(19): siRNA sense strand
cauggugaauuaugaugaa

SEQ ID NO: 151152 - RNA, 19 nt, Homo sapiens
  misc_RNA (1)...(19): siRNA sense strand
ggaaggacucaaauuggaa

SEQ ID NO: 151153 - RNA, 19 nt, Homo sapiens
  misc_RNA (1)...(19): siRNA sense strand
cagcaccuccuuaagagua

SEQ ID NO: 151154 - RNA, 19 nt, Homo sapiens
  misc_RNA (1)...(19): siRNA sense strand
gaagggcagcgaagggauu

SEQ ID NO: 151155 - RNA, 19 nt, Homo sapiens
  misc_RNA (1)...(19): siRNA sense strand
ggagacauggugaauuaug

SEQ ID NO: 151156 - RNA, 19 nt, Homo sapiens
  misc_RNA (1)...(19): siRNA sense strand
ggaaagcagggauucuaug

SEQ ID NO: 151157 - RNA, 19 nt, Homo sapiens
  misc_RNA (1)...(19): siRNA sense strand
cgugguaucuguuucaagu

SEQ ID NO: 151158 - RNA, 19 nt, Homo sapiens
  misc_RNA (1)...(19): siRNA sense strand
ucaagagguucaucagaca

SEQ ID NO: 151159 - RNA, 19 nt, Homo sapiens
  misc_RNA (1)...(19): siRNA sense strand
ggagggcugcugugagauu

SEQ ID NO: 151160 - RNA, 19 nt, Homo sapiens
  misc_RNA (1)...(19): siRNA sense strand
gacagcagccgaugagugu

SEQ ID NO: 151161 - RNA, 19 nt, Homo sapiens
  misc_RNA (1)...(19): siRNA sense strand
ucagacaagagaucauuaa

SEQ ID NO: 151162 - RNA, 19 nt, Homo sapiens
  misc_RNA (1)...(19): siRNA sense strand
ccagaacuuuguuggacuu

SEQ ID NO: 151163 - RNA, 19 nt, Homo sapiens
  misc_RNA (1)...(19): siRNA sense strand
aaacacacccaccagaaga

SEQ ID NO: 151164 - RNA, 19 nt, Homo sapiens
  misc_RNA (1)...(19): siRNA sense strand
ucaagguccuccaggcuau

SEQ ID NO: 151165 - RNA, 19 nt, Homo sapiens
  misc_RNA (1)...(19): siRNA sense strand
caaugacuguguucgaauc

SEQ ID NO: 151166 - RNA, 19 nt, Homo sapiens
  misc_RNA (1)...(19): siRNA sense strand
ucaagggcgugccgggaaa

SEQ ID NO: 151167 - RNA, 19 nt, Homo sapiens
  misc_RNA (1)...(19): siRNA sense strand
aggcaaggcuggccacugu

SEQ ID NO: 151168 - RNA, 19 nt, Homo sapiens
  misc_RNA (1)...(19): siRNA sense strand
aggaaggacucaaauugga

SEQ ID NO: 151169 - RNA, 19 nt, Homo sapiens
  misc_RNA (1)...(19): siRNA sense strand
gggagugccuggaaacaac

SEQ ID NO: 151170 - RNA, 19 nt, Homo sapiens
  misc_RNA (1)...(19): siRNA sense strand
ucaagugaccgaugcaaau

SEQ ID NO: 151171 - RNA, 19 nt, Homo sapiens
  misc_RNA (1)...(19): siRNA sense strand
uaaucccucugacugcuuu

SEQ ID NO: 151172 - RNA, 19 nt, Homo sapiens
  misc_RNA (1)...(19): siRNA sense strand
ugaaaggagagaaggguaa

SEQ ID NO: 151173 - RNA, 19 nt, Homo sapiens
  misc_RNA (1)...(19): siRNA sense strand
ugagaucaauccacagucu

SEQ ID NO: 151174 - RNA, 19 nt, Homo sapiens
  misc_RNA (1)...(19): siRNA sense strand
gggagauccuggcuguguu

SEQ ID NO: 151175 - RNA, 19 nt, Homo sapiens
  misc_RNA (1)...(19): siRNA sense strand
gcaaugacuguguucgaau

SEQ ID NO: 151176 - RNA, 19 nt, Homo sapiens
  misc_RNA (1)...(19): siRNA sense strand
ggagccuggugauccugua

SEQ ID NO: 151177 - RNA, 19 nt, Homo sapiens
  misc_RNA (1)...(19): siRNA sense strand
ggagacagcagccgaugag

SEQ ID NO: 151178 - RNA, 19 nt, Homo sapiens
  misc_RNA (1)...(19): siRNA sense strand
aggauugccugguaccaaa

SEQ ID NO: 151179 - RNA, 19 nt, Homo sapiens
  misc_RNA (1)...(19): siRNA sense strand
gggcuugccaggaguaaga

SEQ ID NO: 151180 - RNA, 19 nt, Homo sapiens
  misc_RNA (1)...(19): siRNA sense strand
ggaccuggcaagagugguu

SEQ ID NO: 151181 - RNA, 19 nt, Homo sapiens
  misc_RNA (1)...(19): siRNA sense strand
gaacuuuguuggacuuccu

SEQ ID NO: 151182 - RNA, 19 nt, Homo sapiens
  misc_RNA (1)...(19): siRNA sense strand
ggagauccuggcuguguug

SEQ ID NO: 151183 - RNA, 19 nt, Homo sapiens
  misc_RNA (1)...(19): siRNA sense strand
cagcaguacccacccauga

SEQ ID NO: 151184 - RNA, 19 nt, Homo sapiens
  misc_RNA (1)...(19): siRNA sense strand
cggauugccuggccuucaa

SEQ ID NO: 151185 - RNA, 19 nt, Homo sapiens
  misc_RNA (1)...(19): siRNA sense strand
ugguaucuguuucaaguga

SEQ ID NO: 151186 - RNA, 19 nt, Homo sapiens
  misc_RNA (1)...(19): siRNA sense strand
gggccugacuggagacaag

SEQ ID NO: 151187 - RNA, 19 nt, Homo sapiens
  misc_RNA (1)...(19): siRNA sense strand
agauaucccuggaagucaa

SEQ ID NO: 151188 - RNA, 19 nt, Homo sapiens
  misc_RNA (1)...(19): siRNA sense strand
caucagacaagagaucauu

SEQ ID NO: 151189 - RNA, 19 nt, Homo sapiens
  misc_RNA (1)...(19): siRNA sense strand
caaauuggaacacaguagu

SEQ ID NO: 151190 - RNA, 19 nt, Homo sapiens
  misc_RNA (1)...(19): siRNA sense strand
agaaacacacccaccagaa

SEQ ID NO: 151191 - RNA, 19 nt, Homo sapiens
  misc_RNA (1)...(19): siRNA sense strand
cagacaagagaucauuaaa

SEQ ID NO: 151192 - RNA, 19 nt, Homo sapiens
  misc_RNA (1)...(19): siRNA sense strand
ugacaacagugagggagau

SEQ ID NO: 151193 - RNA, 19 nt, Homo sapiens
  misc_RNA (1)...(19): siRNA sense strand
ggaaagccagggcccaaag

SEQ ID NO: 151194 - RNA, 19 nt, Homo sapiens
  misc_RNA (1)...(19): siRNA sense strand
caagugaccgaugcaaaug

SEQ ID NO: 151195 - RNA, 19 nt, Homo sapiens
  misc_RNA (1)...(19): siRNA sense strand
gagagaauggcuuacuaca

SEQ ID NO: 151196 - RNA, 19 nt, Homo sapiens
  misc_RNA (1)...(19): siRNA sense strand
cugcagaacugggauccuu

SEQ ID NO: 151197 - RNA, 19 nt, Homo sapiens
  misc_RNA (1)...(19): siRNA sense strand
gggcugcugugagauuuua

SEQ ID NO: 151198 - RNA, 19 nt, Homo sapiens
  misc_RNA (1)...(19): siRNA sense strand
gccugugggccauguauuu

SEQ ID NO: 151199 - RNA, 19 nt, Homo sapiens
  misc_RNA (1)...(19): siRNA sense strand
cugggauccuuaccaauug

SEQ ID NO: 151200 - RNA, 19 nt, Homo sapiens
  misc_RNA (1)...(19): siRNA sense strand
cagcugacgggaagaauca

SEQ ID NO: 151201 - RNA, 19 nt, Homo sapiens
  misc_RNA (1)...(19): siRNA sense strand
aaauuggaacacaguagua

SEQ ID NO: 151202 - RNA, 19 nt, Homo sapiens
  misc_RNA (1)...(19): siRNA sense strand
augagagaauggcuuacua

SEQ ID NO: 151203 - RNA, 19 nt, Homo sapiens
  misc_RNA (1)...(19): siRNA sense strand
uugaacagcaccuccuuaa

SEQ ID NO: 151204 - RNA, 19 nt, Homo sapiens
  misc_RNA (1)...(19): siRNA sense strand
ggaagucaacagccaagag

SEQ ID NO: 151205 - RNA, 19 nt, Homo sapiens
  misc_RNA (1)...(19): siRNA sense strand
gcagggcuugccaggagua

SEQ ID NO: 151206 - RNA, 19 nt, Homo sapiens
  misc_RNA (1)...(19): siRNA sense strand
caaggagaccucaucuucu

SEQ ID NO: 151207 - RNA, 19 nt, Homo sapiens
  misc_RNA (1)...(19): siRNA sense strand
caaauggguauccacagau

SEQ ID NO: 151208 - RNA, 19 nt, Homo sapiens
  misc_RNA (1)...(19): siRNA sense strand
ugugggccauguauuucua

SEQ ID NO: 151209 - RNA, 19 nt, Homo sapiens
  misc_RNA (1)...(19): siRNA sense strand
gcaggugcacaucuacugu

SEQ ID NO: 151210 - RNA, 19 nt, Homo sapiens
  misc_RNA (1)...(19): siRNA sense strand
ggauggugcagcuggcaaa

SEQ ID NO: 151211 - RNA, 19 nt, Homo sapiens
  misc_RNA (1)...(19): siRNA sense strand
uaagggugacuguggcaaa

SEQ ID NO: 151212 - RNA, 19 nt, Homo sapiens
  misc_RNA (1)...(19): siRNA sense strand
gggauugccaggccagaga

SEQ ID NO: 151213 - RNA, 19 nt, Homo sapiens
  misc_RNA (1)...(19): siRNA sense strand
acugggauccuuaccaauu

SEQ ID NO: 151214 - RNA, 19 nt, Homo sapiens
  misc_RNA (1)...(19): siRNA sense strand
acaagcugaugcugagugu

SEQ ID NO: 151215 - RNA, 19 nt, Homo sapiens
  misc_RNA (1)...(19): siRNA sense strand
gaggauugccugguaccaa

SEQ ID NO: 151216 - RNA, 19 nt, Homo sapiens
  misc_RNA (1)...(19): siRNA sense strand
cauccaaggcaucaaagga

SEQ ID NO: 151217 - RNA, 19 nt, Homo sapiens
  misc_RNA (1)...(19): siRNA sense strand
caggagagaucugugucau

SEQ ID NO: 151218 - RNA, 19 nt, Homo sapiens
  misc_RNA (1)...(19): siRNA sense strand
gaaagaaggugguggaauu

SEQ ID NO: 151219 - RNA, 19 nt, Homo sapiens
  misc_RNA (1)...(19): siRNA sense strand
caagaaacauguugugaaa

SEQ ID NO: 151220 - RNA, 19 nt, Homo sapiens
  misc_RNA (1)...(19): siRNA sense strand
gacaucagcugacauauga

SEQ ID NO: 151221 - RNA, 19 nt, Homo sapiens
  misc_RNA (1)...(19): siRNA sense strand
caggauggcuuuggaaaua

SEQ ID NO: 151222 - RNA, 19 nt, Homo sapiens
  misc_RNA (1)...(19): siRNA sense strand
ccucauagcucaagaaaca

SEQ ID NO: 151223 - RNA, 19 nt, Homo sapiens
  misc_RNA (1)...(19): siRNA sense strand
gugcuuugcucaagaauuu

SEQ ID NO: 151224 - RNA, 19 nt, Homo sapiens
  misc_RNA (1)...(19): siRNA sense strand
gcacaaacuuggcauuagu

SEQ ID NO: 151225 - RNA, 19 nt, Homo sapiens
  misc_RNA (1)...(19): siRNA sense strand
caagggagaagcaggauua

SEQ ID NO: 151226 - RNA, 19 nt, Homo sapiens
  misc_RNA (1)...(19): siRNA sense strand
gagaggaccuguuggagau

SEQ ID NO: 151227 - RNA, 19 nt, Homo sapiens
  misc_RNA (1)...(19): siRNA sense strand
ccacagauuucuauaguag

SEQ ID NO: 151228 - RNA, 19 nt, Homo sapiens
  misc_RNA (1)...(19): siRNA sense strand
gaaccaggauuagauggaa

SEQ ID NO: 151229 - RNA, 19 nt, Homo sapiens
  misc_RNA (1)...(19): siRNA sense strand
gcaagccuguggauauuga

SEQ ID NO: 151230 - RNA, 19 nt, Homo sapiens
  misc_RNA (1)...(19): siRNA sense strand
caacaaaggagaagaagga

SEQ ID NO: 151231 - RNA, 19 nt, Homo sapiens
  misc_RNA (1)...(19): siRNA sense strand
ggcaugagcaguuuauaua

SEQ ID NO: 151232 - RNA, 19 nt, Homo sapiens
  misc_RNA (1)...(19): siRNA sense strand
cagcaaagcaggaacuuaa

SEQ ID NO: 151233 - RNA, 19 nt, Homo sapiens
  misc_RNA (1)...(19): siRNA sense strand
gccaggagauguuggauug

SEQ ID NO: 151234 - RNA, 19 nt, Homo sapiens
  misc_RNA (1)...(19): siRNA sense strand
gcagaaagggcauaaagga

SEQ ID NO: 151235 - RNA, 19 nt, Homo sapiens
  misc_RNA (1)...(19): siRNA sense strand
gggaaaugaugaacaugaa

SEQ ID NO: 151236 - RNA, 19 nt, Homo sapiens
  misc_RNA (1)...(19): siRNA sense strand
ggaauacaccaaacucuug

SEQ ID NO: 151237 - RNA, 19 nt, Homo sapiens
  misc_RNA (1)...(19): siRNA sense strand
gcagaauauuccacagauu

SEQ ID NO: 151238 - RNA, 19 nt, Homo sapiens
  misc_RNA (1)...(19): siRNA sense strand
ggacaagacagaagaguca

SEQ ID NO: 151239 - RNA, 19 nt, Homo sapiens
  misc_RNA (1)...(19): siRNA sense strand
ggaaagccaggaauaaaug

SEQ ID NO: 151240 - RNA, 19 nt, Homo sapiens
  misc_RNA (1)...(19): siRNA sense strand
gugugaauguucccaguua

SEQ ID NO: 151241 - RNA, 19 nt, Homo sapiens
  misc_RNA (1)...(19): siRNA sense strand
caagggaaaugaugaacau

SEQ ID NO: 151242 - RNA, 19 nt, Homo sapiens
  misc_RNA (1)...(19): siRNA sense strand
cucaguagcugccauguuu

SEQ ID NO: 151243 - RNA, 19 nt, Homo sapiens
  misc_RNA (1)...(19): siRNA sense strand
gaacaugguaucccaggaa

SEQ ID NO: 151244 - RNA, 19 nt, Homo sapiens
  misc_RNA (1)...(19): siRNA sense strand
cuucauaucugccagcaaa

SEQ ID NO: 151245 - RNA, 19 nt, Homo sapiens
  misc_RNA (1)...(19): siRNA sense strand
ggacaucagcugacauaug

SEQ ID NO: 151246 - RNA, 19 nt, Homo sapiens
  misc_RNA (1)...(19): siRNA sense strand
gaagagaggauggcuguau

SEQ ID NO: 151247 - RNA, 19 nt, Homo sapiens
  misc_RNA (1)...(19): siRNA sense strand
ggagauguguugaacuaca

SEQ ID NO: 151248 - RNA, 19 nt, Homo sapiens
  misc_RNA (1)...(19): siRNA sense strand
cagaauauuccacagauuu

SEQ ID NO: 151249 - RNA, 19 nt, Homo sapiens
  misc_RNA (1)...(19): siRNA sense strand
gagacacuauguauaagau

SEQ ID NO: 151250 - RNA, 19 nt, Homo sapiens
  misc_RNA (1)...(19): siRNA sense strand
ggacuucagcucuggguuu

SEQ ID NO: 151251 - RNA, 19 nt, Homo sapiens
  misc_RNA (1)...(19): siRNA sense strand
uaagggaggugugaauguu

SEQ ID NO: 151252 - RNA, 19 nt, Homo sapiens
  misc_RNA (1)...(19): siRNA sense strand
ggauggcuuuggaaauauu

SEQ ID NO: 151253 - RNA, 19 nt, Homo sapiens
  misc_RNA (1)...(19): siRNA sense strand
gauguaacccagaagauug

SEQ ID NO: 151254 - RNA, 19 nt, Homo sapiens
  misc_RNA (1)...(19): siRNA sense strand
gaagauguaacccagaaga

SEQ ID NO: 151255 - RNA, 19 nt, Homo sapiens
  misc_RNA (1)...(19): siRNA sense strand
gggagagccuggugcaaug

SEQ ID NO: 151256 - RNA, 19 nt, Homo sapiens
  misc_RNA (1)...(19): siRNA sense strand
gcaugagcaguuuauauaa

SEQ ID NO: 151257 - RNA, 19 nt, Homo sapiens
  misc_RNA (1)...(19): siRNA sense strand
caccugguauuccauuuaa

SEQ ID NO: 151258 - RNA, 19 nt, Homo sapiens
  misc_RNA (1)...(19): siRNA sense strand
caggucauuucacuuuaua

SEQ ID NO: 151259 - RNA, 19 nt, Homo sapiens
  misc_RNA (1)...(19): siRNA sense strand
uagcagggaugucgggaaa

SEQ ID NO: 151260 - RNA, 19 nt, Homo sapiens
  misc_RNA (1)...(19): siRNA sense strand
ccaguaaaaugucuucaua

SEQ ID NO: 151261 - RNA, 19 nt, Homo sapiens
  misc_RNA (1)...(19): siRNA sense strand
gaacuucaccaacuuaaaa

SEQ ID NO: 151262 - RNA, 19 nt, Homo sapiens
  misc_RNA (1)...(19): siRNA sense strand
ucaaggaauuccaggcauu

SEQ ID NO: 151263 - RNA, 19 nt, Homo sapiens
  misc_RNA (1)...(19): siRNA sense strand
agaaggauuuccaggugua

SEQ ID NO: 151264 - RNA, 19 nt, Homo sapiens
  misc_RNA (1)...(19): siRNA sense strand
gcgcacaugugggaauuga

SEQ ID NO: 151265 - RNA, 19 nt, Homo sapiens
  misc_RNA (1)...(19): siRNA sense strand
gaacuccguccuuuguuug

SEQ ID NO: 151266 - RNA, 19 nt, Homo sapiens
  misc_RNA (1)...(19): siRNA sense strand
cccagaagauugccucuau

SEQ ID NO: 151267 - RNA, 19 nt, Homo sapiens
  misc_RNA (1)...(19): siRNA sense strand
agaacuccguccuuuguuu

SEQ ID NO: 151268 - RNA, 19 nt, Homo sapiens
  misc_RNA (1)...(19): siRNA sense strand
ggguaagccuggagacaga

SEQ ID NO: 151269 - RNA, 19 nt, Homo sapiens
  misc_RNA (1)...(19): siRNA sense strand
gaaaggagacaagggugaa

SEQ ID NO: 151270 - RNA, 19 nt, Homo sapiens
  misc_RNA (1)...(19): siRNA sense strand
aaacaggaccucccggaaa

SEQ ID NO: 151271 - RNA, 19 nt, Homo sapiens
  misc_RNA (1)...(19): siRNA sense strand
agaaggugguggaauuuau

SEQ ID NO: 151272 - RNA, 19 nt, Homo sapiens
  misc_RNA (1)...(19): siRNA sense strand
gauaacaagggaaaugaug

SEQ ID NO: 151273 - RNA, 19 nt, Homo sapiens
  misc_RNA (1)...(19): siRNA sense strand
caaagcaggaacuuaaaga

SEQ ID NO: 151274 - RNA, 19 nt, Homo sapiens
  misc_RNA (1)...(19): siRNA sense strand
aaacuuggcauuaguauac

SEQ ID NO: 151275 - RNA, 19 nt, Homo sapiens
  misc_RNA (1)...(19): siRNA sense strand
agggagauguguugaacua

SEQ ID NO: 151276 - RNA, 19 nt, Homo sapiens
  misc_RNA (1)...(19): siRNA sense strand
ccaggucauuucacuuuau

SEQ ID NO: 151277 - RNA, 19 nt, Homo sapiens
  misc_RNA (1)...(19): siRNA sense strand
gaaauauugcaucaucaug

SEQ ID NO: 151278 - RNA, 19 nt, Homo sapiens
  misc_RNA (1)...(19): siRNA sense strand
gugcacuucuuauuagaga

SEQ ID NO: 151279 - RNA, 19 nt, Homo sapiens
  misc_RNA (1)...(19): siRNA sense strand
gaagggagaaagaggugaa

SEQ ID NO: 151280 - RNA, 19 nt, Homo sapiens
  misc_RNA (1)...(19): siRNA sense strand
ggugagagaggaccuguug

SEQ ID NO: 151281 - RNA, 19 nt, Homo sapiens
  misc_RNA (1)...(19): siRNA sense strand
gggaagaacuggacauccu

SEQ ID NO: 151282 - RNA, 19 nt, Homo sapiens
  misc_RNA (1)...(19): siRNA sense strand
gaaggcagcaaaggagaaa

SEQ ID NO: 151283 - RNA, 19 nt, Homo sapiens
  misc_RNA (1)...(19): siRNA sense strand
gaaggugguggaauuuaug

SEQ ID NO: 151284 - RNA, 19 nt, Homo sapiens
  misc_RNA (1)...(19): siRNA sense strand
ggugguggaauuuauguuu

SEQ ID NO: 151285 - RNA, 19 nt, Homo sapiens
  misc_RNA (1)...(19): siRNA sense strand
gaaggacccucaggaaagc

SEQ ID NO: 151286 - RNA, 19 nt, Homo sapiens
  misc_RNA (1)...(19): siRNA sense strand
ggcuuuggaugucaauauu

SEQ ID NO: 151287 - RNA, 19 nt, Homo sapiens
  misc_RNA (1)...(19): siRNA sense strand
gaagagucaugcccuaucc

SEQ ID NO: 151288 - RNA, 19 nt, Homo sapiens
  misc_RNA (1)...(19): siRNA sense strand
uaacaagggaaaugaugaa

SEQ ID NO: 151289 - RNA, 19 nt, Homo sapiens
  misc_RNA (1)...(19): siRNA sense strand
ucaagaaacauguugugaa

SEQ ID NO: 151290 - RNA, 19 nt, Homo sapiens
  misc_RNA (1)...(19): siRNA sense strand
ggaaauauugcaucaucau

SEQ ID NO: 151291 - RNA, 19 nt, Homo sapiens
  misc_RNA (1)...(19): siRNA sense strand
aagagaggauggcuguauu

SEQ ID NO: 151292 - RNA, 19 nt, Homo sapiens
  misc_RNA (1)...(19): siRNA sense strand
cagaaggacccucaggaaa

SEQ ID NO: 151293 - RNA, 19 nt, Homo sapiens
  misc_RNA (1)...(19): siRNA sense strand
ccaccugguauuccauuua

SEQ ID NO: 151294 - RNA, 19 nt, Homo sapiens
  misc_RNA (1)...(19): siRNA sense strand
gccagugcauuccaaacaa

SEQ ID NO: 151295 - RNA, 19 nt, Homo sapiens
  misc_RNA (1)...(19): siRNA sense strand
uggaagauguaacccagaa

SEQ ID NO: 151296 - RNA, 19 nt, Homo sapiens
  misc_RNA (1)...(19): siRNA sense strand
cgaaacggcaugagcaguu

SEQ ID NO: 151297 - RNA, 19 nt, Homo sapiens
  misc_RNA (1)...(19): siRNA sense strand
gaugagggucuucaaggaa

SEQ ID NO: 151298 - RNA, 19 nt, Homo sapiens
  misc_RNA (1)...(19): siRNA sense strand
cgaggaggcagacugauga

SEQ ID NO: 151299 - RNA, 19 nt, Homo sapiens
  misc_RNA (1)...(19): siRNA sense strand
caggaaagccaggaauaaa

SEQ ID NO: 151300 - RNA, 19 nt, Homo sapiens
  misc_RNA (1)...(19): siRNA sense strand
caaaggagaaacuggugaa

SEQ ID NO: 151301 - RNA, 19 nt, Homo sapiens
  misc_RNA (1)...(19): siRNA sense strand
aaaggacacuguggauuuc

SEQ ID NO: 151302 - RNA, 19 nt, Homo sapiens
  misc_RNA (1)...(19): siRNA sense strand
cgagaacuccguccuuugu

SEQ ID NO: 151303 - RNA, 19 nt, Homo sapiens
  misc_RNA (1)...(19): siRNA sense strand
ggacccaguggaagaugua

SEQ ID NO: 151304 - RNA, 19 nt, Homo sapiens
  misc_RNA (1)...(19): siRNA sense strand
ucaggaaagccaggaauaa

SEQ ID NO: 151305 - RNA, 19 nt, Homo sapiens
  misc_RNA (1)...(19): siRNA sense strand
ccagaaggacccucaggaa

SEQ ID NO: 151306 - RNA, 19 nt, Homo sapiens
  misc_RNA (1)...(19): siRNA sense strand
gauugcacuuccucucuug

SEQ ID NO: 151307 - RNA, 19 nt, Homo sapiens
  misc_RNA (1)...(19): siRNA sense strand
gcaaagcaggaacuuaaag

SEQ ID NO: 151308 - RNA, 19 nt, Homo sapiens
  misc_RNA (1)...(19): siRNA sense strand
uggcaagccuguggauauu

SEQ ID NO: 151309 - RNA, 19 nt, Homo sapiens
  misc_RNA (1)...(19): siRNA sense strand
caaacuuggcauuaguaua

SEQ ID NO: 151310 - RNA, 19 nt, Homo sapiens
  misc_RNA (1)...(19): siRNA sense strand
gaucgucaguggcacaaac

SEQ ID NO: 151311 - RNA, 19 nt, Homo sapiens
  misc_RNA (1)...(19): siRNA sense strand
ggucauuucacuuuauaug

SEQ ID NO: 151312 - RNA, 19 nt, Homo sapiens
  misc_RNA (1)...(19): siRNA sense strand
cugaugcaguuucauuuga

SEQ ID NO: 151313 - RNA, 19 nt, Homo sapiens
  misc_RNA (1)...(19): siRNA sense strand
gaggaccuguuggagauau

SEQ ID NO: 151314 - RNA, 19 nt, Homo sapiens
  misc_RNA (1)...(19): siRNA sense strand
ccacuuccgugaccguuag

SEQ ID NO: 151315 - RNA, 19 nt, Homo sapiens
  misc_RNA (1)...(19): siRNA sense strand
ugaaaagggugaacaagga

SEQ ID NO: 151316 - RNA, 19 nt, Homo sapiens
  misc_RNA (1)...(19): siRNA sense strand
aaggaacggugguuucugu

SEQ ID NO: 151317 - RNA, 19 nt, Homo sapiens
  misc_RNA (1)...(19): siRNA sense strand
agacagaggcucacaaggu

SEQ ID NO: 151318 - RNA, 19 nt, Homo sapiens
  misc_RNA (1)...(19): siRNA sense strand
ggaaugggcuugccaggaa

SEQ ID NO: 151319 - RNA, 19 nt, Homo sapiens
  misc_RNA (1)...(19): siRNA sense strand
gcucaaaggugacaaagga

SEQ ID NO: 151320 - RNA, 19 nt, Homo sapiens
  misc_RNA (1)...(19): siRNA sense strand
ggagcgagauguucaagaa

SEQ ID NO: 151321 - RNA, 19 nt, Homo sapiens
  misc_RNA (1)...(19): siRNA sense strand
aaagggagaucaagggaua

SEQ ID NO: 151322 - RNA, 19 nt, Homo sapiens
  misc_RNA (1)...(19): siRNA sense strand
ggacaaaugggcuuaaguu

SEQ ID NO: 151323 - RNA, 19 nt, Homo sapiens
  misc_RNA (1)...(19): siRNA sense strand
caaauggaauuguggaaug

SEQ ID NO: 151324 - RNA, 19 nt, Homo sapiens
  misc_RNA (1)...(19): siRNA sense strand
uaaaggugauccagguaua

SEQ ID NO: 151325 - RNA, 19 nt, Homo sapiens
  misc_RNA (1)...(19): siRNA sense strand
ggagagaaaggacaaauug

SEQ ID NO: 151326 - RNA, 19 nt, Homo sapiens
  misc_RNA (1)...(19): siRNA sense strand
caaagguguugacggcuua

SEQ ID NO: 151327 - RNA, 19 nt, Homo sapiens
  misc_RNA (1)...(19): siRNA sense strand
ggagagaguugccucaucu

SEQ ID NO: 151328 - RNA, 19 nt, Homo sapiens
  misc_RNA (1)...(19): siRNA sense strand
gggagacccuggcuugaaa

SEQ ID NO: 151329 - RNA, 19 nt, Homo sapiens
  misc_RNA (1)...(19): siRNA sense strand
cgcaaacgcuuacagcuuu

SEQ ID NO: 151330 - RNA, 19 nt, Homo sapiens
  misc_RNA (1)...(19): siRNA sense strand
caaaugggcuuaaguuuuc

SEQ ID NO: 151331 - RNA, 19 nt, Homo sapiens
  misc_RNA (1)...(19): siRNA sense strand
acaaaggccucccaggauu

SEQ ID NO: 151332 - RNA, 19 nt, Homo sapiens
  misc_RNA (1)...(19): siRNA sense strand
uggcuuaccuggagacaaa

SEQ ID NO: 151333 - RNA, 19 nt, Homo sapiens
  misc_RNA (1)...(19): siRNA sense strand
gcacaaugcccuuccuguu

SEQ ID NO: 151334 - RNA, 19 nt, Homo sapiens
  misc_RNA (1)...(19): siRNA sense strand
gaaaggugaaagaggauuu

SEQ ID NO: 151335 - RNA, 19 nt, Homo sapiens
  misc_RNA (1)...(19): siRNA sense strand
uaacaacgugugcaacuuu

SEQ ID NO: 151336 - RNA, 19 nt, Homo sapiens
  misc_RNA (1)...(19): siRNA sense strand
gaagggagagccuggaguu

SEQ ID NO: 151337 - RNA, 19 nt, Homo sapiens
  misc_RNA (1)...(19): siRNA sense strand
ccaaggagaccgaggcuuu

SEQ ID NO: 151338 - RNA, 19 nt, Homo sapiens
  misc_RNA (1)...(19): siRNA sense strand
caaaggagagcaaggauuc

SEQ ID NO: 151339 - RNA, 19 nt, Homo sapiens
  misc_RNA (1)...(19): siRNA sense strand
gcaagguguuacaggauug

SEQ ID NO: 151340 - RNA, 19 nt, Homo sapiens
  misc_RNA (1)...(19): siRNA sense strand
agaguugccucaucuguga

SEQ ID NO: 151341 - RNA, 19 nt, Homo sapiens
  misc_RNA (1)...(19): siRNA sense strand
uggcaucccuggugucaaa

SEQ ID NO: 151342 - RNA, 19 nt, Homo sapiens
  misc_RNA (1)...(19): siRNA sense strand
cggcuuaccuggagacaug

SEQ ID NO: 151343 - RNA, 19 nt, Homo sapiens
  misc_RNA (1)...(19): siRNA sense strand
aggaacaccuggagagaaa

SEQ ID NO: 151344 - RNA, 19 nt, Homo sapiens
  misc_RNA (1)...(19): siRNA sense strand
caaaggagacaaagguuca

SEQ ID NO: 151345 - RNA, 19 nt, Homo sapiens
  misc_RNA (1)...(19): siRNA sense strand
gggcaugccugguauuggu

SEQ ID NO: 151346 - RNA, 19 nt, Homo sapiens
  misc_RNA (1)...(19): siRNA sense strand
gcaucuggcuacccuggaa

SEQ ID NO: 151347 - RNA, 19 nt, Homo sapiens
  misc_RNA (1)...(19): siRNA sense strand
gaaaugacuacucguacug

SEQ ID NO: 151348 - RNA, 19 nt, Homo sapiens
  misc_RNA (1)...(19): siRNA sense strand
uuccuguucugcaauauua

SEQ ID NO: 151349 - RNA, 19 nt, Homo sapiens
  misc_RNA (1)...(19): siRNA sense strand
gaaccaggucuaccaggaa

SEQ ID NO: 151350 - RNA, 19 nt, Homo sapiens
  misc_RNA (1)...(19): siRNA sense strand
gacaaaugggcuuaaguuu

SEQ ID NO: 151351 - RNA, 19 nt, Homo sapiens
  misc_RNA (1)...(19): siRNA sense strand
uaccgggacucaaagguuu

SEQ ID NO: 151352 - RNA, 19 nt, Homo sapiens
  misc_RNA (1)...(19): siRNA sense strand
gaccaggcauagucaaaca

SEQ ID NO: 151353 - RNA, 19 nt, Homo sapiens
  misc_RNA (1)...(19): siRNA sense strand
agugggugcuccuggauua

SEQ ID NO: 151354 - RNA, 19 nt, Homo sapiens
  misc_RNA (1)...(19): siRNA sense strand
gaagugcgccauucaucga

SEQ ID NO: 151355 - RNA, 19 nt, Homo sapiens
  misc_RNA (1)...(19): siRNA sense strand
caacuuugcaucacgaaau

SEQ ID NO: 151356 - RNA, 19 nt, Homo sapiens
  misc_RNA (1)...(19): siRNA sense strand
cggaaaagauggugacaaa

SEQ ID NO: 151357 - RNA, 19 nt, Homo sapiens
  misc_RNA (1)...(19): siRNA sense strand
ccagaaaggagaccaagga

SEQ ID NO: 151358 - RNA, 19 nt, Homo sapiens
  misc_RNA (1)...(19): siRNA sense strand
caaggacucccuggcauaa

SEQ ID NO: 151359 - RNA, 19 nt, Homo sapiens
  misc_RNA (1)...(19): siRNA sense strand
agacaaaggugcaaaagga

SEQ ID NO: 151360 - RNA, 19 nt, Homo sapiens
  misc_RNA (1)...(19): siRNA sense strand
ugccaagucuguaugagaa

SEQ ID NO: 151361 - RNA, 19 nt, Homo sapiens
  misc_RNA (1)...(19): siRNA sense strand
uccaggaguuccaggauuu

SEQ ID NO: 151362 - RNA, 19 nt, Homo sapiens
  misc_RNA (1)...(19): siRNA sense strand
gacaaaggccucccaggau

SEQ ID NO: 151363 - RNA, 19 nt, Homo sapiens
  misc_RNA (1)...(19): siRNA sense strand
ugagauacuuggccaugug

SEQ ID NO: 151364 - RNA, 19 nt, Homo sapiens
  misc_RNA (1)...(19): siRNA sense strand
gagaggagcgagauguuca

SEQ ID NO: 151365 - RNA, 19 nt, Homo sapiens
  misc_RNA (1)...(19): siRNA sense strand
gaaaggccagcaagguguu

SEQ ID NO: 151366 - RNA, 19 nt, Homo sapiens
  misc_RNA (1)...(19): siRNA sense strand
cgaaaugacuacucguacu

SEQ ID NO: 151367 - RNA, 19 nt, Homo sapiens
  misc_RNA (1)...(19): siRNA sense strand
aggacaagcucaaguucaa

SEQ ID NO: 151368 - RNA, 19 nt, Homo sapiens
  misc_RNA (1)...(19): siRNA sense strand
aguuaaaggugacaaagga

SEQ ID NO: 151369 - RNA, 19 nt, Homo sapiens
  misc_RNA (1)...(19): siRNA sense strand
caaaggagaagcaggucuu

SEQ ID NO: 151370 - RNA, 19 nt, Homo sapiens
  misc_RNA (1)...(19): siRNA sense strand
ggaccaaguggaagagaug

SEQ ID NO: 151371 - RNA, 19 nt, Homo sapiens
  misc_RNA (1)...(19): siRNA sense strand
cacaggaccuuugggagaa

SEQ ID NO: 151372 - RNA, 19 nt, Homo sapiens
  misc_RNA (1)...(19): siRNA sense strand
gaggagagccaggcccaaa

SEQ ID NO: 151373 - RNA, 19 nt, Homo sapiens
  misc_RNA (1)...(19): siRNA sense strand
ugggauugauggaguuaaa

SEQ ID NO: 151374 - RNA, 19 nt, Homo sapiens
  misc_RNA (1)...(19): siRNA sense strand
caaagggugagguggguuu

SEQ ID NO: 151375 - RNA, 19 nt, Homo sapiens
  misc_RNA (1)...(19): siRNA sense strand
gaaccgggaccuccuggau

SEQ ID NO: 151376 - RNA, 19 nt, Homo sapiens
  misc_RNA (1)...(19): siRNA sense strand
uggcagagaugguguugca

SEQ ID NO: 151377 - RNA, 19 nt, Homo sapiens
  misc_RNA (1)...(19): siRNA sense strand
ucugugauauagacggaua

SEQ ID NO: 151378 - RNA, 19 nt, Homo sapiens
  misc_RNA (1)...(19): siRNA sense strand
ccuccuggcuugccugguu

SEQ ID NO: 151379 - RNA, 19 nt, Homo sapiens
  misc_RNA (1)...(19): siRNA sense strand
caggcauagucaaacaaua

SEQ ID NO: 151380 - RNA, 19 nt, Homo sapiens
  misc_RNA (1)...(19): siRNA sense strand
ucaaggacucccuggcaua

SEQ ID NO: 151381 - RNA, 19 nt, Homo sapiens
  misc_RNA (1)...(19): siRNA sense strand
gggagagccuggaguuggu

SEQ ID NO: 151382 - RNA, 19 nt, Homo sapiens
  misc_RNA (1)...(19): siRNA sense strand
guaggugugcuguguguga

SEQ ID NO: 151383 - RNA, 19 nt, Homo sapiens
  misc_RNA (1)...(19): siRNA sense strand
gggcuuaaguuuucaagga

SEQ ID NO: 151384 - RNA, 19 nt, Homo sapiens
  misc_RNA (1)...(19): siRNA sense strand
uuacaggauugguggguau

SEQ ID NO: 151385 - RNA, 19 nt, Homo sapiens
  misc_RNA (1)...(19): siRNA sense strand
caaaggccucccaggauug

SEQ ID NO: 151386 - RNA, 19 nt, Homo sapiens
  misc_RNA (1)...(19): siRNA sense strand
gacaagcucaaguucaaga

SEQ ID NO: 151387 - RNA, 19 nt, Homo sapiens
  misc_RNA (1)...(19): siRNA sense strand
ccaagucuguaugagaaga

SEQ ID NO: 151388 - RNA, 19 nt, Homo sapiens
  misc_RNA (1)...(19): siRNA sense strand
ggaauuaaaggugaucaag

SEQ ID NO: 151389 - RNA, 19 nt, Homo sapiens
  misc_RNA (1)...(19): siRNA sense strand
ccaaaggagagcaaggauu

SEQ ID NO: 151390 - RNA, 19 nt, Homo sapiens
  misc_RNA (1)...(19): siRNA sense strand
ugacugccauggagugaag

SEQ ID NO: 151391 - RNA, 19 nt, Homo sapiens
  misc_RNA (1)...(19): siRNA sense strand
caaaugugacugccaugga

SEQ ID NO: 151392 - RNA, 19 nt, Homo sapiens
  misc_RNA (1)...(19): siRNA sense strand
aggcgaaauuggagagaaa

SEQ ID NO: 151393 - RNA, 19 nt, Homo sapiens
  misc_RNA (1)...(19): siRNA sense strand
gugccaggcccucaaggua

SEQ ID NO: 151394 - RNA, 19 nt, Homo sapiens
  misc_RNA (1)...(19): siRNA sense strand
gccgugggaccugcaauua

SEQ ID NO: 151395 - RNA, 19 nt, Homo sapiens
  misc_RNA (1)...(19): siRNA sense strand
gugcacagccagaccauuc

SEQ ID NO: 151396 - RNA, 19 nt, Homo sapiens
  misc_RNA (1)...(19): siRNA sense strand
acaaugcccuuccuguucu

SEQ ID NO: 151397 - RNA, 19 nt, Homo sapiens
  misc_RNA (1)...(19): siRNA sense strand
uggcaucccuggcccacaa

SEQ ID NO: 151398 - RNA, 19 nt, Homo sapiens
  misc_RNA (1)...(19): siRNA sense strand
gccggguucuguaggauug

SEQ ID NO: 151399 - RNA, 19 nt, Homo sapiens
  misc_RNA (1)...(19): siRNA sense strand
uguugggccuccaggauuu

SEQ ID NO: 151400 - RNA, 19 nt, Homo sapiens
  misc_RNA (1)...(19): siRNA sense strand
ggagacaaagguucaaagg

SEQ ID NO: 151401 - RNA, 19 nt, Homo sapiens
  misc_RNA (1)...(19): siRNA sense strand
gaagggugaaccaggucua

SEQ ID NO: 151402 - RNA, 19 nt, Homo sapiens
  misc_RNA (1)...(19): siRNA sense strand
agagaaaggacaaauugga

SEQ ID NO: 151403 - RNA, 19 nt, Homo sapiens
  misc_RNA (1)...(19): siRNA sense strand
gggcagccaggauuuauag

SEQ ID NO: 151404 - RNA, 19 nt, Homo sapiens
  misc_RNA (1)...(19): siRNA sense strand
aaagggugauacuggagaa

SEQ ID NO: 151405 - RNA, 19 nt, Homo sapiens
  misc_RNA (1)...(19): siRNA sense strand
gaaaagauggugacaaagg

SEQ ID NO: 151406 - RNA, 19 nt, Homo sapiens
  misc_RNA (1)...(19): siRNA sense strand
cacaaugcccuuccuguuc

SEQ ID NO: 151407 - RNA, 19 nt, Homo sapiens
  misc_RNA (1)...(19): siRNA sense strand
caagcucaaguucaagaaa

SEQ ID NO: 151408 - RNA, 19 nt, Homo sapiens
  misc_RNA (1)...(19): siRNA sense strand
ggaccaaaauucuuuacca

SEQ ID NO: 151409 - RNA, 19 nt, Homo sapiens
  misc_RNA (1)...(19): siRNA sense strand
ccaaggagagaaaggacaa

SEQ ID NO: 151410 - RNA, 19 nt, Homo sapiens
  misc_RNA (1)...(19): siRNA sense strand
ccucaucugugauauagac

SEQ ID NO: 151411 - RNA, 19 nt, Homo sapiens
  misc_RNA (1)...(19): siRNA sense strand
ccagggcagccaggauuua

SEQ ID NO: 151412 - RNA, 19 nt, Homo sapiens
  misc_RNA (1)...(19): siRNA sense strand
aaauggaauuguggaaugu

SEQ ID NO: 151413 - RNA, 19 nt, Homo sapiens
  misc_RNA (1)...(19): siRNA sense strand
cagcaugaagggccagaaa

SEQ ID NO: 151414 - RNA, 19 nt, Homo sapiens
  misc_RNA (1)...(19): siRNA sense strand
ggaaucacaggcucuaagg

SEQ ID NO: 151415 - RNA, 19 nt, Homo sapiens
  misc_RNA (1)...(19): siRNA sense strand
gccaggcccucaagguaca

SEQ ID NO: 151416 - RNA, 19 nt, Homo sapiens
  misc_RNA (1)...(19): siRNA sense strand
uaaaggugacaaaggaaau

SEQ ID NO: 151417 - RNA, 19 nt, Homo sapiens
  misc_RNA (1)...(19): siRNA sense strand
gccaggcagugauggaauc

SEQ ID NO: 151418 - RNA, 19 nt, Homo sapiens
  misc_RNA (1)...(19): siRNA sense strand
gggcaggccugguguguuu

SEQ ID NO: 151419 - RNA, 19 nt, Homo sapiens
  misc_RNA (1)...(19): siRNA sense strand
gcgaugggcucgauggauu

SEQ ID NO: 151420 - RNA, 19 nt, Homo sapiens
  misc_RNA (1)...(19): siRNA sense strand
uaaaggaauugauggaaug

SEQ ID NO: 151421 - RNA, 19 nt, Homo sapiens
  misc_RNA (1)...(19): siRNA sense strand
cgacgaagcuaucaaaggu

SEQ ID NO: 151422 - RNA, 19 nt, Homo sapiens
  misc_RNA (1)...(19): siRNA sense strand
caagaggcguuucuggauu

SEQ ID NO: 151423 - RNA, 19 nt, Homo sapiens
  misc_RNA (1)...(19): siRNA sense strand
uaagaggcauuuccuugaa

SEQ ID NO: 151424 - RNA, 19 nt, Homo sapiens
  misc_RNA (1)...(19): siRNA sense strand
gaaugcagauguacagaag

SEQ ID NO: 151425 - RNA, 19 nt, Homo sapiens
  misc_RNA (1)...(19): siRNA sense strand
cgaaggcgguggccaauca

SEQ ID NO: 151426 - RNA, 19 nt, Homo sapiens
  misc_RNA (1)...(19): siRNA sense strand
ggugaugucugcuacuaug

SEQ ID NO: 151427 - RNA, 19 nt, Homo sapiens
  misc_RNA (1)...(19): siRNA sense strand
caacagaggacuugguuuc

SEQ ID NO: 151428 - RNA, 19 nt, Homo sapiens
  misc_RNA (1)...(19): siRNA sense strand
uauuuggccugaaagguua

SEQ ID NO: 151429 - RNA, 19 nt, Homo sapiens
  misc_RNA (1)...(19): siRNA sense strand
caaaggcgaggcuggauuu

SEQ ID NO: 151430 - RNA, 19 nt, Homo sapiens
  misc_RNA (1)...(19): siRNA sense strand
gaagggagaagaaggaauc

SEQ ID NO: 151431 - RNA, 19 nt, Homo sapiens
  misc_RNA (1)...(19): siRNA sense strand
gagcaaggccauccaggaa

SEQ ID NO: 151432 - RNA, 19 nt, Homo sapiens
  misc_RNA (1)...(19): siRNA sense strand
ccugauggcuuccuguuug

SEQ ID NO: 151433 - RNA, 19 nt, Homo sapiens
  misc_RNA (1)...(19): siRNA sense strand
gcuccgggcuuaccagguu

SEQ ID NO: 151434 - RNA, 19 nt, Homo sapiens
  misc_RNA (1)...(19): siRNA sense strand
ccaacgggauuccaucaga

SEQ ID NO: 151435 - RNA, 19 nt, Homo sapiens
  misc_RNA (1)...(19): siRNA sense strand
aggaagcccuggauuuaaa

SEQ ID NO: 151436 - RNA, 19 nt, Homo sapiens
  misc_RNA (1)...(19): siRNA sense strand
ccagaacaaucacaaccaa

SEQ ID NO: 151437 - RNA, 19 nt, Homo sapiens
  misc_RNA (1)...(19): siRNA sense strand
gaaggucugccuggugaua

SEQ ID NO: 151438 - RNA, 19 nt, Homo sapiens
  misc_RNA (1)...(19): siRNA sense strand
gcaagaggcguuucuggau

SEQ ID NO: 151439 - RNA, 19 nt, Homo sapiens
  misc_RNA (1)...(19): siRNA sense strand
ccaaggcccuccuggacuu

SEQ ID NO: 151440 - RNA, 19 nt, Homo sapiens
  misc_RNA (1)...(19): siRNA sense strand
caaugggccaccaggauua

SEQ ID NO: 151441 - RNA, 19 nt, Homo sapiens
  misc_RNA (1)...(19): siRNA sense strand
gaagauugccguccaacca

SEQ ID NO: 151442 - RNA, 19 nt, Homo sapiens
  misc_RNA (1)...(19): siRNA sense strand
caagggagacccaggauuc

SEQ ID NO: 151443 - RNA, 19 nt, Homo sapiens
  misc_RNA (1)...(19): siRNA sense strand
aagaggagcgcgacagaua

SEQ ID NO: 151444 - RNA, 19 nt, Homo sapiens
  misc_RNA (1)...(19): siRNA sense strand
caccugggauggaugguuu

SEQ ID NO: 151445 - RNA, 19 nt, Homo sapiens
  misc_RNA (1)...(19): siRNA sense strand
cuuaugcacugccuaaaga

SEQ ID NO: 151446 - RNA, 19 nt, Homo sapiens
  misc_RNA (1)...(19): siRNA sense strand
gcaccaugcccuuccugua

SEQ ID NO: 151447 - RNA, 19 nt, Homo sapiens
  misc_RNA (1)...(19): siRNA sense strand
uaccaggucugaagggauu

SEQ ID NO: 151448 - RNA, 19 nt, Homo sapiens
  misc_RNA (1)...(19): siRNA sense strand
ggaaugcagauguacagaa

SEQ ID NO: 151449 - RNA, 19 nt, Homo sapiens
  misc_RNA (1)...(19): siRNA sense strand
acagaggacuugguuucua

SEQ ID NO: 151450 - RNA, 19 nt, Homo sapiens
  misc_RNA (1)...(19): siRNA sense strand
ccaccaggauuacaaggau

SEQ ID NO: 151451 - RNA, 19 nt, Homo sapiens
  misc_RNA (1)...(19): siRNA sense strand
gcaaaggcgaggcuggauu

SEQ ID NO: 151452 - RNA, 19 nt, Homo sapiens
  misc_RNA (1)...(19): siRNA sense strand
ggauuuaaaggaauugaug

SEQ ID NO: 151453 - RNA, 19 nt, Homo sapiens
  misc_RNA (1)...(19): siRNA sense strand
gaaaggagcaaaaggaaga

SEQ ID NO: 151454 - RNA, 19 nt, Homo sapiens
  misc_RNA (1)...(19): siRNA sense strand
gggagaagaaggaaucaug

SEQ ID NO: 151455 - RNA, 19 nt, Homo sapiens
  misc_RNA (1)...(19): siRNA sense strand
gcagcugucuagaggacuu

SEQ ID NO: 151456 - RNA, 19 nt, Homo sapiens
  misc_RNA (1)...(19): siRNA sense strand
gaaggaaucaugggcuuuc

SEQ ID NO: 151457 - RNA, 19 nt, Homo sapiens
  misc_RNA (1)...(19): siRNA sense strand
ccagccagguugcauagga

SEQ ID NO: 151458 - RNA, 19 nt, Homo sapiens
  misc_RNA (1)...(19): siRNA sense strand
gaauaagaggcauuuccuu

SEQ ID NO: 151459 - RNA, 19 nt, Homo sapiens
  misc_RNA (1)...(19): siRNA sense strand
gagaucaagcccuacauca

SEQ ID NO: 151460 - RNA, 19 nt, Homo sapiens
  misc_RNA (1)...(19): siRNA sense strand
ggagagaagggaacagaag

SEQ ID NO: 151461 - RNA, 19 nt, Homo sapiens
  misc_RNA (1)...(19): siRNA sense strand
gggcaccacuggaauacca

SEQ ID NO: 151462 - RNA, 19 nt, Homo sapiens
  misc_RNA (1)...(19): siRNA sense strand
aaaggagauuccagaacaa

SEQ ID NO: 151463 - RNA, 19 nt, Homo sapiens
  misc_RNA (1)...(19): siRNA sense strand
gauauuccuuccucaugca

SEQ ID NO: 151464 - RNA, 19 nt, Homo sapiens
  misc_RNA (1)...(19): siRNA sense strand
ggacuuaaaggacaaacag

SEQ ID NO: 151465 - RNA, 19 nt, Homo sapiens
  misc_RNA (1)...(19): siRNA sense strand
gaacaaucacaaccaaagg

SEQ ID NO: 151466 - RNA, 19 nt, Homo sapiens
  misc_RNA (1)...(19): siRNA sense strand
aaaaggagauuccagaaca

SEQ ID NO: 151467 - RNA, 19 nt, Homo sapiens
  misc_RNA (1)...(19): siRNA sense strand
ggagaugaaggacccauag

SEQ ID NO: 151468 - RNA, 19 nt, Homo sapiens
  misc_RNA (1)...(19): siRNA sense strand
ccagaagauugccguccaa

SEQ ID NO: 151469 - RNA, 19 nt, Homo sapiens
  misc_RNA (1)...(19): siRNA sense strand
caaaagguauccaaggaau

SEQ ID NO: 151470 - RNA, 19 nt, Homo sapiens
  misc_RNA (1)...(19): siRNA sense strand
aaggauaccugggcgcaaa

SEQ ID NO: 151471 - RNA, 19 nt, Homo sapiens
  misc_RNA (1)...(19): siRNA sense strand
uaaagaggagcgcgacaga

SEQ ID NO: 151472 - RNA, 19 nt, Homo sapiens
  misc_RNA (1)...(19): siRNA sense strand
aggaagagguggugugucu

SEQ ID NO: 151473 - RNA, 19 nt, Homo sapiens
  misc_RNA (1)...(19): siRNA sense strand
caaagggagacccggguuu

SEQ ID NO: 151474 - RNA, 19 nt, Homo sapiens
  misc_RNA (1)...(19): siRNA sense strand
cagaggacuugguuucuac

SEQ ID NO: 151475 - RNA, 19 nt, Homo sapiens
  misc_RNA (1)...(19): siRNA sense strand
ccacaggagucaccuucca

SEQ ID NO: 151476 - RNA, 19 nt, Homo sapiens
  misc_RNA (1)...(19): siRNA sense strand
agggauauuuggccugaaa

SEQ ID NO: 151477 - RNA, 19 nt, Homo sapiens
  misc_RNA (1)...(19): siRNA sense strand
ggucugaagggauucuuug

SEQ ID NO: 151478 - RNA, 19 nt, Homo sapiens
  misc_RNA (1)...(19): siRNA sense strand
uaaaggagagaaaggagau

SEQ ID NO: 151479 - RNA, 19 nt, Homo sapiens
  misc_RNA (1)...(19): siRNA sense strand
ggaguuuguggaucggaua

SEQ ID NO: 151480 - RNA, 19 nt, Homo sapiens
  misc_RNA (1)...(19): siRNA sense strand
acagaaaggagaccaagga

SEQ ID NO: 151481 - RNA, 19 nt, Homo sapiens
  misc_RNA (1)...(19): siRNA sense strand
ggagaugaagggccuaugg

SEQ ID NO: 151482 - RNA, 19 nt, Homo sapiens
  misc_RNA (1)...(19): siRNA sense strand
uaggagggcccaagggauu

SEQ ID NO: 151483 - RNA, 19 nt, Homo sapiens
  misc_RNA (1)...(19): siRNA sense strand
uggcgggugugaagaaguu

SEQ ID NO: 151484 - RNA, 19 nt, Homo sapiens
  misc_RNA (1)...(19): siRNA sense strand
gaugugccguguggaggaa

SEQ ID NO: 151485 - RNA, 19 nt, Homo sapiens
  misc_RNA (1)...(19): siRNA sense strand
cccagguuauccaggaaua

SEQ ID NO: 151486 - RNA, 19 nt, Homo sapiens
  misc_RNA (1)...(19): siRNA sense strand
ggaacgacaaguccuacug

SEQ ID NO: 151487 - RNA, 19 nt, Homo sapiens
  misc_RNA (1)...(19): siRNA sense strand
ccagugcuacccugagaaa

SEQ ID NO: 151488 - RNA, 19 nt, Homo sapiens
  misc_RNA (1)...(19): siRNA sense strand
aagaggcguuucuggauuc

SEQ ID NO: 151489 - RNA, 19 nt, Homo sapiens
  misc_RNA (1)...(19): siRNA sense strand
ucccagggcugucaggaau

SEQ ID NO: 151490 - RNA, 19 nt, Homo sapiens
  misc_RNA (1)...(19): siRNA sense strand
gcaaggcaacagaggacuu

SEQ ID NO: 151491 - RNA, 19 nt, Homo sapiens
  misc_RNA (1)...(19): siRNA sense strand
gggaacagaaggugacauc

SEQ ID NO: 151492 - RNA, 19 nt, Homo sapiens
  misc_RNA (1)...(19): siRNA sense strand
ggagagcaggccuguaugg

SEQ ID NO: 151493 - RNA, 19 nt, Homo sapiens
  misc_RNA (1)...(19): siRNA sense strand
cggaauacccggucugaag

SEQ ID NO: 151494 - RNA, 19 nt, Homo sapiens
  misc_RNA (1)...(19): siRNA sense strand
aaaggucucucuggugaca

SEQ ID NO: 151495 - RNA, 19 nt, Homo sapiens
  misc_RNA (1)...(19): siRNA sense strand
ccaggaauaagaggcauuu

SEQ ID NO: 151496 - RNA, 19 nt, Homo sapiens
  misc_RNA (1)...(19): siRNA sense strand
gcaacagaggacuugguuu

SEQ ID NO: 151497 - RNA, 19 nt, Homo sapiens
  misc_RNA (1)...(19): siRNA sense strand
acaaugggccaccaggauu

SEQ ID NO: 151498 - RNA, 19 nt, Homo sapiens
  misc_RNA (1)...(19): siRNA sense strand
auaagaggcauuuccuuga

SEQ ID NO: 151499 - RNA, 19 nt, Homo sapiens
  misc_RNA (1)...(19): siRNA sense strand
gaggagcgcgacagauauc

SEQ ID NO: 151500 - RNA, 19 nt, Homo sapiens
  misc_RNA (1)...(19): siRNA sense strand
gggagaugaaggacccaua

SEQ ID NO: 151501 - RNA, 19 nt, Homo sapiens
  misc_RNA (1)...(19): siRNA sense strand
accaagggcuuuccaggau

SEQ ID NO: 151502 - RNA, 19 nt, Homo sapiens
  misc_RNA (1)...(19): siRNA sense strand
cggggacacuauaaauuua

SEQ ID NO: 151503 - RNA, 19 nt, Homo sapiens
  misc_RNA (1)...(19): siRNA sense strand
uaaaggagacaagggugaa

SEQ ID NO: 151504 - RNA, 19 nt, Homo sapiens
  misc_RNA (1)...(19): siRNA sense strand
ggagagaaaggagaugaag

SEQ ID NO: 151505 - RNA, 19 nt, Homo sapiens
  misc_RNA (1)...(19): siRNA sense strand
ggcaacagaggacuugguu

SEQ ID NO: 151506 - RNA, 19 nt, Homo sapiens
  misc_RNA (1)...(19): siRNA sense strand
gggcuuuccuggacuuagg

SEQ ID NO: 151507 - RNA, 19 nt, Homo sapiens
  misc_RNA (1)...(19): siRNA sense strand
gacccagguuauccaggaa

SEQ ID NO: 151508 - RNA, 19 nt, Homo sapiens
  misc_RNA (1)...(19): siRNA sense strand
ccacccagaucaguacaag

SEQ ID NO: 151509 - RNA, 19 nt, Homo sapiens
  misc_RNA (1)...(19): siRNA sense strand
guuuguggaucggauauuc

SEQ ID NO: 151510 - RNA, 19 nt, Homo sapiens
  misc_RNA (1)...(19): siRNA sense strand
caccaggauuacaaggauu

SEQ ID NO: 151511 - RNA, 19 nt, Homo sapiens
  misc_RNA (1)...(19): siRNA sense strand
caaggaagagguggugugu

SEQ ID NO: 151512 - RNA, 19 nt, Homo sapiens
  misc_RNA (1)...(19): siRNA sense strand
cuauggggcugaaaggaua

SEQ ID NO: 151513 - RNA, 19 nt, Homo sapiens
  misc_RNA (1)...(19): siRNA sense strand
cauccagccagguugcaua

SEQ ID NO: 151514 - RNA, 19 nt, Homo sapiens
  misc_RNA (1)...(19): siRNA sense strand
ugccaggugugcaugaaga

SEQ ID NO: 151515 - RNA, 19 nt, Homo sapiens
  misc_RNA (1)...(19): siRNA sense strand
ccaucgcgguccacaguca

SEQ ID NO: 151516 - RNA, 19 nt, Homo sapiens
  misc_RNA (1)...(19): siRNA sense strand
agacauuaaaggagagaaa

SEQ ID NO: 151517 - RNA, 19 nt, Homo sapiens
  misc_RNA (1)...(19): siRNA sense strand
gcccuggauuuaaaggaau

SEQ ID NO: 151518 - RNA, 19 nt, Homo sapiens
  misc_RNA (1)...(19): siRNA sense strand
ucaaggagcuguuggauuu

SEQ ID NO: 151519 - RNA, 19 nt, Homo sapiens
  misc_RNA (1)...(19): siRNA sense strand
gaaagugguucacaaggua

SEQ ID NO: 151520 - RNA, 19 nt, Homo sapiens
  misc_RNA (1)...(19): siRNA sense strand
gcaaggcccuccaggauuu

SEQ ID NO: 151521 - RNA, 19 nt, Homo sapiens
  misc_RNA (1)...(19): siRNA sense strand
ggagagaagucuuauggaa

SEQ ID NO: 151522 - RNA, 19 nt, Homo sapiens
  misc_RNA (1)...(19): siRNA sense strand
aggaagagauggacuaaua

SEQ ID NO: 151523 - RNA, 19 nt, Homo sapiens
  misc_RNA (1)...(19): siRNA sense strand
gaacaaggccuacaaggau

SEQ ID NO: 151524 - RNA, 19 nt, Homo sapiens
  misc_RNA (1)...(19): siRNA sense strand
gaaagguccuccuggauca

SEQ ID NO: 151525 - RNA, 19 nt, Homo sapiens
  misc_RNA (1)...(19): siRNA sense strand
gggcuuccgugguguaaua

SEQ ID NO: 151526 - RNA, 19 nt, Homo sapiens
  misc_RNA (1)...(19): siRNA sense strand
cuacaaggcuccaaagguu

SEQ ID NO: 151527 - RNA, 19 nt, Homo sapiens
  misc_RNA (1)...(19): siRNA sense strand
gccaagaggugacaaagga

SEQ ID NO: 151528 - RNA, 19 nt, Homo sapiens
  misc_RNA (1)...(19): siRNA sense strand
ggacggaguaccagguuua

SEQ ID NO: 151529 - RNA, 19 nt, Homo sapiens
  misc_RNA (1)...(19): siRNA sense strand
gcacaaaggauuucuugga

SEQ ID NO: 151530 - RNA, 19 nt, Homo sapiens
  misc_RNA (1)...(19): siRNA sense strand
ggacuaauaggcaauauag

SEQ ID NO: 151531 - RNA, 19 nt, Homo sapiens
  misc_RNA (1)...(19): siRNA sense strand
ccagguaguuucaaaggaa

SEQ ID NO: 151532 - RNA, 19 nt, Homo sapiens
  misc_RNA (1)...(19): siRNA sense strand
gaaucacccugcccuguau

SEQ ID NO: 151533 - RNA, 19 nt, Homo sapiens
  misc_RNA (1)...(19): siRNA sense strand
ggaaucacccugcccugua

SEQ ID NO: 151534 - RNA, 19 nt, Homo sapiens
  misc_RNA (1)...(19): siRNA sense strand
uaaaggcaaggauggauua

SEQ ID NO: 151535 - RNA, 19 nt, Homo sapiens
  misc_RNA (1)...(19): siRNA sense strand
uaacagggcacaaaggauu

SEQ ID NO: 151536 - RNA, 19 nt, Homo sapiens
  misc_RNA (1)...(19): siRNA sense strand
gagagaagucuuauggaaa

SEQ ID NO: 151537 - RNA, 19 nt, Homo sapiens
  misc_RNA (1)...(19): siRNA sense strand
ggaacaaggccuacaagga

SEQ ID NO: 151538 - RNA, 19 nt, Homo sapiens
  misc_RNA (1)...(19): siRNA sense strand
gauuggcaguccaggcuua

SEQ ID NO: 151539 - RNA, 19 nt, Homo sapiens
  misc_RNA (1)...(19): siRNA sense strand
uaagggagaccaaggaauu

SEQ ID NO: 151540 - RNA, 19 nt, Homo sapiens
  misc_RNA (1)...(19): siRNA sense strand
cggaauaccuaguccaaga

SEQ ID NO: 151541 - RNA, 19 nt, Homo sapiens
  misc_RNA (1)...(19): siRNA sense strand
gaaccaauucucaguacaa

SEQ ID NO: 151542 - RNA, 19 nt, Homo sapiens
  misc_RNA (1)...(19): siRNA sense strand
caaaggaguuaguggaaag

SEQ ID NO: 151543 - RNA, 19 nt, Homo sapiens
  misc_RNA (1)...(19): siRNA sense strand
acaaggagcacccggauuu

SEQ ID NO: 151544 - RNA, 19 nt, Homo sapiens
  misc_RNA (1)...(19): siRNA sense strand
ggaaagaaaggaacaagag

SEQ ID NO: 151545 - RNA, 19 nt, Homo sapiens
  misc_RNA (1)...(19): siRNA sense strand
ccuccuggaucaauuguaa

SEQ ID NO: 151546 - RNA, 19 nt, Homo sapiens
  misc_RNA (1)...(19): siRNA sense strand
caugggaguuccuggcuuu

SEQ ID NO: 151547 - RNA, 19 nt, Homo sapiens
  misc_RNA (1)...(19): siRNA sense strand
ccaaaggcuucccuggauu

SEQ ID NO: 151548 - RNA, 19 nt, Homo sapiens
  misc_RNA (1)...(19): siRNA sense strand
guccagaauuugagacuga

SEQ ID NO: 151549 - RNA, 19 nt, Homo sapiens
  misc_RNA (1)...(19): siRNA sense strand
gaaaggauccaagggugaa

SEQ ID NO: 151550 - RNA, 19 nt, Homo sapiens
  misc_RNA (1)...(19): siRNA sense strand
ggaguugccugugucugaa

SEQ ID NO: 151551 - RNA, 19 nt, Homo sapiens
  misc_RNA (1)...(19): siRNA sense strand
ccucugggaucacagguuu

SEQ ID NO: 151552 - RNA, 19 nt, Homo sapiens
  misc_RNA (1)...(19): siRNA sense strand
gcugugaucucagguaauc

SEQ ID NO: 151553 - RNA, 19 nt, Homo sapiens
  misc_RNA (1)...(19): siRNA sense strand
gaacaagaggcaagaaagg

SEQ ID NO: 151554 - RNA, 19 nt, Homo sapiens
  misc_RNA (1)...(19): siRNA sense strand
gcaccaugcccuucaucua

SEQ ID NO: 151555 - RNA, 19 nt, Homo sapiens
  misc_RNA (1)...(19): siRNA sense strand
agagaagucuuauggaaag

SEQ ID NO: 151556 - RNA, 19 nt, Homo sapiens
  misc_RNA (1)...(19): siRNA sense strand
ucaaaggaguuaguggaaa

SEQ ID NO: 151557 - RNA, 19 nt, Homo sapiens
  misc_RNA (1)...(19): siRNA sense strand
gaaggggucuguuggauuc

SEQ ID NO: 151558 - RNA, 19 nt, Homo sapiens
  misc_RNA (1)...(19): siRNA sense strand
caaaggcuucccuggauuu

SEQ ID NO: 151559 - RNA, 19 nt, Homo sapiens
  misc_RNA (1)...(19): siRNA sense strand
cuggauggcuguaauggaa

SEQ ID NO: 151560 - RNA, 19 nt, Homo sapiens
  misc_RNA (1)...(19): siRNA sense strand
ugcagaagcuguccagguu

SEQ ID NO: 151561 - RNA, 19 nt, Homo sapiens
  misc_RNA (1)...(19): siRNA sense strand
gcaauugggccucuaggau

SEQ ID NO: 151562 - RNA, 19 nt, Homo sapiens
  misc_RNA (1)...(19): siRNA sense strand
cguccaaugucaaaccuuu

SEQ ID NO: 151563 - RNA, 19 nt, Homo sapiens
  misc_RNA (1)...(19): siRNA sense strand
uaaaggagccagaggagau

SEQ ID NO: 151564 - RNA, 19 nt, Homo sapiens
  misc_RNA (1)...(19): siRNA sense strand
gugcugugaucucagguaa

SEQ ID NO: 151565 - RNA, 19 nt, Homo sapiens
  misc_RNA (1)...(19): siRNA sense strand
gaucaauuguaaagaaagg

SEQ ID NO: 151566 - RNA, 19 nt, Homo sapiens
  misc_RNA (1)...(19): siRNA sense strand
aaaaggauauccaggaauu

SEQ ID NO: 151567 - RNA, 19 nt, Homo sapiens
  misc_RNA (1)...(19): siRNA sense strand
caagacguccaaugucaaa

SEQ ID NO: 151568 - RNA, 19 nt, Homo sapiens
  misc_RNA (1)...(19): siRNA sense strand
ggaaauccaggccuaguag

SEQ ID NO: 151569 - RNA, 19 nt, Homo sapiens
  misc_RNA (1)...(19): siRNA sense strand
ugacaucuuuggugcugaa

SEQ ID NO: 151570 - RNA, 19 nt, Homo sapiens
  misc_RNA (1)...(19): siRNA sense strand
gaggagaggcagcaguuug

SEQ ID NO: 151571 - RNA, 19 nt, Homo sapiens
  misc_RNA (1)...(19): siRNA sense strand
gcaaugauaaaucuuacug

SEQ ID NO: 151572 - RNA, 19 nt, Homo sapiens
  misc_RNA (1)...(19): siRNA sense strand
ucaacgaggugugccacua

SEQ ID NO: 151573 - RNA, 19 nt, Homo sapiens
  misc_RNA (1)...(19): siRNA sense strand
acaaggcuccaaagguuua

SEQ ID NO: 151574 - RNA, 19 nt, Homo sapiens
  misc_RNA (1)...(19): siRNA sense strand
gccagacaguugaaauuuc

SEQ ID NO: 151575 - RNA, 19 nt, Homo sapiens
  misc_RNA (1)...(19): siRNA sense strand
ggagaaagugguucacaag

SEQ ID NO: 151576 - RNA, 19 nt, Homo sapiens
  misc_RNA (1)...(19): siRNA sense strand
gggaguugccugugucuga

SEQ ID NO: 151577 - RNA, 19 nt, Homo sapiens
  misc_RNA (1)...(19): siRNA sense strand
ggaacaagaggcaagaaag

SEQ ID NO: 151578 - RNA, 19 nt, Homo sapiens
  misc_RNA (1)...(19): siRNA sense strand
cuggaucaauuguaaagaa

SEQ ID NO: 151579 - RNA, 19 nt, Homo sapiens
  misc_RNA (1)...(19): siRNA sense strand
ccuagggccucagggauuu

SEQ ID NO: 151580 - RNA, 19 nt, Homo sapiens
  misc_RNA (1)...(19): siRNA sense strand
gagaggagaaccaggacuu

SEQ ID NO: 151581 - RNA, 19 nt, Homo sapiens
  misc_RNA (1)...(19): siRNA sense strand
ggccagacaguugaaauuu

SEQ ID NO: 151582 - RNA, 19 nt, Homo sapiens
  misc_RNA (1)...(19): siRNA sense strand
ggacgaccuggaccaauug

SEQ ID NO: 151583 - RNA, 19 nt, Homo sapiens
  misc_RNA (1)...(19): siRNA sense strand
ggcauuaucaaaggaguua

SEQ ID NO: 151584 - RNA, 19 nt, Homo sapiens
  misc_RNA (1)...(19): siRNA sense strand
aaaccuaggccucaaagga

SEQ ID NO: 151585 - RNA, 19 nt, Homo sapiens
  misc_RNA (1)...(19): siRNA sense strand
gaacaagguccaaaaggaa

SEQ ID NO: 151586 - RNA, 19 nt, Homo sapiens
  misc_RNA (1)...(19): siRNA sense strand
cugaaacucuacacaacaa

SEQ ID NO: 151587 - RNA, 19 nt, Homo sapiens
  misc_RNA (1)...(19): siRNA sense strand
gggaguuccuggcuuucuu

SEQ ID NO: 151588 - RNA, 19 nt, Homo sapiens
  misc_RNA (1)...(19): siRNA sense strand
uggaauuccuggaccuaaa

SEQ ID NO: 151589 - RNA, 19 nt, Homo sapiens
  misc_RNA (1)...(19): siRNA sense strand
ggaagagauggacuaauag

SEQ ID NO: 151590 - RNA, 19 nt, Homo sapiens
  misc_RNA (1)...(19): siRNA sense strand
agaaagugguucacaaggu

SEQ ID NO: 151591 - RNA, 19 nt, Homo sapiens
  misc_RNA (1)...(19): siRNA sense strand
gggcacaaaggauuucuug

SEQ ID NO: 151592 - RNA, 19 nt, Homo sapiens
  misc_RNA (1)...(19): siRNA sense strand
gccagggaguccaggauug

SEQ ID NO: 151593 - RNA, 19 nt, Homo sapiens
  misc_RNA (1)...(19): siRNA sense strand
gggaaccaauucucaguac

SEQ ID NO: 151594 - RNA, 19 nt, Homo sapiens
  misc_RNA (1)...(19): siRNA sense strand
uggaaucacuggcccacaa

SEQ ID NO: 151595 - RNA, 19 nt, Homo sapiens
  misc_RNA (1)...(19): siRNA sense strand
gacugaaacucuacacaac

SEQ ID NO: 151596 - RNA, 19 nt, Homo sapiens
  misc_RNA (1)...(19): siRNA sense strand
ccacuacuuugcaaacaag

SEQ ID NO: 151597 - RNA, 19 nt, Homo sapiens
  misc_RNA (1)...(19): siRNA sense strand
gaccaaggaauuccagguu

SEQ ID NO: 151598 - RNA, 19 nt, Homo sapiens
  misc_RNA (1)...(19): siRNA sense strand
cccaaaggcuucccuggau

SEQ ID NO: 151599 - RNA, 19 nt, Homo sapiens
  misc_RNA (1)...(19): siRNA sense strand
ggguuuaccuggccugaag

SEQ ID NO: 151600 - RNA, 19 nt, Homo sapiens
  misc_RNA (1)...(19): siRNA sense strand
cagccugggucaaguggaa

SEQ ID NO: 151601 - RNA, 19 nt, Homo sapiens
  misc_RNA (1)...(19): siRNA sense strand
ggaaccaauucucaguaca

SEQ ID NO: 151602 - RNA, 19 nt, Homo sapiens
  misc_RNA (1)...(19): siRNA sense strand
cuggagagcuggaauucau

SEQ ID NO: 151603 - RNA, 19 nt, Homo sapiens
  misc_RNA (1)...(19): siRNA sense strand
gggacagccuggcgaaucu

SEQ ID NO: 151604 - RNA, 19 nt, Homo sapiens
  misc_RNA (1)...(19): siRNA sense strand
aggacgaccuggaccaauu

SEQ ID NO: 151605 - RNA, 19 nt, Homo sapiens
  misc_RNA (1)...(19): siRNA sense strand
cagcgggagagaagucuua

SEQ ID NO: 151606 - RNA, 19 nt, Homo sapiens
  misc_RNA (1)...(19): siRNA sense strand
cggauuuccuggagcugua

SEQ ID NO: 151607 - RNA, 19 nt, Homo sapiens
  misc_RNA (1)...(19): siRNA sense strand
gcuccacacucgagucagu

SEQ ID NO: 151608 - RNA, 19 nt, Homo sapiens
  misc_RNA (1)...(19): siRNA sense strand
ggccacuccuuucaucgaa

SEQ ID NO: 151609 - RNA, 19 nt, Homo sapiens
  misc_RNA (1)...(19): siRNA sense strand
gaagagauggacuaauagg

SEQ ID NO: 151610 - RNA, 19 nt, Homo sapiens
  misc_RNA (1)...(19): siRNA sense strand
uccaagacguccaauguca

SEQ ID NO: 151611 - RNA, 19 nt, Homo sapiens
  misc_RNA (1)...(19): siRNA sense strand
gggagccacuggugacauc

SEQ ID NO: 151612 - RNA, 19 nt, Homo sapiens
  misc_RNA (1)...(19): siRNA sense strand
agugggagcugucaguguu

SEQ ID NO: 151613 - RNA, 19 nt, Homo sapiens
  misc_RNA (1)...(19): siRNA sense strand
gccacuacuuugcaaacaa

SEQ ID NO: 151614 - RNA, 19 nt, Homo sapiens
  misc_RNA (1)...(19): siRNA sense strand
ccacuccuuucaucgaaug

SEQ ID NO: 151615 - RNA, 19 nt, Homo sapiens
  misc_RNA (1)...(19): siRNA sense strand
gcgcaaugauaaaucuuac

SEQ ID NO: 151616 - RNA, 19 nt, Homo sapiens
  misc_RNA (1)...(19): siRNA sense strand
ggcgcaaugauaaaucuua

SEQ ID NO: 151617 - RNA, 19 nt, Homo sapiens
  misc_RNA (1)...(19): siRNA sense strand
caacgaggugugccacuau

SEQ ID NO: 151618 - RNA, 19 nt, Homo sapiens
  misc_RNA (1)...(19): siRNA sense strand
ucaaggagcuguuggauuu

SEQ ID NO: 151619 - RNA, 19 nt, Homo sapiens
  misc_RNA (1)...(19): siRNA sense strand
gaaagugguucacaaggua

SEQ ID NO: 151620 - RNA, 19 nt, Homo sapiens
  misc_RNA (1)...(19): siRNA sense strand
gcaaggcccuccaggauuu

SEQ ID NO: 151621 - RNA, 19 nt, Homo sapiens
  misc_RNA (1)...(19): siRNA sense strand
ggagagaagucuuauggaa

SEQ ID NO: 151622 - RNA, 19 nt, Homo sapiens
  misc_RNA (1)...(19): siRNA sense strand
aggaagagauggacuaaua

SEQ ID NO: 151623 - RNA, 19 nt, Homo sapiens
  misc_RNA (1)...(19): siRNA sense strand
gaacaaggccuacaaggau

SEQ ID NO: 151624 - RNA, 19 nt, Homo sapiens
  misc_RNA (1)...(19): siRNA sense strand
gaaagguccuccuggauca

SEQ ID NO: 151625 - RNA, 19 nt, Homo sapiens
  misc_RNA (1)...(19): siRNA sense strand
gggcuuccgugguguaaua

SEQ ID NO: 151626 - RNA, 19 nt, Homo sapiens
  misc_RNA (1)...(19): siRNA sense strand
cuacaaggcuccaaagguu

SEQ ID NO: 151627 - RNA, 19 nt, Homo sapiens
  misc_RNA (1)...(19): siRNA sense strand
gccaagaggugacaaagga

SEQ ID NO: 151628 - RNA, 19 nt, Homo sapiens
  misc_RNA (1)...(19): siRNA sense strand
ggacggaguaccagguuua

SEQ ID NO: 151629 - RNA, 19 nt, Homo sapiens
  misc_RNA (1)...(19): siRNA sense strand
gcacaaaggauuucuugga

SEQ ID NO: 151630 - RNA, 19 nt, Homo sapiens
  misc_RNA (1)...(19): siRNA sense strand
ggacuaauaggcaauauag

SEQ ID NO: 151631 - RNA, 19 nt, Homo sapiens
  misc_RNA (1)...(19): siRNA sense strand
ccagguaguuucaaaggaa

SEQ ID NO: 151632 - RNA, 19 nt, Homo sapiens
  misc_RNA (1)...(19): siRNA sense strand
gaaucacccugcccuguau

SEQ ID NO: 151633 - RNA, 19 nt, Homo sapiens
  misc_RNA (1)...(19): siRNA sense strand
ggaaucacccugcccugua

SEQ ID NO: 151634 - RNA, 19 nt, Homo sapiens
  misc_RNA (1)...(19): siRNA sense strand
uaaaggcaaggauggauua

SEQ ID NO: 151635 - RNA, 19 nt, Homo sapiens
  misc_RNA (1)...(19): siRNA sense strand
uaacagggcacaaaggauu

SEQ ID NO: 151636 - RNA, 19 nt, Homo sapiens
  misc_RNA (1)...(19): siRNA sense strand
gagagaagucuuauggaaa

SEQ ID NO: 151637 - RNA, 19 nt, Homo sapiens
  misc_RNA (1)...(19): siRNA sense strand
ggaacaaggccuacaagga

SEQ ID NO: 151638 - RNA, 19 nt, Homo sapiens
  misc_RNA (1)...(19): siRNA sense strand
gauuggcaguccaggcuua

SEQ ID NO: 151639 - RNA, 19 nt, Homo sapiens
  misc_RNA (1)...(19): siRNA sense strand
uaagggagaccaaggaauu

SEQ ID NO: 151640 - RNA, 19 nt, Homo sapiens
  misc_RNA (1)...(19): siRNA sense strand
cggaauaccuaguccaaga

SEQ ID NO: 151641 - RNA, 19 nt, Homo sapiens
  misc_RNA (1)...(19): siRNA sense strand
gaaccaauucucaguacaa

SEQ ID NO: 151642 - RNA, 19 nt, Homo sapiens
  misc_RNA (1)...(19): siRNA sense strand
caaaggaguuaguggaaag

SEQ ID NO: 151643 - RNA, 19 nt, Homo sapiens
  misc_RNA (1)...(19): siRNA sense strand
acaaggagcacccggauuu

SEQ ID NO: 151644 - RNA, 19 nt, Homo sapiens
  misc_RNA (1)...(19): siRNA sense strand
ggaaagaaaggaacaagag

SEQ ID NO: 151645 - RNA, 19 nt, Homo sapiens
  misc_RNA (1)...(19): siRNA sense strand
ccuccuggaucaauuguaa

SEQ ID NO: 151646 - RNA, 19 nt, Homo sapiens
  misc_RNA (1)...(19): siRNA sense strand
caugggaguuccuggcuuu

SEQ ID NO: 151647 - RNA, 19 nt, Homo sapiens
  misc_RNA (1)...(19): siRNA sense strand
ccaaaggcuucccuggauu

SEQ ID NO: 151648 - RNA, 19 nt, Homo sapiens
  misc_RNA (1)...(19): siRNA sense strand
guccagaauuugagacuga

SEQ ID NO: 151649 - RNA, 19 nt, Homo sapiens
  misc_RNA (1)...(19): siRNA sense strand
gaaaggauccaagggugaa

SEQ ID NO: 151650 - RNA, 19 nt, Homo sapiens
  misc_RNA (1)...(19): siRNA sense strand
ggaguugccugugucugaa

SEQ ID NO: 151651 - RNA, 19 nt, Homo sapiens
  misc_RNA (1)...(19): siRNA sense strand
ccucugggaucacagguuu

SEQ ID NO: 151652 - RNA, 19 nt, Homo sapiens
  misc_RNA (1)...(19): siRNA sense strand
gcugugaucucagguaauc

SEQ ID NO: 151653 - RNA, 19 nt, Homo sapiens
  misc_RNA (1)...(19): siRNA sense strand
gaacaagaggcaagaaagg

SEQ ID NO: 151654 - RNA, 19 nt, Homo sapiens
  misc_RNA (1)...(19): siRNA sense strand
gcaccaugcccuucaucua

SEQ ID NO: 151655 - RNA, 19 nt, Homo sapiens
  misc_RNA (1)...(19): siRNA sense strand
agagaagucuuauggaaag

SEQ ID NO: 151656 - RNA, 19 nt, Homo sapiens
  misc_RNA (1)...(19): siRNA sense strand
ucaaaggaguuaguggaaa

SEQ ID NO: 151657 - RNA, 19 nt, Homo sapiens
  misc_RNA (1)...(19): siRNA sense strand
gaaggggucuguuggauuc

SEQ ID NO: 151658 - RNA, 19 nt, Homo sapiens
  misc_RNA (1)...(19): siRNA sense strand
caaaggcuucccuggauuu

SEQ ID NO: 151659 - RNA, 19 nt, Homo sapiens
  misc_RNA (1)...(19): siRNA sense strand
cuggauggcuguaauggaa

SEQ ID NO: 151660 - RNA, 19 nt, Homo sapiens
  misc_RNA (1)...(19): siRNA sense strand
ugcagaagcuguccagguu

SEQ ID NO: 151661 - RNA, 19 nt, Homo sapiens
  misc_RNA (1)...(19): siRNA sense strand
gcaauugggccucuaggau

SEQ ID NO: 151662 - RNA, 19 nt, Homo sapiens
  misc_RNA (1)...(19): siRNA sense strand
cguccaaugucaaaccuuu

SEQ ID NO: 151663 - RNA, 19 nt, Homo sapiens
  misc_RNA (1)...(19): siRNA sense strand
uaaaggagccagaggagau

SEQ ID NO: 151664 - RNA, 19 nt, Homo sapiens
  misc_RNA (1)...(19): siRNA sense strand
gugcugugaucucagguaa

SEQ ID NO: 151665 - RNA, 19 nt, Homo sapiens
  misc_RNA (1)...(19): siRNA sense strand
gaucaauuguaaagaaagg

SEQ ID NO: 151666 - RNA, 19 nt, Homo sapiens
  misc_RNA (1)...(19): siRNA sense strand
aaaaggauauccaggaauu

SEQ ID NO: 151667 - RNA, 19 nt, Homo sapiens
  misc_RNA (1)...(19): siRNA sense strand
caagacguccaaugucaaa

SEQ ID NO: 151668 - RNA, 19 nt, Homo sapiens
  misc_RNA (1)...(19): siRNA sense strand
ggaaauccaggccuaguag

SEQ ID NO: 151669 - RNA, 19 nt, Homo sapiens
  misc_RNA (1)...(19): siRNA sense strand
ugacaucuuuggugcugaa

SEQ ID NO: 151670 - RNA, 19 nt, Homo sapiens
  misc_RNA (1)...(19): siRNA sense strand
gaggagaggcagcaguuug

SEQ ID NO: 151671 - RNA, 19 nt, Homo sapiens
  misc_RNA (1)...(19): siRNA sense strand
gcaaugauaaaucuuacug

SEQ ID NO: 151672 - RNA, 19 nt, Homo sapiens
  misc_RNA (1)...(19): siRNA sense strand
ucaacgaggugugccacua

SEQ ID NO: 151673 - RNA, 19 nt, Homo sapiens
  misc_RNA (1)...(19): siRNA sense strand
acaaggcuccaaagguuua

SEQ ID NO: 151674 - RNA, 19 nt, Homo sapiens
  misc_RNA (1)...(19): siRNA sense strand
gccagacaguugaaauuuc

SEQ ID NO: 151675 - RNA, 19 nt, Homo sapiens
  misc_RNA (1)...(19): siRNA sense strand
ggagaaagugguucacaag

SEQ ID NO: 151676 - RNA, 19 nt, Homo sapiens
  misc_RNA (1)...(19): siRNA sense strand
gggaguugccugugucuga

SEQ ID NO: 151677 - RNA, 19 nt, Homo sapiens
  misc_RNA (1)...(19): siRNA sense strand
ggaacaagaggcaagaaag

SEQ ID NO: 151678 - RNA, 19 nt, Homo sapiens
  misc_RNA (1)...(19): siRNA sense strand
cuggaucaauuguaaagaa

SEQ ID NO: 151679 - RNA, 19 nt, Homo sapiens
  misc_RNA (1)...(19): siRNA sense strand
ccuagggccucagggauuu

SEQ ID NO: 151680 - RNA, 19 nt, Homo sapiens
  misc_RNA (1)...(19): siRNA sense strand
gagaggagaaccaggacuu

SEQ ID NO: 151681 - RNA, 19 nt, Homo sapiens
  misc_RNA (1)...(19): siRNA sense strand
ggccagacaguugaaauuu

SEQ ID NO: 151682 - RNA, 19 nt, Homo sapiens
  misc_RNA (1)...(19): siRNA sense strand
ggacgaccuggaccaauug

SEQ ID NO: 151683 - RNA, 19 nt, Homo sapiens
  misc_RNA (1)...(19): siRNA sense strand
ggcauuaucaaaggaguua

SEQ ID NO: 151684 - RNA, 19 nt, Homo sapiens
  misc_RNA (1)...(19): siRNA sense strand
aaaccuaggccucaaagga

SEQ ID NO: 151685 - RNA, 19 nt, Homo sapiens
  misc_RNA (1)...(19): siRNA sense strand
gaacaagguccaaaaggaa

SEQ ID NO: 151686 - RNA, 19 nt, Homo sapiens
  misc_RNA (1)...(19): siRNA sense strand
cugaaacucuacacaacaa

SEQ ID NO: 151687 - RNA, 19 nt, Homo sapiens
  misc_RNA (1)...(19): siRNA sense strand
gggaguuccuggcuuucuu

SEQ ID NO: 151688 - RNA, 19 nt, Homo sapiens
  misc_RNA (1)...(19): siRNA sense strand
uggaauuccuggaccuaaa

SEQ ID NO: 151689 - RNA, 19 nt, Homo sapiens
  misc_RNA (1)...(19): siRNA sense strand
ggaagagauggacuaauag

SEQ ID NO: 151690 - RNA, 19 nt, Homo sapiens
  misc_RNA (1)...(19): siRNA sense strand
agaaagugguucacaaggu

SEQ ID NO: 151691 - RNA, 19 nt, Homo sapiens
  misc_RNA (1)...(19): siRNA sense strand
gggcacaaaggauuucuug

SEQ ID NO: 151692 - RNA, 19 nt, Homo sapiens
  misc_RNA (1)...(19): siRNA sense strand
gccagggaguccaggauug

SEQ ID NO: 151693 - RNA, 19 nt, Homo sapiens
  misc_RNA (1)...(19): siRNA sense strand
gggaaccaauucucaguac

SEQ ID NO: 151694 - RNA, 19 nt, Homo sapiens
  misc_RNA (1)...(19): siRNA sense strand
uggaaucacuggcccacaa

SEQ ID NO: 151695 - RNA, 19 nt, Homo sapiens
  misc_RNA (1)...(19): siRNA sense strand
gacugaaacucuacacaac

SEQ ID NO: 151696 - RNA, 19 nt, Homo sapiens
  misc_RNA (1)...(19): siRNA sense strand
ccacuacuuugcaaacaag

SEQ ID NO: 151697 - RNA, 19 nt, Homo sapiens
  misc_RNA (1)...(19): siRNA sense strand
gaccaaggaauuccagguu

SEQ ID NO: 151698 - RNA, 19 nt, Homo sapiens
  misc_RNA (1)...(19): siRNA sense strand
cccaaaggcuucccuggau

SEQ ID NO: 151699 - RNA, 19 nt, Homo sapiens
  misc_RNA (1)...(19): siRNA sense strand
ggguuuaccuggccugaag

SEQ ID NO: 151700 - RNA, 19 nt, Homo sapiens
  misc_RNA (1)...(19): siRNA sense strand
cagccugggucaaguggaa

SEQ ID NO: 151701 - RNA, 19 nt, Homo sapiens
  misc_RNA (1)...(19): siRNA sense strand
ggaaccaauucucaguaca

SEQ ID NO: 151702 - RNA, 19 nt, Homo sapiens
  misc_RNA (1)...(19): siRNA sense strand
cuggagagcuggaauucau

SEQ ID NO: 151703 - RNA, 19 nt, Homo sapiens
  misc_RNA (1)...(19): siRNA sense strand
gggacagccuggcgaaucu

SEQ ID NO: 151704 - RNA, 19 nt, Homo sapiens
  misc_RNA (1)...(19): siRNA sense strand
aggacgaccuggaccaauu

SEQ ID NO: 151705 - RNA, 19 nt, Homo sapiens
  misc_RNA (1)...(19): siRNA sense strand
cagcgggagagaagucuua

SEQ ID NO: 151706 - RNA, 19 nt, Homo sapiens
  misc_RNA (1)...(19): siRNA sense strand
cggauuuccuggagcugua

SEQ ID NO: 151707 - RNA, 19 nt, Homo sapiens
  misc_RNA (1)...(19): siRNA sense strand
gcuccacacucgagucagu

SEQ ID NO: 151708 - RNA, 19 nt, Homo sapiens
  misc_RNA (1)...(19): siRNA sense strand
ggccacuccuuucaucgaa

SEQ ID NO: 151709 - RNA, 19 nt, Homo sapiens
  misc_RNA (1)...(19): siRNA sense strand
gaagagauggacuaauagg

SEQ ID NO: 151710 - RNA, 19 nt, Homo sapiens
  misc_RNA (1)...(19): siRNA sense strand
uccaagacguccaauguca

SEQ ID NO: 151711 - RNA, 19 nt, Homo sapiens
  misc_RNA (1)...(19): siRNA sense strand
gggagccacuggugacauc

SEQ ID NO: 151712 - RNA, 19 nt, Homo sapiens
  misc_RNA (1)...(19): siRNA sense strand
agugggagcugucaguguu

SEQ ID NO: 151713 - RNA, 19 nt, Homo sapiens
  misc_RNA (1)...(19): siRNA sense strand
gccacuacuuugcaaacaa

SEQ ID NO: 151714 - RNA, 19 nt, Homo sapiens
  misc_RNA (1)...(19): siRNA sense strand
ccacuccuuucaucgaaug

SEQ ID NO: 151715 - RNA, 19 nt, Homo sapiens
  misc_RNA (1)...(19): siRNA sense strand
gcgcaaugauaaaucuuac

SEQ ID NO: 151716 - RNA, 19 nt, Homo sapiens
  misc_RNA (1)...(19): siRNA sense strand
ggcgcaaugauaaaucuua

SEQ ID NO: 151717 - RNA, 19 nt, Homo sapiens
  misc_RNA (1)...(19): siRNA sense strand
caacgaggugugccacuau

SEQ ID NO: 151718 - RNA, 19 nt, Homo sapiens
  misc_RNA (1)...(19): siRNA sense strand
gagaauaaguaccugauug

SEQ ID NO: 151719 - RNA, 19 nt, Homo sapiens
  misc_RNA (1)...(19): siRNA sense strand
gggacgagcuggucaaguu

SEQ ID NO: 151720 - RNA, 19 nt, Homo sapiens
  misc_RNA (1)...(19): siRNA sense strand
gcccagaucugcauagaca

SEQ ID NO: 151721 - RNA, 19 nt, Homo sapiens
  misc_RNA (1)...(19): siRNA sense strand
gcauuggccugcagaacuu

SEQ ID NO: 151722 - RNA, 19 nt, Homo sapiens
  misc_RNA (1)...(19): siRNA sense strand
acaagaaguguccagauua

SEQ ID NO: 151723 - RNA, 19 nt, Homo sapiens
  misc_RNA (1)...(19): siRNA sense strand
caagaaguguccagauuac

SEQ ID NO: 151724 - RNA, 19 nt, Homo sapiens
  misc_RNA (1)...(19): siRNA sense strand
gcucagaccagcucaaugu

SEQ ID NO: 151725 - RNA, 19 nt, Homo sapiens
  misc_RNA (1)...(19): siRNA sense strand
cgacugcgcuaucaagaag

SEQ ID NO: 151726 - RNA, 19 nt, Homo sapiens
  misc_RNA (1)...(19): siRNA sense strand
cugcagaacuucgagauug

SEQ ID NO: 151727 - RNA, 19 nt, Homo sapiens
  misc_RNA (1)...(19): siRNA sense strand
ucaagagccugcaguggau

SEQ ID NO: 151728 - RNA, 19 nt, Homo sapiens
  misc_RNA (1)...(19): siRNA sense strand
gggcaggcaucgagaucuu

SEQ ID NO: 151729 - RNA, 19 nt, Homo sapiens
  misc_RNA (1)...(19): siRNA sense strand
gaagggagaagccggagau

SEQ ID NO: 151730 - RNA, 19 nt, Homo sapiens
  misc_RNA (1)...(19): siRNA sense strand
gcaagacggccgaguacga

SEQ ID NO: 151731 - RNA, 19 nt, Homo sapiens
  misc_RNA (1)...(19): siRNA sense strand
gggcaucaaagacguguuu

SEQ ID NO: 151732 - RNA, 19 nt, Homo sapiens
  misc_RNA (1)...(19): siRNA sense strand
ggagaauaaguaccugauu

SEQ ID NO: 151733 - RNA, 19 nt, Homo sapiens
  misc_RNA (1)...(19): siRNA sense strand
gcagggugaucagggaaga

SEQ ID NO: 151734 - RNA, 19 nt, Homo sapiens
  misc_RNA (1)...(19): siRNA sense strand
ccaaggacuucgucgucaa

SEQ ID NO: 151735 - RNA, 19 nt, Homo sapiens
  misc_RNA (1)...(19): siRNA sense strand
gaaugucaccgcccagauc

SEQ ID NO: 151736 - RNA, 19 nt, Homo sapiens
  misc_RNA (1)...(19): siRNA sense strand
ucgaugccauggacuuuau

SEQ ID NO: 151737 - RNA, 19 nt, Homo sapiens
  misc_RNA (1)...(19): siRNA sense strand
ccauggacuuuaucaacga

SEQ ID NO: 151738 - RNA, 19 nt, Homo sapiens
  misc_RNA (1)...(19): siRNA sense strand
gaauaaguaccugauugug

SEQ ID NO: 151739 - RNA, 19 nt, Homo sapiens
  misc_RNA (1)...(19): siRNA sense strand
cgagaaggccgugcaggaa

SEQ ID NO: 151740 - RNA, 19 nt, Homo sapiens
  misc_RNA (1)...(19): siRNA sense strand
cugcugcucuucucagaug

SEQ ID NO: 151741 - RNA, 19 nt, Homo sapiens
  misc_RNA (1)...(19): siRNA sense strand
gcaccugggcgucaaaguc

SEQ ID NO: 151742 - RNA, 19 nt, Homo sapiens
  misc_RNA (1)...(19): siRNA sense strand
accgaaaccugguguggaa

SEQ ID NO: 151743 - RNA, 19 nt, Homo sapiens
  misc_RNA (1)...(19): siRNA sense strand
ccguggaccuguucuuugu

SEQ ID NO: 151744 - RNA, 19 nt, Homo sapiens
  misc_RNA (1)...(19): siRNA sense strand
aaauaacguugagcaagug

SEQ ID NO: 151745 - RNA, 19 nt, Homo sapiens
  misc_RNA (1)...(19): siRNA sense strand
guacagccacagccagaug

SEQ ID NO: 151746 - RNA, 19 nt, Homo sapiens
  misc_RNA (1)...(19): siRNA sense strand
aaugugcucuugcugugaa

SEQ ID NO: 151747 - RNA, 19 nt, Homo sapiens
  misc_RNA (1)...(19): siRNA sense strand
cagaccagcucaaugucau

SEQ ID NO: 151748 - RNA, 19 nt, Homo sapiens
  misc_RNA (1)...(19): siRNA sense strand
gcuggaggaugcugugaac

SEQ ID NO: 151749 - RNA, 19 nt, Homo sapiens
  misc_RNA (1)...(19): siRNA sense strand
ccaagcaccugggcgucaa

SEQ ID NO: 151750 - RNA, 19 nt, Homo sapiens
  misc_RNA (1)...(19): siRNA sense strand
agaauaaguaccugauugu

SEQ ID NO: 151751 - RNA, 19 nt, Homo sapiens
  misc_RNA (1)...(19): siRNA sense strand
agacguguuugacuucauc

SEQ ID NO: 151752 - RNA, 19 nt, Homo sapiens
  misc_RNA (1)...(19): siRNA sense strand
ucaaggaagccaucaagag

SEQ ID NO: 151753 - RNA, 19 nt, Homo sapiens
  misc_RNA (1)...(19): siRNA sense strand
gacgauaacaacgacauug

SEQ ID NO: 151754 - RNA, 19 nt, Homo sapiens
  misc_RNA (1)...(19): siRNA sense strand
gugacgagguggagaucau

SEQ ID NO: 151755 - RNA, 19 nt, Homo sapiens
  misc_RNA (1)...(19): siRNA sense strand
aaaauaacguugagcaagu

SEQ ID NO: 151756 - RNA, 19 nt, Homo sapiens
  misc_RNA (1)...(19): siRNA sense strand
agccggagauccuggaaga

SEQ ID NO: 151757 - RNA, 19 nt, Homo sapiens
  misc_RNA (1)...(19): siRNA sense strand
gcucaaggaagccaucaag

SEQ ID NO: 151758 - RNA, 19 nt, Homo sapiens
  misc_RNA (1)...(19): siRNA sense strand
ggacgagcuggucaaguuc

SEQ ID NO: 151759 - RNA, 19 nt, Homo sapiens
  misc_RNA (1)...(19): siRNA sense strand
ggacgcggucaaguacuuu

SEQ ID NO: 151760 - RNA, 19 nt, Homo sapiens
  misc_RNA (1)...(19): siRNA sense strand
gauuacaccugccccauca

SEQ ID NO: 151761 - RNA, 19 nt, Homo sapiens
  misc_RNA (1)...(19): siRNA sense strand
ccaagcgcuucaucgacaa

SEQ ID NO: 151762 - RNA, 19 nt, Homo sapiens
  misc_RNA (1)...(19): siRNA sense strand
gacaaagucaaguccuuca

SEQ ID NO: 151763 - RNA, 19 nt, Homo sapiens
  misc_RNA (1)...(19): siRNA sense strand
gccucucgcuggucaagga

SEQ ID NO: 151764 - RNA, 19 nt, Homo sapiens
  misc_RNA (1)...(19): siRNA sense strand
acgcggguguggugcagua

SEQ ID NO: 151765 - RNA, 19 nt, Homo sapiens
  misc_RNA (1)...(19): siRNA sense strand
ucaccaagcgcuucaucga

SEQ ID NO: 151766 - RNA, 19 nt, Homo sapiens
  misc_RNA (1)...(19): siRNA sense strand
uggacgcggucaaguacuu

SEQ ID NO: 151767 - RNA, 19 nt, Homo sapiens
  misc_RNA (1)...(19): siRNA sense strand
aaagacguguuugacuuca

SEQ ID NO: 151768 - RNA, 19 nt, Homo sapiens
  misc_RNA (1)...(19): siRNA sense strand
cgaaugccagccugcaaga

SEQ ID NO: 151769 - RNA, 19 nt, Homo sapiens
  misc_RNA (1)...(19): siRNA sense strand
ggacgaaugcgagauuuug

SEQ ID NO: 151770 - RNA, 19 nt, Homo sapiens
  misc_RNA (1)...(19): siRNA sense strand
ccggacgaaugcgagauuu

SEQ ID NO: 151771 - RNA, 19 nt, Homo sapiens
  misc_RNA (1)...(19): siRNA sense strand
aagaggagacccuggugaa

SEQ ID NO: 151772 - RNA, 19 nt, Homo sapiens
  misc_RNA (1)...(19): siRNA sense strand
gagccgcgucugagcauca

SEQ ID NO: 151773 - RNA, 19 nt, Homo sapiens
  misc_RNA (1)...(19): siRNA sense strand
gaacgugcaggagcucaag

SEQ ID NO: 151774 - RNA, 19 nt, Homo sapiens
  misc_RNA (1)...(19): siRNA sense strand
ggaacgugcaggagcucaa

SEQ ID NO: 151775 - RNA, 19 nt, Homo sapiens
  misc_RNA (1)...(19): siRNA sense strand
gggagaagccggagauccu

SEQ ID NO: 151776 - RNA, 19 nt, Homo sapiens
  misc_RNA (1)...(19): siRNA sense strand
caucguggacaugaucaaa

SEQ ID NO: 151777 - RNA, 19 nt, Homo sapiens
  misc_RNA (1)...(19): siRNA sense strand
ugaaggagaauaaguaccu

SEQ ID NO: 151778 - RNA, 19 nt, Homo sapiens
  misc_RNA (1)...(19): siRNA sense strand
gugcuggacaccucugaga

SEQ ID NO: 151779 - RNA, 19 nt, Homo sapiens
  misc_RNA (1)...(19): siRNA sense strand
gccagaccaucgacaccau

SEQ ID NO: 151780 - RNA, 19 nt, Homo sapiens
  misc_RNA (1)...(19): siRNA sense strand
ucaagaaccucgaguggau

SEQ ID NO: 151781 - RNA, 19 nt, Homo sapiens
  misc_RNA (1)...(19): siRNA sense strand
ucaaggaggcugucaagaa

SEQ ID NO: 151782 - RNA, 19 nt, Homo sapiens
  misc_RNA (1)...(19): siRNA sense strand
caaggaggcugucaagaac

SEQ ID NO: 151783 - RNA, 19 nt, Homo sapiens
  misc_RNA (1)...(19): siRNA sense strand
aaggugagcugccuggaaa

SEQ ID NO: 151784 - RNA, 19 nt, Homo sapiens
  misc_RNA (1)...(19): siRNA sense strand
ggacgaugaccucaacuug

SEQ ID NO: 151785 - RNA, 19 nt, Homo sapiens
  misc_RNA (1)...(19): siRNA sense strand
gggcguuccuggcuucaaa

SEQ ID NO: 151786 - RNA, 19 nt, Homo sapiens
  misc_RNA (1)...(19): siRNA sense strand
gagaagcacgagagugaaa

SEQ ID NO: 151787 - RNA, 19 nt, Homo sapiens
  misc_RNA (1)...(19): siRNA sense strand
agagaagggugaauuugga

SEQ ID NO: 151788 - RNA, 19 nt, Homo sapiens
  misc_RNA (1)...(19): siRNA sense strand
ccacggacauccugcucuu

SEQ ID NO: 151789 - RNA, 19 nt, Homo sapiens
  misc_RNA (1)...(19): siRNA sense strand
ggagagaagggugaauuug

SEQ ID NO: 151790 - RNA, 19 nt, Homo sapiens
  misc_RNA (1)...(19): siRNA sense strand
aacaacaacugcccagaga

SEQ ID NO: 151791 - RNA, 19 nt, Homo sapiens
  misc_RNA (1)...(19): siRNA sense strand
gagagaagggugaauuugg

SEQ ID NO: 151792 - RNA, 19 nt, Homo sapiens
  misc_RNA (1)...(19): siRNA sense strand
caacaacugcccagagaag

SEQ ID NO: 151793 - RNA, 19 nt, Homo sapiens
  misc_RNA (1)...(19): siRNA sense strand
caagggcaccguccacuuc

SEQ ID NO: 151794 - RNA, 19 nt, Homo sapiens
  misc_RNA (1)...(19): siRNA sense strand
gaccuucccugccaaacag

SEQ ID NO: 151795 - RNA, 19 nt, Homo sapiens
  misc_RNA (1)...(19): siRNA sense strand
gaggaaaggagagaaagga

SEQ ID NO: 151796 - RNA, 19 nt, Homo sapiens
  misc_RNA (1)...(19): siRNA sense strand
gggccuccuucaucaagaa

SEQ ID NO: 151797 - RNA, 19 nt, Homo sapiens
  misc_RNA (1)...(19): siRNA sense strand
ggacauguuccacgagaag

SEQ ID NO: 151798 - RNA, 19 nt, Homo sapiens
  misc_RNA (1)...(19): siRNA sense strand
cagcaggugcgcaacauga

SEQ ID NO: 151799 - RNA, 19 nt, Homo sapiens
  misc_RNA (1)...(19): siRNA sense strand
gcaagggcaccguccacuu

SEQ ID NO: 151800 - RNA, 19 nt, Homo sapiens
  misc_RNA (1)...(19): siRNA sense strand
gggcuaccguggacagaag

SEQ ID NO: 151801 - RNA, 19 nt, Homo sapiens
  misc_RNA (1)...(19): siRNA sense strand
ccucagcccucaaguuugc

SEQ ID NO: 151802 - RNA, 19 nt, Homo sapiens
  misc_RNA (1)...(19): siRNA sense strand
caacaugacggagcagauc

SEQ ID NO: 151803 - RNA, 19 nt, Homo sapiens
  misc_RNA (1)...(19): siRNA sense strand
acgagaagcacgagaguga

SEQ ID NO: 151804 - RNA, 19 nt, Homo sapiens
  misc_RNA (1)...(19): siRNA sense strand
caaggugagcugccuggaa

SEQ ID NO: 151805 - RNA, 19 nt, Homo sapiens
  misc_RNA (1)...(19): siRNA sense strand
agugugacgucaugaccua

SEQ ID NO: 151806 - RNA, 19 nt, Homo sapiens
  misc_RNA (1)...(19): siRNA sense strand
cgaggcgacuuuggcuuga

SEQ ID NO: 151807 - RNA, 19 nt, Homo sapiens
  misc_RNA (1)...(19): siRNA sense strand
ccuggucgcugagaaguuc

SEQ ID NO: 151808 - RNA, 19 nt, Homo sapiens
  misc_RNA (1)...(19): siRNA sense strand
aggagaaccugggaggaaa

SEQ ID NO: 151809 - RNA, 19 nt, Homo sapiens
  misc_RNA (1)...(19): siRNA sense strand
gggacauguuccacgagaa

SEQ ID NO: 151810 - RNA, 19 nt, Homo sapiens
  misc_RNA (1)...(19): siRNA sense strand
gaucgugugcccagaccuu

SEQ ID NO: 151811 - RNA, 19 nt, Homo sapiens
  misc_RNA (1)...(19): siRNA sense strand
gccggacacuaccgagaga

SEQ ID NO: 151812 - RNA, 19 nt, Homo sapiens
  misc_RNA (1)...(19): siRNA sense strand
gaggcgacuuuggcuugaa

SEQ ID NO: 151813 - RNA, 19 nt, Homo sapiens
  misc_RNA (1)...(19): siRNA sense strand
gugaaaaccucuacuccau

SEQ ID NO: 151814 - RNA, 19 nt, Homo sapiens
  misc_RNA (1)...(19): siRNA sense strand
caaaggagagaagggugaa

SEQ ID NO: 151815 - RNA, 19 nt, Homo sapiens
  misc_RNA (1)...(19): siRNA sense strand
acccucagcccucaaguuu

SEQ ID NO: 151816 - RNA, 19 nt, Homo sapiens
  misc_RNA (1)...(19): siRNA sense strand
gugugggcguggugcagua

SEQ ID NO: 151817 - RNA, 19 nt, Homo sapiens
  misc_RNA (1)...(19): siRNA sense strand
ccaaccagaaccugaagga

SEQ ID NO: 151818 - RNA, 19 nt, Homo sapiens
  misc_RNA (1)...(19): siRNA sense strand
cuacggagagugcuacaag

SEQ ID NO: 151819 - RNA, 19 nt, Homo sapiens
  misc_RNA (1)...(19): siRNA sense strand
caagaacgggaccgaugga

SEQ ID NO: 151820 - RNA, 19 nt, Homo sapiens
  misc_RNA (1)...(19): siRNA sense strand
gacacuaccgagagaaaca

SEQ ID NO: 151821 - RNA, 19 nt, Homo sapiens
  misc_RNA (1)...(19): siRNA sense strand
gccacgagggcaccuuuga

SEQ ID NO: 151822 - RNA, 19 nt, Homo sapiens
  misc_RNA (1)...(19): siRNA sense strand
ggaggaaaggagagaaagg

SEQ ID NO: 151823 - RNA, 19 nt, Homo sapiens
  misc_RNA (1)...(19): siRNA sense strand
aggcgacuuuggcuugaaa

SEQ ID NO: 151824 - RNA, 19 nt, Homo sapiens
  misc_RNA (1)...(19): siRNA sense strand
auccugcucuuccacauga

SEQ ID NO: 151825 - RNA, 19 nt, Homo sapiens
  misc_RNA (1)...(19): siRNA sense strand
gguaucaaggcaacaaugg

SEQ ID NO: 151826 - RNA, 19 nt, Homo sapiens
  misc_RNA (1)...(19): siRNA sense strand
cacggagugugacgucaug

SEQ ID NO: 151827 - RNA, 19 nt, Homo sapiens
  misc_RNA (1)...(19): siRNA sense strand
caagaaccucgaguggauu

SEQ ID NO: 151828 - RNA, 19 nt, Homo sapiens
  misc_RNA (1)...(19): siRNA sense strand
gaaguccuggugugaaagg

SEQ ID NO: 151829 - RNA, 19 nt, Homo sapiens
  misc_RNA (1)...(19): siRNA sense strand
gggacgaugaccucaacuu

SEQ ID NO: 151830 - RNA, 19 nt, Homo sapiens
  misc_RNA (1)...(19): siRNA sense strand
cuaccgagagaaacaacaa

SEQ ID NO: 151831 - RNA, 19 nt, Homo sapiens
  misc_RNA (1)...(19): siRNA sense strand
ccacagcaggugcgcaaca

SEQ ID NO: 151832 - RNA, 19 nt, Homo sapiens
  misc_RNA (1)...(19): siRNA sense strand
aggagagaagggugaauuu

SEQ ID NO: 151833 - RNA, 19 nt, Homo sapiens
  misc_RNA (1)...(19): siRNA sense strand
ucaagaaccucgaguggau

SEQ ID NO: 151834 - RNA, 19 nt, Homo sapiens
  misc_RNA (1)...(19): siRNA sense strand
ucaaggaggcugucaagaa

SEQ ID NO: 151835 - RNA, 19 nt, Homo sapiens
  misc_RNA (1)...(19): siRNA sense strand
caaggaggcugucaagaac

SEQ ID NO: 151836 - RNA, 19 nt, Homo sapiens
  misc_RNA (1)...(19): siRNA sense strand
aaggugagcugccuggaaa

SEQ ID NO: 151837 - RNA, 19 nt, Homo sapiens
  misc_RNA (1)...(19): siRNA sense strand
ggacgaugaccucaacuug

SEQ ID NO: 151838 - RNA, 19 nt, Homo sapiens
  misc_RNA (1)...(19): siRNA sense strand
gggcguuccuggcuucaaa

SEQ ID NO: 151839 - RNA, 19 nt, Homo sapiens
  misc_RNA (1)...(19): siRNA sense strand
gagaagcacgagagugaaa

SEQ ID NO: 151840 - RNA, 19 nt, Homo sapiens
  misc_RNA (1)...(19): siRNA sense strand
agagaagggugaauuugga

SEQ ID NO: 151841 - RNA, 19 nt, Homo sapiens
  misc_RNA (1)...(19): siRNA sense strand
ccacggacauccugcucuu

SEQ ID NO: 151842 - RNA, 19 nt, Homo sapiens
  misc_RNA (1)...(19): siRNA sense strand
ggagagaagggugaauuug

SEQ ID NO: 151843 - RNA, 19 nt, Homo sapiens
  misc_RNA (1)...(19): siRNA sense strand
aacaacaacugcccagaga

SEQ ID NO: 151844 - RNA, 19 nt, Homo sapiens
  misc_RNA (1)...(19): siRNA sense strand
gagagaagggugaauuugg

SEQ ID NO: 151845 - RNA, 19 nt, Homo sapiens
  misc_RNA (1)...(19): siRNA sense strand
caacaacugcccagagaag

SEQ ID NO: 151846 - RNA, 19 nt, Homo sapiens
  misc_RNA (1)...(19): siRNA sense strand
caagggcaccguccacuuc

SEQ ID NO: 151847 - RNA, 19 nt, Homo sapiens
  misc_RNA (1)...(19): siRNA sense strand
gaccuucccugccaaacag

SEQ ID NO: 151848 - RNA, 19 nt, Homo sapiens
  misc_RNA (1)...(19): siRNA sense strand
gaggaaaggagagaaagga

SEQ ID NO: 151849 - RNA, 19 nt, Homo sapiens
  misc_RNA (1)...(19): siRNA sense strand
gggccuccuucaucaagaa

SEQ ID NO: 151850 - RNA, 19 nt, Homo sapiens
  misc_RNA (1)...(19): siRNA sense strand
ggacauguuccacgagaag

SEQ ID NO: 151851 - RNA, 19 nt, Homo sapiens
  misc_RNA (1)...(19): siRNA sense strand
cagcaggugcgcaacauga

SEQ ID NO: 151852 - RNA, 19 nt, Homo sapiens
  misc_RNA (1)...(19): siRNA sense strand
gcaagggcaccguccacuu

SEQ ID NO: 151853 - RNA, 19 nt, Homo sapiens
  misc_RNA (1)...(19): siRNA sense strand
gggcuaccguggacagaag

SEQ ID NO: 151854 - RNA, 19 nt, Homo sapiens
  misc_RNA (1)...(19): siRNA sense strand
ccucagcccucaaguuugc

SEQ ID NO: 151855 - RNA, 19 nt, Homo sapiens
  misc_RNA (1)...(19): siRNA sense strand
caacaugacggagcagauc

SEQ ID NO: 151856 - RNA, 19 nt, Homo sapiens
  misc_RNA (1)...(19): siRNA sense strand
acgagaagcacgagaguga

SEQ ID NO: 151857 - RNA, 19 nt, Homo sapiens
  misc_RNA (1)...(19): siRNA sense strand
caaggugagcugccuggaa

SEQ ID NO: 151858 - RNA, 19 nt, Homo sapiens
  misc_RNA (1)...(19): siRNA sense strand
agugugacgucaugaccua

SEQ ID NO: 151859 - RNA, 19 nt, Homo sapiens
  misc_RNA (1)...(19): siRNA sense strand
cgaggcgacuuuggcuuga

SEQ ID NO: 151860 - RNA, 19 nt, Homo sapiens
  misc_RNA (1)...(19): siRNA sense strand
ccuggucgcugagaaguuc

SEQ ID NO: 151861 - RNA, 19 nt, Homo sapiens
  misc_RNA (1)...(19): siRNA sense strand
aggagaaccugggaggaaa

SEQ ID NO: 151862 - RNA, 19 nt, Homo sapiens
  misc_RNA (1)...(19): siRNA sense strand
gggacauguuccacgagaa

SEQ ID NO: 151863 - RNA, 19 nt, Homo sapiens
  misc_RNA (1)...(19): siRNA sense strand
gaucgugugcccagaccuu

SEQ ID NO: 151864 - RNA, 19 nt, Homo sapiens
  misc_RNA (1)...(19): siRNA sense strand
gccggacacuaccgagaga

SEQ ID NO: 151865 - RNA, 19 nt, Homo sapiens
  misc_RNA (1)...(19): siRNA sense strand
gaggcgacuuuggcuugaa

SEQ ID NO: 151866 - RNA, 19 nt, Homo sapiens
  misc_RNA (1)...(19): siRNA sense strand
gugaaaaccucuacuccau

SEQ ID NO: 151867 - RNA, 19 nt, Homo sapiens
  misc_RNA (1)...(19): siRNA sense strand
caaaggagagaagggugaa

SEQ ID NO: 151868 - RNA, 19 nt, Homo sapiens
  misc_RNA (1)...(19): siRNA sense strand
acccucagcccucaaguuu

SEQ ID NO: 151869 - RNA, 19 nt, Homo sapiens
  misc_RNA (1)...(19): siRNA sense strand
gugugggcguggugcagua

SEQ ID NO: 151870 - RNA, 19 nt, Homo sapiens
  misc_RNA (1)...(19): siRNA sense strand
ccaaccagaaccugaagga

SEQ ID NO: 151871 - RNA, 19 nt, Homo sapiens
  misc_RNA (1)...(19): siRNA sense strand
cuacggagagugcuacaag

SEQ ID NO: 151872 - RNA, 19 nt, Homo sapiens
  misc_RNA (1)...(19): siRNA sense strand
caagaacgggaccgaugga

SEQ ID NO: 151873 - RNA, 19 nt, Homo sapiens
  misc_RNA (1)...(19): siRNA sense strand
gacacuaccgagagaaaca

SEQ ID NO: 151874 - RNA, 19 nt, Homo sapiens
  misc_RNA (1)...(19): siRNA sense strand
gccacgagggcaccuuuga

SEQ ID NO: 151875 - RNA, 19 nt, Homo sapiens
  misc_RNA (1)...(19): siRNA sense strand
ggaggaaaggagagaaagg

SEQ ID NO: 151876 - RNA, 19 nt, Homo sapiens
  misc_RNA (1)...(19): siRNA sense strand
aggcgacuuuggcuugaaa

SEQ ID NO: 151877 - RNA, 19 nt, Homo sapiens
  misc_RNA (1)...(19): siRNA sense strand
auccugcucuuccacauga

SEQ ID NO: 151878 - RNA, 19 nt, Homo sapiens
  misc_RNA (1)...(19): siRNA sense strand
gguaucaaggcaacaaugg

SEQ ID NO: 151879 - RNA, 19 nt, Homo sapiens
  misc_RNA (1)...(19): siRNA sense strand
cacggagugugacgucaug

SEQ ID NO: 151880 - RNA, 19 nt, Homo sapiens
  misc_RNA (1)...(19): siRNA sense strand
caagaaccucgaguggauu

SEQ ID NO: 151881 - RNA, 19 nt, Homo sapiens
  misc_RNA (1)...(19): siRNA sense strand
gaaguccuggugugaaagg

SEQ ID NO: 151882 - RNA, 19 nt, Homo sapiens
  misc_RNA (1)...(19): siRNA sense strand
gggacgaugaccucaacuu

SEQ ID NO: 151883 - RNA, 19 nt, Homo sapiens
  misc_RNA (1)...(19): siRNA sense strand
cuaccgagagaaacaacaa

SEQ ID NO: 151884 - RNA, 19 nt, Homo sapiens
  misc_RNA (1)...(19): siRNA sense strand
ccacagcaggugcgcaaca

SEQ ID NO: 151885 - RNA, 19 nt, Homo sapiens
  misc_RNA (1)...(19): siRNA sense strand
aggagagaagggugaauuu

SEQ ID NO: 151886 - RNA, 19 nt, Homo sapiens
  misc_RNA (1)...(19): siRNA sense strand
ucaagaaccucgaguggau

SEQ ID NO: 151887 - RNA, 19 nt, Homo sapiens
  misc_RNA (1)...(19): siRNA sense strand
ucaaggaggcugucaagaa

SEQ ID NO: 151888 - RNA, 19 nt, Homo sapiens
  misc_RNA (1)...(19): siRNA sense strand
caaggaggcugucaagaac

SEQ ID NO: 151889 - RNA, 19 nt, Homo sapiens
  misc_RNA (1)...(19): siRNA sense strand
aaggugagcugccuggaaa

SEQ ID NO: 151890 - RNA, 19 nt, Homo sapiens
  misc_RNA (1)...(19): siRNA sense strand
ggacgaugaccucaacuug

SEQ ID NO: 151891 - RNA, 19 nt, Homo sapiens
  misc_RNA (1)...(19): siRNA sense strand
gggcguuccuggcuucaaa

SEQ ID NO: 151892 - RNA, 19 nt, Homo sapiens
  misc_RNA (1)...(19): siRNA sense strand
gagaagcacgagagugaaa

SEQ ID NO: 151893 - RNA, 19 nt, Homo sapiens
  misc_RNA (1)...(19): siRNA sense strand
agagaagggugaauuugga

SEQ ID NO: 151894 - RNA, 19 nt, Homo sapiens
  misc_RNA (1)...(19): siRNA sense strand
ccacggacauccugcucuu

SEQ ID NO: 151895 - RNA, 19 nt, Homo sapiens
  misc_RNA (1)...(19): siRNA sense strand
ggagagaagggugaauuug

SEQ ID NO: 151896 - RNA, 19 nt, Homo sapiens
  misc_RNA (1)...(19): siRNA sense strand
aacaacaacugcccagaga

SEQ ID NO: 151897 - RNA, 19 nt, Homo sapiens
  misc_RNA (1)...(19): siRNA sense strand
gagagaagggugaauuugg

SEQ ID NO: 151898 - RNA, 19 nt, Homo sapiens
  misc_RNA (1)...(19): siRNA sense strand
caacaacugcccagagaag

SEQ ID NO: 151899 - RNA, 19 nt, Homo sapiens
  misc_RNA (1)...(19): siRNA sense strand
caagggcaccguccacuuc

SEQ ID NO: 151900 - RNA, 19 nt, Homo sapiens
  misc_RNA (1)...(19): siRNA sense strand
gaccuucccugccaaacag

SEQ ID NO: 151901 - RNA, 19 nt, Homo sapiens
  misc_RNA (1)...(19): siRNA sense strand
gaggaaaggagagaaagga

SEQ ID NO: 151902 - RNA, 19 nt, Homo sapiens
  misc_RNA (1)...(19): siRNA sense strand
gggccuccuucaucaagaa

SEQ ID NO: 151903 - RNA, 19 nt, Homo sapiens
  misc_RNA (1)...(19): siRNA sense strand
ggacauguuccacgagaag

SEQ ID NO: 151904 - RNA, 19 nt, Homo sapiens
  misc_RNA (1)...(19): siRNA sense strand
cagcaggugcgcaacauga

SEQ ID NO: 151905 - RNA, 19 nt, Homo sapiens
  misc_RNA (1)...(19): siRNA sense strand
gcaagggcaccguccacuu

SEQ ID NO: 151906 - RNA, 19 nt, Homo sapiens
  misc_RNA (1)...(19): siRNA sense strand
gggcuaccguggacagaag

SEQ ID NO: 151907 - RNA, 19 nt, Homo sapiens
  misc_RNA (1)...(19): siRNA sense strand
ccucagcccucaaguuugc

SEQ ID NO: 151908 - RNA, 19 nt, Homo sapiens
  misc_RNA (1)...(19): siRNA sense strand
caacaugacggagcagauc

SEQ ID NO: 151909 - RNA, 19 nt, Homo sapiens
  misc_RNA (1)...(19): siRNA sense strand
acgagaagcacgagaguga

SEQ ID NO: 151910 - RNA, 19 nt, Homo sapiens
  misc_RNA (1)...(19): siRNA sense strand
caaggugagcugccuggaa

SEQ ID NO: 151911 - RNA, 19 nt, Homo sapiens
  misc_RNA (1)...(19): siRNA sense strand
agugugacgucaugaccua

SEQ ID NO: 151912 - RNA, 19 nt, Homo sapiens
  misc_RNA (1)...(19): siRNA sense strand
cgaggcgacuuuggcuuga

SEQ ID NO: 151913 - RNA, 19 nt, Homo sapiens
  misc_RNA (1)...(19): siRNA sense strand
ccuggucgcugagaaguuc

SEQ ID NO: 151914 - RNA, 19 nt, Homo sapiens
  misc_RNA (1)...(19): siRNA sense strand
aggagaaccugggaggaaa

SEQ ID NO: 151915 - RNA, 19 nt, Homo sapiens
  misc_RNA (1)...(19): siRNA sense strand
gggacauguuccacgagaa

SEQ ID NO: 151916 - RNA, 19 nt, Homo sapiens
  misc_RNA (1)...(19): siRNA sense strand
gaucgugugcccagaccuu

SEQ ID NO: 151917 - RNA, 19 nt, Homo sapiens
  misc_RNA (1)...(19): siRNA sense strand
gccggacacuaccgagaga

SEQ ID NO: 151918 - RNA, 19 nt, Homo sapiens
  misc_RNA (1)...(19): siRNA sense strand
gaggcgacuuuggcuugaa

SEQ ID NO: 151919 - RNA, 19 nt, Homo sapiens
  misc_RNA (1)...(19): siRNA sense strand
gugaaaaccucuacuccau

SEQ ID NO: 151920 - RNA, 19 nt, Homo sapiens
  misc_RNA (1)...(19): siRNA sense strand
caaaggagagaagggugaa

SEQ ID NO: 151921 - RNA, 19 nt, Homo sapiens
  misc_RNA (1)...(19): siRNA sense strand
acccucagcccucaaguuu

SEQ ID NO: 151922 - RNA, 19 nt, Homo sapiens
  misc_RNA (1)...(19): siRNA sense strand
gugugggcguggugcagua

SEQ ID NO: 151923 - RNA, 19 nt, Homo sapiens
  misc_RNA (1)...(19): siRNA sense strand
ccaaccagaaccugaagga

SEQ ID NO: 151924 - RNA, 19 nt, Homo sapiens
  misc_RNA (1)...(19): siRNA sense strand
cuacggagagugcuacaag

SEQ ID NO: 151925 - RNA, 19 nt, Homo sapiens
  misc_RNA (1)...(19): siRNA sense strand
caagaacgggaccgaugga

SEQ ID NO: 151926 - RNA, 19 nt, Homo sapiens
  misc_RNA (1)...(19): siRNA sense strand
gacacuaccgagagaaaca

SEQ ID NO: 151927 - RNA, 19 nt, Homo sapiens
  misc_RNA (1)...(19): siRNA sense strand
gccacgagggcaccuuuga

SEQ ID NO: 151928 - RNA, 19 nt, Homo sapiens
  misc_RNA (1)...(19): siRNA sense strand
ggaggaaaggagagaaagg

SEQ ID NO: 151929 - RNA, 19 nt, Homo sapiens
  misc_RNA (1)...(19): siRNA sense strand
aggcgacuuuggcuugaaa

SEQ ID NO: 151930 - RNA, 19 nt, Homo sapiens
  misc_RNA (1)...(19): siRNA sense strand
auccugcucuuccacauga

SEQ ID NO: 151931 - RNA, 19 nt, Homo sapiens
  misc_RNA (1)...(19): siRNA sense strand
gguaucaaggcaacaaugg

SEQ ID NO: 151932 - RNA, 19 nt, Homo sapiens
  misc_RNA (1)...(19): siRNA sense strand
cacggagugugacgucaug

SEQ ID NO: 151933 - RNA, 19 nt, Homo sapiens
  misc_RNA (1)...(19): siRNA sense strand
caagaaccucgaguggauu

SEQ ID NO: 151934 - RNA, 19 nt, Homo sapiens
  misc_RNA (1)...(19): siRNA sense strand
gaaguccuggugugaaagg

SEQ ID NO: 151935 - RNA, 19 nt, Homo sapiens
  misc_RNA (1)...(19): siRNA sense strand
gggacgaugaccucaacuu

SEQ ID NO: 151936 - RNA, 19 nt, Homo sapiens
  misc_RNA (1)...(19): siRNA sense strand
cuaccgagagaaacaacaa

SEQ ID NO: 151937 - RNA, 19 nt, Homo sapiens
  misc_RNA (1)...(19): siRNA sense strand
ccacagcaggugcgcaaca

SEQ ID NO: 151938 - RNA, 19 nt, Homo sapiens
  misc_RNA (1)...(19): siRNA sense strand
aggagagaagggugaauuu

SEQ ID NO: 151939 - RNA, 19 nt, Homo sapiens
  misc_RNA (1)...(19): siRNA sense strand
gaagaggucccaacgguuu

SEQ ID NO: 151940 - RNA, 19 nt, Homo sapiens
  misc_RNA (1)...(19): siRNA sense strand
cgacagaucagcacauuaa

SEQ ID NO: 151941 - RNA, 19 nt, Homo sapiens
  misc_RNA (1)...(19): siRNA sense strand
acaauuggcuuucaugaug

SEQ ID NO: 151942 - RNA, 19 nt, Homo sapiens
  misc_RNA (1)...(19): siRNA sense strand
gaugggaaauucaggcaaa

SEQ ID NO: 151943 - RNA, 19 nt, Homo sapiens
  misc_RNA (1)...(19): siRNA sense strand
ccaaagggaucugcaggua

SEQ ID NO: 151944 - RNA, 19 nt, Homo sapiens
  misc_RNA (1)...(19): siRNA sense strand
gaacaauuggcuuucauga

SEQ ID NO: 151945 - RNA, 19 nt, Homo sapiens
  misc_RNA (1)...(19): siRNA sense strand
ugaaggugcuagaggaauu

SEQ ID NO: 151946 - RNA, 19 nt, Homo sapiens
  misc_RNA (1)...(19): siRNA sense strand
aaagggaucugcagguaau

SEQ ID NO: 151947 - RNA, 19 nt, Homo sapiens
  misc_RNA (1)...(19): siRNA sense strand
ggacccagaggaacaauug

SEQ ID NO: 151948 - RNA, 19 nt, Homo sapiens
  misc_RNA (1)...(19): siRNA sense strand
acacaagggugaagaaggu

SEQ ID NO: 151949 - RNA, 19 nt, Homo sapiens
  misc_RNA (1)...(19): siRNA sense strand
aaaggugacuugggagaaa

SEQ ID NO: 151950 - RNA, 19 nt, Homo sapiens
  misc_RNA (1)...(19): siRNA sense strand
agaagcaggucccaaagga

SEQ ID NO: 151951 - RNA, 19 nt, Homo sapiens
  misc_RNA (1)...(19): siRNA sense strand
acuuggagauauaggauua

SEQ ID NO: 151952 - RNA, 19 nt, Homo sapiens
  misc_RNA (1)...(19): siRNA sense strand
gaggaacaauuggcuuuca

SEQ ID NO: 151953 - RNA, 19 nt, Homo sapiens
  misc_RNA (1)...(19): siRNA sense strand
guagagcaccgacagauca

SEQ ID NO: 151954 - RNA, 19 nt, Homo sapiens
  misc_RNA (1)...(19): siRNA sense strand
gaacuuggagauauaggau

SEQ ID NO: 151955 - RNA, 19 nt, Homo sapiens
  misc_RNA (1)...(19): siRNA sense strand
ucagcgagcauuuaacaaa

SEQ ID NO: 151956 - RNA, 19 nt, Homo sapiens
  misc_RNA (1)...(19): siRNA sense strand
caaagggaucugcagguaa

SEQ ID NO: 151957 - RNA, 19 nt, Homo sapiens
  misc_RNA (1)...(19): siRNA sense strand
gggcuuagauggugaaccu

SEQ ID NO: 151958 - RNA, 19 nt, Homo sapiens
  misc_RNA (1)...(19): siRNA sense strand
uaagcagguuugcaugaga

SEQ ID NO: 151959 - RNA, 19 nt, Homo sapiens
  misc_RNA (1)...(19): siRNA sense strand
uaaaggggcuaaaggagaa

SEQ ID NO: 151960 - RNA, 19 nt, Homo sapiens
  misc_RNA (1)...(19): siRNA sense strand
ggucagcgagcauuuaaca

SEQ ID NO: 151961 - RNA, 19 nt, Homo sapiens
  misc_RNA (1)...(19): siRNA sense strand
uaaaggagaaauuggugaa

SEQ ID NO: 151962 - RNA, 19 nt, Homo sapiens
  misc_RNA (1)...(19): siRNA sense strand
ccaggucgcucaggauauc

SEQ ID NO: 151963 - RNA, 19 nt, Homo sapiens
  misc_RNA (1)...(19): siRNA sense strand
uggaaugccuggaacaaag

SEQ ID NO: 151964 - RNA, 19 nt, Homo sapiens
  misc_RNA (1)...(19): siRNA sense strand
ccaaaggagacacggguuu

SEQ ID NO: 151965 - RNA, 19 nt, Homo sapiens
  misc_RNA (1)...(19): siRNA sense strand
cagaggaacaauuggcuuu

SEQ ID NO: 151966 - RNA, 19 nt, Homo sapiens
  misc_RNA (1)...(19): siRNA sense strand
cagcgagcauuuaacaaag

SEQ ID NO: 151967 - RNA, 19 nt, Homo sapiens
  misc_RNA (1)...(19): siRNA sense strand
gagagggccugagggaagu

SEQ ID NO: 151968 - RNA, 19 nt, Homo sapiens
  misc_RNA (1)...(19): siRNA sense strand
ggaacaauuggcuuucaug

SEQ ID NO: 151969 - RNA, 19 nt, Homo sapiens
  misc_RNA (1)...(19): siRNA sense strand
gugaugggaucccuggaau

SEQ ID NO: 151970 - RNA, 19 nt, Homo sapiens
  misc_RNA (1)...(19): siRNA sense strand
accuggcgcugauggauua

SEQ ID NO: 151971 - RNA, 19 nt, Homo sapiens
  misc_RNA (1)...(19): siRNA sense strand
gggugccucuggugaagaa

SEQ ID NO: 151972 - RNA, 19 nt, Homo sapiens
  misc_RNA (1)...(19): siRNA sense strand
gaaggugaagcaggagaaa

SEQ ID NO: 151973 - RNA, 19 nt, Homo sapiens
  misc_RNA (1)...(19): siRNA sense strand
gcaggucccaaaggagaua

SEQ ID NO: 151974 - RNA, 19 nt, Homo sapiens
  misc_RNA (1)...(19): siRNA sense strand
cuccugggcuucccgguuu

SEQ ID NO: 151975 - RNA, 19 nt, Homo sapiens
  misc_RNA (1)...(19): siRNA sense strand
ccagggagaacucggagaa

SEQ ID NO: 151976 - RNA, 19 nt, Homo sapiens
  misc_RNA (1)...(19): siRNA sense strand
ggaacuuggagauauagga

SEQ ID NO: 151977 - RNA, 19 nt, Homo sapiens
  misc_RNA (1)...(19): siRNA sense strand
caccaggucgcucaggaua

SEQ ID NO: 151978 - RNA, 19 nt, Homo sapiens
  misc_RNA (1)...(19): siRNA sense strand
cagaucagcacauuaagca

SEQ ID NO: 151979 - RNA, 19 nt, Homo sapiens
  misc_RNA (1)...(19): siRNA sense strand
aggauuaccuggcccaaag

SEQ ID NO: 151980 - RNA, 19 nt, Homo sapiens
  misc_RNA (1)...(19): siRNA sense strand
cagguaaacuggguucucu

SEQ ID NO: 151981 - RNA, 19 nt, Homo sapiens
  misc_RNA (1)...(19): siRNA sense strand
cggagaaguuggagcucaa

SEQ ID NO: 151982 - RNA, 19 nt, Homo sapiens
  misc_RNA (1)...(19): siRNA sense strand
uggcaguagaggagaauua

SEQ ID NO: 151983 - RNA, 19 nt, Homo sapiens
  misc_RNA (1)...(19): siRNA sense strand
caguagaggagaauuagga

SEQ ID NO: 151984 - RNA, 19 nt, Homo sapiens
  misc_RNA (1)...(19): siRNA sense strand
ggauuuccaggccguggua

SEQ ID NO: 151985 - RNA, 19 nt, Homo sapiens
  misc_RNA (1)...(19): siRNA sense strand
aaaaggugcucggggcuua

SEQ ID NO: 151986 - RNA, 19 nt, Homo sapiens
  misc_RNA (1)...(19): siRNA sense strand
agggaagccuggucagaug

SEQ ID NO: 151987 - RNA, 19 nt, Homo sapiens
  misc_RNA (1)...(19): siRNA sense strand
ggagaagcaggucccaaag

SEQ ID NO: 151988 - RNA, 19 nt, Homo sapiens
  misc_RNA (1)...(19): siRNA sense strand
uggaauuccuggugcaaag

SEQ ID NO: 151989 - RNA, 19 nt, Homo sapiens
  misc_RNA (1)...(19): siRNA sense strand
caaagggugaaccaggaaa

SEQ ID NO: 151990 - RNA, 19 nt, Homo sapiens
  misc_RNA (1)...(19): siRNA sense strand
gaaccuggugugccuggau

SEQ ID NO: 151991 - RNA, 19 nt, Homo sapiens
  misc_RNA (1)...(19): siRNA sense strand
gccuggaucgcguggauuu

SEQ ID NO: 151992 - RNA, 19 nt, Homo sapiens
  misc_RNA (1)...(19): siRNA sense strand
gaaggugcuagaggaauuc

SEQ ID NO: 151993 - RNA, 19 nt, Homo sapiens
  misc_RNA (1)...(19): siRNA sense strand
gagaagcaggucccaaagg

SEQ ID NO: 151994 - RNA, 19 nt, Homo sapiens
  misc_RNA (1)...(19): siRNA sense strand
ggacacaagggugaagaag

SEQ ID NO: 151995 - RNA, 19 nt, Homo sapiens
  misc_RNA (1)...(19): siRNA sense strand
uaaaggugacuugggagaa

SEQ ID NO: 151996 - RNA, 19 nt, Homo sapiens
  misc_RNA (1)...(19): siRNA sense strand
ugagagucauacaagaaca

SEQ ID NO: 151997 - RNA, 19 nt, Homo sapiens
  misc_RNA (1)...(19): siRNA sense strand
aaaggguguugcuggugaa

SEQ ID NO: 151998 - RNA, 19 nt, Homo sapiens
  misc_RNA (1)...(19): siRNA sense strand
gaugggaucccuggaaugc

SEQ ID NO: 151999 - RNA, 19 nt, Homo sapiens
  misc_RNA (1)...(19): siRNA sense strand
aggagaagcaggucccaaa

SEQ ID NO: 152000 - RNA, 19 nt, Homo sapiens
  misc_RNA (1)...(19): siRNA sense strand
gcugaaggugcuagaggaa

SEQ ID NO: 152001 - RNA, 19 nt, Homo sapiens
  misc_RNA (1)...(19): siRNA sense strand
uggcacaccuggcgcugau

SEQ ID NO: 152002 - RNA, 19 nt, Homo sapiens
  misc_RNA (1)...(19): siRNA sense strand
ggagagcuuggccguguag

SEQ ID NO: 152003 - RNA, 19 nt, Homo sapiens
  misc_RNA (1)...(19): siRNA sense strand
gugccuggaucgcguggau

SEQ ID NO: 152004 - RNA, 19 nt, Homo sapiens
  misc_RNA (1)...(19): siRNA sense strand
ggaaugccuggaacaaagg

SEQ ID NO: 152005 - RNA, 19 nt, Homo sapiens
  misc_RNA (1)...(19): siRNA sense strand
gguagagcaccgacagauc

SEQ ID NO: 152006 - RNA, 19 nt, Homo sapiens
  misc_RNA (1)...(19): siRNA sense strand
cuggucagaugggaaauuc

SEQ ID NO: 152007 - RNA, 19 nt, Homo sapiens
  misc_RNA (1)...(19): siRNA sense strand
ucuuaagcguccagacuca

SEQ ID NO: 152008 - RNA, 19 nt, Homo sapiens
  misc_RNA (1)...(19): siRNA sense strand
ggaguggaaggaccaagag

SEQ ID NO: 152009 - RNA, 19 nt, Homo sapiens
  misc_RNA (1)...(19): siRNA sense strand
uggagagcuuggccgugua

SEQ ID NO: 152010 - RNA, 19 nt, Homo sapiens
  misc_RNA (1)...(19): siRNA sense strand
ggucagaugggaaauucag

SEQ ID NO: 152011 - RNA, 19 nt, Homo sapiens
  misc_RNA (1)...(19): siRNA sense strand
gaagaggucccaacgguuu

SEQ ID NO: 152012 - RNA, 19 nt, Homo sapiens
  misc_RNA (1)...(19): siRNA sense strand
cgacagaucagcacauuaa

SEQ ID NO: 152013 - RNA, 19 nt, Homo sapiens
  misc_RNA (1)...(19): siRNA sense strand
acaauuggcuuucaugaug

SEQ ID NO: 152014 - RNA, 19 nt, Homo sapiens
  misc_RNA (1)...(19): siRNA sense strand
gaugggaaauucaggcaaa

SEQ ID NO: 152015 - RNA, 19 nt, Homo sapiens
  misc_RNA (1)...(19): siRNA sense strand
ccaaagggaucugcaggua

SEQ ID NO: 152016 - RNA, 19 nt, Homo sapiens
  misc_RNA (1)...(19): siRNA sense strand
gaacaauuggcuuucauga

SEQ ID NO: 152017 - RNA, 19 nt, Homo sapiens
  misc_RNA (1)...(19): siRNA sense strand
ugaaggugcuagaggaauu

SEQ ID NO: 152018 - RNA, 19 nt, Homo sapiens
  misc_RNA (1)...(19): siRNA sense strand
aaagggaucugcagguaau

SEQ ID NO: 152019 - RNA, 19 nt, Homo sapiens
  misc_RNA (1)...(19): siRNA sense strand
ggacccagaggaacaauug

SEQ ID NO: 152020 - RNA, 19 nt, Homo sapiens
  misc_RNA (1)...(19): siRNA sense strand
acacaagggugaagaaggu

SEQ ID NO: 152021 - RNA, 19 nt, Homo sapiens
  misc_RNA (1)...(19): siRNA sense strand
aaaggugacuugggagaaa

SEQ ID NO: 152022 - RNA, 19 nt, Homo sapiens
  misc_RNA (1)...(19): siRNA sense strand
agaagcaggucccaaagga

SEQ ID NO: 152023 - RNA, 19 nt, Homo sapiens
  misc_RNA (1)...(19): siRNA sense strand
acuuggagauauaggauua

SEQ ID NO: 152024 - RNA, 19 nt, Homo sapiens
  misc_RNA (1)...(19): siRNA sense strand
gaggaacaauuggcuuuca

SEQ ID NO: 152025 - RNA, 19 nt, Homo sapiens
  misc_RNA (1)...(19): siRNA sense strand
guagagcaccgacagauca

SEQ ID NO: 152026 - RNA, 19 nt, Homo sapiens
  misc_RNA (1)...(19): siRNA sense strand
gaacuuggagauauaggau

SEQ ID NO: 152027 - RNA, 19 nt, Homo sapiens
  misc_RNA (1)...(19): siRNA sense strand
ucagcgagcauuuaacaaa

SEQ ID NO: 152028 - RNA, 19 nt, Homo sapiens
  misc_RNA (1)...(19): siRNA sense strand
caaagggaucugcagguaa

SEQ ID NO: 152029 - RNA, 19 nt, Homo sapiens
  misc_RNA (1)...(19): siRNA sense strand
gggcuuagauggugaaccu

SEQ ID NO: 152030 - RNA, 19 nt, Homo sapiens
  misc_RNA (1)...(19): siRNA sense strand
uaagcagguuugcaugaga

SEQ ID NO: 152031 - RNA, 19 nt, Homo sapiens
  misc_RNA (1)...(19): siRNA sense strand
uaaaggggcuaaaggagaa

SEQ ID NO: 152032 - RNA, 19 nt, Homo sapiens
  misc_RNA (1)...(19): siRNA sense strand
ggucagcgagcauuuaaca

SEQ ID NO: 152033 - RNA, 19 nt, Homo sapiens
  misc_RNA (1)...(19): siRNA sense strand
uaaaggagaaauuggugaa

SEQ ID NO: 152034 - RNA, 19 nt, Homo sapiens
  misc_RNA (1)...(19): siRNA sense strand
ccaggucgcucaggauauc

SEQ ID NO: 152035 - RNA, 19 nt, Homo sapiens
  misc_RNA (1)...(19): siRNA sense strand
uggaaugccuggaacaaag

SEQ ID NO: 152036 - RNA, 19 nt, Homo sapiens
  misc_RNA (1)...(19): siRNA sense strand
ccaaaggagacacggguuu

SEQ ID NO: 152037 - RNA, 19 nt, Homo sapiens
  misc_RNA (1)...(19): siRNA sense strand
cagaggaacaauuggcuuu

SEQ ID NO: 152038 - RNA, 19 nt, Homo sapiens
  misc_RNA (1)...(19): siRNA sense strand
cagcgagcauuuaacaaag

SEQ ID NO: 152039 - RNA, 19 nt, Homo sapiens
  misc_RNA (1)...(19): siRNA sense strand
gagagggccugagggaagu

SEQ ID NO: 152040 - RNA, 19 nt, Homo sapiens
  misc_RNA (1)...(19): siRNA sense strand
ggaacaauuggcuuucaug

SEQ ID NO: 152041 - RNA, 19 nt, Homo sapiens
  misc_RNA (1)...(19): siRNA sense strand
gugaugggaucccuggaau

SEQ ID NO: 152042 - RNA, 19 nt, Homo sapiens
  misc_RNA (1)...(19): siRNA sense strand
accuggcgcugauggauua

SEQ ID NO: 152043 - RNA, 19 nt, Homo sapiens
  misc_RNA (1)...(19): siRNA sense strand
gggugccucuggugaagaa

SEQ ID NO: 152044 - RNA, 19 nt, Homo sapiens
  misc_RNA (1)...(19): siRNA sense strand
gaaggugaagcaggagaaa

SEQ ID NO: 152045 - RNA, 19 nt, Homo sapiens
  misc_RNA (1)...(19): siRNA sense strand
gcaggucccaaaggagaua

SEQ ID NO: 152046 - RNA, 19 nt, Homo sapiens
  misc_RNA (1)...(19): siRNA sense strand
cuccugggcuucccgguuu

SEQ ID NO: 152047 - RNA, 19 nt, Homo sapiens
  misc_RNA (1)...(19): siRNA sense strand
ccagggagaacucggagaa

SEQ ID NO: 152048 - RNA, 19 nt, Homo sapiens
  misc_RNA (1)...(19): siRNA sense strand
ggaacuuggagauauagga

SEQ ID NO: 152049 - RNA, 19 nt, Homo sapiens
  misc_RNA (1)...(19): siRNA sense strand
caccaggucgcucaggaua

SEQ ID NO: 152050 - RNA, 19 nt, Homo sapiens
  misc_RNA (1)...(19): siRNA sense strand
cagaucagcacauuaagca

SEQ ID NO: 152051 - RNA, 19 nt, Homo sapiens
  misc_RNA (1)...(19): siRNA sense strand
aggauuaccuggcccaaag

SEQ ID NO: 152052 - RNA, 19 nt, Homo sapiens
  misc_RNA (1)...(19): siRNA sense strand
cagguaaacuggguucucu

SEQ ID NO: 152053 - RNA, 19 nt, Homo sapiens
  misc_RNA (1)...(19): siRNA sense strand
cggagaaguuggagcucaa

SEQ ID NO: 152054 - RNA, 19 nt, Homo sapiens
  misc_RNA (1)...(19): siRNA sense strand
uggcaguagaggagaauua

SEQ ID NO: 152055 - RNA, 19 nt, Homo sapiens
  misc_RNA (1)...(19): siRNA sense strand
caguagaggagaauuagga

SEQ ID NO: 152056 - RNA, 19 nt, Homo sapiens
  misc_RNA (1)...(19): siRNA sense strand
ggauuuccaggccguggua

SEQ ID NO: 152057 - RNA, 19 nt, Homo sapiens
  misc_RNA (1)...(19): siRNA sense strand
aaaaggugcucggggcuua

SEQ ID NO: 152058 - RNA, 19 nt, Homo sapiens
  misc_RNA (1)...(19): siRNA sense strand
agggaagccuggucagaug

SEQ ID NO: 152059 - RNA, 19 nt, Homo sapiens
  misc_RNA (1)...(19): siRNA sense strand
ggagaagcaggucccaaag

SEQ ID NO: 152060 - RNA, 19 nt, Homo sapiens
  misc_RNA (1)...(19): siRNA sense strand
uggaauuccuggugcaaag

SEQ ID NO: 152061 - RNA, 19 nt, Homo sapiens
  misc_RNA (1)...(19): siRNA sense strand
caaagggugaaccaggaaa

SEQ ID NO: 152062 - RNA, 19 nt, Homo sapiens
  misc_RNA (1)...(19): siRNA sense strand
gaaccuggugugccuggau

SEQ ID NO: 152063 - RNA, 19 nt, Homo sapiens
  misc_RNA (1)...(19): siRNA sense strand
gccuggaucgcguggauuu

SEQ ID NO: 152064 - RNA, 19 nt, Homo sapiens
  misc_RNA (1)...(19): siRNA sense strand
gaaggugcuagaggaauuc

SEQ ID NO: 152065 - RNA, 19 nt, Homo sapiens
  misc_RNA (1)...(19): siRNA sense strand
gagaagcaggucccaaagg

SEQ ID NO: 152066 - RNA, 19 nt, Homo sapiens
  misc_RNA (1)...(19): siRNA sense strand
ggacacaagggugaagaag

SEQ ID NO: 152067 - RNA, 19 nt, Homo sapiens
  misc_RNA (1)...(19): siRNA sense strand
uaaaggugacuugggagaa

SEQ ID NO: 152068 - RNA, 19 nt, Homo sapiens
  misc_RNA (1)...(19): siRNA sense strand
ugagagucauacaagaaca

SEQ ID NO: 152069 - RNA, 19 nt, Homo sapiens
  misc_RNA (1)...(19): siRNA sense strand
aaaggguguugcuggugaa

SEQ ID NO: 152070 - RNA, 19 nt, Homo sapiens
  misc_RNA (1)...(19): siRNA sense strand
gaugggaucccuggaaugc

SEQ ID NO: 152071 - RNA, 19 nt, Homo sapiens
  misc_RNA (1)...(19): siRNA sense strand
aggagaagcaggucccaaa

SEQ ID NO: 152072 - RNA, 19 nt, Homo sapiens
  misc_RNA (1)...(19): siRNA sense strand
gcugaaggugcuagaggaa

SEQ ID NO: 152073 - RNA, 19 nt, Homo sapiens
  misc_RNA (1)...(19): siRNA sense strand
uggcacaccuggcgcugau

SEQ ID NO: 152074 - RNA, 19 nt, Homo sapiens
  misc_RNA (1)...(19): siRNA sense strand
ggagagcuuggccguguag

SEQ ID NO: 152075 - RNA, 19 nt, Homo sapiens
  misc_RNA (1)...(19): siRNA sense strand
gugccuggaucgcguggau

SEQ ID NO: 152076 - RNA, 19 nt, Homo sapiens
  misc_RNA (1)...(19): siRNA sense strand
ggaaugccuggaacaaagg

SEQ ID NO: 152077 - RNA, 19 nt, Homo sapiens
  misc_RNA (1)...(19): siRNA sense strand
gguagagcaccgacagauc

SEQ ID NO: 152078 - RNA, 19 nt, Homo sapiens
  misc_RNA (1)...(19): siRNA sense strand
cuggucagaugggaaauuc

SEQ ID NO: 152079 - RNA, 19 nt, Homo sapiens
  misc_RNA (1)...(19): siRNA sense strand
ucuuaagcguccagacuca

SEQ ID NO: 152080 - RNA, 19 nt, Homo sapiens
  misc_RNA (1)...(19): siRNA sense strand
ggaguggaaggaccaagag

SEQ ID NO: 152081 - RNA, 19 nt, Homo sapiens
  misc_RNA (1)...(19): siRNA sense strand
uggagagcuuggccgugua

SEQ ID NO: 152082 - RNA, 19 nt, Homo sapiens
  misc_RNA (1)...(19): siRNA sense strand
ggucagaugggaaauucag

SEQ ID NO: 152083 - RNA, 19 nt, Homo sapiens
  misc_RNA (1)...(19): siRNA sense strand
gaagggugauccaggagaa

SEQ ID NO: 152084 - RNA, 19 nt, Homo sapiens
  misc_RNA (1)...(19): siRNA sense strand
gcaaggaguacguggagaa

SEQ ID NO: 152085 - RNA, 19 nt, Homo sapiens
  misc_RNA (1)...(19): siRNA sense strand
ggaaggcagugcggauuuc

SEQ ID NO: 152086 - RNA, 19 nt, Homo sapiens
  misc_RNA (1)...(19): siRNA sense strand
caagggacagcaaggagua

SEQ ID NO: 152087 - RNA, 19 nt, Homo sapiens
  misc_RNA (1)...(19): siRNA sense strand
gaucacaggcccgaaagga

SEQ ID NO: 152088 - RNA, 19 nt, Homo sapiens
  misc_RNA (1)...(19): siRNA sense strand
cggcaaggauggagaucga

SEQ ID NO: 152089 - RNA, 19 nt, Homo sapiens
  misc_RNA (1)...(19): siRNA sense strand
uggccucccuggugagauu

SEQ ID NO: 152090 - RNA, 19 nt, Homo sapiens
  misc_RNA (1)...(19): siRNA sense strand
caagggcgagccuggcaaa

SEQ ID NO: 152091 - RNA, 19 nt, Homo sapiens
  misc_RNA (1)...(19): siRNA sense strand
caacuguccacccggaaug

SEQ ID NO: 152092 - RNA, 19 nt, Homo sapiens
  misc_RNA (1)...(19): siRNA sense strand
gggaaaacguggagagaag

SEQ ID NO: 152093 - RNA, 19 nt, Homo sapiens
  misc_RNA (1)...(19): siRNA sense strand
gggcccucauggauauaaa

SEQ ID NO: 152094 - RNA, 19 nt, Homo sapiens
  misc_RNA (1)...(19): siRNA sense strand
ccuuggagcuucggccuau

SEQ ID NO: 152095 - RNA, 19 nt, Homo sapiens
  misc_RNA (1)...(19): siRNA sense strand
cgcugaagaugcugcaaga

SEQ ID NO: 152096 - RNA, 19 nt, Homo sapiens
  misc_RNA (1)...(19): siRNA sense strand
cggcaucgacggugacaau

SEQ ID NO: 152097 - RNA, 19 nt, Homo sapiens
  misc_RNA (1)...(19): siRNA sense strand
uuacagagccuggauccau

SEQ ID NO: 152098 - RNA, 19 nt, Homo sapiens
  misc_RNA (1)...(19): siRNA sense strand
ggauguggcgcugaagaug

SEQ ID NO: 152099 - RNA, 19 nt, Homo sapiens
  misc_RNA (1)...(19): siRNA sense strand
cgggauugaugguuuaacu

SEQ ID NO: 152100 - RNA, 19 nt, Homo sapiens
  misc_RNA (1)...(19): siRNA sense strand
gcggauuuccuguguccaa

SEQ ID NO: 152101 - RNA, 19 nt, Homo sapiens
  misc_RNA (1)...(19): siRNA sense strand
caacggcaaggauggagau

SEQ ID NO: 152102 - RNA, 19 nt, Homo sapiens
  misc_RNA (1)...(19): siRNA sense strand
gggccuuccuggauucucu

SEQ ID NO: 152103 - RNA, 19 nt, Homo sapiens
  misc_RNA (1)...(19): siRNA sense strand
uggaaggcagugcggauuu

SEQ ID NO: 152104 - RNA, 19 nt, Homo sapiens
  misc_RNA (1)...(19): siRNA sense strand
cagugcggauuuccugugu

SEQ ID NO: 152105 - RNA, 19 nt, Homo sapiens
  misc_RNA (1)...(19): siRNA sense strand
cgaacaaauugcacaguua

SEQ ID NO: 152106 - RNA, 19 nt, Homo sapiens
  misc_RNA (1)...(19): siRNA sense strand
gaccuucagugcccaagua

SEQ ID NO: 152107 - RNA, 19 nt, Homo sapiens
  misc_RNA (1)...(19): siRNA sense strand
gcgaacaaauugcacaguu

SEQ ID NO: 152108 - RNA, 19 nt, Homo sapiens
  misc_RNA (1)...(19): siRNA sense strand
gaugaucagcgaacaaauu

SEQ ID NO: 152109 - RNA, 19 nt, Homo sapiens
  misc_RNA (1)...(19): siRNA sense strand
ggacggcauugacggagaa

SEQ ID NO: 152110 - RNA, 19 nt, Homo sapiens
  misc_RNA (1)...(19): siRNA sense strand
gaacaaauugcacaguuag

SEQ ID NO: 152111 - RNA, 19 nt, Homo sapiens
  misc_RNA (1)...(19): siRNA sense strand
ccaaggagccguguuagga

SEQ ID NO: 152112 - RNA, 19 nt, Homo sapiens
  misc_RNA (1)...(19): siRNA sense strand
gggacccacuggcuacaaa

SEQ ID NO: 152113 - RNA, 19 nt, Homo sapiens
  misc_RNA (1)...(19): siRNA sense strand
gcaaggacggccagaaugg

SEQ ID NO: 152114 - RNA, 19 nt, Homo sapiens
  misc_RNA (1)...(19): siRNA sense strand
gggaugaucagcgaacaaa

SEQ ID NO: 152115 - RNA, 19 nt, Homo sapiens
  misc_RNA (1)...(19): siRNA sense strand
gggcaaggacggccagaau

SEQ ID NO: 152116 - RNA, 19 nt, Homo sapiens
  misc_RNA (1)...(19): siRNA sense strand
gaucagcgaacaaauugca

SEQ ID NO: 152117 - RNA, 19 nt, Homo sapiens
  misc_RNA (1)...(19): siRNA sense strand
uaagggagaccaggguauu

SEQ ID NO: 152118 - RNA, 19 nt, Homo sapiens
  misc_RNA (1)...(19): siRNA sense strand
caccucagccugccaagga

SEQ ID NO: 152119 - RNA, 19 nt, Homo sapiens
  misc_RNA (1)...(19): siRNA sense strand
ggcaaggacggccagaaug

SEQ ID NO: 152120 - RNA, 19 nt, Homo sapiens
  misc_RNA (1)...(19): siRNA sense strand
cugccaaggagccguguua

SEQ ID NO: 152121 - RNA, 19 nt, Homo sapiens
  misc_RNA (1)...(19): siRNA sense strand
ggucugacuggacgagaug

SEQ ID NO: 152122 - RNA, 19 nt, Homo sapiens
  misc_RNA (1)...(19): siRNA sense strand
caaaggcgagaagggagaa

SEQ ID NO: 152123 - RNA, 19 nt, Homo sapiens
  misc_RNA (1)...(19): siRNA sense strand
ggagagcuuugcugagaug

SEQ ID NO: 152124 - RNA, 19 nt, Homo sapiens
  misc_RNA (1)...(19): siRNA sense strand
agaaggcacugaaggagaa

SEQ ID NO: 152125 - RNA, 19 nt, Homo sapiens
  misc_RNA (1)...(19): siRNA sense strand
gcucccagcuuauauggau

SEQ ID NO: 152126 - RNA, 19 nt, Homo sapiens
  misc_RNA (1)...(19): siRNA sense strand
uguacgagcucaugaaagu

SEQ ID NO: 152127 - RNA, 19 nt, Homo sapiens
  misc_RNA (1)...(19): siRNA sense strand
aaggagagcuuugcugaga

SEQ ID NO: 152128 - RNA, 19 nt, Homo sapiens
  misc_RNA (1)...(19): siRNA sense strand
ggcagaagcacuaugugua

SEQ ID NO: 152129 - RNA, 19 nt, Homo sapiens
  misc_RNA (1)...(19): siRNA sense strand
ggagguggcccaugucaag

SEQ ID NO: 152130 - RNA, 19 nt, Homo sapiens
  misc_RNA (1)...(19): siRNA sense strand
gcagaagcacuauguguac

SEQ ID NO: 152131 - RNA, 19 nt, Homo sapiens
  misc_RNA (1)...(19): siRNA sense strand
cgaguuguaucgcauuaag

SEQ ID NO: 152132 - RNA, 19 nt, Homo sapiens
  misc_RNA (1)...(19): siRNA sense strand
gcaauuuccaccucugugu

SEQ ID NO: 152133 - RNA, 19 nt, Homo sapiens
  misc_RNA (1)...(19): siRNA sense strand
caggguauuuagccuaguu

SEQ ID NO: 152134 - RNA, 19 nt, Homo sapiens
  misc_RNA (1)...(19): siRNA sense strand
gagcuuugcugagaugaac

SEQ ID NO: 152135 - RNA, 19 nt, Homo sapiens
  misc_RNA (1)...(19): siRNA sense strand
ucaugaaaguguugugaag

SEQ ID NO: 152136 - RNA, 19 nt, Homo sapiens
  misc_RNA (1)...(19): siRNA sense strand
gucgaguuguaucgcauua

SEQ ID NO: 152137 - RNA, 19 nt, Homo sapiens
  misc_RNA (1)...(19): siRNA sense strand
gagaaagucgaguuguauc

SEQ ID NO: 152138 - RNA, 19 nt, Homo sapiens
  misc_RNA (1)...(19): siRNA sense strand
gcucaugaaaguguuguga

SEQ ID NO: 152139 - RNA, 19 nt, Homo sapiens
  misc_RNA (1)...(19): siRNA sense strand
ugugaagagcgaagacuuu

SEQ ID NO: 152140 - RNA, 19 nt, Homo sapiens
  misc_RNA (1)...(19): siRNA sense strand
aagaguggguggccaagca

SEQ ID NO: 152141 - RNA, 19 nt, Homo sapiens
  misc_RNA (1)...(19): siRNA sense strand
gccagaaggcacugaagga

SEQ ID NO: 152142 - RNA, 19 nt, Homo sapiens
  misc_RNA (1)...(19): siRNA sense strand
ccauguucuucaucgguuu

SEQ ID NO: 152143 - RNA, 19 nt, Homo sapiens
  misc_RNA (1)...(19): siRNA sense strand
gagcaauuuccaccucugu

SEQ ID NO: 152144 - RNA, 19 nt, Homo sapiens
  misc_RNA (1)...(19): siRNA sense strand
gcggugccauguucuucau

SEQ ID NO: 152145 - RNA, 19 nt, Homo sapiens
  misc_RNA (1)...(19): siRNA sense strand
uguaucgcauuaaguucaa

SEQ ID NO: 152146 - RNA, 19 nt, Homo sapiens
  misc_RNA (1)...(19): siRNA sense strand
ugugggcggugccauguuc

SEQ ID NO: 152147 - RNA, 19 nt, Homo sapiens
  misc_RNA (1)...(19): siRNA sense strand
caugaaaguguugugaaga

SEQ ID NO: 152148 - RNA, 19 nt, Homo sapiens
  misc_RNA (1)...(19): siRNA sense strand
uaaguucaaggagagcuuu

SEQ ID NO: 152149 - RNA, 19 nt, Homo sapiens
  misc_RNA (1)...(19): siRNA sense strand
guuggcaagcgagcaauuu

SEQ ID NO: 152150 - RNA, 19 nt, Homo sapiens
  misc_RNA (1)...(19): siRNA sense strand
gaaauuccacuguaucuaa

SEQ ID NO: 152151 - RNA, 19 nt, Homo sapiens
  misc_RNA (1)...(19): siRNA sense strand
ccaggaggaugaugaaauu

SEQ ID NO: 152152 - RNA, 19 nt, Homo sapiens
  misc_RNA (1)...(19): siRNA sense strand
guauagagccaccaugauu

SEQ ID NO: 152153 - RNA, 19 nt, Homo sapiens
  misc_RNA (1)...(19): siRNA sense strand
gcugaugcccuccuguaua

SEQ ID NO: 152154 - RNA, 19 nt, Homo sapiens
  misc_RNA (1)...(19): siRNA sense strand
ugaugaaauuccacuguau

SEQ ID NO: 152155 - RNA, 19 nt, Homo sapiens
  misc_RNA (1)...(19): siRNA sense strand
aaaauaaaguuccggagaa

SEQ ID NO: 152156 - RNA, 19 nt, Homo sapiens
  misc_RNA (1)...(19): siRNA sense strand
caccaugauucuuacaguu

SEQ ID NO: 152157 - RNA, 19 nt, Homo sapiens
  misc_RNA (1)...(19): siRNA sense strand
ggaggaugaugaaauucca

SEQ ID NO: 152158 - RNA, 19 nt, Homo sapiens
  misc_RNA (1)...(19): siRNA sense strand
gggcagaggacgauaagca

SEQ ID NO: 152159 - RNA, 19 nt, Homo sapiens
  misc_RNA (1)...(19): siRNA sense strand
cugaugcccuccuguauag

SEQ ID NO: 152160 - RNA, 19 nt, Homo sapiens
  misc_RNA (1)...(19): siRNA sense strand
augaugaaauuccacugua

SEQ ID NO: 152161 - RNA, 19 nt, Homo sapiens
  misc_RNA (1)...(19): siRNA sense strand
gaugaugaaauuccacugu

SEQ ID NO: 152162 - RNA, 19 nt, Homo sapiens
  misc_RNA (1)...(19): siRNA sense strand
ccaccaugauucuuacagu

SEQ ID NO: 152163 - RNA, 19 nt, Homo sapiens
  misc_RNA (1)...(19): siRNA sense strand
gaugaaauuccacuguauc

SEQ ID NO: 152164 - RNA, 19 nt, Homo sapiens
  misc_RNA (1)...(19): siRNA sense strand
agagccaccaugauucuua

SEQ ID NO: 152165 - RNA, 19 nt, Homo sapiens
  misc_RNA (1)...(19): siRNA sense strand
gagccaccaugauucuuac

SEQ ID NO: 152166 - RNA, 19 nt, Homo sapiens
  misc_RNA (1)...(19): siRNA sense strand
aaauaaaguuccggagaag

SEQ ID NO: 152167 - RNA, 19 nt, Homo sapiens
  misc_RNA (1)...(19): siRNA sense strand
uggcuucauuucccaagaa

SEQ ID NO: 152168 - RNA, 19 nt, Homo sapiens
  misc_RNA (1)...(19): siRNA sense strand
uagcugaugcccuccugua

SEQ ID NO: 152169 - RNA, 19 nt, Homo sapiens
  misc_RNA (1)...(19): siRNA sense strand
ugaaauuccacuguaucua

SEQ ID NO: 152170 - RNA, 19 nt, Homo sapiens
  misc_RNA (1)...(19): siRNA sense strand
uauagagccaccaugauuc

SEQ ID NO: 152171 - RNA, 19 nt, Homo sapiens
  misc_RNA (1)...(19): siRNA sense strand
ugagcuggcuguggcuuca

SEQ ID NO: 152172 - RNA, 19 nt, Homo sapiens
  misc_RNA (1)...(19): siRNA sense strand
caaauacgguaaugcugua

SEQ ID NO: 152173 - RNA, 19 nt, Homo sapiens
  misc_RNA (1)...(19): siRNA sense strand
gccacuuucuguauuguua

SEQ ID NO: 152174 - RNA, 19 nt, Homo sapiens
  misc_RNA (1)...(19): siRNA sense strand
caacacaagucggaauaga

SEQ ID NO: 152175 - RNA, 19 nt, Homo sapiens
  misc_RNA (1)...(19): siRNA sense strand
ggagccacuuucuguauug

SEQ ID NO: 152176 - RNA, 19 nt, Homo sapiens
  misc_RNA (1)...(19): siRNA sense strand
ccaaaggaauggaggaauc

SEQ ID NO: 152177 - RNA, 19 nt, Homo sapiens
  misc_RNA (1)...(19): siRNA sense strand
ggaauggaggaaucaguaa

SEQ ID NO: 152178 - RNA, 19 nt, Homo sapiens
  misc_RNA (1)...(19): siRNA sense strand
ccagaaacguacaccugau

SEQ ID NO: 152179 - RNA, 19 nt, Homo sapiens
  misc_RNA (1)...(19): siRNA sense strand
cuaaaucgucuccaaguuc

SEQ ID NO: 152180 - RNA, 19 nt, Homo sapiens
  misc_RNA (1)...(19): siRNA sense strand
acacaagucggaauagaau

SEQ ID NO: 152181 - RNA, 19 nt, Homo sapiens
  misc_RNA (1)...(19): siRNA sense strand
cagaaacguacaccugauu

SEQ ID NO: 152182 - RNA, 19 nt, Homo sapiens
  misc_RNA (1)...(19): siRNA sense strand
caugacaaauacgguaaug

SEQ ID NO: 152183 - RNA, 19 nt, Homo sapiens
  misc_RNA (1)...(19): siRNA sense strand
uggagccacuuucuguauu

SEQ ID NO: 152184 - RNA, 19 nt, Homo sapiens
  misc_RNA (1)...(19): siRNA sense strand
caaggcagagccaccagaa

SEQ ID NO: 152185 - RNA, 19 nt, Homo sapiens
  misc_RNA (1)...(19): siRNA sense strand
acuaaaucgucuccaaguu

SEQ ID NO: 152186 - RNA, 19 nt, Homo sapiens
  misc_RNA (1)...(19): siRNA sense strand
caaaggaauggaggaauca

SEQ ID NO: 152187 - RNA, 19 nt, Homo sapiens
  misc_RNA (1)...(19): siRNA sense strand
agaaacguacaccugauuu

SEQ ID NO: 152188 - RNA, 19 nt, Homo sapiens
  misc_RNA (1)...(19): siRNA sense strand
aggaauggaggaaucagua

SEQ ID NO: 152189 - RNA, 19 nt, Homo sapiens
  misc_RNA (1)...(19): siRNA sense strand
gaaacguacaccugauuuu

SEQ ID NO: 152190 - RNA, 19 nt, Homo sapiens
  misc_RNA (1)...(19): siRNA sense strand
ugacaaauacgguaaugcu

SEQ ID NO: 152191 - RNA, 19 nt, Homo sapiens
  misc_RNA (1)...(19): siRNA sense strand
ggucaaaagcgcacuaaau

SEQ ID NO: 152192 - RNA, 19 nt, Homo sapiens
  misc_RNA (1)...(19): siRNA sense strand
gagccacuuucuguauugu

SEQ ID NO: 152193 - RNA, 19 nt, Homo sapiens
  misc_RNA (1)...(19): siRNA sense strand
cagagccaccagaaacgua

SEQ ID NO: 152194 - RNA, 19 nt, Homo sapiens
  misc_RNA (1)...(19): siRNA sense strand
gcaacacaagucggaauag

SEQ ID NO: 152195 - RNA, 19 nt, Homo sapiens
  misc_RNA (1)...(19): siRNA sense strand
cgcacuaaaucgucuccaa

SEQ ID NO: 152196 - RNA, 19 nt, Homo sapiens
  misc_RNA (1)...(19): siRNA sense strand
gaagaucacucaagacuau

SEQ ID NO: 152197 - RNA, 19 nt, Homo sapiens
  misc_RNA (1)...(19): siRNA sense strand
caaagaagaucacucaaga

SEQ ID NO: 152198 - RNA, 19 nt, Homo sapiens
  misc_RNA (1)...(19): siRNA sense strand
gaacugggacgcuggcuuu

SEQ ID NO: 152199 - RNA, 19 nt, Homo sapiens
  misc_RNA (1)...(19): siRNA sense strand
caccaacccugauggcuuu

SEQ ID NO: 152200 - RNA, 19 nt, Homo sapiens
  misc_RNA (1)...(19): siRNA sense strand
gcaaagaagaucacucaag

SEQ ID NO: 152201 - RNA, 19 nt, Homo sapiens
  misc_RNA (1)...(19): siRNA sense strand
gaacaucaaggccuucauc

SEQ ID NO: 152202 - RNA, 19 nt, Homo sapiens
  misc_RNA (1)...(19): siRNA sense strand
gaggucaaguccauuguag

SEQ ID NO: 152203 - RNA, 19 nt, Homo sapiens
  misc_RNA (1)...(19): siRNA sense strand
gaaucucuguagccgauga

SEQ ID NO: 152204 - RNA, 19 nt, Homo sapiens
  misc_RNA (1)...(19): siRNA sense strand
gguguugaguguccuguug

SEQ ID NO: 152205 - RNA, 19 nt, Homo sapiens
  misc_RNA (1)...(19): siRNA sense strand
gaaggaccaugggaacauc

SEQ ID NO: 152206 - RNA, 19 nt, Homo sapiens
  misc_RNA (1)...(19): siRNA sense strand
ugacagcccuggccucucu

SEQ ID NO: 152207 - RNA, 19 nt, Homo sapiens
  misc_RNA (1)...(19): siRNA sense strand
uggaggagaucuaugacuu

SEQ ID NO: 152208 - RNA, 19 nt, Homo sapiens
  misc_RNA (1)...(19): siRNA sense strand
ggaggucaaguccauugua

SEQ ID NO: 152209 - RNA, 19 nt, Homo sapiens
  misc_RNA (1)...(19): siRNA sense strand
uaugaagggcgucccauuu

SEQ ID NO: 152210 - RNA, 19 nt, Homo sapiens
  misc_RNA (1)...(19): siRNA sense strand
acucccagcuccucaugua

SEQ ID NO: 152211 - RNA, 19 nt, Homo sapiens
  misc_RNA (1)...(19): siRNA sense strand
gcuaugagaccaugaucga

SEQ ID NO: 152212 - RNA, 19 nt, Homo sapiens
  misc_RNA (1)...(19): siRNA sense strand
gcaggcucccucuguauug

SEQ ID NO: 152213 - RNA, 19 nt, Homo sapiens
  misc_RNA (1)...(19): siRNA sense strand
ucagcaagauccagauugg

SEQ ID NO: 152214 - RNA, 19 nt, Homo sapiens
  misc_RNA (1)...(19): siRNA sense strand
augaagggcgucccauuua

SEQ ID NO: 152215 - RNA, 19 nt, Homo sapiens
  misc_RNA (1)...(19): siRNA sense strand
caucaaggcaauuuaucaa

SEQ ID NO: 152216 - RNA, 19 nt, Homo sapiens
  misc_RNA (1)...(19): siRNA sense strand
caucaucaaggcaauuuau

SEQ ID NO: 152217 - RNA, 19 nt, Homo sapiens
  misc_RNA (1)...(19): siRNA sense strand
ggcaucaggugcuccgaau

SEQ ID NO: 152218 - RNA, 19 nt, Homo sapiens
  misc_RNA (1)...(19): siRNA sense strand
ggaggagaucuaugacuuc

SEQ ID NO: 152219 - RNA, 19 nt, Homo sapiens
  misc_RNA (1)...(19): siRNA sense strand
agacguggcuggcgcuucu

SEQ ID NO: 152220 - RNA, 19 nt, Homo sapiens
  misc_RNA (1)...(19): siRNA sense strand
ggucugguuugcaaagaag

SEQ ID NO: 152221 - RNA, 19 nt, Homo sapiens
  misc_RNA (1)...(19): siRNA sense strand
ccugauggcuuugccuuca

SEQ ID NO: 152222 - RNA, 19 nt, Homo sapiens
  misc_RNA (1)...(19): siRNA sense strand
ggagaacccgcaccuuguc

SEQ ID NO: 152223 - RNA, 19 nt, Homo sapiens
  misc_RNA (1)...(19): siRNA sense strand
gcaucaucaaggcaauuua

SEQ ID NO: 152224 - RNA, 19 nt, Homo sapiens
  misc_RNA (1)...(19): siRNA sense strand
guaucccuauggcuacaaa

SEQ ID NO: 152225 - RNA, 19 nt, Homo sapiens
  misc_RNA (1)...(19): siRNA sense strand
gggucugguuugcaaagaa

SEQ ID NO: 152226 - RNA, 19 nt, Homo sapiens
  misc_RNA (1)...(19): siRNA sense strand
aaucgcauguggcgcaaga

SEQ ID NO: 152227 - RNA, 19 nt, Homo sapiens
  misc_RNA (1)...(19): siRNA sense strand
gcagcaucaucaaggcaau

SEQ ID NO: 152228 - RNA, 19 nt, Homo sapiens
  misc_RNA (1)...(19): siRNA sense strand
uuccaaggcugcugugaca

SEQ ID NO: 152229 - RNA, 19 nt, Homo sapiens
  misc_RNA (1)...(19): siRNA sense strand
ucaaguacuccuucaccuu

SEQ ID NO: 152230 - RNA, 19 nt, Homo sapiens
  misc_RNA (1)...(19): siRNA sense strand
caucaggugcuccgaaucu

SEQ ID NO: 152231 - RNA, 19 nt, Homo sapiens
  misc_RNA (1)...(19): siRNA sense strand
ggucaaguccauuguagac

SEQ ID NO: 152232 - RNA, 19 nt, Homo sapiens
  misc_RNA (1)...(19): siRNA sense strand
ucaagacuaugggcaggau

SEQ ID NO: 152233 - RNA, 19 nt, Homo sapiens
  misc_RNA (1)...(19): siRNA sense strand
ggcaucaaguacuccuuca

SEQ ID NO: 152234 - RNA, 19 nt, Homo sapiens
  misc_RNA (1)...(19): siRNA sense strand
ucaucaaggcaauuuauca

SEQ ID NO: 152235 - RNA, 19 nt, Homo sapiens
  misc_RNA (1)...(19): siRNA sense strand
caacuauggcagcaucauc

SEQ ID NO: 152236 - RNA, 19 nt, Homo sapiens
  misc_RNA (1)...(19): siRNA sense strand
ucaucuccauccacagcua

SEQ ID NO: 152237 - RNA, 19 nt, Homo sapiens
  misc_RNA (1)...(19): siRNA sense strand
uugcaaagaagaucacuca

SEQ ID NO: 152238 - RNA, 19 nt, Homo sapiens
  misc_RNA (1)...(19): siRNA sense strand
ucauggagcacacccugaa

SEQ ID NO: 152239 - RNA, 19 nt, Homo sapiens
  misc_RNA (1)...(19): siRNA sense strand
acuauugacuggaccuaca

SEQ ID NO: 152240 - RNA, 19 nt, Homo sapiens
  misc_RNA (1)...(19): siRNA sense strand
cauuguagacuuugugaag

SEQ ID NO: 152241 - RNA, 19 nt, Homo sapiens
  misc_RNA (1)...(19): siRNA sense strand
gaugaggcccagguacaga

SEQ ID NO: 152242 - RNA, 19 nt, Homo sapiens
  misc_RNA (1)...(19): siRNA sense strand
gagaacccgcaccuuguca

SEQ ID NO: 152243 - RNA, 19 nt, Homo sapiens
  misc_RNA (1)...(19): siRNA sense strand
gcauccaggcggucaagau

SEQ ID NO: 152244 - RNA, 19 nt, Homo sapiens
  misc_RNA (1)...(19): siRNA sense strand
gccagggcaucaaguacuc

SEQ ID NO: 152245 - RNA, 19 nt, Homo sapiens
  misc_RNA (1)...(19): siRNA sense strand
ucaaggccuucaucuccau

SEQ ID NO: 152246 - RNA, 19 nt, Homo sapiens
  misc_RNA (1)...(19): siRNA sense strand
gacgcuggcuuuggguugu

SEQ ID NO: 152247 - RNA, 19 nt, Homo sapiens
  misc_RNA (1)...(19): siRNA sense strand
cagcaggcucccucuguau

SEQ ID NO: 152248 - RNA, 19 nt, Homo sapiens
  misc_RNA (1)...(19): siRNA sense strand
gaucgucaccaacccugau

SEQ ID NO: 152249 - RNA, 19 nt, Homo sapiens
  misc_RNA (1)...(19): siRNA sense strand
gaucgacacgggcauccau

SEQ ID NO: 152250 - RNA, 19 nt, Homo sapiens
  misc_RNA (1)...(19): siRNA sense strand
agaagaucacucaagacua

SEQ ID NO: 152251 - RNA, 19 nt, Homo sapiens
  misc_RNA (1)...(19): siRNA sense strand
cggagaacccgcaccuugu

SEQ ID NO: 152252 - RNA, 19 nt, Homo sapiens
  misc_RNA (1)...(19): siRNA sense strand
acagccagggcaucaagua

SEQ ID NO: 152253 - RNA, 19 nt, Homo sapiens
  misc_RNA (1)...(19): siRNA sense strand
gcacuauugacuggaccua

SEQ ID NO: 152254 - RNA, 19 nt, Homo sapiens
  misc_RNA (1)...(19): siRNA sense strand
aagaagaucacucaagacu

SEQ ID NO: 152255 - RNA, 19 nt, Homo sapiens
  misc_RNA (1)...(19): siRNA sense strand
cagauuggcaacaccuaug

SEQ ID NO: 152256 - RNA, 19 nt, Homo sapiens
  misc_RNA (1)...(19): siRNA sense strand
ccagauuggcaacaccuau

SEQ ID NO: 152257 - RNA, 19 nt, Homo sapiens
  misc_RNA (1)...(19): siRNA sense strand
ccaccgacacuuuuaacua

SEQ ID NO: 152258 - RNA, 19 nt, Homo sapiens
  misc_RNA (1)...(19): siRNA sense strand
caaagagaaugaagaaaug

SEQ ID NO: 152259 - RNA, 19 nt, Homo sapiens
  misc_RNA (1)...(19): siRNA sense strand
gaacaucuccagcuugauu

SEQ ID NO: 152260 - RNA, 19 nt, Homo sapiens
  misc_RNA (1)...(19): siRNA sense strand
ggaccaaucugcucuguca

SEQ ID NO: 152261 - RNA, 19 nt, Homo sapiens
  misc_RNA (1)...(19): siRNA sense strand
ggacaaagagaaugaagaa

SEQ ID NO: 152262 - RNA, 19 nt, Homo sapiens
  misc_RNA (1)...(19): siRNA sense strand
ucacaaacccugauggaua

SEQ ID NO: 152263 - RNA, 19 nt, Homo sapiens
  misc_RNA (1)...(19): siRNA sense strand
gggcauaucuacugucuag

SEQ ID NO: 152264 - RNA, 19 nt, Homo sapiens
  misc_RNA (1)...(19): siRNA sense strand
gaagagaacggagugguaa

SEQ ID NO: 152265 - RNA, 19 nt, Homo sapiens
  misc_RNA (1)...(19): siRNA sense strand
ggaaaggacccauccauca

SEQ ID NO: 152266 - RNA, 19 nt, Homo sapiens
  misc_RNA (1)...(19): siRNA sense strand
gaacugggaugcagguuuu

SEQ ID NO: 152267 - RNA, 19 nt, Homo sapiens
  misc_RNA (1)...(19): siRNA sense strand
ggauacguguucucucaaa

SEQ ID NO: 152268 - RNA, 19 nt, Homo sapiens
  misc_RNA (1)...(19): siRNA sense strand
ggagugguaacuucaauuu

SEQ ID NO: 152269 - RNA, 19 nt, Homo sapiens
  misc_RNA (1)...(19): siRNA sense strand
guacucauuugccuuugaa

SEQ ID NO: 152270 - RNA, 19 nt, Homo sapiens
  misc_RNA (1)...(19): siRNA sense strand
aagaacaucuccagcuuga

SEQ ID NO: 152271 - RNA, 19 nt, Homo sapiens
  misc_RNA (1)...(19): siRNA sense strand
ucaagaacaucuccagcuu

SEQ ID NO: 152272 - RNA, 19 nt, Homo sapiens
  misc_RNA (1)...(19): siRNA sense strand
gaacggagugguaacuuca

SEQ ID NO: 152273 - RNA, 19 nt, Homo sapiens
  misc_RNA (1)...(19): siRNA sense strand
ggacagcaaauaagauugu

SEQ ID NO: 152274 - RNA, 19 nt, Homo sapiens
  misc_RNA (1)...(19): siRNA sense strand
caaguacucauuugccuuu

SEQ ID NO: 152275 - RNA, 19 nt, Homo sapiens
  misc_RNA (1)...(19): siRNA sense strand
ccuauuccaucaugauuga

SEQ ID NO: 152276 - RNA, 19 nt, Homo sapiens
  misc_RNA (1)...(19): siRNA sense strand
ugacugguccuaugauuau

SEQ ID NO: 152277 - RNA, 19 nt, Homo sapiens
  misc_RNA (1)...(19): siRNA sense strand
gagaaugaagaaaugcuuu

SEQ ID NO: 152278 - RNA, 19 nt, Homo sapiens
  misc_RNA (1)...(19): siRNA sense strand
cuaugaacgugcucaaguu

SEQ ID NO: 152279 - RNA, 19 nt, Homo sapiens
  misc_RNA (1)...(19): siRNA sense strand
aaagucaaggccuucauua

SEQ ID NO: 152280 - RNA, 19 nt, Homo sapiens
  misc_RNA (1)...(19): siRNA sense strand
ggaacugggaugcagguuu

SEQ ID NO: 152281 - RNA, 19 nt, Homo sapiens
  misc_RNA (1)...(19): siRNA sense strand
gauuguuucugauuaugga

SEQ ID NO: 152282 - RNA, 19 nt, Homo sapiens
  misc_RNA (1)...(19): siRNA sense strand
ccaaaaggcugcccaaucu

SEQ ID NO: 152283 - RNA, 19 nt, Homo sapiens
  misc_RNA (1)...(19): siRNA sense strand
cguguucucucaaaccaaa

SEQ ID NO: 152284 - RNA, 19 nt, Homo sapiens
  misc_RNA (1)...(19): siRNA sense strand
cacaaacccugauggauac

SEQ ID NO: 152285 - RNA, 19 nt, Homo sapiens
  misc_RNA (1)...(19): siRNA sense strand
aaucguauguggcggaaga

SEQ ID NO: 152286 - RNA, 19 nt, Homo sapiens
  misc_RNA (1)...(19): siRNA sense strand
guacaaagugggaccaauc

SEQ ID NO: 152287 - RNA, 19 nt, Homo sapiens
  misc_RNA (1)...(19): siRNA sense strand
gcaaauaagauuguuucug

SEQ ID NO: 152288 - RNA, 19 nt, Homo sapiens
  misc_RNA (1)...(19): siRNA sense strand
ucauuugccuuugaacuga

SEQ ID NO: 152289 - RNA, 19 nt, Homo sapiens
  misc_RNA (1)...(19): siRNA sense strand
ggcaucaaguacucauuug

SEQ ID NO: 152290 - RNA, 19 nt, Homo sapiens
  misc_RNA (1)...(19): siRNA sense strand
auaguggacuucaucaaga

SEQ ID NO: 152291 - RNA, 19 nt, Homo sapiens
  misc_RNA (1)...(19): siRNA sense strand
caacguccaggcagucaaa

SEQ ID NO: 152292 - RNA, 19 nt, Homo sapiens
  misc_RNA (1)...(19): siRNA sense strand
gcgcuacggcuuccucuug

SEQ ID NO: 152293 - RNA, 19 nt, Homo sapiens
  misc_RNA (1)...(19): siRNA sense strand
gcauugacugguccuauga

SEQ ID NO: 152294 - RNA, 19 nt, Homo sapiens
  misc_RNA (1)...(19): siRNA sense strand
acaaauguaccaaguuaga

SEQ ID NO: 152295 - RNA, 19 nt, Homo sapiens
  misc_RNA (1)...(19): siRNA sense strand
cuagugagcaaagugaaua

SEQ ID NO: 152296 - RNA, 19 nt, Homo sapiens
  misc_RNA (1)...(19): siRNA sense strand
ucuggaagccucuguguug

SEQ ID NO: 152297 - RNA, 19 nt, Homo sapiens
  misc_RNA (1)...(19): siRNA sense strand
cagcaaauaagauuguuuc

SEQ ID NO: 152298 - RNA, 19 nt, Homo sapiens
  misc_RNA (1)...(19): siRNA sense strand
aauauuggcucuucuuuug

SEQ ID NO: 152299 - RNA, 19 nt, Homo sapiens
  misc_RNA (1)...(19): siRNA sense strand
ugagcaaagugaauauugg

SEQ ID NO: 152300 - RNA, 19 nt, Homo sapiens
  misc_RNA (1)...(19): siRNA sense strand
aaucugcucugucaucuac

SEQ ID NO: 152301 - RNA, 19 nt, Homo sapiens
  misc_RNA (1)...(19): siRNA sense strand
ucauuauccuccacagcua

SEQ ID NO: 152302 - RNA, 19 nt, Homo sapiens
  misc_RNA (1)...(19): siRNA sense strand
caucaagagucauggaaaa

SEQ ID NO: 152303 - RNA, 19 nt, Homo sapiens
  misc_RNA (1)...(19): siRNA sense strand
gaaaggacccauccaucac

SEQ ID NO: 152304 - RNA, 19 nt, Homo sapiens
  misc_RNA (1)...(19): siRNA sense strand
gaggagacaagccagcuau

SEQ ID NO: 152305 - RNA, 19 nt, Homo sapiens
  misc_RNA (1)...(19): siRNA sense strand
ugagcacccuggucuagug

SEQ ID NO: 152306 - RNA, 19 nt, Homo sapiens
  misc_RNA (1)...(19): siRNA sense strand
agaccuggcuuggcuugaa

SEQ ID NO: 152307 - RNA, 19 nt, Homo sapiens
  misc_RNA (1)...(19): siRNA sense strand
uuugagaaccggccuauga

SEQ ID NO: 152308 - RNA, 19 nt, Homo sapiens
  misc_RNA (1)...(19): siRNA sense strand
agaagagaacggaguggua

SEQ ID NO: 152309 - RNA, 19 nt, Homo sapiens
  misc_RNA (1)...(19): siRNA sense strand
acucugaaguugaagugaa

SEQ ID NO: 152310 - RNA, 19 nt, Homo sapiens
  misc_RNA (1)...(19): siRNA sense strand
acaauuggaggcucaagaa

SEQ ID NO: 152311 - RNA, 19 nt, Homo sapiens
  misc_RNA (1)...(19): siRNA sense strand
gacagcaaauaagauuguu

SEQ ID NO: 152312 - RNA, 19 nt, Homo sapiens
  misc_RNA (1)...(19): siRNA sense strand
gagacaagccagcuaucug

SEQ ID NO: 152313 - RNA, 19 nt, Homo sapiens
  misc_RNA (1)...(19): siRNA sense strand
gugagcaaagugaauauug

SEQ ID NO: 152314 - RNA, 19 nt, Homo sapiens
  misc_RNA (1)...(19): siRNA sense strand
ggaggagacaagccagcua

SEQ ID NO: 152315 - RNA, 19 nt, Homo sapiens
  misc_RNA (1)...(19): siRNA sense strand
agaacggagugguaacuuc

SEQ ID NO: 152316 - RNA, 19 nt, Homo sapiens
  misc_RNA (1)...(19): siRNA sense strand
ggucuagugagcaaaguga

SEQ ID NO: 152317 - RNA, 19 nt, Homo sapiens
  misc_RNA (1)...(19): siRNA sense strand
ugaauauuggcucuucuuu

SEQ ID NO: 152318 - RNA, 19 nt, Homo sapiens
  misc_RNA (1)...(19): siRNA sense strand
gucaaggccuucauuaucc

SEQ ID NO: 152319 - RNA, 19 nt, Homo sapiens
  misc_RNA (1)...(19): siRNA sense strand
guguugguguggauccuaa

SEQ ID NO: 152320 - RNA, 19 nt, Homo sapiens
  misc_RNA (1)...(19): siRNA sense strand
gaauauuggcucuucuuuu

SEQ ID NO: 152321 - RNA, 19 nt, Homo sapiens
  misc_RNA (1)...(19): siRNA sense strand
uggcaucaaguacucauuu

SEQ ID NO: 152322 - RNA, 19 nt, Homo sapiens
  misc_RNA (1)...(19): siRNA sense strand
ggagacaagccagcuaucu

SEQ ID NO: 152323 - RNA, 19 nt, Homo sapiens
  misc_RNA (1)...(19): siRNA sense strand
uugaugagcugagugaagu

SEQ ID NO: 152324 - RNA, 19 nt, Homo sapiens
  misc_RNA (1)...(19): siRNA sense strand
agucaaggccuucauuauc

SEQ ID NO: 152325 - RNA, 19 nt, Homo sapiens
  misc_RNA (1)...(19): siRNA sense strand
cauaguggacuucaucaag

SEQ ID NO: 152326 - RNA, 19 nt, Homo sapiens
  misc_RNA (1)...(19): siRNA sense strand
accaagcaaugaagaacaa

SEQ ID NO: 152327 - RNA, 19 nt, Homo sapiens
  misc_RNA (1)...(19): siRNA sense strand
ggccuaccauacccuggaa

SEQ ID NO: 152328 - RNA, 19 nt, Homo sapiens
  misc_RNA (1)...(19): siRNA sense strand
ccaaucugcucugucaucu

SEQ ID NO: 152329 - RNA, 19 nt, Homo sapiens
  misc_RNA (1)...(19): siRNA sense strand
gcauggcaccaaguacaaa

SEQ ID NO: 152330 - RNA, 19 nt, Homo sapiens
  misc_RNA (1)...(19): siRNA sense strand
ugagugaaguggcccaaaa

SEQ ID NO: 152331 - RNA, 19 nt, Homo sapiens
  misc_RNA (1)...(19): siRNA sense strand
gaaguugaagugaaaucca

SEQ ID NO: 152332 - RNA, 19 nt, Homo sapiens
  misc_RNA (1)...(19): siRNA sense strand
ugaagugaaauccauagug

SEQ ID NO: 152333 - RNA, 19 nt, Homo sapiens
  misc_RNA (1)...(19): siRNA sense strand
gagaacggagugguaacuu

SEQ ID NO: 152334 - RNA, 19 nt, Homo sapiens
  misc_RNA (1)...(19): siRNA sense strand
gaccuggcuuggcuugaag

SEQ ID NO: 152335 - RNA, 19 nt, Homo sapiens
  misc_RNA (1)...(19): siRNA sense strand
gccaguggaggaagcauug

SEQ ID NO: 152336 - RNA, 19 nt, Homo sapiens
  misc_RNA (1)...(19): siRNA sense strand
auggauacguguucucuca

SEQ ID NO: 152337 - RNA, 19 nt, Homo sapiens
  misc_RNA (1)...(19): siRNA sense strand
uaccauacccuggaagaga

SEQ ID NO: 152338 - RNA, 19 nt, Homo sapiens
  misc_RNA (1)...(19): siRNA sense strand
gagcacccuggucuaguga

SEQ ID NO: 152339 - RNA, 19 nt, Homo sapiens
  misc_RNA (1)...(19): siRNA sense strand
ugacuuugaugagcugagu

SEQ ID NO: 152340 - RNA, 19 nt, Homo sapiens
  misc_RNA (1)...(19): siRNA sense strand
aaauguaccaaguuagaug

SEQ ID NO: 152341 - RNA, 19 nt, Homo sapiens
  misc_RNA (1)...(19): siRNA sense strand
caaauguaccaaguuagau

SEQ ID NO: 152342 - RNA, 19 nt, Homo sapiens
  misc_RNA (1)...(19): siRNA sense strand
cagucaaaguguucuugga

SEQ ID NO: 152343 - RNA, 19 nt, Homo sapiens
  misc_RNA (1)...(19): siRNA sense strand
gauacguguucucucaaac

SEQ ID NO: 152344 - RNA, 19 nt, Homo sapiens
  misc_RNA (1)...(19): siRNA sense strand
gacccagugccaacucuga

SEQ ID NO: 152345 - RNA, 19 nt, Homo sapiens
  misc_RNA (1)...(19): siRNA sense strand
agugguaacuucaauuuug

SEQ ID NO: 152346 - RNA, 19 nt, Homo sapiens
  misc_RNA (1)...(19): siRNA sense strand
gauuauggcaucaaguacu

SEQ ID NO: 152347 - RNA, 19 nt, Homo sapiens
  misc_RNA (1)...(19): siRNA sense strand
caagcaaugaagaacaaau

SEQ ID NO: 152348 - RNA, 19 nt, Homo sapiens
  misc_RNA (1)...(19): siRNA sense strand
cccaagaaauggauaaccu

SEQ ID NO: 152349 - RNA, 19 nt, Homo sapiens
  misc_RNA (1)...(19): siRNA sense strand
gacaaagagaaugaagaaa

SEQ ID NO: 152350 - RNA, 19 nt, Homo sapiens
  misc_RNA (1)...(19): siRNA sense strand
gugaauauuggcucuucuu

SEQ ID NO: 152351 - RNA, 19 nt, Homo sapiens
  misc_RNA (1)...(19): siRNA sense strand
cucugaaguugaagugaaa

SEQ ID NO: 152352 - RNA, 19 nt, Homo sapiens
  misc_RNA (1)...(19): siRNA sense strand
cacaagcuacggcacuuug

SEQ ID NO: 152353 - RNA, 19 nt, Homo sapiens
  misc_RNA (1)...(19): siRNA sense strand
ccuaugaacgugcucaagu

SEQ ID NO: 152354 - RNA, 19 nt, Homo sapiens
  misc_RNA (1)...(19): siRNA sense strand
uugacugguccuaugauua

SEQ ID NO: 152355 - RNA, 19 nt, Homo sapiens
  misc_RNA (1)...(19): siRNA sense strand
caagcuacggcacuuugga

SEQ ID NO: 152356 - RNA, 19 nt, Homo sapiens
  misc_RNA (1)...(19): siRNA sense strand
ucaucaagagucauggaaa

SEQ ID NO: 152357 - RNA, 19 nt, Homo sapiens
  misc_RNA (1)...(19): siRNA sense strand
gaaauggucucucguauua

SEQ ID NO: 152358 - RNA, 19 nt, Homo sapiens
  misc_RNA (1)...(19): siRNA sense strand
gauaucagguucuucuuua

SEQ ID NO: 152359 - RNA, 19 nt, Homo sapiens
  misc_RNA (1)...(19): siRNA sense strand
gcacugaccucaacaggaa

SEQ ID NO: 152360 - RNA, 19 nt, Homo sapiens
  misc_RNA (1)...(19): siRNA sense strand
cgaaagcugucacuaauuu

SEQ ID NO: 152361 - RNA, 19 nt, Homo sapiens
  misc_RNA (1)...(19): siRNA sense strand
caugcuagcugucaaauuu

SEQ ID NO: 152362 - RNA, 19 nt, Homo sapiens
  misc_RNA (1)...(19): siRNA sense strand
gaaagaagaaaggcuauuu

SEQ ID NO: 152363 - RNA, 19 nt, Homo sapiens
  misc_RNA (1)...(19): siRNA sense strand
gacgaaagcugucacuaau

SEQ ID NO: 152364 - RNA, 19 nt, Homo sapiens
  misc_RNA (1)...(19): siRNA sense strand
cuacaucuauggcccaaua

SEQ ID NO: 152365 - RNA, 19 nt, Homo sapiens
  misc_RNA (1)...(19): siRNA sense strand
ccaaugagcuugacuucug

SEQ ID NO: 152366 - RNA, 19 nt, Homo sapiens
  misc_RNA (1)...(19): siRNA sense strand
gaagccaccugaaugaaau

SEQ ID NO: 152367 - RNA, 19 nt, Homo sapiens
  misc_RNA (1)...(19): siRNA sense strand
ggccaaaguugcaaagauu

SEQ ID NO: 152368 - RNA, 19 nt, Homo sapiens
  misc_RNA (1)...(19): siRNA sense strand
gaagauaauccacuauaug

SEQ ID NO: 152369 - RNA, 19 nt, Homo sapiens
  misc_RNA (1)...(19): siRNA sense strand
aagaagagauugagaaaca

SEQ ID NO: 152370 - RNA, 19 nt, Homo sapiens
  misc_RNA (1)...(19): siRNA sense strand
cuaauaugaugguggauuu

SEQ ID NO: 152371 - RNA, 19 nt, Homo sapiens
  misc_RNA (1)...(19): siRNA sense strand
gaugguggauuuccgaguu

SEQ ID NO: 152372 - RNA, 19 nt, Homo sapiens
  misc_RNA (1)...(19): siRNA sense strand
gaaacccgcuacaucuaug

SEQ ID NO: 152373 - RNA, 19 nt, Homo sapiens
  misc_RNA (1)...(19): siRNA sense strand
ggauauauuuggucaugga

SEQ ID NO: 152374 - RNA, 19 nt, Homo sapiens
  misc_RNA (1)...(19): siRNA sense strand
ccaaguauauccucaagca

SEQ ID NO: 152375 - RNA, 19 nt, Homo sapiens
  misc_RNA (1)...(19): siRNA sense strand
gaaaucaagguuuacauca

SEQ ID NO: 152376 - RNA, 19 nt, Homo sapiens
  misc_RNA (1)...(19): siRNA sense strand
gauaaaggcaaauuugguu

SEQ ID NO: 152377 - RNA, 19 nt, Homo sapiens
  misc_RNA (1)...(19): siRNA sense strand
gauuggcacugauguucua

SEQ ID NO: 152378 - RNA, 19 nt, Homo sapiens
  misc_RNA (1)...(19): siRNA sense strand
gauaauccacuauauguuc

SEQ ID NO: 152379 - RNA, 19 nt, Homo sapiens
  misc_RNA (1)...(19): siRNA sense strand
ggaaaagaaugaaagaaga

SEQ ID NO: 152380 - RNA, 19 nt, Homo sapiens
  misc_RNA (1)...(19): siRNA sense strand
aagcagacaucauaaagga

SEQ ID NO: 152381 - RNA, 19 nt, Homo sapiens
  misc_RNA (1)...(19): siRNA sense strand
gagcuugacuucugguauc

SEQ ID NO: 152382 - RNA, 19 nt, Homo sapiens
  misc_RNA (1)...(19): siRNA sense strand
caucaaaacugccaccuaa

SEQ ID NO: 152383 - RNA, 19 nt, Homo sapiens
  misc_RNA (1)...(19): siRNA sense strand
ccaaaugcaucggcacuga

SEQ ID NO: 152384 - RNA, 19 nt, Homo sapiens
  misc_RNA (1)...(19): siRNA sense strand
uaacaccaaugacccaugu

SEQ ID NO: 152385 - RNA, 19 nt, Homo sapiens
  misc_RNA (1)...(19): siRNA sense strand
gcaaagauuggcacugaug

SEQ ID NO: 152386 - RNA, 19 nt, Homo sapiens
  misc_RNA (1)...(19): siRNA sense strand
gcuccgagauaaaggcaaa

SEQ ID NO: 152387 - RNA, 19 nt, Homo sapiens
  misc_RNA (1)...(19): siRNA sense strand
aauggucucucguauuaaa

SEQ ID NO: 152388 - RNA, 19 nt, Homo sapiens
  misc_RNA (1)...(19): siRNA sense strand
cgagauaaaggcaaauuug

SEQ ID NO: 152389 - RNA, 19 nt, Homo sapiens
  misc_RNA (1)...(19): siRNA sense strand
aaacacacauuugccuuug

SEQ ID NO: 152390 - RNA, 19 nt, Homo sapiens
  misc_RNA (1)...(19): siRNA sense strand
agacgaaagcugucacuaa

SEQ ID NO: 152391 - RNA, 19 nt, Homo sapiens
  misc_RNA (1)...(19): siRNA sense strand
ccuuugagcuccgagauaa

SEQ ID NO: 152392 - RNA, 19 nt, Homo sapiens
  misc_RNA (1)...(19): siRNA sense strand
gauguucuaucaacucgau

SEQ ID NO: 152393 - RNA, 19 nt, Homo sapiens
  misc_RNA (1)...(19): siRNA sense strand
gggcaucaaacacacauuu

SEQ ID NO: 152394 - RNA, 19 nt, Homo sapiens
  misc_RNA (1)...(19): siRNA sense strand
gccagugguuugucuauca

SEQ ID NO: 152395 - RNA, 19 nt, Homo sapiens
  misc_RNA (1)...(19): siRNA sense strand
cugaaaagaugauggauaa

SEQ ID NO: 152396 - RNA, 19 nt, Homo sapiens
  misc_RNA (1)...(19): siRNA sense strand
ccucaagcauacuuccuaa

SEQ ID NO: 152397 - RNA, 19 nt, Homo sapiens
  misc_RNA (1)...(19): siRNA sense strand
gauucaugaucuacaagaa

SEQ ID NO: 152398 - RNA, 19 nt, Homo sapiens
  misc_RNA (1)...(19): siRNA sense strand
ggacaaagaaccgcaugug

SEQ ID NO: 152399 - RNA, 19 nt, Homo sapiens
  misc_RNA (1)...(19): siRNA sense strand
aaaauuggaucuacuguug

SEQ ID NO: 152400 - RNA, 19 nt, Homo sapiens
  misc_RNA (1)...(19): siRNA sense strand
aaacaagcagacaucauaa

SEQ ID NO: 152401 - RNA, 19 nt, Homo sapiens
  misc_RNA (1)...(19): siRNA sense strand
aaguauauccucaagcaua

SEQ ID NO: 152402 - RNA, 19 nt, Homo sapiens
  misc_RNA (1)...(19): siRNA sense strand
uugcaaagauuggcacuga

SEQ ID NO: 152403 - RNA, 19 nt, Homo sapiens
  misc_RNA (1)...(19): siRNA sense strand
gauuguggcuuggacugaa

SEQ ID NO: 152404 - RNA, 19 nt, Homo sapiens
  misc_RNA (1)...(19): siRNA sense strand
ugaaauggucucucguauu

SEQ ID NO: 152405 - RNA, 19 nt, Homo sapiens
  misc_RNA (1)...(19): siRNA sense strand
cccaauagaaucaacaauu

SEQ ID NO: 152406 - RNA, 19 nt, Homo sapiens
  misc_RNA (1)...(19): siRNA sense strand
ucaacaauuuacccgauau

SEQ ID NO: 152407 - RNA, 19 nt, Homo sapiens
  misc_RNA (1)...(19): siRNA sense strand
acaagaagagauugagaaa

SEQ ID NO: 152408 - RNA, 19 nt, Homo sapiens
  misc_RNA (1)...(19): siRNA sense strand
gcuauuguuucccuaugga

SEQ ID NO: 152409 - RNA, 19 nt, Homo sapiens
  misc_RNA (1)...(19): siRNA sense strand
cacuauauguucugaagau

SEQ ID NO: 152410 - RNA, 19 nt, Homo sapiens
  misc_RNA (1)...(19): siRNA sense strand
gagauaaaggcaaauuugg

SEQ ID NO: 152411 - RNA, 19 nt, Homo sapiens
  misc_RNA (1)...(19): siRNA sense strand
gaagagauugagaaacagu

SEQ ID NO: 152412 - RNA, 19 nt, Homo sapiens
  misc_RNA (1)...(19): siRNA sense strand
ccaccugaaugaaaucaag

SEQ ID NO: 152413 - RNA, 19 nt, Homo sapiens
  misc_RNA (1)...(19): siRNA sense strand
caccagaguccgagaaaga

SEQ ID NO: 152414 - RNA, 19 nt, Homo sapiens
  misc_RNA (1)...(19): siRNA sense strand
uauauuuggucauggacaa

SEQ ID NO: 152415 - RNA, 19 nt, Homo sapiens
  misc_RNA (1)...(19): siRNA sense strand
aaaacaagcagacaucaua

SEQ ID NO: 152416 - RNA, 19 nt, Homo sapiens
  misc_RNA (1)...(19): siRNA sense strand
uuagaagccaccugaauga

SEQ ID NO: 152417 - RNA, 19 nt, Homo sapiens
  misc_RNA (1)...(19): siRNA sense strand
cgauaucagguucuucuuu

SEQ ID NO: 152418 - RNA, 19 nt, Homo sapiens
  misc_RNA (1)...(19): siRNA sense strand
uauauguucugaagauugg

SEQ ID NO: 152419 - RNA, 19 nt, Homo sapiens
  misc_RNA (1)...(19): siRNA sense strand
aauuggaucuacuguugaa

SEQ ID NO: 152420 - RNA, 19 nt, Homo sapiens
  misc_RNA (1)...(19): siRNA sense strand
agaagccaccugaaugaaa

SEQ ID NO: 152421 - RNA, 19 nt, Homo sapiens
  misc_RNA (1)...(19): siRNA sense strand
gcuaauaugaugguggauu

SEQ ID NO: 152422 - RNA, 19 nt, Homo sapiens
  misc_RNA (1)...(19): siRNA sense strand
uguugaagauaauccacua

SEQ ID NO: 152423 - RNA, 19 nt, Homo sapiens
  misc_RNA (1)...(19): siRNA sense strand
cauaaaggacuuggccaaa

SEQ ID NO: 152424 - RNA, 19 nt, Homo sapiens
  misc_RNA (1)...(19): siRNA sense strand
ccuguggguuugauugcua

SEQ ID NO: 152425 - RNA, 19 nt, Homo sapiens
  misc_RNA (1)...(19): siRNA sense strand
ugaaacccgcuacaucuau

SEQ ID NO: 152426 - RNA, 19 nt, Homo sapiens
  misc_RNA (1)...(19): siRNA sense strand
caucggcacugaccucaac

SEQ ID NO: 152427 - RNA, 19 nt, Homo sapiens
  misc_RNA (1)...(19): siRNA sense strand
guugauggauauauuuggu

SEQ ID NO: 152428 - RNA, 19 nt, Homo sapiens
  misc_RNA (1)...(19): siRNA sense strand
gugcagagagaccaugcua

SEQ ID NO: 152429 - RNA, 19 nt, Homo sapiens
  misc_RNA (1)...(19): siRNA sense strand
caaauuugguuuucuccuu

SEQ ID NO: 152430 - RNA, 19 nt, Homo sapiens
  misc_RNA (1)...(19): siRNA sense strand
gaccucaacaggaauuuua

SEQ ID NO: 152431 - RNA, 19 nt, Homo sapiens
  misc_RNA (1)...(19): siRNA sense strand
ccugaaauggucucucgua

SEQ ID NO: 152432 - RNA, 19 nt, Homo sapiens
  misc_RNA (1)...(19): siRNA sense strand
gaccugggcaucaaacaca

SEQ ID NO: 152433 - RNA, 19 nt, Homo sapiens
  misc_RNA (1)...(19): siRNA sense strand
uaugaaacccgcuacaucu

SEQ ID NO: 152434 - RNA, 19 nt, Homo sapiens
  misc_RNA (1)...(19): siRNA sense strand
ugaaaucaagguuuacauc

SEQ ID NO: 152435 - RNA, 19 nt, Homo sapiens
  misc_RNA (1)...(19): siRNA sense strand
cugaaauggucucucguau

SEQ ID NO: 152436 - RNA, 19 nt, Homo sapiens
  misc_RNA (1)...(19): siRNA sense strand
aaugcacuaugaaaucuug

SEQ ID NO: 152437 - RNA, 19 nt, Homo sapiens
  misc_RNA (1)...(19): siRNA sense strand
aagccaacgugcagagaga

SEQ ID NO: 152438 - RNA, 19 nt, Homo sapiens
  misc_RNA (1)...(19): siRNA sense strand
gcaccagaguccgagaaag

SEQ ID NO: 152439 - RNA, 19 nt, Homo sapiens
  misc_RNA (1)...(19): siRNA sense strand
uuacauucuuccuguguuc

SEQ ID NO: 152440 - RNA, 19 nt, Homo sapiens
  misc_RNA (1)...(19): siRNA sense strand
gcaggcacagcuacgcaaa

SEQ ID NO: 152441 - RNA, 19 nt, Homo sapiens
  misc_RNA (1)...(19): siRNA sense strand
uucaugaucuacaagaaga

SEQ ID NO: 152442 - RNA, 19 nt, Homo sapiens
  misc_RNA (1)...(19): siRNA sense strand
gaaaagaugauggauaagu

SEQ ID NO: 152443 - RNA, 19 nt, Homo sapiens
  misc_RNA (1)...(19): siRNA sense strand
gauaugaaacccgcuacau

SEQ ID NO: 152444 - RNA, 19 nt, Homo sapiens
  misc_RNA (1)...(19): siRNA sense strand
uggccaaaguugcaaagau

SEQ ID NO: 152445 - RNA, 19 nt, Homo sapiens
  misc_RNA (1)...(19): siRNA sense strand
caugaggacuuggccaaag

SEQ ID NO: 152446 - RNA, 19 nt, Homo sapiens
  misc_RNA (1)...(19): siRNA sense strand
uacaagaagagauugagaa

SEQ ID NO: 152447 - RNA, 19 nt, Homo sapiens
  misc_RNA (1)...(19): siRNA sense strand
gaccaugcuagcugucaaa

SEQ ID NO: 152448 - RNA, 19 nt, Homo sapiens
  misc_RNA (1)...(19): siRNA sense strand
aaugacccaugugcagaua

SEQ ID NO: 152449 - RNA, 19 nt, Homo sapiens
  misc_RNA (1)...(19): siRNA sense strand
gggagaaacaaaauuauga

SEQ ID NO: 152450 - RNA, 19 nt, Homo sapiens
  misc_RNA (1)...(19): siRNA sense strand
aaacuuaugggagaaacaa

SEQ ID NO: 152451 - RNA, 19 nt, Homo sapiens
  misc_RNA (1)...(19): siRNA sense strand
cuaccacucuugcaauugc

SEQ ID NO: 152452 - RNA, 19 nt, Homo sapiens
  misc_RNA (1)...(19): siRNA sense strand
uaucagguucuucuuuaga

SEQ ID NO: 152453 - RNA, 19 nt, Homo sapiens
  misc_RNA (1)...(19): siRNA sense strand
acacacauuugccuuugag

SEQ ID NO: 152454 - RNA, 19 nt, Homo sapiens
  misc_RNA (1)...(19): siRNA sense strand
cauccugccuguggguuug

SEQ ID NO: 152455 - RNA, 19 nt, Homo sapiens
  misc_RNA (1)...(19): siRNA sense strand
gaagguguuccgcgugaag

SEQ ID NO: 152456 - RNA, 19 nt, Homo sapiens
  misc_RNA (1)...(19): siRNA sense strand
cuuaugaccugggcaucaa

SEQ ID NO: 152457 - RNA, 19 nt, Homo sapiens
  misc_RNA (1)...(19): siRNA sense strand
gagaagguguuccguguua

SEQ ID NO: 152458 - RNA, 19 nt, Homo sapiens
  misc_RNA (1)...(19): siRNA sense strand
gaacaaugcugaguugaau

SEQ ID NO: 152459 - RNA, 19 nt, Homo sapiens
  misc_RNA (1)...(19): siRNA sense strand
gaucuacccuuacucauau

SEQ ID NO: 152460 - RNA, 19 nt, Homo sapiens
  misc_RNA (1)...(19): siRNA sense strand
ccaaggcccuggcugauuu

SEQ ID NO: 152461 - RNA, 19 nt, Homo sapiens
  misc_RNA (1)...(19): siRNA sense strand
acaguugacuuccguguua

SEQ ID NO: 152462 - RNA, 19 nt, Homo sapiens
  misc_RNA (1)...(19): siRNA sense strand
gcaacaaacucucuuccau

SEQ ID NO: 152463 - RNA, 19 nt, Homo sapiens
  misc_RNA (1)...(19): siRNA sense strand
cgacugggcuuaugaccaa

SEQ ID NO: 152464 - RNA, 19 nt, Homo sapiens
  misc_RNA (1)...(19): siRNA sense strand
ucaaguauguugccagcua

SEQ ID NO: 152465 - RNA, 19 nt, Homo sapiens
  misc_RNA (1)...(19): siRNA sense strand
gauauuccuucaccuuuga

SEQ ID NO: 152466 - RNA, 19 nt, Homo sapiens
  misc_RNA (1)...(19): siRNA sense strand
ggcuaaagcuacugugaaa

SEQ ID NO: 152467 - RNA, 19 nt, Homo sapiens
  misc_RNA (1)...(19): siRNA sense strand
caaaucaaaccucacagua

SEQ ID NO: 152468 - RNA, 19 nt, Homo sapiens
  misc_RNA (1)...(19): siRNA sense strand
ugaaagaacuugccucacu

SEQ ID NO: 152469 - RNA, 19 nt, Homo sapiens
  misc_RNA (1)...(19): siRNA sense strand
gaaauuggagccucucgaa

SEQ ID NO: 152470 - RNA, 19 nt, Homo sapiens
  misc_RNA (1)...(19): siRNA sense strand
caacaagugggaaacgaua

SEQ ID NO: 152471 - RNA, 19 nt, Homo sapiens
  misc_RNA (1)...(19): siRNA sense strand
ugagaacaaugcugaguug

SEQ ID NO: 152472 - RNA, 19 nt, Homo sapiens
  misc_RNA (1)...(19): siRNA sense strand
caacaggacacaguuauga

SEQ ID NO: 152473 - RNA, 19 nt, Homo sapiens
  misc_RNA (1)...(19): siRNA sense strand
caaacucucuuccaucaag

SEQ ID NO: 152474 - RNA, 19 nt, Homo sapiens
  misc_RNA (1)...(19): siRNA sense strand
uaacauaauccgcgaguug

SEQ ID NO: 152475 - RNA, 19 nt, Homo sapiens
  misc_RNA (1)...(19): siRNA sense strand
aaaugaugaucuacccuua

SEQ ID NO: 152476 - RNA, 19 nt, Homo sapiens
  misc_RNA (1)...(19): siRNA sense strand
uaagcaaccugagaaaugu

SEQ ID NO: 152477 - RNA, 19 nt, Homo sapiens
  misc_RNA (1)...(19): siRNA sense strand
gcacagaccccaacagaaa

SEQ ID NO: 152478 - RNA, 19 nt, Homo sapiens
  misc_RNA (1)...(19): siRNA sense strand
cauacuggaucuagcauug

SEQ ID NO: 152479 - RNA, 19 nt, Homo sapiens
  misc_RNA (1)...(19): siRNA sense strand
gauagaggcuuggacucaa

SEQ ID NO: 152480 - RNA, 19 nt, Homo sapiens
  misc_RNA (1)...(19): siRNA sense strand
caacaagucgccacugaga

SEQ ID NO: 152481 - RNA, 19 nt, Homo sapiens
  misc_RNA (1)...(19): siRNA sense strand
aaucaaaccucacaguaca

SEQ ID NO: 152482 - RNA, 19 nt, Homo sapiens
  misc_RNA (1)...(19): siRNA sense strand
aagacucgcuccacccaua

SEQ ID NO: 152483 - RNA, 19 nt, Homo sapiens
  misc_RNA (1)...(19): siRNA sense strand
gaccaaggaaucagauauu

SEQ ID NO: 152484 - RNA, 19 nt, Homo sapiens
  misc_RNA (1)...(19): siRNA sense strand
caauacaagguacugauaa

SEQ ID NO: 152485 - RNA, 19 nt, Homo sapiens
  misc_RNA (1)...(19): siRNA sense strand
gaugcugguuggugugaaa

SEQ ID NO: 152486 - RNA, 19 nt, Homo sapiens
  misc_RNA (1)...(19): siRNA sense strand
guguuaacguugaagauga

SEQ ID NO: 152487 - RNA, 19 nt, Homo sapiens
  misc_RNA (1)...(19): siRNA sense strand
uaaagcuacugugaaagaa

SEQ ID NO: 152488 - RNA, 19 nt, Homo sapiens
  misc_RNA (1)...(19): siRNA sense strand
caaacucggugagaacaau

SEQ ID NO: 152489 - RNA, 19 nt, Homo sapiens
  misc_RNA (1)...(19): siRNA sense strand
gaucuagcauuggcacaga

SEQ ID NO: 152490 - RNA, 19 nt, Homo sapiens
  misc_RNA (1)...(19): siRNA sense strand
ggacgugagauccaaguga

SEQ ID NO: 152491 - RNA, 19 nt, Homo sapiens
  misc_RNA (1)...(19): siRNA sense strand
gagaggcuguucguaccua

SEQ ID NO: 152492 - RNA, 19 nt, Homo sapiens
  misc_RNA (1)...(19): siRNA sense strand
ggacacaguuaugagaagu

SEQ ID NO: 152493 - RNA, 19 nt, Homo sapiens
  misc_RNA (1)...(19): siRNA sense strand
ccucaucucucgcaguguu

SEQ ID NO: 152494 - RNA, 19 nt, Homo sapiens
  misc_RNA (1)...(19): siRNA sense strand
cuaaagcuacugugaaaga

SEQ ID NO: 152495 - RNA, 19 nt, Homo sapiens
  misc_RNA (1)...(19): siRNA sense strand
aacaaacucucuuccauca

SEQ ID NO: 152496 - RNA, 19 nt, Homo sapiens
  misc_RNA (1)...(19): siRNA sense strand
ugaucuacccuuacucaua

SEQ ID NO: 152497 - RNA, 19 nt, Homo sapiens
  misc_RNA (1)...(19): siRNA sense strand
cagaagauacugucacugu

SEQ ID NO: 152498 - RNA, 19 nt, Homo sapiens
  misc_RNA (1)...(19): siRNA sense strand
ucucuuccaucaaggcaua

SEQ ID NO: 152499 - RNA, 19 nt, Homo sapiens
  misc_RNA (1)...(19): siRNA sense strand
gguguuccguguuaacguu

SEQ ID NO: 152500 - RNA, 19 nt, Homo sapiens
  misc_RNA (1)...(19): siRNA sense strand
gcacgacccagauugacuu

SEQ ID NO: 152501 - RNA, 19 nt, Homo sapiens
  misc_RNA (1)...(19): siRNA sense strand
gaugaucuacccuuacuca

SEQ ID NO: 152502 - RNA, 19 nt, Homo sapiens
  misc_RNA (1)...(19): siRNA sense strand
gccagugguuuguaagaga

SEQ ID NO: 152503 - RNA, 19 nt, Homo sapiens
  misc_RNA (1)...(19): siRNA sense strand
uggcaaagcuggacaaaau

SEQ ID NO: 152504 - RNA, 19 nt, Homo sapiens
  misc_RNA (1)...(19): siRNA sense strand
ugacuuccguguuaaagca

SEQ ID NO: 152505 - RNA, 19 nt, Homo sapiens
  misc_RNA (1)...(19): siRNA sense strand
aaagcagaaugaacuacaa

SEQ ID NO: 152506 - RNA, 19 nt, Homo sapiens
  misc_RNA (1)...(19): siRNA sense strand
guuaugagaaguacaacaa

SEQ ID NO: 152507 - RNA, 19 nt, Homo sapiens
  misc_RNA (1)...(19): siRNA sense strand
acaagguacugauaagcaa

SEQ ID NO: 152508 - RNA, 19 nt, Homo sapiens
  misc_RNA (1)...(19): siRNA sense strand
acaauacaagguacugaua

SEQ ID NO: 152509 - RNA, 19 nt, Homo sapiens
  misc_RNA (1)...(19): siRNA sense strand
gcagaaugaacuacaauac

SEQ ID NO: 152510 - RNA, 19 nt, Homo sapiens
  misc_RNA (1)...(19): siRNA sense strand
ugaacuacaauacaaggua

SEQ ID NO: 152511 - RNA, 19 nt, Homo sapiens
  misc_RNA (1)...(19): siRNA sense strand
caucaaggcauaucugaca

SEQ ID NO: 152512 - RNA, 19 nt, Homo sapiens
  misc_RNA (1)...(19): siRNA sense strand
gcugguuggugugaaauug

SEQ ID NO: 152513 - RNA, 19 nt, Homo sapiens
  misc_RNA (1)...(19): siRNA sense strand
guggauuucuccugcauuc

SEQ ID NO: 152514 - RNA, 19 nt, Homo sapiens
  misc_RNA (1)...(19): siRNA sense strand
gcaacaggacacaguuaug

SEQ ID NO: 152515 - RNA, 19 nt, Homo sapiens
  misc_RNA (1)...(19): siRNA sense strand
gcaccaaguacacauaugg

SEQ ID NO: 152516 - RNA, 19 nt, Homo sapiens
  misc_RNA (1)...(19): siRNA sense strand
ugaaugcccuggcuaaagc

SEQ ID NO: 152517 - RNA, 19 nt, Homo sapiens
  misc_RNA (1)...(19): siRNA sense strand
ggcccuggcugauuucauc

SEQ ID NO: 152518 - RNA, 19 nt, Homo sapiens
  misc_RNA (1)...(19): siRNA sense strand
cagauauuccuucaccuuu

SEQ ID NO: 152519 - RNA, 19 nt, Homo sapiens
  misc_RNA (1)...(19): siRNA sense strand
gauaagcaaccugagaaau

SEQ ID NO: 152520 - RNA, 19 nt, Homo sapiens
  misc_RNA (1)...(19): siRNA sense strand
cgagauacaggcagauaug

SEQ ID NO: 152521 - RNA, 19 nt, Homo sapiens
  misc_RNA (1)...(19): siRNA sense strand
agauauuccuucaccuuug

SEQ ID NO: 152522 - RNA, 19 nt, Homo sapiens
  misc_RNA (1)...(19): siRNA sense strand
caaggcauaucugacaauc

SEQ ID NO: 152523 - RNA, 19 nt, Homo sapiens
  misc_RNA (1)...(19): siRNA sense strand
gcaaagcuggacaaaauaa

SEQ ID NO: 152524 - RNA, 19 nt, Homo sapiens
  misc_RNA (1)...(19): siRNA sense strand
uaugagaaguacaacaagu

SEQ ID NO: 152525 - RNA, 19 nt, Homo sapiens
  misc_RNA (1)...(19): siRNA sense strand
gguggaggcucaguuugau

SEQ ID NO: 152526 - RNA, 19 nt, Homo sapiens
  misc_RNA (1)...(19): siRNA sense strand
gaauccagcccucaucucu

SEQ ID NO: 152527 - RNA, 19 nt, Homo sapiens
  misc_RNA (1)...(19): siRNA sense strand
gugcaacaggacacaguua

SEQ ID NO: 152528 - RNA, 19 nt, Homo sapiens
  misc_RNA (1)...(19): siRNA sense strand
auaagcaaccugagaaaug

SEQ ID NO: 152529 - RNA, 19 nt, Homo sapiens
  misc_RNA (1)...(19): siRNA sense strand
cagaaugaacuacaauaca

SEQ ID NO: 152530 - RNA, 19 nt, Homo sapiens
  misc_RNA (1)...(19): siRNA sense strand
aggcauaucugacaaucca

SEQ ID NO: 152531 - RNA, 19 nt, Homo sapiens
  misc_RNA (1)...(19): siRNA sense strand
caacagaaauuuugaugcu

SEQ ID NO: 152532 - RNA, 19 nt, Homo sapiens
  misc_RNA (1)...(19): siRNA sense strand
aaaccucacaguacaguug

SEQ ID NO: 152533 - RNA, 19 nt, Homo sapiens
  misc_RNA (1)...(19): siRNA sense strand
gaaugaacuacaauacaag

SEQ ID NO: 152534 - RNA, 19 nt, Homo sapiens
  misc_RNA (1)...(19): siRNA sense strand
gcucugacgacugggcuua

SEQ ID NO: 152535 - RNA, 19 nt, Homo sapiens
  misc_RNA (1)...(19): siRNA sense strand
uaaagcagaaugaacuaca

SEQ ID NO: 152536 - RNA, 19 nt, Homo sapiens
  misc_RNA (1)...(19): siRNA sense strand
acacaaaucaaaccucaca

SEQ ID NO: 152537 - RNA, 19 nt, Homo sapiens
  misc_RNA (1)...(19): siRNA sense strand
ucacaguacaguugacuuc

SEQ ID NO: 152538 - RNA, 19 nt, Homo sapiens
  misc_RNA (1)...(19): siRNA sense strand
ggauuucuccugcauucug

SEQ ID NO: 152539 - RNA, 19 nt, Homo sapiens
  misc_RNA (1)...(19): siRNA sense strand
aauacaagguacugauaag

SEQ ID NO: 152540 - RNA, 19 nt, Homo sapiens
  misc_RNA (1)...(19): siRNA sense strand
ucagauauuccuucaccuu

SEQ ID NO: 152541 - RNA, 19 nt, Homo sapiens
  misc_RNA (1)...(19): siRNA sense strand
uguuaacguugaagaugaa

SEQ ID NO: 152542 - RNA, 19 nt, Homo sapiens
  misc_RNA (1)...(19): siRNA sense strand
agaacaaugcugaguugaa

SEQ ID NO: 152543 - RNA, 19 nt, Homo sapiens
  misc_RNA (1)...(19): siRNA sense strand
ccacucguacucccaaaug

SEQ ID NO: 152544 - RNA, 19 nt, Homo sapiens
  misc_RNA (1)...(19): siRNA sense strand
guaagagaggcuguucgua

SEQ ID NO: 152545 - RNA, 19 nt, Homo sapiens
  misc_RNA (1)...(19): siRNA sense strand
acaagucgccacugagaau

SEQ ID NO: 152546 - RNA, 19 nt, Homo sapiens
  misc_RNA (1)...(19): siRNA sense strand
cucaacaagucgccacuga

SEQ ID NO: 152547 - RNA, 19 nt, Homo sapiens
  misc_RNA (1)...(19): siRNA sense strand
ccagcacgacccagauuga

SEQ ID NO: 152548 - RNA, 19 nt, Homo sapiens
  misc_RNA (1)...(19): siRNA sense strand
ugaccaaggaaucagauau

SEQ ID NO: 152549 - RNA, 19 nt, Homo sapiens
  misc_RNA (1)...(19): siRNA sense strand
cgauagaggcuuggacuca

SEQ ID NO: 152550 - RNA, 19 nt, Homo sapiens
  misc_RNA (1)...(19): siRNA sense strand
cuuacaaacucggugagaa

SEQ ID NO: 152551 - RNA, 19 nt, Homo sapiens
  misc_RNA (1)...(19): siRNA sense strand
cgaaaccccugugaugaaa

SEQ ID NO: 152552 - RNA, 19 nt, Homo sapiens
  misc_RNA (1)...(19): siRNA sense strand
gaguggauuucuccugcau

SEQ ID NO: 152553 - RNA, 19 nt, Homo sapiens
  misc_RNA (1)...(19): siRNA sense strand
agaagguguuccguguuaa

SEQ ID NO: 152554 - RNA, 19 nt, Homo sapiens
  misc_RNA (1)...(19): siRNA sense strand
cccgggagcuacaacaauc

SEQ ID NO: 152555 - RNA, 19 nt, Homo sapiens
  misc_RNA (1)...(19): siRNA sense strand
gugagaacaaugcugaguu

SEQ ID NO: 152556 - RNA, 19 nt, Homo sapiens
  misc_RNA (1)...(19): siRNA sense strand
gcacuuugaaggcgagaag

SEQ ID NO: 152557 - RNA, 19 nt, Homo sapiens
  misc_RNA (1)...(19): siRNA sense strand
gaacagaccugaauaggaa

SEQ ID NO: 152558 - RNA, 19 nt, Homo sapiens
  misc_RNA (1)...(19): siRNA sense strand
gguaacagcugaccuuauu

SEQ ID NO: 152559 - RNA, 19 nt, Homo sapiens
  misc_RNA (1)...(19): siRNA sense strand
gaagaaauaucaaccagau

SEQ ID NO: 152560 - RNA, 19 nt, Homo sapiens
  misc_RNA (1)...(19): siRNA sense strand
gaauggaucucuccugcuu

SEQ ID NO: 152561 - RNA, 19 nt, Homo sapiens
  misc_RNA (1)...(19): siRNA sense strand
ucaaccagauuaaagcaua

SEQ ID NO: 152562 - RNA, 19 nt, Homo sapiens
  misc_RNA (1)...(19): siRNA sense strand
cagcugaccuuauugugaa

SEQ ID NO: 152563 - RNA, 19 nt, Homo sapiens
  misc_RNA (1)...(19): siRNA sense strand
ugaaggcaguggcuaguuu

SEQ ID NO: 152564 - RNA, 19 nt, Homo sapiens
  misc_RNA (1)...(19): siRNA sense strand
uggaagaucuuauucaaca

SEQ ID NO: 152565 - RNA, 19 nt, Homo sapiens
  misc_RNA (1)...(19): siRNA sense strand
gaaaccuacuguggacuuu

SEQ ID NO: 152566 - RNA, 19 nt, Homo sapiens
  misc_RNA (1)...(19): siRNA sense strand
ggaauuccaugcagugucu

SEQ ID NO: 152567 - RNA, 19 nt, Homo sapiens
  misc_RNA (1)...(19): siRNA sense strand
ggcaucaaauauucguuua

SEQ ID NO: 152568 - RNA, 19 nt, Homo sapiens
  misc_RNA (1)...(19): siRNA sense strand
caguaucacucacuaaaug

SEQ ID NO: 152569 - RNA, 19 nt, Homo sapiens
  misc_RNA (1)...(19): siRNA sense strand
gaggaacugucucuaguag

SEQ ID NO: 152570 - RNA, 19 nt, Homo sapiens
  misc_RNA (1)...(19): siRNA sense strand
gaacaguaucacucacuaa

SEQ ID NO: 152571 - RNA, 19 nt, Homo sapiens
  misc_RNA (1)...(19): siRNA sense strand
ggcaguggcuaguuucuug

SEQ ID NO: 152572 - RNA, 19 nt, Homo sapiens
  misc_RNA (1)...(19): siRNA sense strand
gaaguacccacucuauguu

SEQ ID NO: 152573 - RNA, 19 nt, Homo sapiens
  misc_RNA (1)...(19): siRNA sense strand
acgauuggaucuaugauuu

SEQ ID NO: 152574 - RNA, 19 nt, Homo sapiens
  misc_RNA (1)...(19): siRNA sense strand
aaucgaauguggagaaaga

SEQ ID NO: 152575 - RNA, 19 nt, Homo sapiens
  misc_RNA (1)...(19): siRNA sense strand
cacauuggauccucauuug

SEQ ID NO: 152576 - RNA, 19 nt, Homo sapiens
  misc_RNA (1)...(19): siRNA sense strand
ggaacagaccugaauagga

SEQ ID NO: 152577 - RNA, 19 nt, Homo sapiens
  misc_RNA (1)...(19): siRNA sense strand
ugugaaagcccauuuaaau

SEQ ID NO: 152578 - RNA, 19 nt, Homo sapiens
  misc_RNA (1)...(19): siRNA sense strand
gcaaagaccaugaggaacu

SEQ ID NO: 152579 - RNA, 19 nt, Homo sapiens
  misc_RNA (1)...(19): siRNA sense strand
ugaacaguaucacucacua

SEQ ID NO: 152580 - RNA, 19 nt, Homo sapiens
  misc_RNA (1)...(19): siRNA sense strand
ccacauuggauccucauuu

SEQ ID NO: 152581 - RNA, 19 nt, Homo sapiens
  misc_RNA (1)...(19): siRNA sense strand
ugagaggcauccugauaug

SEQ ID NO: 152582 - RNA, 19 nt, Homo sapiens
  misc_RNA (1)...(19): siRNA sense strand
ccauuguucucuucuguga

SEQ ID NO: 152583 - RNA, 19 nt, Homo sapiens
  misc_RNA (1)...(19): siRNA sense strand
gggcaucaaauauucguuu

SEQ ID NO: 152584 - RNA, 19 nt, Homo sapiens
  misc_RNA (1)...(19): siRNA sense strand
aagcaaagaccaugaggaa

SEQ ID NO: 152585 - RNA, 19 nt, Homo sapiens
  misc_RNA (1)...(19): siRNA sense strand
cuacagaaucuuacuacaa

SEQ ID NO: 152586 - RNA, 19 nt, Homo sapiens
  misc_RNA (1)...(19): siRNA sense strand
ggaaaccuacuguggacuu

SEQ ID NO: 152587 - RNA, 19 nt, Homo sapiens
  misc_RNA (1)...(19): siRNA sense strand
uaaaauagcuuggcauguc

SEQ ID NO: 152588 - RNA, 19 nt, Homo sapiens
  misc_RNA (1)...(19): siRNA sense strand
caaagaccaugaggaacug

SEQ ID NO: 152589 - RNA, 19 nt, Homo sapiens
  misc_RNA (1)...(19): siRNA sense strand
uacagaaucuuacuacaac

SEQ ID NO: 152590 - RNA, 19 nt, Homo sapiens
  misc_RNA (1)...(19): siRNA sense strand
aaacccaccuguagagaag

SEQ ID NO: 152591 - RNA, 19 nt, Homo sapiens
  misc_RNA (1)...(19): siRNA sense strand
ccauauuccuauacacgaa

SEQ ID NO: 152592 - RNA, 19 nt, Homo sapiens
  misc_RNA (1)...(19): siRNA sense strand
gagaaguacccacucuaug

SEQ ID NO: 152593 - RNA, 19 nt, Homo sapiens
  misc_RNA (1)...(19): siRNA sense strand
agaaguacccacucuaugu

SEQ ID NO: 152594 - RNA, 19 nt, Homo sapiens
  misc_RNA (1)...(19): siRNA sense strand
cagcaugucuucgcguuuc

SEQ ID NO: 152595 - RNA, 19 nt, Homo sapiens
  misc_RNA (1)...(19): siRNA sense strand
uaggcaaguucaaguucua

SEQ ID NO: 152596 - RNA, 19 nt, Homo sapiens
  misc_RNA (1)...(19): siRNA sense strand
caucaaacccaccuguaga

SEQ ID NO: 152597 - RNA, 19 nt, Homo sapiens
  misc_RNA (1)...(19): siRNA sense strand
uaacagcugaccuuauugu

SEQ ID NO: 152598 - RNA, 19 nt, Homo sapiens
  misc_RNA (1)...(19): siRNA sense strand
ccauggcucagaaaccuua

SEQ ID NO: 152599 - RNA, 19 nt, Homo sapiens
  misc_RNA (1)...(19): siRNA sense strand
acaucagcaugcauucaua

SEQ ID NO: 152600 - RNA, 19 nt, Homo sapiens
  misc_RNA (1)...(19): siRNA sense strand
cagauuaaagcauacauca

SEQ ID NO: 152601 - RNA, 19 nt, Homo sapiens
  misc_RNA (1)...(19): siRNA sense strand
caaacccaccuguagagaa

SEQ ID NO: 152602 - RNA, 19 nt, Homo sapiens
  misc_RNA (1)...(19): siRNA sense strand
gcaguucgugcuauugaga

SEQ ID NO: 152603 - RNA, 19 nt, Homo sapiens
  misc_RNA (1)...(19): siRNA sense strand
caaguucaaguucuacaga

SEQ ID NO: 152604 - RNA, 19 nt, Homo sapiens
  misc_RNA (1)...(19): siRNA sense strand
gauuggaucuaugauuugg

SEQ ID NO: 152605 - RNA, 19 nt, Homo sapiens
  misc_RNA (1)...(19): siRNA sense strand
ugagaaguacccacucuau

SEQ ID NO: 152606 - RNA, 19 nt, Homo sapiens
  misc_RNA (1)...(19): siRNA sense strand
caucggaacagaccugaau

SEQ ID NO: 152607 - RNA, 19 nt, Homo sapiens
  misc_RNA (1)...(19): siRNA sense strand
ugaggaacugucucuagua

SEQ ID NO: 152608 - RNA, 19 nt, Homo sapiens
  misc_RNA (1)...(19): siRNA sense strand
gaaggugcauccaguuccu

SEQ ID NO: 152609 - RNA, 19 nt, Homo sapiens
  misc_RNA (1)...(19): siRNA sense strand
gaaggcaguggcuaguuuc

SEQ ID NO: 152610 - RNA, 19 nt, Homo sapiens
  misc_RNA (1)...(19): siRNA sense strand
gcagauuuccaacgacaca

SEQ ID NO: 152611 - RNA, 19 nt, Homo sapiens
  misc_RNA (1)...(19): siRNA sense strand
uagcugcucuuccuagaac

SEQ ID NO: 152612 - RNA, 19 nt, Homo sapiens
  misc_RNA (1)...(19): siRNA sense strand
guguuuccauauuccuaua

SEQ ID NO: 152613 - RNA, 19 nt, Homo sapiens
  misc_RNA (1)...(19): siRNA sense strand
acugagaggcauccugaua

SEQ ID NO: 152614 - RNA, 19 nt, Homo sapiens
  misc_RNA (1)...(19): siRNA sense strand
gacgauuggaucuaugauu

SEQ ID NO: 152615 - RNA, 19 nt, Homo sapiens
  misc_RNA (1)...(19): siRNA sense strand
gaggaaggugcauccaguu

SEQ ID NO: 152616 - RNA, 19 nt, Homo sapiens
  misc_RNA (1)...(19): siRNA sense strand
gggacgauuggaucuauga

SEQ ID NO: 152617 - RNA, 19 nt, Homo sapiens
  misc_RNA (1)...(19): siRNA sense strand
cauucauacucccagcaua

SEQ ID NO: 152618 - RNA, 19 nt, Homo sapiens
  misc_RNA (1)...(19): siRNA sense strand
caaccagauuaaagcauac

SEQ ID NO: 152619 - RNA, 19 nt, Homo sapiens
  misc_RNA (1)...(19): siRNA sense strand
aaccuacuguggacuuuau

SEQ ID NO: 152620 - RNA, 19 nt, Homo sapiens
  misc_RNA (1)...(19): siRNA sense strand
auccugauaugcuuacaaa

SEQ ID NO: 152621 - RNA, 19 nt, Homo sapiens
  misc_RNA (1)...(19): siRNA sense strand
uagcuuggcaugucauuag

SEQ ID NO: 152622 - RNA, 19 nt, Homo sapiens
  misc_RNA (1)...(19): siRNA sense strand
ucagaguggccaaguucua

SEQ ID NO: 152623 - RNA, 19 nt, Homo sapiens
  misc_RNA (1)...(19): siRNA sense strand
ggaagaucuuauucaacag

SEQ ID NO: 152624 - RNA, 19 nt, Homo sapiens
  misc_RNA (1)...(19): siRNA sense strand
cucagaaaccuuauaccua

SEQ ID NO: 152625 - RNA, 19 nt, Homo sapiens
  misc_RNA (1)...(19): siRNA sense strand
gcucagaaaccuuauaccu

SEQ ID NO: 152626 - RNA, 19 nt, Homo sapiens
  misc_RNA (1)...(19): siRNA sense strand
aacagcagauuuccaacga

SEQ ID NO: 152627 - RNA, 19 nt, Homo sapiens
  misc_RNA (1)...(19): siRNA sense strand
acagcugaccuuauuguga

SEQ ID NO: 152628 - RNA, 19 nt, Homo sapiens
  misc_RNA (1)...(19): siRNA sense strand
agaccugaauaggaacuuu

SEQ ID NO: 152629 - RNA, 19 nt, Homo sapiens
  misc_RNA (1)...(19): siRNA sense strand
gaccugaauaggaacuuug

SEQ ID NO: 152630 - RNA, 19 nt, Homo sapiens
  misc_RNA (1)...(19): siRNA sense strand
gcaguggcuaguuucuuga

SEQ ID NO: 152631 - RNA, 19 nt, Homo sapiens
  misc_RNA (1)...(19): siRNA sense strand
gagccuccgcaucguacua

SEQ ID NO: 152632 - RNA, 19 nt, Homo sapiens
  misc_RNA (1)...(19): siRNA sense strand
cagcauauaguguuuccau

SEQ ID NO: 152633 - RNA, 19 nt, Homo sapiens
  misc_RNA (1)...(19): siRNA sense strand
gcagcaugucuucgcguuu

SEQ ID NO: 152634 - RNA, 19 nt, Homo sapiens
  misc_RNA (1)...(19): siRNA sense strand
aacaguaucacucacuaaa

SEQ ID NO: 152635 - RNA, 19 nt, Homo sapiens
  misc_RNA (1)...(19): siRNA sense strand
ggccauggcucagaaaccu

SEQ ID NO: 152636 - RNA, 19 nt, Homo sapiens
  misc_RNA (1)...(19): siRNA sense strand
gcuuucugcuugugguuca

SEQ ID NO: 152637 - RNA, 19 nt, Homo sapiens
  misc_RNA (1)...(19): siRNA sense strand
guaucacucacuaaaugaa

SEQ ID NO: 152638 - RNA, 19 nt, Homo sapiens
  misc_RNA (1)...(19): siRNA sense strand
ucuaguagccagugaagca

SEQ ID NO: 152639 - RNA, 19 nt, Homo sapiens
  misc_RNA (1)...(19): siRNA sense strand
caugaggaacugucucuag

SEQ ID NO: 152640 - RNA, 19 nt, Homo sapiens
  misc_RNA (1)...(19): siRNA sense strand
aaaccuacuguggacuuua

SEQ ID NO: 152641 - RNA, 19 nt, Homo sapiens
  misc_RNA (1)...(19): siRNA sense strand
ugaugucgacaaugugaaa

SEQ ID NO: 152642 - RNA, 19 nt, Homo sapiens
  misc_RNA (1)...(19): siRNA sense strand
cagccuugcaguccuugua

SEQ ID NO: 152643 - RNA, 19 nt, Homo sapiens
  misc_RNA (1)...(19): siRNA sense strand
cuuggcaugucauuaggaa

SEQ ID NO: 152644 - RNA, 19 nt, Homo sapiens
  misc_RNA (1)...(19): siRNA sense strand
agcauauaguguuuccaua

SEQ ID NO: 152645 - RNA, 19 nt, Homo sapiens
  misc_RNA (1)...(19): siRNA sense strand
cugagaggcauccugauau

SEQ ID NO: 152646 - RNA, 19 nt, Homo sapiens
  misc_RNA (1)...(19): siRNA sense strand
cgauuggaucuaugauuug

SEQ ID NO: 152647 - RNA, 19 nt, Homo sapiens
  misc_RNA (1)...(19): siRNA sense strand
agucagaaccagaagugaa

SEQ ID NO: 152648 - RNA, 19 nt, Homo sapiens
  misc_RNA (1)...(19): siRNA sense strand
ugagucagaaccagaagug

SEQ ID NO: 152649 - RNA, 19 nt, Homo sapiens
  misc_RNA (1)...(19): siRNA sense strand
cuaggcaaguucaaguucu

SEQ ID NO: 152650 - RNA, 19 nt, Homo sapiens
  misc_RNA (1)...(19): siRNA sense strand
augaggaacugucucuagu

SEQ ID NO: 152651 - RNA, 19 nt, Homo sapiens
  misc_RNA (1)...(19): siRNA sense strand
gcaguccuuguacccauug

SEQ ID NO: 152652 - RNA, 19 nt, Homo sapiens
  misc_RNA (1)...(19): siRNA sense strand
ggaauccaugccagagaau

SEQ ID NO: 152653 - RNA, 19 nt, Homo sapiens
  misc_RNA (1)...(19): siRNA sense strand
guacccacucuauguuuua

SEQ ID NO: 152654 - RNA, 19 nt, Homo sapiens
  misc_RNA (1)...(19): siRNA sense strand
gugcauccaguuccucaug

SEQ ID NO: 152655 - RNA, 19 nt, Homo sapiens
  misc_RNA (1)...(19): siRNA sense strand
ugaccuuauugugaagaaa

SEQ ID NO: 152656 - RNA, 19 nt, Homo sapiens
  misc_RNA (1)...(19): siRNA sense strand
guuucagaguggccaaguu

SEQ ID NO: 152657 - RNA, 19 nt, Homo sapiens
  misc_RNA (1)...(19): siRNA sense strand
gaacagaccugaauaggaa

SEQ ID NO: 152658 - RNA, 19 nt, Homo sapiens
  misc_RNA (1)...(19): siRNA sense strand
gguaacagcugaccuuauu

SEQ ID NO: 152659 - RNA, 19 nt, Homo sapiens
  misc_RNA (1)...(19): siRNA sense strand
gaagaaauaucaaccagau

SEQ ID NO: 152660 - RNA, 19 nt, Homo sapiens
  misc_RNA (1)...(19): siRNA sense strand
gaauggaucucuccugcuu

SEQ ID NO: 152661 - RNA, 19 nt, Homo sapiens
  misc_RNA (1)...(19): siRNA sense strand
ucaaccagauuaaagcaua

SEQ ID NO: 152662 - RNA, 19 nt, Homo sapiens
  misc_RNA (1)...(19): siRNA sense strand
cagcugaccuuauugugaa

SEQ ID NO: 152663 - RNA, 19 nt, Homo sapiens
  misc_RNA (1)...(19): siRNA sense strand
ugaaggcaguggcuaguuu

SEQ ID NO: 152664 - RNA, 19 nt, Homo sapiens
  misc_RNA (1)...(19): siRNA sense strand
uggaagaucuuauucaaca

SEQ ID NO: 152665 - RNA, 19 nt, Homo sapiens
  misc_RNA (1)...(19): siRNA sense strand
gaaaccuacuguggacuuu

SEQ ID NO: 152666 - RNA, 19 nt, Homo sapiens
  misc_RNA (1)...(19): siRNA sense strand
ggaauuccaugcagugucu

SEQ ID NO: 152667 - RNA, 19 nt, Homo sapiens
  misc_RNA (1)...(19): siRNA sense strand
ggcaucaaauauucguuua

SEQ ID NO: 152668 - RNA, 19 nt, Homo sapiens
  misc_RNA (1)...(19): siRNA sense strand
caguaucacucacuaaaug

SEQ ID NO: 152669 - RNA, 19 nt, Homo sapiens
  misc_RNA (1)...(19): siRNA sense strand
gaggaacugucucuaguag

SEQ ID NO: 152670 - RNA, 19 nt, Homo sapiens
  misc_RNA (1)...(19): siRNA sense strand
gaacaguaucacucacuaa

SEQ ID NO: 152671 - RNA, 19 nt, Homo sapiens
  misc_RNA (1)...(19): siRNA sense strand
ggcaguggcuaguuucuug

SEQ ID NO: 152672 - RNA, 19 nt, Homo sapiens
  misc_RNA (1)...(19): siRNA sense strand
gaaguacccacucuauguu

SEQ ID NO: 152673 - RNA, 19 nt, Homo sapiens
  misc_RNA (1)...(19): siRNA sense strand
acgauuggaucuaugauuu

SEQ ID NO: 152674 - RNA, 19 nt, Homo sapiens
  misc_RNA (1)...(19): siRNA sense strand
aaucgaauguggagaaaga

SEQ ID NO: 152675 - RNA, 19 nt, Homo sapiens
  misc_RNA (1)...(19): siRNA sense strand
cacauuggauccucauuug

SEQ ID NO: 152676 - RNA, 19 nt, Homo sapiens
  misc_RNA (1)...(19): siRNA sense strand
ggaacagaccugaauagga

SEQ ID NO: 152677 - RNA, 19 nt, Homo sapiens
  misc_RNA (1)...(19): siRNA sense strand
ugugaaagcccauuuaaau

SEQ ID NO: 152678 - RNA, 19 nt, Homo sapiens
  misc_RNA (1)...(19): siRNA sense strand
gcaaagaccaugaggaacu

SEQ ID NO: 152679 - RNA, 19 nt, Homo sapiens
  misc_RNA (1)...(19): siRNA sense strand
ugaacaguaucacucacua

SEQ ID NO: 152680 - RNA, 19 nt, Homo sapiens
  misc_RNA (1)...(19): siRNA sense strand
ccacauuggauccucauuu

SEQ ID NO: 152681 - RNA, 19 nt, Homo sapiens
  misc_RNA (1)...(19): siRNA sense strand
ugagaggcauccugauaug

SEQ ID NO: 152682 - RNA, 19 nt, Homo sapiens
  misc_RNA (1)...(19): siRNA sense strand
ccauuguucucuucuguga

SEQ ID NO: 152683 - RNA, 19 nt, Homo sapiens
  misc_RNA (1)...(19): siRNA sense strand
gggcaucaaauauucguuu

SEQ ID NO: 152684 - RNA, 19 nt, Homo sapiens
  misc_RNA (1)...(19): siRNA sense strand
aagcaaagaccaugaggaa

SEQ ID NO: 152685 - RNA, 19 nt, Homo sapiens
  misc_RNA (1)...(19): siRNA sense strand
cuacagaaucuuacuacaa

SEQ ID NO: 152686 - RNA, 19 nt, Homo sapiens
  misc_RNA (1)...(19): siRNA sense strand
ggaaaccuacuguggacuu

SEQ ID NO: 152687 - RNA, 19 nt, Homo sapiens
  misc_RNA (1)...(19): siRNA sense strand
caaagaccaugaggaacug

SEQ ID NO: 152688 - RNA, 19 nt, Homo sapiens
  misc_RNA (1)...(19): siRNA sense strand
uacagaaucuuacuacaac

SEQ ID NO: 152689 - RNA, 19 nt, Homo sapiens
  misc_RNA (1)...(19): siRNA sense strand
aaacccaccuguagagaag

SEQ ID NO: 152690 - RNA, 19 nt, Homo sapiens
  misc_RNA (1)...(19): siRNA sense strand
ccauauuccuauacacgaa

SEQ ID NO: 152691 - RNA, 19 nt, Homo sapiens
  misc_RNA (1)...(19): siRNA sense strand
gagaaguacccacucuaug

SEQ ID NO: 152692 - RNA, 19 nt, Homo sapiens
  misc_RNA (1)...(19): siRNA sense strand
agaaguacccacucuaugu

SEQ ID NO: 152693 - RNA, 19 nt, Homo sapiens
  misc_RNA (1)...(19): siRNA sense strand
cagcaugucuucgcguuuc

SEQ ID NO: 152694 - RNA, 19 nt, Homo sapiens
  misc_RNA (1)...(19): siRNA sense strand
uaggcaaguucaaguucua

SEQ ID NO: 152695 - RNA, 19 nt, Homo sapiens
  misc_RNA (1)...(19): siRNA sense strand
caucaaacccaccuguaga

SEQ ID NO: 152696 - RNA, 19 nt, Homo sapiens
  misc_RNA (1)...(19): siRNA sense strand
uaacagcugaccuuauugu

SEQ ID NO: 152697 - RNA, 19 nt, Homo sapiens
  misc_RNA (1)...(19): siRNA sense strand
ccauggcucagaaaccuua

SEQ ID NO: 152698 - RNA, 19 nt, Homo sapiens
  misc_RNA (1)...(19): siRNA sense strand
acaucagcaugcauucaua

SEQ ID NO: 152699 - RNA, 19 nt, Homo sapiens
  misc_RNA (1)...(19): siRNA sense strand
cagauuaaagcauacauca

SEQ ID NO: 152700 - RNA, 19 nt, Homo sapiens
  misc_RNA (1)...(19): siRNA sense strand
caaacccaccuguagagaa

SEQ ID NO: 152701 - RNA, 19 nt, Homo sapiens
  misc_RNA (1)...(19): siRNA sense strand
gcaguucgugcuauugaga

SEQ ID NO: 152702 - RNA, 19 nt, Homo sapiens
  misc_RNA (1)...(19): siRNA sense strand
caaguucaaguucuacaga

SEQ ID NO: 152703 - RNA, 19 nt, Homo sapiens
  misc_RNA (1)...(19): siRNA sense strand
gauuggaucuaugauuugg

SEQ ID NO: 152704 - RNA, 19 nt, Homo sapiens
  misc_RNA (1)...(19): siRNA sense strand
ugagaaguacccacucuau

SEQ ID NO: 152705 - RNA, 19 nt, Homo sapiens
  misc_RNA (1)...(19): siRNA sense strand
caucggaacagaccugaau

SEQ ID NO: 152706 - RNA, 19 nt, Homo sapiens
  misc_RNA (1)...(19): siRNA sense strand
ugaggaacugucucuagua

SEQ ID NO: 152707 - RNA, 19 nt, Homo sapiens
  misc_RNA (1)...(19): siRNA sense strand
gaaggugcauccaguuccu

SEQ ID NO: 152708 - RNA, 19 nt, Homo sapiens
  misc_RNA (1)...(19): siRNA sense strand
gaaggcaguggcuaguuuc

SEQ ID NO: 152709 - RNA, 19 nt, Homo sapiens
  misc_RNA (1)...(19): siRNA sense strand
uagcugcucuuccuagaac

SEQ ID NO: 152710 - RNA, 19 nt, Homo sapiens
  misc_RNA (1)...(19): siRNA sense strand
guguuuccauauuccuaua

SEQ ID NO: 152711 - RNA, 19 nt, Homo sapiens
  misc_RNA (1)...(19): siRNA sense strand
gcagauuuccaacgacaca

SEQ ID NO: 152712 - RNA, 19 nt, Homo sapiens
  misc_RNA (1)...(19): siRNA sense strand
acugagaggcauccugaua

SEQ ID NO: 152713 - RNA, 19 nt, Homo sapiens
  misc_RNA (1)...(19): siRNA sense strand
gacgauuggaucuaugauu

SEQ ID NO: 152714 - RNA, 19 nt, Homo sapiens
  misc_RNA (1)...(19): siRNA sense strand
gaggaaggugcauccaguu

SEQ ID NO: 152715 - RNA, 19 nt, Homo sapiens
  misc_RNA (1)...(19): siRNA sense strand
gggacgauuggaucuauga

SEQ ID NO: 152716 - RNA, 19 nt, Homo sapiens
  misc_RNA (1)...(19): siRNA sense strand
cauucauacucccagcaua

SEQ ID NO: 152717 - RNA, 19 nt, Homo sapiens
  misc_RNA (1)...(19): siRNA sense strand
caaccagauuaaagcauac

SEQ ID NO: 152718 - RNA, 19 nt, Homo sapiens
  misc_RNA (1)...(19): siRNA sense strand
aaccuacuguggacuuuau

SEQ ID NO: 152719 - RNA, 19 nt, Homo sapiens
  misc_RNA (1)...(19): siRNA sense strand
auccugauaugcuuacaaa

SEQ ID NO: 152720 - RNA, 19 nt, Homo sapiens
  misc_RNA (1)...(19): siRNA sense strand
ucagaguggccaaguucua

SEQ ID NO: 152721 - RNA, 19 nt, Homo sapiens
  misc_RNA (1)...(19): siRNA sense strand
ggaagaucuuauucaacag

SEQ ID NO: 152722 - RNA, 19 nt, Homo sapiens
  misc_RNA (1)...(19): siRNA sense strand
cucagaaaccuuauaccua

SEQ ID NO: 152723 - RNA, 19 nt, Homo sapiens
  misc_RNA (1)...(19): siRNA sense strand
gcucagaaaccuuauaccu

SEQ ID NO: 152724 - RNA, 19 nt, Homo sapiens
  misc_RNA (1)...(19): siRNA sense strand
aacagcagauuuccaacga

SEQ ID NO: 152725 - RNA, 19 nt, Homo sapiens
  misc_RNA (1)...(19): siRNA sense strand
acagcugaccuuauuguga

SEQ ID NO: 152726 - RNA, 19 nt, Homo sapiens
  misc_RNA (1)...(19): siRNA sense strand
agaccugaauaggaacuuu

SEQ ID NO: 152727 - RNA, 19 nt, Homo sapiens
  misc_RNA (1)...(19): siRNA sense strand
gaccugaauaggaacuuug

SEQ ID NO: 152728 - RNA, 19 nt, Homo sapiens
  misc_RNA (1)...(19): siRNA sense strand
gcaguggcuaguuucuuga

SEQ ID NO: 152729 - RNA, 19 nt, Homo sapiens
  misc_RNA (1)...(19): siRNA sense strand
gagccuccgcaucguacua

SEQ ID NO: 152730 - RNA, 19 nt, Homo sapiens
  misc_RNA (1)...(19): siRNA sense strand
cagcauauaguguuuccau

SEQ ID NO: 152731 - RNA, 19 nt, Homo sapiens
  misc_RNA (1)...(19): siRNA sense strand
gcagcaugucuucgcguuu

SEQ ID NO: 152732 - RNA, 19 nt, Homo sapiens
  misc_RNA (1)...(19): siRNA sense strand
aacaguaucacucacuaaa

SEQ ID NO: 152733 - RNA, 19 nt, Homo sapiens
  misc_RNA (1)...(19): siRNA sense strand
ggccauggcucagaaaccu

SEQ ID NO: 152734 - RNA, 19 nt, Homo sapiens
  misc_RNA (1)...(19): siRNA sense strand
gcuuucugcuugugguuca

SEQ ID NO: 152735 - RNA, 19 nt, Homo sapiens
  misc_RNA (1)...(19): siRNA sense strand
ugaugucgacaaugugaaa

SEQ ID NO: 152736 - RNA, 19 nt, Homo sapiens
  misc_RNA (1)...(19): siRNA sense strand
ucuaguagccagugaagca

SEQ ID NO: 152737 - RNA, 19 nt, Homo sapiens
  misc_RNA (1)...(19): siRNA sense strand
caugaggaacugucucuag

SEQ ID NO: 152738 - RNA, 19 nt, Homo sapiens
  misc_RNA (1)...(19): siRNA sense strand
aaaccuacuguggacuuua

SEQ ID NO: 152739 - RNA, 19 nt, Homo sapiens
  misc_RNA (1)...(19): siRNA sense strand
guaucacucacuaaaugaa

SEQ ID NO: 152740 - RNA, 19 nt, Homo sapiens
  misc_RNA (1)...(19): siRNA sense strand
cagccuugcaguccuugua

SEQ ID NO: 152741 - RNA, 19 nt, Homo sapiens
  misc_RNA (1)...(19): siRNA sense strand
agcauauaguguuuccaua

SEQ ID NO: 152742 - RNA, 19 nt, Homo sapiens
  misc_RNA (1)...(19): siRNA sense strand
cugagaggcauccugauau

SEQ ID NO: 152743 - RNA, 19 nt, Homo sapiens
  misc_RNA (1)...(19): siRNA sense strand
cgauuggaucuaugauuug

SEQ ID NO: 152744 - RNA, 19 nt, Homo sapiens
  misc_RNA (1)...(19): siRNA sense strand
agucagaaccagaagugaa

SEQ ID NO: 152745 - RNA, 19 nt, Homo sapiens
  misc_RNA (1)...(19): siRNA sense strand
ugagucagaaccagaagug

SEQ ID NO: 152746 - RNA, 19 nt, Homo sapiens
  misc_RNA (1)...(19): siRNA sense strand
guacccacucuauguuuua

SEQ ID NO: 152747 - RNA, 19 nt, Homo sapiens
  misc_RNA (1)...(19): siRNA sense strand
augaggaacugucucuagu

SEQ ID NO: 152748 - RNA, 19 nt, Homo sapiens
  misc_RNA (1)...(19): siRNA sense strand
cuaggcaaguucaaguucu

SEQ ID NO: 152749 - RNA, 19 nt, Homo sapiens
  misc_RNA (1)...(19): siRNA sense strand
gcaguccuuguacccauug

SEQ ID NO: 152750 - RNA, 19 nt, Homo sapiens
  misc_RNA (1)...(19): siRNA sense strand
ggaauccaugccagagaau

SEQ ID NO: 152751 - RNA, 19 nt, Homo sapiens
  misc_RNA (1)...(19): siRNA sense strand
cuuauucaacagcagauuu

SEQ ID NO: 152752 - RNA, 19 nt, Homo sapiens
  misc_RNA (1)...(19): siRNA sense strand
guaacagcugaccuuauug

SEQ ID NO: 152753 - RNA, 19 nt, Homo sapiens
  misc_RNA (1)...(19): siRNA sense strand
guuucagaguggccaaguu

SEQ ID NO: 152754 - RNA, 19 nt, Homo sapiens
  misc_RNA (1)...(19): siRNA sense strand
gugcauccaguuccucaug

SEQ ID NO: 152755 - RNA, 19 nt, Homo sapiens
  misc_RNA (1)...(19): siRNA sense strand
ugaccuuauugugaagaaa

SEQ ID NO: 152756 - RNA, 19 nt, Homo sapiens
  misc_RNA (1)...(19): siRNA sense strand
gaaagaaggugguccaaau

SEQ ID NO: 152757 - RNA, 19 nt, Homo sapiens
  misc_RNA (1)...(19): siRNA sense strand
ccuggaaacuauaaacuua

SEQ ID NO: 152758 - RNA, 19 nt, Homo sapiens
  misc_RNA (1)...(19): siRNA sense strand
gcuuauaccuggaaacuau

SEQ ID NO: 152759 - RNA, 19 nt, Homo sapiens
  misc_RNA (1)...(19): siRNA sense strand
ggaauagaccacgauguua

SEQ ID NO: 152760 - RNA, 19 nt, Homo sapiens
  misc_RNA (1)...(19): siRNA sense strand
ccaauuauccauaugauga

SEQ ID NO: 152761 - RNA, 19 nt, Homo sapiens
  misc_RNA (1)...(19): siRNA sense strand
ccaaggcugucauucauug

SEQ ID NO: 152762 - RNA, 19 nt, Homo sapiens
  misc_RNA (1)...(19): siRNA sense strand
ggaaagaagaggagaagga

SEQ ID NO: 152763 - RNA, 19 nt, Homo sapiens
  misc_RNA (1)...(19): siRNA sense strand
gaccaaggcugucauucau

SEQ ID NO: 152764 - RNA, 19 nt, Homo sapiens
  misc_RNA (1)...(19): siRNA sense strand
gaaagaagaggagaaggaa

SEQ ID NO: 152765 - RNA, 19 nt, Homo sapiens
  misc_RNA (1)...(19): siRNA sense strand
ggaugcaagacuucaauua

SEQ ID NO: 152766 - RNA, 19 nt, Homo sapiens
  misc_RNA (1)...(19): siRNA sense strand
guacgugaaugagaaagaa

SEQ ID NO: 152767 - RNA, 19 nt, Homo sapiens
  misc_RNA (1)...(19): siRNA sense strand
gcagauacaccgaggaguu

SEQ ID NO: 152768 - RNA, 19 nt, Homo sapiens
  misc_RNA (1)...(19): siRNA sense strand
gagaccuuguggccaauua

SEQ ID NO: 152769 - RNA, 19 nt, Homo sapiens
  misc_RNA (1)...(19): siRNA sense strand
gaacccagauggcuuugag

SEQ ID NO: 152770 - RNA, 19 nt, Homo sapiens
  misc_RNA (1)...(19): siRNA sense strand
gaugagacgcggaguggua

SEQ ID NO: 152771 - RNA, 19 nt, Homo sapiens
  misc_RNA (1)...(19): siRNA sense strand
gacagcagcuuuguagaug

SEQ ID NO: 152772 - RNA, 19 nt, Homo sapiens
  misc_RNA (1)...(19): siRNA sense strand
gaucugaaccggaacuuuc

SEQ ID NO: 152773 - RNA, 19 nt, Homo sapiens
  misc_RNA (1)...(19): siRNA sense strand
ucaauuaccuuagcagcaa

SEQ ID NO: 152774 - RNA, 19 nt, Homo sapiens
  misc_RNA (1)...(19): siRNA sense strand
ggagaaggaagaauugaug

SEQ ID NO: 152775 - RNA, 19 nt, Homo sapiens
  misc_RNA (1)...(19): siRNA sense strand
gaaggaagaauugauggaa

SEQ ID NO: 152776 - RNA, 19 nt, Homo sapiens
  misc_RNA (1)...(19): siRNA sense strand
ggaauaugcaugggaauga

SEQ ID NO: 152777 - RNA, 19 nt, Homo sapiens
  misc_RNA (1)...(19): siRNA sense strand
gaaaguggcaguuccuuac

SEQ ID NO: 152778 - RNA, 19 nt, Homo sapiens
  misc_RNA (1)...(19): siRNA sense strand
ccgaggaguuaaaggauuu

SEQ ID NO: 152779 - RNA, 19 nt, Homo sapiens
  misc_RNA (1)...(19): siRNA sense strand
gaaggugguccaaauaauc

SEQ ID NO: 152780 - RNA, 19 nt, Homo sapiens
  misc_RNA (1)...(19): siRNA sense strand
aaagaaggugguccaaaua

SEQ ID NO: 152781 - RNA, 19 nt, Homo sapiens
  misc_RNA (1)...(19): siRNA sense strand
gagccugaauuuaaauaca

SEQ ID NO: 152782 - RNA, 19 nt, Homo sapiens
  misc_RNA (1)...(19): siRNA sense strand
gaugacagcagcuuuguag

SEQ ID NO: 152783 - RNA, 19 nt, Homo sapiens
  misc_RNA (1)...(19): siRNA sense strand
cgacaacccuggcguccau

SEQ ID NO: 152784 - RNA, 19 nt, Homo sapiens
  misc_RNA (1)...(19): siRNA sense strand
cagauacaccgaggaguua

SEQ ID NO: 152785 - RNA, 19 nt, Homo sapiens
  misc_RNA (1)...(19): siRNA sense strand
gaauagaccacgauguuac

SEQ ID NO: 152786 - RNA, 19 nt, Homo sapiens
  misc_RNA (1)...(19): siRNA sense strand
ccgcaaaggauggugauua

SEQ ID NO: 152787 - RNA, 19 nt, Homo sapiens
  misc_RNA (1)...(19): siRNA sense strand
ccaaauaaucaucuguuga

SEQ ID NO: 152788 - RNA, 19 nt, Homo sapiens
  misc_RNA (1)...(19): siRNA sense strand
cuggugagccugaauuuaa

SEQ ID NO: 152789 - RNA, 19 nt, Homo sapiens
  misc_RNA (1)...(19): siRNA sense strand
gagaucaccguggagcuua

SEQ ID NO: 152790 - RNA, 19 nt, Homo sapiens
  misc_RNA (1)...(19): siRNA sense strand
caucaugccuucccugaac

SEQ ID NO: 152791 - RNA, 19 nt, Homo sapiens
  misc_RNA (1)...(19): siRNA sense strand
gaugaugacagcagcuuug

SEQ ID NO: 152792 - RNA, 19 nt, Homo sapiens
  misc_RNA (1)...(19): siRNA sense strand
caaaggauggugauuacug

SEQ ID NO: 152793 - RNA, 19 nt, Homo sapiens
  misc_RNA (1)...(19): siRNA sense strand
gaacucaaggacugguuug

SEQ ID NO: 152794 - RNA, 19 nt, Homo sapiens
  misc_RNA (1)...(19): siRNA sense strand
caagacuucaauuaccuua

SEQ ID NO: 152795 - RNA, 19 nt, Homo sapiens
  misc_RNA (1)...(19): siRNA sense strand
caccaugucgcaagaauga

SEQ ID NO: 152796 - RNA, 19 nt, Homo sapiens
  misc_RNA (1)...(19): siRNA sense strand
agaaggugguccaaauaau

SEQ ID NO: 152797 - RNA, 19 nt, Homo sapiens
  misc_RNA (1)...(19): siRNA sense strand
gaaguucccaccugaagag

SEQ ID NO: 152798 - RNA, 19 nt, Homo sapiens
  misc_RNA (1)...(19): siRNA sense strand
gaauaugcaugggaaugag

SEQ ID NO: 152799 - RNA, 19 nt, Homo sapiens
  misc_RNA (1)...(19): siRNA sense strand
aagaaggugguccaaauaa

SEQ ID NO: 152800 - RNA, 19 nt, Homo sapiens
  misc_RNA (1)...(19): siRNA sense strand
aggaagaauugauggaaug

SEQ ID NO: 152801 - RNA, 19 nt, Homo sapiens
  misc_RNA (1)...(19): siRNA sense strand
agaaaguggcaguuccuua

SEQ ID NO: 152802 - RNA, 19 nt, Homo sapiens
  misc_RNA (1)...(19): siRNA sense strand
ggcauacucuucuuucaac

SEQ ID NO: 152803 - RNA, 19 nt, Homo sapiens
  misc_RNA (1)...(19): siRNA sense strand
gaagcaaugcccagggaau

SEQ ID NO: 152804 - RNA, 19 nt, Homo sapiens
  misc_RNA (1)...(19): siRNA sense strand
cagcagcuuuguagaugga

SEQ ID NO: 152805 - RNA, 19 nt, Homo sapiens
  misc_RNA (1)...(19): siRNA sense strand
gggcauacucuucuuucaa

SEQ ID NO: 152806 - RNA, 19 nt, Homo sapiens
  misc_RNA (1)...(19): siRNA sense strand
gauccacaguacccgcauu

SEQ ID NO: 152807 - RNA, 19 nt, Homo sapiens
  misc_RNA (1)...(19): siRNA sense strand
gaacuggagucauuuucug

SEQ ID NO: 152808 - RNA, 19 nt, Homo sapiens
  misc_RNA (1)...(19): siRNA sense strand
gaugcaagacuucaauuac

SEQ ID NO: 152809 - RNA, 19 nt, Homo sapiens
  misc_RNA (1)...(19): siRNA sense strand
ggauuauggauauuccuuu

SEQ ID NO: 152810 - RNA, 19 nt, Homo sapiens
  misc_RNA (1)...(19): siRNA sense strand
gaagaaaauuguggaucaa

SEQ ID NO: 152811 - RNA, 19 nt, Homo sapiens
  misc_RNA (1)...(19): siRNA sense strand
uaguguacgugaaugagaa

SEQ ID NO: 152812 - RNA, 19 nt, Homo sapiens
  misc_RNA (1)...(19): siRNA sense strand
ggauaguguacgugaauga

SEQ ID NO: 152813 - RNA, 19 nt, Homo sapiens
  misc_RNA (1)...(19): siRNA sense strand
gcaaugcccagggaauaga

SEQ ID NO: 152814 - RNA, 19 nt, Homo sapiens
  misc_RNA (1)...(19): siRNA sense strand
cuacugggaggauaacaaa

SEQ ID NO: 152815 - RNA, 19 nt, Homo sapiens
  misc_RNA (1)...(19): siRNA sense strand
ugacagcagcuuuguagau

SEQ ID NO: 152816 - RNA, 19 nt, Homo sapiens
  misc_RNA (1)...(19): siRNA sense strand
gcugucauucauuggauua

SEQ ID NO: 152817 - RNA, 19 nt, Homo sapiens
  misc_RNA (1)...(19): siRNA sense strand
ugaagaaaauuguggauca

SEQ ID NO: 152818 - RNA, 19 nt, Homo sapiens
  misc_RNA (1)...(19): siRNA sense strand
uggugagccugaauuuaaa

SEQ ID NO: 152819 - RNA, 19 nt, Homo sapiens
  misc_RNA (1)...(19): siRNA sense strand
aagaggagaaggaagaauu

SEQ ID NO: 152820 - RNA, 19 nt, Homo sapiens
  misc_RNA (1)...(19): siRNA sense strand
aagaagaggagaaggaaga

SEQ ID NO: 152821 - RNA, 19 nt, Homo sapiens
  misc_RNA (1)...(19): siRNA sense strand
uagcuaccuugagcagaua

SEQ ID NO: 152822 - RNA, 19 nt, Homo sapiens
  misc_RNA (1)...(19): siRNA sense strand
gagaaguucccaccugaag

SEQ ID NO: 152823 - RNA, 19 nt, Homo sapiens
  misc_RNA (1)...(19): siRNA sense strand
aggaauagaccacgauguu

SEQ ID NO: 152824 - RNA, 19 nt, Homo sapiens
  misc_RNA (1)...(19): siRNA sense strand
ggaaaaugaugucagaaac

SEQ ID NO: 152825 - RNA, 19 nt, Homo sapiens
  misc_RNA (1)...(19): siRNA sense strand
ggugauuacuggagauugc

SEQ ID NO: 152826 - RNA, 19 nt, Homo sapiens
  misc_RNA (1)...(19): siRNA sense strand
ggccaauuauccauaugau

SEQ ID NO: 152827 - RNA, 19 nt, Homo sapiens
  misc_RNA (1)...(19): siRNA sense strand
gauuacuggagauugcuua

SEQ ID NO: 152828 - RNA, 19 nt, Homo sapiens
  misc_RNA (1)...(19): siRNA sense strand
cgcaaaggauggugauuac

SEQ ID NO: 152829 - RNA, 19 nt, Homo sapiens
  misc_RNA (1)...(19): siRNA sense strand
ggaaggaauagaccacgau

SEQ ID NO: 152830 - RNA, 19 nt, Homo sapiens
  misc_RNA (1)...(19): siRNA sense strand
uuagcuaccuugagcagau

SEQ ID NO: 152831 - RNA, 19 nt, Homo sapiens
  misc_RNA (1)...(19): siRNA sense strand
aagcaaugcccagggaaua

SEQ ID NO: 152832 - RNA, 19 nt, Homo sapiens
  misc_RNA (1)...(19): siRNA sense strand
uccaaauaaucaucuguug

SEQ ID NO: 152833 - RNA, 19 nt, Homo sapiens
  misc_RNA (1)...(19): siRNA sense strand
gugguagugcucacgaaua

SEQ ID NO: 152834 - RNA, 19 nt, Homo sapiens
  misc_RNA (1)...(19): siRNA sense strand
aaggaagaauugauggaau

SEQ ID NO: 152835 - RNA, 19 nt, Homo sapiens
  misc_RNA (1)...(19): siRNA sense strand
uacuggagauugcuuauac

SEQ ID NO: 152836 - RNA, 19 nt, Homo sapiens
  misc_RNA (1)...(19): siRNA sense strand
gauacaccgaggaguuaaa

SEQ ID NO: 152837 - RNA, 19 nt, Homo sapiens
  misc_RNA (1)...(19): siRNA sense strand
aaaacucccucauuagcua

SEQ ID NO: 152838 - RNA, 19 nt, Homo sapiens
  misc_RNA (1)...(19): siRNA sense strand
gcaagacuucaauuaccuu

SEQ ID NO: 152839 - RNA, 19 nt, Homo sapiens
  misc_RNA (1)...(19): siRNA sense strand
agaccaaggcugucauuca

SEQ ID NO: 152840 - RNA, 19 nt, Homo sapiens
  misc_RNA (1)...(19): siRNA sense strand
caggcuaucuggcaauaac

SEQ ID NO: 152841 - RNA, 19 nt, Homo sapiens
  misc_RNA (1)...(19): siRNA sense strand
guaccuaugcaacgaauac

SEQ ID NO: 152842 - RNA, 19 nt, Homo sapiens
  misc_RNA (1)...(19): siRNA sense strand
gaggagaaggaagaauuga

SEQ ID NO: 152843 - RNA, 19 nt, Homo sapiens
  misc_RNA (1)...(19): siRNA sense strand
guaacccaauugcgaaugc

SEQ ID NO: 152844 - RNA, 19 nt, Homo sapiens
  misc_RNA (1)...(19): siRNA sense strand
ggauauuccuuuugugcuu

SEQ ID NO: 152845 - RNA, 19 nt, Homo sapiens
  misc_RNA (1)...(19): siRNA sense strand
gguggaaaaugaugucaga

SEQ ID NO: 152846 - RNA, 19 nt, Homo sapiens
  misc_RNA (1)...(19): siRNA sense strand
gcaugggaaugaggcuguu

SEQ ID NO: 152847 - RNA, 19 nt, Homo sapiens
  misc_RNA (1)...(19): siRNA sense strand
gcuuagcugugagaaguuc

SEQ ID NO: 152848 - RNA, 19 nt, Homo sapiens
  misc_RNA (1)...(19): siRNA sense strand
gagugguagugcucacgaa

SEQ ID NO: 152849 - RNA, 19 nt, Homo sapiens
  misc_RNA (1)...(19): siRNA sense strand
gcaccgccaucagcaggau

SEQ ID NO: 152850 - RNA, 19 nt, Homo sapiens
  misc_RNA (1)...(19): siRNA sense strand
gggaauaugcaugggaaug

SEQ ID NO: 152851 - RNA, 19 nt, Homo sapiens
  misc_RNA (1)...(19): siRNA sense strand
uaccuuagcagcaacuguu

SEQ ID NO: 152852 - RNA, 19 nt, Homo sapiens
  misc_RNA (1)...(19): siRNA sense strand
uaucuggcaauaacaaaga

SEQ ID NO: 152853 - RNA, 19 nt, Homo sapiens
  misc_RNA (1)...(19): siRNA sense strand
gauggugauuacuggagau

SEQ ID NO: 152854 - RNA, 19 nt, Homo sapiens
  misc_RNA (1)...(19): siRNA sense strand
cacaguacccgcauucaca

SEQ ID NO: 152855 - RNA, 19 nt, Homo sapiens
  misc_RNA (1)...(19): siRNA sense strand
gaagaggagaaggaagaau

SEQ ID NO: 152856 - RNA, 19 nt, Homo sapiens
  misc_RNA (1)...(19): siRNA sense strand
caacaaauauggagaguau

SEQ ID NO: 152857 - RNA, 19 nt, Homo sapiens
  misc_RNA (1)...(19): siRNA sense strand
gaacuucagugcucuuaaa

SEQ ID NO: 152858 - RNA, 19 nt, Homo sapiens
  misc_RNA (1)...(19): siRNA sense strand
ucacaaaucugaucaauag

SEQ ID NO: 152859 - RNA, 19 nt, Homo sapiens
  misc_RNA (1)...(19): siRNA sense strand
ucaaauacguggcaaauau

SEQ ID NO: 152860 - RNA, 19 nt, Homo sapiens
  misc_RNA (1)...(19): siRNA sense strand
gaacccagauggauuugaa

SEQ ID NO: 152861 - RNA, 19 nt, Homo sapiens
  misc_RNA (1)...(19): siRNA sense strand
caagaaaucccaacaugaa

SEQ ID NO: 152862 - RNA, 19 nt, Homo sapiens
  misc_RNA (1)...(19): siRNA sense strand
caaagacccugaaaucaca

SEQ ID NO: 152863 - RNA, 19 nt, Homo sapiens
  misc_RNA (1)...(19): siRNA sense strand
ggagaagcuuccauccuuu

SEQ ID NO: 152864 - RNA, 19 nt, Homo sapiens
  misc_RNA (1)...(19): siRNA sense strand
gaaaggagacgaguguaaa

SEQ ID NO: 152865 - RNA, 19 nt, Homo sapiens
  misc_RNA (1)...(19): siRNA sense strand
gaagaaaggagacgagugu

SEQ ID NO: 152866 - RNA, 19 nt, Homo sapiens
  misc_RNA (1)...(19): siRNA sense strand
gaacuuuccuaaugguguu

SEQ ID NO: 152867 - RNA, 19 nt, Homo sapiens
  misc_RNA (1)...(19): siRNA sense strand
aaacauaucugccccuaua

SEQ ID NO: 152868 - RNA, 19 nt, Homo sapiens
  misc_RNA (1)...(19): siRNA sense strand
gccugggucuuauauaaua

SEQ ID NO: 152869 - RNA, 19 nt, Homo sapiens
  misc_RNA (1)...(19): siRNA sense strand
aacaaagccucauuaauug

SEQ ID NO: 152870 - RNA, 19 nt, Homo sapiens
  misc_RNA (1)...(19): siRNA sense strand
ccacucagcugcaacaaag

SEQ ID NO: 152871 - RNA, 19 nt, Homo sapiens
  misc_RNA (1)...(19): siRNA sense strand
gaucaauaguacccggaua

SEQ ID NO: 152872 - RNA, 19 nt, Homo sapiens
  misc_RNA (1)...(19): siRNA sense strand
gcccaaugauuccucuaua

SEQ ID NO: 152873 - RNA, 19 nt, Homo sapiens
  misc_RNA (1)...(19): siRNA sense strand
ccaguuacccauuugauaa

SEQ ID NO: 152874 - RNA, 19 nt, Homo sapiens
  misc_RNA (1)...(19): siRNA sense strand
ggagaaaucccagaacuuc

SEQ ID NO: 152875 - RNA, 19 nt, Homo sapiens
  misc_RNA (1)...(19): siRNA sense strand
ugacuugaaucgaaauuuc

SEQ ID NO: 152876 - RNA, 19 nt, Homo sapiens
  misc_RNA (1)...(19): siRNA sense strand
aagguggaaugcaagauua

SEQ ID NO: 152877 - RNA, 19 nt, Homo sapiens
  misc_RNA (1)...(19): siRNA sense strand
caguaugacuugaaucgaa

SEQ ID NO: 152878 - RNA, 19 nt, Homo sapiens
  misc_RNA (1)...(19): siRNA sense strand
gagcugucaugcuguaaau

SEQ ID NO: 152879 - RNA, 19 nt, Homo sapiens
  misc_RNA (1)...(19): siRNA sense strand
gaaaucccaacaugaagaa

SEQ ID NO: 152880 - RNA, 19 nt, Homo sapiens
  misc_RNA (1)...(19): siRNA sense strand
uaaccaguaugacuugaau

SEQ ID NO: 152881 - RNA, 19 nt, Homo sapiens
  misc_RNA (1)...(19): siRNA sense strand
uagcugcgcuggauuucaa

SEQ ID NO: 152882 - RNA, 19 nt, Homo sapiens
  misc_RNA (1)...(19): siRNA sense strand
gaaugcaagauuacaacua

SEQ ID NO: 152883 - RNA, 19 nt, Homo sapiens
  misc_RNA (1)...(19): siRNA sense strand
gcuuaacgccugaugauga

SEQ ID NO: 152884 - RNA, 19 nt, Homo sapiens
  misc_RNA (1)...(19): siRNA sense strand
ccaaaggaacacagaauug

SEQ ID NO: 152885 - RNA, 19 nt, Homo sapiens
  misc_RNA (1)...(19): siRNA sense strand
ccuauagaaccaacaaaua

SEQ ID NO: 152886 - RNA, 19 nt, Homo sapiens
  misc_RNA (1)...(19): siRNA sense strand
gcauggagaugagacuguu

SEQ ID NO: 152887 - RNA, 19 nt, Homo sapiens
  misc_RNA (1)...(19): siRNA sense strand
gcaaagacccugaaaucac

SEQ ID NO: 152888 - RNA, 19 nt, Homo sapiens
  misc_RNA (1)...(19): siRNA sense strand
caaaucugaucaauaguac

SEQ ID NO: 152889 - RNA, 19 nt, Homo sapiens
  misc_RNA (1)...(19): siRNA sense strand
gcaaauaugcauggagaug

SEQ ID NO: 152890 - RNA, 19 nt, Homo sapiens
  misc_RNA (1)...(19): siRNA sense strand
cuaaugguguuacaaaugg

SEQ ID NO: 152891 - RNA, 19 nt, Homo sapiens
  misc_RNA (1)...(19): siRNA sense strand
caagggcaauuggauucua

SEQ ID NO: 152892 - RNA, 19 nt, Homo sapiens
  misc_RNA (1)...(19): siRNA sense strand
gucacucacuuacacagua

SEQ ID NO: 152893 - RNA, 19 nt, Homo sapiens
  misc_RNA (1)...(19): siRNA sense strand
caagguggaaugcaagauu

SEQ ID NO: 152894 - RNA, 19 nt, Homo sapiens
  misc_RNA (1)...(19): siRNA sense strand
caaagccucauuaauugaa

SEQ ID NO: 152895 - RNA, 19 nt, Homo sapiens
  misc_RNA (1)...(19): siRNA sense strand
ccugaaaucacaaaucuga

SEQ ID NO: 152896 - RNA, 19 nt, Homo sapiens
  misc_RNA (1)...(19): siRNA sense strand
uugccugggucuuauauaa

SEQ ID NO: 152897 - RNA, 19 nt, Homo sapiens
  misc_RNA (1)...(19): siRNA sense strand
ucaagaaaucccaacauga

SEQ ID NO: 152898 - RNA, 19 nt, Homo sapiens
  misc_RNA (1)...(19): siRNA sense strand
caugaacccagauggauuu

SEQ ID NO: 152899 - RNA, 19 nt, Homo sapiens
  misc_RNA (1)...(19): siRNA sense strand
ggauuccagaguucaaaua

SEQ ID NO: 152900 - RNA, 19 nt, Homo sapiens
  misc_RNA (1)...(19): siRNA sense strand
gguguaaagggucaaguuu

SEQ ID NO: 152901 - RNA, 19 nt, Homo sapiens
  misc_RNA (1)...(19): siRNA sense strand
caaauggauacucuuggua

SEQ ID NO: 152902 - RNA, 19 nt, Homo sapiens
  misc_RNA (1)...(19): siRNA sense strand
caaauaugcauggagauga

SEQ ID NO: 152903 - RNA, 19 nt, Homo sapiens
  misc_RNA (1)...(19): siRNA sense strand
ugaaguggcugaaaacaga

SEQ ID NO: 152904 - RNA, 19 nt, Homo sapiens
  misc_RNA (1)...(19): siRNA sense strand
gccaguuacccauuugaua

SEQ ID NO: 152905 - RNA, 19 nt, Homo sapiens
  misc_RNA (1)...(19): siRNA sense strand
caaauacguggcaaauaug

SEQ ID NO: 152906 - RNA, 19 nt, Homo sapiens
  misc_RNA (1)...(19): siRNA sense strand
aaugauuccucuauacaga

SEQ ID NO: 152907 - RNA, 19 nt, Homo sapiens
  misc_RNA (1)...(19): siRNA sense strand
uaccuaugcuucaagaaau

SEQ ID NO: 152908 - RNA, 19 nt, Homo sapiens
  misc_RNA (1)...(19): siRNA sense strand
gauaaugguguucaagcaa

SEQ ID NO: 152909 - RNA, 19 nt, Homo sapiens
  misc_RNA (1)...(19): siRNA sense strand
cugauugacuaucucguaa

SEQ ID NO: 152910 - RNA, 19 nt, Homo sapiens
  misc_RNA (1)...(19): siRNA sense strand
gcugucaugcuguaaauau

SEQ ID NO: 152911 - RNA, 19 nt, Homo sapiens
  misc_RNA (1)...(19): siRNA sense strand
aguauuaucuccuucucuu

SEQ ID NO: 152912 - RNA, 19 nt, Homo sapiens
  misc_RNA (1)...(19): siRNA sense strand
ucaagcaacuggggcauua

SEQ ID NO: 152913 - RNA, 19 nt, Homo sapiens
  misc_RNA (1)...(19): siRNA sense strand
caacuaccaccgccaggaa

SEQ ID NO: 152914 - RNA, 19 nt, Homo sapiens
  misc_RNA (1)...(19): siRNA sense strand
aaaugaacuuuccuaaugg

SEQ ID NO: 152915 - RNA, 19 nt, Homo sapiens
  misc_RNA (1)...(19): siRNA sense strand
agaaaggagacgaguguaa

SEQ ID NO: 152916 - RNA, 19 nt, Homo sapiens
  misc_RNA (1)...(19): siRNA sense strand
ggaagggauggaagcguuu

SEQ ID NO: 152917 - RNA, 19 nt, Homo sapiens
  misc_RNA (1)...(19): siRNA sense strand
acaaauggauacucuuggu

SEQ ID NO: 152918 - RNA, 19 nt, Homo sapiens
  misc_RNA (1)...(19): siRNA sense strand
ucacucacuuacacaguau

SEQ ID NO: 152919 - RNA, 19 nt, Homo sapiens
  misc_RNA (1)...(19): siRNA sense strand
gaaauuuccccgaugcuuu

SEQ ID NO: 152920 - RNA, 19 nt, Homo sapiens
  misc_RNA (1)...(19): siRNA sense strand
uggcaaagacccugaaauc

SEQ ID NO: 152921 - RNA, 19 nt, Homo sapiens
  misc_RNA (1)...(19): siRNA sense strand
aagccuaguuuguucuuau

SEQ ID NO: 152922 - RNA, 19 nt, Homo sapiens
  misc_RNA (1)...(19): siRNA sense strand
ugauuccucuauacagaaa

SEQ ID NO: 152923 - RNA, 19 nt, Homo sapiens
  misc_RNA (1)...(19): siRNA sense strand
uucaauaucuugcacauac

SEQ ID NO: 152924 - RNA, 19 nt, Homo sapiens
  misc_RNA (1)...(19): siRNA sense strand
gaagcuuaacgccugauga

SEQ ID NO: 152925 - RNA, 19 nt, Homo sapiens
  misc_RNA (1)...(19): siRNA sense strand
cguaaccagugauggcaaa

SEQ ID NO: 152926 - RNA, 19 nt, Homo sapiens
  misc_RNA (1)...(19): siRNA sense strand
aguaugacuugaaucgaaa

SEQ ID NO: 152927 - RNA, 19 nt, Homo sapiens
  misc_RNA (1)...(19): siRNA sense strand
caaaggaacacagaauugg

SEQ ID NO: 152928 - RNA, 19 nt, Homo sapiens
  misc_RNA (1)...(19): siRNA sense strand
ggagcugucaugcuguaaa

SEQ ID NO: 152929 - RNA, 19 nt, Homo sapiens
  misc_RNA (1)...(19): siRNA sense strand
uuacaaauggauacucuug

SEQ ID NO: 152930 - RNA, 19 nt, Homo sapiens
  misc_RNA (1)...(19): siRNA sense strand
ccaaugauuccucuauaca

SEQ ID NO: 152931 - RNA, 19 nt, Homo sapiens
  misc_RNA (1)...(19): siRNA sense strand
ggcaaagacccugaaauca

SEQ ID NO: 152932 - RNA, 19 nt, Homo sapiens
  misc_RNA (1)...(19): siRNA sense strand
gagaaaucccagaacuuca

SEQ ID NO: 152933 - RNA, 19 nt, Homo sapiens
  misc_RNA (1)...(19): siRNA sense strand
uucaagaaaucccaacaug

SEQ ID NO: 152934 - RNA, 19 nt, Homo sapiens
  misc_RNA (1)...(19): siRNA sense strand
ugauaaugguguucaagca

SEQ ID NO: 152935 - RNA, 19 nt, Homo sapiens
  misc_RNA (1)...(19): siRNA sense strand
gcauuauacucccgaagcu

SEQ ID NO: 152936 - RNA, 19 nt, Homo sapiens
  misc_RNA (1)...(19): siRNA sense strand
aaugcaagauuacaacuac

SEQ ID NO: 152937 - RNA, 19 nt, Homo sapiens
  misc_RNA (1)...(19): siRNA sense strand
aagccugacuguuauuaca

SEQ ID NO: 152938 - RNA, 19 nt, Homo sapiens
  misc_RNA (1)...(19): siRNA sense strand
ccagaccacucagcugcaa

SEQ ID NO: 152939 - RNA, 19 nt, Homo sapiens
  misc_RNA (1)...(19): siRNA sense strand
ugggaaaucugugaaaggu

SEQ ID NO: 152940 - RNA, 19 nt, Homo sapiens
  misc_RNA (1)...(19): siRNA sense strand
gcccaguguuuugaaauua

SEQ ID NO: 152941 - RNA, 19 nt, Homo sapiens
  misc_RNA (1)...(19): siRNA sense strand
ccuaaugguguuacaaaug

SEQ ID NO: 152942 - RNA, 19 nt, Homo sapiens
  misc_RNA (1)...(19): siRNA sense strand
agaaaucccaacaugaaga

SEQ ID NO: 152943 - RNA, 19 nt, Homo sapiens
  misc_RNA (1)...(19): siRNA sense strand
aauaguacccggauacaca

SEQ ID NO: 152944 - RNA, 19 nt, Homo sapiens
  misc_RNA (1)...(19): siRNA sense strand
aaagccuaguuuguucuua

SEQ ID NO: 152945 - RNA, 19 nt, Homo sapiens
  misc_RNA (1)...(19): siRNA sense strand
auuauacucccgaagcuua

SEQ ID NO: 152946 - RNA, 19 nt, Homo sapiens
  misc_RNA (1)...(19): siRNA sense strand
aaauaugcauggagaugag

SEQ ID NO: 152947 - RNA, 19 nt, Homo sapiens
  misc_RNA (1)...(19): siRNA sense strand
cguggccaguuacccauuu

SEQ ID NO: 152948 - RNA, 19 nt, Homo sapiens
  misc_RNA (1)...(19): siRNA sense strand
guucaaauacguggcaaau

SEQ ID NO: 152949 - RNA, 19 nt, Homo sapiens
  misc_RNA (1)...(19): siRNA sense strand
acaaagccucauuaauuga

SEQ ID NO: 152950 - RNA, 19 nt, Homo sapiens
  misc_RNA (1)...(19): siRNA sense strand
gcaagauuacaacuacauc

SEQ ID NO: 152951 - RNA, 19 nt, Homo sapiens
  misc_RNA (1)...(19): siRNA sense strand
auaccuaugcuucaagaaa

SEQ ID NO: 152952 - RNA, 19 nt, Homo sapiens
  misc_RNA (1)...(19): siRNA sense strand
ugaagacuguugcccaaaa

SEQ ID NO: 152953 - RNA, 19 nt, Homo sapiens
  misc_RNA (1)...(19): siRNA sense strand
cuuaacgccugaugaugau

SEQ ID NO: 152954 - RNA, 19 nt, Homo sapiens
  misc_RNA (1)...(19): siRNA sense strand
cagaacuucagugcucuua

SEQ ID NO: 152955 - RNA, 19 nt, Homo sapiens
  misc_RNA (1)...(19): siRNA sense strand
ggugauuauuccggagaaa

SEQ ID NO: 152956 - RNA, 19 nt, Homo sapiens
  misc_RNA (1)...(19): siRNA sense strand
caacaaauauggagaguau

SEQ ID NO: 152957 - RNA, 19 nt, Homo sapiens
  misc_RNA (1)...(19): siRNA sense strand
gaacuucagugcucuuaaa

SEQ ID NO: 152958 - RNA, 19 nt, Homo sapiens
  misc_RNA (1)...(19): siRNA sense strand
ucacaaaucugaucaauag

SEQ ID NO: 152959 - RNA, 19 nt, Homo sapiens
  misc_RNA (1)...(19): siRNA sense strand
ucaaauacguggcaaauau

SEQ ID NO: 152960 - RNA, 19 nt, Homo sapiens
  misc_RNA (1)...(19): siRNA sense strand
gaacccagauggauuugaa

SEQ ID NO: 152961 - RNA, 19 nt, Homo sapiens
  misc_RNA (1)...(19): siRNA sense strand
caagaaaucccaacaugaa

SEQ ID NO: 152962 - RNA, 19 nt, Homo sapiens
  misc_RNA (1)...(19): siRNA sense strand
caaagacccugaaaucaca

SEQ ID NO: 152963 - RNA, 19 nt, Homo sapiens
  misc_RNA (1)...(19): siRNA sense strand
ggagaagcuuccauccuuu

SEQ ID NO: 152964 - RNA, 19 nt, Homo sapiens
  misc_RNA (1)...(19): siRNA sense strand
gaaaggagacgaguguaaa

SEQ ID NO: 152965 - RNA, 19 nt, Homo sapiens
  misc_RNA (1)...(19): siRNA sense strand
gaagaaaggagacgagugu

SEQ ID NO: 152966 - RNA, 19 nt, Homo sapiens
  misc_RNA (1)...(19): siRNA sense strand
gaacuuuccuaaugguguu

SEQ ID NO: 152967 - RNA, 19 nt, Homo sapiens
  misc_RNA (1)...(19): siRNA sense strand
aaacauaucugccccuaua

SEQ ID NO: 152968 - RNA, 19 nt, Homo sapiens
  misc_RNA (1)...(19): siRNA sense strand
gccugggucuuauauaaua

SEQ ID NO: 152969 - RNA, 19 nt, Homo sapiens
  misc_RNA (1)...(19): siRNA sense strand
aacaaagccucauuaauug

SEQ ID NO: 152970 - RNA, 19 nt, Homo sapiens
  misc_RNA (1)...(19): siRNA sense strand
ccacucagcugcaacaaag

SEQ ID NO: 152971 - RNA, 19 nt, Homo sapiens
  misc_RNA (1)...(19): siRNA sense strand
gaucaauaguacccggaua

SEQ ID NO: 152972 - RNA, 19 nt, Homo sapiens
  misc_RNA (1)...(19): siRNA sense strand
gcccaaugauuccucuaua

SEQ ID NO: 152973 - RNA, 19 nt, Homo sapiens
  misc_RNA (1)...(19): siRNA sense strand
ccaguuacccauuugauaa

SEQ ID NO: 152974 - RNA, 19 nt, Homo sapiens
  misc_RNA (1)...(19): siRNA sense strand
ggagaaaucccagaacuuc

SEQ ID NO: 152975 - RNA, 19 nt, Homo sapiens
  misc_RNA (1)...(19): siRNA sense strand
ugacuugaaucgaaauuuc

SEQ ID NO: 152976 - RNA, 19 nt, Homo sapiens
  misc_RNA (1)...(19): siRNA sense strand
aagguggaaugcaagauua

SEQ ID NO: 152977 - RNA, 19 nt, Homo sapiens
  misc_RNA (1)...(19): siRNA sense strand
caguaugacuugaaucgaa

SEQ ID NO: 152978 - RNA, 19 nt, Homo sapiens
  misc_RNA (1)...(19): siRNA sense strand
gagcugucaugcuguaaau

SEQ ID NO: 152979 - RNA, 19 nt, Homo sapiens
  misc_RNA (1)...(19): siRNA sense strand
gaaaucccaacaugaagaa

SEQ ID NO: 152980 - RNA, 19 nt, Homo sapiens
  misc_RNA (1)...(19): siRNA sense strand
uaaccaguaugacuugaau

SEQ ID NO: 152981 - RNA, 19 nt, Homo sapiens
  misc_RNA (1)...(19): siRNA sense strand
uagcugcgcuggauuucaa

SEQ ID NO: 152982 - RNA, 19 nt, Homo sapiens
  misc_RNA (1)...(19): siRNA sense strand
gaaugcaagauuacaacua

SEQ ID NO: 152983 - RNA, 19 nt, Homo sapiens
  misc_RNA (1)...(19): siRNA sense strand
gcuuaacgccugaugauga

SEQ ID NO: 152984 - RNA, 19 nt, Homo sapiens
  misc_RNA (1)...(19): siRNA sense strand
ccaaaggaacacagaauug

SEQ ID NO: 152985 - RNA, 19 nt, Homo sapiens
  misc_RNA (1)...(19): siRNA sense strand
ccuauagaaccaacaaaua

SEQ ID NO: 152986 - RNA, 19 nt, Homo sapiens
  misc_RNA (1)...(19): siRNA sense strand
gcauggagaugagacuguu

SEQ ID NO: 152987 - RNA, 19 nt, Homo sapiens
  misc_RNA (1)...(19): siRNA sense strand
gcaaagacccugaaaucac

SEQ ID NO: 152988 - RNA, 19 nt, Homo sapiens
  misc_RNA (1)...(19): siRNA sense strand
caaaucugaucaauaguac

SEQ ID NO: 152989 - RNA, 19 nt, Homo sapiens
  misc_RNA (1)...(19): siRNA sense strand
gcaaauaugcauggagaug

SEQ ID NO: 152990 - RNA, 19 nt, Homo sapiens
  misc_RNA (1)...(19): siRNA sense strand
cuaaugguguuacaaaugg

SEQ ID NO: 152991 - RNA, 19 nt, Homo sapiens
  misc_RNA (1)...(19): siRNA sense strand
caagggcaauuggauucua

SEQ ID NO: 152992 - RNA, 19 nt, Homo sapiens
  misc_RNA (1)...(19): siRNA sense strand
gucacucacuuacacagua

SEQ ID NO: 152993 - RNA, 19 nt, Homo sapiens
  misc_RNA (1)...(19): siRNA sense strand
caagguggaaugcaagauu

SEQ ID NO: 152994 - RNA, 19 nt, Homo sapiens
  misc_RNA (1)...(19): siRNA sense strand
caaagccucauuaauugaa

SEQ ID NO: 152995 - RNA, 19 nt, Homo sapiens
  misc_RNA (1)...(19): siRNA sense strand
ccugaaaucacaaaucuga

SEQ ID NO: 152996 - RNA, 19 nt, Homo sapiens
  misc_RNA (1)...(19): siRNA sense strand
uugccugggucuuauauaa

SEQ ID NO: 152997 - RNA, 19 nt, Homo sapiens
  misc_RNA (1)...(19): siRNA sense strand
ucaagaaaucccaacauga

SEQ ID NO: 152998 - RNA, 19 nt, Homo sapiens
  misc_RNA (1)...(19): siRNA sense strand
caugaacccagauggauuu

SEQ ID NO: 152999 - RNA, 19 nt, Homo sapiens
  misc_RNA (1)...(19): siRNA sense strand
ggauuccagaguucaaaua

SEQ ID NO: 153000 - RNA, 19 nt, Homo sapiens
  misc_RNA (1)...(19): siRNA sense strand
gguguaaagggucaaguuu

SEQ ID NO: 153001 - RNA, 19 nt, Homo sapiens
  misc_RNA (1)...(19): siRNA sense strand
caaauggauacucuuggua

SEQ ID NO: 153002 - RNA, 19 nt, Homo sapiens
  misc_RNA (1)...(19): siRNA sense strand
caaauaugcauggagauga

SEQ ID NO: 153003 - RNA, 19 nt, Homo sapiens
  misc_RNA (1)...(19): siRNA sense strand
ugaaguggcugaaaacaga

SEQ ID NO: 153004 - RNA, 19 nt, Homo sapiens
  misc_RNA (1)...(19): siRNA sense strand
gccaguuacccauuugaua

SEQ ID NO: 153005 - RNA, 19 nt, Homo sapiens
  misc_RNA (1)...(19): siRNA sense strand
caaauacguggcaaauaug

SEQ ID NO: 153006 - RNA, 19 nt, Homo sapiens
  misc_RNA (1)...(19): siRNA sense strand
aaugauuccucuauacaga

SEQ ID NO: 153007 - RNA, 19 nt, Homo sapiens
  misc_RNA (1)...(19): siRNA sense strand
uaccuaugcuucaagaaau

SEQ ID NO: 153008 - RNA, 19 nt, Homo sapiens
  misc_RNA (1)...(19): siRNA sense strand
gauaaugguguucaagcaa

SEQ ID NO: 153009 - RNA, 19 nt, Homo sapiens
  misc_RNA (1)...(19): siRNA sense strand
cugauugacuaucucguaa

SEQ ID NO: 153010 - RNA, 19 nt, Homo sapiens
  misc_RNA (1)...(19): siRNA sense strand
gcugucaugcuguaaauau

SEQ ID NO: 153011 - RNA, 19 nt, Homo sapiens
  misc_RNA (1)...(19): siRNA sense strand
aguauuaucuccuucucuu

SEQ ID NO: 153012 - RNA, 19 nt, Homo sapiens
  misc_RNA (1)...(19): siRNA sense strand
ucaagcaacuggggcauua

SEQ ID NO: 153013 - RNA, 19 nt, Homo sapiens
  misc_RNA (1)...(19): siRNA sense strand
caacuaccaccgccaggaa

SEQ ID NO: 153014 - RNA, 19 nt, Homo sapiens
  misc_RNA (1)...(19): siRNA sense strand
aaaugaacuuuccuaaugg

SEQ ID NO: 153015 - RNA, 19 nt, Homo sapiens
  misc_RNA (1)...(19): siRNA sense strand
agaaaggagacgaguguaa

SEQ ID NO: 153016 - RNA, 19 nt, Homo sapiens
  misc_RNA (1)...(19): siRNA sense strand
ggaagggauggaagcguuu

SEQ ID NO: 153017 - RNA, 19 nt, Homo sapiens
  misc_RNA (1)...(19): siRNA sense strand
acaaauggauacucuuggu

SEQ ID NO: 153018 - RNA, 19 nt, Homo sapiens
  misc_RNA (1)...(19): siRNA sense strand
ucacucacuuacacaguau

SEQ ID NO: 153019 - RNA, 19 nt, Homo sapiens
  misc_RNA (1)...(19): siRNA sense strand
gaaauuuccccgaugcuuu

SEQ ID NO: 153020 - RNA, 19 nt, Homo sapiens
  misc_RNA (1)...(19): siRNA sense strand
uggcaaagacccugaaauc

SEQ ID NO: 153021 - RNA, 19 nt, Homo sapiens
  misc_RNA (1)...(19): siRNA sense strand
aagccuaguuuguucuuau

SEQ ID NO: 153022 - RNA, 19 nt, Homo sapiens
  misc_RNA (1)...(19): siRNA sense strand
ugauuccucuauacagaaa

SEQ ID NO: 153023 - RNA, 19 nt, Homo sapiens
  misc_RNA (1)...(19): siRNA sense strand
uucaauaucuugcacauac

SEQ ID NO: 153024 - RNA, 19 nt, Homo sapiens
  misc_RNA (1)...(19): siRNA sense strand
gaagcuuaacgccugauga

SEQ ID NO: 153025 - RNA, 19 nt, Homo sapiens
  misc_RNA (1)...(19): siRNA sense strand
cguaaccagugauggcaaa

SEQ ID NO: 153026 - RNA, 19 nt, Homo sapiens
  misc_RNA (1)...(19): siRNA sense strand
aguaugacuugaaucgaaa

SEQ ID NO: 153027 - RNA, 19 nt, Homo sapiens
  misc_RNA (1)...(19): siRNA sense strand
caaaggaacacagaauugg

SEQ ID NO: 153028 - RNA, 19 nt, Homo sapiens
  misc_RNA (1)...(19): siRNA sense strand
ggagcugucaugcuguaaa

SEQ ID NO: 153029 - RNA, 19 nt, Homo sapiens
  misc_RNA (1)...(19): siRNA sense strand
uuacaaauggauacucuug

SEQ ID NO: 153030 - RNA, 19 nt, Homo sapiens
  misc_RNA (1)...(19): siRNA sense strand
ccaaugauuccucuauaca

SEQ ID NO: 153031 - RNA, 19 nt, Homo sapiens
  misc_RNA (1)...(19): siRNA sense strand
ggcaaagacccugaaauca

SEQ ID NO: 153032 - RNA, 19 nt, Homo sapiens
  misc_RNA (1)...(19): siRNA sense strand
gagaaaucccagaacuuca

SEQ ID NO: 153033 - RNA, 19 nt, Homo sapiens
  misc_RNA (1)...(19): siRNA sense strand
uucaagaaaucccaacaug

SEQ ID NO: 153034 - RNA, 19 nt, Homo sapiens
  misc_RNA (1)...(19): siRNA sense strand
ugauaaugguguucaagca

SEQ ID NO: 153035 - RNA, 19 nt, Homo sapiens
  misc_RNA (1)...(19): siRNA sense strand
gcauuauacucccgaagcu

SEQ ID NO: 153036 - RNA, 19 nt, Homo sapiens
  misc_RNA (1)...(19): siRNA sense strand
aaugcaagauuacaacuac

SEQ ID NO: 153037 - RNA, 19 nt, Homo sapiens
  misc_RNA (1)...(19): siRNA sense strand
aagccugacuguuauuaca

SEQ ID NO: 153038 - RNA, 19 nt, Homo sapiens
  misc_RNA (1)...(19): siRNA sense strand
ccagaccacucagcugcaa

SEQ ID NO: 153039 - RNA, 19 nt, Homo sapiens
  misc_RNA (1)...(19): siRNA sense strand
ugggaaaucugugaaaggu

SEQ ID NO: 153040 - RNA, 19 nt, Homo sapiens
  misc_RNA (1)...(19): siRNA sense strand
gcccaguguuuugaaauua

SEQ ID NO: 153041 - RNA, 19 nt, Homo sapiens
  misc_RNA (1)...(19): siRNA sense strand
ccuaaugguguuacaaaug

SEQ ID NO: 153042 - RNA, 19 nt, Homo sapiens
  misc_RNA (1)...(19): siRNA sense strand
agaaaucccaacaugaaga

SEQ ID NO: 153043 - RNA, 19 nt, Homo sapiens
  misc_RNA (1)...(19): siRNA sense strand
aauaguacccggauacaca

SEQ ID NO: 153044 - RNA, 19 nt, Homo sapiens
  misc_RNA (1)...(19): siRNA sense strand
aaagccuaguuuguucuua

SEQ ID NO: 153045 - RNA, 19 nt, Homo sapiens
  misc_RNA (1)...(19): siRNA sense strand
auuauacucccgaagcuua

SEQ ID NO: 153046 - RNA, 19 nt, Homo sapiens
  misc_RNA (1)...(19): siRNA sense strand
aaauaugcauggagaugag

SEQ ID NO: 153047 - RNA, 19 nt, Homo sapiens
  misc_RNA (1)...(19): siRNA sense strand
cguggccaguuacccauuu

SEQ ID NO: 153048 - RNA, 19 nt, Homo sapiens
  misc_RNA (1)...(19): siRNA sense strand
guucaaauacguggcaaau

SEQ ID NO: 153049 - RNA, 19 nt, Homo sapiens
  misc_RNA (1)...(19): siRNA sense strand
acaaagccucauuaauuga

SEQ ID NO: 153050 - RNA, 19 nt, Homo sapiens
  misc_RNA (1)...(19): siRNA sense strand
gcaagauuacaacuacauc

SEQ ID NO: 153051 - RNA, 19 nt, Homo sapiens
  misc_RNA (1)...(19): siRNA sense strand
auaccuaugcuucaagaaa

SEQ ID NO: 153052 - RNA, 19 nt, Homo sapiens
  misc_RNA (1)...(19): siRNA sense strand
ugaagacuguugcccaaaa

SEQ ID NO: 153053 - RNA, 19 nt, Homo sapiens
  misc_RNA (1)...(19): siRNA sense strand
cuuaacgccugaugaugau

SEQ ID NO: 153054 - RNA, 19 nt, Homo sapiens
  misc_RNA (1)...(19): siRNA sense strand
cagaacuucagugcucuua

SEQ ID NO: 153055 - RNA, 19 nt, Homo sapiens
  misc_RNA (1)...(19): siRNA sense strand
ggugauuauuccggagaaa

SEQ ID NO: 153056 - RNA, 19 nt, Homo sapiens
  misc_RNA (1)...(19): siRNA sense strand
gagagaaccucaucaauuu

SEQ ID NO: 153057 - RNA, 19 nt, Homo sapiens
  misc_RNA (1)...(19): siRNA sense strand
guaaaggaaucaucaagaa

SEQ ID NO: 153058 - RNA, 19 nt, Homo sapiens
  misc_RNA (1)...(19): siRNA sense strand
ggagagaaccucaucaauu

SEQ ID NO: 153059 - RNA, 19 nt, Homo sapiens
  misc_RNA (1)...(19): siRNA sense strand
gaagaaggauacagaagug

SEQ ID NO: 153060 - RNA, 19 nt, Homo sapiens
  misc_RNA (1)...(19): siRNA sense strand
ugacugacaucaucacuuu

SEQ ID NO: 153061 - RNA, 19 nt, Homo sapiens
  misc_RNA (1)...(19): siRNA sense strand
gaacagaggcugaaguugu

SEQ ID NO: 153062 - RNA, 19 nt, Homo sapiens
  misc_RNA (1)...(19): siRNA sense strand
gagcggauguuuaauacuu

SEQ ID NO: 153063 - RNA, 19 nt, Homo sapiens
  misc_RNA (1)...(19): siRNA sense strand
gcaagcacaucgucgugua

SEQ ID NO: 153064 - RNA, 19 nt, Homo sapiens
  misc_RNA (1)...(19): siRNA sense strand
ccauggaucugcuguauau

SEQ ID NO: 153065 - RNA, 19 nt, Homo sapiens
  misc_RNA (1)...(19): siRNA sense strand
ugaaagugcugcucuccua

SEQ ID NO: 153066 - RNA, 19 nt, Homo sapiens
  misc_RNA (1)...(19): siRNA sense strand
ccgcaaaucuucuggcaaa

SEQ ID NO: 153067 - RNA, 19 nt, Homo sapiens
  misc_RNA (1)...(19): siRNA sense strand
ccacauuucuuccaaguuc

SEQ ID NO: 153068 - RNA, 19 nt, Homo sapiens
  misc_RNA (1)...(19): siRNA sense strand
ccaugaagcucuuagacaa

SEQ ID NO: 153069 - RNA, 19 nt, Homo sapiens
  misc_RNA (1)...(19): siRNA sense strand
gacguuagaugaaacugaa

SEQ ID NO: 153070 - RNA, 19 nt, Homo sapiens
  misc_RNA (1)...(19): siRNA sense strand
cgacaucaauccgaacauu

SEQ ID NO: 153071 - RNA, 19 nt, Homo sapiens
  misc_RNA (1)...(19): siRNA sense strand
ucaccaagcuguggccuuu

SEQ ID NO: 153072 - RNA, 19 nt, Homo sapiens
  misc_RNA (1)...(19): siRNA sense strand
ccucaucaauuuccacauu

SEQ ID NO: 153073 - RNA, 19 nt, Homo sapiens
  misc_RNA (1)...(19): siRNA sense strand
gggaggaaaucaaaccaau

SEQ ID NO: 153074 - RNA, 19 nt, Homo sapiens
  misc_RNA (1)...(19): siRNA sense strand
gaacacuccugggcagaug

SEQ ID NO: 153075 - RNA, 19 nt, Homo sapiens
  misc_RNA (1)...(19): siRNA sense strand
gaggaaaucaaaccaauuc

SEQ ID NO: 153076 - RNA, 19 nt, Homo sapiens
  misc_RNA (1)...(19): siRNA sense strand
acagugguauuugaaguua

SEQ ID NO: 153077 - RNA, 19 nt, Homo sapiens
  misc_RNA (1)...(19): siRNA sense strand
agaugaaacugaagaagga

SEQ ID NO: 153078 - RNA, 19 nt, Homo sapiens
  misc_RNA (1)...(19): siRNA sense strand
caucaucacuggcguguac

SEQ ID NO: 153079 - RNA, 19 nt, Homo sapiens
  misc_RNA (1)...(19): siRNA sense strand
ugaaagaagcaaugacuga

SEQ ID NO: 153080 - RNA, 19 nt, Homo sapiens
  misc_RNA (1)...(19): siRNA sense strand
ggugaggccucuuaugaag

SEQ ID NO: 153081 - RNA, 19 nt, Homo sapiens
  misc_RNA (1)...(19): siRNA sense strand
cgucaccucuucugccuuu

SEQ ID NO: 153082 - RNA, 19 nt, Homo sapiens
  misc_RNA (1)...(19): siRNA sense strand
ugacaagucguucacguuu

SEQ ID NO: 153083 - RNA, 19 nt, Homo sapiens
  misc_RNA (1)...(19): siRNA sense strand
ggacagcuacgccaaaucu

SEQ ID NO: 153084 - RNA, 19 nt, Homo sapiens
  misc_RNA (1)...(19): siRNA sense strand
cagaggauccuggacaaua

SEQ ID NO: 153085 - RNA, 19 nt, Homo sapiens
  misc_RNA (1)...(19): siRNA sense strand
ccuggugggcuacaaauua

SEQ ID NO: 153086 - RNA, 19 nt, Homo sapiens
  misc_RNA (1)...(19): siRNA sense strand
ggaaggcaccugaaagaag

SEQ ID NO: 153087 - RNA, 19 nt, Homo sapiens
  misc_RNA (1)...(19): siRNA sense strand
caaaucuucuggcaaacga

SEQ ID NO: 153088 - RNA, 19 nt, Homo sapiens
  misc_RNA (1)...(19): siRNA sense strand
ggauggguauggucaagau

SEQ ID NO: 153089 - RNA, 19 nt, Homo sapiens
  misc_RNA (1)...(19): siRNA sense strand
gacggauucucaucgcuuu

SEQ ID NO: 153090 - RNA, 19 nt, Homo sapiens
  misc_RNA (1)...(19): siRNA sense strand
gccuuuacguggugucuaa

SEQ ID NO: 153091 - RNA, 19 nt, Homo sapiens
  misc_RNA (1)...(19): siRNA sense strand
gguaaaggaaucaucaaga

SEQ ID NO: 153092 - RNA, 19 nt, Homo sapiens
  misc_RNA (1)...(19): siRNA sense strand
caagauuacagugguauuu

SEQ ID NO: 153093 - RNA, 19 nt, Homo sapiens
  misc_RNA (1)...(19): siRNA sense strand
caacuauuaugccauggau

SEQ ID NO: 153094 - RNA, 19 nt, Homo sapiens
  misc_RNA (1)...(19): siRNA sense strand
gggagcggauguuuaauac

SEQ ID NO: 153095 - RNA, 19 nt, Homo sapiens
  misc_RNA (1)...(19): siRNA sense strand
ggaccgggaggaaaucaaa

SEQ ID NO: 153096 - RNA, 19 nt, Homo sapiens
  misc_RNA (1)...(19): siRNA sense strand
gacaagucguucacguuug

SEQ ID NO: 153097 - RNA, 19 nt, Homo sapiens
  misc_RNA (1)...(19): siRNA sense strand
aauaagcagucucuugaug

SEQ ID NO: 153098 - RNA, 19 nt, Homo sapiens
  misc_RNA (1)...(19): siRNA sense strand
ggaggaaaucaaaccaauu

SEQ ID NO: 153099 - RNA, 19 nt, Homo sapiens
  misc_RNA (1)...(19): siRNA sense strand
gaucgaucgucaccucuuc

SEQ ID NO: 153100 - RNA, 19 nt, Homo sapiens
  misc_RNA (1)...(19): siRNA sense strand
gcuguggccuuucaguuca

SEQ ID NO: 153101 - RNA, 19 nt, Homo sapiens
  misc_RNA (1)...(19): siRNA sense strand
ccuuggagauuaucaacaa

SEQ ID NO: 153102 - RNA, 19 nt, Homo sapiens
  misc_RNA (1)...(19): siRNA sense strand
acaaggacaugggcaaguu

SEQ ID NO: 153103 - RNA, 19 nt, Homo sapiens
  misc_RNA (1)...(19): siRNA sense strand
gaacaccgcaaaucuucug

SEQ ID NO: 153104 - RNA, 19 nt, Homo sapiens
  misc_RNA (1)...(19): siRNA sense strand
auagagaccucccugaaca

SEQ ID NO: 153105 - RNA, 19 nt, Homo sapiens
  misc_RNA (1)...(19): siRNA sense strand
ugaggccucuuaugaagga

SEQ ID NO: 153106 - RNA, 19 nt, Homo sapiens
  misc_RNA (1)...(19): siRNA sense strand
uguuugacuuggagaauaa

SEQ ID NO: 153107 - RNA, 19 nt, Homo sapiens
  misc_RNA (1)...(19): siRNA sense strand
gggaguacgucauguccau

SEQ ID NO: 153108 - RNA, 19 nt, Homo sapiens
  misc_RNA (1)...(19): siRNA sense strand
gugaacagguaucuacagu

SEQ ID NO: 153109 - RNA, 19 nt, Homo sapiens
  misc_RNA (1)...(19): siRNA sense strand
gcuauggugugucguacau

SEQ ID NO: 153110 - RNA, 19 nt, Homo sapiens
  misc_RNA (1)...(19): siRNA sense strand
agaagcaucagcauaugua

SEQ ID NO: 153111 - RNA, 19 nt, Homo sapiens
  misc_RNA (1)...(19): siRNA sense strand
agauuacagugguauuuga

SEQ ID NO: 153112 - RNA, 19 nt, Homo sapiens
  misc_RNA (1)...(19): siRNA sense strand
ugacaucaucacuuuguuu

SEQ ID NO: 153113 - RNA, 19 nt, Homo sapiens
  misc_RNA (1)...(19): siRNA sense strand
gaugacggcuauggugugu

SEQ ID NO: 153114 - RNA, 19 nt, Homo sapiens
  misc_RNA (1)...(19): siRNA sense strand
gaagugaagacccggauac

SEQ ID NO: 153115 - RNA, 19 nt, Homo sapiens
  misc_RNA (1)...(19): siRNA sense strand
caucaucacuuuguuuggu

SEQ ID NO: 153116 - RNA, 19 nt, Homo sapiens
  misc_RNA (1)...(19): siRNA sense strand
gacaucaucacuuuguuug

SEQ ID NO: 153117 - RNA, 19 nt, Homo sapiens
  misc_RNA (1)...(19): siRNA sense strand
caagaucgaccccucguua

SEQ ID NO: 153118 - RNA, 19 nt, Homo sapiens
  misc_RNA (1)...(19): siRNA sense strand
ggaaugucaagagguuaua

SEQ ID NO: 153119 - RNA, 19 nt, Homo sapiens
  misc_RNA (1)...(19): siRNA sense strand
auacgucaauggacagcua

SEQ ID NO: 153120 - RNA, 19 nt, Homo sapiens
  misc_RNA (1)...(19): siRNA sense strand
uccaugccauccugcuuua

SEQ ID NO: 153121 - RNA, 19 nt, Homo sapiens
  misc_RNA (1)...(19): siRNA sense strand
ucucaguucuaauuccaaa

SEQ ID NO: 153122 - RNA, 19 nt, Homo sapiens
  misc_RNA (1)...(19): siRNA sense strand
ugggagcggauguuuaaua

SEQ ID NO: 153123 - RNA, 19 nt, Homo sapiens
  misc_RNA (1)...(19): siRNA sense strand
gugaacagcaacuauuaug

SEQ ID NO: 153124 - RNA, 19 nt, Homo sapiens
  misc_RNA (1)...(19): siRNA sense strand
gagaagcaucagcauaugu

SEQ ID NO: 153125 - RNA, 19 nt, Homo sapiens
  misc_RNA (1)...(19): siRNA sense strand
ugagaagcaucagcauaug

SEQ ID NO: 153126 - RNA, 19 nt, Homo sapiens
  misc_RNA (1)...(19): siRNA sense strand
gaaacggccaacugcaugu

SEQ ID NO: 153127 - RNA, 19 nt, Homo sapiens
  misc_RNA (1)...(19): siRNA sense strand
caaguuggcgucugagaag

SEQ ID NO: 153128 - RNA, 19 nt, Homo sapiens
  misc_RNA (1)...(19): siRNA sense strand
ggaaucaucaagaaauguc

SEQ ID NO: 153129 - RNA, 19 nt, Homo sapiens
  misc_RNA (1)...(19): siRNA sense strand
aaggaaucaucaagaaaug

SEQ ID NO: 153130 - RNA, 19 nt, Homo sapiens
  misc_RNA (1)...(19): siRNA sense strand
ucacguuuguugucuucaa

SEQ ID NO: 153131 - RNA, 19 nt, Homo sapiens
  misc_RNA (1)...(19): siRNA sense strand
ugaagaaggauacagaagu

SEQ ID NO: 153132 - RNA, 19 nt, Homo sapiens
  misc_RNA (1)...(19): siRNA sense strand
ggugggaggaguacaucua

SEQ ID NO: 153133 - RNA, 19 nt, Homo sapiens
  misc_RNA (1)...(19): siRNA sense strand
uguauauccuuccaacuca

SEQ ID NO: 153134 - RNA, 19 nt, Homo sapiens
  misc_RNA (1)...(19): siRNA sense strand
gaaggauacagaagugaag

SEQ ID NO: 153135 - RNA, 19 nt, Homo sapiens
  misc_RNA (1)...(19): siRNA sense strand
ucggugaggccucuuauga

SEQ ID NO: 153136 - RNA, 19 nt, Homo sapiens
  misc_RNA (1)...(19): siRNA sense strand
ggucucaguucuaauucca

SEQ ID NO: 153137 - RNA, 19 nt, Homo sapiens
  misc_RNA (1)...(19): siRNA sense strand
uggcaaacgacguggauuu

SEQ ID NO: 153138 - RNA, 19 nt, Homo sapiens
  misc_RNA (1)...(19): siRNA sense strand
guucacguuuguugucuuc

SEQ ID NO: 153139 - RNA, 19 nt, Homo sapiens
  misc_RNA (1)...(19): siRNA sense strand
cagcuacgccaaaucucua

SEQ ID NO: 153140 - RNA, 19 nt, Homo sapiens
  misc_RNA (1)...(19): siRNA sense strand
ggugucgucaggccuauuu

SEQ ID NO: 153141 - RNA, 19 nt, Homo sapiens
  misc_RNA (1)...(19): siRNA sense strand
gaaaacccauguuguacag

SEQ ID NO: 153142 - RNA, 19 nt, Homo sapiens
  misc_RNA (1)...(19): siRNA sense strand
gcaccugaaagaagcaaug

SEQ ID NO: 153143 - RNA, 19 nt, Homo sapiens
  misc_RNA (1)...(19): siRNA sense strand
caaggacaugggcaaguuu

SEQ ID NO: 153144 - RNA, 19 nt, Homo sapiens
  misc_RNA (1)...(19): siRNA sense strand
gggaaugucaagagguuau

SEQ ID NO: 153145 - RNA, 19 nt, Homo sapiens
  misc_RNA (1)...(19): siRNA sense strand
cgccaaaucucuacuacac

SEQ ID NO: 153146 - RNA, 19 nt, Homo sapiens
  misc_RNA (1)...(19): siRNA sense strand
aaaauaagcagucucuuga

SEQ ID NO: 153147 - RNA, 19 nt, Homo sapiens
  misc_RNA (1)...(19): siRNA sense strand
ggagauggagcagcagaug

SEQ ID NO: 153148 - RNA, 19 nt, Homo sapiens
  misc_RNA (1)...(19): siRNA sense strand
agugggagcggauguuuaa

SEQ ID NO: 153149 - RNA, 19 nt, Homo sapiens
  misc_RNA (1)...(19): siRNA sense strand
ggaaaucaaaccaauucgu

SEQ ID NO: 153150 - RNA, 19 nt, Homo sapiens
  misc_RNA (1)...(19): siRNA sense strand
gauuacagugguauuugaa

SEQ ID NO: 153151 - RNA, 19 nt, Homo sapiens
  misc_RNA (1)...(19): siRNA sense strand
uuacagugguauuugaagu

SEQ ID NO: 153152 - RNA, 19 nt, Homo sapiens
  misc_RNA (1)...(19): siRNA sense strand
ggugaacagcaacuauuau

SEQ ID NO: 153153 - RNA, 19 nt, Homo sapiens
  misc_RNA (1)...(19): siRNA sense strand
uggugaacagcaacuauua

SEQ ID NO: 153154 - RNA, 19 nt, Homo sapiens
  misc_RNA (1)...(19): siRNA sense strand
gaagcaucagcauauguau

SEQ ID NO: 153155 - RNA, 19 nt, Homo sapiens
  misc_RNA (1)...(19): siRNA sense strand
gaagcaaugacugacauca

SEQ ID NO: 153156 - RNA, 19 nt, Homo sapiens
  misc_RNA (1)...(19): siRNA sense strand
gaacugauccugaccauga

SEQ ID NO: 153157 - RNA, 19 nt, Homo sapiens
  misc_RNA (1)...(19): siRNA sense strand
ccacagagauuaacuucaa

SEQ ID NO: 153158 - RNA, 19 nt, Homo sapiens
  misc_RNA (1)...(19): siRNA sense strand
guaagagccuggugaaaug

SEQ ID NO: 153159 - RNA, 19 nt, Homo sapiens
  misc_RNA (1)...(19): siRNA sense strand
ccagagaacugaccaacga

SEQ ID NO: 153160 - RNA, 19 nt, Homo sapiens
  misc_RNA (1)...(19): siRNA sense strand
ggagacacuuucuacauca

SEQ ID NO: 153161 - RNA, 19 nt, Homo sapiens
  misc_RNA (1)...(19): siRNA sense strand
gggagacacuuucuacauc

SEQ ID NO: 153162 - RNA, 19 nt, Homo sapiens
  misc_RNA (1)...(19): siRNA sense strand
gaugggaggcccuguaaga

SEQ ID NO: 153163 - RNA, 19 nt, Homo sapiens
  misc_RNA (1)...(19): siRNA sense strand
ugaaugugaugcugaggaa

SEQ ID NO: 153164 - RNA, 19 nt, Homo sapiens
  misc_RNA (1)...(19): siRNA sense strand
gaaaugggagagugagaau

SEQ ID NO: 153165 - RNA, 19 nt, Homo sapiens
  misc_RNA (1)...(19): siRNA sense strand
aaugggagagugagaauaa

SEQ ID NO: 153166 - RNA, 19 nt, Homo sapiens
  misc_RNA (1)...(19): siRNA sense strand
gagacacuuucuacaucaa

SEQ ID NO: 153167 - RNA, 19 nt, Homo sapiens
  misc_RNA (1)...(19): siRNA sense strand
ggagggagacacuuucuac

SEQ ID NO: 153168 - RNA, 19 nt, Homo sapiens
  misc_RNA (1)...(19): siRNA sense strand
agaauaaaauggucuguga

SEQ ID NO: 153169 - RNA, 19 nt, Homo sapiens
  misc_RNA (1)...(19): siRNA sense strand
ggucuacguccgagaguga

SEQ ID NO: 153170 - RNA, 19 nt, Homo sapiens
  misc_RNA (1)...(19): siRNA sense strand
gcaccacagagauuaacuu

SEQ ID NO: 153171 - RNA, 19 nt, Homo sapiens
  misc_RNA (1)...(19): siRNA sense strand
uguaagagccuggugaaau

SEQ ID NO: 153172 - RNA, 19 nt, Homo sapiens
  misc_RNA (1)...(19): siRNA sense strand
gugcgcaccacagagauua

SEQ ID NO: 153173 - RNA, 19 nt, Homo sapiens
  misc_RNA (1)...(19): siRNA sense strand
ucgaggaauugcucaaagu

SEQ ID NO: 153174 - RNA, 19 nt, Homo sapiens
  misc_RNA (1)...(19): siRNA sense strand
ugaaaugggagagugagaa

SEQ ID NO: 153175 - RNA, 19 nt, Homo sapiens
  misc_RNA (1)...(19): siRNA sense strand
gggaacugauccugaccau

SEQ ID NO: 153176 - RNA, 19 nt, Homo sapiens
  misc_RNA (1)...(19): siRNA sense strand
cggaaaacuucgaggaauu

SEQ ID NO: 153177 - RNA, 19 nt, Homo sapiens
  misc_RNA (1)...(19): siRNA sense strand
gacggcggaugacguugug

SEQ ID NO: 153178 - RNA, 19 nt, Homo sapiens
  misc_RNA (1)...(19): siRNA sense strand
caugacggcggaugacguu

SEQ ID NO: 153179 - RNA, 19 nt, Homo sapiens
  misc_RNA (1)...(19): siRNA sense strand
ggaaaacuucgaggaauug

SEQ ID NO: 153180 - RNA, 19 nt, Homo sapiens
  misc_RNA (1)...(19): siRNA sense strand
cgaggaauugcucaaagug

SEQ ID NO: 153181 - RNA, 19 nt, Homo sapiens
  misc_RNA (1)...(19): siRNA sense strand
gagggagacacuuucuaca

SEQ ID NO: 153182 - RNA, 19 nt, Homo sapiens
  misc_RNA (1)...(19): siRNA sense strand
uggaugggaggcccuguaa

SEQ ID NO: 153183 - RNA, 19 nt, Homo sapiens
  misc_RNA (1)...(19): siRNA sense strand
gugaugcugaggaagauug

SEQ ID NO: 153184 - RNA, 19 nt, Homo sapiens
  misc_RNA (1)...(19): siRNA sense strand
agagauuaacuucaagguu

SEQ ID NO: 153185 - RNA, 19 nt, Homo sapiens
  misc_RNA (1)...(19): siRNA sense strand
aaugugaugcugaggaaga

SEQ ID NO: 153186 - RNA, 19 nt, Homo sapiens
  misc_RNA (1)...(19): siRNA sense strand
gaagaaagcugaagacuug

SEQ ID NO: 153187 - RNA, 19 nt, Homo sapiens
  misc_RNA (1)...(19): siRNA sense strand
gaagaaaucuggcuaucau

SEQ ID NO: 153188 - RNA, 19 nt, Homo sapiens
  misc_RNA (1)...(19): siRNA sense strand
gacaaacccuuucuaugua

SEQ ID NO: 153189 - RNA, 19 nt, Homo sapiens
  misc_RNA (1)...(19): siRNA sense strand
gaauaugagugaugacaaa

SEQ ID NO: 153190 - RNA, 19 nt, Homo sapiens
  misc_RNA (1)...(19): siRNA sense strand
gaaguggguuuguuuaaug

SEQ ID NO: 153191 - RNA, 19 nt, Homo sapiens
  misc_RNA (1)...(19): siRNA sense strand
uaacgaagauccugaugaa

SEQ ID NO: 153192 - RNA, 19 nt, Homo sapiens
  misc_RNA (1)...(19): siRNA sense strand
ggacaaaccaugccuguug

SEQ ID NO: 153193 - RNA, 19 nt, Homo sapiens
  misc_RNA (1)...(19): siRNA sense strand
gaagaaguggguuuguuua

SEQ ID NO: 153194 - RNA, 19 nt, Homo sapiens
  misc_RNA (1)...(19): siRNA sense strand
gagaagagcagcuaacgaa

SEQ ID NO: 153195 - RNA, 19 nt, Homo sapiens
  misc_RNA (1)...(19): siRNA sense strand
ugacaaacccuuucuaugu

SEQ ID NO: 153196 - RNA, 19 nt, Homo sapiens
  misc_RNA (1)...(19): siRNA sense strand
ucauaaagauugcccugua

SEQ ID NO: 153197 - RNA, 19 nt, Homo sapiens
  misc_RNA (1)...(19): siRNA sense strand
gaaguaccauuggcacaaa

SEQ ID NO: 153198 - RNA, 19 nt, Homo sapiens
  misc_RNA (1)...(19): siRNA sense strand
cauaaagauugcccuguaa

SEQ ID NO: 153199 - RNA, 19 nt, Homo sapiens
  misc_RNA (1)...(19): siRNA sense strand
gagaugacacugaaauuug

SEQ ID NO: 153200 - RNA, 19 nt, Homo sapiens
  misc_RNA (1)...(19): siRNA sense strand
ucauuuggcuguccauaaa

SEQ ID NO: 153201 - RNA, 19 nt, Homo sapiens
  misc_RNA (1)...(19): siRNA sense strand
acaaggaccuguggaauau

SEQ ID NO: 153202 - RNA, 19 nt, Homo sapiens
  misc_RNA (1)...(19): siRNA sense strand
ugaggagccuucuguugua

SEQ ID NO: 153203 - RNA, 19 nt, Homo sapiens
  misc_RNA (1)...(19): siRNA sense strand
gaagagcagcuaacgaaga

SEQ ID NO: 153204 - RNA, 19 nt, Homo sapiens
  misc_RNA (1)...(19): siRNA sense strand
gaagucacccugcugagaa

SEQ ID NO: 153205 - RNA, 19 nt, Homo sapiens
  misc_RNA (1)...(19): siRNA sense strand
gcacagcccacaucagcua

SEQ ID NO: 153206 - RNA, 19 nt, Homo sapiens
  misc_RNA (1)...(19): siRNA sense strand
caugguagcggauugguua

SEQ ID NO: 153207 - RNA, 19 nt, Homo sapiens
  misc_RNA (1)...(19): siRNA sense strand
caacaccuaucauaagaag

SEQ ID NO: 153208 - RNA, 19 nt, Homo sapiens
  misc_RNA (1)...(19): siRNA sense strand
ucacagcccucaggaaguu

SEQ ID NO: 153209 - RNA, 19 nt, Homo sapiens
  misc_RNA (1)...(19): siRNA sense strand
ccacagacccaaaguacaa

SEQ ID NO: 153210 - RNA, 19 nt, Homo sapiens
  misc_RNA (1)...(19): siRNA sense strand
agaaacaacucaccaggau

SEQ ID NO: 153211 - RNA, 19 nt, Homo sapiens
  misc_RNA (1)...(19): siRNA sense strand
gaugauaguucagaagaca

SEQ ID NO: 153212 - RNA, 19 nt, Homo sapiens
  misc_RNA (1)...(19): siRNA sense strand
gaaacaacucaccaggaua

SEQ ID NO: 153213 - RNA, 19 nt, Homo sapiens
  misc_RNA (1)...(19): siRNA sense strand
ccaaugugcugcuuacaag

SEQ ID NO: 153214 - RNA, 19 nt, Homo sapiens
  misc_RNA (1)...(19): siRNA sense strand
uaaccgccaugcagaagaa

SEQ ID NO: 153215 - RNA, 19 nt, Homo sapiens
  misc_RNA (1)...(19): siRNA sense strand
gaaauucaaguuacaugug

SEQ ID NO: 153216 - RNA, 19 nt, Homo sapiens
  misc_RNA (1)...(19): siRNA sense strand
cccauuuccucuucuguua

SEQ ID NO: 153217 - RNA, 19 nt, Homo sapiens
  misc_RNA (1)...(19): siRNA sense strand
ucaccaaccucaaguacug

SEQ ID NO: 153218 - RNA, 19 nt, Homo sapiens
  misc_RNA (1)...(19): siRNA sense strand
gcuauuccugcaucaauua

SEQ ID NO: 153219 - RNA, 19 nt, Homo sapiens
  misc_RNA (1)...(19): siRNA sense strand
ugaagaaguggguuuguuu

SEQ ID NO: 153220 - RNA, 19 nt, Homo sapiens
  misc_RNA (1)...(19): siRNA sense strand
gaagacuugaguucauuaa

SEQ ID NO: 153221 - RNA, 19 nt, Homo sapiens
  misc_RNA (1)...(19): siRNA sense strand
gcuucaagaugccgacaaa

SEQ ID NO: 153222 - RNA, 19 nt, Homo sapiens
  misc_RNA (1)...(19): siRNA sense strand
gaugacaaacccuuucuau

SEQ ID NO: 153223 - RNA, 19 nt, Homo sapiens
  misc_RNA (1)...(19): siRNA sense strand
cagcaacauccuccaguua

SEQ ID NO: 153224 - RNA, 19 nt, Homo sapiens
  misc_RNA (1)...(19): siRNA sense strand
uacaaggaccuguggaaua

SEQ ID NO: 153225 - RNA, 19 nt, Homo sapiens
  misc_RNA (1)...(19): siRNA sense strand
gugaagaaguggguuuguu

SEQ ID NO: 153226 - RNA, 19 nt, Homo sapiens
  misc_RNA (1)...(19): siRNA sense strand
caaguuacaugugaauucu

SEQ ID NO: 153227 - RNA, 19 nt, Homo sapiens
  misc_RNA (1)...(19): siRNA sense strand
gagcagcagcuucaagaug

SEQ ID NO: 153228 - RNA, 19 nt, Homo sapiens
  misc_RNA (1)...(19): siRNA sense strand
ugagaugacacugaaauuu

SEQ ID NO: 153229 - RNA, 19 nt, Homo sapiens
  misc_RNA (1)...(19): siRNA sense strand
caauggugauacugucaaa

SEQ ID NO: 153230 - RNA, 19 nt, Homo sapiens
  misc_RNA (1)...(19): siRNA sense strand
aaacaugagaugacacuga

SEQ ID NO: 153231 - RNA, 19 nt, Homo sapiens
  misc_RNA (1)...(19): siRNA sense strand
ccagcaacauccuccaguu

SEQ ID NO: 153232 - RNA, 19 nt, Homo sapiens
  misc_RNA (1)...(19): siRNA sense strand
gcuuacaaguucugacuca

SEQ ID NO: 153233 - RNA, 19 nt, Homo sapiens
  misc_RNA (1)...(19): siRNA sense strand
ggaaguaccauuggcacaa

SEQ ID NO: 153234 - RNA, 19 nt, Homo sapiens
  misc_RNA (1)...(19): siRNA sense strand
aaccaugccuguugcuauu

SEQ ID NO: 153235 - RNA, 19 nt, Homo sapiens
  misc_RNA (1)...(19): siRNA sense strand
ugcaacaccuaucauaaga

SEQ ID NO: 153236 - RNA, 19 nt, Homo sapiens
  misc_RNA (1)...(19): siRNA sense strand
aacaugagaugacacugaa

SEQ ID NO: 153237 - RNA, 19 nt, Homo sapiens
  misc_RNA (1)...(19): siRNA sense strand
ucauacugcugauaaagau

SEQ ID NO: 153238 - RNA, 19 nt, Homo sapiens
  misc_RNA (1)...(19): siRNA sense strand
aagagcagcuaacgaagau

SEQ ID NO: 153239 - RNA, 19 nt, Homo sapiens
  misc_RNA (1)...(19): siRNA sense strand
aaacaacucaccaggauag

SEQ ID NO: 153240 - RNA, 19 nt, Homo sapiens
  misc_RNA (1)...(19): siRNA sense strand
agaaguggguuuguuuaau

SEQ ID NO: 153241 - RNA, 19 nt, Homo sapiens
  misc_RNA (1)...(19): siRNA sense strand
ccucuucuguuacaucuuc

SEQ ID NO: 153242 - RNA, 19 nt, Homo sapiens
  misc_RNA (1)...(19): siRNA sense strand
ggaauaugagugaugacaa

SEQ ID NO: 153243 - RNA, 19 nt, Homo sapiens
  misc_RNA (1)...(19): siRNA sense strand
cugcaucaauuacaaguuc

SEQ ID NO: 153244 - RNA, 19 nt, Homo sapiens
  misc_RNA (1)...(19): siRNA sense strand
ugagaaggaaguaccauug

SEQ ID NO: 153245 - RNA, 19 nt, Homo sapiens
  misc_RNA (1)...(19): siRNA sense strand
aaggaccuguggaauauga

SEQ ID NO: 153246 - RNA, 19 nt, Homo sapiens
  misc_RNA (1)...(19): siRNA sense strand
gaaagucuggguucagucu

SEQ ID NO: 153247 - RNA, 19 nt, Homo sapiens
  misc_RNA (1)...(19): siRNA sense strand
ccauaaacauaaacaugag

SEQ ID NO: 153248 - RNA, 19 nt, Homo sapiens
  misc_RNA (1)...(19): siRNA sense strand
uacagaagcuauacagcau

SEQ ID NO: 153249 - RNA, 19 nt, Homo sapiens
  misc_RNA (1)...(19): siRNA sense strand
aaauagagcagcagcuuca

SEQ ID NO: 153250 - RNA, 19 nt, Homo sapiens
  misc_RNA (1)...(19): siRNA sense strand
ugaguuggcgaguccauuu

SEQ ID NO: 153251 - RNA, 19 nt, Homo sapiens
  misc_RNA (1)...(19): siRNA sense strand
ucacccugcugagaaauga

SEQ ID NO: 153252 - RNA, 19 nt, Homo sapiens
  misc_RNA (1)...(19): siRNA sense strand
gcaacaccuaucauaagaa

SEQ ID NO: 153253 - RNA, 19 nt, Homo sapiens
  misc_RNA (1)...(19): siRNA sense strand
gguagcggauugguuagga

SEQ ID NO: 153254 - RNA, 19 nt, Homo sapiens
  misc_RNA (1)...(19): siRNA sense strand
cagagucuacuaccaguga

SEQ ID NO: 153255 - RNA, 19 nt, Homo sapiens
  misc_RNA (1)...(19): siRNA sense strand
ucaaguuacaugugaauuc

SEQ ID NO: 153256 - RNA, 19 nt, Homo sapiens
  misc_RNA (1)...(19): siRNA sense strand
cgaaauagagcagcagcuu

SEQ ID NO: 153257 - RNA, 19 nt, Homo sapiens
  misc_RNA (1)...(19): siRNA sense strand
uguuacaucuuccuaaugg

SEQ ID NO: 153258 - RNA, 19 nt, Homo sapiens
  misc_RNA (1)...(19): siRNA sense strand
ggauguggccagcguuuua

SEQ ID NO: 153259 - RNA, 19 nt, Homo sapiens
  misc_RNA (1)...(19): siRNA sense strand
ugaaguggcacagcugaaa

SEQ ID NO: 153260 - RNA, 19 nt, Homo sapiens
  misc_RNA (1)...(19): siRNA sense strand
aaaggaaagucuggguuca

SEQ ID NO: 153261 - RNA, 19 nt, Homo sapiens
  misc_RNA (1)...(19): siRNA sense strand
aagaaguggguuuguuuaa

SEQ ID NO: 153262 - RNA, 19 nt, Homo sapiens
  misc_RNA (1)...(19): siRNA sense strand
gcucuuucacagaucguua

SEQ ID NO: 153263 - RNA, 19 nt, Homo sapiens
  misc_RNA (1)...(19): siRNA sense strand
gaaaucuggcuaucauacu

SEQ ID NO: 153264 - RNA, 19 nt, Homo sapiens
  misc_RNA (1)...(19): siRNA sense strand
agaagaaagcugaagacuu

SEQ ID NO: 153265 - RNA, 19 nt, Homo sapiens
  misc_RNA (1)...(19): siRNA sense strand
ggagaagagcagcuaacga

SEQ ID NO: 153266 - RNA, 19 nt, Homo sapiens
  misc_RNA (1)...(19): siRNA sense strand
gcccacaucagcuauuguu

SEQ ID NO: 153267 - RNA, 19 nt, Homo sapiens
  misc_RNA (1)...(19): siRNA sense strand
uguggaauaugagugauga

SEQ ID NO: 153268 - RNA, 19 nt, Homo sapiens
  misc_RNA (1)...(19): siRNA sense strand
gaggagccuucuguuguag

SEQ ID NO: 153269 - RNA, 19 nt, Homo sapiens
  misc_RNA (1)...(19): siRNA sense strand
aaaucuggcuaucauacug

SEQ ID NO: 153270 - RNA, 19 nt, Homo sapiens
  misc_RNA (1)...(19): siRNA sense strand
uagagcagcagcuucaaga

SEQ ID NO: 153271 - RNA, 19 nt, Homo sapiens
  misc_RNA (1)...(19): siRNA sense strand
gcggauugguuaggacuca

SEQ ID NO: 153272 - RNA, 19 nt, Homo sapiens
  misc_RNA (1)...(19): siRNA sense strand
ccaggcccauuuccucuuc

SEQ ID NO: 153273 - RNA, 19 nt, Homo sapiens
  misc_RNA (1)...(19): siRNA sense strand
uacaaguucugacucaagu

SEQ ID NO: 153274 - RNA, 19 nt, Homo sapiens
  misc_RNA (1)...(19): siRNA sense strand
cagcccacaucagcuauug

SEQ ID NO: 153275 - RNA, 19 nt, Homo sapiens
  misc_RNA (1)...(19): siRNA sense strand
gagaaggaaguaccauugg

SEQ ID NO: 153276 - RNA, 19 nt, Homo sapiens
  misc_RNA (1)...(19): siRNA sense strand
agaugacacugaaauuugg

SEQ ID NO: 153277 - RNA, 19 nt, Homo sapiens
  misc_RNA (1)...(19): siRNA sense strand
gaucagaccccaacaccaa

SEQ ID NO: 153278 - RNA, 19 nt, Homo sapiens
  misc_RNA (1)...(19): siRNA sense strand
ucuguuacaucuuccuaau

SEQ ID NO: 153279 - RNA, 19 nt, Homo sapiens
  misc_RNA (1)...(19): siRNA sense strand
cgaguaguccacauacaga

SEQ ID NO: 153280 - RNA, 19 nt, Homo sapiens
  misc_RNA (1)...(19): siRNA sense strand
auggucagcugcagaguga

SEQ ID NO: 153281 - RNA, 19 nt, Homo sapiens
  misc_RNA (1)...(19): siRNA sense strand
gaaagcugaagacuugagu

SEQ ID NO: 153282 - RNA, 19 nt, Homo sapiens
  misc_RNA (1)...(19): siRNA sense strand
agucuggguucagucuuua

SEQ ID NO: 153283 - RNA, 19 nt, Homo sapiens
  misc_RNA (1)...(19): siRNA sense strand
gcucacacaacuccacaga

SEQ ID NO: 153284 - RNA, 19 nt, Homo sapiens
  misc_RNA (1)...(19): siRNA sense strand
caaguucuaaugugcaugu

SEQ ID NO: 153285 - RNA, 19 nt, Homo sapiens
  misc_RNA (1)...(19): siRNA sense strand
ccagauggcggaccagagu

SEQ ID NO: 153286 - RNA, 19 nt, Homo sapiens
  misc_RNA (1)...(19): siRNA sense strand
ggauucacauuaaccauaa

SEQ ID NO: 153287 - RNA, 19 nt, Homo sapiens
  misc_RNA (1)...(19): siRNA sense strand
caucagaucuucccagaau

SEQ ID NO: 153288 - RNA, 19 nt, Homo sapiens
  misc_RNA (1)...(19): siRNA sense strand
cguaaauggucuucaguua

SEQ ID NO: 153289 - RNA, 19 nt, Homo sapiens
  misc_RNA (1)...(19): siRNA sense strand
guaaauggucuucaguuaa

SEQ ID NO: 153290 - RNA, 19 nt, Homo sapiens
  misc_RNA (1)...(19): siRNA sense strand
gcugagcgguacauagauu

SEQ ID NO: 153291 - RNA, 19 nt, Homo sapiens
  misc_RNA (1)...(19): siRNA sense strand
gguauuugaugguuggauu

SEQ ID NO: 153292 - RNA, 19 nt, Homo sapiens
  misc_RNA (1)...(19): siRNA sense strand
caucgaaacugcagcuucu

SEQ ID NO: 153293 - RNA, 19 nt, Homo sapiens
  misc_RNA (1)...(19): siRNA sense strand
ucacuucauucucaucuuc

SEQ ID NO: 153294 - RNA, 19 nt, Homo sapiens
  misc_RNA (1)...(19): siRNA sense strand
aaacugcagcuucuccaua

SEQ ID NO: 153295 - RNA, 19 nt, Homo sapiens
  misc_RNA (1)...(19): siRNA sense strand
ggaggagcaucagaucuuc

SEQ ID NO: 153296 - RNA, 19 nt, Homo sapiens
  misc_RNA (1)...(19): siRNA sense strand
cagcugagcgguacauaga

SEQ ID NO: 153297 - RNA, 19 nt, Homo sapiens
  misc_RNA (1)...(19): siRNA sense strand
gggaauaggagacuuugug

SEQ ID NO: 153298 - RNA, 19 nt, Homo sapiens
  misc_RNA (1)...(19): siRNA sense strand
gaugacgccuuuagcugau

SEQ ID NO: 153299 - RNA, 19 nt, Homo sapiens
  misc_RNA (1)...(19): siRNA sense strand
cuuccaagaugacgccuuu

SEQ ID NO: 153300 - RNA, 19 nt, Homo sapiens
  misc_RNA (1)...(19): siRNA sense strand
aacugcagcuucuccauaa

SEQ ID NO: 153301 - RNA, 19 nt, Homo sapiens
  misc_RNA (1)...(19): siRNA sense strand
gcagcuucuccauaauuua

SEQ ID NO: 153302 - RNA, 19 nt, Homo sapiens
  misc_RNA (1)...(19): siRNA sense strand
caacuucaaacuucagugu

SEQ ID NO: 153303 - RNA, 19 nt, Homo sapiens
  misc_RNA (1)...(19): siRNA sense strand
caaaauaucugaucuuacc

SEQ ID NO: 153304 - RNA, 19 nt, Homo sapiens
  misc_RNA (1)...(19): siRNA sense strand
gaauguggccaugaucuuc

SEQ ID NO: 153305 - RNA, 19 nt, Homo sapiens
  misc_RNA (1)...(19): siRNA sense strand
caaccucuuuccuugcaau

SEQ ID NO: 153306 - RNA, 19 nt, Homo sapiens
  misc_RNA (1)...(19): siRNA sense strand
aaacccaaauggaaacagu

SEQ ID NO: 153307 - RNA, 19 nt, Homo sapiens
  misc_RNA (1)...(19): siRNA sense strand
ggaaagccgguaccuagag

SEQ ID NO: 153308 - RNA, 19 nt, Homo sapiens
  misc_RNA (1)...(19): siRNA sense strand
cauuaaccauaaagacaga

SEQ ID NO: 153309 - RNA, 19 nt, Homo sapiens
  misc_RNA (1)...(19): siRNA sense strand
ugcagcuucuccauaauuu

SEQ ID NO: 153310 - RNA, 19 nt, Homo sapiens
  misc_RNA (1)...(19): siRNA sense strand
uggauucacauuaaccaua

SEQ ID NO: 153311 - RNA, 19 nt, Homo sapiens
  misc_RNA (1)...(19): siRNA sense strand
gaaacaguaucggggaauu

SEQ ID NO: 153312 - RNA, 19 nt, Homo sapiens
  misc_RNA (1)...(19): siRNA sense strand
cgagggaauaggagacuuu

SEQ ID NO: 153313 - RNA, 19 nt, Homo sapiens
  misc_RNA (1)...(19): siRNA sense strand
ucagcgagcccgaggaguu

SEQ ID NO: 153314 - RNA, 19 nt, Homo sapiens
  misc_RNA (1)...(19): siRNA sense strand
uaaaucgugugacuuuuga

SEQ ID NO: 153315 - RNA, 19 nt, Homo sapiens
  misc_RNA (1)...(19): siRNA sense strand
uaauuuauccuguggugau

SEQ ID NO: 153316 - RNA, 19 nt, Homo sapiens
  misc_RNA (1)...(19): siRNA sense strand
gggaaagccgguaccuaga

SEQ ID NO: 153317 - RNA, 19 nt, Homo sapiens
  misc_RNA (1)...(19): siRNA sense strand
gcaggaggagcaucagauc

SEQ ID NO: 153318 - RNA, 19 nt, Homo sapiens
  misc_RNA (1)...(19): siRNA sense strand
agaugaaaguuggcuguga

SEQ ID NO: 153319 - RNA, 19 nt, Homo sapiens
  misc_RNA (1)...(19): siRNA sense strand
acacguaaauggucuucag

SEQ ID NO: 153320 - RNA, 19 nt, Homo sapiens
  misc_RNA (1)...(19): siRNA sense strand
ucgcccaacuucaaacuuc

SEQ ID NO: 153321 - RNA, 19 nt, Homo sapiens
  misc_RNA (1)...(19): siRNA sense strand
ccgaggaguucauuaccau

SEQ ID NO: 153322 - RNA, 19 nt, Homo sapiens
  misc_RNA (1)...(19): siRNA sense strand
uacauagauuucugugaga

SEQ ID NO: 153323 - RNA, 19 nt, Homo sapiens
  misc_RNA (1)...(19): siRNA sense strand
cuguuugucuggucuuuga

SEQ ID NO: 153324 - RNA, 19 nt, Homo sapiens
  misc_RNA (1)...(19): siRNA sense strand
cacauuaaccauaaagaca

SEQ ID NO: 153325 - RNA, 19 nt, Homo sapiens
  misc_RNA (1)...(19): siRNA sense strand
caagaugacgccuuuagcu

SEQ ID NO: 153326 - RNA, 19 nt, Homo sapiens
  misc_RNA (1)...(19): siRNA sense strand
aagaaauccucagcagguu

SEQ ID NO: 153327 - RNA, 19 nt, Homo sapiens
  misc_RNA (1)...(19): siRNA sense strand
ucauuaccauccacuacga

SEQ ID NO: 153328 - RNA, 19 nt, Homo sapiens
  misc_RNA (1)...(19): siRNA sense strand
acguaaaucgugugacuuu

SEQ ID NO: 153329 - RNA, 19 nt, Homo sapiens
  misc_RNA (1)...(19): siRNA sense strand
cugaagguauuugaugguu

SEQ ID NO: 153330 - RNA, 19 nt, Homo sapiens
  misc_RNA (1)...(19): siRNA sense strand
gaaccaggaaauggauuca

SEQ ID NO: 153331 - RNA, 19 nt, Homo sapiens
  misc_RNA (1)...(19): siRNA sense strand
ucagaucuucccagaaugu

SEQ ID NO: 153332 - RNA, 19 nt, Homo sapiens
  misc_RNA (1)...(19): siRNA sense strand
ccaaauggaaacaguaucg

SEQ ID NO: 153333 - RNA, 19 nt, Homo sapiens
  misc_RNA (1)...(19): siRNA sense strand
uuugaugguuggauucuca

SEQ ID NO: 153334 - RNA, 19 nt, Homo sapiens
  misc_RNA (1)...(19): siRNA sense strand
gaaacugcagcuucuccau

SEQ ID NO: 153335 - RNA, 19 nt, Homo sapiens
  misc_RNA (1)...(19): siRNA sense strand
gagcccgaggaguucauua

SEQ ID NO: 153336 - RNA, 19 nt, Homo sapiens
  misc_RNA (1)...(19): siRNA sense strand
cccagaauguggccaugau

SEQ ID NO: 153337 - RNA, 19 nt, Homo sapiens
  misc_RNA (1)...(19): siRNA sense strand
ccucuuuccuugcaauguc

SEQ ID NO: 153338 - RNA, 19 nt, Homo sapiens
  misc_RNA (1)...(19): siRNA sense strand
guaaaucgugugacuuuug

SEQ ID NO: 153339 - RNA, 19 nt, Homo sapiens
  misc_RNA (1)...(19): siRNA sense strand
gauccuuuccugcucuuca

SEQ ID NO: 153340 - RNA, 19 nt, Homo sapiens
  misc_RNA (1)...(19): siRNA sense strand
acuucaaacuucaguguca

SEQ ID NO: 153341 - RNA, 19 nt, Homo sapiens
  misc_RNA (1)...(19): siRNA sense strand
cugcagcuucuccauaauu

SEQ ID NO: 153342 - RNA, 19 nt, Homo sapiens
  misc_RNA (1)...(19): siRNA sense strand
gagggaauaggagacuuug

SEQ ID NO: 153343 - RNA, 19 nt, Homo sapiens
  misc_RNA (1)...(19): siRNA sense strand
ccaggucuccaucgacugu

SEQ ID NO: 153344 - RNA, 19 nt, Homo sapiens
  misc_RNA (1)...(19): siRNA sense strand
ucauuucucagacuccaaa

SEQ ID NO: 153345 - RNA, 19 nt, Homo sapiens
  misc_RNA (1)...(19): siRNA sense strand
accaggaaauggauucaca

SEQ ID NO: 153346 - RNA, 19 nt, Homo sapiens
  misc_RNA (1)...(19): siRNA sense strand
gcacccagcugguuugaca

SEQ ID NO: 153347 - RNA, 19 nt, Homo sapiens
  misc_RNA (1)...(19): siRNA sense strand
ugauugaggugcauggaaa

SEQ ID NO: 153348 - RNA, 19 nt, Homo sapiens
  misc_RNA (1)...(19): siRNA sense strand
cuucaucccugucaucuga

SEQ ID NO: 153349 - RNA, 19 nt, Homo sapiens
  misc_RNA (1)...(19): siRNA sense strand
gaagagaagccugcuguca

SEQ ID NO: 153350 - RNA, 19 nt, Homo sapiens
  misc_RNA (1)...(19): siRNA sense strand
gaucccagcugauguagac

SEQ ID NO: 153351 - RNA, 19 nt, Homo sapiens
  misc_RNA (1)...(19): siRNA sense strand
guagacccucucaccauua

SEQ ID NO: 153352 - RNA, 19 nt, Homo sapiens
  misc_RNA (1)...(19): siRNA sense strand
uguagacccucucaccauu

SEQ ID NO: 153353 - RNA, 19 nt, Homo sapiens
  misc_RNA (1)...(19): siRNA sense strand
gagcgcaccauucccauca

SEQ ID NO: 153354 - RNA, 19 nt, Homo sapiens
  misc_RNA (1)...(19): siRNA sense strand
guuaagguguugggagaug

SEQ ID NO: 153355 - RNA, 19 nt, Homo sapiens
  misc_RNA (1)...(19): siRNA sense strand
guuugacacuggacucuca

SEQ ID NO: 153356 - RNA, 19 nt, Homo sapiens
  misc_RNA (1)...(19): siRNA sense strand
gaagagcgccaggaugaac

SEQ ID NO: 153357 - RNA, 19 nt, Homo sapiens
  misc_RNA (1)...(19): siRNA sense strand
acucaaaguuaagguguug

SEQ ID NO: 153358 - RNA, 19 nt, Homo sapiens
  misc_RNA (1)...(19): siRNA sense strand
gguguugggagaugugauu

SEQ ID NO: 153359 - RNA, 19 nt, Homo sapiens
  misc_RNA (1)...(19): siRNA sense strand
augaagagcgccaggauga

SEQ ID NO: 153360 - RNA, 19 nt, Homo sapiens
  misc_RNA (1)...(19): siRNA sense strand
gcgccaggaugaacauggu

SEQ ID NO: 153361 - RNA, 19 nt, Homo sapiens
  misc_RNA (1)...(19): siRNA sense strand
gcacuucuccccagaggaa

SEQ ID NO: 153362 - RNA, 19 nt, Homo sapiens
  misc_RNA (1)...(19): siRNA sense strand
ccggaucccagcugaugua

SEQ ID NO: 153363 - RNA, 19 nt, Homo sapiens
  misc_RNA (1)...(19): siRNA sense strand
gacccucucaccauuacuu

SEQ ID NO: 153364 - RNA, 19 nt, Homo sapiens
  misc_RNA (1)...(19): siRNA sense strand
gugaauggaccaaggaaac

SEQ ID NO: 153365 - RNA, 19 nt, Homo sapiens
  misc_RNA (1)...(19): siRNA sense strand
cagagaugcgccuggagaa

SEQ ID NO: 153366 - RNA, 19 nt, Homo sapiens
  misc_RNA (1)...(19): siRNA sense strand
gccaggaugaacaugguuu

SEQ ID NO: 153367 - RNA, 19 nt, Homo sapiens
  misc_RNA (1)...(19): siRNA sense strand
guugggagaugugauugag

SEQ ID NO: 153368 - RNA, 19 nt, Homo sapiens
  misc_RNA (1)...(19): siRNA sense strand
ucggagagcaccuguugga

SEQ ID NO: 153369 - RNA, 19 nt, Homo sapiens
  misc_RNA (1)...(19): siRNA sense strand
agaugcgccuggagaagga

SEQ ID NO: 153370 - RNA, 19 nt, Homo sapiens
  misc_RNA (1)...(19): siRNA sense strand
cuucggagagcaccuguug

SEQ ID NO: 153371 - RNA, 19 nt, Homo sapiens
  misc_RNA (1)...(19): siRNA sense strand
gaacgaggcgaauauccaa

SEQ ID NO: 153372 - RNA, 19 nt, Homo sapiens
  misc_RNA (1)...(19): siRNA sense strand
aaggagagcugagcgauga

SEQ ID NO: 153373 - RNA, 19 nt, Homo sapiens
  misc_RNA (1)...(19): siRNA sense strand
gaacuuccugggcaagaaa

SEQ ID NO: 153374 - RNA, 19 nt, Homo sapiens
  misc_RNA (1)...(19): siRNA sense strand
gcaaugaaguaggguccuu

SEQ ID NO: 153375 - RNA, 19 nt, Homo sapiens
  misc_RNA (1)...(19): siRNA sense strand
ccauuccggugacuacaaa

SEQ ID NO: 153376 - RNA, 19 nt, Homo sapiens
  misc_RNA (1)...(19): siRNA sense strand
gagacugugcgaucuuuga

SEQ ID NO: 153377 - RNA, 19 nt, Homo sapiens
  misc_RNA (1)...(19): siRNA sense strand
ggaacgaggcgaauaucca

SEQ ID NO: 153378 - RNA, 19 nt, Homo sapiens
  misc_RNA (1)...(19): siRNA sense strand
cgagcaugcuggcuuccaa

SEQ ID NO: 153379 - RNA, 19 nt, Homo sapiens
  misc_RNA (1)...(19): siRNA sense strand
uaccgaggauuucaguaug

SEQ ID NO: 153380 - RNA, 19 nt, Homo sapiens
  misc_RNA (1)...(19): siRNA sense strand
acucgaggcugaccaucuu

SEQ ID NO: 153381 - RNA, 19 nt, Homo sapiens
  misc_RNA (1)...(19): siRNA sense strand
gcaguacauucuggaacga

SEQ ID NO: 153382 - RNA, 19 nt, Homo sapiens
  misc_RNA (1)...(19): siRNA sense strand
cuaccgaggauuucaguau

SEQ ID NO: 153383 - RNA, 19 nt, Homo sapiens
  misc_RNA (1)...(19): siRNA sense strand
gggaugggaaggcaaugaa

SEQ ID NO: 153384 - RNA, 19 nt, Homo sapiens
  misc_RNA (1)...(19): siRNA sense strand
ucgagacugugcgaucuuu

SEQ ID NO: 153385 - RNA, 19 nt, Homo sapiens
  misc_RNA (1)...(19): siRNA sense strand
gcugagcgaugacuauccu

SEQ ID NO: 153386 - RNA, 19 nt, Homo sapiens
  misc_RNA (1)...(19): siRNA sense strand
gaugggaaggcaaugaagu

SEQ ID NO: 153387 - RNA, 19 nt, Homo sapiens
  misc_RNA (1)...(19): siRNA sense strand
gcagcaguacauucuggaa

SEQ ID NO: 153388 - RNA, 19 nt, Homo sapiens
  misc_RNA (1)...(19): siRNA sense strand
agaacuuccugggcaagaa

SEQ ID NO: 153389 - RNA, 19 nt, Homo sapiens
  misc_RNA (1)...(19): siRNA sense strand
caagggcagcaguacauuc

SEQ ID NO: 153390 - RNA, 19 nt, Homo sapiens
  misc_RNA (1)...(19): siRNA sense strand
gagaacuuccugggcaaga

SEQ ID NO: 153391 - RNA, 19 nt, Homo sapiens
  misc_RNA (1)...(19): siRNA sense strand
uccggugacuacaaacauu

SEQ ID NO: 153392 - RNA, 19 nt, Homo sapiens
  misc_RNA (1)...(19): siRNA sense strand
uucaguaugugcuggaaug

SEQ ID NO: 153393 - RNA, 19 nt, Homo sapiens
  misc_RNA (1)...(19): siRNA sense strand
gagcugagcgaugacuauc

SEQ ID NO: 153394 - RNA, 19 nt, Homo sapiens
  misc_RNA (1)...(19): siRNA sense strand
gagagcugagcgaugacua

SEQ ID NO: 153395 - RNA, 19 nt, Homo sapiens
  misc_RNA (1)...(19): siRNA sense strand
gaacauggguuggcuauca

SEQ ID NO: 153396 - RNA, 19 nt, Homo sapiens
  misc_RNA (1)...(19): siRNA sense strand
ccaacaaccgugccuauua

SEQ ID NO: 153397 - RNA, 19 nt, Homo sapiens
  misc_RNA (1)...(19): siRNA sense strand
caacaaccgugccuauuac

SEQ ID NO: 153398 - RNA, 19 nt, Homo sapiens
  misc_RNA (1)...(19): siRNA sense strand
gcacaaaaucucccuguuu

SEQ ID NO: 153399 - RNA, 19 nt, Homo sapiens
  misc_RNA (1)...(19): siRNA sense strand
ccuagagccuggugacuuc

SEQ ID NO: 153400 - RNA, 19 nt, Homo sapiens
  misc_RNA (1)...(19): siRNA sense strand
gugaucggcucauguccuu

SEQ ID NO: 153401 - RNA, 19 nt, Homo sapiens
  misc_RNA (1)...(19): siRNA sense strand
gcagugaucggcucauguc

SEQ ID NO: 153402 - RNA, 19 nt, Homo sapiens
  misc_RNA (1)...(19): siRNA sense strand
gggcaacaccauagagauc

SEQ ID NO: 153403 - RNA, 19 nt, Homo sapiens
  misc_RNA (1)...(19): siRNA sense strand
gcaggaacauccccuaguc

SEQ ID NO: 153404 - RNA, 19 nt, Homo sapiens
  misc_RNA (1)...(19): siRNA sense strand
gcaacaccauagagaucca

SEQ ID NO: 153405 - RNA, 19 nt, Homo sapiens
  misc_RNA (1)...(19): siRNA sense strand
gagcagcuaccgcagugau

SEQ ID NO: 153406 - RNA, 19 nt, Homo sapiens
  misc_RNA (1)...(19): siRNA sense strand
cuucaagggcaacaccaua

SEQ ID NO: 153407 - RNA, 19 nt, Homo sapiens
  misc_RNA (1)...(19): siRNA sense strand
cgugugcgcagcaucauug

SEQ ID NO: 153408 - RNA, 19 nt, Homo sapiens
  misc_RNA (1)...(19): siRNA sense strand
gaccgugugcgcagcauca

SEQ ID NO: 153409 - RNA, 19 nt, Homo sapiens
  misc_RNA (1)...(19): siRNA sense strand
ccuuugagcaguccaacuu

SEQ ID NO: 153410 - RNA, 19 nt, Homo sapiens
  misc_RNA (1)...(19): siRNA sense strand
ucaagggcaacaccauaga

SEQ ID NO: 153411 - RNA, 19 nt, Homo sapiens
  misc_RNA (1)...(19): siRNA sense strand
ccgcagugaucggcucaug

SEQ ID NO: 153412 - RNA, 19 nt, Homo sapiens
  misc_RNA (1)...(19): siRNA sense strand
ggacagaagauuuauauga

SEQ ID NO: 153413 - RNA, 19 nt, Homo sapiens
  misc_RNA (1)...(19): siRNA sense strand
gauccacguuucaaugaua

SEQ ID NO: 153414 - RNA, 19 nt, Homo sapiens
  misc_RNA (1)...(19): siRNA sense strand
ugaaggcccuggauuauug

SEQ ID NO: 153415 - RNA, 19 nt, Homo sapiens
  misc_RNA (1)...(19): siRNA sense strand
gauguacgauuauaguuug

SEQ ID NO: 153416 - RNA, 19 nt, Homo sapiens
  misc_RNA (1)...(19): siRNA sense strand
ccaucaacaucacaaauaa

SEQ ID NO: 153417 - RNA, 19 nt, Homo sapiens
  misc_RNA (1)...(19): siRNA sense strand
ugaauuagauccacguuuc

SEQ ID NO: 153418 - RNA, 19 nt, Homo sapiens
  misc_RNA (1)...(19): siRNA sense strand
acuaucagauguacgauua

SEQ ID NO: 153419 - RNA, 19 nt, Homo sapiens
  misc_RNA (1)...(19): siRNA sense strand
acacagacuucaagcaauu

SEQ ID NO: 153420 - RNA, 19 nt, Homo sapiens
  misc_RNA (1)...(19): siRNA sense strand
ugacaauuaugaucaguug

SEQ ID NO: 153421 - RNA, 19 nt, Homo sapiens
  misc_RNA (1)...(19): siRNA sense strand
gaccaccagucacggcuua

SEQ ID NO: 153422 - RNA, 19 nt, Homo sapiens
  misc_RNA (1)...(19): siRNA sense strand
caacacagacuucaagcaa

SEQ ID NO: 153423 - RNA, 19 nt, Homo sapiens
  misc_RNA (1)...(19): siRNA sense strand
cuucaaagguccugagcua

SEQ ID NO: 153424 - RNA, 19 nt, Homo sapiens
  misc_RNA (1)...(19): siRNA sense strand
gaauauaauguccgaguug

SEQ ID NO: 153425 - RNA, 19 nt, Homo sapiens
  misc_RNA (1)...(19): siRNA sense strand
gccaucaacaucacaaaua

SEQ ID NO: 153426 - RNA, 19 nt, Homo sapiens
  misc_RNA (1)...(19): siRNA sense strand
gacagaagauuuauaugac

SEQ ID NO: 153427 - RNA, 19 nt, Homo sapiens
  misc_RNA (1)...(19): siRNA sense strand
ggaauuaugcacagagaug

SEQ ID NO: 153428 - RNA, 19 nt, Homo sapiens
  misc_RNA (1)...(19): siRNA sense strand
uggacaaacugcugcgaua

SEQ ID NO: 153429 - RNA, 19 nt, Homo sapiens
  misc_RNA (1)...(19): siRNA sense strand
acaaacugcugcgauauga

SEQ ID NO: 153430 - RNA, 19 nt, Homo sapiens
  misc_RNA (1)...(19): siRNA sense strand
cccauaaugucaugauuga

SEQ ID NO: 153431 - RNA, 19 nt, Homo sapiens
  misc_RNA (1)...(19): siRNA sense strand
ugucacagcaugggaauua

SEQ ID NO: 153432 - RNA, 19 nt, Homo sapiens
  misc_RNA (1)...(19): siRNA sense strand
gcccugaggccuuggauuu

SEQ ID NO: 153433 - RNA, 19 nt, Homo sapiens
  misc_RNA (1)...(19): siRNA sense strand
caaagguccugagcuacuu

SEQ ID NO: 153434 - RNA, 19 nt, Homo sapiens
  misc_RNA (1)...(19): siRNA sense strand
cgaauggguucaucuagca

SEQ ID NO: 153435 - RNA, 19 nt, Homo sapiens
  misc_RNA (1)...(19): siRNA sense strand
guuguaugcuggcaaguau

SEQ ID NO: 153436 - RNA, 19 nt, Homo sapiens
  misc_RNA (1)...(19): siRNA sense strand
gaaaucaagaugacuacca

SEQ ID NO: 153437 - RNA, 19 nt, Homo sapiens
  misc_RNA (1)...(19): siRNA sense strand
ggacaaacugcugcgauau

SEQ ID NO: 153438 - RNA, 19 nt, Homo sapiens
  misc_RNA (1)...(19): siRNA sense strand
ccagcugguucgaaaauua

SEQ ID NO: 153439 - RNA, 19 nt, Homo sapiens
  misc_RNA (1)...(19): siRNA sense strand
ugucagggauuucuucagu

SEQ ID NO: 153440 - RNA, 19 nt, Homo sapiens
  misc_RNA (1)...(19): siRNA sense strand
cgagguaaauacagugaag

SEQ ID NO: 153441 - RNA, 19 nt, Homo sapiens
  misc_RNA (1)...(19): siRNA sense strand
agaauauaauguccgaguu

SEQ ID NO: 153442 - RNA, 19 nt, Homo sapiens
  misc_RNA (1)...(19): siRNA sense strand
cauaaugucaugauugauc

SEQ ID NO: 153443 - RNA, 19 nt, Homo sapiens
  misc_RNA (1)...(19): siRNA sense strand
gcucgaauggguucaucua

SEQ ID NO: 153444 - RNA, 19 nt, Homo sapiens
  misc_RNA (1)...(19): siRNA sense strand
gacaaacugcugcgauaug

SEQ ID NO: 153445 - RNA, 19 nt, Homo sapiens
  misc_RNA (1)...(19): siRNA sense strand
aaacaacacagacuucaag

SEQ ID NO: 153446 - RNA, 19 nt, Homo sapiens
  misc_RNA (1)...(19): siRNA sense strand
gaaggaccaggcucgaaug

SEQ ID NO: 153447 - RNA, 19 nt, Homo sapiens
  misc_RNA (1)...(19): siRNA sense strand
guacgauuauaguuuggau

SEQ ID NO: 153448 - RNA, 19 nt, Homo sapiens
  misc_RNA (1)...(19): siRNA sense strand
gaauuagauccacguuuca

SEQ ID NO: 153449 - RNA, 19 nt, Homo sapiens
  misc_RNA (1)...(19): siRNA sense strand
gcuggcaaguaugaucuuu

SEQ ID NO: 153450 - RNA, 19 nt, Homo sapiens
  misc_RNA (1)...(19): siRNA sense strand
gggcagacacucucgaaag

SEQ ID NO: 153451 - RNA, 19 nt, Homo sapiens
  misc_RNA (1)...(19): siRNA sense strand
guaaacaacacagacuuca

SEQ ID NO: 153452 - RNA, 19 nt, Homo sapiens
  misc_RNA (1)...(19): siRNA sense strand
uagauccacguuucaauga

SEQ ID NO: 153453 - RNA, 19 nt, Homo sapiens
  misc_RNA (1)...(19): siRNA sense strand
uggcagacauuguaaaaga

SEQ ID NO: 153454 - RNA, 19 nt, Homo sapiens
  misc_RNA (1)...(19): siRNA sense strand
cauccuggccaagaauaua

SEQ ID NO: 153455 - RNA, 19 nt, Homo sapiens
  misc_RNA (1)...(19): siRNA sense strand
gaggauagccaagguucug

SEQ ID NO: 153456 - RNA, 19 nt, Homo sapiens
  misc_RNA (1)...(19): siRNA sense strand
gaagccaucaacaucacaa

SEQ ID NO: 153457 - RNA, 19 nt, Homo sapiens
  misc_RNA (1)...(19): siRNA sense strand
ggcagacacucucgaaagc

SEQ ID NO: 153458 - RNA, 19 nt, Homo sapiens
  misc_RNA (1)...(19): siRNA sense strand
uaaacaacacagacuucaa

SEQ ID NO: 153459 - RNA, 19 nt, Homo sapiens
  misc_RNA (1)...(19): siRNA sense strand
gaaaaucagcaccuuguca

SEQ ID NO: 153460 - RNA, 19 nt, Homo sapiens
  misc_RNA (1)...(19): siRNA sense strand
ccgaguugcuucccgauac

SEQ ID NO: 153461 - RNA, 19 nt, Homo sapiens
  misc_RNA (1)...(19): siRNA sense strand
gaauuaugcacagagaugu

SEQ ID NO: 153462 - RNA, 19 nt, Homo sapiens
  misc_RNA (1)...(19): siRNA sense strand
gguuguaugcuggcaagua

SEQ ID NO: 153463 - RNA, 19 nt, Homo sapiens
  misc_RNA (1)...(19): siRNA sense strand
gaagaaaauuaagcgugaa

SEQ ID NO: 153464 - RNA, 19 nt, Homo sapiens
  misc_RNA (1)...(19): siRNA sense strand
ugaaggaccaggcucgaau

SEQ ID NO: 153465 - RNA, 19 nt, Homo sapiens
  misc_RNA (1)...(19): siRNA sense strand
aaauuaggccgagguaaau

SEQ ID NO: 153466 - RNA, 19 nt, Homo sapiens
  misc_RNA (1)...(19): siRNA sense strand
caacauugaauuagaucca

SEQ ID NO: 153467 - RNA, 19 nt, Homo sapiens
  misc_RNA (1)...(19): siRNA sense strand
cacacuggcagacauugua

SEQ ID NO: 153468 - RNA, 19 nt, Homo sapiens
  misc_RNA (1)...(19): siRNA sense strand
ucagauguacgauuauagu

SEQ ID NO: 153469 - RNA, 19 nt, Homo sapiens
  misc_RNA (1)...(19): siRNA sense strand
uuacauguaugagauucug

SEQ ID NO: 153470 - RNA, 19 nt, Homo sapiens
  misc_RNA (1)...(19): siRNA sense strand
uuucuacacuguugugaag

SEQ ID NO: 153471 - RNA, 19 nt, Homo sapiens
  misc_RNA (1)...(19): siRNA sense strand
aaaauuaggccgagguaaa

SEQ ID NO: 153472 - RNA, 19 nt, Homo sapiens
  misc_RNA (1)...(19): siRNA sense strand
gaucaguuggugaggauag

SEQ ID NO: 153473 - RNA, 19 nt, Homo sapiens
  misc_RNA (1)...(19): siRNA sense strand
uuagauccacguuucaaug

SEQ ID NO: 153474 - RNA, 19 nt, Homo sapiens
  misc_RNA (1)...(19): siRNA sense strand
ucuacacuguugugaagga

SEQ ID NO: 153475 - RNA, 19 nt, Homo sapiens
  misc_RNA (1)...(19): siRNA sense strand
uauaauguccgaguugcuu

SEQ ID NO: 153476 - RNA, 19 nt, Homo sapiens
  misc_RNA (1)...(19): siRNA sense strand
caucacacuggcagacauu

SEQ ID NO: 153477 - RNA, 19 nt, Homo sapiens
  misc_RNA (1)...(19): siRNA sense strand
ucacagcaugggaauuaug

SEQ ID NO: 153478 - RNA, 19 nt, Homo sapiens
  misc_RNA (1)...(19): siRNA sense strand
acacuggcagacauuguaa

SEQ ID NO: 153479 - RNA, 19 nt, Homo sapiens
  misc_RNA (1)...(19): siRNA sense strand
acguuucaaugauaucuug

SEQ ID NO: 153480 - RNA, 19 nt, Homo sapiens
  misc_RNA (1)...(19): siRNA sense strand
uggcaaguaugaucuuucg

SEQ ID NO: 153481 - RNA, 19 nt, Homo sapiens
  misc_RNA (1)...(19): siRNA sense strand
cagauguacgauuauaguu

SEQ ID NO: 153482 - RNA, 19 nt, Homo sapiens
  misc_RNA (1)...(19): siRNA sense strand
cuuguagacuaucagaugu

SEQ ID NO: 153483 - RNA, 19 nt, Homo sapiens
  misc_RNA (1)...(19): siRNA sense strand
ucaaagguccugagcuacu

SEQ ID NO: 153484 - RNA, 19 nt, Homo sapiens
  misc_RNA (1)...(19): siRNA sense strand
gaucaugagcacagaaagc

SEQ ID NO: 153485 - RNA, 19 nt, Homo sapiens
  misc_RNA (1)...(19): siRNA sense strand
ugggaauuaugcacagaga

SEQ ID NO: 153486 - RNA, 19 nt, Homo sapiens
  misc_RNA (1)...(19): siRNA sense strand
uagacuaucagauguacga

SEQ ID NO: 153487 - RNA, 19 nt, Homo sapiens
  misc_RNA (1)...(19): siRNA sense strand
agguaaauacagugaagua

SEQ ID NO: 153488 - RNA, 19 nt, Homo sapiens
  misc_RNA (1)...(19): siRNA sense strand
gaaggcccuggauuauugu

SEQ ID NO: 153489 - RNA, 19 nt, Homo sapiens
  misc_RNA (1)...(19): siRNA sense strand
uguaugcuggcaaguauga

SEQ ID NO: 153490 - RNA, 19 nt, Homo sapiens
  misc_RNA (1)...(19): siRNA sense strand
gauugaucaugagcacaga

SEQ ID NO: 153491 - RNA, 19 nt, Homo sapiens
  misc_RNA (1)...(19): siRNA sense strand
ucugaaggcccuggauuau

SEQ ID NO: 153492 - RNA, 19 nt, Homo sapiens
  misc_RNA (1)...(19): siRNA sense strand
gaugucagggauuucuuca

SEQ ID NO: 153493 - RNA, 19 nt, Homo sapiens
  misc_RNA (1)...(19): siRNA sense strand
uggauuuccuggacaaacu

SEQ ID NO: 153494 - RNA, 19 nt, Homo sapiens
  misc_RNA (1)...(19): siRNA sense strand
cgauuauaguuuggauaug

SEQ ID NO: 153495 - RNA, 19 nt, Homo sapiens
  misc_RNA (1)...(19): siRNA sense strand
cguaaacaacacagacuuc

SEQ ID NO: 153496 - RNA, 19 nt, Homo sapiens
  misc_RNA (1)...(19): siRNA sense strand
aacacagacuucaagcaau

SEQ ID NO: 153497 - RNA, 19 nt, Homo sapiens
  misc_RNA (1)...(19): siRNA sense strand
ggacagaagauuuauauga

SEQ ID NO: 153498 - RNA, 19 nt, Homo sapiens
  misc_RNA (1)...(19): siRNA sense strand
gauccacguuucaaugaua

SEQ ID NO: 153499 - RNA, 19 nt, Homo sapiens
  misc_RNA (1)...(19): siRNA sense strand
ugaaggcccuggauuauug

SEQ ID NO: 153500 - RNA, 19 nt, Homo sapiens
  misc_RNA (1)...(19): siRNA sense strand
gauguacgauuauaguuug

SEQ ID NO: 153501 - RNA, 19 nt, Homo sapiens
  misc_RNA (1)...(19): siRNA sense strand
ccaucaacaucacaaauaa

SEQ ID NO: 153502 - RNA, 19 nt, Homo sapiens
  misc_RNA (1)...(19): siRNA sense strand
ugaauuagauccacguuuc

SEQ ID NO: 153503 - RNA, 19 nt, Homo sapiens
  misc_RNA (1)...(19): siRNA sense strand
acuaucagauguacgauua

SEQ ID NO: 153504 - RNA, 19 nt, Homo sapiens
  misc_RNA (1)...(19): siRNA sense strand
acacagacuucaagcaauu

SEQ ID NO: 153505 - RNA, 19 nt, Homo sapiens
  misc_RNA (1)...(19): siRNA sense strand
ugacaauuaugaucaguug

SEQ ID NO: 153506 - RNA, 19 nt, Homo sapiens
  misc_RNA (1)...(19): siRNA sense strand
gaccaccagucacggcuua

SEQ ID NO: 153507 - RNA, 19 nt, Homo sapiens
  misc_RNA (1)...(19): siRNA sense strand
caacacagacuucaagcaa

SEQ ID NO: 153508 - RNA, 19 nt, Homo sapiens
  misc_RNA (1)...(19): siRNA sense strand
cuucaaagguccugagcua

SEQ ID NO: 153509 - RNA, 19 nt, Homo sapiens
  misc_RNA (1)...(19): siRNA sense strand
gaauauaauguccgaguug

SEQ ID NO: 153510 - RNA, 19 nt, Homo sapiens
  misc_RNA (1)...(19): siRNA sense strand
gccaucaacaucacaaaua

SEQ ID NO: 153511 - RNA, 19 nt, Homo sapiens
  misc_RNA (1)...(19): siRNA sense strand
gacagaagauuuauaugac

SEQ ID NO: 153512 - RNA, 19 nt, Homo sapiens
  misc_RNA (1)...(19): siRNA sense strand
ggaauuaugcacagagaug

SEQ ID NO: 153513 - RNA, 19 nt, Homo sapiens
  misc_RNA (1)...(19): siRNA sense strand
uggacaaacugcugcgaua

SEQ ID NO: 153514 - RNA, 19 nt, Homo sapiens
  misc_RNA (1)...(19): siRNA sense strand
acaaacugcugcgauauga

SEQ ID NO: 153515 - RNA, 19 nt, Homo sapiens
  misc_RNA (1)...(19): siRNA sense strand
cccauaaugucaugauuga

SEQ ID NO: 153516 - RNA, 19 nt, Homo sapiens
  misc_RNA (1)...(19): siRNA sense strand
ugucacagcaugggaauua

SEQ ID NO: 153517 - RNA, 19 nt, Homo sapiens
  misc_RNA (1)...(19): siRNA sense strand
gcccugaggccuuggauuu

SEQ ID NO: 153518 - RNA, 19 nt, Homo sapiens
  misc_RNA (1)...(19): siRNA sense strand
caaagguccugagcuacuu

SEQ ID NO: 153519 - RNA, 19 nt, Homo sapiens
  misc_RNA (1)...(19): siRNA sense strand
cgaauggguucaucuagca

SEQ ID NO: 153520 - RNA, 19 nt, Homo sapiens
  misc_RNA (1)...(19): siRNA sense strand
guuguaugcuggcaaguau

SEQ ID NO: 153521 - RNA, 19 nt, Homo sapiens
  misc_RNA (1)...(19): siRNA sense strand
gaaaucaagaugacuacca

SEQ ID NO: 153522 - RNA, 19 nt, Homo sapiens
  misc_RNA (1)...(19): siRNA sense strand
ggacaaacugcugcgauau

SEQ ID NO: 153523 - RNA, 19 nt, Homo sapiens
  misc_RNA (1)...(19): siRNA sense strand
ccagcugguucgaaaauua

SEQ ID NO: 153524 - RNA, 19 nt, Homo sapiens
  misc_RNA (1)...(19): siRNA sense strand
ugucagggauuucuucagu

SEQ ID NO: 153525 - RNA, 19 nt, Homo sapiens
  misc_RNA (1)...(19): siRNA sense strand
cgagguaaauacagugaag

SEQ ID NO: 153526 - RNA, 19 nt, Homo sapiens
  misc_RNA (1)...(19): siRNA sense strand
agaauauaauguccgaguu

SEQ ID NO: 153527 - RNA, 19 nt, Homo sapiens
  misc_RNA (1)...(19): siRNA sense strand
cauaaugucaugauugauc

SEQ ID NO: 153528 - RNA, 19 nt, Homo sapiens
  misc_RNA (1)...(19): siRNA sense strand
gcucgaauggguucaucua

SEQ ID NO: 153529 - RNA, 19 nt, Homo sapiens
  misc_RNA (1)...(19): siRNA sense strand
gacaaacugcugcgauaug

SEQ ID NO: 153530 - RNA, 19 nt, Homo sapiens
  misc_RNA (1)...(19): siRNA sense strand
aaacaacacagacuucaag

SEQ ID NO: 153531 - RNA, 19 nt, Homo sapiens
  misc_RNA (1)...(19): siRNA sense strand
gaaggaccaggcucgaaug

SEQ ID NO: 153532 - RNA, 19 nt, Homo sapiens
  misc_RNA (1)...(19): siRNA sense strand
guacgauuauaguuuggau

SEQ ID NO: 153533 - RNA, 19 nt, Homo sapiens
  misc_RNA (1)...(19): siRNA sense strand
gaauuagauccacguuuca

SEQ ID NO: 153534 - RNA, 19 nt, Homo sapiens
  misc_RNA (1)...(19): siRNA sense strand
gcuggcaaguaugaucuuu

SEQ ID NO: 153535 - RNA, 19 nt, Homo sapiens
  misc_RNA (1)...(19): siRNA sense strand
gggcagacacucucgaaag

SEQ ID NO: 153536 - RNA, 19 nt, Homo sapiens
  misc_RNA (1)...(19): siRNA sense strand
guaaacaacacagacuuca

SEQ ID NO: 153537 - RNA, 19 nt, Homo sapiens
  misc_RNA (1)...(19): siRNA sense strand
uagauccacguuucaauga

SEQ ID NO: 153538 - RNA, 19 nt, Homo sapiens
  misc_RNA (1)...(19): siRNA sense strand
uggcagacauuguaaaaga

SEQ ID NO: 153539 - RNA, 19 nt, Homo sapiens
  misc_RNA (1)...(19): siRNA sense strand
cauccuggccaagaauaua

SEQ ID NO: 153540 - RNA, 19 nt, Homo sapiens
  misc_RNA (1)...(19): siRNA sense strand
gaggauagccaagguucug

SEQ ID NO: 153541 - RNA, 19 nt, Homo sapiens
  misc_RNA (1)...(19): siRNA sense strand
gaagccaucaacaucacaa

SEQ ID NO: 153542 - RNA, 19 nt, Homo sapiens
  misc_RNA (1)...(19): siRNA sense strand
ggcagacacucucgaaagc

SEQ ID NO: 153543 - RNA, 19 nt, Homo sapiens
  misc_RNA (1)...(19): siRNA sense strand
uaaacaacacagacuucaa

SEQ ID NO: 153544 - RNA, 19 nt, Homo sapiens
  misc_RNA (1)...(19): siRNA sense strand
gaaaaucagcaccuuguca

SEQ ID NO: 153545 - RNA, 19 nt, Homo sapiens
  misc_RNA (1)...(19): siRNA sense strand
ccgaguugcuucccgauac

SEQ ID NO: 153546 - RNA, 19 nt, Homo sapiens
  misc_RNA (1)...(19): siRNA sense strand
gaauuaugcacagagaugu

SEQ ID NO: 153547 - RNA, 19 nt, Homo sapiens
  misc_RNA (1)...(19): siRNA sense strand
gguuguaugcuggcaagua

SEQ ID NO: 153548 - RNA, 19 nt, Homo sapiens
  misc_RNA (1)...(19): siRNA sense strand
gaagaaaauuaagcgugaa

SEQ ID NO: 153549 - RNA, 19 nt, Homo sapiens
  misc_RNA (1)...(19): siRNA sense strand
ugaaggaccaggcucgaau

SEQ ID NO: 153550 - RNA, 19 nt, Homo sapiens
  misc_RNA (1)...(19): siRNA sense strand
aaauuaggccgagguaaau

SEQ ID NO: 153551 - RNA, 19 nt, Homo sapiens
  misc_RNA (1)...(19): siRNA sense strand
caacauugaauuagaucca

SEQ ID NO: 153552 - RNA, 19 nt, Homo sapiens
  misc_RNA (1)...(19): siRNA sense strand
cacacuggcagacauugua

SEQ ID NO: 153553 - RNA, 19 nt, Homo sapiens
  misc_RNA (1)...(19): siRNA sense strand
ucagauguacgauuauagu

SEQ ID NO: 153554 - RNA, 19 nt, Homo sapiens
  misc_RNA (1)...(19): siRNA sense strand
uuacauguaugagauucug

SEQ ID NO: 153555 - RNA, 19 nt, Homo sapiens
  misc_RNA (1)...(19): siRNA sense strand
uuucuacacuguugugaag

SEQ ID NO: 153556 - RNA, 19 nt, Homo sapiens
  misc_RNA (1)...(19): siRNA sense strand
aaaauuaggccgagguaaa

SEQ ID NO: 153557 - RNA, 19 nt, Homo sapiens
  misc_RNA (1)...(19): siRNA sense strand
gaucaguuggugaggauag

SEQ ID NO: 153558 - RNA, 19 nt, Homo sapiens
  misc_RNA (1)...(19): siRNA sense strand
uuagauccacguuucaaug

SEQ ID NO: 153559 - RNA, 19 nt, Homo sapiens
  misc_RNA (1)...(19): siRNA sense strand
ucuacacuguugugaagga

SEQ ID NO: 153560 - RNA, 19 nt, Homo sapiens
  misc_RNA (1)...(19): siRNA sense strand
uauaauguccgaguugcuu

SEQ ID NO: 153561 - RNA, 19 nt, Homo sapiens
  misc_RNA (1)...(19): siRNA sense strand
caucacacuggcagacauu

SEQ ID NO: 153562 - RNA, 19 nt, Homo sapiens
  misc_RNA (1)...(19): siRNA sense strand
ucacagcaugggaauuaug

SEQ ID NO: 153563 - RNA, 19 nt, Homo sapiens
  misc_RNA (1)...(19): siRNA sense strand
acacuggcagacauuguaa

SEQ ID NO: 153564 - RNA, 19 nt, Homo sapiens
  misc_RNA (1)...(19): siRNA sense strand
acguuucaaugauaucuug

SEQ ID NO: 153565 - RNA, 19 nt, Homo sapiens
  misc_RNA (1)...(19): siRNA sense strand
uggcaaguaugaucuuucg

SEQ ID NO: 153566 - RNA, 19 nt, Homo sapiens
  misc_RNA (1)...(19): siRNA sense strand
cagauguacgauuauaguu

SEQ ID NO: 153567 - RNA, 19 nt, Homo sapiens
  misc_RNA (1)...(19): siRNA sense strand
cuuguagacuaucagaugu

SEQ ID NO: 153568 - RNA, 19 nt, Homo sapiens
  misc_RNA (1)...(19): siRNA sense strand
ucaaagguccugagcuacu

SEQ ID NO: 153569 - RNA, 19 nt, Homo sapiens
  misc_RNA (1)...(19): siRNA sense strand
gaucaugagcacagaaagc

SEQ ID NO: 153570 - RNA, 19 nt, Homo sapiens
  misc_RNA (1)...(19): siRNA sense strand
ugggaauuaugcacagaga

SEQ ID NO: 153571 - RNA, 19 nt, Homo sapiens
  misc_RNA (1)...(19): siRNA sense strand
uagacuaucagauguacga

SEQ ID NO: 153572 - RNA, 19 nt, Homo sapiens
  misc_RNA (1)...(19): siRNA sense strand
agguaaauacagugaagua

SEQ ID NO: 153573 - RNA, 19 nt, Homo sapiens
  misc_RNA (1)...(19): siRNA sense strand
gaaggcccuggauuauugu

SEQ ID NO: 153574 - RNA, 19 nt, Homo sapiens
  misc_RNA (1)...(19): siRNA sense strand
uguaugcuggcaaguauga

SEQ ID NO: 153575 - RNA, 19 nt, Homo sapiens
  misc_RNA (1)...(19): siRNA sense strand
gauugaucaugagcacaga

SEQ ID NO: 153576 - RNA, 19 nt, Homo sapiens
  misc_RNA (1)...(19): siRNA sense strand
ucugaaggcccuggauuau

SEQ ID NO: 153577 - RNA, 19 nt, Homo sapiens
  misc_RNA (1)...(19): siRNA sense strand
gaugucagggauuucuuca

SEQ ID NO: 153578 - RNA, 19 nt, Homo sapiens
  misc_RNA (1)...(19): siRNA sense strand
uggauuuccuggacaaacu

SEQ ID NO: 153579 - RNA, 19 nt, Homo sapiens
  misc_RNA (1)...(19): siRNA sense strand
cgauuauaguuuggauaug

SEQ ID NO: 153580 - RNA, 19 nt, Homo sapiens
  misc_RNA (1)...(19): siRNA sense strand
cguaaacaacacagacuuc

SEQ ID NO: 153581 - RNA, 19 nt, Homo sapiens
  misc_RNA (1)...(19): siRNA sense strand
aacacagacuucaagcaau

SEQ ID NO: 153582 - RNA, 19 nt, Homo sapiens
  misc_RNA (1)...(19): siRNA sense strand
ggacagaagauuuauauga

SEQ ID NO: 153583 - RNA, 19 nt, Homo sapiens
  misc_RNA (1)...(19): siRNA sense strand
gauccacguuucaaugaua

SEQ ID NO: 153584 - RNA, 19 nt, Homo sapiens
  misc_RNA (1)...(19): siRNA sense strand
ugaaggcccuggauuauug

SEQ ID NO: 153585 - RNA, 19 nt, Homo sapiens
  misc_RNA (1)...(19): siRNA sense strand
gauguacgauuauaguuug

SEQ ID NO: 153586 - RNA, 19 nt, Homo sapiens
  misc_RNA (1)...(19): siRNA sense strand
acuaucagauguacgauua

SEQ ID NO: 153587 - RNA, 19 nt, Homo sapiens
  misc_RNA (1)...(19): siRNA sense strand
ugaauuagauccacguuuc

SEQ ID NO: 153588 - RNA, 19 nt, Homo sapiens
  misc_RNA (1)...(19): siRNA sense strand
ugacaauuaugaucaguug

SEQ ID NO: 153589 - RNA, 19 nt, Homo sapiens
  misc_RNA (1)...(19): siRNA sense strand
gaccaccagucacggcuua

SEQ ID NO: 153590 - RNA, 19 nt, Homo sapiens
  misc_RNA (1)...(19): siRNA sense strand
cuucaaagguccugagcua

SEQ ID NO: 153591 - RNA, 19 nt, Homo sapiens
  misc_RNA (1)...(19): siRNA sense strand
gaauauaauguccgaguug

SEQ ID NO: 153592 - RNA, 19 nt, Homo sapiens
  misc_RNA (1)...(19): siRNA sense strand
ggaauuaugcacagagaug

SEQ ID NO: 153593 - RNA, 19 nt, Homo sapiens
  misc_RNA (1)...(19): siRNA sense strand
gacagaagauuuauaugac

SEQ ID NO: 153594 - RNA, 19 nt, Homo sapiens
  misc_RNA (1)...(19): siRNA sense strand
uggacaaacugcugcgaua

SEQ ID NO: 153595 - RNA, 19 nt, Homo sapiens
  misc_RNA (1)...(19): siRNA sense strand
acaaacugcugcgauauga

SEQ ID NO: 153596 - RNA, 19 nt, Homo sapiens
  misc_RNA (1)...(19): siRNA sense strand
cccauaaugucaugauuga

SEQ ID NO: 153597 - RNA, 19 nt, Homo sapiens
  misc_RNA (1)...(19): siRNA sense strand
gcccugaggccuuggauuu

SEQ ID NO: 153598 - RNA, 19 nt, Homo sapiens
  misc_RNA (1)...(19): siRNA sense strand
ugucacagcaugggaauua

SEQ ID NO: 153599 - RNA, 19 nt, Homo sapiens
  misc_RNA (1)...(19): siRNA sense strand
caaagguccugagcuacuu

SEQ ID NO: 153600 - RNA, 19 nt, Homo sapiens
  misc_RNA (1)...(19): siRNA sense strand
cgaauggguucaucuagca

SEQ ID NO: 153601 - RNA, 19 nt, Homo sapiens
  misc_RNA (1)...(19): siRNA sense strand
guuguaugcuggcaaguau

SEQ ID NO: 153602 - RNA, 19 nt, Homo sapiens
  misc_RNA (1)...(19): siRNA sense strand
ggacaaacugcugcgauau

SEQ ID NO: 153603 - RNA, 19 nt, Homo sapiens
  misc_RNA (1)...(19): siRNA sense strand
ugucagggauuucuucagu

SEQ ID NO: 153604 - RNA, 19 nt, Homo sapiens
  misc_RNA (1)...(19): siRNA sense strand
agaauauaauguccgaguu

SEQ ID NO: 153605 - RNA, 19 nt, Homo sapiens
  misc_RNA (1)...(19): siRNA sense strand
cauaaugucaugauugauc

SEQ ID NO: 153606 - RNA, 19 nt, Homo sapiens
  misc_RNA (1)...(19): siRNA sense strand
gcucgaauggguucaucua

SEQ ID NO: 153607 - RNA, 19 nt, Homo sapiens
  misc_RNA (1)...(19): siRNA sense strand
gacaaacugcugcgauaug

SEQ ID NO: 153608 - RNA, 19 nt, Homo sapiens
  misc_RNA (1)...(19): siRNA sense strand
gaaggaccaggcucgaaug

SEQ ID NO: 153609 - RNA, 19 nt, Homo sapiens
  misc_RNA (1)...(19): siRNA sense strand
guacgauuauaguuuggau

SEQ ID NO: 153610 - RNA, 19 nt, Homo sapiens
  misc_RNA (1)...(19): siRNA sense strand
gaauuagauccacguuuca

SEQ ID NO: 153611 - RNA, 19 nt, Homo sapiens
  misc_RNA (1)...(19): siRNA sense strand
gcuggcaaguaugaucuuu

SEQ ID NO: 153612 - RNA, 19 nt, Homo sapiens
  misc_RNA (1)...(19): siRNA sense strand
gggcagacacucucgaaag

SEQ ID NO: 153613 - RNA, 19 nt, Homo sapiens
  misc_RNA (1)...(19): siRNA sense strand
uagauccacguuucaauga

SEQ ID NO: 153614 - RNA, 19 nt, Homo sapiens
  misc_RNA (1)...(19): siRNA sense strand
cauccuggccaagaauaua

SEQ ID NO: 153615 - RNA, 19 nt, Homo sapiens
  misc_RNA (1)...(19): siRNA sense strand
gaggauagccaagguucug

SEQ ID NO: 153616 - RNA, 19 nt, Homo sapiens
  misc_RNA (1)...(19): siRNA sense strand
ggcagacacucucgaaagc

SEQ ID NO: 153617 - RNA, 19 nt, Homo sapiens
  misc_RNA (1)...(19): siRNA sense strand
ccgaguugcuucccgauac

SEQ ID NO: 153618 - RNA, 19 nt, Homo sapiens
  misc_RNA (1)...(19): siRNA sense strand
gaauuaugcacagagaugu

SEQ ID NO: 153619 - RNA, 19 nt, Homo sapiens
  misc_RNA (1)...(19): siRNA sense strand
gaaaaucagcaccuuguca

SEQ ID NO: 153620 - RNA, 19 nt, Homo sapiens
  misc_RNA (1)...(19): siRNA sense strand
gguuguaugcuggcaagua

SEQ ID NO: 153621 - RNA, 19 nt, Homo sapiens
  misc_RNA (1)...(19): siRNA sense strand
ugaaggaccaggcucgaau

SEQ ID NO: 153622 - RNA, 19 nt, Homo sapiens
  misc_RNA (1)...(19): siRNA sense strand
ucagauguacgauuauagu

SEQ ID NO: 153623 - RNA, 19 nt, Homo sapiens
  misc_RNA (1)...(19): siRNA sense strand
caacauugaauuagaucca

SEQ ID NO: 153624 - RNA, 19 nt, Homo sapiens
  misc_RNA (1)...(19): siRNA sense strand
gaucaguuggugaggauag

SEQ ID NO: 153625 - RNA, 19 nt, Homo sapiens
  misc_RNA (1)...(19): siRNA sense strand
uuucuacacuguugugaag

SEQ ID NO: 153626 - RNA, 19 nt, Homo sapiens
  misc_RNA (1)...(19): siRNA sense strand
uuagauccacguuucaaug

SEQ ID NO: 153627 - RNA, 19 nt, Homo sapiens
  misc_RNA (1)...(19): siRNA sense strand
ucuacacuguugugaagga

SEQ ID NO: 153628 - RNA, 19 nt, Homo sapiens
  misc_RNA (1)...(19): siRNA sense strand
uauaauguccgaguugcuu

SEQ ID NO: 153629 - RNA, 19 nt, Homo sapiens
  misc_RNA (1)...(19): siRNA sense strand
ucaaagguccugagcuacu

SEQ ID NO: 153630 - RNA, 19 nt, Homo sapiens
  misc_RNA (1)...(19): siRNA sense strand
ugggaauuaugcacagaga

SEQ ID NO: 153631 - RNA, 19 nt, Homo sapiens
  misc_RNA (1)...(19): siRNA sense strand
ucacagcaugggaauuaug

SEQ ID NO: 153632 - RNA, 19 nt, Homo sapiens
  misc_RNA (1)...(19): siRNA sense strand
acguuucaaugauaucuug

SEQ ID NO: 153633 - RNA, 19 nt, Homo sapiens
  misc_RNA (1)...(19): siRNA sense strand
gaucaugagcacagaaagc

SEQ ID NO: 153634 - RNA, 19 nt, Homo sapiens
  misc_RNA (1)...(19): siRNA sense strand
uggcaaguaugaucuuucg

SEQ ID NO: 153635 - RNA, 19 nt, Homo sapiens
  misc_RNA (1)...(19): siRNA sense strand
cagauguacgauuauaguu

SEQ ID NO: 153636 - RNA, 19 nt, Homo sapiens
  misc_RNA (1)...(19): siRNA sense strand
cuuguagacuaucagaugu

SEQ ID NO: 153637 - RNA, 19 nt, Homo sapiens
  misc_RNA (1)...(19): siRNA sense strand
uagacuaucagauguacga

SEQ ID NO: 153638 - RNA, 19 nt, Homo sapiens
  misc_RNA (1)...(19): siRNA sense strand
gauugaucaugagcacaga

SEQ ID NO: 153639 - RNA, 19 nt, Homo sapiens
  misc_RNA (1)...(19): siRNA sense strand
gaaggcccuggauuauugu

SEQ ID NO: 153640 - RNA, 19 nt, Homo sapiens
  misc_RNA (1)...(19): siRNA sense strand
uguaugcuggcaaguauga

SEQ ID NO: 153641 - RNA, 19 nt, Homo sapiens
  misc_RNA (1)...(19): siRNA sense strand
ucugaaggcccuggauuau

SEQ ID NO: 153642 - RNA, 19 nt, Homo sapiens
  misc_RNA (1)...(19): siRNA sense strand
gaugucagggauuucuuca

SEQ ID NO: 153643 - RNA, 19 nt, Homo sapiens
  misc_RNA (1)...(19): siRNA sense strand
uggauuuccuggacaaacu

SEQ ID NO: 153644 - RNA, 19 nt, Homo sapiens
  misc_RNA (1)...(19): siRNA sense strand
cgauuauaguuuggauaug

SEQ ID NO: 153645 - RNA, 19 nt, Homo sapiens
  misc_RNA (1)...(19): siRNA sense strand
gaaggaacccuagaguuua

SEQ ID NO: 153646 - RNA, 19 nt, Homo sapiens
  misc_RNA (1)...(19): siRNA sense strand
gaugauaucccauuuguug

SEQ ID NO: 153647 - RNA, 19 nt, Homo sapiens
  misc_RNA (1)...(19): siRNA sense strand
gggcugugcugaagaguuu

SEQ ID NO: 153648 - RNA, 19 nt, Homo sapiens
  misc_RNA (1)...(19): siRNA sense strand
cgaaggaacccuagaguuu

SEQ ID NO: 153649 - RNA, 19 nt, Homo sapiens
  misc_RNA (1)...(19): siRNA sense strand
cagagacgcugcugaguga

SEQ ID NO: 153650 - RNA, 19 nt, Homo sapiens
  misc_RNA (1)...(19): siRNA sense strand
ugacauccuucaccaauga

SEQ ID NO: 153651 - RNA, 19 nt, Homo sapiens
  misc_RNA (1)...(19): siRNA sense strand
ggucuacgcugggaauauu

SEQ ID NO: 153652 - RNA, 19 nt, Homo sapiens
  misc_RNA (1)...(19): siRNA sense strand
ugucacagcuccaccauau

SEQ ID NO: 153653 - RNA, 19 nt, Homo sapiens
  misc_RNA (1)...(19): siRNA sense strand
ucacagcuccaccauauuu

SEQ ID NO: 153654 - RNA, 19 nt, Homo sapiens
  misc_RNA (1)...(19): siRNA sense strand
caggauggcuuccacuuuc

SEQ ID NO: 153655 - RNA, 19 nt, Homo sapiens
  misc_RNA (1)...(19): siRNA sense strand
gaagaugauaucccauuug

SEQ ID NO: 153656 - RNA, 19 nt, Homo sapiens
  misc_RNA (1)...(19): siRNA sense strand
ccacugagccuuacaaugc

SEQ ID NO: 153657 - RNA, 19 nt, Homo sapiens
  misc_RNA (1)...(19): siRNA sense strand
gggaggcccuggugaacuu

SEQ ID NO: 153658 - RNA, 19 nt, Homo sapiens
  misc_RNA (1)...(19): siRNA sense strand
ugagguaccugagcacuga

SEQ ID NO: 153659 - RNA, 19 nt, Homo sapiens
  misc_RNA (1)...(19): siRNA sense strand
gcaaaucccaggugcuguu

SEQ ID NO: 153660 - RNA, 19 nt, Homo sapiens
  misc_RNA (1)...(19): siRNA sense strand
gacaucguauucucaguga

SEQ ID NO: 153661 - RNA, 19 nt, Homo sapiens
  misc_RNA (1)...(19): siRNA sense strand
agaagaugauaucccauuu

SEQ ID NO: 153662 - RNA, 19 nt, Homo sapiens
  misc_RNA (1)...(19): siRNA sense strand
gggaugagguccacuacca

SEQ ID NO: 153663 - RNA, 19 nt, Homo sapiens
  misc_RNA (1)...(19): siRNA sense strand
gcaagccgauguggauuca

SEQ ID NO: 153664 - RNA, 19 nt, Homo sapiens
  misc_RNA (1)...(19): siRNA sense strand
gcaggauggcuuccacuuu

SEQ ID NO: 153665 - RNA, 19 nt, Homo sapiens
  misc_RNA (1)...(19): siRNA sense strand
cgagagcaguggugacaug

SEQ ID NO: 153666 - RNA, 19 nt, Homo sapiens
  misc_RNA (1)...(19): siRNA sense strand
cugggaauauucuguauga

SEQ ID NO: 153667 - RNA, 19 nt, Homo sapiens
  misc_RNA (1)...(19): siRNA sense strand
aagaugauaucccauuugu

SEQ ID NO: 153668 - RNA, 19 nt, Homo sapiens
  misc_RNA (1)...(19): siRNA sense strand
gaagaggcgaguacuguuc

SEQ ID NO: 153669 - RNA, 19 nt, Homo sapiens
  misc_RNA (1)...(19): siRNA sense strand
gaccaguacccuacgcaua

SEQ ID NO: 153670 - RNA, 19 nt, Homo sapiens
  misc_RNA (1)...(19): siRNA sense strand
gauaucccauuuguugcua

SEQ ID NO: 153671 - RNA, 19 nt, Homo sapiens
  misc_RNA (1)...(19): siRNA sense strand
cacaucaucuucccacaug

SEQ ID NO: 153672 - RNA, 19 nt, Homo sapiens
  misc_RNA (1)...(19): siRNA sense strand
gggccaggguaccguauug

SEQ ID NO: 153673 - RNA, 19 nt, Homo sapiens
  misc_RNA (1)...(19): siRNA sense strand
gaccuccucuuuggcagua

SEQ ID NO: 153674 - RNA, 19 nt, Homo sapiens
  misc_RNA (1)...(19): siRNA sense strand
ccacuauggugacauccuu

SEQ ID NO: 153675 - RNA, 19 nt, Homo sapiens
  misc_RNA (1)...(19): siRNA sense strand
ggugagggauguaaaugag

SEQ ID NO: 153676 - RNA, 19 nt, Homo sapiens
  misc_RNA (1)...(19): siRNA sense strand
cagcugagcaugucugaug

SEQ ID NO: 153677 - RNA, 19 nt, Homo sapiens
  misc_RNA (1)...(19): siRNA sense strand
ggaagaggcgaguacuguu

SEQ ID NO: 153678 - RNA, 19 nt, Homo sapiens
  misc_RNA (1)...(19): siRNA sense strand
ugagggcucugcugcaugu

SEQ ID NO: 153679 - RNA, 19 nt, Homo sapiens
  misc_RNA (1)...(19): siRNA sense strand
cagaagaugauaucccauu

SEQ ID NO: 153680 - RNA, 19 nt, Homo sapiens
  misc_RNA (1)...(19): siRNA sense strand
ucagaggccuuugccauca

SEQ ID NO: 153681 - RNA, 19 nt, Homo sapiens
  misc_RNA (1)...(19): siRNA sense strand
ccacggcucugaccgacau

SEQ ID NO: 153682 - RNA, 19 nt, Homo sapiens
  misc_RNA (1)...(19): siRNA sense strand
gagcugcagaagcauagua

SEQ ID NO: 153683 - RNA, 19 nt, Homo sapiens
  misc_RNA (1)...(19): siRNA sense strand
gaugccacccuacaaguga

SEQ ID NO: 153684 - RNA, 19 nt, Homo sapiens
  misc_RNA (1)...(19): siRNA sense strand
gcuuugacccugacuaugu

SEQ ID NO: 153685 - RNA, 19 nt, Homo sapiens
  misc_RNA (1)...(19): siRNA sense strand
gaggacaccuuccguuucc

SEQ ID NO: 153686 - RNA, 19 nt, Homo sapiens
  misc_RNA (1)...(19): siRNA sense strand
ccacagcucgugccucaga

SEQ ID NO: 153687 - RNA, 19 nt, Homo sapiens
  misc_RNA (1)...(19): siRNA sense strand
gguucaggcucccaggaaa

SEQ ID NO: 153688 - RNA, 19 nt, Homo sapiens
  misc_RNA (1)...(19): siRNA sense strand
aaucuguccuucccaguga

SEQ ID NO: 153689 - RNA, 19 nt, Homo sapiens
  misc_RNA (1)...(19): siRNA sense strand
gcucugccaugcccaucuu

SEQ ID NO: 153690 - RNA, 19 nt, Homo sapiens
  misc_RNA (1)...(19): siRNA sense strand
ucacucagcaggaccuuga

SEQ ID NO: 153691 - RNA, 19 nt, Homo sapiens
  misc_RNA (1)...(19): siRNA sense strand
gagguggucuuugccuuca

SEQ ID NO: 153692 - RNA, 19 nt, Homo sapiens
  misc_RNA (1)...(19): siRNA sense strand
gcaguaucguggccguaga

SEQ ID NO: 153693 - RNA, 19 nt, Homo sapiens
  misc_RNA (1)...(19): siRNA sense strand
gaagaccucagugucaaug

SEQ ID NO: 153694 - RNA, 19 nt, Homo sapiens
  misc_RNA (1)...(19): siRNA sense strand
ggucugaggaucuggucua

SEQ ID NO: 153695 - RNA, 19 nt, Homo sapiens
  misc_RNA (1)...(19): siRNA sense strand
ggagcgagacacugacaga

SEQ ID NO: 153696 - RNA, 19 nt, Homo sapiens
  misc_RNA (1)...(19): siRNA sense strand
ccauccagcccgugaauga

SEQ ID NO: 153697 - RNA, 19 nt, Homo sapiens
  misc_RNA (1)...(19): siRNA sense strand
caccguggcugcucuggau

SEQ ID NO: 153698 - RNA, 19 nt, Homo sapiens
  misc_RNA (1)...(19): siRNA sense strand
ggacaccaaccucgacauc

SEQ ID NO: 153699 - RNA, 19 nt, Homo sapiens
  misc_RNA (1)...(19): siRNA sense strand
caugagggcugugcugaag

SEQ ID NO: 153700 - RNA, 19 nt, Homo sapiens
  misc_RNA (1)...(19): siRNA sense strand
caacaagacgggcaagcau

SEQ ID NO: 153701 - RNA, 19 nt, Homo sapiens
  misc_RNA (1)...(19): siRNA sense strand
ggaggaguaugaggacgau

SEQ ID NO: 153702 - RNA, 19 nt, Homo sapiens
  misc_RNA (1)...(19): siRNA sense strand
ggacgaaggaacccuagag

SEQ ID NO: 153703 - RNA, 19 nt, Homo sapiens
  misc_RNA (1)...(19): siRNA sense strand
gacgaugccuauggccauu

SEQ ID NO: 153704 - RNA, 19 nt, Homo sapiens
  misc_RNA (1)...(19): siRNA sense strand
gacgggagcgagacacuga

SEQ ID NO: 153705 - RNA, 19 nt, Homo sapiens
  misc_RNA (1)...(19): siRNA sense strand
gaccacagaagaugauauc

SEQ ID NO: 153706 - RNA, 19 nt, Homo sapiens
  misc_RNA (1)...(19): siRNA sense strand
aggcugagcugcgcaaauc

SEQ ID NO: 153707 - RNA, 19 nt, Homo sapiens
  misc_RNA (1)...(19): siRNA sense strand
acacuguggugcugacugu

SEQ ID NO: 153708 - RNA, 19 nt, Homo sapiens
  misc_RNA (1)...(19): siRNA sense strand
ccuguggccuucacuguca

SEQ ID NO: 153709 - RNA, 19 nt, Homo sapiens
  misc_RNA (1)...(19): siRNA sense strand
gaugcugacucgggcuuug

SEQ ID NO: 153710 - RNA, 19 nt, Homo sapiens
  misc_RNA (1)...(19): siRNA sense strand
uggaagaccucagugucaa

SEQ ID NO: 153711 - RNA, 19 nt, Homo sapiens
  misc_RNA (1)...(19): siRNA sense strand
gcaacaagacgggcaagca

SEQ ID NO: 153712 - RNA, 19 nt, Homo sapiens
  misc_RNA (1)...(19): siRNA sense strand
uggaggaggaggaguauga

SEQ ID NO: 153713 - RNA, 19 nt, Homo sapiens
  misc_RNA (1)...(19): siRNA sense strand
ugucaagagucucaacagu

SEQ ID NO: 153714 - RNA, 19 nt, Homo sapiens
  misc_RNA (1)...(19): siRNA sense strand
caacuucuccuccucucau

SEQ ID NO: 153715 - RNA, 19 nt, Homo sapiens
  misc_RNA (1)...(19): siRNA sense strand
cagggcagcuaguguaugc

SEQ ID NO: 153716 - RNA, 19 nt, Homo sapiens
  misc_RNA (1)...(19): siRNA sense strand
aaacacaggccugcagaug

SEQ ID NO: 153717 - RNA, 19 nt, Homo sapiens
  misc_RNA (1)...(19): siRNA sense strand
cauccucacuacaaacaca

SEQ ID NO: 153718 - RNA, 19 nt, Homo sapiens
  misc_RNA (1)...(19): siRNA sense strand
ucacuguccugccugucaa

SEQ ID NO: 153719 - RNA, 19 nt, Homo sapiens
  misc_RNA (1)...(19): siRNA sense strand
ugaggucaguguccacauc

SEQ ID NO: 153720 - RNA, 19 nt, Homo sapiens
  misc_RNA (1)...(19): siRNA sense strand
ccuccugucuuugccaauu

SEQ ID NO: 153721 - RNA, 19 nt, Homo sapiens
  misc_RNA (1)...(19): siRNA sense strand
gcaugagggcugugcugaa

SEQ ID NO: 153722 - RNA, 19 nt, Homo sapiens
  misc_RNA (1)...(19): siRNA sense strand
cgaugccuauggccauuau

SEQ ID NO: 153723 - RNA, 19 nt, Homo sapiens
  misc_RNA (1)...(19): siRNA sense strand
acaagacgggcaagcauga

SEQ ID NO: 153724 - RNA, 19 nt, Homo sapiens
  misc_RNA (1)...(19): siRNA sense strand
ggugcugacugucguagag

SEQ ID NO: 153725 - RNA, 19 nt, Homo sapiens
  misc_RNA (1)...(19): siRNA sense strand
cagcagcuccgggugguuu

SEQ ID NO: 153726 - RNA, 19 nt, Homo sapiens
  misc_RNA (1)...(19): siRNA sense strand
gcauggaagaccucagugu

SEQ ID NO: 153727 - RNA, 19 nt, Homo sapiens
  misc_RNA (1)...(19): siRNA sense strand
caacccugcccuuaagaau

SEQ ID NO: 153728 - RNA, 19 nt, Homo sapiens
  misc_RNA (1)...(19): siRNA sense strand
cacccaacccugcccuuaa

SEQ ID NO: 153729 - RNA, 19 nt, Homo sapiens
  misc_RNA (1)...(19): siRNA sense strand
cagcguggcaggcaucuuc

SEQ ID NO: 153730 - RNA, 19 nt, Homo sapiens
  misc_RNA (1)...(19): siRNA sense strand
ggaugccuccaaucucuug

SEQ ID NO: 153731 - RNA, 19 nt, Homo sapiens
  misc_RNA (1)...(19): siRNA sense strand
gggagaggcagcugagauc

SEQ ID NO: 153732 - RNA, 19 nt, Homo sapiens
  misc_RNA (1)...(19): siRNA sense strand
ggaugccacccuacaagug

SEQ ID NO: 153733 - RNA, 19 nt, Homo sapiens
  misc_RNA (1)...(19): siRNA sense strand
guaugaggacgaugccuau

SEQ ID NO: 153734 - RNA, 19 nt, Homo sapiens
  misc_RNA (1)...(19): siRNA sense strand
ggaagaccucagugucaau

SEQ ID NO: 153735 - RNA, 19 nt, Homo sapiens
  misc_RNA (1)...(19): siRNA sense strand
ccacugcacacucagaaca

SEQ ID NO: 153736 - RNA, 19 nt, Homo sapiens
  misc_RNA (1)...(19): siRNA sense strand
ccuggagaaugguggaaga

SEQ ID NO: 153737 - RNA, 19 nt, Homo sapiens
  misc_RNA (1)...(19): siRNA sense strand
acacaggacaagaccacua

SEQ ID NO: 153738 - RNA, 19 nt, Homo sapiens
  misc_RNA (1)...(19): siRNA sense strand
acccacagcaccacgcuua

SEQ ID NO: 153739 - RNA, 19 nt, Homo sapiens
  misc_RNA (1)...(19): siRNA sense strand
ccaugugccugguacuucu

SEQ ID NO: 153740 - RNA, 19 nt, Homo sapiens
  misc_RNA (1)...(19): siRNA sense strand
caacauguucagcgucauc

SEQ ID NO: 153741 - RNA, 19 nt, Homo sapiens
  misc_RNA (1)...(19): siRNA sense strand
gaagcagggaagccagaga

SEQ ID NO: 153742 - RNA, 19 nt, Homo sapiens
  misc_RNA (1)...(19): siRNA sense strand
cuucagccaauuccagaua

SEQ ID NO: 153743 - RNA, 19 nt, Homo sapiens
  misc_RNA (1)...(19): siRNA sense strand
cgaggacaccuuccguuuc

SEQ ID NO: 153744 - RNA, 19 nt, Homo sapiens
  misc_RNA (1)...(19): siRNA sense strand
ggcacaaggcugucagaug

SEQ ID NO: 153745 - RNA, 19 nt, Homo sapiens
  misc_RNA (1)...(19): siRNA sense strand
caacaaggccaccgaagau

SEQ ID NO: 153746 - RNA, 19 nt, Homo sapiens
  misc_RNA (1)...(19): siRNA sense strand
agaaacaguugugcucuuu

SEQ ID NO: 153747 - RNA, 19 nt, Homo sapiens
  misc_RNA (1)...(19): siRNA sense strand
agccagaacugcagaagaa

SEQ ID NO: 153748 - RNA, 19 nt, Homo sapiens
  misc_RNA (1)...(19): siRNA sense strand
gaauuacuucuucgacgua

SEQ ID NO: 153749 - RNA, 19 nt, Homo sapiens
  misc_RNA (1)...(19): siRNA sense strand
ggacaccugugccuuccau

SEQ ID NO: 153750 - RNA, 19 nt, Homo sapiens
  misc_RNA (1)...(19): siRNA sense strand
caaggaggagaauaggaua

SEQ ID NO: 153751 - RNA, 19 nt, Homo sapiens
  misc_RNA (1)...(19): siRNA sense strand
ggaggagaauaggauaauc

SEQ ID NO: 153752 - RNA, 19 nt, Homo sapiens
  misc_RNA (1)...(19): siRNA sense strand
ccaccgaagaugaguacua

SEQ ID NO: 153753 - RNA, 19 nt, Homo sapiens
  misc_RNA (1)...(19): siRNA sense strand
guugugcucuuucgagauc

SEQ ID NO: 153754 - RNA, 19 nt, Homo sapiens
  misc_RNA (1)...(19): siRNA sense strand
ccaaggaggagaauaggau

SEQ ID NO: 153755 - RNA, 19 nt, Homo sapiens
  misc_RNA (1)...(19): siRNA sense strand
gaauuccaggugucaagaa

SEQ ID NO: 153756 - RNA, 19 nt, Homo sapiens
  misc_RNA (1)...(19): siRNA sense strand
gcccuucacuucgccauca

SEQ ID NO: 153757 - RNA, 19 nt, Homo sapiens
  misc_RNA (1)...(19): siRNA sense strand
acaacaaggccaccgaaga

SEQ ID NO: 153758 - RNA, 19 nt, Homo sapiens
  misc_RNA (1)...(19): siRNA sense strand
aaacaguugugcucuuucg

SEQ ID NO: 153759 - RNA, 19 nt, Homo sapiens
  misc_RNA (1)...(19): siRNA sense strand
ccagggagcagaccuuugg

SEQ ID NO: 153760 - RNA, 19 nt, Homo sapiens
  misc_RNA (1)...(19): siRNA sense strand
caccgaagaugaguacuac

SEQ ID NO: 153761 - RNA, 19 nt, Homo sapiens
  misc_RNA (1)...(19): siRNA sense strand
cgaagaugaguacuacaga

SEQ ID NO: 153762 - RNA, 19 nt, Homo sapiens
  misc_RNA (1)...(19): siRNA sense strand
acaaggccaccgaagauga

SEQ ID NO: 153763 - RNA, 19 nt, Homo sapiens
  misc_RNA (1)...(19): siRNA sense strand
caucagcgaguacaacaag

SEQ ID NO: 153764 - RNA, 19 nt, Homo sapiens
  misc_RNA (1)...(19): siRNA sense strand
cagaacugcagaagaaaca

SEQ ID NO: 153765 - RNA, 19 nt, Homo sapiens
  misc_RNA (1)...(19): siRNA sense strand
caccugugccuuccaugaa

SEQ ID NO: 153766 - RNA, 19 nt, Homo sapiens
  misc_RNA (1)...(19): siRNA sense strand
ccacagaccucaaugacaa

SEQ ID NO: 153767 - RNA, 19 nt, Homo sapiens
  misc_RNA (1)...(19): siRNA sense strand
gaacuacuacuucaaugug

SEQ ID NO: 153768 - RNA, 19 nt, Homo sapiens
  misc_RNA (1)...(19): siRNA sense strand
gaacuacaagugccggaaa

SEQ ID NO: 153769 - RNA, 19 nt, Homo sapiens
  misc_RNA (1)...(19): siRNA sense strand
guacaacaaggucauuaau

SEQ ID NO: 153770 - RNA, 19 nt, Homo sapiens
  misc_RNA (1)...(19): siRNA sense strand
acaacugucccuucaauga

SEQ ID NO: 153771 - RNA, 19 nt, Homo sapiens
  misc_RNA (1)...(19): siRNA sense strand
caacaaggucauuaauaag

SEQ ID NO: 153772 - RNA, 19 nt, Homo sapiens
  misc_RNA (1)...(19): siRNA sense strand
gcucuuuccagaucaauga

SEQ ID NO: 153773 - RNA, 19 nt, Homo sapiens
  misc_RNA (1)...(19): siRNA sense strand
uaauaaggaugaguacuac

SEQ ID NO: 153774 - RNA, 19 nt, Homo sapiens
  misc_RNA (1)...(19): siRNA sense strand
acaaggucauuaauaagga

SEQ ID NO: 153775 - RNA, 19 nt, Homo sapiens
  misc_RNA (1)...(19): siRNA sense strand
gaguacaacaaggucauua

SEQ ID NO: 153776 - RNA, 19 nt, Homo sapiens
  misc_RNA (1)...(19): siRNA sense strand
gcugcugacugccuugaug

SEQ ID NO: 153777 - RNA, 19 nt, Homo sapiens
  misc_RNA (1)...(19): siRNA sense strand
caaggucauuaauaaggau

SEQ ID NO: 153778 - RNA, 19 nt, Homo sapiens
  misc_RNA (1)...(19): siRNA sense strand
gcccuggacuuugccauca

SEQ ID NO: 153779 - RNA, 19 nt, Homo sapiens
  misc_RNA (1)...(19): siRNA sense strand
cgaaccacaugcaccaagu

SEQ ID NO: 153780 - RNA, 19 nt, Homo sapiens
  misc_RNA (1)...(19): siRNA sense strand
ugaaagaggaagaguucug

SEQ ID NO: 153781 - RNA, 19 nt, Homo sapiens
  misc_RNA (1)...(19): siRNA sense strand
ggauaaaauuuccauucug

SEQ ID NO: 153782 - RNA, 19 nt, Homo sapiens
  misc_RNA (1)...(19): siRNA sense strand
agaccucaaugacaagagu

SEQ ID NO: 153783 - RNA, 19 nt, Homo sapiens
  misc_RNA (1)...(19): siRNA sense strand
caucagcgaguacaacaag

SEQ ID NO: 153784 - RNA, 19 nt, Homo sapiens
  misc_RNA (1)...(19): siRNA sense strand
acaagugccggaaagucua

SEQ ID NO: 153785 - RNA, 19 nt, Homo sapiens
  misc_RNA (1)...(19): siRNA sense strand
gaaccacaugcaccaaguc

SEQ ID NO: 153786 - RNA, 19 nt, Homo sapiens
  misc_RNA (1)...(19): siRNA sense strand
gaggauaaaauuuccauuc

SEQ ID NO: 153787 - RNA, 19 nt, Homo sapiens
  misc_RNA (1)...(19): siRNA sense strand
caacugucccuucaaugac

SEQ ID NO: 153788 - RNA, 19 nt, Homo sapiens
  misc_RNA (1)...(19): siRNA sense strand
acugaaagaggaagaguuc

SEQ ID NO: 153789 - RNA, 19 nt, Homo sapiens
  misc_RNA (1)...(19): siRNA sense strand
gcacaauacucaagucaug

SEQ ID NO: 153790 - RNA, 19 nt, Homo sapiens
  misc_RNA (1)...(19): siRNA sense strand
guuaauaccuguagaugaa

SEQ ID NO: 153791 - RNA, 19 nt, Homo sapiens
  misc_RNA (1)...(19): siRNA sense strand
gaacagaagacuaaaccua

SEQ ID NO: 153792 - RNA, 19 nt, Homo sapiens
  misc_RNA (1)...(19): siRNA sense strand
gaauggaaauuguggaguu

SEQ ID NO: 153793 - RNA, 19 nt, Homo sapiens
  misc_RNA (1)...(19): siRNA sense strand
guuagaagaucaucccuuu

SEQ ID NO: 153794 - RNA, 19 nt, Homo sapiens
  misc_RNA (1)...(19): siRNA sense strand
gaaccucaaguguguguua

SEQ ID NO: 153795 - RNA, 19 nt, Homo sapiens
  misc_RNA (1)...(19): siRNA sense strand
agagauggcugacagauau

SEQ ID NO: 153796 - RNA, 19 nt, Homo sapiens
  misc_RNA (1)...(19): siRNA sense strand
gaacauucucuccuuauga

SEQ ID NO: 153797 - RNA, 19 nt, Homo sapiens
  misc_RNA (1)...(19): siRNA sense strand
gacuugaccuuccuauuga

SEQ ID NO: 153798 - RNA, 19 nt, Homo sapiens
  misc_RNA (1)...(19): siRNA sense strand
ggagagagaauggaaauug

SEQ ID NO: 153799 - RNA, 19 nt, Homo sapiens
  misc_RNA (1)...(19): siRNA sense strand
gagagagaauggaaauugu

SEQ ID NO: 153800 - RNA, 19 nt, Homo sapiens
  misc_RNA (1)...(19): siRNA sense strand
ggaacauucucuccuuaug

SEQ ID NO: 153801 - RNA, 19 nt, Homo sapiens
  misc_RNA (1)...(19): siRNA sense strand
caaauccacuugacacauc

SEQ ID NO: 153802 - RNA, 19 nt, Homo sapiens
  misc_RNA (1)...(19): siRNA sense strand
uaacauugaugcaggaaca

SEQ ID NO: 153803 - RNA, 19 nt, Homo sapiens
  misc_RNA (1)...(19): siRNA sense strand
gguguuauaucaggaauug

SEQ ID NO: 153804 - RNA, 19 nt, Homo sapiens
  misc_RNA (1)...(19): siRNA sense strand
gaaauacaccgaguucuca

SEQ ID NO: 153805 - RNA, 19 nt, Homo sapiens
  misc_RNA (1)...(19): siRNA sense strand
ucaauguucugccauguug

SEQ ID NO: 153806 - RNA, 19 nt, Homo sapiens
  misc_RNA (1)...(19): siRNA sense strand
gaaguuuguuggccaagau

SEQ ID NO: 153807 - RNA, 19 nt, Homo sapiens
  misc_RNA (1)...(19): siRNA sense strand
cuggagaccugcucuauug

SEQ ID NO: 153808 - RNA, 19 nt, Homo sapiens
  misc_RNA (1)...(19): siRNA sense strand
ggaaaucaaguacauagau

SEQ ID NO: 153809 - RNA, 19 nt, Homo sapiens
  misc_RNA (1)...(19): siRNA sense strand
caaguugucccucauauca

SEQ ID NO: 153810 - RNA, 19 nt, Homo sapiens
  misc_RNA (1)...(19): siRNA sense strand
ccacgaagcuuggcagaag

SEQ ID NO: 153811 - RNA, 19 nt, Homo sapiens
  misc_RNA (1)...(19): siRNA sense strand
gaugagacaggcguuaaua

SEQ ID NO: 153812 - RNA, 19 nt, Homo sapiens
  misc_RNA (1)...(19): siRNA sense strand
acacaucagugaaggagaa

SEQ ID NO: 153813 - RNA, 19 nt, Homo sapiens
  misc_RNA (1)...(19): siRNA sense strand
ucugaccacuggaaagaua

SEQ ID NO: 153814 - RNA, 19 nt, Homo sapiens
  misc_RNA (1)...(19): siRNA sense strand
gacuaaaccuacccagaau

SEQ ID NO: 153815 - RNA, 19 nt, Homo sapiens
  misc_RNA (1)...(19): siRNA sense strand
agacuugaccuuccuauug

SEQ ID NO: 153816 - RNA, 19 nt, Homo sapiens
  misc_RNA (1)...(19): siRNA sense strand
guaugcaggugcucaaauc

SEQ ID NO: 153817 - RNA, 19 nt, Homo sapiens
  misc_RNA (1)...(19): siRNA sense strand
agacuaaaccuacccagaa

SEQ ID NO: 153818 - RNA, 19 nt, Homo sapiens
  misc_RNA (1)...(19): siRNA sense strand
gguuacuggugguguuaua

SEQ ID NO: 153819 - RNA, 19 nt, Homo sapiens
  misc_RNA (1)...(19): siRNA sense strand
ccucaaguguguguuauug

SEQ ID NO: 153820 - RNA, 19 nt, Homo sapiens
  misc_RNA (1)...(19): siRNA sense strand
gcagacuacuuggaagaga

SEQ ID NO: 153821 - RNA, 19 nt, Homo sapiens
  misc_RNA (1)...(19): siRNA sense strand
cacauuaccuccagaaagg

SEQ ID NO: 153822 - RNA, 19 nt, Homo sapiens
  misc_RNA (1)...(19): siRNA sense strand
gaaggagagagaauggaaa

SEQ ID NO: 153823 - RNA, 19 nt, Homo sapiens
  misc_RNA (1)...(19): siRNA sense strand
aaaauugaccccuacauua

SEQ ID NO: 153824 - RNA, 19 nt, Homo sapiens
  misc_RNA (1)...(19): siRNA sense strand
gaaaucaccgaacugaagu

SEQ ID NO: 153825 - RNA, 19 nt, Homo sapiens
  misc_RNA (1)...(19): siRNA sense strand
gcaagggguuguagauuau

SEQ ID NO: 153826 - RNA, 19 nt, Homo sapiens
  misc_RNA (1)...(19): siRNA sense strand
uaacauccacgucagucua

SEQ ID NO: 153827 - RNA, 19 nt, Homo sapiens
  misc_RNA (1)...(19): siRNA sense strand
agaugaagauggccuggaa

SEQ ID NO: 153828 - RNA, 19 nt, Homo sapiens
  misc_RNA (1)...(19): siRNA sense strand
aauggaaauuguggaguua

SEQ ID NO: 153829 - RNA, 19 nt, Homo sapiens
  misc_RNA (1)...(19): siRNA sense strand
gugcugggauggcaagaug

SEQ ID NO: 153830 - RNA, 19 nt, Homo sapiens
  misc_RNA (1)...(19): siRNA sense strand
ggccaucaaccacaaauug

SEQ ID NO: 153831 - RNA, 19 nt, Homo sapiens
  misc_RNA (1)...(19): siRNA sense strand
ccuggaaccucaagugugu

SEQ ID NO: 153832 - RNA, 19 nt, Homo sapiens
  misc_RNA (1)...(19): siRNA sense strand
cugaugaaauggaaagaga

SEQ ID NO: 153833 - RNA, 19 nt, Homo sapiens
  misc_RNA (1)...(19): siRNA sense strand
ccagggacaccuauaguga

SEQ ID NO: 153834 - RNA, 19 nt, Homo sapiens
  misc_RNA (1)...(19): siRNA sense strand
gaaagagauggcugacaga

SEQ ID NO: 153835 - RNA, 19 nt, Homo sapiens
  misc_RNA (1)...(19): siRNA sense strand
ggcagugguugaauucuca

SEQ ID NO: 153836 - RNA, 19 nt, Homo sapiens
  misc_RNA (1)...(19): siRNA sense strand
acugaaguuuccaucaaua

SEQ ID NO: 153837 - RNA, 19 nt, Homo sapiens
  misc_RNA (1)...(19): siRNA sense strand
ugaaaucaccgaacugaag

SEQ ID NO: 153838 - RNA, 19 nt, Homo sapiens
  misc_RNA (1)...(19): siRNA sense strand
agagagaacuuuuguaaca

SEQ ID NO: 153839 - RNA, 19 nt, Homo sapiens
  misc_RNA (1)...(19): siRNA sense strand
uggccaagauguugaagga

SEQ ID NO: 153840 - RNA, 19 nt, Homo sapiens
  misc_RNA (1)...(19): siRNA sense strand
accaagaacucagucauga

SEQ ID NO: 153841 - RNA, 19 nt, Homo sapiens
  misc_RNA (1)...(19): siRNA sense strand
uaugagcgguuccuugaca

SEQ ID NO: 153842 - RNA, 19 nt, Homo sapiens
  misc_RNA (1)...(19): siRNA sense strand
gaccaagaacucagucaug

SEQ ID NO: 153843 - RNA, 19 nt, Homo sapiens
  misc_RNA (1)...(19): siRNA sense strand
ccaauucuacagaguuuga

SEQ ID NO: 153844 - RNA, 19 nt, Homo sapiens
  misc_RNA (1)...(19): siRNA sense strand
ccaggaggauuugguguuc

SEQ ID NO: 153845 - RNA, 19 nt, Homo sapiens
  misc_RNA (1)...(19): siRNA sense strand
gaugaaauggaaagagaug

SEQ ID NO: 153846 - RNA, 19 nt, Homo sapiens
  misc_RNA (1)...(19): siRNA sense strand
acucaagucaugugguuua

SEQ ID NO: 153847 - RNA, 19 nt, Homo sapiens
  misc_RNA (1)...(19): siRNA sense strand
ggaaauuguggaguuagaa

SEQ ID NO: 153848 - RNA, 19 nt, Homo sapiens
  misc_RNA (1)...(19): siRNA sense strand
cauagauucugcggacuug

SEQ ID NO: 153849 - RNA, 19 nt, Homo sapiens
  misc_RNA (1)...(19): siRNA sense strand
gaaauuguggaguuagaag

SEQ ID NO: 153850 - RNA, 19 nt, Homo sapiens
  misc_RNA (1)...(19): siRNA sense strand
auacucaagucaugugguu

SEQ ID NO: 153851 - RNA, 19 nt, Homo sapiens
  misc_RNA (1)...(19): siRNA sense strand
gcaagaugccaauucuaca

SEQ ID NO: 153852 - RNA, 19 nt, Homo sapiens
  misc_RNA (1)...(19): siRNA sense strand
gcaguuggcagugguugaa

SEQ ID NO: 153853 - RNA, 19 nt, Homo sapiens
  misc_RNA (1)...(19): siRNA sense strand
uaauaccuguagaugaaga

SEQ ID NO: 153854 - RNA, 19 nt, Homo sapiens
  misc_RNA (1)...(19): siRNA sense strand
ugccaauucuacagaguuu

SEQ ID NO: 153855 - RNA, 19 nt, Homo sapiens
  misc_RNA (1)...(19): siRNA sense strand
uaacaaggaacggaaagga

SEQ ID NO: 153856 - RNA, 19 nt, Homo sapiens
  misc_RNA (1)...(19): siRNA sense strand
aaaccuacccagaauagug

SEQ ID NO: 153857 - RNA, 19 nt, Homo sapiens
  misc_RNA (1)...(19): siRNA sense strand
ggagauuacuuggggaaaa

SEQ ID NO: 153858 - RNA, 19 nt, Homo sapiens
  misc_RNA (1)...(19): siRNA sense strand
cugaacaagugaucugugu

SEQ ID NO: 153859 - RNA, 19 nt, Homo sapiens
  misc_RNA (1)...(19): siRNA sense strand
ugaaggagagagaauggaa

SEQ ID NO: 153860 - RNA, 19 nt, Homo sapiens
  misc_RNA (1)...(19): siRNA sense strand
uccuaugccucugucauua

SEQ ID NO: 153861 - RNA, 19 nt, Homo sapiens
  misc_RNA (1)...(19): siRNA sense strand
accaguaugucauuaacaa

SEQ ID NO: 153862 - RNA, 19 nt, Homo sapiens
  misc_RNA (1)...(19): siRNA sense strand
agacgcagacuacuuggaa

SEQ ID NO: 153863 - RNA, 19 nt, Homo sapiens
  misc_RNA (1)...(19): siRNA sense strand
caaauuggaaaucaaguac

SEQ ID NO: 153864 - RNA, 19 nt, Homo sapiens
  misc_RNA (1)...(19): siRNA sense strand
ccacaaauuggaaaucaag

SEQ ID NO: 153865 - RNA, 19 nt, Homo sapiens
  misc_RNA (1)...(19): siRNA sense strand
cgaaauacaccgaguucuc

SEQ ID NO: 153866 - RNA, 19 nt, Homo sapiens
  misc_RNA (1)...(19): siRNA sense strand
guaugucauuaacaaggaa

SEQ ID NO: 153867 - RNA, 19 nt, Homo sapiens
  misc_RNA (1)...(19): siRNA sense strand
ggaagcagcuccccugacu

SEQ ID NO: 153868 - RNA, 19 nt, Homo sapiens
  misc_RNA (1)...(19): siRNA sense strand
uggaaauuguggaguuaga

SEQ ID NO: 153869 - RNA, 19 nt, Homo sapiens
  misc_RNA (1)...(19): siRNA sense strand
gcaagaggagaacccuguu

SEQ ID NO: 153870 - RNA, 19 nt, Homo sapiens
  misc_RNA (1)...(19): siRNA sense strand
gcuggagaccugcucuauu

SEQ ID NO: 153871 - RNA, 19 nt, Homo sapiens
  misc_RNA (1)...(19): siRNA sense strand
caucaaccacaaauuggaa

SEQ ID NO: 153872 - RNA, 19 nt, Homo sapiens
  misc_RNA (1)...(19): siRNA sense strand
caaaauugaccccuacauu

SEQ ID NO: 153873 - RNA, 19 nt, Homo sapiens
  misc_RNA (1)...(19): siRNA sense strand
gcucuguagugcucaugga

SEQ ID NO: 153874 - RNA, 19 nt, Homo sapiens
  misc_RNA (1)...(19): siRNA sense strand
gaacggaaaggagauuacu

SEQ ID NO: 153875 - RNA, 19 nt, Homo sapiens
  misc_RNA (1)...(19): siRNA sense strand
aaccacaaauuggaaauca

SEQ ID NO: 153876 - RNA, 19 nt, Homo sapiens
  misc_RNA (1)...(19): siRNA sense strand
aagagauggcugacagaua

SEQ ID NO: 153877 - RNA, 19 nt, Homo sapiens
  misc_RNA (1)...(19): siRNA sense strand
ucaccaaggacaauaaucu

SEQ ID NO: 153878 - RNA, 19 nt, Homo sapiens
  misc_RNA (1)...(19): siRNA sense strand
ucacauuaccuccagaaag

SEQ ID NO: 153879 - RNA, 19 nt, Homo sapiens
  misc_RNA (1)...(19): siRNA sense strand
gcccaucaccucgcaagaa

SEQ ID NO: 153880 - RNA, 19 nt, Homo sapiens
  misc_RNA (1)...(19): siRNA sense strand
aaaugcugaugaaauggaa

SEQ ID NO: 153881 - RNA, 19 nt, Homo sapiens
  misc_RNA (1)...(19): siRNA sense strand
cuaaaccuacccagaauag

SEQ ID NO: 153882 - RNA, 19 nt, Homo sapiens
  misc_RNA (1)...(19): siRNA sense strand
agcaagggguuguagauua

SEQ ID NO: 153883 - RNA, 19 nt, Homo sapiens
  misc_RNA (1)...(19): siRNA sense strand
gaaaggcugcaggcucuca

SEQ ID NO: 153884 - RNA, 19 nt, Homo sapiens
  misc_RNA (1)...(19): siRNA sense strand
acuaugagcgguuccuuga

SEQ ID NO: 153885 - RNA, 19 nt, Homo sapiens
  misc_RNA (1)...(19): siRNA sense strand
uuagaggacuugggcuuuc

SEQ ID NO: 153886 - RNA, 19 nt, Homo sapiens
  misc_RNA (1)...(19): siRNA sense strand
gaggcaccgccaccgauuu

SEQ ID NO: 153887 - RNA, 19 nt, Homo sapiens
  misc_RNA (1)...(19): siRNA sense strand
uggagacgcagacuacuug

SEQ ID NO: 153888 - RNA, 19 nt, Homo sapiens
  misc_RNA (1)...(19): siRNA sense strand
ugaaguuuguuggccaaga

SEQ ID NO: 153889 - RNA, 19 nt, Homo sapiens
  misc_RNA (1)...(19): siRNA sense strand
cggaugagcuggucaacua

SEQ ID NO: 153890 - RNA, 19 nt, Homo sapiens
  misc_RNA (1)...(19): siRNA sense strand
ggucaacuaugucaacaaa

SEQ ID NO: 153891 - RNA, 19 nt, Homo sapiens
  misc_RNA (1)...(19): siRNA sense strand
gacaauggcuucuuuaaaa

SEQ ID NO: 153892 - RNA, 19 nt, Homo sapiens
  misc_RNA (1)...(19): siRNA sense strand
gcuuggaacuucuggacaa

SEQ ID NO: 153893 - RNA, 19 nt, Homo sapiens
  misc_RNA (1)...(19): siRNA sense strand
ugacaauggcuucuuuaaa

SEQ ID NO: 153894 - RNA, 19 nt, Homo sapiens
  misc_RNA (1)...(19): siRNA sense strand
gggugacaauggcuucuuu

SEQ ID NO: 153895 - RNA, 19 nt, Homo sapiens
  misc_RNA (1)...(19): siRNA sense strand
ggacaagcacuacggauac

SEQ ID NO: 153896 - RNA, 19 nt, Homo sapiens
  misc_RNA (1)...(19): siRNA sense strand
ggaucacuguggaaucgaa

SEQ ID NO: 153897 - RNA, 19 nt, Homo sapiens
  misc_RNA (1)...(19): siRNA sense strand
uugaagaggcuauguggua

SEQ ID NO: 153898 - RNA, 19 nt, Homo sapiens
  misc_RNA (1)...(19): siRNA sense strand
ggagcuuucucuguguauu

SEQ ID NO: 153899 - RNA, 19 nt, Homo sapiens
  misc_RNA (1)...(19): siRNA sense strand
acaaacaggacaagcacua

SEQ ID NO: 153900 - RNA, 19 nt, Homo sapiens
  misc_RNA (1)...(19): siRNA sense strand
ggaacaauggccacagugu

SEQ ID NO: 153901 - RNA, 19 nt, Homo sapiens
  misc_RNA (1)...(19): siRNA sense strand
cagaagugguggcuggaau

SEQ ID NO: 153902 - RNA, 19 nt, Homo sapiens
  misc_RNA (1)...(19): siRNA sense strand
gagggagcuuucucugugu

SEQ ID NO: 153903 - RNA, 19 nt, Homo sapiens
  misc_RNA (1)...(19): siRNA sense strand
gagcaggcccucuuuccau

SEQ ID NO: 153904 - RNA, 19 nt, Homo sapiens
  misc_RNA (1)...(19): siRNA sense strand
gacaagcacuacggauaca

SEQ ID NO: 153905 - RNA, 19 nt, Homo sapiens
  misc_RNA (1)...(19): siRNA sense strand
ggugacaauggcuucuuua

SEQ ID NO: 153906 - RNA, 19 nt, Homo sapiens
  misc_RNA (1)...(19): siRNA sense strand
ucaacuaugucaacaaacg

SEQ ID NO: 153907 - RNA, 19 nt, Homo sapiens
  misc_RNA (1)...(19): siRNA sense strand
gugacaauggcuucuuuaa

SEQ ID NO: 153908 - RNA, 19 nt, Homo sapiens
  misc_RNA (1)...(19): siRNA sense strand
gaucaguacugggaaaaga

SEQ ID NO: 153909 - RNA, 19 nt, Homo sapiens
  misc_RNA (1)...(19): siRNA sense strand
gagcuggucaacuauguca

SEQ ID NO: 153910 - RNA, 19 nt, Homo sapiens
  misc_RNA (1)...(19): siRNA sense strand
gaagugguggcuggaauuc

SEQ ID NO: 153911 - RNA, 19 nt, Homo sapiens
  misc_RNA (1)...(19): siRNA sense strand
gagaauggcacacccuacu

SEQ ID NO: 153912 - RNA, 19 nt, Homo sapiens
  misc_RNA (1)...(19): siRNA sense strand
cuacagcccgaccuacaaa

SEQ ID NO: 153913 - RNA, 19 nt, Homo sapiens
  misc_RNA (1)...(19): siRNA sense strand
gaauuccacgcaccgauca

SEQ ID NO: 153914 - RNA, 19 nt, Homo sapiens
  misc_RNA (1)...(19): siRNA sense strand
gaccugaagcugccugcaa

SEQ ID NO: 153915 - RNA, 19 nt, Homo sapiens
  misc_RNA (1)...(19): siRNA sense strand
gagcuuucucuguguauuc

SEQ ID NO: 153916 - RNA, 19 nt, Homo sapiens
  misc_RNA (1)...(19): siRNA sense strand
ggacaucauggccgagauc

SEQ ID NO: 153917 - RNA, 19 nt, Homo sapiens
  misc_RNA (1)...(19): siRNA sense strand
uaugucaacaaacggaaua

SEQ ID NO: 153918 - RNA, 19 nt, Homo sapiens
  misc_RNA (1)...(19): siRNA sense strand
gcuacagcccgaccuacaa

SEQ ID NO: 153919 - RNA, 19 nt, Homo sapiens
  misc_RNA (1)...(19): siRNA sense strand
acacgucaccggagagaug

SEQ ID NO: 153920 - RNA, 19 nt, Homo sapiens
  misc_RNA (1)...(19): siRNA sense strand
aggacaagcacuacggaua

SEQ ID NO: 153921 - RNA, 19 nt, Homo sapiens
  misc_RNA (1)...(19): siRNA sense strand
caggaucacuguggaaucg

SEQ ID NO: 153922 - RNA, 19 nt, Homo sapiens
  misc_RNA (1)...(19): siRNA sense strand
caucauggccgagaucuac

SEQ ID NO: 153923 - RNA, 19 nt, Homo sapiens
  misc_RNA (1)...(19): siRNA sense strand
gaugagcuggucaacuaug

SEQ ID NO: 153924 - RNA, 19 nt, Homo sapiens
  misc_RNA (1)...(19): siRNA sense strand
ccacagugucccaccauca

SEQ ID NO: 153925 - RNA, 19 nt, Homo sapiens
  misc_RNA (1)...(19): siRNA sense strand
caacacgucaccggagaga

SEQ ID NO: 153926 - RNA, 19 nt, Homo sapiens
  misc_RNA (1)...(19): siRNA sense strand
caagcacuacggauacaau

SEQ ID NO: 153927 - RNA, 19 nt, Homo sapiens
  misc_RNA (1)...(19): siRNA sense strand
agucaggaguguaccaaca

SEQ ID NO: 153928 - RNA, 19 nt, Homo sapiens
  misc_RNA (1)...(19): siRNA sense strand
cggacuuccugcucuacaa

SEQ ID NO: 153929 - RNA, 19 nt, Homo sapiens
  misc_RNA (1)...(19): siRNA sense strand
gaucugcauccacaccaau

SEQ ID NO: 153930 - RNA, 19 nt, Homo sapiens
  misc_RNA (1)...(19): siRNA sense strand
uggaaucgaaucagaagug

SEQ ID NO: 153931 - RNA, 19 nt, Homo sapiens
  misc_RNA (1)...(19): siRNA sense strand
ggagcaggcccucuuucca

SEQ ID NO: 153932 - RNA, 19 nt, Homo sapiens
  misc_RNA (1)...(19): siRNA sense strand
cgggaacaauggccacagu

SEQ ID NO: 153933 - RNA, 19 nt, Homo sapiens
  misc_RNA (1)...(19): siRNA sense strand
agaagugguggcuggaauu

SEQ ID NO: 153934 - RNA, 19 nt, Homo sapiens
  misc_RNA (1)...(19): siRNA sense strand
ggacuuccugcucuacaag

SEQ ID NO: 153935 - RNA, 19 nt, Homo sapiens
  misc_RNA (1)...(19): siRNA sense strand
gguuucugguggccucuau

SEQ ID NO: 153936 - RNA, 19 nt, Homo sapiens
  misc_RNA (1)...(19): siRNA sense strand
acuguggaaucgaaucaga

SEQ ID NO: 153937 - RNA, 19 nt, Homo sapiens
  misc_RNA (1)...(19): siRNA sense strand
cggcuguaaugguggcuau

SEQ ID NO: 153938 - RNA, 19 nt, Homo sapiens
  misc_RNA (1)...(19): siRNA sense strand
ggaugagcuggucaacuau

SEQ ID NO: 153939 - RNA, 19 nt, Homo sapiens
  misc_RNA (1)...(19): siRNA sense strand
agggagcuuucucugugua

SEQ ID NO: 153940 - RNA, 19 nt, Homo sapiens
  misc_RNA (1)...(19): siRNA sense strand
cccagagaguuauguuuac

SEQ ID NO: 153941 - RNA, 19 nt, Homo sapiens
  misc_RNA (1)...(19): siRNA sense strand
ccucuaugaaucccaugua

SEQ ID NO: 153942 - RNA, 19 nt, Homo sapiens
  misc_RNA (1)...(19): siRNA sense strand
cugguggccucuaugaauc

SEQ ID NO: 153943 - RNA, 19 nt, Homo sapiens
  misc_RNA (1)...(19): siRNA sense strand
ucugguggccucuaugaau

SEQ ID NO: 153944 - RNA, 19 nt, Homo sapiens
  misc_RNA (1)...(19): siRNA sense strand
cggaugagcuggucaacua

SEQ ID NO: 153945 - RNA, 19 nt, Homo sapiens
  misc_RNA (1)...(19): siRNA sense strand
ggucaacuaugucaacaaa

SEQ ID NO: 153946 - RNA, 19 nt, Homo sapiens
  misc_RNA (1)...(19): siRNA sense strand
gacaauggcuucuuuaaaa

SEQ ID NO: 153947 - RNA, 19 nt, Homo sapiens
  misc_RNA (1)...(19): siRNA sense strand
gcuuggaacuucuggacaa

SEQ ID NO: 153948 - RNA, 19 nt, Homo sapiens
  misc_RNA (1)...(19): siRNA sense strand
ugacaauggcuucuuuaaa

SEQ ID NO: 153949 - RNA, 19 nt, Homo sapiens
  misc_RNA (1)...(19): siRNA sense strand
gggugacaauggcuucuuu

SEQ ID NO: 153950 - RNA, 19 nt, Homo sapiens
  misc_RNA (1)...(19): siRNA sense strand
ggacaagcacuacggauac

SEQ ID NO: 153951 - RNA, 19 nt, Homo sapiens
  misc_RNA (1)...(19): siRNA sense strand
ggaucacuguggaaucgaa

SEQ ID NO: 153952 - RNA, 19 nt, Homo sapiens
  misc_RNA (1)...(19): siRNA sense strand
uugaagaggcuauguggua

SEQ ID NO: 153953 - RNA, 19 nt, Homo sapiens
  misc_RNA (1)...(19): siRNA sense strand
ggagcuuucucuguguauu

SEQ ID NO: 153954 - RNA, 19 nt, Homo sapiens
  misc_RNA (1)...(19): siRNA sense strand
acaaacaggacaagcacua

SEQ ID NO: 153955 - RNA, 19 nt, Homo sapiens
  misc_RNA (1)...(19): siRNA sense strand
ggaacaauggccacagugu

SEQ ID NO: 153956 - RNA, 19 nt, Homo sapiens
  misc_RNA (1)...(19): siRNA sense strand
cagaagugguggcuggaau

SEQ ID NO: 153957 - RNA, 19 nt, Homo sapiens
  misc_RNA (1)...(19): siRNA sense strand
gagggagcuuucucugugu

SEQ ID NO: 153958 - RNA, 19 nt, Homo sapiens
  misc_RNA (1)...(19): siRNA sense strand
gagcaggcccucuuuccau

SEQ ID NO: 153959 - RNA, 19 nt, Homo sapiens
  misc_RNA (1)...(19): siRNA sense strand
gacaagcacuacggauaca

SEQ ID NO: 153960 - RNA, 19 nt, Homo sapiens
  misc_RNA (1)...(19): siRNA sense strand
ggugacaauggcuucuuua

SEQ ID NO: 153961 - RNA, 19 nt, Homo sapiens
  misc_RNA (1)...(19): siRNA sense strand
ucaacuaugucaacaaacg

SEQ ID NO: 153962 - RNA, 19 nt, Homo sapiens
  misc_RNA (1)...(19): siRNA sense strand
gugacaauggcuucuuuaa

SEQ ID NO: 153963 - RNA, 19 nt, Homo sapiens
  misc_RNA (1)...(19): siRNA sense strand
gaucaguacugggaaaaga

SEQ ID NO: 153964 - RNA, 19 nt, Homo sapiens
  misc_RNA (1)...(19): siRNA sense strand
gagcuggucaacuauguca

SEQ ID NO: 153965 - RNA, 19 nt, Homo sapiens
  misc_RNA (1)...(19): siRNA sense strand
gaagugguggcuggaauuc

SEQ ID NO: 153966 - RNA, 19 nt, Homo sapiens
  misc_RNA (1)...(19): siRNA sense strand
gagaauggcacacccuacu

SEQ ID NO: 153967 - RNA, 19 nt, Homo sapiens
  misc_RNA (1)...(19): siRNA sense strand
cuacagcccgaccuacaaa

SEQ ID NO: 153968 - RNA, 19 nt, Homo sapiens
  misc_RNA (1)...(19): siRNA sense strand
gaauuccacgcaccgauca

SEQ ID NO: 153969 - RNA, 19 nt, Homo sapiens
  misc_RNA (1)...(19): siRNA sense strand
gaccugaagcugccugcaa

SEQ ID NO: 153970 - RNA, 19 nt, Homo sapiens
  misc_RNA (1)...(19): siRNA sense strand
gagcuuucucuguguauuc

SEQ ID NO: 153971 - RNA, 19 nt, Homo sapiens
  misc_RNA (1)...(19): siRNA sense strand
ggacaucauggccgagauc

SEQ ID NO: 153972 - RNA, 19 nt, Homo sapiens
  misc_RNA (1)...(19): siRNA sense strand
uaugucaacaaacggaaua

SEQ ID NO: 153973 - RNA, 19 nt, Homo sapiens
  misc_RNA (1)...(19): siRNA sense strand
gcuacagcccgaccuacaa

SEQ ID NO: 153974 - RNA, 19 nt, Homo sapiens
  misc_RNA (1)...(19): siRNA sense strand
acacgucaccggagagaug

SEQ ID NO: 153975 - RNA, 19 nt, Homo sapiens
  misc_RNA (1)...(19): siRNA sense strand
aggacaagcacuacggaua

SEQ ID NO: 153976 - RNA, 19 nt, Homo sapiens
  misc_RNA (1)...(19): siRNA sense strand
caggaucacuguggaaucg

SEQ ID NO: 153977 - RNA, 19 nt, Homo sapiens
  misc_RNA (1)...(19): siRNA sense strand
caucauggccgagaucuac

SEQ ID NO: 153978 - RNA, 19 nt, Homo sapiens
  misc_RNA (1)...(19): siRNA sense strand
gaugagcuggucaacuaug

SEQ ID NO: 153979 - RNA, 19 nt, Homo sapiens
  misc_RNA (1)...(19): siRNA sense strand
ccacagugucccaccauca

SEQ ID NO: 153980 - RNA, 19 nt, Homo sapiens
  misc_RNA (1)...(19): siRNA sense strand
caacacgucaccggagaga

SEQ ID NO: 153981 - RNA, 19 nt, Homo sapiens
  misc_RNA (1)...(19): siRNA sense strand
caagcacuacggauacaau

SEQ ID NO: 153982 - RNA, 19 nt, Homo sapiens
  misc_RNA (1)...(19): siRNA sense strand
agucaggaguguaccaaca

SEQ ID NO: 153983 - RNA, 19 nt, Homo sapiens
  misc_RNA (1)...(19): siRNA sense strand
cggacuuccugcucuacaa

SEQ ID NO: 153984 - RNA, 19 nt, Homo sapiens
  misc_RNA (1)...(19): siRNA sense strand
gaucugcauccacaccaau

SEQ ID NO: 153985 - RNA, 19 nt, Homo sapiens
  misc_RNA (1)...(19): siRNA sense strand
uggaaucgaaucagaagug

SEQ ID NO: 153986 - RNA, 19 nt, Homo sapiens
  misc_RNA (1)...(19): siRNA sense strand
ggagcaggcccucuuucca

SEQ ID NO: 153987 - RNA, 19 nt, Homo sapiens
  misc_RNA (1)...(19): siRNA sense strand
cgggaacaauggccacagu

SEQ ID NO: 153988 - RNA, 19 nt, Homo sapiens
  misc_RNA (1)...(19): siRNA sense strand
agaagugguggcuggaauu

SEQ ID NO: 153989 - RNA, 19 nt, Homo sapiens
  misc_RNA (1)...(19): siRNA sense strand
ggacuuccugcucuacaag

SEQ ID NO: 153990 - RNA, 19 nt, Homo sapiens
  misc_RNA (1)...(19): siRNA sense strand
gguuucugguggccucuau

SEQ ID NO: 153991 - RNA, 19 nt, Homo sapiens
  misc_RNA (1)...(19): siRNA sense strand
acuguggaaucgaaucaga

SEQ ID NO: 153992 - RNA, 19 nt, Homo sapiens
  misc_RNA (1)...(19): siRNA sense strand
cggcuguaaugguggcuau

SEQ ID NO: 153993 - RNA, 19 nt, Homo sapiens
  misc_RNA (1)...(19): siRNA sense strand
ggaugagcuggucaacuau

SEQ ID NO: 153994 - RNA, 19 nt, Homo sapiens
  misc_RNA (1)...(19): siRNA sense strand
agggagcuuucucugugua

SEQ ID NO: 153995 - RNA, 19 nt, Homo sapiens
  misc_RNA (1)...(19): siRNA sense strand
cccagagaguuauguuuac

SEQ ID NO: 153996 - RNA, 19 nt, Homo sapiens
  misc_RNA (1)...(19): siRNA sense strand
ccucuaugaaucccaugua

SEQ ID NO: 153997 - RNA, 19 nt, Homo sapiens
  misc_RNA (1)...(19): siRNA sense strand
cugguggccucuaugaauc

SEQ ID NO: 153998 - RNA, 19 nt, Homo sapiens
  misc_RNA (1)...(19): siRNA sense strand
ucugguggccucuaugaau

SEQ ID NO: 153999 - RNA, 19 nt, Homo sapiens
  misc_RNA (1)...(19): siRNA sense strand
cggaugagcuggucaacua

SEQ ID NO: 154000 - RNA, 19 nt, Homo sapiens
  misc_RNA (1)...(19): siRNA sense strand
ggucaacuaugucaacaaa

SEQ ID NO: 154001 - RNA, 19 nt, Homo sapiens
  misc_RNA (1)...(19): siRNA sense strand
gacaauggcuucuuuaaaa

SEQ ID NO: 154002 - RNA, 19 nt, Homo sapiens
  misc_RNA (1)...(19): siRNA sense strand
gcuuggaacuucuggacaa

SEQ ID NO: 154003 - RNA, 19 nt, Homo sapiens
  misc_RNA (1)...(19): siRNA sense strand
ugacaauggcuucuuuaaa

SEQ ID NO: 154004 - RNA, 19 nt, Homo sapiens
  misc_RNA (1)...(19): siRNA sense strand
gggugacaauggcuucuuu

SEQ ID NO: 154005 - RNA, 19 nt, Homo sapiens
  misc_RNA (1)...(19): siRNA sense strand
ggacaagcacuacggauac

SEQ ID NO: 154006 - RNA, 19 nt, Homo sapiens
  misc_RNA (1)...(19): siRNA sense strand
ggaucacuguggaaucgaa

SEQ ID NO: 154007 - RNA, 19 nt, Homo sapiens
  misc_RNA (1)...(19): siRNA sense strand
uugaagaggcuauguggua

SEQ ID NO: 154008 - RNA, 19 nt, Homo sapiens
  misc_RNA (1)...(19): siRNA sense strand
ggagcuuucucuguguauu

SEQ ID NO: 154009 - RNA, 19 nt, Homo sapiens
  misc_RNA (1)...(19): siRNA sense strand
acaaacaggacaagcacua

SEQ ID NO: 154010 - RNA, 19 nt, Homo sapiens
  misc_RNA (1)...(19): siRNA sense strand
ggaacaauggccacagugu

SEQ ID NO: 154011 - RNA, 19 nt, Homo sapiens
  misc_RNA (1)...(19): siRNA sense strand
cagaagugguggcuggaau

SEQ ID NO: 154012 - RNA, 19 nt, Homo sapiens
  misc_RNA (1)...(19): siRNA sense strand
gagggagcuuucucugugu

SEQ ID NO: 154013 - RNA, 19 nt, Homo sapiens
  misc_RNA (1)...(19): siRNA sense strand
gagcaggcccucuuuccau

SEQ ID NO: 154014 - RNA, 19 nt, Homo sapiens
  misc_RNA (1)...(19): siRNA sense strand
gacaagcacuacggauaca

SEQ ID NO: 154015 - RNA, 19 nt, Homo sapiens
  misc_RNA (1)...(19): siRNA sense strand
ggugacaauggcuucuuua

SEQ ID NO: 154016 - RNA, 19 nt, Homo sapiens
  misc_RNA (1)...(19): siRNA sense strand
ucaacuaugucaacaaacg

SEQ ID NO: 154017 - RNA, 19 nt, Homo sapiens
  misc_RNA (1)...(19): siRNA sense strand
gugacaauggcuucuuuaa

SEQ ID NO: 154018 - RNA, 19 nt, Homo sapiens
  misc_RNA (1)...(19): siRNA sense strand
gaucaguacugggaaaaga

SEQ ID NO: 154019 - RNA, 19 nt, Homo sapiens
  misc_RNA (1)...(19): siRNA sense strand
gagcuggucaacuauguca

SEQ ID NO: 154020 - RNA, 19 nt, Homo sapiens
  misc_RNA (1)...(19): siRNA sense strand
gaagugguggcuggaauuc

SEQ ID NO: 154021 - RNA, 19 nt, Homo sapiens
  misc_RNA (1)...(19): siRNA sense strand
gagaauggcacacccuacu

SEQ ID NO: 154022 - RNA, 19 nt, Homo sapiens
  misc_RNA (1)...(19): siRNA sense strand
cuacagcccgaccuacaaa

SEQ ID NO: 154023 - RNA, 19 nt, Homo sapiens
  misc_RNA (1)...(19): siRNA sense strand
gaauuccacgcaccgauca

SEQ ID NO: 154024 - RNA, 19 nt, Homo sapiens
  misc_RNA (1)...(19): siRNA sense strand
gaccugaagcugccugcaa

SEQ ID NO: 154025 - RNA, 19 nt, Homo sapiens
  misc_RNA (1)...(19): siRNA sense strand
gagcuuucucuguguauuc

SEQ ID NO: 154026 - RNA, 19 nt, Homo sapiens
  misc_RNA (1)...(19): siRNA sense strand
ggacaucauggccgagauc

SEQ ID NO: 154027 - RNA, 19 nt, Homo sapiens
  misc_RNA (1)...(19): siRNA sense strand
uaugucaacaaacggaaua

SEQ ID NO: 154028 - RNA, 19 nt, Homo sapiens
  misc_RNA (1)...(19): siRNA sense strand
gcuacagcccgaccuacaa

SEQ ID NO: 154029 - RNA, 19 nt, Homo sapiens
  misc_RNA (1)...(19): siRNA sense strand
acacgucaccggagagaug

SEQ ID NO: 154030 - RNA, 19 nt, Homo sapiens
  misc_RNA (1)...(19): siRNA sense strand
aggacaagcacuacggaua

SEQ ID NO: 154031 - RNA, 19 nt, Homo sapiens
  misc_RNA (1)...(19): siRNA sense strand
caggaucacuguggaaucg

SEQ ID NO: 154032 - RNA, 19 nt, Homo sapiens
  misc_RNA (1)...(19): siRNA sense strand
caucauggccgagaucuac

SEQ ID NO: 154033 - RNA, 19 nt, Homo sapiens
  misc_RNA (1)...(19): siRNA sense strand
gaugagcuggucaacuaug

SEQ ID NO: 154034 - RNA, 19 nt, Homo sapiens
  misc_RNA (1)...(19): siRNA sense strand
ccacagugucccaccauca

SEQ ID NO: 154035 - RNA, 19 nt, Homo sapiens
  misc_RNA (1)...(19): siRNA sense strand
caacacgucaccggagaga

SEQ ID NO: 154036 - RNA, 19 nt, Homo sapiens
  misc_RNA (1)...(19): siRNA sense strand
caagcacuacggauacaau

SEQ ID NO: 154037 - RNA, 19 nt, Homo sapiens
  misc_RNA (1)...(19): siRNA sense strand
agucaggaguguaccaaca

SEQ ID NO: 154038 - RNA, 19 nt, Homo sapiens
  misc_RNA (1)...(19): siRNA sense strand
cggacuuccugcucuacaa

SEQ ID NO: 154039 - RNA, 19 nt, Homo sapiens
  misc_RNA (1)...(19): siRNA sense strand
gaucugcauccacaccaau

SEQ ID NO: 154040 - RNA, 19 nt, Homo sapiens
  misc_RNA (1)...(19): siRNA sense strand
uggaaucgaaucagaagug

SEQ ID NO: 154041 - RNA, 19 nt, Homo sapiens
  misc_RNA (1)...(19): siRNA sense strand
ggagcaggcccucuuucca

SEQ ID NO: 154042 - RNA, 19 nt, Homo sapiens
  misc_RNA (1)...(19): siRNA sense strand
cgggaacaauggccacagu

SEQ ID NO: 154043 - RNA, 19 nt, Homo sapiens
  misc_RNA (1)...(19): siRNA sense strand
agaagugguggcuggaauu

SEQ ID NO: 154044 - RNA, 19 nt, Homo sapiens
  misc_RNA (1)...(19): siRNA sense strand
ggacuuccugcucuacaag

SEQ ID NO: 154045 - RNA, 19 nt, Homo sapiens
  misc_RNA (1)...(19): siRNA sense strand
gguuucugguggccucuau

SEQ ID NO: 154046 - RNA, 19 nt, Homo sapiens
  misc_RNA (1)...(19): siRNA sense strand
acuguggaaucgaaucaga

SEQ ID NO: 154047 - RNA, 19 nt, Homo sapiens
  misc_RNA (1)...(19): siRNA sense strand
cggcuguaaugguggcuau

SEQ ID NO: 154048 - RNA, 19 nt, Homo sapiens
  misc_RNA (1)...(19): siRNA sense strand
ggaugagcuggucaacuau

SEQ ID NO: 154049 - RNA, 19 nt, Homo sapiens
  misc_RNA (1)...(19): siRNA sense strand
agggagcuuucucugugua

SEQ ID NO: 154050 - RNA, 19 nt, Homo sapiens
  misc_RNA (1)...(19): siRNA sense strand
cccagagaguuauguuuac

SEQ ID NO: 154051 - RNA, 19 nt, Homo sapiens
  misc_RNA (1)...(19): siRNA sense strand
ccucuaugaaucccaugua

SEQ ID NO: 154052 - RNA, 19 nt, Homo sapiens
  misc_RNA (1)...(19): siRNA sense strand
cugguggccucuaugaauc

SEQ ID NO: 154053 - RNA, 19 nt, Homo sapiens
  misc_RNA (1)...(19): siRNA sense strand
ucugguggccucuaugaau

SEQ ID NO: 154054 - RNA, 19 nt, Homo sapiens
  misc_RNA (1)...(19): siRNA sense strand
cggaugagcuggucaacua

SEQ ID NO: 154055 - RNA, 19 nt, Homo sapiens
  misc_RNA (1)...(19): siRNA sense strand
ggucaacuaugucaacaaa

SEQ ID NO: 154056 - RNA, 19 nt, Homo sapiens
  misc_RNA (1)...(19): siRNA sense strand
gacaauggcuucuuuaaaa

SEQ ID NO: 154057 - RNA, 19 nt, Homo sapiens
  misc_RNA (1)...(19): siRNA sense strand
gcuuggaacuucuggacaa

SEQ ID NO: 154058 - RNA, 19 nt, Homo sapiens
  misc_RNA (1)...(19): siRNA sense strand
ugacaauggcuucuuuaaa

SEQ ID NO: 154059 - RNA, 19 nt, Homo sapiens
  misc_RNA (1)...(19): siRNA sense strand
gggugacaauggcuucuuu

SEQ ID NO: 154060 - RNA, 19 nt, Homo sapiens
  misc_RNA (1)...(19): siRNA sense strand
ggacaagcacuacggauac

SEQ ID NO: 154061 - RNA, 19 nt, Homo sapiens
  misc_RNA (1)...(19): siRNA sense strand
ggaucacuguggaaucgaa

SEQ ID NO: 154062 - RNA, 19 nt, Homo sapiens
  misc_RNA (1)...(19): siRNA sense strand
uugaagaggcuauguggua

SEQ ID NO: 154063 - RNA, 19 nt, Homo sapiens
  misc_RNA (1)...(19): siRNA sense strand
ggagcuuucucuguguauu

SEQ ID NO: 154064 - RNA, 19 nt, Homo sapiens
  misc_RNA (1)...(19): siRNA sense strand
acaaacaggacaagcacua

SEQ ID NO: 154065 - RNA, 19 nt, Homo sapiens
  misc_RNA (1)...(19): siRNA sense strand
ggaacaauggccacagugu

SEQ ID NO: 154066 - RNA, 19 nt, Homo sapiens
  misc_RNA (1)...(19): siRNA sense strand
cagaagugguggcuggaau

SEQ ID NO: 154067 - RNA, 19 nt, Homo sapiens
  misc_RNA (1)...(19): siRNA sense strand
gagggagcuuucucugugu

SEQ ID NO: 154068 - RNA, 19 nt, Homo sapiens
  misc_RNA (1)...(19): siRNA sense strand
gagcaggcccucuuuccau

SEQ ID NO: 154069 - RNA, 19 nt, Homo sapiens
  misc_RNA (1)...(19): siRNA sense strand
gacaagcacuacggauaca

SEQ ID NO: 154070 - RNA, 19 nt, Homo sapiens
  misc_RNA (1)...(19): siRNA sense strand
ggugacaauggcuucuuua

SEQ ID NO: 154071 - RNA, 19 nt, Homo sapiens
  misc_RNA (1)...(19): siRNA sense strand
ucaacuaugucaacaaacg

SEQ ID NO: 154072 - RNA, 19 nt, Homo sapiens
  misc_RNA (1)...(19): siRNA sense strand
gugacaauggcuucuuuaa

SEQ ID NO: 154073 - RNA, 19 nt, Homo sapiens
  misc_RNA (1)...(19): siRNA sense strand
gaucaguacugggaaaaga

SEQ ID NO: 154074 - RNA, 19 nt, Homo sapiens
  misc_RNA (1)...(19): siRNA sense strand
gagcuggucaacuauguca

SEQ ID NO: 154075 - RNA, 19 nt, Homo sapiens
  misc_RNA (1)...(19): siRNA sense strand
gaagugguggcuggaauuc

SEQ ID NO: 154076 - RNA, 19 nt, Homo sapiens
  misc_RNA (1)...(19): siRNA sense strand
gagaauggcacacccuacu

SEQ ID NO: 154077 - RNA, 19 nt, Homo sapiens
  misc_RNA (1)...(19): siRNA sense strand
cuacagcccgaccuacaaa

SEQ ID NO: 154078 - RNA, 19 nt, Homo sapiens
  misc_RNA (1)...(19): siRNA sense strand
gaauuccacgcaccgauca

SEQ ID NO: 154079 - RNA, 19 nt, Homo sapiens
  misc_RNA (1)...(19): siRNA sense strand
gaccugaagcugccugcaa

SEQ ID NO: 154080 - RNA, 19 nt, Homo sapiens
  misc_RNA (1)...(19): siRNA sense strand
gagcuuucucuguguauuc

SEQ ID NO: 154081 - RNA, 19 nt, Homo sapiens
  misc_RNA (1)...(19): siRNA sense strand
ggacaucauggccgagauc

SEQ ID NO: 154082 - RNA, 19 nt, Homo sapiens
  misc_RNA (1)...(19): siRNA sense strand
uaugucaacaaacggaaua

SEQ ID NO: 154083 - RNA, 19 nt, Homo sapiens
  misc_RNA (1)...(19): siRNA sense strand
gcuacagcccgaccuacaa

SEQ ID NO: 154084 - RNA, 19 nt, Homo sapiens
  misc_RNA (1)...(19): siRNA sense strand
acacgucaccggagagaug

SEQ ID NO: 154085 - RNA, 19 nt, Homo sapiens
  misc_RNA (1)...(19): siRNA sense strand
aggacaagcacuacggaua

SEQ ID NO: 154086 - RNA, 19 nt, Homo sapiens
  misc_RNA (1)...(19): siRNA sense strand
caggaucacuguggaaucg

SEQ ID NO: 154087 - RNA, 19 nt, Homo sapiens
  misc_RNA (1)...(19): siRNA sense strand
caucauggccgagaucuac

SEQ ID NO: 154088 - RNA, 19 nt, Homo sapiens
  misc_RNA (1)...(19): siRNA sense strand
gaugagcuggucaacuaug

SEQ ID NO: 154089 - RNA, 19 nt, Homo sapiens
  misc_RNA (1)...(19): siRNA sense strand
ccacagugucccaccauca

SEQ ID NO: 154090 - RNA, 19 nt, Homo sapiens
  misc_RNA (1)...(19): siRNA sense strand
caacacgucaccggagaga

SEQ ID NO: 154091 - RNA, 19 nt, Homo sapiens
  misc_RNA (1)...(19): siRNA sense strand
caagcacuacggauacaau

SEQ ID NO: 154092 - RNA, 19 nt, Homo sapiens
  misc_RNA (1)...(19): siRNA sense strand
agucaggaguguaccaaca

SEQ ID NO: 154093 - RNA, 19 nt, Homo sapiens
  misc_RNA (1)...(19): siRNA sense strand
cggacuuccugcucuacaa

SEQ ID NO: 154094 - RNA, 19 nt, Homo sapiens
  misc_RNA (1)...(19): siRNA sense strand
gaucugcauccacaccaau

SEQ ID NO: 154095 - RNA, 19 nt, Homo sapiens
  misc_RNA (1)...(19): siRNA sense strand
uggaaucgaaucagaagug

SEQ ID NO: 154096 - RNA, 19 nt, Homo sapiens
  misc_RNA (1)...(19): siRNA sense strand
ggagcaggcccucuuucca

SEQ ID NO: 154097 - RNA, 19 nt, Homo sapiens
  misc_RNA (1)...(19): siRNA sense strand
cgggaacaauggccacagu

SEQ ID NO: 154098 - RNA, 19 nt, Homo sapiens
  misc_RNA (1)...(19): siRNA sense strand
agaagugguggcuggaauu

SEQ ID NO: 154099 - RNA, 19 nt, Homo sapiens
  misc_RNA (1)...(19): siRNA sense strand
ggacuuccugcucuacaag

SEQ ID NO: 154100 - RNA, 19 nt, Homo sapiens
  misc_RNA (1)...(19): siRNA sense strand
gguuucugguggccucuau

SEQ ID NO: 154101 - RNA, 19 nt, Homo sapiens
  misc_RNA (1)...(19): siRNA sense strand
acuguggaaucgaaucaga

SEQ ID NO: 154102 - RNA, 19 nt, Homo sapiens
  misc_RNA (1)...(19): siRNA sense strand
cggcuguaaugguggcuau

SEQ ID NO: 154103 - RNA, 19 nt, Homo sapiens
  misc_RNA (1)...(19): siRNA sense strand
ggaugagcuggucaacuau

SEQ ID NO: 154104 - RNA, 19 nt, Homo sapiens
  misc_RNA (1)...(19): siRNA sense strand
agggagcuuucucugugua

SEQ ID NO: 154105 - RNA, 19 nt, Homo sapiens
  misc_RNA (1)...(19): siRNA sense strand
cccagagaguuauguuuac

SEQ ID NO: 154106 - RNA, 19 nt, Homo sapiens
  misc_RNA (1)...(19): siRNA sense strand
ccucuaugaaucccaugua

SEQ ID NO: 154107 - RNA, 19 nt, Homo sapiens
  misc_RNA (1)...(19): siRNA sense strand
cugguggccucuaugaauc

SEQ ID NO: 154108 - RNA, 19 nt, Homo sapiens
  misc_RNA (1)...(19): siRNA sense strand
ucugguggccucuaugaau

SEQ ID NO: 154109 - RNA, 19 nt, Homo sapiens
  misc_RNA (1)...(19): siRNA sense strand
cggaugagcuggucaacua

SEQ ID NO: 154110 - RNA, 19 nt, Homo sapiens
  misc_RNA (1)...(19): siRNA sense strand
ggucaacuaugucaacaaa

SEQ ID NO: 154111 - RNA, 19 nt, Homo sapiens
  misc_RNA (1)...(19): siRNA sense strand
gacaauggcuucuuuaaaa

SEQ ID NO: 154112 - RNA, 19 nt, Homo sapiens
  misc_RNA (1)...(19): siRNA sense strand
gcuuggaacuucuggacaa

SEQ ID NO: 154113 - RNA, 19 nt, Homo sapiens
  misc_RNA (1)...(19): siRNA sense strand
ugacaauggcuucuuuaaa

SEQ ID NO: 154114 - RNA, 19 nt, Homo sapiens
  misc_RNA (1)...(19): siRNA sense strand
gggugacaauggcuucuuu

SEQ ID NO: 154115 - RNA, 19 nt, Homo sapiens
  misc_RNA (1)...(19): siRNA sense strand
ggacaagcacuacggauac

SEQ ID NO: 154116 - RNA, 19 nt, Homo sapiens
  misc_RNA (1)...(19): siRNA sense strand
ggaucacuguggaaucgaa

SEQ ID NO: 154117 - RNA, 19 nt, Homo sapiens
  misc_RNA (1)...(19): siRNA sense strand
uugaagaggcuauguggua

SEQ ID NO: 154118 - RNA, 19 nt, Homo sapiens
  misc_RNA (1)...(19): siRNA sense strand
ggagcuuucucuguguauu

SEQ ID NO: 154119 - RNA, 19 nt, Homo sapiens
  misc_RNA (1)...(19): siRNA sense strand
acaaacaggacaagcacua

SEQ ID NO: 154120 - RNA, 19 nt, Homo sapiens
  misc_RNA (1)...(19): siRNA sense strand
ggaacaauggccacagugu

SEQ ID NO: 154121 - RNA, 19 nt, Homo sapiens
  misc_RNA (1)...(19): siRNA sense strand
cagaagugguggcuggaau

SEQ ID NO: 154122 - RNA, 19 nt, Homo sapiens
  misc_RNA (1)...(19): siRNA sense strand
gagggagcuuucucugugu

SEQ ID NO: 154123 - RNA, 19 nt, Homo sapiens
  misc_RNA (1)...(19): siRNA sense strand
gagcaggcccucuuuccau

SEQ ID NO: 154124 - RNA, 19 nt, Homo sapiens
  misc_RNA (1)...(19): siRNA sense strand
gacaagcacuacggauaca

SEQ ID NO: 154125 - RNA, 19 nt, Homo sapiens
  misc_RNA (1)...(19): siRNA sense strand
ggugacaauggcuucuuua

SEQ ID NO: 154126 - RNA, 19 nt, Homo sapiens
  misc_RNA (1)...(19): siRNA sense strand
ucaacuaugucaacaaacg

SEQ ID NO: 154127 - RNA, 19 nt, Homo sapiens
  misc_RNA (1)...(19): siRNA sense strand
gugacaauggcuucuuuaa

SEQ ID NO: 154128 - RNA, 19 nt, Homo sapiens
  misc_RNA (1)...(19): siRNA sense strand
gaucaguacugggaaaaga

SEQ ID NO: 154129 - RNA, 19 nt, Homo sapiens
  misc_RNA (1)...(19): siRNA sense strand
gagcuggucaacuauguca

SEQ ID NO: 154130 - RNA, 19 nt, Homo sapiens
  misc_RNA (1)...(19): siRNA sense strand
gaagugguggcuggaauuc

SEQ ID NO: 154131 - RNA, 19 nt, Homo sapiens
  misc_RNA (1)...(19): siRNA sense strand
gagaauggcacacccuacu

SEQ ID NO: 154132 - RNA, 19 nt, Homo sapiens
  misc_RNA (1)...(19): siRNA sense strand
cuacagcccgaccuacaaa

SEQ ID NO: 154133 - RNA, 19 nt, Homo sapiens
  misc_RNA (1)...(19): siRNA sense strand
gaauuccacgcaccgauca

SEQ ID NO: 154134 - RNA, 19 nt, Homo sapiens
  misc_RNA (1)...(19): siRNA sense strand
gaccugaagcugccugcaa

SEQ ID NO: 154135 - RNA, 19 nt, Homo sapiens
  misc_RNA (1)...(19): siRNA sense strand
gagcuuucucuguguauuc

SEQ ID NO: 154136 - RNA, 19 nt, Homo sapiens
  misc_RNA (1)...(19): siRNA sense strand
ggacaucauggccgagauc

SEQ ID NO: 154137 - RNA, 19 nt, Homo sapiens
  misc_RNA (1)...(19): siRNA sense strand
uaugucaacaaacggaaua

SEQ ID NO: 154138 - RNA, 19 nt, Homo sapiens
  misc_RNA (1)...(19): siRNA sense strand
gcuacagcccgaccuacaa

SEQ ID NO: 154139 - RNA, 19 nt, Homo sapiens
  misc_RNA (1)...(19): siRNA sense strand
acacgucaccggagagaug

SEQ ID NO: 154140 - RNA, 19 nt, Homo sapiens
  misc_RNA (1)...(19): siRNA sense strand
aggacaagcacuacggaua

SEQ ID NO: 154141 - RNA, 19 nt, Homo sapiens
  misc_RNA (1)...(19): siRNA sense strand
caggaucacuguggaaucg

SEQ ID NO: 154142 - RNA, 19 nt, Homo sapiens
  misc_RNA (1)...(19): siRNA sense strand
caucauggccgagaucuac

SEQ ID NO: 154143 - RNA, 19 nt, Homo sapiens
  misc_RNA (1)...(19): siRNA sense strand
gaugagcuggucaacuaug

SEQ ID NO: 154144 - RNA, 19 nt, Homo sapiens
  misc_RNA (1)...(19): siRNA sense strand
ccacagugucccaccauca

SEQ ID NO: 154145 - RNA, 19 nt, Homo sapiens
  misc_RNA (1)...(19): siRNA sense strand
caacacgucaccggagaga

SEQ ID NO: 154146 - RNA, 19 nt, Homo sapiens
  misc_RNA (1)...(19): siRNA sense strand
caagcacuacggauacaau

SEQ ID NO: 154147 - RNA, 19 nt, Homo sapiens
  misc_RNA (1)...(19): siRNA sense strand
agucaggaguguaccaaca

SEQ ID NO: 154148 - RNA, 19 nt, Homo sapiens
  misc_RNA (1)...(19): siRNA sense strand
cggacuuccugcucuacaa

SEQ ID NO: 154149 - RNA, 19 nt, Homo sapiens
  misc_RNA (1)...(19): siRNA sense strand
gaucugcauccacaccaau

SEQ ID NO: 154150 - RNA, 19 nt, Homo sapiens
  misc_RNA (1)...(19): siRNA sense strand
uggaaucgaaucagaagug

SEQ ID NO: 154151 - RNA, 19 nt, Homo sapiens
  misc_RNA (1)...(19): siRNA sense strand
ggagcaggcccucuuucca

SEQ ID NO: 154152 - RNA, 19 nt, Homo sapiens
  misc_RNA (1)...(19): siRNA sense strand
cgggaacaauggccacagu

SEQ ID NO: 154153 - RNA, 19 nt, Homo sapiens
  misc_RNA (1)...(19): siRNA sense strand
agaagugguggcuggaauu

SEQ ID NO: 154154 - RNA, 19 nt, Homo sapiens
  misc_RNA (1)...(19): siRNA sense strand
ggacuuccugcucuacaag

SEQ ID NO: 154155 - RNA, 19 nt, Homo sapiens
  misc_RNA (1)...(19): siRNA sense strand
gguuucugguggccucuau

SEQ ID NO: 154156 - RNA, 19 nt, Homo sapiens
  misc_RNA (1)...(19): siRNA sense strand
acuguggaaucgaaucaga

SEQ ID NO: 154157 - RNA, 19 nt, Homo sapiens
  misc_RNA (1)...(19): siRNA sense strand
cggcuguaaugguggcuau

SEQ ID NO: 154158 - RNA, 19 nt, Homo sapiens
  misc_RNA (1)...(19): siRNA sense strand
ggaugagcuggucaacuau

SEQ ID NO: 154159 - RNA, 19 nt, Homo sapiens
  misc_RNA (1)...(19): siRNA sense strand
agggagcuuucucugugua

SEQ ID NO: 154160 - RNA, 19 nt, Homo sapiens
  misc_RNA (1)...(19): siRNA sense strand
cccagagaguuauguuuac

SEQ ID NO: 154161 - RNA, 19 nt, Homo sapiens
  misc_RNA (1)...(19): siRNA sense strand
ccucuaugaaucccaugua

SEQ ID NO: 154162 - RNA, 19 nt, Homo sapiens
  misc_RNA (1)...(19): siRNA sense strand
cugguggccucuaugaauc

SEQ ID NO: 154163 - RNA, 19 nt, Homo sapiens
  misc_RNA (1)...(19): siRNA sense strand
ucugguggccucuaugaau

SEQ ID NO: 154164 - RNA, 19 nt, Homo sapiens
  misc_RNA (1)...(19): siRNA sense strand
gaugucaacugcucgguua

SEQ ID NO: 154165 - RNA, 19 nt, Homo sapiens
  misc_RNA (1)...(19): siRNA sense strand
caaccaaggcuuugagauu

SEQ ID NO: 154166 - RNA, 19 nt, Homo sapiens
  misc_RNA (1)...(19): siRNA sense strand
gcuuugagauuguguugaa

SEQ ID NO: 154167 - RNA, 19 nt, Homo sapiens
  misc_RNA (1)...(19): siRNA sense strand
gagauuguguugaaugacu

SEQ ID NO: 154168 - RNA, 19 nt, Homo sapiens
  misc_RNA (1)...(19): siRNA sense strand
aaccaaggcuuugagauug

SEQ ID NO: 154169 - RNA, 19 nt, Homo sapiens
  misc_RNA (1)...(19): siRNA sense strand
guagugguguaccuucaga

SEQ ID NO: 154170 - RNA, 19 nt, Homo sapiens
  misc_RNA (1)...(19): siRNA sense strand
gccauuucaccaucauuua

SEQ ID NO: 154171 - RNA, 19 nt, Homo sapiens
  misc_RNA (1)...(19): siRNA sense strand
ggccauuucaccaucauuu

SEQ ID NO: 154172 - RNA, 19 nt, Homo sapiens
  misc_RNA (1)...(19): siRNA sense strand
cuacaagugguuugccuuu

SEQ ID NO: 154173 - RNA, 19 nt, Homo sapiens
  misc_RNA (1)...(19): siRNA sense strand
caccaucauuuacaaccaa

SEQ ID NO: 154174 - RNA, 19 nt, Homo sapiens
  misc_RNA (1)...(19): siRNA sense strand
caacugcaccuaucuugac

SEQ ID NO: 154175 - RNA, 19 nt, Homo sapiens
  misc_RNA (1)...(19): siRNA sense strand
ggauacagcauaugaugac

SEQ ID NO: 154176 - RNA, 19 nt, Homo sapiens
  misc_RNA (1)...(19): siRNA sense strand
uugagauuguguugaauga

SEQ ID NO: 154177 - RNA, 19 nt, Homo sapiens
  misc_RNA (1)...(19): siRNA sense strand
gaaugacuacaagugguuu

SEQ ID NO: 154178 - RNA, 19 nt, Homo sapiens
  misc_RNA (1)...(19): siRNA sense strand
augaugaccuuggcaauuc

SEQ ID NO: 154179 - RNA, 19 nt, Homo sapiens
  misc_RNA (1)...(19): siRNA sense strand
uaugaugaccuuggcaauu

SEQ ID NO: 154180 - RNA, 19 nt, Homo sapiens
  misc_RNA (1)...(19): siRNA sense strand
uacagcauaugaugaccuu

SEQ ID NO: 154181 - RNA, 19 nt, Homo sapiens
  misc_RNA (1)...(19): siRNA sense strand
ugaaugacuacaagugguu

SEQ ID NO: 154182 - RNA, 19 nt, Homo sapiens
  misc_RNA (1)...(19): siRNA sense strand
ccaacugcaccuaucuuga

SEQ ID NO: 154183 - RNA, 19 nt, Homo sapiens
  misc_RNA (1)...(19): siRNA sense strand
ccaaggcuuugagauugug

SEQ ID NO: 154184 - RNA, 19 nt, Homo sapiens
  misc_RNA (1)...(19): siRNA sense strand
agauuguguugaaugacua

SEQ ID NO: 154185 - RNA, 19 nt, Homo sapiens
  misc_RNA (1)...(19): siRNA sense strand
gccaacugcaccuaucuug

SEQ ID NO: 154186 - RNA, 19 nt, Homo sapiens
  misc_RNA (1)...(19): siRNA sense strand
cauuuacaaccaaggcuuu

SEQ ID NO: 154187 - RNA, 19 nt, Homo sapiens
  misc_RNA (1)...(19): siRNA sense strand
gaugucaacugcucgguua

SEQ ID NO: 154188 - RNA, 19 nt, Homo sapiens
  misc_RNA (1)...(19): siRNA sense strand
caaccaaggcuuugagauu

SEQ ID NO: 154189 - RNA, 19 nt, Homo sapiens
  misc_RNA (1)...(19): siRNA sense strand
gcuuugagauuguguugaa

SEQ ID NO: 154190 - RNA, 19 nt, Homo sapiens
  misc_RNA (1)...(19): siRNA sense strand
gagauuguguugaaugacu

SEQ ID NO: 154191 - RNA, 19 nt, Homo sapiens
  misc_RNA (1)...(19): siRNA sense strand
aaccaaggcuuugagauug

SEQ ID NO: 154192 - RNA, 19 nt, Homo sapiens
  misc_RNA (1)...(19): siRNA sense strand
guagugguguaccuucaga

SEQ ID NO: 154193 - RNA, 19 nt, Homo sapiens
  misc_RNA (1)...(19): siRNA sense strand
gccauuucaccaucauuua

SEQ ID NO: 154194 - RNA, 19 nt, Homo sapiens
  misc_RNA (1)...(19): siRNA sense strand
ggccauuucaccaucauuu

SEQ ID NO: 154195 - RNA, 19 nt, Homo sapiens
  misc_RNA (1)...(19): siRNA sense strand
cuacaagugguuugccuuu

SEQ ID NO: 154196 - RNA, 19 nt, Homo sapiens
  misc_RNA (1)...(19): siRNA sense strand
caccaucauuuacaaccaa

SEQ ID NO: 154197 - RNA, 19 nt, Homo sapiens
  misc_RNA (1)...(19): siRNA sense strand
caacugcaccuaucuugac

SEQ ID NO: 154198 - RNA, 19 nt, Homo sapiens
  misc_RNA (1)...(19): siRNA sense strand
ggauacagcauaugaugac

SEQ ID NO: 154199 - RNA, 19 nt, Homo sapiens
  misc_RNA (1)...(19): siRNA sense strand
uugagauuguguugaauga

SEQ ID NO: 154200 - RNA, 19 nt, Homo sapiens
  misc_RNA (1)...(19): siRNA sense strand
gaaugacuacaagugguuu

SEQ ID NO: 154201 - RNA, 19 nt, Homo sapiens
  misc_RNA (1)...(19): siRNA sense strand
augaugaccuuggcaauuc

SEQ ID NO: 154202 - RNA, 19 nt, Homo sapiens
  misc_RNA (1)...(19): siRNA sense strand
uaugaugaccuuggcaauu

SEQ ID NO: 154203 - RNA, 19 nt, Homo sapiens
  misc_RNA (1)...(19): siRNA sense strand
uacagcauaugaugaccuu

SEQ ID NO: 154204 - RNA, 19 nt, Homo sapiens
  misc_RNA (1)...(19): siRNA sense strand
ugaaugacuacaagugguu

SEQ ID NO: 154205 - RNA, 19 nt, Homo sapiens
  misc_RNA (1)...(19): siRNA sense strand
ccaacugcaccuaucuuga

SEQ ID NO: 154206 - RNA, 19 nt, Homo sapiens
  misc_RNA (1)...(19): siRNA sense strand
ccaaggcuuugagauugug

SEQ ID NO: 154207 - RNA, 19 nt, Homo sapiens
  misc_RNA (1)...(19): siRNA sense strand
agauuguguugaaugacua

SEQ ID NO: 154208 - RNA, 19 nt, Homo sapiens
  misc_RNA (1)...(19): siRNA sense strand
gccaacugcaccuaucuug

SEQ ID NO: 154209 - RNA, 19 nt, Homo sapiens
  misc_RNA (1)...(19): siRNA sense strand
cauuuacaaccaaggcuuu

SEQ ID NO: 154210 - RNA, 19 nt, Homo sapiens
  misc_RNA (1)...(19): siRNA sense strand
gagaaaccauuguggaauu

SEQ ID NO: 154211 - RNA, 19 nt, Homo sapiens
  misc_RNA (1)...(19): siRNA sense strand
aaacacagcuucacaaugg

SEQ ID NO: 154212 - RNA, 19 nt, Homo sapiens
  misc_RNA (1)...(19): siRNA sense strand
gagaagaacaugaagauga

SEQ ID NO: 154213 - RNA, 19 nt, Homo sapiens
  misc_RNA (1)...(19): siRNA sense strand
gggcauggguggcuacgua

SEQ ID NO: 154214 - RNA, 19 nt, Homo sapiens
  misc_RNA (1)...(19): siRNA sense strand
ggauuaugcuuuccaguau

SEQ ID NO: 154215 - RNA, 19 nt, Homo sapiens
  misc_RNA (1)...(19): siRNA sense strand
ggacagauguuccggaaaa

SEQ ID NO: 154216 - RNA, 19 nt, Homo sapiens
  misc_RNA (1)...(19): siRNA sense strand
aauauuggcuggugaagaa

SEQ ID NO: 154217 - RNA, 19 nt, Homo sapiens
  misc_RNA (1)...(19): siRNA sense strand
guaaguacaaucccaagua

SEQ ID NO: 154218 - RNA, 19 nt, Homo sapiens
  misc_RNA (1)...(19): siRNA sense strand
gaaagcacagaaucagaua

SEQ ID NO: 154219 - RNA, 19 nt, Homo sapiens
  misc_RNA (1)...(19): siRNA sense strand
uaaguacaaucccaaguau

SEQ ID NO: 154220 - RNA, 19 nt, Homo sapiens
  misc_RNA (1)...(19): siRNA sense strand
cagcuacucuaacauuuga

SEQ ID NO: 154221 - RNA, 19 nt, Homo sapiens
  misc_RNA (1)...(19): siRNA sense strand
gaacgccuuuggagacaug

SEQ ID NO: 154222 - RNA, 19 nt, Homo sapiens
  misc_RNA (1)...(19): siRNA sense strand
gcacagaaucagauaacaa

SEQ ID NO: 154223 - RNA, 19 nt, Homo sapiens
  misc_RNA (1)...(19): siRNA sense strand
gauuauacggcaugaauga

SEQ ID NO: 154224 - RNA, 19 nt, Homo sapiens
  misc_RNA (1)...(19): siRNA sense strand
gaaacacagcuucacaaug

SEQ ID NO: 154225 - RNA, 19 nt, Homo sapiens
  misc_RNA (1)...(19): siRNA sense strand
caaguauucuguugcuaau

SEQ ID NO: 154226 - RNA, 19 nt, Homo sapiens
  misc_RNA (1)...(19): siRNA sense strand
ggagagcagugugggagaa

SEQ ID NO: 154227 - RNA, 19 nt, Homo sapiens
  misc_RNA (1)...(19): siRNA sense strand
gcccauuucuguugcuauu

SEQ ID NO: 154228 - RNA, 19 nt, Homo sapiens
  misc_RNA (1)...(19): siRNA sense strand
ccaaguauucuguugcuaa

SEQ ID NO: 154229 - RNA, 19 nt, Homo sapiens
  misc_RNA (1)...(19): siRNA sense strand
agaagaacaugaagaugau

SEQ ID NO: 154230 - RNA, 19 nt, Homo sapiens
  misc_RNA (1)...(19): siRNA sense strand
ccauuucuguugcuauuga

SEQ ID NO: 154231 - RNA, 19 nt, Homo sapiens
  misc_RNA (1)...(19): siRNA sense strand
uccaguauguucaggauaa

SEQ ID NO: 154232 - RNA, 19 nt, Homo sapiens
  misc_RNA (1)...(19): siRNA sense strand
ggaauugccucagcuacuc

SEQ ID NO: 154233 - RNA, 19 nt, Homo sapiens
  misc_RNA (1)...(19): siRNA sense strand
ggaaacacagcuucacaau

SEQ ID NO: 154234 - RNA, 19 nt, Homo sapiens
  misc_RNA (1)...(19): siRNA sense strand
aguauucuguugcuaauga

SEQ ID NO: 154235 - RNA, 19 nt, Homo sapiens
  misc_RNA (1)...(19): siRNA sense strand
cggcaugaaugaagaagga

SEQ ID NO: 154236 - RNA, 19 nt, Homo sapiens
  misc_RNA (1)...(19): siRNA sense strand
ggaauccuauccauaugag

SEQ ID NO: 154237 - RNA, 19 nt, Homo sapiens
  misc_RNA (1)...(19): siRNA sense strand
ugacuccugugaagaauca

SEQ ID NO: 154238 - RNA, 19 nt, Homo sapiens
  misc_RNA (1)...(19): siRNA sense strand
gaacaugaagaugauugaa

SEQ ID NO: 154239 - RNA, 19 nt, Homo sapiens
  misc_RNA (1)...(19): siRNA sense strand
cagaagaauccuguaagua

SEQ ID NO: 154240 - RNA, 19 nt, Homo sapiens
  misc_RNA (1)...(19): siRNA sense strand
caugaccagugaagaauuc

SEQ ID NO: 154241 - RNA, 19 nt, Homo sapiens
  misc_RNA (1)...(19): siRNA sense strand
ggaauacagggaagggaaa

SEQ ID NO: 154242 - RNA, 19 nt, Homo sapiens
  misc_RNA (1)...(19): siRNA sense strand
gaacugcacaaucaggaau

SEQ ID NO: 154243 - RNA, 19 nt, Homo sapiens
  misc_RNA (1)...(19): siRNA sense strand
ucaggcaggugaugaaugg

SEQ ID NO: 154244 - RNA, 19 nt, Homo sapiens
  misc_RNA (1)...(19): siRNA sense strand
acguaaagauggccaaaga

SEQ ID NO: 154245 - RNA, 19 nt, Homo sapiens
  misc_RNA (1)...(19): siRNA sense strand
gcagugaagacauggauca

SEQ ID NO: 154246 - RNA, 19 nt, Homo sapiens
  misc_RNA (1)...(19): siRNA sense strand
gggagaagaacaugaagau

SEQ ID NO: 154247 - RNA, 19 nt, Homo sapiens
  misc_RNA (1)...(19): siRNA sense strand
ggagaaaccauuguggaau

SEQ ID NO: 154248 - RNA, 19 nt, Homo sapiens
  misc_RNA (1)...(19): siRNA sense strand
cuacgugacuccugugaag

SEQ ID NO: 154249 - RNA, 19 nt, Homo sapiens
  misc_RNA (1)...(19): siRNA sense strand
agacaugaccagugaagaa

SEQ ID NO: 154250 - RNA, 19 nt, Homo sapiens
  misc_RNA (1)...(19): siRNA sense strand
ggagaaggcccugaugaag

SEQ ID NO: 154251 - RNA, 19 nt, Homo sapiens
  misc_RNA (1)...(19): siRNA sense strand
gauuaugcuuuccaguaug

SEQ ID NO: 154252 - RNA, 19 nt, Homo sapiens
  misc_RNA (1)...(19): siRNA sense strand
agaagaauccuguaaguac

SEQ ID NO: 154253 - RNA, 19 nt, Homo sapiens
  misc_RNA (1)...(19): siRNA sense strand
cauaugaggcaacagaaga

SEQ ID NO: 154254 - RNA, 19 nt, Homo sapiens
  misc_RNA (1)...(19): siRNA sense strand
aguccuuccuguucuauaa

SEQ ID NO: 154255 - RNA, 19 nt, Homo sapiens
  misc_RNA (1)...(19): siRNA sense strand
cagauuauacggcaugaau

SEQ ID NO: 154256 - RNA, 19 nt, Homo sapiens
  misc_RNA (1)...(19): siRNA sense strand
ggcgaugcacaacagauua

SEQ ID NO: 154257 - RNA, 19 nt, Homo sapiens
  misc_RNA (1)...(19): siRNA sense strand
uuggagacaugaccaguga

SEQ ID NO: 154258 - RNA, 19 nt, Homo sapiens
  misc_RNA (1)...(19): siRNA sense strand
gggaaacacagcuucacaa

SEQ ID NO: 154259 - RNA, 19 nt, Homo sapiens
  misc_RNA (1)...(19): siRNA sense strand
gaagaaucagggucagugu

SEQ ID NO: 154260 - RNA, 19 nt, Homo sapiens
  misc_RNA (1)...(19): siRNA sense strand
agaaaccauuguggaauug

SEQ ID NO: 154261 - RNA, 19 nt, Homo sapiens
  misc_RNA (1)...(19): siRNA sense strand
ccucagcuacucuaacauu

SEQ ID NO: 154262 - RNA, 19 nt, Homo sapiens
  misc_RNA (1)...(19): siRNA sense strand
ugaaagcacagaaucagau

SEQ ID NO: 154263 - RNA, 19 nt, Homo sapiens
  misc_RNA (1)...(19): siRNA sense strand
uauacggcaugaaugaaga

SEQ ID NO: 154264 - RNA, 19 nt, Homo sapiens
  misc_RNA (1)...(19): siRNA sense strand
gaauucaggcaggugauga

SEQ ID NO: 154265 - RNA, 19 nt, Homo sapiens
  misc_RNA (1)...(19): siRNA sense strand
gcaaugguggccuaaugga

SEQ ID NO: 154266 - RNA, 19 nt, Homo sapiens
  misc_RNA (1)...(19): siRNA sense strand
cugcaaugguggccuaaug

SEQ ID NO: 154267 - RNA, 19 nt, Homo sapiens
  misc_RNA (1)...(19): siRNA sense strand
gagcagugugggagaagaa

SEQ ID NO: 154268 - RNA, 19 nt, Homo sapiens
  misc_RNA (1)...(19): siRNA sense strand
gaacagcuggggugaagaa

SEQ ID NO: 154269 - RNA, 19 nt, Homo sapiens
  misc_RNA (1)...(19): siRNA sense strand
cacagaaucagauaacaau

SEQ ID NO: 154270 - RNA, 19 nt, Homo sapiens
  misc_RNA (1)...(19): siRNA sense strand
gcaaugaaggcugcaaugg

SEQ ID NO: 154271 - RNA, 19 nt, Homo sapiens
  misc_RNA (1)...(19): siRNA sense strand
acaugaagaugauugaacu

SEQ ID NO: 154272 - RNA, 19 nt, Homo sapiens
  misc_RNA (1)...(19): siRNA sense strand
gaagaacaugaagaugauu

SEQ ID NO: 154273 - RNA, 19 nt, Homo sapiens
  misc_RNA (1)...(19): siRNA sense strand
ggugguuggcuacggauuu

SEQ ID NO: 154274 - RNA, 19 nt, Homo sapiens
  misc_RNA (1)...(19): siRNA sense strand
gugguuggcuacggauuug

SEQ ID NO: 154275 - RNA, 19 nt, Homo sapiens
  misc_RNA (1)...(19): siRNA sense strand
ggagaagaacaugaagaug

SEQ ID NO: 154276 - RNA, 19 nt, Homo sapiens
  misc_RNA (1)...(19): siRNA sense strand
cggagaaaccauuguggaa

SEQ ID NO: 154277 - RNA, 19 nt, Homo sapiens
  misc_RNA (1)...(19): siRNA sense strand
gcgaugcacaacagauuau

SEQ ID NO: 154278 - RNA, 19 nt, Homo sapiens
  misc_RNA (1)...(19): siRNA sense strand
acucauccuugcugccuuu

SEQ ID NO: 154279 - RNA, 19 nt, Homo sapiens
  misc_RNA (1)...(19): siRNA sense strand
ggagacaugaccagugaag

SEQ ID NO: 154280 - RNA, 19 nt, Homo sapiens
  misc_RNA (1)...(19): siRNA sense strand
ccaggaaccucuguuuuau

SEQ ID NO: 154281 - RNA, 19 nt, Homo sapiens
  misc_RNA (1)...(19): siRNA sense strand
gacaugaccagugaagaau

SEQ ID NO: 154282 - RNA, 19 nt, Homo sapiens
  misc_RNA (1)...(19): siRNA sense strand
ugccucagcuacucuaaca

SEQ ID NO: 154283 - RNA, 19 nt, Homo sapiens
  misc_RNA (1)...(19): siRNA sense strand
aguacaaucccaaguauuc

SEQ ID NO: 154284 - RNA, 19 nt, Homo sapiens
  misc_RNA (1)...(19): siRNA sense strand
ucuaacauuugaucacagu

SEQ ID NO: 154285 - RNA, 19 nt, Homo sapiens
  misc_RNA (1)...(19): siRNA sense strand
aaugguggccuaauggauu

SEQ ID NO: 154286 - RNA, 19 nt, Homo sapiens
  misc_RNA (1)...(19): siRNA sense strand
caaugaaggcugcaauggu

SEQ ID NO: 154287 - RNA, 19 nt, Homo sapiens
  misc_RNA (1)...(19): siRNA sense strand
gaggcacaguggaccaagu

SEQ ID NO: 154288 - RNA, 19 nt, Homo sapiens
  misc_RNA (1)...(19): siRNA sense strand
ggauuugaaagcacagaau

SEQ ID NO: 154289 - RNA, 19 nt, Homo sapiens
  misc_RNA (1)...(19): siRNA sense strand
gcuaaugacaccggcuuug

SEQ ID NO: 154290 - RNA, 19 nt, Homo sapiens
  misc_RNA (1)...(19): siRNA sense strand
auggaggccuggacucuga

SEQ ID NO: 154291 - RNA, 19 nt, Homo sapiens
  misc_RNA (1)...(19): siRNA sense strand
aaucccaaguauucuguug

SEQ ID NO: 154292 - RNA, 19 nt, Homo sapiens
  misc_RNA (1)...(19): siRNA sense strand
ccaaagaccggagaaacca

SEQ ID NO: 154293 - RNA, 19 nt, Homo sapiens
  misc_RNA (1)...(19): siRNA sense strand
caugaguccuuccuguucu

SEQ ID NO: 154294 - RNA, 19 nt, Homo sapiens
  misc_RNA (1)...(19): siRNA sense strand
ucagcuacucuaacauuug

SEQ ID NO: 154295 - RNA, 19 nt, Homo sapiens
  misc_RNA (1)...(19): siRNA sense strand
aaagaccggagaaaccauu

SEQ ID NO: 154296 - RNA, 19 nt, Homo sapiens
  misc_RNA (1)...(19): siRNA sense strand
cucagcuacucuaacauuu

SEQ ID NO: 154297 - RNA, 19 nt, Homo sapiens
  misc_RNA (1)...(19): siRNA sense strand
gcaggugaugaauggcuuu

SEQ ID NO: 154298 - RNA, 19 nt, Homo sapiens
  misc_RNA (1)...(19): siRNA sense strand
uaaugacaccggcuuugug

SEQ ID NO: 154299 - RNA, 19 nt, Homo sapiens
  misc_RNA (1)...(19): siRNA sense strand
ggccuggacucugaggaau

SEQ ID NO: 154300 - RNA, 19 nt, Homo sapiens
  misc_RNA (1)...(19): siRNA sense strand
agagaaaggcuacgugacu

SEQ ID NO: 154301 - RNA, 19 nt, Homo sapiens
  misc_RNA (1)...(19): siRNA sense strand
aggaaccucuguuuuauga

SEQ ID NO: 154302 - RNA, 19 nt, Homo sapiens
  misc_RNA (1)...(19): siRNA sense strand
gcucuugaaggacagaugu

SEQ ID NO: 154303 - RNA, 19 nt, Homo sapiens
  misc_RNA (1)...(19): siRNA sense strand
gaaggcgaugcacaacaga

SEQ ID NO: 154304 - RNA, 19 nt, Homo sapiens
  misc_RNA (1)...(19): siRNA sense strand
gcauggguggcuacguaaa

SEQ ID NO: 154305 - RNA, 19 nt, Homo sapiens
  misc_RNA (1)...(19): siRNA sense strand
ucaugaguccuuccuguuc

SEQ ID NO: 154306 - RNA, 19 nt, Homo sapiens
  misc_RNA (1)...(19): siRNA sense strand
ccaguauguucaggauaau

SEQ ID NO: 154307 - RNA, 19 nt, Homo sapiens
  misc_RNA (1)...(19): siRNA sense strand
aggagaaggcccugaugaa

SEQ ID NO: 154308 - RNA, 19 nt, Homo sapiens
  misc_RNA (1)...(19): siRNA sense strand
gaccggagaaaccauugug

SEQ ID NO: 154309 - RNA, 19 nt, Homo sapiens
  misc_RNA (1)...(19): siRNA sense strand
gggaagggaaacacagcuu

SEQ ID NO: 154310 - RNA, 19 nt, Homo sapiens
  misc_RNA (1)...(19): siRNA sense strand
gagaaaccauuguggaauu

SEQ ID NO: 154311 - RNA, 19 nt, Homo sapiens
  misc_RNA (1)...(19): siRNA sense strand
aaacacagcuucacaaugg

SEQ ID NO: 154312 - RNA, 19 nt, Homo sapiens
  misc_RNA (1)...(19): siRNA sense strand
gagaagaacaugaagauga

SEQ ID NO: 154313 - RNA, 19 nt, Homo sapiens
  misc_RNA (1)...(19): siRNA sense strand
gggcauggguggcuacgua

SEQ ID NO: 154314 - RNA, 19 nt, Homo sapiens
  misc_RNA (1)...(19): siRNA sense strand
ggauuaugcuuuccaguau

SEQ ID NO: 154315 - RNA, 19 nt, Homo sapiens
  misc_RNA (1)...(19): siRNA sense strand
ggacagauguuccggaaaa

SEQ ID NO: 154316 - RNA, 19 nt, Homo sapiens
  misc_RNA (1)...(19): siRNA sense strand
aauauuggcuggugaagaa

SEQ ID NO: 154317 - RNA, 19 nt, Homo sapiens
  misc_RNA (1)...(19): siRNA sense strand
guaaguacaaucccaagua

SEQ ID NO: 154318 - RNA, 19 nt, Homo sapiens
  misc_RNA (1)...(19): siRNA sense strand
gaaagcacagaaucagaua

SEQ ID NO: 154319 - RNA, 19 nt, Homo sapiens
  misc_RNA (1)...(19): siRNA sense strand
uaaguacaaucccaaguau

SEQ ID NO: 154320 - RNA, 19 nt, Homo sapiens
  misc_RNA (1)...(19): siRNA sense strand
cagcuacucuaacauuuga

SEQ ID NO: 154321 - RNA, 19 nt, Homo sapiens
  misc_RNA (1)...(19): siRNA sense strand
gaacgccuuuggagacaug

SEQ ID NO: 154322 - RNA, 19 nt, Homo sapiens
  misc_RNA (1)...(19): siRNA sense strand
gcacagaaucagauaacaa

SEQ ID NO: 154323 - RNA, 19 nt, Homo sapiens
  misc_RNA (1)...(19): siRNA sense strand
gauuauacggcaugaauga

SEQ ID NO: 154324 - RNA, 19 nt, Homo sapiens
  misc_RNA (1)...(19): siRNA sense strand
gaaacacagcuucacaaug

SEQ ID NO: 154325 - RNA, 19 nt, Homo sapiens
  misc_RNA (1)...(19): siRNA sense strand
caaguauucuguugcuaau

SEQ ID NO: 154326 - RNA, 19 nt, Homo sapiens
  misc_RNA (1)...(19): siRNA sense strand
ggagagcagugugggagaa

SEQ ID NO: 154327 - RNA, 19 nt, Homo sapiens
  misc_RNA (1)...(19): siRNA sense strand
gcccauuucuguugcuauu

SEQ ID NO: 154328 - RNA, 19 nt, Homo sapiens
  misc_RNA (1)...(19): siRNA sense strand
ccaaguauucuguugcuaa

SEQ ID NO: 154329 - RNA, 19 nt, Homo sapiens
  misc_RNA (1)...(19): siRNA sense strand
agaagaacaugaagaugau

SEQ ID NO: 154330 - RNA, 19 nt, Homo sapiens
  misc_RNA (1)...(19): siRNA sense strand
ccauuucuguugcuauuga

SEQ ID NO: 154331 - RNA, 19 nt, Homo sapiens
  misc_RNA (1)...(19): siRNA sense strand
uccaguauguucaggauaa

SEQ ID NO: 154332 - RNA, 19 nt, Homo sapiens
  misc_RNA (1)...(19): siRNA sense strand
ggaauugccucagcuacuc

SEQ ID NO: 154333 - RNA, 19 nt, Homo sapiens
  misc_RNA (1)...(19): siRNA sense strand
ggaaacacagcuucacaau

SEQ ID NO: 154334 - RNA, 19 nt, Homo sapiens
  misc_RNA (1)...(19): siRNA sense strand
aguauucuguugcuaauga

SEQ ID NO: 154335 - RNA, 19 nt, Homo sapiens
  misc_RNA (1)...(19): siRNA sense strand
cggcaugaaugaagaagga

SEQ ID NO: 154336 - RNA, 19 nt, Homo sapiens
  misc_RNA (1)...(19): siRNA sense strand
ggaauccuauccauaugag

SEQ ID NO: 154337 - RNA, 19 nt, Homo sapiens
  misc_RNA (1)...(19): siRNA sense strand
ugacuccugugaagaauca

SEQ ID NO: 154338 - RNA, 19 nt, Homo sapiens
  misc_RNA (1)...(19): siRNA sense strand
gaacaugaagaugauugaa

SEQ ID NO: 154339 - RNA, 19 nt, Homo sapiens
  misc_RNA (1)...(19): siRNA sense strand
cagaagaauccuguaagua

SEQ ID NO: 154340 - RNA, 19 nt, Homo sapiens
  misc_RNA (1)...(19): siRNA sense strand
caugaccagugaagaauuc

SEQ ID NO: 154341 - RNA, 19 nt, Homo sapiens
  misc_RNA (1)...(19): siRNA sense strand
ggaauacagggaagggaaa

SEQ ID NO: 154342 - RNA, 19 nt, Homo sapiens
  misc_RNA (1)...(19): siRNA sense strand
gaacugcacaaucaggaau

SEQ ID NO: 154343 - RNA, 19 nt, Homo sapiens
  misc_RNA (1)...(19): siRNA sense strand
ucaggcaggugaugaaugg

SEQ ID NO: 154344 - RNA, 19 nt, Homo sapiens
  misc_RNA (1)...(19): siRNA sense strand
acguaaagauggccaaaga

SEQ ID NO: 154345 - RNA, 19 nt, Homo sapiens
  misc_RNA (1)...(19): siRNA sense strand
gcagugaagacauggauca

SEQ ID NO: 154346 - RNA, 19 nt, Homo sapiens
  misc_RNA (1)...(19): siRNA sense strand
gggagaagaacaugaagau

SEQ ID NO: 154347 - RNA, 19 nt, Homo sapiens
  misc_RNA (1)...(19): siRNA sense strand
ggagaaaccauuguggaau

SEQ ID NO: 154348 - RNA, 19 nt, Homo sapiens
  misc_RNA (1)...(19): siRNA sense strand
cuacgugacuccugugaag

SEQ ID NO: 154349 - RNA, 19 nt, Homo sapiens
  misc_RNA (1)...(19): siRNA sense strand
agacaugaccagugaagaa

SEQ ID NO: 154350 - RNA, 19 nt, Homo sapiens
  misc_RNA (1)...(19): siRNA sense strand
ggagaaggcccugaugaag

SEQ ID NO: 154351 - RNA, 19 nt, Homo sapiens
  misc_RNA (1)...(19): siRNA sense strand
gauuaugcuuuccaguaug

SEQ ID NO: 154352 - RNA, 19 nt, Homo sapiens
  misc_RNA (1)...(19): siRNA sense strand
agaagaauccuguaaguac

SEQ ID NO: 154353 - RNA, 19 nt, Homo sapiens
  misc_RNA (1)...(19): siRNA sense strand
cauaugaggcaacagaaga

SEQ ID NO: 154354 - RNA, 19 nt, Homo sapiens
  misc_RNA (1)...(19): siRNA sense strand
aguccuuccuguucuauaa

SEQ ID NO: 154355 - RNA, 19 nt, Homo sapiens
  misc_RNA (1)...(19): siRNA sense strand
cagauuauacggcaugaau

SEQ ID NO: 154356 - RNA, 19 nt, Homo sapiens
  misc_RNA (1)...(19): siRNA sense strand
ggcgaugcacaacagauua

SEQ ID NO: 154357 - RNA, 19 nt, Homo sapiens
  misc_RNA (1)...(19): siRNA sense strand
uuggagacaugaccaguga

SEQ ID NO: 154358 - RNA, 19 nt, Homo sapiens
  misc_RNA (1)...(19): siRNA sense strand
gggaaacacagcuucacaa

SEQ ID NO: 154359 - RNA, 19 nt, Homo sapiens
  misc_RNA (1)...(19): siRNA sense strand
gaagaaucagggucagugu

SEQ ID NO: 154360 - RNA, 19 nt, Homo sapiens
  misc_RNA (1)...(19): siRNA sense strand
agaaaccauuguggaauug

SEQ ID NO: 154361 - RNA, 19 nt, Homo sapiens
  misc_RNA (1)...(19): siRNA sense strand
ccucagcuacucuaacauu

SEQ ID NO: 154362 - RNA, 19 nt, Homo sapiens
  misc_RNA (1)...(19): siRNA sense strand
ugaaagcacagaaucagau

SEQ ID NO: 154363 - RNA, 19 nt, Homo sapiens
  misc_RNA (1)...(19): siRNA sense strand
uauacggcaugaaugaaga

SEQ ID NO: 154364 - RNA, 19 nt, Homo sapiens
  misc_RNA (1)...(19): siRNA sense strand
gaauucaggcaggugauga

SEQ ID NO: 154365 - RNA, 19 nt, Homo sapiens
  misc_RNA (1)...(19): siRNA sense strand
gcaaugguggccuaaugga

SEQ ID NO: 154366 - RNA, 19 nt, Homo sapiens
  misc_RNA (1)...(19): siRNA sense strand
cugcaaugguggccuaaug

SEQ ID NO: 154367 - RNA, 19 nt, Homo sapiens
  misc_RNA (1)...(19): siRNA sense strand
gagcagugugggagaagaa

SEQ ID NO: 154368 - RNA, 19 nt, Homo sapiens
  misc_RNA (1)...(19): siRNA sense strand
gaacagcuggggugaagaa

SEQ ID NO: 154369 - RNA, 19 nt, Homo sapiens
  misc_RNA (1)...(19): siRNA sense strand
cacagaaucagauaacaau

SEQ ID NO: 154370 - RNA, 19 nt, Homo sapiens
  misc_RNA (1)...(19): siRNA sense strand
gcaaugaaggcugcaaugg

SEQ ID NO: 154371 - RNA, 19 nt, Homo sapiens
  misc_RNA (1)...(19): siRNA sense strand
acaugaagaugauugaacu

SEQ ID NO: 154372 - RNA, 19 nt, Homo sapiens
  misc_RNA (1)...(19): siRNA sense strand
gaagaacaugaagaugauu

SEQ ID NO: 154373 - RNA, 19 nt, Homo sapiens
  misc_RNA (1)...(19): siRNA sense strand
ggugguuggcuacggauuu

SEQ ID NO: 154374 - RNA, 19 nt, Homo sapiens
  misc_RNA (1)...(19): siRNA sense strand
gugguuggcuacggauuug

SEQ ID NO: 154375 - RNA, 19 nt, Homo sapiens
  misc_RNA (1)...(19): siRNA sense strand
ggagaagaacaugaagaug

SEQ ID NO: 154376 - RNA, 19 nt, Homo sapiens
  misc_RNA (1)...(19): siRNA sense strand
cggagaaaccauuguggaa

SEQ ID NO: 154377 - RNA, 19 nt, Homo sapiens
  misc_RNA (1)...(19): siRNA sense strand
gcgaugcacaacagauuau

SEQ ID NO: 154378 - RNA, 19 nt, Homo sapiens
  misc_RNA (1)...(19): siRNA sense strand
acucauccuugcugccuuu

SEQ ID NO: 154379 - RNA, 19 nt, Homo sapiens
  misc_RNA (1)...(19): siRNA sense strand
ggagacaugaccagugaag

SEQ ID NO: 154380 - RNA, 19 nt, Homo sapiens
  misc_RNA (1)...(19): siRNA sense strand
ccaggaaccucuguuuuau

SEQ ID NO: 154381 - RNA, 19 nt, Homo sapiens
  misc_RNA (1)...(19): siRNA sense strand
gacaugaccagugaagaau

SEQ ID NO: 154382 - RNA, 19 nt, Homo sapiens
  misc_RNA (1)...(19): siRNA sense strand
ugccucagcuacucuaaca

SEQ ID NO: 154383 - RNA, 19 nt, Homo sapiens
  misc_RNA (1)...(19): siRNA sense strand
aguacaaucccaaguauuc

SEQ ID NO: 154384 - RNA, 19 nt, Homo sapiens
  misc_RNA (1)...(19): siRNA sense strand
ucuaacauuugaucacagu

SEQ ID NO: 154385 - RNA, 19 nt, Homo sapiens
  misc_RNA (1)...(19): siRNA sense strand
aaugguggccuaauggauu

SEQ ID NO: 154386 - RNA, 19 nt, Homo sapiens
  misc_RNA (1)...(19): siRNA sense strand
caaugaaggcugcaauggu

SEQ ID NO: 154387 - RNA, 19 nt, Homo sapiens
  misc_RNA (1)...(19): siRNA sense strand
gaggcacaguggaccaagu

SEQ ID NO: 154388 - RNA, 19 nt, Homo sapiens
  misc_RNA (1)...(19): siRNA sense strand
ggauuugaaagcacagaau

SEQ ID NO: 154389 - RNA, 19 nt, Homo sapiens
  misc_RNA (1)...(19): siRNA sense strand
gcuaaugacaccggcuuug

SEQ ID NO: 154390 - RNA, 19 nt, Homo sapiens
  misc_RNA (1)...(19): siRNA sense strand
auggaggccuggacucuga

SEQ ID NO: 154391 - RNA, 19 nt, Homo sapiens
  misc_RNA (1)...(19): siRNA sense strand
aaucccaaguauucuguug

SEQ ID NO: 154392 - RNA, 19 nt, Homo sapiens
  misc_RNA (1)...(19): siRNA sense strand
ccaaagaccggagaaacca

SEQ ID NO: 154393 - RNA, 19 nt, Homo sapiens
  misc_RNA (1)...(19): siRNA sense strand
caugaguccuuccuguucu

SEQ ID NO: 154394 - RNA, 19 nt, Homo sapiens
  misc_RNA (1)...(19): siRNA sense strand
ucagcuacucuaacauuug

SEQ ID NO: 154395 - RNA, 19 nt, Homo sapiens
  misc_RNA (1)...(19): siRNA sense strand
aaagaccggagaaaccauu

SEQ ID NO: 154396 - RNA, 19 nt, Homo sapiens
  misc_RNA (1)...(19): siRNA sense strand
cucagcuacucuaacauuu

SEQ ID NO: 154397 - RNA, 19 nt, Homo sapiens
  misc_RNA (1)...(19): siRNA sense strand
gcaggugaugaauggcuuu

SEQ ID NO: 154398 - RNA, 19 nt, Homo sapiens
  misc_RNA (1)...(19): siRNA sense strand
uaaugacaccggcuuugug

SEQ ID NO: 154399 - RNA, 19 nt, Homo sapiens
  misc_RNA (1)...(19): siRNA sense strand
ggccuggacucugaggaau

SEQ ID NO: 154400 - RNA, 19 nt, Homo sapiens
  misc_RNA (1)...(19): siRNA sense strand
agagaaaggcuacgugacu

SEQ ID NO: 154401 - RNA, 19 nt, Homo sapiens
  misc_RNA (1)...(19): siRNA sense strand
aggaaccucuguuuuauga

SEQ ID NO: 154402 - RNA, 19 nt, Homo sapiens
  misc_RNA (1)...(19): siRNA sense strand
gcucuugaaggacagaugu

SEQ ID NO: 154403 - RNA, 19 nt, Homo sapiens
  misc_RNA (1)...(19): siRNA sense strand
gaaggcgaugcacaacaga

SEQ ID NO: 154404 - RNA, 19 nt, Homo sapiens
  misc_RNA (1)...(19): siRNA sense strand
gcauggguggcuacguaaa

SEQ ID NO: 154405 - RNA, 19 nt, Homo sapiens
  misc_RNA (1)...(19): siRNA sense strand
ucaugaguccuuccuguuc

SEQ ID NO: 154406 - RNA, 19 nt, Homo sapiens
  misc_RNA (1)...(19): siRNA sense strand
ccaguauguucaggauaau

SEQ ID NO: 154407 - RNA, 19 nt, Homo sapiens
  misc_RNA (1)...(19): siRNA sense strand
aggagaaggcccugaugaa

SEQ ID NO: 154408 - RNA, 19 nt, Homo sapiens
  misc_RNA (1)...(19): siRNA sense strand
gaccggagaaaccauugug

SEQ ID NO: 154409 - RNA, 19 nt, Homo sapiens
  misc_RNA (1)...(19): siRNA sense strand
gggaagggaaacacagcuu

SEQ ID NO: 154410 - RNA, 19 nt, Homo sapiens
  misc_RNA (1)...(19): siRNA sense strand
gaacagaaguuacagaaug

SEQ ID NO: 154411 - RNA, 19 nt, Homo sapiens
  misc_RNA (1)...(19): siRNA sense strand
gggaaacucuggaagaaua

SEQ ID NO: 154412 - RNA, 19 nt, Homo sapiens
  misc_RNA (1)...(19): siRNA sense strand
ggaauuugcugaagugaaa

SEQ ID NO: 154413 - RNA, 19 nt, Homo sapiens
  misc_RNA (1)...(19): siRNA sense strand
gaaccaagccgaaaccaua

SEQ ID NO: 154414 - RNA, 19 nt, Homo sapiens
  misc_RNA (1)...(19): siRNA sense strand
gaagaacacuccagaggau

SEQ ID NO: 154415 - RNA, 19 nt, Homo sapiens
  misc_RNA (1)...(19): siRNA sense strand
caaauacgaugaagaaacu

SEQ ID NO: 154416 - RNA, 19 nt, Homo sapiens
  misc_RNA (1)...(19): siRNA sense strand
gaagaaagagcugaacauu

SEQ ID NO: 154417 - RNA, 19 nt, Homo sapiens
  misc_RNA (1)...(19): siRNA sense strand
acagagaaccagaaacuua

SEQ ID NO: 154418 - RNA, 19 nt, Homo sapiens
  misc_RNA (1)...(19): siRNA sense strand
ggaggaagcugagcauaag

SEQ ID NO: 154419 - RNA, 19 nt, Homo sapiens
  misc_RNA (1)...(19): siRNA sense strand
cagaaugacuuugcagaaa

SEQ ID NO: 154420 - RNA, 19 nt, Homo sapiens
  misc_RNA (1)...(19): siRNA sense strand
caaggaauuugcugaagug

SEQ ID NO: 154421 - RNA, 19 nt, Homo sapiens
  misc_RNA (1)...(19): siRNA sense strand
ggaagaauacaacaaggaa

SEQ ID NO: 154422 - RNA, 19 nt, Homo sapiens
  misc_RNA (1)...(19): siRNA sense strand
ccauagcucuugagaagga

SEQ ID NO: 154423 - RNA, 19 nt, Homo sapiens
  misc_RNA (1)...(19): siRNA sense strand
ugaagaaacuacugcaaag

SEQ ID NO: 154424 - RNA, 19 nt, Homo sapiens
  misc_RNA (1)...(19): siRNA sense strand
aaagugagcaguccagaaa

SEQ ID NO: 154425 - RNA, 19 nt, Homo sapiens
  misc_RNA (1)...(19): siRNA sense strand
gcugaagaguuuccaagga

SEQ ID NO: 154426 - RNA, 19 nt, Homo sapiens
  misc_RNA (1)...(19): siRNA sense strand
augaagaggugaagaaaga

SEQ ID NO: 154427 - RNA, 19 nt, Homo sapiens
  misc_RNA (1)...(19): siRNA sense strand
ucaaacaacuggaagaaaa

SEQ ID NO: 154428 - RNA, 19 nt, Homo sapiens
  misc_RNA (1)...(19): siRNA sense strand
aaccauagcucuugagaag

SEQ ID NO: 154429 - RNA, 19 nt, Homo sapiens
  misc_RNA (1)...(19): siRNA sense strand
gaauaugaacagacacuga

SEQ ID NO: 154430 - RNA, 19 nt, Homo sapiens
  misc_RNA (1)...(19): siRNA sense strand
caacaaggaauuugcugaa

SEQ ID NO: 154431 - RNA, 19 nt, Homo sapiens
  misc_RNA (1)...(19): siRNA sense strand
gaucaugacggaccuugaa

SEQ ID NO: 154432 - RNA, 19 nt, Homo sapiens
  misc_RNA (1)...(19): siRNA sense strand
gagagaggcggagaccuua

SEQ ID NO: 154433 - RNA, 19 nt, Homo sapiens
  misc_RNA (1)...(19): siRNA sense strand
gaaagugagcaguccagaa

SEQ ID NO: 154434 - RNA, 19 nt, Homo sapiens
  misc_RNA (1)...(19): siRNA sense strand
gagauugaaaugaucauga

SEQ ID NO: 154435 - RNA, 19 nt, Homo sapiens
  misc_RNA (1)...(19): siRNA sense strand
ucaccaagcugcgggagaa

SEQ ID NO: 154436 - RNA, 19 nt, Homo sapiens
  misc_RNA (1)...(19): siRNA sense strand
gccgggaguucaagaagaa

SEQ ID NO: 154437 - RNA, 19 nt, Homo sapiens
  misc_RNA (1)...(19): siRNA sense strand
uagggaaacucuggaagaa

SEQ ID NO: 154438 - RNA, 19 nt, Homo sapiens
  misc_RNA (1)...(19): siRNA sense strand
aaacagcacacucaaacaa

SEQ ID NO: 154439 - RNA, 19 nt, Homo sapiens
  misc_RNA (1)...(19): siRNA sense strand
gagcugaacauucugaagu

SEQ ID NO: 154440 - RNA, 19 nt, Homo sapiens
  misc_RNA (1)...(19): siRNA sense strand
gacagcaacuccagcucaa

SEQ ID NO: 154441 - RNA, 19 nt, Homo sapiens
  misc_RNA (1)...(19): siRNA sense strand
aacagaaguuacagaauga

SEQ ID NO: 154442 - RNA, 19 nt, Homo sapiens
  misc_RNA (1)...(19): siRNA sense strand
ugagaaggaacagaaguua

SEQ ID NO: 154443 - RNA, 19 nt, Homo sapiens
  misc_RNA (1)...(19): siRNA sense strand
gaaaccauagcucuugaga

SEQ ID NO: 154444 - RNA, 19 nt, Homo sapiens
  misc_RNA (1)...(19): siRNA sense strand
aucaagagguuacgauaaa

SEQ ID NO: 154445 - RNA, 19 nt, Homo sapiens
  misc_RNA (1)...(19): siRNA sense strand
guucagagccuacaaacag

SEQ ID NO: 154446 - RNA, 19 nt, Homo sapiens
  misc_RNA (1)...(19): siRNA sense strand
gcagcuuucuugaaugucu

SEQ ID NO: 154447 - RNA, 19 nt, Homo sapiens
  misc_RNA (1)...(19): siRNA sense strand
cgacgagauugaaaugauc

SEQ ID NO: 154448 - RNA, 19 nt, Homo sapiens
  misc_RNA (1)...(19): siRNA sense strand
ccgagaauaugaacagaca

SEQ ID NO: 154449 - RNA, 19 nt, Homo sapiens
  misc_RNA (1)...(19): siRNA sense strand
gaauacaacaaggaauuug

SEQ ID NO: 154450 - RNA, 19 nt, Homo sapiens
  misc_RNA (1)...(19): siRNA sense strand
aaacagagaaccagaaacu

SEQ ID NO: 154451 - RNA, 19 nt, Homo sapiens
  misc_RNA (1)...(19): siRNA sense strand
ugaaacagagaaccagaaa

SEQ ID NO: 154452 - RNA, 19 nt, Homo sapiens
  misc_RNA (1)...(19): siRNA sense strand
gcuccagccuagaaguuga

SEQ ID NO: 154453 - RNA, 19 nt, Homo sapiens
  misc_RNA (1)...(19): siRNA sense strand
ucaaaggccaggcugacua

SEQ ID NO: 154454 - RNA, 19 nt, Homo sapiens
  misc_RNA (1)...(19): siRNA sense strand
gaacacuccagaggauuug

SEQ ID NO: 154455 - RNA, 19 nt, Homo sapiens
  misc_RNA (1)...(19): siRNA sense strand
caaaggccgacgagauuga

SEQ ID NO: 154456 - RNA, 19 nt, Homo sapiens
  misc_RNA (1)...(19): siRNA sense strand
gcaaaggccgacgagauug

SEQ ID NO: 154457 - RNA, 19 nt, Homo sapiens
  misc_RNA (1)...(19): siRNA sense strand
gauaaaagcacuuaaagag

SEQ ID NO: 154458 - RNA, 19 nt, Homo sapiens
  misc_RNA (1)...(19): siRNA sense strand
acaaggaauuugcugaagu

SEQ ID NO: 154459 - RNA, 19 nt, Homo sapiens
  misc_RNA (1)...(19): siRNA sense strand
gaagaauacaacaaggaau

SEQ ID NO: 154460 - RNA, 19 nt, Homo sapiens
  misc_RNA (1)...(19): siRNA sense strand
gagauugaugcacugagua

SEQ ID NO: 154461 - RNA, 19 nt, Homo sapiens
  misc_RNA (1)...(19): siRNA sense strand
ccgacgagauugaaaugau

SEQ ID NO: 154462 - RNA, 19 nt, Homo sapiens
  misc_RNA (1)...(19): siRNA sense strand
gaaaauccgagaauaugaa

SEQ ID NO: 154463 - RNA, 19 nt, Homo sapiens
  misc_RNA (1)...(19): siRNA sense strand
aaccaaauacgaugaagaa

SEQ ID NO: 154464 - RNA, 19 nt, Homo sapiens
  misc_RNA (1)...(19): siRNA sense strand
gaaagcugcaggagacaca

SEQ ID NO: 154465 - RNA, 19 nt, Homo sapiens
  misc_RNA (1)...(19): siRNA sense strand
aaucaagagguuacgauaa

SEQ ID NO: 154466 - RNA, 19 nt, Homo sapiens
  misc_RNA (1)...(19): siRNA sense strand
caaaggccaggcugacuau

SEQ ID NO: 154467 - RNA, 19 nt, Homo sapiens
  misc_RNA (1)...(19): siRNA sense strand
cuacaaacagcccuggaaa

SEQ ID NO: 154468 - RNA, 19 nt, Homo sapiens
  misc_RNA (1)...(19): siRNA sense strand
ccgaaaccauagcucuuga

SEQ ID NO: 154469 - RNA, 19 nt, Homo sapiens
  misc_RNA (1)...(19): siRNA sense strand
ggaacagaaguuacagaau

SEQ ID NO: 154470 - RNA, 19 nt, Homo sapiens
  misc_RNA (1)...(19): siRNA sense strand
cagaauuauuugaccugaa

SEQ ID NO: 154471 - RNA, 19 nt, Homo sapiens
  misc_RNA (1)...(19): siRNA sense strand
uggaggaagcugagcauaa

SEQ ID NO: 154472 - RNA, 19 nt, Homo sapiens
  misc_RNA (1)...(19): siRNA sense strand
aaaucaagagguuacgaua

SEQ ID NO: 154473 - RNA, 19 nt, Homo sapiens
  misc_RNA (1)...(19): siRNA sense strand
gaaccggcaggaugaaagu

SEQ ID NO: 154474 - RNA, 19 nt, Homo sapiens
  misc_RNA (1)...(19): siRNA sense strand
uaagggaacagcucucauc

SEQ ID NO: 154475 - RNA, 19 nt, Homo sapiens
  misc_RNA (1)...(19): siRNA sense strand
ccaaauacgaugaagaaac

SEQ ID NO: 154476 - RNA, 19 nt, Homo sapiens
  misc_RNA (1)...(19): siRNA sense strand
cagccuagaaguugaguug

SEQ ID NO: 154477 - RNA, 19 nt, Homo sapiens
  misc_RNA (1)...(19): siRNA sense strand
agagauugaugcacugagu

SEQ ID NO: 154478 - RNA, 19 nt, Homo sapiens
  misc_RNA (1)...(19): siRNA sense strand
cgccgcugcugaagaguuu

SEQ ID NO: 154479 - RNA, 19 nt, Homo sapiens
  misc_RNA (1)...(19): siRNA sense strand
ugcaaaggccgacgagauu

SEQ ID NO: 154480 - RNA, 19 nt, Homo sapiens
  misc_RNA (1)...(19): siRNA sense strand
gaugaagaaacuacugcaa

SEQ ID NO: 154481 - RNA, 19 nt, Homo sapiens
  misc_RNA (1)...(19): siRNA sense strand
agaaggaacagaaguuaca

SEQ ID NO: 154482 - RNA, 19 nt, Homo sapiens
  misc_RNA (1)...(19): siRNA sense strand
cagagaaccagaaacuuag

SEQ ID NO: 154483 - RNA, 19 nt, Homo sapiens
  misc_RNA (1)...(19): siRNA sense strand
ugaaguccauggaguuugc

SEQ ID NO: 154484 - RNA, 19 nt, Homo sapiens
  misc_RNA (1)...(19): siRNA sense strand
aggccaggcugacuaugaa

SEQ ID NO: 154485 - RNA, 19 nt, Homo sapiens
  misc_RNA (1)...(19): siRNA sense strand
gagaaaauccgagaauaug

SEQ ID NO: 154486 - RNA, 19 nt, Homo sapiens
  misc_RNA (1)...(19): siRNA sense strand
gcaacuccagcucaaagug

SEQ ID NO: 154487 - RNA, 19 nt, Homo sapiens
  misc_RNA (1)...(19): siRNA sense strand
agaacacuccagaggauuu

SEQ ID NO: 154488 - RNA, 19 nt, Homo sapiens
  misc_RNA (1)...(19): siRNA sense strand
gaagaaacuacugcaaagg

SEQ ID NO: 154489 - RNA, 19 nt, Homo sapiens
  misc_RNA (1)...(19): siRNA sense strand
ggaagcugagcauaagguu

SEQ ID NO: 154490 - RNA, 19 nt, Homo sapiens
  misc_RNA (1)...(19): siRNA sense strand
cagaucccguaccagcuuu

SEQ ID NO: 154491 - RNA, 19 nt, Homo sapiens
  misc_RNA (1)...(19): siRNA sense strand
agagagaggcggagaccuu

SEQ ID NO: 154492 - RNA, 19 nt, Homo sapiens
  misc_RNA (1)...(19): siRNA sense strand
aagcugagcauaagguuca

SEQ ID NO: 154493 - RNA, 19 nt, Homo sapiens
  misc_RNA (1)...(19): siRNA sense strand
agaaugacuuugcagaaaa

SEQ ID NO: 154494 - RNA, 19 nt, Homo sapiens
  misc_RNA (1)...(19): siRNA sense strand
aaccagaaacuuagggaaa

SEQ ID NO: 154495 - RNA, 19 nt, Homo sapiens
  misc_RNA (1)...(19): siRNA sense strand
gaauucggccagccagauc

SEQ ID NO: 154496 - RNA, 19 nt, Homo sapiens
  misc_RNA (1)...(19): siRNA sense strand
ggagagauugaugcacuga

SEQ ID NO: 154497 - RNA, 19 nt, Homo sapiens
  misc_RNA (1)...(19): siRNA sense strand
aauaugaacagacacugaa

SEQ ID NO: 154498 - RNA, 19 nt, Homo sapiens
  misc_RNA (1)...(19): siRNA sense strand
ugcacgauauugaaacaga

SEQ ID NO: 154499 - RNA, 19 nt, Homo sapiens
  misc_RNA (1)...(19): siRNA sense strand
aagaaagagcugaacauuc

SEQ ID NO: 154500 - RNA, 19 nt, Homo sapiens
  misc_RNA (1)...(19): siRNA sense strand
gaaaaccaaauacgaugaa

SEQ ID NO: 154501 - RNA, 19 nt, Homo sapiens
  misc_RNA (1)...(19): siRNA sense strand
acagaaugacuuugcagaa

SEQ ID NO: 154502 - RNA, 19 nt, Homo sapiens
  misc_RNA (1)...(19): siRNA sense strand
cagcuuucuugaaugucua

SEQ ID NO: 154503 - RNA, 19 nt, Homo sapiens
  misc_RNA (1)...(19): siRNA sense strand
gagaauaugaacagacacu

SEQ ID NO: 154504 - RNA, 19 nt, Homo sapiens
  misc_RNA (1)...(19): siRNA sense strand
ccaagcugcgggagaauuc

SEQ ID NO: 154505 - RNA, 19 nt, Homo sapiens
  misc_RNA (1)...(19): siRNA sense strand
ugaacauucugaaguccau

SEQ ID NO: 154506 - RNA, 19 nt, Homo sapiens
  misc_RNA (1)...(19): siRNA sense strand
aaagagcugaacauucuga

SEQ ID NO: 154507 - RNA, 19 nt, Homo sapiens
  misc_RNA (1)...(19): siRNA sense strand
ccagaucccguaccagcuu

SEQ ID NO: 154508 - RNA, 19 nt, Homo sapiens
  misc_RNA (1)...(19): siRNA sense strand
agauugaugcacugaguaa

SEQ ID NO: 154509 - RNA, 19 nt, Homo sapiens
  misc_RNA (1)...(19): siRNA sense strand
ugaagaaagagcugaacau

SEQ ID NO: 154510 - RNA, 19 nt, Homo sapiens
  misc_RNA (1)...(19): siRNA sense strand
gaacagaaguuacagaaug

SEQ ID NO: 154511 - RNA, 19 nt, Homo sapiens
  misc_RNA (1)...(19): siRNA sense strand
gggaaacucuggaagaaua

SEQ ID NO: 154512 - RNA, 19 nt, Homo sapiens
  misc_RNA (1)...(19): siRNA sense strand
ggaauuugcugaagugaaa

SEQ ID NO: 154513 - RNA, 19 nt, Homo sapiens
  misc_RNA (1)...(19): siRNA sense strand
gaaccaagccgaaaccaua

SEQ ID NO: 154514 - RNA, 19 nt, Homo sapiens
  misc_RNA (1)...(19): siRNA sense strand
gaagaacacuccagaggau

SEQ ID NO: 154515 - RNA, 19 nt, Homo sapiens
  misc_RNA (1)...(19): siRNA sense strand
caaauacgaugaagaaacu

SEQ ID NO: 154516 - RNA, 19 nt, Homo sapiens
  misc_RNA (1)...(19): siRNA sense strand
gaagaaagagcugaacauu

SEQ ID NO: 154517 - RNA, 19 nt, Homo sapiens
  misc_RNA (1)...(19): siRNA sense strand
acagagaaccagaaacuua

SEQ ID NO: 154518 - RNA, 19 nt, Homo sapiens
  misc_RNA (1)...(19): siRNA sense strand
ggaggaagcugagcauaag

SEQ ID NO: 154519 - RNA, 19 nt, Homo sapiens
  misc_RNA (1)...(19): siRNA sense strand
cagaaugacuuugcagaaa

SEQ ID NO: 154520 - RNA, 19 nt, Homo sapiens
  misc_RNA (1)...(19): siRNA sense strand
caaggaauuugcugaagug

SEQ ID NO: 154521 - RNA, 19 nt, Homo sapiens
  misc_RNA (1)...(19): siRNA sense strand
ggaagaauacaacaaggaa

SEQ ID NO: 154522 - RNA, 19 nt, Homo sapiens
  misc_RNA (1)...(19): siRNA sense strand
ccauagcucuugagaagga

SEQ ID NO: 154523 - RNA, 19 nt, Homo sapiens
  misc_RNA (1)...(19): siRNA sense strand
ugaagaaacuacugcaaag

SEQ ID NO: 154524 - RNA, 19 nt, Homo sapiens
  misc_RNA (1)...(19): siRNA sense strand
aaagugagcaguccagaaa

SEQ ID NO: 154525 - RNA, 19 nt, Homo sapiens
  misc_RNA (1)...(19): siRNA sense strand
gcugaagaguuuccaagga

SEQ ID NO: 154526 - RNA, 19 nt, Homo sapiens
  misc_RNA (1)...(19): siRNA sense strand
augaagaggugaagaaaga

SEQ ID NO: 154527 - RNA, 19 nt, Homo sapiens
  misc_RNA (1)...(19): siRNA sense strand
ucaaacaacuggaagaaaa

SEQ ID NO: 154528 - RNA, 19 nt, Homo sapiens
  misc_RNA (1)...(19): siRNA sense strand
aaccauagcucuugagaag

SEQ ID NO: 154529 - RNA, 19 nt, Homo sapiens
  misc_RNA (1)...(19): siRNA sense strand
gaauaugaacagacacuga

SEQ ID NO: 154530 - RNA, 19 nt, Homo sapiens
  misc_RNA (1)...(19): siRNA sense strand
caacaaggaauuugcugaa

SEQ ID NO: 154531 - RNA, 19 nt, Homo sapiens
  misc_RNA (1)...(19): siRNA sense strand
gaucaugacggaccuugaa

SEQ ID NO: 154532 - RNA, 19 nt, Homo sapiens
  misc_RNA (1)...(19): siRNA sense strand
gagagaggcggagaccuua

SEQ ID NO: 154533 - RNA, 19 nt, Homo sapiens
  misc_RNA (1)...(19): siRNA sense strand
gaaagugagcaguccagaa

SEQ ID NO: 154534 - RNA, 19 nt, Homo sapiens
  misc_RNA (1)...(19): siRNA sense strand
gagauugaaaugaucauga

SEQ ID NO: 154535 - RNA, 19 nt, Homo sapiens
  misc_RNA (1)...(19): siRNA sense strand
ucaccaagcugcgggagaa

SEQ ID NO: 154536 - RNA, 19 nt, Homo sapiens
  misc_RNA (1)...(19): siRNA sense strand
gccgggaguucaagaagaa

SEQ ID NO: 154537 - RNA, 19 nt, Homo sapiens
  misc_RNA (1)...(19): siRNA sense strand
uagggaaacucuggaagaa

SEQ ID NO: 154538 - RNA, 19 nt, Homo sapiens
  misc_RNA (1)...(19): siRNA sense strand
aaacagcacacucaaacaa

SEQ ID NO: 154539 - RNA, 19 nt, Homo sapiens
  misc_RNA (1)...(19): siRNA sense strand
gagcugaacauucugaagu

SEQ ID NO: 154540 - RNA, 19 nt, Homo sapiens
  misc_RNA (1)...(19): siRNA sense strand
gacagcaacuccagcucaa

SEQ ID NO: 154541 - RNA, 19 nt, Homo sapiens
  misc_RNA (1)...(19): siRNA sense strand
aacagaaguuacagaauga

SEQ ID NO: 154542 - RNA, 19 nt, Homo sapiens
  misc_RNA (1)...(19): siRNA sense strand
ugagaaggaacagaaguua

SEQ ID NO: 154543 - RNA, 19 nt, Homo sapiens
  misc_RNA (1)...(19): siRNA sense strand
gaaaccauagcucuugaga

SEQ ID NO: 154544 - RNA, 19 nt, Homo sapiens
  misc_RNA (1)...(19): siRNA sense strand
aucaagagguuacgauaaa

SEQ ID NO: 154545 - RNA, 19 nt, Homo sapiens
  misc_RNA (1)...(19): siRNA sense strand
guucagagccuacaaacag

SEQ ID NO: 154546 - RNA, 19 nt, Homo sapiens
  misc_RNA (1)...(19): siRNA sense strand
gcagcuuucuugaaugucu

SEQ ID NO: 154547 - RNA, 19 nt, Homo sapiens
  misc_RNA (1)...(19): siRNA sense strand
cgacgagauugaaaugauc

SEQ ID NO: 154548 - RNA, 19 nt, Homo sapiens
  misc_RNA (1)...(19): siRNA sense strand
ccgagaauaugaacagaca

SEQ ID NO: 154549 - RNA, 19 nt, Homo sapiens
  misc_RNA (1)...(19): siRNA sense strand
gaauacaacaaggaauuug

SEQ ID NO: 154550 - RNA, 19 nt, Homo sapiens
  misc_RNA (1)...(19): siRNA sense strand
aaacagagaaccagaaacu

SEQ ID NO: 154551 - RNA, 19 nt, Homo sapiens
  misc_RNA (1)...(19): siRNA sense strand
ugaaacagagaaccagaaa

SEQ ID NO: 154552 - RNA, 19 nt, Homo sapiens
  misc_RNA (1)...(19): siRNA sense strand
gcuccagccuagaaguuga

SEQ ID NO: 154553 - RNA, 19 nt, Homo sapiens
  misc_RNA (1)...(19): siRNA sense strand
ucaaaggccaggcugacua

SEQ ID NO: 154554 - RNA, 19 nt, Homo sapiens
  misc_RNA (1)...(19): siRNA sense strand
gaacacuccagaggauuug

SEQ ID NO: 154555 - RNA, 19 nt, Homo sapiens
  misc_RNA (1)...(19): siRNA sense strand
caaaggccgacgagauuga

SEQ ID NO: 154556 - RNA, 19 nt, Homo sapiens
  misc_RNA (1)...(19): siRNA sense strand
gcaaaggccgacgagauug

SEQ ID NO: 154557 - RNA, 19 nt, Homo sapiens
  misc_RNA (1)...(19): siRNA sense strand
gauaaaagcacuuaaagag

SEQ ID NO: 154558 - RNA, 19 nt, Homo sapiens
  misc_RNA (1)...(19): siRNA sense strand
acaaggaauuugcugaagu

SEQ ID NO: 154559 - RNA, 19 nt, Homo sapiens
  misc_RNA (1)...(19): siRNA sense strand
gaagaauacaacaaggaau

SEQ ID NO: 154560 - RNA, 19 nt, Homo sapiens
  misc_RNA (1)...(19): siRNA sense strand
gagauugaugcacugagua

SEQ ID NO: 154561 - RNA, 19 nt, Homo sapiens
  misc_RNA (1)...(19): siRNA sense strand
ccgacgagauugaaaugau

SEQ ID NO: 154562 - RNA, 19 nt, Homo sapiens
  misc_RNA (1)...(19): siRNA sense strand
gaaaauccgagaauaugaa

SEQ ID NO: 154563 - RNA, 19 nt, Homo sapiens
  misc_RNA (1)...(19): siRNA sense strand
aaccaaauacgaugaagaa

SEQ ID NO: 154564 - RNA, 19 nt, Homo sapiens
  misc_RNA (1)...(19): siRNA sense strand
gaaagcugcaggagacaca

SEQ ID NO: 154565 - RNA, 19 nt, Homo sapiens
  misc_RNA (1)...(19): siRNA sense strand
aaucaagagguuacgauaa

SEQ ID NO: 154566 - RNA, 19 nt, Homo sapiens
  misc_RNA (1)...(19): siRNA sense strand
caaaggccaggcugacuau

SEQ ID NO: 154567 - RNA, 19 nt, Homo sapiens
  misc_RNA (1)...(19): siRNA sense strand
cuacaaacagcccuggaaa

SEQ ID NO: 154568 - RNA, 19 nt, Homo sapiens
  misc_RNA (1)...(19): siRNA sense strand
ccgaaaccauagcucuuga

SEQ ID NO: 154569 - RNA, 19 nt, Homo sapiens
  misc_RNA (1)...(19): siRNA sense strand
ggaacagaaguuacagaau

SEQ ID NO: 154570 - RNA, 19 nt, Homo sapiens
  misc_RNA (1)...(19): siRNA sense strand
cagaauuauuugaccugaa

SEQ ID NO: 154571 - RNA, 19 nt, Homo sapiens
  misc_RNA (1)...(19): siRNA sense strand
uggaggaagcugagcauaa

SEQ ID NO: 154572 - RNA, 19 nt, Homo sapiens
  misc_RNA (1)...(19): siRNA sense strand
aaaucaagagguuacgaua

SEQ ID NO: 154573 - RNA, 19 nt, Homo sapiens
  misc_RNA (1)...(19): siRNA sense strand
gaaccggcaggaugaaagu

SEQ ID NO: 154574 - RNA, 19 nt, Homo sapiens
  misc_RNA (1)...(19): siRNA sense strand
uaagggaacagcucucauc

SEQ ID NO: 154575 - RNA, 19 nt, Homo sapiens
  misc_RNA (1)...(19): siRNA sense strand
ccaaauacgaugaagaaac

SEQ ID NO: 154576 - RNA, 19 nt, Homo sapiens
  misc_RNA (1)...(19): siRNA sense strand
cagccuagaaguugaguug

SEQ ID NO: 154577 - RNA, 19 nt, Homo sapiens
  misc_RNA (1)...(19): siRNA sense strand
agagauugaugcacugagu

SEQ ID NO: 154578 - RNA, 19 nt, Homo sapiens
  misc_RNA (1)...(19): siRNA sense strand
cgccgcugcugaagaguuu

SEQ ID NO: 154579 - RNA, 19 nt, Homo sapiens
  misc_RNA (1)...(19): siRNA sense strand
ugcaaaggccgacgagauu

SEQ ID NO: 154580 - RNA, 19 nt, Homo sapiens
  misc_RNA (1)...(19): siRNA sense strand
gaugaagaaacuacugcaa

SEQ ID NO: 154581 - RNA, 19 nt, Homo sapiens
  misc_RNA (1)...(19): siRNA sense strand
agaaggaacagaaguuaca

SEQ ID NO: 154582 - RNA, 19 nt, Homo sapiens
  misc_RNA (1)...(19): siRNA sense strand
cagagaaccagaaacuuag

SEQ ID NO: 154583 - RNA, 19 nt, Homo sapiens
  misc_RNA (1)...(19): siRNA sense strand
ugaaguccauggaguuugc

SEQ ID NO: 154584 - RNA, 19 nt, Homo sapiens
  misc_RNA (1)...(19): siRNA sense strand
aggccaggcugacuaugaa

SEQ ID NO: 154585 - RNA, 19 nt, Homo sapiens
  misc_RNA (1)...(19): siRNA sense strand
gagaaaauccgagaauaug

SEQ ID NO: 154586 - RNA, 19 nt, Homo sapiens
  misc_RNA (1)...(19): siRNA sense strand
gcaacuccagcucaaagug

SEQ ID NO: 154587 - RNA, 19 nt, Homo sapiens
  misc_RNA (1)...(19): siRNA sense strand
agaacacuccagaggauuu

SEQ ID NO: 154588 - RNA, 19 nt, Homo sapiens
  misc_RNA (1)...(19): siRNA sense strand
gaagaaacuacugcaaagg

SEQ ID NO: 154589 - RNA, 19 nt, Homo sapiens
  misc_RNA (1)...(19): siRNA sense strand
ggaagcugagcauaagguu

SEQ ID NO: 154590 - RNA, 19 nt, Homo sapiens
  misc_RNA (1)...(19): siRNA sense strand
cagaucccguaccagcuuu

SEQ ID NO: 154591 - RNA, 19 nt, Homo sapiens
  misc_RNA (1)...(19): siRNA sense strand
agagagaggcggagaccuu

SEQ ID NO: 154592 - RNA, 19 nt, Homo sapiens
  misc_RNA (1)...(19): siRNA sense strand
aagcugagcauaagguuca

SEQ ID NO: 154593 - RNA, 19 nt, Homo sapiens
  misc_RNA (1)...(19): siRNA sense strand
agaaugacuuugcagaaaa

SEQ ID NO: 154594 - RNA, 19 nt, Homo sapiens
  misc_RNA (1)...(19): siRNA sense strand
aaccagaaacuuagggaaa

SEQ ID NO: 154595 - RNA, 19 nt, Homo sapiens
  misc_RNA (1)...(19): siRNA sense strand
gaauucggccagccagauc

SEQ ID NO: 154596 - RNA, 19 nt, Homo sapiens
  misc_RNA (1)...(19): siRNA sense strand
ggagagauugaugcacuga

SEQ ID NO: 154597 - RNA, 19 nt, Homo sapiens
  misc_RNA (1)...(19): siRNA sense strand
aauaugaacagacacugaa

SEQ ID NO: 154598 - RNA, 19 nt, Homo sapiens
  misc_RNA (1)...(19): siRNA sense strand
ugcacgauauugaaacaga

SEQ ID NO: 154599 - RNA, 19 nt, Homo sapiens
  misc_RNA (1)...(19): siRNA sense strand
aagaaagagcugaacauuc

SEQ ID NO: 154600 - RNA, 19 nt, Homo sapiens
  misc_RNA (1)...(19): siRNA sense strand
gaaaaccaaauacgaugaa

SEQ ID NO: 154601 - RNA, 19 nt, Homo sapiens
  misc_RNA (1)...(19): siRNA sense strand
acagaaugacuuugcagaa

SEQ ID NO: 154602 - RNA, 19 nt, Homo sapiens
  misc_RNA (1)...(19): siRNA sense strand
cagcuuucuugaaugucua

SEQ ID NO: 154603 - RNA, 19 nt, Homo sapiens
  misc_RNA (1)...(19): siRNA sense strand
gagaauaugaacagacacu

SEQ ID NO: 154604 - RNA, 19 nt, Homo sapiens
  misc_RNA (1)...(19): siRNA sense strand
ccaagcugcgggagaauuc

SEQ ID NO: 154605 - RNA, 19 nt, Homo sapiens
  misc_RNA (1)...(19): siRNA sense strand
ugaacauucugaaguccau

SEQ ID NO: 154606 - RNA, 19 nt, Homo sapiens
  misc_RNA (1)...(19): siRNA sense strand
aaagagcugaacauucuga

SEQ ID NO: 154607 - RNA, 19 nt, Homo sapiens
  misc_RNA (1)...(19): siRNA sense strand
ccagaucccguaccagcuu

SEQ ID NO: 154608 - RNA, 19 nt, Homo sapiens
  misc_RNA (1)...(19): siRNA sense strand
agauugaugcacugaguaa

SEQ ID NO: 154609 - RNA, 19 nt, Homo sapiens
  misc_RNA (1)...(19): siRNA sense strand
ugaagaaagagcugaacau

SEQ ID NO: 154610 - RNA, 19 nt, Homo sapiens
  misc_RNA (1)...(19): siRNA sense strand
gaacagaaguuacagaaug

SEQ ID NO: 154611 - RNA, 19 nt, Homo sapiens
  misc_RNA (1)...(19): siRNA sense strand
gggaaacucuggaagaaua

SEQ ID NO: 154612 - RNA, 19 nt, Homo sapiens
  misc_RNA (1)...(19): siRNA sense strand
ggaauuugcugaagugaaa

SEQ ID NO: 154613 - RNA, 19 nt, Homo sapiens
  misc_RNA (1)...(19): siRNA sense strand
gaaccaagccgaaaccaua

SEQ ID NO: 154614 - RNA, 19 nt, Homo sapiens
  misc_RNA (1)...(19): siRNA sense strand
gaagaacacuccagaggau

SEQ ID NO: 154615 - RNA, 19 nt, Homo sapiens
  misc_RNA (1)...(19): siRNA sense strand
caaauacgaugaagaaacu

SEQ ID NO: 154616 - RNA, 19 nt, Homo sapiens
  misc_RNA (1)...(19): siRNA sense strand
gaagaaagagcugaacauu

SEQ ID NO: 154617 - RNA, 19 nt, Homo sapiens
  misc_RNA (1)...(19): siRNA sense strand
acagagaaccagaaacuua

SEQ ID NO: 154618 - RNA, 19 nt, Homo sapiens
  misc_RNA (1)...(19): siRNA sense strand
ggaggaagcugagcauaag

SEQ ID NO: 154619 - RNA, 19 nt, Homo sapiens
  misc_RNA (1)...(19): siRNA sense strand
cagaaugacuuugcagaaa

SEQ ID NO: 154620 - RNA, 19 nt, Homo sapiens
  misc_RNA (1)...(19): siRNA sense strand
caaggaauuugcugaagug

SEQ ID NO: 154621 - RNA, 19 nt, Homo sapiens
  misc_RNA (1)...(19): siRNA sense strand
ggaagaauacaacaaggaa

SEQ ID NO: 154622 - RNA, 19 nt, Homo sapiens
  misc_RNA (1)...(19): siRNA sense strand
ccauagcucuugagaagga

SEQ ID NO: 154623 - RNA, 19 nt, Homo sapiens
  misc_RNA (1)...(19): siRNA sense strand
ugaagaaacuacugcaaag

SEQ ID NO: 154624 - RNA, 19 nt, Homo sapiens
  misc_RNA (1)...(19): siRNA sense strand
aaagugagcaguccagaaa

SEQ ID NO: 154625 - RNA, 19 nt, Homo sapiens
  misc_RNA (1)...(19): siRNA sense strand
gcugaagaguuuccaagga

SEQ ID NO: 154626 - RNA, 19 nt, Homo sapiens
  misc_RNA (1)...(19): siRNA sense strand
augaagaggugaagaaaga

SEQ ID NO: 154627 - RNA, 19 nt, Homo sapiens
  misc_RNA (1)...(19): siRNA sense strand
ucaaacaacuggaagaaaa

SEQ ID NO: 154628 - RNA, 19 nt, Homo sapiens
  misc_RNA (1)...(19): siRNA sense strand
aaccauagcucuugagaag

SEQ ID NO: 154629 - RNA, 19 nt, Homo sapiens
  misc_RNA (1)...(19): siRNA sense strand
gaauaugaacagacacuga

SEQ ID NO: 154630 - RNA, 19 nt, Homo sapiens
  misc_RNA (1)...(19): siRNA sense strand
caacaaggaauuugcugaa

SEQ ID NO: 154631 - RNA, 19 nt, Homo sapiens
  misc_RNA (1)...(19): siRNA sense strand
gaucaugacggaccuugaa

SEQ ID NO: 154632 - RNA, 19 nt, Homo sapiens
  misc_RNA (1)...(19): siRNA sense strand
gagagaggcggagaccuua

SEQ ID NO: 154633 - RNA, 19 nt, Homo sapiens
  misc_RNA (1)...(19): siRNA sense strand
gaaagugagcaguccagaa

SEQ ID NO: 154634 - RNA, 19 nt, Homo sapiens
  misc_RNA (1)...(19): siRNA sense strand
gagauugaaaugaucauga

SEQ ID NO: 154635 - RNA, 19 nt, Homo sapiens
  misc_RNA (1)...(19): siRNA sense strand
ucaccaagcugcgggagaa

SEQ ID NO: 154636 - RNA, 19 nt, Homo sapiens
  misc_RNA (1)...(19): siRNA sense strand
gccgggaguucaagaagaa

SEQ ID NO: 154637 - RNA, 19 nt, Homo sapiens
  misc_RNA (1)...(19): siRNA sense strand
uagggaaacucuggaagaa

SEQ ID NO: 154638 - RNA, 19 nt, Homo sapiens
  misc_RNA (1)...(19): siRNA sense strand
aaacagcacacucaaacaa

SEQ ID NO: 154639 - RNA, 19 nt, Homo sapiens
  misc_RNA (1)...(19): siRNA sense strand
gagcugaacauucugaagu

SEQ ID NO: 154640 - RNA, 19 nt, Homo sapiens
  misc_RNA (1)...(19): siRNA sense strand
gacagcaacuccagcucaa

SEQ ID NO: 154641 - RNA, 19 nt, Homo sapiens
  misc_RNA (1)...(19): siRNA sense strand
aacagaaguuacagaauga

SEQ ID NO: 154642 - RNA, 19 nt, Homo sapiens
  misc_RNA (1)...(19): siRNA sense strand
ugagaaggaacagaaguua

SEQ ID NO: 154643 - RNA, 19 nt, Homo sapiens
  misc_RNA (1)...(19): siRNA sense strand
gaaaccauagcucuugaga

SEQ ID NO: 154644 - RNA, 19 nt, Homo sapiens
  misc_RNA (1)...(19): siRNA sense strand
aucaagagguuacgauaaa

SEQ ID NO: 154645 - RNA, 19 nt, Homo sapiens
  misc_RNA (1)...(19): siRNA sense strand
guucagagccuacaaacag

SEQ ID NO: 154646 - RNA, 19 nt, Homo sapiens
  misc_RNA (1)...(19): siRNA sense strand
gcagcuuucuugaaugucu

SEQ ID NO: 154647 - RNA, 19 nt, Homo sapiens
  misc_RNA (1)...(19): siRNA sense strand
cgacgagauugaaaugauc

SEQ ID NO: 154648 - RNA, 19 nt, Homo sapiens
  misc_RNA (1)...(19): siRNA sense strand
ccgagaauaugaacagaca

SEQ ID NO: 154649 - RNA, 19 nt, Homo sapiens
  misc_RNA (1)...(19): siRNA sense strand
gaauacaacaaggaauuug

SEQ ID NO: 154650 - RNA, 19 nt, Homo sapiens
  misc_RNA (1)...(19): siRNA sense strand
aaacagagaaccagaaacu

SEQ ID NO: 154651 - RNA, 19 nt, Homo sapiens
  misc_RNA (1)...(19): siRNA sense strand
ugaaacagagaaccagaaa

SEQ ID NO: 154652 - RNA, 19 nt, Homo sapiens
  misc_RNA (1)...(19): siRNA sense strand
gcuccagccuagaaguuga

SEQ ID NO: 154653 - RNA, 19 nt, Homo sapiens
  misc_RNA (1)...(19): siRNA sense strand
ucaaaggccaggcugacua

SEQ ID NO: 154654 - RNA, 19 nt, Homo sapiens
  misc_RNA (1)...(19): siRNA sense strand
gaacacuccagaggauuug

SEQ ID NO: 154655 - RNA, 19 nt, Homo sapiens
  misc_RNA (1)...(19): siRNA sense strand
caaaggccgacgagauuga

SEQ ID NO: 154656 - RNA, 19 nt, Homo sapiens
  misc_RNA (1)...(19): siRNA sense strand
gcaaaggccgacgagauug

SEQ ID NO: 154657 - RNA, 19 nt, Homo sapiens
  misc_RNA (1)...(19): siRNA sense strand
gauaaaagcacuuaaagag

SEQ ID NO: 154658 - RNA, 19 nt, Homo sapiens
  misc_RNA (1)...(19): siRNA sense strand
acaaggaauuugcugaagu

SEQ ID NO: 154659 - RNA, 19 nt, Homo sapiens
  misc_RNA (1)...(19): siRNA sense strand
gaagaauacaacaaggaau

SEQ ID NO: 154660 - RNA, 19 nt, Homo sapiens
  misc_RNA (1)...(19): siRNA sense strand
gagauugaugcacugagua

SEQ ID NO: 154661 - RNA, 19 nt, Homo sapiens
  misc_RNA (1)...(19): siRNA sense strand
ccgacgagauugaaaugau

SEQ ID NO: 154662 - RNA, 19 nt, Homo sapiens
  misc_RNA (1)...(19): siRNA sense strand
gaaaauccgagaauaugaa

SEQ ID NO: 154663 - RNA, 19 nt, Homo sapiens
  misc_RNA (1)...(19): siRNA sense strand
aaccaaauacgaugaagaa

SEQ ID NO: 154664 - RNA, 19 nt, Homo sapiens
  misc_RNA (1)...(19): siRNA sense strand
gaaagcugcaggagacaca

SEQ ID NO: 154665 - RNA, 19 nt, Homo sapiens
  misc_RNA (1)...(19): siRNA sense strand
aaucaagagguuacgauaa

SEQ ID NO: 154666 - RNA, 19 nt, Homo sapiens
  misc_RNA (1)...(19): siRNA sense strand
caaaggccaggcugacuau

SEQ ID NO: 154667 - RNA, 19 nt, Homo sapiens
  misc_RNA (1)...(19): siRNA sense strand
cuacaaacagcccuggaaa

SEQ ID NO: 154668 - RNA, 19 nt, Homo sapiens
  misc_RNA (1)...(19): siRNA sense strand
ccgaaaccauagcucuuga

SEQ ID NO: 154669 - RNA, 19 nt, Homo sapiens
  misc_RNA (1)...(19): siRNA sense strand
ggaacagaaguuacagaau

SEQ ID NO: 154670 - RNA, 19 nt, Homo sapiens
  misc_RNA (1)...(19): siRNA sense strand
cagaauuauuugaccugaa

SEQ ID NO: 154671 - RNA, 19 nt, Homo sapiens
  misc_RNA (1)...(19): siRNA sense strand
uggaggaagcugagcauaa

SEQ ID NO: 154672 - RNA, 19 nt, Homo sapiens
  misc_RNA (1)...(19): siRNA sense strand
aaaucaagagguuacgaua

SEQ ID NO: 154673 - RNA, 19 nt, Homo sapiens
  misc_RNA (1)...(19): siRNA sense strand
gaaccggcaggaugaaagu

SEQ ID NO: 154674 - RNA, 19 nt, Homo sapiens
  misc_RNA (1)...(19): siRNA sense strand
uaagggaacagcucucauc

SEQ ID NO: 154675 - RNA, 19 nt, Homo sapiens
  misc_RNA (1)...(19): siRNA sense strand
ccaaauacgaugaagaaac

SEQ ID NO: 154676 - RNA, 19 nt, Homo sapiens
  misc_RNA (1)...(19): siRNA sense strand
cagccuagaaguugaguug

SEQ ID NO: 154677 - RNA, 19 nt, Homo sapiens
  misc_RNA (1)...(19): siRNA sense strand
agagauugaugcacugagu

SEQ ID NO: 154678 - RNA, 19 nt, Homo sapiens
  misc_RNA (1)...(19): siRNA sense strand
cgccgcugcugaagaguuu

SEQ ID NO: 154679 - RNA, 19 nt, Homo sapiens
  misc_RNA (1)...(19): siRNA sense strand
ugcaaaggccgacgagauu

SEQ ID NO: 154680 - RNA, 19 nt, Homo sapiens
  misc_RNA (1)...(19): siRNA sense strand
gaugaagaaacuacugcaa

SEQ ID NO: 154681 - RNA, 19 nt, Homo sapiens
  misc_RNA (1)...(19): siRNA sense strand
agaaggaacagaaguuaca

SEQ ID NO: 154682 - RNA, 19 nt, Homo sapiens
  misc_RNA (1)...(19): siRNA sense strand
cagagaaccagaaacuuag

SEQ ID NO: 154683 - RNA, 19 nt, Homo sapiens
  misc_RNA (1)...(19): siRNA sense strand
ugaaguccauggaguuugc

SEQ ID NO: 154684 - RNA, 19 nt, Homo sapiens
  misc_RNA (1)...(19): siRNA sense strand
aggccaggcugacuaugaa

SEQ ID NO: 154685 - RNA, 19 nt, Homo sapiens
  misc_RNA (1)...(19): siRNA sense strand
gagaaaauccgagaauaug

SEQ ID NO: 154686 - RNA, 19 nt, Homo sapiens
  misc_RNA (1)...(19): siRNA sense strand
gcaacuccagcucaaagug

SEQ ID NO: 154687 - RNA, 19 nt, Homo sapiens
  misc_RNA (1)...(19): siRNA sense strand
agaacacuccagaggauuu

SEQ ID NO: 154688 - RNA, 19 nt, Homo sapiens
  misc_RNA (1)...(19): siRNA sense strand
gaagaaacuacugcaaagg

SEQ ID NO: 154689 - RNA, 19 nt, Homo sapiens
  misc_RNA (1)...(19): siRNA sense strand
ggaagcugagcauaagguu

SEQ ID NO: 154690 - RNA, 19 nt, Homo sapiens
  misc_RNA (1)...(19): siRNA sense strand
cagaucccguaccagcuuu

SEQ ID NO: 154691 - RNA, 19 nt, Homo sapiens
  misc_RNA (1)...(19): siRNA sense strand
agagagaggcggagaccuu

SEQ ID NO: 154692 - RNA, 19 nt, Homo sapiens
  misc_RNA (1)...(19): siRNA sense strand
aagcugagcauaagguuca

SEQ ID NO: 154693 - RNA, 19 nt, Homo sapiens
  misc_RNA (1)...(19): siRNA sense strand
agaaugacuuugcagaaaa

SEQ ID NO: 154694 - RNA, 19 nt, Homo sapiens
  misc_RNA (1)...(19): siRNA sense strand
aaccagaaacuuagggaaa

SEQ ID NO: 154695 - RNA, 19 nt, Homo sapiens
  misc_RNA (1)...(19): siRNA sense strand
gaauucggccagccagauc

SEQ ID NO: 154696 - RNA, 19 nt, Homo sapiens
  misc_RNA (1)...(19): siRNA sense strand
ggagagauugaugcacuga

SEQ ID NO: 154697 - RNA, 19 nt, Homo sapiens
  misc_RNA (1)...(19): siRNA sense strand
aauaugaacagacacugaa

SEQ ID NO: 154698 - RNA, 19 nt, Homo sapiens
  misc_RNA (1)...(19): siRNA sense strand
ugcacgauauugaaacaga

SEQ ID NO: 154699 - RNA, 19 nt, Homo sapiens
  misc_RNA (1)...(19): siRNA sense strand
aagaaagagcugaacauuc

SEQ ID NO: 154700 - RNA, 19 nt, Homo sapiens
  misc_RNA (1)...(19): siRNA sense strand
gaaaaccaaauacgaugaa

SEQ ID NO: 154701 - RNA, 19 nt, Homo sapiens
  misc_RNA (1)...(19): siRNA sense strand
acagaaugacuuugcagaa

SEQ ID NO: 154702 - RNA, 19 nt, Homo sapiens
  misc_RNA (1)...(19): siRNA sense strand
cagcuuucuugaaugucua

SEQ ID NO: 154703 - RNA, 19 nt, Homo sapiens
  misc_RNA (1)...(19): siRNA sense strand
gagaauaugaacagacacu

SEQ ID NO: 154704 - RNA, 19 nt, Homo sapiens
  misc_RNA (1)...(19): siRNA sense strand
ccaagcugcgggagaauuc

SEQ ID NO: 154705 - RNA, 19 nt, Homo sapiens
  misc_RNA (1)...(19): siRNA sense strand
ugaacauucugaaguccau

SEQ ID NO: 154706 - RNA, 19 nt, Homo sapiens
  misc_RNA (1)...(19): siRNA sense strand
aaagagcugaacauucuga

SEQ ID NO: 154707 - RNA, 19 nt, Homo sapiens
  misc_RNA (1)...(19): siRNA sense strand
ccagaucccguaccagcuu

SEQ ID NO: 154708 - RNA, 19 nt, Homo sapiens
  misc_RNA (1)...(19): siRNA sense strand
agauugaugcacugaguaa

SEQ ID NO: 154709 - RNA, 19 nt, Homo sapiens
  misc_RNA (1)...(19): siRNA sense strand
ugaagaaagagcugaacau

SEQ ID NO: 154710 - RNA, 19 nt, Homo sapiens
  misc_RNA (1)...(19): siRNA sense strand
ggagugaacuaaacaauau

SEQ ID NO: 154711 - RNA, 19 nt, Homo sapiens
  misc_RNA (1)...(19): siRNA sense strand
ggaaagaacuaucuacagu

SEQ ID NO: 154712 - RNA, 19 nt, Homo sapiens
  misc_RNA (1)...(19): siRNA sense strand
ggacacaguucugggauuu

SEQ ID NO: 154713 - RNA, 19 nt, Homo sapiens
  misc_RNA (1)...(19): siRNA sense strand
gaaaagaaauuguccagaa

SEQ ID NO: 154714 - RNA, 19 nt, Homo sapiens
  misc_RNA (1)...(19): siRNA sense strand
gcuacaaccucuuccauga

SEQ ID NO: 154715 - RNA, 19 nt, Homo sapiens
  misc_RNA (1)...(19): siRNA sense strand
caacagaccuuugacuauc

SEQ ID NO: 154716 - RNA, 19 nt, Homo sapiens
  misc_RNA (1)...(19): siRNA sense strand
acacagaggucauccacaa

SEQ ID NO: 154717 - RNA, 19 nt, Homo sapiens
  misc_RNA (1)...(19): siRNA sense strand
gagagaggcaucuacaauu

SEQ ID NO: 154718 - RNA, 19 nt, Homo sapiens
  misc_RNA (1)...(19): siRNA sense strand
ccagggacccagacaguua

SEQ ID NO: 154719 - RNA, 19 nt, Homo sapiens
  misc_RNA (1)...(19): siRNA sense strand
gaaacuggagugaacuaaa

SEQ ID NO: 154720 - RNA, 19 nt, Homo sapiens
  misc_RNA (1)...(19): siRNA sense strand
gcgcagacgugauugucaa

SEQ ID NO: 154721 - RNA, 19 nt, Homo sapiens
  misc_RNA (1)...(19): siRNA sense strand
ccacaacuauggccaugga

SEQ ID NO: 154722 - RNA, 19 nt, Homo sapiens
  misc_RNA (1)...(19): siRNA sense strand
guggcugacugaaagguua

SEQ ID NO: 154723 - RNA, 19 nt, Homo sapiens
  misc_RNA (1)...(19): siRNA sense strand
agagaggcaucuacaauuc

SEQ ID NO: 154724 - RNA, 19 nt, Homo sapiens
  misc_RNA (1)...(19): siRNA sense strand
acugaaagguuaacugaga

SEQ ID NO: 154725 - RNA, 19 nt, Homo sapiens
  misc_RNA (1)...(19): siRNA sense strand
ggagaauccuggaagaaaa

SEQ ID NO: 154726 - RNA, 19 nt, Homo sapiens
  misc_RNA (1)...(19): siRNA sense strand
uggauauguucccagauua

SEQ ID NO: 154727 - RNA, 19 nt, Homo sapiens
  misc_RNA (1)...(19): siRNA sense strand
cugaagaaugcaagaauua

SEQ ID NO: 154728 - RNA, 19 nt, Homo sapiens
  misc_RNA (1)...(19): siRNA sense strand
gggagaauccuggaagaaa

SEQ ID NO: 154729 - RNA, 19 nt, Homo sapiens
  misc_RNA (1)...(19): siRNA sense strand
ggaggcagccaagcucuuu

SEQ ID NO: 154730 - RNA, 19 nt, Homo sapiens
  misc_RNA (1)...(19): siRNA sense strand
ugacugaaagguuaacuga

SEQ ID NO: 154731 - RNA, 19 nt, Homo sapiens
  misc_RNA (1)...(19): siRNA sense strand
aaacuggagugaacuaaac

SEQ ID NO: 154732 - RNA, 19 nt, Homo sapiens
  misc_RNA (1)...(19): siRNA sense strand
gccaacagaccuuugacua

SEQ ID NO: 154733 - RNA, 19 nt, Homo sapiens
  misc_RNA (1)...(19): siRNA sense strand
ccaacagaccuuugacuau

SEQ ID NO: 154734 - RNA, 19 nt, Homo sapiens
  misc_RNA (1)...(19): siRNA sense strand
cagaggucauccacaacua

SEQ ID NO: 154735 - RNA, 19 nt, Homo sapiens
  misc_RNA (1)...(19): siRNA sense strand
ggagggaaagaacuaucua

SEQ ID NO: 154736 - RNA, 19 nt, Homo sapiens
  misc_RNA (1)...(19): siRNA sense strand
ggaaacuggagugaacuaa

SEQ ID NO: 154737 - RNA, 19 nt, Homo sapiens
  misc_RNA (1)...(19): siRNA sense strand
ggagccaacagaccuuuga

SEQ ID NO: 154738 - RNA, 19 nt, Homo sapiens
  misc_RNA (1)...(19): siRNA sense strand
acugaagaaugcaagaauu

SEQ ID NO: 154739 - RNA, 19 nt, Homo sapiens
  misc_RNA (1)...(19): siRNA sense strand
ccagacaguuacucuugga

SEQ ID NO: 154740 - RNA, 19 nt, Homo sapiens
  misc_RNA (1)...(19): siRNA sense strand
guucccagauuacggcuau

SEQ ID NO: 154741 - RNA, 19 nt, Homo sapiens
  misc_RNA (1)...(19): siRNA sense strand
uggagugaacuaaacaaua

SEQ ID NO: 154742 - RNA, 19 nt, Homo sapiens
  misc_RNA (1)...(19): siRNA sense strand
agaaggcgcagacgugauu

SEQ ID NO: 154743 - RNA, 19 nt, Homo sapiens
  misc_RNA (1)...(19): siRNA sense strand
uugaggagguggcaagaga

SEQ ID NO: 154744 - RNA, 19 nt, Homo sapiens
  misc_RNA (1)...(19): siRNA sense strand
gcacuggaccuucaaacac

SEQ ID NO: 154745 - RNA, 19 nt, Homo sapiens
  misc_RNA (1)...(19): siRNA sense strand
gauuggagcaggagucauc

SEQ ID NO: 154746 - RNA, 19 nt, Homo sapiens
  misc_RNA (1)...(19): siRNA sense strand
gggaaacuggagugaacua

SEQ ID NO: 154747 - RNA, 19 nt, Homo sapiens
  misc_RNA (1)...(19): siRNA sense strand
aaagaaauuguccagaaug

SEQ ID NO: 154748 - RNA, 19 nt, Homo sapiens
  misc_RNA (1)...(19): siRNA sense strand
gccuaauucuggagggaaa

SEQ ID NO: 154749 - RNA, 19 nt, Homo sapiens
  misc_RNA (1)...(19): siRNA sense strand
agagagaggcaucuacaau

SEQ ID NO: 154750 - RNA, 19 nt, Homo sapiens
  misc_RNA (1)...(19): siRNA sense strand
gcuacgggcucaccaucca

SEQ ID NO: 154751 - RNA, 19 nt, Homo sapiens
  misc_RNA (1)...(19): siRNA sense strand
gacuggagcccacacugaa

SEQ ID NO: 154752 - RNA, 19 nt, Homo sapiens
  misc_RNA (1)...(19): siRNA sense strand
ccacacaagccuaauucug

SEQ ID NO: 154753 - RNA, 19 nt, Homo sapiens
  misc_RNA (1)...(19): siRNA sense strand
cacuggaccuucaaacaca

SEQ ID NO: 154754 - RNA, 19 nt, Homo sapiens
  misc_RNA (1)...(19): siRNA sense strand
gcuagaaagagaacagcuu

SEQ ID NO: 154755 - RNA, 19 nt, Homo sapiens
  misc_RNA (1)...(19): siRNA sense strand
ccagagagaggcaucuaca

SEQ ID NO: 154756 - RNA, 19 nt, Homo sapiens
  misc_RNA (1)...(19): siRNA sense strand
aaccugggccuguuccuaa

SEQ ID NO: 154757 - RNA, 19 nt, Homo sapiens
  misc_RNA (1)...(19): siRNA sense strand
agauucggcuagaaagaga

SEQ ID NO: 154758 - RNA, 19 nt, Homo sapiens
  misc_RNA (1)...(19): siRNA sense strand
gagcccacacugaagaaug

SEQ ID NO: 154759 - RNA, 19 nt, Homo sapiens
  misc_RNA (1)...(19): siRNA sense strand
cuacaaccucuuccaugaa

SEQ ID NO: 154760 - RNA, 19 nt, Homo sapiens
  misc_RNA (1)...(19): siRNA sense strand
gaggucauccacaacuaug

SEQ ID NO: 154761 - RNA, 19 nt, Homo sapiens
  misc_RNA (1)...(19): siRNA sense strand
gggaaagaacuaucuacag

SEQ ID NO: 154762 - RNA, 19 nt, Homo sapiens
  misc_RNA (1)...(19): siRNA sense strand
cagacgugauugucaacug

SEQ ID NO: 154763 - RNA, 19 nt, Homo sapiens
  misc_RNA (1)...(19): siRNA sense strand
agacuggagcccacacuga

SEQ ID NO: 154764 - RNA, 19 nt, Homo sapiens
  misc_RNA (1)...(19): siRNA sense strand
ggacccagacaguuacucu

SEQ ID NO: 154765 - RNA, 19 nt, Homo sapiens
  misc_RNA (1)...(19): siRNA sense strand
ggauauguucccagauuac

SEQ ID NO: 154766 - RNA, 19 nt, Homo sapiens
  misc_RNA (1)...(19): siRNA sense strand
aagaaauuguccagaaugc

SEQ ID NO: 154767 - RNA, 19 nt, Homo sapiens
  misc_RNA (1)...(19): siRNA sense strand
ccagauucggcuagaaaga

SEQ ID NO: 154768 - RNA, 19 nt, Homo sapiens
  misc_RNA (1)...(19): siRNA sense strand
gccaccaucccaccucuga

SEQ ID NO: 154769 - RNA, 19 nt, Homo sapiens
  misc_RNA (1)...(19): siRNA sense strand
ugcaagaauuauuggugaa

SEQ ID NO: 154770 - RNA, 19 nt, Homo sapiens
  misc_RNA (1)...(19): siRNA sense strand
aagaauuauuggugaacga

SEQ ID NO: 154771 - RNA, 19 nt, Homo sapiens
  misc_RNA (1)...(19): siRNA sense strand
caacugcacugggguaugg

SEQ ID NO: 154772 - RNA, 19 nt, Homo sapiens
  misc_RNA (1)...(19): siRNA sense strand
gcuucgcacuggaccuuca

SEQ ID NO: 154773 - RNA, 19 nt, Homo sapiens
  misc_RNA (1)...(19): siRNA sense strand
caggaccacaacaccauuu

SEQ ID NO: 154774 - RNA, 19 nt, Homo sapiens
  misc_RNA (1)...(19): siRNA sense strand
ccugagccauguccauucu

SEQ ID NO: 154775 - RNA, 19 nt, Homo sapiens
  misc_RNA (1)...(19): siRNA sense strand
guuccacacaagccuaauu

SEQ ID NO: 154776 - RNA, 19 nt, Homo sapiens
  misc_RNA (1)...(19): siRNA sense strand
uggcagcccuaccuuucug

SEQ ID NO: 154777 - RNA, 19 nt, Homo sapiens
  misc_RNA (1)...(19): siRNA sense strand
ucaauggguuccagugauu

SEQ ID NO: 154778 - RNA, 19 nt, Homo sapiens
  misc_RNA (1)...(19): siRNA sense strand
ggacgaggacgacgacaga

SEQ ID NO: 154779 - RNA, 19 nt, Homo sapiens
  misc_RNA (1)...(19): siRNA sense strand
gaucaauggguuccaguga

SEQ ID NO: 154780 - RNA, 19 nt, Homo sapiens
  misc_RNA (1)...(19): siRNA sense strand
ccgaaaggauggauaaggu

SEQ ID NO: 154781 - RNA, 19 nt, Homo sapiens
  misc_RNA (1)...(19): siRNA sense strand
gauccugccuuaagucaac

SEQ ID NO: 154782 - RNA, 19 nt, Homo sapiens
  misc_RNA (1)...(19): siRNA sense strand
gggaugcccuggaggaagu

SEQ ID NO: 154783 - RNA, 19 nt, Homo sapiens
  misc_RNA (1)...(19): siRNA sense strand
ccgauaacgugguguugug

SEQ ID NO: 154784 - RNA, 19 nt, Homo sapiens
  misc_RNA (1)...(19): siRNA sense strand
ggaaagucgcuacauggau

SEQ ID NO: 154785 - RNA, 19 nt, Homo sapiens
  misc_RNA (1)...(19): siRNA sense strand
ggacgacgacagagaugug

SEQ ID NO: 154786 - RNA, 19 nt, Homo sapiens
  misc_RNA (1)...(19): siRNA sense strand
gggaaagucgcuacaugga

SEQ ID NO: 154787 - RNA, 19 nt, Homo sapiens
  misc_RNA (1)...(19): siRNA sense strand
gagcagaagaccgaaagga

SEQ ID NO: 154788 - RNA, 19 nt, Homo sapiens
  misc_RNA (1)...(19): siRNA sense strand
ccgggaaagucgcuacaug

SEQ ID NO: 154789 - RNA, 19 nt, Homo sapiens
  misc_RNA (1)...(19): siRNA sense strand
agaccgaaaggauggauaa

SEQ ID NO: 154790 - RNA, 19 nt, Homo sapiens
  misc_RNA (1)...(19): siRNA sense strand
cggccaagcugcucaacgu

SEQ ID NO: 154791 - RNA, 19 nt, Homo sapiens
  misc_RNA (1)...(19): siRNA sense strand
ggagagcagaagaccgaaa

SEQ ID NO: 154792 - RNA, 19 nt, Homo sapiens
  misc_RNA (1)...(19): siRNA sense strand
caauggguuccagugauua

SEQ ID NO: 154793 - RNA, 19 nt, Homo sapiens
  misc_RNA (1)...(19): siRNA sense strand
cgagaacgacaucaacauc

SEQ ID NO: 154794 - RNA, 19 nt, Homo sapiens
  misc_RNA (1)...(19): siRNA sense strand
gagagcagaagaccgaaag

SEQ ID NO: 154795 - RNA, 19 nt, Homo sapiens
  misc_RNA (1)...(19): siRNA sense strand
gagauguggcucugcagau

SEQ ID NO: 154796 - RNA, 19 nt, Homo sapiens
  misc_RNA (1)...(19): siRNA sense strand
gcgagaacgacaucaacau

SEQ ID NO: 154797 - RNA, 19 nt, Homo sapiens
  misc_RNA (1)...(19): siRNA sense strand
gucgcuacauggaucaaug

SEQ ID NO: 154798 - RNA, 19 nt, Homo sapiens
  misc_RNA (1)...(19): siRNA sense strand
cgaggacgacgacagagau

SEQ ID NO: 154799 - RNA, 19 nt, Homo sapiens
  misc_RNA (1)...(19): siRNA sense strand
ggguuccagugauuaaucu

SEQ ID NO: 154800 - RNA, 19 nt, Homo sapiens
  misc_RNA (1)...(19): siRNA sense strand
agauguggcucugcagauc

SEQ ID NO: 154801 - RNA, 19 nt, Homo sapiens
  misc_RNA (1)...(19): siRNA sense strand
ggacauaucuauuuccuuu

SEQ ID NO: 154802 - RNA, 19 nt, Homo sapiens
  misc_RNA (1)...(19): siRNA sense strand
gaccaggacauaucuauuu

SEQ ID NO: 154803 - RNA, 19 nt, Homo sapiens
  misc_RNA (1)...(19): siRNA sense strand
guugggaacugccucauug

SEQ ID NO: 154804 - RNA, 19 nt, Homo sapiens
  misc_RNA (1)...(19): siRNA sense strand
gauaaaagcucugcucuuc

SEQ ID NO: 154805 - RNA, 19 nt, Homo sapiens
  misc_RNA (1)...(19): siRNA sense strand
gcucugcucuucagguuuc

SEQ ID NO: 154806 - RNA, 19 nt, Homo sapiens
  misc_RNA (1)...(19): siRNA sense strand
gcugcacgcgugucgauua

SEQ ID NO: 154807 - RNA, 19 nt, Homo sapiens
  misc_RNA (1)...(19): siRNA sense strand
gccagaagaccaggacaua

SEQ ID NO: 154808 - RNA, 19 nt, Homo sapiens
  misc_RNA (1)...(19): siRNA sense strand
cagaagaccaggacauauc

SEQ ID NO: 154809 - RNA, 19 nt, Homo sapiens
  misc_RNA (1)...(19): siRNA sense strand
gaagaccaggacauaucua

SEQ ID NO: 154810 - RNA, 19 nt, Homo sapiens
  misc_RNA (1)...(19): siRNA sense strand
cugcacgcgugucgauuaa

SEQ ID NO: 154811 - RNA, 19 nt, Homo sapiens
  misc_RNA (1)...(19): siRNA sense strand
ggcauggucugcucuugca

SEQ ID NO: 154812 - RNA, 19 nt, Homo sapiens
  misc_RNA (1)...(19): siRNA sense strand
aagcucugcucuucagguu

SEQ ID NO: 154813 - RNA, 19 nt, Homo sapiens
  misc_RNA (1)...(19): siRNA sense strand
ccucgcugcuauucucuug

SEQ ID NO: 154814 - RNA, 19 nt, Homo sapiens
  misc_RNA (1)...(19): siRNA sense strand
ccagaagaccaggacauau

SEQ ID NO: 154815 - RNA, 19 nt, Homo sapiens
  misc_RNA (1)...(19): siRNA sense strand
acauaucuauuuccuuugc

SEQ ID NO: 154816 - RNA, 19 nt, Homo sapiens
  misc_RNA (1)...(19): siRNA sense strand
uaaaagcucugcucuucag

SEQ ID NO: 154817 - RNA, 19 nt, Homo sapiens
  misc_RNA (1)...(19): siRNA sense strand
gcucuugcagauuaguauu

SEQ ID NO: 154818 - RNA, 19 nt, Homo sapiens
  misc_RNA (1)...(19): siRNA sense strand
ccuccucgcugcuauucuc

SEQ ID NO: 154819 - RNA, 19 nt, Homo sapiens
  misc_RNA (1)...(19): siRNA sense strand
accaggacauaucuauuuc

SEQ ID NO: 154820 - RNA, 19 nt, Homo sapiens
  misc_RNA (1)...(19): siRNA sense strand
ucauugguggugugaguuu

SEQ ID NO: 154821 - RNA, 19 nt, Homo sapiens
  misc_RNA (1)...(19): siRNA sense strand
gaugcaagcucaagucuua

SEQ ID NO: 154822 - RNA, 19 nt, Homo sapiens
  misc_RNA (1)...(19): siRNA sense strand
ggacuuugccgucuccuuu

SEQ ID NO: 154823 - RNA, 19 nt, Homo sapiens
  misc_RNA (1)...(19): siRNA sense strand
gcacugucauggguauuaa

SEQ ID NO: 154824 - RNA, 19 nt, Homo sapiens
  misc_RNA (1)...(19): siRNA sense strand
ugcagaagguccuguuauu

SEQ ID NO: 154825 - RNA, 19 nt, Homo sapiens
  misc_RNA (1)...(19): siRNA sense strand
uaugggaccugcacuguca

SEQ ID NO: 154826 - RNA, 19 nt, Homo sapiens
  misc_RNA (1)...(19): siRNA sense strand
caacagaauauuccuaugg

SEQ ID NO: 154827 - RNA, 19 nt, Homo sapiens
  misc_RNA (1)...(19): siRNA sense strand
cagaagguccuguuauuca

SEQ ID NO: 154828 - RNA, 19 nt, Homo sapiens
  misc_RNA (1)...(19): siRNA sense strand
gcagaagguccuguuauuc

SEQ ID NO: 154829 - RNA, 19 nt, Homo sapiens
  misc_RNA (1)...(19): siRNA sense strand
agaagguccuguuauucaa

SEQ ID NO: 154830 - RNA, 19 nt, Homo sapiens
  misc_RNA (1)...(19): siRNA sense strand
gguauuaaccacagauucu

SEQ ID NO: 154831 - RNA, 19 nt, Homo sapiens
  misc_RNA (1)...(19): siRNA sense strand
gggcaaaugaccaggacuu

SEQ ID NO: 154832 - RNA, 19 nt, Homo sapiens
  misc_RNA (1)...(19): siRNA sense strand
ucaacagaauauuccuaug

SEQ ID NO: 154833 - RNA, 19 nt, Homo sapiens
  misc_RNA (1)...(19): siRNA sense strand
ggcaaaugaccaggacuuu

SEQ ID NO: 154834 - RNA, 19 nt, Homo sapiens
  misc_RNA (1)...(19): siRNA sense strand
ucaacaagggcuuucacuu

SEQ ID NO: 154835 - RNA, 19 nt, Homo sapiens
  misc_RNA (1)...(19): siRNA sense strand
gaggaugcaagcucaaguc

SEQ ID NO: 154836 - RNA, 19 nt, Homo sapiens
  misc_RNA (1)...(19): siRNA sense strand
cauccucacugcuguucuc

SEQ ID NO: 154837 - RNA, 19 nt, Homo sapiens
  misc_RNA (1)...(19): siRNA sense strand
gaagguccuguuauucaac

SEQ ID NO: 154838 - RNA, 19 nt, Homo sapiens
  misc_RNA (1)...(19): siRNA sense strand
ggaugcaagcucaagucuu

SEQ ID NO: 154839 - RNA, 19 nt, Homo sapiens
  misc_RNA (1)...(19): siRNA sense strand
acuccaagcugaggaugau

SEQ ID NO: 154840 - RNA, 19 nt, Homo sapiens
  misc_RNA (1)...(19): siRNA sense strand
ggaauuggaggaccgauuu

SEQ ID NO: 154841 - RNA, 19 nt, Homo sapiens
  misc_RNA (1)...(19): siRNA sense strand
gaggagagccggaucaauc

SEQ ID NO: 154842 - RNA, 19 nt, Homo sapiens
  misc_RNA (1)...(19): siRNA sense strand
ggaagaagcagagaacaau

SEQ ID NO: 154843 - RNA, 19 nt, Homo sapiens
  misc_RNA (1)...(19): siRNA sense strand
gcccucaacuuccgagaaa

SEQ ID NO: 154844 - RNA, 19 nt, Homo sapiens
  misc_RNA (1)...(19): siRNA sense strand
uuaagaaagugcaugaaga

SEQ ID NO: 154845 - RNA, 19 nt, Homo sapiens
  misc_RNA (1)...(19): siRNA sense strand
gagaucgcguuccuuaaga

SEQ ID NO: 154846 - RNA, 19 nt, Homo sapiens
  misc_RNA (1)...(19): siRNA sense strand
guucugagguccauaccaa

SEQ ID NO: 154847 - RNA, 19 nt, Homo sapiens
  misc_RNA (1)...(19): siRNA sense strand
gaagaagcagagaacaauu

SEQ ID NO: 154848 - RNA, 19 nt, Homo sapiens
  misc_RNA (1)...(19): siRNA sense strand
gaaaccagcccugagcaaa

SEQ ID NO: 154849 - RNA, 19 nt, Homo sapiens
  misc_RNA (1)...(19): siRNA sense strand
agcaggagaugauggaaua

SEQ ID NO: 154850 - RNA, 19 nt, Homo sapiens
  misc_RNA (1)...(19): siRNA sense strand
gaagauggcccuggaugug

SEQ ID NO: 154851 - RNA, 19 nt, Homo sapiens
  misc_RNA (1)...(19): siRNA sense strand
gacaccagauccaguccua

SEQ ID NO: 154852 - RNA, 19 nt, Homo sapiens
  misc_RNA (1)...(19): siRNA sense strand
ggagaucgcguuccuuaag

SEQ ID NO: 154853 - RNA, 19 nt, Homo sapiens
  misc_RNA (1)...(19): siRNA sense strand
ggacguggaugcagcuacu

SEQ ID NO: 154854 - RNA, 19 nt, Homo sapiens
  misc_RNA (1)...(19): siRNA sense strand
gaaggaagaagcagagaac

SEQ ID NO: 154855 - RNA, 19 nt, Homo sapiens
  misc_RNA (1)...(19): siRNA sense strand
ccaagaagacggugaugau

SEQ ID NO: 154856 - RNA, 19 nt, Homo sapiens
  misc_RNA (1)...(19): siRNA sense strand
gaucaagaccaucgagaca

SEQ ID NO: 154857 - RNA, 19 nt, Homo sapiens
  misc_RNA (1)...(19): siRNA sense strand
caggcgagcugcuggacuu

SEQ ID NO: 154858 - RNA, 19 nt, Homo sapiens
  misc_RNA (1)...(19): siRNA sense strand
aagaagcagagaacaauuu

SEQ ID NO: 154859 - RNA, 19 nt, Homo sapiens
  misc_RNA (1)...(19): siRNA sense strand
gcugaggagugguacaagu

SEQ ID NO: 154860 - RNA, 19 nt, Homo sapiens
  misc_RNA (1)...(19): siRNA sense strand
gcaggaggagauucaguug

SEQ ID NO: 154861 - RNA, 19 nt, Homo sapiens
  misc_RNA (1)...(19): siRNA sense strand
gaccuacucugcccucaac

SEQ ID NO: 154862 - RNA, 19 nt, Homo sapiens
  misc_RNA (1)...(19): siRNA sense strand
ugaggcagaugcgggaauu

SEQ ID NO: 154863 - RNA, 19 nt, Homo sapiens
  misc_RNA (1)...(19): siRNA sense strand
gaccuggagcgcagaauug

SEQ ID NO: 154864 - RNA, 19 nt, Homo sapiens
  misc_RNA (1)...(19): siRNA sense strand
gaagaggagauccgugagu

SEQ ID NO: 154865 - RNA, 19 nt, Homo sapiens
  misc_RNA (1)...(19): siRNA sense strand
caucgcggcuaagaacauu

SEQ ID NO: 154866 - RNA, 19 nt, Homo sapiens
  misc_RNA (1)...(19): siRNA sense strand
aagaggagauccgugaguu

SEQ ID NO: 154867 - RNA, 19 nt, Homo sapiens
  misc_RNA (1)...(19): siRNA sense strand
agguggaggugcucacuaa

SEQ ID NO: 154868 - RNA, 19 nt, Homo sapiens
  misc_RNA (1)...(19): siRNA sense strand
uaagaaagugcaugaagag

SEQ ID NO: 154869 - RNA, 19 nt, Homo sapiens
  misc_RNA (1)...(19): siRNA sense strand
ggaaauccggcaccucaag

SEQ ID NO: 154870 - RNA, 19 nt, Homo sapiens
  misc_RNA (1)...(19): siRNA sense strand
gcacuaacgauucccugau

SEQ ID NO: 154871 - RNA, 19 nt, Homo sapiens
  misc_RNA (1)...(19): siRNA sense strand
cacuaacgauucccugaug

SEQ ID NO: 154872 - RNA, 19 nt, Homo sapiens
  misc_RNA (1)...(19): siRNA sense strand
aggcucagcuucaggaaca

SEQ ID NO: 154873 - RNA, 19 nt, Homo sapiens
  misc_RNA (1)...(19): siRNA sense strand
gaucgcguuccuuaagaaa

SEQ ID NO: 154874 - RNA, 19 nt, Homo sapiens
  misc_RNA (1)...(19): siRNA sense strand
ucaaugaccguucgccaau

SEQ ID NO: 154875 - RNA, 19 nt, Homo sapiens
  misc_RNA (1)...(19): siRNA sense strand
ggagaggagagccggauca

SEQ ID NO: 154876 - RNA, 19 nt, Homo sapiens
  misc_RNA (1)...(19): siRNA sense strand
ggaauaccgacaccagauc

SEQ ID NO: 154877 - RNA, 19 nt, Homo sapiens
  misc_RNA (1)...(19): siRNA sense strand
gaauuggaggaccgauuug

SEQ ID NO: 154878 - RNA, 19 nt, Homo sapiens
  misc_RNA (1)...(19): siRNA sense strand
ucgcguuccuuaagaaagu

SEQ ID NO: 154879 - RNA, 19 nt, Homo sapiens
  misc_RNA (1)...(19): siRNA sense strand
gaccaucgcggcuaagaac

SEQ ID NO: 154880 - RNA, 19 nt, Homo sapiens
  misc_RNA (1)...(19): siRNA sense strand
ccaagcaggagaugaugga

SEQ ID NO: 154881 - RNA, 19 nt, Homo sapiens
  misc_RNA (1)...(19): siRNA sense strand
ggcccuggauguggagauu

SEQ ID NO: 154882 - RNA, 19 nt, Homo sapiens
  misc_RNA (1)...(19): siRNA sense strand
agaagcagagaacaauuug

SEQ ID NO: 154883 - RNA, 19 nt, Homo sapiens
  misc_RNA (1)...(19): siRNA sense strand
caagaagacggugaugauc

SEQ ID NO: 154884 - RNA, 19 nt, Homo sapiens
  misc_RNA (1)...(19): siRNA sense strand
gggaauuggaggaccgauu

SEQ ID NO: 154885 - RNA, 19 nt, Homo sapiens
  misc_RNA (1)...(19): siRNA sense strand
guccuacaccugcgagauu

SEQ ID NO: 154886 - RNA, 19 nt, Homo sapiens
  misc_RNA (1)...(19): siRNA sense strand
guacaagucgaagguguca

SEQ ID NO: 154887 - RNA, 19 nt, Homo sapiens
  misc_RNA (1)...(19): siRNA sense strand
gagauggacaugucuaagc

SEQ ID NO: 154888 - RNA, 19 nt, Homo sapiens
  misc_RNA (1)...(19): siRNA sense strand
uccggcaccucaaggauga

SEQ ID NO: 154889 - RNA, 19 nt, Homo sapiens
  misc_RNA (1)...(19): siRNA sense strand
gagaggagagccggaucaa

SEQ ID NO: 154890 - RNA, 19 nt, Homo sapiens
  misc_RNA (1)...(19): siRNA sense strand
agaucgcguuccuuaagaa

SEQ ID NO: 154891 - RNA, 19 nt, Homo sapiens
  misc_RNA (1)...(19): siRNA sense strand
acuaacgauucccugauga

SEQ ID NO: 154892 - RNA, 19 nt, Homo sapiens
  misc_RNA (1)...(19): siRNA sense strand
acaagucgaaggugucaga

SEQ ID NO: 154893 - RNA, 19 nt, Homo sapiens
  misc_RNA (1)...(19): siRNA sense strand
ugaaggaagaagcagagaa

SEQ ID NO: 154894 - RNA, 19 nt, Homo sapiens
  misc_RNA (1)...(19): siRNA sense strand
ugaccuggagcgcagaauu

SEQ ID NO: 154895 - RNA, 19 nt, Homo sapiens
  misc_RNA (1)...(19): siRNA sense strand
gagaccaucgcggcuaaga

SEQ ID NO: 154896 - RNA, 19 nt, Homo sapiens
  misc_RNA (1)...(19): siRNA sense strand
caaugaccguucgccaauc

SEQ ID NO: 154897 - RNA, 19 nt, Homo sapiens
  misc_RNA (1)...(19): siRNA sense strand
gcgagcugcuggacuucuc

SEQ ID NO: 154898 - RNA, 19 nt, Homo sapiens
  misc_RNA (1)...(19): siRNA sense strand
ugagguccauaccaagaag

SEQ ID NO: 154899 - RNA, 19 nt, Homo sapiens
  misc_RNA (1)...(19): siRNA sense strand
cuacucugcccucaacuuc

SEQ ID NO: 154900 - RNA, 19 nt, Homo sapiens
  misc_RNA (1)...(19): siRNA sense strand
ugaagauggcccuggaugu

SEQ ID NO: 154901 - RNA, 19 nt, Homo sapiens
  misc_RNA (1)...(19): siRNA sense strand
uggaggugcucacuaacca

SEQ ID NO: 154902 - RNA, 19 nt, Homo sapiens
  misc_RNA (1)...(19): siRNA sense strand
ggagauggacaugucuaag

SEQ ID NO: 154903 - RNA, 19 nt, Homo sapiens
  misc_RNA (1)...(19): siRNA sense strand
aaaccagcccugagcaaag

SEQ ID NO: 154904 - RNA, 19 nt, Homo sapiens
  misc_RNA (1)...(19): siRNA sense strand
ugcuacagcugucggagaa

SEQ ID NO: 154905 - RNA, 19 nt, Homo sapiens
  misc_RNA (1)...(19): siRNA sense strand
ucaccgagcgcuugaugug

SEQ ID NO: 154906 - RNA, 19 nt, Homo sapiens
  misc_RNA (1)...(19): siRNA sense strand
uggcgucggugcagcugaa

SEQ ID NO: 154907 - RNA, 19 nt, Homo sapiens
  misc_RNA (1)...(19): siRNA sense strand
gacaugaucuucuuccauu

SEQ ID NO: 154908 - RNA, 19 nt, Homo sapiens
  misc_RNA (1)...(19): siRNA sense strand
gagaauuacugcaaguuug

SEQ ID NO: 154909 - RNA, 19 nt, Homo sapiens
  misc_RNA (1)...(19): siRNA sense strand
gcaagucaaugccaugauc

SEQ ID NO: 154910 - RNA, 19 nt, Homo sapiens
  misc_RNA (1)...(19): siRNA sense strand
uaaaguggacgccuucuaa

SEQ ID NO: 154911 - RNA, 19 nt, Homo sapiens
  misc_RNA (1)...(19): siRNA sense strand
gcuuguggcugaaaccuuu

SEQ ID NO: 154912 - RNA, 19 nt, Homo sapiens
  misc_RNA (1)...(19): siRNA sense strand
caacaugguggacguauug

SEQ ID NO: 154913 - RNA, 19 nt, Homo sapiens
  misc_RNA (1)...(19): siRNA sense strand
cauccaaccucaucaguuc

SEQ ID NO: 154914 - RNA, 19 nt, Homo sapiens
  misc_RNA (1)...(19): siRNA sense strand
aggaagaccucaucaagug

SEQ ID NO: 154915 - RNA, 19 nt, Homo sapiens
  misc_RNA (1)...(19): siRNA sense strand
ucaaugccaugaucgagaa

SEQ ID NO: 154916 - RNA, 19 nt, Homo sapiens
  misc_RNA (1)...(19): siRNA sense strand
ccacauacuugggcgaguu

SEQ ID NO: 154917 - RNA, 19 nt, Homo sapiens
  misc_RNA (1)...(19): siRNA sense strand
ccaaugagaauuacugcaa

SEQ ID NO: 154918 - RNA, 19 nt, Homo sapiens
  misc_RNA (1)...(19): siRNA sense strand
cgggagaacgggaucaaua

SEQ ID NO: 154919 - RNA, 19 nt, Homo sapiens
  misc_RNA (1)...(19): siRNA sense strand
acccagaguccguguauua

SEQ ID NO: 154920 - RNA, 19 nt, Homo sapiens
  misc_RNA (1)...(19): siRNA sense strand
gagaacgggaucaauagga

SEQ ID NO: 154921 - RNA, 19 nt, Homo sapiens
  misc_RNA (1)...(19): siRNA sense strand
ugagaauuacugcaaguuu

SEQ ID NO: 154922 - RNA, 19 nt, Homo sapiens
  misc_RNA (1)...(19): siRNA sense strand
guggacgccuucuaagaug

SEQ ID NO: 154923 - RNA, 19 nt, Homo sapiens
  misc_RNA (1)...(19): siRNA sense strand
guaaaguggacgccuucua

SEQ ID NO: 154924 - RNA, 19 nt, Homo sapiens
  misc_RNA (1)...(19): siRNA sense strand
cagaguccguguauuacug

SEQ ID NO: 154925 - RNA, 19 nt, Homo sapiens
  misc_RNA (1)...(19): siRNA sense strand
gaagcuggaaccacuguca

SEQ ID NO: 154926 - RNA, 19 nt, Homo sapiens
  misc_RNA (1)...(19): siRNA sense strand
gcacaacaugguggacgua

SEQ ID NO: 154927 - RNA, 19 nt, Homo sapiens
  misc_RNA (1)...(19): siRNA sense strand
gggagaacgggaucaauag

SEQ ID NO: 154928 - RNA, 19 nt, Homo sapiens
  misc_RNA (1)...(19): siRNA sense strand
caacccagaguccguguau

SEQ ID NO: 154929 - RNA, 19 nt, Homo sapiens
  misc_RNA (1)...(19): siRNA sense strand
caaccgcggugugaauuac

SEQ ID NO: 154930 - RNA, 19 nt, Homo sapiens
  misc_RNA (1)...(19): siRNA sense strand
agaacgggaucaauaggau

SEQ ID NO: 154931 - RNA, 19 nt, Homo sapiens
  misc_RNA (1)...(19): siRNA sense strand
agaauuacugcaaguuuga

SEQ ID NO: 154932 - RNA, 19 nt, Homo sapiens
  misc_RNA (1)...(19): siRNA sense strand
acaacaugguggacguauu

SEQ ID NO: 154933 - RNA, 19 nt, Homo sapiens
  misc_RNA (1)...(19): siRNA sense strand
ucaaccgcggugugaauua

SEQ ID NO: 154934 - RNA, 19 nt, Homo sapiens
  misc_RNA (1)...(19): siRNA sense strand
uaaagcacagcucgacguu

SEQ ID NO: 154935 - RNA, 19 nt, Homo sapiens
  misc_RNA (1)...(19): siRNA sense strand
ugaaaccuuugcccagaag

SEQ ID NO: 154936 - RNA, 19 nt, Homo sapiens
  misc_RNA (1)...(19): siRNA sense strand
cugaaaccuuugcccagaa

SEQ ID NO: 154937 - RNA, 19 nt, Homo sapiens
  misc_RNA (1)...(19): siRNA sense strand
guguuuagucccgcacuua

SEQ ID NO: 154938 - RNA, 19 nt, Homo sapiens
  misc_RNA (1)...(19): siRNA sense strand
gagaucaacaacccagagu

SEQ ID NO: 154939 - RNA, 19 nt, Homo sapiens
  misc_RNA (1)...(19): siRNA sense strand
ugagaagaacgaggacuga

SEQ ID NO: 154940 - RNA, 19 nt, Homo sapiens
  misc_RNA (1)...(19): siRNA sense strand
ugagaccauucgcuaccuu

SEQ ID NO: 154941 - RNA, 19 nt, Homo sapiens
  misc_RNA (1)...(19): siRNA sense strand
aaugagaauuacugcaagu

SEQ ID NO: 154942 - RNA, 19 nt, Homo sapiens
  misc_RNA (1)...(19): siRNA sense strand
ggagaacgggaucaauagg

SEQ ID NO: 154943 - RNA, 19 nt, Homo sapiens
  misc_RNA (1)...(19): siRNA sense strand
ggacgccuucuaagaugau

SEQ ID NO: 154944 - RNA, 19 nt, Homo sapiens
  misc_RNA (1)...(19): siRNA sense strand
cgacaugaucuucuuccau

SEQ ID NO: 154945 - RNA, 19 nt, Homo sapiens
  misc_RNA (1)...(19): siRNA sense strand
cagcaagucaaugccauga

SEQ ID NO: 154946 - RNA, 19 nt, Homo sapiens
  misc_RNA (1)...(19): siRNA sense strand
ucaauaggaucggaaaccu

SEQ ID NO: 154947 - RNA, 19 nt, Homo sapiens
  misc_RNA (1)...(19): siRNA sense strand
gcuggugcccaaugagaau

SEQ ID NO: 154948 - RNA, 19 nt, Homo sapiens
  misc_RNA (1)...(19): siRNA sense strand
cuucuuccauuccuacaag

SEQ ID NO: 154949 - RNA, 19 nt, Homo sapiens
  misc_RNA (1)...(19): siRNA sense strand
uggacgccuucuaagauga

SEQ ID NO: 154950 - RNA, 19 nt, Homo sapiens
  misc_RNA (1)...(19): siRNA sense strand
gacaugaucuucuuccauu

SEQ ID NO: 154951 - RNA, 19 nt, Homo sapiens
  misc_RNA (1)...(19): siRNA sense strand
gagaauuacugcaaguuug

SEQ ID NO: 154952 - RNA, 19 nt, Homo sapiens
  misc_RNA (1)...(19): siRNA sense strand
gcaagucaaugccaugauc

SEQ ID NO: 154953 - RNA, 19 nt, Homo sapiens
  misc_RNA (1)...(19): siRNA sense strand
uaaaguggacgccuucuaa

SEQ ID NO: 154954 - RNA, 19 nt, Homo sapiens
  misc_RNA (1)...(19): siRNA sense strand
gcuuguggcugaaaccuuu

SEQ ID NO: 154955 - RNA, 19 nt, Homo sapiens
  misc_RNA (1)...(19): siRNA sense strand
caacaugguggacguauug

SEQ ID NO: 154956 - RNA, 19 nt, Homo sapiens
  misc_RNA (1)...(19): siRNA sense strand
cauccaaccucaucaguuc

SEQ ID NO: 154957 - RNA, 19 nt, Homo sapiens
  misc_RNA (1)...(19): siRNA sense strand
aggaagaccucaucaagug

SEQ ID NO: 154958 - RNA, 19 nt, Homo sapiens
  misc_RNA (1)...(19): siRNA sense strand
ucaaugccaugaucgagaa

SEQ ID NO: 154959 - RNA, 19 nt, Homo sapiens
  misc_RNA (1)...(19): siRNA sense strand
ccacauacuugggcgaguu

SEQ ID NO: 154960 - RNA, 19 nt, Homo sapiens
  misc_RNA (1)...(19): siRNA sense strand
ccaaugagaauuacugcaa

SEQ ID NO: 154961 - RNA, 19 nt, Homo sapiens
  misc_RNA (1)...(19): siRNA sense strand
cgggagaacgggaucaaua

SEQ ID NO: 154962 - RNA, 19 nt, Homo sapiens
  misc_RNA (1)...(19): siRNA sense strand
acccagaguccguguauua

SEQ ID NO: 154963 - RNA, 19 nt, Homo sapiens
  misc_RNA (1)...(19): siRNA sense strand
gagaacgggaucaauagga

SEQ ID NO: 154964 - RNA, 19 nt, Homo sapiens
  misc_RNA (1)...(19): siRNA sense strand
ugagaauuacugcaaguuu

SEQ ID NO: 154965 - RNA, 19 nt, Homo sapiens
  misc_RNA (1)...(19): siRNA sense strand
guggacgccuucuaagaug

SEQ ID NO: 154966 - RNA, 19 nt, Homo sapiens
  misc_RNA (1)...(19): siRNA sense strand
guaaaguggacgccuucua

SEQ ID NO: 154967 - RNA, 19 nt, Homo sapiens
  misc_RNA (1)...(19): siRNA sense strand
cagaguccguguauuacug

SEQ ID NO: 154968 - RNA, 19 nt, Homo sapiens
  misc_RNA (1)...(19): siRNA sense strand
gaagcuggaaccacuguca

SEQ ID NO: 154969 - RNA, 19 nt, Homo sapiens
  misc_RNA (1)...(19): siRNA sense strand
gcacaacaugguggacgua

SEQ ID NO: 154970 - RNA, 19 nt, Homo sapiens
  misc_RNA (1)...(19): siRNA sense strand
gggagaacgggaucaauag

SEQ ID NO: 154971 - RNA, 19 nt, Homo sapiens
  misc_RNA (1)...(19): siRNA sense strand
caacccagaguccguguau

SEQ ID NO: 154972 - RNA, 19 nt, Homo sapiens
  misc_RNA (1)...(19): siRNA sense strand
caaccgcggugugaauuac

SEQ ID NO: 154973 - RNA, 19 nt, Homo sapiens
  misc_RNA (1)...(19): siRNA sense strand
agaacgggaucaauaggau

SEQ ID NO: 154974 - RNA, 19 nt, Homo sapiens
  misc_RNA (1)...(19): siRNA sense strand
agaauuacugcaaguuuga

SEQ ID NO: 154975 - RNA, 19 nt, Homo sapiens
  misc_RNA (1)...(19): siRNA sense strand
acaacaugguggacguauu

SEQ ID NO: 154976 - RNA, 19 nt, Homo sapiens
  misc_RNA (1)...(19): siRNA sense strand
ucaaccgcggugugaauua

SEQ ID NO: 154977 - RNA, 19 nt, Homo sapiens
  misc_RNA (1)...(19): siRNA sense strand
uaaagcacagcucgacguu

SEQ ID NO: 154978 - RNA, 19 nt, Homo sapiens
  misc_RNA (1)...(19): siRNA sense strand
ugaaaccuuugcccagaag

SEQ ID NO: 154979 - RNA, 19 nt, Homo sapiens
  misc_RNA (1)...(19): siRNA sense strand
cugaaaccuuugcccagaa

SEQ ID NO: 154980 - RNA, 19 nt, Homo sapiens
  misc_RNA (1)...(19): siRNA sense strand
guguuuagucccgcacuua

SEQ ID NO: 154981 - RNA, 19 nt, Homo sapiens
  misc_RNA (1)...(19): siRNA sense strand
gagaucaacaacccagagu

SEQ ID NO: 154982 - RNA, 19 nt, Homo sapiens
  misc_RNA (1)...(19): siRNA sense strand
ugagaagaacgaggacuga

SEQ ID NO: 154983 - RNA, 19 nt, Homo sapiens
  misc_RNA (1)...(19): siRNA sense strand
ugagaccauucgcuaccuu

SEQ ID NO: 154984 - RNA, 19 nt, Homo sapiens
  misc_RNA (1)...(19): siRNA sense strand
aaugagaauuacugcaagu

SEQ ID NO: 154985 - RNA, 19 nt, Homo sapiens
  misc_RNA (1)...(19): siRNA sense strand
ggagaacgggaucaauagg

SEQ ID NO: 154986 - RNA, 19 nt, Homo sapiens
  misc_RNA (1)...(19): siRNA sense strand
ggacgccuucuaagaugau

SEQ ID NO: 154987 - RNA, 19 nt, Homo sapiens
  misc_RNA (1)...(19): siRNA sense strand
cgacaugaucuucuuccau

SEQ ID NO: 154988 - RNA, 19 nt, Homo sapiens
  misc_RNA (1)...(19): siRNA sense strand
cagcaagucaaugccauga

SEQ ID NO: 154989 - RNA, 19 nt, Homo sapiens
  misc_RNA (1)...(19): siRNA sense strand
ucaauaggaucggaaaccu

SEQ ID NO: 154990 - RNA, 19 nt, Homo sapiens
  misc_RNA (1)...(19): siRNA sense strand
gcuggugcccaaugagaau

SEQ ID NO: 154991 - RNA, 19 nt, Homo sapiens
  misc_RNA (1)...(19): siRNA sense strand
cuucuuccauuccuacaag

SEQ ID NO: 154992 - RNA, 19 nt, Homo sapiens
  misc_RNA (1)...(19): siRNA sense strand
uggacgccuucuaagauga

SEQ ID NO: 154993 - RNA, 19 nt, Homo sapiens
  misc_RNA (1)...(19): siRNA sense strand
gacaugaucuucuuccauu

SEQ ID NO: 154994 - RNA, 19 nt, Homo sapiens
  misc_RNA (1)...(19): siRNA sense strand
gagaauuacugcaaguuug

SEQ ID NO: 154995 - RNA, 19 nt, Homo sapiens
  misc_RNA (1)...(19): siRNA sense strand
gcaagucaaugccaugauc

SEQ ID NO: 154996 - RNA, 19 nt, Homo sapiens
  misc_RNA (1)...(19): siRNA sense strand
uaaaguggacgccuucuaa

SEQ ID NO: 154997 - RNA, 19 nt, Homo sapiens
  misc_RNA (1)...(19): siRNA sense strand
gcuuguggcugaaaccuuu

SEQ ID NO: 154998 - RNA, 19 nt, Homo sapiens
  misc_RNA (1)...(19): siRNA sense strand
caacaugguggacguauug

SEQ ID NO: 154999 - RNA, 19 nt, Homo sapiens
  misc_RNA (1)...(19): siRNA sense strand
cauccaaccucaucaguuc

SEQ ID NO: 155000 - RNA, 19 nt, Homo sapiens
  misc_RNA (1)...(19): siRNA sense strand
aggaagaccucaucaagug

SEQ ID NO: 155001 - RNA, 19 nt, Homo sapiens
  misc_RNA (1)...(19): siRNA sense strand
ucaaugccaugaucgagaa

SEQ ID NO: 155002 - RNA, 19 nt, Homo sapiens
  misc_RNA (1)...(19): siRNA sense strand
ccacauacuugggcgaguu

SEQ ID NO: 155003 - RNA, 19 nt, Homo sapiens
  misc_RNA (1)...(19): siRNA sense strand
ccaaugagaauuacugcaa

SEQ ID NO: 155004 - RNA, 19 nt, Homo sapiens
  misc_RNA (1)...(19): siRNA sense strand
cgggagaacgggaucaaua

SEQ ID NO: 155005 - RNA, 19 nt, Homo sapiens
  misc_RNA (1)...(19): siRNA sense strand
acccagaguccguguauua

SEQ ID NO: 155006 - RNA, 19 nt, Homo sapiens
  misc_RNA (1)...(19): siRNA sense strand
gagaacgggaucaauagga

SEQ ID NO: 155007 - RNA, 19 nt, Homo sapiens
  misc_RNA (1)...(19): siRNA sense strand
ugagaauuacugcaaguuu

SEQ ID NO: 155008 - RNA, 19 nt, Homo sapiens
  misc_RNA (1)...(19): siRNA sense strand
guggacgccuucuaagaug

SEQ ID NO: 155009 - RNA, 19 nt, Homo sapiens
  misc_RNA (1)...(19): siRNA sense strand
guaaaguggacgccuucua

SEQ ID NO: 155010 - RNA, 19 nt, Homo sapiens
  misc_RNA (1)...(19): siRNA sense strand
cagaguccguguauuacug

SEQ ID NO: 155011 - RNA, 19 nt, Homo sapiens
  misc_RNA (1)...(19): siRNA sense strand
gaagcuggaaccacuguca

SEQ ID NO: 155012 - RNA, 19 nt, Homo sapiens
  misc_RNA (1)...(19): siRNA sense strand
gcacaacaugguggacgua

SEQ ID NO: 155013 - RNA, 19 nt, Homo sapiens
  misc_RNA (1)...(19): siRNA sense strand
gggagaacgggaucaauag

SEQ ID NO: 155014 - RNA, 19 nt, Homo sapiens
  misc_RNA (1)...(19): siRNA sense strand
caacccagaguccguguau

SEQ ID NO: 155015 - RNA, 19 nt, Homo sapiens
  misc_RNA (1)...(19): siRNA sense strand
caaccgcggugugaauuac

SEQ ID NO: 155016 - RNA, 19 nt, Homo sapiens
  misc_RNA (1)...(19): siRNA sense strand
agaacgggaucaauaggau

SEQ ID NO: 155017 - RNA, 19 nt, Homo sapiens
  misc_RNA (1)...(19): siRNA sense strand
agaauuacugcaaguuuga

SEQ ID NO: 155018 - RNA, 19 nt, Homo sapiens
  misc_RNA (1)...(19): siRNA sense strand
acaacaugguggacguauu

SEQ ID NO: 155019 - RNA, 19 nt, Homo sapiens
  misc_RNA (1)...(19): siRNA sense strand
ucaaccgcggugugaauua

SEQ ID NO: 155020 - RNA, 19 nt, Homo sapiens
  misc_RNA (1)...(19): siRNA sense strand
uaaagcacagcucgacguu

SEQ ID NO: 155021 - RNA, 19 nt, Homo sapiens
  misc_RNA (1)...(19): siRNA sense strand
ugaaaccuuugcccagaag

SEQ ID NO: 155022 - RNA, 19 nt, Homo sapiens
  misc_RNA (1)...(19): siRNA sense strand
cugaaaccuuugcccagaa

SEQ ID NO: 155023 - RNA, 19 nt, Homo sapiens
  misc_RNA (1)...(19): siRNA sense strand
guguuuagucccgcacuua

SEQ ID NO: 155024 - RNA, 19 nt, Homo sapiens
  misc_RNA (1)...(19): siRNA sense strand
gagaucaacaacccagagu

SEQ ID NO: 155025 - RNA, 19 nt, Homo sapiens
  misc_RNA (1)...(19): siRNA sense strand
ugagaagaacgaggacuga

SEQ ID NO: 155026 - RNA, 19 nt, Homo sapiens
  misc_RNA (1)...(19): siRNA sense strand
ugagaccauucgcuaccuu

SEQ ID NO: 155027 - RNA, 19 nt, Homo sapiens
  misc_RNA (1)...(19): siRNA sense strand
aaugagaauuacugcaagu

SEQ ID NO: 155028 - RNA, 19 nt, Homo sapiens
  misc_RNA (1)...(19): siRNA sense strand
ggagaacgggaucaauagg

SEQ ID NO: 155029 - RNA, 19 nt, Homo sapiens
  misc_RNA (1)...(19): siRNA sense strand
ggacgccuucuaagaugau

SEQ ID NO: 155030 - RNA, 19 nt, Homo sapiens
  misc_RNA (1)...(19): siRNA sense strand
cgacaugaucuucuuccau

SEQ ID NO: 155031 - RNA, 19 nt, Homo sapiens
  misc_RNA (1)...(19): siRNA sense strand
cagcaagucaaugccauga

SEQ ID NO: 155032 - RNA, 19 nt, Homo sapiens
  misc_RNA (1)...(19): siRNA sense strand
ucaauaggaucggaaaccu

SEQ ID NO: 155033 - RNA, 19 nt, Homo sapiens
  misc_RNA (1)...(19): siRNA sense strand
gcuggugcccaaugagaau

SEQ ID NO: 155034 - RNA, 19 nt, Homo sapiens
  misc_RNA (1)...(19): siRNA sense strand
cuucuuccauuccuacaag

SEQ ID NO: 155035 - RNA, 19 nt, Homo sapiens
  misc_RNA (1)...(19): siRNA sense strand
uggacgccuucuaagauga

SEQ ID NO: 155036 - RNA, 19 nt, Homo sapiens
  misc_RNA (1)...(19): siRNA sense strand
ggaggaagaucgcuuaaag

SEQ ID NO: 155037 - RNA, 19 nt, Homo sapiens
  misc_RNA (1)...(19): siRNA sense strand
gaauaucacuuugugucua

SEQ ID NO: 155038 - RNA, 19 nt, Homo sapiens
  misc_RNA (1)...(19): siRNA sense strand
augagaagcuucgcuauua

SEQ ID NO: 155039 - RNA, 19 nt, Homo sapiens
  misc_RNA (1)...(19): siRNA sense strand
cuccggagcugcugacuua

SEQ ID NO: 155040 - RNA, 19 nt, Homo sapiens
  misc_RNA (1)...(19): siRNA sense strand
gagaugagcuccgagaagu

SEQ ID NO: 155041 - RNA, 19 nt, Homo sapiens
  misc_RNA (1)...(19): siRNA sense strand
gaaagagccaugagaagga

SEQ ID NO: 155042 - RNA, 19 nt, Homo sapiens
  misc_RNA (1)...(19): siRNA sense strand
ucaaaguggucuuagagaa

SEQ ID NO: 155043 - RNA, 19 nt, Homo sapiens
  misc_RNA (1)...(19): siRNA sense strand
gaaggaaggaguggaauau

SEQ ID NO: 155044 - RNA, 19 nt, Homo sapiens
  misc_RNA (1)...(19): siRNA sense strand
aagcuucgcuauuaugaaa

SEQ ID NO: 155045 - RNA, 19 nt, Homo sapiens
  misc_RNA (1)...(19): siRNA sense strand
cgacuuacaucacaacaag

SEQ ID NO: 155046 - RNA, 19 nt, Homo sapiens
  misc_RNA (1)...(19): siRNA sense strand
acgaagagguggccaggua

SEQ ID NO: 155047 - RNA, 19 nt, Homo sapiens
  misc_RNA (1)...(19): siRNA sense strand
uagagaagcugagcaagga

SEQ ID NO: 155048 - RNA, 19 nt, Homo sapiens
  misc_RNA (1)...(19): siRNA sense strand
ggaggacucugguuugcau

SEQ ID NO: 155049 - RNA, 19 nt, Homo sapiens
  misc_RNA (1)...(19): siRNA sense strand
caaagagaccugugacugu

SEQ ID NO: 155050 - RNA, 19 nt, Homo sapiens
  misc_RNA (1)...(19): siRNA sense strand
ggaacauggugaauauaag

SEQ ID NO: 155051 - RNA, 19 nt, Homo sapiens
  misc_RNA (1)...(19): siRNA sense strand
gaagauucaugagaagcuu

SEQ ID NO: 155052 - RNA, 19 nt, Homo sapiens
  misc_RNA (1)...(19): siRNA sense strand
ccuggaacauggugaauau

SEQ ID NO: 155053 - RNA, 19 nt, Homo sapiens
  misc_RNA (1)...(19): siRNA sense strand
cagaagcacugaaacaacu

SEQ ID NO: 155054 - RNA, 19 nt, Homo sapiens
  misc_RNA (1)...(19): siRNA sense strand
ugagaagcuucgcuauuau

SEQ ID NO: 155055 - RNA, 19 nt, Homo sapiens
  misc_RNA (1)...(19): siRNA sense strand
ggacacagcagccccauuu

SEQ ID NO: 155056 - RNA, 19 nt, Homo sapiens
  misc_RNA (1)...(19): siRNA sense strand
gaugaggaaucggugaaga

SEQ ID NO: 155057 - RNA, 19 nt, Homo sapiens
  misc_RNA (1)...(19): siRNA sense strand
gaacauggugaauauaagg

SEQ ID NO: 155058 - RNA, 19 nt, Homo sapiens
  misc_RNA (1)...(19): siRNA sense strand
uaaaggagagcaagguguu

SEQ ID NO: 155059 - RNA, 19 nt, Homo sapiens
  misc_RNA (1)...(19): siRNA sense strand
gaugagcuccgagaaguga

SEQ ID NO: 155060 - RNA, 19 nt, Homo sapiens
  misc_RNA (1)...(19): siRNA sense strand
ggacucugguuugcaugaa

SEQ ID NO: 155061 - RNA, 19 nt, Homo sapiens
  misc_RNA (1)...(19): siRNA sense strand
ccaggaggaagaucgcuua

SEQ ID NO: 155062 - RNA, 19 nt, Homo sapiens
  misc_RNA (1)...(19): siRNA sense strand
gagaagcuucgcuauuaug

SEQ ID NO: 155063 - RNA, 19 nt, Homo sapiens
  misc_RNA (1)...(19): siRNA sense strand
gacgagaucagccagauuc

SEQ ID NO: 155064 - RNA, 19 nt, Homo sapiens
  misc_RNA (1)...(19): siRNA sense strand
uggaacauggugaauauaa

SEQ ID NO: 155065 - RNA, 19 nt, Homo sapiens
  misc_RNA (1)...(19): siRNA sense strand
aggaaggaguggaauauca

SEQ ID NO: 155066 - RNA, 19 nt, Homo sapiens
  misc_RNA (1)...(19): siRNA sense strand
aaagagccaugagaaggaa

SEQ ID NO: 155067 - RNA, 19 nt, Homo sapiens
  misc_RNA (1)...(19): siRNA sense strand
gggcugugcucaugguaca

SEQ ID NO: 155068 - RNA, 19 nt, Homo sapiens
  misc_RNA (1)...(19): siRNA sense strand
gcauuacgggcaccuggua

SEQ ID NO: 155069 - RNA, 19 nt, Homo sapiens
  misc_RNA (1)...(19): siRNA sense strand
caauaucgaugaggauuuu

SEQ ID NO: 155070 - RNA, 19 nt, Homo sapiens
  misc_RNA (1)...(19): siRNA sense strand
ccuaugaucagccuuguga

SEQ ID NO: 155071 - RNA, 19 nt, Homo sapiens
  misc_RNA (1)...(19): siRNA sense strand
caugagaagcuucgcuauu

SEQ ID NO: 155072 - RNA, 19 nt, Homo sapiens
  misc_RNA (1)...(19): siRNA sense strand
cauggugaauauaaggaaa

SEQ ID NO: 155073 - RNA, 19 nt, Homo sapiens
  misc_RNA (1)...(19): siRNA sense strand
caaaguggucuuagagaag

SEQ ID NO: 155074 - RNA, 19 nt, Homo sapiens
  misc_RNA (1)...(19): siRNA sense strand
ggagccagaagcacugaaa

SEQ ID NO: 155075 - RNA, 19 nt, Homo sapiens
  misc_RNA (1)...(19): siRNA sense strand
uaucggaggacucugguuu

SEQ ID NO: 155076 - RNA, 19 nt, Homo sapiens
  misc_RNA (1)...(19): siRNA sense strand
gcacuuuggcgucgcuguu

SEQ ID NO: 155077 - RNA, 19 nt, Homo sapiens
  misc_RNA (1)...(19): siRNA sense strand
gaagcuucgcuauuaugaa

SEQ ID NO: 155078 - RNA, 19 nt, Homo sapiens
  misc_RNA (1)...(19): siRNA sense strand
ugucuaagcaagcauuuga

SEQ ID NO: 155079 - RNA, 19 nt, Homo sapiens
  misc_RNA (1)...(19): siRNA sense strand
agaaggaaggaguggaaua

SEQ ID NO: 155080 - RNA, 19 nt, Homo sapiens
  misc_RNA (1)...(19): siRNA sense strand
gacaauaucgaugaggauu

SEQ ID NO: 155081 - RNA, 19 nt, Homo sapiens
  misc_RNA (1)...(19): siRNA sense strand
aagccucaguuacuuaaug

SEQ ID NO: 155082 - RNA, 19 nt, Homo sapiens
  misc_RNA (1)...(19): siRNA sense strand
ggaauaucacuuugugucu

SEQ ID NO: 155083 - RNA, 19 nt, Homo sapiens
  misc_RNA (1)...(19): siRNA sense strand
gcucaaaguggucuuagag

SEQ ID NO: 155084 - RNA, 19 nt, Homo sapiens
  misc_RNA (1)...(19): siRNA sense strand
gaagcacugaaacaacuga

SEQ ID NO: 155085 - RNA, 19 nt, Homo sapiens
  misc_RNA (1)...(19): siRNA sense strand
gcugcugacuuacgaagag

SEQ ID NO: 155086 - RNA, 19 nt, Homo sapiens
  misc_RNA (1)...(19): siRNA sense strand
gacucugguuugcaugaaa

SEQ ID NO: 155087 - RNA, 19 nt, Homo sapiens
  misc_RNA (1)...(19): siRNA sense strand
gaggccgacuuacaucaca

SEQ ID NO: 155088 - RNA, 19 nt, Homo sapiens
  misc_RNA (1)...(19): siRNA sense strand
ugagggauguuuucaguga

SEQ ID NO: 155089 - RNA, 19 nt, Homo sapiens
  misc_RNA (1)...(19): siRNA sense strand
ugacacgguugcccagaag

SEQ ID NO: 155090 - RNA, 19 nt, Homo sapiens
  misc_RNA (1)...(19): siRNA sense strand
gccagaagcacugaaacaa

SEQ ID NO: 155091 - RNA, 19 nt, Homo sapiens
  misc_RNA (1)...(19): siRNA sense strand
ugagaaggaaggaguggaa

SEQ ID NO: 155092 - RNA, 19 nt, Homo sapiens
  misc_RNA (1)...(19): siRNA sense strand
ugagaacccacagcacuuu

SEQ ID NO: 155093 - RNA, 19 nt, Homo sapiens
  misc_RNA (1)...(19): siRNA sense strand
aggaagaucgcuuaaagga

SEQ ID NO: 155094 - RNA, 19 nt, Homo sapiens
  misc_RNA (1)...(19): siRNA sense strand
gaugagcagcagcaagaga

SEQ ID NO: 155095 - RNA, 19 nt, Homo sapiens
  misc_RNA (1)...(19): siRNA sense strand
uaugaaaggcaaaguccaa

SEQ ID NO: 155096 - RNA, 19 nt, Homo sapiens
  misc_RNA (1)...(19): siRNA sense strand
uguaaagccugcaauucag

SEQ ID NO: 155097 - RNA, 19 nt, Homo sapiens
  misc_RNA (1)...(19): siRNA sense strand
ccucaaagggcacuaugug

SEQ ID NO: 155098 - RNA, 19 nt, Homo sapiens
  misc_RNA (1)...(19): siRNA sense strand
uggcgucgcuguuccacau

SEQ ID NO: 155099 - RNA, 19 nt, Homo sapiens
  misc_RNA (1)...(19): siRNA sense strand
ggagagcaagguguucaug

SEQ ID NO: 155100 - RNA, 19 nt, Homo sapiens
  misc_RNA (1)...(19): siRNA sense strand
gagaacccacagcacuuug

SEQ ID NO: 155101 - RNA, 19 nt, Homo sapiens
  misc_RNA (1)...(19): siRNA sense strand
cucaguuacuuaaugaaga

SEQ ID NO: 155102 - RNA, 19 nt, Homo sapiens
  misc_RNA (1)...(19): siRNA sense strand
acaauaucgaugaggauuu

SEQ ID NO: 155103 - RNA, 19 nt, Homo sapiens
  misc_RNA (1)...(19): siRNA sense strand
uuguaaagccugcaauuca

SEQ ID NO: 155104 - RNA, 19 nt, Homo sapiens
  misc_RNA (1)...(19): siRNA sense strand
agaagcuucgcuauuauga

SEQ ID NO: 155105 - RNA, 19 nt, Homo sapiens
  misc_RNA (1)...(19): siRNA sense strand
agccucaguuacuuaauga

SEQ ID NO: 155106 - RNA, 19 nt, Homo sapiens
  misc_RNA (1)...(19): siRNA sense strand
caggagagacgacuaagcu

SEQ ID NO: 155107 - RNA, 19 nt, Homo sapiens
  misc_RNA (1)...(19): siRNA sense strand
gaaaaucuguauggaacca

SEQ ID NO: 155108 - RNA, 19 nt, Homo sapiens
  misc_RNA (1)...(19): siRNA sense strand
gaccugacuccaaccacaa

SEQ ID NO: 155109 - RNA, 19 nt, Homo sapiens
  misc_RNA (1)...(19): siRNA sense strand
cggagcugcugacuuacga

SEQ ID NO: 155110 - RNA, 19 nt, Homo sapiens
  misc_RNA (1)...(19): siRNA sense strand
gaggaagaucgcuuaaagg

SEQ ID NO: 155111 - RNA, 19 nt, Homo sapiens
  misc_RNA (1)...(19): siRNA sense strand
cuacagccagcucaaagug

SEQ ID NO: 155112 - RNA, 19 nt, Homo sapiens
  misc_RNA (1)...(19): siRNA sense strand
uugaugagcagcagcaaga

SEQ ID NO: 155113 - RNA, 19 nt, Homo sapiens
  misc_RNA (1)...(19): siRNA sense strand
ggaaggaguggaauaucac

SEQ ID NO: 155114 - RNA, 19 nt, Homo sapiens
  misc_RNA (1)...(19): siRNA sense strand
cgguugcccagaagaauuu

SEQ ID NO: 155115 - RNA, 19 nt, Homo sapiens
  misc_RNA (1)...(19): siRNA sense strand
ggacgugauggaggaguug

SEQ ID NO: 155116 - RNA, 19 nt, Homo sapiens
  misc_RNA (1)...(19): siRNA sense strand
gugacaaagagaccuguga

SEQ ID NO: 155117 - RNA, 19 nt, Homo sapiens
  misc_RNA (1)...(19): siRNA sense strand
cgacgagaucagccagauu

SEQ ID NO: 155118 - RNA, 19 nt, Homo sapiens
  misc_RNA (1)...(19): siRNA sense strand
ggauguggagccagaagca

SEQ ID NO: 155119 - RNA, 19 nt, Homo sapiens
  misc_RNA (1)...(19): siRNA sense strand
ccagaagcacugaaacaac

SEQ ID NO: 155120 - RNA, 19 nt, Homo sapiens
  misc_RNA (1)...(19): siRNA sense strand
ccagcucaaaguggucuua

SEQ ID NO: 155121 - RNA, 19 nt, Homo sapiens
  misc_RNA (1)...(19): siRNA sense strand
gaacaaacgcuccaaguau

SEQ ID NO: 155122 - RNA, 19 nt, Homo sapiens
  misc_RNA (1)...(19): siRNA sense strand
aacaaacgcuccaaguaua

SEQ ID NO: 155123 - RNA, 19 nt, Homo sapiens
  misc_RNA (1)...(19): siRNA sense strand
gggaggaccuucucugugu

SEQ ID NO: 155124 - RNA, 19 nt, Homo sapiens
  misc_RNA (1)...(19): siRNA sense strand
auaagaagcuccugaagca

SEQ ID NO: 155125 - RNA, 19 nt, Homo sapiens
  misc_RNA (1)...(19): siRNA sense strand
agaacaaacgcuccaagua

SEQ ID NO: 155126 - RNA, 19 nt, Homo sapiens
  misc_RNA (1)...(19): siRNA sense strand
gcaagccgaggaccaucua

SEQ ID NO: 155127 - RNA, 19 nt, Homo sapiens
  misc_RNA (1)...(19): siRNA sense strand
acaaacgcuccaaguauaa

SEQ ID NO: 155128 - RNA, 19 nt, Homo sapiens
  misc_RNA (1)...(19): siRNA sense strand
agaagcuccugaagcagaa

SEQ ID NO: 155129 - RNA, 19 nt, Homo sapiens
  misc_RNA (1)...(19): siRNA sense strand
ucacccagacccagguaaa

SEQ ID NO: 155130 - RNA, 19 nt, Homo sapiens
  misc_RNA (1)...(19): siRNA sense strand
cagaacaaacgcuccaagu

SEQ ID NO: 155131 - RNA, 19 nt, Homo sapiens
  misc_RNA (1)...(19): siRNA sense strand
agguaaagaucugguuuca

SEQ ID NO: 155132 - RNA, 19 nt, Homo sapiens
  misc_RNA (1)...(19): siRNA sense strand
gaacaaacgcuccaaguau

SEQ ID NO: 155133 - RNA, 19 nt, Homo sapiens
  misc_RNA (1)...(19): siRNA sense strand
aacaaacgcuccaaguaua

SEQ ID NO: 155134 - RNA, 19 nt, Homo sapiens
  misc_RNA (1)...(19): siRNA sense strand
gggaggaccuucucugugu

SEQ ID NO: 155135 - RNA, 19 nt, Homo sapiens
  misc_RNA (1)...(19): siRNA sense strand
auaagaagcuccugaagca

SEQ ID NO: 155136 - RNA, 19 nt, Homo sapiens
  misc_RNA (1)...(19): siRNA sense strand
agaacaaacgcuccaagua

SEQ ID NO: 155137 - RNA, 19 nt, Homo sapiens
  misc_RNA (1)...(19): siRNA sense strand
gcaagccgaggaccaucua

SEQ ID NO: 155138 - RNA, 19 nt, Homo sapiens
  misc_RNA (1)...(19): siRNA sense strand
acaaacgcuccaaguauaa

SEQ ID NO: 155139 - RNA, 19 nt, Homo sapiens
  misc_RNA (1)...(19): siRNA sense strand
agaagcuccugaagcagaa

SEQ ID NO: 155140 - RNA, 19 nt, Homo sapiens
  misc_RNA (1)...(19): siRNA sense strand
ucacccagacccagguaaa

SEQ ID NO: 155141 - RNA, 19 nt, Homo sapiens
  misc_RNA (1)...(19): siRNA sense strand
cagaacaaacgcuccaagu

SEQ ID NO: 155142 - RNA, 19 nt, Homo sapiens
  misc_RNA (1)...(19): siRNA sense strand
agguaaagaucugguuuca

SEQ ID NO: 155143 - RNA, 19 nt, Homo sapiens
  misc_RNA (1)...(19): siRNA sense strand
guaaagaggcgaaguauua

SEQ ID NO: 155144 - RNA, 19 nt, Homo sapiens
  misc_RNA (1)...(19): siRNA sense strand
gguaauagcuucuacaaga

SEQ ID NO: 155145 - RNA, 19 nt, Homo sapiens
  misc_RNA (1)...(19): siRNA sense strand
caagaaauauccucuacua

SEQ ID NO: 155146 - RNA, 19 nt, Homo sapiens
  misc_RNA (1)...(19): siRNA sense strand
gagcagagcugaaaauuuu

SEQ ID NO: 155147 - RNA, 19 nt, Homo sapiens
  misc_RNA (1)...(19): siRNA sense strand
gaaccaaauuuaccaaguu

SEQ ID NO: 155148 - RNA, 19 nt, Homo sapiens
  misc_RNA (1)...(19): siRNA sense strand
gaaguuauacuccuuaaga

SEQ ID NO: 155149 - RNA, 19 nt, Homo sapiens
  misc_RNA (1)...(19): siRNA sense strand
uaagauggauuucagauca

SEQ ID NO: 155150 - RNA, 19 nt, Homo sapiens
  misc_RNA (1)...(19): siRNA sense strand
aagacaaccuugaccauua

SEQ ID NO: 155151 - RNA, 19 nt, Homo sapiens
  misc_RNA (1)...(19): siRNA sense strand
ggaagacaauucagcuuug

SEQ ID NO: 155152 - RNA, 19 nt, Homo sapiens
  misc_RNA (1)...(19): siRNA sense strand
gaagagaggauuccaaaca

SEQ ID NO: 155153 - RNA, 19 nt, Homo sapiens
  misc_RNA (1)...(19): siRNA sense strand
ggaaaggugucaguacuau

SEQ ID NO: 155154 - RNA, 19 nt, Homo sapiens
  misc_RNA (1)...(19): siRNA sense strand
gaggaaggaaucuuuauaa

SEQ ID NO: 155155 - RNA, 19 nt, Homo sapiens
  misc_RNA (1)...(19): siRNA sense strand
gaacaaaggcacagaugau

SEQ ID NO: 155156 - RNA, 19 nt, Homo sapiens
  misc_RNA (1)...(19): siRNA sense strand
gaauaucucuacaaacaag

SEQ ID NO: 155157 - RNA, 19 nt, Homo sapiens
  misc_RNA (1)...(19): siRNA sense strand
gaaguggcguguucaagug

SEQ ID NO: 155158 - RNA, 19 nt, Homo sapiens
  misc_RNA (1)...(19): siRNA sense strand
aaaggcagcugauuacaga

SEQ ID NO: 155159 - RNA, 19 nt, Homo sapiens
  misc_RNA (1)...(19): siRNA sense strand
caaguugaguaccuccuua

SEQ ID NO: 155160 - RNA, 19 nt, Homo sapiens
  misc_RNA (1)...(19): siRNA sense strand
caauucagcuuuggauaaa

SEQ ID NO: 155161 - RNA, 19 nt, Homo sapiens
  misc_RNA (1)...(19): siRNA sense strand
ggaggaaggaaucuuuaua

SEQ ID NO: 155162 - RNA, 19 nt, Homo sapiens
  misc_RNA (1)...(19): siRNA sense strand
ccaaagcccuggucgaugu

SEQ ID NO: 155163 - RNA, 19 nt, Homo sapiens
  misc_RNA (1)...(19): siRNA sense strand
gcacagcacaccaacauau

SEQ ID NO: 155164 - RNA, 19 nt, Homo sapiens
  misc_RNA (1)...(19): siRNA sense strand
gcacaccaacauauauaua

SEQ ID NO: 155165 - RNA, 19 nt, Homo sapiens
  misc_RNA (1)...(19): siRNA sense strand
gaagaagguuacagacaca

SEQ ID NO: 155166 - RNA, 19 nt, Homo sapiens
  misc_RNA (1)...(19): siRNA sense strand
caaugcaacuuccauacaa

SEQ ID NO: 155167 - RNA, 19 nt, Homo sapiens
  misc_RNA (1)...(19): siRNA sense strand
ucaggaggauucagaacua

SEQ ID NO: 155168 - RNA, 19 nt, Homo sapiens
  misc_RNA (1)...(19): siRNA sense strand
cacucuaacugauuacuua

SEQ ID NO: 155169 - RNA, 19 nt, Homo sapiens
  misc_RNA (1)...(19): siRNA sense strand
ugaagcagccagacaauuu

SEQ ID NO: 155170 - RNA, 19 nt, Homo sapiens
  misc_RNA (1)...(19): siRNA sense strand
gauaagaucaugcaugcaa

SEQ ID NO: 155171 - RNA, 19 nt, Homo sapiens
  misc_RNA (1)...(19): siRNA sense strand
ugacaugccucaguuguga

SEQ ID NO: 155172 - RNA, 19 nt, Homo sapiens
  misc_RNA (1)...(19): siRNA sense strand
gaagguuacagacacauuu

SEQ ID NO: 155173 - RNA, 19 nt, Homo sapiens
  misc_RNA (1)...(19): siRNA sense strand
gcaaugugguauacugaug

SEQ ID NO: 155174 - RNA, 19 nt, Homo sapiens
  misc_RNA (1)...(19): siRNA sense strand
uagcauaugcccaauuuaa

SEQ ID NO: 155175 - RNA, 19 nt, Homo sapiens
  misc_RNA (1)...(19): siRNA sense strand
gaagacaaccuugaccauu

SEQ ID NO: 155176 - RNA, 19 nt, Homo sapiens
  misc_RNA (1)...(19): siRNA sense strand
gaacugggccacuuaccuu

SEQ ID NO: 155177 - RNA, 19 nt, Homo sapiens
  misc_RNA (1)...(19): siRNA sense strand
aaacuuacacucuaacuga

SEQ ID NO: 155178 - RNA, 19 nt, Homo sapiens
  misc_RNA (1)...(19): siRNA sense strand
gggaacauuugaaguugaa

SEQ ID NO: 155179 - RNA, 19 nt, Homo sapiens
  misc_RNA (1)...(19): siRNA sense strand
acagacacauuugcuauuu

SEQ ID NO: 155180 - RNA, 19 nt, Homo sapiens
  misc_RNA (1)...(19): siRNA sense strand
uauaguagcuagcuuugau

SEQ ID NO: 155181 - RNA, 19 nt, Homo sapiens
  misc_RNA (1)...(19): siRNA sense strand
gcaggcccauguagucaaa

SEQ ID NO: 155182 - RNA, 19 nt, Homo sapiens
  misc_RNA (1)...(19): siRNA sense strand
gaucuugccuccucauuuu

SEQ ID NO: 155183 - RNA, 19 nt, Homo sapiens
  misc_RNA (1)...(19): siRNA sense strand
ggagaacaguacauuugau

SEQ ID NO: 155184 - RNA, 19 nt, Homo sapiens
  misc_RNA (1)...(19): siRNA sense strand
aaagugacaugccucaguu

SEQ ID NO: 155185 - RNA, 19 nt, Homo sapiens
  misc_RNA (1)...(19): siRNA sense strand
guaauagcuucuacaagau

SEQ ID NO: 155186 - RNA, 19 nt, Homo sapiens
  misc_RNA (1)...(19): siRNA sense strand
gaucaugcaugcaaucaac

SEQ ID NO: 155187 - RNA, 19 nt, Homo sapiens
  misc_RNA (1)...(19): siRNA sense strand
ccaaggagauaagaucaug

SEQ ID NO: 155188 - RNA, 19 nt, Homo sapiens
  misc_RNA (1)...(19): siRNA sense strand
ugaugaagaccauggaaua

SEQ ID NO: 155189 - RNA, 19 nt, Homo sapiens
  misc_RNA (1)...(19): siRNA sense strand
gaugauaacguucacuuuc

SEQ ID NO: 155190 - RNA, 19 nt, Homo sapiens
  misc_RNA (1)...(19): siRNA sense strand
gaucaugaauaucucuaca

SEQ ID NO: 155191 - RNA, 19 nt, Homo sapiens
  misc_RNA (1)...(19): siRNA sense strand
cuacacagcuucauaugac

SEQ ID NO: 155192 - RNA, 19 nt, Homo sapiens
  misc_RNA (1)...(19): siRNA sense strand
guacacagaacguuacaug

SEQ ID NO: 155193 - RNA, 19 nt, Homo sapiens
  misc_RNA (1)...(19): siRNA sense strand
gaaguauuaucagcugaga

SEQ ID NO: 155194 - RNA, 19 nt, Homo sapiens
  misc_RNA (1)...(19): siRNA sense strand
gcaacacaagaaagaauuu

SEQ ID NO: 155195 - RNA, 19 nt, Homo sapiens
  misc_RNA (1)...(19): siRNA sense strand
uaacugacuggguuuauga

SEQ ID NO: 155196 - RNA, 19 nt, Homo sapiens
  misc_RNA (1)...(19): siRNA sense strand
ggaaguggcguguucaagu

SEQ ID NO: 155197 - RNA, 19 nt, Homo sapiens
  misc_RNA (1)...(19): siRNA sense strand
guacuauucugugucauuc

SEQ ID NO: 155198 - RNA, 19 nt, Homo sapiens
  misc_RNA (1)...(19): siRNA sense strand
cuuacacucuaacugauua

SEQ ID NO: 155199 - RNA, 19 nt, Homo sapiens
  misc_RNA (1)...(19): siRNA sense strand
cagaagagaggauuccaaa

SEQ ID NO: 155200 - RNA, 19 nt, Homo sapiens
  misc_RNA (1)...(19): siRNA sense strand
gaauaacugacuggguuua

SEQ ID NO: 155201 - RNA, 19 nt, Homo sapiens
  misc_RNA (1)...(19): siRNA sense strand
caguacauuugaugaguuu

SEQ ID NO: 155202 - RNA, 19 nt, Homo sapiens
  misc_RNA (1)...(19): siRNA sense strand
cagcacaccaacauauaua

SEQ ID NO: 155203 - RNA, 19 nt, Homo sapiens
  misc_RNA (1)...(19): siRNA sense strand
acagaagacugggaacauu

SEQ ID NO: 155204 - RNA, 19 nt, Homo sapiens
  misc_RNA (1)...(19): siRNA sense strand
gaagacaauucagcuuugg

SEQ ID NO: 155205 - RNA, 19 nt, Homo sapiens
  misc_RNA (1)...(19): siRNA sense strand
gcacggcaacacauugaaa

SEQ ID NO: 155206 - RNA, 19 nt, Homo sapiens
  misc_RNA (1)...(19): siRNA sense strand
aagagaggauuccaaacaa

SEQ ID NO: 155207 - RNA, 19 nt, Homo sapiens
  misc_RNA (1)...(19): siRNA sense strand
uuuagcauaugcccaauuu

SEQ ID NO: 155208 - RNA, 19 nt, Homo sapiens
  misc_RNA (1)...(19): siRNA sense strand
uaaauuggcauauguuugg

SEQ ID NO: 155209 - RNA, 19 nt, Homo sapiens
  misc_RNA (1)...(19): siRNA sense strand
ggucaccagugggucauaa

SEQ ID NO: 155210 - RNA, 19 nt, Homo sapiens
  misc_RNA (1)...(19): siRNA sense strand
gagaacaguacauuugaug

SEQ ID NO: 155211 - RNA, 19 nt, Homo sapiens
  misc_RNA (1)...(19): siRNA sense strand
caauguuucucuuuaccuu

SEQ ID NO: 155212 - RNA, 19 nt, Homo sapiens
  misc_RNA (1)...(19): siRNA sense strand
gaacauuugaaguugaaga

SEQ ID NO: 155213 - RNA, 19 nt, Homo sapiens
  misc_RNA (1)...(19): siRNA sense strand
acaauucagcuuuggauaa

SEQ ID NO: 155214 - RNA, 19 nt, Homo sapiens
  misc_RNA (1)...(19): siRNA sense strand
caucagcaaugaagaaggu

SEQ ID NO: 155215 - RNA, 19 nt, Homo sapiens
  misc_RNA (1)...(19): siRNA sense strand
ggauauuugugacuaugau

SEQ ID NO: 155216 - RNA, 19 nt, Homo sapiens
  misc_RNA (1)...(19): siRNA sense strand
gauaggggaucacuacuug

SEQ ID NO: 155217 - RNA, 19 nt, Homo sapiens
  misc_RNA (1)...(19): siRNA sense strand
gaacaguacauuugaugag

SEQ ID NO: 155218 - RNA, 19 nt, Homo sapiens
  misc_RNA (1)...(19): siRNA sense strand
acaacuacgugaagcaaug

SEQ ID NO: 155219 - RNA, 19 nt, Homo sapiens
  misc_RNA (1)...(19): siRNA sense strand
cauuugaaguugaagauca

SEQ ID NO: 155220 - RNA, 19 nt, Homo sapiens
  misc_RNA (1)...(19): siRNA sense strand
cacagcagcgugaaugaua

SEQ ID NO: 155221 - RNA, 19 nt, Homo sapiens
  misc_RNA (1)...(19): siRNA sense strand
ucaguacuauucuguguca

SEQ ID NO: 155222 - RNA, 19 nt, Homo sapiens
  misc_RNA (1)...(19): siRNA sense strand
guaaauacagacucucuca

SEQ ID NO: 155223 - RNA, 19 nt, Homo sapiens
  misc_RNA (1)...(19): siRNA sense strand
ucacugcaguacccaaaga

SEQ ID NO: 155224 - RNA, 19 nt, Homo sapiens
  misc_RNA (1)...(19): siRNA sense strand
ggggaaagaagauauaaua

SEQ ID NO: 155225 - RNA, 19 nt, Homo sapiens
  misc_RNA (1)...(19): siRNA sense strand
ggaauaacugacuggguuu

SEQ ID NO: 155226 - RNA, 19 nt, Homo sapiens
  misc_RNA (1)...(19): siRNA sense strand
gaacagcagaugauaacgu

SEQ ID NO: 155227 - RNA, 19 nt, Homo sapiens
  misc_RNA (1)...(19): siRNA sense strand
uugaguaccuccuuauuca

SEQ ID NO: 155228 - RNA, 19 nt, Homo sapiens
  misc_RNA (1)...(19): siRNA sense strand
gaagucaucgggauagaag

SEQ ID NO: 155229 - RNA, 19 nt, Homo sapiens
  misc_RNA (1)...(19): siRNA sense strand
gaugggcaguuuauucucu

SEQ ID NO: 155230 - RNA, 19 nt, Homo sapiens
  misc_RNA (1)...(19): siRNA sense strand
cagaagacugggaacauuu

SEQ ID NO: 155231 - RNA, 19 nt, Homo sapiens
  misc_RNA (1)...(19): siRNA sense strand
caaugaagaagguuacaga

SEQ ID NO: 155232 - RNA, 19 nt, Homo sapiens
  misc_RNA (1)...(19): siRNA sense strand
uggcuggguuggaagauuu

SEQ ID NO: 155233 - RNA, 19 nt, Homo sapiens
  misc_RNA (1)...(19): siRNA sense strand
gaacuauucggucauggau

SEQ ID NO: 155234 - RNA, 19 nt, Homo sapiens
  misc_RNA (1)...(19): siRNA sense strand
ucacugcuccugcuucuau

SEQ ID NO: 155235 - RNA, 19 nt, Homo sapiens
  misc_RNA (1)...(19): siRNA sense strand
gcugugaauccaacuguaa

SEQ ID NO: 155236 - RNA, 19 nt, Homo sapiens
  misc_RNA (1)...(19): siRNA sense strand
gcaacuuccauacaaauca

SEQ ID NO: 155237 - RNA, 19 nt, Homo sapiens
  misc_RNA (1)...(19): siRNA sense strand
ucaguaaagaggcgaagua

SEQ ID NO: 155238 - RNA, 19 nt, Homo sapiens
  misc_RNA (1)...(19): siRNA sense strand
gaaaggugucaguacuauu

SEQ ID NO: 155239 - RNA, 19 nt, Homo sapiens
  misc_RNA (1)...(19): siRNA sense strand
acuauucggucauggauau

SEQ ID NO: 155240 - RNA, 19 nt, Homo sapiens
  misc_RNA (1)...(19): siRNA sense strand
ggaggauucagaacuauuc

SEQ ID NO: 155241 - RNA, 19 nt, Homo sapiens
  misc_RNA (1)...(19): siRNA sense strand
ugagaguccuggaagacaa

SEQ ID NO: 155242 - RNA, 19 nt, Homo sapiens
  misc_RNA (1)...(19): siRNA sense strand
acauauauauacccacaug

SEQ ID NO: 155243 - RNA, 19 nt, Homo sapiens
  misc_RNA (1)...(19): siRNA sense strand
ucauggagcucccaacuua

SEQ ID NO: 155244 - RNA, 19 nt, Homo sapiens
  misc_RNA (1)...(19): siRNA sense strand
gaaggucacuguagaagau

SEQ ID NO: 155245 - RNA, 19 nt, Homo sapiens
  misc_RNA (1)...(19): siRNA sense strand
gaacagaaaggaacaguga

SEQ ID NO: 155246 - RNA, 19 nt, Homo sapiens
  misc_RNA (1)...(19): siRNA sense strand
gcaaggaaggugugauuua

SEQ ID NO: 155247 - RNA, 19 nt, Homo sapiens
  misc_RNA (1)...(19): siRNA sense strand
gccaacagcugauauuuau

SEQ ID NO: 155248 - RNA, 19 nt, Homo sapiens
  misc_RNA (1)...(19): siRNA sense strand
gcacacagcagaacucauu

SEQ ID NO: 155249 - RNA, 19 nt, Homo sapiens
  misc_RNA (1)...(19): siRNA sense strand
gauaauagucugucucaaa

SEQ ID NO: 155250 - RNA, 19 nt, Homo sapiens
  misc_RNA (1)...(19): siRNA sense strand
caacagagcauacgagaug

SEQ ID NO: 155251 - RNA, 19 nt, Homo sapiens
  misc_RNA (1)...(19): siRNA sense strand
caaaugaacaugucaagaa

SEQ ID NO: 155252 - RNA, 19 nt, Homo sapiens
  misc_RNA (1)...(19): siRNA sense strand
uaacagacuucaaacucua

SEQ ID NO: 155253 - RNA, 19 nt, Homo sapiens
  misc_RNA (1)...(19): siRNA sense strand
gauaagugauacagaauuc

SEQ ID NO: 155254 - RNA, 19 nt, Homo sapiens
  misc_RNA (1)...(19): siRNA sense strand
caacacaacagauaagaaa

SEQ ID NO: 155255 - RNA, 19 nt, Homo sapiens
  misc_RNA (1)...(19): siRNA sense strand
cagcagaacucauuacaca

SEQ ID NO: 155256 - RNA, 19 nt, Homo sapiens
  misc_RNA (1)...(19): siRNA sense strand
ucaagaaggccauaaauga

SEQ ID NO: 155257 - RNA, 19 nt, Homo sapiens
  misc_RNA (1)...(19): siRNA sense strand
gauauuacguccugagcaa

SEQ ID NO: 155258 - RNA, 19 nt, Homo sapiens
  misc_RNA (1)...(19): siRNA sense strand
gaacucauuacacaacuaa

SEQ ID NO: 155259 - RNA, 19 nt, Homo sapiens
  misc_RNA (1)...(19): siRNA sense strand
uaagagccaucagauauga

SEQ ID NO: 155260 - RNA, 19 nt, Homo sapiens
  misc_RNA (1)...(19): siRNA sense strand
ugaaggagcaguacauuga

SEQ ID NO: 155261 - RNA, 19 nt, Homo sapiens
  misc_RNA (1)...(19): siRNA sense strand
gaagaaggucacuguagaa

SEQ ID NO: 155262 - RNA, 19 nt, Homo sapiens
  misc_RNA (1)...(19): siRNA sense strand
agaagaaggucacuguaga

SEQ ID NO: 155263 - RNA, 19 nt, Homo sapiens
  misc_RNA (1)...(19): siRNA sense strand
gaagaaacacgaggaugaa

SEQ ID NO: 155264 - RNA, 19 nt, Homo sapiens
  misc_RNA (1)...(19): siRNA sense strand
guggauaagugauacagaa

SEQ ID NO: 155265 - RNA, 19 nt, Homo sapiens
  misc_RNA (1)...(19): siRNA sense strand
ggccaacagcugauauuua

SEQ ID NO: 155266 - RNA, 19 nt, Homo sapiens
  misc_RNA (1)...(19): siRNA sense strand
gcagaggaauuggaaagga

SEQ ID NO: 155267 - RNA, 19 nt, Homo sapiens
  misc_RNA (1)...(19): siRNA sense strand
uaucaacacucguauacug

SEQ ID NO: 155268 - RNA, 19 nt, Homo sapiens
  misc_RNA (1)...(19): siRNA sense strand
cgaagaaacacgaggauga

SEQ ID NO: 155269 - RNA, 19 nt, Homo sapiens
  misc_RNA (1)...(19): siRNA sense strand
gauagagaguaugcacuuu

SEQ ID NO: 155270 - RNA, 19 nt, Homo sapiens
  misc_RNA (1)...(19): siRNA sense strand
gggaaauucuaucacauca

SEQ ID NO: 155271 - RNA, 19 nt, Homo sapiens
  misc_RNA (1)...(19): siRNA sense strand
ggaaaggaauagcaauugc

SEQ ID NO: 155272 - RNA, 19 nt, Homo sapiens
  misc_RNA (1)...(19): siRNA sense strand
acagggacauugagauuga

SEQ ID NO: 155273 - RNA, 19 nt, Homo sapiens
  misc_RNA (1)...(19): siRNA sense strand
gaggcuaaguggauaagug

SEQ ID NO: 155274 - RNA, 19 nt, Homo sapiens
  misc_RNA (1)...(19): siRNA sense strand
gugcacaacacaacagaua

SEQ ID NO: 155275 - RNA, 19 nt, Homo sapiens
  misc_RNA (1)...(19): siRNA sense strand
cgagggaaauucuaucaca

SEQ ID NO: 155276 - RNA, 19 nt, Homo sapiens
  misc_RNA (1)...(19): siRNA sense strand
gcauuucccuacacguuau

SEQ ID NO: 155277 - RNA, 19 nt, Homo sapiens
  misc_RNA (1)...(19): siRNA sense strand
gugacuggcuguaugaaga

SEQ ID NO: 155278 - RNA, 19 nt, Homo sapiens
  misc_RNA (1)...(19): siRNA sense strand
gaucgucaccucggucaua

SEQ ID NO: 155279 - RNA, 19 nt, Homo sapiens
  misc_RNA (1)...(19): siRNA sense strand
caaggaaggugugauuuac

SEQ ID NO: 155280 - RNA, 19 nt, Homo sapiens
  misc_RNA (1)...(19): siRNA sense strand
gcuaaguggauaagugaua

SEQ ID NO: 155281 - RNA, 19 nt, Homo sapiens
  misc_RNA (1)...(19): siRNA sense strand
cagaggaauuggaaaggaa

SEQ ID NO: 155282 - RNA, 19 nt, Homo sapiens
  misc_RNA (1)...(19): siRNA sense strand
gcucugcucucucuccaau

SEQ ID NO: 155283 - RNA, 19 nt, Homo sapiens
  misc_RNA (1)...(19): siRNA sense strand
gcaauugcacugcuuguca

SEQ ID NO: 155284 - RNA, 19 nt, Homo sapiens
  misc_RNA (1)...(19): siRNA sense strand
gaauucaucuacagagaac

SEQ ID NO: 155285 - RNA, 19 nt, Homo sapiens
  misc_RNA (1)...(19): siRNA sense strand
gaaacacgaggaugaaagu

SEQ ID NO: 155286 - RNA, 19 nt, Homo sapiens
  misc_RNA (1)...(19): siRNA sense strand
gaaaggcuaauuacagcuu

SEQ ID NO: 155287 - RNA, 19 nt, Homo sapiens
  misc_RNA (1)...(19): siRNA sense strand
cagaauucaucuacagaga

SEQ ID NO: 155288 - RNA, 19 nt, Homo sapiens
  misc_RNA (1)...(19): siRNA sense strand
ccugugaccugguugagaa

SEQ ID NO: 155289 - RNA, 19 nt, Homo sapiens
  misc_RNA (1)...(19): siRNA sense strand
gaaggugugauuuacaaug

SEQ ID NO: 155290 - RNA, 19 nt, Homo sapiens
  misc_RNA (1)...(19): siRNA sense strand
ggucuccacuggcaaggaa

SEQ ID NO: 155291 - RNA, 19 nt, Homo sapiens
  misc_RNA (1)...(19): siRNA sense strand
acaaauacuucuacugucu

SEQ ID NO: 155292 - RNA, 19 nt, Homo sapiens
  misc_RNA (1)...(19): siRNA sense strand
gugagacuguggaauguug

SEQ ID NO: 155293 - RNA, 19 nt, Homo sapiens
  misc_RNA (1)...(19): siRNA sense strand
ggauaagugauacagaauu

SEQ ID NO: 155294 - RNA, 19 nt, Homo sapiens
  misc_RNA (1)...(19): siRNA sense strand
aaaggcuaauuacagcuua

SEQ ID NO: 155295 - RNA, 19 nt, Homo sapiens
  misc_RNA (1)...(19): siRNA sense strand
acagaugccuaaaguggaa

SEQ ID NO: 155296 - RNA, 19 nt, Homo sapiens
  misc_RNA (1)...(19): siRNA sense strand
gugcgaagguccugguguu

SEQ ID NO: 155297 - RNA, 19 nt, Homo sapiens
  misc_RNA (1)...(19): siRNA sense strand
ccacagacagaaugaagaa

SEQ ID NO: 155298 - RNA, 19 nt, Homo sapiens
  misc_RNA (1)...(19): siRNA sense strand
ggacgaggaggaggacuaa

SEQ ID NO: 155299 - RNA, 19 nt, Homo sapiens
  misc_RNA (1)...(19): siRNA sense strand
ucugcucucucuccaauaa

SEQ ID NO: 155300 - RNA, 19 nt, Homo sapiens
  misc_RNA (1)...(19): siRNA sense strand
caaggauggccgaaaguuu

SEQ ID NO: 155301 - RNA, 19 nt, Homo sapiens
  misc_RNA (1)...(19): siRNA sense strand
gaacccauauaucaacacu

SEQ ID NO: 155302 - RNA, 19 nt, Homo sapiens
  misc_RNA (1)...(19): siRNA sense strand
agaaacaaaugaacauguc

SEQ ID NO: 155303 - RNA, 19 nt, Homo sapiens
  misc_RNA (1)...(19): siRNA sense strand
gagaugaugccgccugaug

SEQ ID NO: 155304 - RNA, 19 nt, Homo sapiens
  misc_RNA (1)...(19): siRNA sense strand
ccauauaucaacacucgua

SEQ ID NO: 155305 - RNA, 19 nt, Homo sapiens
  misc_RNA (1)...(19): siRNA sense strand
gauacagaauucaucuaca

SEQ ID NO: 155306 - RNA, 19 nt, Homo sapiens
  misc_RNA (1)...(19): siRNA sense strand
cauacgagaugaccaaggu

SEQ ID NO: 155307 - RNA, 19 nt, Homo sapiens
  misc_RNA (1)...(19): siRNA sense strand
gagcauacgagaugaccaa

SEQ ID NO: 155308 - RNA, 19 nt, Homo sapiens
  misc_RNA (1)...(19): siRNA sense strand
gaauacagggacauugaga

SEQ ID NO: 155309 - RNA, 19 nt, Homo sapiens
  misc_RNA (1)...(19): siRNA sense strand
gaaacaaauacuucuacug

SEQ ID NO: 155310 - RNA, 19 nt, Homo sapiens
  misc_RNA (1)...(19): siRNA sense strand
gcacaacacaacagauaag

SEQ ID NO: 155311 - RNA, 19 nt, Homo sapiens
  misc_RNA (1)...(19): siRNA sense strand
gaaaggaauagcaauugca

SEQ ID NO: 155312 - RNA, 19 nt, Homo sapiens
  misc_RNA (1)...(19): siRNA sense strand
ggaagauaauagucugucu

SEQ ID NO: 155313 - RNA, 19 nt, Homo sapiens
  misc_RNA (1)...(19): siRNA sense strand
gagggaaauucuaucacau

SEQ ID NO: 155314 - RNA, 19 nt, Homo sapiens
  misc_RNA (1)...(19): siRNA sense strand
caauguggaacccauauau

SEQ ID NO: 155315 - RNA, 19 nt, Homo sapiens
  misc_RNA (1)...(19): siRNA sense strand
aaaugaacaugucaagaag

SEQ ID NO: 155316 - RNA, 19 nt, Homo sapiens
  misc_RNA (1)...(19): siRNA sense strand
ugacaccagcggaagauaa

SEQ ID NO: 155317 - RNA, 19 nt, Homo sapiens
  misc_RNA (1)...(19): siRNA sense strand
gauccuagccuacgaugag

SEQ ID NO: 155318 - RNA, 19 nt, Homo sapiens
  misc_RNA (1)...(19): siRNA sense strand
acucguauacuggauauua

SEQ ID NO: 155319 - RNA, 19 nt, Homo sapiens
  misc_RNA (1)...(19): siRNA sense strand
gcgcgguggugguaaagug

SEQ ID NO: 155320 - RNA, 19 nt, Homo sapiens
  misc_RNA (1)...(19): siRNA sense strand
gaaacaaaugaacauguca

SEQ ID NO: 155321 - RNA, 19 nt, Homo sapiens
  misc_RNA (1)...(19): siRNA sense strand
cauuaagagccaucagaua

SEQ ID NO: 155322 - RNA, 19 nt, Homo sapiens
  misc_RNA (1)...(19): siRNA sense strand
gcagaacucauuacacaac

SEQ ID NO: 155323 - RNA, 19 nt, Homo sapiens
  misc_RNA (1)...(19): siRNA sense strand
ccauggacuugacaacaga

SEQ ID NO: 155324 - RNA, 19 nt, Homo sapiens
  misc_RNA (1)...(19): siRNA sense strand
ggacgugaccaagauccua

SEQ ID NO: 155325 - RNA, 19 nt, Homo sapiens
  misc_RNA (1)...(19): siRNA sense strand
gacaacauccaguccauca

SEQ ID NO: 155326 - RNA, 19 nt, Homo sapiens
  misc_RNA (1)...(19): siRNA sense strand
aggaaggugugauuuacaa

SEQ ID NO: 155327 - RNA, 19 nt, Homo sapiens
  misc_RNA (1)...(19): siRNA sense strand
gcuaauuacagcuuacaga

SEQ ID NO: 155328 - RNA, 19 nt, Homo sapiens
  misc_RNA (1)...(19): siRNA sense strand
ccuacacguuauuggcuua

SEQ ID NO: 155329 - RNA, 19 nt, Homo sapiens
  misc_RNA (1)...(19): siRNA sense strand
ugagauugaugauuacaac

SEQ ID NO: 155330 - RNA, 19 nt, Homo sapiens
  misc_RNA (1)...(19): siRNA sense strand
guacuugggccuccaugga

SEQ ID NO: 155331 - RNA, 19 nt, Homo sapiens
  misc_RNA (1)...(19): siRNA sense strand
uccaauaacagacuucaaa

SEQ ID NO: 155332 - RNA, 19 nt, Homo sapiens
  misc_RNA (1)...(19): siRNA sense strand
guugagaacugcaccuacu

SEQ ID NO: 155333 - RNA, 19 nt, Homo sapiens
  misc_RNA (1)...(19): siRNA sense strand
gauuuacaauggccucagu

SEQ ID NO: 155334 - RNA, 19 nt, Homo sapiens
  misc_RNA (1)...(19): siRNA sense strand
ccaagauccuagccuacga

SEQ ID NO: 155335 - RNA, 19 nt, Homo sapiens
  misc_RNA (1)...(19): siRNA sense strand
caauugcacugcuugucau

SEQ ID NO: 155336 - RNA, 19 nt, Homo sapiens
  misc_RNA (1)...(19): siRNA sense strand
auuaagagccaucagauau

SEQ ID NO: 155337 - RNA, 19 nt, Homo sapiens
  misc_RNA (1)...(19): siRNA sense strand
cauaaaugaccgacagaug

SEQ ID NO: 155338 - RNA, 19 nt, Homo sapiens
  misc_RNA (1)...(19): siRNA sense strand
gaggaauuggaaaggaaua

SEQ ID NO: 155339 - RNA, 19 nt, Homo sapiens
  misc_RNA (1)...(19): siRNA sense strand
uaaaggccaacagcugaua

SEQ ID NO: 155340 - RNA, 19 nt, Homo sapiens
  misc_RNA (1)...(19): siRNA sense strand
caagaaggccauaaaugac

SEQ ID NO: 155341 - RNA, 19 nt, Homo sapiens
  misc_RNA (1)...(19): siRNA sense strand
cagcaguuccugaucauuc

SEQ ID NO: 155342 - RNA, 19 nt, Homo sapiens
  misc_RNA (1)...(19): siRNA sense strand
ggacauugagauugaugau

SEQ ID NO: 155343 - RNA, 19 nt, Homo sapiens
  misc_RNA (1)...(19): siRNA sense strand
ucauggagcucccaacuua

SEQ ID NO: 155344 - RNA, 19 nt, Homo sapiens
  misc_RNA (1)...(19): siRNA sense strand
gaaggucacuguagaagau

SEQ ID NO: 155345 - RNA, 19 nt, Homo sapiens
  misc_RNA (1)...(19): siRNA sense strand
gaacagaaaggaacaguga

SEQ ID NO: 155346 - RNA, 19 nt, Homo sapiens
  misc_RNA (1)...(19): siRNA sense strand
gcaaggaaggugugauuua

SEQ ID NO: 155347 - RNA, 19 nt, Homo sapiens
  misc_RNA (1)...(19): siRNA sense strand
gccaacagcugauauuuau

SEQ ID NO: 155348 - RNA, 19 nt, Homo sapiens
  misc_RNA (1)...(19): siRNA sense strand
gcacacagcagaacucauu

SEQ ID NO: 155349 - RNA, 19 nt, Homo sapiens
  misc_RNA (1)...(19): siRNA sense strand
gauaauagucugucucaaa

SEQ ID NO: 155350 - RNA, 19 nt, Homo sapiens
  misc_RNA (1)...(19): siRNA sense strand
caacagagcauacgagaug

SEQ ID NO: 155351 - RNA, 19 nt, Homo sapiens
  misc_RNA (1)...(19): siRNA sense strand
caaaugaacaugucaagaa

SEQ ID NO: 155352 - RNA, 19 nt, Homo sapiens
  misc_RNA (1)...(19): siRNA sense strand
uaacagacuucaaacucua

SEQ ID NO: 155353 - RNA, 19 nt, Homo sapiens
  misc_RNA (1)...(19): siRNA sense strand
gauaagugauacagaauuc

SEQ ID NO: 155354 - RNA, 19 nt, Homo sapiens
  misc_RNA (1)...(19): siRNA sense strand
caacacaacagauaagaaa

SEQ ID NO: 155355 - RNA, 19 nt, Homo sapiens
  misc_RNA (1)...(19): siRNA sense strand
cagcagaacucauuacaca

SEQ ID NO: 155356 - RNA, 19 nt, Homo sapiens
  misc_RNA (1)...(19): siRNA sense strand
ucaagaaggccauaaauga

SEQ ID NO: 155357 - RNA, 19 nt, Homo sapiens
  misc_RNA (1)...(19): siRNA sense strand
gauauuacguccugagcaa

SEQ ID NO: 155358 - RNA, 19 nt, Homo sapiens
  misc_RNA (1)...(19): siRNA sense strand
gaacucauuacacaacuaa

SEQ ID NO: 155359 - RNA, 19 nt, Homo sapiens
  misc_RNA (1)...(19): siRNA sense strand
uaagagccaucagauauga

SEQ ID NO: 155360 - RNA, 19 nt, Homo sapiens
  misc_RNA (1)...(19): siRNA sense strand
ugaaggagcaguacauuga

SEQ ID NO: 155361 - RNA, 19 nt, Homo sapiens
  misc_RNA (1)...(19): siRNA sense strand
gaagaaggucacuguagaa

SEQ ID NO: 155362 - RNA, 19 nt, Homo sapiens
  misc_RNA (1)...(19): siRNA sense strand
agaagaaggucacuguaga

SEQ ID NO: 155363 - RNA, 19 nt, Homo sapiens
  misc_RNA (1)...(19): siRNA sense strand
gaagaaacacgaggaugaa

SEQ ID NO: 155364 - RNA, 19 nt, Homo sapiens
  misc_RNA (1)...(19): siRNA sense strand
guggauaagugauacagaa

SEQ ID NO: 155365 - RNA, 19 nt, Homo sapiens
  misc_RNA (1)...(19): siRNA sense strand
ggccaacagcugauauuua

SEQ ID NO: 155366 - RNA, 19 nt, Homo sapiens
  misc_RNA (1)...(19): siRNA sense strand
gcagaggaauuggaaagga

SEQ ID NO: 155367 - RNA, 19 nt, Homo sapiens
  misc_RNA (1)...(19): siRNA sense strand
uaucaacacucguauacug

SEQ ID NO: 155368 - RNA, 19 nt, Homo sapiens
  misc_RNA (1)...(19): siRNA sense strand
cgaagaaacacgaggauga

SEQ ID NO: 155369 - RNA, 19 nt, Homo sapiens
  misc_RNA (1)...(19): siRNA sense strand
gauagagaguaugcacuuu

SEQ ID NO: 155370 - RNA, 19 nt, Homo sapiens
  misc_RNA (1)...(19): siRNA sense strand
gggaaauucuaucacauca

SEQ ID NO: 155371 - RNA, 19 nt, Homo sapiens
  misc_RNA (1)...(19): siRNA sense strand
ggaaaggaauagcaauugc

SEQ ID NO: 155372 - RNA, 19 nt, Homo sapiens
  misc_RNA (1)...(19): siRNA sense strand
acagggacauugagauuga

SEQ ID NO: 155373 - RNA, 19 nt, Homo sapiens
  misc_RNA (1)...(19): siRNA sense strand
gaggcuaaguggauaagug

SEQ ID NO: 155374 - RNA, 19 nt, Homo sapiens
  misc_RNA (1)...(19): siRNA sense strand
gugcacaacacaacagaua

SEQ ID NO: 155375 - RNA, 19 nt, Homo sapiens
  misc_RNA (1)...(19): siRNA sense strand
cgagggaaauucuaucaca

SEQ ID NO: 155376 - RNA, 19 nt, Homo sapiens
  misc_RNA (1)...(19): siRNA sense strand
gcauuucccuacacguuau

SEQ ID NO: 155377 - RNA, 19 nt, Homo sapiens
  misc_RNA (1)...(19): siRNA sense strand
gugacuggcuguaugaaga

SEQ ID NO: 155378 - RNA, 19 nt, Homo sapiens
  misc_RNA (1)...(19): siRNA sense strand
gaucgucaccucggucaua

SEQ ID NO: 155379 - RNA, 19 nt, Homo sapiens
  misc_RNA (1)...(19): siRNA sense strand
caaggaaggugugauuuac

SEQ ID NO: 155380 - RNA, 19 nt, Homo sapiens
  misc_RNA (1)...(19): siRNA sense strand
gcuaaguggauaagugaua

SEQ ID NO: 155381 - RNA, 19 nt, Homo sapiens
  misc_RNA (1)...(19): siRNA sense strand
cagaggaauuggaaaggaa

SEQ ID NO: 155382 - RNA, 19 nt, Homo sapiens
  misc_RNA (1)...(19): siRNA sense strand
gcucugcucucucuccaau

SEQ ID NO: 155383 - RNA, 19 nt, Homo sapiens
  misc_RNA (1)...(19): siRNA sense strand
gcaauugcacugcuuguca

SEQ ID NO: 155384 - RNA, 19 nt, Homo sapiens
  misc_RNA (1)...(19): siRNA sense strand
gaauucaucuacagagaac

SEQ ID NO: 155385 - RNA, 19 nt, Homo sapiens
  misc_RNA (1)...(19): siRNA sense strand
gaaacacgaggaugaaagu

SEQ ID NO: 155386 - RNA, 19 nt, Homo sapiens
  misc_RNA (1)...(19): siRNA sense strand
gaaaggcuaauuacagcuu

SEQ ID NO: 155387 - RNA, 19 nt, Homo sapiens
  misc_RNA (1)...(19): siRNA sense strand
cagaauucaucuacagaga

SEQ ID NO: 155388 - RNA, 19 nt, Homo sapiens
  misc_RNA (1)...(19): siRNA sense strand
ccugugaccugguugagaa

SEQ ID NO: 155389 - RNA, 19 nt, Homo sapiens
  misc_RNA (1)...(19): siRNA sense strand
gaaggugugauuuacaaug

SEQ ID NO: 155390 - RNA, 19 nt, Homo sapiens
  misc_RNA (1)...(19): siRNA sense strand
ggucuccacuggcaaggaa

SEQ ID NO: 155391 - RNA, 19 nt, Homo sapiens
  misc_RNA (1)...(19): siRNA sense strand
acaaauacuucuacugucu

SEQ ID NO: 155392 - RNA, 19 nt, Homo sapiens
  misc_RNA (1)...(19): siRNA sense strand
gugagacuguggaauguug

SEQ ID NO: 155393 - RNA, 19 nt, Homo sapiens
  misc_RNA (1)...(19): siRNA sense strand
ggauaagugauacagaauu

SEQ ID NO: 155394 - RNA, 19 nt, Homo sapiens
  misc_RNA (1)...(19): siRNA sense strand
aaaggcuaauuacagcuua

SEQ ID NO: 155395 - RNA, 19 nt, Homo sapiens
  misc_RNA (1)...(19): siRNA sense strand
acagaugccuaaaguggaa

SEQ ID NO: 155396 - RNA, 19 nt, Homo sapiens
  misc_RNA (1)...(19): siRNA sense strand
gugcgaagguccugguguu

SEQ ID NO: 155397 - RNA, 19 nt, Homo sapiens
  misc_RNA (1)...(19): siRNA sense strand
ccacagacagaaugaagaa

SEQ ID NO: 155398 - RNA, 19 nt, Homo sapiens
  misc_RNA (1)...(19): siRNA sense strand
ggacgaggaggaggacuaa

SEQ ID NO: 155399 - RNA, 19 nt, Homo sapiens
  misc_RNA (1)...(19): siRNA sense strand
ucugcucucucuccaauaa

SEQ ID NO: 155400 - RNA, 19 nt, Homo sapiens
  misc_RNA (1)...(19): siRNA sense strand
caaggauggccgaaaguuu

SEQ ID NO: 155401 - RNA, 19 nt, Homo sapiens
  misc_RNA (1)...(19): siRNA sense strand
gaacccauauaucaacacu

SEQ ID NO: 155402 - RNA, 19 nt, Homo sapiens
  misc_RNA (1)...(19): siRNA sense strand
agaaacaaaugaacauguc

SEQ ID NO: 155403 - RNA, 19 nt, Homo sapiens
  misc_RNA (1)...(19): siRNA sense strand
gagaugaugccgccugaug

SEQ ID NO: 155404 - RNA, 19 nt, Homo sapiens
  misc_RNA (1)...(19): siRNA sense strand
ccauauaucaacacucgua

SEQ ID NO: 155405 - RNA, 19 nt, Homo sapiens
  misc_RNA (1)...(19): siRNA sense strand
gauacagaauucaucuaca

SEQ ID NO: 155406 - RNA, 19 nt, Homo sapiens
  misc_RNA (1)...(19): siRNA sense strand
cauacgagaugaccaaggu

SEQ ID NO: 155407 - RNA, 19 nt, Homo sapiens
  misc_RNA (1)...(19): siRNA sense strand
gagcauacgagaugaccaa

SEQ ID NO: 155408 - RNA, 19 nt, Homo sapiens
  misc_RNA (1)...(19): siRNA sense strand
gaauacagggacauugaga

SEQ ID NO: 155409 - RNA, 19 nt, Homo sapiens
  misc_RNA (1)...(19): siRNA sense strand
gaaacaaauacuucuacug

SEQ ID NO: 155410 - RNA, 19 nt, Homo sapiens
  misc_RNA (1)...(19): siRNA sense strand
gcacaacacaacagauaag

SEQ ID NO: 155411 - RNA, 19 nt, Homo sapiens
  misc_RNA (1)...(19): siRNA sense strand
gaaaggaauagcaauugca

SEQ ID NO: 155412 - RNA, 19 nt, Homo sapiens
  misc_RNA (1)...(19): siRNA sense strand
ggaagauaauagucugucu

SEQ ID NO: 155413 - RNA, 19 nt, Homo sapiens
  misc_RNA (1)...(19): siRNA sense strand
gagggaaauucuaucacau

SEQ ID NO: 155414 - RNA, 19 nt, Homo sapiens
  misc_RNA (1)...(19): siRNA sense strand
caauguggaacccauauau

SEQ ID NO: 155415 - RNA, 19 nt, Homo sapiens
  misc_RNA (1)...(19): siRNA sense strand
aaaugaacaugucaagaag

SEQ ID NO: 155416 - RNA, 19 nt, Homo sapiens
  misc_RNA (1)...(19): siRNA sense strand
ugacaccagcggaagauaa

SEQ ID NO: 155417 - RNA, 19 nt, Homo sapiens
  misc_RNA (1)...(19): siRNA sense strand
gauccuagccuacgaugag

SEQ ID NO: 155418 - RNA, 19 nt, Homo sapiens
  misc_RNA (1)...(19): siRNA sense strand
acucguauacuggauauua

SEQ ID NO: 155419 - RNA, 19 nt, Homo sapiens
  misc_RNA (1)...(19): siRNA sense strand
gcgcgguggugguaaagug

SEQ ID NO: 155420 - RNA, 19 nt, Homo sapiens
  misc_RNA (1)...(19): siRNA sense strand
gaaacaaaugaacauguca

SEQ ID NO: 155421 - RNA, 19 nt, Homo sapiens
  misc_RNA (1)...(19): siRNA sense strand
cauuaagagccaucagaua

SEQ ID NO: 155422 - RNA, 19 nt, Homo sapiens
  misc_RNA (1)...(19): siRNA sense strand
gcagaacucauuacacaac

SEQ ID NO: 155423 - RNA, 19 nt, Homo sapiens
  misc_RNA (1)...(19): siRNA sense strand
ccauggacuugacaacaga

SEQ ID NO: 155424 - RNA, 19 nt, Homo sapiens
  misc_RNA (1)...(19): siRNA sense strand
ggacgugaccaagauccua

SEQ ID NO: 155425 - RNA, 19 nt, Homo sapiens
  misc_RNA (1)...(19): siRNA sense strand
gacaacauccaguccauca

SEQ ID NO: 155426 - RNA, 19 nt, Homo sapiens
  misc_RNA (1)...(19): siRNA sense strand
aggaaggugugauuuacaa

SEQ ID NO: 155427 - RNA, 19 nt, Homo sapiens
  misc_RNA (1)...(19): siRNA sense strand
gcuaauuacagcuuacaga

SEQ ID NO: 155428 - RNA, 19 nt, Homo sapiens
  misc_RNA (1)...(19): siRNA sense strand
ccuacacguuauuggcuua

SEQ ID NO: 155429 - RNA, 19 nt, Homo sapiens
  misc_RNA (1)...(19): siRNA sense strand
ugagauugaugauuacaac

SEQ ID NO: 155430 - RNA, 19 nt, Homo sapiens
  misc_RNA (1)...(19): siRNA sense strand
guacuugggccuccaugga

SEQ ID NO: 155431 - RNA, 19 nt, Homo sapiens
  misc_RNA (1)...(19): siRNA sense strand
uccaauaacagacuucaaa

SEQ ID NO: 155432 - RNA, 19 nt, Homo sapiens
  misc_RNA (1)...(19): siRNA sense strand
guugagaacugcaccuacu

SEQ ID NO: 155433 - RNA, 19 nt, Homo sapiens
  misc_RNA (1)...(19): siRNA sense strand
gauuuacaauggccucagu

SEQ ID NO: 155434 - RNA, 19 nt, Homo sapiens
  misc_RNA (1)...(19): siRNA sense strand
ccaagauccuagccuacga

SEQ ID NO: 155435 - RNA, 19 nt, Homo sapiens
  misc_RNA (1)...(19): siRNA sense strand
caauugcacugcuugucau

SEQ ID NO: 155436 - RNA, 19 nt, Homo sapiens
  misc_RNA (1)...(19): siRNA sense strand
auuaagagccaucagauau

SEQ ID NO: 155437 - RNA, 19 nt, Homo sapiens
  misc_RNA (1)...(19): siRNA sense strand
cauaaaugaccgacagaug

SEQ ID NO: 155438 - RNA, 19 nt, Homo sapiens
  misc_RNA (1)...(19): siRNA sense strand
gaggaauuggaaaggaaua

SEQ ID NO: 155439 - RNA, 19 nt, Homo sapiens
  misc_RNA (1)...(19): siRNA sense strand
uaaaggccaacagcugaua

SEQ ID NO: 155440 - RNA, 19 nt, Homo sapiens
  misc_RNA (1)...(19): siRNA sense strand
caagaaggccauaaaugac

SEQ ID NO: 155441 - RNA, 19 nt, Homo sapiens
  misc_RNA (1)...(19): siRNA sense strand
cagcaguuccugaucauuc

SEQ ID NO: 155442 - RNA, 19 nt, Homo sapiens
  misc_RNA (1)...(19): siRNA sense strand
ggacauugagauugaugau

SEQ ID NO: 155443 - RNA, 19 nt, Homo sapiens
  misc_RNA (1)...(19): siRNA sense strand
caacagggcuggcauggaa

SEQ ID NO: 155444 - RNA, 19 nt, Homo sapiens
  misc_RNA (1)...(19): siRNA sense strand
ggacaugauuuccuacaau

SEQ ID NO: 155445 - RNA, 19 nt, Homo sapiens
  misc_RNA (1)...(19): siRNA sense strand
gaauacgacugugaauuug

SEQ ID NO: 155446 - RNA, 19 nt, Homo sapiens
  misc_RNA (1)...(19): siRNA sense strand
gacaugauuuccuacaauu

SEQ ID NO: 155447 - RNA, 19 nt, Homo sapiens
  misc_RNA (1)...(19): siRNA sense strand
ugaauacgacugugaauuu

SEQ ID NO: 155448 - RNA, 19 nt, Homo sapiens
  misc_RNA (1)...(19): siRNA sense strand
gaugaugggugggugaauu

SEQ ID NO: 155449 - RNA, 19 nt, Homo sapiens
  misc_RNA (1)...(19): siRNA sense strand
gggcuggcauggaauggua

SEQ ID NO: 155450 - RNA, 19 nt, Homo sapiens
  misc_RNA (1)...(19): siRNA sense strand
ccauauuccugcuggcuaa

SEQ ID NO: 155451 - RNA, 19 nt, Homo sapiens
  misc_RNA (1)...(19): siRNA sense strand
agcaagaggugcccauauu

SEQ ID NO: 155452 - RNA, 19 nt, Homo sapiens
  misc_RNA (1)...(19): siRNA sense strand
caguggaaguucauaaugu

SEQ ID NO: 155453 - RNA, 19 nt, Homo sapiens
  misc_RNA (1)...(19): siRNA sense strand
gcaagaggugcccauauuc

SEQ ID NO: 155454 - RNA, 19 nt, Homo sapiens
  misc_RNA (1)...(19): siRNA sense strand
gaggagcaacaaccacuuu

SEQ ID NO: 155455 - RNA, 19 nt, Homo sapiens
  misc_RNA (1)...(19): siRNA sense strand
gugaggaaauggacaugau

SEQ ID NO: 155456 - RNA, 19 nt, Homo sapiens
  misc_RNA (1)...(19): siRNA sense strand
cagacgugcuccaacaaug

SEQ ID NO: 155457 - RNA, 19 nt, Homo sapiens
  misc_RNA (1)...(19): siRNA sense strand
gaucgccaguggaaguuca

SEQ ID NO: 155458 - RNA, 19 nt, Homo sapiens
  misc_RNA (1)...(19): siRNA sense strand
cagaauauccaggucacua

SEQ ID NO: 155459 - RNA, 19 nt, Homo sapiens
  misc_RNA (1)...(19): siRNA sense strand
gaauauccaggucacuaug

SEQ ID NO: 155460 - RNA, 19 nt, Homo sapiens
  misc_RNA (1)...(19): siRNA sense strand
uaccagacgugcuccaaca

SEQ ID NO: 155461 - RNA, 19 nt, Homo sapiens
  misc_RNA (1)...(19): siRNA sense strand
ugaggagcaucuucagcaa

SEQ ID NO: 155462 - RNA, 19 nt, Homo sapiens
  misc_RNA (1)...(19): siRNA sense strand
aaagggaucgccaguggaa

SEQ ID NO: 155463 - RNA, 19 nt, Homo sapiens
  misc_RNA (1)...(19): siRNA sense strand
gaucgggaguggcaguuuu

SEQ ID NO: 155464 - RNA, 19 nt, Homo sapiens
  misc_RNA (1)...(19): siRNA sense strand
ugacugaauacgacuguga

SEQ ID NO: 155465 - RNA, 19 nt, Homo sapiens
  misc_RNA (1)...(19): siRNA sense strand
uaaugugccggaugacuga

SEQ ID NO: 155466 - RNA, 19 nt, Homo sapiens
  misc_RNA (1)...(19): siRNA sense strand
gaugggugggugaauuuga

SEQ ID NO: 155467 - RNA, 19 nt, Homo sapiens
  misc_RNA (1)...(19): siRNA sense strand
ccaguggaaguucauaaug

SEQ ID NO: 155468 - RNA, 19 nt, Homo sapiens
  misc_RNA (1)...(19): siRNA sense strand
gagcaacaaccacuuucuc

SEQ ID NO: 155469 - RNA, 19 nt, Homo sapiens
  misc_RNA (1)...(19): siRNA sense strand
ugugccggaugacugaaua

SEQ ID NO: 155470 - RNA, 19 nt, Homo sapiens
  misc_RNA (1)...(19): siRNA sense strand
ccugcuggcuaacaacaga

SEQ ID NO: 155471 - RNA, 19 nt, Homo sapiens
  misc_RNA (1)...(19): siRNA sense strand
ccagcaguaucaugacuac

SEQ ID NO: 155472 - RNA, 19 nt, Homo sapiens
  misc_RNA (1)...(19): siRNA sense strand
gcuaacaacagaauaucca

SEQ ID NO: 155473 - RNA, 19 nt, Homo sapiens
  misc_RNA (1)...(19): siRNA sense strand
cagcaagaggugcccauau

SEQ ID NO: 155474 - RNA, 19 nt, Homo sapiens
  misc_RNA (1)...(19): siRNA sense strand
ugaggaaauggacaugauu

SEQ ID NO: 155475 - RNA, 19 nt, Homo sapiens
  misc_RNA (1)...(19): siRNA sense strand
aguggaaguucauaaugug

SEQ ID NO: 155476 - RNA, 19 nt, Homo sapiens
  misc_RNA (1)...(19): siRNA sense strand
gagccgcuacuucgaguca

SEQ ID NO: 155477 - RNA, 19 nt, Homo sapiens
  misc_RNA (1)...(19): siRNA sense strand
uggacaugauuuccuacaa

SEQ ID NO: 155478 - RNA, 19 nt, Homo sapiens
  misc_RNA (1)...(19): siRNA sense strand
agaauauccaggucacuau

SEQ ID NO: 155479 - RNA, 19 nt, Homo sapiens
  misc_RNA (1)...(19): siRNA sense strand
auacgacugugaauuugca

SEQ ID NO: 155480 - RNA, 19 nt, Homo sapiens
  misc_RNA (1)...(19): siRNA sense strand
ggagcaacaaccacuuucu

SEQ ID NO: 155481 - RNA, 19 nt, Homo sapiens
  misc_RNA (1)...(19): siRNA sense strand
agucuucucuggguacuuc

SEQ ID NO: 155482 - RNA, 19 nt, Homo sapiens
  misc_RNA (1)...(19): siRNA sense strand
gccaguggaaguucauaau

SEQ ID NO: 155483 - RNA, 19 nt, Homo sapiens
  misc_RNA (1)...(19): siRNA sense strand
gacugaauacgacugugaa

SEQ ID NO: 155484 - RNA, 19 nt, Homo sapiens
  misc_RNA (1)...(19): siRNA sense strand
ccagacgugcuccaacaau

SEQ ID NO: 155485 - RNA, 19 nt, Homo sapiens
  misc_RNA (1)...(19): siRNA sense strand
gaugacugaauacgacugu

SEQ ID NO: 155486 - RNA, 19 nt, Homo sapiens
  misc_RNA (1)...(19): siRNA sense strand
ccaguauggcgauuaugga

SEQ ID NO: 155487 - RNA, 19 nt, Homo sapiens
  misc_RNA (1)...(19): siRNA sense strand
caacaggaauggcuucaaa

SEQ ID NO: 155488 - RNA, 19 nt, Homo sapiens
  misc_RNA (1)...(19): siRNA sense strand
ggauuuggcucuuacauca

SEQ ID NO: 155489 - RNA, 19 nt, Homo sapiens
  misc_RNA (1)...(19): siRNA sense strand
ccagagcugcuaucaauaa

SEQ ID NO: 155490 - RNA, 19 nt, Homo sapiens
  misc_RNA (1)...(19): siRNA sense strand
uacaagcacuagaaaguuu

SEQ ID NO: 155491 - RNA, 19 nt, Homo sapiens
  misc_RNA (1)...(19): siRNA sense strand
gaaaggccaguucucguuu

SEQ ID NO: 155492 - RNA, 19 nt, Homo sapiens
  misc_RNA (1)...(19): siRNA sense strand
gagacagcaacaagaauua

SEQ ID NO: 155493 - RNA, 19 nt, Homo sapiens
  misc_RNA (1)...(19): siRNA sense strand
gaacugcugcacugaauuc

SEQ ID NO: 155494 - RNA, 19 nt, Homo sapiens
  misc_RNA (1)...(19): siRNA sense strand
cuagaaaguuugggauuug

SEQ ID NO: 155495 - RNA, 19 nt, Homo sapiens
  misc_RNA (1)...(19): siRNA sense strand
ucauucaccuuauaucuuc

SEQ ID NO: 155496 - RNA, 19 nt, Homo sapiens
  misc_RNA (1)...(19): siRNA sense strand
ugaagaagaguuauugaga

SEQ ID NO: 155497 - RNA, 19 nt, Homo sapiens
  misc_RNA (1)...(19): siRNA sense strand
gcaagaguguaaaacagua

SEQ ID NO: 155498 - RNA, 19 nt, Homo sapiens
  misc_RNA (1)...(19): siRNA sense strand
ggccaguucucguuuggaa

SEQ ID NO: 155499 - RNA, 19 nt, Homo sapiens
  misc_RNA (1)...(19): siRNA sense strand
cugcugcacugaauucauu

SEQ ID NO: 155500 - RNA, 19 nt, Homo sapiens
  misc_RNA (1)...(19): siRNA sense strand
cagagcugcuaucaauaaa

SEQ ID NO: 155501 - RNA, 19 nt, Homo sapiens
  misc_RNA (1)...(19): siRNA sense strand
caacgaugaugaucucacu

SEQ ID NO: 155502 - RNA, 19 nt, Homo sapiens
  misc_RNA (1)...(19): siRNA sense strand
gugaacugcugcacugaau

SEQ ID NO: 155503 - RNA, 19 nt, Homo sapiens
  misc_RNA (1)...(19): siRNA sense strand
acuagaaaguuugggauuu

SEQ ID NO: 155504 - RNA, 19 nt, Homo sapiens
  misc_RNA (1)...(19): siRNA sense strand
ugagacagcaacaagaauu

SEQ ID NO: 155505 - RNA, 19 nt, Homo sapiens
  misc_RNA (1)...(19): siRNA sense strand
gagcugcuaucaauaaaau

SEQ ID NO: 155506 - RNA, 19 nt, Homo sapiens
  misc_RNA (1)...(19): siRNA sense strand
aagaagaguuauugagaca

SEQ ID NO: 155507 - RNA, 19 nt, Homo sapiens
  misc_RNA (1)...(19): siRNA sense strand
gcucuuacaucagugaagu

SEQ ID NO: 155508 - RNA, 19 nt, Homo sapiens
  misc_RNA (1)...(19): siRNA sense strand
aggaauggcuucaaaugca

SEQ ID NO: 155509 - RNA, 19 nt, Homo sapiens
  misc_RNA (1)...(19): siRNA sense strand
cauacaagcacuagaaagu

SEQ ID NO: 155510 - RNA, 19 nt, Homo sapiens
  misc_RNA (1)...(19): siRNA sense strand
ggcgggaucuucucaggau

SEQ ID NO: 155511 - RNA, 19 nt, Homo sapiens
  misc_RNA (1)...(19): siRNA sense strand
gacagcaacaagaauuauu

SEQ ID NO: 155512 - RNA, 19 nt, Homo sapiens
  misc_RNA (1)...(19): siRNA sense strand
caccagagcaugucauaca

SEQ ID NO: 155513 - RNA, 19 nt, Homo sapiens
  misc_RNA (1)...(19): siRNA sense strand
cucgagagcugguggugaa

SEQ ID NO: 155514 - RNA, 19 nt, Homo sapiens
  misc_RNA (1)...(19): siRNA sense strand
gagagcugguggugaacug

SEQ ID NO: 155515 - RNA, 19 nt, Homo sapiens
  misc_RNA (1)...(19): siRNA sense strand
ugucauacaagcacuagaa

SEQ ID NO: 155516 - RNA, 19 nt, Homo sapiens
  misc_RNA (1)...(19): siRNA sense strand
aaaggccaguucucguuug

SEQ ID NO: 155517 - RNA, 19 nt, Homo sapiens
  misc_RNA (1)...(19): siRNA sense strand
gacagcaacaagcagaauu

SEQ ID NO: 155518 - RNA, 19 nt, Homo sapiens
  misc_RNA (1)...(19): siRNA sense strand
cagcaacaagaauuauuug

SEQ ID NO: 155519 - RNA, 19 nt, Homo sapiens
  misc_RNA (1)...(19): siRNA sense strand
gaagccaaugagauuugua

SEQ ID NO: 155520 - RNA, 19 nt, Homo sapiens
  misc_RNA (1)...(19): siRNA sense strand
ccucagccagugcaucuaa

SEQ ID NO: 155521 - RNA, 19 nt, Homo sapiens
  misc_RNA (1)...(19): siRNA sense strand
ccccagagcugcuaucaau

SEQ ID NO: 155522 - RNA, 19 nt, Homo sapiens
  misc_RNA (1)...(19): siRNA sense strand
aagccaaugagauuuguaa

SEQ ID NO: 155523 - RNA, 19 nt, Homo sapiens
  misc_RNA (1)...(19): siRNA sense strand
gggaucuucucaggaugaa

SEQ ID NO: 155524 - RNA, 19 nt, Homo sapiens
  misc_RNA (1)...(19): siRNA sense strand
uggcauuccugaagaagag

SEQ ID NO: 155525 - RNA, 19 nt, Homo sapiens
  misc_RNA (1)...(19): siRNA sense strand
guguaaaacaguagcauua

SEQ ID NO: 155526 - RNA, 19 nt, Homo sapiens
  misc_RNA (1)...(19): siRNA sense strand
guuugggauuuggcucuua

SEQ ID NO: 155527 - RNA, 19 nt, Homo sapiens
  misc_RNA (1)...(19): siRNA sense strand
uaacaaaucggaaaagaag

SEQ ID NO: 155528 - RNA, 19 nt, Homo sapiens
  misc_RNA (1)...(19): siRNA sense strand
ugaagccaaugagauuugu

SEQ ID NO: 155529 - RNA, 19 nt, Homo sapiens
  misc_RNA (1)...(19): siRNA sense strand
acaggaauggcuucaaaug

SEQ ID NO: 155530 - RNA, 19 nt, Homo sapiens
  misc_RNA (1)...(19): siRNA sense strand
uggcaacgaugaugaucuc

SEQ ID NO: 155531 - RNA, 19 nt, Homo sapiens
  misc_RNA (1)...(19): siRNA sense strand
gccaaugagauuuguaaca

SEQ ID NO: 155532 - RNA, 19 nt, Homo sapiens
  misc_RNA (1)...(19): siRNA sense strand
aaagaagaaaggccaguuc

SEQ ID NO: 155533 - RNA, 19 nt, Homo sapiens
  misc_RNA (1)...(19): siRNA sense strand
ggugaacugcugcacugaa

SEQ ID NO: 155534 - RNA, 19 nt, Homo sapiens
  misc_RNA (1)...(19): siRNA sense strand
cgaugaugaucucacuauc

SEQ ID NO: 155535 - RNA, 19 nt, Homo sapiens
  misc_RNA (1)...(19): siRNA sense strand
gggauuuggcucuuacauc

SEQ ID NO: 155536 - RNA, 19 nt, Homo sapiens
  misc_RNA (1)...(19): siRNA sense strand
gcaugucauacaagcacua

SEQ ID NO: 155537 - RNA, 19 nt, Homo sapiens
  misc_RNA (1)...(19): siRNA sense strand
acagcaacaagcagaauug

SEQ ID NO: 155538 - RNA, 19 nt, Homo sapiens
  misc_RNA (1)...(19): siRNA sense strand
gaccaucucaccagagcau

SEQ ID NO: 155539 - RNA, 19 nt, Homo sapiens
  misc_RNA (1)...(19): siRNA sense strand
auacaagcacuagaaaguu

SEQ ID NO: 155540 - RNA, 19 nt, Homo sapiens
  misc_RNA (1)...(19): siRNA sense strand
uagaaaguuugggauuugg

SEQ ID NO: 155541 - RNA, 19 nt, Homo sapiens
  misc_RNA (1)...(19): siRNA sense strand
gaacuaagcacuacucuaa

SEQ ID NO: 155542 - RNA, 19 nt, Homo sapiens
  misc_RNA (1)...(19): siRNA sense strand
ggacagaccacuccagaua

SEQ ID NO: 155543 - RNA, 19 nt, Homo sapiens
  misc_RNA (1)...(19): siRNA sense strand
ccaauaaaguucccuacua

SEQ ID NO: 155544 - RNA, 19 nt, Homo sapiens
  misc_RNA (1)...(19): siRNA sense strand
gaguaaaguuggugaauga

SEQ ID NO: 155545 - RNA, 19 nt, Homo sapiens
  misc_RNA (1)...(19): siRNA sense strand
caaaauugcuccuucuuua

SEQ ID NO: 155546 - RNA, 19 nt, Homo sapiens
  misc_RNA (1)...(19): siRNA sense strand
gcaggcagcugaccaguuc

SEQ ID NO: 155547 - RNA, 19 nt, Homo sapiens
  misc_RNA (1)...(19): siRNA sense strand
cuauuaagcuguucaaaga

SEQ ID NO: 155548 - RNA, 19 nt, Homo sapiens
  misc_RNA (1)...(19): siRNA sense strand
gcuuggaccugguaacuuu

SEQ ID NO: 155549 - RNA, 19 nt, Homo sapiens
  misc_RNA (1)...(19): siRNA sense strand
ggacuuugccacaaccuua

SEQ ID NO: 155550 - RNA, 19 nt, Homo sapiens
  misc_RNA (1)...(19): siRNA sense strand
gagcacauccaggcuauua

SEQ ID NO: 155551 - RNA, 19 nt, Homo sapiens
  misc_RNA (1)...(19): siRNA sense strand
caugaaagauggaguaaag

SEQ ID NO: 155552 - RNA, 19 nt, Homo sapiens
  misc_RNA (1)...(19): siRNA sense strand
ccacagcccuggaaaucuu

SEQ ID NO: 155553 - RNA, 19 nt, Homo sapiens
  misc_RNA (1)...(19): siRNA sense strand
gcacccauuugaggaguua

SEQ ID NO: 155554 - RNA, 19 nt, Homo sapiens
  misc_RNA (1)...(19): siRNA sense strand
caacagaccaccgcaauga

SEQ ID NO: 155555 - RNA, 19 nt, Homo sapiens
  misc_RNA (1)...(19): siRNA sense strand
gacacacacucccgaauug

SEQ ID NO: 155556 - RNA, 19 nt, Homo sapiens
  misc_RNA (1)...(19): siRNA sense strand
ggaguaaaguuggugaaug

SEQ ID NO: 155557 - RNA, 19 nt, Homo sapiens
  misc_RNA (1)...(19): siRNA sense strand
gaaagauggaguaaaguug

SEQ ID NO: 155558 - RNA, 19 nt, Homo sapiens
  misc_RNA (1)...(19): siRNA sense strand
gaugugcacuugucaaugg

SEQ ID NO: 155559 - RNA, 19 nt, Homo sapiens
  misc_RNA (1)...(19): siRNA sense strand
gcugaccaguuccaucaua

SEQ ID NO: 155560 - RNA, 19 nt, Homo sapiens
  misc_RNA (1)...(19): siRNA sense strand
gcaugcagauccucgaaga

SEQ ID NO: 155561 - RNA, 19 nt, Homo sapiens
  misc_RNA (1)...(19): siRNA sense strand
caauaaaguucccuacuac

SEQ ID NO: 155562 - RNA, 19 nt, Homo sapiens
  misc_RNA (1)...(19): siRNA sense strand
ggagacacaugcggccuuu

SEQ ID NO: 155563 - RNA, 19 nt, Homo sapiens
  misc_RNA (1)...(19): siRNA sense strand
gcacggaagugaaggaaaa

SEQ ID NO: 155564 - RNA, 19 nt, Homo sapiens
  misc_RNA (1)...(19): siRNA sense strand
cgaaacagcggauccagaa

SEQ ID NO: 155565 - RNA, 19 nt, Homo sapiens
  misc_RNA (1)...(19): siRNA sense strand
uagcugaucugaacaacau

SEQ ID NO: 155566 - RNA, 19 nt, Homo sapiens
  misc_RNA (1)...(19): siRNA sense strand
gaccagcaccgucacauug

SEQ ID NO: 155567 - RNA, 19 nt, Homo sapiens
  misc_RNA (1)...(19): siRNA sense strand
uaaaguuggugaaugaucu

SEQ ID NO: 155568 - RNA, 19 nt, Homo sapiens
  misc_RNA (1)...(19): siRNA sense strand
gcauagacgaggaccagua

SEQ ID NO: 155569 - RNA, 19 nt, Homo sapiens
  misc_RNA (1)...(19): siRNA sense strand
ccacaaccuuaaagaacaa

SEQ ID NO: 155570 - RNA, 19 nt, Homo sapiens
  misc_RNA (1)...(19): siRNA sense strand
gaucaacguccgauggaaa

SEQ ID NO: 155571 - RNA, 19 nt, Homo sapiens
  misc_RNA (1)...(19): siRNA sense strand
caacuugccauuucugaug

SEQ ID NO: 155572 - RNA, 19 nt, Homo sapiens
  misc_RNA (1)...(19): siRNA sense strand
ccaugaaucuguguuggaa

SEQ ID NO: 155573 - RNA, 19 nt, Homo sapiens
  misc_RNA (1)...(19): siRNA sense strand
gcuggaggcugacuacagu

SEQ ID NO: 155574 - RNA, 19 nt, Homo sapiens
  misc_RNA (1)...(19): siRNA sense strand
gccacaaccuuaaagaaca

SEQ ID NO: 155575 - RNA, 19 nt, Homo sapiens
  misc_RNA (1)...(19): siRNA sense strand
gaucugaacaacauuaagu

SEQ ID NO: 155576 - RNA, 19 nt, Homo sapiens
  misc_RNA (1)...(19): siRNA sense strand
aaaguucccuacuacauca

SEQ ID NO: 155577 - RNA, 19 nt, Homo sapiens
  misc_RNA (1)...(19): siRNA sense strand
agagcaauuucacccaaua

SEQ ID NO: 155578 - RNA, 19 nt, Homo sapiens
  misc_RNA (1)...(19): siRNA sense strand
ugccagaccugcuucuuga

SEQ ID NO: 155579 - RNA, 19 nt, Homo sapiens
  misc_RNA (1)...(19): siRNA sense strand
cgacacacacucccgaauu

SEQ ID NO: 155580 - RNA, 19 nt, Homo sapiens
  misc_RNA (1)...(19): siRNA sense strand
gauccuggcccacuuggaa

SEQ ID NO: 155581 - RNA, 19 nt, Homo sapiens
  misc_RNA (1)...(19): siRNA sense strand
ggucaaagagccaggaugu

SEQ ID NO: 155582 - RNA, 19 nt, Homo sapiens
  misc_RNA (1)...(19): siRNA sense strand
ccucgaagaucacaacaag

SEQ ID NO: 155583 - RNA, 19 nt, Homo sapiens
  misc_RNA (1)...(19): siRNA sense strand
ccaagaugacagaguuaua

SEQ ID NO: 155584 - RNA, 19 nt, Homo sapiens
  misc_RNA (1)...(19): siRNA sense strand
gugcgaaguucugauguga

SEQ ID NO: 155585 - RNA, 19 nt, Homo sapiens
  misc_RNA (1)...(19): siRNA sense strand
aaauuccgcuccaagcauu

SEQ ID NO: 155586 - RNA, 19 nt, Homo sapiens
  misc_RNA (1)...(19): siRNA sense strand
ugacagaguuauaccaaac

SEQ ID NO: 155587 - RNA, 19 nt, Homo sapiens
  misc_RNA (1)...(19): siRNA sense strand
ugaaagauggaguaaaguu

SEQ ID NO: 155588 - RNA, 19 nt, Homo sapiens
  misc_RNA (1)...(19): siRNA sense strand
gcugaucugaacaacauua

SEQ ID NO: 155589 - RNA, 19 nt, Homo sapiens
  misc_RNA (1)...(19): siRNA sense strand
gagcaauuucacccaauaa

SEQ ID NO: 155590 - RNA, 19 nt, Homo sapiens
  misc_RNA (1)...(19): siRNA sense strand
gaucuggcccaccaacuug

SEQ ID NO: 155591 - RNA, 19 nt, Homo sapiens
  misc_RNA (1)...(19): siRNA sense strand
gaagauccuggcccacuug

SEQ ID NO: 155592 - RNA, 19 nt, Homo sapiens
  misc_RNA (1)...(19): siRNA sense strand
caagcauuauuucagcaaa

SEQ ID NO: 155593 - RNA, 19 nt, Homo sapiens
  misc_RNA (1)...(19): siRNA sense strand
gaaucuguguuggaaugaa

SEQ ID NO: 155594 - RNA, 19 nt, Homo sapiens
  misc_RNA (1)...(19): siRNA sense strand
ucaaagagccaggauguca

SEQ ID NO: 155595 - RNA, 19 nt, Homo sapiens
  misc_RNA (1)...(19): siRNA sense strand
gcacgugauggauguggua

SEQ ID NO: 155596 - RNA, 19 nt, Homo sapiens
  misc_RNA (1)...(19): siRNA sense strand
gaugacagaguuauaccaa

SEQ ID NO: 155597 - RNA, 19 nt, Homo sapiens
  misc_RNA (1)...(19): siRNA sense strand
caauuucacccaauaaagu

SEQ ID NO: 155598 - RNA, 19 nt, Homo sapiens
  misc_RNA (1)...(19): siRNA sense strand
ggggaucucuucauugauu

SEQ ID NO: 155599 - RNA, 19 nt, Homo sapiens
  misc_RNA (1)...(19): siRNA sense strand
gaaucucagccgcuuugua

SEQ ID NO: 155600 - RNA, 19 nt, Homo sapiens
  misc_RNA (1)...(19): siRNA sense strand
uggaggacaucauggagaa

SEQ ID NO: 155601 - RNA, 19 nt, Homo sapiens
  misc_RNA (1)...(19): siRNA sense strand
gagcugaggcgccugaagu

SEQ ID NO: 155602 - RNA, 19 nt, Homo sapiens
  misc_RNA (1)...(19): siRNA sense strand
gaggcugacuacagugaga

SEQ ID NO: 155603 - RNA, 19 nt, Homo sapiens
  misc_RNA (1)...(19): siRNA sense strand
cguaguugcuuccguuuua

SEQ ID NO: 155604 - RNA, 19 nt, Homo sapiens
  misc_RNA (1)...(19): siRNA sense strand
gaggcauccuggucaaugu

SEQ ID NO: 155605 - RNA, 19 nt, Homo sapiens
  misc_RNA (1)...(19): siRNA sense strand
gcaauuucacccaauaaag

SEQ ID NO: 155606 - RNA, 19 nt, Homo sapiens
  misc_RNA (1)...(19): siRNA sense strand
ggaacuaagcacuacucua

SEQ ID NO: 155607 - RNA, 19 nt, Homo sapiens
  misc_RNA (1)...(19): siRNA sense strand
ggaccagcaccgucacauu

SEQ ID NO: 155608 - RNA, 19 nt, Homo sapiens
  misc_RNA (1)...(19): siRNA sense strand
gcacauccaggcuauuaag

SEQ ID NO: 155609 - RNA, 19 nt, Homo sapiens
  misc_RNA (1)...(19): siRNA sense strand
gcgaaguucugaugugacu

SEQ ID NO: 155610 - RNA, 19 nt, Homo sapiens
  misc_RNA (1)...(19): siRNA sense strand
ccacugaggcagcaacaga

SEQ ID NO: 155611 - RNA, 19 nt, Homo sapiens
  misc_RNA (1)...(19): siRNA sense strand
gaagaugagaaccggauuc

SEQ ID NO: 155612 - RNA, 19 nt, Homo sapiens
  misc_RNA (1)...(19): siRNA sense strand
uugcugagauggaaaguca

SEQ ID NO: 155613 - RNA, 19 nt, Homo sapiens
  misc_RNA (1)...(19): siRNA sense strand
aaucucagccgcuuuguau

SEQ ID NO: 155614 - RNA, 19 nt, Homo sapiens
  misc_RNA (1)...(19): siRNA sense strand
gcuauuaagcuguucaaag

SEQ ID NO: 155615 - RNA, 19 nt, Homo sapiens
  misc_RNA (1)...(19): siRNA sense strand
cagagcacauccaggcuau

SEQ ID NO: 155616 - RNA, 19 nt, Homo sapiens
  misc_RNA (1)...(19): siRNA sense strand
aaacuucaguaccucuuca

SEQ ID NO: 155617 - RNA, 19 nt, Homo sapiens
  misc_RNA (1)...(19): siRNA sense strand
ccagugagcacgugaugga

SEQ ID NO: 155618 - RNA, 19 nt, Homo sapiens
  misc_RNA (1)...(19): siRNA sense strand
accaagugcucuaucugua

SEQ ID NO: 155619 - RNA, 19 nt, Homo sapiens
  misc_RNA (1)...(19): siRNA sense strand
aaagaggcauccuggucaa

SEQ ID NO: 155620 - RNA, 19 nt, Homo sapiens
  misc_RNA (1)...(19): siRNA sense strand
ggaaccaccagccaugaau

SEQ ID NO: 155621 - RNA, 19 nt, Homo sapiens
  misc_RNA (1)...(19): siRNA sense strand
gcaacagaccaccgcaaug

SEQ ID NO: 155622 - RNA, 19 nt, Homo sapiens
  misc_RNA (1)...(19): siRNA sense strand
gaccaagugcucuaucugu

SEQ ID NO: 155623 - RNA, 19 nt, Homo sapiens
  misc_RNA (1)...(19): siRNA sense strand
aaucuguguuggaaugaaa

SEQ ID NO: 155624 - RNA, 19 nt, Homo sapiens
  misc_RNA (1)...(19): siRNA sense strand
ugccuuauaugaacguuug

SEQ ID NO: 155625 - RNA, 19 nt, Homo sapiens
  misc_RNA (1)...(19): siRNA sense strand
cugccugacugccuuauau

SEQ ID NO: 155626 - RNA, 19 nt, Homo sapiens
  misc_RNA (1)...(19): siRNA sense strand
cccuggaaaucuucaauga

SEQ ID NO: 155627 - RNA, 19 nt, Homo sapiens
  misc_RNA (1)...(19): siRNA sense strand
ccaaaaggaugaggaguug

SEQ ID NO: 155628 - RNA, 19 nt, Homo sapiens
  misc_RNA (1)...(19): siRNA sense strand
gcugagauggaaagucaaa

SEQ ID NO: 155629 - RNA, 19 nt, Homo sapiens
  misc_RNA (1)...(19): siRNA sense strand
gugagcacgugauggaugu

SEQ ID NO: 155630 - RNA, 19 nt, Homo sapiens
  misc_RNA (1)...(19): siRNA sense strand
uaaaguucccuacuacauc

SEQ ID NO: 155631 - RNA, 19 nt, Homo sapiens
  misc_RNA (1)...(19): siRNA sense strand
cuacaggcgucaguugaug

SEQ ID NO: 155632 - RNA, 19 nt, Homo sapiens
  misc_RNA (1)...(19): siRNA sense strand
caagaugacagaguuauac

SEQ ID NO: 155633 - RNA, 19 nt, Homo sapiens
  misc_RNA (1)...(19): siRNA sense strand
uaccgaggcugcagaugau

SEQ ID NO: 155634 - RNA, 19 nt, Homo sapiens
  misc_RNA (1)...(19): siRNA sense strand
cagcugaccaguuccauca

SEQ ID NO: 155635 - RNA, 19 nt, Homo sapiens
  misc_RNA (1)...(19): siRNA sense strand
caacucaggcagccagugu

SEQ ID NO: 155636 - RNA, 19 nt, Homo sapiens
  misc_RNA (1)...(19): siRNA sense strand
aacauuaaguucucagcuu

SEQ ID NO: 155637 - RNA, 19 nt, Homo sapiens
  misc_RNA (1)...(19): siRNA sense strand
agacacaugcggccuuuau

SEQ ID NO: 155638 - RNA, 19 nt, Homo sapiens
  misc_RNA (1)...(19): siRNA sense strand
caucauggaguauuacaca

SEQ ID NO: 155639 - RNA, 19 nt, Homo sapiens
  misc_RNA (1)...(19): siRNA sense strand
caucagaccaagugcucua

SEQ ID NO: 155640 - RNA, 19 nt, Homo sapiens
  misc_RNA (1)...(19): siRNA sense strand
ccaccaacuugccauuucu

SEQ ID NO: 155641 - RNA, 19 nt, Homo sapiens
  misc_RNA (1)...(19): siRNA sense strand
gcuccaagcuggccaagaa

SEQ ID NO: 155642 - RNA, 19 nt, Homo sapiens
  misc_RNA (1)...(19): siRNA sense strand
ccacccaccuccacucuuu

SEQ ID NO: 155643 - RNA, 19 nt, Homo sapiens
  misc_RNA (1)...(19): siRNA sense strand
gaauaaagacucgauguca

SEQ ID NO: 155644 - RNA, 19 nt, Homo sapiens
  misc_RNA (1)...(19): siRNA sense strand
gggcggagccuuaaugaug

SEQ ID NO: 155645 - RNA, 19 nt, Homo sapiens
  misc_RNA (1)...(19): siRNA sense strand
cccaugagguuuccuuauu

SEQ ID NO: 155646 - RNA, 19 nt, Homo sapiens
  misc_RNA (1)...(19): siRNA sense strand
gcaagaugcuauccaugca

SEQ ID NO: 155647 - RNA, 19 nt, Homo sapiens
  misc_RNA (1)...(19): siRNA sense strand
gcagugcgguggcuacagu

SEQ ID NO: 155648 - RNA, 19 nt, Homo sapiens
  misc_RNA (1)...(19): siRNA sense strand
ggaguggacggaagaaaga

SEQ ID NO: 155649 - RNA, 19 nt, Homo sapiens
  misc_RNA (1)...(19): siRNA sense strand
ggcggagccuuaaugauga

SEQ ID NO: 155650 - RNA, 19 nt, Homo sapiens
  misc_RNA (1)...(19): siRNA sense strand
gccagaggcuagcuuugaa

SEQ ID NO: 155651 - RNA, 19 nt, Homo sapiens
  misc_RNA (1)...(19): siRNA sense strand
caagaaggcccgaguagag

SEQ ID NO: 155652 - RNA, 19 nt, Homo sapiens
  misc_RNA (1)...(19): siRNA sense strand
gaagacacgacagaauaaa

SEQ ID NO: 155653 - RNA, 19 nt, Homo sapiens
  misc_RNA (1)...(19): siRNA sense strand
ggagaaugacucugacuca

SEQ ID NO: 155654 - RNA, 19 nt, Homo sapiens
  misc_RNA (1)...(19): siRNA sense strand
ccaccgggcuaucgaggaa

SEQ ID NO: 155655 - RNA, 19 nt, Homo sapiens
  misc_RNA (1)...(19): siRNA sense strand
aauaaagacucgaugucaa

SEQ ID NO: 155656 - RNA, 19 nt, Homo sapiens
  misc_RNA (1)...(19): siRNA sense strand
ccaugagguuuccuuauuc

SEQ ID NO: 155657 - RNA, 19 nt, Homo sapiens
  misc_RNA (1)...(19): siRNA sense strand
acagucaccugaagaagga

SEQ ID NO: 155658 - RNA, 19 nt, Homo sapiens
  misc_RNA (1)...(19): siRNA sense strand
ccaccagucucaacacauc

SEQ ID NO: 155659 - RNA, 19 nt, Homo sapiens
  misc_RNA (1)...(19): siRNA sense strand
caacagcaaugcccaucca

SEQ ID NO: 155660 - RNA, 19 nt, Homo sapiens
  misc_RNA (1)...(19): siRNA sense strand
caccuggccugcacccuuu

SEQ ID NO: 155661 - RNA, 19 nt, Homo sapiens
  misc_RNA (1)...(19): siRNA sense strand
gcagcgaccuguacuucgu

SEQ ID NO: 155662 - RNA, 19 nt, Homo sapiens
  misc_RNA (1)...(19): siRNA sense strand
ggagccggcugaggaguau

SEQ ID NO: 155663 - RNA, 19 nt, Homo sapiens
  misc_RNA (1)...(19): siRNA sense strand
gaaagugaggagaccaaug

SEQ ID NO: 155664 - RNA, 19 nt, Homo sapiens
  misc_RNA (1)...(19): siRNA sense strand
ccaacaagccucucugucu

SEQ ID NO: 155665 - RNA, 19 nt, Homo sapiens
  misc_RNA (1)...(19): siRNA sense strand
cuggaaguguggagaauga

SEQ ID NO: 155666 - RNA, 19 nt, Homo sapiens
  misc_RNA (1)...(19): siRNA sense strand
agaaggagcgcgagcuuga

SEQ ID NO: 155667 - RNA, 19 nt, Homo sapiens
  misc_RNA (1)...(19): siRNA sense strand
caugagguuuccuuauuca

SEQ ID NO: 155668 - RNA, 19 nt, Homo sapiens
  misc_RNA (1)...(19): siRNA sense strand
ugucaugucuccuggcaau

SEQ ID NO: 155669 - RNA, 19 nt, Homo sapiens
  misc_RNA (1)...(19): siRNA sense strand
gaagaaggaaagcgacaag

SEQ ID NO: 155670 - RNA, 19 nt, Homo sapiens
  misc_RNA (1)...(19): siRNA sense strand
ccuccgaucuggauagcuu

SEQ ID NO: 155671 - RNA, 19 nt, Homo sapiens
  misc_RNA (1)...(19): siRNA sense strand
caauggcccuccagucucu

SEQ ID NO: 155672 - RNA, 19 nt, Homo sapiens
  misc_RNA (1)...(19): siRNA sense strand
ccuuauucauccucuagua

SEQ ID NO: 155673 - RNA, 19 nt, Homo sapiens
  misc_RNA (1)...(19): siRNA sense strand
ggagaccaaugcaccaaaa

SEQ ID NO: 155674 - RNA, 19 nt, Homo sapiens
  misc_RNA (1)...(19): siRNA sense strand
guccagcagugauggcaaa

SEQ ID NO: 155675 - RNA, 19 nt, Homo sapiens
  misc_RNA (1)...(19): siRNA sense strand
ccacuacucccauuucagu

SEQ ID NO: 155676 - RNA, 19 nt, Homo sapiens
  misc_RNA (1)...(19): siRNA sense strand
gcagcgacccuagggauau

SEQ ID NO: 155677 - RNA, 19 nt, Homo sapiens
  misc_RNA (1)...(19): siRNA sense strand
agacacgacagaauaaaga

SEQ ID NO: 155678 - RNA, 19 nt, Homo sapiens
  misc_RNA (1)...(19): siRNA sense strand
ggccugacauguccuaugc

SEQ ID NO: 155679 - RNA, 19 nt, Homo sapiens
  misc_RNA (1)...(19): siRNA sense strand
uauucauccucuaguagua

SEQ ID NO: 155680 - RNA, 19 nt, Homo sapiens
  misc_RNA (1)...(19): siRNA sense strand
gaaagcgacaagccacugu

SEQ ID NO: 155681 - RNA, 19 nt, Homo sapiens
  misc_RNA (1)...(19): siRNA sense strand
gccucagggucucaccuua

SEQ ID NO: 155682 - RNA, 19 nt, Homo sapiens
  misc_RNA (1)...(19): siRNA sense strand
ccaucgcccuccauuugaa

SEQ ID NO: 155683 - RNA, 19 nt, Homo sapiens
  misc_RNA (1)...(19): siRNA sense strand
gcagccuccucuuccaguu

SEQ ID NO: 155684 - RNA, 19 nt, Homo sapiens
  misc_RNA (1)...(19): siRNA sense strand
gcuccuggguuacaauguc

SEQ ID NO: 155685 - RNA, 19 nt, Homo sapiens
  misc_RNA (1)...(19): siRNA sense strand
cuacuacagucaccugaag

SEQ ID NO: 155686 - RNA, 19 nt, Homo sapiens
  misc_RNA (1)...(19): siRNA sense strand
ggcugcagaugcucaaugu

SEQ ID NO: 155687 - RNA, 19 nt, Homo sapiens
  misc_RNA (1)...(19): siRNA sense strand
cugcagaugcucaauguga

SEQ ID NO: 155688 - RNA, 19 nt, Homo sapiens
  misc_RNA (1)...(19): siRNA sense strand
gcagcagccuccucuucca

SEQ ID NO: 155689 - RNA, 19 nt, Homo sapiens
  misc_RNA (1)...(19): siRNA sense strand
gcaaucgcaaccauccauu

SEQ ID NO: 155690 - RNA, 19 nt, Homo sapiens
  misc_RNA (1)...(19): siRNA sense strand
gaaggagcgcgagcuugaa

SEQ ID NO: 155691 - RNA, 19 nt, Homo sapiens
  misc_RNA (1)...(19): siRNA sense strand
cagcuggaacucucccuaa

SEQ ID NO: 155692 - RNA, 19 nt, Homo sapiens
  misc_RNA (1)...(19): siRNA sense strand
gcagcagcaucacggaaac

SEQ ID NO: 155693 - RNA, 19 nt, Homo sapiens
  misc_RNA (1)...(19): siRNA sense strand
cagaauaaagacucgaugu

SEQ ID NO: 155694 - RNA, 19 nt, Homo sapiens
  misc_RNA (1)...(19): siRNA sense strand
ccaagaaggcccgaguaga

SEQ ID NO: 155695 - RNA, 19 nt, Homo sapiens
  misc_RNA (1)...(19): siRNA sense strand
ccuccacucuuuccuccuu

SEQ ID NO: 155696 - RNA, 19 nt, Homo sapiens
  misc_RNA (1)...(19): siRNA sense strand
ccaggcagacagccaagaa

SEQ ID NO: 155697 - RNA, 19 nt, Homo sapiens
  misc_RNA (1)...(19): siRNA sense strand
ucgcaaccauccauucuac

SEQ ID NO: 155698 - RNA, 19 nt, Homo sapiens
  misc_RNA (1)...(19): siRNA sense strand
cagcagugauggcaaagcu

SEQ ID NO: 155699 - RNA, 19 nt, Homo sapiens
  misc_RNA (1)...(19): siRNA sense strand
ccucuuagccaacagcaau

SEQ ID NO: 155700 - RNA, 19 nt, Homo sapiens
  misc_RNA (1)...(19): siRNA sense strand
gaaggcccgaguagaggaa

SEQ ID NO: 155701 - RNA, 19 nt, Homo sapiens
  misc_RNA (1)...(19): siRNA sense strand
gcgcagcgaccuguacuuc

SEQ ID NO: 155702 - RNA, 19 nt, Homo sapiens
  misc_RNA (1)...(19): siRNA sense strand
ggugggaaccuaccuucug

SEQ ID NO: 155703 - RNA, 19 nt, Homo sapiens
  misc_RNA (1)...(19): siRNA sense strand
auaaagacucgaugucaau

SEQ ID NO: 155704 - RNA, 19 nt, Homo sapiens
  misc_RNA (1)...(19): siRNA sense strand
gcgccacgcagaucaaaca

SEQ ID NO: 155705 - RNA, 19 nt, Homo sapiens
  misc_RNA (1)...(19): siRNA sense strand
gcacacccuuacgccaugu

SEQ ID NO: 155706 - RNA, 19 nt, Homo sapiens
  misc_RNA (1)...(19): siRNA sense strand
gcaaccauccauucuacgu

SEQ ID NO: 155707 - RNA, 19 nt, Homo sapiens
  misc_RNA (1)...(19): siRNA sense strand
caaguauacucagccuucu

SEQ ID NO: 155708 - RNA, 19 nt, Homo sapiens
  misc_RNA (1)...(19): siRNA sense strand
ccaggaggacuacuacagu

SEQ ID NO: 155709 - RNA, 19 nt, Homo sapiens
  misc_RNA (1)...(19): siRNA sense strand
gacacccacuggauaucau

SEQ ID NO: 155710 - RNA, 19 nt, Homo sapiens
  misc_RNA (1)...(19): siRNA sense strand
aaagugaggagaccaaugc

SEQ ID NO: 155711 - RNA, 19 nt, Homo sapiens
  misc_RNA (1)...(19): siRNA sense strand
ucucaacacaucaccauca

SEQ ID NO: 155712 - RNA, 19 nt, Homo sapiens
  misc_RNA (1)...(19): siRNA sense strand
aagccucucugucuccaau

SEQ ID NO: 155713 - RNA, 19 nt, Homo sapiens
  misc_RNA (1)...(19): siRNA sense strand
gcggagccuuaaugaugau

SEQ ID NO: 155714 - RNA, 19 nt, Homo sapiens
  misc_RNA (1)...(19): siRNA sense strand
gaagccuagugagcuggaa

SEQ ID NO: 155715 - RNA, 19 nt, Homo sapiens
  misc_RNA (1)...(19): siRNA sense strand
ccagucagucugccagguu

SEQ ID NO: 155716 - RNA, 19 nt, Homo sapiens
  misc_RNA (1)...(19): siRNA sense strand
uaaagacucgaugucaaug

SEQ ID NO: 155717 - RNA, 19 nt, Homo sapiens
  misc_RNA (1)...(19): siRNA sense strand
guguggagaaugacucuga

SEQ ID NO: 155718 - RNA, 19 nt, Homo sapiens
  misc_RNA (1)...(19): siRNA sense strand
gaacucccucggccacagu

SEQ ID NO: 155719 - RNA, 19 nt, Homo sapiens
  misc_RNA (1)...(19): siRNA sense strand
ggccaugcacgcacaguca

SEQ ID NO: 155720 - RNA, 19 nt, Homo sapiens
  misc_RNA (1)...(19): siRNA sense strand
gccaagaaggcccgaguag

SEQ ID NO: 155721 - RNA, 19 nt, Homo sapiens
  misc_RNA (1)...(19): siRNA sense strand
cgagaaggagcgcgagcuu

SEQ ID NO: 155722 - RNA, 19 nt, Homo sapiens
  misc_RNA (1)...(19): siRNA sense strand
gaccaaaacugaggaacuc

SEQ ID NO: 155723 - RNA, 19 nt, Homo sapiens
  misc_RNA (1)...(19): siRNA sense strand
gagcgccacgcagaucaaa

SEQ ID NO: 155724 - RNA, 19 nt, Homo sapiens
  misc_RNA (1)...(19): siRNA sense strand
ccuccagucucuuccucuu

SEQ ID NO: 155725 - RNA, 19 nt, Homo sapiens
  misc_RNA (1)...(19): siRNA sense strand
gaggagaccaaugcaccaa

SEQ ID NO: 155726 - RNA, 19 nt, Homo sapiens
  misc_RNA (1)...(19): siRNA sense strand
aaagacucgaugucaauga

SEQ ID NO: 155727 - RNA, 19 nt, Homo sapiens
  misc_RNA (1)...(19): siRNA sense strand
gacucugacucaucuucug

SEQ ID NO: 155728 - RNA, 19 nt, Homo sapiens
  misc_RNA (1)...(19): siRNA sense strand
cucccaaggugguagaugu

SEQ ID NO: 155729 - RNA, 19 nt, Homo sapiens
  misc_RNA (1)...(19): siRNA sense strand
gaggaguggacggaagaaa

SEQ ID NO: 155730 - RNA, 19 nt, Homo sapiens
  misc_RNA (1)...(19): siRNA sense strand
ugagguuuccuuauucauc

SEQ ID NO: 155731 - RNA, 19 nt, Homo sapiens
  misc_RNA (1)...(19): siRNA sense strand
gaugacagcuucuuggaua

SEQ ID NO: 155732 - RNA, 19 nt, Homo sapiens
  misc_RNA (1)...(19): siRNA sense strand
gaaaguacuucuuccacua

SEQ ID NO: 155733 - RNA, 19 nt, Homo sapiens
  misc_RNA (1)...(19): siRNA sense strand
cgagaugggucgaauguua

SEQ ID NO: 155734 - RNA, 19 nt, Homo sapiens
  misc_RNA (1)...(19): siRNA sense strand
gaaauugguuugagauaga

SEQ ID NO: 155735 - RNA, 19 nt, Homo sapiens
  misc_RNA (1)...(19): siRNA sense strand
agaauacucuggaacauua

SEQ ID NO: 155736 - RNA, 19 nt, Homo sapiens
  misc_RNA (1)...(19): siRNA sense strand
gaacgauucucucuauaga

SEQ ID NO: 155737 - RNA, 19 nt, Homo sapiens
  misc_RNA (1)...(19): siRNA sense strand
gaagucgaaucacaaagua

SEQ ID NO: 155738 - RNA, 19 nt, Homo sapiens
  misc_RNA (1)...(19): siRNA sense strand
ugacaacccuccaguguuu

SEQ ID NO: 155739 - RNA, 19 nt, Homo sapiens
  misc_RNA (1)...(19): siRNA sense strand
caacagaaauacuggagaa

SEQ ID NO: 155740 - RNA, 19 nt, Homo sapiens
  misc_RNA (1)...(19): siRNA sense strand
caaagaacuugcacuggua

SEQ ID NO: 155741 - RNA, 19 nt, Homo sapiens
  misc_RNA (1)...(19): siRNA sense strand
gaaggaaauugguuugaga

SEQ ID NO: 155742 - RNA, 19 nt, Homo sapiens
  misc_RNA (1)...(19): siRNA sense strand
gcaccaagcucuagucuac

SEQ ID NO: 155743 - RNA, 19 nt, Homo sapiens
  misc_RNA (1)...(19): siRNA sense strand
gaccaucacuuuaaccaaa

SEQ ID NO: 155744 - RNA, 19 nt, Homo sapiens
  misc_RNA (1)...(19): siRNA sense strand
ggauauaaccacugucaua

SEQ ID NO: 155745 - RNA, 19 nt, Homo sapiens
  misc_RNA (1)...(19): siRNA sense strand
ccacaaauaccaccugaua

SEQ ID NO: 155746 - RNA, 19 nt, Homo sapiens
  misc_RNA (1)...(19): siRNA sense strand
gaaggacgcccaucuaaug

SEQ ID NO: 155747 - RNA, 19 nt, Homo sapiens
  misc_RNA (1)...(19): siRNA sense strand
cagaaauacuggagaaauu

SEQ ID NO: 155748 - RNA, 19 nt, Homo sapiens
  misc_RNA (1)...(19): siRNA sense strand
caaauuugcucgagauuag

SEQ ID NO: 155749 - RNA, 19 nt, Homo sapiens
  misc_RNA (1)...(19): siRNA sense strand
cagaugaaccgaacaauuu

SEQ ID NO: 155750 - RNA, 19 nt, Homo sapiens
  misc_RNA (1)...(19): siRNA sense strand
gcagagaaaugcaagaucu

SEQ ID NO: 155751 - RNA, 19 nt, Homo sapiens
  misc_RNA (1)...(19): siRNA sense strand
ggacuggaguuucuucaga

SEQ ID NO: 155752 - RNA, 19 nt, Homo sapiens
  misc_RNA (1)...(19): siRNA sense strand
uaugggaucuuugucauua

SEQ ID NO: 155753 - RNA, 19 nt, Homo sapiens
  misc_RNA (1)...(19): siRNA sense strand
gguaagagauuauaacacu

SEQ ID NO: 155754 - RNA, 19 nt, Homo sapiens
  misc_RNA (1)...(19): siRNA sense strand
ggaccuaaauuuaagaagu

SEQ ID NO: 155755 - RNA, 19 nt, Homo sapiens
  misc_RNA (1)...(19): siRNA sense strand
caaauacacuggugaugau

SEQ ID NO: 155756 - RNA, 19 nt, Homo sapiens
  misc_RNA (1)...(19): siRNA sense strand
ccaaguauauucuucugaa

SEQ ID NO: 155757 - RNA, 19 nt, Homo sapiens
  misc_RNA (1)...(19): siRNA sense strand
gaaggaggucugaauauga

SEQ ID NO: 155758 - RNA, 19 nt, Homo sapiens
  misc_RNA (1)...(19): siRNA sense strand
gaauugaucagccaccaua

SEQ ID NO: 155759 - RNA, 19 nt, Homo sapiens
  misc_RNA (1)...(19): siRNA sense strand
auacagagccgaacacuaa

SEQ ID NO: 155760 - RNA, 19 nt, Homo sapiens
  misc_RNA (1)...(19): siRNA sense strand
gaugaagaguucucagcua

SEQ ID NO: 155761 - RNA, 19 nt, Homo sapiens
  misc_RNA (1)...(19): siRNA sense strand
uaauaucccuuacauggaa

SEQ ID NO: 155762 - RNA, 19 nt, Homo sapiens
  misc_RNA (1)...(19): siRNA sense strand
acaagaaccuucagauuca

SEQ ID NO: 155763 - RNA, 19 nt, Homo sapiens
  misc_RNA (1)...(19): siRNA sense strand
gcaaauacacuggugauga

SEQ ID NO: 155764 - RNA, 19 nt, Homo sapiens
  misc_RNA (1)...(19): siRNA sense strand
gaaacggagccaaagauuu

SEQ ID NO: 155765 - RNA, 19 nt, Homo sapiens
  misc_RNA (1)...(19): siRNA sense strand
gaguggagcuggcauaagu

SEQ ID NO: 155766 - RNA, 19 nt, Homo sapiens
  misc_RNA (1)...(19): siRNA sense strand
ggaaauugguuugagauag

SEQ ID NO: 155767 - RNA, 19 nt, Homo sapiens
  misc_RNA (1)...(19): siRNA sense strand
gaacaggcaaacucacuuu

SEQ ID NO: 155768 - RNA, 19 nt, Homo sapiens
  misc_RNA (1)...(19): siRNA sense strand
gacaagaaccuucagauuc

SEQ ID NO: 155769 - RNA, 19 nt, Homo sapiens
  misc_RNA (1)...(19): siRNA sense strand
ugauuugcauggaauguua

SEQ ID NO: 155770 - RNA, 19 nt, Homo sapiens
  misc_RNA (1)...(19): siRNA sense strand
ugagauaugucaagaauac

SEQ ID NO: 155771 - RNA, 19 nt, Homo sapiens
  misc_RNA (1)...(19): siRNA sense strand
gagagagaaugacaggauu

SEQ ID NO: 155772 - RNA, 19 nt, Homo sapiens
  misc_RNA (1)...(19): siRNA sense strand
ccaaggaacaguacaauau

SEQ ID NO: 155773 - RNA, 19 nt, Homo sapiens
  misc_RNA (1)...(19): siRNA sense strand
ggagaaauucgaacgauga

SEQ ID NO: 155774 - RNA, 19 nt, Homo sapiens
  misc_RNA (1)...(19): siRNA sense strand
gaugaucuguugugauugu

SEQ ID NO: 155775 - RNA, 19 nt, Homo sapiens
  misc_RNA (1)...(19): siRNA sense strand
ucagaaaacuggugaaauu

SEQ ID NO: 155776 - RNA, 19 nt, Homo sapiens
  misc_RNA (1)...(19): siRNA sense strand
ccugauaacgcaaauauaa

SEQ ID NO: 155777 - RNA, 19 nt, Homo sapiens
  misc_RNA (1)...(19): siRNA sense strand
gaaaugaaggaaauugguu

SEQ ID NO: 155778 - RNA, 19 nt, Homo sapiens
  misc_RNA (1)...(19): siRNA sense strand
gcagaugaaccgaacaauu

SEQ ID NO: 155779 - RNA, 19 nt, Homo sapiens
  misc_RNA (1)...(19): siRNA sense strand
ccaguaugcucuugcugua

SEQ ID NO: 155780 - RNA, 19 nt, Homo sapiens
  misc_RNA (1)...(19): siRNA sense strand
gcacugguacaauuaauau

SEQ ID NO: 155781 - RNA, 19 nt, Homo sapiens
  misc_RNA (1)...(19): siRNA sense strand
caaaccagcaaguuacaua

SEQ ID NO: 155782 - RNA, 19 nt, Homo sapiens
  misc_RNA (1)...(19): siRNA sense strand
ggucacuccuuucuucauu

SEQ ID NO: 155783 - RNA, 19 nt, Homo sapiens
  misc_RNA (1)...(19): siRNA sense strand
gagaaugacaggauuugaa

SEQ ID NO: 155784 - RNA, 19 nt, Homo sapiens
  misc_RNA (1)...(19): siRNA sense strand
gaacagucuucauauacca

SEQ ID NO: 155785 - RNA, 19 nt, Homo sapiens
  misc_RNA (1)...(19): siRNA sense strand
ggaaacggagccaaagauu

SEQ ID NO: 155786 - RNA, 19 nt, Homo sapiens
  misc_RNA (1)...(19): siRNA sense strand
gguaauaugggaucaaaug

SEQ ID NO: 155787 - RNA, 19 nt, Homo sapiens
  misc_RNA (1)...(19): siRNA sense strand
gacaggauuugaacuaaca

SEQ ID NO: 155788 - RNA, 19 nt, Homo sapiens
  misc_RNA (1)...(19): siRNA sense strand
uugaugaucuguugugauu

SEQ ID NO: 155789 - RNA, 19 nt, Homo sapiens
  misc_RNA (1)...(19): siRNA sense strand
gguauguaaugggaaauaa

SEQ ID NO: 155790 - RNA, 19 nt, Homo sapiens
  misc_RNA (1)...(19): siRNA sense strand
caacgacuguuagguaugu

SEQ ID NO: 155791 - RNA, 19 nt, Homo sapiens
  misc_RNA (1)...(19): siRNA sense strand
gugacuguguuaaauguaa

SEQ ID NO: 155792 - RNA, 19 nt, Homo sapiens
  misc_RNA (1)...(19): siRNA sense strand
caaaugugguagugacaga

SEQ ID NO: 155793 - RNA, 19 nt, Homo sapiens
  misc_RNA (1)...(19): siRNA sense strand
gagggaauguagagaagga

SEQ ID NO: 155794 - RNA, 19 nt, Homo sapiens
  misc_RNA (1)...(19): siRNA sense strand
gagaaggaggucugaauau

SEQ ID NO: 155795 - RNA, 19 nt, Homo sapiens
  misc_RNA (1)...(19): siRNA sense strand
gguagaaguuaacagugaa

SEQ ID NO: 155796 - RNA, 19 nt, Homo sapiens
  misc_RNA (1)...(19): siRNA sense strand
uuacgcagaugaagaugaa

SEQ ID NO: 155797 - RNA, 19 nt, Homo sapiens
  misc_RNA (1)...(19): siRNA sense strand
uaauccagcugaccugcua

SEQ ID NO: 155798 - RNA, 19 nt, Homo sapiens
  misc_RNA (1)...(19): siRNA sense strand
gguuugagauagaaaugaa

SEQ ID NO: 155799 - RNA, 19 nt, Homo sapiens
  misc_RNA (1)...(19): siRNA sense strand
ccgcaucucuggaguagga

SEQ ID NO: 155800 - RNA, 19 nt, Homo sapiens
  misc_RNA (1)...(19): siRNA sense strand
gcagacaucagccuaggaa

SEQ ID NO: 155801 - RNA, 19 nt, Homo sapiens
  misc_RNA (1)...(19): siRNA sense strand
ggagagagaaugacaggau

SEQ ID NO: 155802 - RNA, 19 nt, Homo sapiens
  misc_RNA (1)...(19): siRNA sense strand
aaggaacgauucucucuau

SEQ ID NO: 155803 - RNA, 19 nt, Homo sapiens
  misc_RNA (1)...(19): siRNA sense strand
cauaaguggugguggcauu

SEQ ID NO: 155804 - RNA, 19 nt, Homo sapiens
  misc_RNA (1)...(19): siRNA sense strand
gaaagaguaauccaaccaa

SEQ ID NO: 155805 - RNA, 19 nt, Homo sapiens
  misc_RNA (1)...(19): siRNA sense strand
gagccgaacacuaaaauua

SEQ ID NO: 155806 - RNA, 19 nt, Homo sapiens
  misc_RNA (1)...(19): siRNA sense strand
gguagugacagaaagagua

SEQ ID NO: 155807 - RNA, 19 nt, Homo sapiens
  misc_RNA (1)...(19): siRNA sense strand
aaggaggucugaauaugaa

SEQ ID NO: 155808 - RNA, 19 nt, Homo sapiens
  misc_RNA (1)...(19): siRNA sense strand
agaaggaggucugaauaug

SEQ ID NO: 155809 - RNA, 19 nt, Homo sapiens
  misc_RNA (1)...(19): siRNA sense strand
ccugagauaugucaagaau

SEQ ID NO: 155810 - RNA, 19 nt, Homo sapiens
  misc_RNA (1)...(19): siRNA sense strand
ggaacgauucucucuauag

SEQ ID NO: 155811 - RNA, 19 nt, Homo sapiens
  misc_RNA (1)...(19): siRNA sense strand
uagagagucuucaaaugug

SEQ ID NO: 155812 - RNA, 19 nt, Homo sapiens
  misc_RNA (1)...(19): siRNA sense strand
ucuggaacauuaagaagaa

SEQ ID NO: 155813 - RNA, 19 nt, Homo sapiens
  misc_RNA (1)...(19): siRNA sense strand
gauaccagcacaacuucua

SEQ ID NO: 155814 - RNA, 19 nt, Homo sapiens
  misc_RNA (1)...(19): siRNA sense strand
ccugcuagcuguugauuca

SEQ ID NO: 155815 - RNA, 19 nt, Homo sapiens
  misc_RNA (1)...(19): siRNA sense strand
guacuucuuccacuaacua

SEQ ID NO: 155816 - RNA, 19 nt, Homo sapiens
  misc_RNA (1)...(19): siRNA sense strand
caaguuacauaccgcaucu

SEQ ID NO: 155817 - RNA, 19 nt, Homo sapiens
  misc_RNA (1)...(19): siRNA sense strand
ccucugaccaucacuuuaa

SEQ ID NO: 155818 - RNA, 19 nt, Homo sapiens
  misc_RNA (1)...(19): siRNA sense strand
ccuagagagucuucaaaug

SEQ ID NO: 155819 - RNA, 19 nt, Homo sapiens
  misc_RNA (1)...(19): siRNA sense strand
cuacccaccucucugacua

SEQ ID NO: 155820 - RNA, 19 nt, Homo sapiens
  misc_RNA (1)...(19): siRNA sense strand
gagcucagagucaggguuu

SEQ ID NO: 155821 - RNA, 19 nt, Homo sapiens
  misc_RNA (1)...(19): siRNA sense strand
gccgagcucugaacucaau

SEQ ID NO: 155822 - RNA, 19 nt, Homo sapiens
  misc_RNA (1)...(19): siRNA sense strand
aaacgugaauggaucaagu

SEQ ID NO: 155823 - RNA, 19 nt, Homo sapiens
  misc_RNA (1)...(19): siRNA sense strand
agaggucacuccuuucuuc

SEQ ID NO: 155824 - RNA, 19 nt, Homo sapiens
  misc_RNA (1)...(19): siRNA sense strand
caaccaacuuccggcauga

SEQ ID NO: 155825 - RNA, 19 nt, Homo sapiens
  misc_RNA (1)...(19): siRNA sense strand
ggaggaggagagagaauga

SEQ ID NO: 155826 - RNA, 19 nt, Homo sapiens
  misc_RNA (1)...(19): siRNA sense strand
gcauuggacuccucaucau

SEQ ID NO: 155827 - RNA, 19 nt, Homo sapiens
  misc_RNA (1)...(19): siRNA sense strand
cugaaagcaucugcaauuu

SEQ ID NO: 155828 - RNA, 19 nt, Homo sapiens
  misc_RNA (1)...(19): siRNA sense strand
gcccuuagauuaugaagcu

SEQ ID NO: 155829 - RNA, 19 nt, Homo sapiens
  misc_RNA (1)...(19): siRNA sense strand
augaagaguucucagcuaa

SEQ ID NO: 155830 - RNA, 19 nt, Homo sapiens
  misc_RNA (1)...(19): siRNA sense strand
ugauuuggaugaagaguuc

SEQ ID NO: 155831 - RNA, 19 nt, Homo sapiens
  misc_RNA (1)...(19): siRNA sense strand
gaaaguaacucaggaaaua

SEQ ID NO: 155832 - RNA, 19 nt, Homo sapiens
  misc_RNA (1)...(19): siRNA sense strand
gaacacagcuucacauuca

SEQ ID NO: 155833 - RNA, 19 nt, Homo sapiens
  misc_RNA (1)...(19): siRNA sense strand
ggaaguagauuaugaagaa

SEQ ID NO: 155834 - RNA, 19 nt, Homo sapiens
  misc_RNA (1)...(19): siRNA sense strand
caauauaccuguaguagaa

SEQ ID NO: 155835 - RNA, 19 nt, Homo sapiens
  misc_RNA (1)...(19): siRNA sense strand
gagaggaucuguccaagaa

SEQ ID NO: 155836 - RNA, 19 nt, Homo sapiens
  misc_RNA (1)...(19): siRNA sense strand
uaacaaagauacuggagaa

SEQ ID NO: 155837 - RNA, 19 nt, Homo sapiens
  misc_RNA (1)...(19): siRNA sense strand
gcacaguccuuaucaaugu

SEQ ID NO: 155838 - RNA, 19 nt, Homo sapiens
  misc_RNA (1)...(19): siRNA sense strand
gcauuaagguucuugauau

SEQ ID NO: 155839 - RNA, 19 nt, Homo sapiens
  misc_RNA (1)...(19): siRNA sense strand
ggaauugugacccuuauua

SEQ ID NO: 155840 - RNA, 19 nt, Homo sapiens
  misc_RNA (1)...(19): siRNA sense strand
gaaagaggacucaaaauua

SEQ ID NO: 155841 - RNA, 19 nt, Homo sapiens
  misc_RNA (1)...(19): siRNA sense strand
aaucuugacuucaguguua

SEQ ID NO: 155842 - RNA, 19 nt, Homo sapiens
  misc_RNA (1)...(19): siRNA sense strand
aaacagaugcucaaacuaa

SEQ ID NO: 155843 - RNA, 19 nt, Homo sapiens
  misc_RNA (1)...(19): siRNA sense strand
gaaaugugauagcaacaga

SEQ ID NO: 155844 - RNA, 19 nt, Homo sapiens
  misc_RNA (1)...(19): siRNA sense strand
ggaaauagucacugaaaga

SEQ ID NO: 155845 - RNA, 19 nt, Homo sapiens
  misc_RNA (1)...(19): siRNA sense strand
gaacacagcagcuacacuu

SEQ ID NO: 155846 - RNA, 19 nt, Homo sapiens
  misc_RNA (1)...(19): siRNA sense strand
caacagaaacuuccuaugu

SEQ ID NO: 155847 - RNA, 19 nt, Homo sapiens
  misc_RNA (1)...(19): siRNA sense strand
gaaacugaaucgcugaaug

SEQ ID NO: 155848 - RNA, 19 nt, Homo sapiens
  misc_RNA (1)...(19): siRNA sense strand
ccaauacccugaauucgaa

SEQ ID NO: 155849 - RNA, 19 nt, Homo sapiens
  misc_RNA (1)...(19): siRNA sense strand
gaugaccgcuucuuagaug

SEQ ID NO: 155850 - RNA, 19 nt, Homo sapiens
  misc_RNA (1)...(19): siRNA sense strand
gaugaaauagguucugaua

SEQ ID NO: 155851 - RNA, 19 nt, Homo sapiens
  misc_RNA (1)...(19): siRNA sense strand
gaaaauagcacgccaagaa

SEQ ID NO: 155852 - RNA, 19 nt, Homo sapiens
  misc_RNA (1)...(19): siRNA sense strand
gcacuguacagcauucuua

SEQ ID NO: 155853 - RNA, 19 nt, Homo sapiens
  misc_RNA (1)...(19): siRNA sense strand
gcaauugcgcucaugauuu

SEQ ID NO: 155854 - RNA, 19 nt, Homo sapiens
  misc_RNA (1)...(19): siRNA sense strand
gcagcgucaucucaauuua

SEQ ID NO: 155855 - RNA, 19 nt, Homo sapiens
  misc_RNA (1)...(19): siRNA sense strand
ggcaguagcuucccaguuc

SEQ ID NO: 155856 - RNA, 19 nt, Homo sapiens
  misc_RNA (1)...(19): siRNA sense strand
aagauugccuucugguuua

SEQ ID NO: 155857 - RNA, 19 nt, Homo sapiens
  misc_RNA (1)...(19): siRNA sense strand
ccaguguucuaccuaaaua

SEQ ID NO: 155858 - RNA, 19 nt, Homo sapiens
  misc_RNA (1)...(19): siRNA sense strand
gaauccaauugccaagaua

SEQ ID NO: 155859 - RNA, 19 nt, Homo sapiens
  misc_RNA (1)...(19): siRNA sense strand
ucaagucaauguagaaguu

SEQ ID NO: 155860 - RNA, 19 nt, Homo sapiens
  misc_RNA (1)...(19): siRNA sense strand
gaagauagagauaauugga

SEQ ID NO: 155861 - RNA, 19 nt, Homo sapiens
  misc_RNA (1)...(19): siRNA sense strand
gaaauugagcagagacaaa

SEQ ID NO: 155862 - RNA, 19 nt, Homo sapiens
  misc_RNA (1)...(19): siRNA sense strand
gaggaucuguccaagaaga

SEQ ID NO: 155863 - RNA, 19 nt, Homo sapiens
  misc_RNA (1)...(19): siRNA sense strand
aagcaaaggccaaauaauu

SEQ ID NO: 155864 - RNA, 19 nt, Homo sapiens
  misc_RNA (1)...(19): siRNA sense strand
gaauugugacccuuauuaa

SEQ ID NO: 155865 - RNA, 19 nt, Homo sapiens
  misc_RNA (1)...(19): siRNA sense strand
gagguuauuuccacauaga

SEQ ID NO: 155866 - RNA, 19 nt, Homo sapiens
  misc_RNA (1)...(19): siRNA sense strand
gaaagaaggcauucauuuu

SEQ ID NO: 155867 - RNA, 19 nt, Homo sapiens
  misc_RNA (1)...(19): siRNA sense strand
caaagauacuggagaacug

SEQ ID NO: 155868 - RNA, 19 nt, Homo sapiens
  misc_RNA (1)...(19): siRNA sense strand
acaagucgauuaggaguaa

SEQ ID NO: 155869 - RNA, 19 nt, Homo sapiens
  misc_RNA (1)...(19): siRNA sense strand
cagcuacacuuugacagua

SEQ ID NO: 155870 - RNA, 19 nt, Homo sapiens
  misc_RNA (1)...(19): siRNA sense strand
ggaaggcacucagcaucuu

SEQ ID NO: 155871 - RNA, 19 nt, Homo sapiens
  misc_RNA (1)...(19): siRNA sense strand
uuacaggucuuaagcacaa

SEQ ID NO: 155872 - RNA, 19 nt, Homo sapiens
  misc_RNA (1)...(19): siRNA sense strand
gaaaaucaaugcaacagau

SEQ ID NO: 155873 - RNA, 19 nt, Homo sapiens
  misc_RNA (1)...(19): siRNA sense strand
ccaauggcuucuagaaaug

SEQ ID NO: 155874 - RNA, 19 nt, Homo sapiens
  misc_RNA (1)...(19): siRNA sense strand
caaguucagauucguauuu

SEQ ID NO: 155875 - RNA, 19 nt, Homo sapiens
  misc_RNA (1)...(19): siRNA sense strand
gaaauggaguaggagguau

SEQ ID NO: 155876 - RNA, 19 nt, Homo sapiens
  misc_RNA (1)...(19): siRNA sense strand
gcauagcacuguacagcau

SEQ ID NO: 155877 - RNA, 19 nt, Homo sapiens
  misc_RNA (1)...(19): siRNA sense strand
cccaauggcuucuagaaau

SEQ ID NO: 155878 - RNA, 19 nt, Homo sapiens
  misc_RNA (1)...(19): siRNA sense strand
gcuagaugaccgcuucuua

SEQ ID NO: 155879 - RNA, 19 nt, Homo sapiens
  misc_RNA (1)...(19): siRNA sense strand
gaagaaagaggacucaaaa

SEQ ID NO: 155880 - RNA, 19 nt, Homo sapiens
  misc_RNA (1)...(19): siRNA sense strand
uagaucagccuuaugcuaa

SEQ ID NO: 155881 - RNA, 19 nt, Homo sapiens
  misc_RNA (1)...(19): siRNA sense strand
caauugcgcucaugauuuu

SEQ ID NO: 155882 - RNA, 19 nt, Homo sapiens
  misc_RNA (1)...(19): siRNA sense strand
caggagagauuuauacaac

SEQ ID NO: 155883 - RNA, 19 nt, Homo sapiens
  misc_RNA (1)...(19): siRNA sense strand
ggagagauuuauacaacca

SEQ ID NO: 155884 - RNA, 19 nt, Homo sapiens
  misc_RNA (1)...(19): siRNA sense strand
gaaauagucacugaaagau

SEQ ID NO: 155885 - RNA, 19 nt, Homo sapiens
  misc_RNA (1)...(19): siRNA sense strand
aaagauugccuucugguuu

SEQ ID NO: 155886 - RNA, 19 nt, Homo sapiens
  misc_RNA (1)...(19): siRNA sense strand
agaaacagaugcucaaacu

SEQ ID NO: 155887 - RNA, 19 nt, Homo sapiens
  misc_RNA (1)...(19): siRNA sense strand
cacagcagcuacacuuuga

SEQ ID NO: 155888 - RNA, 19 nt, Homo sapiens
  misc_RNA (1)...(19): siRNA sense strand
caauguagagaaacccuua

SEQ ID NO: 155889 - RNA, 19 nt, Homo sapiens
  misc_RNA (1)...(19): siRNA sense strand
ggccauaucagaagauuau

SEQ ID NO: 155890 - RNA, 19 nt, Homo sapiens
  misc_RNA (1)...(19): siRNA sense strand
agagaaacccuuagagcua

SEQ ID NO: 155891 - RNA, 19 nt, Homo sapiens
  misc_RNA (1)...(19): siRNA sense strand
agacaaaccuguaaaacaa

SEQ ID NO: 155892 - RNA, 19 nt, Homo sapiens
  misc_RNA (1)...(19): siRNA sense strand
gcaguaggacagaauguga

SEQ ID NO: 155893 - RNA, 19 nt, Homo sapiens
  misc_RNA (1)...(19): siRNA sense strand
caacugucccacacugaua

SEQ ID NO: 155894 - RNA, 19 nt, Homo sapiens
  misc_RNA (1)...(19): siRNA sense strand
guucgaugcagaugaaaua

SEQ ID NO: 155895 - RNA, 19 nt, Homo sapiens
  misc_RNA (1)...(19): siRNA sense strand
gaggaaacaauguagagaa

SEQ ID NO: 155896 - RNA, 19 nt, Homo sapiens
  misc_RNA (1)...(19): siRNA sense strand
caaggaagccacgaugaaa

SEQ ID NO: 155897 - RNA, 19 nt, Homo sapiens
  misc_RNA (1)...(19): siRNA sense strand
gaagggaugguugaagaaa

SEQ ID NO: 155898 - RNA, 19 nt, Homo sapiens
  misc_RNA (1)...(19): siRNA sense strand
ccuuagagcuacgcauuaa

SEQ ID NO: 155899 - RNA, 19 nt, Homo sapiens
  misc_RNA (1)...(19): siRNA sense strand
aggaaacaauguagagaaa

SEQ ID NO: 155900 - RNA, 19 nt, Homo sapiens
  misc_RNA (1)...(19): siRNA sense strand
guuaccagauucccacuga

SEQ ID NO: 155901 - RNA, 19 nt, Homo sapiens
  misc_RNA (1)...(19): siRNA sense strand
agauguaccuuacgucaug

SEQ ID NO: 155902 - RNA, 19 nt, Homo sapiens
  misc_RNA (1)...(19): siRNA sense strand
acagaaacuuccuauguca

SEQ ID NO: 155903 - RNA, 19 nt, Homo sapiens
  misc_RNA (1)...(19): siRNA sense strand
gagcaaacuaugguuaauu

SEQ ID NO: 155904 - RNA, 19 nt, Homo sapiens
  misc_RNA (1)...(19): siRNA sense strand
ucaagacgcuagcugaagu

SEQ ID NO: 155905 - RNA, 19 nt, Homo sapiens
  misc_RNA (1)...(19): siRNA sense strand
gaaacagaugcucaaacua

SEQ ID NO: 155906 - RNA, 19 nt, Homo sapiens
  misc_RNA (1)...(19): siRNA sense strand
ggaaaugaaggagguuauu

SEQ ID NO: 155907 - RNA, 19 nt, Homo sapiens
  misc_RNA (1)...(19): siRNA sense strand
caaugacaauauaccugua

SEQ ID NO: 155908 - RNA, 19 nt, Homo sapiens
  misc_RNA (1)...(19): siRNA sense strand
ugauaucaaugacaacgaa

SEQ ID NO: 155909 - RNA, 19 nt, Homo sapiens
  misc_RNA (1)...(19): siRNA sense strand
gaaacaauguagagaaacc

SEQ ID NO: 155910 - RNA, 19 nt, Homo sapiens
  misc_RNA (1)...(19): siRNA sense strand
gauacaggagagauuuaua

SEQ ID NO: 155911 - RNA, 19 nt, Homo sapiens
  misc_RNA (1)...(19): siRNA sense strand
uguggucacugaaagagua

SEQ ID NO: 155912 - RNA, 19 nt, Homo sapiens
  misc_RNA (1)...(19): siRNA sense strand
guagaucagccuuaugcua

SEQ ID NO: 155913 - RNA, 19 nt, Homo sapiens
  misc_RNA (1)...(19): siRNA sense strand
gagaaaguaacucaggaaa

SEQ ID NO: 155914 - RNA, 19 nt, Homo sapiens
  misc_RNA (1)...(19): siRNA sense strand
uuagaugauuugggacuua

SEQ ID NO: 155915 - RNA, 19 nt, Homo sapiens
  misc_RNA (1)...(19): siRNA sense strand
ucugucacaucugaaauua

SEQ ID NO: 155916 - RNA, 19 nt, Homo sapiens
  misc_RNA (1)...(19): siRNA sense strand
ucaagcaaaggccaaauaa

SEQ ID NO: 155917 - RNA, 19 nt, Homo sapiens
  misc_RNA (1)...(19): siRNA sense strand
caaccaguguuaccuugga

SEQ ID NO: 155918 - RNA, 19 nt, Homo sapiens
  misc_RNA (1)...(19): siRNA sense strand
gauagagccugugcagaca

SEQ ID NO: 155919 - RNA, 19 nt, Homo sapiens
  misc_RNA (1)...(19): siRNA sense strand
uaaugaagguacaguugug

SEQ ID NO: 155920 - RNA, 19 nt, Homo sapiens
  misc_RNA (1)...(19): siRNA sense strand
gcugaaugcuucuauuggu

SEQ ID NO: 155921 - RNA, 19 nt, Homo sapiens
  misc_RNA (1)...(19): siRNA sense strand
aggaagaaauggaguagga

SEQ ID NO: 155922 - RNA, 19 nt, Homo sapiens
  misc_RNA (1)...(19): siRNA sense strand
ucagaagauuauccuagaa

SEQ ID NO: 155923 - RNA, 19 nt, Homo sapiens
  misc_RNA (1)...(19): siRNA sense strand
gcgcuaucaugaccacuga

SEQ ID NO: 155924 - RNA, 19 nt, Homo sapiens
  misc_RNA (1)...(19): siRNA sense strand
acaagguggugccaucauu

SEQ ID NO: 155925 - RNA, 19 nt, Homo sapiens
  misc_RNA (1)...(19): siRNA sense strand
gcagggaagcacagcauga

SEQ ID NO: 155926 - RNA, 19 nt, Homo sapiens
  misc_RNA (1)...(19): siRNA sense strand
gaucagccuuaugcuaaug

SEQ ID NO: 155927 - RNA, 19 nt, Homo sapiens
  misc_RNA (1)...(19): siRNA sense strand
ccaucaaggucaaagugaa

SEQ ID NO: 155928 - RNA, 19 nt, Homo sapiens
  misc_RNA (1)...(19): siRNA sense strand
ggccaugccuaauauagca

SEQ ID NO: 155929 - RNA, 19 nt, Homo sapiens
  misc_RNA (1)...(19): siRNA sense strand
gcuaaugaagguacaguug

SEQ ID NO: 155930 - RNA, 19 nt, Homo sapiens
  misc_RNA (1)...(19): siRNA sense strand
ccaaggaagccacgaugaa

SEQ ID NO: 155931 - RNA, 19 nt, Homo sapiens
  misc_RNA (1)...(19): siRNA sense strand
uaacaaagcugccucaaau

SEQ ID NO: 155932 - RNA, 19 nt, Homo sapiens
  misc_RNA (1)...(19): siRNA sense strand
gcaaaugacugcuuguuga

SEQ ID NO: 155933 - RNA, 19 nt, Homo sapiens
  misc_RNA (1)...(19): siRNA sense strand
gaauggaaaugaccacuaa

SEQ ID NO: 155934 - RNA, 19 nt, Homo sapiens
  misc_RNA (1)...(19): siRNA sense strand
ugaaagaugucaacgauaa

SEQ ID NO: 155935 - RNA, 19 nt, Homo sapiens
  misc_RNA (1)...(19): siRNA sense strand
gaaggaaauugguuugaaa

SEQ ID NO: 155936 - RNA, 19 nt, Homo sapiens
  misc_RNA (1)...(19): siRNA sense strand
cuacaaagcgugaaacuua

SEQ ID NO: 155937 - RNA, 19 nt, Homo sapiens
  misc_RNA (1)...(19): siRNA sense strand
gaaccgagauucuacuuuc

SEQ ID NO: 155938 - RNA, 19 nt, Homo sapiens
  misc_RNA (1)...(19): siRNA sense strand
ggaaaguucugaaguuugu

SEQ ID NO: 155939 - RNA, 19 nt, Homo sapiens
  misc_RNA (1)...(19): siRNA sense strand
ucaaggagcuucugcuuug

SEQ ID NO: 155940 - RNA, 19 nt, Homo sapiens
  misc_RNA (1)...(19): siRNA sense strand
ggugaaggcucuagauuau

SEQ ID NO: 155941 - RNA, 19 nt, Homo sapiens
  misc_RNA (1)...(19): siRNA sense strand
uaacagauuuggaugaaga

SEQ ID NO: 155942 - RNA, 19 nt, Homo sapiens
  misc_RNA (1)...(19): siRNA sense strand
gcuagaacacugaauaaua

SEQ ID NO: 155943 - RNA, 19 nt, Homo sapiens
  misc_RNA (1)...(19): siRNA sense strand
gaauuucaccaaucaguua

SEQ ID NO: 155944 - RNA, 19 nt, Homo sapiens
  misc_RNA (1)...(19): siRNA sense strand
ggaagacgauggccaggaa

SEQ ID NO: 155945 - RNA, 19 nt, Homo sapiens
  misc_RNA (1)...(19): siRNA sense strand
ccaaaccacuugaauucua

SEQ ID NO: 155946 - RNA, 19 nt, Homo sapiens
  misc_RNA (1)...(19): siRNA sense strand
gaugaagaguacacagaua

SEQ ID NO: 155947 - RNA, 19 nt, Homo sapiens
  misc_RNA (1)...(19): siRNA sense strand
agacaaagauggagaagga

SEQ ID NO: 155948 - RNA, 19 nt, Homo sapiens
  misc_RNA (1)...(19): siRNA sense strand
gagaaaccacuuauacuaa

SEQ ID NO: 155949 - RNA, 19 nt, Homo sapiens
  misc_RNA (1)...(19): siRNA sense strand
gaaggacuaucaacucaau

SEQ ID NO: 155950 - RNA, 19 nt, Homo sapiens
  misc_RNA (1)...(19): siRNA sense strand
gaaccaaaccacuugaauu

SEQ ID NO: 155951 - RNA, 19 nt, Homo sapiens
  misc_RNA (1)...(19): siRNA sense strand
gagaaggacuaucaacuca

SEQ ID NO: 155952 - RNA, 19 nt, Homo sapiens
  misc_RNA (1)...(19): siRNA sense strand
auaauuggcuugcaguaua

SEQ ID NO: 155953 - RNA, 19 nt, Homo sapiens
  misc_RNA (1)...(19): siRNA sense strand
ugaaggcucuagauuauga

SEQ ID NO: 155954 - RNA, 19 nt, Homo sapiens
  misc_RNA (1)...(19): siRNA sense strand
gauccuugcucccgucuaa

SEQ ID NO: 155955 - RNA, 19 nt, Homo sapiens
  misc_RNA (1)...(19): siRNA sense strand
gaugguggauaccuaauga

SEQ ID NO: 155956 - RNA, 19 nt, Homo sapiens
  misc_RNA (1)...(19): siRNA sense strand
gcagcaugguaacuauuua

SEQ ID NO: 155957 - RNA, 19 nt, Homo sapiens
  misc_RNA (1)...(19): siRNA sense strand
caaaccacuugaauucuaa

SEQ ID NO: 155958 - RNA, 19 nt, Homo sapiens
  misc_RNA (1)...(19): siRNA sense strand
cuagaacacugaauaauag

SEQ ID NO: 155959 - RNA, 19 nt, Homo sapiens
  misc_RNA (1)...(19): siRNA sense strand
ccucaaaugucaaauaugu

SEQ ID NO: 155960 - RNA, 19 nt, Homo sapiens
  misc_RNA (1)...(19): siRNA sense strand
ggaaauugguuugaaauac

SEQ ID NO: 155961 - RNA, 19 nt, Homo sapiens
  misc_RNA (1)...(19): siRNA sense strand
ugauaauccuccaguauuu

SEQ ID NO: 155962 - RNA, 19 nt, Homo sapiens
  misc_RNA (1)...(19): siRNA sense strand
guggauaccuaaugauuga

SEQ ID NO: 155963 - RNA, 19 nt, Homo sapiens
  misc_RNA (1)...(19): siRNA sense strand
gauaacuucccaauguuua

SEQ ID NO: 155964 - RNA, 19 nt, Homo sapiens
  misc_RNA (1)...(19): siRNA sense strand
gagauaagccuugguguug

SEQ ID NO: 155965 - RNA, 19 nt, Homo sapiens
  misc_RNA (1)...(19): siRNA sense strand
cagcagacaggauuuguua

SEQ ID NO: 155966 - RNA, 19 nt, Homo sapiens
  misc_RNA (1)...(19): siRNA sense strand
cuacgagggucacauacua

SEQ ID NO: 155967 - RNA, 19 nt, Homo sapiens
  misc_RNA (1)...(19): siRNA sense strand
gacaaggaaaucacaaaua

SEQ ID NO: 155968 - RNA, 19 nt, Homo sapiens
  misc_RNA (1)...(19): siRNA sense strand
aaacugauccuagaacuaa

SEQ ID NO: 155969 - RNA, 19 nt, Homo sapiens
  misc_RNA (1)...(19): siRNA sense strand
gcagagaaggagaagauaa

SEQ ID NO: 155970 - RNA, 19 nt, Homo sapiens
  misc_RNA (1)...(19): siRNA sense strand
uaacgaugguggauaccua

SEQ ID NO: 155971 - RNA, 19 nt, Homo sapiens
  misc_RNA (1)...(19): siRNA sense strand
caagauuacuucagauuac

SEQ ID NO: 155972 - RNA, 19 nt, Homo sapiens
  misc_RNA (1)...(19): siRNA sense strand
uaacauaacagcuauaguc

SEQ ID NO: 155973 - RNA, 19 nt, Homo sapiens
  misc_RNA (1)...(19): siRNA sense strand
agacagcgguuaugggauu

SEQ ID NO: 155974 - RNA, 19 nt, Homo sapiens
  misc_RNA (1)...(19): siRNA sense strand
cauggaaaguucugaaguu

SEQ ID NO: 155975 - RNA, 19 nt, Homo sapiens
  misc_RNA (1)...(19): siRNA sense strand
gaacauaucaagccaucga

SEQ ID NO: 155976 - RNA, 19 nt, Homo sapiens
  misc_RNA (1)...(19): siRNA sense strand
gaaacccaauugccaagau

SEQ ID NO: 155977 - RNA, 19 nt, Homo sapiens
  misc_RNA (1)...(19): siRNA sense strand
gaaugaaggaaauugguuu

SEQ ID NO: 155978 - RNA, 19 nt, Homo sapiens
  misc_RNA (1)...(19): siRNA sense strand
gacuaaaggucaauaugau

SEQ ID NO: 155979 - RNA, 19 nt, Homo sapiens
  misc_RNA (1)...(19): siRNA sense strand
ccaagauuacuucagauua

SEQ ID NO: 155980 - RNA, 19 nt, Homo sapiens
  misc_RNA (1)...(19): siRNA sense strand
gauacuaaaugccacagau

SEQ ID NO: 155981 - RNA, 19 nt, Homo sapiens
  misc_RNA (1)...(19): siRNA sense strand
ggaaaugaccacuaagcuu

SEQ ID NO: 155982 - RNA, 19 nt, Homo sapiens
  misc_RNA (1)...(19): siRNA sense strand
caauggagccgauuucaug

SEQ ID NO: 155983 - RNA, 19 nt, Homo sapiens
  misc_RNA (1)...(19): siRNA sense strand
gaagaguacacagauaauu

SEQ ID NO: 155984 - RNA, 19 nt, Homo sapiens
  misc_RNA (1)...(19): siRNA sense strand
agagaaaccacuuauacua

SEQ ID NO: 155985 - RNA, 19 nt, Homo sapiens
  misc_RNA (1)...(19): siRNA sense strand
gcuuguugaucuaugauaa

SEQ ID NO: 155986 - RNA, 19 nt, Homo sapiens
  misc_RNA (1)...(19): siRNA sense strand
cacgguauauguuagagua

SEQ ID NO: 155987 - RNA, 19 nt, Homo sapiens
  misc_RNA (1)...(19): siRNA sense strand
ugaaggaaauugguuugaa

SEQ ID NO: 155988 - RNA, 19 nt, Homo sapiens
  misc_RNA (1)...(19): siRNA sense strand
cacuggagauauuaacaua

SEQ ID NO: 155989 - RNA, 19 nt, Homo sapiens
  misc_RNA (1)...(19): siRNA sense strand
aacgauaacuucccaaugu

SEQ ID NO: 155990 - RNA, 19 nt, Homo sapiens
  misc_RNA (1)...(19): siRNA sense strand
cauauugguucauggagaa

SEQ ID NO: 155991 - RNA, 19 nt, Homo sapiens
  misc_RNA (1)...(19): siRNA sense strand
guagagaaaccacuuauac

SEQ ID NO: 155992 - RNA, 19 nt, Homo sapiens
  misc_RNA (1)...(19): siRNA sense strand
gauaagccuugguguugau

SEQ ID NO: 155993 - RNA, 19 nt, Homo sapiens
  misc_RNA (1)...(19): siRNA sense strand
caacucaaugugaauguaa

SEQ ID NO: 155994 - RNA, 19 nt, Homo sapiens
  misc_RNA (1)...(19): siRNA sense strand
agggugaucugucccauuu

SEQ ID NO: 155995 - RNA, 19 nt, Homo sapiens
  misc_RNA (1)...(19): siRNA sense strand
aagaagagaugacuaugca

SEQ ID NO: 155996 - RNA, 19 nt, Homo sapiens
  misc_RNA (1)...(19): siRNA sense strand
ggaaugaaggaaauugguu

SEQ ID NO: 155997 - RNA, 19 nt, Homo sapiens
  misc_RNA (1)...(19): siRNA sense strand
ggaauggaaaugaccacua

SEQ ID NO: 155998 - RNA, 19 nt, Homo sapiens
  misc_RNA (1)...(19): siRNA sense strand
ccgagauucuacuuucaua

SEQ ID NO: 155999 - RNA, 19 nt, Homo sapiens
  misc_RNA (1)...(19): siRNA sense strand
gaaauacaaacugauccua

SEQ ID NO: 156000 - RNA, 19 nt, Homo sapiens
  misc_RNA (1)...(19): siRNA sense strand
gaucacaugucgggcucua

SEQ ID NO: 156001 - RNA, 19 nt, Homo sapiens
  misc_RNA (1)...(19): siRNA sense strand
gaaggaacaauucaucagu

SEQ ID NO: 156002 - RNA, 19 nt, Homo sapiens
  misc_RNA (1)...(19): siRNA sense strand
caacagcuguccucgaaaa

SEQ ID NO: 156003 - RNA, 19 nt, Homo sapiens
  misc_RNA (1)...(19): siRNA sense strand
agacuaaaggucaauauga

SEQ ID NO: 156004 - RNA, 19 nt, Homo sapiens
  misc_RNA (1)...(19): siRNA sense strand
gaaucgaucagccgccuuu

SEQ ID NO: 156005 - RNA, 19 nt, Homo sapiens
  misc_RNA (1)...(19): siRNA sense strand
agacaggauuuguuaagug

SEQ ID NO: 156006 - RNA, 19 nt, Homo sapiens
  misc_RNA (1)...(19): siRNA sense strand
gaacaaucggugugagaug

SEQ ID NO: 156007 - RNA, 19 nt, Homo sapiens
  misc_RNA (1)...(19): siRNA sense strand
aaaguugccugccguaugg

SEQ ID NO: 156008 - RNA, 19 nt, Homo sapiens
  misc_RNA (1)...(19): siRNA sense strand
gaagaucaaccuguaaagu

SEQ ID NO: 156009 - RNA, 19 nt, Homo sapiens
  misc_RNA (1)...(19): siRNA sense strand
uaauuggcuugcaguauau

SEQ ID NO: 156010 - RNA, 19 nt, Homo sapiens
  misc_RNA (1)...(19): siRNA sense strand
aggacuagauguagagaaa

SEQ ID NO: 156011 - RNA, 19 nt, Homo sapiens
  misc_RNA (1)...(19): siRNA sense strand
uccaacagcuguccucgaa

SEQ ID NO: 156012 - RNA, 19 nt, Homo sapiens
  misc_RNA (1)...(19): siRNA sense strand
aauacaaacugauccuaga

SEQ ID NO: 156013 - RNA, 19 nt, Homo sapiens
  misc_RNA (1)...(19): siRNA sense strand
ggagaaggacuaucaacuc

SEQ ID NO: 156014 - RNA, 19 nt, Homo sapiens
  misc_RNA (1)...(19): siRNA sense strand
uaaugauaauccuccagua

SEQ ID NO: 156015 - RNA, 19 nt, Homo sapiens
  misc_RNA (1)...(19): siRNA sense strand
gccaaacccugcagagaag

SEQ ID NO: 156016 - RNA, 19 nt, Homo sapiens
  misc_RNA (1)...(19): siRNA sense strand
gaaguucagccacccucua

SEQ ID NO: 156017 - RNA, 19 nt, Homo sapiens
  misc_RNA (1)...(19): siRNA sense strand
aaagcugccucaaauguca

SEQ ID NO: 156018 - RNA, 19 nt, Homo sapiens
  misc_RNA (1)...(19): siRNA sense strand
gaaaaucaccuaccgaauc

SEQ ID NO: 156019 - RNA, 19 nt, Homo sapiens
  misc_RNA (1)...(19): siRNA sense strand
caagacauuuacugugcaa

SEQ ID NO: 156020 - RNA, 19 nt, Homo sapiens
  misc_RNA (1)...(19): siRNA sense strand
ucaauaugaugaagaagag

SEQ ID NO: 156021 - RNA, 19 nt, Homo sapiens
  misc_RNA (1)...(19): siRNA sense strand
gauguagagaaaccacuua

SEQ ID NO: 156022 - RNA, 19 nt, Homo sapiens
  misc_RNA (1)...(19): siRNA sense strand
gugaaugggugaaauuugc

SEQ ID NO: 156023 - RNA, 19 nt, Homo sapiens
  misc_RNA (1)...(19): siRNA sense strand
caagcuuccugaucacaug

SEQ ID NO: 156024 - RNA, 19 nt, Homo sapiens
  misc_RNA (1)...(19): siRNA sense strand
aaacccaauugccaagauu

SEQ ID NO: 156025 - RNA, 19 nt, Homo sapiens
  misc_RNA (1)...(19): siRNA sense strand
gcagacaggauuuguuaag

SEQ ID NO: 156026 - RNA, 19 nt, Homo sapiens
  misc_RNA (1)...(19): siRNA sense strand
gaagaagagaugacuaugc

SEQ ID NO: 156027 - RNA, 19 nt, Homo sapiens
  misc_RNA (1)...(19): siRNA sense strand
ggagaauugcgaauagaga

SEQ ID NO: 156028 - RNA, 19 nt, Homo sapiens
  misc_RNA (1)...(19): siRNA sense strand
cauggagaauugcgaauag

SEQ ID NO: 156029 - RNA, 19 nt, Homo sapiens
  misc_RNA (1)...(19): siRNA sense strand
ucaacucaaugugaaugua

SEQ ID NO: 156030 - RNA, 19 nt, Homo sapiens
  misc_RNA (1)...(19): siRNA sense strand
acuccaagcuuccugauca

SEQ ID NO: 156031 - RNA, 19 nt, Homo sapiens
  misc_RNA (1)...(19): siRNA sense strand
gaacuguggugucuuggua

SEQ ID NO: 156032 - RNA, 19 nt, Homo sapiens
  misc_RNA (1)...(19): siRNA sense strand
uggcuuaccuuaugcagaa

SEQ ID NO: 156033 - RNA, 19 nt, Homo sapiens
  misc_RNA (1)...(19): siRNA sense strand
gaaauggcgaucagcaaga

SEQ ID NO: 156034 - RNA, 19 nt, Homo sapiens
  misc_RNA (1)...(19): siRNA sense strand
gacuguggcuuaccuuaug

SEQ ID NO: 156035 - RNA, 19 nt, Homo sapiens
  misc_RNA (1)...(19): siRNA sense strand
ggcauuagccgcucaguca

SEQ ID NO: 156036 - RNA, 19 nt, Homo sapiens
  misc_RNA (1)...(19): siRNA sense strand
ggacucagcagcccaugug

SEQ ID NO: 156037 - RNA, 19 nt, Homo sapiens
  misc_RNA (1)...(19): siRNA sense strand
caacauauccccuaacuuc

SEQ ID NO: 156038 - RNA, 19 nt, Homo sapiens
  misc_RNA (1)...(19): siRNA sense strand
ggcaagaacuguggugucu

SEQ ID NO: 156039 - RNA, 19 nt, Homo sapiens
  misc_RNA (1)...(19): siRNA sense strand
acacaguggugcucuacga

SEQ ID NO: 156040 - RNA, 19 nt, Homo sapiens
  misc_RNA (1)...(19): siRNA sense strand
cagguggacucucugcaau

SEQ ID NO: 156041 - RNA, 19 nt, Homo sapiens
  misc_RNA (1)...(19): siRNA sense strand
gguggacucucugcaaucu

SEQ ID NO: 156042 - RNA, 19 nt, Homo sapiens
  misc_RNA (1)...(19): siRNA sense strand
uguggugucuugguacauu

SEQ ID NO: 156043 - RNA, 19 nt, Homo sapiens
  misc_RNA (1)...(19): siRNA sense strand
gagaggacgcugggacuca

SEQ ID NO: 156044 - RNA, 19 nt, Homo sapiens
  misc_RNA (1)...(19): siRNA sense strand
ugacuguggcuuaccuuau

SEQ ID NO: 156045 - RNA, 19 nt, Homo sapiens
  misc_RNA (1)...(19): siRNA sense strand
ccagguggacucucugcaa

SEQ ID NO: 156046 - RNA, 19 nt, Homo sapiens
  misc_RNA (1)...(19): siRNA sense strand
uauaccagguggacucucu

SEQ ID NO: 156047 - RNA, 19 nt, Homo sapiens
  misc_RNA (1)...(19): siRNA sense strand
cuuccaaccagaauguaua

SEQ ID NO: 156048 - RNA, 19 nt, Homo sapiens
  misc_RNA (1)...(19): siRNA sense strand
gugacuguggcuuaccuua

SEQ ID NO: 156049 - RNA, 19 nt, Homo sapiens
  misc_RNA (1)...(19): siRNA sense strand
gcagcgacuggaacgagaa

SEQ ID NO: 156050 - RNA, 19 nt, Homo sapiens
  misc_RNA (1)...(19): siRNA sense strand
uggacucucugcaaucuac

SEQ ID NO: 156051 - RNA, 19 nt, Homo sapiens
  misc_RNA (1)...(19): siRNA sense strand
ucgggcugcugcucaagaa

SEQ ID NO: 156052 - RNA, 19 nt, Homo sapiens
  misc_RNA (1)...(19): siRNA sense strand
guggugucuugguacauug

SEQ ID NO: 156053 - RNA, 19 nt, Homo sapiens
  misc_RNA (1)...(19): siRNA sense strand
gaacuguggugucuuggua

SEQ ID NO: 156054 - RNA, 19 nt, Homo sapiens
  misc_RNA (1)...(19): siRNA sense strand
uggcuuaccuuaugcagaa

SEQ ID NO: 156055 - RNA, 19 nt, Homo sapiens
  misc_RNA (1)...(19): siRNA sense strand
gaaauggcgaucagcaaga

SEQ ID NO: 156056 - RNA, 19 nt, Homo sapiens
  misc_RNA (1)...(19): siRNA sense strand
gacuguggcuuaccuuaug

SEQ ID NO: 156057 - RNA, 19 nt, Homo sapiens
  misc_RNA (1)...(19): siRNA sense strand
ggcauuagccgcucaguca

SEQ ID NO: 156058 - RNA, 19 nt, Homo sapiens
  misc_RNA (1)...(19): siRNA sense strand
ggacucagcagcccaugug

SEQ ID NO: 156059 - RNA, 19 nt, Homo sapiens
  misc_RNA (1)...(19): siRNA sense strand
caacauauccccuaacuuc

SEQ ID NO: 156060 - RNA, 19 nt, Homo sapiens
  misc_RNA (1)...(19): siRNA sense strand
ggcaagaacuguggugucu

SEQ ID NO: 156061 - RNA, 19 nt, Homo sapiens
  misc_RNA (1)...(19): siRNA sense strand
acacaguggugcucuacga

SEQ ID NO: 156062 - RNA, 19 nt, Homo sapiens
  misc_RNA (1)...(19): siRNA sense strand
cagguggacucucugcaau

SEQ ID NO: 156063 - RNA, 19 nt, Homo sapiens
  misc_RNA (1)...(19): siRNA sense strand
gguggacucucugcaaucu

SEQ ID NO: 156064 - RNA, 19 nt, Homo sapiens
  misc_RNA (1)...(19): siRNA sense strand
uguggugucuugguacauu

SEQ ID NO: 156065 - RNA, 19 nt, Homo sapiens
  misc_RNA (1)...(19): siRNA sense strand
gagaggacgcugggacuca

SEQ ID NO: 156066 - RNA, 19 nt, Homo sapiens
  misc_RNA (1)...(19): siRNA sense strand
ugacuguggcuuaccuuau

SEQ ID NO: 156067 - RNA, 19 nt, Homo sapiens
  misc_RNA (1)...(19): siRNA sense strand
ccagguggacucucugcaa

SEQ ID NO: 156068 - RNA, 19 nt, Homo sapiens
  misc_RNA (1)...(19): siRNA sense strand
uauaccagguggacucucu

SEQ ID NO: 156069 - RNA, 19 nt, Homo sapiens
  misc_RNA (1)...(19): siRNA sense strand
cuuccaaccagaauguaua

SEQ ID NO: 156070 - RNA, 19 nt, Homo sapiens
  misc_RNA (1)...(19): siRNA sense strand
gugacuguggcuuaccuua

SEQ ID NO: 156071 - RNA, 19 nt, Homo sapiens
  misc_RNA (1)...(19): siRNA sense strand
gcagcgacuggaacgagaa

SEQ ID NO: 156072 - RNA, 19 nt, Homo sapiens
  misc_RNA (1)...(19): siRNA sense strand
uggacucucugcaaucuac

SEQ ID NO: 156073 - RNA, 19 nt, Homo sapiens
  misc_RNA (1)...(19): siRNA sense strand
ucgggcugcugcucaagaa

SEQ ID NO: 156074 - RNA, 19 nt, Homo sapiens
  misc_RNA (1)...(19): siRNA sense strand
guggugucuugguacauug

SEQ ID NO: 156075 - RNA, 19 nt, Homo sapiens
  misc_RNA (1)...(19): siRNA sense strand
gaaauuagaugaacugauc

SEQ ID NO: 156076 - RNA, 19 nt, Homo sapiens
  misc_RNA (1)...(19): siRNA sense strand
ugaagugccugacucaaua

SEQ ID NO: 156077 - RNA, 19 nt, Homo sapiens
  misc_RNA (1)...(19): siRNA sense strand
gaaggcauccaccucauua

SEQ ID NO: 156078 - RNA, 19 nt, Homo sapiens
  misc_RNA (1)...(19): siRNA sense strand
gaacaaggcagcagaagug

SEQ ID NO: 156079 - RNA, 19 nt, Homo sapiens
  misc_RNA (1)...(19): siRNA sense strand
ccaaauuccuuccaaccua

SEQ ID NO: 156080 - RNA, 19 nt, Homo sapiens
  misc_RNA (1)...(19): siRNA sense strand
gcacuacgaaguccagaua

SEQ ID NO: 156081 - RNA, 19 nt, Homo sapiens
  misc_RNA (1)...(19): siRNA sense strand
gaaacacacaguccaauga

SEQ ID NO: 156082 - RNA, 19 nt, Homo sapiens
  misc_RNA (1)...(19): siRNA sense strand
gcauccaccucauuaagaa

SEQ ID NO: 156083 - RNA, 19 nt, Homo sapiens
  misc_RNA (1)...(19): siRNA sense strand
ccauugagguuuacuuaug

SEQ ID NO: 156084 - RNA, 19 nt, Homo sapiens
  misc_RNA (1)...(19): siRNA sense strand
ggagaaagcggucaucagu

SEQ ID NO: 156085 - RNA, 19 nt, Homo sapiens
  misc_RNA (1)...(19): siRNA sense strand
gagaaggauuuaugauauc

SEQ ID NO: 156086 - RNA, 19 nt, Homo sapiens
  misc_RNA (1)...(19): siRNA sense strand
gaagagaagaaauuagaug

SEQ ID NO: 156087 - RNA, 19 nt, Homo sapiens
  misc_RNA (1)...(19): siRNA sense strand
caaagguuagcuuauguua

SEQ ID NO: 156088 - RNA, 19 nt, Homo sapiens
  misc_RNA (1)...(19): siRNA sense strand
gagaagaaauuagaugaac

SEQ ID NO: 156089 - RNA, 19 nt, Homo sapiens
  misc_RNA (1)...(19): siRNA sense strand
uagaugaacugauccaaag

SEQ ID NO: 156090 - RNA, 19 nt, Homo sapiens
  misc_RNA (1)...(19): siRNA sense strand
ucaaccaacucaggacaua

SEQ ID NO: 156091 - RNA, 19 nt, Homo sapiens
  misc_RNA (1)...(19): siRNA sense strand
aagguuagcuuauguuaca

SEQ ID NO: 156092 - RNA, 19 nt, Homo sapiens
  misc_RNA (1)...(19): siRNA sense strand
aggaagagcugcacuacga

SEQ ID NO: 156093 - RNA, 19 nt, Homo sapiens
  misc_RNA (1)...(19): siRNA sense strand
aaucaaagguuagcuuaug

SEQ ID NO: 156094 - RNA, 19 nt, Homo sapiens
  misc_RNA (1)...(19): siRNA sense strand
gaagaaauuagaugaacug

SEQ ID NO: 156095 - RNA, 19 nt, Homo sapiens
  misc_RNA (1)...(19): siRNA sense strand
gagaaagcggucaucagua

SEQ ID NO: 156096 - RNA, 19 nt, Homo sapiens
  misc_RNA (1)...(19): siRNA sense strand
caucagcgaucucuucgau

SEQ ID NO: 156097 - RNA, 19 nt, Homo sapiens
  misc_RNA (1)...(19): siRNA sense strand
guaccucucagaugguuua

SEQ ID NO: 156098 - RNA, 19 nt, Homo sapiens
  misc_RNA (1)...(19): siRNA sense strand
caaccuagaaggaccguuu

SEQ ID NO: 156099 - RNA, 19 nt, Homo sapiens
  misc_RNA (1)...(19): siRNA sense strand
agaaagcggucaucaguac

SEQ ID NO: 156100 - RNA, 19 nt, Homo sapiens
  misc_RNA (1)...(19): siRNA sense strand
cuuaaagaccaaacuguua

SEQ ID NO: 156101 - RNA, 19 nt, Homo sapiens
  misc_RNA (1)...(19): siRNA sense strand
caaaggaagagcugcacua

SEQ ID NO: 156102 - RNA, 19 nt, Homo sapiens
  misc_RNA (1)...(19): siRNA sense strand
cagaagagacugaaacaca

SEQ ID NO: 156103 - RNA, 19 nt, Homo sapiens
  misc_RNA (1)...(19): siRNA sense strand
ucaggaagagaagaaauua

SEQ ID NO: 156104 - RNA, 19 nt, Homo sapiens
  misc_RNA (1)...(19): siRNA sense strand
gcccauugagguuuacuua

SEQ ID NO: 156105 - RNA, 19 nt, Homo sapiens
  misc_RNA (1)...(19): siRNA sense strand
caauagagagccuacaaau

SEQ ID NO: 156106 - RNA, 19 nt, Homo sapiens
  misc_RNA (1)...(19): siRNA sense strand
caaaaucucccucagaaaa

SEQ ID NO: 156107 - RNA, 19 nt, Homo sapiens
  misc_RNA (1)...(19): siRNA sense strand
ggaaggcauccaccucauu

SEQ ID NO: 156108 - RNA, 19 nt, Homo sapiens
  misc_RNA (1)...(19): siRNA sense strand
aauagagagccuacaaaua

SEQ ID NO: 156109 - RNA, 19 nt, Homo sapiens
  misc_RNA (1)...(19): siRNA sense strand
gaaagccccuccagaaaca

SEQ ID NO: 156110 - RNA, 19 nt, Homo sapiens
  misc_RNA (1)...(19): siRNA sense strand
acauagcgauugcucaguu

SEQ ID NO: 156111 - RNA, 19 nt, Homo sapiens
  misc_RNA (1)...(19): siRNA sense strand
auagagagccuacaaauac

SEQ ID NO: 156112 - RNA, 19 nt, Homo sapiens
  misc_RNA (1)...(19): siRNA sense strand
gguauuggauuugaacaag

SEQ ID NO: 156113 - RNA, 19 nt, Homo sapiens
  misc_RNA (1)...(19): siRNA sense strand
cuucgaugcuuacgauuug

SEQ ID NO: 156114 - RNA, 19 nt, Homo sapiens
  misc_RNA (1)...(19): siRNA sense strand
uuacuuauguccagaagag

SEQ ID NO: 156115 - RNA, 19 nt, Homo sapiens
  misc_RNA (1)...(19): siRNA sense strand
gugccugacucaauagaga

SEQ ID NO: 156116 - RNA, 19 nt, Homo sapiens
  misc_RNA (1)...(19): siRNA sense strand
agaaucaaagguuagcuua

SEQ ID NO: 156117 - RNA, 19 nt, Homo sapiens
  misc_RNA (1)...(19): siRNA sense strand
cuagaaggaccguuuguga

SEQ ID NO: 156118 - RNA, 19 nt, Homo sapiens
  misc_RNA (1)...(19): siRNA sense strand
gcagacugaggaccaaauu

SEQ ID NO: 156119 - RNA, 19 nt, Homo sapiens
  misc_RNA (1)...(19): siRNA sense strand
cauagcgauugcucaguuu

SEQ ID NO: 156120 - RNA, 19 nt, Homo sapiens
  misc_RNA (1)...(19): siRNA sense strand
uggaugggcugcagucugu

SEQ ID NO: 156121 - RNA, 19 nt, Homo sapiens
  misc_RNA (1)...(19): siRNA sense strand
uaaccgaggauucagagaa

SEQ ID NO: 156122 - RNA, 19 nt, Homo sapiens
  misc_RNA (1)...(19): siRNA sense strand
caaaagagaaggauuuaug

SEQ ID NO: 156123 - RNA, 19 nt, Homo sapiens
  misc_RNA (1)...(19): siRNA sense strand
gagaaucaaagguuagcuu

SEQ ID NO: 156124 - RNA, 19 nt, Homo sapiens
  misc_RNA (1)...(19): siRNA sense strand
gcgaucucuucgaugcuua

SEQ ID NO: 156125 - RNA, 19 nt, Homo sapiens
  misc_RNA (1)...(19): siRNA sense strand
uaaacccgcuuccaaagac

SEQ ID NO: 156126 - RNA, 19 nt, Homo sapiens
  misc_RNA (1)...(19): siRNA sense strand
cauugagguuuacuuaugu

SEQ ID NO: 156127 - RNA, 19 nt, Homo sapiens
  misc_RNA (1)...(19): siRNA sense strand
ggaagagaagaaauuagau

SEQ ID NO: 156128 - RNA, 19 nt, Homo sapiens
  misc_RNA (1)...(19): siRNA sense strand
gaaucaaagguuagcuuau

SEQ ID NO: 156129 - RNA, 19 nt, Homo sapiens
  misc_RNA (1)...(19): siRNA sense strand
ggauuuaugauaucaccaa

SEQ ID NO: 156130 - RNA, 19 nt, Homo sapiens
  misc_RNA (1)...(19): siRNA sense strand
gaaggaccguuugugaacu

SEQ ID NO: 156131 - RNA, 19 nt, Homo sapiens
  misc_RNA (1)...(19): siRNA sense strand
aaacacacaguccaaugaa

SEQ ID NO: 156132 - RNA, 19 nt, Homo sapiens
  misc_RNA (1)...(19): siRNA sense strand
gaagagacugaaacacaca

SEQ ID NO: 156133 - RNA, 19 nt, Homo sapiens
  misc_RNA (1)...(19): siRNA sense strand
uucagagaaucaaagguua

SEQ ID NO: 156134 - RNA, 19 nt, Homo sapiens
  misc_RNA (1)...(19): siRNA sense strand
uagagagccuacaaauaca

SEQ ID NO: 156135 - RNA, 19 nt, Homo sapiens
  misc_RNA (1)...(19): siRNA sense strand
ccucucagaugguuuaaaa

SEQ ID NO: 156136 - RNA, 19 nt, Homo sapiens
  misc_RNA (1)...(19): siRNA sense strand
uagaaggaccguuugugaa

SEQ ID NO: 156137 - RNA, 19 nt, Homo sapiens
  misc_RNA (1)...(19): siRNA sense strand
ucaccaagaaguucauuca

SEQ ID NO: 156138 - RNA, 19 nt, Homo sapiens
  misc_RNA (1)...(19): siRNA sense strand
caaacaaccaagaccacaa

SEQ ID NO: 156139 - RNA, 19 nt, Homo sapiens
  misc_RNA (1)...(19): siRNA sense strand
gagagccuacaaauacauu

SEQ ID NO: 156140 - RNA, 19 nt, Homo sapiens
  misc_RNA (1)...(19): siRNA sense strand
ucaauagagagccuacaaa

SEQ ID NO: 156141 - RNA, 19 nt, Homo sapiens
  misc_RNA (1)...(19): siRNA sense strand
aggaagagaagaaauuaga

SEQ ID NO: 156142 - RNA, 19 nt, Homo sapiens
  misc_RNA (1)...(19): siRNA sense strand
ucucuucgaugcuuacgau

SEQ ID NO: 156143 - RNA, 19 nt, Homo sapiens
  misc_RNA (1)...(19): siRNA sense strand
caagaccacaaugggaaua

SEQ ID NO: 156144 - RNA, 19 nt, Homo sapiens
  misc_RNA (1)...(19): siRNA sense strand
aaacaaccaagaccacaau

SEQ ID NO: 156145 - RNA, 19 nt, Homo sapiens
  misc_RNA (1)...(19): siRNA sense strand
ggacaaaagggcacugcua

SEQ ID NO: 156146 - RNA, 19 nt, Homo sapiens
  misc_RNA (1)...(19): siRNA sense strand
ggaagagcugcacuacgaa

SEQ ID NO: 156147 - RNA, 19 nt, Homo sapiens
  misc_RNA (1)...(19): siRNA sense strand
ggcauccaccucauuaaga

SEQ ID NO: 156148 - RNA, 19 nt, Homo sapiens
  misc_RNA (1)...(19): siRNA sense strand
aagggcccauugagguuua

SEQ ID NO: 156149 - RNA, 19 nt, Homo sapiens
  misc_RNA (1)...(19): siRNA sense strand
ccaagggcccauugagguu

SEQ ID NO: 156150 - RNA, 19 nt, Homo sapiens
  misc_RNA (1)...(19): siRNA sense strand
gucaggaagagaagaaauu

SEQ ID NO: 156151 - RNA, 19 nt, Homo sapiens
  misc_RNA (1)...(19): siRNA sense strand
ugaaacacacaguccaaug

SEQ ID NO: 156152 - RNA, 19 nt, Homo sapiens
  misc_RNA (1)...(19): siRNA sense strand
cuaaacccgcuuccaaaga

SEQ ID NO: 156153 - RNA, 19 nt, Homo sapiens
  misc_RNA (1)...(19): siRNA sense strand
uuagaugaacugauccaaa

SEQ ID NO: 156154 - RNA, 19 nt, Homo sapiens
  misc_RNA (1)...(19): siRNA sense strand
caagggcccauugagguuu

SEQ ID NO: 156155 - RNA, 19 nt, Homo sapiens
  misc_RNA (1)...(19): siRNA sense strand
gucaaggccugucaaaaga

SEQ ID NO: 156156 - RNA, 19 nt, Homo sapiens
  misc_RNA (1)...(19): siRNA sense strand
gaagugccugacucaauag

SEQ ID NO: 156157 - RNA, 19 nt, Homo sapiens
  misc_RNA (1)...(19): siRNA sense strand
ucaaagguuagcuuauguu

SEQ ID NO: 156158 - RNA, 19 nt, Homo sapiens
  misc_RNA (1)...(19): siRNA sense strand
ccuuaaagaccaaacuguu

SEQ ID NO: 156159 - RNA, 19 nt, Homo sapiens
  misc_RNA (1)...(19): siRNA sense strand
aacacacaguccaaugaaa

SEQ ID NO: 156160 - RNA, 19 nt, Homo sapiens
  misc_RNA (1)...(19): siRNA sense strand
aaggaccguuugugaacuu

SEQ ID NO: 156161 - RNA, 19 nt, Homo sapiens
  misc_RNA (1)...(19): siRNA sense strand
gaaggcaucagcgaucucu

SEQ ID NO: 156162 - RNA, 19 nt, Homo sapiens
  misc_RNA (1)...(19): siRNA sense strand
gcugcacccuggaccucaa

SEQ ID NO: 156163 - RNA, 19 nt, Homo sapiens
  misc_RNA (1)...(19): siRNA sense strand
gcgcguacauccagauccu

SEQ ID NO: 156164 - RNA, 19 nt, Homo sapiens
  misc_RNA (1)...(19): siRNA sense strand
guacccaagggcccauuga

SEQ ID NO: 156165 - RNA, 19 nt, Homo sapiens
  misc_RNA (1)...(19): siRNA sense strand
uccaaaaucucccucagaa

SEQ ID NO: 156166 - RNA, 19 nt, Homo sapiens
  misc_RNA (1)...(19): siRNA sense strand
caguaccucucagaugguu

SEQ ID NO: 156167 - RNA, 19 nt, Homo sapiens
  misc_RNA (1)...(19): siRNA sense strand
gaaguccagauaguccaaa

SEQ ID NO: 156168 - RNA, 19 nt, Homo sapiens
  misc_RNA (1)...(19): siRNA sense strand
ggucugcucaccaagaagu

SEQ ID NO: 156169 - RNA, 19 nt, Homo sapiens
  misc_RNA (1)...(19): siRNA sense strand
uuuaugauaucaccaacgu

SEQ ID NO: 156170 - RNA, 19 nt, Homo sapiens
  misc_RNA (1)...(19): siRNA sense strand
gaccguuugugaacuuacu

SEQ ID NO: 156171 - RNA, 19 nt, Homo sapiens
  misc_RNA (1)...(19): siRNA sense strand
aaauuaguggccuuaaaga

SEQ ID NO: 156172 - RNA, 19 nt, Homo sapiens
  misc_RNA (1)...(19): siRNA sense strand
ucagucaggaagagaagaa

SEQ ID NO: 156173 - RNA, 19 nt, Homo sapiens
  misc_RNA (1)...(19): siRNA sense strand
uaucaccaacguucuggaa

SEQ ID NO: 156174 - RNA, 19 nt, Homo sapiens
  misc_RNA (1)...(19): siRNA sense strand
gcgauugcucaguuucuau

SEQ ID NO: 156175 - RNA, 19 nt, Homo sapiens
  misc_RNA (1)...(19): siRNA sense strand
ggaauugacuugauugaaa

SEQ ID NO: 156176 - RNA, 19 nt, Homo sapiens
  misc_RNA (1)...(19): siRNA sense strand
gcagaugacuacaacuuua

SEQ ID NO: 156177 - RNA, 19 nt, Homo sapiens
  misc_RNA (1)...(19): siRNA sense strand
gacaucagcuacagauaua

SEQ ID NO: 156178 - RNA, 19 nt, Homo sapiens
  misc_RNA (1)...(19): siRNA sense strand
caacaugucucugaaagaa

SEQ ID NO: 156179 - RNA, 19 nt, Homo sapiens
  misc_RNA (1)...(19): siRNA sense strand
gaagacaucuguaauugcu

SEQ ID NO: 156180 - RNA, 19 nt, Homo sapiens
  misc_RNA (1)...(19): siRNA sense strand
cuaaagaagucauagauag

SEQ ID NO: 156181 - RNA, 19 nt, Homo sapiens
  misc_RNA (1)...(19): siRNA sense strand
ugacguguuuccucucuua

SEQ ID NO: 156182 - RNA, 19 nt, Homo sapiens
  misc_RNA (1)...(19): siRNA sense strand
ggugcuggcuguaauacua

SEQ ID NO: 156183 - RNA, 19 nt, Homo sapiens
  misc_RNA (1)...(19): siRNA sense strand
agacaucuguaauugcuuu

SEQ ID NO: 156184 - RNA, 19 nt, Homo sapiens
  misc_RNA (1)...(19): siRNA sense strand
ugauaucaccaaugucuua

SEQ ID NO: 156185 - RNA, 19 nt, Homo sapiens
  misc_RNA (1)...(19): siRNA sense strand
ggagguacccauuccagaa

SEQ ID NO: 156186 - RNA, 19 nt, Homo sapiens
  misc_RNA (1)...(19): siRNA sense strand
cgaaggaguuugugaucug

SEQ ID NO: 156187 - RNA, 19 nt, Homo sapiens
  misc_RNA (1)...(19): siRNA sense strand
caaagcggcugcugauacu

SEQ ID NO: 156188 - RNA, 19 nt, Homo sapiens
  misc_RNA (1)...(19): siRNA sense strand
caugugcugcuuauaaaua

SEQ ID NO: 156189 - RNA, 19 nt, Homo sapiens
  misc_RNA (1)...(19): siRNA sense strand
caugaagacaucuguaauu

SEQ ID NO: 156190 - RNA, 19 nt, Homo sapiens
  misc_RNA (1)...(19): siRNA sense strand
gaugauaacgaaggaguuu

SEQ ID NO: 156191 - RNA, 19 nt, Homo sapiens
  misc_RNA (1)...(19): siRNA sense strand
caaaagaaauaccagauca

SEQ ID NO: 156192 - RNA, 19 nt, Homo sapiens
  misc_RNA (1)...(19): siRNA sense strand
gaucuagaacugaaggaaa

SEQ ID NO: 156193 - RNA, 19 nt, Homo sapiens
  misc_RNA (1)...(19): siRNA sense strand
ggaaagagaacuugaucag

SEQ ID NO: 156194 - RNA, 19 nt, Homo sapiens
  misc_RNA (1)...(19): siRNA sense strand
gcugauacuuuggcuguga

SEQ ID NO: 156195 - RNA, 19 nt, Homo sapiens
  misc_RNA (1)...(19): siRNA sense strand
gaaggaguuugugaucugu

SEQ ID NO: 156196 - RNA, 19 nt, Homo sapiens
  misc_RNA (1)...(19): siRNA sense strand
uaaauaaagagucgaguuc

SEQ ID NO: 156197 - RNA, 19 nt, Homo sapiens
  misc_RNA (1)...(19): siRNA sense strand
gaaggaaagagaacuugau

SEQ ID NO: 156198 - RNA, 19 nt, Homo sapiens
  misc_RNA (1)...(19): siRNA sense strand
agagggaauugacuugauu

SEQ ID NO: 156199 - RNA, 19 nt, Homo sapiens
  misc_RNA (1)...(19): siRNA sense strand
gcagacaucagcuacagau

SEQ ID NO: 156200 - RNA, 19 nt, Homo sapiens
  misc_RNA (1)...(19): siRNA sense strand
gagguacccauuccagaaa

SEQ ID NO: 156201 - RNA, 19 nt, Homo sapiens
  misc_RNA (1)...(19): siRNA sense strand
ucagcaggaucuauuagug

SEQ ID NO: 156202 - RNA, 19 nt, Homo sapiens
  misc_RNA (1)...(19): siRNA sense strand
gagcaacaugucucugaaa

SEQ ID NO: 156203 - RNA, 19 nt, Homo sapiens
  misc_RNA (1)...(19): siRNA sense strand
agaaaugggucagaaugga

SEQ ID NO: 156204 - RNA, 19 nt, Homo sapiens
  misc_RNA (1)...(19): siRNA sense strand
uugaagaucuagaacugaa

SEQ ID NO: 156205 - RNA, 19 nt, Homo sapiens
  misc_RNA (1)...(19): siRNA sense strand
uccaugugcugcuuauaaa

SEQ ID NO: 156206 - RNA, 19 nt, Homo sapiens
  misc_RNA (1)...(19): siRNA sense strand
cagaugacuacaacuuuaa

SEQ ID NO: 156207 - RNA, 19 nt, Homo sapiens
  misc_RNA (1)...(19): siRNA sense strand
agacaucagcuacagauau

SEQ ID NO: 156208 - RNA, 19 nt, Homo sapiens
  misc_RNA (1)...(19): siRNA sense strand
aagcugaaauugaagaucu

SEQ ID NO: 156209 - RNA, 19 nt, Homo sapiens
  misc_RNA (1)...(19): siRNA sense strand
gcaacaugucucugaaaga

SEQ ID NO: 156210 - RNA, 19 nt, Homo sapiens
  misc_RNA (1)...(19): siRNA sense strand
augaagacaucuguaauug

SEQ ID NO: 156211 - RNA, 19 nt, Homo sapiens
  misc_RNA (1)...(19): siRNA sense strand
guaggugcuggcuguaaua

SEQ ID NO: 156212 - RNA, 19 nt, Homo sapiens
  misc_RNA (1)...(19): siRNA sense strand
uuugugaucuguuugaugu

SEQ ID NO: 156213 - RNA, 19 nt, Homo sapiens
  misc_RNA (1)...(19): siRNA sense strand
uccagugacuccacagaaa

SEQ ID NO: 156214 - RNA, 19 nt, Homo sapiens
  misc_RNA (1)...(19): siRNA sense strand
ccagaaaugggucagaaug

SEQ ID NO: 156215 - RNA, 19 nt, Homo sapiens
  misc_RNA (1)...(19): siRNA sense strand
gaacugaaggaaagagaac

SEQ ID NO: 156216 - RNA, 19 nt, Homo sapiens
  misc_RNA (1)...(19): siRNA sense strand
ugagcaacaugucucugaa

SEQ ID NO: 156217 - RNA, 19 nt, Homo sapiens
  misc_RNA (1)...(19): siRNA sense strand
cuauguaacucaugaagac

SEQ ID NO: 156218 - RNA, 19 nt, Homo sapiens
  misc_RNA (1)...(19): siRNA sense strand
uaacgaaggaguuugugau

SEQ ID NO: 156219 - RNA, 19 nt, Homo sapiens
  misc_RNA (1)...(19): siRNA sense strand
ggcagaugacuacaacuuu

SEQ ID NO: 156220 - RNA, 19 nt, Homo sapiens
  misc_RNA (1)...(19): siRNA sense strand
aauugaagaucuagaacug

SEQ ID NO: 156221 - RNA, 19 nt, Homo sapiens
  misc_RNA (1)...(19): siRNA sense strand
gauguccagauacuaaauu

SEQ ID NO: 156222 - RNA, 19 nt, Homo sapiens
  misc_RNA (1)...(19): siRNA sense strand
gcuguaauacuaaagaagu

SEQ ID NO: 156223 - RNA, 19 nt, Homo sapiens
  misc_RNA (1)...(19): siRNA sense strand
aagagucgaguucaucuaa

SEQ ID NO: 156224 - RNA, 19 nt, Homo sapiens
  misc_RNA (1)...(19): siRNA sense strand
gaaauugaagaucuagaac

SEQ ID NO: 156225 - RNA, 19 nt, Homo sapiens
  misc_RNA (1)...(19): siRNA sense strand
uuuccucucuuaaggcuuu

SEQ ID NO: 156226 - RNA, 19 nt, Homo sapiens
  misc_RNA (1)...(19): siRNA sense strand
ucaaagcggcugcugauac

SEQ ID NO: 156227 - RNA, 19 nt, Homo sapiens
  misc_RNA (1)...(19): siRNA sense strand
caacuggagguacccauuc

SEQ ID NO: 156228 - RNA, 19 nt, Homo sapiens
  misc_RNA (1)...(19): siRNA sense strand
ucaggcaccuucugguaca

SEQ ID NO: 156229 - RNA, 19 nt, Homo sapiens
  misc_RNA (1)...(19): siRNA sense strand
uagagggaauugacuugau

SEQ ID NO: 156230 - RNA, 19 nt, Homo sapiens
  misc_RNA (1)...(19): siRNA sense strand
gcugcucacuaccaaguuc

SEQ ID NO: 156231 - RNA, 19 nt, Homo sapiens
  misc_RNA (1)...(19): siRNA sense strand
uaucaccaaugucuuagag

SEQ ID NO: 156232 - RNA, 19 nt, Homo sapiens
  misc_RNA (1)...(19): siRNA sense strand
aaugucuucugacguguuu

SEQ ID NO: 156233 - RNA, 19 nt, Homo sapiens
  misc_RNA (1)...(19): siRNA sense strand
caucuaagcccgugguuuu

SEQ ID NO: 156234 - RNA, 19 nt, Homo sapiens
  misc_RNA (1)...(19): siRNA sense strand
aauaaagagucgaguucau

SEQ ID NO: 156235 - RNA, 19 nt, Homo sapiens
  misc_RNA (1)...(19): siRNA sense strand
aggaguuugugaucuguuu

SEQ ID NO: 156236 - RNA, 19 nt, Homo sapiens
  misc_RNA (1)...(19): siRNA sense strand
gggaauugacuugauugaa

SEQ ID NO: 156237 - RNA, 19 nt, Homo sapiens
  misc_RNA (1)...(19): siRNA sense strand
caaggacggcguucuggau

SEQ ID NO: 156238 - RNA, 19 nt, Homo sapiens
  misc_RNA (1)...(19): siRNA sense strand
cagcagacaucagcuacag

SEQ ID NO: 156239 - RNA, 19 nt, Homo sapiens
  misc_RNA (1)...(19): siRNA sense strand
ugaaggaaagagaacuuga

SEQ ID NO: 156240 - RNA, 19 nt, Homo sapiens
  misc_RNA (1)...(19): siRNA sense strand
uugaugaguuaaugucuuc

SEQ ID NO: 156241 - RNA, 19 nt, Homo sapiens
  misc_RNA (1)...(19): siRNA sense strand
uaugauaucaccaaugucu

SEQ ID NO: 156242 - RNA, 19 nt, Homo sapiens
  misc_RNA (1)...(19): siRNA sense strand
gaguuugugaucuguuuga

SEQ ID NO: 156243 - RNA, 19 nt, Homo sapiens
  misc_RNA (1)...(19): siRNA sense strand
uguaggugcuggcuguaau

SEQ ID NO: 156244 - RNA, 19 nt, Homo sapiens
  misc_RNA (1)...(19): siRNA sense strand
gagggaauugacuugauug

SEQ ID NO: 156245 - RNA, 19 nt, Homo sapiens
  misc_RNA (1)...(19): siRNA sense strand
ggacggcguucuggaucuc

SEQ ID NO: 156246 - RNA, 19 nt, Homo sapiens
  misc_RNA (1)...(19): siRNA sense strand
cggcagaugacuacaacuu

SEQ ID NO: 156247 - RNA, 19 nt, Homo sapiens
  misc_RNA (1)...(19): siRNA sense strand
aagcggcugcugauacuuu

SEQ ID NO: 156248 - RNA, 19 nt, Homo sapiens
  misc_RNA (1)...(19): siRNA sense strand
uuuccuauguaacucauga

SEQ ID NO: 156249 - RNA, 19 nt, Homo sapiens
  misc_RNA (1)...(19): siRNA sense strand
gagucgaguucaucuaagc

SEQ ID NO: 156250 - RNA, 19 nt, Homo sapiens
  misc_RNA (1)...(19): siRNA sense strand
gcagcaggcacgagaagag

SEQ ID NO: 156251 - RNA, 19 nt, Homo sapiens
  misc_RNA (1)...(19): siRNA sense strand
ccagugacuccacagaaau

SEQ ID NO: 156252 - RNA, 19 nt, Homo sapiens
  misc_RNA (1)...(19): siRNA sense strand
uaaagagucgaguucaucu

SEQ ID NO: 156253 - RNA, 19 nt, Homo sapiens
  misc_RNA (1)...(19): siRNA sense strand
uuugauguccagauacuaa

SEQ ID NO: 156254 - RNA, 19 nt, Homo sapiens
  misc_RNA (1)...(19): siRNA sense strand
uggcuguaauacuaaagaa

SEQ ID NO: 156255 - RNA, 19 nt, Homo sapiens
  misc_RNA (1)...(19): siRNA sense strand
aaaaugugauggacgauuc

SEQ ID NO: 156256 - RNA, 19 nt, Homo sapiens
  misc_RNA (1)...(19): siRNA sense strand
gagaacuugaucagcagaa

SEQ ID NO: 156257 - RNA, 19 nt, Homo sapiens
  misc_RNA (1)...(19): siRNA sense strand
caucagcuacagauauauc

SEQ ID NO: 156258 - RNA, 19 nt, Homo sapiens
  misc_RNA (1)...(19): siRNA sense strand
gugcuggcuguaauacuaa

SEQ ID NO: 156259 - RNA, 19 nt, Homo sapiens
  misc_RNA (1)...(19): siRNA sense strand
ucucaaagcggcugcugau

SEQ ID NO: 156260 - RNA, 19 nt, Homo sapiens
  misc_RNA (1)...(19): siRNA sense strand
ugauaacgaaggaguuugu

SEQ ID NO: 156261 - RNA, 19 nt, Homo sapiens
  misc_RNA (1)...(19): siRNA sense strand
gauauaucuucagcaggau

SEQ ID NO: 156262 - RNA, 19 nt, Homo sapiens
  misc_RNA (1)...(19): siRNA sense strand
aauccagcauggcaacuca

SEQ ID NO: 156263 - RNA, 19 nt, Homo sapiens
  misc_RNA (1)...(19): siRNA sense strand
cagaaaugggucagaaugg

SEQ ID NO: 156264 - RNA, 19 nt, Homo sapiens
  misc_RNA (1)...(19): siRNA sense strand
guccuugacuccagugacu

SEQ ID NO: 156265 - RNA, 19 nt, Homo sapiens
  misc_RNA (1)...(19): siRNA sense strand
aaauaaagagucgaguuca

SEQ ID NO: 156266 - RNA, 19 nt, Homo sapiens
  misc_RNA (1)...(19): siRNA sense strand
gggcugcucacuaccaagu

SEQ ID NO: 156267 - RNA, 19 nt, Homo sapiens
  misc_RNA (1)...(19): siRNA sense strand
aaagagucgaguucaucua

SEQ ID NO: 156268 - RNA, 19 nt, Homo sapiens
  misc_RNA (1)...(19): siRNA sense strand
ggaggaacuuucugacuua

SEQ ID NO: 156269 - RNA, 19 nt, Homo sapiens
  misc_RNA (1)...(19): siRNA sense strand
guuaacagaugacaaagaa

SEQ ID NO: 156270 - RNA, 19 nt, Homo sapiens
  misc_RNA (1)...(19): siRNA sense strand
uaaacaagguugcaacgaa

SEQ ID NO: 156271 - RNA, 19 nt, Homo sapiens
  misc_RNA (1)...(19): siRNA sense strand
ggaacuuucugacuuauca

SEQ ID NO: 156272 - RNA, 19 nt, Homo sapiens
  misc_RNA (1)...(19): siRNA sense strand
uagcauaugugaccuauca

SEQ ID NO: 156273 - RNA, 19 nt, Homo sapiens
  misc_RNA (1)...(19): siRNA sense strand
gaaaccagauuggauguuc

SEQ ID NO: 156274 - RNA, 19 nt, Homo sapiens
  misc_RNA (1)...(19): siRNA sense strand
aaacaagguugcaacgaaa

SEQ ID NO: 156275 - RNA, 19 nt, Homo sapiens
  misc_RNA (1)...(19): siRNA sense strand
gaaagacuagcauauguga

SEQ ID NO: 156276 - RNA, 19 nt, Homo sapiens
  misc_RNA (1)...(19): siRNA sense strand
cauauuagauggauaggau

SEQ ID NO: 156277 - RNA, 19 nt, Homo sapiens
  misc_RNA (1)...(19): siRNA sense strand
gaucgucauugcaguuaaa

SEQ ID NO: 156278 - RNA, 19 nt, Homo sapiens
  misc_RNA (1)...(19): siRNA sense strand
gaagagaccucguuuugau

SEQ ID NO: 156279 - RNA, 19 nt, Homo sapiens
  misc_RNA (1)...(19): siRNA sense strand
ucagcaaagugaagaauug

SEQ ID NO: 156280 - RNA, 19 nt, Homo sapiens
  misc_RNA (1)...(19): siRNA sense strand
caacggaccuaucgauguc

SEQ ID NO: 156281 - RNA, 19 nt, Homo sapiens
  misc_RNA (1)...(19): siRNA sense strand
gaagaauugcuugaaguaa

SEQ ID NO: 156282 - RNA, 19 nt, Homo sapiens
  misc_RNA (1)...(19): siRNA sense strand
gaaagcggagaguguauga

SEQ ID NO: 156283 - RNA, 19 nt, Homo sapiens
  misc_RNA (1)...(19): siRNA sense strand
ccaagaaccauauuagaug

SEQ ID NO: 156284 - RNA, 19 nt, Homo sapiens
  misc_RNA (1)...(19): siRNA sense strand
auguaucgcugguuuauuu

SEQ ID NO: 156285 - RNA, 19 nt, Homo sapiens
  misc_RNA (1)...(19): siRNA sense strand
gaaucgaccucguugaaaa

SEQ ID NO: 156286 - RNA, 19 nt, Homo sapiens
  misc_RNA (1)...(19): siRNA sense strand
ugaguuaacagaugacaaa

SEQ ID NO: 156287 - RNA, 19 nt, Homo sapiens
  misc_RNA (1)...(19): siRNA sense strand
ugacuuaucagcaauggaa

SEQ ID NO: 156288 - RNA, 19 nt, Homo sapiens
  misc_RNA (1)...(19): siRNA sense strand
ugaagaauugcuugaagua

SEQ ID NO: 156289 - RNA, 19 nt, Homo sapiens
  misc_RNA (1)...(19): siRNA sense strand
aguuaaagcuccagcagaa

SEQ ID NO: 156290 - RNA, 19 nt, Homo sapiens
  misc_RNA (1)...(19): siRNA sense strand
ucaagacauucauagcauu

SEQ ID NO: 156291 - RNA, 19 nt, Homo sapiens
  misc_RNA (1)...(19): siRNA sense strand
gaagaugcuuuggaugagu

SEQ ID NO: 156292 - RNA, 19 nt, Homo sapiens
  misc_RNA (1)...(19): siRNA sense strand
ggaagaugcuuuggaugag

SEQ ID NO: 156293 - RNA, 19 nt, Homo sapiens
  misc_RNA (1)...(19): siRNA sense strand
gcauucaggccuuccauga

SEQ ID NO: 156294 - RNA, 19 nt, Homo sapiens
  misc_RNA (1)...(19): siRNA sense strand
gugaagaauugcuugaagu

SEQ ID NO: 156295 - RNA, 19 nt, Homo sapiens
  misc_RNA (1)...(19): siRNA sense strand
caucaccaaugucuuagau

SEQ ID NO: 156296 - RNA, 19 nt, Homo sapiens
  misc_RNA (1)...(19): siRNA sense strand
gaaauccaagaaccauauu

SEQ ID NO: 156297 - RNA, 19 nt, Homo sapiens
  misc_RNA (1)...(19): siRNA sense strand
ggaaucgaccucguugaaa

SEQ ID NO: 156298 - RNA, 19 nt, Homo sapiens
  misc_RNA (1)...(19): siRNA sense strand
gagaagacucuaucacagu

SEQ ID NO: 156299 - RNA, 19 nt, Homo sapiens
  misc_RNA (1)...(19): siRNA sense strand
agaaggcccugaggaagaa

SEQ ID NO: 156300 - RNA, 19 nt, Homo sapiens
  misc_RNA (1)...(19): siRNA sense strand
aggaggaacuuucugacuu

SEQ ID NO: 156301 - RNA, 19 nt, Homo sapiens
  misc_RNA (1)...(19): siRNA sense strand
uggaagaugcuuuggauga

SEQ ID NO: 156302 - RNA, 19 nt, Homo sapiens
  misc_RNA (1)...(19): siRNA sense strand
aagaauugcuugaaguaag

SEQ ID NO: 156303 - RNA, 19 nt, Homo sapiens
  misc_RNA (1)...(19): siRNA sense strand
cagaaggcccugaggaaga

SEQ ID NO: 156304 - RNA, 19 nt, Homo sapiens
  misc_RNA (1)...(19): siRNA sense strand
uggaugaguuaauuaagga

SEQ ID NO: 156305 - RNA, 19 nt, Homo sapiens
  misc_RNA (1)...(19): siRNA sense strand
gaggaacuuucugacuuau

SEQ ID NO: 156306 - RNA, 19 nt, Homo sapiens
  misc_RNA (1)...(19): siRNA sense strand
uaugugaccuaucaagaca

SEQ ID NO: 156307 - RNA, 19 nt, Homo sapiens
  misc_RNA (1)...(19): siRNA sense strand
aauggaagaugcuuuggau

SEQ ID NO: 156308 - RNA, 19 nt, Homo sapiens
  misc_RNA (1)...(19): siRNA sense strand
gaagaaaauccucagcaaa

SEQ ID NO: 156309 - RNA, 19 nt, Homo sapiens
  misc_RNA (1)...(19): siRNA sense strand
gaaacugggaguccgaaag

SEQ ID NO: 156310 - RNA, 19 nt, Homo sapiens
  misc_RNA (1)...(19): siRNA sense strand
gaccuaucgaugucuauuu

SEQ ID NO: 156311 - RNA, 19 nt, Homo sapiens
  misc_RNA (1)...(19): siRNA sense strand
agaaauccaagaaccauau

SEQ ID NO: 156312 - RNA, 19 nt, Homo sapiens
  misc_RNA (1)...(19): siRNA sense strand
augaaagacuagcauaugu

SEQ ID NO: 156313 - RNA, 19 nt, Homo sapiens
  misc_RNA (1)...(19): siRNA sense strand
cgaggaaguuacccagucu

SEQ ID NO: 156314 - RNA, 19 nt, Homo sapiens
  misc_RNA (1)...(19): siRNA sense strand
ggaccuaucgaugucuauu

SEQ ID NO: 156315 - RNA, 19 nt, Homo sapiens
  misc_RNA (1)...(19): siRNA sense strand
ggccuuccaugaacagauc

SEQ ID NO: 156316 - RNA, 19 nt, Homo sapiens
  misc_RNA (1)...(19): siRNA sense strand
uuugauguaucgcugguuu

SEQ ID NO: 156317 - RNA, 19 nt, Homo sapiens
  misc_RNA (1)...(19): siRNA sense strand
ugugaccuaucaagacauu

SEQ ID NO: 156318 - RNA, 19 nt, Homo sapiens
  misc_RNA (1)...(19): siRNA sense strand
caagacauucauagcauuc

SEQ ID NO: 156319 - RNA, 19 nt, Homo sapiens
  misc_RNA (1)...(19): siRNA sense strand
ccaacggaccuaucgaugu

SEQ ID NO: 156320 - RNA, 19 nt, Homo sapiens
  misc_RNA (1)...(19): siRNA sense strand
cagaucgucauugcaguua

SEQ ID NO: 156321 - RNA, 19 nt, Homo sapiens
  misc_RNA (1)...(19): siRNA sense strand
cauaugugaccuaucaaga

SEQ ID NO: 156322 - RNA, 19 nt, Homo sapiens
  misc_RNA (1)...(19): siRNA sense strand
uaucaagacauucauagca

SEQ ID NO: 156323 - RNA, 19 nt, Homo sapiens
  misc_RNA (1)...(19): siRNA sense strand
aagaugcuuuggaugaguu

SEQ ID NO: 156324 - RNA, 19 nt, Homo sapiens
  misc_RNA (1)...(19): siRNA sense strand
uggaaucgaccucguugaa

SEQ ID NO: 156325 - RNA, 19 nt, Homo sapiens
  misc_RNA (1)...(19): siRNA sense strand
ugaaagacuagcauaugug

SEQ ID NO: 156326 - RNA, 19 nt, Homo sapiens
  misc_RNA (1)...(19): siRNA sense strand
gaagcuacaggaggaacuu

SEQ ID NO: 156327 - RNA, 19 nt, Homo sapiens
  misc_RNA (1)...(19): siRNA sense strand
gcuuuggaugaguuaauua

SEQ ID NO: 156328 - RNA, 19 nt, Homo sapiens
  misc_RNA (1)...(19): siRNA sense strand
aaagugaagagaccucguu

SEQ ID NO: 156329 - RNA, 19 nt, Homo sapiens
  misc_RNA (1)...(19): siRNA sense strand
guaucgcugguuuauuuaa

SEQ ID NO: 156330 - RNA, 19 nt, Homo sapiens
  misc_RNA (1)...(19): siRNA sense strand
aaugaaagacuagcauaug

SEQ ID NO: 156331 - RNA, 19 nt, Homo sapiens
  misc_RNA (1)...(19): siRNA sense strand
accaaugucuuagauggaa

SEQ ID NO: 156332 - RNA, 19 nt, Homo sapiens
  misc_RNA (1)...(19): siRNA sense strand
cgaccucguugaaaagaaa

SEQ ID NO: 156333 - RNA, 19 nt, Homo sapiens
  misc_RNA (1)...(19): siRNA sense strand
cuaucgaugucuauuugug

SEQ ID NO: 156334 - RNA, 19 nt, Homo sapiens
  misc_RNA (1)...(19): siRNA sense strand
accuaucgaugucuauuug

SEQ ID NO: 156335 - RNA, 19 nt, Homo sapiens
  misc_RNA (1)...(19): siRNA sense strand
gggguauucuugacuuaaa

SEQ ID NO: 156336 - RNA, 19 nt, Homo sapiens
  misc_RNA (1)...(19): siRNA sense strand
gcggagaguguaugacauc

SEQ ID NO: 156337 - RNA, 19 nt, Homo sapiens
  misc_RNA (1)...(19): siRNA sense strand
ugaccuaucaagacauuca

SEQ ID NO: 156338 - RNA, 19 nt, Homo sapiens
  misc_RNA (1)...(19): siRNA sense strand
gcauaugugaccuaucaag

SEQ ID NO: 156339 - RNA, 19 nt, Homo sapiens
  misc_RNA (1)...(19): siRNA sense strand
gugaagagaccucguuuug

SEQ ID NO: 156340 - RNA, 19 nt, Homo sapiens
  misc_RNA (1)...(19): siRNA sense strand
gagcaguuccccaacaaaa

SEQ ID NO: 156341 - RNA, 19 nt, Homo sapiens
  misc_RNA (1)...(19): siRNA sense strand
uccaagaaccauauuagau

SEQ ID NO: 156342 - RNA, 19 nt, Homo sapiens
  misc_RNA (1)...(19): siRNA sense strand
caauggaagaugcuuugga

SEQ ID NO: 156343 - RNA, 19 nt, Homo sapiens
  misc_RNA (1)...(19): siRNA sense strand
aaagugaagaauugcuuga

SEQ ID NO: 156344 - RNA, 19 nt, Homo sapiens
  misc_RNA (1)...(19): siRNA sense strand
gucgggaccucuucaucug

SEQ ID NO: 156345 - RNA, 19 nt, Homo sapiens
  misc_RNA (1)...(19): siRNA sense strand
cagcagaaaccagauugga

SEQ ID NO: 156346 - RNA, 19 nt, Homo sapiens
  misc_RNA (1)...(19): siRNA sense strand
ucuaucacagugcacauaa

SEQ ID NO: 156347 - RNA, 19 nt, Homo sapiens
  misc_RNA (1)...(19): siRNA sense strand
cgaugucuauuugugugaa

SEQ ID NO: 156348 - RNA, 19 nt, Homo sapiens
  misc_RNA (1)...(19): siRNA sense strand
gaaguggagcagggucaga

SEQ ID NO: 156349 - RNA, 19 nt, Homo sapiens
  misc_RNA (1)...(19): siRNA sense strand
agaagaaaauccucagcaa

SEQ ID NO: 156350 - RNA, 19 nt, Homo sapiens
  misc_RNA (1)...(19): siRNA sense strand
auuuauggaucuugucaga

SEQ ID NO: 156351 - RNA, 19 nt, Homo sapiens
  misc_RNA (1)...(19): siRNA sense strand
gcaguuccccaacaaaaga

SEQ ID NO: 156352 - RNA, 19 nt, Homo sapiens
  misc_RNA (1)...(19): siRNA sense strand
gaaaauccucagcaaagug

SEQ ID NO: 156353 - RNA, 19 nt, Homo sapiens
  misc_RNA (1)...(19): siRNA sense strand
aagaaauccaagaaccaua

SEQ ID NO: 156354 - RNA, 19 nt, Homo sapiens
  misc_RNA (1)...(19): siRNA sense strand
gaguguaugacaucaccaa

SEQ ID NO: 156355 - RNA, 19 nt, Homo sapiens
  misc_RNA (1)...(19): siRNA sense strand
uacaggaggaacuuucuga

SEQ ID NO: 156356 - RNA, 19 nt, Homo sapiens
  misc_RNA (1)...(19): siRNA sense strand
agugaagaauugcuugaag

SEQ ID NO: 156357 - RNA, 19 nt, Homo sapiens
  misc_RNA (1)...(19): siRNA sense strand
aaagaaauccaagaaccau

SEQ ID NO: 156358 - RNA, 19 nt, Homo sapiens
  misc_RNA (1)...(19): siRNA sense strand
uguuccagcucccagagaa

SEQ ID NO: 156359 - RNA, 19 nt, Homo sapiens
  misc_RNA (1)...(19): siRNA sense strand
cgaaagcggagaguguaug

SEQ ID NO: 156360 - RNA, 19 nt, Homo sapiens
  misc_RNA (1)...(19): siRNA sense strand
ccaaugucuuagauggaau

SEQ ID NO: 156361 - RNA, 19 nt, Homo sapiens
  misc_RNA (1)...(19): siRNA sense strand
gaaaaugaaagacuagcau

SEQ ID NO: 156362 - RNA, 19 nt, Homo sapiens
  misc_RNA (1)...(19): siRNA sense strand
gagcaccaacggaccuauc

SEQ ID NO: 156363 - RNA, 19 nt, Homo sapiens
  misc_RNA (1)...(19): siRNA sense strand
cgaggaaguuacccagucu

SEQ ID NO: 156364 - RNA, 19 nt, Homo sapiens
  misc_RNA (1)...(19): siRNA sense strand
cgaggaaguuacccagucu

SEQ ID NO: 156365 - RNA, 19 nt, Homo sapiens
  misc_RNA (1)...(19): siRNA sense strand
cgaggaaguuacccagucu

SEQ ID NO: 156366 - RNA, 19 nt, Homo sapiens
  misc_RNA (1)...(19): siRNA sense strand
cgaggaaguuacccagucu

SEQ ID NO: 156367 - RNA, 19 nt, Homo sapiens
  misc_RNA (1)...(19): siRNA sense strand
uggauaagcuggagucuau

SEQ ID NO: 156368 - RNA, 19 nt, Homo sapiens
  misc_RNA (1)...(19): siRNA sense strand
cagccuccauucucaguaa

SEQ ID NO: 156369 - RNA, 19 nt, Homo sapiens
  misc_RNA (1)...(19): siRNA sense strand
gauaagcuggagucuauuc

SEQ ID NO: 156370 - RNA, 19 nt, Homo sapiens
  misc_RNA (1)...(19): siRNA sense strand
gcugcaaggugccaaugau

SEQ ID NO: 156371 - RNA, 19 nt, Homo sapiens
  misc_RNA (1)...(19): siRNA sense strand
caggaggcaccuuggauaa

SEQ ID NO: 156372 - RNA, 19 nt, Homo sapiens
  misc_RNA (1)...(19): siRNA sense strand
ggacggaauccuauaugca

SEQ ID NO: 156373 - RNA, 19 nt, Homo sapiens
  misc_RNA (1)...(19): siRNA sense strand
ggaggcaccuuggauaagc

SEQ ID NO: 156374 - RNA, 19 nt, Homo sapiens
  misc_RNA (1)...(19): siRNA sense strand
gcccagagcagaugcaagu

SEQ ID NO: 156375 - RNA, 19 nt, Homo sapiens
  misc_RNA (1)...(19): siRNA sense strand
acaggaggcaccuuggaua

SEQ ID NO: 156376 - RNA, 19 nt, Homo sapiens
  misc_RNA (1)...(19): siRNA sense strand
uggagucuauuccuggauu

SEQ ID NO: 156377 - RNA, 19 nt, Homo sapiens
  misc_RNA (1)...(19): siRNA sense strand
ggagucuauuccuggauuc

SEQ ID NO: 156378 - RNA, 19 nt, Homo sapiens
  misc_RNA (1)...(19): siRNA sense strand
ggugguggacguuaaguuc

SEQ ID NO: 156379 - RNA, 19 nt, Homo sapiens
  misc_RNA (1)...(19): siRNA sense strand
caucacagccuccauucuc

SEQ ID NO: 156380 - RNA, 19 nt, Homo sapiens
  misc_RNA (1)...(19): siRNA sense strand
ggacagccugccacucauc

SEQ ID NO: 156381 - RNA, 19 nt, Homo sapiens
  misc_RNA (1)...(19): siRNA sense strand
gcucuggugguggacguua

SEQ ID NO: 156382 - RNA, 19 nt, Homo sapiens
  misc_RNA (1)...(19): siRNA sense strand
gcaaggugccaaugaucag

SEQ ID NO: 156383 - RNA, 19 nt, Homo sapiens
  misc_RNA (1)...(19): siRNA sense strand
gucuauuccuggauucaau

SEQ ID NO: 156384 - RNA, 19 nt, Homo sapiens
  misc_RNA (1)...(19): siRNA sense strand
ggaagggagccagggacuu

SEQ ID NO: 156385 - RNA, 19 nt, Homo sapiens
  misc_RNA (1)...(19): siRNA sense strand
gcggacggaauccuauaug

SEQ ID NO: 156386 - RNA, 19 nt, Homo sapiens
  misc_RNA (1)...(19): siRNA sense strand
gcaagaagcuggaggacaa

SEQ ID NO: 156387 - RNA, 19 nt, Homo sapiens
  misc_RNA (1)...(19): siRNA sense strand
ccacaucgccugcaaguuu

SEQ ID NO: 156388 - RNA, 19 nt, Homo sapiens
  misc_RNA (1)...(19): siRNA sense strand
ucaagaacguggagaagaa

SEQ ID NO: 156389 - RNA, 19 nt, Homo sapiens
  misc_RNA (1)...(19): siRNA sense strand
gcuggaagguggagcguaa

SEQ ID NO: 156390 - RNA, 19 nt, Homo sapiens
  misc_RNA (1)...(19): siRNA sense strand
gaagucagcgccuacauca

SEQ ID NO: 156391 - RNA, 19 nt, Homo sapiens
  misc_RNA (1)...(19): siRNA sense strand
guacaagauuggcggcauu

SEQ ID NO: 156392 - RNA, 19 nt, Homo sapiens
  misc_RNA (1)...(19): siRNA sense strand
ucaagaagaucggcuacaa

SEQ ID NO: 156393 - RNA, 19 nt, Homo sapiens
  misc_RNA (1)...(19): siRNA sense strand
aaaggaccauugagaaguu

SEQ ID NO: 156394 - RNA, 19 nt, Homo sapiens
  misc_RNA (1)...(19): siRNA sense strand
gaaggaggcggcugagaug

SEQ ID NO: 156395 - RNA, 19 nt, Homo sapiens
  misc_RNA (1)...(19): siRNA sense strand
gagaagacccacaucaaca

SEQ ID NO: 156396 - RNA, 19 nt, Homo sapiens
  misc_RNA (1)...(19): siRNA sense strand
ugaagaacgugucggugaa

SEQ ID NO: 156397 - RNA, 19 nt, Homo sapiens
  misc_RNA (1)...(19): siRNA sense strand
gcgggcaucuccaagaaug

SEQ ID NO: 156398 - RNA, 19 nt, Homo sapiens
  misc_RNA (1)...(19): siRNA sense strand
gcgccuacaucaagaagau

SEQ ID NO: 156399 - RNA, 19 nt, Homo sapiens
  misc_RNA (1)...(19): siRNA sense strand
uugcggagcugaaggagaa

SEQ ID NO: 156400 - RNA, 19 nt, Homo sapiens
  misc_RNA (1)...(19): siRNA sense strand
cuacaaaugcggagguauu

SEQ ID NO: 156401 - RNA, 19 nt, Homo sapiens
  misc_RNA (1)...(19): siRNA sense strand
caacgucggcuucaaugug

SEQ ID NO: 156402 - RNA, 19 nt, Homo sapiens
  misc_RNA (1)...(19): siRNA sense strand
ggagaagacccacaucaac

SEQ ID NO: 156403 - RNA, 19 nt, Homo sapiens
  misc_RNA (1)...(19): siRNA sense strand
gcaggacguguacaagauu

SEQ ID NO: 156404 - RNA, 19 nt, Homo sapiens
  misc_RNA (1)...(19): siRNA sense strand
gcaaggagaagacccacau

SEQ ID NO: 156405 - RNA, 19 nt, Homo sapiens
  misc_RNA (1)...(19): siRNA sense strand
gagcugaaggagaagauug

SEQ ID NO: 156406 - RNA, 19 nt, Homo sapiens
  misc_RNA (1)...(19): siRNA sense strand
cgggaaagcccaugugugu

SEQ ID NO: 156407 - RNA, 19 nt, Homo sapiens
  misc_RNA (1)...(19): siRNA sense strand
ggaagucagcgccuacauc

SEQ ID NO: 156408 - RNA, 19 nt, Homo sapiens
  misc_RNA (1)...(19): siRNA sense strand
ggucaucgacugccacaca

SEQ ID NO: 156409 - RNA, 19 nt, Homo sapiens
  misc_RNA (1)...(19): siRNA sense strand
caccgcgacuucaucaaga

SEQ ID NO: 156410 - RNA, 19 nt, Homo sapiens
  misc_RNA (1)...(19): siRNA sense strand
uugagaaguucgagaagga

SEQ ID NO: 156411 - RNA, 19 nt, Homo sapiens
  misc_RNA (1)...(19): siRNA sense strand
cacaucgccugcaaguuug

SEQ ID NO: 156412 - RNA, 19 nt, Homo sapiens
  misc_RNA (1)...(19): siRNA sense strand
ugaagucaguggagaugca

SEQ ID NO: 156413 - RNA, 19 nt, Homo sapiens
  misc_RNA (1)...(19): siRNA sense strand
augcggagguauugacaaa

SEQ ID NO: 156414 - RNA, 19 nt, Homo sapiens
  misc_RNA (1)...(19): siRNA sense strand
aacgucggcuucaauguga

SEQ ID NO: 156415 - RNA, 19 nt, Homo sapiens
  misc_RNA (1)...(19): siRNA sense strand
ccacgggccaccucaucua

SEQ ID NO: 156416 - RNA, 19 nt, Homo sapiens
  misc_RNA (1)...(19): siRNA sense strand
caggacguguacaagauug

SEQ ID NO: 156417 - RNA, 19 nt, Homo sapiens
  misc_RNA (1)...(19): siRNA sense strand
gaagacccacaucaacauc

SEQ ID NO: 156418 - RNA, 19 nt, Homo sapiens
  misc_RNA (1)...(19): siRNA sense strand
ccauugagaaguucgagaa

SEQ ID NO: 156419 - RNA, 19 nt, Homo sapiens
  misc_RNA (1)...(19): siRNA sense strand
ccguaggcgucaucaagaa

SEQ ID NO: 156420 - RNA, 19 nt, Homo sapiens
  misc_RNA (1)...(19): siRNA sense strand
gacaacgucggcuucaaug

SEQ ID NO: 156421 - RNA, 19 nt, Homo sapiens
  misc_RNA (1)...(19): siRNA sense strand
gaagcgcuacgacgagauc

SEQ ID NO: 156422 - RNA, 19 nt, Homo sapiens
  misc_RNA (1)...(19): siRNA sense strand
caacaugccgugguucaag

SEQ ID NO: 156423 - RNA, 19 nt, Homo sapiens
  misc_RNA (1)...(19): siRNA sense strand
cuacaucaccaucaucgau

SEQ ID NO: 156424 - RNA, 19 nt, Homo sapiens
  misc_RNA (1)...(19): siRNA sense strand
ccauguguguggagagcuu

SEQ ID NO: 156425 - RNA, 19 nt, Homo sapiens
  misc_RNA (1)...(19): siRNA sense strand
agaaggaggcggcugagau

SEQ ID NO: 156426 - RNA, 19 nt, Homo sapiens
  misc_RNA (1)...(19): siRNA sense strand
gcaugguggugaccuuugc

SEQ ID NO: 156427 - RNA, 19 nt, Homo sapiens
  misc_RNA (1)...(19): siRNA sense strand
ugcaggacguguacaagau

SEQ ID NO: 156428 - RNA, 19 nt, Homo sapiens
  misc_RNA (1)...(19): siRNA sense strand
ccacguggacuccggaaag

SEQ ID NO: 156429 - RNA, 19 nt, Homo sapiens
  misc_RNA (1)...(19): siRNA sense strand
caucgugggcgugaacaaa

SEQ ID NO: 156430 - RNA, 19 nt, Homo sapiens
  misc_RNA (1)...(19): siRNA sense strand
cgggccaccucaucuacaa

SEQ ID NO: 156431 - RNA, 19 nt, Homo sapiens
  misc_RNA (1)...(19): siRNA sense strand
ucaccaagucggcgcagaa

SEQ ID NO: 156432 - RNA, 19 nt, Homo sapiens
  misc_RNA (1)...(19): siRNA sense strand
gaagaacgugucggugaag

SEQ ID NO: 156433 - RNA, 19 nt, Homo sapiens
  misc_RNA (1)...(19): siRNA sense strand
gacaaaaggaccauugaga

SEQ ID NO: 156434 - RNA, 19 nt, Homo sapiens
  misc_RNA (1)...(19): siRNA sense strand
ggccguaggcgucaucaag

SEQ ID NO: 156435 - RNA, 19 nt, Homo sapiens
  misc_RNA (1)...(19): siRNA sense strand
gcgacuucaucaagaacau

SEQ ID NO: 156436 - RNA, 19 nt, Homo sapiens
  misc_RNA (1)...(19): siRNA sense strand
ccggcaaggucaccaaguc

SEQ ID NO: 156437 - RNA, 19 nt, Homo sapiens
  misc_RNA (1)...(19): siRNA sense strand
gccguaggcgucaucaaga

SEQ ID NO: 156438 - RNA, 19 nt, Homo sapiens
  misc_RNA (1)...(19): siRNA sense strand
uggagauggugccgggaaa

SEQ ID NO: 156439 - RNA, 19 nt, Homo sapiens
  misc_RNA (1)...(19): siRNA sense strand
ggaaguucgagaccaccaa

SEQ ID NO: 156440 - RNA, 19 nt, Homo sapiens
  misc_RNA (1)...(19): siRNA sense strand
ucgagaccaccaaguacua

SEQ ID NO: 156441 - RNA, 19 nt, Homo sapiens
  misc_RNA (1)...(19): siRNA sense strand
agucagcgccuacaucaag

SEQ ID NO: 156442 - RNA, 19 nt, Homo sapiens
  misc_RNA (1)...(19): siRNA sense strand
cagcccacaucgccugcaa

SEQ ID NO: 156443 - RNA, 19 nt, Homo sapiens
  misc_RNA (1)...(19): siRNA sense strand
caaaugcggagguauugac

SEQ ID NO: 156444 - RNA, 19 nt, Homo sapiens
  misc_RNA (1)...(19): siRNA sense strand
gggcaugguggugaccuuu

SEQ ID NO: 156445 - RNA, 19 nt, Homo sapiens
  misc_RNA (1)...(19): siRNA sense strand
ggaagguggagcguaagga

SEQ ID NO: 156446 - RNA, 19 nt, Homo sapiens
  misc_RNA (1)...(19): siRNA sense strand
gucagcgccuacaucaaga

SEQ ID NO: 156447 - RNA, 19 nt, Homo sapiens
  misc_RNA (1)...(19): siRNA sense strand
ccaccgcgacuucaucaag

SEQ ID NO: 156448 - RNA, 19 nt, Homo sapiens
  misc_RNA (1)...(19): siRNA sense strand
uacaaaugcggagguauug

SEQ ID NO: 156449 - RNA, 19 nt, Homo sapiens
  misc_RNA (1)...(19): siRNA sense strand
ggccaccucaucuacaaau

SEQ ID NO: 156450 - RNA, 19 nt, Homo sapiens
  misc_RNA (1)...(19): siRNA sense strand
gagaaggaggcggcugaga

SEQ ID NO: 156451 - RNA, 19 nt, Homo sapiens
  misc_RNA (1)...(19): siRNA sense strand
gaacaugaucacggguaca

SEQ ID NO: 156452 - RNA, 19 nt, Homo sapiens
  misc_RNA (1)...(19): siRNA sense strand
agacagauauggcgaaauu

SEQ ID NO: 156453 - RNA, 19 nt, Homo sapiens
  misc_RNA (1)...(19): siRNA sense strand
ggaaguggagcuacagaua

SEQ ID NO: 156454 - RNA, 19 nt, Homo sapiens
  misc_RNA (1)...(19): siRNA sense strand
ugccaagucuuccaucuua

SEQ ID NO: 156455 - RNA, 19 nt, Homo sapiens
  misc_RNA (1)...(19): siRNA sense strand
ggaggaaagugaagaagca

SEQ ID NO: 156456 - RNA, 19 nt, Homo sapiens
  misc_RNA (1)...(19): siRNA sense strand
gggcucaucuaaacuaguu

SEQ ID NO: 156457 - RNA, 19 nt, Homo sapiens
  misc_RNA (1)...(19): siRNA sense strand
ccagugggauacggaauua

SEQ ID NO: 156458 - RNA, 19 nt, Homo sapiens
  misc_RNA (1)...(19): siRNA sense strand
ggaagacacuacaggaagu

SEQ ID NO: 156459 - RNA, 19 nt, Homo sapiens
  misc_RNA (1)...(19): siRNA sense strand
caaagaggcuaagggaaga

SEQ ID NO: 156460 - RNA, 19 nt, Homo sapiens
  misc_RNA (1)...(19): siRNA sense strand
gauaaaguuggaacagaua

SEQ ID NO: 156461 - RNA, 19 nt, Homo sapiens
  misc_RNA (1)...(19): siRNA sense strand
aagcagauguggcaguauu

SEQ ID NO: 156462 - RNA, 19 nt, Homo sapiens
  misc_RNA (1)...(19): siRNA sense strand
ggauguggcugcuuucaac

SEQ ID NO: 156463 - RNA, 19 nt, Homo sapiens
  misc_RNA (1)...(19): siRNA sense strand
uccaggugcucaacgauua

SEQ ID NO: 156464 - RNA, 19 nt, Homo sapiens
  misc_RNA (1)...(19): siRNA sense strand
cuacagauaguaaagauga

SEQ ID NO: 156465 - RNA, 19 nt, Homo sapiens
  misc_RNA (1)...(19): siRNA sense strand
gaagaagcaaagaggcuaa

SEQ ID NO: 156466 - RNA, 19 nt, Homo sapiens
  misc_RNA (1)...(19): siRNA sense strand
ccauggauguggcugcuuu

SEQ ID NO: 156467 - RNA, 19 nt, Homo sapiens
  misc_RNA (1)...(19): siRNA sense strand
acaagcagauguggcagua

SEQ ID NO: 156468 - RNA, 19 nt, Homo sapiens
  misc_RNA (1)...(19): siRNA sense strand
gaaguggagcuacagauag

SEQ ID NO: 156469 - RNA, 19 nt, Homo sapiens
  misc_RNA (1)...(19): siRNA sense strand
ugauaaaguuggaacagau

SEQ ID NO: 156470 - RNA, 19 nt, Homo sapiens
  misc_RNA (1)...(19): siRNA sense strand
gauacggaauuaagaaacu

SEQ ID NO: 156471 - RNA, 19 nt, Homo sapiens
  misc_RNA (1)...(19): siRNA sense strand
gguauaaucacaucaaguc

SEQ ID NO: 156472 - RNA, 19 nt, Homo sapiens
  misc_RNA (1)...(19): siRNA sense strand
gaacgucuugcacaauaug

SEQ ID NO: 156473 - RNA, 19 nt, Homo sapiens
  misc_RNA (1)...(19): siRNA sense strand
cacaucaagucuuacgaaa

SEQ ID NO: 156474 - RNA, 19 nt, Homo sapiens
  misc_RNA (1)...(19): siRNA sense strand
gcccuacguugguauaauc

SEQ ID NO: 156475 - RNA, 19 nt, Homo sapiens
  misc_RNA (1)...(19): siRNA sense strand
guaaagaugaugaugacau

SEQ ID NO: 156476 - RNA, 19 nt, Homo sapiens
  misc_RNA (1)...(19): siRNA sense strand
ugaugacauugaccucuuu

SEQ ID NO: 156477 - RNA, 19 nt, Homo sapiens
  misc_RNA (1)...(19): siRNA sense strand
gggaugaugagacagauau

SEQ ID NO: 156478 - RNA, 19 nt, Homo sapiens
  misc_RNA (1)...(19): siRNA sense strand
gaaagugaagaagcaaaga

SEQ ID NO: 156479 - RNA, 19 nt, Homo sapiens
  misc_RNA (1)...(19): siRNA sense strand
ggaaagugaagaagcaaag

SEQ ID NO: 156480 - RNA, 19 nt, Homo sapiens
  misc_RNA (1)...(19): siRNA sense strand
ugaagaugauaaaguugga

SEQ ID NO: 156481 - RNA, 19 nt, Homo sapiens
  misc_RNA (1)...(19): siRNA sense strand
ugagacagauauggcgaaa

SEQ ID NO: 156482 - RNA, 19 nt, Homo sapiens
  misc_RNA (1)...(19): siRNA sense strand
ucacaucaagucuuacgaa

SEQ ID NO: 156483 - RNA, 19 nt, Homo sapiens
  misc_RNA (1)...(19): siRNA sense strand
gggauacggaauuaagaaa

SEQ ID NO: 156484 - RNA, 19 nt, Homo sapiens
  misc_RNA (1)...(19): siRNA sense strand
gcacaauaugaaucaaaga

SEQ ID NO: 156485 - RNA, 19 nt, Homo sapiens
  misc_RNA (1)...(19): siRNA sense strand
acgauuaccuggcggacaa

SEQ ID NO: 156486 - RNA, 19 nt, Homo sapiens
  misc_RNA (1)...(19): siRNA sense strand
caucaagucuuacgaaaag

SEQ ID NO: 156487 - RNA, 19 nt, Homo sapiens
  misc_RNA (1)...(19): siRNA sense strand
gcagauguggcaguauuug

SEQ ID NO: 156488 - RNA, 19 nt, Homo sapiens
  misc_RNA (1)...(19): siRNA sense strand
gacauugaccucuuuggau

SEQ ID NO: 156489 - RNA, 19 nt, Homo sapiens
  misc_RNA (1)...(19): siRNA sense strand
uaguaaagaugaugaugac

SEQ ID NO: 156490 - RNA, 19 nt, Homo sapiens
  misc_RNA (1)...(19): siRNA sense strand
gagcuacagauaguaaaga

SEQ ID NO: 156491 - RNA, 19 nt, Homo sapiens
  misc_RNA (1)...(19): siRNA sense strand
caagucuuccaucuuacua

SEQ ID NO: 156492 - RNA, 19 nt, Homo sapiens
  misc_RNA (1)...(19): siRNA sense strand
ugacauugaccucuuugga

SEQ ID NO: 156493 - RNA, 19 nt, Homo sapiens
  misc_RNA (1)...(19): siRNA sense strand
aagaugaugaugacauuga

SEQ ID NO: 156494 - RNA, 19 nt, Homo sapiens
  misc_RNA (1)...(19): siRNA sense strand
ggagugcgucagaagcauu

SEQ ID NO: 156495 - RNA, 19 nt, Homo sapiens
  misc_RNA (1)...(19): siRNA sense strand
guggagcuacagauaguaa

SEQ ID NO: 156496 - RNA, 19 nt, Homo sapiens
  misc_RNA (1)...(19): siRNA sense strand
cagauauggcgaaauuaga

SEQ ID NO: 156497 - RNA, 19 nt, Homo sapiens
  misc_RNA (1)...(19): siRNA sense strand
ugugaaaccuugggaugau

SEQ ID NO: 156498 - RNA, 19 nt, Homo sapiens
  misc_RNA (1)...(19): siRNA sense strand
cuacguugguauaaucaca

SEQ ID NO: 156499 - RNA, 19 nt, Homo sapiens
  misc_RNA (1)...(19): siRNA sense strand
gauaguaaagaugaugaug

SEQ ID NO: 156500 - RNA, 19 nt, Homo sapiens
  misc_RNA (1)...(19): siRNA sense strand
guguguaguugaagaugau

SEQ ID NO: 156501 - RNA, 19 nt, Homo sapiens
  misc_RNA (1)...(19): siRNA sense strand
acagauauggcgaaauuag

SEQ ID NO: 156502 - RNA, 19 nt, Homo sapiens
  misc_RNA (1)...(19): siRNA sense strand
gaagaugauaaaguuggaa

SEQ ID NO: 156503 - RNA, 19 nt, Homo sapiens
  misc_RNA (1)...(19): siRNA sense strand
gaggagugcgucagaagca

SEQ ID NO: 156504 - RNA, 19 nt, Homo sapiens
  misc_RNA (1)...(19): siRNA sense strand
gucaugcccuacguuggua

SEQ ID NO: 156505 - RNA, 19 nt, Homo sapiens
  misc_RNA (1)...(19): siRNA sense strand
gugaaaccuugggaugaug

SEQ ID NO: 156506 - RNA, 19 nt, Homo sapiens
  misc_RNA (1)...(19): siRNA sense strand
agaacgucuugcacaauau

SEQ ID NO: 156507 - RNA, 19 nt, Homo sapiens
  misc_RNA (1)...(19): siRNA sense strand
aaguggagcuacagauagu

SEQ ID NO: 156508 - RNA, 19 nt, Homo sapiens
  misc_RNA (1)...(19): siRNA sense strand
guggaagacacuacaggaa

SEQ ID NO: 156509 - RNA, 19 nt, Homo sapiens
  misc_RNA (1)...(19): siRNA sense strand
caggagugaagaaagcuuu

SEQ ID NO: 156510 - RNA, 19 nt, Homo sapiens
  misc_RNA (1)...(19): siRNA sense strand
gaaacuucaaauacagugu

SEQ ID NO: 156511 - RNA, 19 nt, Homo sapiens
  misc_RNA (1)...(19): siRNA sense strand
uuagaggagugcgucagaa

SEQ ID NO: 156512 - RNA, 19 nt, Homo sapiens
  misc_RNA (1)...(19): siRNA sense strand
gacagauauggcgaaauua

SEQ ID NO: 156513 - RNA, 19 nt, Homo sapiens
  misc_RNA (1)...(19): siRNA sense strand
agucuuccaucuuacuaga

SEQ ID NO: 156514 - RNA, 19 nt, Homo sapiens
  misc_RNA (1)...(19): siRNA sense strand
cagauaguaaagaugauga

SEQ ID NO: 156515 - RNA, 19 nt, Homo sapiens
  misc_RNA (1)...(19): siRNA sense strand
ggagcuacagauaguaaag

SEQ ID NO: 156516 - RNA, 19 nt, Homo sapiens
  misc_RNA (1)...(19): siRNA sense strand
uacaggaaguggagcuaca

SEQ ID NO: 156517 - RNA, 19 nt, Homo sapiens
  misc_RNA (1)...(19): siRNA sense strand
uaaaguuggaacagauaug

SEQ ID NO: 156518 - RNA, 19 nt, Homo sapiens
  misc_RNA (1)...(19): siRNA sense strand
cagauguggcaguauuuga

SEQ ID NO: 156519 - RNA, 19 nt, Homo sapiens
  misc_RNA (1)...(19): siRNA sense strand
agauguggcaguauuugaa

SEQ ID NO: 156520 - RNA, 19 nt, Homo sapiens
  misc_RNA (1)...(19): siRNA sense strand
aauaugguccugccgaugu

SEQ ID NO: 156521 - RNA, 19 nt, Homo sapiens
  misc_RNA (1)...(19): siRNA sense strand
ugaaaccuugggaugauga

SEQ ID NO: 156522 - RNA, 19 nt, Homo sapiens
  misc_RNA (1)...(19): siRNA sense strand
ugaaucaaagaaagccaaa

SEQ ID NO: 156523 - RNA, 19 nt, Homo sapiens
  misc_RNA (1)...(19): siRNA sense strand
ugaggaggaaagugaagaa

SEQ ID NO: 156524 - RNA, 19 nt, Homo sapiens
  misc_RNA (1)...(19): siRNA sense strand
ggauacggaauuaagaaac

SEQ ID NO: 156525 - RNA, 19 nt, Homo sapiens
  misc_RNA (1)...(19): siRNA sense strand
uggcugcuuucaacaagau

SEQ ID NO: 156526 - RNA, 19 nt, Homo sapiens
  misc_RNA (1)...(19): siRNA sense strand
ugcacaauaugaaucaaag

SEQ ID NO: 156527 - RNA, 19 nt, Homo sapiens
  misc_RNA (1)...(19): siRNA sense strand
augauaaaguuggaacaga

SEQ ID NO: 156528 - RNA, 19 nt, Homo sapiens
  misc_RNA (1)...(19): siRNA sense strand
agacagauauggcgaaauu

SEQ ID NO: 156529 - RNA, 19 nt, Homo sapiens
  misc_RNA (1)...(19): siRNA sense strand
ggaaguggagcuacagaua

SEQ ID NO: 156530 - RNA, 19 nt, Homo sapiens
  misc_RNA (1)...(19): siRNA sense strand
ugccaagucuuccaucuua

SEQ ID NO: 156531 - RNA, 19 nt, Homo sapiens
  misc_RNA (1)...(19): siRNA sense strand
ggaggaaagugaagaagca

SEQ ID NO: 156532 - RNA, 19 nt, Homo sapiens
  misc_RNA (1)...(19): siRNA sense strand
gggcucaucuaaacuaguu

SEQ ID NO: 156533 - RNA, 19 nt, Homo sapiens
  misc_RNA (1)...(19): siRNA sense strand
ccagugggauacggaauua

SEQ ID NO: 156534 - RNA, 19 nt, Homo sapiens
  misc_RNA (1)...(19): siRNA sense strand
ggaagacacuacaggaagu

SEQ ID NO: 156535 - RNA, 19 nt, Homo sapiens
  misc_RNA (1)...(19): siRNA sense strand
caaagaggcuaagggaaga

SEQ ID NO: 156536 - RNA, 19 nt, Homo sapiens
  misc_RNA (1)...(19): siRNA sense strand
gauaaaguuggaacagaua

SEQ ID NO: 156537 - RNA, 19 nt, Homo sapiens
  misc_RNA (1)...(19): siRNA sense strand
aagcagauguggcaguauu

SEQ ID NO: 156538 - RNA, 19 nt, Homo sapiens
  misc_RNA (1)...(19): siRNA sense strand
ggauguggcugcuuucaac

SEQ ID NO: 156539 - RNA, 19 nt, Homo sapiens
  misc_RNA (1)...(19): siRNA sense strand
uccaggugcucaacgauua

SEQ ID NO: 156540 - RNA, 19 nt, Homo sapiens
  misc_RNA (1)...(19): siRNA sense strand
cuacagauaguaaagauga

SEQ ID NO: 156541 - RNA, 19 nt, Homo sapiens
  misc_RNA (1)...(19): siRNA sense strand
gaagaagcaaagaggcuaa

SEQ ID NO: 156542 - RNA, 19 nt, Homo sapiens
  misc_RNA (1)...(19): siRNA sense strand
ccauggauguggcugcuuu

SEQ ID NO: 156543 - RNA, 19 nt, Homo sapiens
  misc_RNA (1)...(19): siRNA sense strand
acaagcagauguggcagua

SEQ ID NO: 156544 - RNA, 19 nt, Homo sapiens
  misc_RNA (1)...(19): siRNA sense strand
gaaguggagcuacagauag

SEQ ID NO: 156545 - RNA, 19 nt, Homo sapiens
  misc_RNA (1)...(19): siRNA sense strand
ugauaaaguuggaacagau

SEQ ID NO: 156546 - RNA, 19 nt, Homo sapiens
  misc_RNA (1)...(19): siRNA sense strand
gauacggaauuaagaaacu

SEQ ID NO: 156547 - RNA, 19 nt, Homo sapiens
  misc_RNA (1)...(19): siRNA sense strand
gguauaaucacaucaaguc

SEQ ID NO: 156548 - RNA, 19 nt, Homo sapiens
  misc_RNA (1)...(19): siRNA sense strand
gaacgucuugcacaauaug

SEQ ID NO: 156549 - RNA, 19 nt, Homo sapiens
  misc_RNA (1)...(19): siRNA sense strand
cacaucaagucuuacgaaa

SEQ ID NO: 156550 - RNA, 19 nt, Homo sapiens
  misc_RNA (1)...(19): siRNA sense strand
gcccuacguugguauaauc

SEQ ID NO: 156551 - RNA, 19 nt, Homo sapiens
  misc_RNA (1)...(19): siRNA sense strand
guaaagaugaugaugacau

SEQ ID NO: 156552 - RNA, 19 nt, Homo sapiens
  misc_RNA (1)...(19): siRNA sense strand
ugaugacauugaccucuuu

SEQ ID NO: 156553 - RNA, 19 nt, Homo sapiens
  misc_RNA (1)...(19): siRNA sense strand
gggaugaugagacagauau

SEQ ID NO: 156554 - RNA, 19 nt, Homo sapiens
  misc_RNA (1)...(19): siRNA sense strand
gaaagugaagaagcaaaga

SEQ ID NO: 156555 - RNA, 19 nt, Homo sapiens
  misc_RNA (1)...(19): siRNA sense strand
ggaaagugaagaagcaaag

SEQ ID NO: 156556 - RNA, 19 nt, Homo sapiens
  misc_RNA (1)...(19): siRNA sense strand
ugaagaugauaaaguugga

SEQ ID NO: 156557 - RNA, 19 nt, Homo sapiens
  misc_RNA (1)...(19): siRNA sense strand
ugagacagauauggcgaaa

SEQ ID NO: 156558 - RNA, 19 nt, Homo sapiens
  misc_RNA (1)...(19): siRNA sense strand
ucacaucaagucuuacgaa

SEQ ID NO: 156559 - RNA, 19 nt, Homo sapiens
  misc_RNA (1)...(19): siRNA sense strand
gggauacggaauuaagaaa

SEQ ID NO: 156560 - RNA, 19 nt, Homo sapiens
  misc_RNA (1)...(19): siRNA sense strand
gcacaauaugaaucaaaga

SEQ ID NO: 156561 - RNA, 19 nt, Homo sapiens
  misc_RNA (1)...(19): siRNA sense strand
acgauuaccuggcggacaa

SEQ ID NO: 156562 - RNA, 19 nt, Homo sapiens
  misc_RNA (1)...(19): siRNA sense strand
caucaagucuuacgaaaag

SEQ ID NO: 156563 - RNA, 19 nt, Homo sapiens
  misc_RNA (1)...(19): siRNA sense strand
gcagauguggcaguauuug

SEQ ID NO: 156564 - RNA, 19 nt, Homo sapiens
  misc_RNA (1)...(19): siRNA sense strand
gacauugaccucuuuggau

SEQ ID NO: 156565 - RNA, 19 nt, Homo sapiens
  misc_RNA (1)...(19): siRNA sense strand
uaguaaagaugaugaugac

SEQ ID NO: 156566 - RNA, 19 nt, Homo sapiens
  misc_RNA (1)...(19): siRNA sense strand
gagcuacagauaguaaaga

SEQ ID NO: 156567 - RNA, 19 nt, Homo sapiens
  misc_RNA (1)...(19): siRNA sense strand
caagucuuccaucuuacua

SEQ ID NO: 156568 - RNA, 19 nt, Homo sapiens
  misc_RNA (1)...(19): siRNA sense strand
ugacauugaccucuuugga

SEQ ID NO: 156569 - RNA, 19 nt, Homo sapiens
  misc_RNA (1)...(19): siRNA sense strand
aagaugaugaugacauuga

SEQ ID NO: 156570 - RNA, 19 nt, Homo sapiens
  misc_RNA (1)...(19): siRNA sense strand
ggagugcgucagaagcauu

SEQ ID NO: 156571 - RNA, 19 nt, Homo sapiens
  misc_RNA (1)...(19): siRNA sense strand
guggagcuacagauaguaa

SEQ ID NO: 156572 - RNA, 19 nt, Homo sapiens
  misc_RNA (1)...(19): siRNA sense strand
cagauauggcgaaauuaga

SEQ ID NO: 156573 - RNA, 19 nt, Homo sapiens
  misc_RNA (1)...(19): siRNA sense strand
ugugaaaccuugggaugau

SEQ ID NO: 156574 - RNA, 19 nt, Homo sapiens
  misc_RNA (1)...(19): siRNA sense strand
cuacguugguauaaucaca

SEQ ID NO: 156575 - RNA, 19 nt, Homo sapiens
  misc_RNA (1)...(19): siRNA sense strand
gauaguaaagaugaugaug

SEQ ID NO: 156576 - RNA, 19 nt, Homo sapiens
  misc_RNA (1)...(19): siRNA sense strand
guguguaguugaagaugau

SEQ ID NO: 156577 - RNA, 19 nt, Homo sapiens
  misc_RNA (1)...(19): siRNA sense strand
acagauauggcgaaauuag

SEQ ID NO: 156578 - RNA, 19 nt, Homo sapiens
  misc_RNA (1)...(19): siRNA sense strand
gaagaugauaaaguuggaa

SEQ ID NO: 156579 - RNA, 19 nt, Homo sapiens
  misc_RNA (1)...(19): siRNA sense strand
gaggagugcgucagaagca

SEQ ID NO: 156580 - RNA, 19 nt, Homo sapiens
  misc_RNA (1)...(19): siRNA sense strand
gucaugcccuacguuggua

SEQ ID NO: 156581 - RNA, 19 nt, Homo sapiens
  misc_RNA (1)...(19): siRNA sense strand
gugaaaccuugggaugaug

SEQ ID NO: 156582 - RNA, 19 nt, Homo sapiens
  misc_RNA (1)...(19): siRNA sense strand
agaacgucuugcacaauau

SEQ ID NO: 156583 - RNA, 19 nt, Homo sapiens
  misc_RNA (1)...(19): siRNA sense strand
aaguggagcuacagauagu

SEQ ID NO: 156584 - RNA, 19 nt, Homo sapiens
  misc_RNA (1)...(19): siRNA sense strand
guggaagacacuacaggaa

SEQ ID NO: 156585 - RNA, 19 nt, Homo sapiens
  misc_RNA (1)...(19): siRNA sense strand
caggagugaagaaagcuuu

SEQ ID NO: 156586 - RNA, 19 nt, Homo sapiens
  misc_RNA (1)...(19): siRNA sense strand
gaaacuucaaauacagugu

SEQ ID NO: 156587 - RNA, 19 nt, Homo sapiens
  misc_RNA (1)...(19): siRNA sense strand
uuagaggagugcgucagaa

SEQ ID NO: 156588 - RNA, 19 nt, Homo sapiens
  misc_RNA (1)...(19): siRNA sense strand
gacagauauggcgaaauua

SEQ ID NO: 156589 - RNA, 19 nt, Homo sapiens
  misc_RNA (1)...(19): siRNA sense strand
agucuuccaucuuacuaga

SEQ ID NO: 156590 - RNA, 19 nt, Homo sapiens
  misc_RNA (1)...(19): siRNA sense strand
cagauaguaaagaugauga

SEQ ID NO: 156591 - RNA, 19 nt, Homo sapiens
  misc_RNA (1)...(19): siRNA sense strand
ggagcuacagauaguaaag

SEQ ID NO: 156592 - RNA, 19 nt, Homo sapiens
  misc_RNA (1)...(19): siRNA sense strand
uacaggaaguggagcuaca

SEQ ID NO: 156593 - RNA, 19 nt, Homo sapiens
  misc_RNA (1)...(19): siRNA sense strand
uaaaguuggaacagauaug

SEQ ID NO: 156594 - RNA, 19 nt, Homo sapiens
  misc_RNA (1)...(19): siRNA sense strand
cagauguggcaguauuuga

SEQ ID NO: 156595 - RNA, 19 nt, Homo sapiens
  misc_RNA (1)...(19): siRNA sense strand
agauguggcaguauuugaa

SEQ ID NO: 156596 - RNA, 19 nt, Homo sapiens
  misc_RNA (1)...(19): siRNA sense strand
aauaugguccugccgaugu

SEQ ID NO: 156597 - RNA, 19 nt, Homo sapiens
  misc_RNA (1)...(19): siRNA sense strand
ugaaaccuugggaugauga

SEQ ID NO: 156598 - RNA, 19 nt, Homo sapiens
  misc_RNA (1)...(19): siRNA sense strand
ugaaucaaagaaagccaaa

SEQ ID NO: 156599 - RNA, 19 nt, Homo sapiens
  misc_RNA (1)...(19): siRNA sense strand
ugaggaggaaagugaagaa

SEQ ID NO: 156600 - RNA, 19 nt, Homo sapiens
  misc_RNA (1)...(19): siRNA sense strand
ggauacggaauuaagaaac

SEQ ID NO: 156601 - RNA, 19 nt, Homo sapiens
  misc_RNA (1)...(19): siRNA sense strand
uggcugcuuucaacaagau

SEQ ID NO: 156602 - RNA, 19 nt, Homo sapiens
  misc_RNA (1)...(19): siRNA sense strand
ugcacaauaugaaucaaag

SEQ ID NO: 156603 - RNA, 19 nt, Homo sapiens
  misc_RNA (1)...(19): siRNA sense strand
augauaaaguuggaacaga

SEQ ID NO: 156604 - RNA, 19 nt, Homo sapiens
  misc_RNA (1)...(19): siRNA sense strand
gagagaacauccagaaauc

SEQ ID NO: 156605 - RNA, 19 nt, Homo sapiens
  misc_RNA (1)...(19): siRNA sense strand
ugacgaggaugaugacauu

SEQ ID NO: 156606 - RNA, 19 nt, Homo sapiens
  misc_RNA (1)...(19): siRNA sense strand
caaacuuccuagcacauga

SEQ ID NO: 156607 - RNA, 19 nt, Homo sapiens
  misc_RNA (1)...(19): siRNA sense strand
ucgacaaguucaaauauga

SEQ ID NO: 156608 - RNA, 19 nt, Homo sapiens
  misc_RNA (1)...(19): siRNA sense strand
uaucgcagcuuucaacaag

SEQ ID NO: 156609 - RNA, 19 nt, Homo sapiens
  misc_RNA (1)...(19): siRNA sense strand
ccagagagaacauccagaa

SEQ ID NO: 156610 - RNA, 19 nt, Homo sapiens
  misc_RNA (1)...(19): siRNA sense strand
ccacagacccagcacguau

SEQ ID NO: 156611 - RNA, 19 nt, Homo sapiens
  misc_RNA (1)...(19): siRNA sense strand
caaauaugacgacgcagaa

SEQ ID NO: 156612 - RNA, 19 nt, Homo sapiens
  misc_RNA (1)...(19): siRNA sense strand
gaagaucugguucgacaag

SEQ ID NO: 156613 - RNA, 19 nt, Homo sapiens
  misc_RNA (1)...(19): siRNA sense strand
ugaugacauugaccuguuu

SEQ ID NO: 156614 - RNA, 19 nt, Homo sapiens
  misc_RNA (1)...(19): siRNA sense strand
agagagaacauccagaaau

SEQ ID NO: 156615 - RNA, 19 nt, Homo sapiens
  misc_RNA (1)...(19): siRNA sense strand
gguucgacaaguucaaaua

SEQ ID NO: 156616 - RNA, 19 nt, Homo sapiens
  misc_RNA (1)...(19): siRNA sense strand
gagucugcguggcguggua

SEQ ID NO: 156617 - RNA, 19 nt, Homo sapiens
  misc_RNA (1)...(19): siRNA sense strand
ggcaguacgcggagaagaa

SEQ ID NO: 156618 - RNA, 19 nt, Homo sapiens
  misc_RNA (1)...(19): siRNA sense strand
gaucugguucgacaaguuc

SEQ ID NO: 156619 - RNA, 19 nt, Homo sapiens
  misc_RNA (1)...(19): siRNA sense strand
cggagaagaaggccaagaa

SEQ ID NO: 156620 - RNA, 19 nt, Homo sapiens
  misc_RNA (1)...(19): siRNA sense strand
cagaggaugacgaggauga

SEQ ID NO: 156621 - RNA, 19 nt, Homo sapiens
  misc_RNA (1)...(19): siRNA sense strand
gagcucgucguccggauug

SEQ ID NO: 156622 - RNA, 19 nt, Homo sapiens
  misc_RNA (1)...(19): siRNA sense strand
guucgacaaguucaaauau

SEQ ID NO: 156623 - RNA, 19 nt, Homo sapiens
  misc_RNA (1)...(19): siRNA sense strand
ggagaagaaggccaagaag

SEQ ID NO: 156624 - RNA, 19 nt, Homo sapiens
  misc_RNA (1)...(19): siRNA sense strand
gugucgauaucgcagcuuu

SEQ ID NO: 156625 - RNA, 19 nt, Homo sapiens
  misc_RNA (1)...(19): siRNA sense strand
uccggaagcuacagauuca

SEQ ID NO: 156626 - RNA, 19 nt, Homo sapiens
  misc_RNA (1)...(19): siRNA sense strand
cacaugagaagaucugguu

SEQ ID NO: 156627 - RNA, 19 nt, Homo sapiens
  misc_RNA (1)...(19): siRNA sense strand
ggaaguggagaaccagagu

SEQ ID NO: 156628 - RNA, 19 nt, Homo sapiens
  misc_RNA (1)...(19): siRNA sense strand
ucgcagcuuucaacaagau

SEQ ID NO: 156629 - RNA, 19 nt, Homo sapiens
  misc_RNA (1)...(19): siRNA sense strand
gagauucuacgagcagaug

SEQ ID NO: 156630 - RNA, 19 nt, Homo sapiens
  misc_RNA (1)...(19): siRNA sense strand
acaaugaggaggaggacaa

SEQ ID NO: 156631 - RNA, 19 nt, Homo sapiens
  misc_RNA (1)...(19): siRNA sense strand
cagagagaacauccagaaa

SEQ ID NO: 156632 - RNA, 19 nt, Homo sapiens
  misc_RNA (1)...(19): siRNA sense strand
ccacaccagcagaggauga

SEQ ID NO: 156633 - RNA, 19 nt, Homo sapiens
  misc_RNA (1)...(19): siRNA sense strand
gcaguacgcggagaagaag

SEQ ID NO: 156634 - RNA, 19 nt, Homo sapiens
  misc_RNA (1)...(19): siRNA sense strand
agaucugguucgacaaguu

SEQ ID NO: 156635 - RNA, 19 nt, Homo sapiens
  misc_RNA (1)...(19): siRNA sense strand
augaugacauugaccuguu

SEQ ID NO: 156636 - RNA, 19 nt, Homo sapiens
  misc_RNA (1)...(19): siRNA sense strand
cgaggaugaugacauugac

SEQ ID NO: 156637 - RNA, 19 nt, Homo sapiens
  misc_RNA (1)...(19): siRNA sense strand
cgauaucgcagcuuucaac

SEQ ID NO: 156638 - RNA, 19 nt, Homo sapiens
  misc_RNA (1)...(19): siRNA sense strand
gagagaacauccagaaauc

SEQ ID NO: 156639 - RNA, 19 nt, Homo sapiens
  misc_RNA (1)...(19): siRNA sense strand
ugacgaggaugaugacauu

SEQ ID NO: 156640 - RNA, 19 nt, Homo sapiens
  misc_RNA (1)...(19): siRNA sense strand
caaacuuccuagcacauga

SEQ ID NO: 156641 - RNA, 19 nt, Homo sapiens
  misc_RNA (1)...(19): siRNA sense strand
ucgacaaguucaaauauga

SEQ ID NO: 156642 - RNA, 19 nt, Homo sapiens
  misc_RNA (1)...(19): siRNA sense strand
uaucgcagcuuucaacaag

SEQ ID NO: 156643 - RNA, 19 nt, Homo sapiens
  misc_RNA (1)...(19): siRNA sense strand
ccagagagaacauccagaa

SEQ ID NO: 156644 - RNA, 19 nt, Homo sapiens
  misc_RNA (1)...(19): siRNA sense strand
ccacagacccagcacguau

SEQ ID NO: 156645 - RNA, 19 nt, Homo sapiens
  misc_RNA (1)...(19): siRNA sense strand
caaauaugacgacgcagaa

SEQ ID NO: 156646 - RNA, 19 nt, Homo sapiens
  misc_RNA (1)...(19): siRNA sense strand
gaagaucugguucgacaag

SEQ ID NO: 156647 - RNA, 19 nt, Homo sapiens
  misc_RNA (1)...(19): siRNA sense strand
ugaugacauugaccuguuu

SEQ ID NO: 156648 - RNA, 19 nt, Homo sapiens
  misc_RNA (1)...(19): siRNA sense strand
agagagaacauccagaaau

SEQ ID NO: 156649 - RNA, 19 nt, Homo sapiens
  misc_RNA (1)...(19): siRNA sense strand
gguucgacaaguucaaaua

SEQ ID NO: 156650 - RNA, 19 nt, Homo sapiens
  misc_RNA (1)...(19): siRNA sense strand
gagucugcguggcguggua

SEQ ID NO: 156651 - RNA, 19 nt, Homo sapiens
  misc_RNA (1)...(19): siRNA sense strand
ggcaguacgcggagaagaa

SEQ ID NO: 156652 - RNA, 19 nt, Homo sapiens
  misc_RNA (1)...(19): siRNA sense strand
gaucugguucgacaaguuc

SEQ ID NO: 156653 - RNA, 19 nt, Homo sapiens
  misc_RNA (1)...(19): siRNA sense strand
cggagaagaaggccaagaa

SEQ ID NO: 156654 - RNA, 19 nt, Homo sapiens
  misc_RNA (1)...(19): siRNA sense strand
cagaggaugacgaggauga

SEQ ID NO: 156655 - RNA, 19 nt, Homo sapiens
  misc_RNA (1)...(19): siRNA sense strand
gagcucgucguccggauug

SEQ ID NO: 156656 - RNA, 19 nt, Homo sapiens
  misc_RNA (1)...(19): siRNA sense strand
guucgacaaguucaaauau

SEQ ID NO: 156657 - RNA, 19 nt, Homo sapiens
  misc_RNA (1)...(19): siRNA sense strand
ggagaagaaggccaagaag

SEQ ID NO: 156658 - RNA, 19 nt, Homo sapiens
  misc_RNA (1)...(19): siRNA sense strand
gugucgauaucgcagcuuu

SEQ ID NO: 156659 - RNA, 19 nt, Homo sapiens
  misc_RNA (1)...(19): siRNA sense strand
uccggaagcuacagauuca

SEQ ID NO: 156660 - RNA, 19 nt, Homo sapiens
  misc_RNA (1)...(19): siRNA sense strand
ggaaguggagaaccagagu

SEQ ID NO: 156661 - RNA, 19 nt, Homo sapiens
  misc_RNA (1)...(19): siRNA sense strand
cacaugagaagaucugguu

SEQ ID NO: 156662 - RNA, 19 nt, Homo sapiens
  misc_RNA (1)...(19): siRNA sense strand
ucgcagcuuucaacaagau

SEQ ID NO: 156663 - RNA, 19 nt, Homo sapiens
  misc_RNA (1)...(19): siRNA sense strand
gagauucuacgagcagaug

SEQ ID NO: 156664 - RNA, 19 nt, Homo sapiens
  misc_RNA (1)...(19): siRNA sense strand
acaaugaggaggaggacaa

SEQ ID NO: 156665 - RNA, 19 nt, Homo sapiens
  misc_RNA (1)...(19): siRNA sense strand
cagagagaacauccagaaa

SEQ ID NO: 156666 - RNA, 19 nt, Homo sapiens
  misc_RNA (1)...(19): siRNA sense strand
ccacaccagcagaggauga

SEQ ID NO: 156667 - RNA, 19 nt, Homo sapiens
  misc_RNA (1)...(19): siRNA sense strand
gcaguacgcggagaagaag

SEQ ID NO: 156668 - RNA, 19 nt, Homo sapiens
  misc_RNA (1)...(19): siRNA sense strand
agaucugguucgacaaguu

SEQ ID NO: 156669 - RNA, 19 nt, Homo sapiens
  misc_RNA (1)...(19): siRNA sense strand
augaugacauugaccuguu

SEQ ID NO: 156670 - RNA, 19 nt, Homo sapiens
  misc_RNA (1)...(19): siRNA sense strand
cgaggaugaugacauugac

SEQ ID NO: 156671 - RNA, 19 nt, Homo sapiens
  misc_RNA (1)...(19): siRNA sense strand
cgauaucgcagcuuucaac

SEQ ID NO: 156672 - RNA, 19 nt, Homo sapiens
  misc_RNA (1)...(19): siRNA sense strand
ggaagaagguccugucuaa

SEQ ID NO: 156673 - RNA, 19 nt, Homo sapiens
  misc_RNA (1)...(19): siRNA sense strand
gaacuuugauggcuacagu

SEQ ID NO: 156674 - RNA, 19 nt, Homo sapiens
  misc_RNA (1)...(19): siRNA sense strand
ccaaaggguucaagagaug

SEQ ID NO: 156675 - RNA, 19 nt, Homo sapiens
  misc_RNA (1)...(19): siRNA sense strand
caaauggaccgcugaaguu

SEQ ID NO: 156676 - RNA, 19 nt, Homo sapiens
  misc_RNA (1)...(19): siRNA sense strand
gcacaaacaccaaggauac

SEQ ID NO: 156677 - RNA, 19 nt, Homo sapiens
  misc_RNA (1)...(19): siRNA sense strand
ccgcugaaguucucugaaa

SEQ ID NO: 156678 - RNA, 19 nt, Homo sapiens
  misc_RNA (1)...(19): siRNA sense strand
caacaaauagcuguaugaa

SEQ ID NO: 156679 - RNA, 19 nt, Homo sapiens
  misc_RNA (1)...(19): siRNA sense strand
gaagaagguccugucuaaa

SEQ ID NO: 156680 - RNA, 19 nt, Homo sapiens
  misc_RNA (1)...(19): siRNA sense strand
cagaugacaccguacauga

SEQ ID NO: 156681 - RNA, 19 nt, Homo sapiens
  misc_RNA (1)...(19): siRNA sense strand
gucuaaagcucaaagucuu

SEQ ID NO: 156682 - RNA, 19 nt, Homo sapiens
  misc_RNA (1)...(19): siRNA sense strand
gcuacgcugucuacuggaa

SEQ ID NO: 156683 - RNA, 19 nt, Homo sapiens
  misc_RNA (1)...(19): siRNA sense strand
cgagaacgcggcacaaaca

SEQ ID NO: 156684 - RNA, 19 nt, Homo sapiens
  misc_RNA (1)...(19): siRNA sense strand
ccaaauggaccgcugaagu

SEQ ID NO: 156685 - RNA, 19 nt, Homo sapiens
  misc_RNA (1)...(19): siRNA sense strand
gaauguaaccggccucacu

SEQ ID NO: 156686 - RNA, 19 nt, Homo sapiens
  misc_RNA (1)...(19): siRNA sense strand
gauguuaacgacaaaguag

SEQ ID NO: 156687 - RNA, 19 nt, Homo sapiens
  misc_RNA (1)...(19): siRNA sense strand
uucaagagaugggaaugua

SEQ ID NO: 156688 - RNA, 19 nt, Homo sapiens
  misc_RNA (1)...(19): siRNA sense strand
cauuagaaccagcagauga

SEQ ID NO: 156689 - RNA, 19 nt, Homo sapiens
  misc_RNA (1)...(19): siRNA sense strand
ccaacaaauagcuguauga

SEQ ID NO: 156690 - RNA, 19 nt, Homo sapiens
  misc_RNA (1)...(19): siRNA sense strand
cggccucacucuccaaaug

SEQ ID NO: 156691 - RNA, 19 nt, Homo sapiens
  misc_RNA (1)...(19): siRNA sense strand
cuacaucuccucugcaauc

SEQ ID NO: 156692 - RNA, 19 nt, Homo sapiens
  misc_RNA (1)...(19): siRNA sense strand
gcagaugacaccguacaug

SEQ ID NO: 156693 - RNA, 19 nt, Homo sapiens
  misc_RNA (1)...(19): siRNA sense strand
ggcacaaacaccaaggaua

SEQ ID NO: 156694 - RNA, 19 nt, Homo sapiens
  misc_RNA (1)...(19): siRNA sense strand
gauguugacgcugguguuu

SEQ ID NO: 156695 - RNA, 19 nt, Homo sapiens
  misc_RNA (1)...(19): siRNA sense strand
ccauauugaugucuguauc

SEQ ID NO: 156696 - RNA, 19 nt, Homo sapiens
  misc_RNA (1)...(19): siRNA sense strand
gaugacaccguacaugagu

SEQ ID NO: 156697 - RNA, 19 nt, Homo sapiens
  misc_RNA (1)...(19): siRNA sense strand
ucaagagaugggaauguaa

SEQ ID NO: 156698 - RNA, 19 nt, Homo sapiens
  misc_RNA (1)...(19): siRNA sense strand
ucucuaggauuugaauuca

SEQ ID NO: 156699 - RNA, 19 nt, Homo sapiens
  misc_RNA (1)...(19): siRNA sense strand
aagaagguccugucuaaag

SEQ ID NO: 156700 - RNA, 19 nt, Homo sapiens
  misc_RNA (1)...(19): siRNA sense strand
ugacuaccauauugauguc

SEQ ID NO: 156701 - RNA, 19 nt, Homo sapiens
  misc_RNA (1)...(19): siRNA sense strand
gguccugucuaaagcucaa

SEQ ID NO: 156702 - RNA, 19 nt, Homo sapiens
  misc_RNA (1)...(19): siRNA sense strand
uccaaaggguucaagagau

SEQ ID NO: 156703 - RNA, 19 nt, Homo sapiens
  misc_RNA (1)...(19): siRNA sense strand
ucuacauggugaacuuuga

SEQ ID NO: 156704 - RNA, 19 nt, Homo sapiens
  misc_RNA (1)...(19): siRNA sense strand
agauaagacugagcgcuau

SEQ ID NO: 156705 - RNA, 19 nt, Homo sapiens
  misc_RNA (1)...(19): siRNA sense strand
cgauguuaacgacaaagua

SEQ ID NO: 156706 - RNA, 19 nt, Homo sapiens
  misc_RNA (1)...(19): siRNA sense strand
aacuauagguguucaugau

SEQ ID NO: 156707 - RNA, 19 nt, Homo sapiens
  misc_RNA (1)...(19): siRNA sense strand
aaucccagauaauggaaga

SEQ ID NO: 156708 - RNA, 19 nt, Homo sapiens
  misc_RNA (1)...(19): siRNA sense strand
aaacuauagguguucauga

SEQ ID NO: 156709 - RNA, 19 nt, Homo sapiens
  misc_RNA (1)...(19): siRNA sense strand
gugacuaccauauugaugu

SEQ ID NO: 156710 - RNA, 19 nt, Homo sapiens
  misc_RNA (1)...(19): siRNA sense strand
gcaaucccagauaauggaa

SEQ ID NO: 156711 - RNA, 19 nt, Homo sapiens
  misc_RNA (1)...(19): siRNA sense strand
gauaagacugagcgcuaug

SEQ ID NO: 156712 - RNA, 19 nt, Homo sapiens
  misc_RNA (1)...(19): siRNA sense strand
gaccaacaaauagcuguau

SEQ ID NO: 156713 - RNA, 19 nt, Homo sapiens
  misc_RNA (1)...(19): siRNA sense strand
caagagaugggaauguaac

SEQ ID NO: 156714 - RNA, 19 nt, Homo sapiens
  misc_RNA (1)...(19): siRNA sense strand
agaagguccugucuaaagc

SEQ ID NO: 156715 - RNA, 19 nt, Homo sapiens
  misc_RNA (1)...(19): siRNA sense strand
ccagauaauggaagaaggu

SEQ ID NO: 156716 - RNA, 19 nt, Homo sapiens
  misc_RNA (1)...(19): siRNA sense strand
cgacaaaguagaaaauuca

SEQ ID NO: 156717 - RNA, 19 nt, Homo sapiens
  misc_RNA (1)...(19): siRNA sense strand
ucaaugacuaccuggaugu

SEQ ID NO: 156718 - RNA, 19 nt, Homo sapiens
  misc_RNA (1)...(19): siRNA sense strand
gcgaugcuuuugacauuau

SEQ ID NO: 156719 - RNA, 19 nt, Homo sapiens
  misc_RNA (1)...(19): siRNA sense strand
ucccagaagauaagacuga

SEQ ID NO: 156720 - RNA, 19 nt, Homo sapiens
  misc_RNA (1)...(19): siRNA sense strand
uaucaaugacuaccuggau

SEQ ID NO: 156721 - RNA, 19 nt, Homo sapiens
  misc_RNA (1)...(19): siRNA sense strand
ggcgagaacgcggcacaaa

SEQ ID NO: 156722 - RNA, 19 nt, Homo sapiens
  misc_RNA (1)...(19): siRNA sense strand
gcucuucacucccuuuucu

SEQ ID NO: 156723 - RNA, 19 nt, Homo sapiens
  misc_RNA (1)...(19): siRNA sense strand
uguugacgcugguguuucu

SEQ ID NO: 156724 - RNA, 19 nt, Homo sapiens
  misc_RNA (1)...(19): siRNA sense strand
gaaggaagcaauucucuua

SEQ ID NO: 156725 - RNA, 19 nt, Homo sapiens
  misc_RNA (1)...(19): siRNA sense strand
gaaaggacaugguuagaau

SEQ ID NO: 156726 - RNA, 19 nt, Homo sapiens
  misc_RNA (1)...(19): siRNA sense strand
gcagaaacuuugcaaauug

SEQ ID NO: 156727 - RNA, 19 nt, Homo sapiens
  misc_RNA (1)...(19): siRNA sense strand
ggaagcaauucucuuauuu

SEQ ID NO: 156728 - RNA, 19 nt, Homo sapiens
  misc_RNA (1)...(19): siRNA sense strand
caagagagaguauguaaua

SEQ ID NO: 156729 - RNA, 19 nt, Homo sapiens
  misc_RNA (1)...(19): siRNA sense strand
gggauucacugucuugaua

SEQ ID NO: 156730 - RNA, 19 nt, Homo sapiens
  misc_RNA (1)...(19): siRNA sense strand
gagcgaagcuuucauaugc

SEQ ID NO: 156731 - RNA, 19 nt, Homo sapiens
  misc_RNA (1)...(19): siRNA sense strand
gaauaacgauugacuucuu

SEQ ID NO: 156732 - RNA, 19 nt, Homo sapiens
  misc_RNA (1)...(19): siRNA sense strand
gaaguacugugaagauguu

SEQ ID NO: 156733 - RNA, 19 nt, Homo sapiens
  misc_RNA (1)...(19): siRNA sense strand
caacaggaaggaaucauua

SEQ ID NO: 156734 - RNA, 19 nt, Homo sapiens
  misc_RNA (1)...(19): siRNA sense strand
ccuaucagcuaacccauua

SEQ ID NO: 156735 - RNA, 19 nt, Homo sapiens
  misc_RNA (1)...(19): siRNA sense strand
ggaaaacuauguucugaua

SEQ ID NO: 156736 - RNA, 19 nt, Homo sapiens
  misc_RNA (1)...(19): siRNA sense strand
gaaaugggaauucuacuug

SEQ ID NO: 156737 - RNA, 19 nt, Homo sapiens
  misc_RNA (1)...(19): siRNA sense strand
gcuaguggcugaaaucaug

SEQ ID NO: 156738 - RNA, 19 nt, Homo sapiens
  misc_RNA (1)...(19): siRNA sense strand
gagagaguauguaauauag

SEQ ID NO: 156739 - RNA, 19 nt, Homo sapiens
  misc_RNA (1)...(19): siRNA sense strand
gcauguauauugaagcauu

SEQ ID NO: 156740 - RNA, 19 nt, Homo sapiens
  misc_RNA (1)...(19): siRNA sense strand
ggaaauaguaucuuuagga

SEQ ID NO: 156741 - RNA, 19 nt, Homo sapiens
  misc_RNA (1)...(19): siRNA sense strand
caagaggacuggcaaagau

SEQ ID NO: 156742 - RNA, 19 nt, Homo sapiens
  misc_RNA (1)...(19): siRNA sense strand
aaucauggcuguacucuug

SEQ ID NO: 156743 - RNA, 19 nt, Homo sapiens
  misc_RNA (1)...(19): siRNA sense strand
gaccguaucuucuauucaa

SEQ ID NO: 156744 - RNA, 19 nt, Homo sapiens
  misc_RNA (1)...(19): siRNA sense strand
uaaccuccauucaucauuu

SEQ ID NO: 156745 - RNA, 19 nt, Homo sapiens
  misc_RNA (1)...(19): siRNA sense strand
gugaagauguuaaugaaug

SEQ ID NO: 156746 - RNA, 19 nt, Homo sapiens
  misc_RNA (1)...(19): siRNA sense strand
ugauguaggucacccauuu

SEQ ID NO: 156747 - RNA, 19 nt, Homo sapiens
  misc_RNA (1)...(19): siRNA sense strand
gauggugugugcauguaua

SEQ ID NO: 156748 - RNA, 19 nt, Homo sapiens
  misc_RNA (1)...(19): siRNA sense strand
uagcaguguuugaggauua

SEQ ID NO: 156749 - RNA, 19 nt, Homo sapiens
  misc_RNA (1)...(19): siRNA sense strand
gcuaugccaucaguaauaa

SEQ ID NO: 156750 - RNA, 19 nt, Homo sapiens
  misc_RNA (1)...(19): siRNA sense strand
gaagaugaccaccacuauu

SEQ ID NO: 156751 - RNA, 19 nt, Homo sapiens
  misc_RNA (1)...(19): siRNA sense strand
uaacagcugugucauugga

SEQ ID NO: 156752 - RNA, 19 nt, Homo sapiens
  misc_RNA (1)...(19): siRNA sense strand
gaucccugcuuauaucaaa

SEQ ID NO: 156753 - RNA, 19 nt, Homo sapiens
  misc_RNA (1)...(19): siRNA sense strand
gagcagaaacuuugcaaau

SEQ ID NO: 156754 - RNA, 19 nt, Homo sapiens
  misc_RNA (1)...(19): siRNA sense strand
cagaaacuuugcaaauuga

SEQ ID NO: 156755 - RNA, 19 nt, Homo sapiens
  misc_RNA (1)...(19): siRNA sense strand
aaugccagcugcacaaaua

SEQ ID NO: 156756 - RNA, 19 nt, Homo sapiens
  misc_RNA (1)...(19): siRNA sense strand
ccauggaaauaguaucuuu

SEQ ID NO: 156757 - RNA, 19 nt, Homo sapiens
  misc_RNA (1)...(19): siRNA sense strand
aauaacagcugugucauug

SEQ ID NO: 156758 - RNA, 19 nt, Homo sapiens
  misc_RNA (1)...(19): siRNA sense strand
ggaaggaaucauuacagua

SEQ ID NO: 156759 - RNA, 19 nt, Homo sapiens
  misc_RNA (1)...(19): siRNA sense strand
gagaguauguaauauagag

SEQ ID NO: 156760 - RNA, 19 nt, Homo sapiens
  misc_RNA (1)...(19): siRNA sense strand
acacagaaggaaccaauua

SEQ ID NO: 156761 - RNA, 19 nt, Homo sapiens
  misc_RNA (1)...(19): siRNA sense strand
agagagagcuaauauggau

SEQ ID NO: 156762 - RNA, 19 nt, Homo sapiens
  misc_RNA (1)...(19): siRNA sense strand
cauuggaugugcuugauaa

SEQ ID NO: 156763 - RNA, 19 nt, Homo sapiens
  misc_RNA (1)...(19): siRNA sense strand
gaccaccacuauuccguaa

SEQ ID NO: 156764 - RNA, 19 nt, Homo sapiens
  misc_RNA (1)...(19): siRNA sense strand
gagaugggauucacugucu

SEQ ID NO: 156765 - RNA, 19 nt, Homo sapiens
  misc_RNA (1)...(19): siRNA sense strand
ggauagagagagcuaauau

SEQ ID NO: 156766 - RNA, 19 nt, Homo sapiens
  misc_RNA (1)...(19): siRNA sense strand
ggcaagaccuccagucaca

SEQ ID NO: 156767 - RNA, 19 nt, Homo sapiens
  misc_RNA (1)...(19): siRNA sense strand
ggaaaggacaugguuagaa

SEQ ID NO: 156768 - RNA, 19 nt, Homo sapiens
  misc_RNA (1)...(19): siRNA sense strand
cagcauaauuuguuugcaa

SEQ ID NO: 156769 - RNA, 19 nt, Homo sapiens
  misc_RNA (1)...(19): siRNA sense strand
gaagcaauucucuuauuug

SEQ ID NO: 156770 - RNA, 19 nt, Homo sapiens
  misc_RNA (1)...(19): siRNA sense strand
gaaauaauucccacauucu

SEQ ID NO: 156771 - RNA, 19 nt, Homo sapiens
  misc_RNA (1)...(19): siRNA sense strand
gaaauagugacucugaaug

SEQ ID NO: 156772 - RNA, 19 nt, Homo sapiens
  misc_RNA (1)...(19): siRNA sense strand
uaagaaauagugacucuga

SEQ ID NO: 156773 - RNA, 19 nt, Homo sapiens
  misc_RNA (1)...(19): siRNA sense strand
gcacgugcccuguaggauu

SEQ ID NO: 156774 - RNA, 19 nt, Homo sapiens
  misc_RNA (1)...(19): siRNA sense strand
caacagagaaggaagcaau

SEQ ID NO: 156775 - RNA, 19 nt, Homo sapiens
  misc_RNA (1)...(19): siRNA sense strand
uacagaaucucaacacaug

SEQ ID NO: 156776 - RNA, 19 nt, Homo sapiens
  misc_RNA (1)...(19): siRNA sense strand
gaucuaaagaaccaaguaa

SEQ ID NO: 156777 - RNA, 19 nt, Homo sapiens
  misc_RNA (1)...(19): siRNA sense strand
ggaaggagugauuuaaaug

SEQ ID NO: 156778 - RNA, 19 nt, Homo sapiens
  misc_RNA (1)...(19): siRNA sense strand
gcuguacucuuggguguaa

SEQ ID NO: 156779 - RNA, 19 nt, Homo sapiens
  misc_RNA (1)...(19): siRNA sense strand
gcaaauugaggaaaggaaa

SEQ ID NO: 156780 - RNA, 19 nt, Homo sapiens
  misc_RNA (1)...(19): siRNA sense strand
cagaaggaaccaauuauga

SEQ ID NO: 156781 - RNA, 19 nt, Homo sapiens
  misc_RNA (1)...(19): siRNA sense strand
gaagacuuacccagaauga

SEQ ID NO: 156782 - RNA, 19 nt, Homo sapiens
  misc_RNA (1)...(19): siRNA sense strand
ucaaaacgccgaagacuua

SEQ ID NO: 156783 - RNA, 19 nt, Homo sapiens
  misc_RNA (1)...(19): siRNA sense strand
ggaaaugggaauucuacuu

SEQ ID NO: 156784 - RNA, 19 nt, Homo sapiens
  misc_RNA (1)...(19): siRNA sense strand
gcugcucacucuuaucauu

SEQ ID NO: 156785 - RNA, 19 nt, Homo sapiens
  misc_RNA (1)...(19): siRNA sense strand
gaaaauaacagcuguguca

SEQ ID NO: 156786 - RNA, 19 nt, Homo sapiens
  misc_RNA (1)...(19): siRNA sense strand
ucucagugaucauggauuu

SEQ ID NO: 156787 - RNA, 19 nt, Homo sapiens
  misc_RNA (1)...(19): siRNA sense strand
ggacugauacagggauuaa

SEQ ID NO: 156788 - RNA, 19 nt, Homo sapiens
  misc_RNA (1)...(19): siRNA sense strand
ccugcacccuucuuaauuu

SEQ ID NO: 156789 - RNA, 19 nt, Homo sapiens
  misc_RNA (1)...(19): siRNA sense strand
ccaccacuauuccguaaga

SEQ ID NO: 156790 - RNA, 19 nt, Homo sapiens
  misc_RNA (1)...(19): siRNA sense strand
gggagaggaugccacaugu

SEQ ID NO: 156791 - RNA, 19 nt, Homo sapiens
  misc_RNA (1)...(19): siRNA sense strand
gaaagccucagaugggaaa

SEQ ID NO: 156792 - RNA, 19 nt, Homo sapiens
  misc_RNA (1)...(19): siRNA sense strand
cgauugacuucuuaacuga

SEQ ID NO: 156793 - RNA, 19 nt, Homo sapiens
  misc_RNA (1)...(19): siRNA sense strand
ugaaaguucuucccuccaa

SEQ ID NO: 156794 - RNA, 19 nt, Homo sapiens
  misc_RNA (1)...(19): siRNA sense strand
gccgaagacuuacccagaa

SEQ ID NO: 156795 - RNA, 19 nt, Homo sapiens
  misc_RNA (1)...(19): siRNA sense strand
ggaagaugaccaccacuau

SEQ ID NO: 156796 - RNA, 19 nt, Homo sapiens
  misc_RNA (1)...(19): siRNA sense strand
gccaguaguuucaaaauuu

SEQ ID NO: 156797 - RNA, 19 nt, Homo sapiens
  misc_RNA (1)...(19): siRNA sense strand
guucugauauagaugaaug

SEQ ID NO: 156798 - RNA, 19 nt, Homo sapiens
  misc_RNA (1)...(19): siRNA sense strand
gaaccaaguaacaccauug

SEQ ID NO: 156799 - RNA, 19 nt, Homo sapiens
  misc_RNA (1)...(19): siRNA sense strand
gcccugaaguggauagaga

SEQ ID NO: 156800 - RNA, 19 nt, Homo sapiens
  misc_RNA (1)...(19): siRNA sense strand
ggcaagagagaguauguaa

SEQ ID NO: 156801 - RNA, 19 nt, Homo sapiens
  misc_RNA (1)...(19): siRNA sense strand
gguaauggagcgaagcuuu

SEQ ID NO: 156802 - RNA, 19 nt, Homo sapiens
  misc_RNA (1)...(19): siRNA sense strand
ggacugauuugcccugacu

SEQ ID NO: 156803 - RNA, 19 nt, Homo sapiens
  misc_RNA (1)...(19): siRNA sense strand
guggugaaguugaucuaaa

SEQ ID NO: 156804 - RNA, 19 nt, Homo sapiens
  misc_RNA (1)...(19): siRNA sense strand
agauuauucuggacugaua

SEQ ID NO: 156805 - RNA, 19 nt, Homo sapiens
  misc_RNA (1)...(19): siRNA sense strand
uggaaggagugauuuaaau

SEQ ID NO: 156806 - RNA, 19 nt, Homo sapiens
  misc_RNA (1)...(19): siRNA sense strand
ggacuggauuggccguaga

SEQ ID NO: 156807 - RNA, 19 nt, Homo sapiens
  misc_RNA (1)...(19): siRNA sense strand
gagguucuguccacauuag

SEQ ID NO: 156808 - RNA, 19 nt, Homo sapiens
  misc_RNA (1)...(19): siRNA sense strand
gauauacuuugcccauaca

SEQ ID NO: 156809 - RNA, 19 nt, Homo sapiens
  misc_RNA (1)...(19): siRNA sense strand
cacgugcccuguaggauuu

SEQ ID NO: 156810 - RNA, 19 nt, Homo sapiens
  misc_RNA (1)...(19): siRNA sense strand
aaacauccaacacagcaua

SEQ ID NO: 156811 - RNA, 19 nt, Homo sapiens
  misc_RNA (1)...(19): siRNA sense strand
cucagaagcugcuaucgaa

SEQ ID NO: 156812 - RNA, 19 nt, Homo sapiens
  misc_RNA (1)...(19): siRNA sense strand
gagaggaugccacauguca

SEQ ID NO: 156813 - RNA, 19 nt, Homo sapiens
  misc_RNA (1)...(19): siRNA sense strand
gaaaucauggugucagauc

SEQ ID NO: 156814 - RNA, 19 nt, Homo sapiens
  misc_RNA (1)...(19): siRNA sense strand
ccaguggaauaacgauuga

SEQ ID NO: 156815 - RNA, 19 nt, Homo sapiens
  misc_RNA (1)...(19): siRNA sense strand
gaucaugacccuguggaaa

SEQ ID NO: 156816 - RNA, 19 nt, Homo sapiens
  misc_RNA (1)...(19): siRNA sense strand
aggaagcaauucucuuauu

SEQ ID NO: 156817 - RNA, 19 nt, Homo sapiens
  misc_RNA (1)...(19): siRNA sense strand
gauucacugucuugauauu

SEQ ID NO: 156818 - RNA, 19 nt, Homo sapiens
  misc_RNA (1)...(19): siRNA sense strand
agacuagagugucagaaga

SEQ ID NO: 156819 - RNA, 19 nt, Homo sapiens
  misc_RNA (1)...(19): siRNA sense strand
gauauucgacacaugcauu

SEQ ID NO: 156820 - RNA, 19 nt, Homo sapiens
  misc_RNA (1)...(19): siRNA sense strand
cuuauuugcuccugugauu

SEQ ID NO: 156821 - RNA, 19 nt, Homo sapiens
  misc_RNA (1)...(19): siRNA sense strand
caagcagucugugauugaa

SEQ ID NO: 156822 - RNA, 19 nt, Homo sapiens
  misc_RNA (1)...(19): siRNA sense strand
cagaagauaacauuacaga

SEQ ID NO: 156823 - RNA, 19 nt, Homo sapiens
  misc_RNA (1)...(19): siRNA sense strand
guuggcagguggugaaguu

SEQ ID NO: 156824 - RNA, 19 nt, Homo sapiens
  misc_RNA (1)...(19): siRNA sense strand
ggacaugacagcaaccuuu

SEQ ID NO: 156825 - RNA, 19 nt, Homo sapiens
  misc_RNA (1)...(19): siRNA sense strand
ggacaagaaagcagacaaa

SEQ ID NO: 156826 - RNA, 19 nt, Homo sapiens
  misc_RNA (1)...(19): siRNA sense strand
ccacagggcuuucggacau

SEQ ID NO: 156827 - RNA, 19 nt, Homo sapiens
  misc_RNA (1)...(19): siRNA sense strand
gcaagaggcauaccaagau

SEQ ID NO: 156828 - RNA, 19 nt, Homo sapiens
  misc_RNA (1)...(19): siRNA sense strand
cgacaucuguggaagaaag

SEQ ID NO: 156829 - RNA, 19 nt, Homo sapiens
  misc_RNA (1)...(19): siRNA sense strand
gaugaacgcaagaggcaua

SEQ ID NO: 156830 - RNA, 19 nt, Homo sapiens
  misc_RNA (1)...(19): siRNA sense strand
cgacagcagucccauuuac

SEQ ID NO: 156831 - RNA, 19 nt, Homo sapiens
  misc_RNA (1)...(19): siRNA sense strand
gaccugaaggcccucaaua

SEQ ID NO: 156832 - RNA, 19 nt, Homo sapiens
  misc_RNA (1)...(19): siRNA sense strand
caagaggcauaccaagauc

SEQ ID NO: 156833 - RNA, 19 nt, Homo sapiens
  misc_RNA (1)...(19): siRNA sense strand
guuacuaccucuuauccau

SEQ ID NO: 156834 - RNA, 19 nt, Homo sapiens
  misc_RNA (1)...(19): siRNA sense strand
ccugacaucucucugaaca

SEQ ID NO: 156835 - RNA, 19 nt, Homo sapiens
  misc_RNA (1)...(19): siRNA sense strand
ugacaucucucugaacaac

SEQ ID NO: 156836 - RNA, 19 nt, Homo sapiens
  misc_RNA (1)...(19): siRNA sense strand
ccuccucucucucuuccua

SEQ ID NO: 156837 - RNA, 19 nt, Homo sapiens
  misc_RNA (1)...(19): siRNA sense strand
caccuauacuggccgcuuu

SEQ ID NO: 156838 - RNA, 19 nt, Homo sapiens
  misc_RNA (1)...(19): siRNA sense strand
caagaaagcagacaaaagu

SEQ ID NO: 156839 - RNA, 19 nt, Homo sapiens
  misc_RNA (1)...(19): siRNA sense strand
ccaguggaguccugugauc

SEQ ID NO: 156840 - RNA, 19 nt, Homo sapiens
  misc_RNA (1)...(19): siRNA sense strand
gaacgcaagaggcauacca

SEQ ID NO: 156841 - RNA, 19 nt, Homo sapiens
  misc_RNA (1)...(19): siRNA sense strand
acccuaagcuggaggagau

SEQ ID NO: 156842 - RNA, 19 nt, Homo sapiens
  misc_RNA (1)...(19): siRNA sense strand
caacgacagcagucccauu

SEQ ID NO: 156843 - RNA, 19 nt, Homo sapiens
  misc_RNA (1)...(19): siRNA sense strand
gcaccugaccgcagagucu

SEQ ID NO: 156844 - RNA, 19 nt, Homo sapiens
  misc_RNA (1)...(19): siRNA sense strand
aaaguguuguggccucuuc

SEQ ID NO: 156845 - RNA, 19 nt, Homo sapiens
  misc_RNA (1)...(19): siRNA sense strand
gcagaaggacaagaaagca

SEQ ID NO: 156846 - RNA, 19 nt, Homo sapiens
  misc_RNA (1)...(19): siRNA sense strand
aacgacagcagucccauuu

SEQ ID NO: 156847 - RNA, 19 nt, Homo sapiens
  misc_RNA (1)...(19): siRNA sense strand
gaaagcagacaaaaguguu

SEQ ID NO: 156848 - RNA, 19 nt, Homo sapiens
  misc_RNA (1)...(19): siRNA sense strand
uuaaggccuuugccacuca

SEQ ID NO: 156849 - RNA, 19 nt, Homo sapiens
  misc_RNA (1)...(19): siRNA sense strand
ccauggacaacuacccuaa

SEQ ID NO: 156850 - RNA, 19 nt, Homo sapiens
  misc_RNA (1)...(19): siRNA sense strand
caaggguggcuuccagguu

SEQ ID NO: 156851 - RNA, 19 nt, Homo sapiens
  misc_RNA (1)...(19): siRNA sense strand
ccucagcugucaccaacuc

SEQ ID NO: 156852 - RNA, 19 nt, Homo sapiens
  misc_RNA (1)...(19): siRNA sense strand
gcgcagugccauccaacga

SEQ ID NO: 156853 - RNA, 19 nt, Homo sapiens
  misc_RNA (1)...(19): siRNA sense strand
ugcgacaucuguggaagaa

SEQ ID NO: 156854 - RNA, 19 nt, Homo sapiens
  misc_RNA (1)...(19): siRNA sense strand
uaaccccucugucuacuau

SEQ ID NO: 156855 - RNA, 19 nt, Homo sapiens
  misc_RNA (1)...(19): siRNA sense strand
cgcaagaggcauaccaaga

SEQ ID NO: 156856 - RNA, 19 nt, Homo sapiens
  misc_RNA (1)...(19): siRNA sense strand
caucuguggaagaaaguuu

SEQ ID NO: 156857 - RNA, 19 nt, Homo sapiens
  misc_RNA (1)...(19): siRNA sense strand
ggaccugaaggcccucaau

SEQ ID NO: 156858 - RNA, 19 nt, Homo sapiens
  misc_RNA (1)...(19): siRNA sense strand
acaucucucugaacaacga

SEQ ID NO: 156859 - RNA, 19 nt, Homo sapiens
  misc_RNA (1)...(19): siRNA sense strand
gccgaacacugacauuuuc

SEQ ID NO: 156860 - RNA, 19 nt, Homo sapiens
  misc_RNA (1)...(19): siRNA sense strand
cagcagucccauuuacuca

SEQ ID NO: 156861 - RNA, 19 nt, Homo sapiens
  misc_RNA (1)...(19): siRNA sense strand
ucaguggccuagugagcau

SEQ ID NO: 156862 - RNA, 19 nt, Homo sapiens
  misc_RNA (1)...(19): siRNA sense strand
cgcccaccauggacaacua

SEQ ID NO: 156863 - RNA, 19 nt, Homo sapiens
  misc_RNA (1)...(19): siRNA sense strand
ccagccgcaugcgcaagua

SEQ ID NO: 156864 - RNA, 19 nt, Homo sapiens
  misc_RNA (1)...(19): siRNA sense strand
cagggacagcgcuccagua

SEQ ID NO: 156865 - RNA, 19 nt, Homo sapiens
  misc_RNA (1)...(19): siRNA sense strand
ccacauccgcauccacaca

SEQ ID NO: 156866 - RNA, 19 nt, Homo sapiens
  misc_RNA (1)...(19): siRNA sense strand
gcugcgcagugccauccaa

SEQ ID NO: 156867 - RNA, 19 nt, Homo sapiens
  misc_RNA (1)...(19): siRNA sense strand
gcuuccagguucccaugau

SEQ ID NO: 156868 - RNA, 19 nt, Homo sapiens
  misc_RNA (1)...(19): siRNA sense strand
gaacauggauccaaugaca

SEQ ID NO: 156869 - RNA, 19 nt, Homo sapiens
  misc_RNA (1)...(19): siRNA sense strand
gaacaagccuaacaugaau

SEQ ID NO: 156870 - RNA, 19 nt, Homo sapiens
  misc_RNA (1)...(19): siRNA sense strand
ccaaagauguggagaaugg

SEQ ID NO: 156871 - RNA, 19 nt, Homo sapiens
  misc_RNA (1)...(19): siRNA sense strand
gagaauggagggaaagaua

SEQ ID NO: 156872 - RNA, 19 nt, Homo sapiens
  misc_RNA (1)...(19): siRNA sense strand
gcaggaaccucccagaaca

SEQ ID NO: 156873 - RNA, 19 nt, Homo sapiens
  misc_RNA (1)...(19): siRNA sense strand
cuacauacacucuggcuua

SEQ ID NO: 156874 - RNA, 19 nt, Homo sapiens
  misc_RNA (1)...(19): siRNA sense strand
gaugggcaguuuaagcuuu

SEQ ID NO: 156875 - RNA, 19 nt, Homo sapiens
  misc_RNA (1)...(19): siRNA sense strand
cauacacucuggcuuauau

SEQ ID NO: 156876 - RNA, 19 nt, Homo sapiens
  misc_RNA (1)...(19): siRNA sense strand
caccaucugucaucaaauu

SEQ ID NO: 156877 - RNA, 19 nt, Homo sapiens
  misc_RNA (1)...(19): siRNA sense strand
cauuuacucucaacucuuu

SEQ ID NO: 156878 - RNA, 19 nt, Homo sapiens
  misc_RNA (1)...(19): siRNA sense strand
ccgagaaacuggcagagaa

SEQ ID NO: 156879 - RNA, 19 nt, Homo sapiens
  misc_RNA (1)...(19): siRNA sense strand
gauucagucuugcuagaaa

SEQ ID NO: 156880 - RNA, 19 nt, Homo sapiens
  misc_RNA (1)...(19): siRNA sense strand
acacagacauugauucagu

SEQ ID NO: 156881 - RNA, 19 nt, Homo sapiens
  misc_RNA (1)...(19): siRNA sense strand
aagaaacuauccaagcuuu

SEQ ID NO: 156882 - RNA, 19 nt, Homo sapiens
  misc_RNA (1)...(19): siRNA sense strand
ccucagauacuauuaugua

SEQ ID NO: 156883 - RNA, 19 nt, Homo sapiens
  misc_RNA (1)...(19): siRNA sense strand
gagggugacugugaaaguu

SEQ ID NO: 156884 - RNA, 19 nt, Homo sapiens
  misc_RNA (1)...(19): siRNA sense strand
gcagaagccucagaacaag

SEQ ID NO: 156885 - RNA, 19 nt, Homo sapiens
  misc_RNA (1)...(19): siRNA sense strand
ccaaguauuucuccaucuu

SEQ ID NO: 156886 - RNA, 19 nt, Homo sapiens
  misc_RNA (1)...(19): siRNA sense strand
gaauggagggaaagauaaa

SEQ ID NO: 156887 - RNA, 19 nt, Homo sapiens
  misc_RNA (1)...(19): siRNA sense strand
gggugacugugaaaguuua

SEQ ID NO: 156888 - RNA, 19 nt, Homo sapiens
  misc_RNA (1)...(19): siRNA sense strand
acaagcacaugaucuguug

SEQ ID NO: 156889 - RNA, 19 nt, Homo sapiens
  misc_RNA (1)...(19): siRNA sense strand
gaagaaacuauccaagcuu

SEQ ID NO: 156890 - RNA, 19 nt, Homo sapiens
  misc_RNA (1)...(19): siRNA sense strand
agaacaagccuaacaugaa

SEQ ID NO: 156891 - RNA, 19 nt, Homo sapiens
  misc_RNA (1)...(19): siRNA sense strand
gauaaagacugagaaucca

SEQ ID NO: 156892 - RNA, 19 nt, Homo sapiens
  misc_RNA (1)...(19): siRNA sense strand
gaacuccuccaauguaaag

SEQ ID NO: 156893 - RNA, 19 nt, Homo sapiens
  misc_RNA (1)...(19): siRNA sense strand
cagcagcaguuccaaagau

SEQ ID NO: 156894 - RNA, 19 nt, Homo sapiens
  misc_RNA (1)...(19): siRNA sense strand
ggauugagggugacuguga

SEQ ID NO: 156895 - RNA, 19 nt, Homo sapiens
  misc_RNA (1)...(19): siRNA sense strand
uagccgcaaugacuacaua

SEQ ID NO: 156896 - RNA, 19 nt, Homo sapiens
  misc_RNA (1)...(19): siRNA sense strand
agccuaacaugaauuauga

SEQ ID NO: 156897 - RNA, 19 nt, Homo sapiens
  misc_RNA (1)...(19): siRNA sense strand
cuaaugaugggcaguuuaa

SEQ ID NO: 156898 - RNA, 19 nt, Homo sapiens
  misc_RNA (1)...(19): siRNA sense strand
cacaccaucugucaucaaa

SEQ ID NO: 156899 - RNA, 19 nt, Homo sapiens
  misc_RNA (1)...(19): siRNA sense strand
gauugagggugacugugaa

SEQ ID NO: 156900 - RNA, 19 nt, Homo sapiens
  misc_RNA (1)...(19): siRNA sense strand
gcaagaacaagccuaacau

SEQ ID NO: 156901 - RNA, 19 nt, Homo sapiens
  misc_RNA (1)...(19): siRNA sense strand
cgacacagacauugauuca

SEQ ID NO: 156902 - RNA, 19 nt, Homo sapiens
  misc_RNA (1)...(19): siRNA sense strand
ggucagaaguuuguguaca

SEQ ID NO: 156903 - RNA, 19 nt, Homo sapiens
  misc_RNA (1)...(19): siRNA sense strand
acaagccuaacaugaauua

SEQ ID NO: 156904 - RNA, 19 nt, Homo sapiens
  misc_RNA (1)...(19): siRNA sense strand
gaacuuccagagaauuugu

SEQ ID NO: 156905 - RNA, 19 nt, Homo sapiens
  misc_RNA (1)...(19): siRNA sense strand
gaacaagcacaugaucugu

SEQ ID NO: 156906 - RNA, 19 nt, Homo sapiens
  misc_RNA (1)...(19): siRNA sense strand
gcccucagauacuauuaug

SEQ ID NO: 156907 - RNA, 19 nt, Homo sapiens
  misc_RNA (1)...(19): siRNA sense strand
gccgagcccucagauacua

SEQ ID NO: 156908 - RNA, 19 nt, Homo sapiens
  misc_RNA (1)...(19): siRNA sense strand
caagaccucuagccgcaau

SEQ ID NO: 156909 - RNA, 19 nt, Homo sapiens
  misc_RNA (1)...(19): siRNA sense strand
gaaccucccagaacaccuu

SEQ ID NO: 156910 - RNA, 19 nt, Homo sapiens
  misc_RNA (1)...(19): siRNA sense strand
agaagaaacuauccaagcu

SEQ ID NO: 156911 - RNA, 19 nt, Homo sapiens
  misc_RNA (1)...(19): siRNA sense strand
gagcccaucucucccuaca

SEQ ID NO: 156912 - RNA, 19 nt, Homo sapiens
  misc_RNA (1)...(19): siRNA sense strand
caagaacaagccuaacaug

SEQ ID NO: 156913 - RNA, 19 nt, Homo sapiens
  misc_RNA (1)...(19): siRNA sense strand
agacaucgacacagacauu

SEQ ID NO: 156914 - RNA, 19 nt, Homo sapiens
  misc_RNA (1)...(19): siRNA sense strand
caucugucaucaaauuugu

SEQ ID NO: 156915 - RNA, 19 nt, Homo sapiens
  misc_RNA (1)...(19): siRNA sense strand
cuaaagaccaggauucagu

SEQ ID NO: 156916 - RNA, 19 nt, Homo sapiens
  misc_RNA (1)...(19): siRNA sense strand
gaagucagcagcaguucca

SEQ ID NO: 156917 - RNA, 19 nt, Homo sapiens
  misc_RNA (1)...(19): siRNA sense strand
ccucagaacaagcacauga

SEQ ID NO: 156918 - RNA, 19 nt, Homo sapiens
  misc_RNA (1)...(19): siRNA sense strand
uguuggaccucuaaugaug

SEQ ID NO: 156919 - RNA, 19 nt, Homo sapiens
  misc_RNA (1)...(19): siRNA sense strand
cgagaaacuggcagagaaa

SEQ ID NO: 156920 - RNA, 19 nt, Homo sapiens
  misc_RNA (1)...(19): siRNA sense strand
uugaacuccuccaauguaa

SEQ ID NO: 156921 - RNA, 19 nt, Homo sapiens
  misc_RNA (1)...(19): siRNA sense strand
ucuuugaacuccuccaaug

SEQ ID NO: 156922 - RNA, 19 nt, Homo sapiens
  misc_RNA (1)...(19): siRNA sense strand
aagaacaagccuaacauga

SEQ ID NO: 156923 - RNA, 19 nt, Homo sapiens
  misc_RNA (1)...(19): siRNA sense strand
cuaacguaaugacugcuuu

SEQ ID NO: 156924 - RNA, 19 nt, Homo sapiens
  misc_RNA (1)...(19): siRNA sense strand
agaauggagggaaagauaa

SEQ ID NO: 156925 - RNA, 19 nt, Homo sapiens
  misc_RNA (1)...(19): siRNA sense strand
ugaauggucagaaguuugu

SEQ ID NO: 156926 - RNA, 19 nt, Homo sapiens
  misc_RNA (1)...(19): siRNA sense strand
ugcagaagccucagaacaa

SEQ ID NO: 156927 - RNA, 19 nt, Homo sapiens
  misc_RNA (1)...(19): siRNA sense strand
gcacccacccuugugauca

SEQ ID NO: 156928 - RNA, 19 nt, Homo sapiens
  misc_RNA (1)...(19): siRNA sense strand
gcugccaccauuucaauug

SEQ ID NO: 156929 - RNA, 19 nt, Homo sapiens
  misc_RNA (1)...(19): siRNA sense strand
acccagacaucgacacaga

SEQ ID NO: 156930 - RNA, 19 nt, Homo sapiens
  misc_RNA (1)...(19): siRNA sense strand
guauuucuccaucuucaga

SEQ ID NO: 156931 - RNA, 19 nt, Homo sapiens
  misc_RNA (1)...(19): siRNA sense strand
ucuguuggaccucuaauga

SEQ ID NO: 156932 - RNA, 19 nt, Homo sapiens
  misc_RNA (1)...(19): siRNA sense strand
ggauucagucuugcuagaa

SEQ ID NO: 156933 - RNA, 19 nt, Homo sapiens
  misc_RNA (1)...(19): siRNA sense strand
gcuagaaaaggacaaagua

SEQ ID NO: 156934 - RNA, 19 nt, Homo sapiens
  misc_RNA (1)...(19): siRNA sense strand
cccuacagcuucucuuaca

SEQ ID NO: 156935 - RNA, 19 nt, Homo sapiens
  misc_RNA (1)...(19): siRNA sense strand
ucaucaagauccaagaaac

SEQ ID NO: 156936 - RNA, 19 nt, Homo sapiens
  misc_RNA (1)...(19): siRNA sense strand
caugaauuaugacaaacuc

SEQ ID NO: 156937 - RNA, 19 nt, Homo sapiens
  misc_RNA (1)...(19): siRNA sense strand
uacauacacucuggcuuau

SEQ ID NO: 156938 - RNA, 19 nt, Homo sapiens
  misc_RNA (1)...(19): siRNA sense strand
gaauccagccgagaaacug

SEQ ID NO: 156939 - RNA, 19 nt, Homo sapiens
  misc_RNA (1)...(19): siRNA sense strand
uuugaacuccuccaaugua

SEQ ID NO: 156940 - RNA, 19 nt, Homo sapiens
  misc_RNA (1)...(19): siRNA sense strand
cagccgagcccucagauac

SEQ ID NO: 156941 - RNA, 19 nt, Homo sapiens
  misc_RNA (1)...(19): siRNA sense strand
agugaauggucagaaguuu

SEQ ID NO: 156942 - RNA, 19 nt, Homo sapiens
  misc_RNA (1)...(19): siRNA sense strand
ugagaauccagccgagaaa

SEQ ID NO: 156943 - RNA, 19 nt, Homo sapiens
  misc_RNA (1)...(19): siRNA sense strand
cacucuggcuuauauucuu

SEQ ID NO: 156944 - RNA, 19 nt, Homo sapiens
  misc_RNA (1)...(19): siRNA sense strand
ucuaaugaugggcaguuua

SEQ ID NO: 156945 - RNA, 19 nt, Homo sapiens
  misc_RNA (1)...(19): siRNA sense strand
ugauaaagacugagaaucc

SEQ ID NO: 156946 - RNA, 19 nt, Homo sapiens
  misc_RNA (1)...(19): siRNA sense strand
gagcccacaccaucuguca

SEQ ID NO: 156947 - RNA, 19 nt, Homo sapiens
  misc_RNA (1)...(19): siRNA sense strand
gagcccucagauacuauua

SEQ ID NO: 156948 - RNA, 19 nt, Homo sapiens
  misc_RNA (1)...(19): siRNA sense strand
gugaauggucagaaguuug

SEQ ID NO: 156949 - RNA, 19 nt, Homo sapiens
  misc_RNA (1)...(19): siRNA sense strand
gagccuaaagaccaggauu

SEQ ID NO: 156950 - RNA, 19 nt, Homo sapiens
  misc_RNA (1)...(19): siRNA sense strand
ccacccauuucguccauac

SEQ ID NO: 156951 - RNA, 19 nt, Homo sapiens
  misc_RNA (1)...(19): siRNA sense strand
aagccuaacaugaauuaug

SEQ ID NO: 156952 - RNA, 19 nt, Homo sapiens
  misc_RNA (1)...(19): siRNA sense strand
agaacaagcacaugaucug

SEQ ID NO: 156953 - RNA, 19 nt, Homo sapiens
  misc_RNA (1)...(19): siRNA sense strand
uguggagaauggagggaaa

SEQ ID NO: 156954 - RNA, 19 nt, Homo sapiens
  misc_RNA (1)...(19): siRNA sense strand
ccucuagccgcaaugacua

SEQ ID NO: 156955 - RNA, 19 nt, Homo sapiens
  misc_RNA (1)...(19): siRNA sense strand
ccaggauucagucuugcua

SEQ ID NO: 156956 - RNA, 19 nt, Homo sapiens
  misc_RNA (1)...(19): siRNA sense strand
aaguauuucuccaucuuca

SEQ ID NO: 156957 - RNA, 19 nt, Homo sapiens
  misc_RNA (1)...(19): siRNA sense strand
ccaucugucaucaaauuug

SEQ ID NO: 156958 - RNA, 19 nt, Homo sapiens
  misc_RNA (1)...(19): siRNA sense strand
gcagcaguuccaaagaugu

SEQ ID NO: 156959 - RNA, 19 nt, Homo sapiens
  misc_RNA (1)...(19): siRNA sense strand
gauccaagaaacccaaagg

SEQ ID NO: 156960 - RNA, 19 nt, Homo sapiens
  misc_RNA (1)...(19): siRNA sense strand
aggauucagucuugcuaga

SEQ ID NO: 156961 - RNA, 19 nt, Homo sapiens
  misc_RNA (1)...(19): siRNA sense strand
uugauucaguggcuucuca

SEQ ID NO: 156962 - RNA, 19 nt, Homo sapiens
  misc_RNA (1)...(19): siRNA sense strand
caaguauuucuccaucuuc

SEQ ID NO: 156963 - RNA, 19 nt, Homo sapiens
  misc_RNA (1)...(19): siRNA sense strand
ggagaauggagggaaagau

SEQ ID NO: 156964 - RNA, 19 nt, Homo sapiens
  misc_RNA (1)...(19): siRNA sense strand
gcccacaccaucugucauc

SEQ ID NO: 156965 - RNA, 19 nt, Homo sapiens
  misc_RNA (1)...(19): siRNA sense strand
caucgacacagacauugau

SEQ ID NO: 156966 - RNA, 19 nt, Homo sapiens
  misc_RNA (1)...(19): siRNA sense strand
ccaccacaccacccauuuc

SEQ ID NO: 156967 - RNA, 19 nt, Homo sapiens
  misc_RNA (1)...(19): siRNA sense strand
gccaccacaccacccauuu

SEQ ID NO: 156968 - RNA, 19 nt, Homo sapiens
  misc_RNA (1)...(19): siRNA sense strand
gaacauggauccaaugaca

SEQ ID NO: 156969 - RNA, 19 nt, Homo sapiens
  misc_RNA (1)...(19): siRNA sense strand
gaacaagccuaacaugaau

SEQ ID NO: 156970 - RNA, 19 nt, Homo sapiens
  misc_RNA (1)...(19): siRNA sense strand
ccaaagauguggagaaugg

SEQ ID NO: 156971 - RNA, 19 nt, Homo sapiens
  misc_RNA (1)...(19): siRNA sense strand
gagaauggagggaaagaua

SEQ ID NO: 156972 - RNA, 19 nt, Homo sapiens
  misc_RNA (1)...(19): siRNA sense strand
gcaggaaccucccagaaca

SEQ ID NO: 156973 - RNA, 19 nt, Homo sapiens
  misc_RNA (1)...(19): siRNA sense strand
cuacauacacucuggcuua

SEQ ID NO: 156974 - RNA, 19 nt, Homo sapiens
  misc_RNA (1)...(19): siRNA sense strand
gaugggcaguuuaagcuuu

SEQ ID NO: 156975 - RNA, 19 nt, Homo sapiens
  misc_RNA (1)...(19): siRNA sense strand
cauacacucuggcuuauau

SEQ ID NO: 156976 - RNA, 19 nt, Homo sapiens
  misc_RNA (1)...(19): siRNA sense strand
caccaucugucaucaaauu

SEQ ID NO: 156977 - RNA, 19 nt, Homo sapiens
  misc_RNA (1)...(19): siRNA sense strand
cauuuacucucaacucuuu

SEQ ID NO: 156978 - RNA, 19 nt, Homo sapiens
  misc_RNA (1)...(19): siRNA sense strand
ccgagaaacuggcagagaa

SEQ ID NO: 156979 - RNA, 19 nt, Homo sapiens
  misc_RNA (1)...(19): siRNA sense strand
gauucagucuugcuagaaa

SEQ ID NO: 156980 - RNA, 19 nt, Homo sapiens
  misc_RNA (1)...(19): siRNA sense strand
acacagacauugauucagu

SEQ ID NO: 156981 - RNA, 19 nt, Homo sapiens
  misc_RNA (1)...(19): siRNA sense strand
aagaaacuauccaagcuuu

SEQ ID NO: 156982 - RNA, 19 nt, Homo sapiens
  misc_RNA (1)...(19): siRNA sense strand
ccucagauacuauuaugua

SEQ ID NO: 156983 - RNA, 19 nt, Homo sapiens
  misc_RNA (1)...(19): siRNA sense strand
gagggugacugugaaaguu

SEQ ID NO: 156984 - RNA, 19 nt, Homo sapiens
  misc_RNA (1)...(19): siRNA sense strand
gcagaagccucagaacaag

SEQ ID NO: 156985 - RNA, 19 nt, Homo sapiens
  misc_RNA (1)...(19): siRNA sense strand
ccaaguauuucuccaucuu

SEQ ID NO: 156986 - RNA, 19 nt, Homo sapiens
  misc_RNA (1)...(19): siRNA sense strand
gaauggagggaaagauaaa

SEQ ID NO: 156987 - RNA, 19 nt, Homo sapiens
  misc_RNA (1)...(19): siRNA sense strand
gggugacugugaaaguuua

SEQ ID NO: 156988 - RNA, 19 nt, Homo sapiens
  misc_RNA (1)...(19): siRNA sense strand
acaagcacaugaucuguug

SEQ ID NO: 156989 - RNA, 19 nt, Homo sapiens
  misc_RNA (1)...(19): siRNA sense strand
gaagaaacuauccaagcuu

SEQ ID NO: 156990 - RNA, 19 nt, Homo sapiens
  misc_RNA (1)...(19): siRNA sense strand
agaacaagccuaacaugaa

SEQ ID NO: 156991 - RNA, 19 nt, Homo sapiens
  misc_RNA (1)...(19): siRNA sense strand
gauaaagacugagaaucca

SEQ ID NO: 156992 - RNA, 19 nt, Homo sapiens
  misc_RNA (1)...(19): siRNA sense strand
gaacuccuccaauguaaag

SEQ ID NO: 156993 - RNA, 19 nt, Homo sapiens
  misc_RNA (1)...(19): siRNA sense strand
cagcagcaguuccaaagau

SEQ ID NO: 156994 - RNA, 19 nt, Homo sapiens
  misc_RNA (1)...(19): siRNA sense strand
ggauugagggugacuguga

SEQ ID NO: 156995 - RNA, 19 nt, Homo sapiens
  misc_RNA (1)...(19): siRNA sense strand
uagccgcaaugacuacaua

SEQ ID NO: 156996 - RNA, 19 nt, Homo sapiens
  misc_RNA (1)...(19): siRNA sense strand
agccuaacaugaauuauga

SEQ ID NO: 156997 - RNA, 19 nt, Homo sapiens
  misc_RNA (1)...(19): siRNA sense strand
cuaaugaugggcaguuuaa

SEQ ID NO: 156998 - RNA, 19 nt, Homo sapiens
  misc_RNA (1)...(19): siRNA sense strand
cacaccaucugucaucaaa

SEQ ID NO: 156999 - RNA, 19 nt, Homo sapiens
  misc_RNA (1)...(19): siRNA sense strand
gauugagggugacugugaa

SEQ ID NO: 157000 - RNA, 19 nt, Homo sapiens
  misc_RNA (1)...(19): siRNA sense strand
gcaagaacaagccuaacau

SEQ ID NO: 157001 - RNA, 19 nt, Homo sapiens
  misc_RNA (1)...(19): siRNA sense strand
cgacacagacauugauuca

SEQ ID NO: 157002 - RNA, 19 nt, Homo sapiens
  misc_RNA (1)...(19): siRNA sense strand
ggucagaaguuuguguaca

SEQ ID NO: 157003 - RNA, 19 nt, Homo sapiens
  misc_RNA (1)...(19): siRNA sense strand
acaagccuaacaugaauua

SEQ ID NO: 157004 - RNA, 19 nt, Homo sapiens
  misc_RNA (1)...(19): siRNA sense strand
gaacuuccagagaauuugu

SEQ ID NO: 157005 - RNA, 19 nt, Homo sapiens
  misc_RNA (1)...(19): siRNA sense strand
gaacaagcacaugaucugu

SEQ ID NO: 157006 - RNA, 19 nt, Homo sapiens
  misc_RNA (1)...(19): siRNA sense strand
gcccucagauacuauuaug

SEQ ID NO: 157007 - RNA, 19 nt, Homo sapiens
  misc_RNA (1)...(19): siRNA sense strand
gccgagcccucagauacua

SEQ ID NO: 157008 - RNA, 19 nt, Homo sapiens
  misc_RNA (1)...(19): siRNA sense strand
caagaccucuagccgcaau

SEQ ID NO: 157009 - RNA, 19 nt, Homo sapiens
  misc_RNA (1)...(19): siRNA sense strand
gaaccucccagaacaccuu

SEQ ID NO: 157010 - RNA, 19 nt, Homo sapiens
  misc_RNA (1)...(19): siRNA sense strand
agaagaaacuauccaagcu

SEQ ID NO: 157011 - RNA, 19 nt, Homo sapiens
  misc_RNA (1)...(19): siRNA sense strand
gagcccaucucucccuaca

SEQ ID NO: 157012 - RNA, 19 nt, Homo sapiens
  misc_RNA (1)...(19): siRNA sense strand
caagaacaagccuaacaug

SEQ ID NO: 157013 - RNA, 19 nt, Homo sapiens
  misc_RNA (1)...(19): siRNA sense strand
agacaucgacacagacauu

SEQ ID NO: 157014 - RNA, 19 nt, Homo sapiens
  misc_RNA (1)...(19): siRNA sense strand
caucugucaucaaauuugu

SEQ ID NO: 157015 - RNA, 19 nt, Homo sapiens
  misc_RNA (1)...(19): siRNA sense strand
cuaaagaccaggauucagu

SEQ ID NO: 157016 - RNA, 19 nt, Homo sapiens
  misc_RNA (1)...(19): siRNA sense strand
gaagucagcagcaguucca

SEQ ID NO: 157017 - RNA, 19 nt, Homo sapiens
  misc_RNA (1)...(19): siRNA sense strand
ccucagaacaagcacauga

SEQ ID NO: 157018 - RNA, 19 nt, Homo sapiens
  misc_RNA (1)...(19): siRNA sense strand
uguuggaccucuaaugaug

SEQ ID NO: 157019 - RNA, 19 nt, Homo sapiens
  misc_RNA (1)...(19): siRNA sense strand
cgagaaacuggcagagaaa

SEQ ID NO: 157020 - RNA, 19 nt, Homo sapiens
  misc_RNA (1)...(19): siRNA sense strand
uugaacuccuccaauguaa

SEQ ID NO: 157021 - RNA, 19 nt, Homo sapiens
  misc_RNA (1)...(19): siRNA sense strand
ucuuugaacuccuccaaug

SEQ ID NO: 157022 - RNA, 19 nt, Homo sapiens
  misc_RNA (1)...(19): siRNA sense strand
aagaacaagccuaacauga

SEQ ID NO: 157023 - RNA, 19 nt, Homo sapiens
  misc_RNA (1)...(19): siRNA sense strand
cuaacguaaugacugcuuu

SEQ ID NO: 157024 - RNA, 19 nt, Homo sapiens
  misc_RNA (1)...(19): siRNA sense strand
agaauggagggaaagauaa

SEQ ID NO: 157025 - RNA, 19 nt, Homo sapiens
  misc_RNA (1)...(19): siRNA sense strand
ugaauggucagaaguuugu

SEQ ID NO: 157026 - RNA, 19 nt, Homo sapiens
  misc_RNA (1)...(19): siRNA sense strand
ugcagaagccucagaacaa

SEQ ID NO: 157027 - RNA, 19 nt, Homo sapiens
  misc_RNA (1)...(19): siRNA sense strand
gcacccacccuugugauca

SEQ ID NO: 157028 - RNA, 19 nt, Homo sapiens
  misc_RNA (1)...(19): siRNA sense strand
gcugccaccauuucaauug

SEQ ID NO: 157029 - RNA, 19 nt, Homo sapiens
  misc_RNA (1)...(19): siRNA sense strand
acccagacaucgacacaga

SEQ ID NO: 157030 - RNA, 19 nt, Homo sapiens
  misc_RNA (1)...(19): siRNA sense strand
guauuucuccaucuucaga

SEQ ID NO: 157031 - RNA, 19 nt, Homo sapiens
  misc_RNA (1)...(19): siRNA sense strand
ucuguuggaccucuaauga

SEQ ID NO: 157032 - RNA, 19 nt, Homo sapiens
  misc_RNA (1)...(19): siRNA sense strand
ggauucagucuugcuagaa

SEQ ID NO: 157033 - RNA, 19 nt, Homo sapiens
  misc_RNA (1)...(19): siRNA sense strand
gcuagaaaaggacaaagua

SEQ ID NO: 157034 - RNA, 19 nt, Homo sapiens
  misc_RNA (1)...(19): siRNA sense strand
cccuacagcuucucuuaca

SEQ ID NO: 157035 - RNA, 19 nt, Homo sapiens
  misc_RNA (1)...(19): siRNA sense strand
ucaucaagauccaagaaac

SEQ ID NO: 157036 - RNA, 19 nt, Homo sapiens
  misc_RNA (1)...(19): siRNA sense strand
caugaauuaugacaaacuc

SEQ ID NO: 157037 - RNA, 19 nt, Homo sapiens
  misc_RNA (1)...(19): siRNA sense strand
uacauacacucuggcuuau

SEQ ID NO: 157038 - RNA, 19 nt, Homo sapiens
  misc_RNA (1)...(19): siRNA sense strand
gaauccagccgagaaacug

SEQ ID NO: 157039 - RNA, 19 nt, Homo sapiens
  misc_RNA (1)...(19): siRNA sense strand
uuugaacuccuccaaugua

SEQ ID NO: 157040 - RNA, 19 nt, Homo sapiens
  misc_RNA (1)...(19): siRNA sense strand
cagccgagcccucagauac

SEQ ID NO: 157041 - RNA, 19 nt, Homo sapiens
  misc_RNA (1)...(19): siRNA sense strand
agugaauggucagaaguuu

SEQ ID NO: 157042 - RNA, 19 nt, Homo sapiens
  misc_RNA (1)...(19): siRNA sense strand
ugagaauccagccgagaaa

SEQ ID NO: 157043 - RNA, 19 nt, Homo sapiens
  misc_RNA (1)...(19): siRNA sense strand
cacucuggcuuauauucuu

SEQ ID NO: 157044 - RNA, 19 nt, Homo sapiens
  misc_RNA (1)...(19): siRNA sense strand
ucuaaugaugggcaguuua

SEQ ID NO: 157045 - RNA, 19 nt, Homo sapiens
  misc_RNA (1)...(19): siRNA sense strand
ugauaaagacugagaaucc

SEQ ID NO: 157046 - RNA, 19 nt, Homo sapiens
  misc_RNA (1)...(19): siRNA sense strand
gagcccacaccaucuguca

SEQ ID NO: 157047 - RNA, 19 nt, Homo sapiens
  misc_RNA (1)...(19): siRNA sense strand
gagcccucagauacuauua

SEQ ID NO: 157048 - RNA, 19 nt, Homo sapiens
  misc_RNA (1)...(19): siRNA sense strand
gugaauggucagaaguuug

SEQ ID NO: 157049 - RNA, 19 nt, Homo sapiens
  misc_RNA (1)...(19): siRNA sense strand
gagccuaaagaccaggauu

SEQ ID NO: 157050 - RNA, 19 nt, Homo sapiens
  misc_RNA (1)...(19): siRNA sense strand
ccacccauuucguccauac

SEQ ID NO: 157051 - RNA, 19 nt, Homo sapiens
  misc_RNA (1)...(19): siRNA sense strand
aagccuaacaugaauuaug

SEQ ID NO: 157052 - RNA, 19 nt, Homo sapiens
  misc_RNA (1)...(19): siRNA sense strand
agaacaagcacaugaucug

SEQ ID NO: 157053 - RNA, 19 nt, Homo sapiens
  misc_RNA (1)...(19): siRNA sense strand
uguggagaauggagggaaa

SEQ ID NO: 157054 - RNA, 19 nt, Homo sapiens
  misc_RNA (1)...(19): siRNA sense strand
ccucuagccgcaaugacua

SEQ ID NO: 157055 - RNA, 19 nt, Homo sapiens
  misc_RNA (1)...(19): siRNA sense strand
ccaggauucagucuugcua

SEQ ID NO: 157056 - RNA, 19 nt, Homo sapiens
  misc_RNA (1)...(19): siRNA sense strand
aaguauuucuccaucuuca

SEQ ID NO: 157057 - RNA, 19 nt, Homo sapiens
  misc_RNA (1)...(19): siRNA sense strand
ccaucugucaucaaauuug

SEQ ID NO: 157058 - RNA, 19 nt, Homo sapiens
  misc_RNA (1)...(19): siRNA sense strand
gcagcaguuccaaagaugu

SEQ ID NO: 157059 - RNA, 19 nt, Homo sapiens
  misc_RNA (1)...(19): siRNA sense strand
gauccaagaaacccaaagg

SEQ ID NO: 157060 - RNA, 19 nt, Homo sapiens
  misc_RNA (1)...(19): siRNA sense strand
aggauucagucuugcuaga

SEQ ID NO: 157061 - RNA, 19 nt, Homo sapiens
  misc_RNA (1)...(19): siRNA sense strand
uugauucaguggcuucuca

SEQ ID NO: 157062 - RNA, 19 nt, Homo sapiens
  misc_RNA (1)...(19): siRNA sense strand
caaguauuucuccaucuuc

SEQ ID NO: 157063 - RNA, 19 nt, Homo sapiens
  misc_RNA (1)...(19): siRNA sense strand
ggagaauggagggaaagau

SEQ ID NO: 157064 - RNA, 19 nt, Homo sapiens
  misc_RNA (1)...(19): siRNA sense strand
gcccacaccaucugucauc

SEQ ID NO: 157065 - RNA, 19 nt, Homo sapiens
  misc_RNA (1)...(19): siRNA sense strand
caucgacacagacauugau

SEQ ID NO: 157066 - RNA, 19 nt, Homo sapiens
  misc_RNA (1)...(19): siRNA sense strand
ccaccacaccacccauuuc

SEQ ID NO: 157067 - RNA, 19 nt, Homo sapiens
  misc_RNA (1)...(19): siRNA sense strand
gccaccacaccacccauuu

SEQ ID NO: 157068 - RNA, 19 nt, Homo sapiens
  misc_RNA (1)...(19): siRNA sense strand
gcaaagauauugaugaaug

SEQ ID NO: 157069 - RNA, 19 nt, Homo sapiens
  misc_RNA (1)...(19): siRNA sense strand
ggagugcgaugcaaagaua

SEQ ID NO: 157070 - RNA, 19 nt, Homo sapiens
  misc_RNA (1)...(19): siRNA sense strand
gagcaaaguuaucaacaaa

SEQ ID NO: 157071 - RNA, 19 nt, Homo sapiens
  misc_RNA (1)...(19): siRNA sense strand
ccaauacaguggacaguua

SEQ ID NO: 157072 - RNA, 19 nt, Homo sapiens
  misc_RNA (1)...(19): siRNA sense strand
gcaaaguuaucaacaaaga

SEQ ID NO: 157073 - RNA, 19 nt, Homo sapiens
  misc_RNA (1)...(19): siRNA sense strand
ggaguggaauguagagaua

SEQ ID NO: 157074 - RNA, 19 nt, Homo sapiens
  misc_RNA (1)...(19): siRNA sense strand
gguaauaacuguagagaca

SEQ ID NO: 157075 - RNA, 19 nt, Homo sapiens
  misc_RNA (1)...(19): siRNA sense strand
gcaauggacaguugaauuu

SEQ ID NO: 157076 - RNA, 19 nt, Homo sapiens
  misc_RNA (1)...(19): siRNA sense strand
gaauacaacugagagcuuu

SEQ ID NO: 157077 - RNA, 19 nt, Homo sapiens
  misc_RNA (1)...(19): siRNA sense strand
gcaugacacuggcaucuuu

SEQ ID NO: 157078 - RNA, 19 nt, Homo sapiens
  misc_RNA (1)...(19): siRNA sense strand
ggacuaaauucaccaagga

SEQ ID NO: 157079 - RNA, 19 nt, Homo sapiens
  misc_RNA (1)...(19): siRNA sense strand
ccagaaagauggcaacuuc

SEQ ID NO: 157080 - RNA, 19 nt, Homo sapiens
  misc_RNA (1)...(19): siRNA sense strand
ccaaaggguucucuucaaa

SEQ ID NO: 157081 - RNA, 19 nt, Homo sapiens
  misc_RNA (1)...(19): siRNA sense strand
gagcaugcaacuuguaaua

SEQ ID NO: 157082 - RNA, 19 nt, Homo sapiens
  misc_RNA (1)...(19): siRNA sense strand
gugaagauauugaugaaug

SEQ ID NO: 157083 - RNA, 19 nt, Homo sapiens
  misc_RNA (1)...(19): siRNA sense strand
caaguuggauucaucucua

SEQ ID NO: 157084 - RNA, 19 nt, Homo sapiens
  misc_RNA (1)...(19): siRNA sense strand
gaucggguguuccacaauu

SEQ ID NO: 157085 - RNA, 19 nt, Homo sapiens
  misc_RNA (1)...(19): siRNA sense strand
gaagaugugauacccgaua

SEQ ID NO: 157086 - RNA, 19 nt, Homo sapiens
  misc_RNA (1)...(19): siRNA sense strand
caacaaagaaugcagugaa

SEQ ID NO: 157087 - RNA, 19 nt, Homo sapiens
  misc_RNA (1)...(19): siRNA sense strand
gaugaauucucgagucguu

SEQ ID NO: 157088 - RNA, 19 nt, Homo sapiens
  misc_RNA (1)...(19): siRNA sense strand
uggaaacccucagcaaaua

SEQ ID NO: 157089 - RNA, 19 nt, Homo sapiens
  misc_RNA (1)...(19): siRNA sense strand
gugaagacguggaugaaug

SEQ ID NO: 157090 - RNA, 19 nt, Homo sapiens
  misc_RNA (1)...(19): siRNA sense strand
ccagaaggcucccagaaag

SEQ ID NO: 157091 - RNA, 19 nt, Homo sapiens
  misc_RNA (1)...(19): siRNA sense strand
guacaagugcagcuguuua

SEQ ID NO: 157092 - RNA, 19 nt, Homo sapiens
  misc_RNA (1)...(19): siRNA sense strand
gaaagacggcuucucagau

SEQ ID NO: 157093 - RNA, 19 nt, Homo sapiens
  misc_RNA (1)...(19): siRNA sense strand
uaaaugagcgcuucuucaa

SEQ ID NO: 157094 - RNA, 19 nt, Homo sapiens
  misc_RNA (1)...(19): siRNA sense strand
gaugugauacccgauaaua

SEQ ID NO: 157095 - RNA, 19 nt, Homo sapiens
  misc_RNA (1)...(19): siRNA sense strand
cauaaugacuggagagaag

SEQ ID NO: 157096 - RNA, 19 nt, Homo sapiens
  misc_RNA (1)...(19): siRNA sense strand
ggauucaucucuagaaacu

SEQ ID NO: 157097 - RNA, 19 nt, Homo sapiens
  misc_RNA (1)...(19): siRNA sense strand
acacaagacugacaacaag

SEQ ID NO: 157098 - RNA, 19 nt, Homo sapiens
  misc_RNA (1)...(19): siRNA sense strand
gcccagagcaugcaacuug

SEQ ID NO: 157099 - RNA, 19 nt, Homo sapiens
  misc_RNA (1)...(19): siRNA sense strand
gagaggcccaucuguguuu

SEQ ID NO: 157100 - RNA, 19 nt, Homo sapiens
  misc_RNA (1)...(19): siRNA sense strand
aaagacggcuucucagauc

SEQ ID NO: 157101 - RNA, 19 nt, Homo sapiens
  misc_RNA (1)...(19): siRNA sense strand
aaaggguucucuucaaaug

SEQ ID NO: 157102 - RNA, 19 nt, Homo sapiens
  misc_RNA (1)...(19): siRNA sense strand
gccaaaggguucucuucaa

SEQ ID NO: 157103 - RNA, 19 nt, Homo sapiens
  misc_RNA (1)...(19): siRNA sense strand
gagaucaagcugaagauga

SEQ ID NO: 157104 - RNA, 19 nt, Homo sapiens
  misc_RNA (1)...(19): siRNA sense strand
gacauugagagcaaaguua

SEQ ID NO: 157105 - RNA, 19 nt, Homo sapiens
  misc_RNA (1)...(19): siRNA sense strand
gcaugcaacuuguaauaac

SEQ ID NO: 157106 - RNA, 19 nt, Homo sapiens
  misc_RNA (1)...(19): siRNA sense strand
ggaagcuucugagacauau

SEQ ID NO: 157107 - RNA, 19 nt, Homo sapiens
  misc_RNA (1)...(19): siRNA sense strand
gaauguagagauauugaug

SEQ ID NO: 157108 - RNA, 19 nt, Homo sapiens
  misc_RNA (1)...(19): siRNA sense strand
gaccguaguuucucugaag

SEQ ID NO: 157109 - RNA, 19 nt, Homo sapiens
  misc_RNA (1)...(19): siRNA sense strand
ugaagguggugaauuacuu

SEQ ID NO: 157110 - RNA, 19 nt, Homo sapiens
  misc_RNA (1)...(19): siRNA sense strand
agaucaagcugaagaugaa

SEQ ID NO: 157111 - RNA, 19 nt, Homo sapiens
  misc_RNA (1)...(19): siRNA sense strand
ccucugagaucaagcugaa

SEQ ID NO: 157112 - RNA, 19 nt, Homo sapiens
  misc_RNA (1)...(19): siRNA sense strand
guuggaaacuacucuuguu

SEQ ID NO: 157113 - RNA, 19 nt, Homo sapiens
  misc_RNA (1)...(19): siRNA sense strand
ggacauccuuuggcugugu

SEQ ID NO: 157114 - RNA, 19 nt, Homo sapiens
  misc_RNA (1)...(19): siRNA sense strand
cggaauacuuagacauuga

SEQ ID NO: 157115 - RNA, 19 nt, Homo sapiens
  misc_RNA (1)...(19): siRNA sense strand
uaugccaccugcaccaaua

SEQ ID NO: 157116 - RNA, 19 nt, Homo sapiens
  misc_RNA (1)...(19): siRNA sense strand
ccuggaagcuucugagaca

SEQ ID NO: 157117 - RNA, 19 nt, Homo sapiens
  misc_RNA (1)...(19): siRNA sense strand
gaauuucacagaccaagga

SEQ ID NO: 157118 - RNA, 19 nt, Homo sapiens
  misc_RNA (1)...(19): siRNA sense strand
cauaagacccacacggaaa

SEQ ID NO: 157119 - RNA, 19 nt, Homo sapiens
  misc_RNA (1)...(19): siRNA sense strand
uauaccaucugcagcugua

SEQ ID NO: 157120 - RNA, 19 nt, Homo sapiens
  misc_RNA (1)...(19): siRNA sense strand
gacaaagugugugaaaaua

SEQ ID NO: 157121 - RNA, 19 nt, Homo sapiens
  misc_RNA (1)...(19): siRNA sense strand
gaaaugugccccaucaauu

SEQ ID NO: 157122 - RNA, 19 nt, Homo sapiens
  misc_RNA (1)...(19): siRNA sense strand
caaagcaucgugugaagau

SEQ ID NO: 157123 - RNA, 19 nt, Homo sapiens
  misc_RNA (1)...(19): siRNA sense strand
cacaaaggguaauaacugu

SEQ ID NO: 157124 - RNA, 19 nt, Homo sapiens
  misc_RNA (1)...(19): siRNA sense strand
aaugagcgcuucuucaaag

SEQ ID NO: 157125 - RNA, 19 nt, Homo sapiens
  misc_RNA (1)...(19): siRNA sense strand
gacggaauacuuagacauu

SEQ ID NO: 157126 - RNA, 19 nt, Homo sapiens
  misc_RNA (1)...(19): siRNA sense strand
agaaugcagugaagagaau

SEQ ID NO: 157127 - RNA, 19 nt, Homo sapiens
  misc_RNA (1)...(19): siRNA sense strand
uggagaacauucagccaaa

SEQ ID NO: 157128 - RNA, 19 nt, Homo sapiens
  misc_RNA (1)...(19): siRNA sense strand
gcagcuguuuagaugguuu

SEQ ID NO: 157129 - RNA, 19 nt, Homo sapiens
  misc_RNA (1)...(19): siRNA sense strand
ccacagggcuauggaaugc

SEQ ID NO: 157130 - RNA, 19 nt, Homo sapiens
  misc_RNA (1)...(19): siRNA sense strand
gugaagagaaugugacguu

SEQ ID NO: 157131 - RNA, 19 nt, Homo sapiens
  misc_RNA (1)...(19): siRNA sense strand
agagcaaaguuaucaacaa

SEQ ID NO: 157132 - RNA, 19 nt, Homo sapiens
  misc_RNA (1)...(19): siRNA sense strand
auaagcagauccagcaaug

SEQ ID NO: 157133 - RNA, 19 nt, Homo sapiens
  misc_RNA (1)...(19): siRNA sense strand
aggguucucuucaaaugua

SEQ ID NO: 157134 - RNA, 19 nt, Homo sapiens
  misc_RNA (1)...(19): siRNA sense strand
ggcaauuucuccuguacug

SEQ ID NO: 157135 - RNA, 19 nt, Homo sapiens
  misc_RNA (1)...(19): siRNA sense strand
ggaaacccucagcaaauau

SEQ ID NO: 157136 - RNA, 19 nt, Homo sapiens
  misc_RNA (1)...(19): siRNA sense strand
gaugcaaagauauugauga

SEQ ID NO: 157137 - RNA, 19 nt, Homo sapiens
  misc_RNA (1)...(19): siRNA sense strand
gcuguaaucagauggcaaa

SEQ ID NO: 157138 - RNA, 19 nt, Homo sapiens
  misc_RNA (1)...(19): siRNA sense strand
acacaaaggguaauaacug

SEQ ID NO: 157139 - RNA, 19 nt, Homo sapiens
  misc_RNA (1)...(19): siRNA sense strand
gugugaagauauugaugaa

SEQ ID NO: 157140 - RNA, 19 nt, Homo sapiens
  misc_RNA (1)...(19): siRNA sense strand
caacuuguaauaacacugu

SEQ ID NO: 157141 - RNA, 19 nt, Homo sapiens
  misc_RNA (1)...(19): siRNA sense strand
caaacacaaaggguaauaa

SEQ ID NO: 157142 - RNA, 19 nt, Homo sapiens
  misc_RNA (1)...(19): siRNA sense strand
uggaaucgguuuuaaauga

SEQ ID NO: 157143 - RNA, 19 nt, Homo sapiens
  misc_RNA (1)...(19): siRNA sense strand
agagggaaccgcagugaaa

SEQ ID NO: 157144 - RNA, 19 nt, Homo sapiens
  misc_RNA (1)...(19): siRNA sense strand
ccaaacacaaaggguaaua

SEQ ID NO: 157145 - RNA, 19 nt, Homo sapiens
  misc_RNA (1)...(19): siRNA sense strand
aagaugugauacccgauaa

SEQ ID NO: 157146 - RNA, 19 nt, Homo sapiens
  misc_RNA (1)...(19): siRNA sense strand
gcugugauacuguucuuga

SEQ ID NO: 157147 - RNA, 19 nt, Homo sapiens
  misc_RNA (1)...(19): siRNA sense strand
aagagaaugugacguugga

SEQ ID NO: 157148 - RNA, 19 nt, Homo sapiens
  misc_RNA (1)...(19): siRNA sense strand
ggacaaagugugugaaaau

SEQ ID NO: 157149 - RNA, 19 nt, Homo sapiens
  misc_RNA (1)...(19): siRNA sense strand
caaaggguaauaacuguag

SEQ ID NO: 157150 - RNA, 19 nt, Homo sapiens
  misc_RNA (1)...(19): siRNA sense strand
cauuagccauguaggcauu

SEQ ID NO: 157151 - RNA, 19 nt, Homo sapiens
  misc_RNA (1)...(19): siRNA sense strand
aagugcagcuguuuagaug

SEQ ID NO: 157152 - RNA, 19 nt, Homo sapiens
  misc_RNA (1)...(19): siRNA sense strand
gguggaggcugugauacug

SEQ ID NO: 157153 - RNA, 19 nt, Homo sapiens
  misc_RNA (1)...(19): siRNA sense strand
gcugguggaggcugugaua

SEQ ID NO: 157154 - RNA, 19 nt, Homo sapiens
  misc_RNA (1)...(19): siRNA sense strand
ggagaacauucagccaaag

SEQ ID NO: 157155 - RNA, 19 nt, Homo sapiens
  misc_RNA (1)...(19): siRNA sense strand
gaaugugacguuggacuug

SEQ ID NO: 157156 - RNA, 19 nt, Homo sapiens
  misc_RNA (1)...(19): siRNA sense strand
caaagaaugcagugaagag

SEQ ID NO: 157157 - RNA, 19 nt, Homo sapiens
  misc_RNA (1)...(19): siRNA sense strand
gcauaugucuccuuuugug

SEQ ID NO: 157158 - RNA, 19 nt, Homo sapiens
  misc_RNA (1)...(19): siRNA sense strand
caaaggguucucuucaaau

SEQ ID NO: 157159 - RNA, 19 nt, Homo sapiens
  misc_RNA (1)...(19): siRNA sense strand
gaaacuccaccugugaaga

SEQ ID NO: 157160 - RNA, 19 nt, Homo sapiens
  misc_RNA (1)...(19): siRNA sense strand
gaaacccucagcaaauauc

SEQ ID NO: 157161 - RNA, 19 nt, Homo sapiens
  misc_RNA (1)...(19): siRNA sense strand
gaugagugccgccaagauc

SEQ ID NO: 157162 - RNA, 19 nt, Homo sapiens
  misc_RNA (1)...(19): siRNA sense strand
gaccaaggaguggaaugua

SEQ ID NO: 157163 - RNA, 19 nt, Homo sapiens
  misc_RNA (1)...(19): siRNA sense strand
gaugaaugcacugaaaugu

SEQ ID NO: 157164 - RNA, 19 nt, Homo sapiens
  misc_RNA (1)...(19): siRNA sense strand
cuucagcucucgcaacauc

SEQ ID NO: 157165 - RNA, 19 nt, Homo sapiens
  misc_RNA (1)...(19): siRNA sense strand
guagagacaguaccuugug

SEQ ID NO: 157166 - RNA, 19 nt, Homo sapiens
  misc_RNA (1)...(19): siRNA sense strand
cagugaaaccugcauaugu

SEQ ID NO: 157167 - RNA, 19 nt, Homo sapiens
  misc_RNA (1)...(19): siRNA sense strand
ccaucaaccugugguccua

SEQ ID NO: 157168 - RNA, 19 nt, Homo sapiens
  misc_RNA (1)...(19): siRNA sense strand
ggacauaacuuccguaauc

SEQ ID NO: 157169 - RNA, 19 nt, Homo sapiens
  misc_RNA (1)...(19): siRNA sense strand
gcaacaagcuggccaugca

SEQ ID NO: 157170 - RNA, 19 nt, Homo sapiens
  misc_RNA (1)...(19): siRNA sense strand
gcugagggauggagacaaa

SEQ ID NO: 157171 - RNA, 19 nt, Homo sapiens
  misc_RNA (1)...(19): siRNA sense strand
ccacugauccuucccgaua

SEQ ID NO: 157172 - RNA, 19 nt, Homo sapiens
  misc_RNA (1)...(19): siRNA sense strand
agacaaacagcguuacuua

SEQ ID NO: 157173 - RNA, 19 nt, Homo sapiens
  misc_RNA (1)...(19): siRNA sense strand
gcaaggaugccaccaaugu

SEQ ID NO: 157174 - RNA, 19 nt, Homo sapiens
  misc_RNA (1)...(19): siRNA sense strand
cugaacgucuggcuaaaua

SEQ ID NO: 157175 - RNA, 19 nt, Homo sapiens
  misc_RNA (1)...(19): siRNA sense strand
ggacaaauacggcaaggau

SEQ ID NO: 157176 - RNA, 19 nt, Homo sapiens
  misc_RNA (1)...(19): siRNA sense strand
gcaaauaugacuuggacuu

SEQ ID NO: 157177 - RNA, 19 nt, Homo sapiens
  misc_RNA (1)...(19): siRNA sense strand
ggacugagaacaaauccaa

SEQ ID NO: 157178 - RNA, 19 nt, Homo sapiens
  misc_RNA (1)...(19): siRNA sense strand
gaaggaagccaucgacaag

SEQ ID NO: 157179 - RNA, 19 nt, Homo sapiens
  misc_RNA (1)...(19): siRNA sense strand
ggaugggacugagaacaaa

SEQ ID NO: 157180 - RNA, 19 nt, Homo sapiens
  misc_RNA (1)...(19): siRNA sense strand
gugcagaggucuaccauac

SEQ ID NO: 157181 - RNA, 19 nt, Homo sapiens
  misc_RNA (1)...(19): siRNA sense strand
gcaacugucugcugcucaa

SEQ ID NO: 157182 - RNA, 19 nt, Homo sapiens
  misc_RNA (1)...(19): siRNA sense strand
ggagguggaucucuauacu

SEQ ID NO: 157183 - RNA, 19 nt, Homo sapiens
  misc_RNA (1)...(19): siRNA sense strand
acaaccagcucaugagaau

SEQ ID NO: 157184 - RNA, 19 nt, Homo sapiens
  misc_RNA (1)...(19): siRNA sense strand
caaguucacagccaaugua

SEQ ID NO: 157185 - RNA, 19 nt, Homo sapiens
  misc_RNA (1)...(19): siRNA sense strand
ucaagggagucaucaagga

SEQ ID NO: 157186 - RNA, 19 nt, Homo sapiens
  misc_RNA (1)...(19): siRNA sense strand
ggugaugaccugacaguga

SEQ ID NO: 157187 - RNA, 19 nt, Homo sapiens
  misc_RNA (1)...(19): siRNA sense strand
gaaacuggacaaccugaug

SEQ ID NO: 157188 - RNA, 19 nt, Homo sapiens
  misc_RNA (1)...(19): siRNA sense strand
gaacgucuggcuaaauaca

SEQ ID NO: 157189 - RNA, 19 nt, Homo sapiens
  misc_RNA (1)...(19): siRNA sense strand
gcagaggucuaccauacac

SEQ ID NO: 157190 - RNA, 19 nt, Homo sapiens
  misc_RNA (1)...(19): siRNA sense strand
ugagaacaaauccaaguuu

SEQ ID NO: 157191 - RNA, 19 nt, Homo sapiens
  misc_RNA (1)...(19): siRNA sense strand
gaucaaugguggcucucau

SEQ ID NO: 157192 - RNA, 19 nt, Homo sapiens
  misc_RNA (1)...(19): siRNA sense strand
caguggagguggaucucua

SEQ ID NO: 157193 - RNA, 19 nt, Homo sapiens
  misc_RNA (1)...(19): siRNA sense strand
aggcaaagguguccugaag

SEQ ID NO: 157194 - RNA, 19 nt, Homo sapiens
  misc_RNA (1)...(19): siRNA sense strand
gcacaggccagaucaagac

SEQ ID NO: 157195 - RNA, 19 nt, Homo sapiens
  misc_RNA (1)...(19): siRNA sense strand
gagagacugaggacacauu

SEQ ID NO: 157196 - RNA, 19 nt, Homo sapiens
  misc_RNA (1)...(19): siRNA sense strand
ggacccauuugaccaggau

SEQ ID NO: 157197 - RNA, 19 nt, Homo sapiens
  misc_RNA (1)...(19): siRNA sense strand
aaauaugacuuggacuuca

SEQ ID NO: 157198 - RNA, 19 nt, Homo sapiens
  misc_RNA (1)...(19): siRNA sense strand
ccaauauccuggagaacag

SEQ ID NO: 157199 - RNA, 19 nt, Homo sapiens
  misc_RNA (1)...(19): siRNA sense strand
ucaugagaauugaggaaga

SEQ ID NO: 157200 - RNA, 19 nt, Homo sapiens
  misc_RNA (1)...(19): siRNA sense strand
ggaucucuauacugccaaa

SEQ ID NO: 157201 - RNA, 19 nt, Homo sapiens
  misc_RNA (1)...(19): siRNA sense strand
aaauacaaccagcucauga

SEQ ID NO: 157202 - RNA, 19 nt, Homo sapiens
  misc_RNA (1)...(19): siRNA sense strand
agucaucgcucaggagaga

SEQ ID NO: 157203 - RNA, 19 nt, Homo sapiens
  misc_RNA (1)...(19): siRNA sense strand
caauguagggauccagauu

SEQ ID NO: 157204 - RNA, 19 nt, Homo sapiens
  misc_RNA (1)...(19): siRNA sense strand
aauaugacuuggacuucaa

SEQ ID NO: 157205 - RNA, 19 nt, Homo sapiens
  misc_RNA (1)...(19): siRNA sense strand
ugacagugaccaacccaaa

SEQ ID NO: 157206 - RNA, 19 nt, Homo sapiens
  misc_RNA (1)...(19): siRNA sense strand
ccauugaggacccauuuga

SEQ ID NO: 157207 - RNA, 19 nt, Homo sapiens
  misc_RNA (1)...(19): siRNA sense strand
ugaaggaagccaucgacaa

SEQ ID NO: 157208 - RNA, 19 nt, Homo sapiens
  misc_RNA (1)...(19): siRNA sense strand
caaauaugacuuggacuuc

SEQ ID NO: 157209 - RNA, 19 nt, Homo sapiens
  misc_RNA (1)...(19): siRNA sense strand
ggucuaccauacacucaag

SEQ ID NO: 157210 - RNA, 19 nt, Homo sapiens
  misc_RNA (1)...(19): siRNA sense strand
gacaaacagcguuacuuag

SEQ ID NO: 157211 - RNA, 19 nt, Homo sapiens
  misc_RNA (1)...(19): siRNA sense strand
gaucggcucggucacugaa

SEQ ID NO: 157212 - RNA, 19 nt, Homo sapiens
  misc_RNA (1)...(19): siRNA sense strand
gaucguuauuggcauggau

SEQ ID NO: 157213 - RNA, 19 nt, Homo sapiens
  misc_RNA (1)...(19): siRNA sense strand
gagacaaacagcguuacuu

SEQ ID NO: 157214 - RNA, 19 nt, Homo sapiens
  misc_RNA (1)...(19): siRNA sense strand
aagagaaacuggacaaccu

SEQ ID NO: 157215 - RNA, 19 nt, Homo sapiens
  misc_RNA (1)...(19): siRNA sense strand
cauuugaccaggaugauug

SEQ ID NO: 157216 - RNA, 19 nt, Homo sapiens
  misc_RNA (1)...(19): siRNA sense strand
ccucuacgggcaucuauga

SEQ ID NO: 157217 - RNA, 19 nt, Homo sapiens
  misc_RNA (1)...(19): siRNA sense strand
guuauuggcauggauguug

SEQ ID NO: 157218 - RNA, 19 nt, Homo sapiens
  misc_RNA (1)...(19): siRNA sense strand
aaccagcucaugagaauug

SEQ ID NO: 157219 - RNA, 19 nt, Homo sapiens
  misc_RNA (1)...(19): siRNA sense strand
uaaauacaaccagcucaug

SEQ ID NO: 157220 - RNA, 19 nt, Homo sapiens
  misc_RNA (1)...(19): siRNA sense strand
acaaacagcguuacuuagg

SEQ ID NO: 157221 - RNA, 19 nt, Homo sapiens
  misc_RNA (1)...(19): siRNA sense strand
gauccuucccgauacauca

SEQ ID NO: 157222 - RNA, 19 nt, Homo sapiens
  misc_RNA (1)...(19): siRNA sense strand
cuucaagucucccacugau

SEQ ID NO: 157223 - RNA, 19 nt, Homo sapiens
  misc_RNA (1)...(19): siRNA sense strand
cggaaaagaucguuauugg

SEQ ID NO: 157224 - RNA, 19 nt, Homo sapiens
  misc_RNA (1)...(19): siRNA sense strand
ucucugugguggagcaaga

SEQ ID NO: 157225 - RNA, 19 nt, Homo sapiens
  misc_RNA (1)...(19): siRNA sense strand
caugagaauugaggaagag

SEQ ID NO: 157226 - RNA, 19 nt, Homo sapiens
  misc_RNA (1)...(19): siRNA sense strand
caaggaugccaccaaugug

SEQ ID NO: 157227 - RNA, 19 nt, Homo sapiens
  misc_RNA (1)...(19): siRNA sense strand
uuaucgugauggcaaauau

SEQ ID NO: 157228 - RNA, 19 nt, Homo sapiens
  misc_RNA (1)...(19): siRNA sense strand
ucucuauacugccaaaggu

SEQ ID NO: 157229 - RNA, 19 nt, Homo sapiens
  misc_RNA (1)...(19): siRNA sense strand
aaggcuggcuacacggaaa

SEQ ID NO: 157230 - RNA, 19 nt, Homo sapiens
  misc_RNA (1)...(19): siRNA sense strand
caucagcucaggucucucu

SEQ ID NO: 157231 - RNA, 19 nt, Homo sapiens
  misc_RNA (1)...(19): siRNA sense strand
gacauaacuuccguaaucc

SEQ ID NO: 157232 - RNA, 19 nt, Homo sapiens
  misc_RNA (1)...(19): siRNA sense strand
ggagacaaacagcguuacu

SEQ ID NO: 157233 - RNA, 19 nt, Homo sapiens
  misc_RNA (1)...(19): siRNA sense strand
gacugaggacacauucauu

SEQ ID NO: 157234 - RNA, 19 nt, Homo sapiens
  misc_RNA (1)...(19): siRNA sense strand
gcucaaggucaaccagauc

SEQ ID NO: 157235 - RNA, 19 nt, Homo sapiens
  misc_RNA (1)...(19): siRNA sense strand
gagucaucaaggacaaaua

SEQ ID NO: 157236 - RNA, 19 nt, Homo sapiens
  misc_RNA (1)...(19): siRNA sense strand
ggagucaucaaggacaaau

SEQ ID NO: 157237 - RNA, 19 nt, Homo sapiens
  misc_RNA (1)...(19): siRNA sense strand
gagcgggcaguggaagaaa

SEQ ID NO: 157238 - RNA, 19 nt, Homo sapiens
  misc_RNA (1)...(19): siRNA sense strand
uggaugggacugagaacaa

SEQ ID NO: 157239 - RNA, 19 nt, Homo sapiens
  misc_RNA (1)...(19): siRNA sense strand
cagcguuacuuaggcaaag

SEQ ID NO: 157240 - RNA, 19 nt, Homo sapiens
  misc_RNA (1)...(19): siRNA sense strand
acaaccugaugcuggaguu

SEQ ID NO: 157241 - RNA, 19 nt, Homo sapiens
  misc_RNA (1)...(19): siRNA sense strand
gagaauaaguccaaguuug

SEQ ID NO: 157242 - RNA, 19 nt, Homo sapiens
  misc_RNA (1)...(19): siRNA sense strand
gaaacaagcuggccaugca

SEQ ID NO: 157243 - RNA, 19 nt, Homo sapiens
  misc_RNA (1)...(19): siRNA sense strand
gaagaaggccugcaacugu

SEQ ID NO: 157244 - RNA, 19 nt, Homo sapiens
  misc_RNA (1)...(19): siRNA sense strand
gcaacugucugcugcugaa

SEQ ID NO: 157245 - RNA, 19 nt, Homo sapiens
  misc_RNA (1)...(19): siRNA sense strand
ggaaggaugccaccaaugu

SEQ ID NO: 157246 - RNA, 19 nt, Homo sapiens
  misc_RNA (1)...(19): siRNA sense strand
ugggaacccugaccucaua

SEQ ID NO: 157247 - RNA, 19 nt, Homo sapiens
  misc_RNA (1)...(19): siRNA sense strand
cggagcgucuggccaaaua

SEQ ID NO: 157248 - RNA, 19 nt, Homo sapiens
  misc_RNA (1)...(19): siRNA sense strand
uagaugggaccgagaauaa

SEQ ID NO: 157249 - RNA, 19 nt, Homo sapiens
  misc_RNA (1)...(19): siRNA sense strand
ucggagagcuguauaagag

SEQ ID NO: 157250 - RNA, 19 nt, Homo sapiens
  misc_RNA (1)...(19): siRNA sense strand
caaauacaaccaacucaug

SEQ ID NO: 157251 - RNA, 19 nt, Homo sapiens
  misc_RNA (1)...(19): siRNA sense strand
gugccagccuucaauguga

SEQ ID NO: 157252 - RNA, 19 nt, Homo sapiens
  misc_RNA (1)...(19): siRNA sense strand
caaugugggugaugaaggu

SEQ ID NO: 157253 - RNA, 19 nt, Homo sapiens
  misc_RNA (1)...(19): siRNA sense strand
ccaacauccuggagaacaa

SEQ ID NO: 157254 - RNA, 19 nt, Homo sapiens
  misc_RNA (1)...(19): siRNA sense strand
acuaagagacggagacaaa

SEQ ID NO: 157255 - RNA, 19 nt, Homo sapiens
  misc_RNA (1)...(19): siRNA sense strand
ggcagcaucugaguucuau

SEQ ID NO: 157256 - RNA, 19 nt, Homo sapiens
  misc_RNA (1)...(19): siRNA sense strand
cuaugaggcucuggaacua

SEQ ID NO: 157257 - RNA, 19 nt, Homo sapiens
  misc_RNA (1)...(19): siRNA sense strand
gcacaggacagaucaagac

SEQ ID NO: 157258 - RNA, 19 nt, Homo sapiens
  misc_RNA (1)...(19): siRNA sense strand
gggugaacauccagauugu

SEQ ID NO: 157259 - RNA, 19 nt, Homo sapiens
  misc_RNA (1)...(19): siRNA sense strand
caaggaagccaugcgcauu

SEQ ID NO: 157260 - RNA, 19 nt, Homo sapiens
  misc_RNA (1)...(19): siRNA sense strand
aaauacaaccaacucauga

SEQ ID NO: 157261 - RNA, 19 nt, Homo sapiens
  misc_RNA (1)...(19): siRNA sense strand
gcaaugggaaguacgaucu

SEQ ID NO: 157262 - RNA, 19 nt, Homo sapiens
  misc_RNA (1)...(19): siRNA sense strand
gaaggaugccaccaaugug

SEQ ID NO: 157263 - RNA, 19 nt, Homo sapiens
  misc_RNA (1)...(19): siRNA sense strand
gaacuaagagacggagaca

SEQ ID NO: 157264 - RNA, 19 nt, Homo sapiens
  misc_RNA (1)...(19): siRNA sense strand
ggacgcaaguuccguaacc

SEQ ID NO: 157265 - RNA, 19 nt, Homo sapiens
  misc_RNA (1)...(19): siRNA sense strand
ugaaggcuguggagaacau

SEQ ID NO: 157266 - RNA, 19 nt, Homo sapiens
  misc_RNA (1)...(19): siRNA sense strand
ggucaucaaggccaaguau

SEQ ID NO: 157267 - RNA, 19 nt, Homo sapiens
  misc_RNA (1)...(19): siRNA sense strand
acaaccaacucaugaggau

SEQ ID NO: 157268 - RNA, 19 nt, Homo sapiens
  misc_RNA (1)...(19): siRNA sense strand
cgagaauaaguccaaguuu

SEQ ID NO: 157269 - RNA, 19 nt, Homo sapiens
  misc_RNA (1)...(19): siRNA sense strand
cacccaacauccuggagaa

SEQ ID NO: 157270 - RNA, 19 nt, Homo sapiens
  misc_RNA (1)...(19): siRNA sense strand
gaugggaccgagaauaagu

SEQ ID NO: 157271 - RNA, 19 nt, Homo sapiens
  misc_RNA (1)...(19): siRNA sense strand
agagcuuuaucaagaacua

SEQ ID NO: 157272 - RNA, 19 nt, Homo sapiens
  misc_RNA (1)...(19): siRNA sense strand
gauccaggcgugcaaacug

SEQ ID NO: 157273 - RNA, 19 nt, Homo sapiens
  misc_RNA (1)...(19): siRNA sense strand
gcacaucacuggggagaag

SEQ ID NO: 157274 - RNA, 19 nt, Homo sapiens
  misc_RNA (1)...(19): siRNA sense strand
gagaagaaggccugcaacu

SEQ ID NO: 157275 - RNA, 19 nt, Homo sapiens
  misc_RNA (1)...(19): siRNA sense strand
caggaugacugggccacuu

SEQ ID NO: 157276 - RNA, 19 nt, Homo sapiens
  misc_RNA (1)...(19): siRNA sense strand
uaagagcuuuaucaagaac

SEQ ID NO: 157277 - RNA, 19 nt, Homo sapiens
  misc_RNA (1)...(19): siRNA sense strand
cuagaugggaccgagaaua

SEQ ID NO: 157278 - RNA, 19 nt, Homo sapiens
  misc_RNA (1)...(19): siRNA sense strand
ccgagaauaaguccaaguu

SEQ ID NO: 157279 - RNA, 19 nt, Homo sapiens
  misc_RNA (1)...(19): siRNA sense strand
gggagacugaggacacauu

SEQ ID NO: 157280 - RNA, 19 nt, Homo sapiens
  misc_RNA (1)...(19): siRNA sense strand
ccaaauacaaccaacucau

SEQ ID NO: 157281 - RNA, 19 nt, Homo sapiens
  misc_RNA (1)...(19): siRNA sense strand
ggagacugaggacacauuc

SEQ ID NO: 157282 - RNA, 19 nt, Homo sapiens
  misc_RNA (1)...(19): siRNA sense strand
ugggaaggaugccaccaau

SEQ ID NO: 157283 - RNA, 19 nt, Homo sapiens
  misc_RNA (1)...(19): siRNA sense strand
auucauugcugaccuugug

SEQ ID NO: 157284 - RNA, 19 nt, Homo sapiens
  misc_RNA (1)...(19): siRNA sense strand
augcaggaguucaugauuc

SEQ ID NO: 157285 - RNA, 19 nt, Homo sapiens
  misc_RNA (1)...(19): siRNA sense strand
gcccugcucugcugcaaaa

SEQ ID NO: 157286 - RNA, 19 nt, Homo sapiens
  misc_RNA (1)...(19): siRNA sense strand
ggccaaguaugggaaggau

SEQ ID NO: 157287 - RNA, 19 nt, Homo sapiens
  misc_RNA (1)...(19): siRNA sense strand
ucugaguucuaucgcaaug

SEQ ID NO: 157288 - RNA, 19 nt, Homo sapiens
  misc_RNA (1)...(19): siRNA sense strand
cacauucauugcugaccuu

SEQ ID NO: 157289 - RNA, 19 nt, Homo sapiens
  misc_RNA (1)...(19): siRNA sense strand
gacugaggacacauucauu

SEQ ID NO: 157290 - RNA, 19 nt, Homo sapiens
  misc_RNA (1)...(19): siRNA sense strand
gagcgucuggccaaauaca

SEQ ID NO: 157291 - RNA, 19 nt, Homo sapiens
  misc_RNA (1)...(19): siRNA sense strand
ugcaggaguucaugauucu

SEQ ID NO: 157292 - RNA, 19 nt, Homo sapiens
  misc_RNA (1)...(19): siRNA sense strand
ccugaaggcuguggagaac

SEQ ID NO: 157293 - RNA, 19 nt, Homo sapiens
  misc_RNA (1)...(19): siRNA sense strand
aaugggaaguacgaucuug

SEQ ID NO: 157294 - RNA, 19 nt, Homo sapiens
  misc_RNA (1)...(19): siRNA sense strand
caacauccuggagaacaau

SEQ ID NO: 157295 - RNA, 19 nt, Homo sapiens
  misc_RNA (1)...(19): siRNA sense strand
gaacccugaccucauacuc

SEQ ID NO: 157296 - RNA, 19 nt, Homo sapiens
  misc_RNA (1)...(19): siRNA sense strand
uaagagacggagacaaagg

SEQ ID NO: 157297 - RNA, 19 nt, Homo sapiens
  misc_RNA (1)...(19): siRNA sense strand
aaggaagccaugcgcauug

SEQ ID NO: 157298 - RNA, 19 nt, Homo sapiens
  misc_RNA (1)...(19): siRNA sense strand
gagaauaaguccaaguuug

SEQ ID NO: 157299 - RNA, 19 nt, Homo sapiens
  misc_RNA (1)...(19): siRNA sense strand
gaaacaagcuggccaugca

SEQ ID NO: 157300 - RNA, 19 nt, Homo sapiens
  misc_RNA (1)...(19): siRNA sense strand
gaagaaggccugcaacugu

SEQ ID NO: 157301 - RNA, 19 nt, Homo sapiens
  misc_RNA (1)...(19): siRNA sense strand
gcaacugucugcugcugaa

SEQ ID NO: 157302 - RNA, 19 nt, Homo sapiens
  misc_RNA (1)...(19): siRNA sense strand
ggaaggaugccaccaaugu

SEQ ID NO: 157303 - RNA, 19 nt, Homo sapiens
  misc_RNA (1)...(19): siRNA sense strand
ugggaacccugaccucaua

SEQ ID NO: 157304 - RNA, 19 nt, Homo sapiens
  misc_RNA (1)...(19): siRNA sense strand
cggagcgucuggccaaaua

SEQ ID NO: 157305 - RNA, 19 nt, Homo sapiens
  misc_RNA (1)...(19): siRNA sense strand
uagaugggaccgagaauaa

SEQ ID NO: 157306 - RNA, 19 nt, Homo sapiens
  misc_RNA (1)...(19): siRNA sense strand
ucggagagcuguauaagag

SEQ ID NO: 157307 - RNA, 19 nt, Homo sapiens
  misc_RNA (1)...(19): siRNA sense strand
caaauacaaccaacucaug

SEQ ID NO: 157308 - RNA, 19 nt, Homo sapiens
  misc_RNA (1)...(19): siRNA sense strand
gugccagccuucaauguga

SEQ ID NO: 157309 - RNA, 19 nt, Homo sapiens
  misc_RNA (1)...(19): siRNA sense strand
caaugugggugaugaaggu

SEQ ID NO: 157310 - RNA, 19 nt, Homo sapiens
  misc_RNA (1)...(19): siRNA sense strand
ccaacauccuggagaacaa

SEQ ID NO: 157311 - RNA, 19 nt, Homo sapiens
  misc_RNA (1)...(19): siRNA sense strand
acuaagagacggagacaaa

SEQ ID NO: 157312 - RNA, 19 nt, Homo sapiens
  misc_RNA (1)...(19): siRNA sense strand
ggcagcaucugaguucuau

SEQ ID NO: 157313 - RNA, 19 nt, Homo sapiens
  misc_RNA (1)...(19): siRNA sense strand
cuaugaggcucuggaacua

SEQ ID NO: 157314 - RNA, 19 nt, Homo sapiens
  misc_RNA (1)...(19): siRNA sense strand
gcacaggacagaucaagac

SEQ ID NO: 157315 - RNA, 19 nt, Homo sapiens
  misc_RNA (1)...(19): siRNA sense strand
gggugaacauccagauugu

SEQ ID NO: 157316 - RNA, 19 nt, Homo sapiens
  misc_RNA (1)...(19): siRNA sense strand
caaggaagccaugcgcauu

SEQ ID NO: 157317 - RNA, 19 nt, Homo sapiens
  misc_RNA (1)...(19): siRNA sense strand
aaauacaaccaacucauga

SEQ ID NO: 157318 - RNA, 19 nt, Homo sapiens
  misc_RNA (1)...(19): siRNA sense strand
gcaaugggaaguacgaucu

SEQ ID NO: 157319 - RNA, 19 nt, Homo sapiens
  misc_RNA (1)...(19): siRNA sense strand
gaaggaugccaccaaugug

SEQ ID NO: 157320 - RNA, 19 nt, Homo sapiens
  misc_RNA (1)...(19): siRNA sense strand
gaacuaagagacggagaca

SEQ ID NO: 157321 - RNA, 19 nt, Homo sapiens
  misc_RNA (1)...(19): siRNA sense strand
ggacgcaaguuccguaacc

SEQ ID NO: 157322 - RNA, 19 nt, Homo sapiens
  misc_RNA (1)...(19): siRNA sense strand
ugaaggcuguggagaacau

SEQ ID NO: 157323 - RNA, 19 nt, Homo sapiens
  misc_RNA (1)...(19): siRNA sense strand
ggucaucaaggccaaguau

SEQ ID NO: 157324 - RNA, 19 nt, Homo sapiens
  misc_RNA (1)...(19): siRNA sense strand
acaaccaacucaugaggau

SEQ ID NO: 157325 - RNA, 19 nt, Homo sapiens
  misc_RNA (1)...(19): siRNA sense strand
cgagaauaaguccaaguuu

SEQ ID NO: 157326 - RNA, 19 nt, Homo sapiens
  misc_RNA (1)...(19): siRNA sense strand
cacccaacauccuggagaa

SEQ ID NO: 157327 - RNA, 19 nt, Homo sapiens
  misc_RNA (1)...(19): siRNA sense strand
gaugggaccgagaauaagu

SEQ ID NO: 157328 - RNA, 19 nt, Homo sapiens
  misc_RNA (1)...(19): siRNA sense strand
agagcuuuaucaagaacua

SEQ ID NO: 157329 - RNA, 19 nt, Homo sapiens
  misc_RNA (1)...(19): siRNA sense strand
gauccaggcgugcaaacug

SEQ ID NO: 157330 - RNA, 19 nt, Homo sapiens
  misc_RNA (1)...(19): siRNA sense strand
gcacaucacuggggagaag

SEQ ID NO: 157331 - RNA, 19 nt, Homo sapiens
  misc_RNA (1)...(19): siRNA sense strand
gagaagaaggccugcaacu

SEQ ID NO: 157332 - RNA, 19 nt, Homo sapiens
  misc_RNA (1)...(19): siRNA sense strand
caggaugacugggccacuu

SEQ ID NO: 157333 - RNA, 19 nt, Homo sapiens
  misc_RNA (1)...(19): siRNA sense strand
uaagagcuuuaucaagaac

SEQ ID NO: 157334 - RNA, 19 nt, Homo sapiens
  misc_RNA (1)...(19): siRNA sense strand
cuagaugggaccgagaaua

SEQ ID NO: 157335 - RNA, 19 nt, Homo sapiens
  misc_RNA (1)...(19): siRNA sense strand
ccgagaauaaguccaaguu

SEQ ID NO: 157336 - RNA, 19 nt, Homo sapiens
  misc_RNA (1)...(19): siRNA sense strand
gggagacugaggacacauu

SEQ ID NO: 157337 - RNA, 19 nt, Homo sapiens
  misc_RNA (1)...(19): siRNA sense strand
ccaaauacaaccaacucau

SEQ ID NO: 157338 - RNA, 19 nt, Homo sapiens
  misc_RNA (1)...(19): siRNA sense strand
ggagacugaggacacauuc

SEQ ID NO: 157339 - RNA, 19 nt, Homo sapiens
  misc_RNA (1)...(19): siRNA sense strand
ugggaaggaugccaccaau

SEQ ID NO: 157340 - RNA, 19 nt, Homo sapiens
  misc_RNA (1)...(19): siRNA sense strand
auucauugcugaccuugug

SEQ ID NO: 157341 - RNA, 19 nt, Homo sapiens
  misc_RNA (1)...(19): siRNA sense strand
augcaggaguucaugauuc

SEQ ID NO: 157342 - RNA, 19 nt, Homo sapiens
  misc_RNA (1)...(19): siRNA sense strand
gcccugcucugcugcaaaa

SEQ ID NO: 157343 - RNA, 19 nt, Homo sapiens
  misc_RNA (1)...(19): siRNA sense strand
ggccaaguaugggaaggau

SEQ ID NO: 157344 - RNA, 19 nt, Homo sapiens
  misc_RNA (1)...(19): siRNA sense strand
ucugaguucuaucgcaaug

SEQ ID NO: 157345 - RNA, 19 nt, Homo sapiens
  misc_RNA (1)...(19): siRNA sense strand
cacauucauugcugaccuu

SEQ ID NO: 157346 - RNA, 19 nt, Homo sapiens
  misc_RNA (1)...(19): siRNA sense strand
gacugaggacacauucauu

SEQ ID NO: 157347 - RNA, 19 nt, Homo sapiens
  misc_RNA (1)...(19): siRNA sense strand
gagcgucuggccaaauaca

SEQ ID NO: 157348 - RNA, 19 nt, Homo sapiens
  misc_RNA (1)...(19): siRNA sense strand
ugcaggaguucaugauucu

SEQ ID NO: 157349 - RNA, 19 nt, Homo sapiens
  misc_RNA (1)...(19): siRNA sense strand
ccugaaggcuguggagaac

SEQ ID NO: 157350 - RNA, 19 nt, Homo sapiens
  misc_RNA (1)...(19): siRNA sense strand
aaugggaaguacgaucuug

SEQ ID NO: 157351 - RNA, 19 nt, Homo sapiens
  misc_RNA (1)...(19): siRNA sense strand
caacauccuggagaacaau

SEQ ID NO: 157352 - RNA, 19 nt, Homo sapiens
  misc_RNA (1)...(19): siRNA sense strand
gaacccugaccucauacuc

SEQ ID NO: 157353 - RNA, 19 nt, Homo sapiens
  misc_RNA (1)...(19): siRNA sense strand
uaagagacggagacaaagg

SEQ ID NO: 157354 - RNA, 19 nt, Homo sapiens
  misc_RNA (1)...(19): siRNA sense strand
aaggaagccaugcgcauug

SEQ ID NO: 157355 - RNA, 19 nt, Homo sapiens
  misc_RNA (1)...(19): siRNA sense strand
gaugacagcuggauuucuu

SEQ ID NO: 157356 - RNA, 19 nt, Homo sapiens
  misc_RNA (1)...(19): siRNA sense strand
agaagaagcuggugaagga

SEQ ID NO: 157357 - RNA, 19 nt, Homo sapiens
  misc_RNA (1)...(19): siRNA sense strand
gcaaacaggccaucgauga

SEQ ID NO: 157358 - RNA, 19 nt, Homo sapiens
  misc_RNA (1)...(19): siRNA sense strand
gcagaugacagcuggauuu

SEQ ID NO: 157359 - RNA, 19 nt, Homo sapiens
  misc_RNA (1)...(19): siRNA sense strand
ucaagagggucaucgacua

SEQ ID NO: 157360 - RNA, 19 nt, Homo sapiens
  misc_RNA (1)...(19): siRNA sense strand
agaagaagaucgaggugau

SEQ ID NO: 157361 - RNA, 19 nt, Homo sapiens
  misc_RNA (1)...(19): siRNA sense strand
gaaggagauugggcggauu

SEQ ID NO: 157362 - RNA, 19 nt, Homo sapiens
  misc_RNA (1)...(19): siRNA sense strand
ugaaagccaagaagaagaa

SEQ ID NO: 157363 - RNA, 19 nt, Homo sapiens
  misc_RNA (1)...(19): siRNA sense strand
ccuccaagcucucugugau

SEQ ID NO: 157364 - RNA, 19 nt, Homo sapiens
  misc_RNA (1)...(19): siRNA sense strand
uggccaagcugaaggagau

SEQ ID NO: 157365 - RNA, 19 nt, Homo sapiens
  misc_RNA (1)...(19): siRNA sense strand
ccaagaagaagaagaucga

SEQ ID NO: 157366 - RNA, 19 nt, Homo sapiens
  misc_RNA (1)...(19): siRNA sense strand
ucaugaaagccaagaagaa

SEQ ID NO: 157367 - RNA, 19 nt, Homo sapiens
  misc_RNA (1)...(19): siRNA sense strand
caaacaggccaucgaugau

SEQ ID NO: 157368 - RNA, 19 nt, Homo sapiens
  misc_RNA (1)...(19): siRNA sense strand
gaaaguggagcgggagauc

SEQ ID NO: 157369 - RNA, 19 nt, Homo sapiens
  misc_RNA (1)...(19): siRNA sense strand
caagcucucugugaucagu

SEQ ID NO: 157370 - RNA, 19 nt, Homo sapiens
  misc_RNA (1)...(19): siRNA sense strand
ggugugaagcacuccauga

SEQ ID NO: 157371 - RNA, 19 nt, Homo sapiens
  misc_RNA (1)...(19): siRNA sense strand
ggagauugggcggauuuga

SEQ ID NO: 157372 - RNA, 19 nt, Homo sapiens
  misc_RNA (1)...(19): siRNA sense strand
cgacuacgccgugaagauc

SEQ ID NO: 157373 - RNA, 19 nt, Homo sapiens
  misc_RNA (1)...(19): siRNA sense strand
gggcaaacaggccaucgau

SEQ ID NO: 157374 - RNA, 19 nt, Homo sapiens
  misc_RNA (1)...(19): siRNA sense strand
gugugaagcacuccaugaa

SEQ ID NO: 157375 - RNA, 19 nt, Homo sapiens
  misc_RNA (1)...(19): siRNA sense strand
caugaaagccaagaagaag

SEQ ID NO: 157376 - RNA, 19 nt, Homo sapiens
  misc_RNA (1)...(19): siRNA sense strand
uccaagcucucugugauca

SEQ ID NO: 157377 - RNA, 19 nt, Homo sapiens
  misc_RNA (1)...(19): siRNA sense strand
ugacagcuggauuucuuga

SEQ ID NO: 157378 - RNA, 19 nt, Homo sapiens
  misc_RNA (1)...(19): siRNA sense strand
caagagggucaucgacuac

SEQ ID NO: 157379 - RNA, 19 nt, Homo sapiens
  misc_RNA (1)...(19): siRNA sense strand
aaggagauugggcggauuu

SEQ ID NO: 157380 - RNA, 19 nt, Homo sapiens
  misc_RNA (1)...(19): siRNA sense strand
gaacaaacaugaccuauga

SEQ ID NO: 157381 - RNA, 19 nt, Homo sapiens
  misc_RNA (1)...(19): siRNA sense strand
ggagcuggaugaacaaaua

SEQ ID NO: 157382 - RNA, 19 nt, Homo sapiens
  misc_RNA (1)...(19): siRNA sense strand
gaacaaauauaccaagaag

SEQ ID NO: 157383 - RNA, 19 nt, Homo sapiens
  misc_RNA (1)...(19): siRNA sense strand
ggacaaagaauccaaaaua

SEQ ID NO: 157384 - RNA, 19 nt, Homo sapiens
  misc_RNA (1)...(19): siRNA sense strand
guagacugcuuugggauua

SEQ ID NO: 157385 - RNA, 19 nt, Homo sapiens
  misc_RNA (1)...(19): siRNA sense strand
gggaagaccuggcuuacau

SEQ ID NO: 157386 - RNA, 19 nt, Homo sapiens
  misc_RNA (1)...(19): siRNA sense strand
gagaauagcagacuguaga

SEQ ID NO: 157387 - RNA, 19 nt, Homo sapiens
  misc_RNA (1)...(19): siRNA sense strand
gcaacacguuugaaaugaa

SEQ ID NO: 157388 - RNA, 19 nt, Homo sapiens
  misc_RNA (1)...(19): siRNA sense strand
aaacaugaccuaugagaaa

SEQ ID NO: 157389 - RNA, 19 nt, Homo sapiens
  misc_RNA (1)...(19): siRNA sense strand
gggauuacgucuaucaguu

SEQ ID NO: 157390 - RNA, 19 nt, Homo sapiens
  misc_RNA (1)...(19): siRNA sense strand
gaacgaauuucauauacac

SEQ ID NO: 157391 - RNA, 19 nt, Homo sapiens
  misc_RNA (1)...(19): siRNA sense strand
ggaacgaauuucauauaca

SEQ ID NO: 157392 - RNA, 19 nt, Homo sapiens
  misc_RNA (1)...(19): siRNA sense strand
caggugaugugcucuauga

SEQ ID NO: 157393 - RNA, 19 nt, Homo sapiens
  misc_RNA (1)...(19): siRNA sense strand
uggauaaugugcaccauaa

SEQ ID NO: 157394 - RNA, 19 nt, Homo sapiens
  misc_RNA (1)...(19): siRNA sense strand
caacacguuugaaaugaau

SEQ ID NO: 157395 - RNA, 19 nt, Homo sapiens
  misc_RNA (1)...(19): siRNA sense strand
ggucaccuaucacgacaaa

SEQ ID NO: 157396 - RNA, 19 nt, Homo sapiens
  misc_RNA (1)...(19): siRNA sense strand
gaaacucuauacacacaca

SEQ ID NO: 157397 - RNA, 19 nt, Homo sapiens
  misc_RNA (1)...(19): siRNA sense strand
ccauaacccucccaccauu

SEQ ID NO: 157398 - RNA, 19 nt, Homo sapiens
  misc_RNA (1)...(19): siRNA sense strand
cauaagaacagaacaaaca

SEQ ID NO: 157399 - RNA, 19 nt, Homo sapiens
  misc_RNA (1)...(19): siRNA sense strand
caggaacgaauuucauaua

SEQ ID NO: 157400 - RNA, 19 nt, Homo sapiens
  misc_RNA (1)...(19): siRNA sense strand
ucagaaccaugaagaagau

SEQ ID NO: 157401 - RNA, 19 nt, Homo sapiens
  misc_RNA (1)...(19): siRNA sense strand
gaagaccuggcuuacauga

SEQ ID NO: 157402 - RNA, 19 nt, Homo sapiens
  misc_RNA (1)...(19): siRNA sense strand
gcuuugggauuacgucuau

SEQ ID NO: 157403 - RNA, 19 nt, Homo sapiens
  misc_RNA (1)...(19): siRNA sense strand
gcauuaagcaggaacgaau

SEQ ID NO: 157404 - RNA, 19 nt, Homo sapiens
  misc_RNA (1)...(19): siRNA sense strand
cagcaacacguuugaaaug

SEQ ID NO: 157405 - RNA, 19 nt, Homo sapiens
  misc_RNA (1)...(19): siRNA sense strand
ccuggaaacucuauacaca

SEQ ID NO: 157406 - RNA, 19 nt, Homo sapiens
  misc_RNA (1)...(19): siRNA sense strand
gacagcaacacguuugaaa

SEQ ID NO: 157407 - RNA, 19 nt, Homo sapiens
  misc_RNA (1)...(19): siRNA sense strand
ggauuacgucuaucaguug

SEQ ID NO: 157408 - RNA, 19 nt, Homo sapiens
  misc_RNA (1)...(19): siRNA sense strand
gcaggaacgaauuucauau

SEQ ID NO: 157409 - RNA, 19 nt, Homo sapiens
  misc_RNA (1)...(19): siRNA sense strand
ugaaaugaauggcaaagcu

SEQ ID NO: 157410 - RNA, 19 nt, Homo sapiens
  misc_RNA (1)...(19): siRNA sense strand
ggaaggagccaggacaaag

SEQ ID NO: 157411 - RNA, 19 nt, Homo sapiens
  misc_RNA (1)...(19): siRNA sense strand
gcacuccguggauuucaaa

SEQ ID NO: 157412 - RNA, 19 nt, Homo sapiens
  misc_RNA (1)...(19): siRNA sense strand
gggaaaccauaagaacaga

SEQ ID NO: 157413 - RNA, 19 nt, Homo sapiens
  misc_RNA (1)...(19): siRNA sense strand
gaacuccuucagcauauuc

SEQ ID NO: 157414 - RNA, 19 nt, Homo sapiens
  misc_RNA (1)...(19): siRNA sense strand
gagcacgccaugcccauug

SEQ ID NO: 157415 - RNA, 19 nt, Homo sapiens
  misc_RNA (1)...(19): siRNA sense strand
cuaucgaucuccucauuca

SEQ ID NO: 157416 - RNA, 19 nt, Homo sapiens
  misc_RNA (1)...(19): siRNA sense strand
caaacaugaccuaugagaa

SEQ ID NO: 157417 - RNA, 19 nt, Homo sapiens
  misc_RNA (1)...(19): siRNA sense strand
aagaacagaacaaacauga

SEQ ID NO: 157418 - RNA, 19 nt, Homo sapiens
  misc_RNA (1)...(19): siRNA sense strand
ggaggacaaagaauccaaa

SEQ ID NO: 157419 - RNA, 19 nt, Homo sapiens
  misc_RNA (1)...(19): siRNA sense strand
uggaaacucuauacacaca

SEQ ID NO: 157420 - RNA, 19 nt, Homo sapiens
  misc_RNA (1)...(19): siRNA sense strand
gaaggagccaggacaaagg

SEQ ID NO: 157421 - RNA, 19 nt, Homo sapiens
  misc_RNA (1)...(19): siRNA sense strand
ggagagcacacgcgugauc

SEQ ID NO: 157422 - RNA, 19 nt, Homo sapiens
  misc_RNA (1)...(19): siRNA sense strand
gaugggaggacaaagaauc

SEQ ID NO: 157423 - RNA, 19 nt, Homo sapiens
  misc_RNA (1)...(19): siRNA sense strand
uaaggccaauugacagcaa

SEQ ID NO: 157424 - RNA, 19 nt, Homo sapiens
  misc_RNA (1)...(19): siRNA sense strand
agaccuggcuuacaugaac

SEQ ID NO: 157425 - RNA, 19 nt, Homo sapiens
  misc_RNA (1)...(19): siRNA sense strand
gaggucauacugcaucaga

SEQ ID NO: 157426 - RNA, 19 nt, Homo sapiens
  misc_RNA (1)...(19): siRNA sense strand
ucauauacaccuccagaga

SEQ ID NO: 157427 - RNA, 19 nt, Homo sapiens
  misc_RNA (1)...(19): siRNA sense strand
gcgccacuacuacaaacua

SEQ ID NO: 157428 - RNA, 19 nt, Homo sapiens
  misc_RNA (1)...(19): siRNA sense strand
ucaccuaucacgacaaauc

SEQ ID NO: 157429 - RNA, 19 nt, Homo sapiens
  misc_RNA (1)...(19): siRNA sense strand
gcaucagaaccaugaagaa

SEQ ID NO: 157430 - RNA, 19 nt, Homo sapiens
  misc_RNA (1)...(19): siRNA sense strand
gugaugugcucuaugaacu

SEQ ID NO: 157431 - RNA, 19 nt, Homo sapiens
  misc_RNA (1)...(19): siRNA sense strand
cgcuaucgaucuccucauu

SEQ ID NO: 157432 - RNA, 19 nt, Homo sapiens
  misc_RNA (1)...(19): siRNA sense strand
aaucaugaguggccgaaca

SEQ ID NO: 157433 - RNA, 19 nt, Homo sapiens
  misc_RNA (1)...(19): siRNA sense strand
agagcccagugccgaguua

SEQ ID NO: 157434 - RNA, 19 nt, Homo sapiens
  misc_RNA (1)...(19): siRNA sense strand
caauugacagcaacacguu

SEQ ID NO: 157435 - RNA, 19 nt, Homo sapiens
  misc_RNA (1)...(19): siRNA sense strand
gaaaaccccagaugaaauc

SEQ ID NO: 157436 - RNA, 19 nt, Homo sapiens
  misc_RNA (1)...(19): siRNA sense strand
cgccacuacuacaaacuaa

SEQ ID NO: 157437 - RNA, 19 nt, Homo sapiens
  misc_RNA (1)...(19): siRNA sense strand
ggaagaccuggcuuacaug

SEQ ID NO: 157438 - RNA, 19 nt, Homo sapiens
  misc_RNA (1)...(19): siRNA sense strand
ccaugaagaagauaacugu

SEQ ID NO: 157439 - RNA, 19 nt, Homo sapiens
  misc_RNA (1)...(19): siRNA sense strand
ggaaaccucggauucuuuu

SEQ ID NO: 157440 - RNA, 19 nt, Homo sapiens
  misc_RNA (1)...(19): siRNA sense strand
uaaacauuaucaggaagga

SEQ ID NO: 157441 - RNA, 19 nt, Homo sapiens
  misc_RNA (1)...(19): siRNA sense strand
guggauaaugugcaccaua

SEQ ID NO: 157442 - RNA, 19 nt, Homo sapiens
  misc_RNA (1)...(19): siRNA sense strand
gagcuggaugaacaaauau

SEQ ID NO: 157443 - RNA, 19 nt, Homo sapiens
  misc_RNA (1)...(19): siRNA sense strand
acaaacaugaccuaugaga

SEQ ID NO: 157444 - RNA, 19 nt, Homo sapiens
  misc_RNA (1)...(19): siRNA sense strand
gaaaccauaagaacagaac

SEQ ID NO: 157445 - RNA, 19 nt, Homo sapiens
  misc_RNA (1)...(19): siRNA sense strand
ucugacagccgguacgaaa

SEQ ID NO: 157446 - RNA, 19 nt, Homo sapiens
  misc_RNA (1)...(19): siRNA sense strand
agcaacacguuugaaauga

SEQ ID NO: 157447 - RNA, 19 nt, Homo sapiens
  misc_RNA (1)...(19): siRNA sense strand
caaauauaccaagaagaug

SEQ ID NO: 157448 - RNA, 19 nt, Homo sapiens
  misc_RNA (1)...(19): siRNA sense strand
caagugggcugaaaaugag

SEQ ID NO: 157449 - RNA, 19 nt, Homo sapiens
  misc_RNA (1)...(19): siRNA sense strand
ggaaaccauaagaacagaa

SEQ ID NO: 157450 - RNA, 19 nt, Homo sapiens
  misc_RNA (1)...(19): siRNA sense strand
gggaagggaagcccaucaa

SEQ ID NO: 157451 - RNA, 19 nt, Homo sapiens
  misc_RNA (1)...(19): siRNA sense strand
ggacuuucgcuaucgaucu

SEQ ID NO: 157452 - RNA, 19 nt, Homo sapiens
  misc_RNA (1)...(19): siRNA sense strand
ggaugaacaaauauaccaa

SEQ ID NO: 157453 - RNA, 19 nt, Homo sapiens
  misc_RNA (1)...(19): siRNA sense strand
uaagaacagaacaaacaug

SEQ ID NO: 157454 - RNA, 19 nt, Homo sapiens
  misc_RNA (1)...(19): siRNA sense strand
aggaacgaauuucauauac

SEQ ID NO: 157455 - RNA, 19 nt, Homo sapiens
  misc_RNA (1)...(19): siRNA sense strand
ggaguccuacccucuguca

SEQ ID NO: 157456 - RNA, 19 nt, Homo sapiens
  misc_RNA (1)...(19): siRNA sense strand
ggagaauagcagacuguag

SEQ ID NO: 157457 - RNA, 19 nt, Homo sapiens
  misc_RNA (1)...(19): siRNA sense strand
uggcuuacaugaaccacau

SEQ ID NO: 157458 - RNA, 19 nt, Homo sapiens
  misc_RNA (1)...(19): siRNA sense strand
ucaagugggcugaaaauga

SEQ ID NO: 157459 - RNA, 19 nt, Homo sapiens
  misc_RNA (1)...(19): siRNA sense strand
gggagaauagcagacugua

SEQ ID NO: 157460 - RNA, 19 nt, Homo sapiens
  misc_RNA (1)...(19): siRNA sense strand
gaaccaugaagaagauaac

SEQ ID NO: 157461 - RNA, 19 nt, Homo sapiens
  misc_RNA (1)...(19): siRNA sense strand
caucagaaccaugaagaag

SEQ ID NO: 157462 - RNA, 19 nt, Homo sapiens
  misc_RNA (1)...(19): siRNA sense strand
agaacaaacaugaccuaug

SEQ ID NO: 157463 - RNA, 19 nt, Homo sapiens
  misc_RNA (1)...(19): siRNA sense strand
acagaacaaacaugaccua

SEQ ID NO: 157464 - RNA, 19 nt, Homo sapiens
  misc_RNA (1)...(19): siRNA sense strand
uaagcaggaacgaauuuca

SEQ ID NO: 157465 - RNA, 19 nt, Homo sapiens
  misc_RNA (1)...(19): siRNA sense strand
ccgaugggaggacaaagaa

SEQ ID NO: 157466 - RNA, 19 nt, Homo sapiens
  misc_RNA (1)...(19): siRNA sense strand
ggcacuccguggauuucaa

SEQ ID NO: 157467 - RNA, 19 nt, Homo sapiens
  misc_RNA (1)...(19): siRNA sense strand
gagcccugcgccacuacua

SEQ ID NO: 157468 - RNA, 19 nt, Homo sapiens
  misc_RNA (1)...(19): siRNA sense strand
uuacgucuaucaguugcuu

SEQ ID NO: 157469 - RNA, 19 nt, Homo sapiens
  misc_RNA (1)...(19): siRNA sense strand
gacuuucgcuaucgaucuc

SEQ ID NO: 157470 - RNA, 19 nt, Homo sapiens
  misc_RNA (1)...(19): siRNA sense strand
ccacuacuacaaacuaaac

SEQ ID NO: 157471 - RNA, 19 nt, Homo sapiens
  misc_RNA (1)...(19): siRNA sense strand
agcaggaacgaauuucaua

SEQ ID NO: 157472 - RNA, 19 nt, Homo sapiens
  misc_RNA (1)...(19): siRNA sense strand
acacacagccggaggucau

SEQ ID NO: 157473 - RNA, 19 nt, Homo sapiens
  misc_RNA (1)...(19): siRNA sense strand
uggcucaagugggcugaaa

SEQ ID NO: 157474 - RNA, 19 nt, Homo sapiens
  misc_RNA (1)...(19): siRNA sense strand
cauuaagcaggaacgaauu

SEQ ID NO: 157475 - RNA, 19 nt, Homo sapiens
  misc_RNA (1)...(19): siRNA sense strand
ggaagggaagcccaucaac

SEQ ID NO: 157476 - RNA, 19 nt, Homo sapiens
  misc_RNA (1)...(19): siRNA sense strand
ggauggaggaagacucgau

SEQ ID NO: 157477 - RNA, 19 nt, Homo sapiens
  misc_RNA (1)...(19): siRNA sense strand
aggaaaccucggauucuuu

SEQ ID NO: 157478 - RNA, 19 nt, Homo sapiens
  misc_RNA (1)...(19): siRNA sense strand
cauaacccucccaccauug

SEQ ID NO: 157479 - RNA, 19 nt, Homo sapiens
  misc_RNA (1)...(19): siRNA sense strand
ccucgacgccacuucaugu

SEQ ID NO: 157480 - RNA, 19 nt, Homo sapiens
  misc_RNA (1)...(19): siRNA sense strand
gaaaggacaugguuguguu

SEQ ID NO: 157481 - RNA, 19 nt, Homo sapiens
  misc_RNA (1)...(19): siRNA sense strand
ggacaugguuguguuucug

SEQ ID NO: 157482 - RNA, 19 nt, Homo sapiens
  misc_RNA (1)...(19): siRNA sense strand
cgagucggauuucuaugaa

SEQ ID NO: 157483 - RNA, 19 nt, Homo sapiens
  misc_RNA (1)...(19): siRNA sense strand
cuucuacacuuacaugaug

SEQ ID NO: 157484 - RNA, 19 nt, Homo sapiens
  misc_RNA (1)...(19): siRNA sense strand
gugaccagaugcgucguua

SEQ ID NO: 157485 - RNA, 19 nt, Homo sapiens
  misc_RNA (1)...(19): siRNA sense strand
gcccuaaaccugccggaaa

SEQ ID NO: 157486 - RNA, 19 nt, Homo sapiens
  misc_RNA (1)...(19): siRNA sense strand
agucggauuucuaugaaga

SEQ ID NO: 157487 - RNA, 19 nt, Homo sapiens
  misc_RNA (1)...(19): siRNA sense strand
ggaggagccgguagaugga

SEQ ID NO: 157488 - RNA, 19 nt, Homo sapiens
  misc_RNA (1)...(19): siRNA sense strand
ggacaggggcaacccagua

SEQ ID NO: 157489 - RNA, 19 nt, Homo sapiens
  misc_RNA (1)...(19): siRNA sense strand
gagccgaaaggacaugguu

SEQ ID NO: 157490 - RNA, 19 nt, Homo sapiens
  misc_RNA (1)...(19): siRNA sense strand
cgaaaggacaugguugugu

SEQ ID NO: 157491 - RNA, 19 nt, Homo sapiens
  misc_RNA (1)...(19): siRNA sense strand
cagcgccagugaccagaug

SEQ ID NO: 157492 - RNA, 19 nt, Homo sapiens
  misc_RNA (1)...(19): siRNA sense strand
aaaggacaugguuguguuu

SEQ ID NO: 157493 - RNA, 19 nt, Homo sapiens
  misc_RNA (1)...(19): siRNA sense strand
gccgaaaggacaugguugu

SEQ ID NO: 157494 - RNA, 19 nt, Homo sapiens
  misc_RNA (1)...(19): siRNA sense strand
ggaagaagagcaagauuua

SEQ ID NO: 157495 - RNA, 19 nt, Homo sapiens
  misc_RNA (1)...(19): siRNA sense strand
gaaagugguuuaauucaga

SEQ ID NO: 157496 - RNA, 19 nt, Homo sapiens
  misc_RNA (1)...(19): siRNA sense strand
gauuauaccucacaaaugu

SEQ ID NO: 157497 - RNA, 19 nt, Homo sapiens
  misc_RNA (1)...(19): siRNA sense strand
gagaacaucuauagugcua

SEQ ID NO: 157498 - RNA, 19 nt, Homo sapiens
  misc_RNA (1)...(19): siRNA sense strand
ggagaagccuagugucaug

SEQ ID NO: 157499 - RNA, 19 nt, Homo sapiens
  misc_RNA (1)...(19): siRNA sense strand
ccaagacagugaauuagaa

SEQ ID NO: 157500 - RNA, 19 nt, Homo sapiens
  misc_RNA (1)...(19): siRNA sense strand
gauccuaugcccagaaaua

SEQ ID NO: 157501 - RNA, 19 nt, Homo sapiens
  misc_RNA (1)...(19): siRNA sense strand
gcagagagcaccacauuag

SEQ ID NO: 157502 - RNA, 19 nt, Homo sapiens
  misc_RNA (1)...(19): siRNA sense strand
ggaaaggacccaacaguag

SEQ ID NO: 157503 - RNA, 19 nt, Homo sapiens
  misc_RNA (1)...(19): siRNA sense strand
gaaagaauugugugaaugu

SEQ ID NO: 157504 - RNA, 19 nt, Homo sapiens
  misc_RNA (1)...(19): siRNA sense strand
guuaggaacugcauuaaag

SEQ ID NO: 157505 - RNA, 19 nt, Homo sapiens
  misc_RNA (1)...(19): siRNA sense strand
gcacauauucucucaguuc

SEQ ID NO: 157506 - RNA, 19 nt, Homo sapiens
  misc_RNA (1)...(19): siRNA sense strand
gagcagaaauugaaguuuu

SEQ ID NO: 157507 - RNA, 19 nt, Homo sapiens
  misc_RNA (1)...(19): siRNA sense strand
gagauuaagagcagaaauu

SEQ ID NO: 157508 - RNA, 19 nt, Homo sapiens
  misc_RNA (1)...(19): siRNA sense strand
gugauuggcucagguuuaa

SEQ ID NO: 157509 - RNA, 19 nt, Homo sapiens
  misc_RNA (1)...(19): siRNA sense strand
gaaagugagagaaaucuau

SEQ ID NO: 157510 - RNA, 19 nt, Homo sapiens
  misc_RNA (1)...(19): siRNA sense strand
cagaggaaauuaugacaug

SEQ ID NO: 157511 - RNA, 19 nt, Homo sapiens
  misc_RNA (1)...(19): siRNA sense strand
gcccagcacauuauucuua

SEQ ID NO: 157512 - RNA, 19 nt, Homo sapiens
  misc_RNA (1)...(19): siRNA sense strand
ucacaaauguauucugcaa

SEQ ID NO: 157513 - RNA, 19 nt, Homo sapiens
  misc_RNA (1)...(19): siRNA sense strand
ggccaagguucuccuauau

SEQ ID NO: 157514 - RNA, 19 nt, Homo sapiens
  misc_RNA (1)...(19): siRNA sense strand
gaacugcauuaaaguccuu

SEQ ID NO: 157515 - RNA, 19 nt, Homo sapiens
  misc_RNA (1)...(19): siRNA sense strand
cagaaagaauugugugaau

SEQ ID NO: 157516 - RNA, 19 nt, Homo sapiens
  misc_RNA (1)...(19): siRNA sense strand
gaaggaagcacugcagaga

SEQ ID NO: 157517 - RNA, 19 nt, Homo sapiens
  misc_RNA (1)...(19): siRNA sense strand
ccacauaccagucggagaa

SEQ ID NO: 157518 - RNA, 19 nt, Homo sapiens
  misc_RNA (1)...(19): siRNA sense strand
ugaauuagaacggguauuu

SEQ ID NO: 157519 - RNA, 19 nt, Homo sapiens
  misc_RNA (1)...(19): siRNA sense strand
gaaaggacccaacaguagu

SEQ ID NO: 157520 - RNA, 19 nt, Homo sapiens
  misc_RNA (1)...(19): siRNA sense strand
ccaagguucuccuauaugg

SEQ ID NO: 157521 - RNA, 19 nt, Homo sapiens
  misc_RNA (1)...(19): siRNA sense strand
caaguaagcaauccagaug

SEQ ID NO: 157522 - RNA, 19 nt, Homo sapiens
  misc_RNA (1)...(19): siRNA sense strand
gauuaucccaccuauacua

SEQ ID NO: 157523 - RNA, 19 nt, Homo sapiens
  misc_RNA (1)...(19): siRNA sense strand
uggccaagguucuccuaua

SEQ ID NO: 157524 - RNA, 19 nt, Homo sapiens
  misc_RNA (1)...(19): siRNA sense strand
aggaagcacugcagagauu

SEQ ID NO: 157525 - RNA, 19 nt, Homo sapiens
  misc_RNA (1)...(19): siRNA sense strand
ggacccaacaguagugauu

SEQ ID NO: 157526 - RNA, 19 nt, Homo sapiens
  misc_RNA (1)...(19): siRNA sense strand
aaacaugacuagcaagaac

SEQ ID NO: 157527 - RNA, 19 nt, Homo sapiens
  misc_RNA (1)...(19): siRNA sense strand
ggcugauacucaucuauuu

SEQ ID NO: 157528 - RNA, 19 nt, Homo sapiens
  misc_RNA (1)...(19): siRNA sense strand
ggaaagcugaugccacuuc

SEQ ID NO: 157529 - RNA, 19 nt, Homo sapiens
  misc_RNA (1)...(19): siRNA sense strand
gaagcacugcagagauuaa

SEQ ID NO: 157530 - RNA, 19 nt, Homo sapiens
  misc_RNA (1)...(19): siRNA sense strand
ggaaagugagagaaaucua

SEQ ID NO: 157531 - RNA, 19 nt, Homo sapiens
  misc_RNA (1)...(19): siRNA sense strand
ugaaguggcugauacucau

SEQ ID NO: 157532 - RNA, 19 nt, Homo sapiens
  misc_RNA (1)...(19): siRNA sense strand
gaaagcugaugccacuucu

SEQ ID NO: 157533 - RNA, 19 nt, Homo sapiens
  misc_RNA (1)...(19): siRNA sense strand
gagagcaaacuauaaguca

SEQ ID NO: 157534 - RNA, 19 nt, Homo sapiens
  misc_RNA (1)...(19): siRNA sense strand
agaaagaauugugugaaug

SEQ ID NO: 157535 - RNA, 19 nt, Homo sapiens
  misc_RNA (1)...(19): siRNA sense strand
gcaggaaucaggagagcaa

SEQ ID NO: 157536 - RNA, 19 nt, Homo sapiens
  misc_RNA (1)...(19): siRNA sense strand
cguauggacuaccuccuuu

SEQ ID NO: 157537 - RNA, 19 nt, Homo sapiens
  misc_RNA (1)...(19): siRNA sense strand
guucuuaccugcacuacag

SEQ ID NO: 157538 - RNA, 19 nt, Homo sapiens
  misc_RNA (1)...(19): siRNA sense strand
ggaagcacugcagagauua

SEQ ID NO: 157539 - RNA, 19 nt, Homo sapiens
  misc_RNA (1)...(19): siRNA sense strand
gauaucuacuucuucuaca

SEQ ID NO: 157540 - RNA, 19 nt, Homo sapiens
  misc_RNA (1)...(19): siRNA sense strand
ugaauguucugaucacuac

SEQ ID NO: 157541 - RNA, 19 nt, Homo sapiens
  misc_RNA (1)...(19): siRNA sense strand
uggcucagguuuaacaaug

SEQ ID NO: 157542 - RNA, 19 nt, Homo sapiens
  misc_RNA (1)...(19): siRNA sense strand
cuucaaaccuucccauguc

SEQ ID NO: 157543 - RNA, 19 nt, Homo sapiens
  misc_RNA (1)...(19): siRNA sense strand
ggagacccuucuacaaguc

SEQ ID NO: 157544 - RNA, 19 nt, Homo sapiens
  misc_RNA (1)...(19): siRNA sense strand
uaucccaccuauacuauuc

SEQ ID NO: 157545 - RNA, 19 nt, Homo sapiens
  misc_RNA (1)...(19): siRNA sense strand
gcaucucaaaccaggauua

SEQ ID NO: 157546 - RNA, 19 nt, Homo sapiens
  misc_RNA (1)...(19): siRNA sense strand
gcaauccagaugucaguga

SEQ ID NO: 157547 - RNA, 19 nt, Homo sapiens
  misc_RNA (1)...(19): siRNA sense strand
caucuauagugcuaccaaa

SEQ ID NO: 157548 - RNA, 19 nt, Homo sapiens
  misc_RNA (1)...(19): siRNA sense strand
gagagaaaucuaugauaag

SEQ ID NO: 157549 - RNA, 19 nt, Homo sapiens
  misc_RNA (1)...(19): siRNA sense strand
gaugaucaguccaggaaaa

SEQ ID NO: 157550 - RNA, 19 nt, Homo sapiens
  misc_RNA (1)...(19): siRNA sense strand
cacaaaugccagccugaua

SEQ ID NO: 157551 - RNA, 19 nt, Homo sapiens
  misc_RNA (1)...(19): siRNA sense strand
uggacuaggagaaauauuu

SEQ ID NO: 157552 - RNA, 19 nt, Homo sapiens
  misc_RNA (1)...(19): siRNA sense strand
gugagagaaaucuaugaua

SEQ ID NO: 157553 - RNA, 19 nt, Homo sapiens
  misc_RNA (1)...(19): siRNA sense strand
ccagguacauguggaagau

SEQ ID NO: 157554 - RNA, 19 nt, Homo sapiens
  misc_RNA (1)...(19): siRNA sense strand
uggaaaggacccaacagua

SEQ ID NO: 157555 - RNA, 19 nt, Homo sapiens
  misc_RNA (1)...(19): siRNA sense strand
acaaaugccagccugauau

SEQ ID NO: 157556 - RNA, 19 nt, Homo sapiens
  misc_RNA (1)...(19): siRNA sense strand
ggagagcaaacuauaaguc

SEQ ID NO: 157557 - RNA, 19 nt, Homo sapiens
  misc_RNA (1)...(19): siRNA sense strand
gcucagguuuaacaaugga

SEQ ID NO: 157558 - RNA, 19 nt, Homo sapiens
  misc_RNA (1)...(19): siRNA sense strand
ucaggagagcaaacuauaa

SEQ ID NO: 157559 - RNA, 19 nt, Homo sapiens
  misc_RNA (1)...(19): siRNA sense strand
gagcaaacuauaagucaag

SEQ ID NO: 157560 - RNA, 19 nt, Homo sapiens
  misc_RNA (1)...(19): siRNA sense strand
gauuaagagcagaaauuga

SEQ ID NO: 157561 - RNA, 19 nt, Homo sapiens
  misc_RNA (1)...(19): siRNA sense strand
gcagagauuaagagcagaa

SEQ ID NO: 157562 - RNA, 19 nt, Homo sapiens
  misc_RNA (1)...(19): siRNA sense strand
gaaucaggagagcaaacua

SEQ ID NO: 157563 - RNA, 19 nt, Homo sapiens
  misc_RNA (1)...(19): siRNA sense strand
gguuaggaacugcauuaaa

SEQ ID NO: 157564 - RNA, 19 nt, Homo sapiens
  misc_RNA (1)...(19): siRNA sense strand
gcaaacuauaagucaagua

SEQ ID NO: 157565 - RNA, 19 nt, Homo sapiens
  misc_RNA (1)...(19): siRNA sense strand
caggucagacuaacaguga

SEQ ID NO: 157566 - RNA, 19 nt, Homo sapiens
  misc_RNA (1)...(19): siRNA sense strand
gacaugcaccgauuacauc

SEQ ID NO: 157567 - RNA, 19 nt, Homo sapiens
  misc_RNA (1)...(19): siRNA sense strand
ccugauaucuacuucuucu

SEQ ID NO: 157568 - RNA, 19 nt, Homo sapiens
  misc_RNA (1)...(19): siRNA sense strand
gcacaaaugccagccugau

SEQ ID NO: 157569 - RNA, 19 nt, Homo sapiens
  misc_RNA (1)...(19): siRNA sense strand
aagccaagaugcaggaauc

SEQ ID NO: 157570 - RNA, 19 nt, Homo sapiens
  misc_RNA (1)...(19): siRNA sense strand
uacaguuucucaacagaug

SEQ ID NO: 157571 - RNA, 19 nt, Homo sapiens
  misc_RNA (1)...(19): siRNA sense strand
ggaugaggaaacuagcuuu

SEQ ID NO: 157572 - RNA, 19 nt, Homo sapiens
  misc_RNA (1)...(19): siRNA sense strand
acagcagacucaacccuau

SEQ ID NO: 157573 - RNA, 19 nt, Homo sapiens
  misc_RNA (1)...(19): siRNA sense strand
ccagaaagaauugugugaa

SEQ ID NO: 157574 - RNA, 19 nt, Homo sapiens
  misc_RNA (1)...(19): siRNA sense strand
gcacugcagagauuaagag

SEQ ID NO: 157575 - RNA, 19 nt, Homo sapiens
  misc_RNA (1)...(19): siRNA sense strand
gaauuagaacggguauuuc

SEQ ID NO: 157576 - RNA, 19 nt, Homo sapiens
  misc_RNA (1)...(19): siRNA sense strand
gccaagcccagcacauuau

SEQ ID NO: 157577 - RNA, 19 nt, Homo sapiens
  misc_RNA (1)...(19): siRNA sense strand
cagccaagcccagcacauu

SEQ ID NO: 157578 - RNA, 19 nt, Homo sapiens
  misc_RNA (1)...(19): siRNA sense strand
cuacaggguuaaccacaag

SEQ ID NO: 157579 - RNA, 19 nt, Homo sapiens
  misc_RNA (1)...(19): siRNA sense strand
ccugaaagugguuuaauuc

SEQ ID NO: 157580 - RNA, 19 nt, Homo sapiens
  misc_RNA (1)...(19): siRNA sense strand
gguaugaaaccugaaagug

SEQ ID NO: 157581 - RNA, 19 nt, Homo sapiens
  misc_RNA (1)...(19): siRNA sense strand
uggagacccuucuacaagu

SEQ ID NO: 157582 - RNA, 19 nt, Homo sapiens
  misc_RNA (1)...(19): siRNA sense strand
agagcaaacuauaagucaa

SEQ ID NO: 157583 - RNA, 19 nt, Homo sapiens
  misc_RNA (1)...(19): siRNA sense strand
agagaaaucuaugauaagc

SEQ ID NO: 157584 - RNA, 19 nt, Homo sapiens
  misc_RNA (1)...(19): siRNA sense strand
gaagaagagcaagauuuac

SEQ ID NO: 157585 - RNA, 19 nt, Homo sapiens
  misc_RNA (1)...(19): siRNA sense strand
uauauggacuaggagaaau

SEQ ID NO: 157586 - RNA, 19 nt, Homo sapiens
  misc_RNA (1)...(19): siRNA sense strand
caauccagaugucagugau

SEQ ID NO: 157587 - RNA, 19 nt, Homo sapiens
  misc_RNA (1)...(19): siRNA sense strand
ucaggcaacccaaacguau

SEQ ID NO: 157588 - RNA, 19 nt, Homo sapiens
  misc_RNA (1)...(19): siRNA sense strand
auuaugacaugcaccgauu

SEQ ID NO: 157589 - RNA, 19 nt, Homo sapiens
  misc_RNA (1)...(19): siRNA sense strand
ugacaugcaccgauuacau

SEQ ID NO: 157590 - RNA, 19 nt, Homo sapiens
  misc_RNA (1)...(19): siRNA sense strand
caggagagcaaacuauaag

SEQ ID NO: 157591 - RNA, 19 nt, Homo sapiens
  misc_RNA (1)...(19): siRNA sense strand
gcaguagccagcaucucaa

SEQ ID NO: 157592 - RNA, 19 nt, Homo sapiens
  misc_RNA (1)...(19): siRNA sense strand
cccagcacauuauucuuau

SEQ ID NO: 157593 - RNA, 19 nt, Homo sapiens
  misc_RNA (1)...(19): siRNA sense strand
caaaugccagccugauauc

SEQ ID NO: 157594 - RNA, 19 nt, Homo sapiens
  misc_RNA (1)...(19): siRNA sense strand
ggaagaagagcaagauuua

SEQ ID NO: 157595 - RNA, 19 nt, Homo sapiens
  misc_RNA (1)...(19): siRNA sense strand
gaaagugguuuaauucaga

SEQ ID NO: 157596 - RNA, 19 nt, Homo sapiens
  misc_RNA (1)...(19): siRNA sense strand
gauuauaccucacaaaugu

SEQ ID NO: 157597 - RNA, 19 nt, Homo sapiens
  misc_RNA (1)...(19): siRNA sense strand
ggagaagccuagugucaug

SEQ ID NO: 157598 - RNA, 19 nt, Homo sapiens
  misc_RNA (1)...(19): siRNA sense strand
ccaagacagugaauuagaa

SEQ ID NO: 157599 - RNA, 19 nt, Homo sapiens
  misc_RNA (1)...(19): siRNA sense strand
gauccuaugcccagaaaua

SEQ ID NO: 157600 - RNA, 19 nt, Homo sapiens
  misc_RNA (1)...(19): siRNA sense strand
gcagagagcaccacauuag

SEQ ID NO: 157601 - RNA, 19 nt, Homo sapiens
  misc_RNA (1)...(19): siRNA sense strand
ggaaaggacccaacaguag

SEQ ID NO: 157602 - RNA, 19 nt, Homo sapiens
  misc_RNA (1)...(19): siRNA sense strand
gcacauauucucucaguuc

SEQ ID NO: 157603 - RNA, 19 nt, Homo sapiens
  misc_RNA (1)...(19): siRNA sense strand
gugauuggcucagguuuaa

SEQ ID NO: 157604 - RNA, 19 nt, Homo sapiens
  misc_RNA (1)...(19): siRNA sense strand
cagaggaaauuaugacaug

SEQ ID NO: 157605 - RNA, 19 nt, Homo sapiens
  misc_RNA (1)...(19): siRNA sense strand
gcccagcacauuauucuua

SEQ ID NO: 157606 - RNA, 19 nt, Homo sapiens
  misc_RNA (1)...(19): siRNA sense strand
ucacaaauguauucugcaa

SEQ ID NO: 157607 - RNA, 19 nt, Homo sapiens
  misc_RNA (1)...(19): siRNA sense strand
ccacauaccagucggagaa

SEQ ID NO: 157608 - RNA, 19 nt, Homo sapiens
  misc_RNA (1)...(19): siRNA sense strand
ugaauuagaacggguauuu

SEQ ID NO: 157609 - RNA, 19 nt, Homo sapiens
  misc_RNA (1)...(19): siRNA sense strand
gaaaggacccaacaguagu

SEQ ID NO: 157610 - RNA, 19 nt, Homo sapiens
  misc_RNA (1)...(19): siRNA sense strand
caaguaagcaauccagaug

SEQ ID NO: 157611 - RNA, 19 nt, Homo sapiens
  misc_RNA (1)...(19): siRNA sense strand
gauuaucccaccuauacua

SEQ ID NO: 157612 - RNA, 19 nt, Homo sapiens
  misc_RNA (1)...(19): siRNA sense strand
ggacccaacaguagugauu

SEQ ID NO: 157613 - RNA, 19 nt, Homo sapiens
  misc_RNA (1)...(19): siRNA sense strand
aaacaugacuagcaagaac

SEQ ID NO: 157614 - RNA, 19 nt, Homo sapiens
  misc_RNA (1)...(19): siRNA sense strand
ggcugauacucaucuauuu

SEQ ID NO: 157615 - RNA, 19 nt, Homo sapiens
  misc_RNA (1)...(19): siRNA sense strand
ggaaagcugaugccacuuc

SEQ ID NO: 157616 - RNA, 19 nt, Homo sapiens
  misc_RNA (1)...(19): siRNA sense strand
ugaaguggcugauacucau

SEQ ID NO: 157617 - RNA, 19 nt, Homo sapiens
  misc_RNA (1)...(19): siRNA sense strand
gagagcaaacuauaaguca

SEQ ID NO: 157618 - RNA, 19 nt, Homo sapiens
  misc_RNA (1)...(19): siRNA sense strand
gcaggaaucaggagagcaa

SEQ ID NO: 157619 - RNA, 19 nt, Homo sapiens
  misc_RNA (1)...(19): siRNA sense strand
gaaagcugaugccacuucu

SEQ ID NO: 157620 - RNA, 19 nt, Homo sapiens
  misc_RNA (1)...(19): siRNA sense strand
cguauggacuaccuccuuu

SEQ ID NO: 157621 - RNA, 19 nt, Homo sapiens
  misc_RNA (1)...(19): siRNA sense strand
guucuuaccugcacuacag

SEQ ID NO: 157622 - RNA, 19 nt, Homo sapiens
  misc_RNA (1)...(19): siRNA sense strand
gauaucuacuucuucuaca

SEQ ID NO: 157623 - RNA, 19 nt, Homo sapiens
  misc_RNA (1)...(19): siRNA sense strand
uggcucagguuuaacaaug

SEQ ID NO: 157624 - RNA, 19 nt, Homo sapiens
  misc_RNA (1)...(19): siRNA sense strand
cuucaaaccuucccauguc

SEQ ID NO: 157625 - RNA, 19 nt, Homo sapiens
  misc_RNA (1)...(19): siRNA sense strand
ggagacccuucuacaaguc

SEQ ID NO: 157626 - RNA, 19 nt, Homo sapiens
  misc_RNA (1)...(19): siRNA sense strand
uaucccaccuauacuauuc

SEQ ID NO: 157627 - RNA, 19 nt, Homo sapiens
  misc_RNA (1)...(19): siRNA sense strand
gcaucucaaaccaggauua

SEQ ID NO: 157628 - RNA, 19 nt, Homo sapiens
  misc_RNA (1)...(19): siRNA sense strand
gcaauccagaugucaguga

SEQ ID NO: 157629 - RNA, 19 nt, Homo sapiens
  misc_RNA (1)...(19): siRNA sense strand
gaugaucaguccaggaaaa

SEQ ID NO: 157630 - RNA, 19 nt, Homo sapiens
  misc_RNA (1)...(19): siRNA sense strand
cacaaaugccagccugaua

SEQ ID NO: 157631 - RNA, 19 nt, Homo sapiens
  misc_RNA (1)...(19): siRNA sense strand
uggaaaggacccaacagua

SEQ ID NO: 157632 - RNA, 19 nt, Homo sapiens
  misc_RNA (1)...(19): siRNA sense strand
acaaaugccagccugauau

SEQ ID NO: 157633 - RNA, 19 nt, Homo sapiens
  misc_RNA (1)...(19): siRNA sense strand
ggagagcaaacuauaaguc

SEQ ID NO: 157634 - RNA, 19 nt, Homo sapiens
  misc_RNA (1)...(19): siRNA sense strand
gcucagguuuaacaaugga

SEQ ID NO: 157635 - RNA, 19 nt, Homo sapiens
  misc_RNA (1)...(19): siRNA sense strand
gagcaaacuauaagucaag

SEQ ID NO: 157636 - RNA, 19 nt, Homo sapiens
  misc_RNA (1)...(19): siRNA sense strand
ucaggagagcaaacuauaa

SEQ ID NO: 157637 - RNA, 19 nt, Homo sapiens
  misc_RNA (1)...(19): siRNA sense strand
gacaugcaccgauuacauc

SEQ ID NO: 157638 - RNA, 19 nt, Homo sapiens
  misc_RNA (1)...(19): siRNA sense strand
gaaucaggagagcaaacua

SEQ ID NO: 157639 - RNA, 19 nt, Homo sapiens
  misc_RNA (1)...(19): siRNA sense strand
gcaaacuauaagucaagua

SEQ ID NO: 157640 - RNA, 19 nt, Homo sapiens
  misc_RNA (1)...(19): siRNA sense strand
caggucagacuaacaguga

SEQ ID NO: 157641 - RNA, 19 nt, Homo sapiens
  misc_RNA (1)...(19): siRNA sense strand
ccugauaucuacuucuucu

SEQ ID NO: 157642 - RNA, 19 nt, Homo sapiens
  misc_RNA (1)...(19): siRNA sense strand
gcacaaaugccagccugau

SEQ ID NO: 157643 - RNA, 19 nt, Homo sapiens
  misc_RNA (1)...(19): siRNA sense strand
aagccaagaugcaggaauc

SEQ ID NO: 157644 - RNA, 19 nt, Homo sapiens
  misc_RNA (1)...(19): siRNA sense strand
acagcagacucaacccuau

SEQ ID NO: 157645 - RNA, 19 nt, Homo sapiens
  misc_RNA (1)...(19): siRNA sense strand
gaauuagaacggguauuuc

SEQ ID NO: 157646 - RNA, 19 nt, Homo sapiens
  misc_RNA (1)...(19): siRNA sense strand
gccaagcccagcacauuau

SEQ ID NO: 157647 - RNA, 19 nt, Homo sapiens
  misc_RNA (1)...(19): siRNA sense strand
cagccaagcccagcacauu

SEQ ID NO: 157648 - RNA, 19 nt, Homo sapiens
  misc_RNA (1)...(19): siRNA sense strand
cuacaggguuaaccacaag

SEQ ID NO: 157649 - RNA, 19 nt, Homo sapiens
  misc_RNA (1)...(19): siRNA sense strand
ccugaaagugguuuaauuc

SEQ ID NO: 157650 - RNA, 19 nt, Homo sapiens
  misc_RNA (1)...(19): siRNA sense strand
gguaugaaaccugaaagug

SEQ ID NO: 157651 - RNA, 19 nt, Homo sapiens
  misc_RNA (1)...(19): siRNA sense strand
agagcaaacuauaagucaa

SEQ ID NO: 157652 - RNA, 19 nt, Homo sapiens
  misc_RNA (1)...(19): siRNA sense strand
uggagacccuucuacaagu

SEQ ID NO: 157653 - RNA, 19 nt, Homo sapiens
  misc_RNA (1)...(19): siRNA sense strand
gaagaagagcaagauuuac

SEQ ID NO: 157654 - RNA, 19 nt, Homo sapiens
  misc_RNA (1)...(19): siRNA sense strand
caauccagaugucagugau

SEQ ID NO: 157655 - RNA, 19 nt, Homo sapiens
  misc_RNA (1)...(19): siRNA sense strand
auuaugacaugcaccgauu

SEQ ID NO: 157656 - RNA, 19 nt, Homo sapiens
  misc_RNA (1)...(19): siRNA sense strand
caggagagcaaacuauaag

SEQ ID NO: 157657 - RNA, 19 nt, Homo sapiens
  misc_RNA (1)...(19): siRNA sense strand
gcaguagccagcaucucaa

SEQ ID NO: 157658 - RNA, 19 nt, Homo sapiens
  misc_RNA (1)...(19): siRNA sense strand
cccagcacauuauucuuau

SEQ ID NO: 157659 - RNA, 19 nt, Homo sapiens
  misc_RNA (1)...(19): siRNA sense strand
ucaggcaacccaaacguau

SEQ ID NO: 157660 - RNA, 19 nt, Homo sapiens
  misc_RNA (1)...(19): siRNA sense strand
ugacaugcaccgauuacau

SEQ ID NO: 157661 - RNA, 19 nt, Homo sapiens
  misc_RNA (1)...(19): siRNA sense strand
caaaugccagccugauauc

SEQ ID NO: 157662 - RNA, 19 nt, Homo sapiens
  misc_RNA (1)...(19): siRNA sense strand
ccaaacguauggacuaccu

SEQ ID NO: 157663 - RNA, 19 nt, Homo sapiens
  misc_RNA (1)...(19): siRNA sense strand
uggauccuaugcccagaaa

SEQ ID NO: 157664 - RNA, 19 nt, Homo sapiens
  misc_RNA (1)...(19): siRNA sense strand
caucaucaucuuccacuca

SEQ ID NO: 157665 - RNA, 19 nt, Homo sapiens
  misc_RNA (1)...(19): siRNA sense strand
accugaaagugguuuaauu

SEQ ID NO: 157666 - RNA, 19 nt, Homo sapiens
  misc_RNA (1)...(19): siRNA sense strand
gcauuguggccagguauga

SEQ ID NO: 157667 - RNA, 19 nt, Homo sapiens
  misc_RNA (1)...(19): siRNA sense strand
ggugcauuguggccaggua

SEQ ID NO: 157668 - RNA, 19 nt, Homo sapiens
  misc_RNA (1)...(19): siRNA sense strand
caaugauuauaccucacaa

SEQ ID NO: 157669 - RNA, 19 nt, Homo sapiens
  misc_RNA (1)...(19): siRNA sense strand
uggcugauacucaucuauu

SEQ ID NO: 157670 - RNA, 19 nt, Homo sapiens
  misc_RNA (1)...(19): siRNA sense strand
gauuggcucagguuuaaca

SEQ ID NO: 157671 - RNA, 19 nt, Homo sapiens
  misc_RNA (1)...(19): siRNA sense strand
gcccagaaauauggaaagg

SEQ ID NO: 157672 - RNA, 19 nt, Homo sapiens
  misc_RNA (1)...(19): siRNA sense strand
cauuagcagcaaccacaua

SEQ ID NO: 157673 - RNA, 19 nt, Homo sapiens
  misc_RNA (1)...(19): siRNA sense strand
ccaaugauuauaccucaca

SEQ ID NO: 157674 - RNA, 19 nt, Homo sapiens
  misc_RNA (1)...(19): siRNA sense strand
ccagaugucagugaucaga

SEQ ID NO: 157675 - RNA, 19 nt, Homo sapiens
  misc_RNA (1)...(19): siRNA sense strand
guagugauuggcucagguu

SEQ ID NO: 157676 - RNA, 19 nt, Homo sapiens
  misc_RNA (1)...(19): siRNA sense strand
uucccaagacagugaauua

SEQ ID NO: 157677 - RNA, 19 nt, Homo sapiens
  misc_RNA (1)...(19): siRNA sense strand
cagacuacaccaaguaaag

SEQ ID NO: 157678 - RNA, 19 nt, Homo sapiens
  misc_RNA (1)...(19): siRNA sense strand
ugauuauaccucacaaaug

SEQ ID NO: 157679 - RNA, 19 nt, Homo sapiens
  misc_RNA (1)...(19): siRNA sense strand
ucaaguaagcaauccagau

SEQ ID NO: 157680 - RNA, 19 nt, Homo sapiens
  misc_RNA (1)...(19): siRNA sense strand
agccaagcccagcacauua

SEQ ID NO: 157681 - RNA, 19 nt, Homo sapiens
  misc_RNA (1)...(19): siRNA sense strand
caaaccuucccaugucaga

SEQ ID NO: 157682 - RNA, 19 nt, Homo sapiens
  misc_RNA (1)...(19): siRNA sense strand
ggaaucaggagagcaaacu

SEQ ID NO: 157683 - RNA, 19 nt, Homo sapiens
  misc_RNA (1)...(19): siRNA sense strand
caugucagaggaaauuaug

SEQ ID NO: 157684 - RNA, 19 nt, Homo sapiens
  misc_RNA (1)...(19): siRNA sense strand
gaggaaauuaugacaugca

SEQ ID NO: 157685 - RNA, 19 nt, Homo sapiens
  misc_RNA (1)...(19): siRNA sense strand
gcuucaaaccuucccaugu

SEQ ID NO: 157686 - RNA, 19 nt, Homo sapiens
  misc_RNA (1)...(19): siRNA sense strand
aagcugaugccacuucuuc

SEQ ID NO: 157687 - RNA, 19 nt, Homo sapiens
  misc_RNA (1)...(19): siRNA sense strand
agacuacaccaaguaaaga

SEQ ID NO: 157688 - RNA, 19 nt, Homo sapiens
  misc_RNA (1)...(19): siRNA sense strand
ggucagacuaacagugaug

SEQ ID NO: 157689 - RNA, 19 nt, Homo sapiens
  misc_RNA (1)...(19): siRNA sense strand
ccaagcccagcacauuauu

SEQ ID NO: 157690 - RNA, 19 nt, Homo sapiens
  misc_RNA (1)...(19): siRNA sense strand
agccugauaucuacuucuu

SEQ ID NO: 157691 - RNA, 19 nt, Homo sapiens
  misc_RNA (1)...(19): siRNA sense strand
agugauuggcucagguuua

SEQ ID NO: 157692 - RNA, 19 nt, Homo sapiens
  misc_RNA (1)...(19): siRNA sense strand
uaccagagcaaccagugaa

SEQ ID NO: 157693 - RNA, 19 nt, Homo sapiens
  misc_RNA (1)...(19): siRNA sense strand
ucacaggucagacuaacag

SEQ ID NO: 157694 - RNA, 19 nt, Homo sapiens
  misc_RNA (1)...(19): siRNA sense strand
gaaaugaaguggaaauaug

SEQ ID NO: 157695 - RNA, 19 nt, Homo sapiens
  misc_RNA (1)...(19): siRNA sense strand
cgaaugagauaacuuguaa

SEQ ID NO: 157696 - RNA, 19 nt, Homo sapiens
  misc_RNA (1)...(19): siRNA sense strand
gaagguagccugugaggaa

SEQ ID NO: 157697 - RNA, 19 nt, Homo sapiens
  misc_RNA (1)...(19): siRNA sense strand
gaaaauggcucuucaguag

SEQ ID NO: 157698 - RNA, 19 nt, Homo sapiens
  misc_RNA (1)...(19): siRNA sense strand
gcaaaccuaugaagaagga

SEQ ID NO: 157699 - RNA, 19 nt, Homo sapiens
  misc_RNA (1)...(19): siRNA sense strand
caacagaggagaagugaaa

SEQ ID NO: 157700 - RNA, 19 nt, Homo sapiens
  misc_RNA (1)...(19): siRNA sense strand
gaaauacguugugaagaug

SEQ ID NO: 157701 - RNA, 19 nt, Homo sapiens
  misc_RNA (1)...(19): siRNA sense strand
caagaacccuuaagaacau

SEQ ID NO: 157702 - RNA, 19 nt, Homo sapiens
  misc_RNA (1)...(19): siRNA sense strand
ggacaaaguacaauacgaa

SEQ ID NO: 157703 - RNA, 19 nt, Homo sapiens
  misc_RNA (1)...(19): siRNA sense strand
agucuuacauggagauuua

SEQ ID NO: 157704 - RNA, 19 nt, Homo sapiens
  misc_RNA (1)...(19): siRNA sense strand
gcacaucuccuccucuuau

SEQ ID NO: 157705 - RNA, 19 nt, Homo sapiens
  misc_RNA (1)...(19): siRNA sense strand
ggagaaauaguucauauag

SEQ ID NO: 157706 - RNA, 19 nt, Homo sapiens
  misc_RNA (1)...(19): siRNA sense strand
agaaauacguugugaagau

SEQ ID NO: 157707 - RNA, 19 nt, Homo sapiens
  misc_RNA (1)...(19): siRNA sense strand
caaccaaccuguaggaaag

SEQ ID NO: 157708 - RNA, 19 nt, Homo sapiens
  misc_RNA (1)...(19): siRNA sense strand
gacaacagaccacacauuu

SEQ ID NO: 157709 - RNA, 19 nt, Homo sapiens
  misc_RNA (1)...(19): siRNA sense strand
gagcaaaccacguguacaa

SEQ ID NO: 157710 - RNA, 19 nt, Homo sapiens
  misc_RNA (1)...(19): siRNA sense strand
caagauguauuccaagaca

SEQ ID NO: 157711 - RNA, 19 nt, Homo sapiens
  misc_RNA (1)...(19): siRNA sense strand
cuaaguggaucugauuuaa

SEQ ID NO: 157712 - RNA, 19 nt, Homo sapiens
  misc_RNA (1)...(19): siRNA sense strand
gaaauuauuccacaacaca

SEQ ID NO: 157713 - RNA, 19 nt, Homo sapiens
  misc_RNA (1)...(19): siRNA sense strand
uaaacagggauaugacuua

SEQ ID NO: 157714 - RNA, 19 nt, Homo sapiens
  misc_RNA (1)...(19): siRNA sense strand
caaagugaaggacaaagua

SEQ ID NO: 157715 - RNA, 19 nt, Homo sapiens
  misc_RNA (1)...(19): siRNA sense strand
cuacacagcuggaggaaag

SEQ ID NO: 157716 - RNA, 19 nt, Homo sapiens
  misc_RNA (1)...(19): siRNA sense strand
guggaaauaugaagggaaa

SEQ ID NO: 157717 - RNA, 19 nt, Homo sapiens
  misc_RNA (1)...(19): siRNA sense strand
caaaguacaauacgaaugu

SEQ ID NO: 157718 - RNA, 19 nt, Homo sapiens
  misc_RNA (1)...(19): siRNA sense strand
gaaggaagaagaaacagau

SEQ ID NO: 157719 - RNA, 19 nt, Homo sapiens
  misc_RNA (1)...(19): siRNA sense strand
ggacagaaccuccaaaaug

SEQ ID NO: 157720 - RNA, 19 nt, Homo sapiens
  misc_RNA (1)...(19): siRNA sense strand
aaauggcucuucaguagaa

SEQ ID NO: 157721 - RNA, 19 nt, Homo sapiens
  misc_RNA (1)...(19): siRNA sense strand
gaagggaaagucuuacaug

SEQ ID NO: 157722 - RNA, 19 nt, Homo sapiens
  misc_RNA (1)...(19): siRNA sense strand
uggauuacaugaacagaaa

SEQ ID NO: 157723 - RNA, 19 nt, Homo sapiens
  misc_RNA (1)...(19): siRNA sense strand
gauccucaguggaauauag

SEQ ID NO: 157724 - RNA, 19 nt, Homo sapiens
  misc_RNA (1)...(19): siRNA sense strand
gggauaaagugacauaugc

SEQ ID NO: 157725 - RNA, 19 nt, Homo sapiens
  misc_RNA (1)...(19): siRNA sense strand
gaucgaaugagauaacuug

SEQ ID NO: 157726 - RNA, 19 nt, Homo sapiens
  misc_RNA (1)...(19): siRNA sense strand
gaagagcaaaccacgugua

SEQ ID NO: 157727 - RNA, 19 nt, Homo sapiens
  misc_RNA (1)...(19): siRNA sense strand
aaagcacucugucuuauca

SEQ ID NO: 157728 - RNA, 19 nt, Homo sapiens
  misc_RNA (1)...(19): siRNA sense strand
gaggagaagugaaauaucc

SEQ ID NO: 157729 - RNA, 19 nt, Homo sapiens
  misc_RNA (1)...(19): siRNA sense strand
ugagauaacuuguaaucgu

SEQ ID NO: 157730 - RNA, 19 nt, Homo sapiens
  misc_RNA (1)...(19): siRNA sense strand
gcagaaauacguugugaag

SEQ ID NO: 157731 - RNA, 19 nt, Homo sapiens
  misc_RNA (1)...(19): siRNA sense strand
gaagacagaggagguagaa

SEQ ID NO: 157732 - RNA, 19 nt, Homo sapiens
  misc_RNA (1)...(19): siRNA sense strand
caaacacauucaacaacuu

SEQ ID NO: 157733 - RNA, 19 nt, Homo sapiens
  misc_RNA (1)...(19): siRNA sense strand
gaaaguggaagacaagaag

SEQ ID NO: 157734 - RNA, 19 nt, Homo sapiens
  misc_RNA (1)...(19): siRNA sense strand
acauagaaaugaaguggaa

SEQ ID NO: 157735 - RNA, 19 nt, Homo sapiens
  misc_RNA (1)...(19): siRNA sense strand
ggaaccauguacuguuaau

SEQ ID NO: 157736 - RNA, 19 nt, Homo sapiens
  misc_RNA (1)...(19): siRNA sense strand
cagaaaacauucaaaguga

SEQ ID NO: 157737 - RNA, 19 nt, Homo sapiens
  misc_RNA (1)...(19): siRNA sense strand
uauccaagauguauuccaa

SEQ ID NO: 157738 - RNA, 19 nt, Homo sapiens
  misc_RNA (1)...(19): siRNA sense strand
uaagcauccuccuguugua

SEQ ID NO: 157739 - RNA, 19 nt, Homo sapiens
  misc_RNA (1)...(19): siRNA sense strand
cagcagaaauacguuguga

SEQ ID NO: 157740 - RNA, 19 nt, Homo sapiens
  misc_RNA (1)...(19): siRNA sense strand
aaagcaaaccuaugaagaa

SEQ ID NO: 157741 - RNA, 19 nt, Homo sapiens
  misc_RNA (1)...(19): siRNA sense strand
uuggaaccauguacuguua

SEQ ID NO: 157742 - RNA, 19 nt, Homo sapiens
  misc_RNA (1)...(19): siRNA sense strand
acaaagcacucugucuuau

SEQ ID NO: 157743 - RNA, 19 nt, Homo sapiens
  misc_RNA (1)...(19): siRNA sense strand
gaauacagauguuuugauc

SEQ ID NO: 157744 - RNA, 19 nt, Homo sapiens
  misc_RNA (1)...(19): siRNA sense strand
ugacuuaucuccauuaacc

SEQ ID NO: 157745 - RNA, 19 nt, Homo sapiens
  misc_RNA (1)...(19): siRNA sense strand
aaacagggauaugacuuau

SEQ ID NO: 157746 - RNA, 19 nt, Homo sapiens
  misc_RNA (1)...(19): siRNA sense strand
ucaagaacccuuaagaaca

SEQ ID NO: 157747 - RNA, 19 nt, Homo sapiens
  misc_RNA (1)...(19): siRNA sense strand
uaaagcaaaccuaugaaga

SEQ ID NO: 157748 - RNA, 19 nt, Homo sapiens
  misc_RNA (1)...(19): siRNA sense strand
ggagaacucuaugcagaag

SEQ ID NO: 157749 - RNA, 19 nt, Homo sapiens
  misc_RNA (1)...(19): siRNA sense strand
ugaaggacaaaguacaaua

SEQ ID NO: 157750 - RNA, 19 nt, Homo sapiens
  misc_RNA (1)...(19): siRNA sense strand
caucuccuccucuuauuaa

SEQ ID NO: 157751 - RNA, 19 nt, Homo sapiens
  misc_RNA (1)...(19): siRNA sense strand
gagccaaggugcuucaaaa

SEQ ID NO: 157752 - RNA, 19 nt, Homo sapiens
  misc_RNA (1)...(19): siRNA sense strand
ucaaacacauucaacaacu

SEQ ID NO: 157753 - RNA, 19 nt, Homo sapiens
  misc_RNA (1)...(19): siRNA sense strand
ggagguagaaugucucaca

SEQ ID NO: 157754 - RNA, 19 nt, Homo sapiens
  misc_RNA (1)...(19): siRNA sense strand
uuagagccaugcacauuau

SEQ ID NO: 157755 - RNA, 19 nt, Homo sapiens
  misc_RNA (1)...(19): siRNA sense strand
gaggaaccacccuucauug

SEQ ID NO: 157756 - RNA, 19 nt, Homo sapiens
  misc_RNA (1)...(19): siRNA sense strand
aaggagaugucguucaguu

SEQ ID NO: 157757 - RNA, 19 nt, Homo sapiens
  misc_RNA (1)...(19): siRNA sense strand
gaaggacaaaguacaauac

SEQ ID NO: 157758 - RNA, 19 nt, Homo sapiens
  misc_RNA (1)...(19): siRNA sense strand
gcaaaccacguguacaaca

SEQ ID NO: 157759 - RNA, 19 nt, Homo sapiens
  misc_RNA (1)...(19): siRNA sense strand
ccaugggucagcagaaaua

SEQ ID NO: 157760 - RNA, 19 nt, Homo sapiens
  misc_RNA (1)...(19): siRNA sense strand
uaucaagaacccuuaagaa

SEQ ID NO: 157761 - RNA, 19 nt, Homo sapiens
  misc_RNA (1)...(19): siRNA sense strand
caacagaccacacauuuug

SEQ ID NO: 157762 - RNA, 19 nt, Homo sapiens
  misc_RNA (1)...(19): siRNA sense strand
gugcacaucuccuccucuu

SEQ ID NO: 157763 - RNA, 19 nt, Homo sapiens
  misc_RNA (1)...(19): siRNA sense strand
gagaagugaaauauccuuu

SEQ ID NO: 157764 - RNA, 19 nt, Homo sapiens
  misc_RNA (1)...(19): siRNA sense strand
gaaggaugaagaagugguu

SEQ ID NO: 157765 - RNA, 19 nt, Homo sapiens
  misc_RNA (1)...(19): siRNA sense strand
ggacuacaccaccauugug

SEQ ID NO: 157766 - RNA, 19 nt, Homo sapiens
  misc_RNA (1)...(19): siRNA sense strand
gaucaccauuuccuagaag

SEQ ID NO: 157767 - RNA, 19 nt, Homo sapiens
  misc_RNA (1)...(19): siRNA sense strand
ugaagaaggagaugucguu

SEQ ID NO: 157768 - RNA, 19 nt, Homo sapiens
  misc_RNA (1)...(19): siRNA sense strand
cagaggagguagaaugucu

SEQ ID NO: 157769 - RNA, 19 nt, Homo sapiens
  misc_RNA (1)...(19): siRNA sense strand
agacagaggagguagaaug

SEQ ID NO: 157770 - RNA, 19 nt, Homo sapiens
  misc_RNA (1)...(19): siRNA sense strand
guaagcauccuccuguugu

SEQ ID NO: 157771 - RNA, 19 nt, Homo sapiens
  misc_RNA (1)...(19): siRNA sense strand
ccauggaucgaaugagaua

SEQ ID NO: 157772 - RNA, 19 nt, Homo sapiens
  misc_RNA (1)...(19): siRNA sense strand
gaagaagugguucaauguc

SEQ ID NO: 157773 - RNA, 19 nt, Homo sapiens
  misc_RNA (1)...(19): siRNA sense strand
ggaagaagaaacagauguc

SEQ ID NO: 157774 - RNA, 19 nt, Homo sapiens
  misc_RNA (1)...(19): siRNA sense strand
guacaauacgaaugugcua

SEQ ID NO: 157775 - RNA, 19 nt, Homo sapiens
  misc_RNA (1)...(19): siRNA sense strand
ccaugcacauuaucuuuua

SEQ ID NO: 157776 - RNA, 19 nt, Homo sapiens
  misc_RNA (1)...(19): siRNA sense strand
ggaauauagaugcaaugaa

SEQ ID NO: 157777 - RNA, 19 nt, Homo sapiens
  misc_RNA (1)...(19): siRNA sense strand
ugaggaaccacccuucauu

SEQ ID NO: 157778 - RNA, 19 nt, Homo sapiens
  misc_RNA (1)...(19): siRNA sense strand
ucuaaguggaucugauuua

SEQ ID NO: 157779 - RNA, 19 nt, Homo sapiens
  misc_RNA (1)...(19): siRNA sense strand
aggagaagguagccuguga

SEQ ID NO: 157780 - RNA, 19 nt, Homo sapiens
  misc_RNA (1)...(19): siRNA sense strand
auacuuauccagcugaauu

SEQ ID NO: 157781 - RNA, 19 nt, Homo sapiens
  misc_RNA (1)...(19): siRNA sense strand
ucaguagaauacagauguu

SEQ ID NO: 157782 - RNA, 19 nt, Homo sapiens
  misc_RNA (1)...(19): siRNA sense strand
cccauugucugaauuaucu

SEQ ID NO: 157783 - RNA, 19 nt, Homo sapiens
  misc_RNA (1)...(19): siRNA sense strand
guaaacagggauaugacuu

SEQ ID NO: 157784 - RNA, 19 nt, Homo sapiens
  misc_RNA (1)...(19): siRNA sense strand
ggaaauaugaagggaaagu

SEQ ID NO: 157785 - RNA, 19 nt, Homo sapiens
  misc_RNA (1)...(19): siRNA sense strand
guuuggcuccugaauuaua

SEQ ID NO: 157786 - RNA, 19 nt, Homo sapiens
  misc_RNA (1)...(19): siRNA sense strand
ugacaacagaccacacauu

SEQ ID NO: 157787 - RNA, 19 nt, Homo sapiens
  misc_RNA (1)...(19): siRNA sense strand
cagaggagaagugaaauau

SEQ ID NO: 157788 - RNA, 19 nt, Homo sapiens
  misc_RNA (1)...(19): siRNA sense strand
gaaagucuuacauggagau

SEQ ID NO: 157789 - RNA, 19 nt, Homo sapiens
  misc_RNA (1)...(19): siRNA sense strand
gcauccuccuguuguaaug

SEQ ID NO: 157790 - RNA, 19 nt, Homo sapiens
  misc_RNA (1)...(19): siRNA sense strand
agaaggagaugucguucag

SEQ ID NO: 157791 - RNA, 19 nt, Homo sapiens
  misc_RNA (1)...(19): siRNA sense strand
caaaccacguguacaacag

SEQ ID NO: 157792 - RNA, 19 nt, Homo sapiens
  misc_RNA (1)...(19): siRNA sense strand
uaucuaaguggaucugauu

SEQ ID NO: 157793 - RNA, 19 nt, Homo sapiens
  misc_RNA (1)...(19): siRNA sense strand
caaauuaaagugcucuucu

SEQ ID NO: 157794 - RNA, 19 nt, Homo sapiens
  misc_RNA (1)...(19): siRNA sense strand
gaaaguggguuaacugaau

SEQ ID NO: 157795 - RNA, 19 nt, Homo sapiens
  misc_RNA (1)...(19): siRNA sense strand
gaagaugccuccggauauu

SEQ ID NO: 157796 - RNA, 19 nt, Homo sapiens
  misc_RNA (1)...(19): siRNA sense strand
gcgcauuacucauuccuuu

SEQ ID NO: 157797 - RNA, 19 nt, Homo sapiens
  misc_RNA (1)...(19): siRNA sense strand
caacaaaugccaccuuaga

SEQ ID NO: 157798 - RNA, 19 nt, Homo sapiens
  misc_RNA (1)...(19): siRNA sense strand
ggucauuucuucucaggaa

SEQ ID NO: 157799 - RNA, 19 nt, Homo sapiens
  misc_RNA (1)...(19): siRNA sense strand
ccuuuaagaucagcuauua

SEQ ID NO: 157800 - RNA, 19 nt, Homo sapiens
  misc_RNA (1)...(19): siRNA sense strand
agauuagucuccaucaaua

SEQ ID NO: 157801 - RNA, 19 nt, Homo sapiens
  misc_RNA (1)...(19): siRNA sense strand
guacgucuacaguaucuua

SEQ ID NO: 157802 - RNA, 19 nt, Homo sapiens
  misc_RNA (1)...(19): siRNA sense strand
aaaguggguuaacugaaua

SEQ ID NO: 157803 - RNA, 19 nt, Homo sapiens
  misc_RNA (1)...(19): siRNA sense strand
uaaccugaauaacagcaua

SEQ ID NO: 157804 - RNA, 19 nt, Homo sapiens
  misc_RNA (1)...(19): siRNA sense strand
cauaagcauugaccgguuu

SEQ ID NO: 157805 - RNA, 19 nt, Homo sapiens
  misc_RNA (1)...(19): siRNA sense strand
uaacagcagugggcaguug

SEQ ID NO: 157806 - RNA, 19 nt, Homo sapiens
  misc_RNA (1)...(19): siRNA sense strand
ccacaaacguccuccugau

SEQ ID NO: 157807 - RNA, 19 nt, Homo sapiens
  misc_RNA (1)...(19): siRNA sense strand
ggcaguugauggcaaguaa

SEQ ID NO: 157808 - RNA, 19 nt, Homo sapiens
  misc_RNA (1)...(19): siRNA sense strand
cagaagaugccuccggaua

SEQ ID NO: 157809 - RNA, 19 nt, Homo sapiens
  misc_RNA (1)...(19): siRNA sense strand
caacaucacuaccugucau

SEQ ID NO: 157810 - RNA, 19 nt, Homo sapiens
  misc_RNA (1)...(19): siRNA sense strand
uggguuaacugaauacaga

SEQ ID NO: 157811 - RNA, 19 nt, Homo sapiens
  misc_RNA (1)...(19): siRNA sense strand
agagguacgucuacaguau

SEQ ID NO: 157812 - RNA, 19 nt, Homo sapiens
  misc_RNA (1)...(19): siRNA sense strand
cuucgucacugcagcauuu

SEQ ID NO: 157813 - RNA, 19 nt, Homo sapiens
  misc_RNA (1)...(19): siRNA sense strand
cggcagaugugcuguuugu

SEQ ID NO: 157814 - RNA, 19 nt, Homo sapiens
  misc_RNA (1)...(19): siRNA sense strand
gcagaugugcuguuugugu

SEQ ID NO: 157815 - RNA, 19 nt, Homo sapiens
  misc_RNA (1)...(19): siRNA sense strand
gaaccccaaugauaaauau

SEQ ID NO: 157816 - RNA, 19 nt, Homo sapiens
  misc_RNA (1)...(19): siRNA sense strand
agcaacaaaugccaccuua

SEQ ID NO: 157817 - RNA, 19 nt, Homo sapiens
  misc_RNA (1)...(19): siRNA sense strand
gaucccagcaguuauaaca

SEQ ID NO: 157818 - RNA, 19 nt, Homo sapiens
  misc_RNA (1)...(19): siRNA sense strand
gccucuaucuugcucauga

SEQ ID NO: 157819 - RNA, 19 nt, Homo sapiens
  misc_RNA (1)...(19): siRNA sense strand
gcuccuggcugacacucuu

SEQ ID NO: 157820 - RNA, 19 nt, Homo sapiens
  misc_RNA (1)...(19): siRNA sense strand
ucacuugucuggccaucug

SEQ ID NO: 157821 - RNA, 19 nt, Homo sapiens
  misc_RNA (1)...(19): siRNA sense strand
cuucucugcugucuucuuu

SEQ ID NO: 157822 - RNA, 19 nt, Homo sapiens
  misc_RNA (1)...(19): siRNA sense strand
guuccgaucccagcaguua

SEQ ID NO: 157823 - RNA, 19 nt, Homo sapiens
  misc_RNA (1)...(19): siRNA sense strand
gauuagucuccaucaauaa

SEQ ID NO: 157824 - RNA, 19 nt, Homo sapiens
  misc_RNA (1)...(19): siRNA sense strand
acaaacguccuccugauug

SEQ ID NO: 157825 - RNA, 19 nt, Homo sapiens
  misc_RNA (1)...(19): siRNA sense strand
cagauuagucuccaucaau

SEQ ID NO: 157826 - RNA, 19 nt, Homo sapiens
  misc_RNA (1)...(19): siRNA sense strand
ucauuuccacggucuguua

SEQ ID NO: 157827 - RNA, 19 nt, Homo sapiens
  misc_RNA (1)...(19): siRNA sense strand
ucuaucauucgaugucuua

SEQ ID NO: 157828 - RNA, 19 nt, Homo sapiens
  misc_RNA (1)...(19): siRNA sense strand
gauugcgcauuacucauuc

SEQ ID NO: 157829 - RNA, 19 nt, Homo sapiens
  misc_RNA (1)...(19): siRNA sense strand
agaagaugccuccggauau

SEQ ID NO: 157830 - RNA, 19 nt, Homo sapiens
  misc_RNA (1)...(19): siRNA sense strand
ugauugcgcauuacucauu

SEQ ID NO: 157831 - RNA, 19 nt, Homo sapiens
  misc_RNA (1)...(19): siRNA sense strand
caaugaaacccugcucgaa

SEQ ID NO: 157832 - RNA, 19 nt, Homo sapiens
  misc_RNA (1)...(19): siRNA sense strand
caucauggccaucguugug

SEQ ID NO: 157833 - RNA, 19 nt, Homo sapiens
  misc_RNA (1)...(19): siRNA sense strand
uaaaagcaguccucuucaa

SEQ ID NO: 157834 - RNA, 19 nt, Homo sapiens
  misc_RNA (1)...(19): siRNA sense strand
cacggcagaugugcuguuu

SEQ ID NO: 157835 - RNA, 19 nt, Homo sapiens
  misc_RNA (1)...(19): siRNA sense strand
caaacguccuccugauugc

SEQ ID NO: 157836 - RNA, 19 nt, Homo sapiens
  misc_RNA (1)...(19): siRNA sense strand
ucuuagcucuuccgcaguu

SEQ ID NO: 157837 - RNA, 19 nt, Homo sapiens
  misc_RNA (1)...(19): siRNA sense strand
cacaaacguccuccugauu

SEQ ID NO: 157838 - RNA, 19 nt, Homo sapiens
  misc_RNA (1)...(19): siRNA sense strand
acaaaugccaccuuagauc

SEQ ID NO: 157839 - RNA, 19 nt, Homo sapiens
  misc_RNA (1)...(19): siRNA sense strand
gcaguugauggcaaguaaa

SEQ ID NO: 157840 - RNA, 19 nt, Homo sapiens
  misc_RNA (1)...(19): siRNA sense strand
ucaggaaccccaaugauaa

SEQ ID NO: 157841 - RNA, 19 nt, Homo sapiens
  misc_RNA (1)...(19): siRNA sense strand
gcaucuucaucauuugcuu

SEQ ID NO: 157842 - RNA, 19 nt, Homo sapiens
  misc_RNA (1)...(19): siRNA sense strand
uguuaugugucuaucauuc

SEQ ID NO: 157843 - RNA, 19 nt, Homo sapiens
  misc_RNA (1)...(19): siRNA sense strand
acagauuagucuccaucaa

SEQ ID NO: 157844 - RNA, 19 nt, Homo sapiens
  misc_RNA (1)...(19): siRNA sense strand
gggcuuccuucacuugucu

SEQ ID NO: 157845 - RNA, 19 nt, Homo sapiens
  misc_RNA (1)...(19): siRNA sense strand
cagagguacgucuacagua

SEQ ID NO: 157846 - RNA, 19 nt, Homo sapiens
  misc_RNA (1)...(19): siRNA sense strand
gcauuacucauuccuuucu

SEQ ID NO: 157847 - RNA, 19 nt, Homo sapiens
  misc_RNA (1)...(19): siRNA sense strand
acaacuuccugcauucauc

SEQ ID NO: 157848 - RNA, 19 nt, Homo sapiens
  misc_RNA (1)...(19): siRNA sense strand
cugaauaacagcauauaca

SEQ ID NO: 157849 - RNA, 19 nt, Homo sapiens
  misc_RNA (1)...(19): siRNA sense strand
ugaaaguggguuaacugaa

SEQ ID NO: 157850 - RNA, 19 nt, Homo sapiens
  misc_RNA (1)...(19): siRNA sense strand
acuauuacgcuuccucuga

SEQ ID NO: 157851 - RNA, 19 nt, Homo sapiens
  misc_RNA (1)...(19): siRNA sense strand
ggccaucguuguguucauc

SEQ ID NO: 157852 - RNA, 19 nt, Homo sapiens
  misc_RNA (1)...(19): siRNA sense strand
cugcauucaucucagaaga

SEQ ID NO: 157853 - RNA, 19 nt, Homo sapiens
  misc_RNA (1)...(19): siRNA sense strand
aaacaucauggccaucguu

SEQ ID NO: 157854 - RNA, 19 nt, Homo sapiens
  misc_RNA (1)...(19): siRNA sense strand
gaaaaugaaggucaagaag

SEQ ID NO: 157855 - RNA, 19 nt, Homo sapiens
  misc_RNA (1)...(19): siRNA sense strand
gcaacaaaugccaccuuag

SEQ ID NO: 157856 - RNA, 19 nt, Homo sapiens
  misc_RNA (1)...(19): siRNA sense strand
uugccuaccuccucugugu

SEQ ID NO: 157857 - RNA, 19 nt, Homo sapiens
  misc_RNA (1)...(19): siRNA sense strand
aaaugaaaguggguuaacu

SEQ ID NO: 157858 - RNA, 19 nt, Homo sapiens
  misc_RNA (1)...(19): siRNA sense strand
uucugcaucuucaucauuu

SEQ ID NO: 157859 - RNA, 19 nt, Homo sapiens
  misc_RNA (1)...(19): siRNA sense strand
ucauggccaucguuguguu

SEQ ID NO: 157860 - RNA, 19 nt, Homo sapiens
  misc_RNA (1)...(19): siRNA sense strand
ccagagguacgucuacagu

SEQ ID NO: 157861 - RNA, 19 nt, Homo sapiens
  misc_RNA (1)...(19): siRNA sense strand
ucuguuaugugucuaucau

SEQ ID NO: 157862 - RNA, 19 nt, Homo sapiens
  misc_RNA (1)...(19): siRNA sense strand
guuucuggcugugguguau

SEQ ID NO: 157863 - RNA, 19 nt, Homo sapiens
  misc_RNA (1)...(19): siRNA sense strand
agccuucucugcugucuuc

SEQ ID NO: 157864 - RNA, 19 nt, Homo sapiens
  misc_RNA (1)...(19): siRNA sense strand
ggaaccccaaugauaaaua

SEQ ID NO: 157865 - RNA, 19 nt, Homo sapiens
  misc_RNA (1)...(19): siRNA sense strand
gaucauuuccacggucugu

SEQ ID NO: 157866 - RNA, 19 nt, Homo sapiens
  misc_RNA (1)...(19): siRNA sense strand
ugucugugcuccccuuuaa

SEQ ID NO: 157867 - RNA, 19 nt, Homo sapiens
  misc_RNA (1)...(19): siRNA sense strand
aaacaacuuccugcauuca

SEQ ID NO: 157868 - RNA, 19 nt, Homo sapiens
  misc_RNA (1)...(19): siRNA sense strand
gggcaguugauggcaagua

SEQ ID NO: 157869 - RNA, 19 nt, Homo sapiens
  misc_RNA (1)...(19): siRNA sense strand
cgucuacaguaucuuaugc

SEQ ID NO: 157870 - RNA, 19 nt, Homo sapiens
  misc_RNA (1)...(19): siRNA sense strand
gguuaacugaauacagauu

SEQ ID NO: 157871 - RNA, 19 nt, Homo sapiens
  misc_RNA (1)...(19): siRNA sense strand
uccgaucccagcaguuaua

SEQ ID NO: 157872 - RNA, 19 nt, Homo sapiens
  misc_RNA (1)...(19): siRNA sense strand
gagguacgucuacaguauc

SEQ ID NO: 157873 - RNA, 19 nt, Homo sapiens
  misc_RNA (1)...(19): siRNA sense strand
ggcaaggacuuaauuuaua

SEQ ID NO: 157874 - RNA, 19 nt, Homo sapiens
  misc_RNA (1)...(19): siRNA sense strand
gaacaacacuuuccuaagc

SEQ ID NO: 157875 - RNA, 19 nt, Homo sapiens
  misc_RNA (1)...(19): siRNA sense strand
caaauacuguggcagcaua

SEQ ID NO: 157876 - RNA, 19 nt, Homo sapiens
  misc_RNA (1)...(19): siRNA sense strand
agucuacacuguucaaaua

SEQ ID NO: 157877 - RNA, 19 nt, Homo sapiens
  misc_RNA (1)...(19): siRNA sense strand
gcaaggacuuaauuuauac

SEQ ID NO: 157878 - RNA, 19 nt, Homo sapiens
  misc_RNA (1)...(19): siRNA sense strand
cauuggagcugugguauuu

SEQ ID NO: 157879 - RNA, 19 nt, Homo sapiens
  misc_RNA (1)...(19): siRNA sense strand
caccuuaccuggagacaaa

SEQ ID NO: 157880 - RNA, 19 nt, Homo sapiens
  misc_RNA (1)...(19): siRNA sense strand
ucaaucaagucuacacugu

SEQ ID NO: 157881 - RNA, 19 nt, Homo sapiens
  misc_RNA (1)...(19): siRNA sense strand
gaaugugaccguagaagau

SEQ ID NO: 157882 - RNA, 19 nt, Homo sapiens
  misc_RNA (1)...(19): siRNA sense strand
ggacagccaacaauucaga

SEQ ID NO: 157883 - RNA, 19 nt, Homo sapiens
  misc_RNA (1)...(19): siRNA sense strand
gggagccucuguaugagaa

SEQ ID NO: 157884 - RNA, 19 nt, Homo sapiens
  misc_RNA (1)...(19): siRNA sense strand
acaguuaaccggaagagua

SEQ ID NO: 157885 - RNA, 19 nt, Homo sapiens
  misc_RNA (1)...(19): siRNA sense strand
ucagaaggaacaacacuuu

SEQ ID NO: 157886 - RNA, 19 nt, Homo sapiens
  misc_RNA (1)...(19): siRNA sense strand
aaucaagucuacacuguuc

SEQ ID NO: 157887 - RNA, 19 nt, Homo sapiens
  misc_RNA (1)...(19): siRNA sense strand
uguggcagcauauaauuua

SEQ ID NO: 157888 - RNA, 19 nt, Homo sapiens
  misc_RNA (1)...(19): siRNA sense strand
ggcuauaucucuacacaag

SEQ ID NO: 157889 - RNA, 19 nt, Homo sapiens
  misc_RNA (1)...(19): siRNA sense strand
ucaaauaagcacuaaguca

SEQ ID NO: 157890 - RNA, 19 nt, Homo sapiens
  misc_RNA (1)...(19): siRNA sense strand
cauccuggcuauaucucua

SEQ ID NO: 157891 - RNA, 19 nt, Homo sapiens
  misc_RNA (1)...(19): siRNA sense strand
gcacuaagucaggagauug

SEQ ID NO: 157892 - RNA, 19 nt, Homo sapiens
  misc_RNA (1)...(19): siRNA sense strand
ccgacgagauugugaagga

SEQ ID NO: 157893 - RNA, 19 nt, Homo sapiens
  misc_RNA (1)...(19): siRNA sense strand
ccaaacccgucaaucaagu

SEQ ID NO: 157894 - RNA, 19 nt, Homo sapiens
  misc_RNA (1)...(19): siRNA sense strand
gcuucaggcacuacaaaua

SEQ ID NO: 157895 - RNA, 19 nt, Homo sapiens
  misc_RNA (1)...(19): siRNA sense strand
agccaacaauucagaguuu

SEQ ID NO: 157896 - RNA, 19 nt, Homo sapiens
  misc_RNA (1)...(19): siRNA sense strand
cuauaucucuacacaagug

SEQ ID NO: 157897 - RNA, 19 nt, Homo sapiens
  misc_RNA (1)...(19): siRNA sense strand
uuggaaaucuucaaguuca

SEQ ID NO: 157898 - RNA, 19 nt, Homo sapiens
  misc_RNA (1)...(19): siRNA sense strand
caucauccuugucaucauc

SEQ ID NO: 157899 - RNA, 19 nt, Homo sapiens
  misc_RNA (1)...(19): siRNA sense strand
uggcaaggacuuaauuuau

SEQ ID NO: 157900 - RNA, 19 nt, Homo sapiens
  misc_RNA (1)...(19): siRNA sense strand
guacagacagcccgguaga

SEQ ID NO: 157901 - RNA, 19 nt, Homo sapiens
  misc_RNA (1)...(19): siRNA sense strand
guucaaauaagcacuaagu

SEQ ID NO: 157902 - RNA, 19 nt, Homo sapiens
  misc_RNA (1)...(19): siRNA sense strand
ugauguggauaaaggagaa

SEQ ID NO: 157903 - RNA, 19 nt, Homo sapiens
  misc_RNA (1)...(19): siRNA sense strand
ugauugauguggauaaagg

SEQ ID NO: 157904 - RNA, 19 nt, Homo sapiens
  misc_RNA (1)...(19): siRNA sense strand
gaaaacagccaaaacaaac

SEQ ID NO: 157905 - RNA, 19 nt, Homo sapiens
  misc_RNA (1)...(19): siRNA sense strand
uaagucaggagauuggaaa

SEQ ID NO: 157906 - RNA, 19 nt, Homo sapiens
  misc_RNA (1)...(19): siRNA sense strand
guggcagcauauaauuuaa

SEQ ID NO: 157907 - RNA, 19 nt, Homo sapiens
  misc_RNA (1)...(19): siRNA sense strand
uggcacgggucuucuccua

SEQ ID NO: 157908 - RNA, 19 nt, Homo sapiens
  misc_RNA (1)...(19): siRNA sense strand
ugaccucaccgacgagauu

SEQ ID NO: 157909 - RNA, 19 nt, Homo sapiens
  misc_RNA (1)...(19): siRNA sense strand
caucauuggagcuguggua

SEQ ID NO: 157910 - RNA, 19 nt, Homo sapiens
  misc_RNA (1)...(19): siRNA sense strand
gaaaggggaauucagagaa

SEQ ID NO: 157911 - RNA, 19 nt, Homo sapiens
  misc_RNA (1)...(19): siRNA sense strand
ggagaaaggggaauucaga

SEQ ID NO: 157912 - RNA, 19 nt, Homo sapiens
  misc_RNA (1)...(19): siRNA sense strand
uugaacaggugggaacaaa

SEQ ID NO: 157913 - RNA, 19 nt, Homo sapiens
  misc_RNA (1)...(19): siRNA sense strand
guacuuggcacgggucuuc

SEQ ID NO: 157914 - RNA, 19 nt, Homo sapiens
  misc_RNA (1)...(19): siRNA sense strand
ccccagaguucacaccuua

SEQ ID NO: 157915 - RNA, 19 nt, Homo sapiens
  misc_RNA (1)...(19): siRNA sense strand
ugaaugugaccguagaaga

SEQ ID NO: 157916 - RNA, 19 nt, Homo sapiens
  misc_RNA (1)...(19): siRNA sense strand
ggaaagaaaacagccaaaa

SEQ ID NO: 157917 - RNA, 19 nt, Homo sapiens
  misc_RNA (1)...(19): siRNA sense strand
gugauucccucccgaacag

SEQ ID NO: 157918 - RNA, 19 nt, Homo sapiens
  misc_RNA (1)...(19): siRNA sense strand
gcgcuucaggcacuacaaa

SEQ ID NO: 157919 - RNA, 19 nt, Homo sapiens
  misc_RNA (1)...(19): siRNA sense strand
gcaaaugcuuuuacacaac

SEQ ID NO: 157920 - RNA, 19 nt, Homo sapiens
  misc_RNA (1)...(19): siRNA sense strand
ggcagcauauaauuuaacu

SEQ ID NO: 157921 - RNA, 19 nt, Homo sapiens
  misc_RNA (1)...(19): siRNA sense strand
ccaaaacaaacacuaauga

SEQ ID NO: 157922 - RNA, 19 nt, Homo sapiens
  misc_RNA (1)...(19): siRNA sense strand
ggaacaaaagugaauguga

SEQ ID NO: 157923 - RNA, 19 nt, Homo sapiens
  misc_RNA (1)...(19): siRNA sense strand
caaaugcuuuuacacaaca

SEQ ID NO: 157924 - RNA, 19 nt, Homo sapiens
  misc_RNA (1)...(19): siRNA sense strand
auacuguggcagcauauaa

SEQ ID NO: 157925 - RNA, 19 nt, Homo sapiens
  misc_RNA (1)...(19): siRNA sense strand
ggucaucauccuugucauc

SEQ ID NO: 157926 - RNA, 19 nt, Homo sapiens
  misc_RNA (1)...(19): siRNA sense strand
gggaauucagagaaauauu

SEQ ID NO: 157927 - RNA, 19 nt, Homo sapiens
  misc_RNA (1)...(19): siRNA sense strand
aaaggggaauucagagaaa

SEQ ID NO: 157928 - RNA, 19 nt, Homo sapiens
  misc_RNA (1)...(19): siRNA sense strand
caaucaagucuacacuguu

SEQ ID NO: 157929 - RNA, 19 nt, Homo sapiens
  misc_RNA (1)...(19): siRNA sense strand
agacagcccgguagagugu

SEQ ID NO: 157930 - RNA, 19 nt, Homo sapiens
  misc_RNA (1)...(19): siRNA sense strand
gaacaggugggaacaaaag

SEQ ID NO: 157931 - RNA, 19 nt, Homo sapiens
  misc_RNA (1)...(19): siRNA sense strand
gaacccaaacccgucaauc

SEQ ID NO: 157932 - RNA, 19 nt, Homo sapiens
  misc_RNA (1)...(19): siRNA sense strand
uuggcaaggacuuaauuua

SEQ ID NO: 157933 - RNA, 19 nt, Homo sapiens
  misc_RNA (1)...(19): siRNA sense strand
gaaagaaaacagccaaaac

SEQ ID NO: 157934 - RNA, 19 nt, Homo sapiens
  misc_RNA (1)...(19): siRNA sense strand
ccucggacagccaacaauu

SEQ ID NO: 157935 - RNA, 19 nt, Homo sapiens
  misc_RNA (1)...(19): siRNA sense strand
cgacgagauugugaaggau

SEQ ID NO: 157936 - RNA, 19 nt, Homo sapiens
  misc_RNA (1)...(19): siRNA sense strand
gaacaguuaaccggaagag

SEQ ID NO: 157937 - RNA, 19 nt, Homo sapiens
  misc_RNA (1)...(19): siRNA sense strand
cuaagccuccgggauguuu

SEQ ID NO: 157938 - RNA, 19 nt, Homo sapiens
  misc_RNA (1)...(19): siRNA sense strand
aagugaaugugaccguaga

SEQ ID NO: 157939 - RNA, 19 nt, Homo sapiens
  misc_RNA (1)...(19): siRNA sense strand
gucaucauccuggcuauau

SEQ ID NO: 157940 - RNA, 19 nt, Homo sapiens
  misc_RNA (1)...(19): siRNA sense strand
cagccaacaauucagaguu

SEQ ID NO: 157941 - RNA, 19 nt, Homo sapiens
  misc_RNA (1)...(19): siRNA sense strand
aaagaaaacagccaaaaca

SEQ ID NO: 157942 - RNA, 19 nt, Homo sapiens
  misc_RNA (1)...(19): siRNA sense strand
cagaaggaacaacacuuuc

SEQ ID NO: 157943 - RNA, 19 nt, Homo sapiens
  misc_RNA (1)...(19): siRNA sense strand
gagauugugaaggauguga

SEQ ID NO: 157944 - RNA, 19 nt, Homo sapiens
  misc_RNA (1)...(19): siRNA sense strand
aacccaaacccgucaauca

SEQ ID NO: 157945 - RNA, 19 nt, Homo sapiens
  misc_RNA (1)...(19): siRNA sense strand
cuacacuguucaaauaagc

SEQ ID NO: 157946 - RNA, 19 nt, Homo sapiens
  misc_RNA (1)...(19): siRNA sense strand
ucggacagccaacaauuca

SEQ ID NO: 157947 - RNA, 19 nt, Homo sapiens
  misc_RNA (1)...(19): siRNA sense strand
ggauacaggugucaaauaa

SEQ ID NO: 157948 - RNA, 19 nt, Homo sapiens
  misc_RNA (1)...(19): siRNA sense strand
ggacaaagacggcugguua

SEQ ID NO: 157949 - RNA, 19 nt, Homo sapiens
  misc_RNA (1)...(19): siRNA sense strand
caacaaagcugaacucucu

SEQ ID NO: 157950 - RNA, 19 nt, Homo sapiens
  misc_RNA (1)...(19): siRNA sense strand
gaacaaggaugcuuugcuu

SEQ ID NO: 157951 - RNA, 19 nt, Homo sapiens
  misc_RNA (1)...(19): siRNA sense strand
gaggaacugugcagaaaua

SEQ ID NO: 157952 - RNA, 19 nt, Homo sapiens
  misc_RNA (1)...(19): siRNA sense strand
gaaaugaagccaucacgua

SEQ ID NO: 157953 - RNA, 19 nt, Homo sapiens
  misc_RNA (1)...(19): siRNA sense strand
gaaggauucuggucugaaa

SEQ ID NO: 157954 - RNA, 19 nt, Homo sapiens
  misc_RNA (1)...(19): siRNA sense strand
gaagauauggugagacuug

SEQ ID NO: 157955 - RNA, 19 nt, Homo sapiens
  misc_RNA (1)...(19): siRNA sense strand
gcugaacucucucugguuu

SEQ ID NO: 157956 - RNA, 19 nt, Homo sapiens
  misc_RNA (1)...(19): siRNA sense strand
gaaggccaaacucuuauua

SEQ ID NO: 157957 - RNA, 19 nt, Homo sapiens
  misc_RNA (1)...(19): siRNA sense strand
ggccagagcugcggaacua

SEQ ID NO: 157958 - RNA, 19 nt, Homo sapiens
  misc_RNA (1)...(19): siRNA sense strand
caaauaauggcccuuguuu

SEQ ID NO: 157959 - RNA, 19 nt, Homo sapiens
  misc_RNA (1)...(19): siRNA sense strand
uaaacagguugcagaauug

SEQ ID NO: 157960 - RNA, 19 nt, Homo sapiens
  misc_RNA (1)...(19): siRNA sense strand
auaaacagguugcagaauu

SEQ ID NO: 157961 - RNA, 19 nt, Homo sapiens
  misc_RNA (1)...(19): siRNA sense strand
caaggaugcuuugcuuauu

SEQ ID NO: 157962 - RNA, 19 nt, Homo sapiens
  misc_RNA (1)...(19): siRNA sense strand
gcacgaagauccgcacuac

SEQ ID NO: 157963 - RNA, 19 nt, Homo sapiens
  misc_RNA (1)...(19): siRNA sense strand
ugagagaguuguagagugu

SEQ ID NO: 157964 - RNA, 19 nt, Homo sapiens
  misc_RNA (1)...(19): siRNA sense strand
ggugaucguuccacuuuau

SEQ ID NO: 157965 - RNA, 19 nt, Homo sapiens
  misc_RNA (1)...(19): siRNA sense strand
ggucaaaggcaucacauug

SEQ ID NO: 157966 - RNA, 19 nt, Homo sapiens
  misc_RNA (1)...(19): siRNA sense strand
gaagaucuugcaguaauuu

SEQ ID NO: 157967 - RNA, 19 nt, Homo sapiens
  misc_RNA (1)...(19): siRNA sense strand
gcagcggcaucaucagaaa

SEQ ID NO: 157968 - RNA, 19 nt, Homo sapiens
  misc_RNA (1)...(19): siRNA sense strand
gaaaccagaccaacccuau

SEQ ID NO: 157969 - RNA, 19 nt, Homo sapiens
  misc_RNA (1)...(19): siRNA sense strand
caacagagaauacagucaa

SEQ ID NO: 157970 - RNA, 19 nt, Homo sapiens
  misc_RNA (1)...(19): siRNA sense strand
auacgaagguuuccagaga

SEQ ID NO: 157971 - RNA, 19 nt, Homo sapiens
  misc_RNA (1)...(19): siRNA sense strand
ucacguacauagucaacaa

SEQ ID NO: 157972 - RNA, 19 nt, Homo sapiens
  misc_RNA (1)...(19): siRNA sense strand
auacaggugucaaauaaug

SEQ ID NO: 157973 - RNA, 19 nt, Homo sapiens
  misc_RNA (1)...(19): siRNA sense strand
gaaacauagugagcgauug

SEQ ID NO: 157974 - RNA, 19 nt, Homo sapiens
  misc_RNA (1)...(19): siRNA sense strand
aaagacggcugguuacaca

SEQ ID NO: 157975 - RNA, 19 nt, Homo sapiens
  misc_RNA (1)...(19): siRNA sense strand
ugaaagggccaaauguauu

SEQ ID NO: 157976 - RNA, 19 nt, Homo sapiens
  misc_RNA (1)...(19): siRNA sense strand
gggauacaggugucaaaua

SEQ ID NO: 157977 - RNA, 19 nt, Homo sapiens
  misc_RNA (1)...(19): siRNA sense strand
gaacugugcagaaauaagg

SEQ ID NO: 157978 - RNA, 19 nt, Homo sapiens
  misc_RNA (1)...(19): siRNA sense strand
gaaaacagcagaagcuuug

SEQ ID NO: 157979 - RNA, 19 nt, Homo sapiens
  misc_RNA (1)...(19): siRNA sense strand
gaggaaagaagcagacguu

SEQ ID NO: 157980 - RNA, 19 nt, Homo sapiens
  misc_RNA (1)...(19): siRNA sense strand
gaagauccgcacuacuuga

SEQ ID NO: 157981 - RNA, 19 nt, Homo sapiens
  misc_RNA (1)...(19): siRNA sense strand
gcacaaggagaauacauag

SEQ ID NO: 157982 - RNA, 19 nt, Homo sapiens
  misc_RNA (1)...(19): siRNA sense strand
gagaauacagucaauccuu

SEQ ID NO: 157983 - RNA, 19 nt, Homo sapiens
  misc_RNA (1)...(19): siRNA sense strand
cugaagaucuugcaguaau

SEQ ID NO: 157984 - RNA, 19 nt, Homo sapiens
  misc_RNA (1)...(19): siRNA sense strand
ucaguucauuggcaucuuu

SEQ ID NO: 157985 - RNA, 19 nt, Homo sapiens
  misc_RNA (1)...(19): siRNA sense strand
gaauggcuuucauauaaac

SEQ ID NO: 157986 - RNA, 19 nt, Homo sapiens
  misc_RNA (1)...(19): siRNA sense strand
cacauugcacccugaauua

SEQ ID NO: 157987 - RNA, 19 nt, Homo sapiens
  misc_RNA (1)...(19): siRNA sense strand
gcgacgagcccuuggugua

SEQ ID NO: 157988 - RNA, 19 nt, Homo sapiens
  misc_RNA (1)...(19): siRNA sense strand
ugaagaucuugcaguaauu

SEQ ID NO: 157989 - RNA, 19 nt, Homo sapiens
  misc_RNA (1)...(19): siRNA sense strand
cugagugggugauuauuga

SEQ ID NO: 157990 - RNA, 19 nt, Homo sapiens
  misc_RNA (1)...(19): siRNA sense strand
ucacauugcacccugaauu

SEQ ID NO: 157991 - RNA, 19 nt, Homo sapiens
  misc_RNA (1)...(19): siRNA sense strand
gcagaaauaaggaugucaa

SEQ ID NO: 157992 - RNA, 19 nt, Homo sapiens
  misc_RNA (1)...(19): siRNA sense strand
gugaaagggccaaauguau

SEQ ID NO: 157993 - RNA, 19 nt, Homo sapiens
  misc_RNA (1)...(19): siRNA sense strand
gcaguuggaagaaaugaau

SEQ ID NO: 157994 - RNA, 19 nt, Homo sapiens
  misc_RNA (1)...(19): siRNA sense strand
cggcugaucuuccacaaag

SEQ ID NO: 157995 - RNA, 19 nt, Homo sapiens
  misc_RNA (1)...(19): siRNA sense strand
aaauaauggcccuuguuua

SEQ ID NO: 157996 - RNA, 19 nt, Homo sapiens
  misc_RNA (1)...(19): siRNA sense strand
ucaaaggcaucacauugca

SEQ ID NO: 157997 - RNA, 19 nt, Homo sapiens
  misc_RNA (1)...(19): siRNA sense strand
gaacaggucaaaggcauca

SEQ ID NO: 157998 - RNA, 19 nt, Homo sapiens
  misc_RNA (1)...(19): siRNA sense strand
aauggcaccuugaaaauua

SEQ ID NO: 157999 - RNA, 19 nt, Homo sapiens
  misc_RNA (1)...(19): siRNA sense strand
gcugaucuuccacaaagua

SEQ ID NO: 158000 - RNA, 19 nt, Homo sapiens
  misc_RNA (1)...(19): siRNA sense strand
gaaagcaacagagaauaca

SEQ ID NO: 158001 - RNA, 19 nt, Homo sapiens
  misc_RNA (1)...(19): siRNA sense strand
caugagcuguuccgguauu

SEQ ID NO: 158002 - RNA, 19 nt, Homo sapiens
  misc_RNA (1)...(19): siRNA sense strand
aauaauggcccuuguuuag

SEQ ID NO: 158003 - RNA, 19 nt, Homo sapiens
  misc_RNA (1)...(19): siRNA sense strand
gguaccagauguugagaca

SEQ ID NO: 158004 - RNA, 19 nt, Homo sapiens
  misc_RNA (1)...(19): siRNA sense strand
gcaauugugguaccagaug

SEQ ID NO: 158005 - RNA, 19 nt, Homo sapiens
  misc_RNA (1)...(19): siRNA sense strand
ggcacaaggagaauacaua

SEQ ID NO: 158006 - RNA, 19 nt, Homo sapiens
  misc_RNA (1)...(19): siRNA sense strand
ccagacgacucaccaccuu

SEQ ID NO: 158007 - RNA, 19 nt, Homo sapiens
  misc_RNA (1)...(19): siRNA sense strand
ggaagaaaugaauuacaug

SEQ ID NO: 158008 - RNA, 19 nt, Homo sapiens
  misc_RNA (1)...(19): siRNA sense strand
gacgagcccuugguguauu

SEQ ID NO: 158009 - RNA, 19 nt, Homo sapiens
  misc_RNA (1)...(19): siRNA sense strand
agaccugagugggugauua

SEQ ID NO: 158010 - RNA, 19 nt, Homo sapiens
  misc_RNA (1)...(19): siRNA sense strand
gggaaggauucuggucuga

SEQ ID NO: 158011 - RNA, 19 nt, Homo sapiens
  misc_RNA (1)...(19): siRNA sense strand
aggccaaacucuuauuaga

SEQ ID NO: 158012 - RNA, 19 nt, Homo sapiens
  misc_RNA (1)...(19): siRNA sense strand
cugcaggcauuucucauug

SEQ ID NO: 158013 - RNA, 19 nt, Homo sapiens
  misc_RNA (1)...(19): siRNA sense strand
ccgaugccgugcaauuuga

SEQ ID NO: 158014 - RNA, 19 nt, Homo sapiens
  misc_RNA (1)...(19): siRNA sense strand
gaucuugcaguaauuuguu

SEQ ID NO: 158015 - RNA, 19 nt, Homo sapiens
  misc_RNA (1)...(19): siRNA sense strand
gcaagcccaugagcuguuc

SEQ ID NO: 158016 - RNA, 19 nt, Homo sapiens
  misc_RNA (1)...(19): siRNA sense strand
ucaggucgcagauagauga

SEQ ID NO: 158017 - RNA, 19 nt, Homo sapiens
  misc_RNA (1)...(19): siRNA sense strand
gcauuucucauugcaauug

SEQ ID NO: 158018 - RNA, 19 nt, Homo sapiens
  misc_RNA (1)...(19): siRNA sense strand
ggacaucggaaaaugguua

SEQ ID NO: 158019 - RNA, 19 nt, Homo sapiens
  misc_RNA (1)...(19): siRNA sense strand
gagaaggccaaacucuuau

SEQ ID NO: 158020 - RNA, 19 nt, Homo sapiens
  misc_RNA (1)...(19): siRNA sense strand
gaagccaucacguacauag

SEQ ID NO: 158021 - RNA, 19 nt, Homo sapiens
  misc_RNA (1)...(19): siRNA sense strand
ggaagucaccagcaugaag

SEQ ID NO: 158022 - RNA, 19 nt, Homo sapiens
  misc_RNA (1)...(19): siRNA sense strand
cgaaacauagugagcgauu

SEQ ID NO: 158023 - RNA, 19 nt, Homo sapiens
  misc_RNA (1)...(19): siRNA sense strand
ggugauuauugaacaagga

SEQ ID NO: 158024 - RNA, 19 nt, Homo sapiens
  misc_RNA (1)...(19): siRNA sense strand
caacauuauacgaagguuu

SEQ ID NO: 158025 - RNA, 19 nt, Homo sapiens
  misc_RNA (1)...(19): siRNA sense strand
gcaggcauuucucauugca

SEQ ID NO: 158026 - RNA, 19 nt, Homo sapiens
  misc_RNA (1)...(19): siRNA sense strand
cagcagaagcuuuggacaa

SEQ ID NO: 158027 - RNA, 19 nt, Homo sapiens
  misc_RNA (1)...(19): siRNA sense strand
cgacagugcgugacucuuc

SEQ ID NO: 158028 - RNA, 19 nt, Homo sapiens
  misc_RNA (1)...(19): siRNA sense strand
uaugauacccuuggaaaug

SEQ ID NO: 158029 - RNA, 19 nt, Homo sapiens
  misc_RNA (1)...(19): siRNA sense strand
cccagaugauacuuugaua

SEQ ID NO: 158030 - RNA, 19 nt, Homo sapiens
  misc_RNA (1)...(19): siRNA sense strand
ggucacucaccgaaacaua

SEQ ID NO: 158031 - RNA, 19 nt, Homo sapiens
  misc_RNA (1)...(19): siRNA sense strand
uugaggaacugugcagaaa

SEQ ID NO: 158032 - RNA, 19 nt, Homo sapiens
  misc_RNA (1)...(19): siRNA sense strand
gaccugagugggugauuau

SEQ ID NO: 158033 - RNA, 19 nt, Homo sapiens
  misc_RNA (1)...(19): siRNA sense strand
cagagcugcggaacuauuu

SEQ ID NO: 158034 - RNA, 19 nt, Homo sapiens
  misc_RNA (1)...(19): siRNA sense strand
gauuugaagggucguuuga

SEQ ID NO: 158035 - RNA, 19 nt, Homo sapiens
  misc_RNA (1)...(19): siRNA sense strand
ccaaauggcaccuugaaaa

SEQ ID NO: 158036 - RNA, 19 nt, Homo sapiens
  misc_RNA (1)...(19): siRNA sense strand
ugugaaagggccaaaugua

SEQ ID NO: 158037 - RNA, 19 nt, Homo sapiens
  misc_RNA (1)...(19): siRNA sense strand
ucaaauaauggcccuuguu

SEQ ID NO: 158038 - RNA, 19 nt, Homo sapiens
  misc_RNA (1)...(19): siRNA sense strand
guacauagucaacaaagcu

SEQ ID NO: 158039 - RNA, 19 nt, Homo sapiens
  misc_RNA (1)...(19): siRNA sense strand
aaggaugcuuugcuuauuc

SEQ ID NO: 158040 - RNA, 19 nt, Homo sapiens
  misc_RNA (1)...(19): siRNA sense strand
acaaggaugcuuugcuuau

SEQ ID NO: 158041 - RNA, 19 nt, Homo sapiens
  misc_RNA (1)...(19): siRNA sense strand
ccggauguuugaccgaauu

SEQ ID NO: 158042 - RNA, 19 nt, Homo sapiens
  misc_RNA (1)...(19): siRNA sense strand
ugaccucuauuccaucauc

SEQ ID NO: 158043 - RNA, 19 nt, Homo sapiens
  misc_RNA (1)...(19): siRNA sense strand
auugcacccugaauuauuu

SEQ ID NO: 158044 - RNA, 19 nt, Homo sapiens
  misc_RNA (1)...(19): siRNA sense strand
ugaagggucguuugaggaa

SEQ ID NO: 158045 - RNA, 19 nt, Homo sapiens
  misc_RNA (1)...(19): siRNA sense strand
gcgugacucuuccgaccaa

SEQ ID NO: 158046 - RNA, 19 nt, Homo sapiens
  misc_RNA (1)...(19): siRNA sense strand
ccucgaagauauggugaga

SEQ ID NO: 158047 - RNA, 19 nt, Homo sapiens
  misc_RNA (1)...(19): siRNA sense strand
gcgcauaucuuccgcauug

SEQ ID NO: 158048 - RNA, 19 nt, Homo sapiens
  misc_RNA (1)...(19): siRNA sense strand
gagcagggcuacaccauga

SEQ ID NO: 158049 - RNA, 19 nt, Homo sapiens
  misc_RNA (1)...(19): siRNA sense strand
guggagagcucaucugcua

SEQ ID NO: 158050 - RNA, 19 nt, Homo sapiens
  misc_RNA (1)...(19): siRNA sense strand
ucaauacuguggguucuua

SEQ ID NO: 158051 - RNA, 19 nt, Homo sapiens
  misc_RNA (1)...(19): siRNA sense strand
ggacagcagugggccauug

SEQ ID NO: 158052 - RNA, 19 nt, Homo sapiens
  misc_RNA (1)...(19): siRNA sense strand
gcugagaccugccacaaca

SEQ ID NO: 158053 - RNA, 19 nt, Homo sapiens
  misc_RNA (1)...(19): siRNA sense strand
gggcaaggccugaagagaa

SEQ ID NO: 158054 - RNA, 19 nt, Homo sapiens
  misc_RNA (1)...(19): siRNA sense strand
cagcaccuuugcaucaaua

SEQ ID NO: 158055 - RNA, 19 nt, Homo sapiens
  misc_RNA (1)...(19): siRNA sense strand
gggcacaccugcacagaca

SEQ ID NO: 158056 - RNA, 19 nt, Homo sapiens
  misc_RNA (1)...(19): siRNA sense strand
gcaacuguguggacaucaa

SEQ ID NO: 158057 - RNA, 19 nt, Homo sapiens
  misc_RNA (1)...(19): siRNA sense strand
ccaacucuguccauucuau

SEQ ID NO: 158058 - RNA, 19 nt, Homo sapiens
  misc_RNA (1)...(19): siRNA sense strand
cccaauaccugcaaagaca

SEQ ID NO: 158059 - RNA, 19 nt, Homo sapiens
  misc_RNA (1)...(19): siRNA sense strand
ccaaguguguggacgugaa

SEQ ID NO: 158060 - RNA, 19 nt, Homo sapiens
  misc_RNA (1)...(19): siRNA sense strand
cgaguguccucccaacuau

SEQ ID NO: 158061 - RNA, 19 nt, Homo sapiens
  misc_RNA (1)...(19): siRNA sense strand
cacgggaacuucucagaug

SEQ ID NO: 158062 - RNA, 19 nt, Homo sapiens
  misc_RNA (1)...(19): siRNA sense strand
aagaucagcugccaguuca

SEQ ID NO: 158063 - RNA, 19 nt, Homo sapiens
  misc_RNA (1)...(19): siRNA sense strand
ggagugugccaacaucuau

SEQ ID NO: 158064 - RNA, 19 nt, Homo sapiens
  misc_RNA (1)...(19): siRNA sense strand
gcaaugaggagggcuacuu

SEQ ID NO: 158065 - RNA, 19 nt, Homo sapiens
  misc_RNA (1)...(19): siRNA sense strand
gcaucucccuguacaagca

SEQ ID NO: 158066 - RNA, 19 nt, Homo sapiens
  misc_RNA (1)...(19): siRNA sense strand
caagaucagcugccaguuc

SEQ ID NO: 158067 - RNA, 19 nt, Homo sapiens
  misc_RNA (1)...(19): siRNA sense strand
ggcuaucccugcaaucaug

SEQ ID NO: 158068 - RNA, 19 nt, Homo sapiens
  misc_RNA (1)...(19): siRNA sense strand
caaugaggagggcuacuuu

SEQ ID NO: 158069 - RNA, 19 nt, Homo sapiens
  misc_RNA (1)...(19): siRNA sense strand
gcacuaccagcucaacuuc

SEQ ID NO: 158070 - RNA, 19 nt, Homo sapiens
  misc_RNA (1)...(19): siRNA sense strand
gcugugaagacgugaauga

SEQ ID NO: 158071 - RNA, 19 nt, Homo sapiens
  misc_RNA (1)...(19): siRNA sense strand
ggacagugaggaggaagaa

SEQ ID NO: 158072 - RNA, 19 nt, Homo sapiens
  misc_RNA (1)...(19): siRNA sense strand
cagaggcacugcugugucu

SEQ ID NO: 158073 - RNA, 19 nt, Homo sapiens
  misc_RNA (1)...(19): siRNA sense strand
ggcaaggccugaagagaac

SEQ ID NO: 158074 - RNA, 19 nt, Homo sapiens
  misc_RNA (1)...(19): siRNA sense strand
cggauggcguguccuguga

SEQ ID NO: 158075 - RNA, 19 nt, Homo sapiens
  misc_RNA (1)...(19): siRNA sense strand
caacauccuguccacauca

SEQ ID NO: 158076 - RNA, 19 nt, Homo sapiens
  misc_RNA (1)...(19): siRNA sense strand
ccaccuuccuggccaagau

SEQ ID NO: 158077 - RNA, 19 nt, Homo sapiens
  misc_RNA (1)...(19): siRNA sense strand
ccaggagugugccaacauc

SEQ ID NO: 158078 - RNA, 19 nt, Homo sapiens
  misc_RNA (1)...(19): siRNA sense strand
uuaccacugugccugcuuu

SEQ ID NO: 158079 - RNA, 19 nt, Homo sapiens
  misc_RNA (1)...(19): siRNA sense strand
ccaggaagccgcaaguucu

SEQ ID NO: 158080 - RNA, 19 nt, Homo sapiens
  misc_RNA (1)...(19): siRNA sense strand
ggcuucagcugcaucaaca

SEQ ID NO: 158081 - RNA, 19 nt, Homo sapiens
  misc_RNA (1)...(19): siRNA sense strand
gacaucaacgaguguguga

SEQ ID NO: 158082 - RNA, 19 nt, Homo sapiens
  misc_RNA (1)...(19): siRNA sense strand
gaucagcugccaguucaug

SEQ ID NO: 158083 - RNA, 19 nt, Homo sapiens
  misc_RNA (1)...(19): siRNA sense strand
cuaccgcugugacugcaaa

SEQ ID NO: 158084 - RNA, 19 nt, Homo sapiens
  misc_RNA (1)...(19): siRNA sense strand
ucaacacggugggcuccua

SEQ ID NO: 158085 - RNA, 19 nt, Homo sapiens
  misc_RNA (1)...(19): siRNA sense strand
agaacacacucggcuccua

SEQ ID NO: 158086 - RNA, 19 nt, Homo sapiens
  misc_RNA (1)...(19): siRNA sense strand
cagcgcgcaucacgcacua

SEQ ID NO: 158087 - RNA, 19 nt, Homo sapiens
  misc_RNA (1)...(19): siRNA sense strand
gaagaccccuacagcuaug

SEQ ID NO: 158088 - RNA, 19 nt, Homo sapiens
  misc_RNA (1)...(19): siRNA sense strand
ucgaguguccucccaacua

SEQ ID NO: 158089 - RNA, 19 nt, Homo sapiens
  misc_RNA (1)...(19): siRNA sense strand
cagaggaacccgcugaucu

SEQ ID NO: 158090 - RNA, 19 nt, Homo sapiens
  misc_RNA (1)...(19): siRNA sense strand
uuucccagguggccucuaa

SEQ ID NO: 158091 - RNA, 19 nt, Homo sapiens
  misc_RNA (1)...(19): siRNA sense strand
gccagcaccuuugcaucaa

SEQ ID NO: 158092 - RNA, 19 nt, Homo sapiens
  misc_RNA (1)...(19): siRNA sense strand
gcugcggcaucucccugua

SEQ ID NO: 158093 - RNA, 19 nt, Homo sapiens
  misc_RNA (1)...(19): siRNA sense strand
cccgagaagugcccaggaa

SEQ ID NO: 158094 - RNA, 19 nt, Homo sapiens
  misc_RNA (1)...(19): siRNA sense strand
ggaggaggagagagaggaa

SEQ ID NO: 158095 - RNA, 19 nt, Homo sapiens
  misc_RNA (1)...(19): siRNA sense strand
cgaggacagugaggaggaa

SEQ ID NO: 158096 - RNA, 19 nt, Homo sapiens
  misc_RNA (1)...(19): siRNA sense strand
ggacggcaagcgcugugaa

SEQ ID NO: 158097 - RNA, 19 nt, Homo sapiens
  misc_RNA (1)...(19): siRNA sense strand
cgugugaguccaauccuaa

SEQ ID NO: 158098 - RNA, 19 nt, Homo sapiens
  misc_RNA (1)...(19): siRNA sense strand
gggacaccaucgcccugaa

SEQ ID NO: 158099 - RNA, 19 nt, Homo sapiens
  misc_RNA (1)...(19): siRNA sense strand
gaacaucaucaagggcaau

SEQ ID NO: 158100 - RNA, 19 nt, Homo sapiens
  misc_RNA (1)...(19): siRNA sense strand
acagugaggaggaagaaga

SEQ ID NO: 158101 - RNA, 19 nt, Homo sapiens
  misc_RNA (1)...(19): siRNA sense strand
caccaccuuugcccuguga

SEQ ID NO: 158102 - RNA, 19 nt, Homo sapiens
  misc_RNA (1)...(19): siRNA sense strand
gcacaccugcacagacauc

SEQ ID NO: 158103 - RNA, 19 nt, Homo sapiens
  misc_RNA (1)...(19): siRNA sense strand
gauggcguguccugugaag

SEQ ID NO: 158104 - RNA, 19 nt, Homo sapiens
  misc_RNA (1)...(19): siRNA sense strand
gacccagucuuccuaucca

SEQ ID NO: 158105 - RNA, 19 nt, Homo sapiens
  misc_RNA (1)...(19): siRNA sense strand
ggcgagcacugugugaaca

SEQ ID NO: 158106 - RNA, 19 nt, Homo sapiens
  misc_RNA (1)...(19): siRNA sense strand
ugaacacacugggcuccuu

SEQ ID NO: 158107 - RNA, 19 nt, Homo sapiens
  misc_RNA (1)...(19): siRNA sense strand
acaacauccuguccacauc

SEQ ID NO: 158108 - RNA, 19 nt, Homo sapiens
  misc_RNA (1)...(19): siRNA sense strand
ccagcaccuuugcaucaau

SEQ ID NO: 158109 - RNA, 19 nt, Homo sapiens
  misc_RNA (1)...(19): siRNA sense strand
gacagcagugggccauuga

SEQ ID NO: 158110 - RNA, 19 nt, Homo sapiens
  misc_RNA (1)...(19): siRNA sense strand
gaucccacccacccgagaa

SEQ ID NO: 158111 - RNA, 19 nt, Homo sapiens
  misc_RNA (1)...(19): siRNA sense strand
ggaggagagagaggaaaug

SEQ ID NO: 158112 - RNA, 19 nt, Homo sapiens
  misc_RNA (1)...(19): siRNA sense strand
ccacgggaacuucucagau

SEQ ID NO: 158113 - RNA, 19 nt, Homo sapiens
  misc_RNA (1)...(19): siRNA sense strand
gccaggcuaugcccucaag

SEQ ID NO: 158114 - RNA, 19 nt, Homo sapiens
  misc_RNA (1)...(19): siRNA sense strand
ucagccauaugcuccuguu

SEQ ID NO: 158115 - RNA, 19 nt, Homo sapiens
  misc_RNA (1)...(19): siRNA sense strand
gagggccagucgugugagu

SEQ ID NO: 158116 - RNA, 19 nt, Homo sapiens
  misc_RNA (1)...(19): siRNA sense strand
gagagugaccgaggacagu

SEQ ID NO: 158117 - RNA, 19 nt, Homo sapiens
  misc_RNA (1)...(19): siRNA sense strand
caaggacguggaugagugu

SEQ ID NO: 158118 - RNA, 19 nt, Homo sapiens
  misc_RNA (1)...(19): siRNA sense strand
cgaagacguggaugagugu

SEQ ID NO: 158119 - RNA, 19 nt, Homo sapiens
  misc_RNA (1)...(19): siRNA sense strand
caacugcaucgaggcugua

SEQ ID NO: 158120 - RNA, 19 nt, Homo sapiens
  misc_RNA (1)...(19): siRNA sense strand
caucaauacuguggguucu

SEQ ID NO: 158121 - RNA, 19 nt, Homo sapiens
  misc_RNA (1)...(19): siRNA sense strand
gcugcaccacggagaguuu

SEQ ID NO: 158122 - RNA, 19 nt, Homo sapiens
  misc_RNA (1)...(19): siRNA sense strand
gaggagagagaggaaaugg

SEQ ID NO: 158123 - RNA, 19 nt, Homo sapiens
  misc_RNA (1)...(19): siRNA sense strand
cugcuuuccuggcuucuca

SEQ ID NO: 158124 - RNA, 19 nt, Homo sapiens
  misc_RNA (1)...(19): siRNA sense strand
ucccaacuauguccaaguc

SEQ ID NO: 158125 - RNA, 19 nt, Homo sapiens
  misc_RNA (1)...(19): siRNA sense strand
guacuaugacugccuacag

SEQ ID NO: 158126 - RNA, 19 nt, Homo sapiens
  misc_RNA (1)...(19): siRNA sense strand
ggacacagaccccaacucu

SEQ ID NO: 158127 - RNA, 19 nt, Homo sapiens
  misc_RNA (1)...(19): siRNA sense strand
gccauaugcuccuguuuuc

SEQ ID NO: 158128 - RNA, 19 nt, Homo sapiens
  misc_RNA (1)...(19): siRNA sense strand
gcgagggcuaccaguacua

SEQ ID NO: 158129 - RNA, 19 nt, Homo sapiens
  misc_RNA (1)...(19): siRNA sense strand
ggaggaaacuguaucaaua

SEQ ID NO: 158130 - RNA, 19 nt, Homo sapiens
  misc_RNA (1)...(19): siRNA sense strand
ggacggagaugcuuugaua

SEQ ID NO: 158131 - RNA, 19 nt, Homo sapiens
  misc_RNA (1)...(19): siRNA sense strand
gcaaagaucuggaugaaug

SEQ ID NO: 158132 - RNA, 19 nt, Homo sapiens
  misc_RNA (1)...(19): siRNA sense strand
gcaaagaccuugaugaaug

SEQ ID NO: 158133 - RNA, 19 nt, Homo sapiens
  misc_RNA (1)...(19): siRNA sense strand
ggagggaacuguacagaua

SEQ ID NO: 158134 - RNA, 19 nt, Homo sapiens
  misc_RNA (1)...(19): siRNA sense strand
gaagagauaucaaugaaug

SEQ ID NO: 158135 - RNA, 19 nt, Homo sapiens
  misc_RNA (1)...(19): siRNA sense strand
gaagagauauugaugaaug

SEQ ID NO: 158136 - RNA, 19 nt, Homo sapiens
  misc_RNA (1)...(19): siRNA sense strand
gaaacaaccuuggaucuuu

SEQ ID NO: 158137 - RNA, 19 nt, Homo sapiens
  misc_RNA (1)...(19): siRNA sense strand
ggaagaaacuguauugaca

SEQ ID NO: 158138 - RNA, 19 nt, Homo sapiens
  misc_RNA (1)...(19): siRNA sense strand
gaacguaacccucuccuuu

SEQ ID NO: 158139 - RNA, 19 nt, Homo sapiens
  misc_RNA (1)...(19): siRNA sense strand
gaagagaaguauucaugaa

SEQ ID NO: 158140 - RNA, 19 nt, Homo sapiens
  misc_RNA (1)...(19): siRNA sense strand
gaaacugcaucaacacuuu

SEQ ID NO: 158141 - RNA, 19 nt, Homo sapiens
  misc_RNA (1)...(19): siRNA sense strand
guacagauauugaugaaug

SEQ ID NO: 158142 - RNA, 19 nt, Homo sapiens
  misc_RNA (1)...(19): siRNA sense strand
gaaacuguauugacauuga

SEQ ID NO: 158143 - RNA, 19 nt, Homo sapiens
  misc_RNA (1)...(19): siRNA sense strand
gcugugaggugaauauuaa

SEQ ID NO: 158144 - RNA, 19 nt, Homo sapiens
  misc_RNA (1)...(19): siRNA sense strand
gaagugggaugaagaugaa

SEQ ID NO: 158145 - RNA, 19 nt, Homo sapiens
  misc_RNA (1)...(19): siRNA sense strand
ccaggaagcuucaagugua

SEQ ID NO: 158146 - RNA, 19 nt, Homo sapiens
  misc_RNA (1)...(19): siRNA sense strand
gaacaugauuggaaccuau

SEQ ID NO: 158147 - RNA, 19 nt, Homo sapiens
  misc_RNA (1)...(19): siRNA sense strand
gaacagaucagccuagaga

SEQ ID NO: 158148 - RNA, 19 nt, Homo sapiens
  misc_RNA (1)...(19): siRNA sense strand
gggcaaagcugggaacaaa

SEQ ID NO: 158149 - RNA, 19 nt, Homo sapiens
  misc_RNA (1)...(19): siRNA sense strand
gacaaucucugcagaaaug

SEQ ID NO: 158150 - RNA, 19 nt, Homo sapiens
  misc_RNA (1)...(19): siRNA sense strand
ggacgaauguucuaaugga

SEQ ID NO: 158151 - RNA, 19 nt, Homo sapiens
  misc_RNA (1)...(19): siRNA sense strand
ggacugaacugugaagaug

SEQ ID NO: 158152 - RNA, 19 nt, Homo sapiens
  misc_RNA (1)...(19): siRNA sense strand
ugaaugugcugaaggguua

SEQ ID NO: 158153 - RNA, 19 nt, Homo sapiens
  misc_RNA (1)...(19): siRNA sense strand
ucaaaucccugcacuaaug

SEQ ID NO: 158154 - RNA, 19 nt, Homo sapiens
  misc_RNA (1)...(19): siRNA sense strand
guauagaccuugaugaaug

SEQ ID NO: 158155 - RNA, 19 nt, Homo sapiens
  misc_RNA (1)...(19): siRNA sense strand
gaaaauggacguuguguua

SEQ ID NO: 158156 - RNA, 19 nt, Homo sapiens
  misc_RNA (1)...(19): siRNA sense strand
ggaguacgcuguguggaua

SEQ ID NO: 158157 - RNA, 19 nt, Homo sapiens
  misc_RNA (1)...(19): siRNA sense strand
gaaguugcauuucaggauu

SEQ ID NO: 158158 - RNA, 19 nt, Homo sapiens
  misc_RNA (1)...(19): siRNA sense strand
gcaaaaugcugcuguagua

SEQ ID NO: 158159 - RNA, 19 nt, Homo sapiens
  misc_RNA (1)...(19): siRNA sense strand
caacauuccuggagaguau

SEQ ID NO: 158160 - RNA, 19 nt, Homo sapiens
  misc_RNA (1)...(19): siRNA sense strand
uaacacaccugguuccuau

SEQ ID NO: 158161 - RNA, 19 nt, Homo sapiens
  misc_RNA (1)...(19): siRNA sense strand
gguuugaacucacucauaa

SEQ ID NO: 158162 - RNA, 19 nt, Homo sapiens
  misc_RNA (1)...(19): siRNA sense strand
guacugauguugaugaaug

SEQ ID NO: 158163 - RNA, 19 nt, Homo sapiens
  misc_RNA (1)...(19): siRNA sense strand
gaaacggcaucaaguguau

SEQ ID NO: 158164 - RNA, 19 nt, Homo sapiens
  misc_RNA (1)...(19): siRNA sense strand
ggacguguguguguugaua

SEQ ID NO: 158165 - RNA, 19 nt, Homo sapiens
  misc_RNA (1)...(19): siRNA sense strand
gaagaaggagcuuaagaaa

SEQ ID NO: 158166 - RNA, 19 nt, Homo sapiens
  misc_RNA (1)...(19): siRNA sense strand
ggagaaggcuguguagaug

SEQ ID NO: 158167 - RNA, 19 nt, Homo sapiens
  misc_RNA (1)...(19): siRNA sense strand
uaaccugccuggaauguuu

SEQ ID NO: 158168 - RNA, 19 nt, Homo sapiens
  misc_RNA (1)...(19): siRNA sense strand
guaauaaccugccuggaau

SEQ ID NO: 158169 - RNA, 19 nt, Homo sapiens
  misc_RNA (1)...(19): siRNA sense strand
gaugaaugcuccuuccaaa

SEQ ID NO: 158170 - RNA, 19 nt, Homo sapiens
  misc_RNA (1)...(19): siRNA sense strand
ggaaugggcucagcuacuu

SEQ ID NO: 158171 - RNA, 19 nt, Homo sapiens
  misc_RNA (1)...(19): siRNA sense strand
gaaaauggaugucagaaug

SEQ ID NO: 158172 - RNA, 19 nt, Homo sapiens
  misc_RNA (1)...(19): siRNA sense strand
gcaagaggauggaaagaca

SEQ ID NO: 158173 - RNA, 19 nt, Homo sapiens
  misc_RNA (1)...(19): siRNA sense strand
ggauugaucuguauugaca

SEQ ID NO: 158174 - RNA, 19 nt, Homo sapiens
  misc_RNA (1)...(19): siRNA sense strand
uaaacagacugcuuuguga

SEQ ID NO: 158175 - RNA, 19 nt, Homo sapiens
  misc_RNA (1)...(19): siRNA sense strand
gaaacacgccaggaaguua

SEQ ID NO: 158176 - RNA, 19 nt, Homo sapiens
  misc_RNA (1)...(19): siRNA sense strand
ggaaagggaaucugucaaa

SEQ ID NO: 158177 - RNA, 19 nt, Homo sapiens
  misc_RNA (1)...(19): siRNA sense strand
gaaaagcuguugacauuga

SEQ ID NO: 158178 - RNA, 19 nt, Homo sapiens
  misc_RNA (1)...(19): siRNA sense strand
gagaaugaguugccuuuca

SEQ ID NO: 158179 - RNA, 19 nt, Homo sapiens
  misc_RNA (1)...(19): siRNA sense strand
uaugggaagugcagaaaua

SEQ ID NO: 158180 - RNA, 19 nt, Homo sapiens
  misc_RNA (1)...(19): siRNA sense strand
acaaagacaucaaugaaug

SEQ ID NO: 158181 - RNA, 19 nt, Homo sapiens
  misc_RNA (1)...(19): siRNA sense strand
gagccacucugaaaucuga

SEQ ID NO: 158182 - RNA, 19 nt, Homo sapiens
  misc_RNA (1)...(19): siRNA sense strand
gaaagcaacccauguguca

SEQ ID NO: 158183 - RNA, 19 nt, Homo sapiens
  misc_RNA (1)...(19): siRNA sense strand
gaaaggauauauuggaacu

SEQ ID NO: 158184 - RNA, 19 nt, Homo sapiens
  misc_RNA (1)...(19): siRNA sense strand
ccaggaaucugcaugaaug

SEQ ID NO: 158185 - RNA, 19 nt, Homo sapiens
  misc_RNA (1)...(19): siRNA sense strand
guauagauguugaugaaug

SEQ ID NO: 158186 - RNA, 19 nt, Homo sapiens
  misc_RNA (1)...(19): siRNA sense strand
gaaugugcaucaaugaaga

SEQ ID NO: 158187 - RNA, 19 nt, Homo sapiens
  misc_RNA (1)...(19): siRNA sense strand
caacacggcugccagaaca

SEQ ID NO: 158188 - RNA, 19 nt, Homo sapiens
  misc_RNA (1)...(19): siRNA sense strand
cgccagggcuguacagaua

SEQ ID NO: 158189 - RNA, 19 nt, Homo sapiens
  misc_RNA (1)...(19): siRNA sense strand
gcaacuacaucugcaagaa

SEQ ID NO: 158190 - RNA, 19 nt, Homo sapiens
  misc_RNA (1)...(19): siRNA sense strand
gccaagauauugaugaaug

SEQ ID NO: 158191 - RNA, 19 nt, Homo sapiens
  misc_RNA (1)...(19): siRNA sense strand
caaugaaugugaccuaaau

SEQ ID NO: 158192 - RNA, 19 nt, Homo sapiens
  misc_RNA (1)...(19): siRNA sense strand
guauugaucuggacgaaug

SEQ ID NO: 158193 - RNA, 19 nt, Homo sapiens
  misc_RNA (1)...(19): siRNA sense strand
agaaggagcuuaagaaacu

SEQ ID NO: 158194 - RNA, 19 nt, Homo sapiens
  misc_RNA (1)...(19): siRNA sense strand
gugaagauguugaugaaug

SEQ ID NO: 158195 - RNA, 19 nt, Homo sapiens
  misc_RNA (1)...(19): siRNA sense strand
gugaagauaucaacgaaug

SEQ ID NO: 158196 - RNA, 19 nt, Homo sapiens
  misc_RNA (1)...(19): siRNA sense strand
ggacagggaccuaucauca

SEQ ID NO: 158197 - RNA, 19 nt, Homo sapiens
  misc_RNA (1)...(19): siRNA sense strand
gagaaugaaugcuccaauc

SEQ ID NO: 158198 - RNA, 19 nt, Homo sapiens
  misc_RNA (1)...(19): siRNA sense strand
aggaacagcugacuuuaaa

SEQ ID NO: 158199 - RNA, 19 nt, Homo sapiens
  misc_RNA (1)...(19): siRNA sense strand
ggaaacggcaucaagugua

SEQ ID NO: 158200 - RNA, 19 nt, Homo sapiens
  misc_RNA (1)...(19): siRNA sense strand
ggacuggccguguauguuu

SEQ ID NO: 158201 - RNA, 19 nt, Homo sapiens
  misc_RNA (1)...(19): siRNA sense strand
caugaugaauguacaacua

SEQ ID NO: 158202 - RNA, 19 nt, Homo sapiens
  misc_RNA (1)...(19): siRNA sense strand
gccaagauguugaugaaug

SEQ ID NO: 158203 - RNA, 19 nt, Homo sapiens
  misc_RNA (1)...(19): siRNA sense strand
caaagaccuugaugaaugu

SEQ ID NO: 158204 - RNA, 19 nt, Homo sapiens
  misc_RNA (1)...(19): siRNA sense strand
ggucaggugugcagaaaug

SEQ ID NO: 158205 - RNA, 19 nt, Homo sapiens
  misc_RNA (1)...(19): siRNA sense strand
caacacgccuggucgcuau

SEQ ID NO: 158206 - RNA, 19 nt, Homo sapiens
  misc_RNA (1)...(19): siRNA sense strand
agagaaggcuggauuggaa

SEQ ID NO: 158207 - RNA, 19 nt, Homo sapiens
  misc_RNA (1)...(19): siRNA sense strand
aaacaauccugauaucugu

SEQ ID NO: 158208 - RNA, 19 nt, Homo sapiens
  misc_RNA (1)...(19): siRNA sense strand
gaaauacaaucggaagcuu

SEQ ID NO: 158209 - RNA, 19 nt, Homo sapiens
  misc_RNA (1)...(19): siRNA sense strand
aagcaagcaugcauugaua

SEQ ID NO: 158210 - RNA, 19 nt, Homo sapiens
  misc_RNA (1)...(19): siRNA sense strand
cagaaaggauauauuggaa

SEQ ID NO: 158211 - RNA, 19 nt, Homo sapiens
  misc_RNA (1)...(19): siRNA sense strand
gaaugugggucucaaccuu

SEQ ID NO: 158212 - RNA, 19 nt, Homo sapiens
  misc_RNA (1)...(19): siRNA sense strand
ugaauuaacuacagaugga

SEQ ID NO: 158213 - RNA, 19 nt, Homo sapiens
  misc_RNA (1)...(19): siRNA sense strand
uaucaucacuggacuaaca

SEQ ID NO: 158214 - RNA, 19 nt, Homo sapiens
  misc_RNA (1)...(19): siRNA sense strand
ccaaaccucugcaccaaug

SEQ ID NO: 158215 - RNA, 19 nt, Homo sapiens
  misc_RNA (1)...(19): siRNA sense strand
ggacguuguguuaacauua

SEQ ID NO: 158216 - RNA, 19 nt, Homo sapiens
  misc_RNA (1)...(19): siRNA sense strand
gaaugcacgugcccgauug

SEQ ID NO: 158217 - RNA, 19 nt, Homo sapiens
  misc_RNA (1)...(19): siRNA sense strand
ugaugaagaucccaacauu

SEQ ID NO: 158218 - RNA, 19 nt, Homo sapiens
  misc_RNA (1)...(19): siRNA sense strand
gagauuguauagauguuga

SEQ ID NO: 158219 - RNA, 19 nt, Homo sapiens
  misc_RNA (1)...(19): siRNA sense strand
gagcacauccuggaacuaa

SEQ ID NO: 158220 - RNA, 19 nt, Homo sapiens
  misc_RNA (1)...(19): siRNA sense strand
caaagacgaugaaguugca

SEQ ID NO: 158221 - RNA, 19 nt, Homo sapiens
  misc_RNA (1)...(19): siRNA sense strand
agacaucaaugaaugcaaa

SEQ ID NO: 158222 - RNA, 19 nt, Homo sapiens
  misc_RNA (1)...(19): siRNA sense strand
aaacucagcuccacaggau

SEQ ID NO: 158223 - RNA, 19 nt, Homo sapiens
  misc_RNA (1)...(19): siRNA sense strand
gacaauagauaucuguaag

SEQ ID NO: 158224 - RNA, 19 nt, Homo sapiens
  misc_RNA (1)...(19): siRNA sense strand
guaaauguccaccugguuu

SEQ ID NO: 158225 - RNA, 19 nt, Homo sapiens
  misc_RNA (1)...(19): siRNA sense strand
aaacaaagcagcauaacug

SEQ ID NO: 158226 - RNA, 19 nt, Homo sapiens
  misc_RNA (1)...(19): siRNA sense strand
agucauggcuuguguguug

SEQ ID NO: 158227 - RNA, 19 nt, Homo sapiens
  misc_RNA (1)...(19): siRNA sense strand
uuaaagguguuacguguga

SEQ ID NO: 158228 - RNA, 19 nt, Homo sapiens
  misc_RNA (1)...(19): siRNA sense strand
gcaaauggagauuguauag

SEQ ID NO: 158229 - RNA, 19 nt, Homo sapiens
  misc_RNA (1)...(19): siRNA sense strand
uguacaaggugaucuauua

SEQ ID NO: 158230 - RNA, 19 nt, Homo sapiens
  misc_RNA (1)...(19): siRNA sense strand
gaagucaguuccaccaaau

SEQ ID NO: 158231 - RNA, 19 nt, Homo sapiens
  misc_RNA (1)...(19): siRNA sense strand
gaaguacuggcuacaauuu

SEQ ID NO: 158232 - RNA, 19 nt, Homo sapiens
  misc_RNA (1)...(19): siRNA sense strand
gagaaguacuggcuacaau

SEQ ID NO: 158233 - RNA, 19 nt, Homo sapiens
  misc_RNA (1)...(19): siRNA sense strand
gaagagacaaauucaaguu

SEQ ID NO: 158234 - RNA, 19 nt, Homo sapiens
  misc_RNA (1)...(19): siRNA sense strand
gaacugggauguguacaag

SEQ ID NO: 158235 - RNA, 19 nt, Homo sapiens
  misc_RNA (1)...(19): siRNA sense strand
ggaacaauuucuuugaagu

SEQ ID NO: 158236 - RNA, 19 nt, Homo sapiens
  misc_RNA (1)...(19): siRNA sense strand
cacaacaucuccauuacaa

SEQ ID NO: 158237 - RNA, 19 nt, Homo sapiens
  misc_RNA (1)...(19): siRNA sense strand
ccaaaugguuccacaaugg

SEQ ID NO: 158238 - RNA, 19 nt, Homo sapiens
  misc_RNA (1)...(19): siRNA sense strand
caacaucuccauuacaaau

SEQ ID NO: 158239 - RNA, 19 nt, Homo sapiens
  misc_RNA (1)...(19): siRNA sense strand
ggacacaggauuauuuauc

SEQ ID NO: 158240 - RNA, 19 nt, Homo sapiens
  misc_RNA (1)...(19): siRNA sense strand
gugaagcucucaaguacug

SEQ ID NO: 158241 - RNA, 19 nt, Homo sapiens
  misc_RNA (1)...(19): siRNA sense strand
uguggcagcuggacuauga

SEQ ID NO: 158242 - RNA, 19 nt, Homo sapiens
  misc_RNA (1)...(19): siRNA sense strand
ugaagucaguuccaccaaa

SEQ ID NO: 158243 - RNA, 19 nt, Homo sapiens
  misc_RNA (1)...(19): siRNA sense strand
aggaaaggcuucagacuuc

SEQ ID NO: 158244 - RNA, 19 nt, Homo sapiens
  misc_RNA (1)...(19): siRNA sense strand
gcaggucacauuucucuug

SEQ ID NO: 158245 - RNA, 19 nt, Homo sapiens
  misc_RNA (1)...(19): siRNA sense strand
gacacaggauuauuuaucu

SEQ ID NO: 158246 - RNA, 19 nt, Homo sapiens
  misc_RNA (1)...(19): siRNA sense strand
ggugaucuauuauaaggau

SEQ ID NO: 158247 - RNA, 19 nt, Homo sapiens
  misc_RNA (1)...(19): siRNA sense strand
cauguaaugggaacaauuu

SEQ ID NO: 158248 - RNA, 19 nt, Homo sapiens
  misc_RNA (1)...(19): siRNA sense strand
gaacaauuucuuugaaguc

SEQ ID NO: 158249 - RNA, 19 nt, Homo sapiens
  misc_RNA (1)...(19): siRNA sense strand
gggaacaauuucuuugaag

SEQ ID NO: 158250 - RNA, 19 nt, Homo sapiens
  misc_RNA (1)...(19): siRNA sense strand
ugucagcaccaacaaguua

SEQ ID NO: 158251 - RNA, 19 nt, Homo sapiens
  misc_RNA (1)...(19): siRNA sense strand
ugaagacaguggagaauac

SEQ ID NO: 158252 - RNA, 19 nt, Homo sapiens
  misc_RNA (1)...(19): siRNA sense strand
ggucacauuucucuugaag

SEQ ID NO: 158253 - RNA, 19 nt, Homo sapiens
  misc_RNA (1)...(19): siRNA sense strand
aaccacaacaucuccauua

SEQ ID NO: 158254 - RNA, 19 nt, Homo sapiens
  misc_RNA (1)...(19): siRNA sense strand
guggacacaggauuauuua

SEQ ID NO: 158255 - RNA, 19 nt, Homo sapiens
  misc_RNA (1)...(19): siRNA sense strand
uuacaaaugccacaguuga

SEQ ID NO: 158256 - RNA, 19 nt, Homo sapiens
  misc_RNA (1)...(19): siRNA sense strand
gaaccacaacaucuccauu

SEQ ID NO: 158257 - RNA, 19 nt, Homo sapiens
  misc_RNA (1)...(19): siRNA sense strand
guaaugggaacaauuucuu

SEQ ID NO: 158258 - RNA, 19 nt, Homo sapiens
  misc_RNA (1)...(19): siRNA sense strand
caggucacauuucucuuga

SEQ ID NO: 158259 - RNA, 19 nt, Homo sapiens
  misc_RNA (1)...(19): siRNA sense strand
guacaaggugaucuauuau

SEQ ID NO: 158260 - RNA, 19 nt, Homo sapiens
  misc_RNA (1)...(19): siRNA sense strand
ggaacugggauguguacaa

SEQ ID NO: 158261 - RNA, 19 nt, Homo sapiens
  misc_RNA (1)...(19): siRNA sense strand
ccaacaaguuaaugagagu

SEQ ID NO: 158262 - RNA, 19 nt, Homo sapiens
  misc_RNA (1)...(19): siRNA sense strand
ugggaacaauuucuuugaa

SEQ ID NO: 158263 - RNA, 19 nt, Homo sapiens
  misc_RNA (1)...(19): siRNA sense strand
cagaagagacaaauucaag

SEQ ID NO: 158264 - RNA, 19 nt, Homo sapiens
  misc_RNA (1)...(19): siRNA sense strand
caaaugccacaguugaaga

SEQ ID NO: 158265 - RNA, 19 nt, Homo sapiens
  misc_RNA (1)...(19): siRNA sense strand
caggaaaggcuucagacuu

SEQ ID NO: 158266 - RNA, 19 nt, Homo sapiens
  misc_RNA (1)...(19): siRNA sense strand
gugacuggcugcuccuuca

SEQ ID NO: 158267 - RNA, 19 nt, Homo sapiens
  misc_RNA (1)...(19): siRNA sense strand
ggaggaacugggaugugua

SEQ ID NO: 158268 - RNA, 19 nt, Homo sapiens
  misc_RNA (1)...(19): siRNA sense strand
ggaaaggcuucagacuucu

SEQ ID NO: 158269 - RNA, 19 nt, Homo sapiens
  misc_RNA (1)...(19): siRNA sense strand
caauuucuuugaagucagu

SEQ ID NO: 158270 - RNA, 19 nt, Homo sapiens
  misc_RNA (1)...(19): siRNA sense strand
gguaugagaaccacaacau

SEQ ID NO: 158271 - RNA, 19 nt, Homo sapiens
  misc_RNA (1)...(19): siRNA sense strand
gcucucaaguacugguaug

SEQ ID NO: 158272 - RNA, 19 nt, Homo sapiens
  misc_RNA (1)...(19): siRNA sense strand
auacaaaugucagcaccaa

SEQ ID NO: 158273 - RNA, 19 nt, Homo sapiens
  misc_RNA (1)...(19): siRNA sense strand
guguguagccuuacuguuc

SEQ ID NO: 158274 - RNA, 19 nt, Homo sapiens
  misc_RNA (1)...(19): siRNA sense strand
aguggaaccuacuacugua

SEQ ID NO: 158275 - RNA, 19 nt, Homo sapiens
  misc_RNA (1)...(19): siRNA sense strand
aaggugaucuauuauaagg

SEQ ID NO: 158276 - RNA, 19 nt, Homo sapiens
  misc_RNA (1)...(19): siRNA sense strand
cugcugagguggugaugga

SEQ ID NO: 158277 - RNA, 19 nt, Homo sapiens
  misc_RNA (1)...(19): siRNA sense strand
guuugaauauugugaaugc

SEQ ID NO: 158278 - RNA, 19 nt, Homo sapiens
  misc_RNA (1)...(19): siRNA sense strand
cuucugaacccacauccua

SEQ ID NO: 158279 - RNA, 19 nt, Homo sapiens
  misc_RNA (1)...(19): siRNA sense strand
uggugaagcucucaaguac

SEQ ID NO: 158280 - RNA, 19 nt, Homo sapiens
  misc_RNA (1)...(19): siRNA sense strand
agacaguggagaauacaaa

SEQ ID NO: 158281 - RNA, 19 nt, Homo sapiens
  misc_RNA (1)...(19): siRNA sense strand
gaagacaguggagaauaca

SEQ ID NO: 158282 - RNA, 19 nt, Homo sapiens
  misc_RNA (1)...(19): siRNA sense strand
uggaggaacugggaugugu

SEQ ID NO: 158283 - RNA, 19 nt, Homo sapiens
  misc_RNA (1)...(19): siRNA sense strand
guuagcagucccucagaaa

SEQ ID NO: 158284 - RNA, 19 nt, Homo sapiens
  misc_RNA (1)...(19): siRNA sense strand
aagcuccgcgugagaagua

SEQ ID NO: 158285 - RNA, 19 nt, Homo sapiens
  misc_RNA (1)...(19): siRNA sense strand
ccacaacaucuccauuaca

SEQ ID NO: 158286 - RNA, 19 nt, Homo sapiens
  misc_RNA (1)...(19): siRNA sense strand
ucaaguacugguaugagaa

SEQ ID NO: 158287 - RNA, 19 nt, Homo sapiens
  misc_RNA (1)...(19): siRNA sense strand
acaaaugucagcaccaaca

SEQ ID NO: 158288 - RNA, 19 nt, Homo sapiens
  misc_RNA (1)...(19): siRNA sense strand
agaaguacuggcuacaauu

SEQ ID NO: 158289 - RNA, 19 nt, Homo sapiens
  misc_RNA (1)...(19): siRNA sense strand
gcaccaacaaguuaaugag

SEQ ID NO: 158290 - RNA, 19 nt, Homo sapiens
  misc_RNA (1)...(19): siRNA sense strand
caauggcagccuuucagaa

SEQ ID NO: 158291 - RNA, 19 nt, Homo sapiens
  misc_RNA (1)...(19): siRNA sense strand
cuugaacccuccauggaau

SEQ ID NO: 158292 - RNA, 19 nt, Homo sapiens
  misc_RNA (1)...(19): siRNA sense strand
caaaugucagcaccaacaa

SEQ ID NO: 158293 - RNA, 19 nt, Homo sapiens
  misc_RNA (1)...(19): siRNA sense strand
caguggagaauacaaaugu

SEQ ID NO: 158294 - RNA, 19 nt, Homo sapiens
  misc_RNA (1)...(19): siRNA sense strand
ccacaauggcagccuuuca

SEQ ID NO: 158295 - RNA, 19 nt, Homo sapiens
  misc_RNA (1)...(19): siRNA sense strand
cgcuccagauggcguguua

SEQ ID NO: 158296 - RNA, 19 nt, Homo sapiens
  misc_RNA (1)...(19): siRNA sense strand
uaaaggagagaaugugacu

SEQ ID NO: 158297 - RNA, 19 nt, Homo sapiens
  misc_RNA (1)...(19): siRNA sense strand
gaagacaguggaaccuacu

SEQ ID NO: 158298 - RNA, 19 nt, Homo sapiens
  misc_RNA (1)...(19): siRNA sense strand
caaggugaucuauuauaag

SEQ ID NO: 158299 - RNA, 19 nt, Homo sapiens
  misc_RNA (1)...(19): siRNA sense strand
uuucagaagagacaaauuc

SEQ ID NO: 158300 - RNA, 19 nt, Homo sapiens
  misc_RNA (1)...(19): siRNA sense strand
cagcaggucacauuucucu

SEQ ID NO: 158301 - RNA, 19 nt, Homo sapiens
  misc_RNA (1)...(19): siRNA sense strand
uaugagaaccacaacaucu

SEQ ID NO: 158302 - RNA, 19 nt, Homo sapiens
  misc_RNA (1)...(19): siRNA sense strand
gacaguggagaauacaaau

SEQ ID NO: 158303 - RNA, 19 nt, Homo sapiens
  misc_RNA (1)...(19): siRNA sense strand
caccaacaaguuaaugaga

SEQ ID NO: 158304 - RNA, 19 nt, Homo sapiens
  misc_RNA (1)...(19): siRNA sense strand
uuauaaggauggugaagcu

SEQ ID NO: 158305 - RNA, 19 nt, Homo sapiens
  misc_RNA (1)...(19): siRNA sense strand
ucagaagagacaaauucaa

SEQ ID NO: 158306 - RNA, 19 nt, Homo sapiens
  misc_RNA (1)...(19): siRNA sense strand
cagcagcaggucacauuuc

SEQ ID NO: 158307 - RNA, 19 nt, Homo sapiens
  misc_RNA (1)...(19): siRNA sense strand
aacccuccauggaauagaa

SEQ ID NO: 158308 - RNA, 19 nt, Homo sapiens
  misc_RNA (1)...(19): siRNA sense strand
ggaauccccuacucuacug

SEQ ID NO: 158309 - RNA, 19 nt, Homo sapiens
  misc_RNA (1)...(19): siRNA sense strand
uguuagcagucccucagaa

SEQ ID NO: 158310 - RNA, 19 nt, Homo sapiens
  misc_RNA (1)...(19): siRNA sense strand
cuacuacuguacgggcaaa

SEQ ID NO: 158311 - RNA, 19 nt, Homo sapiens
  misc_RNA (1)...(19): siRNA sense strand
uacaaaugccacaguugaa

SEQ ID NO: 158312 - RNA, 19 nt, Homo sapiens
  misc_RNA (1)...(19): siRNA sense strand
gaggaacugggauguguac

SEQ ID NO: 158313 - RNA, 19 nt, Homo sapiens
  misc_RNA (1)...(19): siRNA sense strand
uugaagacaguggagaaua

SEQ ID NO: 158314 - RNA, 19 nt, Homo sapiens
  misc_RNA (1)...(19): siRNA sense strand
ccuugaacccuccauggaa

SEQ ID NO: 158315 - RNA, 19 nt, Homo sapiens
  misc_RNA (1)...(19): siRNA sense strand
gauuaagagaaccaggaaa

SEQ ID NO: 158316 - RNA, 19 nt, Homo sapiens
  misc_RNA (1)...(19): siRNA sense strand
acacaggauuauuuaucuc

SEQ ID NO: 158317 - RNA, 19 nt, Homo sapiens
  misc_RNA (1)...(19): siRNA sense strand
acaaguuaaugagagugaa

SEQ ID NO: 158318 - RNA, 19 nt, Homo sapiens
  misc_RNA (1)...(19): siRNA sense strand
guggagaauacaaauguca

SEQ ID NO: 158319 - RNA, 19 nt, Homo sapiens
  misc_RNA (1)...(19): siRNA sense strand
gaugugaguucuucgaauu

SEQ ID NO: 158320 - RNA, 19 nt, Homo sapiens
  misc_RNA (1)...(19): siRNA sense strand
ccaaagaccaagacaauga

SEQ ID NO: 158321 - RNA, 19 nt, Homo sapiens
  misc_RNA (1)...(19): siRNA sense strand
gaauugugcugagaaguuc

SEQ ID NO: 158322 - RNA, 19 nt, Homo sapiens
  misc_RNA (1)...(19): siRNA sense strand
gcagcgagcuccguguaga

SEQ ID NO: 158323 - RNA, 19 nt, Homo sapiens
  misc_RNA (1)...(19): siRNA sense strand
caugagagcuaugccaaug

SEQ ID NO: 158324 - RNA, 19 nt, Homo sapiens
  misc_RNA (1)...(19): siRNA sense strand
ccaagacaaugaugugagu

SEQ ID NO: 158325 - RNA, 19 nt, Homo sapiens
  misc_RNA (1)...(19): siRNA sense strand
gcgaagggguacaaauaua

SEQ ID NO: 158326 - RNA, 19 nt, Homo sapiens
  misc_RNA (1)...(19): siRNA sense strand
cgaauugugcugagaaguu

SEQ ID NO: 158327 - RNA, 19 nt, Homo sapiens
  misc_RNA (1)...(19): siRNA sense strand
gggagaggcaggugucauu

SEQ ID NO: 158328 - RNA, 19 nt, Homo sapiens
  misc_RNA (1)...(19): siRNA sense strand
acaaugaugugaguucuuc

SEQ ID NO: 158329 - RNA, 19 nt, Homo sapiens
  misc_RNA (1)...(19): siRNA sense strand
ggauggcucuguggacuuc

SEQ ID NO: 158330 - RNA, 19 nt, Homo sapiens
  misc_RNA (1)...(19): siRNA sense strand
guguagaccugguggacuu

SEQ ID NO: 158331 - RNA, 19 nt, Homo sapiens
  misc_RNA (1)...(19): siRNA sense strand
caccaaagaccaagacaau

SEQ ID NO: 158332 - RNA, 19 nt, Homo sapiens
  misc_RNA (1)...(19): siRNA sense strand
uaacgggccacaacaacaa

SEQ ID NO: 158333 - RNA, 19 nt, Homo sapiens
  misc_RNA (1)...(19): siRNA sense strand
caacuucuucuccaccaaa

SEQ ID NO: 158334 - RNA, 19 nt, Homo sapiens
  misc_RNA (1)...(19): siRNA sense strand
ucaauggucucuaccucau

SEQ ID NO: 158335 - RNA, 19 nt, Homo sapiens
  misc_RNA (1)...(19): siRNA sense strand
caacugcaaggaccugcua

SEQ ID NO: 158336 - RNA, 19 nt, Homo sapiens
  misc_RNA (1)...(19): siRNA sense strand
ccacaacaacaacuucuuc

SEQ ID NO: 158337 - RNA, 19 nt, Homo sapiens
  misc_RNA (1)...(19): siRNA sense strand
agaggcaggugucauugga

SEQ ID NO: 158338 - RNA, 19 nt, Homo sapiens
  misc_RNA (1)...(19): siRNA sense strand
cugacaagcucaccauucu

SEQ ID NO: 158339 - RNA, 19 nt, Homo sapiens
  misc_RNA (1)...(19): siRNA sense strand
aaaccucaauggucucuac

SEQ ID NO: 158340 - RNA, 19 nt, Homo sapiens
  misc_RNA (1)...(19): siRNA sense strand
ugagggcaaccaccaguuu

SEQ ID NO: 158341 - RNA, 19 nt, Homo sapiens
  misc_RNA (1)...(19): siRNA sense strand
ugagagcuaugccaauggu

SEQ ID NO: 158342 - RNA, 19 nt, Homo sapiens
  misc_RNA (1)...(19): siRNA sense strand
ggagaggcaggugucauug

SEQ ID NO: 158343 - RNA, 19 nt, Homo sapiens
  misc_RNA (1)...(19): siRNA sense strand
caaagaccaagacaaugau

SEQ ID NO: 158344 - RNA, 19 nt, Homo sapiens
  misc_RNA (1)...(19): siRNA sense strand
gcaggugucauuggagaga

SEQ ID NO: 158345 - RNA, 19 nt, Homo sapiens
  misc_RNA (1)...(19): siRNA sense strand
gcagugcggguaauucucu

SEQ ID NO: 158346 - RNA, 19 nt, Homo sapiens
  misc_RNA (1)...(19): siRNA sense strand
cuagucuuguuccugcaua

SEQ ID NO: 158347 - RNA, 19 nt, Homo sapiens
  misc_RNA (1)...(19): siRNA sense strand
gaccaagacaaugauguga

SEQ ID NO: 158348 - RNA, 19 nt, Homo sapiens
  misc_RNA (1)...(19): siRNA sense strand
gcuaaguacaaaucauuca

SEQ ID NO: 158349 - RNA, 19 nt, Homo sapiens
  misc_RNA (1)...(19): siRNA sense strand
gagggcaaccaccaguuug

SEQ ID NO: 158350 - RNA, 19 nt, Homo sapiens
  misc_RNA (1)...(19): siRNA sense strand
caacauccacgcccugacu

SEQ ID NO: 158351 - RNA, 19 nt, Homo sapiens
  misc_RNA (1)...(19): siRNA sense strand
ccaccaguuugcuaaguac

SEQ ID NO: 158352 - RNA, 19 nt, Homo sapiens
  misc_RNA (1)...(19): siRNA sense strand
acacauguccagaggugaa

SEQ ID NO: 158353 - RNA, 19 nt, Homo sapiens
  misc_RNA (1)...(19): siRNA sense strand
cgacugucaugcuucaaac

SEQ ID NO: 158354 - RNA, 19 nt, Homo sapiens
  misc_RNA (1)...(19): siRNA sense strand
ugaugugaguucuucgaau

SEQ ID NO: 158355 - RNA, 19 nt, Homo sapiens
  misc_RNA (1)...(19): siRNA sense strand
ugacugugcucugugacau

SEQ ID NO: 158356 - RNA, 19 nt, Homo sapiens
  misc_RNA (1)...(19): siRNA sense strand
gagcuaugccaaugguauc

SEQ ID NO: 158357 - RNA, 19 nt, Homo sapiens
  misc_RNA (1)...(19): siRNA sense strand
ggugguacgccgacuguca

SEQ ID NO: 158358 - RNA, 19 nt, Homo sapiens
  misc_RNA (1)...(19): siRNA sense strand
accaccaguuugcuaagua

SEQ ID NO: 158359 - RNA, 19 nt, Homo sapiens
  misc_RNA (1)...(19): siRNA sense strand
ggggaugcguggagagaaa

SEQ ID NO: 158360 - RNA, 19 nt, Homo sapiens
  misc_RNA (1)...(19): siRNA sense strand
uagaccugguggacuuuga

SEQ ID NO: 158361 - RNA, 19 nt, Homo sapiens
  misc_RNA (1)...(19): siRNA sense strand
gggcagugcggguaauucu

SEQ ID NO: 158362 - RNA, 19 nt, Homo sapiens
  misc_RNA (1)...(19): siRNA sense strand
ccaccaaagaccaagacaa

SEQ ID NO: 158363 - RNA, 19 nt, Homo sapiens
  misc_RNA (1)...(19): siRNA sense strand
gcggcuggcacaccaucua

SEQ ID NO: 158364 - RNA, 19 nt, Homo sapiens
  misc_RNA (1)...(19): siRNA sense strand
gacaaugaugugaguucuu

SEQ ID NO: 158365 - RNA, 19 nt, Homo sapiens
  misc_RNA (1)...(19): siRNA sense strand
agacaaugaugugaguucu

SEQ ID NO: 158366 - RNA, 19 nt, Homo sapiens
  misc_RNA (1)...(19): siRNA sense strand
cugacgaggcagagaagua

SEQ ID NO: 158367 - RNA, 19 nt, Homo sapiens
  misc_RNA (1)...(19): siRNA sense strand
aagcagcgagcuccgugua

SEQ ID NO: 158368 - RNA, 19 nt, Homo sapiens
  misc_RNA (1)...(19): siRNA sense strand
gcugguacugggagccuuu

SEQ ID NO: 158369 - RNA, 19 nt, Homo sapiens
  misc_RNA (1)...(19): siRNA sense strand
cggcgaagggguacaaaua

SEQ ID NO: 158370 - RNA, 19 nt, Homo sapiens
  misc_RNA (1)...(19): siRNA sense strand
ggaacugccuggugacaga

SEQ ID NO: 158371 - RNA, 19 nt, Homo sapiens
  misc_RNA (1)...(19): siRNA sense strand
cgaggauccugaagcagua

SEQ ID NO: 158372 - RNA, 19 nt, Homo sapiens
  misc_RNA (1)...(19): siRNA sense strand
agaagaauguccugaagau

SEQ ID NO: 158373 - RNA, 19 nt, Homo sapiens
  misc_RNA (1)...(19): siRNA sense strand
aggaauaccuggagauuag

SEQ ID NO: 158374 - RNA, 19 nt, Homo sapiens
  misc_RNA (1)...(19): siRNA sense strand
caacaucgugcgucucauu

SEQ ID NO: 158375 - RNA, 19 nt, Homo sapiens
  misc_RNA (1)...(19): siRNA sense strand
aacaggagcuccggaauga

SEQ ID NO: 158376 - RNA, 19 nt, Homo sapiens
  misc_RNA (1)...(19): siRNA sense strand
ccagagcuguguccugaug

SEQ ID NO: 158377 - RNA, 19 nt, Homo sapiens
  misc_RNA (1)...(19): siRNA sense strand
caagaagagugguguuguc

SEQ ID NO: 158378 - RNA, 19 nt, Homo sapiens
  misc_RNA (1)...(19): siRNA sense strand
ugaccucagugacagauga

SEQ ID NO: 158379 - RNA, 19 nt, Homo sapiens
  misc_RNA (1)...(19): siRNA sense strand
gagaagaauguccugaaga

SEQ ID NO: 158380 - RNA, 19 nt, Homo sapiens
  misc_RNA (1)...(19): siRNA sense strand
ccacaucucaggaaucuuc

SEQ ID NO: 158381 - RNA, 19 nt, Homo sapiens
  misc_RNA (1)...(19): siRNA sense strand
caacaggagcuccggaaug

SEQ ID NO: 158382 - RNA, 19 nt, Homo sapiens
  misc_RNA (1)...(19): siRNA sense strand
gguguugggugagcagauu

SEQ ID NO: 158383 - RNA, 19 nt, Homo sapiens
  misc_RNA (1)...(19): siRNA sense strand
caccugaggcccuuaacua

SEQ ID NO: 158384 - RNA, 19 nt, Homo sapiens
  misc_RNA (1)...(19): siRNA sense strand
uggaguaccuggagagcaa

SEQ ID NO: 158385 - RNA, 19 nt, Homo sapiens
  misc_RNA (1)...(19): siRNA sense strand
ggccaaguuucuacaggaa

SEQ ID NO: 158386 - RNA, 19 nt, Homo sapiens
  misc_RNA (1)...(19): siRNA sense strand
gcucuuugcucaccacaac

SEQ ID NO: 158387 - RNA, 19 nt, Homo sapiens
  misc_RNA (1)...(19): siRNA sense strand
gcucaucgaccaccuacug

SEQ ID NO: 158388 - RNA, 19 nt, Homo sapiens
  misc_RNA (1)...(19): siRNA sense strand
aagaauguccugaagauca

SEQ ID NO: 158389 - RNA, 19 nt, Homo sapiens
  misc_RNA (1)...(19): siRNA sense strand
guggagcuuuggcaucuug

SEQ ID NO: 158390 - RNA, 19 nt, Homo sapiens
  misc_RNA (1)...(19): siRNA sense strand
agagaagaauguccugaag

SEQ ID NO: 158391 - RNA, 19 nt, Homo sapiens
  misc_RNA (1)...(19): siRNA sense strand
cacgggaguuuguggagaa

SEQ ID NO: 158392 - RNA, 19 nt, Homo sapiens
  misc_RNA (1)...(19): siRNA sense strand
gcucccaccugaccucaag

SEQ ID NO: 158393 - RNA, 19 nt, Homo sapiens
  misc_RNA (1)...(19): siRNA sense strand
gagaucaccagccaaacug

SEQ ID NO: 158394 - RNA, 19 nt, Homo sapiens
  misc_RNA (1)...(19): siRNA sense strand
cagagaagaauguccugaa

SEQ ID NO: 158395 - RNA, 19 nt, Homo sapiens
  misc_RNA (1)...(19): siRNA sense strand
acaagugggugcugaacca

SEQ ID NO: 158396 - RNA, 19 nt, Homo sapiens
  misc_RNA (1)...(19): siRNA sense strand
agaggcaagugcugcaaga

SEQ ID NO: 158397 - RNA, 19 nt, Homo sapiens
  misc_RNA (1)...(19): siRNA sense strand
gaagcagcccaucuacauc

SEQ ID NO: 158398 - RNA, 19 nt, Homo sapiens
  misc_RNA (1)...(19): siRNA sense strand
agaagcagcccaucuacau

SEQ ID NO: 158399 - RNA, 19 nt, Homo sapiens
  misc_RNA (1)...(19): siRNA sense strand
gccaggacauugagaagcu

SEQ ID NO: 158400 - RNA, 19 nt, Homo sapiens
  misc_RNA (1)...(19): siRNA sense strand
aagcgaggauccugaagca

SEQ ID NO: 158401 - RNA, 19 nt, Homo sapiens
  misc_RNA (1)...(19): siRNA sense strand
ugcaugagcagcuguggua

SEQ ID NO: 158402 - RNA, 19 nt, Homo sapiens
  misc_RNA (1)...(19): siRNA sense strand
ggacacccacgcuggagau

SEQ ID NO: 158403 - RNA, 19 nt, Homo sapiens
  misc_RNA (1)...(19): siRNA sense strand
cagcaggagcucaccaaga

SEQ ID NO: 158404 - RNA, 19 nt, Homo sapiens
  misc_RNA (1)...(19): siRNA sense strand
gaagaauguccugaagauc

SEQ ID NO: 158405 - RNA, 19 nt, Homo sapiens
  misc_RNA (1)...(19): siRNA sense strand
gugaagucuugucgagaga

SEQ ID NO: 158406 - RNA, 19 nt, Homo sapiens
  misc_RNA (1)...(19): siRNA sense strand
agugggugcugaaccauga

SEQ ID NO: 158407 - RNA, 19 nt, Homo sapiens
  misc_RNA (1)...(19): siRNA sense strand
ggaaugaagaggagaacac

SEQ ID NO: 158408 - RNA, 19 nt, Homo sapiens
  misc_RNA (1)...(19): siRNA sense strand
uaaccuguaccgacuggaa

SEQ ID NO: 158409 - RNA, 19 nt, Homo sapiens
  misc_RNA (1)...(19): siRNA sense strand
agacaaggaccgugacaag

SEQ ID NO: 158410 - RNA, 19 nt, Homo sapiens
  misc_RNA (1)...(19): siRNA sense strand
guaccaggaggccagcaaa

SEQ ID NO: 158411 - RNA, 19 nt, Homo sapiens
  misc_RNA (1)...(19): siRNA sense strand
ggacugcuucaccacaugu

SEQ ID NO: 158412 - RNA, 19 nt, Homo sapiens
  misc_RNA (1)...(19): siRNA sense strand
cccagaagcagcccaucua

SEQ ID NO: 158413 - RNA, 19 nt, Homo sapiens
  misc_RNA (1)...(19): siRNA sense strand
gcaacaggagcuccggaau

SEQ ID NO: 158414 - RNA, 19 nt, Homo sapiens
  misc_RNA (1)...(19): siRNA sense strand
ccucaaggccaaguuucua

SEQ ID NO: 158415 - RNA, 19 nt, Homo sapiens
  misc_RNA (1)...(19): siRNA sense strand
cccagcgggucaagaguga

SEQ ID NO: 158416 - RNA, 19 nt, Homo sapiens
  misc_RNA (1)...(19): siRNA sense strand
caucgugcgucucauuggu

SEQ ID NO: 158417 - RNA, 19 nt, Homo sapiens
  misc_RNA (1)...(19): siRNA sense strand
ugaccucaaggccaaguuu

SEQ ID NO: 158418 - RNA, 19 nt, Homo sapiens
  misc_RNA (1)...(19): siRNA sense strand
cagcagacacgggaguuug

SEQ ID NO: 158419 - RNA, 19 nt, Homo sapiens
  misc_RNA (1)...(19): siRNA sense strand
guguggagcuuuggcaucu

SEQ ID NO: 158420 - RNA, 19 nt, Homo sapiens
  misc_RNA (1)...(19): siRNA sense strand
acgaggagauggcuugcau

SEQ ID NO: 158421 - RNA, 19 nt, Homo sapiens
  misc_RNA (1)...(19): siRNA sense strand
ggccgcuacuccuccgaaa

SEQ ID NO: 158422 - RNA, 19 nt, Homo sapiens
  misc_RNA (1)...(19): siRNA sense strand
caggacugcuucaccacau

SEQ ID NO: 158423 - RNA, 19 nt, Homo sapiens
  misc_RNA (1)...(19): siRNA sense strand
ccaagaagagugguguugu

SEQ ID NO: 158424 - RNA, 19 nt, Homo sapiens
  misc_RNA (1)...(19): siRNA sense strand
aggaguugcugcagaccaa

SEQ ID NO: 158425 - RNA, 19 nt, Homo sapiens
  misc_RNA (1)...(19): siRNA sense strand
ggcagcagcuucgcaagac

SEQ ID NO: 158426 - RNA, 19 nt, Homo sapiens
  misc_RNA (1)...(19): siRNA sense strand
ggaggccgagcuucgucua

SEQ ID NO: 158427 - RNA, 19 nt, Homo sapiens
  misc_RNA (1)...(19): siRNA sense strand
ggaagccgauggggucuau

SEQ ID NO: 158428 - RNA, 19 nt, Homo sapiens
  misc_RNA (1)...(19): siRNA sense strand
ugguggcggugaagucuug

SEQ ID NO: 158429 - RNA, 19 nt, Homo sapiens
  misc_RNA (1)...(19): siRNA sense strand
caggagcuccggaaugaag

SEQ ID NO: 158430 - RNA, 19 nt, Homo sapiens
  misc_RNA (1)...(19): siRNA sense strand
accaggagcugcagagcau

SEQ ID NO: 158431 - RNA, 19 nt, Homo sapiens
  misc_RNA (1)...(19): siRNA sense strand
agcaggagcucaccaagac

SEQ ID NO: 158432 - RNA, 19 nt, Homo sapiens
  misc_RNA (1)...(19): siRNA sense strand
guccuuggauaaccuguac

SEQ ID NO: 158433 - RNA, 19 nt, Homo sapiens
  misc_RNA (1)...(19): siRNA sense strand
ccucagcaaucagcagaca

SEQ ID NO: 158434 - RNA, 19 nt, Homo sapiens
  misc_RNA (1)...(19): siRNA sense strand
caagagugacagggaguau

SEQ ID NO: 158435 - RNA, 19 nt, Homo sapiens
  misc_RNA (1)...(19): siRNA sense strand
gcauuccuuugcucaucga

SEQ ID NO: 158436 - RNA, 19 nt, Homo sapiens
  misc_RNA (1)...(19): siRNA sense strand
gaaggcuuuccuagcauuc

SEQ ID NO: 158437 - RNA, 19 nt, Homo sapiens
  misc_RNA (1)...(19): siRNA sense strand
gaaggaagauggaagauua

SEQ ID NO: 158438 - RNA, 19 nt, Homo sapiens
  misc_RNA (1)...(19): siRNA sense strand
cuaaauguguuacggauga

SEQ ID NO: 158439 - RNA, 19 nt, Homo sapiens
  misc_RNA (1)...(19): siRNA sense strand
gaagagcgacccucacauc

SEQ ID NO: 158440 - RNA, 19 nt, Homo sapiens
  misc_RNA (1)...(19): siRNA sense strand
ggaguugugucuaucaaag

SEQ ID NO: 158441 - RNA, 19 nt, Homo sapiens
  misc_RNA (1)...(19): siRNA sense strand
gagcgacccucacaucaag

SEQ ID NO: 158442 - RNA, 19 nt, Homo sapiens
  misc_RNA (1)...(19): siRNA sense strand
ucaaggaaauacaccaguu

SEQ ID NO: 158443 - RNA, 19 nt, Homo sapiens
  misc_RNA (1)...(19): siRNA sense strand
ccaagcggcuguacugcaa

SEQ ID NO: 158444 - RNA, 19 nt, Homo sapiens
  misc_RNA (1)...(19): siRNA sense strand
ucaaaggagugugugcuaa

SEQ ID NO: 158445 - RNA, 19 nt, Homo sapiens
  misc_RNA (1)...(19): siRNA sense strand
gaagagagaggaguugugu

SEQ ID NO: 158446 - RNA, 19 nt, Homo sapiens
  misc_RNA (1)...(19): siRNA sense strand
agagaggaguugugucuau

SEQ ID NO: 158447 - RNA, 19 nt, Homo sapiens
  misc_RNA (1)...(19): siRNA sense strand
gcuacaacuucaagcagaa

SEQ ID NO: 158448 - RNA, 19 nt, Homo sapiens
  misc_RNA (1)...(19): siRNA sense strand
gagaagagcgacccucaca

SEQ ID NO: 158449 - RNA, 19 nt, Homo sapiens
  misc_RNA (1)...(19): siRNA sense strand
gaggaguugugucuaucaa

SEQ ID NO: 158450 - RNA, 19 nt, Homo sapiens
  misc_RNA (1)...(19): siRNA sense strand
gagaggaguugugucuauc

SEQ ID NO: 158451 - RNA, 19 nt, Homo sapiens
  misc_RNA (1)...(19): siRNA sense strand
caaggaaauacaccaguug

SEQ ID NO: 158452 - RNA, 19 nt, Homo sapiens
  misc_RNA (1)...(19): siRNA sense strand
ggaccugggcagaaagcua

SEQ ID NO: 158453 - RNA, 19 nt, Homo sapiens
  misc_RNA (1)...(19): siRNA sense strand
guugguauguggcacugaa

SEQ ID NO: 158454 - RNA, 19 nt, Homo sapiens
  misc_RNA (1)...(19): siRNA sense strand
gaccugggcagaaagcuau

SEQ ID NO: 158455 - RNA, 19 nt, Homo sapiens
  misc_RNA (1)...(19): siRNA sense strand
auuacuggcuucuaaaugu

SEQ ID NO: 158456 - RNA, 19 nt, Homo sapiens
  misc_RNA (1)...(19): siRNA sense strand
ucacaucaagcuacaacuu

SEQ ID NO: 158457 - RNA, 19 nt, Homo sapiens
  misc_RNA (1)...(19): siRNA sense strand
acaucaagcuacaacuuca

SEQ ID NO: 158458 - RNA, 19 nt, Homo sapiens
  misc_RNA (1)...(19): siRNA sense strand
gcagaagagagaggaguug

SEQ ID NO: 158459 - RNA, 19 nt, Homo sapiens
  misc_RNA (1)...(19): siRNA sense strand
gauuacuggcuucuaaaug

SEQ ID NO: 158460 - RNA, 19 nt, Homo sapiens
  misc_RNA (1)...(19): siRNA sense strand
auacuuaccggucaaggaa

SEQ ID NO: 158461 - RNA, 19 nt, Homo sapiens
  misc_RNA (1)...(19): siRNA sense strand
ugaaggaagauggaagauu

SEQ ID NO: 158462 - RNA, 19 nt, Homo sapiens
  misc_RNA (1)...(19): siRNA sense strand
accguuaccuggcuaugaa

SEQ ID NO: 158463 - RNA, 19 nt, Homo sapiens
  misc_RNA (1)...(19): siRNA sense strand
uuacuggcuucuaaaugug

SEQ ID NO: 158464 - RNA, 19 nt, Homo sapiens
  misc_RNA (1)...(19): siRNA sense strand
uuaccuggcuaugaaggaa

SEQ ID NO: 158465 - RNA, 19 nt, Homo sapiens
  misc_RNA (1)...(19): siRNA sense strand
uaugaaggaagauggaaga

SEQ ID NO: 158466 - RNA, 19 nt, Homo sapiens
  misc_RNA (1)...(19): siRNA sense strand
gagagaggaguugugucua

SEQ ID NO: 158467 - RNA, 19 nt, Homo sapiens
  misc_RNA (1)...(19): siRNA sense strand
ggaagauggaagauuacug

SEQ ID NO: 158468 - RNA, 19 nt, Homo sapiens
  misc_RNA (1)...(19): siRNA sense strand
caaaggagugugugcuaac

SEQ ID NO: 158469 - RNA, 19 nt, Homo sapiens
  misc_RNA (1)...(19): siRNA sense strand
cuuccaaugucugcuaaga

SEQ ID NO: 158470 - RNA, 19 nt, Homo sapiens
  misc_RNA (1)...(19): siRNA sense strand
caagcuacaacuucaagca

SEQ ID NO: 158471 - RNA, 19 nt, Homo sapiens
  misc_RNA (1)...(19): siRNA sense strand
agagagaggaguugugucu

SEQ ID NO: 158472 - RNA, 19 nt, Homo sapiens
  misc_RNA (1)...(19): siRNA sense strand
guguuacggaugaguguuu

SEQ ID NO: 158473 - RNA, 19 nt, Homo sapiens
  misc_RNA (1)...(19): siRNA sense strand
uacaauacuuaccggucaa

SEQ ID NO: 158474 - RNA, 19 nt, Homo sapiens
  misc_RNA (1)...(19): siRNA sense strand
cacaucaagcuacaacuuc

SEQ ID NO: 158475 - RNA, 19 nt, Homo sapiens
  misc_RNA (1)...(19): siRNA sense strand
gcaagaaugggaagaccaa

SEQ ID NO: 158476 - RNA, 19 nt, Homo sapiens
  misc_RNA (1)...(19): siRNA sense strand
ccaugaaggucacccacuu

SEQ ID NO: 158477 - RNA, 19 nt, Homo sapiens
  misc_RNA (1)...(19): siRNA sense strand
gagugucgcccaccaugaa

SEQ ID NO: 158478 - RNA, 19 nt, Homo sapiens
  misc_RNA (1)...(19): siRNA sense strand
gcagcaagggcaagcucua

SEQ ID NO: 158479 - RNA, 19 nt, Homo sapiens
  misc_RNA (1)...(19): siRNA sense strand
ccuacgaguccuacaagua

SEQ ID NO: 158480 - RNA, 19 nt, Homo sapiens
  misc_RNA (1)...(19): siRNA sense strand
gcaagggcaagcucuaugg

SEQ ID NO: 158481 - RNA, 19 nt, Homo sapiens
  misc_RNA (1)...(19): siRNA sense strand
agaaugggaagaccaagaa

SEQ ID NO: 158482 - RNA, 19 nt, Homo sapiens
  misc_RNA (1)...(19): siRNA sense strand
cuacgaguccuacaaguac

SEQ ID NO: 158483 - RNA, 19 nt, Homo sapiens
  misc_RNA (1)...(19): siRNA sense strand
ucaucgcccugagcaagaa

SEQ ID NO: 158484 - RNA, 19 nt, Homo sapiens
  misc_RNA (1)...(19): siRNA sense strand
cagcaagggcaagcucuau

SEQ ID NO: 158485 - RNA, 19 nt, Homo sapiens
  misc_RNA (1)...(19): siRNA sense strand
gaaagugaauucuaucuug

SEQ ID NO: 158486 - RNA, 19 nt, Homo sapiens
  misc_RNA (1)...(19): siRNA sense strand
ggaaauguuuguugccuua

SEQ ID NO: 158487 - RNA, 19 nt, Homo sapiens
  misc_RNA (1)...(19): siRNA sense strand
gcaaauggcuacaaaugug

SEQ ID NO: 158488 - RNA, 19 nt, Homo sapiens
  misc_RNA (1)...(19): siRNA sense strand
cccaagagaugaagaauaa

SEQ ID NO: 158489 - RNA, 19 nt, Homo sapiens
  misc_RNA (1)...(19): siRNA sense strand
gaucaugcuuucacauuau

SEQ ID NO: 158490 - RNA, 19 nt, Homo sapiens
  misc_RNA (1)...(19): siRNA sense strand
caacuuugcucuacagauc

SEQ ID NO: 158491 - RNA, 19 nt, Homo sapiens
  misc_RNA (1)...(19): siRNA sense strand
gaaagaaugcaaugaagau

SEQ ID NO: 158492 - RNA, 19 nt, Homo sapiens
  misc_RNA (1)...(19): siRNA sense strand
gguggaaagugaauucuau

SEQ ID NO: 158493 - RNA, 19 nt, Homo sapiens
  misc_RNA (1)...(19): siRNA sense strand
ugacaugacuccagagcaa

SEQ ID NO: 158494 - RNA, 19 nt, Homo sapiens
  misc_RNA (1)...(19): siRNA sense strand
gagcaaauggcuacaaaug

SEQ ID NO: 158495 - RNA, 19 nt, Homo sapiens
  misc_RNA (1)...(19): siRNA sense strand
ugaauucuaucuugcaaug

SEQ ID NO: 158496 - RNA, 19 nt, Homo sapiens
  misc_RNA (1)...(19): siRNA sense strand
gcaaagaaagaaugcaaug

SEQ ID NO: 158497 - RNA, 19 nt, Homo sapiens
  misc_RNA (1)...(19): siRNA sense strand
agaucaugcuuucacauua

SEQ ID NO: 158498 - RNA, 19 nt, Homo sapiens
  misc_RNA (1)...(19): siRNA sense strand
gauuguaacuucaaagaac

SEQ ID NO: 158499 - RNA, 19 nt, Homo sapiens
  misc_RNA (1)...(19): siRNA sense strand
gaaguuaugauuacaugga

SEQ ID NO: 158500 - RNA, 19 nt, Homo sapiens
  misc_RNA (1)...(19): siRNA sense strand
acaaauggauacugacaug

SEQ ID NO: 158501 - RNA, 19 nt, Homo sapiens
  misc_RNA (1)...(19): siRNA sense strand
cagagcaaauggcuacaaa

SEQ ID NO: 158502 - RNA, 19 nt, Homo sapiens
  misc_RNA (1)...(19): siRNA sense strand
gguacuauaucuuuagcuu

SEQ ID NO: 158503 - RNA, 19 nt, Homo sapiens
  misc_RNA (1)...(19): siRNA sense strand
gauaaaagaggcaaaguaa

SEQ ID NO: 158504 - RNA, 19 nt, Homo sapiens
  misc_RNA (1)...(19): siRNA sense strand
cacaagaaguuaugauuac

SEQ ID NO: 158505 - RNA, 19 nt, Homo sapiens
  misc_RNA (1)...(19): siRNA sense strand
gagcgacacacaagaaguu

SEQ ID NO: 158506 - RNA, 19 nt, Homo sapiens
  misc_RNA (1)...(19): siRNA sense strand
cauggauccugccaacuuu

SEQ ID NO: 158507 - RNA, 19 nt, Homo sapiens
  misc_RNA (1)...(19): siRNA sense strand
gacaguggcaguuggaauu

SEQ ID NO: 158508 - RNA, 19 nt, Homo sapiens
  misc_RNA (1)...(19): siRNA sense strand
ggaaaacucuaugcaaaga

SEQ ID NO: 158509 - RNA, 19 nt, Homo sapiens
  misc_RNA (1)...(19): siRNA sense strand
ggaaagugaauucuaucuu

SEQ ID NO: 158510 - RNA, 19 nt, Homo sapiens
  misc_RNA (1)...(19): siRNA sense strand
gcacaaauggauacugaca

SEQ ID NO: 158511 - RNA, 19 nt, Homo sapiens
  misc_RNA (1)...(19): siRNA sense strand
ggaaaaccauuacaacaca

SEQ ID NO: 158512 - RNA, 19 nt, Homo sapiens
  misc_RNA (1)...(19): siRNA sense strand
acacauaugcaucagcuaa

SEQ ID NO: 158513 - RNA, 19 nt, Homo sapiens
  misc_RNA (1)...(19): siRNA sense strand
caaagaaagaaugcaauga

SEQ ID NO: 158514 - RNA, 19 nt, Homo sapiens
  misc_RNA (1)...(19): siRNA sense strand
ucaaagggguggaaaguga

SEQ ID NO: 158515 - RNA, 19 nt, Homo sapiens
  misc_RNA (1)...(19): siRNA sense strand
gcaaugaacaaggaaggaa

SEQ ID NO: 158516 - RNA, 19 nt, Homo sapiens
  misc_RNA (1)...(19): siRNA sense strand
gauauaagagugagaagac

SEQ ID NO: 158517 - RNA, 19 nt, Homo sapiens
  misc_RNA (1)...(19): siRNA sense strand
caaauggcuacaaauguga

SEQ ID NO: 158518 - RNA, 19 nt, Homo sapiens
  misc_RNA (1)...(19): siRNA sense strand
ggaaggaggggauauaaga

SEQ ID NO: 158519 - RNA, 19 nt, Homo sapiens
  misc_RNA (1)...(19): siRNA sense strand
caaaaggggauuccuguaa

SEQ ID NO: 158520 - RNA, 19 nt, Homo sapiens
  misc_RNA (1)...(19): siRNA sense strand
aagaaagaaugcaaugaag

SEQ ID NO: 158521 - RNA, 19 nt, Homo sapiens
  misc_RNA (1)...(19): siRNA sense strand
ggacccaagagaugaagaa

SEQ ID NO: 158522 - RNA, 19 nt, Homo sapiens
  misc_RNA (1)...(19): siRNA sense strand
cagaucaugcuuucacauu

SEQ ID NO: 158523 - RNA, 19 nt, Homo sapiens
  misc_RNA (1)...(19): siRNA sense strand
caacggaggggaaauguuu

SEQ ID NO: 158524 - RNA, 19 nt, Homo sapiens
  misc_RNA (1)...(19): siRNA sense strand
cgacacacaagaaguuaug

SEQ ID NO: 158525 - RNA, 19 nt, Homo sapiens
  misc_RNA (1)...(19): siRNA sense strand
uuacaacacauaugcauca

SEQ ID NO: 158526 - RNA, 19 nt, Homo sapiens
  misc_RNA (1)...(19): siRNA sense strand
ggauauaagagugagaaga

SEQ ID NO: 158527 - RNA, 19 nt, Homo sapiens
  misc_RNA (1)...(19): siRNA sense strand
ucagcuaaauggacacaca

SEQ ID NO: 158528 - RNA, 19 nt, Homo sapiens
  misc_RNA (1)...(19): siRNA sense strand
gcucuacagaucaugcuuu

SEQ ID NO: 158529 - RNA, 19 nt, Homo sapiens
  misc_RNA (1)...(19): siRNA sense strand
agaaagaaugcaaugaaga

SEQ ID NO: 158530 - RNA, 19 nt, Homo sapiens
  misc_RNA (1)...(19): siRNA sense strand
caaugaacaaggaaggaaa

SEQ ID NO: 158531 - RNA, 19 nt, Homo sapiens
  misc_RNA (1)...(19): siRNA sense strand
ggacaguggcaguuggaau

SEQ ID NO: 158532 - RNA, 19 nt, Homo sapiens
  misc_RNA (1)...(19): siRNA sense strand
aaggaaaacucuaugcaaa

SEQ ID NO: 158533 - RNA, 19 nt, Homo sapiens
  misc_RNA (1)...(19): siRNA sense strand
gaaauguuuguugccuuaa

SEQ ID NO: 158534 - RNA, 19 nt, Homo sapiens
  misc_RNA (1)...(19): siRNA sense strand
cacacaagaaguuaugauu

SEQ ID NO: 158535 - RNA, 19 nt, Homo sapiens
  misc_RNA (1)...(19): siRNA sense strand
gaaggaaaacucuaugcaa

SEQ ID NO: 158536 - RNA, 19 nt, Homo sapiens
  misc_RNA (1)...(19): siRNA sense strand
aguggguacuauaucuuua

SEQ ID NO: 158537 - RNA, 19 nt, Homo sapiens
  misc_RNA (1)...(19): siRNA sense strand
acauaugcaucagcuaaau

SEQ ID NO: 158538 - RNA, 19 nt, Homo sapiens
  misc_RNA (1)...(19): siRNA sense strand
acagcccacuuucuuccua

SEQ ID NO: 158539 - RNA, 19 nt, Homo sapiens
  misc_RNA (1)...(19): siRNA sense strand
gcuuucacauuaucugucu

SEQ ID NO: 158540 - RNA, 19 nt, Homo sapiens
  misc_RNA (1)...(19): siRNA sense strand
aaagggacccaagagauga

SEQ ID NO: 158541 - RNA, 19 nt, Homo sapiens
  misc_RNA (1)...(19): siRNA sense strand
gaacaaggaaggaaaacuc

SEQ ID NO: 158542 - RNA, 19 nt, Homo sapiens
  misc_RNA (1)...(19): siRNA sense strand
acauggauccugccaacuu

SEQ ID NO: 158543 - RNA, 19 nt, Homo sapiens
  misc_RNA (1)...(19): siRNA sense strand
aaauggauacugacaugga

SEQ ID NO: 158544 - RNA, 19 nt, Homo sapiens
  misc_RNA (1)...(19): siRNA sense strand
cagcccacuuucuuccuau

SEQ ID NO: 158545 - RNA, 19 nt, Homo sapiens
  misc_RNA (1)...(19): siRNA sense strand
ggguggaaagugaauucua

SEQ ID NO: 158546 - RNA, 19 nt, Homo sapiens
  misc_RNA (1)...(19): siRNA sense strand
ucacauuaucugucuagug

SEQ ID NO: 158547 - RNA, 19 nt, Homo sapiens
  misc_RNA (1)...(19): siRNA sense strand
ccugagcgacacacaagaa

SEQ ID NO: 158548 - RNA, 19 nt, Homo sapiens
  misc_RNA (1)...(19): siRNA sense strand
cacauaugcaucagcuaaa

SEQ ID NO: 158549 - RNA, 19 nt, Homo sapiens
  misc_RNA (1)...(19): siRNA sense strand
guaccugaggaucgauaaa

SEQ ID NO: 158550 - RNA, 19 nt, Homo sapiens
  misc_RNA (1)...(19): siRNA sense strand
cgauaaaagaggcaaagua

SEQ ID NO: 158551 - RNA, 19 nt, Homo sapiens
  misc_RNA (1)...(19): siRNA sense strand
aauggauacugacauggau

SEQ ID NO: 158552 - RNA, 19 nt, Homo sapiens
  misc_RNA (1)...(19): siRNA sense strand
cauaugcaucagcuaaaug

SEQ ID NO: 158553 - RNA, 19 nt, Homo sapiens
  misc_RNA (1)...(19): siRNA sense strand
gaaaaccauuacaacacau

SEQ ID NO: 158554 - RNA, 19 nt, Homo sapiens
  misc_RNA (1)...(19): siRNA sense strand
gaauucuaucuugcaauga

SEQ ID NO: 158555 - RNA, 19 nt, Homo sapiens
  misc_RNA (1)...(19): siRNA sense strand
gacaugacuccagagcaaa

SEQ ID NO: 158556 - RNA, 19 nt, Homo sapiens
  misc_RNA (1)...(19): siRNA sense strand
ucauggaaaucaggacagu

SEQ ID NO: 158557 - RNA, 19 nt, Homo sapiens
  misc_RNA (1)...(19): siRNA sense strand
guaaaagggacccaagaga

SEQ ID NO: 158558 - RNA, 19 nt, Homo sapiens
  misc_RNA (1)...(19): siRNA sense strand
caaaguaccugaacuguau

SEQ ID NO: 158559 - RNA, 19 nt, Homo sapiens
  misc_RNA (1)...(19): siRNA sense strand
gcgauacuauguugcauua

SEQ ID NO: 158560 - RNA, 19 nt, Homo sapiens
  misc_RNA (1)...(19): siRNA sense strand
ggacuuggaucauuuaaag

SEQ ID NO: 158561 - RNA, 19 nt, Homo sapiens
  misc_RNA (1)...(19): siRNA sense strand
ggaaggcgauacuauguug

SEQ ID NO: 158562 - RNA, 19 nt, Homo sapiens
  misc_RNA (1)...(19): siRNA sense strand
ucacggacuuggaucauuu

SEQ ID NO: 158563 - RNA, 19 nt, Homo sapiens
  misc_RNA (1)...(19): siRNA sense strand
caccagaaauucacacauu

SEQ ID NO: 158564 - RNA, 19 nt, Homo sapiens
  misc_RNA (1)...(19): siRNA sense strand
ggacuggauuucacuuaga

SEQ ID NO: 158565 - RNA, 19 nt, Homo sapiens
  misc_RNA (1)...(19): siRNA sense strand
gaaagaccacagccgauuu

SEQ ID NO: 158566 - RNA, 19 nt, Homo sapiens
  misc_RNA (1)...(19): siRNA sense strand
ggacuaaacggcaccagaa

SEQ ID NO: 158567 - RNA, 19 nt, Homo sapiens
  misc_RNA (1)...(19): siRNA sense strand
ccaagaguguguauucaga

SEQ ID NO: 158568 - RNA, 19 nt, Homo sapiens
  misc_RNA (1)...(19): siRNA sense strand
gagaagggacuaggacuaa

SEQ ID NO: 158569 - RNA, 19 nt, Homo sapiens
  misc_RNA (1)...(19): siRNA sense strand
uaccugaacuguauaagga

SEQ ID NO: 158570 - RNA, 19 nt, Homo sapiens
  misc_RNA (1)...(19): siRNA sense strand
ggaaagaccacagccgauu

SEQ ID NO: 158571 - RNA, 19 nt, Homo sapiens
  misc_RNA (1)...(19): siRNA sense strand
cgucaaaccuauauaagca

SEQ ID NO: 158572 - RNA, 19 nt, Homo sapiens
  misc_RNA (1)...(19): siRNA sense strand
ggacagcccgguuuuguua

SEQ ID NO: 158573 - RNA, 19 nt, Homo sapiens
  misc_RNA (1)...(19): siRNA sense strand
ggagcuguauggaucagaa

SEQ ID NO: 158574 - RNA, 19 nt, Homo sapiens
  misc_RNA (1)...(19): siRNA sense strand
cuaaacggcaccagaaauu

SEQ ID NO: 158575 - RNA, 19 nt, Homo sapiens
  misc_RNA (1)...(19): siRNA sense strand
gauauucuaagccaaaguu

SEQ ID NO: 158576 - RNA, 19 nt, Homo sapiens
  misc_RNA (1)...(19): siRNA sense strand
gacuggauuucacuuagaa

SEQ ID NO: 158577 - RNA, 19 nt, Homo sapiens
  misc_RNA (1)...(19): siRNA sense strand
gcaggaugcgguaccguuu

SEQ ID NO: 158578 - RNA, 19 nt, Homo sapiens
  misc_RNA (1)...(19): siRNA sense strand
ccugaacuguauaaggaua

SEQ ID NO: 158579 - RNA, 19 nt, Homo sapiens
  misc_RNA (1)...(19): siRNA sense strand
uauaauacguacucgucaa

SEQ ID NO: 158580 - RNA, 19 nt, Homo sapiens
  misc_RNA (1)...(19): siRNA sense strand
acaaaguaccugaacugua

SEQ ID NO: 158581 - RNA, 19 nt, Homo sapiens
  misc_RNA (1)...(19): siRNA sense strand
guauaaggauauucuaagc

SEQ ID NO: 158582 - RNA, 19 nt, Homo sapiens
  misc_RNA (1)...(19): siRNA sense strand
cgacaaaguaccugaacug

SEQ ID NO: 158583 - RNA, 19 nt, Homo sapiens
  misc_RNA (1)...(19): siRNA sense strand
guacucgucaaaccuauau

SEQ ID NO: 158584 - RNA, 19 nt, Homo sapiens
  misc_RNA (1)...(19): siRNA sense strand
uuagaaaucuuccccaaug

SEQ ID NO: 158585 - RNA, 19 nt, Homo sapiens
  misc_RNA (1)...(19): siRNA sense strand
aaacggcaccagaaauuca

SEQ ID NO: 158586 - RNA, 19 nt, Homo sapiens
  misc_RNA (1)...(19): siRNA sense strand
gaaaucuuccccaauggua

SEQ ID NO: 158587 - RNA, 19 nt, Homo sapiens
  misc_RNA (1)...(19): siRNA sense strand
gaagggacuaggacuaaac

SEQ ID NO: 158588 - RNA, 19 nt, Homo sapiens
  misc_RNA (1)...(19): siRNA sense strand
agaagggacuaggacuaaa

SEQ ID NO: 158589 - RNA, 19 nt, Homo sapiens
  misc_RNA (1)...(19): siRNA sense strand
ccacagccgauuuggcauu

SEQ ID NO: 158590 - RNA, 19 nt, Homo sapiens
  misc_RNA (1)...(19): siRNA sense strand
caggacuggauuucacuua

SEQ ID NO: 158591 - RNA, 19 nt, Homo sapiens
  misc_RNA (1)...(19): siRNA sense strand
gacuaaacggcaccagaaa

SEQ ID NO: 158592 - RNA, 19 nt, Homo sapiens
  misc_RNA (1)...(19): siRNA sense strand
aaagaccacagccgauuug

SEQ ID NO: 158593 - RNA, 19 nt, Homo sapiens
  misc_RNA (1)...(19): siRNA sense strand
aagaguguguauucagaga

SEQ ID NO: 158594 - RNA, 19 nt, Homo sapiens
  misc_RNA (1)...(19): siRNA sense strand
ggacucuaccucgggauga

SEQ ID NO: 158595 - RNA, 19 nt, Homo sapiens
  misc_RNA (1)...(19): siRNA sense strand
gaguguguauucagagaac

SEQ ID NO: 158596 - RNA, 19 nt, Homo sapiens
  misc_RNA (1)...(19): siRNA sense strand
agagaagggacuaggacua

SEQ ID NO: 158597 - RNA, 19 nt, Homo sapiens
  misc_RNA (1)...(19): siRNA sense strand
gacucuaccucgggaugaa

SEQ ID NO: 158598 - RNA, 19 nt, Homo sapiens
  misc_RNA (1)...(19): siRNA sense strand
acucgucaaaccuauauaa

SEQ ID NO: 158599 - RNA, 19 nt, Homo sapiens
  misc_RNA (1)...(19): siRNA sense strand
gacaaaguaccugaacugu

SEQ ID NO: 158600 - RNA, 19 nt, Homo sapiens
  misc_RNA (1)...(19): siRNA sense strand
gcgguaccguuugggaaug

SEQ ID NO: 158601 - RNA, 19 nt, Homo sapiens
  misc_RNA (1)...(19): siRNA sense strand
aaggauauucuaagccaaa

SEQ ID NO: 158602 - RNA, 19 nt, Homo sapiens
  misc_RNA (1)...(19): siRNA sense strand
gucacggacuuggaucauu

SEQ ID NO: 158603 - RNA, 19 nt, Homo sapiens
  misc_RNA (1)...(19): siRNA sense strand
guaccugaacuguauaagg

SEQ ID NO: 158604 - RNA, 19 nt, Homo sapiens
  misc_RNA (1)...(19): siRNA sense strand
gagcuguauggaucagaaa

SEQ ID NO: 158605 - RNA, 19 nt, Homo sapiens
  misc_RNA (1)...(19): siRNA sense strand
uaaacggcaccagaaauuc

SEQ ID NO: 158606 - RNA, 19 nt, Homo sapiens
  misc_RNA (1)...(19): siRNA sense strand
ggaauuuaucaguauagca

SEQ ID NO: 158607 - RNA, 19 nt, Homo sapiens
  misc_RNA (1)...(19): siRNA sense strand
gaacuguauaaggauauuc

SEQ ID NO: 158608 - RNA, 19 nt, Homo sapiens
  misc_RNA (1)...(19): siRNA sense strand
cagccgauuuggcauucug

SEQ ID NO: 158609 - RNA, 19 nt, Homo sapiens
  misc_RNA (1)...(19): siRNA sense strand
auaauacguacucgucaaa

SEQ ID NO: 158610 - RNA, 19 nt, Homo sapiens
  misc_RNA (1)...(19): siRNA sense strand
gaugaagauugcugacuuu

SEQ ID NO: 158611 - RNA, 19 nt, Homo sapiens
  misc_RNA (1)...(19): siRNA sense strand
gcacuggagucucgugaug

SEQ ID NO: 158612 - RNA, 19 nt, Homo sapiens
  misc_RNA (1)...(19): siRNA sense strand
gaaccgcauuggaggcauu

SEQ ID NO: 158613 - RNA, 19 nt, Homo sapiens
  misc_RNA (1)...(19): siRNA sense strand
ucaagaugcucaaagacaa

SEQ ID NO: 158614 - RNA, 19 nt, Homo sapiens
  misc_RNA (1)...(19): siRNA sense strand
cauagggaccucucgaaua

SEQ ID NO: 158615 - RNA, 19 nt, Homo sapiens
  misc_RNA (1)...(19): siRNA sense strand
cacauugacuacuauaaga

SEQ ID NO: 158616 - RNA, 19 nt, Homo sapiens
  misc_RNA (1)...(19): siRNA sense strand
ccuaaagacugcagacauc

SEQ ID NO: 158617 - RNA, 19 nt, Homo sapiens
  misc_RNA (1)...(19): siRNA sense strand
ugaugaagauugcugacuu

SEQ ID NO: 158618 - RNA, 19 nt, Homo sapiens
  misc_RNA (1)...(19): siRNA sense strand
auagggaccucucgaauag

SEQ ID NO: 158619 - RNA, 19 nt, Homo sapiens
  misc_RNA (1)...(19): siRNA sense strand
ucaaagacaacgccucuga

SEQ ID NO: 158620 - RNA, 19 nt, Homo sapiens
  misc_RNA (1)...(19): siRNA sense strand
auaacuaccugcuagaugu

SEQ ID NO: 158621 - RNA, 19 nt, Homo sapiens
  misc_RNA (1)...(19): siRNA sense strand
gggcugcuuuggccaggua

SEQ ID NO: 158622 - RNA, 19 nt, Homo sapiens
  misc_RNA (1)...(19): siRNA sense strand
ugaagcacaucgucaucaa

SEQ ID NO: 158623 - RNA, 19 nt, Homo sapiens
  misc_RNA (1)...(19): siRNA sense strand
gaacaucaucaaccugcuu

SEQ ID NO: 158624 - RNA, 19 nt, Homo sapiens
  misc_RNA (1)...(19): siRNA sense strand
agagugacguguggucuuu

SEQ ID NO: 158625 - RNA, 19 nt, Homo sapiens
  misc_RNA (1)...(19): siRNA sense strand
ccaccacauugacuacuau

SEQ ID NO: 158626 - RNA, 19 nt, Homo sapiens
  misc_RNA (1)...(19): siRNA sense strand
acaccugccugguagagaa

SEQ ID NO: 158627 - RNA, 19 nt, Homo sapiens
  misc_RNA (1)...(19): siRNA sense strand
gccuagagauugccagcuu

SEQ ID NO: 158628 - RNA, 19 nt, Homo sapiens
  misc_RNA (1)...(19): siRNA sense strand
gagcaggagcugacaguag

SEQ ID NO: 158629 - RNA, 19 nt, Homo sapiens
  misc_RNA (1)...(19): siRNA sense strand
ccagaggccuaccuucaag

SEQ ID NO: 158630 - RNA, 19 nt, Homo sapiens
  misc_RNA (1)...(19): siRNA sense strand
ccucgugagucuagaucua

SEQ ID NO: 158631 - RNA, 19 nt, Homo sapiens
  misc_RNA (1)...(19): siRNA sense strand
ucucgaauaggcacaguua

SEQ ID NO: 158632 - RNA, 19 nt, Homo sapiens
  misc_RNA (1)...(19): siRNA sense strand
gcauucggcugcgccauca

SEQ ID NO: 158633 - RNA, 19 nt, Homo sapiens
  misc_RNA (1)...(19): siRNA sense strand
agacaacgccucugacaag

SEQ ID NO: 158634 - RNA, 19 nt, Homo sapiens
  misc_RNA (1)...(19): siRNA sense strand
gcacuguggccgucaagau

SEQ ID NO: 158635 - RNA, 19 nt, Homo sapiens
  misc_RNA (1)...(19): siRNA sense strand
ccacauugacuacuauaag

SEQ ID NO: 158636 - RNA, 19 nt, Homo sapiens
  misc_RNA (1)...(19): siRNA sense strand
cacauacaccugccuggua

SEQ ID NO: 158637 - RNA, 19 nt, Homo sapiens
  misc_RNA (1)...(19): siRNA sense strand
ccgucaagaugcucaaaga

SEQ ID NO: 158638 - RNA, 19 nt, Homo sapiens
  misc_RNA (1)...(19): siRNA sense strand
cugaggaaguggagcuuga

SEQ ID NO: 158639 - RNA, 19 nt, Homo sapiens
  misc_RNA (1)...(19): siRNA sense strand
gcuggugacugaggacaau

SEQ ID NO: 158640 - RNA, 19 nt, Homo sapiens
  misc_RNA (1)...(19): siRNA sense strand
ugcagaaucucaccuugau

SEQ ID NO: 158641 - RNA, 19 nt, Homo sapiens
  misc_RNA (1)...(19): siRNA sense strand
acaagaacaucaucaaccu

SEQ ID NO: 158642 - RNA, 19 nt, Homo sapiens
  misc_RNA (1)...(19): siRNA sense strand
guacgaggcgugcgucucu

SEQ ID NO: 158643 - RNA, 19 nt, Homo sapiens
  misc_RNA (1)...(19): siRNA sense strand
uggaggcgcuggacaaggu

SEQ ID NO: 158644 - RNA, 19 nt, Homo sapiens
  misc_RNA (1)...(19): siRNA sense strand
gucaagcucaucccuggua

SEQ ID NO: 158645 - RNA, 19 nt, Homo sapiens
  misc_RNA (1)...(19): siRNA sense strand
cuccagcgauucugucuuc

SEQ ID NO: 158646 - RNA, 19 nt, Homo sapiens
  misc_RNA (1)...(19): siRNA sense strand
gacacaagaacaucaucaa

SEQ ID NO: 158647 - RNA, 19 nt, Homo sapiens
  misc_RNA (1)...(19): siRNA sense strand
gaggacaaugugaugaaga

SEQ ID NO: 158648 - RNA, 19 nt, Homo sapiens
  misc_RNA (1)...(19): siRNA sense strand
cgacacaagaacaucauca

SEQ ID NO: 158649 - RNA, 19 nt, Homo sapiens
  misc_RNA (1)...(19): siRNA sense strand
ggacaaugugaugaagauu

SEQ ID NO: 158650 - RNA, 19 nt, Homo sapiens
  misc_RNA (1)...(19): siRNA sense strand
uaaagacugcagacaucaa

SEQ ID NO: 158651 - RNA, 19 nt, Homo sapiens
  misc_RNA (1)...(19): siRNA sense strand
aggacaaugugaugaagau

SEQ ID NO: 158652 - RNA, 19 nt, Homo sapiens
  misc_RNA (1)...(19): siRNA sense strand
aaagacaacgccucugaca

SEQ ID NO: 158653 - RNA, 19 nt, Homo sapiens
  misc_RNA (1)...(19): siRNA sense strand
agagauugccagcuuccua

SEQ ID NO: 158654 - RNA, 19 nt, Homo sapiens
  misc_RNA (1)...(19): siRNA sense strand
ugacugaggacaaugugau

SEQ ID NO: 158655 - RNA, 19 nt, Homo sapiens
  misc_RNA (1)...(19): siRNA sense strand
uaucuggagucccggaagu

SEQ ID NO: 158656 - RNA, 19 nt, Homo sapiens
  misc_RNA (1)...(19): siRNA sense strand
agggaaaccugcgggaguu

SEQ ID NO: 158657 - RNA, 19 nt, Homo sapiens
  misc_RNA (1)...(19): siRNA sense strand
ggagauggaggugaugaag

SEQ ID NO: 158658 - RNA, 19 nt, Homo sapiens
  misc_RNA (1)...(19): siRNA sense strand
gucaagaugcucaaagaca

SEQ ID NO: 158659 - RNA, 19 nt, Homo sapiens
  misc_RNA (1)...(19): siRNA sense strand
acguggagcugcugugcaa

SEQ ID NO: 158660 - RNA, 19 nt, Homo sapiens
  misc_RNA (1)...(19): siRNA sense strand
agauggaggugaugaagcu

SEQ ID NO: 158661 - RNA, 19 nt, Homo sapiens
  misc_RNA (1)...(19): siRNA sense strand
ccaugaucguccugcagaa

SEQ ID NO: 158662 - RNA, 19 nt, Homo sapiens
  misc_RNA (1)...(19): siRNA sense strand
uccaccacauugacuacua

SEQ ID NO: 158663 - RNA, 19 nt, Homo sapiens
  misc_RNA (1)...(19): siRNA sense strand
gcugaucggccgacacaag

SEQ ID NO: 158664 - RNA, 19 nt, Homo sapiens
  misc_RNA (1)...(19): siRNA sense strand
gauggacaggccuuucaug

SEQ ID NO: 158665 - RNA, 19 nt, Homo sapiens
  misc_RNA (1)...(19): siRNA sense strand
aaagacugcagacaucaau

SEQ ID NO: 158666 - RNA, 19 nt, Homo sapiens
  misc_RNA (1)...(19): siRNA sense strand
ccauagggaccucucgaau

SEQ ID NO: 158667 - RNA, 19 nt, Homo sapiens
  misc_RNA (1)...(19): siRNA sense strand
uauaacuaccugcuagaug

SEQ ID NO: 158668 - RNA, 19 nt, Homo sapiens
  misc_RNA (1)...(19): siRNA sense strand
uccaguggcugaagcacau

SEQ ID NO: 158669 - RNA, 19 nt, Homo sapiens
  misc_RNA (1)...(19): siRNA sense strand
ggccgucucugaggaguac

SEQ ID NO: 158670 - RNA, 19 nt, Homo sapiens
  misc_RNA (1)...(19): siRNA sense strand
agacugcagacaucaauag

SEQ ID NO: 158671 - RNA, 19 nt, Homo sapiens
  misc_RNA (1)...(19): siRNA sense strand
ugaggacaaugugaugaag

SEQ ID NO: 158672 - RNA, 19 nt, Homo sapiens
  misc_RNA (1)...(19): siRNA sense strand
gaugaagauugcugacuuu

SEQ ID NO: 158673 - RNA, 19 nt, Homo sapiens
  misc_RNA (1)...(19): siRNA sense strand
gcacuggagucucgugaug

SEQ ID NO: 158674 - RNA, 19 nt, Homo sapiens
  misc_RNA (1)...(19): siRNA sense strand
gaaccgcauuggaggcauu

SEQ ID NO: 158675 - RNA, 19 nt, Homo sapiens
  misc_RNA (1)...(19): siRNA sense strand
ucaagaugcucaaagacaa

SEQ ID NO: 158676 - RNA, 19 nt, Homo sapiens
  misc_RNA (1)...(19): siRNA sense strand
cauagggaccucucgaaua

SEQ ID NO: 158677 - RNA, 19 nt, Homo sapiens
  misc_RNA (1)...(19): siRNA sense strand
cacauugacuacuauaaga

SEQ ID NO: 158678 - RNA, 19 nt, Homo sapiens
  misc_RNA (1)...(19): siRNA sense strand
ccuaaagacugcagacauc

SEQ ID NO: 158679 - RNA, 19 nt, Homo sapiens
  misc_RNA (1)...(19): siRNA sense strand
ugaugaagauugcugacuu

SEQ ID NO: 158680 - RNA, 19 nt, Homo sapiens
  misc_RNA (1)...(19): siRNA sense strand
auagggaccucucgaauag

SEQ ID NO: 158681 - RNA, 19 nt, Homo sapiens
  misc_RNA (1)...(19): siRNA sense strand
ucaaagacaacgccucuga

SEQ ID NO: 158682 - RNA, 19 nt, Homo sapiens
  misc_RNA (1)...(19): siRNA sense strand
auaacuaccugcuagaugu

SEQ ID NO: 158683 - RNA, 19 nt, Homo sapiens
  misc_RNA (1)...(19): siRNA sense strand
gggcugcuuuggccaggua

SEQ ID NO: 158684 - RNA, 19 nt, Homo sapiens
  misc_RNA (1)...(19): siRNA sense strand
ugaagcacaucgucaucaa

SEQ ID NO: 158685 - RNA, 19 nt, Homo sapiens
  misc_RNA (1)...(19): siRNA sense strand
gaacaucaucaaccugcuu

SEQ ID NO: 158686 - RNA, 19 nt, Homo sapiens
  misc_RNA (1)...(19): siRNA sense strand
agagugacguguggucuuu

SEQ ID NO: 158687 - RNA, 19 nt, Homo sapiens
  misc_RNA (1)...(19): siRNA sense strand
ccaccacauugacuacuau

SEQ ID NO: 158688 - RNA, 19 nt, Homo sapiens
  misc_RNA (1)...(19): siRNA sense strand
acaccugccugguagagaa

SEQ ID NO: 158689 - RNA, 19 nt, Homo sapiens
  misc_RNA (1)...(19): siRNA sense strand
gccuagagauugccagcuu

SEQ ID NO: 158690 - RNA, 19 nt, Homo sapiens
  misc_RNA (1)...(19): siRNA sense strand
gagcaggagcugacaguag

SEQ ID NO: 158691 - RNA, 19 nt, Homo sapiens
  misc_RNA (1)...(19): siRNA sense strand
ccagaggccuaccuucaag

SEQ ID NO: 158692 - RNA, 19 nt, Homo sapiens
  misc_RNA (1)...(19): siRNA sense strand
ccucgugagucuagaucua

SEQ ID NO: 158693 - RNA, 19 nt, Homo sapiens
  misc_RNA (1)...(19): siRNA sense strand
ucucgaauaggcacaguua

SEQ ID NO: 158694 - RNA, 19 nt, Homo sapiens
  misc_RNA (1)...(19): siRNA sense strand
gcauucggcugcgccauca

SEQ ID NO: 158695 - RNA, 19 nt, Homo sapiens
  misc_RNA (1)...(19): siRNA sense strand
agacaacgccucugacaag

SEQ ID NO: 158696 - RNA, 19 nt, Homo sapiens
  misc_RNA (1)...(19): siRNA sense strand
gcacuguggccgucaagau

SEQ ID NO: 158697 - RNA, 19 nt, Homo sapiens
  misc_RNA (1)...(19): siRNA sense strand
ccacauugacuacuauaag

SEQ ID NO: 158698 - RNA, 19 nt, Homo sapiens
  misc_RNA (1)...(19): siRNA sense strand
cacauacaccugccuggua

SEQ ID NO: 158699 - RNA, 19 nt, Homo sapiens
  misc_RNA (1)...(19): siRNA sense strand
ccgucaagaugcucaaaga

SEQ ID NO: 158700 - RNA, 19 nt, Homo sapiens
  misc_RNA (1)...(19): siRNA sense strand
cugaggaaguggagcuuga

SEQ ID NO: 158701 - RNA, 19 nt, Homo sapiens
  misc_RNA (1)...(19): siRNA sense strand
gcuggugacugaggacaau

SEQ ID NO: 158702 - RNA, 19 nt, Homo sapiens
  misc_RNA (1)...(19): siRNA sense strand
ugcagaaucucaccuugau

SEQ ID NO: 158703 - RNA, 19 nt, Homo sapiens
  misc_RNA (1)...(19): siRNA sense strand
acaagaacaucaucaaccu

SEQ ID NO: 158704 - RNA, 19 nt, Homo sapiens
  misc_RNA (1)...(19): siRNA sense strand
guacgaggcgugcgucucu

SEQ ID NO: 158705 - RNA, 19 nt, Homo sapiens
  misc_RNA (1)...(19): siRNA sense strand
uggaggcgcuggacaaggu

SEQ ID NO: 158706 - RNA, 19 nt, Homo sapiens
  misc_RNA (1)...(19): siRNA sense strand
gucaagcucaucccuggua

SEQ ID NO: 158707 - RNA, 19 nt, Homo sapiens
  misc_RNA (1)...(19): siRNA sense strand
cuccagcgauucugucuuc

SEQ ID NO: 158708 - RNA, 19 nt, Homo sapiens
  misc_RNA (1)...(19): siRNA sense strand
gacacaagaacaucaucaa

SEQ ID NO: 158709 - RNA, 19 nt, Homo sapiens
  misc_RNA (1)...(19): siRNA sense strand
gaggacaaugugaugaaga

SEQ ID NO: 158710 - RNA, 19 nt, Homo sapiens
  misc_RNA (1)...(19): siRNA sense strand
cgacacaagaacaucauca

SEQ ID NO: 158711 - RNA, 19 nt, Homo sapiens
  misc_RNA (1)...(19): siRNA sense strand
ggacaaugugaugaagauu

SEQ ID NO: 158712 - RNA, 19 nt, Homo sapiens
  misc_RNA (1)...(19): siRNA sense strand
uaaagacugcagacaucaa

SEQ ID NO: 158713 - RNA, 19 nt, Homo sapiens
  misc_RNA (1)...(19): siRNA sense strand
aggacaaugugaugaagau

SEQ ID NO: 158714 - RNA, 19 nt, Homo sapiens
  misc_RNA (1)...(19): siRNA sense strand
aaagacaacgccucugaca

SEQ ID NO: 158715 - RNA, 19 nt, Homo sapiens
  misc_RNA (1)...(19): siRNA sense strand
agagauugccagcuuccua

SEQ ID NO: 158716 - RNA, 19 nt, Homo sapiens
  misc_RNA (1)...(19): siRNA sense strand
ugacugaggacaaugugau

SEQ ID NO: 158717 - RNA, 19 nt, Homo sapiens
  misc_RNA (1)...(19): siRNA sense strand
uaucuggagucccggaagu

SEQ ID NO: 158718 - RNA, 19 nt, Homo sapiens
  misc_RNA (1)...(19): siRNA sense strand
agggaaaccugcgggaguu

SEQ ID NO: 158719 - RNA, 19 nt, Homo sapiens
  misc_RNA (1)...(19): siRNA sense strand
ggagauggaggugaugaag

SEQ ID NO: 158720 - RNA, 19 nt, Homo sapiens
  misc_RNA (1)...(19): siRNA sense strand
gucaagaugcucaaagaca

SEQ ID NO: 158721 - RNA, 19 nt, Homo sapiens
  misc_RNA (1)...(19): siRNA sense strand
acguggagcugcugugcaa

SEQ ID NO: 158722 - RNA, 19 nt, Homo sapiens
  misc_RNA (1)...(19): siRNA sense strand
agauggaggugaugaagcu

SEQ ID NO: 158723 - RNA, 19 nt, Homo sapiens
  misc_RNA (1)...(19): siRNA sense strand
ccaugaucguccugcagaa

SEQ ID NO: 158724 - RNA, 19 nt, Homo sapiens
  misc_RNA (1)...(19): siRNA sense strand
uccaccacauugacuacua

SEQ ID NO: 158725 - RNA, 19 nt, Homo sapiens
  misc_RNA (1)...(19): siRNA sense strand
gcugaucggccgacacaag

SEQ ID NO: 158726 - RNA, 19 nt, Homo sapiens
  misc_RNA (1)...(19): siRNA sense strand
gauggacaggccuuucaug

SEQ ID NO: 158727 - RNA, 19 nt, Homo sapiens
  misc_RNA (1)...(19): siRNA sense strand
aaagacugcagacaucaau

SEQ ID NO: 158728 - RNA, 19 nt, Homo sapiens
  misc_RNA (1)...(19): siRNA sense strand
ccauagggaccucucgaau

SEQ ID NO: 158729 - RNA, 19 nt, Homo sapiens
  misc_RNA (1)...(19): siRNA sense strand
uauaacuaccugcuagaug

SEQ ID NO: 158730 - RNA, 19 nt, Homo sapiens
  misc_RNA (1)...(19): siRNA sense strand
uccaguggcugaagcacau

SEQ ID NO: 158731 - RNA, 19 nt, Homo sapiens
  misc_RNA (1)...(19): siRNA sense strand
ggccgucucugaggaguac

SEQ ID NO: 158732 - RNA, 19 nt, Homo sapiens
  misc_RNA (1)...(19): siRNA sense strand
agacugcagacaucaauag

SEQ ID NO: 158733 - RNA, 19 nt, Homo sapiens
  misc_RNA (1)...(19): siRNA sense strand
ugaggacaaugugaugaag

SEQ ID NO: 158734 - RNA, 19 nt, Homo sapiens
  misc_RNA (1)...(19): siRNA sense strand
caggaaggcuggagacuuu

SEQ ID NO: 158735 - RNA, 19 nt, Homo sapiens
  misc_RNA (1)...(19): siRNA sense strand
ggaaugacagcaucuauga

SEQ ID NO: 158736 - RNA, 19 nt, Homo sapiens
  misc_RNA (1)...(19): siRNA sense strand
gaacuguccuucgcucuug

SEQ ID NO: 158737 - RNA, 19 nt, Homo sapiens
  misc_RNA (1)...(19): siRNA sense strand
ugaaguggccgauuuguuu

SEQ ID NO: 158738 - RNA, 19 nt, Homo sapiens
  misc_RNA (1)...(19): siRNA sense strand
caagcccucuguaguguuu

SEQ ID NO: 158739 - RNA, 19 nt, Homo sapiens
  misc_RNA (1)...(19): siRNA sense strand
gaauaggaaaccuguggua

SEQ ID NO: 158740 - RNA, 19 nt, Homo sapiens
  misc_RNA (1)...(19): siRNA sense strand
cugaugaaguggccgauuu

SEQ ID NO: 158741 - RNA, 19 nt, Homo sapiens
  misc_RNA (1)...(19): siRNA sense strand
guccuucgcucuugugaau

SEQ ID NO: 158742 - RNA, 19 nt, Homo sapiens
  misc_RNA (1)...(19): siRNA sense strand
caucaagcccucuguagug

SEQ ID NO: 158743 - RNA, 19 nt, Homo sapiens
  misc_RNA (1)...(19): siRNA sense strand
guucagauuuggccaacau

SEQ ID NO: 158744 - RNA, 19 nt, Homo sapiens
  misc_RNA (1)...(19): siRNA sense strand
augaggagcuccagaaaca

SEQ ID NO: 158745 - RNA, 19 nt, Homo sapiens
  misc_RNA (1)...(19): siRNA sense strand
gaggagcuccagaaacaug

SEQ ID NO: 158746 - RNA, 19 nt, Homo sapiens
  misc_RNA (1)...(19): siRNA sense strand
ggagaucagaggaggaaau

SEQ ID NO: 158747 - RNA, 19 nt, Homo sapiens
  misc_RNA (1)...(19): siRNA sense strand
gaaguggccgauuuguuuc

SEQ ID NO: 158748 - RNA, 19 nt, Homo sapiens
  misc_RNA (1)...(19): siRNA sense strand
ggaccucucucaccuuuuc

SEQ ID NO: 158749 - RNA, 19 nt, Homo sapiens
  misc_RNA (1)...(19): siRNA sense strand
ugaccugcguccugaugaa

SEQ ID NO: 158750 - RNA, 19 nt, Homo sapiens
  misc_RNA (1)...(19): siRNA sense strand
ugggaccucucucaccuuu

SEQ ID NO: 158751 - RNA, 19 nt, Homo sapiens
  misc_RNA (1)...(19): siRNA sense strand
gagaucagaggaggaaaug

SEQ ID NO: 158752 - RNA, 19 nt, Homo sapiens
  misc_RNA (1)...(19): siRNA sense strand
ggaggaaauggcagcagaa

SEQ ID NO: 158753 - RNA, 19 nt, Homo sapiens
  misc_RNA (1)...(19): siRNA sense strand
uaggaaaccugugguacca

SEQ ID NO: 158754 - RNA, 19 nt, Homo sapiens
  misc_RNA (1)...(19): siRNA sense strand
gcgggucuacuuucaguga

SEQ ID NO: 158755 - RNA, 19 nt, Homo sapiens
  misc_RNA (1)...(19): siRNA sense strand
ggaaggcuggagacuuuca

SEQ ID NO: 158756 - RNA, 19 nt, Homo sapiens
  misc_RNA (1)...(19): siRNA sense strand
cuggagacuuucacaggaa

SEQ ID NO: 158757 - RNA, 19 nt, Homo sapiens
  misc_RNA (1)...(19): siRNA sense strand
gagacuuucacaggaauga

SEQ ID NO: 158758 - RNA, 19 nt, Homo sapiens
  misc_RNA (1)...(19): siRNA sense strand
ccuucgcucuugugaauag

SEQ ID NO: 158759 - RNA, 19 nt, Homo sapiens
  misc_RNA (1)...(19): siRNA sense strand
ucuaugaggagcuccagaa

SEQ ID NO: 158760 - RNA, 19 nt, Homo sapiens
  misc_RNA (1)...(19): siRNA sense strand
gcucugcgggucuacuuuc

SEQ ID NO: 158761 - RNA, 19 nt, Homo sapiens
  misc_RNA (1)...(19): siRNA sense strand
uggccaacaucucaucaag

SEQ ID NO: 158762 - RNA, 19 nt, Homo sapiens
  misc_RNA (1)...(19): siRNA sense strand
ugaugaaguggccgauuug

SEQ ID NO: 158763 - RNA, 19 nt, Homo sapiens
  misc_RNA (1)...(19): siRNA sense strand
caggaaugacagcaucuau

SEQ ID NO: 158764 - RNA, 19 nt, Homo sapiens
  misc_RNA (1)...(19): siRNA sense strand
caucaaagcucgaguugua

SEQ ID NO: 158765 - RNA, 19 nt, Homo sapiens
  misc_RNA (1)...(19): siRNA sense strand
ggaaaacucugucauauuu

SEQ ID NO: 158766 - RNA, 19 nt, Homo sapiens
  misc_RNA (1)...(19): siRNA sense strand
ggagaugucuuguuacuca

SEQ ID NO: 158767 - RNA, 19 nt, Homo sapiens
  misc_RNA (1)...(19): siRNA sense strand
gcacuggcuuucuuacuaa

SEQ ID NO: 158768 - RNA, 19 nt, Homo sapiens
  misc_RNA (1)...(19): siRNA sense strand
ggaaauuaaugcaaggaaa

SEQ ID NO: 158769 - RNA, 19 nt, Homo sapiens
  misc_RNA (1)...(19): siRNA sense strand
caaacuaugugccaaauuc

SEQ ID NO: 158770 - RNA, 19 nt, Homo sapiens
  misc_RNA (1)...(19): siRNA sense strand
ugaaagaguuugugcuaaa

SEQ ID NO: 158771 - RNA, 19 nt, Homo sapiens
  misc_RNA (1)...(19): siRNA sense strand
cagaacauguugagaaauu

SEQ ID NO: 158772 - RNA, 19 nt, Homo sapiens
  misc_RNA (1)...(19): siRNA sense strand
gaaagaguuugugcuaaau

SEQ ID NO: 158773 - RNA, 19 nt, Homo sapiens
  misc_RNA (1)...(19): siRNA sense strand
uagaugaacuccugaccua

SEQ ID NO: 158774 - RNA, 19 nt, Homo sapiens
  misc_RNA (1)...(19): siRNA sense strand
gaugaacuccugaccuaua

SEQ ID NO: 158775 - RNA, 19 nt, Homo sapiens
  misc_RNA (1)...(19): siRNA sense strand
ggaagagccuauugacauc

SEQ ID NO: 158776 - RNA, 19 nt, Homo sapiens
  misc_RNA (1)...(19): siRNA sense strand
cugcaaggcuuuacaauca

SEQ ID NO: 158777 - RNA, 19 nt, Homo sapiens
  misc_RNA (1)...(19): siRNA sense strand
uuucauagccggcaauaua

SEQ ID NO: 158778 - RNA, 19 nt, Homo sapiens
  misc_RNA (1)...(19): siRNA sense strand
caugauaccuacaggagaa

SEQ ID NO: 158779 - RNA, 19 nt, Homo sapiens
  misc_RNA (1)...(19): siRNA sense strand
caauauaagcauccagaua

SEQ ID NO: 158780 - RNA, 19 nt, Homo sapiens
  misc_RNA (1)...(19): siRNA sense strand
gaaacacauucaauucaag

SEQ ID NO: 158781 - RNA, 19 nt, Homo sapiens
  misc_RNA (1)...(19): siRNA sense strand
ugaccuauaucaaugcaaa

SEQ ID NO: 158782 - RNA, 19 nt, Homo sapiens
  misc_RNA (1)...(19): siRNA sense strand
gagcccaccugcuuugaga

SEQ ID NO: 158783 - RNA, 19 nt, Homo sapiens
  misc_RNA (1)...(19): siRNA sense strand
caccgaacauguugaagaa

SEQ ID NO: 158784 - RNA, 19 nt, Homo sapiens
  misc_RNA (1)...(19): siRNA sense strand
gcaaggcuuuacaaucaga

SEQ ID NO: 158785 - RNA, 19 nt, Homo sapiens
  misc_RNA (1)...(19): siRNA sense strand
caaaggaagagccuauuga

SEQ ID NO: 158786 - RNA, 19 nt, Homo sapiens
  misc_RNA (1)...(19): siRNA sense strand
gagauucaccgaacauguu

SEQ ID NO: 158787 - RNA, 19 nt, Homo sapiens
  misc_RNA (1)...(19): siRNA sense strand
ugaugagucuguagugaaa

SEQ ID NO: 158788 - RNA, 19 nt, Homo sapiens
  misc_RNA (1)...(19): siRNA sense strand
agacaggacucagcugaaa

SEQ ID NO: 158789 - RNA, 19 nt, Homo sapiens
  misc_RNA (1)...(19): siRNA sense strand
ucaugcaaauuacggcuua

SEQ ID NO: 158790 - RNA, 19 nt, Homo sapiens
  misc_RNA (1)...(19): siRNA sense strand
gaccaaagucugcagugua

SEQ ID NO: 158791 - RNA, 19 nt, Homo sapiens
  misc_RNA (1)...(19): siRNA sense strand
ggucugcacuggcuuucuu

SEQ ID NO: 158792 - RNA, 19 nt, Homo sapiens
  misc_RNA (1)...(19): siRNA sense strand
gagccagucucuacaaguc

SEQ ID NO: 158793 - RNA, 19 nt, Homo sapiens
  misc_RNA (1)...(19): siRNA sense strand
gaaauuaaugcaaggaaag

SEQ ID NO: 158794 - RNA, 19 nt, Homo sapiens
  misc_RNA (1)...(19): siRNA sense strand
gcugaaagaguuugugcua

SEQ ID NO: 158795 - RNA, 19 nt, Homo sapiens
  misc_RNA (1)...(19): siRNA sense strand
accaaagucugcaguguaa

SEQ ID NO: 158796 - RNA, 19 nt, Homo sapiens
  misc_RNA (1)...(19): siRNA sense strand
auaaacaacuggcucaauc

SEQ ID NO: 158797 - RNA, 19 nt, Homo sapiens
  misc_RNA (1)...(19): siRNA sense strand
caagugcugucuggaagaa

SEQ ID NO: 158798 - RNA, 19 nt, Homo sapiens
  misc_RNA (1)...(19): siRNA sense strand
gaacuccugaccuauauca

SEQ ID NO: 158799 - RNA, 19 nt, Homo sapiens
  misc_RNA (1)...(19): siRNA sense strand
aaugggagguggucacuau

SEQ ID NO: 158800 - RNA, 19 nt, Homo sapiens
  misc_RNA (1)...(19): siRNA sense strand
guacaagagucuccaucuc

SEQ ID NO: 158801 - RNA, 19 nt, Homo sapiens
  misc_RNA (1)...(19): siRNA sense strand
ucacauacauagaugaacu

SEQ ID NO: 158802 - RNA, 19 nt, Homo sapiens
  misc_RNA (1)...(19): siRNA sense strand
caccaagugucaugauaga

SEQ ID NO: 158803 - RNA, 19 nt, Homo sapiens
  misc_RNA (1)...(19): siRNA sense strand
ggugaucagccgaaucuuu

SEQ ID NO: 158804 - RNA, 19 nt, Homo sapiens
  misc_RNA (1)...(19): siRNA sense strand
cagaagauuauccaaacua

SEQ ID NO: 158805 - RNA, 19 nt, Homo sapiens
  misc_RNA (1)...(19): siRNA sense strand
gaacauucaaggucaucaa

SEQ ID NO: 158806 - RNA, 19 nt, Homo sapiens
  misc_RNA (1)...(19): siRNA sense strand
caagcgaguugccauugug

SEQ ID NO: 158807 - RNA, 19 nt, Homo sapiens
  misc_RNA (1)...(19): siRNA sense strand
guaacaaaaugcucagauu

SEQ ID NO: 158808 - RNA, 19 nt, Homo sapiens
  misc_RNA (1)...(19): siRNA sense strand
ccacuuugaccuucugaaa

SEQ ID NO: 158809 - RNA, 19 nt, Homo sapiens
  misc_RNA (1)...(19): siRNA sense strand
gcucugaccgucuucuuug

SEQ ID NO: 158810 - RNA, 19 nt, Homo sapiens
  misc_RNA (1)...(19): siRNA sense strand
aagaguuugugcuaaauga

SEQ ID NO: 158811 - RNA, 19 nt, Homo sapiens
  misc_RNA (1)...(19): siRNA sense strand
gcucaaucaugcaaauuac

SEQ ID NO: 158812 - RNA, 19 nt, Homo sapiens
  misc_RNA (1)...(19): siRNA sense strand
ggcucaaucaugcaaauua

SEQ ID NO: 158813 - RNA, 19 nt, Homo sapiens
  misc_RNA (1)...(19): siRNA sense strand
guugauggagcgaaagaua

SEQ ID NO: 158814 - RNA, 19 nt, Homo sapiens
  misc_RNA (1)...(19): siRNA sense strand
ugcacuggcuuucuuacua

SEQ ID NO: 158815 - RNA, 19 nt, Homo sapiens
  misc_RNA (1)...(19): siRNA sense strand
gugaucagccgaaucuuug

SEQ ID NO: 158816 - RNA, 19 nt, Homo sapiens
  misc_RNA (1)...(19): siRNA sense strand
aggccucacuguacaagua

SEQ ID NO: 158817 - RNA, 19 nt, Homo sapiens
  misc_RNA (1)...(19): siRNA sense strand
gaagauuauccaaacuaug

SEQ ID NO: 158818 - RNA, 19 nt, Homo sapiens
  misc_RNA (1)...(19): siRNA sense strand
acaagucugugguuuccaa

SEQ ID NO: 158819 - RNA, 19 nt, Homo sapiens
  misc_RNA (1)...(19): siRNA sense strand
aacccaaccuguucucuau

SEQ ID NO: 158820 - RNA, 19 nt, Homo sapiens
  misc_RNA (1)...(19): siRNA sense strand
gcauccagauauauuuaag

SEQ ID NO: 158821 - RNA, 19 nt, Homo sapiens
  misc_RNA (1)...(19): siRNA sense strand
ccaagcgaguugccauugu

SEQ ID NO: 158822 - RNA, 19 nt, Homo sapiens
  misc_RNA (1)...(19): siRNA sense strand
gauaaacaacuggcucaau

SEQ ID NO: 158823 - RNA, 19 nt, Homo sapiens
  misc_RNA (1)...(19): siRNA sense strand
gccacuggauacacauuug

SEQ ID NO: 158824 - RNA, 19 nt, Homo sapiens
  misc_RNA (1)...(19): siRNA sense strand
ggagauucaccgaacaugu

SEQ ID NO: 158825 - RNA, 19 nt, Homo sapiens
  misc_RNA (1)...(19): siRNA sense strand
caucaagugcugucuggaa

SEQ ID NO: 158826 - RNA, 19 nt, Homo sapiens
  misc_RNA (1)...(19): siRNA sense strand
uggcuuugcuuguggcuau

SEQ ID NO: 158827 - RNA, 19 nt, Homo sapiens
  misc_RNA (1)...(19): siRNA sense strand
uaucuucccugcacaucug

SEQ ID NO: 158828 - RNA, 19 nt, Homo sapiens
  misc_RNA (1)...(19): siRNA sense strand
ucaaaggaagagccuauug

SEQ ID NO: 158829 - RNA, 19 nt, Homo sapiens
  misc_RNA (1)...(19): siRNA sense strand
ugauggagcgaaagauaaa

SEQ ID NO: 158830 - RNA, 19 nt, Homo sapiens
  misc_RNA (1)...(19): siRNA sense strand
uucagaacauguugagaaa

SEQ ID NO: 158831 - RNA, 19 nt, Homo sapiens
  misc_RNA (1)...(19): siRNA sense strand
ggauuccuuuccagguauu

SEQ ID NO: 158832 - RNA, 19 nt, Homo sapiens
  misc_RNA (1)...(19): siRNA sense strand
ucaccgaacauguugaaga

SEQ ID NO: 158833 - RNA, 19 nt, Homo sapiens
  misc_RNA (1)...(19): siRNA sense strand
ucacuaugcaugaagagaa

SEQ ID NO: 158834 - RNA, 19 nt, Homo sapiens
  misc_RNA (1)...(19): siRNA sense strand
caaagucugcaguguaaca

SEQ ID NO: 158835 - RNA, 19 nt, Homo sapiens
  misc_RNA (1)...(19): siRNA sense strand
cugaaagaguuugugcuaa

SEQ ID NO: 158836 - RNA, 19 nt, Homo sapiens
  misc_RNA (1)...(19): siRNA sense strand
uaaguuaccaccaccaagu

SEQ ID NO: 158837 - RNA, 19 nt, Homo sapiens
  misc_RNA (1)...(19): siRNA sense strand
guucaucaggccaagcaua

SEQ ID NO: 158838 - RNA, 19 nt, Homo sapiens
  misc_RNA (1)...(19): siRNA sense strand
ccauaccaguuccgcuuga

SEQ ID NO: 158839 - RNA, 19 nt, Homo sapiens
  misc_RNA (1)...(19): siRNA sense strand
uuacucagacuuuccauuc

SEQ ID NO: 158840 - RNA, 19 nt, Homo sapiens
  misc_RNA (1)...(19): siRNA sense strand
cccagaagauuauccaaac

SEQ ID NO: 158841 - RNA, 19 nt, Homo sapiens
  misc_RNA (1)...(19): siRNA sense strand
ggucaucaaagcucgaguu

SEQ ID NO: 158842 - RNA, 19 nt, Homo sapiens
  misc_RNA (1)...(19): siRNA sense strand
agccagaaaugccaucaug

SEQ ID NO: 158843 - RNA, 19 nt, Homo sapiens
  misc_RNA (1)...(19): siRNA sense strand
aaacccaaccuguucucua

SEQ ID NO: 158844 - RNA, 19 nt, Homo sapiens
  misc_RNA (1)...(19): siRNA sense strand
acuuugaccuucugaaaca

SEQ ID NO: 158845 - RNA, 19 nt, Homo sapiens
  misc_RNA (1)...(19): siRNA sense strand
ccagugggaccgaacauuc

SEQ ID NO: 158846 - RNA, 19 nt, Homo sapiens
  misc_RNA (1)...(19): siRNA sense strand
caagcucggugggcuguuc

SEQ ID NO: 158847 - RNA, 19 nt, Homo sapiens
  misc_RNA (1)...(19): siRNA sense strand
uaaacaacuggcucaauca

SEQ ID NO: 158848 - RNA, 19 nt, Homo sapiens
  misc_RNA (1)...(19): siRNA sense strand
gagaguccuugugauugga

SEQ ID NO: 158849 - RNA, 19 nt, Homo sapiens
  misc_RNA (1)...(19): siRNA sense strand
agagaguccuugugauugg

SEQ ID NO: 158850 - RNA, 19 nt, Homo sapiens
  misc_RNA (1)...(19): siRNA sense strand
gguggucacuaugcaugaa

SEQ ID NO: 158851 - RNA, 19 nt, Homo sapiens
  misc_RNA (1)...(19): siRNA sense strand
uuucagaacauguugagaa

SEQ ID NO: 158852 - RNA, 19 nt, Homo sapiens
  misc_RNA (1)...(19): siRNA sense strand
cuccugaccuauaucaaug

SEQ ID NO: 158853 - RNA, 19 nt, Homo sapiens
  misc_RNA (1)...(19): siRNA sense strand
ugacacgcuuucagaacau

SEQ ID NO: 158854 - RNA, 19 nt, Homo sapiens
  misc_RNA (1)...(19): siRNA sense strand
gagucuccaucucccuuug

SEQ ID NO: 158855 - RNA, 19 nt, Homo sapiens
  misc_RNA (1)...(19): siRNA sense strand
ccagaagauuauccaaacu

SEQ ID NO: 158856 - RNA, 19 nt, Homo sapiens
  misc_RNA (1)...(19): siRNA sense strand
gucaugauagaggaaauua

SEQ ID NO: 158857 - RNA, 19 nt, Homo sapiens
  misc_RNA (1)...(19): siRNA sense strand
gaagagccuauugacauca

SEQ ID NO: 158858 - RNA, 19 nt, Homo sapiens
  misc_RNA (1)...(19): siRNA sense strand
aggaagagccuauugacau

SEQ ID NO: 158859 - RNA, 19 nt, Homo sapiens
  misc_RNA (1)...(19): siRNA sense strand
aaaggaaaacucugucaua

SEQ ID NO: 158860 - RNA, 19 nt, Homo sapiens
  misc_RNA (1)...(19): siRNA sense strand
gaguuugugcuaaaugaug

SEQ ID NO: 158861 - RNA, 19 nt, Homo sapiens
  misc_RNA (1)...(19): siRNA sense strand
gagcgaaagauaaacaacu

SEQ ID NO: 158862 - RNA, 19 nt, Homo sapiens
  misc_RNA (1)...(19): siRNA sense strand
gggagguggucacuaugca

SEQ ID NO: 158863 - RNA, 19 nt, Homo sapiens
  misc_RNA (1)...(19): siRNA sense strand
aaggagaugucuuguuacu

SEQ ID NO: 158864 - RNA, 19 nt, Homo sapiens
  misc_RNA (1)...(19): siRNA sense strand
gaaaggaaguugaauaaga

SEQ ID NO: 158865 - RNA, 19 nt, Homo sapiens
  misc_RNA (1)...(19): siRNA sense strand
guaaggaaaugucauguua

SEQ ID NO: 158866 - RNA, 19 nt, Homo sapiens
  misc_RNA (1)...(19): siRNA sense strand
caagaaaguugcagugauu

SEQ ID NO: 158867 - RNA, 19 nt, Homo sapiens
  misc_RNA (1)...(19): siRNA sense strand
acaagaagaugcuguaguu

SEQ ID NO: 158868 - RNA, 19 nt, Homo sapiens
  misc_RNA (1)...(19): siRNA sense strand
gggacuaucuccaagaauu

SEQ ID NO: 158869 - RNA, 19 nt, Homo sapiens
  misc_RNA (1)...(19): siRNA sense strand
ucaugaggauuauggauua

SEQ ID NO: 158870 - RNA, 19 nt, Homo sapiens
  misc_RNA (1)...(19): siRNA sense strand
acaaaugucuguaaggaaa

SEQ ID NO: 158871 - RNA, 19 nt, Homo sapiens
  misc_RNA (1)...(19): siRNA sense strand
ugagagaagugaugacauu

SEQ ID NO: 158872 - RNA, 19 nt, Homo sapiens
  misc_RNA (1)...(19): siRNA sense strand
gaucuucacuacaggauau

SEQ ID NO: 158873 - RNA, 19 nt, Homo sapiens
  misc_RNA (1)...(19): siRNA sense strand
caagaaaggaaguugaaua

SEQ ID NO: 158874 - RNA, 19 nt, Homo sapiens
  misc_RNA (1)...(19): siRNA sense strand
ugauaucgcugccugcaua

SEQ ID NO: 158875 - RNA, 19 nt, Homo sapiens
  misc_RNA (1)...(19): siRNA sense strand
aaauagagcugucuuugau

SEQ ID NO: 158876 - RNA, 19 nt, Homo sapiens
  misc_RNA (1)...(19): siRNA sense strand
caaaggacucuguaagaua

SEQ ID NO: 158877 - RNA, 19 nt, Homo sapiens
  misc_RNA (1)...(19): siRNA sense strand
agaaaccucugcugucuuu

SEQ ID NO: 158878 - RNA, 19 nt, Homo sapiens
  misc_RNA (1)...(19): siRNA sense strand
aagcaagucuuucccuuaa

SEQ ID NO: 158879 - RNA, 19 nt, Homo sapiens
  misc_RNA (1)...(19): siRNA sense strand
uaaaggauccaucuuauca

SEQ ID NO: 158880 - RNA, 19 nt, Homo sapiens
  misc_RNA (1)...(19): siRNA sense strand
ugaaauuggugagagauaa

SEQ ID NO: 158881 - RNA, 19 nt, Homo sapiens
  misc_RNA (1)...(19): siRNA sense strand
ugacuucccuuuccacgaa

SEQ ID NO: 158882 - RNA, 19 nt, Homo sapiens
  misc_RNA (1)...(19): siRNA sense strand
gauuggagcuggugugagu

SEQ ID NO: 158883 - RNA, 19 nt, Homo sapiens
  misc_RNA (1)...(19): siRNA sense strand
gacagaacauugaaaccuu

SEQ ID NO: 158884 - RNA, 19 nt, Homo sapiens
  misc_RNA (1)...(19): siRNA sense strand
ggaaaugucauguuacagu

SEQ ID NO: 158885 - RNA, 19 nt, Homo sapiens
  misc_RNA (1)...(19): siRNA sense strand
cagacuagcuugggaaguu

SEQ ID NO: 158886 - RNA, 19 nt, Homo sapiens
  misc_RNA (1)...(19): siRNA sense strand
gaaaaggaacagcucauua

SEQ ID NO: 158887 - RNA, 19 nt, Homo sapiens
  misc_RNA (1)...(19): siRNA sense strand
caagcaagucuuucccuua

SEQ ID NO: 158888 - RNA, 19 nt, Homo sapiens
  misc_RNA (1)...(19): siRNA sense strand
acuuugaccuccugaaaua

SEQ ID NO: 158889 - RNA, 19 nt, Homo sapiens
  misc_RNA (1)...(19): siRNA sense strand
gaaauuggugagagauaaa

SEQ ID NO: 158890 - RNA, 19 nt, Homo sapiens
  misc_RNA (1)...(19): siRNA sense strand
gggcuauccuuauaauaug

SEQ ID NO: 158891 - RNA, 19 nt, Homo sapiens
  misc_RNA (1)...(19): siRNA sense strand
gagcccaccugcuuugaga

SEQ ID NO: 158892 - RNA, 19 nt, Homo sapiens
  misc_RNA (1)...(19): siRNA sense strand
ggacuaucuccaagaauuu

SEQ ID NO: 158893 - RNA, 19 nt, Homo sapiens
  misc_RNA (1)...(19): siRNA sense strand
ccucaaggaucccagacua

SEQ ID NO: 158894 - RNA, 19 nt, Homo sapiens
  misc_RNA (1)...(19): siRNA sense strand
ucaaaggacucuguaagau

SEQ ID NO: 158895 - RNA, 19 nt, Homo sapiens
  misc_RNA (1)...(19): siRNA sense strand
gcacuuugaccuccugaaa

SEQ ID NO: 158896 - RNA, 19 nt, Homo sapiens
  misc_RNA (1)...(19): siRNA sense strand
uaaacuggauucaagaaag

SEQ ID NO: 158897 - RNA, 19 nt, Homo sapiens
  misc_RNA (1)...(19): siRNA sense strand
ggaaguugaauaagagauu

SEQ ID NO: 158898 - RNA, 19 nt, Homo sapiens
  misc_RNA (1)...(19): siRNA sense strand
caagaucccagaaggcuuu

SEQ ID NO: 158899 - RNA, 19 nt, Homo sapiens
  misc_RNA (1)...(19): siRNA sense strand
gcaagucuuucccuuaaac

SEQ ID NO: 158900 - RNA, 19 nt, Homo sapiens
  misc_RNA (1)...(19): siRNA sense strand
uaacgaagcguccagacuu

SEQ ID NO: 158901 - RNA, 19 nt, Homo sapiens
  misc_RNA (1)...(19): siRNA sense strand
aaaccagcgugauugaauu

SEQ ID NO: 158902 - RNA, 19 nt, Homo sapiens
  misc_RNA (1)...(19): siRNA sense strand
agaagaugcuguaguuuua

SEQ ID NO: 158903 - RNA, 19 nt, Homo sapiens
  misc_RNA (1)...(19): siRNA sense strand
ggucagauccugcauaguc

SEQ ID NO: 158904 - RNA, 19 nt, Homo sapiens
  misc_RNA (1)...(19): siRNA sense strand
ccaagaaaguugcagugau

SEQ ID NO: 158905 - RNA, 19 nt, Homo sapiens
  misc_RNA (1)...(19): siRNA sense strand
aaaggaaguugaauaagag

SEQ ID NO: 158906 - RNA, 19 nt, Homo sapiens
  misc_RNA (1)...(19): siRNA sense strand
gaacacuggaggagacauu

SEQ ID NO: 158907 - RNA, 19 nt, Homo sapiens
  misc_RNA (1)...(19): siRNA sense strand
gauuaaguauuaccaaagg

SEQ ID NO: 158908 - RNA, 19 nt, Homo sapiens
  misc_RNA (1)...(19): siRNA sense strand
acagaacauugaaaccuuu

SEQ ID NO: 158909 - RNA, 19 nt, Homo sapiens
  misc_RNA (1)...(19): siRNA sense strand
aaaggacucuguaagauac

SEQ ID NO: 158910 - RNA, 19 nt, Homo sapiens
  misc_RNA (1)...(19): siRNA sense strand
gucuauaagucauuaguga

SEQ ID NO: 158911 - RNA, 19 nt, Homo sapiens
  misc_RNA (1)...(19): siRNA sense strand
gauuauggaaguuuacuga

SEQ ID NO: 158912 - RNA, 19 nt, Homo sapiens
  misc_RNA (1)...(19): siRNA sense strand
cuuaaaggauccaucuuau

SEQ ID NO: 158913 - RNA, 19 nt, Homo sapiens
  misc_RNA (1)...(19): siRNA sense strand
gcaaacgcgucuuggugau

SEQ ID NO: 158914 - RNA, 19 nt, Homo sapiens
  misc_RNA (1)...(19): siRNA sense strand
gcacuggacauuuccugaa

SEQ ID NO: 158915 - RNA, 19 nt, Homo sapiens
  misc_RNA (1)...(19): siRNA sense strand
ggugagagauaaacuacag

SEQ ID NO: 158916 - RNA, 19 nt, Homo sapiens
  misc_RNA (1)...(19): siRNA sense strand
gaccauguacuccuuauca

SEQ ID NO: 158917 - RNA, 19 nt, Homo sapiens
  misc_RNA (1)...(19): siRNA sense strand
gaugagcugccaaacugua

SEQ ID NO: 158918 - RNA, 19 nt, Homo sapiens
  misc_RNA (1)...(19): siRNA sense strand
cuacuugccucucuucuac

SEQ ID NO: 158919 - RNA, 19 nt, Homo sapiens
  misc_RNA (1)...(19): siRNA sense strand
ggucacaagaguauucaaa

SEQ ID NO: 158920 - RNA, 19 nt, Homo sapiens
  misc_RNA (1)...(19): siRNA sense strand
gguuugcacuggacauuuc

SEQ ID NO: 158921 - RNA, 19 nt, Homo sapiens
  misc_RNA (1)...(19): siRNA sense strand
aaacgcgucuuggugauug

SEQ ID NO: 158922 - RNA, 19 nt, Homo sapiens
  misc_RNA (1)...(19): siRNA sense strand
cagggucuauaagucauua

SEQ ID NO: 158923 - RNA, 19 nt, Homo sapiens
  misc_RNA (1)...(19): siRNA sense strand
aaggaaaugucauguuaca

SEQ ID NO: 158924 - RNA, 19 nt, Homo sapiens
  misc_RNA (1)...(19): siRNA sense strand
ugacuacauugccuacaug

SEQ ID NO: 158925 - RNA, 19 nt, Homo sapiens
  misc_RNA (1)...(19): siRNA sense strand
ucacaagaguauucaaagg

SEQ ID NO: 158926 - RNA, 19 nt, Homo sapiens
  misc_RNA (1)...(19): siRNA sense strand
uauggaaguuuacugaauc

SEQ ID NO: 158927 - RNA, 19 nt, Homo sapiens
  misc_RNA (1)...(19): siRNA sense strand
gaaaguugcagugauugga

SEQ ID NO: 158928 - RNA, 19 nt, Homo sapiens
  misc_RNA (1)...(19): siRNA sense strand
gauuggggcuauccuuaua

SEQ ID NO: 158929 - RNA, 19 nt, Homo sapiens
  misc_RNA (1)...(19): siRNA sense strand
cuugggcgcucuucagauu

SEQ ID NO: 158930 - RNA, 19 nt, Homo sapiens
  misc_RNA (1)...(19): siRNA sense strand
ucagugggauguugucaca

SEQ ID NO: 158931 - RNA, 19 nt, Homo sapiens
  misc_RNA (1)...(19): siRNA sense strand
aaaggaacagcucauuaaa

SEQ ID NO: 158932 - RNA, 19 nt, Homo sapiens
  misc_RNA (1)...(19): siRNA sense strand
guaagucuuuggcgaggau

SEQ ID NO: 158933 - RNA, 19 nt, Homo sapiens
  misc_RNA (1)...(19): siRNA sense strand
caccagcaaagacaaauuu

SEQ ID NO: 158934 - RNA, 19 nt, Homo sapiens
  misc_RNA (1)...(19): siRNA sense strand
uuucuaaacuggauucaag

SEQ ID NO: 158935 - RNA, 19 nt, Homo sapiens
  misc_RNA (1)...(19): siRNA sense strand
uaugaugguuacaagaaga

SEQ ID NO: 158936 - RNA, 19 nt, Homo sapiens
  misc_RNA (1)...(19): siRNA sense strand
gaggauuauggauuaagua

SEQ ID NO: 158937 - RNA, 19 nt, Homo sapiens
  misc_RNA (1)...(19): siRNA sense strand
caucaaaugcuguguggau

SEQ ID NO: 158938 - RNA, 19 nt, Homo sapiens
  misc_RNA (1)...(19): siRNA sense strand
gccaaacuguauccucugu

SEQ ID NO: 158939 - RNA, 19 nt, Homo sapiens
  misc_RNA (1)...(19): siRNA sense strand
aaacuggauucaagaaagg

SEQ ID NO: 158940 - RNA, 19 nt, Homo sapiens
  misc_RNA (1)...(19): siRNA sense strand
cguccagacuucuccgaaa

SEQ ID NO: 158941 - RNA, 19 nt, Homo sapiens
  misc_RNA (1)...(19): siRNA sense strand
gaugauggaggcuacugaa

SEQ ID NO: 158942 - RNA, 19 nt, Homo sapiens
  misc_RNA (1)...(19): siRNA sense strand
augaugagcugccaaacug

SEQ ID NO: 158943 - RNA, 19 nt, Homo sapiens
  misc_RNA (1)...(19): siRNA sense strand
caaguucugccuucacguu

SEQ ID NO: 158944 - RNA, 19 nt, Homo sapiens
  misc_RNA (1)...(19): siRNA sense strand
ggcuauccuuauaauauga

SEQ ID NO: 158945 - RNA, 19 nt, Homo sapiens
  misc_RNA (1)...(19): siRNA sense strand
aaaaggaacagcucauuaa

SEQ ID NO: 158946 - RNA, 19 nt, Homo sapiens
  misc_RNA (1)...(19): siRNA sense strand
uaaacuacaggacagaaug

SEQ ID NO: 158947 - RNA, 19 nt, Homo sapiens
  misc_RNA (1)...(19): siRNA sense strand
agacuagcuugggaaguuu

SEQ ID NO: 158948 - RNA, 19 nt, Homo sapiens
  misc_RNA (1)...(19): siRNA sense strand
uuaaagacaccagcaaaga

SEQ ID NO: 158949 - RNA, 19 nt, Homo sapiens
  misc_RNA (1)...(19): siRNA sense strand
caugaggauuauggauuaa

SEQ ID NO: 158950 - RNA, 19 nt, Homo sapiens
  misc_RNA (1)...(19): siRNA sense strand
ggacagaacauugaaaccu

SEQ ID NO: 158951 - RNA, 19 nt, Homo sapiens
  misc_RNA (1)...(19): siRNA sense strand
cuacauugccuacauggau

SEQ ID NO: 158952 - RNA, 19 nt, Homo sapiens
  misc_RNA (1)...(19): siRNA sense strand
aaaagccucuguacaaaga

SEQ ID NO: 158953 - RNA, 19 nt, Homo sapiens
  misc_RNA (1)...(19): siRNA sense strand
ugaaugaugagcugccaaa

SEQ ID NO: 158954 - RNA, 19 nt, Homo sapiens
  misc_RNA (1)...(19): siRNA sense strand
ugaggauuauggauuaagu

SEQ ID NO: 158955 - RNA, 19 nt, Homo sapiens
  misc_RNA (1)...(19): siRNA sense strand
cagaacauugaaaccuuua

SEQ ID NO: 158956 - RNA, 19 nt, Homo sapiens
  misc_RNA (1)...(19): siRNA sense strand
cagcaucccacuucuguuc

SEQ ID NO: 158957 - RNA, 19 nt, Homo sapiens
  misc_RNA (1)...(19): siRNA sense strand
cagcgugauugaauuuaca

SEQ ID NO: 158958 - RNA, 19 nt, Homo sapiens
  misc_RNA (1)...(19): siRNA sense strand
ggauuaaguauuaccaaag

SEQ ID NO: 158959 - RNA, 19 nt, Homo sapiens
  misc_RNA (1)...(19): siRNA sense strand
caagaagaugcuguaguuu

SEQ ID NO: 158960 - RNA, 19 nt, Homo sapiens
  misc_RNA (1)...(19): siRNA sense strand
gauaaacuacaggacagaa

SEQ ID NO: 158961 - RNA, 19 nt, Homo sapiens
  misc_RNA (1)...(19): siRNA sense strand
cacaagaguauucaaagga

SEQ ID NO: 158962 - RNA, 19 nt, Homo sapiens
  misc_RNA (1)...(19): siRNA sense strand
cuagagagagcgacauuag

SEQ ID NO: 158963 - RNA, 19 nt, Homo sapiens
  misc_RNA (1)...(19): siRNA sense strand
caaaugcuguguggaugag

SEQ ID NO: 158964 - RNA, 19 nt, Homo sapiens
  misc_RNA (1)...(19): siRNA sense strand
gcaauaggaucaaugaguu

SEQ ID NO: 158965 - RNA, 19 nt, Homo sapiens
  misc_RNA (1)...(19): siRNA sense strand
gaagugggcaguuccauga

SEQ ID NO: 158966 - RNA, 19 nt, Homo sapiens
  misc_RNA (1)...(19): siRNA sense strand
ccacagggcugcucuggau

SEQ ID NO: 158967 - RNA, 19 nt, Homo sapiens
  misc_RNA (1)...(19): siRNA sense strand
gaaggcgucuuugacaaug

SEQ ID NO: 158968 - RNA, 19 nt, Homo sapiens
  misc_RNA (1)...(19): siRNA sense strand
guacauggagcacaacaau

SEQ ID NO: 158969 - RNA, 19 nt, Homo sapiens
  misc_RNA (1)...(19): siRNA sense strand
acaaccagcugcagaagau

SEQ ID NO: 158970 - RNA, 19 nt, Homo sapiens
  misc_RNA (1)...(19): siRNA sense strand
ggaaggcgucuuugacaau

SEQ ID NO: 158971 - RNA, 19 nt, Homo sapiens
  misc_RNA (1)...(19): siRNA sense strand
gugauaaggugggcaggaa

SEQ ID NO: 158972 - RNA, 19 nt, Homo sapiens
  misc_RNA (1)...(19): siRNA sense strand
cgcccaagcugcuguaugu

SEQ ID NO: 158973 - RNA, 19 nt, Homo sapiens
  misc_RNA (1)...(19): siRNA sense strand
ucaaguaccugcccuucgu

SEQ ID NO: 158974 - RNA, 19 nt, Homo sapiens
  misc_RNA (1)...(19): siRNA sense strand
gcagccagcaguccaccua

SEQ ID NO: 158975 - RNA, 19 nt, Homo sapiens
  misc_RNA (1)...(19): siRNA sense strand
acaacagucuaaccaacaa

SEQ ID NO: 158976 - RNA, 19 nt, Homo sapiens
  misc_RNA (1)...(19): siRNA sense strand
gaucaccuccauccaggaa

SEQ ID NO: 158977 - RNA, 19 nt, Homo sapiens
  misc_RNA (1)...(19): siRNA sense strand
ucaaugaguucuccaucag

SEQ ID NO: 158978 - RNA, 19 nt, Homo sapiens
  misc_RNA (1)...(19): siRNA sense strand
gaaccucacggccuuguac

SEQ ID NO: 158979 - RNA, 19 nt, Homo sapiens
  misc_RNA (1)...(19): siRNA sense strand
cuaugacccuuacccguau

SEQ ID NO: 158980 - RNA, 19 nt, Homo sapiens
  misc_RNA (1)...(19): siRNA sense strand
ggcaauaggaucaaugagu

SEQ ID NO: 158981 - RNA, 19 nt, Homo sapiens
  misc_RNA (1)...(19): siRNA sense strand
gagcuagaccucuccuaca

SEQ ID NO: 158982 - RNA, 19 nt, Homo sapiens
  misc_RNA (1)...(19): siRNA sense strand
ggcuguaccuggaccacaa

SEQ ID NO: 158983 - RNA, 19 nt, Homo sapiens
  misc_RNA (1)...(19): siRNA sense strand
uugagcagcuguacaugga

SEQ ID NO: 158984 - RNA, 19 nt, Homo sapiens
  misc_RNA (1)...(19): siRNA sense strand
acgaugagauccaggaagu

SEQ ID NO: 158985 - RNA, 19 nt, Homo sapiens
  misc_RNA (1)...(19): siRNA sense strand
ugcuggaccugaguuauaa

SEQ ID NO: 158986 - RNA, 19 nt, Homo sapiens
  misc_RNA (1)...(19): siRNA sense strand
gcaguccaccuacuacgau

SEQ ID NO: 158987 - RNA, 19 nt, Homo sapiens
  misc_RNA (1)...(19): siRNA sense strand
gacaaucgcaaccucaagu

SEQ ID NO: 158988 - RNA, 19 nt, Homo sapiens
  misc_RNA (1)...(19): siRNA sense strand
ccaaggcaauaggaucaau

SEQ ID NO: 158989 - RNA, 19 nt, Homo sapiens
  misc_RNA (1)...(19): siRNA sense strand
uugcuggaccugaguuaua

SEQ ID NO: 158990 - RNA, 19 nt, Homo sapiens
  misc_RNA (1)...(19): siRNA sense strand
cgacugcccacccaacuuc

SEQ ID NO: 158991 - RNA, 19 nt, Homo sapiens
  misc_RNA (1)...(19): siRNA sense strand
gcagccuccuugagcuaga

SEQ ID NO: 158992 - RNA, 19 nt, Homo sapiens
  misc_RNA (1)...(19): siRNA sense strand
cuacuacgaucccuaugac

SEQ ID NO: 158993 - RNA, 19 nt, Homo sapiens
  misc_RNA (1)...(19): siRNA sense strand
ggccauguacugugacaau

SEQ ID NO: 158994 - RNA, 19 nt, Homo sapiens
  misc_RNA (1)...(19): siRNA sense strand
gccagcaguccaccuacua

SEQ ID NO: 158995 - RNA, 19 nt, Homo sapiens
  misc_RNA (1)...(19): siRNA sense strand
caggaaggcgucuuugaca

SEQ ID NO: 158996 - RNA, 19 nt, Homo sapiens
  misc_RNA (1)...(19): siRNA sense strand
uauguguacuuccagaaca

SEQ ID NO: 158997 - RNA, 19 nt, Homo sapiens
  misc_RNA (1)...(19): siRNA sense strand
cauccaggaaggcgucuuu

SEQ ID NO: 158998 - RNA, 19 nt, Homo sapiens
  misc_RNA (1)...(19): siRNA sense strand
aggaaggcgucuuugacaa

SEQ ID NO: 158999 - RNA, 19 nt, Homo sapiens
  misc_RNA (1)...(19): siRNA sense strand
agcuagaccucuccuacaa

SEQ ID NO: 159000 - RNA, 19 nt, Homo sapiens
  misc_RNA (1)...(19): siRNA sense strand
acaaucgcaaccucaagua

SEQ ID NO: 159001 - RNA, 19 nt, Homo sapiens
  misc_RNA (1)...(19): siRNA sense strand
acaccaaccuggagaaccu

SEQ ID NO: 159002 - RNA, 19 nt, Homo sapiens
  misc_RNA (1)...(19): siRNA sense strand
ccuccaacaccuucaauuc

SEQ ID NO: 159003 - RNA, 19 nt, Homo sapiens
  misc_RNA (1)...(19): siRNA sense strand
gugcggcugucccacaaca

SEQ ID NO: 159004 - RNA, 19 nt, Homo sapiens
  misc_RNA (1)...(19): siRNA sense strand
acaaccagaucaccuccau

SEQ ID NO: 159005 - RNA, 19 nt, Homo sapiens
  misc_RNA (1)...(19): siRNA sense strand
ccuacuacgaucccuauga

SEQ ID NO: 159006 - RNA, 19 nt, Homo sapiens
  misc_RNA (1)...(19): siRNA sense strand
cagcagccuccuugagcua

SEQ ID NO: 159007 - RNA, 19 nt, Homo sapiens
  misc_RNA (1)...(19): siRNA sense strand
caaggcaauaggaucaaug

SEQ ID NO: 159008 - RNA, 19 nt, Homo sapiens
  misc_RNA (1)...(19): siRNA sense strand
ggacgggaacgagaucaag

SEQ ID NO: 159009 - RNA, 19 nt, Homo sapiens
  misc_RNA (1)...(19): siRNA sense strand
caauaggaucaaugaguuc

SEQ ID NO: 159010 - RNA, 19 nt, Homo sapiens
  misc_RNA (1)...(19): siRNA sense strand
gccauguacugugacaauc

SEQ ID NO: 159011 - RNA, 19 nt, Homo sapiens
  misc_RNA (1)...(19): siRNA sense strand
uccaacaccuucaauucca

SEQ ID NO: 159012 - RNA, 19 nt, Homo sapiens
  misc_RNA (1)...(19): siRNA sense strand
ggccuccggucacugaucu

SEQ ID NO: 159013 - RNA, 19 nt, Homo sapiens
  misc_RNA (1)...(19): siRNA sense strand
cuacgagccuuaccccuau

SEQ ID NO: 159014 - RNA, 19 nt, Homo sapiens
  misc_RNA (1)...(19): siRNA sense strand
cacaacagucuaaccaaca

SEQ ID NO: 159015 - RNA, 19 nt, Homo sapiens
  misc_RNA (1)...(19): siRNA sense strand
guaccuggaccacaacaac

SEQ ID NO: 159016 - RNA, 19 nt, Homo sapiens
  misc_RNA (1)...(19): siRNA sense strand
ggagucagcugccaagaga

SEQ ID NO: 159017 - RNA, 19 nt, Homo sapiens
  misc_RNA (1)...(19): siRNA sense strand
ggagacaccuggagcaaga

SEQ ID NO: 159018 - RNA, 19 nt, Homo sapiens
  misc_RNA (1)...(19): siRNA sense strand
ccacagccaucucacauuu

SEQ ID NO: 159019 - RNA, 19 nt, Homo sapiens
  misc_RNA (1)...(19): siRNA sense strand
gaagagacuugcuuugaca

SEQ ID NO: 159020 - RNA, 19 nt, Homo sapiens
  misc_RNA (1)...(19): siRNA sense strand
gcaaaccgcugccaugaag

SEQ ID NO: 159021 - RNA, 19 nt, Homo sapiens
  misc_RNA (1)...(19): siRNA sense strand
gcacaacuucgaauuauga

SEQ ID NO: 159022 - RNA, 19 nt, Homo sapiens
  misc_RNA (1)...(19): siRNA sense strand
gaguaaaccugaagcugaa

SEQ ID NO: 159023 - RNA, 19 nt, Homo sapiens
  misc_RNA (1)...(19): siRNA sense strand
caucucacauuuccaagua

SEQ ID NO: 159024 - RNA, 19 nt, Homo sapiens
  misc_RNA (1)...(19): siRNA sense strand
gaggaaaucugcacaacca

SEQ ID NO: 159025 - RNA, 19 nt, Homo sapiens
  misc_RNA (1)...(19): siRNA sense strand
gaagagacaacaugaagug

SEQ ID NO: 159026 - RNA, 19 nt, Homo sapiens
  misc_RNA (1)...(19): siRNA sense strand
cgagaucagugcauuguug

SEQ ID NO: 159027 - RNA, 19 nt, Homo sapiens
  misc_RNA (1)...(19): siRNA sense strand
ggacaugcauugccuacuc

SEQ ID NO: 159028 - RNA, 19 nt, Homo sapiens
  misc_RNA (1)...(19): siRNA sense strand
gcaaugcguugguuuguac

SEQ ID NO: 159029 - RNA, 19 nt, Homo sapiens
  misc_RNA (1)...(19): siRNA sense strand
gcccauagcugagaagugu

SEQ ID NO: 159030 - RNA, 19 nt, Homo sapiens
  misc_RNA (1)...(19): siRNA sense strand
cagcacaacuucgaauuau

SEQ ID NO: 159031 - RNA, 19 nt, Homo sapiens
  misc_RNA (1)...(19): siRNA sense strand
ggaccacacagaacuauga

SEQ ID NO: 159032 - RNA, 19 nt, Homo sapiens
  misc_RNA (1)...(19): siRNA sense strand
ggucaguccuacaagauug

SEQ ID NO: 159033 - RNA, 19 nt, Homo sapiens
  misc_RNA (1)...(19): siRNA sense strand
gacuggugguuacauguua

SEQ ID NO: 159034 - RNA, 19 nt, Homo sapiens
  misc_RNA (1)...(19): siRNA sense strand
aaagcaagcccgguuguua

SEQ ID NO: 159035 - RNA, 19 nt, Homo sapiens
  misc_RNA (1)...(19): siRNA sense strand
gaaggcagcggacgcauca

SEQ ID NO: 159036 - RNA, 19 nt, Homo sapiens
  misc_RNA (1)...(19): siRNA sense strand
gagugugugugucuuggua

SEQ ID NO: 159037 - RNA, 19 nt, Homo sapiens
  misc_RNA (1)...(19): siRNA sense strand
gaaaucugcacaaccaaug

SEQ ID NO: 159038 - RNA, 19 nt, Homo sapiens
  misc_RNA (1)...(19): siRNA sense strand
gaacgacacauuccacaag

SEQ ID NO: 159039 - RNA, 19 nt, Homo sapiens
  misc_RNA (1)...(19): siRNA sense strand
ccacaagcgucaugaagag

SEQ ID NO: 159040 - RNA, 19 nt, Homo sapiens
  misc_RNA (1)...(19): siRNA sense strand
ggaggaagccgagguuuua

SEQ ID NO: 159041 - RNA, 19 nt, Homo sapiens
  misc_RNA (1)...(19): siRNA sense strand
ccaugugucuuaccauuca

SEQ ID NO: 159042 - RNA, 19 nt, Homo sapiens
  misc_RNA (1)...(19): siRNA sense strand
gaggcaggcucagcaaaug

SEQ ID NO: 159043 - RNA, 19 nt, Homo sapiens
  misc_RNA (1)...(19): siRNA sense strand
gaggagaguggaaguguga

SEQ ID NO: 159044 - RNA, 19 nt, Homo sapiens
  misc_RNA (1)...(19): siRNA sense strand
gcuggaugaugguagauug

SEQ ID NO: 159045 - RNA, 19 nt, Homo sapiens
  misc_RNA (1)...(19): siRNA sense strand
gcaagcccauagcugagaa

SEQ ID NO: 159046 - RNA, 19 nt, Homo sapiens
  misc_RNA (1)...(19): siRNA sense strand
ccuaaagacuccaugaucu

SEQ ID NO: 159047 - RNA, 19 nt, Homo sapiens
  misc_RNA (1)...(19): siRNA sense strand
gcacguguguugggaaugg

SEQ ID NO: 159048 - RNA, 19 nt, Homo sapiens
  misc_RNA (1)...(19): siRNA sense strand
gggaugcaguggcugaaga

SEQ ID NO: 159049 - RNA, 19 nt, Homo sapiens
  misc_RNA (1)...(19): siRNA sense strand
gaaauagaugcaacgauca

SEQ ID NO: 159050 - RNA, 19 nt, Homo sapiens
  misc_RNA (1)...(19): siRNA sense strand
ggcaaugcguugguuugua

SEQ ID NO: 159051 - RNA, 19 nt, Homo sapiens
  misc_RNA (1)...(19): siRNA sense strand
gaaaccugcuccagugcau

SEQ ID NO: 159052 - RNA, 19 nt, Homo sapiens
  misc_RNA (1)...(19): siRNA sense strand
gaagacacaaggaaauaag

SEQ ID NO: 159053 - RNA, 19 nt, Homo sapiens
  misc_RNA (1)...(19): siRNA sense strand
gcagaagagacaacaugaa

SEQ ID NO: 159054 - RNA, 19 nt, Homo sapiens
  misc_RNA (1)...(19): siRNA sense strand
gaaggauaaucgaggaaac

SEQ ID NO: 159055 - RNA, 19 nt, Homo sapiens
  misc_RNA (1)...(19): siRNA sense strand
gagauucaugggagaagua

SEQ ID NO: 159056 - RNA, 19 nt, Homo sapiens
  misc_RNA (1)...(19): siRNA sense strand
ggacgcaucacuugcacuu

SEQ ID NO: 159057 - RNA, 19 nt, Homo sapiens
  misc_RNA (1)...(19): siRNA sense strand
acaaggaaauaagcaaaug

SEQ ID NO: 159058 - RNA, 19 nt, Homo sapiens
  misc_RNA (1)...(19): siRNA sense strand
cgagggagaauaagcugua

SEQ ID NO: 159059 - RNA, 19 nt, Homo sapiens
  misc_RNA (1)...(19): siRNA sense strand
guaugugcauggugucaga

SEQ ID NO: 159060 - RNA, 19 nt, Homo sapiens
  misc_RNA (1)...(19): siRNA sense strand
gggcacaugcugaacugua

SEQ ID NO: 159061 - RNA, 19 nt, Homo sapiens
  misc_RNA (1)...(19): siRNA sense strand
ggaaaucugcacaaccaau

SEQ ID NO: 159062 - RNA, 19 nt, Homo sapiens
  misc_RNA (1)...(19): siRNA sense strand
caaccacaauuacacugau

SEQ ID NO: 159063 - RNA, 19 nt, Homo sapiens
  misc_RNA (1)...(19): siRNA sense strand
ucacuugcacuucuagaaa

SEQ ID NO: 159064 - RNA, 19 nt, Homo sapiens
  misc_RNA (1)...(19): siRNA sense strand
gcugggcgagggagaauaa

SEQ ID NO: 159065 - RNA, 19 nt, Homo sapiens
  misc_RNA (1)...(19): siRNA sense strand
uuacagaccuauccaagcu

SEQ ID NO: 159066 - RNA, 19 nt, Homo sapiens
  misc_RNA (1)...(19): siRNA sense strand
gcaacgaucaggacacaag

SEQ ID NO: 159067 - RNA, 19 nt, Homo sapiens
  misc_RNA (1)...(19): siRNA sense strand
cuuaugagcguccuaaaga

SEQ ID NO: 159068 - RNA, 19 nt, Homo sapiens
  misc_RNA (1)...(19): siRNA sense strand
ggagaaguaugugcauggu

SEQ ID NO: 159069 - RNA, 19 nt, Homo sapiens
  misc_RNA (1)...(19): siRNA sense strand
gggcagaagagacaacaug

SEQ ID NO: 159070 - RNA, 19 nt, Homo sapiens
  misc_RNA (1)...(19): siRNA sense strand
cacaugagacuggugguua

SEQ ID NO: 159071 - RNA, 19 nt, Homo sapiens
  misc_RNA (1)...(19): siRNA sense strand
ugaagagacuugcuuugac

SEQ ID NO: 159072 - RNA, 19 nt, Homo sapiens
  misc_RNA (1)...(19): siRNA sense strand
cagcuguaacccagacuua

SEQ ID NO: 159073 - RNA, 19 nt, Homo sapiens
  misc_RNA (1)...(19): siRNA sense strand
gacuuacgguggcaacuca

SEQ ID NO: 159074 - RNA, 19 nt, Homo sapiens
  misc_RNA (1)...(19): siRNA sense strand
gagaucagugcauuguuga

SEQ ID NO: 159075 - RNA, 19 nt, Homo sapiens
  misc_RNA (1)...(19): siRNA sense strand
gggauaagcagcaugacau

SEQ ID NO: 159076 - RNA, 19 nt, Homo sapiens
  misc_RNA (1)...(19): siRNA sense strand
uggagagccaugugucuua

SEQ ID NO: 159077 - RNA, 19 nt, Homo sapiens
  misc_RNA (1)...(19): siRNA sense strand
ugaagacacaaggaaauaa

SEQ ID NO: 159078 - RNA, 19 nt, Homo sapiens
  misc_RNA (1)...(19): siRNA sense strand
ggagaucagugggauaagc

SEQ ID NO: 159079 - RNA, 19 nt, Homo sapiens
  misc_RNA (1)...(19): siRNA sense strand
cagaagagacaacaugaag

SEQ ID NO: 159080 - RNA, 19 nt, Homo sapiens
  misc_RNA (1)...(19): siRNA sense strand
ggagagccaugugucuuac

SEQ ID NO: 159081 - RNA, 19 nt, Homo sapiens
  misc_RNA (1)...(19): siRNA sense strand
ugagacuggugguuacaug

SEQ ID NO: 159082 - RNA, 19 nt, Homo sapiens
  misc_RNA (1)...(19): siRNA sense strand
gcagcggacgcaucacuug

SEQ ID NO: 159083 - RNA, 19 nt, Homo sapiens
  misc_RNA (1)...(19): siRNA sense strand
ucgaaguauuuaucacuga

SEQ ID NO: 159084 - RNA, 19 nt, Homo sapiens
  misc_RNA (1)...(19): siRNA sense strand
caagugguccugucgaagu

SEQ ID NO: 159085 - RNA, 19 nt, Homo sapiens
  misc_RNA (1)...(19): siRNA sense strand
ggagauucaugggagaagu

SEQ ID NO: 159086 - RNA, 19 nt, Homo sapiens
  misc_RNA (1)...(19): siRNA sense strand
gcugaagacacaaggaaau

SEQ ID NO: 159087 - RNA, 19 nt, Homo sapiens
  misc_RNA (1)...(19): siRNA sense strand
gaucaggacacaaggacau

SEQ ID NO: 159088 - RNA, 19 nt, Homo sapiens
  misc_RNA (1)...(19): siRNA sense strand
caaguacacugggaacacu

SEQ ID NO: 159089 - RNA, 19 nt, Homo sapiens
  misc_RNA (1)...(19): siRNA sense strand
gguuuguacuuguuaugga

SEQ ID NO: 159090 - RNA, 19 nt, Homo sapiens
  misc_RNA (1)...(19): siRNA sense strand
ccauagcugagaaguguuu

SEQ ID NO: 159091 - RNA, 19 nt, Homo sapiens
  misc_RNA (1)...(19): siRNA sense strand
ggaugaugguagauuguac

SEQ ID NO: 159092 - RNA, 19 nt, Homo sapiens
  misc_RNA (1)...(19): siRNA sense strand
ggucauguaccgcauugga

SEQ ID NO: 159093 - RNA, 19 nt, Homo sapiens
  misc_RNA (1)...(19): siRNA sense strand
ggcagaagagacaacauga

SEQ ID NO: 159094 - RNA, 19 nt, Homo sapiens
  misc_RNA (1)...(19): siRNA sense strand
uccaugaucugggacugua

SEQ ID NO: 159095 - RNA, 19 nt, Homo sapiens
  misc_RNA (1)...(19): siRNA sense strand
gaaguauuuaucacugaga

SEQ ID NO: 159096 - RNA, 19 nt, Homo sapiens
  misc_RNA (1)...(19): siRNA sense strand
acacaaggaaauaagcaaa

SEQ ID NO: 159097 - RNA, 19 nt, Homo sapiens
  misc_RNA (1)...(19): siRNA sense strand
gagcaagaaggauaaucga

SEQ ID NO: 159098 - RNA, 19 nt, Homo sapiens
  misc_RNA (1)...(19): siRNA sense strand
ggagcaagaaggauaaucg

SEQ ID NO: 159099 - RNA, 19 nt, Homo sapiens
  misc_RNA (1)...(19): siRNA sense strand
gaggagaccacaugagacu

SEQ ID NO: 159100 - RNA, 19 nt, Homo sapiens
  misc_RNA (1)...(19): siRNA sense strand
cacuugcacuucuagaaau

SEQ ID NO: 159101 - RNA, 19 nt, Homo sapiens
  misc_RNA (1)...(19): siRNA sense strand
aagugguccugucgaagua

SEQ ID NO: 159102 - RNA, 19 nt, Homo sapiens
  misc_RNA (1)...(19): siRNA sense strand
gagcaggaccagaaauacu

SEQ ID NO: 159103 - RNA, 19 nt, Homo sapiens
  misc_RNA (1)...(19): siRNA sense strand
gcaagcccgguuguuauga

SEQ ID NO: 159104 - RNA, 19 nt, Homo sapiens
  misc_RNA (1)...(19): siRNA sense strand
cugaagagacuugcuuuga

SEQ ID NO: 159105 - RNA, 19 nt, Homo sapiens
  misc_RNA (1)...(19): siRNA sense strand
cugaagacacaaggaaaua

SEQ ID NO: 159106 - RNA, 19 nt, Homo sapiens
  misc_RNA (1)...(19): siRNA sense strand
gacauccuauagaauugga

SEQ ID NO: 159107 - RNA, 19 nt, Homo sapiens
  misc_RNA (1)...(19): siRNA sense strand
cauguuagagugugugugu

SEQ ID NO: 159108 - RNA, 19 nt, Homo sapiens
  misc_RNA (1)...(19): siRNA sense strand
gcuucgagaucagugcauu

SEQ ID NO: 159109 - RNA, 19 nt, Homo sapiens
  misc_RNA (1)...(19): siRNA sense strand
caacaaccacaauuacacu

SEQ ID NO: 159110 - RNA, 19 nt, Homo sapiens
  misc_RNA (1)...(19): siRNA sense strand
ugcaguggcugaagacaca

SEQ ID NO: 159111 - RNA, 19 nt, Homo sapiens
  misc_RNA (1)...(19): siRNA sense strand
acuugcacuucuagaaaua

SEQ ID NO: 159112 - RNA, 19 nt, Homo sapiens
  misc_RNA (1)...(19): siRNA sense strand
uggaggagaccacaugaga

SEQ ID NO: 159113 - RNA, 19 nt, Homo sapiens
  misc_RNA (1)...(19): siRNA sense strand
gguccugucgaaguauuua

SEQ ID NO: 159114 - RNA, 19 nt, Homo sapiens
  misc_RNA (1)...(19): siRNA sense strand
aagcaagcccgguuguuau

SEQ ID NO: 159115 - RNA, 19 nt, Homo sapiens
  misc_RNA (1)...(19): siRNA sense strand
gcugagaaguguuuugauc

SEQ ID NO: 159116 - RNA, 19 nt, Homo sapiens
  misc_RNA (1)...(19): siRNA sense strand
ggagucagcugccaagaga

SEQ ID NO: 159117 - RNA, 19 nt, Homo sapiens
  misc_RNA (1)...(19): siRNA sense strand
ggagacaccuggagcaaga

SEQ ID NO: 159118 - RNA, 19 nt, Homo sapiens
  misc_RNA (1)...(19): siRNA sense strand
ccacagccaucucacauuu

SEQ ID NO: 159119 - RNA, 19 nt, Homo sapiens
  misc_RNA (1)...(19): siRNA sense strand
gaagagacuugcuuugaca

SEQ ID NO: 159120 - RNA, 19 nt, Homo sapiens
  misc_RNA (1)...(19): siRNA sense strand
gcaaaccgcugccaugaag

SEQ ID NO: 159121 - RNA, 19 nt, Homo sapiens
  misc_RNA (1)...(19): siRNA sense strand
gcacaacuucgaauuauga

SEQ ID NO: 159122 - RNA, 19 nt, Homo sapiens
  misc_RNA (1)...(19): siRNA sense strand
gaguaaaccugaagcugaa

SEQ ID NO: 159123 - RNA, 19 nt, Homo sapiens
  misc_RNA (1)...(19): siRNA sense strand
caucucacauuuccaagua

SEQ ID NO: 159124 - RNA, 19 nt, Homo sapiens
  misc_RNA (1)...(19): siRNA sense strand
gaggaaaucugcacaacca

SEQ ID NO: 159125 - RNA, 19 nt, Homo sapiens
  misc_RNA (1)...(19): siRNA sense strand
gaagagacaacaugaagug

SEQ ID NO: 159126 - RNA, 19 nt, Homo sapiens
  misc_RNA (1)...(19): siRNA sense strand
cgagaucagugcauuguug

SEQ ID NO: 159127 - RNA, 19 nt, Homo sapiens
  misc_RNA (1)...(19): siRNA sense strand
ggacaugcauugccuacuc

SEQ ID NO: 159128 - RNA, 19 nt, Homo sapiens
  misc_RNA (1)...(19): siRNA sense strand
gcaaugcguugguuuguac

SEQ ID NO: 159129 - RNA, 19 nt, Homo sapiens
  misc_RNA (1)...(19): siRNA sense strand
gcccauagcugagaagugu

SEQ ID NO: 159130 - RNA, 19 nt, Homo sapiens
  misc_RNA (1)...(19): siRNA sense strand
cagcacaacuucgaauuau

SEQ ID NO: 159131 - RNA, 19 nt, Homo sapiens
  misc_RNA (1)...(19): siRNA sense strand
ggaccacacagaacuauga

SEQ ID NO: 159132 - RNA, 19 nt, Homo sapiens
  misc_RNA (1)...(19): siRNA sense strand
ggucaguccuacaagauug

SEQ ID NO: 159133 - RNA, 19 nt, Homo sapiens
  misc_RNA (1)...(19): siRNA sense strand
gacuggugguuacauguua

SEQ ID NO: 159134 - RNA, 19 nt, Homo sapiens
  misc_RNA (1)...(19): siRNA sense strand
aaagcaagcccgguuguua

SEQ ID NO: 159135 - RNA, 19 nt, Homo sapiens
  misc_RNA (1)...(19): siRNA sense strand
gaaggcagcggacgcauca

SEQ ID NO: 159136 - RNA, 19 nt, Homo sapiens
  misc_RNA (1)...(19): siRNA sense strand
gagugugugugucuuggua

SEQ ID NO: 159137 - RNA, 19 nt, Homo sapiens
  misc_RNA (1)...(19): siRNA sense strand
gaaaucugcacaaccaaug

SEQ ID NO: 159138 - RNA, 19 nt, Homo sapiens
  misc_RNA (1)...(19): siRNA sense strand
gaacgacacauuccacaag

SEQ ID NO: 159139 - RNA, 19 nt, Homo sapiens
  misc_RNA (1)...(19): siRNA sense strand
ccacaagcgucaugaagag

SEQ ID NO: 159140 - RNA, 19 nt, Homo sapiens
  misc_RNA (1)...(19): siRNA sense strand
ggaggaagccgagguuuua

SEQ ID NO: 159141 - RNA, 19 nt, Homo sapiens
  misc_RNA (1)...(19): siRNA sense strand
ccaugugucuuaccauuca

SEQ ID NO: 159142 - RNA, 19 nt, Homo sapiens
  misc_RNA (1)...(19): siRNA sense strand
gaggcaggcucagcaaaug

SEQ ID NO: 159143 - RNA, 19 nt, Homo sapiens
  misc_RNA (1)...(19): siRNA sense strand
gaggagaguggaaguguga

SEQ ID NO: 159144 - RNA, 19 nt, Homo sapiens
  misc_RNA (1)...(19): siRNA sense strand
gcuggaugaugguagauug

SEQ ID NO: 159145 - RNA, 19 nt, Homo sapiens
  misc_RNA (1)...(19): siRNA sense strand
gcaagcccauagcugagaa

SEQ ID NO: 159146 - RNA, 19 nt, Homo sapiens
  misc_RNA (1)...(19): siRNA sense strand
ccuaaagacuccaugaucu

SEQ ID NO: 159147 - RNA, 19 nt, Homo sapiens
  misc_RNA (1)...(19): siRNA sense strand
gcacguguguugggaaugg

SEQ ID NO: 159148 - RNA, 19 nt, Homo sapiens
  misc_RNA (1)...(19): siRNA sense strand
gggaugcaguggcugaaga

SEQ ID NO: 159149 - RNA, 19 nt, Homo sapiens
  misc_RNA (1)...(19): siRNA sense strand
gaaauagaugcaacgauca

SEQ ID NO: 159150 - RNA, 19 nt, Homo sapiens
  misc_RNA (1)...(19): siRNA sense strand
ggcaaugcguugguuugua

SEQ ID NO: 159151 - RNA, 19 nt, Homo sapiens
  misc_RNA (1)...(19): siRNA sense strand
gaaaccugcuccagugcau

SEQ ID NO: 159152 - RNA, 19 nt, Homo sapiens
  misc_RNA (1)...(19): siRNA sense strand
gaagacacaaggaaauaag

SEQ ID NO: 159153 - RNA, 19 nt, Homo sapiens
  misc_RNA (1)...(19): siRNA sense strand
gcagaagagacaacaugaa

SEQ ID NO: 159154 - RNA, 19 nt, Homo sapiens
  misc_RNA (1)...(19): siRNA sense strand
gaaggauaaucgaggaaac

SEQ ID NO: 159155 - RNA, 19 nt, Homo sapiens
  misc_RNA (1)...(19): siRNA sense strand
gagauucaugggagaagua

SEQ ID NO: 159156 - RNA, 19 nt, Homo sapiens
  misc_RNA (1)...(19): siRNA sense strand
ggacgcaucacuugcacuu

SEQ ID NO: 159157 - RNA, 19 nt, Homo sapiens
  misc_RNA (1)...(19): siRNA sense strand
acaaggaaauaagcaaaug

SEQ ID NO: 159158 - RNA, 19 nt, Homo sapiens
  misc_RNA (1)...(19): siRNA sense strand
cgagggagaauaagcugua

SEQ ID NO: 159159 - RNA, 19 nt, Homo sapiens
  misc_RNA (1)...(19): siRNA sense strand
guaugugcauggugucaga

SEQ ID NO: 159160 - RNA, 19 nt, Homo sapiens
  misc_RNA (1)...(19): siRNA sense strand
gggcacaugcugaacugua

SEQ ID NO: 159161 - RNA, 19 nt, Homo sapiens
  misc_RNA (1)...(19): siRNA sense strand
ggaaaucugcacaaccaau

SEQ ID NO: 159162 - RNA, 19 nt, Homo sapiens
  misc_RNA (1)...(19): siRNA sense strand
caaccacaauuacacugau

SEQ ID NO: 159163 - RNA, 19 nt, Homo sapiens
  misc_RNA (1)...(19): siRNA sense strand
ucacuugcacuucuagaaa

SEQ ID NO: 159164 - RNA, 19 nt, Homo sapiens
  misc_RNA (1)...(19): siRNA sense strand
gcugggcgagggagaauaa

SEQ ID NO: 159165 - RNA, 19 nt, Homo sapiens
  misc_RNA (1)...(19): siRNA sense strand
uuacagaccuauccaagcu

SEQ ID NO: 159166 - RNA, 19 nt, Homo sapiens
  misc_RNA (1)...(19): siRNA sense strand
gcaacgaucaggacacaag

SEQ ID NO: 159167 - RNA, 19 nt, Homo sapiens
  misc_RNA (1)...(19): siRNA sense strand
cuuaugagcguccuaaaga

SEQ ID NO: 159168 - RNA, 19 nt, Homo sapiens
  misc_RNA (1)...(19): siRNA sense strand
ggagaaguaugugcauggu

SEQ ID NO: 159169 - RNA, 19 nt, Homo sapiens
  misc_RNA (1)...(19): siRNA sense strand
gggcagaagagacaacaug

SEQ ID NO: 159170 - RNA, 19 nt, Homo sapiens
  misc_RNA (1)...(19): siRNA sense strand
cacaugagacuggugguua

SEQ ID NO: 159171 - RNA, 19 nt, Homo sapiens
  misc_RNA (1)...(19): siRNA sense strand
ugaagagacuugcuuugac

SEQ ID NO: 159172 - RNA, 19 nt, Homo sapiens
  misc_RNA (1)...(19): siRNA sense strand
cagcuguaacccagacuua

SEQ ID NO: 159173 - RNA, 19 nt, Homo sapiens
  misc_RNA (1)...(19): siRNA sense strand
gacuuacgguggcaacuca

SEQ ID NO: 159174 - RNA, 19 nt, Homo sapiens
  misc_RNA (1)...(19): siRNA sense strand
gagaucagugcauuguuga

SEQ ID NO: 159175 - RNA, 19 nt, Homo sapiens
  misc_RNA (1)...(19): siRNA sense strand
gggauaagcagcaugacau

SEQ ID NO: 159176 - RNA, 19 nt, Homo sapiens
  misc_RNA (1)...(19): siRNA sense strand
uggagagccaugugucuua

SEQ ID NO: 159177 - RNA, 19 nt, Homo sapiens
  misc_RNA (1)...(19): siRNA sense strand
ugaagacacaaggaaauaa

SEQ ID NO: 159178 - RNA, 19 nt, Homo sapiens
  misc_RNA (1)...(19): siRNA sense strand
ggagaucagugggauaagc

SEQ ID NO: 159179 - RNA, 19 nt, Homo sapiens
  misc_RNA (1)...(19): siRNA sense strand
cagaagagacaacaugaag

SEQ ID NO: 159180 - RNA, 19 nt, Homo sapiens
  misc_RNA (1)...(19): siRNA sense strand
ggagagccaugugucuuac

SEQ ID NO: 159181 - RNA, 19 nt, Homo sapiens
  misc_RNA (1)...(19): siRNA sense strand
ugagacuggugguuacaug

SEQ ID NO: 159182 - RNA, 19 nt, Homo sapiens
  misc_RNA (1)...(19): siRNA sense strand
gcagcggacgcaucacuug

SEQ ID NO: 159183 - RNA, 19 nt, Homo sapiens
  misc_RNA (1)...(19): siRNA sense strand
ucgaaguauuuaucacuga

SEQ ID NO: 159184 - RNA, 19 nt, Homo sapiens
  misc_RNA (1)...(19): siRNA sense strand
caagugguccugucgaagu

SEQ ID NO: 159185 - RNA, 19 nt, Homo sapiens
  misc_RNA (1)...(19): siRNA sense strand
ggagauucaugggagaagu

SEQ ID NO: 159186 - RNA, 19 nt, Homo sapiens
  misc_RNA (1)...(19): siRNA sense strand
gcugaagacacaaggaaau

SEQ ID NO: 159187 - RNA, 19 nt, Homo sapiens
  misc_RNA (1)...(19): siRNA sense strand
gaucaggacacaaggacau

SEQ ID NO: 159188 - RNA, 19 nt, Homo sapiens
  misc_RNA (1)...(19): siRNA sense strand
caaguacacugggaacacu

SEQ ID NO: 159189 - RNA, 19 nt, Homo sapiens
  misc_RNA (1)...(19): siRNA sense strand
gguuuguacuuguuaugga

SEQ ID NO: 159190 - RNA, 19 nt, Homo sapiens
  misc_RNA (1)...(19): siRNA sense strand
ccauagcugagaaguguuu

SEQ ID NO: 159191 - RNA, 19 nt, Homo sapiens
  misc_RNA (1)...(19): siRNA sense strand
ggaugaugguagauuguac

SEQ ID NO: 159192 - RNA, 19 nt, Homo sapiens
  misc_RNA (1)...(19): siRNA sense strand
ggucauguaccgcauugga

SEQ ID NO: 159193 - RNA, 19 nt, Homo sapiens
  misc_RNA (1)...(19): siRNA sense strand
ggcagaagagacaacauga

SEQ ID NO: 159194 - RNA, 19 nt, Homo sapiens
  misc_RNA (1)...(19): siRNA sense strand
uccaugaucugggacugua

SEQ ID NO: 159195 - RNA, 19 nt, Homo sapiens
  misc_RNA (1)...(19): siRNA sense strand
gaaguauuuaucacugaga

SEQ ID NO: 159196 - RNA, 19 nt, Homo sapiens
  misc_RNA (1)...(19): siRNA sense strand
acacaaggaaauaagcaaa

SEQ ID NO: 159197 - RNA, 19 nt, Homo sapiens
  misc_RNA (1)...(19): siRNA sense strand
gagcaagaaggauaaucga

SEQ ID NO: 159198 - RNA, 19 nt, Homo sapiens
  misc_RNA (1)...(19): siRNA sense strand
ggagcaagaaggauaaucg

SEQ ID NO: 159199 - RNA, 19 nt, Homo sapiens
  misc_RNA (1)...(19): siRNA sense strand
gaggagaccacaugagacu

SEQ ID NO: 159200 - RNA, 19 nt, Homo sapiens
  misc_RNA (1)...(19): siRNA sense strand
cacuugcacuucuagaaau

SEQ ID NO: 159201 - RNA, 19 nt, Homo sapiens
  misc_RNA (1)...(19): siRNA sense strand
aagugguccugucgaagua

SEQ ID NO: 159202 - RNA, 19 nt, Homo sapiens
  misc_RNA (1)...(19): siRNA sense strand
gagcaggaccagaaauacu

SEQ ID NO: 159203 - RNA, 19 nt, Homo sapiens
  misc_RNA (1)...(19): siRNA sense strand
gcaagcccgguuguuauga

SEQ ID NO: 159204 - RNA, 19 nt, Homo sapiens
  misc_RNA (1)...(19): siRNA sense strand
cugaagagacuugcuuuga

SEQ ID NO: 159205 - RNA, 19 nt, Homo sapiens
  misc_RNA (1)...(19): siRNA sense strand
cugaagacacaaggaaaua

SEQ ID NO: 159206 - RNA, 19 nt, Homo sapiens
  misc_RNA (1)...(19): siRNA sense strand
gacauccuauagaauugga

SEQ ID NO: 159207 - RNA, 19 nt, Homo sapiens
  misc_RNA (1)...(19): siRNA sense strand
cauguuagagugugugugu

SEQ ID NO: 159208 - RNA, 19 nt, Homo sapiens
  misc_RNA (1)...(19): siRNA sense strand
gcuucgagaucagugcauu

SEQ ID NO: 159209 - RNA, 19 nt, Homo sapiens
  misc_RNA (1)...(19): siRNA sense strand
caacaaccacaauuacacu

SEQ ID NO: 159210 - RNA, 19 nt, Homo sapiens
  misc_RNA (1)...(19): siRNA sense strand
ugcaguggcugaagacaca

SEQ ID NO: 159211 - RNA, 19 nt, Homo sapiens
  misc_RNA (1)...(19): siRNA sense strand
acuugcacuucuagaaaua

SEQ ID NO: 159212 - RNA, 19 nt, Homo sapiens
  misc_RNA (1)...(19): siRNA sense strand
uggaggagaccacaugaga

SEQ ID NO: 159213 - RNA, 19 nt, Homo sapiens
  misc_RNA (1)...(19): siRNA sense strand
gguccugucgaaguauuua

SEQ ID NO: 159214 - RNA, 19 nt, Homo sapiens
  misc_RNA (1)...(19): siRNA sense strand
aagcaagcccgguuguuau

SEQ ID NO: 159215 - RNA, 19 nt, Homo sapiens
  misc_RNA (1)...(19): siRNA sense strand
gcugagaaguguuuugauc

SEQ ID NO: 159216 - RNA, 19 nt, Homo sapiens
  misc_RNA (1)...(19): siRNA sense strand
gaaacagacucuucauauu

SEQ ID NO: 159217 - RNA, 19 nt, Homo sapiens
  misc_RNA (1)...(19): siRNA sense strand
gaaggucuguggaacaaua

SEQ ID NO: 159218 - RNA, 19 nt, Homo sapiens
  misc_RNA (1)...(19): siRNA sense strand
gaagacaucuaugaaucua

SEQ ID NO: 159219 - RNA, 19 nt, Homo sapiens
  misc_RNA (1)...(19): siRNA sense strand
ggaacuacauucacagaga

SEQ ID NO: 159220 - RNA, 19 nt, Homo sapiens
  misc_RNA (1)...(19): siRNA sense strand
gggaaaccaugcuuaaaga

SEQ ID NO: 159221 - RNA, 19 nt, Homo sapiens
  misc_RNA (1)...(19): siRNA sense strand
gaacaauaccacuccagua

SEQ ID NO: 159222 - RNA, 19 nt, Homo sapiens
  misc_RNA (1)...(19): siRNA sense strand
aaauaaagcugccggugaa

SEQ ID NO: 159223 - RNA, 19 nt, Homo sapiens
  misc_RNA (1)...(19): siRNA sense strand
caagaccgguuccuuucua

SEQ ID NO: 159224 - RNA, 19 nt, Homo sapiens
  misc_RNA (1)...(19): siRNA sense strand
gaacuacauucacagagau

SEQ ID NO: 159225 - RNA, 19 nt, Homo sapiens
  misc_RNA (1)...(19): siRNA sense strand
gcagagccgugguucuuug

SEQ ID NO: 159226 - RNA, 19 nt, Homo sapiens
  misc_RNA (1)...(19): siRNA sense strand
guuggaaacuugaagacua

SEQ ID NO: 159227 - RNA, 19 nt, Homo sapiens
  misc_RNA (1)...(19): siRNA sense strand
gcagagaaacaacuauuau

SEQ ID NO: 159228 - RNA, 19 nt, Homo sapiens
  misc_RNA (1)...(19): siRNA sense strand
agaauucucucuuucaguu

SEQ ID NO: 159229 - RNA, 19 nt, Homo sapiens
  misc_RNA (1)...(19): siRNA sense strand
gcaagaauaucuccaaaau

SEQ ID NO: 159230 - RNA, 19 nt, Homo sapiens
  misc_RNA (1)...(19): siRNA sense strand
gaagccauucguaguaaua

SEQ ID NO: 159231 - RNA, 19 nt, Homo sapiens
  misc_RNA (1)...(19): siRNA sense strand
aaacaagaccgguuccuuu

SEQ ID NO: 159232 - RNA, 19 nt, Homo sapiens
  misc_RNA (1)...(19): siRNA sense strand
caugagggcuggugguuug

SEQ ID NO: 159233 - RNA, 19 nt, Homo sapiens
  misc_RNA (1)...(19): siRNA sense strand
gauguauggucauuuggaa

SEQ ID NO: 159234 - RNA, 19 nt, Homo sapiens
  misc_RNA (1)...(19): siRNA sense strand
gaaucuagacacgaaauaa

SEQ ID NO: 159235 - RNA, 19 nt, Homo sapiens
  misc_RNA (1)...(19): siRNA sense strand
aaacagacucuucauauuc

SEQ ID NO: 159236 - RNA, 19 nt, Homo sapiens
  misc_RNA (1)...(19): siRNA sense strand
uaugacaggugcccaggua

SEQ ID NO: 159237 - RNA, 19 nt, Homo sapiens
  misc_RNA (1)...(19): siRNA sense strand
gaagaucagaugcagagaa

SEQ ID NO: 159238 - RNA, 19 nt, Homo sapiens
  misc_RNA (1)...(19): siRNA sense strand
ggaacgaccuacauuugag

SEQ ID NO: 159239 - RNA, 19 nt, Homo sapiens
  misc_RNA (1)...(19): siRNA sense strand
gggaaggucuguggaacaa

SEQ ID NO: 159240 - RNA, 19 nt, Homo sapiens
  misc_RNA (1)...(19): siRNA sense strand
aagaucagaugcagagaaa

SEQ ID NO: 159241 - RNA, 19 nt, Homo sapiens
  misc_RNA (1)...(19): siRNA sense strand
gcaacuacaaggcuauauu

SEQ ID NO: 159242 - RNA, 19 nt, Homo sapiens
  misc_RNA (1)...(19): siRNA sense strand
cauuuggaauccuucuuua

SEQ ID NO: 159243 - RNA, 19 nt, Homo sapiens
  misc_RNA (1)...(19): siRNA sense strand
uuacagaguugaugagaca

SEQ ID NO: 159244 - RNA, 19 nt, Homo sapiens
  misc_RNA (1)...(19): siRNA sense strand
gcuauauuccuucuaacua

SEQ ID NO: 159245 - RNA, 19 nt, Homo sapiens
  misc_RNA (1)...(19): siRNA sense strand
gauguuggcucaaaacuau

SEQ ID NO: 159246 - RNA, 19 nt, Homo sapiens
  misc_RNA (1)...(19): siRNA sense strand
ccuaagacauccaaagcuu

SEQ ID NO: 159247 - RNA, 19 nt, Homo sapiens
  misc_RNA (1)...(19): siRNA sense strand
gaucagaugcagagaaaca

SEQ ID NO: 159248 - RNA, 19 nt, Homo sapiens
  misc_RNA (1)...(19): siRNA sense strand
ccaucugacucaacaggua

SEQ ID NO: 159249 - RNA, 19 nt, Homo sapiens
  misc_RNA (1)...(19): siRNA sense strand
acacugcguuggaaacuug

SEQ ID NO: 159250 - RNA, 19 nt, Homo sapiens
  misc_RNA (1)...(19): siRNA sense strand
uaaggaacgaccuacauuu

SEQ ID NO: 159251 - RNA, 19 nt, Homo sapiens
  misc_RNA (1)...(19): siRNA sense strand
uaagguagauaaugaagac

SEQ ID NO: 159252 - RNA, 19 nt, Homo sapiens
  misc_RNA (1)...(19): siRNA sense strand
caacuacaaggcuauauuc

SEQ ID NO: 159253 - RNA, 19 nt, Homo sapiens
  misc_RNA (1)...(19): siRNA sense strand
ggaauccuucuuuaugaaa

SEQ ID NO: 159254 - RNA, 19 nt, Homo sapiens
  misc_RNA (1)...(19): siRNA sense strand
ggucccagcuccauuugau

SEQ ID NO: 159255 - RNA, 19 nt, Homo sapiens
  misc_RNA (1)...(19): siRNA sense strand
gaaaccaugcuuaaagauc

SEQ ID NO: 159256 - RNA, 19 nt, Homo sapiens
  misc_RNA (1)...(19): siRNA sense strand
ccauuugauuugucguaua

SEQ ID NO: 159257 - RNA, 19 nt, Homo sapiens
  misc_RNA (1)...(19): siRNA sense strand
gcucaaaacuauagacuuc

SEQ ID NO: 159258 - RNA, 19 nt, Homo sapiens
  misc_RNA (1)...(19): siRNA sense strand
auggaagucugcaagaaua

SEQ ID NO: 159259 - RNA, 19 nt, Homo sapiens
  misc_RNA (1)...(19): siRNA sense strand
gauaaugaagaaccuaaga

SEQ ID NO: 159260 - RNA, 19 nt, Homo sapiens
  misc_RNA (1)...(19): siRNA sense strand
caauaccacuccaguagca

SEQ ID NO: 159261 - RNA, 19 nt, Homo sapiens
  misc_RNA (1)...(19): siRNA sense strand
ggaaacuugaagacuauuu

SEQ ID NO: 159262 - RNA, 19 nt, Homo sapiens
  misc_RNA (1)...(19): siRNA sense strand
cuacguggcugaggacaga

SEQ ID NO: 159263 - RNA, 19 nt, Homo sapiens
  misc_RNA (1)...(19): siRNA sense strand
gaacgaccuacauuugaga

SEQ ID NO: 159264 - RNA, 19 nt, Homo sapiens
  misc_RNA (1)...(19): siRNA sense strand
aggcacagauaaugaagaa

SEQ ID NO: 159265 - RNA, 19 nt, Homo sapiens
  misc_RNA (1)...(19): siRNA sense strand
cuaugaaucuagacacgaa

SEQ ID NO: 159266 - RNA, 19 nt, Homo sapiens
  misc_RNA (1)...(19): siRNA sense strand
gaaccuaagacauccaaag

SEQ ID NO: 159267 - RNA, 19 nt, Homo sapiens
  misc_RNA (1)...(19): siRNA sense strand
gaaugcagagccuaaggaa

SEQ ID NO: 159268 - RNA, 19 nt, Homo sapiens
  misc_RNA (1)...(19): siRNA sense strand
ccgagcaggugacaaacuu

SEQ ID NO: 159269 - RNA, 19 nt, Homo sapiens
  misc_RNA (1)...(19): siRNA sense strand
auugggaucuggucaguuu

SEQ ID NO: 159270 - RNA, 19 nt, Homo sapiens
  misc_RNA (1)...(19): siRNA sense strand
gauagaccgcaacuccaua

SEQ ID NO: 159271 - RNA, 19 nt, Homo sapiens
  misc_RNA (1)...(19): siRNA sense strand
gcaaucggaagaucagaug

SEQ ID NO: 159272 - RNA, 19 nt, Homo sapiens
  misc_RNA (1)...(19): siRNA sense strand
uuggaauccuucuuuauga

SEQ ID NO: 159273 - RNA, 19 nt, Homo sapiens
  misc_RNA (1)...(19): siRNA sense strand
cagguucaauggauccaaa

SEQ ID NO: 159274 - RNA, 19 nt, Homo sapiens
  misc_RNA (1)...(19): siRNA sense strand
acacugaacgaauuuguga

SEQ ID NO: 159275 - RNA, 19 nt, Homo sapiens
  misc_RNA (1)...(19): siRNA sense strand
aacagacucuucauauuca

SEQ ID NO: 159276 - RNA, 19 nt, Homo sapiens
  misc_RNA (1)...(19): siRNA sense strand
ggaaugcagagccuaagga

SEQ ID NO: 159277 - RNA, 19 nt, Homo sapiens
  misc_RNA (1)...(19): siRNA sense strand
gguagauaaugaagacauc

SEQ ID NO: 159278 - RNA, 19 nt, Homo sapiens
  misc_RNA (1)...(19): siRNA sense strand
gcauuaaguccgauguaug

SEQ ID NO: 159279 - RNA, 19 nt, Homo sapiens
  misc_RNA (1)...(19): siRNA sense strand
guucaauggauccaaauga

SEQ ID NO: 159280 - RNA, 19 nt, Homo sapiens
  misc_RNA (1)...(19): siRNA sense strand
uggaauccuucuuuaugaa

SEQ ID NO: 159281 - RNA, 19 nt, Homo sapiens
  misc_RNA (1)...(19): siRNA sense strand
gcucugggaguaccuagaa

SEQ ID NO: 159282 - RNA, 19 nt, Homo sapiens
  misc_RNA (1)...(19): siRNA sense strand
ugccagaaauguccucguu

SEQ ID NO: 159283 - RNA, 19 nt, Homo sapiens
  misc_RNA (1)...(19): siRNA sense strand
ccaggucccagcuccauuu

SEQ ID NO: 159284 - RNA, 19 nt, Homo sapiens
  misc_RNA (1)...(19): siRNA sense strand
cuaaggaacgaccuacauu

SEQ ID NO: 159285 - RNA, 19 nt, Homo sapiens
  misc_RNA (1)...(19): siRNA sense strand
gcacagguugccucuggaa

SEQ ID NO: 159286 - RNA, 19 nt, Homo sapiens
  misc_RNA (1)...(19): siRNA sense strand
agacauggcggcacagguu

SEQ ID NO: 159287 - RNA, 19 nt, Homo sapiens
  misc_RNA (1)...(19): siRNA sense strand
caauggauccaaaugacuu

SEQ ID NO: 159288 - RNA, 19 nt, Homo sapiens
  misc_RNA (1)...(19): siRNA sense strand
ucucggaacuacauucaca

SEQ ID NO: 159289 - RNA, 19 nt, Homo sapiens
  misc_RNA (1)...(19): siRNA sense strand
gggaggcacagauaaugaa

SEQ ID NO: 159290 - RNA, 19 nt, Homo sapiens
  misc_RNA (1)...(19): siRNA sense strand
ggaaaccaugcuuaaagau

SEQ ID NO: 159291 - RNA, 19 nt, Homo sapiens
  misc_RNA (1)...(19): siRNA sense strand
cagauaaugaagaaccuaa

SEQ ID NO: 159292 - RNA, 19 nt, Homo sapiens
  misc_RNA (1)...(19): siRNA sense strand
gagggaggcacagauaaug

SEQ ID NO: 159293 - RNA, 19 nt, Homo sapiens
  misc_RNA (1)...(19): siRNA sense strand
ucauuuggaauccuucuuu

SEQ ID NO: 159294 - RNA, 19 nt, Homo sapiens
  misc_RNA (1)...(19): siRNA sense strand
augaagacaucuaugaauc

SEQ ID NO: 159295 - RNA, 19 nt, Homo sapiens
  misc_RNA (1)...(19): siRNA sense strand
gauaaugaagacaucuaug

SEQ ID NO: 159296 - RNA, 19 nt, Homo sapiens
  misc_RNA (1)...(19): siRNA sense strand
cuauauuccuucuaacuac

SEQ ID NO: 159297 - RNA, 19 nt, Homo sapiens
  misc_RNA (1)...(19): siRNA sense strand
uuggaaacuugaagacuau

SEQ ID NO: 159298 - RNA, 19 nt, Homo sapiens
  misc_RNA (1)...(19): siRNA sense strand
uaaagcugccggugaagug

SEQ ID NO: 159299 - RNA, 19 nt, Homo sapiens
  misc_RNA (1)...(19): siRNA sense strand
agacaagucaaccgugauu

SEQ ID NO: 159300 - RNA, 19 nt, Homo sapiens
  misc_RNA (1)...(19): siRNA sense strand
ccucguuggugaacauaau

SEQ ID NO: 159301 - RNA, 19 nt, Homo sapiens
  misc_RNA (1)...(19): siRNA sense strand
gagcaggugacaaacuuca

SEQ ID NO: 159302 - RNA, 19 nt, Homo sapiens
  misc_RNA (1)...(19): siRNA sense strand
caacacugaacgaauuugu

SEQ ID NO: 159303 - RNA, 19 nt, Homo sapiens
  misc_RNA (1)...(19): siRNA sense strand
gaauucucucuuucaguuu

SEQ ID NO: 159304 - RNA, 19 nt, Homo sapiens
  misc_RNA (1)...(19): siRNA sense strand
cuaaucagagaaagugaaa

SEQ ID NO: 159305 - RNA, 19 nt, Homo sapiens
  misc_RNA (1)...(19): siRNA sense strand
ugcagagaaacaacuauua

SEQ ID NO: 159306 - RNA, 19 nt, Homo sapiens
  misc_RNA (1)...(19): siRNA sense strand
aaggaacgaccuacauuug

SEQ ID NO: 159307 - RNA, 19 nt, Homo sapiens
  misc_RNA (1)...(19): siRNA sense strand
ccacagcaauuuuacaaca

SEQ ID NO: 159308 - RNA, 19 nt, Homo sapiens
  misc_RNA (1)...(19): siRNA sense strand
aaauccaucugacucaaca

SEQ ID NO: 159309 - RNA, 19 nt, Homo sapiens
  misc_RNA (1)...(19): siRNA sense strand
cugcaagaauaucuccaaa

SEQ ID NO: 159310 - RNA, 19 nt, Homo sapiens
  misc_RNA (1)...(19): siRNA sense strand
gcaacuccauacagcuucu

SEQ ID NO: 159311 - RNA, 19 nt, Homo sapiens
  misc_RNA (1)...(19): siRNA sense strand
gaggcauggccacuacuuu

SEQ ID NO: 159312 - RNA, 19 nt, Homo sapiens
  misc_RNA (1)...(19): siRNA sense strand
gcuggaaugcagagccuaa

SEQ ID NO: 159313 - RNA, 19 nt, Homo sapiens
  misc_RNA (1)...(19): siRNA sense strand
ugaaucuagacacgaaaua

SEQ ID NO: 159314 - RNA, 19 nt, Homo sapiens
  misc_RNA (1)...(19): siRNA sense strand
gaagucugcaagaauaucu

SEQ ID NO: 159315 - RNA, 19 nt, Homo sapiens
  misc_RNA (1)...(19): siRNA sense strand
acauggaagucugcaagaa

SEQ ID NO: 159316 - RNA, 19 nt, Homo sapiens
  misc_RNA (1)...(19): siRNA sense strand
gaaaugcacucuauuaaug

SEQ ID NO: 159317 - RNA, 19 nt, Homo sapiens
  misc_RNA (1)...(19): siRNA sense strand
gaaguuaguaccuuugaaa

SEQ ID NO: 159318 - RNA, 19 nt, Homo sapiens
  misc_RNA (1)...(19): siRNA sense strand
gaacagguggccaaacaaa

SEQ ID NO: 159319 - RNA, 19 nt, Homo sapiens
  misc_RNA (1)...(19): siRNA sense strand
caaggaaauuucaacaguu

SEQ ID NO: 159320 - RNA, 19 nt, Homo sapiens
  misc_RNA (1)...(19): siRNA sense strand
ucaagacuauaaccaagua

SEQ ID NO: 159321 - RNA, 19 nt, Homo sapiens
  misc_RNA (1)...(19): siRNA sense strand
ugauguaucucaagacuau

SEQ ID NO: 159322 - RNA, 19 nt, Homo sapiens
  misc_RNA (1)...(19): siRNA sense strand
gaauggcagugucaggaaa

SEQ ID NO: 159323 - RNA, 19 nt, Homo sapiens
  misc_RNA (1)...(19): siRNA sense strand
ccaaguagagaaugucaua

SEQ ID NO: 159324 - RNA, 19 nt, Homo sapiens
  misc_RNA (1)...(19): siRNA sense strand
ggaagugcauugcuaucga

SEQ ID NO: 159325 - RNA, 19 nt, Homo sapiens
  misc_RNA (1)...(19): siRNA sense strand
cagaacagguggccaaaca

SEQ ID NO: 159326 - RNA, 19 nt, Homo sapiens
  misc_RNA (1)...(19): siRNA sense strand
gcauugcuaucgagugcua

SEQ ID NO: 159327 - RNA, 19 nt, Homo sapiens
  misc_RNA (1)...(19): siRNA sense strand
gaaauugaaaugcacucua

SEQ ID NO: 159328 - RNA, 19 nt, Homo sapiens
  misc_RNA (1)...(19): siRNA sense strand
ggcagaagcuuugcagaug

SEQ ID NO: 159329 - RNA, 19 nt, Homo sapiens
  misc_RNA (1)...(19): siRNA sense strand
gaggugaagccauauaaug

SEQ ID NO: 159330 - RNA, 19 nt, Homo sapiens
  misc_RNA (1)...(19): siRNA sense strand
gguaaauugugcaggaaug

SEQ ID NO: 159331 - RNA, 19 nt, Homo sapiens
  misc_RNA (1)...(19): siRNA sense strand
acaaggaaauuucaacagu

SEQ ID NO: 159332 - RNA, 19 nt, Homo sapiens
  misc_RNA (1)...(19): siRNA sense strand
gcaggacaguugggauuau

SEQ ID NO: 159333 - RNA, 19 nt, Homo sapiens
  misc_RNA (1)...(19): siRNA sense strand
gcuccaguaacuucuauua

SEQ ID NO: 159334 - RNA, 19 nt, Homo sapiens
  misc_RNA (1)...(19): siRNA sense strand
agacucgacuuauuucaga

SEQ ID NO: 159335 - RNA, 19 nt, Homo sapiens
  misc_RNA (1)...(19): siRNA sense strand
uguuaaagaugccauacaa

SEQ ID NO: 159336 - RNA, 19 nt, Homo sapiens
  misc_RNA (1)...(19): siRNA sense strand
uaacucugguugcacgaaa

SEQ ID NO: 159337 - RNA, 19 nt, Homo sapiens
  misc_RNA (1)...(19): siRNA sense strand
uugaagaucuugaaguuag

SEQ ID NO: 159338 - RNA, 19 nt, Homo sapiens
  misc_RNA (1)...(19): siRNA sense strand
gaagccauauaaugucuac

SEQ ID NO: 159339 - RNA, 19 nt, Homo sapiens
  misc_RNA (1)...(19): siRNA sense strand
gcacucuauuaaugacaaa

SEQ ID NO: 159340 - RNA, 19 nt, Homo sapiens
  misc_RNA (1)...(19): siRNA sense strand
gcauccaaguuugccauaa

SEQ ID NO: 159341 - RNA, 19 nt, Homo sapiens
  misc_RNA (1)...(19): siRNA sense strand
uggacaugcugguaaauug

SEQ ID NO: 159342 - RNA, 19 nt, Homo sapiens
  misc_RNA (1)...(19): siRNA sense strand
gaagaucuugaaguuagua

SEQ ID NO: 159343 - RNA, 19 nt, Homo sapiens
  misc_RNA (1)...(19): siRNA sense strand
gcaggcaaagaaagaaauu

SEQ ID NO: 159344 - RNA, 19 nt, Homo sapiens
  misc_RNA (1)...(19): siRNA sense strand
gaaagguuaaugagcauca

SEQ ID NO: 159345 - RNA, 19 nt, Homo sapiens
  misc_RNA (1)...(19): siRNA sense strand
uaaagaugccauacaagga

SEQ ID NO: 159346 - RNA, 19 nt, Homo sapiens
  misc_RNA (1)...(19): siRNA sense strand
aaggaaauuucaacaguuc

SEQ ID NO: 159347 - RNA, 19 nt, Homo sapiens
  misc_RNA (1)...(19): siRNA sense strand
cgagugcuauaaacaagga

SEQ ID NO: 159348 - RNA, 19 nt, Homo sapiens
  misc_RNA (1)...(19): siRNA sense strand
gcacuauugcuuuguuuua

SEQ ID NO: 159349 - RNA, 19 nt, Homo sapiens
  misc_RNA (1)...(19): siRNA sense strand
gggauuggcagaagcuuug

SEQ ID NO: 159350 - RNA, 19 nt, Homo sapiens
  misc_RNA (1)...(19): siRNA sense strand
ggaauggcagugucaggaa

SEQ ID NO: 159351 - RNA, 19 nt, Homo sapiens
  misc_RNA (1)...(19): siRNA sense strand
ggacaugcugguaaauugu

SEQ ID NO: 159352 - RNA, 19 nt, Homo sapiens
  misc_RNA (1)...(19): siRNA sense strand
gguggugcuuugcauauca

SEQ ID NO: 159353 - RNA, 19 nt, Homo sapiens
  misc_RNA (1)...(19): siRNA sense strand
aaagaugccauacaaggaa

SEQ ID NO: 159354 - RNA, 19 nt, Homo sapiens
  misc_RNA (1)...(19): siRNA sense strand
acagguggccaaacaaauu

SEQ ID NO: 159355 - RNA, 19 nt, Homo sapiens
  misc_RNA (1)...(19): siRNA sense strand
caggacaguugggauuauu

SEQ ID NO: 159356 - RNA, 19 nt, Homo sapiens
  misc_RNA (1)...(19): siRNA sense strand
acaaggagcuuuuauaacu

SEQ ID NO: 159357 - RNA, 19 nt, Homo sapiens
  misc_RNA (1)...(19): siRNA sense strand
cagaagcuuugcagaugga

SEQ ID NO: 159358 - RNA, 19 nt, Homo sapiens
  misc_RNA (1)...(19): siRNA sense strand
caguggacaugcugguaaa

SEQ ID NO: 159359 - RNA, 19 nt, Homo sapiens
  misc_RNA (1)...(19): siRNA sense strand
cauccaaguuugccauaag

SEQ ID NO: 159360 - RNA, 19 nt, Homo sapiens
  misc_RNA (1)...(19): siRNA sense strand
ugaaguuaguaccuuugaa

SEQ ID NO: 159361 - RNA, 19 nt, Homo sapiens
  misc_RNA (1)...(19): siRNA sense strand
gcuaucgagugcuauaaac

SEQ ID NO: 159362 - RNA, 19 nt, Homo sapiens
  misc_RNA (1)...(19): siRNA sense strand
ugggauggcuccaguaacu

SEQ ID NO: 159363 - RNA, 19 nt, Homo sapiens
  misc_RNA (1)...(19): siRNA sense strand
gcuauaaacaaggagcuuu

SEQ ID NO: 159364 - RNA, 19 nt, Homo sapiens
  misc_RNA (1)...(19): siRNA sense strand
ggaggugaagccauauaau

SEQ ID NO: 159365 - RNA, 19 nt, Homo sapiens
  misc_RNA (1)...(19): siRNA sense strand
uuuggagacucgacuuauu

SEQ ID NO: 159366 - RNA, 19 nt, Homo sapiens
  misc_RNA (1)...(19): siRNA sense strand
gugaagccauauaaugucu

SEQ ID NO: 159367 - RNA, 19 nt, Homo sapiens
  misc_RNA (1)...(19): siRNA sense strand
ggcaggacaguugggauua

SEQ ID NO: 159368 - RNA, 19 nt, Homo sapiens
  misc_RNA (1)...(19): siRNA sense strand
ggcaaagaaagaaauugaa

SEQ ID NO: 159369 - RNA, 19 nt, Homo sapiens
  misc_RNA (1)...(19): siRNA sense strand
ggauggcuccaguaacuuc

SEQ ID NO: 159370 - RNA, 19 nt, Homo sapiens
  misc_RNA (1)...(19): siRNA sense strand
gugcuuugcauaucaguug

SEQ ID NO: 159371 - RNA, 19 nt, Homo sapiens
  misc_RNA (1)...(19): siRNA sense strand
ggcaggaucguguuugugu

SEQ ID NO: 159372 - RNA, 19 nt, Homo sapiens
  misc_RNA (1)...(19): siRNA sense strand
ccgcacuauugcuuuguuu

SEQ ID NO: 159373 - RNA, 19 nt, Homo sapiens
  misc_RNA (1)...(19): siRNA sense strand
gaagaaaacagaacaaagc

SEQ ID NO: 159374 - RNA, 19 nt, Homo sapiens
  misc_RNA (1)...(19): siRNA sense strand
cuacucugcauccaaguuu

SEQ ID NO: 159375 - RNA, 19 nt, Homo sapiens
  misc_RNA (1)...(19): siRNA sense strand
aggcaaagaaagaaauuga

SEQ ID NO: 159376 - RNA, 19 nt, Homo sapiens
  misc_RNA (1)...(19): siRNA sense strand
acaguucccuuggcucaga

SEQ ID NO: 159377 - RNA, 19 nt, Homo sapiens
  misc_RNA (1)...(19): siRNA sense strand
aagaugccauacaaggaaa

SEQ ID NO: 159378 - RNA, 19 nt, Homo sapiens
  misc_RNA (1)...(19): siRNA sense strand
gggauuauucgguuucaca

SEQ ID NO: 159379 - RNA, 19 nt, Homo sapiens
  misc_RNA (1)...(19): siRNA sense strand
gccgugaucaccaccauga

SEQ ID NO: 159380 - RNA, 19 nt, Homo sapiens
  misc_RNA (1)...(19): siRNA sense strand
ucuugaaguuaguaccuuu

SEQ ID NO: 159381 - RNA, 19 nt, Homo sapiens
  misc_RNA (1)...(19): siRNA sense strand
uaucgagugcuauaaacaa

SEQ ID NO: 159382 - RNA, 19 nt, Homo sapiens
  misc_RNA (1)...(19): siRNA sense strand
caaguagagaaugucauaa

SEQ ID NO: 159383 - RNA, 19 nt, Homo sapiens
  misc_RNA (1)...(19): siRNA sense strand
uuggagacucgacuuauuu

SEQ ID NO: 159384 - RNA, 19 nt, Homo sapiens
  misc_RNA (1)...(19): siRNA sense strand
gggcgcauguggugguuac

SEQ ID NO: 159385 - RNA, 19 nt, Homo sapiens
  misc_RNA (1)...(19): siRNA sense strand
gacuauaaccaaguagaga

SEQ ID NO: 159386 - RNA, 19 nt, Homo sapiens
  misc_RNA (1)...(19): siRNA sense strand
ugaagaucuugaaguuagu

SEQ ID NO: 159387 - RNA, 19 nt, Homo sapiens
  misc_RNA (1)...(19): siRNA sense strand
gacaaacagguggugcuuu

SEQ ID NO: 159388 - RNA, 19 nt, Homo sapiens
  misc_RNA (1)...(19): siRNA sense strand
ggugaagccauauaauguc

SEQ ID NO: 159389 - RNA, 19 nt, Homo sapiens
  misc_RNA (1)...(19): siRNA sense strand
ccaguggcaucgggaagug

SEQ ID NO: 159390 - RNA, 19 nt, Homo sapiens
  misc_RNA (1)...(19): siRNA sense strand
auaaccaaguagagaaugu

SEQ ID NO: 159391 - RNA, 19 nt, Homo sapiens
  misc_RNA (1)...(19): siRNA sense strand
cagguggccaaacaaauug

SEQ ID NO: 159392 - RNA, 19 nt, Homo sapiens
  misc_RNA (1)...(19): siRNA sense strand
guggacaugcugguaaauu

SEQ ID NO: 159393 - RNA, 19 nt, Homo sapiens
  misc_RNA (1)...(19): siRNA sense strand
uggaggugaagccauauaa

SEQ ID NO: 159394 - RNA, 19 nt, Homo sapiens
  misc_RNA (1)...(19): siRNA sense strand
uggcucagauggguacaug

SEQ ID NO: 159395 - RNA, 19 nt, Homo sapiens
  misc_RNA (1)...(19): siRNA sense strand
cacagacacaccuggcuuu

SEQ ID NO: 159396 - RNA, 19 nt, Homo sapiens
  misc_RNA (1)...(19): siRNA sense strand
cuacaucacaguugcuuac

SEQ ID NO: 159397 - RNA, 19 nt, Homo sapiens
  misc_RNA (1)...(19): siRNA sense strand
cauggugucuccgcucauc

SEQ ID NO: 159398 - RNA, 19 nt, Homo sapiens
  misc_RNA (1)...(19): siRNA sense strand
ggagacucgacuuauuuca

SEQ ID NO: 159399 - RNA, 19 nt, Homo sapiens
  misc_RNA (1)...(19): siRNA sense strand
caccuggcuuugccgaaga

SEQ ID NO: 159400 - RNA, 19 nt, Homo sapiens
  misc_RNA (1)...(19): siRNA sense strand
cagguggugcuuugcauau

SEQ ID NO: 159401 - RNA, 19 nt, Homo sapiens
  misc_RNA (1)...(19): siRNA sense strand
gagaaugucauaaaacaag

SEQ ID NO: 159402 - RNA, 19 nt, Homo sapiens
  misc_RNA (1)...(19): siRNA sense strand
ggacaguugggauuauucg

SEQ ID NO: 159403 - RNA, 19 nt, Homo sapiens
  misc_RNA (1)...(19): siRNA sense strand
gacaugcugguaaauugug

SEQ ID NO: 159404 - RNA, 19 nt, Homo sapiens
  misc_RNA (1)...(19): siRNA sense strand
gccauacaaggaaauuuca

SEQ ID NO: 159405 - RNA, 19 nt, Homo sapiens
  misc_RNA (1)...(19): siRNA sense strand
gagacucgacuuauuucag

SEQ ID NO: 159406 - RNA, 19 nt, Homo sapiens
  misc_RNA (1)...(19): siRNA sense strand
uggcagaagcuuugcagau

SEQ ID NO: 159407 - RNA, 19 nt, Homo sapiens
  misc_RNA (1)...(19): siRNA sense strand
gaaaggagaccaugucaaa

SEQ ID NO: 159408 - RNA, 19 nt, Homo sapiens
  misc_RNA (1)...(19): siRNA sense strand
aggaagagcucugaaauua

SEQ ID NO: 159409 - RNA, 19 nt, Homo sapiens
  misc_RNA (1)...(19): siRNA sense strand
ggacucauaugcaagauug

SEQ ID NO: 159410 - RNA, 19 nt, Homo sapiens
  misc_RNA (1)...(19): siRNA sense strand
ggaauggacucauaugcaa

SEQ ID NO: 159411 - RNA, 19 nt, Homo sapiens
  misc_RNA (1)...(19): siRNA sense strand
gcagaagagugguacuuug

SEQ ID NO: 159412 - RNA, 19 nt, Homo sapiens
  misc_RNA (1)...(19): siRNA sense strand
gaaguuuacuggauuucuu

SEQ ID NO: 159413 - RNA, 19 nt, Homo sapiens
  misc_RNA (1)...(19): siRNA sense strand
gaagagugguacuuuggaa

SEQ ID NO: 159414 - RNA, 19 nt, Homo sapiens
  misc_RNA (1)...(19): siRNA sense strand
caaaggaaguuuacuggau

SEQ ID NO: 159415 - RNA, 19 nt, Homo sapiens
  misc_RNA (1)...(19): siRNA sense strand
gcucugaaauuaccaaauc

SEQ ID NO: 159416 - RNA, 19 nt, Homo sapiens
  misc_RNA (1)...(19): siRNA sense strand
gaacaaaggaaguuuacug

SEQ ID NO: 159417 - RNA, 19 nt, Homo sapiens
  misc_RNA (1)...(19): siRNA sense strand
gaaauuaccaaaucuugug

SEQ ID NO: 159418 - RNA, 19 nt, Homo sapiens
  misc_RNA (1)...(19): siRNA sense strand
aaaggaaguuuacuggauu

SEQ ID NO: 159419 - RNA, 19 nt, Homo sapiens
  misc_RNA (1)...(19): siRNA sense strand
gaaggaagagcucugaaau

SEQ ID NO: 159420 - RNA, 19 nt, Homo sapiens
  misc_RNA (1)...(19): siRNA sense strand
gacagaagaugaccugagu

SEQ ID NO: 159421 - RNA, 19 nt, Homo sapiens
  misc_RNA (1)...(19): siRNA sense strand
gaagagcucugaaauuacc

SEQ ID NO: 159422 - RNA, 19 nt, Homo sapiens
  misc_RNA (1)...(19): siRNA sense strand
gaagcccgcuccuugacaa

SEQ ID NO: 159423 - RNA, 19 nt, Homo sapiens
  misc_RNA (1)...(19): siRNA sense strand
gaacagcucggaaggagau

SEQ ID NO: 159424 - RNA, 19 nt, Homo sapiens
  misc_RNA (1)...(19): siRNA sense strand
ugauugggaugauaugaaa

SEQ ID NO: 159425 - RNA, 19 nt, Homo sapiens
  misc_RNA (1)...(19): siRNA sense strand
caacuggagagacagguua

SEQ ID NO: 159426 - RNA, 19 nt, Homo sapiens
  misc_RNA (1)...(19): siRNA sense strand
ggagagacagguuacauuc

SEQ ID NO: 159427 - RNA, 19 nt, Homo sapiens
  misc_RNA (1)...(19): siRNA sense strand
cggauuggcccgauugaua

SEQ ID NO: 159428 - RNA, 19 nt, Homo sapiens
  misc_RNA (1)...(19): siRNA sense strand
gaagaacgccccacuuuug

SEQ ID NO: 159429 - RNA, 19 nt, Homo sapiens
  misc_RNA (1)...(19): siRNA sense strand
cagaagaugaccugaguuu

SEQ ID NO: 159430 - RNA, 19 nt, Homo sapiens
  misc_RNA (1)...(19): siRNA sense strand
aagcgcagaucaugaagaa

SEQ ID NO: 159431 - RNA, 19 nt, Homo sapiens
  misc_RNA (1)...(19): siRNA sense strand
acaucgagcgcaugaauua

SEQ ID NO: 159432 - RNA, 19 nt, Homo sapiens
  misc_RNA (1)...(19): siRNA sense strand
gcgcaugaauuauauccau

SEQ ID NO: 159433 - RNA, 19 nt, Homo sapiens
  misc_RNA (1)...(19): siRNA sense strand
caaaggugccuauucacuu

SEQ ID NO: 159434 - RNA, 19 nt, Homo sapiens
  misc_RNA (1)...(19): siRNA sense strand
acagguggcugcaggaaug

SEQ ID NO: 159435 - RNA, 19 nt, Homo sapiens
  misc_RNA (1)...(19): siRNA sense strand
gcaauguaaggauaaagaa

SEQ ID NO: 159436 - RNA, 19 nt, Homo sapiens
  misc_RNA (1)...(19): siRNA sense strand
ugacaaugguggauacuac

SEQ ID NO: 159437 - RNA, 19 nt, Homo sapiens
  misc_RNA (1)...(19): siRNA sense strand
gauagaagacaaugaguac

SEQ ID NO: 159438 - RNA, 19 nt, Homo sapiens
  misc_RNA (1)...(19): siRNA sense strand
uaccaaaucuuguggacau

SEQ ID NO: 159439 - RNA, 19 nt, Homo sapiens
  misc_RNA (1)...(19): siRNA sense strand
gacaaugaguacacagcaa

SEQ ID NO: 159440 - RNA, 19 nt, Homo sapiens
  misc_RNA (1)...(19): siRNA sense strand
caagacaaggugcaaaguu

SEQ ID NO: 159441 - RNA, 19 nt, Homo sapiens
  misc_RNA (1)...(19): siRNA sense strand
aagacaaggugcaaaguuc

SEQ ID NO: 159442 - RNA, 19 nt, Homo sapiens
  misc_RNA (1)...(19): siRNA sense strand
gaagaugaccugaguuuuc

SEQ ID NO: 159443 - RNA, 19 nt, Homo sapiens
  misc_RNA (1)...(19): siRNA sense strand
ggagaaggaagagcucuga

SEQ ID NO: 159444 - RNA, 19 nt, Homo sapiens
  misc_RNA (1)...(19): siRNA sense strand
gccaaggacucaccgucuu

SEQ ID NO: 159445 - RNA, 19 nt, Homo sapiens
  misc_RNA (1)...(19): siRNA sense strand
cagguuacauucccagcaa

SEQ ID NO: 159446 - RNA, 19 nt, Homo sapiens
  misc_RNA (1)...(19): siRNA sense strand
ccgaguauaugaacaaagg

SEQ ID NO: 159447 - RNA, 19 nt, Homo sapiens
  misc_RNA (1)...(19): siRNA sense strand
ugauagaagacaaugagua

SEQ ID NO: 159448 - RNA, 19 nt, Homo sapiens
  misc_RNA (1)...(19): siRNA sense strand
gcgaucagcaaacauucua

SEQ ID NO: 159449 - RNA, 19 nt, Homo sapiens
  misc_RNA (1)...(19): siRNA sense strand
agagguaccuuucuuaucc

SEQ ID NO: 159450 - RNA, 19 nt, Homo sapiens
  misc_RNA (1)...(19): siRNA sense strand
guacacagcaagacaaggu

SEQ ID NO: 159451 - RNA, 19 nt, Homo sapiens
  misc_RNA (1)...(19): siRNA sense strand
ugugugcaauguaaggaua

SEQ ID NO: 159452 - RNA, 19 nt, Homo sapiens
  misc_RNA (1)...(19): siRNA sense strand
gugaacucuucgucucaua

SEQ ID NO: 159453 - RNA, 19 nt, Homo sapiens
  misc_RNA (1)...(19): siRNA sense strand
ggauuggcccgauugauag

SEQ ID NO: 159454 - RNA, 19 nt, Homo sapiens
  misc_RNA (1)...(19): siRNA sense strand
cgcaugaauuauauccaua

SEQ ID NO: 159455 - RNA, 19 nt, Homo sapiens
  misc_RNA (1)...(19): siRNA sense strand
ucuaugcaguggugucuga

SEQ ID NO: 159456 - RNA, 19 nt, Homo sapiens
  misc_RNA (1)...(19): siRNA sense strand
ggauaaagaagcaacaaaa

SEQ ID NO: 159457 - RNA, 19 nt, Homo sapiens
  misc_RNA (1)...(19): siRNA sense strand
ccaaaggaagagugccaua

SEQ ID NO: 159458 - RNA, 19 nt, Homo sapiens
  misc_RNA (1)...(19): siRNA sense strand
ccaaggacucaccgucuuu

SEQ ID NO: 159459 - RNA, 19 nt, Homo sapiens
  misc_RNA (1)...(19): siRNA sense strand
gaauggaaacacaaaagua

SEQ ID NO: 159460 - RNA, 19 nt, Homo sapiens
  misc_RNA (1)...(19): siRNA sense strand
cagcuauuguccuuuggaa

SEQ ID NO: 159461 - RNA, 19 nt, Homo sapiens
  misc_RNA (1)...(19): siRNA sense strand
gaggaagcgcagaucauga

SEQ ID NO: 159462 - RNA, 19 nt, Homo sapiens
  misc_RNA (1)...(19): siRNA sense strand
acacaaaaguagccauaaa

SEQ ID NO: 159463 - RNA, 19 nt, Homo sapiens
  misc_RNA (1)...(19): siRNA sense strand
gggaauggacucauaugca

SEQ ID NO: 159464 - RNA, 19 nt, Homo sapiens
  misc_RNA (1)...(19): siRNA sense strand
ucgagcgcaugaauuauau

SEQ ID NO: 159465 - RNA, 19 nt, Homo sapiens
  misc_RNA (1)...(19): siRNA sense strand
aaggaaguuuacuggauuu

SEQ ID NO: 159466 - RNA, 19 nt, Homo sapiens
  misc_RNA (1)...(19): siRNA sense strand
agaaggaagagcucugaaa

SEQ ID NO: 159467 - RNA, 19 nt, Homo sapiens
  misc_RNA (1)...(19): siRNA sense strand
ggaagagcucugaaauuac

SEQ ID NO: 159468 - RNA, 19 nt, Homo sapiens
  misc_RNA (1)...(19): siRNA sense strand
guuacauucccagcaauua

SEQ ID NO: 159469 - RNA, 19 nt, Homo sapiens
  misc_RNA (1)...(19): siRNA sense strand
agucugacguguggucuuu

SEQ ID NO: 159470 - RNA, 19 nt, Homo sapiens
  misc_RNA (1)...(19): siRNA sense strand
gaagcgcagaucaugaaga

SEQ ID NO: 159471 - RNA, 19 nt, Homo sapiens
  misc_RNA (1)...(19): siRNA sense strand
ggcagaagagugguacuuu

SEQ ID NO: 159472 - RNA, 19 nt, Homo sapiens
  misc_RNA (1)...(19): siRNA sense strand
gaguauaugaacaaaggaa

SEQ ID NO: 159473 - RNA, 19 nt, Homo sapiens
  misc_RNA (1)...(19): siRNA sense strand
aaggaagagcucugaaauu

SEQ ID NO: 159474 - RNA, 19 nt, Homo sapiens
  misc_RNA (1)...(19): siRNA sense strand
gcaugaauuauauccauag

SEQ ID NO: 159475 - RNA, 19 nt, Homo sapiens
  misc_RNA (1)...(19): siRNA sense strand
gcuauuguccuuuggaaac

SEQ ID NO: 159476 - RNA, 19 nt, Homo sapiens
  misc_RNA (1)...(19): siRNA sense strand
cuuaaaagauggagaagga

SEQ ID NO: 159477 - RNA, 19 nt, Homo sapiens
  misc_RNA (1)...(19): siRNA sense strand
cuugacaacuggagagaca

SEQ ID NO: 159478 - RNA, 19 nt, Homo sapiens
  misc_RNA (1)...(19): siRNA sense strand
gaucagcaaacauucuagu

SEQ ID NO: 159479 - RNA, 19 nt, Homo sapiens
  misc_RNA (1)...(19): siRNA sense strand
gcacagguggcugcaggaa

SEQ ID NO: 159480 - RNA, 19 nt, Homo sapiens
  misc_RNA (1)...(19): siRNA sense strand
gugauugggaugauaugaa

SEQ ID NO: 159481 - RNA, 19 nt, Homo sapiens
  misc_RNA (1)...(19): siRNA sense strand
uuacauucccagcaauuau

SEQ ID NO: 159482 - RNA, 19 nt, Homo sapiens
  misc_RNA (1)...(19): siRNA sense strand
agaagacaaugaguacaca

SEQ ID NO: 159483 - RNA, 19 nt, Homo sapiens
  misc_RNA (1)...(19): siRNA sense strand
uuacaucgagcgcaugaau

SEQ ID NO: 159484 - RNA, 19 nt, Homo sapiens
  misc_RNA (1)...(19): siRNA sense strand
ucaccgaguauaugaacaa

SEQ ID NO: 159485 - RNA, 19 nt, Homo sapiens
  misc_RNA (1)...(19): siRNA sense strand
cuacaucgucaccgaguau

SEQ ID NO: 159486 - RNA, 19 nt, Homo sapiens
  misc_RNA (1)...(19): siRNA sense strand
ugaggaagcgcagaucaug

SEQ ID NO: 159487 - RNA, 19 nt, Homo sapiens
  misc_RNA (1)...(19): siRNA sense strand
cagcagcuuguacaacauu

SEQ ID NO: 159488 - RNA, 19 nt, Homo sapiens
  misc_RNA (1)...(19): siRNA sense strand
aaggagaccaugucaaaca

SEQ ID NO: 159489 - RNA, 19 nt, Homo sapiens
  misc_RNA (1)...(19): siRNA sense strand
cagaagagugguacuuugg

SEQ ID NO: 159490 - RNA, 19 nt, Homo sapiens
  misc_RNA (1)...(19): siRNA sense strand
ccaaaggugccuauucacu

SEQ ID NO: 159491 - RNA, 19 nt, Homo sapiens
  misc_RNA (1)...(19): siRNA sense strand
gcaagacaaggugcaaagu

SEQ ID NO: 159492 - RNA, 19 nt, Homo sapiens
  misc_RNA (1)...(19): siRNA sense strand
gagaaggaagagcucugaa

SEQ ID NO: 159493 - RNA, 19 nt, Homo sapiens
  misc_RNA (1)...(19): siRNA sense strand
ucgcaaacuugacaauggu

SEQ ID NO: 159494 - RNA, 19 nt, Homo sapiens
  misc_RNA (1)...(19): siRNA sense strand
ggaagcccgcuccuugaca

SEQ ID NO: 159495 - RNA, 19 nt, Homo sapiens
  misc_RNA (1)...(19): siRNA sense strand
caccgaguauaugaacaaa

SEQ ID NO: 159496 - RNA, 19 nt, Homo sapiens
  misc_RNA (1)...(19): siRNA sense strand
gaagcacggacagaagaug

SEQ ID NO: 159497 - RNA, 19 nt, Homo sapiens
  misc_RNA (1)...(19): siRNA sense strand
aggaagcgcagaucaugaa

SEQ ID NO: 159498 - RNA, 19 nt, Homo sapiens
  misc_RNA (1)...(19): siRNA sense strand
uucagcagcuuguacaaca

SEQ ID NO: 159499 - RNA, 19 nt, Homo sapiens
  misc_RNA (1)...(19): siRNA sense strand
gagugaaaccaccaaaggu

SEQ ID NO: 159500 - RNA, 19 nt, Homo sapiens
  misc_RNA (1)...(19): siRNA sense strand
aaacuuggccgaaaagaug

SEQ ID NO: 159501 - RNA, 19 nt, Homo sapiens
  misc_RNA (1)...(19): siRNA sense strand
gguuacauucccagcaauu

SEQ ID NO: 159502 - RNA, 19 nt, Homo sapiens
  misc_RNA (1)...(19): siRNA sense strand
cugcaggaauggcuuacau

SEQ ID NO: 159503 - RNA, 19 nt, Homo sapiens
  misc_RNA (1)...(19): siRNA sense strand
cugaggagcccaucuacau

SEQ ID NO: 159504 - RNA, 19 nt, Homo sapiens
  misc_RNA (1)...(19): siRNA sense strand
uaccuggaauggaaacaca

SEQ ID NO: 159505 - RNA, 19 nt, Homo sapiens
  misc_RNA (1)...(19): siRNA sense strand
ggcccuuuaugacuaugaa

SEQ ID NO: 159506 - RNA, 19 nt, Homo sapiens
  misc_RNA (1)...(19): siRNA sense strand
uggcuccaguugacucuau

SEQ ID NO: 159507 - RNA, 19 nt, Homo sapiens
  misc_RNA (1)...(19): siRNA sense strand
gaaaggagaccaugucaaa

SEQ ID NO: 159508 - RNA, 19 nt, Homo sapiens
  misc_RNA (1)...(19): siRNA sense strand
aggaagagcucugaaauua

SEQ ID NO: 159509 - RNA, 19 nt, Homo sapiens
  misc_RNA (1)...(19): siRNA sense strand
ggacucauaugcaagauug

SEQ ID NO: 159510 - RNA, 19 nt, Homo sapiens
  misc_RNA (1)...(19): siRNA sense strand
ggaauggacucauaugcaa

SEQ ID NO: 159511 - RNA, 19 nt, Homo sapiens
  misc_RNA (1)...(19): siRNA sense strand
gcagaagagugguacuuug

SEQ ID NO: 159512 - RNA, 19 nt, Homo sapiens
  misc_RNA (1)...(19): siRNA sense strand
gaaguuuacuggauuucuu

SEQ ID NO: 159513 - RNA, 19 nt, Homo sapiens
  misc_RNA (1)...(19): siRNA sense strand
gaagagugguacuuuggaa

SEQ ID NO: 159514 - RNA, 19 nt, Homo sapiens
  misc_RNA (1)...(19): siRNA sense strand
caaaggaaguuuacuggau

SEQ ID NO: 159515 - RNA, 19 nt, Homo sapiens
  misc_RNA (1)...(19): siRNA sense strand
gcucugaaauuaccaaauc

SEQ ID NO: 159516 - RNA, 19 nt, Homo sapiens
  misc_RNA (1)...(19): siRNA sense strand
gaacaaaggaaguuuacug

SEQ ID NO: 159517 - RNA, 19 nt, Homo sapiens
  misc_RNA (1)...(19): siRNA sense strand
gaaauuaccaaaucuugug

SEQ ID NO: 159518 - RNA, 19 nt, Homo sapiens
  misc_RNA (1)...(19): siRNA sense strand
aaaggaaguuuacuggauu

SEQ ID NO: 159519 - RNA, 19 nt, Homo sapiens
  misc_RNA (1)...(19): siRNA sense strand
gaaggaagagcucugaaau

SEQ ID NO: 159520 - RNA, 19 nt, Homo sapiens
  misc_RNA (1)...(19): siRNA sense strand
gacagaagaugaccugagu

SEQ ID NO: 159521 - RNA, 19 nt, Homo sapiens
  misc_RNA (1)...(19): siRNA sense strand
gaagagcucugaaauuacc

SEQ ID NO: 159522 - RNA, 19 nt, Homo sapiens
  misc_RNA (1)...(19): siRNA sense strand
gaagcccgcuccuugacaa

SEQ ID NO: 159523 - RNA, 19 nt, Homo sapiens
  misc_RNA (1)...(19): siRNA sense strand
gaacagcucggaaggagau

SEQ ID NO: 159524 - RNA, 19 nt, Homo sapiens
  misc_RNA (1)...(19): siRNA sense strand
ugauugggaugauaugaaa

SEQ ID NO: 159525 - RNA, 19 nt, Homo sapiens
  misc_RNA (1)...(19): siRNA sense strand
caacuggagagacagguua

SEQ ID NO: 159526 - RNA, 19 nt, Homo sapiens
  misc_RNA (1)...(19): siRNA sense strand
ggagagacagguuacauuc

SEQ ID NO: 159527 - RNA, 19 nt, Homo sapiens
  misc_RNA (1)...(19): siRNA sense strand
cggauuggcccgauugaua

SEQ ID NO: 159528 - RNA, 19 nt, Homo sapiens
  misc_RNA (1)...(19): siRNA sense strand
gaagaacgccccacuuuug

SEQ ID NO: 159529 - RNA, 19 nt, Homo sapiens
  misc_RNA (1)...(19): siRNA sense strand
cagaagaugaccugaguuu

SEQ ID NO: 159530 - RNA, 19 nt, Homo sapiens
  misc_RNA (1)...(19): siRNA sense strand
aagcgcagaucaugaagaa

SEQ ID NO: 159531 - RNA, 19 nt, Homo sapiens
  misc_RNA (1)...(19): siRNA sense strand
acaucgagcgcaugaauua

SEQ ID NO: 159532 - RNA, 19 nt, Homo sapiens
  misc_RNA (1)...(19): siRNA sense strand
gcgcaugaauuauauccau

SEQ ID NO: 159533 - RNA, 19 nt, Homo sapiens
  misc_RNA (1)...(19): siRNA sense strand
caaaggugccuauucacuu

SEQ ID NO: 159534 - RNA, 19 nt, Homo sapiens
  misc_RNA (1)...(19): siRNA sense strand
acagguggcugcaggaaug

SEQ ID NO: 159535 - RNA, 19 nt, Homo sapiens
  misc_RNA (1)...(19): siRNA sense strand
gcaauguaaggauaaagaa

SEQ ID NO: 159536 - RNA, 19 nt, Homo sapiens
  misc_RNA (1)...(19): siRNA sense strand
ugacaaugguggauacuac

SEQ ID NO: 159537 - RNA, 19 nt, Homo sapiens
  misc_RNA (1)...(19): siRNA sense strand
gauagaagacaaugaguac

SEQ ID NO: 159538 - RNA, 19 nt, Homo sapiens
  misc_RNA (1)...(19): siRNA sense strand
uaccaaaucuuguggacau

SEQ ID NO: 159539 - RNA, 19 nt, Homo sapiens
  misc_RNA (1)...(19): siRNA sense strand
gacaaugaguacacagcaa

SEQ ID NO: 159540 - RNA, 19 nt, Homo sapiens
  misc_RNA (1)...(19): siRNA sense strand
caagacaaggugcaaaguu

SEQ ID NO: 159541 - RNA, 19 nt, Homo sapiens
  misc_RNA (1)...(19): siRNA sense strand
aagacaaggugcaaaguuc

SEQ ID NO: 159542 - RNA, 19 nt, Homo sapiens
  misc_RNA (1)...(19): siRNA sense strand
gaagaugaccugaguuuuc

SEQ ID NO: 159543 - RNA, 19 nt, Homo sapiens
  misc_RNA (1)...(19): siRNA sense strand
ggagaaggaagagcucuga

SEQ ID NO: 159544 - RNA, 19 nt, Homo sapiens
  misc_RNA (1)...(19): siRNA sense strand
gccaaggacucaccgucuu

SEQ ID NO: 159545 - RNA, 19 nt, Homo sapiens
  misc_RNA (1)...(19): siRNA sense strand
cagguuacauucccagcaa

SEQ ID NO: 159546 - RNA, 19 nt, Homo sapiens
  misc_RNA (1)...(19): siRNA sense strand
ccgaguauaugaacaaagg

SEQ ID NO: 159547 - RNA, 19 nt, Homo sapiens
  misc_RNA (1)...(19): siRNA sense strand
ugauagaagacaaugagua

SEQ ID NO: 159548 - RNA, 19 nt, Homo sapiens
  misc_RNA (1)...(19): siRNA sense strand
gcgaucagcaaacauucua

SEQ ID NO: 159549 - RNA, 19 nt, Homo sapiens
  misc_RNA (1)...(19): siRNA sense strand
agagguaccuuucuuaucc

SEQ ID NO: 159550 - RNA, 19 nt, Homo sapiens
  misc_RNA (1)...(19): siRNA sense strand
guacacagcaagacaaggu

SEQ ID NO: 159551 - RNA, 19 nt, Homo sapiens
  misc_RNA (1)...(19): siRNA sense strand
ugugugcaauguaaggaua

SEQ ID NO: 159552 - RNA, 19 nt, Homo sapiens
  misc_RNA (1)...(19): siRNA sense strand
gugaacucuucgucucaua

SEQ ID NO: 159553 - RNA, 19 nt, Homo sapiens
  misc_RNA (1)...(19): siRNA sense strand
ggauuggcccgauugauag

SEQ ID NO: 159554 - RNA, 19 nt, Homo sapiens
  misc_RNA (1)...(19): siRNA sense strand
cgcaugaauuauauccaua

SEQ ID NO: 159555 - RNA, 19 nt, Homo sapiens
  misc_RNA (1)...(19): siRNA sense strand
ucuaugcaguggugucuga

SEQ ID NO: 159556 - RNA, 19 nt, Homo sapiens
  misc_RNA (1)...(19): siRNA sense strand
ggauaaagaagcaacaaaa

SEQ ID NO: 159557 - RNA, 19 nt, Homo sapiens
  misc_RNA (1)...(19): siRNA sense strand
ccaaaggaagagugccaua

SEQ ID NO: 159558 - RNA, 19 nt, Homo sapiens
  misc_RNA (1)...(19): siRNA sense strand
ccaaggacucaccgucuuu

SEQ ID NO: 159559 - RNA, 19 nt, Homo sapiens
  misc_RNA (1)...(19): siRNA sense strand
gaauggaaacacaaaagua

SEQ ID NO: 159560 - RNA, 19 nt, Homo sapiens
  misc_RNA (1)...(19): siRNA sense strand
cagcuauuguccuuuggaa

SEQ ID NO: 159561 - RNA, 19 nt, Homo sapiens
  misc_RNA (1)...(19): siRNA sense strand
gaggaagcgcagaucauga

SEQ ID NO: 159562 - RNA, 19 nt, Homo sapiens
  misc_RNA (1)...(19): siRNA sense strand
acacaaaaguagccauaaa

SEQ ID NO: 159563 - RNA, 19 nt, Homo sapiens
  misc_RNA (1)...(19): siRNA sense strand
gggaauggacucauaugca

SEQ ID NO: 159564 - RNA, 19 nt, Homo sapiens
  misc_RNA (1)...(19): siRNA sense strand
ucgagcgcaugaauuauau

SEQ ID NO: 159565 - RNA, 19 nt, Homo sapiens
  misc_RNA (1)...(19): siRNA sense strand
aaggaaguuuacuggauuu

SEQ ID NO: 159566 - RNA, 19 nt, Homo sapiens
  misc_RNA (1)...(19): siRNA sense strand
agaaggaagagcucugaaa

SEQ ID NO: 159567 - RNA, 19 nt, Homo sapiens
  misc_RNA (1)...(19): siRNA sense strand
ggaagagcucugaaauuac

SEQ ID NO: 159568 - RNA, 19 nt, Homo sapiens
  misc_RNA (1)...(19): siRNA sense strand
guuacauucccagcaauua

SEQ ID NO: 159569 - RNA, 19 nt, Homo sapiens
  misc_RNA (1)...(19): siRNA sense strand
agucugacguguggucuuu

SEQ ID NO: 159570 - RNA, 19 nt, Homo sapiens
  misc_RNA (1)...(19): siRNA sense strand
gaagcgcagaucaugaaga

SEQ ID NO: 159571 - RNA, 19 nt, Homo sapiens
  misc_RNA (1)...(19): siRNA sense strand
ggcagaagagugguacuuu

SEQ ID NO: 159572 - RNA, 19 nt, Homo sapiens
  misc_RNA (1)...(19): siRNA sense strand
gaguauaugaacaaaggaa

SEQ ID NO: 159573 - RNA, 19 nt, Homo sapiens
  misc_RNA (1)...(19): siRNA sense strand
aaggaagagcucugaaauu

SEQ ID NO: 159574 - RNA, 19 nt, Homo sapiens
  misc_RNA (1)...(19): siRNA sense strand
gcaugaauuauauccauag

SEQ ID NO: 159575 - RNA, 19 nt, Homo sapiens
  misc_RNA (1)...(19): siRNA sense strand
gcuauuguccuuuggaaac

SEQ ID NO: 159576 - RNA, 19 nt, Homo sapiens
  misc_RNA (1)...(19): siRNA sense strand
cuuaaaagauggagaagga

SEQ ID NO: 159577 - RNA, 19 nt, Homo sapiens
  misc_RNA (1)...(19): siRNA sense strand
cuugacaacuggagagaca

SEQ ID NO: 159578 - RNA, 19 nt, Homo sapiens
  misc_RNA (1)...(19): siRNA sense strand
gaucagcaaacauucuagu

SEQ ID NO: 159579 - RNA, 19 nt, Homo sapiens
  misc_RNA (1)...(19): siRNA sense strand
gcacagguggcugcaggaa

SEQ ID NO: 159580 - RNA, 19 nt, Homo sapiens
  misc_RNA (1)...(19): siRNA sense strand
gugauugggaugauaugaa

SEQ ID NO: 159581 - RNA, 19 nt, Homo sapiens
  misc_RNA (1)...(19): siRNA sense strand
uuacauucccagcaauuau

SEQ ID NO: 159582 - RNA, 19 nt, Homo sapiens
  misc_RNA (1)...(19): siRNA sense strand
agaagacaaugaguacaca

SEQ ID NO: 159583 - RNA, 19 nt, Homo sapiens
  misc_RNA (1)...(19): siRNA sense strand
uuacaucgagcgcaugaau

SEQ ID NO: 159584 - RNA, 19 nt, Homo sapiens
  misc_RNA (1)...(19): siRNA sense strand
ucaccgaguauaugaacaa

SEQ ID NO: 159585 - RNA, 19 nt, Homo sapiens
  misc_RNA (1)...(19): siRNA sense strand
cuacaucgucaccgaguau

SEQ ID NO: 159586 - RNA, 19 nt, Homo sapiens
  misc_RNA (1)...(19): siRNA sense strand
ugaggaagcgcagaucaug

SEQ ID NO: 159587 - RNA, 19 nt, Homo sapiens
  misc_RNA (1)...(19): siRNA sense strand
cagcagcuuguacaacauu

SEQ ID NO: 159588 - RNA, 19 nt, Homo sapiens
  misc_RNA (1)...(19): siRNA sense strand
aaggagaccaugucaaaca

SEQ ID NO: 159589 - RNA, 19 nt, Homo sapiens
  misc_RNA (1)...(19): siRNA sense strand
cagaagagugguacuuugg

SEQ ID NO: 159590 - RNA, 19 nt, Homo sapiens
  misc_RNA (1)...(19): siRNA sense strand
ccaaaggugccuauucacu

SEQ ID NO: 159591 - RNA, 19 nt, Homo sapiens
  misc_RNA (1)...(19): siRNA sense strand
gcaagacaaggugcaaagu

SEQ ID NO: 159592 - RNA, 19 nt, Homo sapiens
  misc_RNA (1)...(19): siRNA sense strand
gagaaggaagagcucugaa

SEQ ID NO: 159593 - RNA, 19 nt, Homo sapiens
  misc_RNA (1)...(19): siRNA sense strand
ucgcaaacuugacaauggu

SEQ ID NO: 159594 - RNA, 19 nt, Homo sapiens
  misc_RNA (1)...(19): siRNA sense strand
ggaagcccgcuccuugaca

SEQ ID NO: 159595 - RNA, 19 nt, Homo sapiens
  misc_RNA (1)...(19): siRNA sense strand
caccgaguauaugaacaaa

SEQ ID NO: 159596 - RNA, 19 nt, Homo sapiens
  misc_RNA (1)...(19): siRNA sense strand
gaagcacggacagaagaug

SEQ ID NO: 159597 - RNA, 19 nt, Homo sapiens
  misc_RNA (1)...(19): siRNA sense strand
aggaagcgcagaucaugaa

SEQ ID NO: 159598 - RNA, 19 nt, Homo sapiens
  misc_RNA (1)...(19): siRNA sense strand
uucagcagcuuguacaaca

SEQ ID NO: 159599 - RNA, 19 nt, Homo sapiens
  misc_RNA (1)...(19): siRNA sense strand
gagugaaaccaccaaaggu

SEQ ID NO: 159600 - RNA, 19 nt, Homo sapiens
  misc_RNA (1)...(19): siRNA sense strand
aaacuuggccgaaaagaug

SEQ ID NO: 159601 - RNA, 19 nt, Homo sapiens
  misc_RNA (1)...(19): siRNA sense strand
gguuacauucccagcaauu

SEQ ID NO: 159602 - RNA, 19 nt, Homo sapiens
  misc_RNA (1)...(19): siRNA sense strand
cugcaggaauggcuuacau

SEQ ID NO: 159603 - RNA, 19 nt, Homo sapiens
  misc_RNA (1)...(19): siRNA sense strand
cugaggagcccaucuacau

SEQ ID NO: 159604 - RNA, 19 nt, Homo sapiens
  misc_RNA (1)...(19): siRNA sense strand
uaccuggaauggaaacaca

SEQ ID NO: 159605 - RNA, 19 nt, Homo sapiens
  misc_RNA (1)...(19): siRNA sense strand
ggcccuuuaugacuaugaa

SEQ ID NO: 159606 - RNA, 19 nt, Homo sapiens
  misc_RNA (1)...(19): siRNA sense strand
uggcuccaguugacucuau

SEQ ID NO: 159607 - RNA, 19 nt, Homo sapiens
  misc_RNA (1)...(19): siRNA sense strand
gaaaggagaccaugucaaa

SEQ ID NO: 159608 - RNA, 19 nt, Homo sapiens
  misc_RNA (1)...(19): siRNA sense strand
aggaagagcucugaaauua

SEQ ID NO: 159609 - RNA, 19 nt, Homo sapiens
  misc_RNA (1)...(19): siRNA sense strand
ggacucauaugcaagauug

SEQ ID NO: 159610 - RNA, 19 nt, Homo sapiens
  misc_RNA (1)...(19): siRNA sense strand
ggaauggacucauaugcaa

SEQ ID NO: 159611 - RNA, 19 nt, Homo sapiens
  misc_RNA (1)...(19): siRNA sense strand
gcagaagagugguacuuug

SEQ ID NO: 159612 - RNA, 19 nt, Homo sapiens
  misc_RNA (1)...(19): siRNA sense strand
gaaguuuacuggauuucuu

SEQ ID NO: 159613 - RNA, 19 nt, Homo sapiens
  misc_RNA (1)...(19): siRNA sense strand
gaagagugguacuuuggaa

SEQ ID NO: 159614 - RNA, 19 nt, Homo sapiens
  misc_RNA (1)...(19): siRNA sense strand
caaaggaaguuuacuggau

SEQ ID NO: 159615 - RNA, 19 nt, Homo sapiens
  misc_RNA (1)...(19): siRNA sense strand
gcucugaaauuaccaaauc

SEQ ID NO: 159616 - RNA, 19 nt, Homo sapiens
  misc_RNA (1)...(19): siRNA sense strand
gaacaaaggaaguuuacug

SEQ ID NO: 159617 - RNA, 19 nt, Homo sapiens
  misc_RNA (1)...(19): siRNA sense strand
gaaauuaccaaaucuugug

SEQ ID NO: 159618 - RNA, 19 nt, Homo sapiens
  misc_RNA (1)...(19): siRNA sense strand
aaaggaaguuuacuggauu

SEQ ID NO: 159619 - RNA, 19 nt, Homo sapiens
  misc_RNA (1)...(19): siRNA sense strand
gaaggaagagcucugaaau

SEQ ID NO: 159620 - RNA, 19 nt, Homo sapiens
  misc_RNA (1)...(19): siRNA sense strand
gacagaagaugaccugagu

SEQ ID NO: 159621 - RNA, 19 nt, Homo sapiens
  misc_RNA (1)...(19): siRNA sense strand
gaagagcucugaaauuacc

SEQ ID NO: 159622 - RNA, 19 nt, Homo sapiens
  misc_RNA (1)...(19): siRNA sense strand
gaagcccgcuccuugacaa

SEQ ID NO: 159623 - RNA, 19 nt, Homo sapiens
  misc_RNA (1)...(19): siRNA sense strand
gaacagcucggaaggagau

SEQ ID NO: 159624 - RNA, 19 nt, Homo sapiens
  misc_RNA (1)...(19): siRNA sense strand
ugauugggaugauaugaaa

SEQ ID NO: 159625 - RNA, 19 nt, Homo sapiens
  misc_RNA (1)...(19): siRNA sense strand
caacuggagagacagguua

SEQ ID NO: 159626 - RNA, 19 nt, Homo sapiens
  misc_RNA (1)...(19): siRNA sense strand
ggagagacagguuacauuc

SEQ ID NO: 159627 - RNA, 19 nt, Homo sapiens
  misc_RNA (1)...(19): siRNA sense strand
cggauuggcccgauugaua

SEQ ID NO: 159628 - RNA, 19 nt, Homo sapiens
  misc_RNA (1)...(19): siRNA sense strand
gaagaacgccccacuuuug

SEQ ID NO: 159629 - RNA, 19 nt, Homo sapiens
  misc_RNA (1)...(19): siRNA sense strand
cagaagaugaccugaguuu

SEQ ID NO: 159630 - RNA, 19 nt, Homo sapiens
  misc_RNA (1)...(19): siRNA sense strand
aagcgcagaucaugaagaa

SEQ ID NO: 159631 - RNA, 19 nt, Homo sapiens
  misc_RNA (1)...(19): siRNA sense strand
acaucgagcgcaugaauua

SEQ ID NO: 159632 - RNA, 19 nt, Homo sapiens
  misc_RNA (1)...(19): siRNA sense strand
gcgcaugaauuauauccau

SEQ ID NO: 159633 - RNA, 19 nt, Homo sapiens
  misc_RNA (1)...(19): siRNA sense strand
caaaggugccuauucacuu

SEQ ID NO: 159634 - RNA, 19 nt, Homo sapiens
  misc_RNA (1)...(19): siRNA sense strand
acagguggcugcaggaaug

SEQ ID NO: 159635 - RNA, 19 nt, Homo sapiens
  misc_RNA (1)...(19): siRNA sense strand
gcaauguaaggauaaagaa

SEQ ID NO: 159636 - RNA, 19 nt, Homo sapiens
  misc_RNA (1)...(19): siRNA sense strand
ugacaaugguggauacuac

SEQ ID NO: 159637 - RNA, 19 nt, Homo sapiens
  misc_RNA (1)...(19): siRNA sense strand
gauagaagacaaugaguac

SEQ ID NO: 159638 - RNA, 19 nt, Homo sapiens
  misc_RNA (1)...(19): siRNA sense strand
uaccaaaucuuguggacau

SEQ ID NO: 159639 - RNA, 19 nt, Homo sapiens
  misc_RNA (1)...(19): siRNA sense strand
gacaaugaguacacagcaa

SEQ ID NO: 159640 - RNA, 19 nt, Homo sapiens
  misc_RNA (1)...(19): siRNA sense strand
caagacaaggugcaaaguu

SEQ ID NO: 159641 - RNA, 19 nt, Homo sapiens
  misc_RNA (1)...(19): siRNA sense strand
aagacaaggugcaaaguuc

SEQ ID NO: 159642 - RNA, 19 nt, Homo sapiens
  misc_RNA (1)...(19): siRNA sense strand
gaagaugaccugaguuuuc

SEQ ID NO: 159643 - RNA, 19 nt, Homo sapiens
  misc_RNA (1)...(19): siRNA sense strand
ggagaaggaagagcucuga

SEQ ID NO: 159644 - RNA, 19 nt, Homo sapiens
  misc_RNA (1)...(19): siRNA sense strand
gccaaggacucaccgucuu

SEQ ID NO: 159645 - RNA, 19 nt, Homo sapiens
  misc_RNA (1)...(19): siRNA sense strand
cagguuacauucccagcaa

SEQ ID NO: 159646 - RNA, 19 nt, Homo sapiens
  misc_RNA (1)...(19): siRNA sense strand
ccgaguauaugaacaaagg

SEQ ID NO: 159647 - RNA, 19 nt, Homo sapiens
  misc_RNA (1)...(19): siRNA sense strand
ugauagaagacaaugagua

SEQ ID NO: 159648 - RNA, 19 nt, Homo sapiens
  misc_RNA (1)...(19): siRNA sense strand
gcgaucagcaaacauucua

SEQ ID NO: 159649 - RNA, 19 nt, Homo sapiens
  misc_RNA (1)...(19): siRNA sense strand
agagguaccuuucuuaucc

SEQ ID NO: 159650 - RNA, 19 nt, Homo sapiens
  misc_RNA (1)...(19): siRNA sense strand
guacacagcaagacaaggu

SEQ ID NO: 159651 - RNA, 19 nt, Homo sapiens
  misc_RNA (1)...(19): siRNA sense strand
ugugugcaauguaaggaua

SEQ ID NO: 159652 - RNA, 19 nt, Homo sapiens
  misc_RNA (1)...(19): siRNA sense strand
gugaacucuucgucucaua

SEQ ID NO: 159653 - RNA, 19 nt, Homo sapiens
  misc_RNA (1)...(19): siRNA sense strand
ggauuggcccgauugauag

SEQ ID NO: 159654 - RNA, 19 nt, Homo sapiens
  misc_RNA (1)...(19): siRNA sense strand
cgcaugaauuauauccaua

SEQ ID NO: 159655 - RNA, 19 nt, Homo sapiens
  misc_RNA (1)...(19): siRNA sense strand
ucuaugcaguggugucuga

SEQ ID NO: 159656 - RNA, 19 nt, Homo sapiens
  misc_RNA (1)...(19): siRNA sense strand
ggauaaagaagcaacaaaa

SEQ ID NO: 159657 - RNA, 19 nt, Homo sapiens
  misc_RNA (1)...(19): siRNA sense strand
ccaaaggaagagugccaua

SEQ ID NO: 159658 - RNA, 19 nt, Homo sapiens
  misc_RNA (1)...(19): siRNA sense strand
ccaaggacucaccgucuuu

SEQ ID NO: 159659 - RNA, 19 nt, Homo sapiens
  misc_RNA (1)...(19): siRNA sense strand
gaauggaaacacaaaagua

SEQ ID NO: 159660 - RNA, 19 nt, Homo sapiens
  misc_RNA (1)...(19): siRNA sense strand
cagcuauuguccuuuggaa

SEQ ID NO: 159661 - RNA, 19 nt, Homo sapiens
  misc_RNA (1)...(19): siRNA sense strand
gaggaagcgcagaucauga

SEQ ID NO: 159662 - RNA, 19 nt, Homo sapiens
  misc_RNA (1)...(19): siRNA sense strand
acacaaaaguagccauaaa

SEQ ID NO: 159663 - RNA, 19 nt, Homo sapiens
  misc_RNA (1)...(19): siRNA sense strand
gggaauggacucauaugca

SEQ ID NO: 159664 - RNA, 19 nt, Homo sapiens
  misc_RNA (1)...(19): siRNA sense strand
ucgagcgcaugaauuauau

SEQ ID NO: 159665 - RNA, 19 nt, Homo sapiens
  misc_RNA (1)...(19): siRNA sense strand
aaggaaguuuacuggauuu

SEQ ID NO: 159666 - RNA, 19 nt, Homo sapiens
  misc_RNA (1)...(19): siRNA sense strand
agaaggaagagcucugaaa

SEQ ID NO: 159667 - RNA, 19 nt, Homo sapiens
  misc_RNA (1)...(19): siRNA sense strand
ggaagagcucugaaauuac

SEQ ID NO: 159668 - RNA, 19 nt, Homo sapiens
  misc_RNA (1)...(19): siRNA sense strand
guuacauucccagcaauua

SEQ ID NO: 159669 - RNA, 19 nt, Homo sapiens
  misc_RNA (1)...(19): siRNA sense strand
agucugacguguggucuuu

SEQ ID NO: 159670 - RNA, 19 nt, Homo sapiens
  misc_RNA (1)...(19): siRNA sense strand
gaagcgcagaucaugaaga

SEQ ID NO: 159671 - RNA, 19 nt, Homo sapiens
  misc_RNA (1)...(19): siRNA sense strand
ggcagaagagugguacuuu

SEQ ID NO: 159672 - RNA, 19 nt, Homo sapiens
  misc_RNA (1)...(19): siRNA sense strand
gaguauaugaacaaaggaa

SEQ ID NO: 159673 - RNA, 19 nt, Homo sapiens
  misc_RNA (1)...(19): siRNA sense strand
aaggaagagcucugaaauu

SEQ ID NO: 159674 - RNA, 19 nt, Homo sapiens
  misc_RNA (1)...(19): siRNA sense strand
gcaugaauuauauccauag

SEQ ID NO: 159675 - RNA, 19 nt, Homo sapiens
  misc_RNA (1)...(19): siRNA sense strand
gcuauuguccuuuggaaac

SEQ ID NO: 159676 - RNA, 19 nt, Homo sapiens
  misc_RNA (1)...(19): siRNA sense strand
cuuaaaagauggagaagga

SEQ ID NO: 159677 - RNA, 19 nt, Homo sapiens
  misc_RNA (1)...(19): siRNA sense strand
cuugacaacuggagagaca

SEQ ID NO: 159678 - RNA, 19 nt, Homo sapiens
  misc_RNA (1)...(19): siRNA sense strand
gaucagcaaacauucuagu

SEQ ID NO: 159679 - RNA, 19 nt, Homo sapiens
  misc_RNA (1)...(19): siRNA sense strand
gcacagguggcugcaggaa

SEQ ID NO: 159680 - RNA, 19 nt, Homo sapiens
  misc_RNA (1)...(19): siRNA sense strand
gugauugggaugauaugaa

SEQ ID NO: 159681 - RNA, 19 nt, Homo sapiens
  misc_RNA (1)...(19): siRNA sense strand
uuacauucccagcaauuau

SEQ ID NO: 159682 - RNA, 19 nt, Homo sapiens
  misc_RNA (1)...(19): siRNA sense strand
agaagacaaugaguacaca

SEQ ID NO: 159683 - RNA, 19 nt, Homo sapiens
  misc_RNA (1)...(19): siRNA sense strand
uuacaucgagcgcaugaau

SEQ ID NO: 159684 - RNA, 19 nt, Homo sapiens
  misc_RNA (1)...(19): siRNA sense strand
ucaccgaguauaugaacaa

SEQ ID NO: 159685 - RNA, 19 nt, Homo sapiens
  misc_RNA (1)...(19): siRNA sense strand
cuacaucgucaccgaguau

SEQ ID NO: 159686 - RNA, 19 nt, Homo sapiens
  misc_RNA (1)...(19): siRNA sense strand
ugaggaagcgcagaucaug

SEQ ID NO: 159687 - RNA, 19 nt, Homo sapiens
  misc_RNA (1)...(19): siRNA sense strand
cagcagcuuguacaacauu

SEQ ID NO: 159688 - RNA, 19 nt, Homo sapiens
  misc_RNA (1)...(19): siRNA sense strand
aaggagaccaugucaaaca

SEQ ID NO: 159689 - RNA, 19 nt, Homo sapiens
  misc_RNA (1)...(19): siRNA sense strand
cagaagagugguacuuugg

SEQ ID NO: 159690 - RNA, 19 nt, Homo sapiens
  misc_RNA (1)...(19): siRNA sense strand
ccaaaggugccuauucacu

SEQ ID NO: 159691 - RNA, 19 nt, Homo sapiens
  misc_RNA (1)...(19): siRNA sense strand
gcaagacaaggugcaaagu

SEQ ID NO: 159692 - RNA, 19 nt, Homo sapiens
  misc_RNA (1)...(19): siRNA sense strand
gagaaggaagagcucugaa

SEQ ID NO: 159693 - RNA, 19 nt, Homo sapiens
  misc_RNA (1)...(19): siRNA sense strand
ucgcaaacuugacaauggu

SEQ ID NO: 159694 - RNA, 19 nt, Homo sapiens
  misc_RNA (1)...(19): siRNA sense strand
ggaagcccgcuccuugaca

SEQ ID NO: 159695 - RNA, 19 nt, Homo sapiens
  misc_RNA (1)...(19): siRNA sense strand
caccgaguauaugaacaaa

SEQ ID NO: 159696 - RNA, 19 nt, Homo sapiens
  misc_RNA (1)...(19): siRNA sense strand
gaagcacggacagaagaug

SEQ ID NO: 159697 - RNA, 19 nt, Homo sapiens
  misc_RNA (1)...(19): siRNA sense strand
aggaagcgcagaucaugaa

SEQ ID NO: 159698 - RNA, 19 nt, Homo sapiens
  misc_RNA (1)...(19): siRNA sense strand
uucagcagcuuguacaaca

SEQ ID NO: 159699 - RNA, 19 nt, Homo sapiens
  misc_RNA (1)...(19): siRNA sense strand
gagugaaaccaccaaaggu

SEQ ID NO: 159700 - RNA, 19 nt, Homo sapiens
  misc_RNA (1)...(19): siRNA sense strand
aaacuuggccgaaaagaug

SEQ ID NO: 159701 - RNA, 19 nt, Homo sapiens
  misc_RNA (1)...(19): siRNA sense strand
gguuacauucccagcaauu

SEQ ID NO: 159702 - RNA, 19 nt, Homo sapiens
  misc_RNA (1)...(19): siRNA sense strand
cugcaggaauggcuuacau

SEQ ID NO: 159703 - RNA, 19 nt, Homo sapiens
  misc_RNA (1)...(19): siRNA sense strand
cugaggagcccaucuacau

SEQ ID NO: 159704 - RNA, 19 nt, Homo sapiens
  misc_RNA (1)...(19): siRNA sense strand
uaccuggaauggaaacaca

SEQ ID NO: 159705 - RNA, 19 nt, Homo sapiens
  misc_RNA (1)...(19): siRNA sense strand
ggcccuuuaugacuaugaa

SEQ ID NO: 159706 - RNA, 19 nt, Homo sapiens
  misc_RNA (1)...(19): siRNA sense strand
uggcuccaguugacucuau

SEQ ID NO: 159707 - RNA, 19 nt, Homo sapiens
  misc_RNA (1)...(19): siRNA sense strand
gaaacagacuccaaugaua

SEQ ID NO: 159708 - RNA, 19 nt, Homo sapiens
  misc_RNA (1)...(19): siRNA sense strand
caucaaagcuagacacuau

SEQ ID NO: 159709 - RNA, 19 nt, Homo sapiens
  misc_RNA (1)...(19): siRNA sense strand
gaugcuggauugacauuua

SEQ ID NO: 159710 - RNA, 19 nt, Homo sapiens
  misc_RNA (1)...(19): siRNA sense strand
gagcaaacauggaaugaau

SEQ ID NO: 159711 - RNA, 19 nt, Homo sapiens
  misc_RNA (1)...(19): siRNA sense strand
uaacgucccuucucauaaa

SEQ ID NO: 159712 - RNA, 19 nt, Homo sapiens
  misc_RNA (1)...(19): siRNA sense strand
gagaguggauuauguuguu

SEQ ID NO: 159713 - RNA, 19 nt, Homo sapiens
  misc_RNA (1)...(19): siRNA sense strand
cagaagaccuuggcucuaa

SEQ ID NO: 159714 - RNA, 19 nt, Homo sapiens
  misc_RNA (1)...(19): siRNA sense strand
ucucaagacugcuaugaua

SEQ ID NO: 159715 - RNA, 19 nt, Homo sapiens
  misc_RNA (1)...(19): siRNA sense strand
ggaggaagcagcccuauga

SEQ ID NO: 159716 - RNA, 19 nt, Homo sapiens
  misc_RNA (1)...(19): siRNA sense strand
acaaguagaugcuggauug

SEQ ID NO: 159717 - RNA, 19 nt, Homo sapiens
  misc_RNA (1)...(19): siRNA sense strand
gauaacgucccuucucaua

SEQ ID NO: 159718 - RNA, 19 nt, Homo sapiens
  misc_RNA (1)...(19): siRNA sense strand
caagaagccuauucguauu

SEQ ID NO: 159719 - RNA, 19 nt, Homo sapiens
  misc_RNA (1)...(19): siRNA sense strand
gaggagaugguucguguua

SEQ ID NO: 159720 - RNA, 19 nt, Homo sapiens
  misc_RNA (1)...(19): siRNA sense strand
ggaagcagcccuaugauca

SEQ ID NO: 159721 - RNA, 19 nt, Homo sapiens
  misc_RNA (1)...(19): siRNA sense strand
cauaucagcuaaucaaugu

SEQ ID NO: 159722 - RNA, 19 nt, Homo sapiens
  misc_RNA (1)...(19): siRNA sense strand
ccaagaagccuauucguau

SEQ ID NO: 159723 - RNA, 19 nt, Homo sapiens
  misc_RNA (1)...(19): siRNA sense strand
gccagcgccuuuagaaaua

SEQ ID NO: 159724 - RNA, 19 nt, Homo sapiens
  misc_RNA (1)...(19): siRNA sense strand
ccaguuagaucucccauca

SEQ ID NO: 159725 - RNA, 19 nt, Homo sapiens
  misc_RNA (1)...(19): siRNA sense strand
caacaccugguaauacuua

SEQ ID NO: 159726 - RNA, 19 nt, Homo sapiens
  misc_RNA (1)...(19): siRNA sense strand
acaaacagguggaauacuu

SEQ ID NO: 159727 - RNA, 19 nt, Homo sapiens
  misc_RNA (1)...(19): siRNA sense strand
gcgaggaggagaugaauaa

SEQ ID NO: 159728 - RNA, 19 nt, Homo sapiens
  misc_RNA (1)...(19): siRNA sense strand
gagacaaacagguggaaua

SEQ ID NO: 159729 - RNA, 19 nt, Homo sapiens
  misc_RNA (1)...(19): siRNA sense strand
aaacagacuccaaugauaa

SEQ ID NO: 159730 - RNA, 19 nt, Homo sapiens
  misc_RNA (1)...(19): siRNA sense strand
guaauaccauuuccacugu

SEQ ID NO: 159731 - RNA, 19 nt, Homo sapiens
  misc_RNA (1)...(19): siRNA sense strand
agaauuauguucccaugaa

SEQ ID NO: 159732 - RNA, 19 nt, Homo sapiens
  misc_RNA (1)...(19): siRNA sense strand
gguaauacuuaucagauuc

SEQ ID NO: 159733 - RNA, 19 nt, Homo sapiens
  misc_RNA (1)...(19): siRNA sense strand
ucaguugacuccagccuuu

SEQ ID NO: 159734 - RNA, 19 nt, Homo sapiens
  misc_RNA (1)...(19): siRNA sense strand
gccagaaugggaagaauua

SEQ ID NO: 159735 - RNA, 19 nt, Homo sapiens
  misc_RNA (1)...(19): siRNA sense strand
ugaccgaucuccuguggaa

SEQ ID NO: 159736 - RNA, 19 nt, Homo sapiens
  misc_RNA (1)...(19): siRNA sense strand
ccaaaggugucuccaucaa

SEQ ID NO: 159737 - RNA, 19 nt, Homo sapiens
  misc_RNA (1)...(19): siRNA sense strand
caaacagguggaauacuua

SEQ ID NO: 159738 - RNA, 19 nt, Homo sapiens
  misc_RNA (1)...(19): siRNA sense strand
ccacgaacauuuccagaag

SEQ ID NO: 159739 - RNA, 19 nt, Homo sapiens
  misc_RNA (1)...(19): siRNA sense strand
caaauuaugugccaaugac

SEQ ID NO: 159740 - RNA, 19 nt, Homo sapiens
  misc_RNA (1)...(19): siRNA sense strand
agaagaagauccugugaag

SEQ ID NO: 159741 - RNA, 19 nt, Homo sapiens
  misc_RNA (1)...(19): siRNA sense strand
cagaugagagaguggauua

SEQ ID NO: 159742 - RNA, 19 nt, Homo sapiens
  misc_RNA (1)...(19): siRNA sense strand
cgacaacauuccagcaguu

SEQ ID NO: 159743 - RNA, 19 nt, Homo sapiens
  misc_RNA (1)...(19): siRNA sense strand
uaaguggguucguuguauu

SEQ ID NO: 159744 - RNA, 19 nt, Homo sapiens
  misc_RNA (1)...(19): siRNA sense strand
gugaagaacuggaugaaaa

SEQ ID NO: 159745 - RNA, 19 nt, Homo sapiens
  misc_RNA (1)...(19): siRNA sense strand
gauggagaacucuauguuu

SEQ ID NO: 159746 - RNA, 19 nt, Homo sapiens
  misc_RNA (1)...(19): siRNA sense strand
ccacgagcauuuccaagug

SEQ ID NO: 159747 - RNA, 19 nt, Homo sapiens
  misc_RNA (1)...(19): siRNA sense strand
gccaagaagccuauucgua

SEQ ID NO: 159748 - RNA, 19 nt, Homo sapiens
  misc_RNA (1)...(19): siRNA sense strand
acaagcaccagcugauuua

SEQ ID NO: 159749 - RNA, 19 nt, Homo sapiens
  misc_RNA (1)...(19): siRNA sense strand
ugauagaucuaguucacuu

SEQ ID NO: 159750 - RNA, 19 nt, Homo sapiens
  misc_RNA (1)...(19): siRNA sense strand
ccuggaaacucuuggcauu

SEQ ID NO: 159751 - RNA, 19 nt, Homo sapiens
  misc_RNA (1)...(19): siRNA sense strand
uggauuauguuguuguuga

SEQ ID NO: 159752 - RNA, 19 nt, Homo sapiens
  misc_RNA (1)...(19): siRNA sense strand
gccaaugacuccaggaaca

SEQ ID NO: 159753 - RNA, 19 nt, Homo sapiens
  misc_RNA (1)...(19): siRNA sense strand
gcaaauuaugugccaauga

SEQ ID NO: 159754 - RNA, 19 nt, Homo sapiens
  misc_RNA (1)...(19): siRNA sense strand
caagacugcuaugauauuc

SEQ ID NO: 159755 - RNA, 19 nt, Homo sapiens
  misc_RNA (1)...(19): siRNA sense strand
gaaaauccaccucuucuga

SEQ ID NO: 159756 - RNA, 19 nt, Homo sapiens
  misc_RNA (1)...(19): siRNA sense strand
acccaaaccuguccaguga

SEQ ID NO: 159757 - RNA, 19 nt, Homo sapiens
  misc_RNA (1)...(19): siRNA sense strand
ucgagacucuuccagguuu

SEQ ID NO: 159758 - RNA, 19 nt, Homo sapiens
  misc_RNA (1)...(19): siRNA sense strand
gaaaauuacgucccaauga

SEQ ID NO: 159759 - RNA, 19 nt, Homo sapiens
  misc_RNA (1)...(19): siRNA sense strand
caaaugaggcauguaucua

SEQ ID NO: 159760 - RNA, 19 nt, Homo sapiens
  misc_RNA (1)...(19): siRNA sense strand
ugugacaucuguggguuua

SEQ ID NO: 159761 - RNA, 19 nt, Homo sapiens
  misc_RNA (1)...(19): siRNA sense strand
gcagcaguguagcagauga

SEQ ID NO: 159762 - RNA, 19 nt, Homo sapiens
  misc_RNA (1)...(19): siRNA sense strand
aggcauguaucuauuaguu

SEQ ID NO: 159763 - RNA, 19 nt, Homo sapiens
  misc_RNA (1)...(19): siRNA sense strand
aggaggagaugaauaagug

SEQ ID NO: 159764 - RNA, 19 nt, Homo sapiens
  misc_RNA (1)...(19): siRNA sense strand
gcuagacacuauuccagau

SEQ ID NO: 159765 - RNA, 19 nt, Homo sapiens
  misc_RNA (1)...(19): siRNA sense strand
aaaggugucuccaucaagu

SEQ ID NO: 159766 - RNA, 19 nt, Homo sapiens
  misc_RNA (1)...(19): siRNA sense strand
aaauccaccucuucugaaa

SEQ ID NO: 159767 - RNA, 19 nt, Homo sapiens
  misc_RNA (1)...(19): siRNA sense strand
guuacgcaguggccguuua

SEQ ID NO: 159768 - RNA, 19 nt, Homo sapiens
  misc_RNA (1)...(19): siRNA sense strand
gggagacaguccacagaau

SEQ ID NO: 159769 - RNA, 19 nt, Homo sapiens
  misc_RNA (1)...(19): siRNA sense strand
gaagcagcccuaugaucaa

SEQ ID NO: 159770 - RNA, 19 nt, Homo sapiens
  misc_RNA (1)...(19): siRNA sense strand
ccagaacgcaugcugauuc

SEQ ID NO: 159771 - RNA, 19 nt, Homo sapiens
  misc_RNA (1)...(19): siRNA sense strand
gaaaccacauccagcucau

SEQ ID NO: 159772 - RNA, 19 nt, Homo sapiens
  misc_RNA (1)...(19): siRNA sense strand
ggaguuauucccaugaugu

SEQ ID NO: 159773 - RNA, 19 nt, Homo sapiens
  misc_RNA (1)...(19): siRNA sense strand
gaagccuauucguauuauu

SEQ ID NO: 159774 - RNA, 19 nt, Homo sapiens
  misc_RNA (1)...(19): siRNA sense strand
cagcgaagagugugaaaug

SEQ ID NO: 159775 - RNA, 19 nt, Homo sapiens
  misc_RNA (1)...(19): siRNA sense strand
ucaagacugcuaugauauu

SEQ ID NO: 159776 - RNA, 19 nt, Homo sapiens
  misc_RNA (1)...(19): siRNA sense strand
ugaagcagauggagaacuc

SEQ ID NO: 159777 - RNA, 19 nt, Homo sapiens
  misc_RNA (1)...(19): siRNA sense strand
caacacuauugaccggauu

SEQ ID NO: 159778 - RNA, 19 nt, Homo sapiens
  misc_RNA (1)...(19): siRNA sense strand
ugacaucuguggguuuaau

SEQ ID NO: 159779 - RNA, 19 nt, Homo sapiens
  misc_RNA (1)...(19): siRNA sense strand
aagaagccuauucguauua

SEQ ID NO: 159780 - RNA, 19 nt, Homo sapiens
  misc_RNA (1)...(19): siRNA sense strand
caagccagcgccuuuagaa

SEQ ID NO: 159781 - RNA, 19 nt, Homo sapiens
  misc_RNA (1)...(19): siRNA sense strand
cacuguggauuuaaacaaa

SEQ ID NO: 159782 - RNA, 19 nt, Homo sapiens
  misc_RNA (1)...(19): siRNA sense strand
ucacguaguaauaccauuu

SEQ ID NO: 159783 - RNA, 19 nt, Homo sapiens
  misc_RNA (1)...(19): siRNA sense strand
uggcagcucuuuacaagca

SEQ ID NO: 159784 - RNA, 19 nt, Homo sapiens
  misc_RNA (1)...(19): siRNA sense strand
ggagacaguccacagaauc

SEQ ID NO: 159785 - RNA, 19 nt, Homo sapiens
  misc_RNA (1)...(19): siRNA sense strand
acacgacagugaagagaau

SEQ ID NO: 159786 - RNA, 19 nt, Homo sapiens
  misc_RNA (1)...(19): siRNA sense strand
ggagaugguucguguuacg

SEQ ID NO: 159787 - RNA, 19 nt, Homo sapiens
  misc_RNA (1)...(19): siRNA sense strand
caacauuccagcaguuuua

SEQ ID NO: 159788 - RNA, 19 nt, Homo sapiens
  misc_RNA (1)...(19): siRNA sense strand
ugggaaguguuucaaguga

SEQ ID NO: 159789 - RNA, 19 nt, Homo sapiens
  misc_RNA (1)...(19): siRNA sense strand
gcaaacauggaaugaaugg

SEQ ID NO: 159790 - RNA, 19 nt, Homo sapiens
  misc_RNA (1)...(19): siRNA sense strand
ugaaacagacuccaaugau

SEQ ID NO: 159791 - RNA, 19 nt, Homo sapiens
  misc_RNA (1)...(19): siRNA sense strand
aaugaggcauguaucuauu

SEQ ID NO: 159792 - RNA, 19 nt, Homo sapiens
  misc_RNA (1)...(19): siRNA sense strand
gaugagagaguggauuaug

SEQ ID NO: 159793 - RNA, 19 nt, Homo sapiens
  misc_RNA (1)...(19): siRNA sense strand
ccaaaccuguccagugaag

SEQ ID NO: 159794 - RNA, 19 nt, Homo sapiens
  misc_RNA (1)...(19): siRNA sense strand
uagacacuauuccagauau

SEQ ID NO: 159795 - RNA, 19 nt, Homo sapiens
  misc_RNA (1)...(19): siRNA sense strand
caccacaccuggaaacucu

SEQ ID NO: 159796 - RNA, 19 nt, Homo sapiens
  misc_RNA (1)...(19): siRNA sense strand
cgggaagccuggacagaug

SEQ ID NO: 159797 - RNA, 19 nt, Homo sapiens
  misc_RNA (1)...(19): siRNA sense strand
gaaccucaagccagacaga

SEQ ID NO: 159798 - RNA, 19 nt, Homo sapiens
  misc_RNA (1)...(19): siRNA sense strand
aaaauuacgucccaaugaa

SEQ ID NO: 159799 - RNA, 19 nt, Homo sapiens
  misc_RNA (1)...(19): siRNA sense strand
ucagauuccacgaacauuu

SEQ ID NO: 159800 - RNA, 19 nt, Homo sapiens
  misc_RNA (1)...(19): siRNA sense strand
caagugaagaacuggauga

SEQ ID NO: 159801 - RNA, 19 nt, Homo sapiens
  misc_RNA (1)...(19): siRNA sense strand
gaaaagaugcuaguucuca

SEQ ID NO: 159802 - RNA, 19 nt, Homo sapiens
  misc_RNA (1)...(19): siRNA sense strand
ccagcgccuuuagaaauaa

SEQ ID NO: 159803 - RNA, 19 nt, Homo sapiens
  misc_RNA (1)...(19): siRNA sense strand
gagacaguccacagaauca

SEQ ID NO: 159804 - RNA, 19 nt, Homo sapiens
  misc_RNA (1)...(19): siRNA sense strand
gaugcuaguucucaagacu

SEQ ID NO: 159805 - RNA, 19 nt, Homo sapiens
  misc_RNA (1)...(19): siRNA sense strand
agaagaccuuggcucuaaa

SEQ ID NO: 159806 - RNA, 19 nt, Homo sapiens
  misc_RNA (1)...(19): siRNA sense strand
ugagagaguggauuauguu

SEQ ID NO: 159807 - RNA, 19 nt, Homo sapiens
  misc_RNA (1)...(19): siRNA sense strand
ugaagaagcucaagugaua

SEQ ID NO: 159808 - RNA, 19 nt, Homo sapiens
  misc_RNA (1)...(19): siRNA sense strand
gaaacucagucgugcauua

SEQ ID NO: 159809 - RNA, 19 nt, Homo sapiens
  misc_RNA (1)...(19): siRNA sense strand
gaaauucucuggagucauc

SEQ ID NO: 159810 - RNA, 19 nt, Homo sapiens
  misc_RNA (1)...(19): siRNA sense strand
gaagaaacuugcaaagaug

SEQ ID NO: 159811 - RNA, 19 nt, Homo sapiens
  misc_RNA (1)...(19): siRNA sense strand
ggacaugauuuguaaaguu

SEQ ID NO: 159812 - RNA, 19 nt, Homo sapiens
  misc_RNA (1)...(19): siRNA sense strand
gaacagaacaggaaacaau

SEQ ID NO: 159813 - RNA, 19 nt, Homo sapiens
  misc_RNA (1)...(19): siRNA sense strand
agacaucaaugaaccaaua

SEQ ID NO: 159814 - RNA, 19 nt, Homo sapiens
  misc_RNA (1)...(19): siRNA sense strand
cagaggagcugauagaaau

SEQ ID NO: 159815 - RNA, 19 nt, Homo sapiens
  misc_RNA (1)...(19): siRNA sense strand
gaacaacagaugaaugaaa

SEQ ID NO: 159816 - RNA, 19 nt, Homo sapiens
  misc_RNA (1)...(19): siRNA sense strand
gaaccaauaggcaauuuaa

SEQ ID NO: 159817 - RNA, 19 nt, Homo sapiens
  misc_RNA (1)...(19): siRNA sense strand
gaaauuugucugcaagaua

SEQ ID NO: 159818 - RNA, 19 nt, Homo sapiens
  misc_RNA (1)...(19): siRNA sense strand
gaaagcagccaaaguacaa

SEQ ID NO: 159819 - RNA, 19 nt, Homo sapiens
  misc_RNA (1)...(19): siRNA sense strand
ucacaaccauuucagauga

SEQ ID NO: 159820 - RNA, 19 nt, Homo sapiens
  misc_RNA (1)...(19): siRNA sense strand
gaucaaccugugcaaauua

SEQ ID NO: 159821 - RNA, 19 nt, Homo sapiens
  misc_RNA (1)...(19): siRNA sense strand
agaagaaacuugcaaagau

SEQ ID NO: 159822 - RNA, 19 nt, Homo sapiens
  misc_RNA (1)...(19): siRNA sense strand
ggaauugaaccaaaguuaa

SEQ ID NO: 159823 - RNA, 19 nt, Homo sapiens
  misc_RNA (1)...(19): siRNA sense strand
gaauucagcaugaccgaua

SEQ ID NO: 159824 - RNA, 19 nt, Homo sapiens
  misc_RNA (1)...(19): siRNA sense strand
gaaccaagacuacaguguu

SEQ ID NO: 159825 - RNA, 19 nt, Homo sapiens
  misc_RNA (1)...(19): siRNA sense strand
guguacagguaauuucuua

SEQ ID NO: 159826 - RNA, 19 nt, Homo sapiens
  misc_RNA (1)...(19): siRNA sense strand
aaacacaucacaaccauuu

SEQ ID NO: 159827 - RNA, 19 nt, Homo sapiens
  misc_RNA (1)...(19): siRNA sense strand
gcaaauuauuccagcauca

SEQ ID NO: 159828 - RNA, 19 nt, Homo sapiens
  misc_RNA (1)...(19): siRNA sense strand
gaaagcagagugcacagaa

SEQ ID NO: 159829 - RNA, 19 nt, Homo sapiens
  misc_RNA (1)...(19): siRNA sense strand
gacaugauuuguaaaguuc

SEQ ID NO: 159830 - RNA, 19 nt, Homo sapiens
  misc_RNA (1)...(19): siRNA sense strand
cagcggaguugaaccguuu

SEQ ID NO: 159831 - RNA, 19 nt, Homo sapiens
  misc_RNA (1)...(19): siRNA sense strand
gcagaggagcugauagaaa

SEQ ID NO: 159832 - RNA, 19 nt, Homo sapiens
  misc_RNA (1)...(19): siRNA sense strand
gaacagaagaaacuugcaa

SEQ ID NO: 159833 - RNA, 19 nt, Homo sapiens
  misc_RNA (1)...(19): siRNA sense strand
cagaacaagugacaagaug

SEQ ID NO: 159834 - RNA, 19 nt, Homo sapiens
  misc_RNA (1)...(19): siRNA sense strand
ggaaggcuauaggaaagaa

SEQ ID NO: 159835 - RNA, 19 nt, Homo sapiens
  misc_RNA (1)...(19): siRNA sense strand
gaagaaagcauuguagaac

SEQ ID NO: 159836 - RNA, 19 nt, Homo sapiens
  misc_RNA (1)...(19): siRNA sense strand
ggagucaucuggaacuucu

SEQ ID NO: 159837 - RNA, 19 nt, Homo sapiens
  misc_RNA (1)...(19): siRNA sense strand
caaagagcgccgaggauuu

SEQ ID NO: 159838 - RNA, 19 nt, Homo sapiens
  misc_RNA (1)...(19): siRNA sense strand
ccaauaggcaauuuaaaga

SEQ ID NO: 159839 - RNA, 19 nt, Homo sapiens
  misc_RNA (1)...(19): siRNA sense strand
ccuacuaccauuaaaguua

SEQ ID NO: 159840 - RNA, 19 nt, Homo sapiens
  misc_RNA (1)...(19): siRNA sense strand
ucaccacacucaacauuuc

SEQ ID NO: 159841 - RNA, 19 nt, Homo sapiens
  misc_RNA (1)...(19): siRNA sense strand
gaacuguacagcuuagugu

SEQ ID NO: 159842 - RNA, 19 nt, Homo sapiens
  misc_RNA (1)...(19): siRNA sense strand
ccaaggaauugaaccaaag

SEQ ID NO: 159843 - RNA, 19 nt, Homo sapiens
  misc_RNA (1)...(19): siRNA sense strand
ccagaacgaaguuuauuug

SEQ ID NO: 159844 - RNA, 19 nt, Homo sapiens
  misc_RNA (1)...(19): siRNA sense strand
gcugauagaaauugagauu

SEQ ID NO: 159845 - RNA, 19 nt, Homo sapiens
  misc_RNA (1)...(19): siRNA sense strand
uauguagucucaaccaaga

SEQ ID NO: 159846 - RNA, 19 nt, Homo sapiens
  misc_RNA (1)...(19): siRNA sense strand
gggagagaauuauguaguc

SEQ ID NO: 159847 - RNA, 19 nt, Homo sapiens
  misc_RNA (1)...(19): siRNA sense strand
agaagcacaucuuguugaa

SEQ ID NO: 159848 - RNA, 19 nt, Homo sapiens
  misc_RNA (1)...(19): siRNA sense strand
gauggaacuguacagcuua

SEQ ID NO: 159849 - RNA, 19 nt, Homo sapiens
  misc_RNA (1)...(19): siRNA sense strand
gaagaagcucaagugauaa

SEQ ID NO: 159850 - RNA, 19 nt, Homo sapiens
  misc_RNA (1)...(19): siRNA sense strand
aagaacaacagaugaauga

SEQ ID NO: 159851 - RNA, 19 nt, Homo sapiens
  misc_RNA (1)...(19): siRNA sense strand
gaaauugagauugauggaa

SEQ ID NO: 159852 - RNA, 19 nt, Homo sapiens
  misc_RNA (1)...(19): siRNA sense strand
gaacuucuccgaaaauaug

SEQ ID NO: 159853 - RNA, 19 nt, Homo sapiens
  misc_RNA (1)...(19): siRNA sense strand
ggaauugcccagccaguca

SEQ ID NO: 159854 - RNA, 19 nt, Homo sapiens
  misc_RNA (1)...(19): siRNA sense strand
ugaucaaccugugcaaauu

SEQ ID NO: 159855 - RNA, 19 nt, Homo sapiens
  misc_RNA (1)...(19): siRNA sense strand
ggccauagacaucaaugaa

SEQ ID NO: 159856 - RNA, 19 nt, Homo sapiens
  misc_RNA (1)...(19): siRNA sense strand
cagaagaaacuugcaaaga

SEQ ID NO: 159857 - RNA, 19 nt, Homo sapiens
  misc_RNA (1)...(19): siRNA sense strand
ggcaagagauuuguguaca

SEQ ID NO: 159858 - RNA, 19 nt, Homo sapiens
  misc_RNA (1)...(19): siRNA sense strand
ggauccagaacgaaguuua

SEQ ID NO: 159859 - RNA, 19 nt, Homo sapiens
  misc_RNA (1)...(19): siRNA sense strand
gcagagugcacagaagaaa

SEQ ID NO: 159860 - RNA, 19 nt, Homo sapiens
  misc_RNA (1)...(19): siRNA sense strand
cuacaccuacuaccauuaa

SEQ ID NO: 159861 - RNA, 19 nt, Homo sapiens
  misc_RNA (1)...(19): siRNA sense strand
agauggaacuguacagcuu

SEQ ID NO: 159862 - RNA, 19 nt, Homo sapiens
  misc_RNA (1)...(19): siRNA sense strand
aagaaagcauuguagaaca

SEQ ID NO: 159863 - RNA, 19 nt, Homo sapiens
  misc_RNA (1)...(19): siRNA sense strand
caacagaugaaugaaauag

SEQ ID NO: 159864 - RNA, 19 nt, Homo sapiens
  misc_RNA (1)...(19): siRNA sense strand
ggagagaauuauguagucu

SEQ ID NO: 159865 - RNA, 19 nt, Homo sapiens
  misc_RNA (1)...(19): siRNA sense strand
gcacuggaaggcuauagga

SEQ ID NO: 159866 - RNA, 19 nt, Homo sapiens
  misc_RNA (1)...(19): siRNA sense strand
ggacacuguugagguuguu

SEQ ID NO: 159867 - RNA, 19 nt, Homo sapiens
  misc_RNA (1)...(19): siRNA sense strand
uuuggaugcucaugaaauu

SEQ ID NO: 159868 - RNA, 19 nt, Homo sapiens
  misc_RNA (1)...(19): siRNA sense strand
guucaaggcaagagauuug

SEQ ID NO: 159869 - RNA, 19 nt, Homo sapiens
  misc_RNA (1)...(19): siRNA sense strand
agccuacgaugaacuauga

SEQ ID NO: 159870 - RNA, 19 nt, Homo sapiens
  misc_RNA (1)...(19): siRNA sense strand
aaaauaagccuacgaugaa

SEQ ID NO: 159871 - RNA, 19 nt, Homo sapiens
  misc_RNA (1)...(19): siRNA sense strand
gagcugauagaaauugaga

SEQ ID NO: 159872 - RNA, 19 nt, Homo sapiens
  misc_RNA (1)...(19): siRNA sense strand
caagaacaacagaugaaug

SEQ ID NO: 159873 - RNA, 19 nt, Homo sapiens
  misc_RNA (1)...(19): siRNA sense strand
cagaagcacaucuuguuga

SEQ ID NO: 159874 - RNA, 19 nt, Homo sapiens
  misc_RNA (1)...(19): siRNA sense strand
cuguugagguuguuauuga

SEQ ID NO: 159875 - RNA, 19 nt, Homo sapiens
  misc_RNA (1)...(19): siRNA sense strand
gauccagaacgaaguuuau

SEQ ID NO: 159876 - RNA, 19 nt, Homo sapiens
  misc_RNA (1)...(19): siRNA sense strand
ugcgaaagcagccaaagua

SEQ ID NO: 159877 - RNA, 19 nt, Homo sapiens
  misc_RNA (1)...(19): siRNA sense strand
agaagaaagcauuguagaa

SEQ ID NO: 159878 - RNA, 19 nt, Homo sapiens
  misc_RNA (1)...(19): siRNA sense strand
cagaccaaguccugcauug

SEQ ID NO: 159879 - RNA, 19 nt, Homo sapiens
  misc_RNA (1)...(19): siRNA sense strand
cagcuuaguguacagguaa

SEQ ID NO: 159880 - RNA, 19 nt, Homo sapiens
  misc_RNA (1)...(19): siRNA sense strand
gaugaacuaugagaaacuc

SEQ ID NO: 159881 - RNA, 19 nt, Homo sapiens
  misc_RNA (1)...(19): siRNA sense strand
agucgugcauuaagauauu

SEQ ID NO: 159882 - RNA, 19 nt, Homo sapiens
  misc_RNA (1)...(19): siRNA sense strand
gcaagucaagaacaacaga

SEQ ID NO: 159883 - RNA, 19 nt, Homo sapiens
  misc_RNA (1)...(19): siRNA sense strand
cagaagaaagcauuguaga

SEQ ID NO: 159884 - RNA, 19 nt, Homo sapiens
  misc_RNA (1)...(19): siRNA sense strand
aaacucagucgugcauuaa

SEQ ID NO: 159885 - RNA, 19 nt, Homo sapiens
  misc_RNA (1)...(19): siRNA sense strand
aaacaauggccaaauccaa

SEQ ID NO: 159886 - RNA, 19 nt, Homo sapiens
  misc_RNA (1)...(19): siRNA sense strand
acaaagagcgccgaggauu

SEQ ID NO: 159887 - RNA, 19 nt, Homo sapiens
  misc_RNA (1)...(19): siRNA sense strand
caaccugugcaaauuauuc

SEQ ID NO: 159888 - RNA, 19 nt, Homo sapiens
  misc_RNA (1)...(19): siRNA sense strand
gaaacugcuagaaccaaga

SEQ ID NO: 159889 - RNA, 19 nt, Homo sapiens
  misc_RNA (1)...(19): siRNA sense strand
gcacagaagaaagcauugu

SEQ ID NO: 159890 - RNA, 19 nt, Homo sapiens
  misc_RNA (1)...(19): siRNA sense strand
ugaaauuugucugcaagau

SEQ ID NO: 159891 - RNA, 19 nt, Homo sapiens
  misc_RNA (1)...(19): siRNA sense strand
agacuacaguguucuuugg

SEQ ID NO: 159892 - RNA, 19 nt, Homo sapiens
  misc_RNA (1)...(19): siRNA sense strand
aaccaagacuacaguguuc

SEQ ID NO: 159893 - RNA, 19 nt, Homo sapiens
  misc_RNA (1)...(19): siRNA sense strand
gcuacugcuucucugcaaa

SEQ ID NO: 159894 - RNA, 19 nt, Homo sapiens
  misc_RNA (1)...(19): siRNA sense strand
agaugcagcuccauggaau

SEQ ID NO: 159895 - RNA, 19 nt, Homo sapiens
  misc_RNA (1)...(19): siRNA sense strand
gaggagcugauagaaauug

SEQ ID NO: 159896 - RNA, 19 nt, Homo sapiens
  misc_RNA (1)...(19): siRNA sense strand
gagaaacucagucgugcau

SEQ ID NO: 159897 - RNA, 19 nt, Homo sapiens
  misc_RNA (1)...(19): siRNA sense strand
aggaaacaauggccaaauc

SEQ ID NO: 159898 - RNA, 19 nt, Homo sapiens
  misc_RNA (1)...(19): siRNA sense strand
agaauuauguagucucaac

SEQ ID NO: 159899 - RNA, 19 nt, Homo sapiens
  misc_RNA (1)...(19): siRNA sense strand
gccuugggauacccuauga

SEQ ID NO: 159900 - RNA, 19 nt, Homo sapiens
  misc_RNA (1)...(19): siRNA sense strand
aggaauugaaccaaaguua

SEQ ID NO: 159901 - RNA, 19 nt, Homo sapiens
  misc_RNA (1)...(19): siRNA sense strand
ucaugaaauuugucugcaa

SEQ ID NO: 159902 - RNA, 19 nt, Homo sapiens
  misc_RNA (1)...(19): siRNA sense strand
caaaguuaaacauccuuga

SEQ ID NO: 159903 - RNA, 19 nt, Homo sapiens
  misc_RNA (1)...(19): siRNA sense strand
aaagagcgccgaggauuuc

SEQ ID NO: 159904 - RNA, 19 nt, Homo sapiens
  misc_RNA (1)...(19): siRNA sense strand
ugaaccaauaggcaauuua

SEQ ID NO: 159905 - RNA, 19 nt, Homo sapiens
  misc_RNA (1)...(19): siRNA sense strand
gugcacagaagaaagcauu

SEQ ID NO: 159906 - RNA, 19 nt, Homo sapiens
  misc_RNA (1)...(19): siRNA sense strand
gaaucagaagcacaucuug

SEQ ID NO: 159907 - RNA, 19 nt, Homo sapiens
  misc_RNA (1)...(19): siRNA sense strand
ugaaugaccuggacaacua

SEQ ID NO: 159908 - RNA, 19 nt, Homo sapiens
  misc_RNA (1)...(19): siRNA sense strand
gaagagaaguccacgagau

SEQ ID NO: 159909 - RNA, 19 nt, Homo sapiens
  misc_RNA (1)...(19): siRNA sense strand
ggaaagugcucuauagucu

SEQ ID NO: 159910 - RNA, 19 nt, Homo sapiens
  misc_RNA (1)...(19): siRNA sense strand
guacaaccgucucuacauu

SEQ ID NO: 159911 - RNA, 19 nt, Homo sapiens
  misc_RNA (1)...(19): siRNA sense strand
gacauggacuuuacgauga

SEQ ID NO: 159912 - RNA, 19 nt, Homo sapiens
  misc_RNA (1)...(19): siRNA sense strand
gauaaauacuccaggauca

SEQ ID NO: 159913 - RNA, 19 nt, Homo sapiens
  misc_RNA (1)...(19): siRNA sense strand
ccaaaucgccucugacaaa

SEQ ID NO: 159914 - RNA, 19 nt, Homo sapiens
  misc_RNA (1)...(19): siRNA sense strand
ggcaaugacuccuuaaaga

SEQ ID NO: 159915 - RNA, 19 nt, Homo sapiens
  misc_RNA (1)...(19): siRNA sense strand
caaacgugcucucuugaaa

SEQ ID NO: 159916 - RNA, 19 nt, Homo sapiens
  misc_RNA (1)...(19): siRNA sense strand
gaggauagaugaccaugau

SEQ ID NO: 159917 - RNA, 19 nt, Homo sapiens
  misc_RNA (1)...(19): siRNA sense strand
ccaccaaacuggcuuucua

SEQ ID NO: 159918 - RNA, 19 nt, Homo sapiens
  misc_RNA (1)...(19): siRNA sense strand
acacaaacgugcucucuug

SEQ ID NO: 159919 - RNA, 19 nt, Homo sapiens
  misc_RNA (1)...(19): siRNA sense strand
ggauagaugaccaugauuu

SEQ ID NO: 159920 - RNA, 19 nt, Homo sapiens
  misc_RNA (1)...(19): siRNA sense strand
ucaacuaccugaccacugu

SEQ ID NO: 159921 - RNA, 19 nt, Homo sapiens
  misc_RNA (1)...(19): siRNA sense strand
gaacagcuucugaggauag

SEQ ID NO: 159922 - RNA, 19 nt, Homo sapiens
  misc_RNA (1)...(19): siRNA sense strand
cagagaagcagcuauguga

SEQ ID NO: 159923 - RNA, 19 nt, Homo sapiens
  misc_RNA (1)...(19): siRNA sense strand
gagagaagcccgacaggau

SEQ ID NO: 159924 - RNA, 19 nt, Homo sapiens
  misc_RNA (1)...(19): siRNA sense strand
gacgagaaguacaugaaga

SEQ ID NO: 159925 - RNA, 19 nt, Homo sapiens
  misc_RNA (1)...(19): siRNA sense strand
ugaaagcuaugccuauaca

SEQ ID NO: 159926 - RNA, 19 nt, Homo sapiens
  misc_RNA (1)...(19): siRNA sense strand
acaaccgucucuacauuaa

SEQ ID NO: 159927 - RNA, 19 nt, Homo sapiens
  misc_RNA (1)...(19): siRNA sense strand
gagaggagcuccccacaga

SEQ ID NO: 159928 - RNA, 19 nt, Homo sapiens
  misc_RNA (1)...(19): siRNA sense strand
ucucagagguugacaugga

SEQ ID NO: 159929 - RNA, 19 nt, Homo sapiens
  misc_RNA (1)...(19): siRNA sense strand
caacggugcugaccauguc

SEQ ID NO: 159930 - RNA, 19 nt, Homo sapiens
  misc_RNA (1)...(19): siRNA sense strand
gagacgaaguccugacauc

SEQ ID NO: 159931 - RNA, 19 nt, Homo sapiens
  misc_RNA (1)...(19): siRNA sense strand
ggaucucacucucccaguu

SEQ ID NO: 159932 - RNA, 19 nt, Homo sapiens
  misc_RNA (1)...(19): siRNA sense strand
gguccagccugaugggaaa

SEQ ID NO: 159933 - RNA, 19 nt, Homo sapiens
  misc_RNA (1)...(19): siRNA sense strand
ucaaggccguggacaucua

SEQ ID NO: 159934 - RNA, 19 nt, Homo sapiens
  misc_RNA (1)...(19): siRNA sense strand
aaagugcucuauagucuca

SEQ ID NO: 159935 - RNA, 19 nt, Homo sapiens
  misc_RNA (1)...(19): siRNA sense strand
gaugggaaagugcucuaua

SEQ ID NO: 159936 - RNA, 19 nt, Homo sapiens
  misc_RNA (1)...(19): siRNA sense strand
acaacuacaugccagagaa

SEQ ID NO: 159937 - RNA, 19 nt, Homo sapiens
  misc_RNA (1)...(19): siRNA sense strand
ccacaucuucuucuucuug

SEQ ID NO: 159938 - RNA, 19 nt, Homo sapiens
  misc_RNA (1)...(19): siRNA sense strand
ucacaacggugcugaccau

SEQ ID NO: 159939 - RNA, 19 nt, Homo sapiens
  misc_RNA (1)...(19): siRNA sense strand
caugaggccuggcuuugga

SEQ ID NO: 159940 - RNA, 19 nt, Homo sapiens
  misc_RNA (1)...(19): siRNA sense strand
gagaagcccgacaggauga

SEQ ID NO: 159941 - RNA, 19 nt, Homo sapiens
  misc_RNA (1)...(19): siRNA sense strand
aaccgucucuacauuaauu

SEQ ID NO: 159942 - RNA, 19 nt, Homo sapiens
  misc_RNA (1)...(19): siRNA sense strand
ccacagacaacgucauguu

SEQ ID NO: 159943 - RNA, 19 nt, Homo sapiens
  misc_RNA (1)...(19): siRNA sense strand
gauagaugaccaugauuuc

SEQ ID NO: 159944 - RNA, 19 nt, Homo sapiens
  misc_RNA (1)...(19): siRNA sense strand
cccacgccauugauaaaua

SEQ ID NO: 159945 - RNA, 19 nt, Homo sapiens
  misc_RNA (1)...(19): siRNA sense strand
aacgugcucucuugaaauu

SEQ ID NO: 159946 - RNA, 19 nt, Homo sapiens
  misc_RNA (1)...(19): siRNA sense strand
gaguuuggauagcaucuca

SEQ ID NO: 159947 - RNA, 19 nt, Homo sapiens
  misc_RNA (1)...(19): siRNA sense strand
gagguugacauggacuuua

SEQ ID NO: 159948 - RNA, 19 nt, Homo sapiens
  misc_RNA (1)...(19): siRNA sense strand
guccugacaucaccaaauc

SEQ ID NO: 159949 - RNA, 19 nt, Homo sapiens
  misc_RNA (1)...(19): siRNA sense strand
gacggcaacuacagugaug

SEQ ID NO: 159950 - RNA, 19 nt, Homo sapiens
  misc_RNA (1)...(19): siRNA sense strand
ucuucuugcuccaaacuua

SEQ ID NO: 159951 - RNA, 19 nt, Homo sapiens
  misc_RNA (1)...(19): siRNA sense strand
cgugcucucuugaaauuga

SEQ ID NO: 159952 - RNA, 19 nt, Homo sapiens
  misc_RNA (1)...(19): siRNA sense strand
caaaucgccucugacaaag

SEQ ID NO: 159953 - RNA, 19 nt, Homo sapiens
  misc_RNA (1)...(19): siRNA sense strand
cugggucccugacauguuu

SEQ ID NO: 159954 - RNA, 19 nt, Homo sapiens
  misc_RNA (1)...(19): siRNA sense strand
ccaaagacaaagacgagaa

SEQ ID NO: 159955 - RNA, 19 nt, Homo sapiens
  misc_RNA (1)...(19): siRNA sense strand
uccacgagaugucuaagaa

SEQ ID NO: 159956 - RNA, 19 nt, Homo sapiens
  misc_RNA (1)...(19): siRNA sense strand
auugaaagcuaugccuaua

SEQ ID NO: 159957 - RNA, 19 nt, Homo sapiens
  misc_RNA (1)...(19): siRNA sense strand
cacgagaugucuaagaaag

SEQ ID NO: 159958 - RNA, 19 nt, Homo sapiens
  misc_RNA (1)...(19): siRNA sense strand
gcaaugacuccuuaaagac

SEQ ID NO: 159959 - RNA, 19 nt, Homo sapiens
  misc_RNA (1)...(19): siRNA sense strand
gacaaagucagaacagcuu

SEQ ID NO: 159960 - RNA, 19 nt, Homo sapiens
  misc_RNA (1)...(19): siRNA sense strand
uacaaccgucucuacauua

SEQ ID NO: 159961 - RNA, 19 nt, Homo sapiens
  misc_RNA (1)...(19): siRNA sense strand
aacagaagcugcgggagaa

SEQ ID NO: 159962 - RNA, 19 nt, Homo sapiens
  misc_RNA (1)...(19): siRNA sense strand
gaucugggucccugacaug

SEQ ID NO: 159963 - RNA, 19 nt, Homo sapiens
  misc_RNA (1)...(19): siRNA sense strand
ccacgccauugauaaauac

SEQ ID NO: 159964 - RNA, 19 nt, Homo sapiens
  misc_RNA (1)...(19): siRNA sense strand
caaugacuccuuaaagaca

SEQ ID NO: 159965 - RNA, 19 nt, Homo sapiens
  misc_RNA (1)...(19): siRNA sense strand
gcaagucagcccaauucug

SEQ ID NO: 159966 - RNA, 19 nt, Homo sapiens
  misc_RNA (1)...(19): siRNA sense strand
gggcaaugacuccuuaaag

SEQ ID NO: 159967 - RNA, 19 nt, Homo sapiens
  misc_RNA (1)...(19): siRNA sense strand
gggaaagugcucuauaguc

SEQ ID NO: 159968 - RNA, 19 nt, Homo sapiens
  misc_RNA (1)...(19): siRNA sense strand
acaugaagaugcccacaag

SEQ ID NO: 159969 - RNA, 19 nt, Homo sapiens
  misc_RNA (1)...(19): siRNA sense strand
caagcaagucagcccaauu

SEQ ID NO: 159970 - RNA, 19 nt, Homo sapiens
  misc_RNA (1)...(19): siRNA sense strand
ggauagcaucucagagguu

SEQ ID NO: 159971 - RNA, 19 nt, Homo sapiens
  misc_RNA (1)...(19): siRNA sense strand
gaaguccacgagaugucua

SEQ ID NO: 159972 - RNA, 19 nt, Homo sapiens
  misc_RNA (1)...(19): siRNA sense strand
ggacggcaacuacagugau

SEQ ID NO: 159973 - RNA, 19 nt, Homo sapiens
  misc_RNA (1)...(19): siRNA sense strand
ugaagaugcccacaagcaa

SEQ ID NO: 159974 - RNA, 19 nt, Homo sapiens
  misc_RNA (1)...(19): siRNA sense strand
aaagcuaugccuauacaga

SEQ ID NO: 159975 - RNA, 19 nt, Homo sapiens
  misc_RNA (1)...(19): siRNA sense strand
ggagaggaaggaacagaag

SEQ ID NO: 159976 - RNA, 19 nt, Homo sapiens
  misc_RNA (1)...(19): siRNA sense strand
ccacugugcaggagaggaa

SEQ ID NO: 159977 - RNA, 19 nt, Homo sapiens
  misc_RNA (1)...(19): siRNA sense strand
gaccauguccaccaucauc

SEQ ID NO: 159978 - RNA, 19 nt, Homo sapiens
  misc_RNA (1)...(19): siRNA sense strand
guggagaguuuggauagca

SEQ ID NO: 159979 - RNA, 19 nt, Homo sapiens
  misc_RNA (1)...(19): siRNA sense strand
gccagagaauggagagaag

SEQ ID NO: 159980 - RNA, 19 nt, Homo sapiens
  misc_RNA (1)...(19): siRNA sense strand
ccacgagaugucuaagaaa

SEQ ID NO: 159981 - RNA, 19 nt, Homo sapiens
  misc_RNA (1)...(19): siRNA sense strand
agacaaagacgagaaguac

SEQ ID NO: 159982 - RNA, 19 nt, Homo sapiens
  misc_RNA (1)...(19): siRNA sense strand
gaucucacucucccaguuc

SEQ ID NO: 159983 - RNA, 19 nt, Homo sapiens
  misc_RNA (1)...(19): siRNA sense strand
gaugaacggaucucacucu

SEQ ID NO: 159984 - RNA, 19 nt, Homo sapiens
  misc_RNA (1)...(19): siRNA sense strand
aagcaagucagcccaauuc

SEQ ID NO: 159985 - RNA, 19 nt, Homo sapiens
  misc_RNA (1)...(19): siRNA sense strand
caaagacaaagacgagaag

SEQ ID NO: 159986 - RNA, 19 nt, Homo sapiens
  misc_RNA (1)...(19): siRNA sense strand
gacacccacgccauugaua

SEQ ID NO: 159987 - RNA, 19 nt, Homo sapiens
  misc_RNA (1)...(19): siRNA sense strand
gcagcuaugugagcaugag

SEQ ID NO: 159988 - RNA, 19 nt, Homo sapiens
  misc_RNA (1)...(19): siRNA sense strand
gcgcgucuccuacaucaag

SEQ ID NO: 159989 - RNA, 19 nt, Homo sapiens
  misc_RNA (1)...(19): siRNA sense strand
aagcuaugccuauacagaa

SEQ ID NO: 159990 - RNA, 19 nt, Homo sapiens
  misc_RNA (1)...(19): siRNA sense strand
cagcaugaggccuggcuuu

SEQ ID NO: 159991 - RNA, 19 nt, Homo sapiens
  misc_RNA (1)...(19): siRNA sense strand
acacccacgccauugauaa

SEQ ID NO: 159992 - RNA, 19 nt, Homo sapiens
  misc_RNA (1)...(19): siRNA sense strand
aagacaaagacgagaagua

SEQ ID NO: 159993 - RNA, 19 nt, Homo sapiens
  misc_RNA (1)...(19): siRNA sense strand
gauuuggcaucuuucuuuu

SEQ ID NO: 159994 - RNA, 19 nt, Homo sapiens
  misc_RNA (1)...(19): siRNA sense strand
caucaaggccguggacauc

SEQ ID NO: 159995 - RNA, 19 nt, Homo sapiens
  misc_RNA (1)...(19): siRNA sense strand
cgccacaucuucuucuucu

SEQ ID NO: 159996 - RNA, 19 nt, Homo sapiens
  misc_RNA (1)...(19): siRNA sense strand
acaaagacgagaaguacau

SEQ ID NO: 159997 - RNA, 19 nt, Homo sapiens
  misc_RNA (1)...(19): siRNA sense strand
caucucagagguugacaug

SEQ ID NO: 159998 - RNA, 19 nt, Homo sapiens
  misc_RNA (1)...(19): siRNA sense strand
gaaguccugacaucaccaa

SEQ ID NO: 159999 - RNA, 19 nt, Homo sapiens
  misc_RNA (1)...(19): siRNA sense strand
caacuacaugccagagaau

SEQ ID NO: 160000 - RNA, 19 nt, Homo sapiens
  misc_RNA (1)...(19): siRNA sense strand
aaucgccucugacaaaguc

SEQ ID NO: 160001 - RNA, 19 nt, Homo sapiens
  misc_RNA (1)...(19): siRNA sense strand
caccaaaucgccucugaca

SEQ ID NO: 160002 - RNA, 19 nt, Homo sapiens
  misc_RNA (1)...(19): siRNA sense strand
ccaacaaccucagcaugac

SEQ ID NO: 160003 - RNA, 19 nt, Homo sapiens
  misc_RNA (1)...(19): siRNA sense strand
gguacaaccgucucuacau

SEQ ID NO: 160004 - RNA, 19 nt, Homo sapiens
  misc_RNA (1)...(19): siRNA sense strand
acaaacgugcucucuugaa

SEQ ID NO: 160005 - RNA, 19 nt, Homo sapiens
  misc_RNA (1)...(19): siRNA sense strand
caaagacgagaaguacaug

SEQ ID NO: 160006 - RNA, 19 nt, Homo sapiens
  misc_RNA (1)...(19): siRNA sense strand
aaacgugcucucuugaaau

SEQ ID NO: 160007 - RNA, 19 nt, Homo sapiens
  misc_RNA (1)...(19): siRNA sense strand
gacauggacuucacuauga

SEQ ID NO: 160008 - RNA, 19 nt, Homo sapiens
  misc_RNA (1)...(19): siRNA sense strand
caaauacucuagguugaua

SEQ ID NO: 160009 - RNA, 19 nt, Homo sapiens
  misc_RNA (1)...(19): siRNA sense strand
gagcacgacuucagcauga

SEQ ID NO: 160010 - RNA, 19 nt, Homo sapiens
  misc_RNA (1)...(19): siRNA sense strand
uuucguaucuuccagaaua

SEQ ID NO: 160011 - RNA, 19 nt, Homo sapiens
  misc_RNA (1)...(19): siRNA sense strand
aaagaucguucacucauga

SEQ ID NO: 160012 - RNA, 19 nt, Homo sapiens
  misc_RNA (1)...(19): siRNA sense strand
gacaaauacucuagguuga

SEQ ID NO: 160013 - RNA, 19 nt, Homo sapiens
  misc_RNA (1)...(19): siRNA sense strand
gauggaagcuacagugagu

SEQ ID NO: 160014 - RNA, 19 nt, Homo sapiens
  misc_RNA (1)...(19): siRNA sense strand
ggacauggacuucacuaug

SEQ ID NO: 160015 - RNA, 19 nt, Homo sapiens
  misc_RNA (1)...(19): siRNA sense strand
gaagccauauccugacaga

SEQ ID NO: 160016 - RNA, 19 nt, Homo sapiens
  misc_RNA (1)...(19): siRNA sense strand
ggagagcuaugccuauaca

SEQ ID NO: 160017 - RNA, 19 nt, Homo sapiens
  misc_RNA (1)...(19): siRNA sense strand
ggacagggcagguggaaau

SEQ ID NO: 160018 - RNA, 19 nt, Homo sapiens
  misc_RNA (1)...(19): siRNA sense strand
guggaaugcuucacucaaa

SEQ ID NO: 160019 - RNA, 19 nt, Homo sapiens
  misc_RNA (1)...(19): siRNA sense strand
cccaugccauugacaaaua

SEQ ID NO: 160020 - RNA, 19 nt, Homo sapiens
  misc_RNA (1)...(19): siRNA sense strand
acaaccgucuguacauuaa

SEQ ID NO: 160021 - RNA, 19 nt, Homo sapiens
  misc_RNA (1)...(19): siRNA sense strand
ccugaugucuucuuuguuc

SEQ ID NO: 160022 - RNA, 19 nt, Homo sapiens
  misc_RNA (1)...(19): siRNA sense strand
gaagcuacagugagucuga

SEQ ID NO: 160023 - RNA, 19 nt, Homo sapiens
  misc_RNA (1)...(19): siRNA sense strand
ucaaggccguggacaucua

SEQ ID NO: 160024 - RNA, 19 nt, Homo sapiens
  misc_RNA (1)...(19): siRNA sense strand
gaaguucccgugcaugugu

SEQ ID NO: 160025 - RNA, 19 nt, Homo sapiens
  misc_RNA (1)...(19): siRNA sense strand
gcaacaagagcaugaccuu

SEQ ID NO: 160026 - RNA, 19 nt, Homo sapiens
  misc_RNA (1)...(19): siRNA sense strand
gaagaagaaaggcaagaca

SEQ ID NO: 160027 - RNA, 19 nt, Homo sapiens
  misc_RNA (1)...(19): siRNA sense strand
ccacaucuucuucuucuug

SEQ ID NO: 160028 - RNA, 19 nt, Homo sapiens
  misc_RNA (1)...(19): siRNA sense strand
gcagaaaacccaagaggaa

SEQ ID NO: 160029 - RNA, 19 nt, Homo sapiens
  misc_RNA (1)...(19): siRNA sense strand
aagaagaaccuugauguga

SEQ ID NO: 160030 - RNA, 19 nt, Homo sapiens
  misc_RNA (1)...(19): siRNA sense strand
gccauauccugacagaaga

SEQ ID NO: 160031 - RNA, 19 nt, Homo sapiens
  misc_RNA (1)...(19): siRNA sense strand
gagaaguucccgugcaugu

SEQ ID NO: 160032 - RNA, 19 nt, Homo sapiens
  misc_RNA (1)...(19): siRNA sense strand
gagcuaugccuauacagau

SEQ ID NO: 160033 - RNA, 19 nt, Homo sapiens
  misc_RNA (1)...(19): siRNA sense strand
cuggagagcuaugccuaua

SEQ ID NO: 160034 - RNA, 19 nt, Homo sapiens
  misc_RNA (1)...(19): siRNA sense strand
ggucccugaugucuucuuu

SEQ ID NO: 160035 - RNA, 19 nt, Homo sapiens
  misc_RNA (1)...(19): siRNA sense strand
ggaagcugcgggagaaguu

SEQ ID NO: 160036 - RNA, 19 nt, Homo sapiens
  misc_RNA (1)...(19): siRNA sense strand
gaaaugcccaagccaaguc

SEQ ID NO: 160037 - RNA, 19 nt, Homo sapiens
  misc_RNA (1)...(19): siRNA sense strand
ucagaaauuucacacaacu

SEQ ID NO: 160038 - RNA, 19 nt, Homo sapiens
  misc_RNA (1)...(19): siRNA sense strand
guaugcggcugucaacuac

SEQ ID NO: 160039 - RNA, 19 nt, Homo sapiens
  misc_RNA (1)...(19): siRNA sense strand
cagaauacccaugccauug

SEQ ID NO: 160040 - RNA, 19 nt, Homo sapiens
  misc_RNA (1)...(19): siRNA sense strand
agaagaaaggcaagacaaa

SEQ ID NO: 160041 - RNA, 19 nt, Homo sapiens
  misc_RNA (1)...(19): siRNA sense strand
gaagaaaggcaagacaaaa

SEQ ID NO: 160042 - RNA, 19 nt, Homo sapiens
  misc_RNA (1)...(19): siRNA sense strand
ucccagaccuguucuuugg

SEQ ID NO: 160043 - RNA, 19 nt, Homo sapiens
  misc_RNA (1)...(19): siRNA sense strand
uaagaagaaccuugaugug

SEQ ID NO: 160044 - RNA, 19 nt, Homo sapiens
  misc_RNA (1)...(19): siRNA sense strand
cuguacagcaugaggauua

SEQ ID NO: 160045 - RNA, 19 nt, Homo sapiens
  misc_RNA (1)...(19): siRNA sense strand
agaauacccaugccauuga

SEQ ID NO: 160046 - RNA, 19 nt, Homo sapiens
  misc_RNA (1)...(19): siRNA sense strand
ccagaauacccaugccauu

SEQ ID NO: 160047 - RNA, 19 nt, Homo sapiens
  misc_RNA (1)...(19): siRNA sense strand
cagaagccauauccugaca

SEQ ID NO: 160048 - RNA, 19 nt, Homo sapiens
  misc_RNA (1)...(19): siRNA sense strand
cccuguaccugcggcauua

SEQ ID NO: 160049 - RNA, 19 nt, Homo sapiens
  misc_RNA (1)...(19): siRNA sense strand
gaauacccaugccauugac

SEQ ID NO: 160050 - RNA, 19 nt, Homo sapiens
  misc_RNA (1)...(19): siRNA sense strand
ucacgacggugcugaccau

SEQ ID NO: 160051 - RNA, 19 nt, Homo sapiens
  misc_RNA (1)...(19): siRNA sense strand
caccaccacugacaacauc

SEQ ID NO: 160052 - RNA, 19 nt, Homo sapiens
  misc_RNA (1)...(19): siRNA sense strand
gaugagaggcuagcuuucu

SEQ ID NO: 160053 - RNA, 19 nt, Homo sapiens
  misc_RNA (1)...(19): siRNA sense strand
ggaaaugcccaagccaagu

SEQ ID NO: 160054 - RNA, 19 nt, Homo sapiens
  misc_RNA (1)...(19): siRNA sense strand
ucuucuugcuccaaacaua

SEQ ID NO: 160055 - RNA, 19 nt, Homo sapiens
  misc_RNA (1)...(19): siRNA sense strand
gaagaucugggucccugau

SEQ ID NO: 160056 - RNA, 19 nt, Homo sapiens
  misc_RNA (1)...(19): siRNA sense strand
gcacgacuucagcaugaga

SEQ ID NO: 160057 - RNA, 19 nt, Homo sapiens
  misc_RNA (1)...(19): siRNA sense strand
cgacggugcugaccaugac

SEQ ID NO: 160058 - RNA, 19 nt, Homo sapiens
  misc_RNA (1)...(19): siRNA sense strand
gagcugugccugccagagu

SEQ ID NO: 160059 - RNA, 19 nt, Homo sapiens
  misc_RNA (1)...(19): siRNA sense strand
agaaauuucacacaacuuc

SEQ ID NO: 160060 - RNA, 19 nt, Homo sapiens
  misc_RNA (1)...(19): siRNA sense strand
gaucuccuugucucaguuu

SEQ ID NO: 160061 - RNA, 19 nt, Homo sapiens
  misc_RNA (1)...(19): siRNA sense strand
acaagagcaugaccuucga

SEQ ID NO: 160062 - RNA, 19 nt, Homo sapiens
  misc_RNA (1)...(19): siRNA sense strand
cagauggacacgugcugua

SEQ ID NO: 160063 - RNA, 19 nt, Homo sapiens
  misc_RNA (1)...(19): siRNA sense strand
ucccugaugucuucuuugu

SEQ ID NO: 160064 - RNA, 19 nt, Homo sapiens
  misc_RNA (1)...(19): siRNA sense strand
auaagaagaaccuugaugu

SEQ ID NO: 160065 - RNA, 19 nt, Homo sapiens
  misc_RNA (1)...(19): siRNA sense strand
uauaagaagaaccuugaug

SEQ ID NO: 160066 - RNA, 19 nt, Homo sapiens
  misc_RNA (1)...(19): siRNA sense strand
ucuccgagguggacaugga

SEQ ID NO: 160067 - RNA, 19 nt, Homo sapiens
  misc_RNA (1)...(19): siRNA sense strand
cgccacaucuucuucuucu

SEQ ID NO: 160068 - RNA, 19 nt, Homo sapiens
  misc_RNA (1)...(19): siRNA sense strand
gcuaugccuauacagauga

SEQ ID NO: 160069 - RNA, 19 nt, Homo sapiens
  misc_RNA (1)...(19): siRNA sense strand
agccaacgcugccagaaag

SEQ ID NO: 160070 - RNA, 19 nt, Homo sapiens
  misc_RNA (1)...(19): siRNA sense strand
aacggaagcugcgggagaa

SEQ ID NO: 160071 - RNA, 19 nt, Homo sapiens
  misc_RNA (1)...(19): siRNA sense strand
ccaagauccggaagggaaa

SEQ ID NO: 160072 - RNA, 19 nt, Homo sapiens
  misc_RNA (1)...(19): siRNA sense strand
gaagccaacgcugccagaa

SEQ ID NO: 160073 - RNA, 19 nt, Homo sapiens
  misc_RNA (1)...(19): siRNA sense strand
ggcauuacuggaaggauga

SEQ ID NO: 160074 - RNA, 19 nt, Homo sapiens
  misc_RNA (1)...(19): siRNA sense strand
agaaaggcaagacaaaaua

SEQ ID NO: 160075 - RNA, 19 nt, Homo sapiens
  misc_RNA (1)...(19): siRNA sense strand
uauccugacagaagaagaa

SEQ ID NO: 160076 - RNA, 19 nt, Homo sapiens
  misc_RNA (1)...(19): siRNA sense strand
aguaugcggcugucaacua

SEQ ID NO: 160077 - RNA, 19 nt, Homo sapiens
  misc_RNA (1)...(19): siRNA sense strand
augcugcacuggaagaaug

SEQ ID NO: 160078 - RNA, 19 nt, Homo sapiens
  misc_RNA (1)...(19): siRNA sense strand
aggaugagaggcuagcuuu

SEQ ID NO: 160079 - RNA, 19 nt, Homo sapiens
  misc_RNA (1)...(19): siRNA sense strand
aagaagaaaggcaagacaa

SEQ ID NO: 160080 - RNA, 19 nt, Homo sapiens
  misc_RNA (1)...(19): siRNA sense strand
cucagcagcuucucagagu

SEQ ID NO: 160081 - RNA, 19 nt, Homo sapiens
  misc_RNA (1)...(19): siRNA sense strand
cugggucccugaugucuuc

SEQ ID NO: 160082 - RNA, 19 nt, Homo sapiens
  misc_RNA (1)...(19): siRNA sense strand
ucucggugcuggaguaugc

SEQ ID NO: 160083 - RNA, 19 nt, Homo sapiens
  misc_RNA (1)...(19): siRNA sense strand
ugauauucccugccuccua

SEQ ID NO: 160084 - RNA, 19 nt, Homo sapiens
  misc_RNA (1)...(19): siRNA sense strand
gaucugggucccugauguc

SEQ ID NO: 160085 - RNA, 19 nt, Homo sapiens
  misc_RNA (1)...(19): siRNA sense strand
gccagcaacaagagcauga

SEQ ID NO: 160086 - RNA, 19 nt, Homo sapiens
  misc_RNA (1)...(19): siRNA sense strand
gaaaggcaagacaaaauag

SEQ ID NO: 160087 - RNA, 19 nt, Homo sapiens
  misc_RNA (1)...(19): siRNA sense strand
ggaguaugcggcugucaac

SEQ ID NO: 160088 - RNA, 19 nt, Homo sapiens
  misc_RNA (1)...(19): siRNA sense strand
cugaggguguucccagaug

SEQ ID NO: 160089 - RNA, 19 nt, Homo sapiens
  misc_RNA (1)...(19): siRNA sense strand
gcuggagagcuaugccuau

SEQ ID NO: 160090 - RNA, 19 nt, Homo sapiens
  misc_RNA (1)...(19): siRNA sense strand
caacgcugccagaaagaag

SEQ ID NO: 160091 - RNA, 19 nt, Homo sapiens
  misc_RNA (1)...(19): siRNA sense strand
agagcuaugccuauacaga

SEQ ID NO: 160092 - RNA, 19 nt, Homo sapiens
  misc_RNA (1)...(19): siRNA sense strand
gcacaacuauuucuuaugu

SEQ ID NO: 160093 - RNA, 19 nt, Homo sapiens
  misc_RNA (1)...(19): siRNA sense strand
gcucaagggucacgacuua

SEQ ID NO: 160094 - RNA, 19 nt, Homo sapiens
  misc_RNA (1)...(19): siRNA sense strand
ggaaauaucccaccaaguu

SEQ ID NO: 160095 - RNA, 19 nt, Homo sapiens
  misc_RNA (1)...(19): siRNA sense strand
gaagauaugugaagaagca

SEQ ID NO: 160096 - RNA, 19 nt, Homo sapiens
  misc_RNA (1)...(19): siRNA sense strand
ggaccagucuauaucauuu

SEQ ID NO: 160097 - RNA, 19 nt, Homo sapiens
  misc_RNA (1)...(19): siRNA sense strand
gaggagugauggaagcuua

SEQ ID NO: 160098 - RNA, 19 nt, Homo sapiens
  misc_RNA (1)...(19): siRNA sense strand
gaaggaaucuauccaaggu

SEQ ID NO: 160099 - RNA, 19 nt, Homo sapiens
  misc_RNA (1)...(19): siRNA sense strand
uaggagagcauauagauua

SEQ ID NO: 160100 - RNA, 19 nt, Homo sapiens
  misc_RNA (1)...(19): siRNA sense strand
gagagcauauagauuauug

SEQ ID NO: 160101 - RNA, 19 nt, Homo sapiens
  misc_RNA (1)...(19): siRNA sense strand
ggcagaacauccuagguua

SEQ ID NO: 160102 - RNA, 19 nt, Homo sapiens
  misc_RNA (1)...(19): siRNA sense strand
cuaauaacauccagauuga

SEQ ID NO: 160103 - RNA, 19 nt, Homo sapiens
  misc_RNA (1)...(19): siRNA sense strand
agaacaagaugugcuaaua

SEQ ID NO: 160104 - RNA, 19 nt, Homo sapiens
  misc_RNA (1)...(19): siRNA sense strand
caggaacacuuuggucuua

SEQ ID NO: 160105 - RNA, 19 nt, Homo sapiens
  misc_RNA (1)...(19): siRNA sense strand
cgaagcuccuggcuaaaua

SEQ ID NO: 160106 - RNA, 19 nt, Homo sapiens
  misc_RNA (1)...(19): siRNA sense strand
caaaugugcacaaagcuua

SEQ ID NO: 160107 - RNA, 19 nt, Homo sapiens
  misc_RNA (1)...(19): siRNA sense strand
gauauucuguucuuccuau

SEQ ID NO: 160108 - RNA, 19 nt, Homo sapiens
  misc_RNA (1)...(19): siRNA sense strand
gcuaauaacauccagauug

SEQ ID NO: 160109 - RNA, 19 nt, Homo sapiens
  misc_RNA (1)...(19): siRNA sense strand
caacuucccauuucaauau

SEQ ID NO: 160110 - RNA, 19 nt, Homo sapiens
  misc_RNA (1)...(19): siRNA sense strand
gcuccuggcuaaauacaaa

SEQ ID NO: 160111 - RNA, 19 nt, Homo sapiens
  misc_RNA (1)...(19): siRNA sense strand
gaacauccuagguuacuga

SEQ ID NO: 160112 - RNA, 19 nt, Homo sapiens
  misc_RNA (1)...(19): siRNA sense strand
gaacaagaugugcuaauag

SEQ ID NO: 160113 - RNA, 19 nt, Homo sapiens
  misc_RNA (1)...(19): siRNA sense strand
cugcgaagcuccuggcuaa

SEQ ID NO: 160114 - RNA, 19 nt, Homo sapiens
  misc_RNA (1)...(19): siRNA sense strand
ggauuagucuagaagaaau

SEQ ID NO: 160115 - RNA, 19 nt, Homo sapiens
  misc_RNA (1)...(19): siRNA sense strand
ccaggaagagucaacauaa

SEQ ID NO: 160116 - RNA, 19 nt, Homo sapiens
  misc_RNA (1)...(19): siRNA sense strand
cauaauaggagagcauaua

SEQ ID NO: 160117 - RNA, 19 nt, Homo sapiens
  misc_RNA (1)...(19): siRNA sense strand
gcaacuucccauuucaaua

SEQ ID NO: 160118 - RNA, 19 nt, Homo sapiens
  misc_RNA (1)...(19): siRNA sense strand
ggaagagucaacauaauag

SEQ ID NO: 160119 - RNA, 19 nt, Homo sapiens
  misc_RNA (1)...(19): siRNA sense strand
gaauuagccuggaggaacu

SEQ ID NO: 160120 - RNA, 19 nt, Homo sapiens
  misc_RNA (1)...(19): siRNA sense strand
gcaggugucugggaauuag

SEQ ID NO: 160121 - RNA, 19 nt, Homo sapiens
  misc_RNA (1)...(19): siRNA sense strand
uauccggacuucaguacua

SEQ ID NO: 160122 - RNA, 19 nt, Homo sapiens
  misc_RNA (1)...(19): siRNA sense strand
gaacacuuuggucuuagua

SEQ ID NO: 160123 - RNA, 19 nt, Homo sapiens
  misc_RNA (1)...(19): siRNA sense strand
uggaggaggugcaggcuaa

SEQ ID NO: 160124 - RNA, 19 nt, Homo sapiens
  misc_RNA (1)...(19): siRNA sense strand
gcagcaacuucccauuuca

SEQ ID NO: 160125 - RNA, 19 nt, Homo sapiens
  misc_RNA (1)...(19): siRNA sense strand
gaaauaucccaccaaguuc

SEQ ID NO: 160126 - RNA, 19 nt, Homo sapiens
  misc_RNA (1)...(19): siRNA sense strand
gaggaacuccgaacccaaa

SEQ ID NO: 160127 - RNA, 19 nt, Homo sapiens
  misc_RNA (1)...(19): siRNA sense strand
ggcagcaacuucccauuuc

SEQ ID NO: 160128 - RNA, 19 nt, Homo sapiens
  misc_RNA (1)...(19): siRNA sense strand
ucacagugcugggaaggaa

SEQ ID NO: 160129 - RNA, 19 nt, Homo sapiens
  misc_RNA (1)...(19): siRNA sense strand
gaagcuaaaggagauguuu

SEQ ID NO: 160130 - RNA, 19 nt, Homo sapiens
  misc_RNA (1)...(19): siRNA sense strand
ccaaguugauagaauuuag

SEQ ID NO: 160131 - RNA, 19 nt, Homo sapiens
  misc_RNA (1)...(19): siRNA sense strand
caggaagagucaacauaau

SEQ ID NO: 160132 - RNA, 19 nt, Homo sapiens
  misc_RNA (1)...(19): siRNA sense strand
uuaguaaccugacuggaau

SEQ ID NO: 160133 - RNA, 19 nt, Homo sapiens
  misc_RNA (1)...(19): siRNA sense strand
uuaaaggaauucaggaaca

SEQ ID NO: 160134 - RNA, 19 nt, Homo sapiens
  misc_RNA (1)...(19): siRNA sense strand
aggaagagucaacauaaua

SEQ ID NO: 160135 - RNA, 19 nt, Homo sapiens
  misc_RNA (1)...(19): siRNA sense strand
gcaaaugugcacaaagcuu

SEQ ID NO: 160136 - RNA, 19 nt, Homo sapiens
  misc_RNA (1)...(19): siRNA sense strand
cgcgagugcuccaguuuaa

SEQ ID NO: 160137 - RNA, 19 nt, Homo sapiens
  misc_RNA (1)...(19): siRNA sense strand
uagaagaaaugcuguuggu

SEQ ID NO: 160138 - RNA, 19 nt, Homo sapiens
  misc_RNA (1)...(19): siRNA sense strand
ggagcaguguuugugauug

SEQ ID NO: 160139 - RNA, 19 nt, Homo sapiens
  misc_RNA (1)...(19): siRNA sense strand
uggcacaacuauuucuuau

SEQ ID NO: 160140 - RNA, 19 nt, Homo sapiens
  misc_RNA (1)...(19): siRNA sense strand
gcgcgagugcuccaguuua

SEQ ID NO: 160141 - RNA, 19 nt, Homo sapiens
  misc_RNA (1)...(19): siRNA sense strand
gguggaacuugcagaaauc

SEQ ID NO: 160142 - RNA, 19 nt, Homo sapiens
  misc_RNA (1)...(19): siRNA sense strand
gagcauauagauuauugug

SEQ ID NO: 160143 - RNA, 19 nt, Homo sapiens
  misc_RNA (1)...(19): siRNA sense strand
gugcucaucuucaaacucu

SEQ ID NO: 160144 - RNA, 19 nt, Homo sapiens
  misc_RNA (1)...(19): siRNA sense strand
gcaaugggacaaaguacug

SEQ ID NO: 160145 - RNA, 19 nt, Homo sapiens
  misc_RNA (1)...(19): siRNA sense strand
cagucuauaucauuucuug

SEQ ID NO: 160146 - RNA, 19 nt, Homo sapiens
  misc_RNA (1)...(19): siRNA sense strand
agaaaucugugccaagagu

SEQ ID NO: 160147 - RNA, 19 nt, Homo sapiens
  misc_RNA (1)...(19): siRNA sense strand
ccugguagauggaaauauc

SEQ ID NO: 160148 - RNA, 19 nt, Homo sapiens
  misc_RNA (1)...(19): siRNA sense strand
uaaccugacuggaaugaac

SEQ ID NO: 160149 - RNA, 19 nt, Homo sapiens
  misc_RNA (1)...(19): siRNA sense strand
ggaacacuuuggucuuagu

SEQ ID NO: 160150 - RNA, 19 nt, Homo sapiens
  misc_RNA (1)...(19): siRNA sense strand
ucaguacuagugcuaauaa

SEQ ID NO: 160151 - RNA, 19 nt, Homo sapiens
  misc_RNA (1)...(19): siRNA sense strand
uagcaaaugugcacaaagc

SEQ ID NO: 160152 - RNA, 19 nt, Homo sapiens
  misc_RNA (1)...(19): siRNA sense strand
gggcaaagcauguguacag

SEQ ID NO: 160153 - RNA, 19 nt, Homo sapiens
  misc_RNA (1)...(19): siRNA sense strand
gggauuagucuagaagaaa

SEQ ID NO: 160154 - RNA, 19 nt, Homo sapiens
  misc_RNA (1)...(19): siRNA sense strand
ggaggugcaggcuaaacua

SEQ ID NO: 160155 - RNA, 19 nt, Homo sapiens
  misc_RNA (1)...(19): siRNA sense strand
gaucuauucccaaguuuua

SEQ ID NO: 160156 - RNA, 19 nt, Homo sapiens
  misc_RNA (1)...(19): siRNA sense strand
caagagugagcguuacauu

SEQ ID NO: 160157 - RNA, 19 nt, Homo sapiens
  misc_RNA (1)...(19): siRNA sense strand
ccagugcuuuggucuguug

SEQ ID NO: 160158 - RNA, 19 nt, Homo sapiens
  misc_RNA (1)...(19): siRNA sense strand
ugaauaaggcagcaacuuc

SEQ ID NO: 160159 - RNA, 19 nt, Homo sapiens
  misc_RNA (1)...(19): siRNA sense strand
cuagguuacugaagcuaaa

SEQ ID NO: 160160 - RNA, 19 nt, Homo sapiens
  misc_RNA (1)...(19): siRNA sense strand
uauguggacuuaaaggaau

SEQ ID NO: 160161 - RNA, 19 nt, Homo sapiens
  misc_RNA (1)...(19): siRNA sense strand
gagcaguguuugugauugc

SEQ ID NO: 160162 - RNA, 19 nt, Homo sapiens
  misc_RNA (1)...(19): siRNA sense strand
caccggagaagcaaaguuu

SEQ ID NO: 160163 - RNA, 19 nt, Homo sapiens
  misc_RNA (1)...(19): siRNA sense strand
caacuggccaauacaaauc

SEQ ID NO: 160164 - RNA, 19 nt, Homo sapiens
  misc_RNA (1)...(19): siRNA sense strand
cugccaaguugauagaauu

SEQ ID NO: 160165 - RNA, 19 nt, Homo sapiens
  misc_RNA (1)...(19): siRNA sense strand
gugccaagagugagcguua

SEQ ID NO: 160166 - RNA, 19 nt, Homo sapiens
  misc_RNA (1)...(19): siRNA sense strand
guacuagugcuaauaacau

SEQ ID NO: 160167 - RNA, 19 nt, Homo sapiens
  misc_RNA (1)...(19): siRNA sense strand
gcauggaccagucuauauc

SEQ ID NO: 160168 - RNA, 19 nt, Homo sapiens
  misc_RNA (1)...(19): siRNA sense strand
gcccagcuuucuagcaaau

SEQ ID NO: 160169 - RNA, 19 nt, Homo sapiens
  misc_RNA (1)...(19): siRNA sense strand
gcgaagcuccuggcuaaau

SEQ ID NO: 160170 - RNA, 19 nt, Homo sapiens
  misc_RNA (1)...(19): siRNA sense strand
acaguuguguggagaugaa

SEQ ID NO: 160171 - RNA, 19 nt, Homo sapiens
  misc_RNA (1)...(19): siRNA sense strand
ggaauucaggaacacuuug

SEQ ID NO: 160172 - RNA, 19 nt, Homo sapiens
  misc_RNA (1)...(19): siRNA sense strand
cgagugcuccaguuuaaga

SEQ ID NO: 160173 - RNA, 19 nt, Homo sapiens
  misc_RNA (1)...(19): siRNA sense strand
ccaacuggccaauacaaau

SEQ ID NO: 160174 - RNA, 19 nt, Homo sapiens
  misc_RNA (1)...(19): siRNA sense strand
aagaagauaugugaagaag

SEQ ID NO: 160175 - RNA, 19 nt, Homo sapiens
  misc_RNA (1)...(19): siRNA sense strand
gugcuccaguuuaagaaga

SEQ ID NO: 160176 - RNA, 19 nt, Homo sapiens
  misc_RNA (1)...(19): siRNA sense strand
uccaaacacucaagaugug

SEQ ID NO: 160177 - RNA, 19 nt, Homo sapiens
  misc_RNA (1)...(19): siRNA sense strand
gaagaaggaacugccaagu

SEQ ID NO: 160178 - RNA, 19 nt, Homo sapiens
  misc_RNA (1)...(19): siRNA sense strand
guggcacaacuauuucuua

SEQ ID NO: 160179 - RNA, 19 nt, Homo sapiens
  misc_RNA (1)...(19): siRNA sense strand
gaacugccugguagaugga

SEQ ID NO: 160180 - RNA, 19 nt, Homo sapiens
  misc_RNA (1)...(19): siRNA sense strand
aaaguuuguuugcuaccaa

SEQ ID NO: 160181 - RNA, 19 nt, Homo sapiens
  misc_RNA (1)...(19): siRNA sense strand
uccuauggcuguagaacaa

SEQ ID NO: 160182 - RNA, 19 nt, Homo sapiens
  misc_RNA (1)...(19): siRNA sense strand
ggagagcauauagauuauu

SEQ ID NO: 160183 - RNA, 19 nt, Homo sapiens
  misc_RNA (1)...(19): siRNA sense strand
caacauaauaggagagcau

SEQ ID NO: 160184 - RNA, 19 nt, Homo sapiens
  misc_RNA (1)...(19): siRNA sense strand
ggcauggaccagucuauau

SEQ ID NO: 160185 - RNA, 19 nt, Homo sapiens
  misc_RNA (1)...(19): siRNA sense strand
cuuaguaaccugacuggaa

SEQ ID NO: 160186 - RNA, 19 nt, Homo sapiens
  misc_RNA (1)...(19): siRNA sense strand
ccagcuuucuagcaaaugu

SEQ ID NO: 160187 - RNA, 19 nt, Homo sapiens
  misc_RNA (1)...(19): siRNA sense strand
gcuccaguuuaagaagaua

SEQ ID NO: 160188 - RNA, 19 nt, Homo sapiens
  misc_RNA (1)...(19): siRNA sense strand
uggcagaacauccuagguu

SEQ ID NO: 160189 - RNA, 19 nt, Homo sapiens
  misc_RNA (1)...(19): siRNA sense strand
gcucaucuucaaacucuau

SEQ ID NO: 160190 - RNA, 19 nt, Homo sapiens
  misc_RNA (1)...(19): siRNA sense strand
caggcuaaacuagggauua

SEQ ID NO: 160191 - RNA, 19 nt, Homo sapiens
  misc_RNA (1)...(19): siRNA sense strand
uggaucagcugguggacau

SEQ ID NO: 160192 - RNA, 19 nt, Homo sapiens
  misc_RNA (1)...(19): siRNA sense strand
cauagaagcuguagaugaa

SEQ ID NO: 160193 - RNA, 19 nt, Homo sapiens
  misc_RNA (1)...(19): siRNA sense strand
gaacauagaagcuguagau

SEQ ID NO: 160194 - RNA, 19 nt, Homo sapiens
  misc_RNA (1)...(19): siRNA sense strand
ugaacaagaugguaucaaa

SEQ ID NO: 160195 - RNA, 19 nt, Homo sapiens
  misc_RNA (1)...(19): siRNA sense strand
gaagauaaagcucauaagg

SEQ ID NO: 160196 - RNA, 19 nt, Homo sapiens
  misc_RNA (1)...(19): siRNA sense strand
gaaaccaaaccuaaggaaa

SEQ ID NO: 160197 - RNA, 19 nt, Homo sapiens
  misc_RNA (1)...(19): siRNA sense strand
ggacgaggguaaagaagag

SEQ ID NO: 160198 - RNA, 19 nt, Homo sapiens
  misc_RNA (1)...(19): siRNA sense strand
uagcuuccguggacacaua

SEQ ID NO: 160199 - RNA, 19 nt, Homo sapiens
  misc_RNA (1)...(19): siRNA sense strand
ccacuaaagcuuccacuga

SEQ ID NO: 160200 - RNA, 19 nt, Homo sapiens
  misc_RNA (1)...(19): siRNA sense strand
ggagaaggcaccacuacug

SEQ ID NO: 160201 - RNA, 19 nt, Homo sapiens
  misc_RNA (1)...(19): siRNA sense strand
cagaagauaaagcucauaa

SEQ ID NO: 160202 - RNA, 19 nt, Homo sapiens
  misc_RNA (1)...(19): siRNA sense strand
gcaggacgaggguaaagaa

SEQ ID NO: 160203 - RNA, 19 nt, Homo sapiens
  misc_RNA (1)...(19): siRNA sense strand
acuaaagcuuccacugaua

SEQ ID NO: 160204 - RNA, 19 nt, Homo sapiens
  misc_RNA (1)...(19): siRNA sense strand
uagaugaaaccaaaccuaa

SEQ ID NO: 160205 - RNA, 19 nt, Homo sapiens
  misc_RNA (1)...(19): siRNA sense strand
cuaaagcuuccacugauaa

SEQ ID NO: 160206 - RNA, 19 nt, Homo sapiens
  misc_RNA (1)...(19): siRNA sense strand
cacuaaagcuuccacugau

SEQ ID NO: 160207 - RNA, 19 nt, Homo sapiens
  misc_RNA (1)...(19): siRNA sense strand
guagaugaaaccaaaccua

SEQ ID NO: 160208 - RNA, 19 nt, Homo sapiens
  misc_RNA (1)...(19): siRNA sense strand
ucauaaggccgcaaccaaa

SEQ ID NO: 160209 - RNA, 19 nt, Homo sapiens
  misc_RNA (1)...(19): siRNA sense strand
gaacaagaugguaucaaac

SEQ ID NO: 160210 - RNA, 19 nt, Homo sapiens
  misc_RNA (1)...(19): siRNA sense strand
aaaccaaaccuaaggaaag

SEQ ID NO: 160211 - RNA, 19 nt, Homo sapiens
  misc_RNA (1)...(19): siRNA sense strand
ggcugaagcuaauaagaag

SEQ ID NO: 160212 - RNA, 19 nt, Homo sapiens
  misc_RNA (1)...(19): siRNA sense strand
acauagaagcuguagauga

SEQ ID NO: 160213 - RNA, 19 nt, Homo sapiens
  misc_RNA (1)...(19): siRNA sense strand
gaugaaaccaaaccuaagg

SEQ ID NO: 160214 - RNA, 19 nt, Homo sapiens
  misc_RNA (1)...(19): siRNA sense strand
guggacacauaacaaggaa

SEQ ID NO: 160215 - RNA, 19 nt, Homo sapiens
  misc_RNA (1)...(19): siRNA sense strand
aaggagagaagaaggauga

SEQ ID NO: 160216 - RNA, 19 nt, Homo sapiens
  misc_RNA (1)...(19): siRNA sense strand
ggacacauaacaaggaaaa

SEQ ID NO: 160217 - RNA, 19 nt, Homo sapiens
  misc_RNA (1)...(19): siRNA sense strand
ucaaaggagagaagaagga

SEQ ID NO: 160218 - RNA, 19 nt, Homo sapiens
  misc_RNA (1)...(19): siRNA sense strand
cugcugaggcugaagcuaa

SEQ ID NO: 160219 - RNA, 19 nt, Homo sapiens
  misc_RNA (1)...(19): siRNA sense strand
cggcaaagcaggagaaacu

SEQ ID NO: 160220 - RNA, 19 nt, Homo sapiens
  misc_RNA (1)...(19): siRNA sense strand
aagcuaauaagaaggauga

SEQ ID NO: 160221 - RNA, 19 nt, Homo sapiens
  misc_RNA (1)...(19): siRNA sense strand
ccaaaagauugaacaagau

SEQ ID NO: 160222 - RNA, 19 nt, Homo sapiens
  misc_RNA (1)...(19): siRNA sense strand
aaccaaaccuaaggaaagu

SEQ ID NO: 160223 - RNA, 19 nt, Homo sapiens
  misc_RNA (1)...(19): siRNA sense strand
aggcugaagcuaauaagaa

SEQ ID NO: 160224 - RNA, 19 nt, Homo sapiens
  misc_RNA (1)...(19): siRNA sense strand
gcucaaaggagagaagaag

SEQ ID NO: 160225 - RNA, 19 nt, Homo sapiens
  misc_RNA (1)...(19): siRNA sense strand
gcaacagcccagccuccaa

SEQ ID NO: 160226 - RNA, 19 nt, Homo sapiens
  misc_RNA (1)...(19): siRNA sense strand
ccaagcugcugaggcugaa

SEQ ID NO: 160227 - RNA, 19 nt, Homo sapiens
  misc_RNA (1)...(19): siRNA sense strand
gaggcugaagcuaauaaga

SEQ ID NO: 160228 - RNA, 19 nt, Homo sapiens
  misc_RNA (1)...(19): siRNA sense strand
ugaaaccaaaccuaaggaa

SEQ ID NO: 160229 - RNA, 19 nt, Homo sapiens
  misc_RNA (1)...(19): siRNA sense strand
uagaagcuguagaugaaac

SEQ ID NO: 160230 - RNA, 19 nt, Homo sapiens
  misc_RNA (1)...(19): siRNA sense strand
caaaggagagaagaaggau

SEQ ID NO: 160231 - RNA, 19 nt, Homo sapiens
  misc_RNA (1)...(19): siRNA sense strand
agcuguagaugaaaccaaa

SEQ ID NO: 160232 - RNA, 19 nt, Homo sapiens
  misc_RNA (1)...(19): siRNA sense strand
caaaccagaagauaaagcu

SEQ ID NO: 160233 - RNA, 19 nt, Homo sapiens
  misc_RNA (1)...(19): siRNA sense strand
accaaaagauugaacaaga

SEQ ID NO: 160234 - RNA, 19 nt, Homo sapiens
  misc_RNA (1)...(19): siRNA sense strand
gcugugcuguaugagaaga

SEQ ID NO: 160235 - RNA, 19 nt, Homo sapiens
  misc_RNA (1)...(19): siRNA sense strand
ccaagcugaagagaacaua

SEQ ID NO: 160236 - RNA, 19 nt, Homo sapiens
  misc_RNA (1)...(19): siRNA sense strand
accugaggcugaccaagaa

SEQ ID NO: 160237 - RNA, 19 nt, Homo sapiens
  misc_RNA (1)...(19): siRNA sense strand
aaccugaggcugaccaaga

SEQ ID NO: 160238 - RNA, 19 nt, Homo sapiens
  misc_RNA (1)...(19): siRNA sense strand
aagcugaagagaacauaga

SEQ ID NO: 160239 - RNA, 19 nt, Homo sapiens
  misc_RNA (1)...(19): siRNA sense strand
gaacagggugugauuaaua

SEQ ID NO: 160240 - RNA, 19 nt, Homo sapiens
  misc_RNA (1)...(19): siRNA sense strand
gcccaaagaugauauugua

SEQ ID NO: 160241 - RNA, 19 nt, Homo sapiens
  misc_RNA (1)...(19): siRNA sense strand
caaaggagcuggcguuaca

SEQ ID NO: 160242 - RNA, 19 nt, Homo sapiens
  misc_RNA (1)...(19): siRNA sense strand
caaauuugcugacuucaug

SEQ ID NO: 160243 - RNA, 19 nt, Homo sapiens
  misc_RNA (1)...(19): siRNA sense strand
uggcagaccuucaccuuua

SEQ ID NO: 160244 - RNA, 19 nt, Homo sapiens
  misc_RNA (1)...(19): siRNA sense strand
uggaguaucucacaaagua

SEQ ID NO: 160245 - RNA, 19 nt, Homo sapiens
  misc_RNA (1)...(19): siRNA sense strand
ugagaaaccucugaaagaa

SEQ ID NO: 160246 - RNA, 19 nt, Homo sapiens
  misc_RNA (1)...(19): siRNA sense strand
guauuaggcuauuucauug

SEQ ID NO: 160247 - RNA, 19 nt, Homo sapiens
  misc_RNA (1)...(19): siRNA sense strand
ccaaguagacguagacaaa

SEQ ID NO: 160248 - RNA, 19 nt, Homo sapiens
  misc_RNA (1)...(19): siRNA sense strand
agaaggagaugaacagaga

SEQ ID NO: 160249 - RNA, 19 nt, Homo sapiens
  misc_RNA (1)...(19): siRNA sense strand
aaacaugccuggguacuug

SEQ ID NO: 160250 - RNA, 19 nt, Homo sapiens
  misc_RNA (1)...(19): siRNA sense strand
gaaguuguuccgaauguaa

SEQ ID NO: 160251 - RNA, 19 nt, Homo sapiens
  misc_RNA (1)...(19): siRNA sense strand
aaagaccucuggccaugua

SEQ ID NO: 160252 - RNA, 19 nt, Homo sapiens
  misc_RNA (1)...(19): siRNA sense strand
uggaguaucuugccauuug

SEQ ID NO: 160253 - RNA, 19 nt, Homo sapiens
  misc_RNA (1)...(19): siRNA sense strand
ggccagguauccucuguuu

SEQ ID NO: 160254 - RNA, 19 nt, Homo sapiens
  misc_RNA (1)...(19): siRNA sense strand
ugugaugagugcuacauua

SEQ ID NO: 160255 - RNA, 19 nt, Homo sapiens
  misc_RNA (1)...(19): siRNA sense strand
gugcugaucguuccuguua

SEQ ID NO: 160256 - RNA, 19 nt, Homo sapiens
  misc_RNA (1)...(19): siRNA sense strand
gaaaagaaaucagaaaugg

SEQ ID NO: 160257 - RNA, 19 nt, Homo sapiens
  misc_RNA (1)...(19): siRNA sense strand
gaucagagucagagaauuc

SEQ ID NO: 160258 - RNA, 19 nt, Homo sapiens
  misc_RNA (1)...(19): siRNA sense strand
ccaguuggcugugcuuuga

SEQ ID NO: 160259 - RNA, 19 nt, Homo sapiens
  misc_RNA (1)...(19): siRNA sense strand
agacaaauuugcugacuuc

SEQ ID NO: 160260 - RNA, 19 nt, Homo sapiens
  misc_RNA (1)...(19): siRNA sense strand
aaucagaaauggaaagugu

SEQ ID NO: 160261 - RNA, 19 nt, Homo sapiens
  misc_RNA (1)...(19): siRNA sense strand
ccagguauccucuguuuga

SEQ ID NO: 160262 - RNA, 19 nt, Homo sapiens
  misc_RNA (1)...(19): siRNA sense strand
ggcagcacauggagaauga

SEQ ID NO: 160263 - RNA, 19 nt, Homo sapiens
  misc_RNA (1)...(19): siRNA sense strand
gaaauugagcacuuuguag

SEQ ID NO: 160264 - RNA, 19 nt, Homo sapiens
  misc_RNA (1)...(19): siRNA sense strand
uggagaugcugcugaauga

SEQ ID NO: 160265 - RNA, 19 nt, Homo sapiens
  misc_RNA (1)...(19): siRNA sense strand
aacagggugugauuaauaa

SEQ ID NO: 160266 - RNA, 19 nt, Homo sapiens
  misc_RNA (1)...(19): siRNA sense strand
gagaugaacagagaacauu

SEQ ID NO: 160267 - RNA, 19 nt, Homo sapiens
  misc_RNA (1)...(19): siRNA sense strand
gugaagagauuccagaaaa

SEQ ID NO: 160268 - RNA, 19 nt, Homo sapiens
  misc_RNA (1)...(19): siRNA sense strand
gcugaucguuccuguuaug

SEQ ID NO: 160269 - RNA, 19 nt, Homo sapiens
  misc_RNA (1)...(19): siRNA sense strand
uggcccagcuugauaacua

SEQ ID NO: 160270 - RNA, 19 nt, Homo sapiens
  misc_RNA (1)...(19): siRNA sense strand
gcacauggagaaugagaug

SEQ ID NO: 160271 - RNA, 19 nt, Homo sapiens
  misc_RNA (1)...(19): siRNA sense strand
gaccaggcauggaguaucu

SEQ ID NO: 160272 - RNA, 19 nt, Homo sapiens
  misc_RNA (1)...(19): siRNA sense strand
ccaaagaugauauuguaga

SEQ ID NO: 160273 - RNA, 19 nt, Homo sapiens
  misc_RNA (1)...(19): siRNA sense strand
cagcauaguccaagaccua

SEQ ID NO: 160274 - RNA, 19 nt, Homo sapiens
  misc_RNA (1)...(19): siRNA sense strand
aaauggagaugcugcugaa

SEQ ID NO: 160275 - RNA, 19 nt, Homo sapiens
  misc_RNA (1)...(19): siRNA sense strand
ucacgaagguuggaauauc

SEQ ID NO: 160276 - RNA, 19 nt, Homo sapiens
  misc_RNA (1)...(19): siRNA sense strand
gugcugaccaucuauuaaa

SEQ ID NO: 160277 - RNA, 19 nt, Homo sapiens
  misc_RNA (1)...(19): siRNA sense strand
gagggaccgugacucaaug

SEQ ID NO: 160278 - RNA, 19 nt, Homo sapiens
  misc_RNA (1)...(19): siRNA sense strand
cauauaagaaggaugcaaa

SEQ ID NO: 160279 - RNA, 19 nt, Homo sapiens
  misc_RNA (1)...(19): siRNA sense strand
caauugguaaggcauauaa

SEQ ID NO: 160280 - RNA, 19 nt, Homo sapiens
  misc_RNA (1)...(19): siRNA sense strand
agggagaucuugugcgaaa

SEQ ID NO: 160281 - RNA, 19 nt, Homo sapiens
  misc_RNA (1)...(19): siRNA sense strand
ggcagaaauugagcacuuu

SEQ ID NO: 160282 - RNA, 19 nt, Homo sapiens
  misc_RNA (1)...(19): siRNA sense strand
gcagauaagagcagagauc

SEQ ID NO: 160283 - RNA, 19 nt, Homo sapiens
  misc_RNA (1)...(19): siRNA sense strand
ugccaggacugaugagauu

SEQ ID NO: 160284 - RNA, 19 nt, Homo sapiens
  misc_RNA (1)...(19): siRNA sense strand
gaagaaguuguuccgaaug

SEQ ID NO: 160285 - RNA, 19 nt, Homo sapiens
  misc_RNA (1)...(19): siRNA sense strand
ugaucaaugugaagagauu

SEQ ID NO: 160286 - RNA, 19 nt, Homo sapiens
  misc_RNA (1)...(19): siRNA sense strand
aauugaaacugaagggaaa

SEQ ID NO: 160287 - RNA, 19 nt, Homo sapiens
  misc_RNA (1)...(19): siRNA sense strand
ccugggagaugcuguugaa

SEQ ID NO: 160288 - RNA, 19 nt, Homo sapiens
  misc_RNA (1)...(19): siRNA sense strand
uggcagaaauugagcacuu

SEQ ID NO: 160289 - RNA, 19 nt, Homo sapiens
  misc_RNA (1)...(19): siRNA sense strand
gcauggaguaucucacaaa

SEQ ID NO: 160290 - RNA, 19 nt, Homo sapiens
  misc_RNA (1)...(19): siRNA sense strand
gaugagugcuacauuacag

SEQ ID NO: 160291 - RNA, 19 nt, Homo sapiens
  misc_RNA (1)...(19): siRNA sense strand
gaccuucaccuuuauuugu

SEQ ID NO: 160292 - RNA, 19 nt, Homo sapiens
  misc_RNA (1)...(19): siRNA sense strand
gaucaagcuuuugcuauuu

SEQ ID NO: 160293 - RNA, 19 nt, Homo sapiens
  misc_RNA (1)...(19): siRNA sense strand
gagcaauugguaaggcaua

SEQ ID NO: 160294 - RNA, 19 nt, Homo sapiens
  misc_RNA (1)...(19): siRNA sense strand
ucagaaauggaaaguguuu

SEQ ID NO: 160295 - RNA, 19 nt, Homo sapiens
  misc_RNA (1)...(19): siRNA sense strand
caaagaugauauuguagac

SEQ ID NO: 160296 - RNA, 19 nt, Homo sapiens
  misc_RNA (1)...(19): siRNA sense strand
gagaugcugcugaaugaga

SEQ ID NO: 160297 - RNA, 19 nt, Homo sapiens
  misc_RNA (1)...(19): siRNA sense strand
caaaacuggugauggagua

SEQ ID NO: 160298 - RNA, 19 nt, Homo sapiens
  misc_RNA (1)...(19): siRNA sense strand
agucaauguuguucaguuu

SEQ ID NO: 160299 - RNA, 19 nt, Homo sapiens
  misc_RNA (1)...(19): siRNA sense strand
uaacacaguauuaggcuau

SEQ ID NO: 160300 - RNA, 19 nt, Homo sapiens
  misc_RNA (1)...(19): siRNA sense strand
gaaacaugccuggguacuu

SEQ ID NO: 160301 - RNA, 19 nt, Homo sapiens
  misc_RNA (1)...(19): siRNA sense strand
guaagggagcaauugguaa

SEQ ID NO: 160302 - RNA, 19 nt, Homo sapiens
  misc_RNA (1)...(19): siRNA sense strand
gaagggcaagagacuggua

SEQ ID NO: 160303 - RNA, 19 nt, Homo sapiens
  misc_RNA (1)...(19): siRNA sense strand
gaaauugaugucugauaag

SEQ ID NO: 160304 - RNA, 19 nt, Homo sapiens
  misc_RNA (1)...(19): siRNA sense strand
ggaguaucuugccauuugu

SEQ ID NO: 160305 - RNA, 19 nt, Homo sapiens
  misc_RNA (1)...(19): siRNA sense strand
gcaauugguaaggcauaua

SEQ ID NO: 160306 - RNA, 19 nt, Homo sapiens
  misc_RNA (1)...(19): siRNA sense strand
gaaaucagaaauggaaagu

SEQ ID NO: 160307 - RNA, 19 nt, Homo sapiens
  misc_RNA (1)...(19): siRNA sense strand
uuaguggucuguaugacuu

SEQ ID NO: 160308 - RNA, 19 nt, Homo sapiens
  misc_RNA (1)...(19): siRNA sense strand
agaaauugagcacuuugua

SEQ ID NO: 160309 - RNA, 19 nt, Homo sapiens
  misc_RNA (1)...(19): siRNA sense strand
gcugugcuuugaagaacaa

SEQ ID NO: 160310 - RNA, 19 nt, Homo sapiens
  misc_RNA (1)...(19): siRNA sense strand
caugaucaaugugaagaga

SEQ ID NO: 160311 - RNA, 19 nt, Homo sapiens
  misc_RNA (1)...(19): siRNA sense strand
caagaggguucuggaagca

SEQ ID NO: 160312 - RNA, 19 nt, Homo sapiens
  misc_RNA (1)...(19): siRNA sense strand
cugagaaaccucugaaaga

SEQ ID NO: 160313 - RNA, 19 nt, Homo sapiens
  misc_RNA (1)...(19): siRNA sense strand
ugauaacuauggacagcaa

SEQ ID NO: 160314 - RNA, 19 nt, Homo sapiens
  misc_RNA (1)...(19): siRNA sense strand
gaaguguucugucgaaaag

SEQ ID NO: 160315 - RNA, 19 nt, Homo sapiens
  misc_RNA (1)...(19): siRNA sense strand
gcagaaauugagcacuuug

SEQ ID NO: 160316 - RNA, 19 nt, Homo sapiens
  misc_RNA (1)...(19): siRNA sense strand
aagaaguuguuccgaaugu

SEQ ID NO: 160317 - RNA, 19 nt, Homo sapiens
  misc_RNA (1)...(19): siRNA sense strand
aaauugagcacuuuguaga

SEQ ID NO: 160318 - RNA, 19 nt, Homo sapiens
  misc_RNA (1)...(19): siRNA sense strand
cguuacagcccaaagauga

SEQ ID NO: 160319 - RNA, 19 nt, Homo sapiens
  misc_RNA (1)...(19): siRNA sense strand
gauugagauuguuggaugu

SEQ ID NO: 160320 - RNA, 19 nt, Homo sapiens
  misc_RNA (1)...(19): siRNA sense strand
ggcagaccuucaccuuuau

SEQ ID NO: 160321 - RNA, 19 nt, Homo sapiens
  misc_RNA (1)...(19): siRNA sense strand
aagagacaaucgaggaaug

SEQ ID NO: 160322 - RNA, 19 nt, Homo sapiens
  misc_RNA (1)...(19): siRNA sense strand
uuacagaaauggagaugcu

SEQ ID NO: 160323 - RNA, 19 nt, Homo sapiens
  misc_RNA (1)...(19): siRNA sense strand
ggcagcacuuuauccaaga

SEQ ID NO: 160324 - RNA, 19 nt, Homo sapiens
  misc_RNA (1)...(19): siRNA sense strand
uaagaaggaugcaaaacug

SEQ ID NO: 160325 - RNA, 19 nt, Homo sapiens
  misc_RNA (1)...(19): siRNA sense strand
ugaacagggugugauuaau

SEQ ID NO: 160326 - RNA, 19 nt, Homo sapiens
  misc_RNA (1)...(19): siRNA sense strand
agaggguucuggaagcaaa

SEQ ID NO: 160327 - RNA, 19 nt, Homo sapiens
  misc_RNA (1)...(19): siRNA sense strand
uccagugucuuuuaacuua

SEQ ID NO: 160328 - RNA, 19 nt, Homo sapiens
  misc_RNA (1)...(19): siRNA sense strand
gcacuuuauccaagaggaa

SEQ ID NO: 160329 - RNA, 19 nt, Homo sapiens
  misc_RNA (1)...(19): siRNA sense strand
ggaguucaaccaaggaaag

SEQ ID NO: 160330 - RNA, 19 nt, Homo sapiens
  misc_RNA (1)...(19): siRNA sense strand
uccaagaccuagccaaugg

SEQ ID NO: 160331 - RNA, 19 nt, Homo sapiens
  misc_RNA (1)...(19): siRNA sense strand
gaguaucucacaaaguaga

SEQ ID NO: 160332 - RNA, 19 nt, Homo sapiens
  misc_RNA (1)...(19): siRNA sense strand
ggagaugaacagagaacau

SEQ ID NO: 160333 - RNA, 19 nt, Homo sapiens
  misc_RNA (1)...(19): siRNA sense strand
cagucaauguuguucaguu

SEQ ID NO: 160334 - RNA, 19 nt, Homo sapiens
  misc_RNA (1)...(19): siRNA sense strand
gcugagaaaccucugaaag

SEQ ID NO: 160335 - RNA, 19 nt, Homo sapiens
  misc_RNA (1)...(19): siRNA sense strand
acacaguauuaggcuauuu

SEQ ID NO: 160336 - RNA, 19 nt, Homo sapiens
  misc_RNA (1)...(19): siRNA sense strand
guagacaaauuugcugacu

SEQ ID NO: 160337 - RNA, 19 nt, Homo sapiens
  misc_RNA (1)...(19): siRNA sense strand
agaaguuguuccgaaugua

SEQ ID NO: 160338 - RNA, 19 nt, Homo sapiens
  misc_RNA (1)...(19): siRNA sense strand
cacgaagguuggaauaucu

SEQ ID NO: 160339 - RNA, 19 nt, Homo sapiens
  misc_RNA (1)...(19): siRNA sense strand
gcgagucggucaaggagaa

SEQ ID NO: 160340 - RNA, 19 nt, Homo sapiens
  misc_RNA (1)...(19): siRNA sense strand
ggacgacuacuacgaugag

SEQ ID NO: 160341 - RNA, 19 nt, Homo sapiens
  misc_RNA (1)...(19): siRNA sense strand
gccgcuaccugaccuacug

SEQ ID NO: 160342 - RNA, 19 nt, Homo sapiens
  misc_RNA (1)...(19): siRNA sense strand
cuacuacgaugaggacuac

SEQ ID NO: 160343 - RNA, 19 nt, Homo sapiens
  misc_RNA (1)...(19): siRNA sense strand
gcaccgucauugaggacau

SEQ ID NO: 160344 - RNA, 19 nt, Homo sapiens
  misc_RNA (1)...(19): siRNA sense strand
uugaggacaugcuggcuau

SEQ ID NO: 160345 - RNA, 19 nt, Homo sapiens
  misc_RNA (1)...(19): siRNA sense strand
gcaucucggcccucauuca

SEQ ID NO: 160346 - RNA, 19 nt, Homo sapiens
  misc_RNA (1)...(19): siRNA sense strand
acgaugaggacuacgauga

SEQ ID NO: 160347 - RNA, 19 nt, Homo sapiens
  misc_RNA (1)...(19): siRNA sense strand
gcagcuacgccuacaacca

SEQ ID NO: 160348 - RNA, 19 nt, Homo sapiens
  misc_RNA (1)...(19): siRNA sense strand
cuacugcggcaaagucuuc

SEQ ID NO: 160349 - RNA, 19 nt, Homo sapiens
  misc_RNA (1)...(19): siRNA sense strand
uggaagaucuggauggaaa

SEQ ID NO: 160350 - RNA, 19 nt, Homo sapiens
  misc_RNA (1)...(19): siRNA sense strand
ccaagaagcgccugauugu

SEQ ID NO: 160351 - RNA, 19 nt, Homo sapiens
  misc_RNA (1)...(19): siRNA sense strand
gaccugcacugccuucauc

SEQ ID NO: 160352 - RNA, 19 nt, Homo sapiens
  misc_RNA (1)...(19): siRNA sense strand
ggacaggccacuaccuaug

SEQ ID NO: 160353 - RNA, 19 nt, Homo sapiens
  misc_RNA (1)...(19): siRNA sense strand
ggacaggacaggccacuac

SEQ ID NO: 160354 - RNA, 19 nt, Homo sapiens
  misc_RNA (1)...(19): siRNA sense strand
gaaggaugguauucagacu

SEQ ID NO: 160355 - RNA, 19 nt, Homo sapiens
  misc_RNA (1)...(19): siRNA sense strand
aagaagcgccugauuguca

SEQ ID NO: 160356 - RNA, 19 nt, Homo sapiens
  misc_RNA (1)...(19): siRNA sense strand
cugcggcacuggccuacua

SEQ ID NO: 160357 - RNA, 19 nt, Homo sapiens
  misc_RNA (1)...(19): siRNA sense strand
caggugaaccggccacuga

SEQ ID NO: 160358 - RNA, 19 nt, Homo sapiens
  misc_RNA (1)...(19): siRNA sense strand
gcucuacccugccucaacu

SEQ ID NO: 160359 - RNA, 19 nt, Homo sapiens
  misc_RNA (1)...(19): siRNA sense strand
uuagccaccucaugccuuu

SEQ ID NO: 160360 - RNA, 19 nt, Homo sapiens
  misc_RNA (1)...(19): siRNA sense strand
acccauugcucaacuguau

SEQ ID NO: 160361 - RNA, 19 nt, Homo sapiens
  misc_RNA (1)...(19): siRNA sense strand
gcggaaggaugguauucag

SEQ ID NO: 160362 - RNA, 19 nt, Homo sapiens
  misc_RNA (1)...(19): siRNA sense strand
caggacaggccacuaccua

SEQ ID NO: 160363 - RNA, 19 nt, Homo sapiens
  misc_RNA (1)...(19): siRNA sense strand
caagaugaaugggcagaac

SEQ ID NO: 160364 - RNA, 19 nt, Homo sapiens
  misc_RNA (1)...(19): siRNA sense strand
cacaggagcagccgaagga

SEQ ID NO: 160365 - RNA, 19 nt, Homo sapiens
  misc_RNA (1)...(19): siRNA sense strand
ucaauucagcagccuauuc

SEQ ID NO: 160366 - RNA, 19 nt, Homo sapiens
  misc_RNA (1)...(19): siRNA sense strand
gaugguauucagacucgaa

SEQ ID NO: 160367 - RNA, 19 nt, Homo sapiens
  misc_RNA (1)...(19): siRNA sense strand
caacgccugcggccucuau

SEQ ID NO: 160368 - RNA, 19 nt, Homo sapiens
  misc_RNA (1)...(19): siRNA sense strand
gcugaggccuacagacacu

SEQ ID NO: 160369 - RNA, 19 nt, Homo sapiens
  misc_RNA (1)...(19): siRNA sense strand
cccaagaagcgccugauug

SEQ ID NO: 160370 - RNA, 19 nt, Homo sapiens
  misc_RNA (1)...(19): siRNA sense strand
cguggaagaucuggaugga

SEQ ID NO: 160371 - RNA, 19 nt, Homo sapiens
  misc_RNA (1)...(19): siRNA sense strand
uggagacuuugaagacaga

SEQ ID NO: 160372 - RNA, 19 nt, Homo sapiens
  misc_RNA (1)...(19): siRNA sense strand
ucuuucagguguacccauu

SEQ ID NO: 160373 - RNA, 19 nt, Homo sapiens
  misc_RNA (1)...(19): siRNA sense strand
guacugcccaucucuacca

SEQ ID NO: 160374 - RNA, 19 nt, Homo sapiens
  misc_RNA (1)...(19): siRNA sense strand
ccugcggccucuacuacaa

SEQ ID NO: 160375 - RNA, 19 nt, Homo sapiens
  misc_RNA (1)...(19): siRNA sense strand
cggccucuaucacaagaug

SEQ ID NO: 160376 - RNA, 19 nt, Homo sapiens
  misc_RNA (1)...(19): siRNA sense strand
uacccugccucaacugugu

SEQ ID NO: 160377 - RNA, 19 nt, Homo sapiens
  misc_RNA (1)...(19): siRNA sense strand
acacuguggcggagaaaug

SEQ ID NO: 160378 - RNA, 19 nt, Homo sapiens
  misc_RNA (1)...(19): siRNA sense strand
gcccaagaagcgccugauu

SEQ ID NO: 160379 - RNA, 19 nt, Homo sapiens
  misc_RNA (1)...(19): siRNA sense strand
ggacgcugaggccuacaga

SEQ ID NO: 160380 - RNA, 19 nt, Homo sapiens
  misc_RNA (1)...(19): siRNA sense strand
ggcccugacuuuuccagua

SEQ ID NO: 160381 - RNA, 19 nt, Homo sapiens
  misc_RNA (1)...(19): siRNA sense strand
cuauuccucucccaagcuu

SEQ ID NO: 160382 - RNA, 19 nt, Homo sapiens
  misc_RNA (1)...(19): siRNA sense strand
gguacucagugcaccaacu

SEQ ID NO: 160383 - RNA, 19 nt, Homo sapiens
  misc_RNA (1)...(19): siRNA sense strand
ugugugaacugcggagcaa

SEQ ID NO: 160384 - RNA, 19 nt, Homo sapiens
  misc_RNA (1)...(19): siRNA sense strand
gaaaaggcagcaccagcuu

SEQ ID NO: 160385 - RNA, 19 nt, Homo sapiens
  misc_RNA (1)...(19): siRNA sense strand
guaaacgggcagguacuca

SEQ ID NO: 160386 - RNA, 19 nt, Homo sapiens
  misc_RNA (1)...(19): siRNA sense strand
ccaagaaccugaauaaauc

SEQ ID NO: 160387 - RNA, 19 nt, Homo sapiens
  misc_RNA (1)...(19): siRNA sense strand
ggacauaaucacugcguaa

SEQ ID NO: 160388 - RNA, 19 nt, Homo sapiens
  misc_RNA (1)...(19): siRNA sense strand
gaaccugaauaaaucuaag

SEQ ID NO: 160389 - RNA, 19 nt, Homo sapiens
  misc_RNA (1)...(19): siRNA sense strand
cccaagaaccugaauaaau

SEQ ID NO: 160390 - RNA, 19 nt, Homo sapiens
  misc_RNA (1)...(19): siRNA sense strand
gcagagagugugucaacug

SEQ ID NO: 160391 - RNA, 19 nt, Homo sapiens
  misc_RNA (1)...(19): siRNA sense strand
aagcaggacucuuggaaca

SEQ ID NO: 160392 - RNA, 19 nt, Homo sapiens
  misc_RNA (1)...(19): siRNA sense strand
cagagagugugucaacugu

SEQ ID NO: 160393 - RNA, 19 nt, Homo sapiens
  misc_RNA (1)...(19): siRNA sense strand
cgauauguuugacgacuuc

SEQ ID NO: 160394 - RNA, 19 nt, Homo sapiens
  misc_RNA (1)...(19): siRNA sense strand
gaaggcagagaguguguca

SEQ ID NO: 160395 - RNA, 19 nt, Homo sapiens
  misc_RNA (1)...(19): siRNA sense strand
gagaugggacgggucacua

SEQ ID NO: 160396 - RNA, 19 nt, Homo sapiens
  misc_RNA (1)...(19): siRNA sense strand
ucccagacguucucaguca

SEQ ID NO: 160397 - RNA, 19 nt, Homo sapiens
  misc_RNA (1)...(19): siRNA sense strand
gaaaacggaagcccaagaa

SEQ ID NO: 160398 - RNA, 19 nt, Homo sapiens
  misc_RNA (1)...(19): siRNA sense strand
gggcgagccugugugcaau

SEQ ID NO: 160399 - RNA, 19 nt, Homo sapiens
  misc_RNA (1)...(19): siRNA sense strand
guacccaggccucuugcaa

SEQ ID NO: 160400 - RNA, 19 nt, Homo sapiens
  misc_RNA (1)...(19): siRNA sense strand
acccaggccucuugcaaug

SEQ ID NO: 160401 - RNA, 19 nt, Homo sapiens
  misc_RNA (1)...(19): siRNA sense strand
gcccaagaaccugaauaaa

SEQ ID NO: 160402 - RNA, 19 nt, Homo sapiens
  misc_RNA (1)...(19): siRNA sense strand
ccugcggccucuacaugaa

SEQ ID NO: 160403 - RNA, 19 nt, Homo sapiens
  misc_RNA (1)...(19): siRNA sense strand
ggaagcccaagaaccugaa

SEQ ID NO: 160404 - RNA, 19 nt, Homo sapiens
  misc_RNA (1)...(19): siRNA sense strand
gagccuggccugucaucuc

SEQ ID NO: 160405 - RNA, 19 nt, Homo sapiens
  misc_RNA (1)...(19): siRNA sense strand
ggaaagaggggauccaaac

SEQ ID NO: 160406 - RNA, 19 nt, Homo sapiens
  misc_RNA (1)...(19): siRNA sense strand
caagaaccugaauaaaucu

SEQ ID NO: 160407 - RNA, 19 nt, Homo sapiens
  misc_RNA (1)...(19): siRNA sense strand
ugacagagcugacacauag

SEQ ID NO: 160408 - RNA, 19 nt, Homo sapiens
  misc_RNA (1)...(19): siRNA sense strand
cgaaaggcauguaccauaa

SEQ ID NO: 160409 - RNA, 19 nt, Homo sapiens
  misc_RNA (1)...(19): siRNA sense strand
gauacaggcugaagagauu

SEQ ID NO: 160410 - RNA, 19 nt, Homo sapiens
  misc_RNA (1)...(19): siRNA sense strand
ugaaacaacugacugagaa

SEQ ID NO: 160411 - RNA, 19 nt, Homo sapiens
  misc_RNA (1)...(19): siRNA sense strand
gaacaggagcaacuacuaa

SEQ ID NO: 160412 - RNA, 19 nt, Homo sapiens
  misc_RNA (1)...(19): siRNA sense strand
gaagauccuuucugccauu

SEQ ID NO: 160413 - RNA, 19 nt, Homo sapiens
  misc_RNA (1)...(19): siRNA sense strand
caagcuggcuggaaagaaa

SEQ ID NO: 160414 - RNA, 19 nt, Homo sapiens
  misc_RNA (1)...(19): siRNA sense strand
ggagaggaguuaucaggaa

SEQ ID NO: 160415 - RNA, 19 nt, Homo sapiens
  misc_RNA (1)...(19): siRNA sense strand
ugaacaagcuggcuggaaa

SEQ ID NO: 160416 - RNA, 19 nt, Homo sapiens
  misc_RNA (1)...(19): siRNA sense strand
ggauucagcugacuuugug

SEQ ID NO: 160417 - RNA, 19 nt, Homo sapiens
  misc_RNA (1)...(19): siRNA sense strand
gaccaacuguacuauguga

SEQ ID NO: 160418 - RNA, 19 nt, Homo sapiens
  misc_RNA (1)...(19): siRNA sense strand
gacccucgcucuuaaacuu

SEQ ID NO: 160419 - RNA, 19 nt, Homo sapiens
  misc_RNA (1)...(19): siRNA sense strand
gaacagaaggagaggaguu

SEQ ID NO: 160420 - RNA, 19 nt, Homo sapiens
  misc_RNA (1)...(19): siRNA sense strand
gaagugaaggcgggaauuu

SEQ ID NO: 160421 - RNA, 19 nt, Homo sapiens
  misc_RNA (1)...(19): siRNA sense strand
ucgagaaacuacaagauga

SEQ ID NO: 160422 - RNA, 19 nt, Homo sapiens
  misc_RNA (1)...(19): siRNA sense strand
caacgggccucgucuagag

SEQ ID NO: 160423 - RNA, 19 nt, Homo sapiens
  misc_RNA (1)...(19): siRNA sense strand
aagagauucugcagacaua

SEQ ID NO: 160424 - RNA, 19 nt, Homo sapiens
  misc_RNA (1)...(19): siRNA sense strand
agacauacuugaaauccaa

SEQ ID NO: 160425 - RNA, 19 nt, Homo sapiens
  misc_RNA (1)...(19): siRNA sense strand
gcacagggacagugagaga

SEQ ID NO: 160426 - RNA, 19 nt, Homo sapiens
  misc_RNA (1)...(19): siRNA sense strand
ggaguuccuucaaagaugu

SEQ ID NO: 160427 - RNA, 19 nt, Homo sapiens
  misc_RNA (1)...(19): siRNA sense strand
cagaaugacuccuggaucu

SEQ ID NO: 160428 - RNA, 19 nt, Homo sapiens
  misc_RNA (1)...(19): siRNA sense strand
ggaacaggagcaacuacua

SEQ ID NO: 160429 - RNA, 19 nt, Homo sapiens
  misc_RNA (1)...(19): siRNA sense strand
gcaccuucguguacaauag

SEQ ID NO: 160430 - RNA, 19 nt, Homo sapiens
  misc_RNA (1)...(19): siRNA sense strand
ggaguuaucaggaacacuu

SEQ ID NO: 160431 - RNA, 19 nt, Homo sapiens
  misc_RNA (1)...(19): siRNA sense strand
uacaggaucuccagacgaa

SEQ ID NO: 160432 - RNA, 19 nt, Homo sapiens
  misc_RNA (1)...(19): siRNA sense strand
aauccuaccugaugaacaa

SEQ ID NO: 160433 - RNA, 19 nt, Homo sapiens
  misc_RNA (1)...(19): siRNA sense strand
gaagccaggccacauccua

SEQ ID NO: 160434 - RNA, 19 nt, Homo sapiens
  misc_RNA (1)...(19): siRNA sense strand
caucagagauccacaugac

SEQ ID NO: 160435 - RNA, 19 nt, Homo sapiens
  misc_RNA (1)...(19): siRNA sense strand
gcuaucgucucuuuguuca

SEQ ID NO: 160436 - RNA, 19 nt, Homo sapiens
  misc_RNA (1)...(19): siRNA sense strand
ggcaaauccuaccugauga

SEQ ID NO: 160437 - RNA, 19 nt, Homo sapiens
  misc_RNA (1)...(19): siRNA sense strand
gaaacuacaagaugaagag

SEQ ID NO: 160438 - RNA, 19 nt, Homo sapiens
  misc_RNA (1)...(19): siRNA sense strand
gaagagauucugcagacau

SEQ ID NO: 160439 - RNA, 19 nt, Homo sapiens
  misc_RNA (1)...(19): siRNA sense strand
gagaggccauugaagucuu

SEQ ID NO: 160440 - RNA, 19 nt, Homo sapiens
  misc_RNA (1)...(19): siRNA sense strand
ggugcagucucacacuaaa

SEQ ID NO: 160441 - RNA, 19 nt, Homo sapiens
  misc_RNA (1)...(19): siRNA sense strand
gcaaauccuaccugaugaa

SEQ ID NO: 160442 - RNA, 19 nt, Homo sapiens
  misc_RNA (1)...(19): siRNA sense strand
gagcagcaccuucguguac

SEQ ID NO: 160443 - RNA, 19 nt, Homo sapiens
  misc_RNA (1)...(19): siRNA sense strand
ugacugagaagauggagaa

SEQ ID NO: 160444 - RNA, 19 nt, Homo sapiens
  misc_RNA (1)...(19): siRNA sense strand
gauccuuucugccauuaca

SEQ ID NO: 160445 - RNA, 19 nt, Homo sapiens
  misc_RNA (1)...(19): siRNA sense strand
ggacuuggaagcagaugga

SEQ ID NO: 160446 - RNA, 19 nt, Homo sapiens
  misc_RNA (1)...(19): siRNA sense strand
caggaacacuugaaacaac

SEQ ID NO: 160447 - RNA, 19 nt, Homo sapiens
  misc_RNA (1)...(19): siRNA sense strand
uaucgucucuuuguucaga

SEQ ID NO: 160448 - RNA, 19 nt, Homo sapiens
  misc_RNA (1)...(19): siRNA sense strand
gcuccacggugcagucuca

SEQ ID NO: 160449 - RNA, 19 nt, Homo sapiens
  misc_RNA (1)...(19): siRNA sense strand
gagagaggccauugaaguc

SEQ ID NO: 160450 - RNA, 19 nt, Homo sapiens
  misc_RNA (1)...(19): siRNA sense strand
ccacaugacaggcccaaug

SEQ ID NO: 160451 - RNA, 19 nt, Homo sapiens
  misc_RNA (1)...(19): siRNA sense strand
gaacacuugaaacaacuga

SEQ ID NO: 160452 - RNA, 19 nt, Homo sapiens
  misc_RNA (1)...(19): siRNA sense strand
aaaggagauugaaguggaa

SEQ ID NO: 160453 - RNA, 19 nt, Homo sapiens
  misc_RNA (1)...(19): siRNA sense strand
ggauacaggcugaagagau

SEQ ID NO: 160454 - RNA, 19 nt, Homo sapiens
  misc_RNA (1)...(19): siRNA sense strand
ugagagagaggccauugaa

SEQ ID NO: 160455 - RNA, 19 nt, Homo sapiens
  misc_RNA (1)...(19): siRNA sense strand
cauacucccugaagcugaa

SEQ ID NO: 160456 - RNA, 19 nt, Homo sapiens
  misc_RNA (1)...(19): siRNA sense strand
agaaugagaaugagguuga

SEQ ID NO: 160457 - RNA, 19 nt, Homo sapiens
  misc_RNA (1)...(19): siRNA sense strand
acacauagaauccgaucaa

SEQ ID NO: 160458 - RNA, 19 nt, Homo sapiens
  misc_RNA (1)...(19): siRNA sense strand
gcagcaccuucguguacaa

SEQ ID NO: 160459 - RNA, 19 nt, Homo sapiens
  misc_RNA (1)...(19): siRNA sense strand
uuucaguccucuagaagaa

SEQ ID NO: 160460 - RNA, 19 nt, Homo sapiens
  misc_RNA (1)...(19): siRNA sense strand
cugagaagauggagaacga

SEQ ID NO: 160461 - RNA, 19 nt, Homo sapiens
  misc_RNA (1)...(19): siRNA sense strand
ugaaguggaacgugugaaa

SEQ ID NO: 160462 - RNA, 19 nt, Homo sapiens
  misc_RNA (1)...(19): siRNA sense strand
gggcuaucgucucuuuguu

SEQ ID NO: 160463 - RNA, 19 nt, Homo sapiens
  misc_RNA (1)...(19): siRNA sense strand
gaaugacuccuggaucuuc

SEQ ID NO: 160464 - RNA, 19 nt, Homo sapiens
  misc_RNA (1)...(19): siRNA sense strand
acgaaaggcauguaccaua

SEQ ID NO: 160465 - RNA, 19 nt, Homo sapiens
  misc_RNA (1)...(19): siRNA sense strand
gcuacaagaccugaagaaa

SEQ ID NO: 160466 - RNA, 19 nt, Homo sapiens
  misc_RNA (1)...(19): siRNA sense strand
caggaagcaucaucagauc

SEQ ID NO: 160467 - RNA, 19 nt, Homo sapiens
  misc_RNA (1)...(19): siRNA sense strand
agacuucuguuccuacauc

SEQ ID NO: 160468 - RNA, 19 nt, Homo sapiens
  misc_RNA (1)...(19): siRNA sense strand
uggaccaacuguacuaugu

SEQ ID NO: 160469 - RNA, 19 nt, Homo sapiens
  misc_RNA (1)...(19): siRNA sense strand
gagcagaugauggaacaga

SEQ ID NO: 160470 - RNA, 19 nt, Homo sapiens
  misc_RNA (1)...(19): siRNA sense strand
gaacaagcuggcuggaaag

SEQ ID NO: 160471 - RNA, 19 nt, Homo sapiens
  misc_RNA (1)...(19): siRNA sense strand
ugaaauccaaggagucuau

SEQ ID NO: 160472 - RNA, 19 nt, Homo sapiens
  misc_RNA (1)...(19): siRNA sense strand
gaagcaucaucagaucguu

SEQ ID NO: 160473 - RNA, 19 nt, Homo sapiens
  misc_RNA (1)...(19): siRNA sense strand
cugaugagaaugagaauga

SEQ ID NO: 160474 - RNA, 19 nt, Homo sapiens
  misc_RNA (1)...(19): siRNA sense strand
cugcagacauacuugaaau

SEQ ID NO: 160475 - RNA, 19 nt, Homo sapiens
  misc_RNA (1)...(19): siRNA sense strand
uguggacacugagagauuu

SEQ ID NO: 160476 - RNA, 19 nt, Homo sapiens
  misc_RNA (1)...(19): siRNA sense strand
ucaguccucuagaagaaga

SEQ ID NO: 160477 - RNA, 19 nt, Homo sapiens
  misc_RNA (1)...(19): siRNA sense strand
ucaggaagcaucaucagau

SEQ ID NO: 160478 - RNA, 19 nt, Homo sapiens
  misc_RNA (1)...(19): siRNA sense strand
gaagggugacaaccagaau

SEQ ID NO: 160479 - RNA, 19 nt, Homo sapiens
  misc_RNA (1)...(19): siRNA sense strand
gaaaggcauguaccauaag

SEQ ID NO: 160480 - RNA, 19 nt, Homo sapiens
  misc_RNA (1)...(19): siRNA sense strand
aggcaaauccuaccugaug

SEQ ID NO: 160481 - RNA, 19 nt, Homo sapiens
  misc_RNA (1)...(19): siRNA sense strand
cgagaaacuacaagaugaa

SEQ ID NO: 160482 - RNA, 19 nt, Homo sapiens
  misc_RNA (1)...(19): siRNA sense strand
cacauagaauccgaucaaa

SEQ ID NO: 160483 - RNA, 19 nt, Homo sapiens
  misc_RNA (1)...(19): siRNA sense strand
gaaucaggaagcaucauca

SEQ ID NO: 160484 - RNA, 19 nt, Homo sapiens
  misc_RNA (1)...(19): siRNA sense strand
caagaagccaggccacauc

SEQ ID NO: 160485 - RNA, 19 nt, Homo sapiens
  misc_RNA (1)...(19): siRNA sense strand
gaaugagaaugagguugag

SEQ ID NO: 160486 - RNA, 19 nt, Homo sapiens
  misc_RNA (1)...(19): siRNA sense strand
acaacugacugagaagaug

SEQ ID NO: 160487 - RNA, 19 nt, Homo sapiens
  misc_RNA (1)...(19): siRNA sense strand
gaagcucugaagauccuuu

SEQ ID NO: 160488 - RNA, 19 nt, Homo sapiens
  misc_RNA (1)...(19): siRNA sense strand
gaagcuacaagaccugaag

SEQ ID NO: 160489 - RNA, 19 nt, Homo sapiens
  misc_RNA (1)...(19): siRNA sense strand
agagagaggccauugaagu

SEQ ID NO: 160490 - RNA, 19 nt, Homo sapiens
  misc_RNA (1)...(19): siRNA sense strand
ucugggagauguagagaag

SEQ ID NO: 160491 - RNA, 19 nt, Homo sapiens
  misc_RNA (1)...(19): siRNA sense strand
gugcagcugcccacagaaa

SEQ ID NO: 160492 - RNA, 19 nt, Homo sapiens
  misc_RNA (1)...(19): siRNA sense strand
gagaaugagguugaggauu

SEQ ID NO: 160493 - RNA, 19 nt, Homo sapiens
  misc_RNA (1)...(19): siRNA sense strand
gugaaggcgggaauuuauu

SEQ ID NO: 160494 - RNA, 19 nt, Homo sapiens
  misc_RNA (1)...(19): siRNA sense strand
uaaacagaaucaggaagca

SEQ ID NO: 160495 - RNA, 19 nt, Homo sapiens
  misc_RNA (1)...(19): siRNA sense strand
ggucaacgggccucgucua

SEQ ID NO: 160496 - RNA, 19 nt, Homo sapiens
  misc_RNA (1)...(19): siRNA sense strand
gugacagagcugacacaua

SEQ ID NO: 160497 - RNA, 19 nt, Homo sapiens
  misc_RNA (1)...(19): siRNA sense strand
aagauccuuucugccauua

SEQ ID NO: 160498 - RNA, 19 nt, Homo sapiens
  misc_RNA (1)...(19): siRNA sense strand
gcaggaaaugcaaagaaag

SEQ ID NO: 160499 - RNA, 19 nt, Homo sapiens
  misc_RNA (1)...(19): siRNA sense strand
ggaagcaucaucagaucgu

SEQ ID NO: 160500 - RNA, 19 nt, Homo sapiens
  misc_RNA (1)...(19): siRNA sense strand
cauagaauccgaucaaaau

SEQ ID NO: 160501 - RNA, 19 nt, Homo sapiens
  misc_RNA (1)...(19): siRNA sense strand
agaaggagaggaguuauca

SEQ ID NO: 160502 - RNA, 19 nt, Homo sapiens
  misc_RNA (1)...(19): siRNA sense strand
ucaaaauccucaccugaug

SEQ ID NO: 160503 - RNA, 19 nt, Homo sapiens
  misc_RNA (1)...(19): siRNA sense strand
ugaggauucagcugacuuu

SEQ ID NO: 160504 - RNA, 19 nt, Homo sapiens
  misc_RNA (1)...(19): siRNA sense strand
gaaguggaacgugugaaag

SEQ ID NO: 160505 - RNA, 19 nt, Homo sapiens
  misc_RNA (1)...(19): siRNA sense strand
cuacaagaccugaagaaaa

SEQ ID NO: 160506 - RNA, 19 nt, Homo sapiens
  misc_RNA (1)...(19): siRNA sense strand
aaaaggcuauugcccacua

SEQ ID NO: 160507 - RNA, 19 nt, Homo sapiens
  misc_RNA (1)...(19): siRNA sense strand
ggcagaagcuccaggauga

SEQ ID NO: 160508 - RNA, 19 nt, Homo sapiens
  misc_RNA (1)...(19): siRNA sense strand
caaccuggcugccuauaga

SEQ ID NO: 160509 - RNA, 19 nt, Homo sapiens
  misc_RNA (1)...(19): siRNA sense strand
gaggagauccgguucuuga

SEQ ID NO: 160510 - RNA, 19 nt, Homo sapiens
  misc_RNA (1)...(19): siRNA sense strand
ggagcucaaugaccgcuuu

SEQ ID NO: 160511 - RNA, 19 nt, Homo sapiens
  misc_RNA (1)...(19): siRNA sense strand
gcaauggcguccagcaaca

SEQ ID NO: 160512 - RNA, 19 nt, Homo sapiens
  misc_RNA (1)...(19): siRNA sense strand
gcacgaagccaacgacuac

SEQ ID NO: 160513 - RNA, 19 nt, Homo sapiens
  misc_RNA (1)...(19): siRNA sense strand
gaacaaccuggcugccuau

SEQ ID NO: 160514 - RNA, 19 nt, Homo sapiens
  misc_RNA (1)...(19): siRNA sense strand
ccgcagcccugaaagagau

SEQ ID NO: 160515 - RNA, 19 nt, Homo sapiens
  misc_RNA (1)...(19): siRNA sense strand
ccaaggagcccaccaagcu

SEQ ID NO: 160516 - RNA, 19 nt, Homo sapiens
  misc_RNA (1)...(19): siRNA sense strand
agaggaacaucguggugaa

SEQ ID NO: 160517 - RNA, 19 nt, Homo sapiens
  misc_RNA (1)...(19): siRNA sense strand
ucagaaggccaccucaaga

SEQ ID NO: 160518 - RNA, 19 nt, Homo sapiens
  misc_RNA (1)...(19): siRNA sense strand
gggauggagaggucauuaa

SEQ ID NO: 160519 - RNA, 19 nt, Homo sapiens
  misc_RNA (1)...(19): siRNA sense strand
gagaaccggaucaccauuc

SEQ ID NO: 160520 - RNA, 19 nt, Homo sapiens
  misc_RNA (1)...(19): siRNA sense strand
auggagaggucauuaagga

SEQ ID NO: 160521 - RNA, 19 nt, Homo sapiens
  misc_RNA (1)...(19): siRNA sense strand
ccagcuacaucgagaaggu

SEQ ID NO: 160522 - RNA, 19 nt, Homo sapiens
  misc_RNA (1)...(19): siRNA sense strand
acaucgagaucgccaccua

SEQ ID NO: 160523 - RNA, 19 nt, Homo sapiens
  misc_RNA (1)...(19): siRNA sense strand
gagaugauggagcucaaug

SEQ ID NO: 160524 - RNA, 19 nt, Homo sapiens
  misc_RNA (1)...(19): siRNA sense strand
ggauggagaggucauuaag

SEQ ID NO: 160525 - RNA, 19 nt, Homo sapiens
  misc_RNA (1)...(19): siRNA sense strand
gucuggaucuggagaggaa

SEQ ID NO: 160526 - RNA, 19 nt, Homo sapiens
  misc_RNA (1)...(19): siRNA sense strand
ccagugagcgggcagagau

SEQ ID NO: 160527 - RNA, 19 nt, Homo sapiens
  misc_RNA (1)...(19): siRNA sense strand
ccaagcaggagcacaagga

SEQ ID NO: 160528 - RNA, 19 nt, Homo sapiens
  misc_RNA (1)...(19): siRNA sense strand
ggagaaccggaucaccauu

SEQ ID NO: 160529 - RNA, 19 nt, Homo sapiens
  misc_RNA (1)...(19): siRNA sense strand
acucaaugcuggcuucaag

SEQ ID NO: 160530 - RNA, 19 nt, Homo sapiens
  misc_RNA (1)...(19): siRNA sense strand
cagagaugauggagcucaa

SEQ ID NO: 160531 - RNA, 19 nt, Homo sapiens
  misc_RNA (1)...(19): siRNA sense strand
cagaagcuccaggaugaaa

SEQ ID NO: 160532 - RNA, 19 nt, Homo sapiens
  misc_RNA (1)...(19): siRNA sense strand
ggaacaucguggugaagac

SEQ ID NO: 160533 - RNA, 19 nt, Homo sapiens
  misc_RNA (1)...(19): siRNA sense strand
ugguaccgcuccaaguuug

SEQ ID NO: 160534 - RNA, 19 nt, Homo sapiens
  misc_RNA (1)...(19): siRNA sense strand
caaguuugcagaccugaca

SEQ ID NO: 160535 - RNA, 19 nt, Homo sapiens
  misc_RNA (1)...(19): siRNA sense strand
gaucaacucaccgccaaca

SEQ ID NO: 160536 - RNA, 19 nt, Homo sapiens
  misc_RNA (1)...(19): siRNA sense strand
gcagaagcuccaggaugaa

SEQ ID NO: 160537 - RNA, 19 nt, Homo sapiens
  misc_RNA (1)...(19): siRNA sense strand
ccucaccgcagcccugaaa

SEQ ID NO: 160538 - RNA, 19 nt, Homo sapiens
  misc_RNA (1)...(19): siRNA sense strand
gugguaccgcuccaaguuu

SEQ ID NO: 160539 - RNA, 19 nt, Homo sapiens
  misc_RNA (1)...(19): siRNA sense strand
ggugaagaccguggagaug

SEQ ID NO: 160540 - RNA, 19 nt, Homo sapiens
  misc_RNA (1)...(19): siRNA sense strand
ucaaugcuggcuucaagga

SEQ ID NO: 160541 - RNA, 19 nt, Homo sapiens
  misc_RNA (1)...(19): siRNA sense strand
caagcuggcagacgucuac

SEQ ID NO: 160542 - RNA, 19 nt, Homo sapiens
  misc_RNA (1)...(19): siRNA sense strand
ggaggagauccgguucuug

SEQ ID NO: 160543 - RNA, 19 nt, Homo sapiens
  misc_RNA (1)...(19): siRNA sense strand
ucaccgcagcccugaaaga

SEQ ID NO: 160544 - RNA, 19 nt, Homo sapiens
  misc_RNA (1)...(19): siRNA sense strand
cagaaggccaccucaagag

SEQ ID NO: 160545 - RNA, 19 nt, Homo sapiens
  misc_RNA (1)...(19): siRNA sense strand
ccugcgaccuggagucucu

SEQ ID NO: 160546 - RNA, 19 nt, Homo sapiens
  misc_RNA (1)...(19): siRNA sense strand
ucuccaaccugcagauucg

SEQ ID NO: 160547 - RNA, 19 nt, Homo sapiens
  misc_RNA (1)...(19): siRNA sense strand
caacagaacuuuaucauca

SEQ ID NO: 160548 - RNA, 19 nt, Homo sapiens
  misc_RNA (1)...(19): siRNA sense strand
gagcauggaugacgaaauu

SEQ ID NO: 160549 - RNA, 19 nt, Homo sapiens
  misc_RNA (1)...(19): siRNA sense strand
gaacauaaacuuucuacug

SEQ ID NO: 160550 - RNA, 19 nt, Homo sapiens
  misc_RNA (1)...(19): siRNA sense strand
ggacgaggcuaucauuaug

SEQ ID NO: 160551 - RNA, 19 nt, Homo sapiens
  misc_RNA (1)...(19): siRNA sense strand
ugaaacggcugccugauuu

SEQ ID NO: 160552 - RNA, 19 nt, Homo sapiens
  misc_RNA (1)...(19): siRNA sense strand
ggagacagauuguggaguu

SEQ ID NO: 160553 - RNA, 19 nt, Homo sapiens
  misc_RNA (1)...(19): siRNA sense strand
uaaaggagauccagagaug

SEQ ID NO: 160554 - RNA, 19 nt, Homo sapiens
  misc_RNA (1)...(19): siRNA sense strand
ggagagaguuauccaacaa

SEQ ID NO: 160555 - RNA, 19 nt, Homo sapiens
  misc_RNA (1)...(19): siRNA sense strand
caagauaccagcuuuacua

SEQ ID NO: 160556 - RNA, 19 nt, Homo sapiens
  misc_RNA (1)...(19): siRNA sense strand
gaucaugcuuggauugaaa

SEQ ID NO: 160557 - RNA, 19 nt, Homo sapiens
  misc_RNA (1)...(19): siRNA sense strand
gcaacaagauauggauuug

SEQ ID NO: 160558 - RNA, 19 nt, Homo sapiens
  misc_RNA (1)...(19): siRNA sense strand
caagaaagacgcaaagaga

SEQ ID NO: 160559 - RNA, 19 nt, Homo sapiens
  misc_RNA (1)...(19): siRNA sense strand
caaaggcuaugacuucgaa

SEQ ID NO: 160560 - RNA, 19 nt, Homo sapiens
  misc_RNA (1)...(19): siRNA sense strand
caugagagaucacacuuau

SEQ ID NO: 160561 - RNA, 19 nt, Homo sapiens
  misc_RNA (1)...(19): siRNA sense strand
gaaacuagcaacagaacuu

SEQ ID NO: 160562 - RNA, 19 nt, Homo sapiens
  misc_RNA (1)...(19): siRNA sense strand
gcuaugacuucgaaucuga

SEQ ID NO: 160563 - RNA, 19 nt, Homo sapiens
  misc_RNA (1)...(19): siRNA sense strand
uuacuuauaugcacucuga

SEQ ID NO: 160564 - RNA, 19 nt, Homo sapiens
  misc_RNA (1)...(19): siRNA sense strand
aaaggaagcugcaaucucu

SEQ ID NO: 160565 - RNA, 19 nt, Homo sapiens
  misc_RNA (1)...(19): siRNA sense strand
gauuguggaguucauauua

SEQ ID NO: 160566 - RNA, 19 nt, Homo sapiens
  misc_RNA (1)...(19): siRNA sense strand
gaauuugggugguuugaag

SEQ ID NO: 160567 - RNA, 19 nt, Homo sapiens
  misc_RNA (1)...(19): siRNA sense strand
uaaacgaacugcaggagau

SEQ ID NO: 160568 - RNA, 19 nt, Homo sapiens
  misc_RNA (1)...(19): siRNA sense strand
ccaaaucugugacuguaga

SEQ ID NO: 160569 - RNA, 19 nt, Homo sapiens
  misc_RNA (1)...(19): siRNA sense strand
uugccaagcucguuaagua

SEQ ID NO: 160570 - RNA, 19 nt, Homo sapiens
  misc_RNA (1)...(19): siRNA sense strand
ggaagccaaugccugcaaa

SEQ ID NO: 160571 - RNA, 19 nt, Homo sapiens
  misc_RNA (1)...(19): siRNA sense strand
gagaggaagagucaacuuu

SEQ ID NO: 160572 - RNA, 19 nt, Homo sapiens
  misc_RNA (1)...(19): siRNA sense strand
gaacaggcaaagacaagaa

SEQ ID NO: 160573 - RNA, 19 nt, Homo sapiens
  misc_RNA (1)...(19): siRNA sense strand
caagauauggauuuggaua

SEQ ID NO: 160574 - RNA, 19 nt, Homo sapiens
  misc_RNA (1)...(19): siRNA sense strand
cauccuugcuggugaauug

SEQ ID NO: 160575 - RNA, 19 nt, Homo sapiens
  misc_RNA (1)...(19): siRNA sense strand
ggaagaugaugauguugca

SEQ ID NO: 160576 - RNA, 19 nt, Homo sapiens
  misc_RNA (1)...(19): siRNA sense strand
cgugaucccuuuacaguug

SEQ ID NO: 160577 - RNA, 19 nt, Homo sapiens
  misc_RNA (1)...(19): siRNA sense strand
ggagugaacauaaacuuuc

SEQ ID NO: 160578 - RNA, 19 nt, Homo sapiens
  misc_RNA (1)...(19): siRNA sense strand
ugacgaaauucagaaacua

SEQ ID NO: 160579 - RNA, 19 nt, Homo sapiens
  misc_RNA (1)...(19): siRNA sense strand
uuaaggcacuggaugaaga

SEQ ID NO: 160580 - RNA, 19 nt, Homo sapiens
  misc_RNA (1)...(19): siRNA sense strand
gagaggcuaugauguugau

SEQ ID NO: 160581 - RNA, 19 nt, Homo sapiens
  misc_RNA (1)...(19): siRNA sense strand
gacagcagauacuuugaug

SEQ ID NO: 160582 - RNA, 19 nt, Homo sapiens
  misc_RNA (1)...(19): siRNA sense strand
cagaaacacaccagucuuu

SEQ ID NO: 160583 - RNA, 19 nt, Homo sapiens
  misc_RNA (1)...(19): siRNA sense strand
gaacccaguccugucaaua

SEQ ID NO: 160584 - RNA, 19 nt, Homo sapiens
  misc_RNA (1)...(19): siRNA sense strand
caacuacaaagacuugaaa

SEQ ID NO: 160585 - RNA, 19 nt, Homo sapiens
  misc_RNA (1)...(19): siRNA sense strand
gcugagaggcuaugauguu

SEQ ID NO: 160586 - RNA, 19 nt, Homo sapiens
  misc_RNA (1)...(19): siRNA sense strand
gaggauacugagaccauua

SEQ ID NO: 160587 - RNA, 19 nt, Homo sapiens
  misc_RNA (1)...(19): siRNA sense strand
guacagaggauaugauucu

SEQ ID NO: 160588 - RNA, 19 nt, Homo sapiens
  misc_RNA (1)...(19): siRNA sense strand
gcaaaacccagcuuauuaa

SEQ ID NO: 160589 - RNA, 19 nt, Homo sapiens
  misc_RNA (1)...(19): siRNA sense strand
caagugcugucauagaaca

SEQ ID NO: 160590 - RNA, 19 nt, Homo sapiens
  misc_RNA (1)...(19): siRNA sense strand
ugaugcaagugcugucaua

SEQ ID NO: 160591 - RNA, 19 nt, Homo sapiens
  misc_RNA (1)...(19): siRNA sense strand
caacuuugaugacuauacu

SEQ ID NO: 160592 - RNA, 19 nt, Homo sapiens
  misc_RNA (1)...(19): siRNA sense strand
uugaggagcugacugaguu

SEQ ID NO: 160593 - RNA, 19 nt, Homo sapiens
  misc_RNA (1)...(19): siRNA sense strand
ccaagcucguuaaguauau

SEQ ID NO: 160594 - RNA, 19 nt, Homo sapiens
  misc_RNA (1)...(19): siRNA sense strand
gaaagacgcaaagagauca

SEQ ID NO: 160595 - RNA, 19 nt, Homo sapiens
  misc_RNA (1)...(19): siRNA sense strand
ggagagaggagcuuuaacu

SEQ ID NO: 160596 - RNA, 19 nt, Homo sapiens
  misc_RNA (1)...(19): siRNA sense strand
ugaaggaucacauaaagga

SEQ ID NO: 160597 - RNA, 19 nt, Homo sapiens
  misc_RNA (1)...(19): siRNA sense strand
ugacuauacugugaauuug

SEQ ID NO: 160598 - RNA, 19 nt, Homo sapiens
  misc_RNA (1)...(19): siRNA sense strand
ggauggacgucuuucuauc

SEQ ID NO: 160599 - RNA, 19 nt, Homo sapiens
  misc_RNA (1)...(19): siRNA sense strand
gaaaggaagcugcaaucuc

SEQ ID NO: 160600 - RNA, 19 nt, Homo sapiens
  misc_RNA (1)...(19): siRNA sense strand
ucaaaggccuucagagacu

SEQ ID NO: 160601 - RNA, 19 nt, Homo sapiens
  misc_RNA (1)...(19): siRNA sense strand
ggcacuggaugaagaaguu

SEQ ID NO: 160602 - RNA, 19 nt, Homo sapiens
  misc_RNA (1)...(19): siRNA sense strand
cacggaaucuugccaaauc

SEQ ID NO: 160603 - RNA, 19 nt, Homo sapiens
  misc_RNA (1)...(19): siRNA sense strand
auacugagaccauuaagaa

SEQ ID NO: 160604 - RNA, 19 nt, Homo sapiens
  misc_RNA (1)...(19): siRNA sense strand
ggaggauacugagaccauu

SEQ ID NO: 160605 - RNA, 19 nt, Homo sapiens
  misc_RNA (1)...(19): siRNA sense strand
gcuggugaauugaaacaug

SEQ ID NO: 160606 - RNA, 19 nt, Homo sapiens
  misc_RNA (1)...(19): siRNA sense strand
gaacuccagcagaucauga

SEQ ID NO: 160607 - RNA, 19 nt, Homo sapiens
  misc_RNA (1)...(19): siRNA sense strand
gauaccagcuuuacuaccu

SEQ ID NO: 160608 - RNA, 19 nt, Homo sapiens
  misc_RNA (1)...(19): siRNA sense strand
gccaagcucguuaaguaua

SEQ ID NO: 160609 - RNA, 19 nt, Homo sapiens
  misc_RNA (1)...(19): siRNA sense strand
ggagaacccaguccuguca

SEQ ID NO: 160610 - RNA, 19 nt, Homo sapiens
  misc_RNA (1)...(19): siRNA sense strand
gauaaugggacgaggcuau

SEQ ID NO: 160611 - RNA, 19 nt, Homo sapiens
  misc_RNA (1)...(19): siRNA sense strand
ucuggaagaugaugauguu

SEQ ID NO: 160612 - RNA, 19 nt, Homo sapiens
  misc_RNA (1)...(19): siRNA sense strand
ugcaagugcugucauagaa

SEQ ID NO: 160613 - RNA, 19 nt, Homo sapiens
  misc_RNA (1)...(19): siRNA sense strand
cauaaacuuucuacugauc

SEQ ID NO: 160614 - RNA, 19 nt, Homo sapiens
  misc_RNA (1)...(19): siRNA sense strand
agagaguuauccaacaauu

SEQ ID NO: 160615 - RNA, 19 nt, Homo sapiens
  misc_RNA (1)...(19): siRNA sense strand
uggcuuugguggauaaauu

SEQ ID NO: 160616 - RNA, 19 nt, Homo sapiens
  misc_RNA (1)...(19): siRNA sense strand
ugauguacaccuuggaaua

SEQ ID NO: 160617 - RNA, 19 nt, Homo sapiens
  misc_RNA (1)...(19): siRNA sense strand
gggacgaggcuaucauuau

SEQ ID NO: 160618 - RNA, 19 nt, Homo sapiens
  misc_RNA (1)...(19): siRNA sense strand
gauguuugcccuuaugaug

SEQ ID NO: 160619 - RNA, 19 nt, Homo sapiens
  misc_RNA (1)...(19): siRNA sense strand
aaucaaaggccuucagaga

SEQ ID NO: 160620 - RNA, 19 nt, Homo sapiens
  misc_RNA (1)...(19): siRNA sense strand
gaacacaaugagaggaaga

SEQ ID NO: 160621 - RNA, 19 nt, Homo sapiens
  misc_RNA (1)...(19): siRNA sense strand
gaguacagaggauaugauu

SEQ ID NO: 160622 - RNA, 19 nt, Homo sapiens
  misc_RNA (1)...(19): siRNA sense strand
guucauuuaugcagaagga

SEQ ID NO: 160623 - RNA, 19 nt, Homo sapiens
  misc_RNA (1)...(19): siRNA sense strand
guucacaagcaacaagaua

SEQ ID NO: 160624 - RNA, 19 nt, Homo sapiens
  misc_RNA (1)...(19): siRNA sense strand
gaggcuaugauguugauuu

SEQ ID NO: 160625 - RNA, 19 nt, Homo sapiens
  misc_RNA (1)...(19): siRNA sense strand
gugauaaggaggauacuga

SEQ ID NO: 160626 - RNA, 19 nt, Homo sapiens
  misc_RNA (1)...(19): siRNA sense strand
gaaauucagaaacuagcaa

SEQ ID NO: 160627 - RNA, 19 nt, Homo sapiens
  misc_RNA (1)...(19): siRNA sense strand
ugagacagcagauacuuug

SEQ ID NO: 160628 - RNA, 19 nt, Homo sapiens
  misc_RNA (1)...(19): siRNA sense strand
acaccagucuuucgagaug

SEQ ID NO: 160629 - RNA, 19 nt, Homo sapiens
  misc_RNA (1)...(19): siRNA sense strand
aagcaaaggcuaugacuuc

SEQ ID NO: 160630 - RNA, 19 nt, Homo sapiens
  misc_RNA (1)...(19): siRNA sense strand
aacaagauauggauuugga

SEQ ID NO: 160631 - RNA, 19 nt, Homo sapiens
  misc_RNA (1)...(19): siRNA sense strand
acaauggaaucaucaccaa

SEQ ID NO: 160632 - RNA, 19 nt, Homo sapiens
  misc_RNA (1)...(19): siRNA sense strand
ugccaaaucugugacugua

SEQ ID NO: 160633 - RNA, 19 nt, Homo sapiens
  misc_RNA (1)...(19): siRNA sense strand
gauaaauugaugccuguga

SEQ ID NO: 160634 - RNA, 19 nt, Homo sapiens
  misc_RNA (1)...(19): siRNA sense strand
gcaagaaagacgcaaagag

SEQ ID NO: 160635 - RNA, 19 nt, Homo sapiens
  misc_RNA (1)...(19): siRNA sense strand
agaauuugauguacaccuu

SEQ ID NO: 160636 - RNA, 19 nt, Homo sapiens
  misc_RNA (1)...(19): siRNA sense strand
ugacugaguugccugugau

SEQ ID NO: 160637 - RNA, 19 nt, Homo sapiens
  misc_RNA (1)...(19): siRNA sense strand
ucaguucauuuaugcagaa

SEQ ID NO: 160638 - RNA, 19 nt, Homo sapiens
  misc_RNA (1)...(19): siRNA sense strand
ucacauuccuauacucuac

SEQ ID NO: 160639 - RNA, 19 nt, Homo sapiens
  misc_RNA (1)...(19): siRNA sense strand
aaacagacacagagacaau

SEQ ID NO: 160640 - RNA, 19 nt, Homo sapiens
  misc_RNA (1)...(19): siRNA sense strand
ggaaucaucaccaacuaca

SEQ ID NO: 160641 - RNA, 19 nt, Homo sapiens
  misc_RNA (1)...(19): siRNA sense strand
cuacugaucacauuccuau

SEQ ID NO: 160642 - RNA, 19 nt, Homo sapiens
  misc_RNA (1)...(19): siRNA sense strand
gcaacagaacuuuaucauc

SEQ ID NO: 160643 - RNA, 19 nt, Homo sapiens
  misc_RNA (1)...(19): siRNA sense strand
uaaggagagaggagcuuua

SEQ ID NO: 160644 - RNA, 19 nt, Homo sapiens
  misc_RNA (1)...(19): siRNA sense strand
ucgagaugauguuugcuuu

SEQ ID NO: 160645 - RNA, 19 nt, Homo sapiens
  misc_RNA (1)...(19): siRNA sense strand
gggauuugauggaggcaau

SEQ ID NO: 160646 - RNA, 19 nt, Homo sapiens
  misc_RNA (1)...(19): siRNA sense strand
aaagagaucaugcuuggau

SEQ ID NO: 160647 - RNA, 19 nt, Homo sapiens
  misc_RNA (1)...(19): siRNA sense strand
gggcagaucuucaaucagu

SEQ ID NO: 160648 - RNA, 19 nt, Homo sapiens
  misc_RNA (1)...(19): siRNA sense strand
ggaaggacauggacaaggu

SEQ ID NO: 160649 - RNA, 19 nt, Homo sapiens
  misc_RNA (1)...(19): siRNA sense strand
aaacgcagcagaaaucuaa

SEQ ID NO: 160650 - RNA, 19 nt, Homo sapiens
  misc_RNA (1)...(19): siRNA sense strand
uguaccagcuggcauauga

SEQ ID NO: 160651 - RNA, 19 nt, Homo sapiens
  misc_RNA (1)...(19): siRNA sense strand
ggacugggcagaucuucaa

SEQ ID NO: 160652 - RNA, 19 nt, Homo sapiens
  misc_RNA (1)...(19): siRNA sense strand
ugacaccuaucaggaguuu

SEQ ID NO: 160653 - RNA, 19 nt, Homo sapiens
  misc_RNA (1)...(19): siRNA sense strand
gggcagcuguggcuucuag

SEQ ID NO: 160654 - RNA, 19 nt, Homo sapiens
  misc_RNA (1)...(19): siRNA sense strand
ccaacagccugguguaugg

SEQ ID NO: 160655 - RNA, 19 nt, Homo sapiens
  misc_RNA (1)...(19): siRNA sense strand
uggacaaggucgagacauu

SEQ ID NO: 160656 - RNA, 19 nt, Homo sapiens
  misc_RNA (1)...(19): siRNA sense strand
ggacaaggucgagacauuc

SEQ ID NO: 160657 - RNA, 19 nt, Homo sapiens
  misc_RNA (1)...(19): siRNA sense strand
gcuggcauaugacaccuau

SEQ ID NO: 160658 - RNA, 19 nt, Homo sapiens
  misc_RNA (1)...(19): siRNA sense strand
gggcugcucuacugcuuca

SEQ ID NO: 160659 - RNA, 19 nt, Homo sapiens
  misc_RNA (1)...(19): siRNA sense strand
cugggcagaucuucaauca

SEQ ID NO: 160660 - RNA, 19 nt, Homo sapiens
  misc_RNA (1)...(19): siRNA sense strand
gcagcagaaaucuaaccua

SEQ ID NO: 160661 - RNA, 19 nt, Homo sapiens
  misc_RNA (1)...(19): siRNA sense strand
gaacuacgggcugcucuac

SEQ ID NO: 160662 - RNA, 19 nt, Homo sapiens
  misc_RNA (1)...(19): siRNA sense strand
gagggcagcuguggcuucu

SEQ ID NO: 160663 - RNA, 19 nt, Homo sapiens
  misc_RNA (1)...(19): siRNA sense strand
gcagugccuucccaaccau

SEQ ID NO: 160664 - RNA, 19 nt, Homo sapiens
  misc_RNA (1)...(19): siRNA sense strand
uggcauaugacaccuauca

SEQ ID NO: 160665 - RNA, 19 nt, Homo sapiens
  misc_RNA (1)...(19): siRNA sense strand
ucaaucaguccuacagcaa

SEQ ID NO: 160666 - RNA, 19 nt, Homo sapiens
  misc_RNA (1)...(19): siRNA sense strand
ccugaaggaccuagaggaa

SEQ ID NO: 160667 - RNA, 19 nt, Homo sapiens
  misc_RNA (1)...(19): siRNA sense strand
ucaggaaggacauggacaa

SEQ ID NO: 160668 - RNA, 19 nt, Homo sapiens
  misc_RNA (1)...(19): siRNA sense strand
gccaacagccugguguaug

SEQ ID NO: 160669 - RNA, 19 nt, Homo sapiens
  misc_RNA (1)...(19): siRNA sense strand
gcaucucccugcugcucau

SEQ ID NO: 160670 - RNA, 19 nt, Homo sapiens
  misc_RNA (1)...(19): siRNA sense strand
cgucccugcuccuggcuuu

SEQ ID NO: 160671 - RNA, 19 nt, Homo sapiens
  misc_RNA (1)...(19): siRNA sense strand
gccuguaccagcuggcaua

SEQ ID NO: 160672 - RNA, 19 nt, Homo sapiens
  misc_RNA (1)...(19): siRNA sense strand
aaucaguccuacagcaagu

SEQ ID NO: 160673 - RNA, 19 nt, Homo sapiens
  misc_RNA (1)...(19): siRNA sense strand
acuacgggcugcucuacug

SEQ ID NO: 160674 - RNA, 19 nt, Homo sapiens
  misc_RNA (1)...(19): siRNA sense strand
ugaaaacgcagcagaaauc

SEQ ID NO: 160675 - RNA, 19 nt, Homo sapiens
  misc_RNA (1)...(19): siRNA sense strand
ucccaaccauucccuuauc

SEQ ID NO: 160676 - RNA, 19 nt, Homo sapiens
  misc_RNA (1)...(19): siRNA sense strand
gggcagaucuucaaucagu

SEQ ID NO: 160677 - RNA, 19 nt, Homo sapiens
  misc_RNA (1)...(19): siRNA sense strand
ggaaggacauggacaaggu

SEQ ID NO: 160678 - RNA, 19 nt, Homo sapiens
  misc_RNA (1)...(19): siRNA sense strand
aaacgcagcagaaaucuaa

SEQ ID NO: 160679 - RNA, 19 nt, Homo sapiens
  misc_RNA (1)...(19): siRNA sense strand
uguaccagcuggcauauga

SEQ ID NO: 160680 - RNA, 19 nt, Homo sapiens
  misc_RNA (1)...(19): siRNA sense strand
ggacugggcagaucuucaa

SEQ ID NO: 160681 - RNA, 19 nt, Homo sapiens
  misc_RNA (1)...(19): siRNA sense strand
ugacaccuaucaggaguuu

SEQ ID NO: 160682 - RNA, 19 nt, Homo sapiens
  misc_RNA (1)...(19): siRNA sense strand
gggcagcuguggcuucuag

SEQ ID NO: 160683 - RNA, 19 nt, Homo sapiens
  misc_RNA (1)...(19): siRNA sense strand
ccaacagccugguguaugg

SEQ ID NO: 160684 - RNA, 19 nt, Homo sapiens
  misc_RNA (1)...(19): siRNA sense strand
uggacaaggucgagacauu

SEQ ID NO: 160685 - RNA, 19 nt, Homo sapiens
  misc_RNA (1)...(19): siRNA sense strand
ggacaaggucgagacauuc

SEQ ID NO: 160686 - RNA, 19 nt, Homo sapiens
  misc_RNA (1)...(19): siRNA sense strand
gcuggcauaugacaccuau

SEQ ID NO: 160687 - RNA, 19 nt, Homo sapiens
  misc_RNA (1)...(19): siRNA sense strand
gggcugcucuacugcuuca

SEQ ID NO: 160688 - RNA, 19 nt, Homo sapiens
  misc_RNA (1)...(19): siRNA sense strand
cugggcagaucuucaauca

SEQ ID NO: 160689 - RNA, 19 nt, Homo sapiens
  misc_RNA (1)...(19): siRNA sense strand
gcagcagaaaucuaaccua

SEQ ID NO: 160690 - RNA, 19 nt, Homo sapiens
  misc_RNA (1)...(19): siRNA sense strand
gaacuacgggcugcucuac

SEQ ID NO: 160691 - RNA, 19 nt, Homo sapiens
  misc_RNA (1)...(19): siRNA sense strand
gagggcagcuguggcuucu

SEQ ID NO: 160692 - RNA, 19 nt, Homo sapiens
  misc_RNA (1)...(19): siRNA sense strand
gcagugccuucccaaccau

SEQ ID NO: 160693 - RNA, 19 nt, Homo sapiens
  misc_RNA (1)...(19): siRNA sense strand
uggcauaugacaccuauca

SEQ ID NO: 160694 - RNA, 19 nt, Homo sapiens
  misc_RNA (1)...(19): siRNA sense strand
ucaaucaguccuacagcaa

SEQ ID NO: 160695 - RNA, 19 nt, Homo sapiens
  misc_RNA (1)...(19): siRNA sense strand
ccugaaggaccuagaggaa

SEQ ID NO: 160696 - RNA, 19 nt, Homo sapiens
  misc_RNA (1)...(19): siRNA sense strand
ucaggaaggacauggacaa

SEQ ID NO: 160697 - RNA, 19 nt, Homo sapiens
  misc_RNA (1)...(19): siRNA sense strand
gccaacagccugguguaug

SEQ ID NO: 160698 - RNA, 19 nt, Homo sapiens
  misc_RNA (1)...(19): siRNA sense strand
gcaucucccugcugcucau

SEQ ID NO: 160699 - RNA, 19 nt, Homo sapiens
  misc_RNA (1)...(19): siRNA sense strand
cgucccugcuccuggcuuu

SEQ ID NO: 160700 - RNA, 19 nt, Homo sapiens
  misc_RNA (1)...(19): siRNA sense strand
gccuguaccagcuggcaua

SEQ ID NO: 160701 - RNA, 19 nt, Homo sapiens
  misc_RNA (1)...(19): siRNA sense strand
aaucaguccuacagcaagu

SEQ ID NO: 160702 - RNA, 19 nt, Homo sapiens
  misc_RNA (1)...(19): siRNA sense strand
acuacgggcugcucuacug

SEQ ID NO: 160703 - RNA, 19 nt, Homo sapiens
  misc_RNA (1)...(19): siRNA sense strand
ugaaaacgcagcagaaauc

SEQ ID NO: 160704 - RNA, 19 nt, Homo sapiens
  misc_RNA (1)...(19): siRNA sense strand
ucccaaccauucccuuauc

SEQ ID NO: 160705 - RNA, 19 nt, Homo sapiens
  misc_RNA (1)...(19): siRNA sense strand
gggcagaucuucaaucagu

SEQ ID NO: 160706 - RNA, 19 nt, Homo sapiens
  misc_RNA (1)...(19): siRNA sense strand
aaacgcagcagaaaucuaa

SEQ ID NO: 160707 - RNA, 19 nt, Homo sapiens
  misc_RNA (1)...(19): siRNA sense strand
uguaccagcuggcauauga

SEQ ID NO: 160708 - RNA, 19 nt, Homo sapiens
  misc_RNA (1)...(19): siRNA sense strand
ggacugggcagaucuucaa

SEQ ID NO: 160709 - RNA, 19 nt, Homo sapiens
  misc_RNA (1)...(19): siRNA sense strand
ugacaccuaucaggaguuu

SEQ ID NO: 160710 - RNA, 19 nt, Homo sapiens
  misc_RNA (1)...(19): siRNA sense strand
ccaacagccugguguaugg

SEQ ID NO: 160711 - RNA, 19 nt, Homo sapiens
  misc_RNA (1)...(19): siRNA sense strand
gcuggcauaugacaccuau

SEQ ID NO: 160712 - RNA, 19 nt, Homo sapiens
  misc_RNA (1)...(19): siRNA sense strand
cugggcagaucuucaauca

SEQ ID NO: 160713 - RNA, 19 nt, Homo sapiens
  misc_RNA (1)...(19): siRNA sense strand
gcagcagaaaucuaaccua

SEQ ID NO: 160714 - RNA, 19 nt, Homo sapiens
  misc_RNA (1)...(19): siRNA sense strand
gcagugccuucccaaccau

SEQ ID NO: 160715 - RNA, 19 nt, Homo sapiens
  misc_RNA (1)...(19): siRNA sense strand
uggcauaugacaccuauca

SEQ ID NO: 160716 - RNA, 19 nt, Homo sapiens
  misc_RNA (1)...(19): siRNA sense strand
ucaaucaguccuacagcaa

SEQ ID NO: 160717 - RNA, 19 nt, Homo sapiens
  misc_RNA (1)...(19): siRNA sense strand
ccugaaggaccuagaggaa

SEQ ID NO: 160718 - RNA, 19 nt, Homo sapiens
  misc_RNA (1)...(19): siRNA sense strand
gccaacagccugguguaug

SEQ ID NO: 160719 - RNA, 19 nt, Homo sapiens
  misc_RNA (1)...(19): siRNA sense strand
gcaucucccugcugcucau

SEQ ID NO: 160720 - RNA, 19 nt, Homo sapiens
  misc_RNA (1)...(19): siRNA sense strand
cgucccugcuccuggcuuu

SEQ ID NO: 160721 - RNA, 19 nt, Homo sapiens
  misc_RNA (1)...(19): siRNA sense strand
gccuguaccagcuggcaua

SEQ ID NO: 160722 - RNA, 19 nt, Homo sapiens
  misc_RNA (1)...(19): siRNA sense strand
aaucaguccuacagcaagu

SEQ ID NO: 160723 - RNA, 19 nt, Homo sapiens
  misc_RNA (1)...(19): siRNA sense strand
ugaaaacgcagcagaaauc

SEQ ID NO: 160724 - RNA, 19 nt, Homo sapiens
  misc_RNA (1)...(19): siRNA sense strand
ucccaaccauucccuuauc

SEQ ID NO: 160725 - RNA, 19 nt, Homo sapiens
  misc_RNA (1)...(19): siRNA sense strand
gggcagaucuucaaucagu

SEQ ID NO: 160726 - RNA, 19 nt, Homo sapiens
  misc_RNA (1)...(19): siRNA sense strand
ggaaggacauggacaaggu

SEQ ID NO: 160727 - RNA, 19 nt, Homo sapiens
  misc_RNA (1)...(19): siRNA sense strand
aaacgcagcagaaaucuaa

SEQ ID NO: 160728 - RNA, 19 nt, Homo sapiens
  misc_RNA (1)...(19): siRNA sense strand
uguaccagcuggcauauga

SEQ ID NO: 160729 - RNA, 19 nt, Homo sapiens
  misc_RNA (1)...(19): siRNA sense strand
ggacugggcagaucuucaa

SEQ ID NO: 160730 - RNA, 19 nt, Homo sapiens
  misc_RNA (1)...(19): siRNA sense strand
ugacaccuaucaggaguuu

SEQ ID NO: 160731 - RNA, 19 nt, Homo sapiens
  misc_RNA (1)...(19): siRNA sense strand
gggcagcuguggcuucuag

SEQ ID NO: 160732 - RNA, 19 nt, Homo sapiens
  misc_RNA (1)...(19): siRNA sense strand
ccaacagccugguguaugg

SEQ ID NO: 160733 - RNA, 19 nt, Homo sapiens
  misc_RNA (1)...(19): siRNA sense strand
uggacaaggucgagacauu

SEQ ID NO: 160734 - RNA, 19 nt, Homo sapiens
  misc_RNA (1)...(19): siRNA sense strand
ggacaaggucgagacauuc

SEQ ID NO: 160735 - RNA, 19 nt, Homo sapiens
  misc_RNA (1)...(19): siRNA sense strand
gcuggcauaugacaccuau

SEQ ID NO: 160736 - RNA, 19 nt, Homo sapiens
  misc_RNA (1)...(19): siRNA sense strand
gggcugcucuacugcuuca

SEQ ID NO: 160737 - RNA, 19 nt, Homo sapiens
  misc_RNA (1)...(19): siRNA sense strand
cugggcagaucuucaauca

SEQ ID NO: 160738 - RNA, 19 nt, Homo sapiens
  misc_RNA (1)...(19): siRNA sense strand
gcagcagaaaucuaaccua

SEQ ID NO: 160739 - RNA, 19 nt, Homo sapiens
  misc_RNA (1)...(19): siRNA sense strand
gaacuacgggcugcucuac

SEQ ID NO: 160740 - RNA, 19 nt, Homo sapiens
  misc_RNA (1)...(19): siRNA sense strand
gagggcagcuguggcuucu

SEQ ID NO: 160741 - RNA, 19 nt, Homo sapiens
  misc_RNA (1)...(19): siRNA sense strand
gcagugccuucccaaccau

SEQ ID NO: 160742 - RNA, 19 nt, Homo sapiens
  misc_RNA (1)...(19): siRNA sense strand
uggcauaugacaccuauca

SEQ ID NO: 160743 - RNA, 19 nt, Homo sapiens
  misc_RNA (1)...(19): siRNA sense strand
ucaaucaguccuacagcaa

SEQ ID NO: 160744 - RNA, 19 nt, Homo sapiens
  misc_RNA (1)...(19): siRNA sense strand
ccugaaggaccuagaggaa

SEQ ID NO: 160745 - RNA, 19 nt, Homo sapiens
  misc_RNA (1)...(19): siRNA sense strand
ucaggaaggacauggacaa

SEQ ID NO: 160746 - RNA, 19 nt, Homo sapiens
  misc_RNA (1)...(19): siRNA sense strand
gccaacagccugguguaug

SEQ ID NO: 160747 - RNA, 19 nt, Homo sapiens
  misc_RNA (1)...(19): siRNA sense strand
gcaucucccugcugcucau

SEQ ID NO: 160748 - RNA, 19 nt, Homo sapiens
  misc_RNA (1)...(19): siRNA sense strand
cgucccugcuccuggcuuu

SEQ ID NO: 160749 - RNA, 19 nt, Homo sapiens
  misc_RNA (1)...(19): siRNA sense strand
gccuguaccagcuggcaua

SEQ ID NO: 160750 - RNA, 19 nt, Homo sapiens
  misc_RNA (1)...(19): siRNA sense strand
aaucaguccuacagcaagu

SEQ ID NO: 160751 - RNA, 19 nt, Homo sapiens
  misc_RNA (1)...(19): siRNA sense strand
acuacgggcugcucuacug

SEQ ID NO: 160752 - RNA, 19 nt, Homo sapiens
  misc_RNA (1)...(19): siRNA sense strand
ugaaaacgcagcagaaauc

SEQ ID NO: 160753 - RNA, 19 nt, Homo sapiens
  misc_RNA (1)...(19): siRNA sense strand
ucccaaccauucccuuauc

SEQ ID NO: 160754 - RNA, 19 nt, Homo sapiens
  misc_RNA (1)...(19): siRNA sense strand
gcaccaacgucugcuauga

SEQ ID NO: 160755 - RNA, 19 nt, Homo sapiens
  misc_RNA (1)...(19): siRNA sense strand
cuaagaagcaguauguaua

SEQ ID NO: 160756 - RNA, 19 nt, Homo sapiens
  misc_RNA (1)...(19): siRNA sense strand
gcaccuaugucgccagugu

SEQ ID NO: 160757 - RNA, 19 nt, Homo sapiens
  misc_RNA (1)...(19): siRNA sense strand
gggccaaccugaccacaga

SEQ ID NO: 160758 - RNA, 19 nt, Homo sapiens
  misc_RNA (1)...(19): siRNA sense strand
ugacggugcucuucaucuu

SEQ ID NO: 160759 - RNA, 19 nt, Homo sapiens
  misc_RNA (1)...(19): siRNA sense strand
gaccauggagcccguguuu

SEQ ID NO: 160760 - RNA, 19 nt, Homo sapiens
  misc_RNA (1)...(19): siRNA sense strand
gauggucgccugcgcauuc

SEQ ID NO: 160761 - RNA, 19 nt, Homo sapiens
  misc_RNA (1)...(19): siRNA sense strand
uaagaagcaguauguauag

SEQ ID NO: 160762 - RNA, 19 nt, Homo sapiens
  misc_RNA (1)...(19): siRNA sense strand
gcacugaugggcaccuaug

SEQ ID NO: 160763 - RNA, 19 nt, Homo sapiens
  misc_RNA (1)...(19): siRNA sense strand
gagcacugaugggcaccua

SEQ ID NO: 160764 - RNA, 19 nt, Homo sapiens
  misc_RNA (1)...(19): siRNA sense strand
ccauggagcccguguuugu

SEQ ID NO: 160765 - RNA, 19 nt, Homo sapiens
  misc_RNA (1)...(19): siRNA sense strand
ucaucucccuggugcuuaa

SEQ ID NO: 160766 - RNA, 19 nt, Homo sapiens
  misc_RNA (1)...(19): siRNA sense strand
gcacacccacccuggucua

SEQ ID NO: 160767 - RNA, 19 nt, Homo sapiens
  misc_RNA (1)...(19): siRNA sense strand
aggagaggcuggcgucuuc

SEQ ID NO: 160768 - RNA, 19 nt, Homo sapiens
  misc_RNA (1)...(19): siRNA sense strand
aagagcggcuggcgcagaa

SEQ ID NO: 160769 - RNA, 19 nt, Homo sapiens
  misc_RNA (1)...(19): siRNA sense strand
gcaccuccucagacccuua

SEQ ID NO: 160770 - RNA, 19 nt, Homo sapiens
  misc_RNA (1)...(19): siRNA sense strand
caagaucucgguggcagaa

SEQ ID NO: 160771 - RNA, 19 nt, Homo sapiens
  misc_RNA (1)...(19): siRNA sense strand
ucuaagaagcaguauguau

SEQ ID NO: 160772 - RNA, 19 nt, Homo sapiens
  misc_RNA (1)...(19): siRNA sense strand
cuaccugggccaugucauu

SEQ ID NO: 160773 - RNA, 19 nt, Homo sapiens
  misc_RNA (1)...(19): siRNA sense strand
acucgaccgugguggguaa

SEQ ID NO: 160774 - RNA, 19 nt, Homo sapiens
  misc_RNA (1)...(19): siRNA sense strand
gaccaucuucaucaucuuc

SEQ ID NO: 160775 - RNA, 19 nt, Homo sapiens
  misc_RNA (1)...(19): siRNA sense strand
gaggagaggcuggcgucuu

SEQ ID NO: 160776 - RNA, 19 nt, Homo sapiens
  misc_RNA (1)...(19): siRNA sense strand
ugcuuaaccugcuggaguu

SEQ ID NO: 160777 - RNA, 19 nt, Homo sapiens
  misc_RNA (1)...(19): siRNA sense strand
guuggugguuggacucauc

SEQ ID NO: 160778 - RNA, 19 nt, Homo sapiens
  misc_RNA (1)...(19): siRNA sense strand
agaucucgguggcagaaga

SEQ ID NO: 160779 - RNA, 19 nt, Homo sapiens
  misc_RNA (1)...(19): siRNA sense strand
ccaugucauuuaccugucu

SEQ ID NO: 160780 - RNA, 19 nt, Homo sapiens
  misc_RNA (1)...(19): siRNA sense strand
cuucaucaucuucauguug

SEQ ID NO: 160781 - RNA, 19 nt, Homo sapiens
  misc_RNA (1)...(19): siRNA sense strand
gcgaggagcuucaugauug

SEQ ID NO: 160782 - RNA, 19 nt, Homo sapiens
  misc_RNA (1)...(19): siRNA sense strand
gauaaauccugaugaaaga

SEQ ID NO: 160783 - RNA, 19 nt, Homo sapiens
  misc_RNA (1)...(19): siRNA sense strand
gaauggaguucccaaauca

SEQ ID NO: 160784 - RNA, 19 nt, Homo sapiens
  misc_RNA (1)...(19): siRNA sense strand
guagaggaauuaucaaauc

SEQ ID NO: 160785 - RNA, 19 nt, Homo sapiens
  misc_RNA (1)...(19): siRNA sense strand
gaguuaaucuuuccuugga

SEQ ID NO: 160786 - RNA, 19 nt, Homo sapiens
  misc_RNA (1)...(19): siRNA sense strand
gaagcaaguuuccaagaag

SEQ ID NO: 160787 - RNA, 19 nt, Homo sapiens
  misc_RNA (1)...(19): siRNA sense strand
gaaucaaacucuucaucau

SEQ ID NO: 160788 - RNA, 19 nt, Homo sapiens
  misc_RNA (1)...(19): siRNA sense strand
ugaagcaaguuuccaagaa

SEQ ID NO: 160789 - RNA, 19 nt, Homo sapiens
  misc_RNA (1)...(19): siRNA sense strand
gguauucggucauugugaa

SEQ ID NO: 160790 - RNA, 19 nt, Homo sapiens
  misc_RNA (1)...(19): siRNA sense strand
acauacagcuguugacuca

SEQ ID NO: 160791 - RNA, 19 nt, Homo sapiens
  misc_RNA (1)...(19): siRNA sense strand
gaugaaagagaagaaauga

SEQ ID NO: 160792 - RNA, 19 nt, Homo sapiens
  misc_RNA (1)...(19): siRNA sense strand
gcaaaacuguucauuguag

SEQ ID NO: 160793 - RNA, 19 nt, Homo sapiens
  misc_RNA (1)...(19): siRNA sense strand
ugaauggaguucccaaauc

SEQ ID NO: 160794 - RNA, 19 nt, Homo sapiens
  misc_RNA (1)...(19): siRNA sense strand
ucagggaguuuccagaugu

SEQ ID NO: 160795 - RNA, 19 nt, Homo sapiens
  misc_RNA (1)...(19): siRNA sense strand
gcuguugacucacaaugau

SEQ ID NO: 160796 - RNA, 19 nt, Homo sapiens
  misc_RNA (1)...(19): siRNA sense strand
caccagauuugacugcauu

SEQ ID NO: 160797 - RNA, 19 nt, Homo sapiens
  misc_RNA (1)...(19): siRNA sense strand
gcuaaacaauuugacauac

SEQ ID NO: 160798 - RNA, 19 nt, Homo sapiens
  misc_RNA (1)...(19): siRNA sense strand
ugacugcauuugcuaaaca

SEQ ID NO: 160799 - RNA, 19 nt, Homo sapiens
  misc_RNA (1)...(19): siRNA sense strand
ggaguuuccagaugucuug

SEQ ID NO: 160800 - RNA, 19 nt, Homo sapiens
  misc_RNA (1)...(19): siRNA sense strand
gaaagagaagaaaugaaag

SEQ ID NO: 160801 - RNA, 19 nt, Homo sapiens
  misc_RNA (1)...(19): siRNA sense strand
gcacagguaaaaccaaaua

SEQ ID NO: 160802 - RNA, 19 nt, Homo sapiens
  misc_RNA (1)...(19): siRNA sense strand
gaaagcauuccugacauuc

SEQ ID NO: 160803 - RNA, 19 nt, Homo sapiens
  misc_RNA (1)...(19): siRNA sense strand
ucacaaugauccaaaagaa

SEQ ID NO: 160804 - RNA, 19 nt, Homo sapiens
  misc_RNA (1)...(19): siRNA sense strand
gcuggauucugugaucauu

SEQ ID NO: 160805 - RNA, 19 nt, Homo sapiens
  misc_RNA (1)...(19): siRNA sense strand
aagcauuccugacauucaa

SEQ ID NO: 160806 - RNA, 19 nt, Homo sapiens
  misc_RNA (1)...(19): siRNA sense strand
ggaggaauuagaaaacuua

SEQ ID NO: 160807 - RNA, 19 nt, Homo sapiens
  misc_RNA (1)...(19): siRNA sense strand
gaaaagauaaauccugaug

SEQ ID NO: 160808 - RNA, 19 nt, Homo sapiens
  misc_RNA (1)...(19): siRNA sense strand
cuucaugauuguauccaaa

SEQ ID NO: 160809 - RNA, 19 nt, Homo sapiens
  misc_RNA (1)...(19): siRNA sense strand
caguugacauggccuguuc

SEQ ID NO: 160810 - RNA, 19 nt, Homo sapiens
  misc_RNA (1)...(19): siRNA sense strand
cgaggagcuucaugauugu

SEQ ID NO: 160811 - RNA, 19 nt, Homo sapiens
  misc_RNA (1)...(19): siRNA sense strand
auacagcuguugacucaca

SEQ ID NO: 160812 - RNA, 19 nt, Homo sapiens
  misc_RNA (1)...(19): siRNA sense strand
aaagauuguugccauaggu

SEQ ID NO: 160813 - RNA, 19 nt, Homo sapiens
  misc_RNA (1)...(19): siRNA sense strand
agauaaauccugaugaaag

SEQ ID NO: 160814 - RNA, 19 nt, Homo sapiens
  misc_RNA (1)...(19): siRNA sense strand
uggagcauuuacagccuua

SEQ ID NO: 160815 - RNA, 19 nt, Homo sapiens
  misc_RNA (1)...(19): siRNA sense strand
uuacugggaggaauuagaa

SEQ ID NO: 160816 - RNA, 19 nt, Homo sapiens
  misc_RNA (1)...(19): siRNA sense strand
agaaucaaacucuucauca

SEQ ID NO: 160817 - RNA, 19 nt, Homo sapiens
  misc_RNA (1)...(19): siRNA sense strand
cauagguaccucugaucua

SEQ ID NO: 160818 - RNA, 19 nt, Homo sapiens
  misc_RNA (1)...(19): siRNA sense strand
aucaaacucuucaucauca

SEQ ID NO: 160819 - RNA, 19 nt, Homo sapiens
  misc_RNA (1)...(19): siRNA sense strand
gggcacagguaaaaccaaa

SEQ ID NO: 160820 - RNA, 19 nt, Homo sapiens
  misc_RNA (1)...(19): siRNA sense strand
auagguaccucugaucuag

SEQ ID NO: 160821 - RNA, 19 nt, Homo sapiens
  misc_RNA (1)...(19): siRNA sense strand
ggucagggaguuuccagau

SEQ ID NO: 160822 - RNA, 19 nt, Homo sapiens
  misc_RNA (1)...(19): siRNA sense strand
ggagcuucaugauuguauc

SEQ ID NO: 160823 - RNA, 19 nt, Homo sapiens
  misc_RNA (1)...(19): siRNA sense strand
gacugcauuugcuaaacaa

SEQ ID NO: 160824 - RNA, 19 nt, Homo sapiens
  misc_RNA (1)...(19): siRNA sense strand
uagaagugcaguugacaug

SEQ ID NO: 160825 - RNA, 19 nt, Homo sapiens
  misc_RNA (1)...(19): siRNA sense strand
uaaauccugaugaaagaga

SEQ ID NO: 160826 - RNA, 19 nt, Homo sapiens
  misc_RNA (1)...(19): siRNA sense strand
gucagggaguuuccagaug

SEQ ID NO: 160827 - RNA, 19 nt, Homo sapiens
  misc_RNA (1)...(19): siRNA sense strand
uaccucugaucuagacaaa

SEQ ID NO: 160828 - RNA, 19 nt, Homo sapiens
  misc_RNA (1)...(19): siRNA sense strand
cagauuuggucagggaguu

SEQ ID NO: 160829 - RNA, 19 nt, Homo sapiens
  misc_RNA (1)...(19): siRNA sense strand
ugaugaaagagaagaaaug

SEQ ID NO: 160830 - RNA, 19 nt, Homo sapiens
  misc_RNA (1)...(19): siRNA sense strand
ugacucacaaugauccaaa

SEQ ID NO: 160831 - RNA, 19 nt, Homo sapiens
  misc_RNA (1)...(19): siRNA sense strand
ucaaacucuucaucaucaa

SEQ ID NO: 160832 - RNA, 19 nt, Homo sapiens
  misc_RNA (1)...(19): siRNA sense strand
cugcaaaacuguucauugu

SEQ ID NO: 160833 - RNA, 19 nt, Homo sapiens
  misc_RNA (1)...(19): siRNA sense strand
gauuugacugcauuugcua

SEQ ID NO: 160834 - RNA, 19 nt, Homo sapiens
  misc_RNA (1)...(19): siRNA sense strand
gugaaaaguagaggaauua

SEQ ID NO: 160835 - RNA, 19 nt, Homo sapiens
  misc_RNA (1)...(19): siRNA sense strand
aaucaaacucuucaucauc

SEQ ID NO: 160836 - RNA, 19 nt, Homo sapiens
  misc_RNA (1)...(19): siRNA sense strand
cagguaaaaccaaauagua

SEQ ID NO: 160837 - RNA, 19 nt, Homo sapiens
  misc_RNA (1)...(19): siRNA sense strand
uaucagugggcacagguaa

SEQ ID NO: 160838 - RNA, 19 nt, Homo sapiens
  misc_RNA (1)...(19): siRNA sense strand
aaucuuuccuuggagcauu

SEQ ID NO: 160839 - RNA, 19 nt, Homo sapiens
  misc_RNA (1)...(19): siRNA sense strand
caaaacuguucauuguaga

SEQ ID NO: 160840 - RNA, 19 nt, Homo sapiens
  misc_RNA (1)...(19): siRNA sense strand
gcacagcgaggagcuucau

SEQ ID NO: 160841 - RNA, 19 nt, Homo sapiens
  misc_RNA (1)...(19): siRNA sense strand
acuguucauuguagaauca

SEQ ID NO: 160842 - RNA, 19 nt, Homo sapiens
  misc_RNA (1)...(19): siRNA sense strand
gaggagcuucaugauugua

SEQ ID NO: 160843 - RNA, 19 nt, Homo sapiens
  misc_RNA (1)...(19): siRNA sense strand
uguaucucaugcaguagaa

SEQ ID NO: 160844 - RNA, 19 nt, Homo sapiens
  misc_RNA (1)...(19): siRNA sense strand
uugcuucaccuccuauuga

SEQ ID NO: 160845 - RNA, 19 nt, Homo sapiens
  misc_RNA (1)...(19): siRNA sense strand
cagcuggauucugugauca

SEQ ID NO: 160846 - RNA, 19 nt, Homo sapiens
  misc_RNA (1)...(19): siRNA sense strand
gcaguugacauggccuguu

SEQ ID NO: 160847 - RNA, 19 nt, Homo sapiens
  misc_RNA (1)...(19): siRNA sense strand
gcuucaugauuguauccaa

SEQ ID NO: 160848 - RNA, 19 nt, Homo sapiens
  misc_RNA (1)...(19): siRNA sense strand
uagaaucaaacucuucauc

SEQ ID NO: 160849 - RNA, 19 nt, Homo sapiens
  misc_RNA (1)...(19): siRNA sense strand
caaaucaaaaggcuacauu

SEQ ID NO: 160850 - RNA, 19 nt, Homo sapiens
  misc_RNA (1)...(19): siRNA sense strand
acagcgaggagcuucauga

SEQ ID NO: 160851 - RNA, 19 nt, Homo sapiens
  misc_RNA (1)...(19): siRNA sense strand
gcauuugcuaaacaauuug

SEQ ID NO: 160852 - RNA, 19 nt, Homo sapiens
  misc_RNA (1)...(19): siRNA sense strand
ugccauagguaccucugau

SEQ ID NO: 160853 - RNA, 19 nt, Homo sapiens
  misc_RNA (1)...(19): siRNA sense strand
aaauccugaugaaagagaa

SEQ ID NO: 160854 - RNA, 19 nt, Homo sapiens
  misc_RNA (1)...(19): siRNA sense strand
ccaccagauuugacugcau

SEQ ID NO: 160855 - RNA, 19 nt, Homo sapiens
  misc_RNA (1)...(19): siRNA sense strand
ugugaugccaccagauuug

SEQ ID NO: 160856 - RNA, 19 nt, Homo sapiens
  misc_RNA (1)...(19): siRNA sense strand
ugugugaugccaccagauu

SEQ ID NO: 160857 - RNA, 19 nt, Homo sapiens
  misc_RNA (1)...(19): siRNA sense strand
gcuacgaccugaaacucua

SEQ ID NO: 160858 - RNA, 19 nt, Homo sapiens
  misc_RNA (1)...(19): siRNA sense strand
cggcaaagcucagaggaaa

SEQ ID NO: 160859 - RNA, 19 nt, Homo sapiens
  misc_RNA (1)...(19): siRNA sense strand
ggaggccgcugucuacauc

SEQ ID NO: 160860 - RNA, 19 nt, Homo sapiens
  misc_RNA (1)...(19): siRNA sense strand
ccaguaacauccaguuugu

SEQ ID NO: 160861 - RNA, 19 nt, Homo sapiens
  misc_RNA (1)...(19): siRNA sense strand
caagagcaccaucgucaaa

SEQ ID NO: 160862 - RNA, 19 nt, Homo sapiens
  misc_RNA (1)...(19): siRNA sense strand
agaacaaucucaaguacau

SEQ ID NO: 160863 - RNA, 19 nt, Homo sapiens
  misc_RNA (1)...(19): siRNA sense strand
gcaacaaggagaccaagga

SEQ ID NO: 160864 - RNA, 19 nt, Homo sapiens
  misc_RNA (1)...(19): siRNA sense strand
ucaaguacauuggccuuug

SEQ ID NO: 160865 - RNA, 19 nt, Homo sapiens
  misc_RNA (1)...(19): siRNA sense strand
aacaacaacugguucauca

SEQ ID NO: 160866 - RNA, 19 nt, Homo sapiens
  misc_RNA (1)...(19): siRNA sense strand
gaggauaaccagacaaguc

SEQ ID NO: 160867 - RNA, 19 nt, Homo sapiens
  misc_RNA (1)...(19): siRNA sense strand
uaacauccaguuugucuuc

SEQ ID NO: 160868 - RNA, 19 nt, Homo sapiens
  misc_RNA (1)...(19): siRNA sense strand
ucacagccaucaucuucug

SEQ ID NO: 160869 - RNA, 19 nt, Homo sapiens
  misc_RNA (1)...(19): siRNA sense strand
ggagcucaccuucaagaug

SEQ ID NO: 160870 - RNA, 19 nt, Homo sapiens
  misc_RNA (1)...(19): siRNA sense strand
gagaucuacucccacuuca

SEQ ID NO: 160871 - RNA, 19 nt, Homo sapiens
  misc_RNA (1)...(19): siRNA sense strand
ggacaugaccacgggcauu

SEQ ID NO: 160872 - RNA, 19 nt, Homo sapiens
  misc_RNA (1)...(19): siRNA sense strand
gcaccaucgucaaacagau

SEQ ID NO: 160873 - RNA, 19 nt, Homo sapiens
  misc_RNA (1)...(19): siRNA sense strand
acagaacaaucucaaguac

SEQ ID NO: 160874 - RNA, 19 nt, Homo sapiens
  misc_RNA (1)...(19): siRNA sense strand
caucaacaccucacucauc

SEQ ID NO: 160875 - RNA, 19 nt, Homo sapiens
  misc_RNA (1)...(19): siRNA sense strand
gaacaaucucaaguacauu

SEQ ID NO: 160876 - RNA, 19 nt, Homo sapiens
  misc_RNA (1)...(19): siRNA sense strand
uacagaacaaucucaagua

SEQ ID NO: 160877 - RNA, 19 nt, Homo sapiens
  misc_RNA (1)...(19): siRNA sense strand
cugaaacucuacgaggaua

SEQ ID NO: 160878 - RNA, 19 nt, Homo sapiens
  misc_RNA (1)...(19): siRNA sense strand
gcaagagcaccaucgucaa

SEQ ID NO: 160879 - RNA, 19 nt, Homo sapiens
  misc_RNA (1)...(19): siRNA sense strand
cuacgaggauaaccagaca

SEQ ID NO: 160880 - RNA, 19 nt, Homo sapiens
  misc_RNA (1)...(19): siRNA sense strand
gcagaggucagagcgcaaa

SEQ ID NO: 160881 - RNA, 19 nt, Homo sapiens
  misc_RNA (1)...(19): siRNA sense strand
caacaacaacugguucauc

SEQ ID NO: 160882 - RNA, 19 nt, Homo sapiens
  misc_RNA (1)...(19): siRNA sense strand
cgccgcagcugacuauauc

SEQ ID NO: 160883 - RNA, 19 nt, Homo sapiens
  misc_RNA (1)...(19): siRNA sense strand
acaagggccagaacacgua

SEQ ID NO: 160884 - RNA, 19 nt, Homo sapiens
  misc_RNA (1)...(19): siRNA sense strand
acaaggagaccaaggagau

SEQ ID NO: 160885 - RNA, 19 nt, Homo sapiens
  misc_RNA (1)...(19): siRNA sense strand
gagcaagggcgagaucaca

SEQ ID NO: 160886 - RNA, 19 nt, Homo sapiens
  misc_RNA (1)...(19): siRNA sense strand
caacaacugguucaucaac

SEQ ID NO: 160887 - RNA, 19 nt, Homo sapiens
  misc_RNA (1)...(19): siRNA sense strand
gacaugaccacgggcauug

SEQ ID NO: 160888 - RNA, 19 nt, Homo sapiens
  misc_RNA (1)...(19): siRNA sense strand
acaccucacucauccucuu

SEQ ID NO: 160889 - RNA, 19 nt, Homo sapiens
  misc_RNA (1)...(19): siRNA sense strand
caaguacauuggccuuugc

SEQ ID NO: 160890 - RNA, 19 nt, Homo sapiens
  misc_RNA (1)...(19): siRNA sense strand
gcaucccgcucaccaucug

SEQ ID NO: 160891 - RNA, 19 nt, Homo sapiens
  misc_RNA (1)...(19): siRNA sense strand
cagcggcuacgaccugaaa

SEQ ID NO: 160892 - RNA, 19 nt, Homo sapiens
  misc_RNA (1)...(19): siRNA sense strand
cagacgucaucauacagaa

SEQ ID NO: 160893 - RNA, 19 nt, Homo sapiens
  misc_RNA (1)...(19): siRNA sense strand
ccaucugcuuucccgagua

SEQ ID NO: 160894 - RNA, 19 nt, Homo sapiens
  misc_RNA (1)...(19): siRNA sense strand
gacuccaucugcaacaaca

SEQ ID NO: 160895 - RNA, 19 nt, Homo sapiens
  misc_RNA (1)...(19): siRNA sense strand
caucgccgcagcugacuau

SEQ ID NO: 160896 - RNA, 19 nt, Homo sapiens
  misc_RNA (1)...(19): siRNA sense strand
caucugcuuucccgaguac

SEQ ID NO: 160897 - RNA, 19 nt, Homo sapiens
  misc_RNA (1)...(19): siRNA sense strand
agagcaccaucgucaaaca

SEQ ID NO: 160898 - RNA, 19 nt, Homo sapiens
  misc_RNA (1)...(19): siRNA sense strand
cuacauccagcggcaguuu

SEQ ID NO: 160899 - RNA, 19 nt, Homo sapiens
  misc_RNA (1)...(19): siRNA sense strand
auacagaacaaucucaagu

SEQ ID NO: 160900 - RNA, 19 nt, Homo sapiens
  misc_RNA (1)...(19): siRNA sense strand
cagccaucaucuucugugu

SEQ ID NO: 160901 - RNA, 19 nt, Homo sapiens
  misc_RNA (1)...(19): siRNA sense strand
gacgucaucauacagaaca

SEQ ID NO: 160902 - RNA, 19 nt, Homo sapiens
  misc_RNA (1)...(19): siRNA sense strand
gaaacucuacgaggauaac

SEQ ID NO: 160903 - RNA, 19 nt, Homo sapiens
  misc_RNA (1)...(19): siRNA sense strand
guacaagccccucaucauc

SEQ ID NO: 160904 - RNA, 19 nt, Homo sapiens
  misc_RNA (1)...(19): siRNA sense strand
acagacgucaucauacaga

SEQ ID NO: 160905 - RNA, 19 nt, Homo sapiens
  misc_RNA (1)...(19): siRNA sense strand
gcgccaccgacaccaguaa

SEQ ID NO: 160906 - RNA, 19 nt, Homo sapiens
  misc_RNA (1)...(19): siRNA sense strand
gaagaccugaaccgcaaca

SEQ ID NO: 160907 - RNA, 19 nt, Homo sapiens
  misc_RNA (1)...(19): siRNA sense strand
gcagaagacuguauuugug

SEQ ID NO: 160908 - RNA, 19 nt, Homo sapiens
  misc_RNA (1)...(19): siRNA sense strand
gaaagccugugcugacguu

SEQ ID NO: 160909 - RNA, 19 nt, Homo sapiens
  misc_RNA (1)...(19): siRNA sense strand
ugacuucaaucucuucauu

SEQ ID NO: 160910 - RNA, 19 nt, Homo sapiens
  misc_RNA (1)...(19): siRNA sense strand
ggacaucaacgccaucugu

SEQ ID NO: 160911 - RNA, 19 nt, Homo sapiens
  misc_RNA (1)...(19): siRNA sense strand
gauugcagaugccaggaaa

SEQ ID NO: 160912 - RNA, 19 nt, Homo sapiens
  misc_RNA (1)...(19): siRNA sense strand
ggacaccuggccaagauuu

SEQ ID NO: 160913 - RNA, 19 nt, Homo sapiens
  misc_RNA (1)...(19): siRNA sense strand
ggaccugccgucagacuuu

SEQ ID NO: 160914 - RNA, 19 nt, Homo sapiens
  misc_RNA (1)...(19): siRNA sense strand
gcacugggccacugauucu

SEQ ID NO: 160915 - RNA, 19 nt, Homo sapiens
  misc_RNA (1)...(19): siRNA sense strand
gugccaagcucugggaugu

SEQ ID NO: 160916 - RNA, 19 nt, Homo sapiens
  misc_RNA (1)...(19): siRNA sense strand
gcagcagaagacuguauuu

SEQ ID NO: 160917 - RNA, 19 nt, Homo sapiens
  misc_RNA (1)...(19): siRNA sense strand
caucaacgccaucuguuuc

SEQ ID NO: 160918 - RNA, 19 nt, Homo sapiens
  misc_RNA (1)...(19): siRNA sense strand
gcuggugucuggccuagag

SEQ ID NO: 160919 - RNA, 19 nt, Homo sapiens
  misc_RNA (1)...(19): siRNA sense strand
gauucuaagcugcugguaa

SEQ ID NO: 160920 - RNA, 19 nt, Homo sapiens
  misc_RNA (1)...(19): siRNA sense strand
gacuucaacugcaaugucu

SEQ ID NO: 160921 - RNA, 19 nt, Homo sapiens
  misc_RNA (1)...(19): siRNA sense strand
accaggagcugaucugcuu

SEQ ID NO: 160922 - RNA, 19 nt, Homo sapiens
  misc_RNA (1)...(19): siRNA sense strand
gacaccuggccaagauuua

SEQ ID NO: 160923 - RNA, 19 nt, Homo sapiens
  misc_RNA (1)...(19): siRNA sense strand
cagcagaagacuguauuug

SEQ ID NO: 160924 - RNA, 19 nt, Homo sapiens
  misc_RNA (1)...(19): siRNA sense strand
cauccucucuggccacgau

SEQ ID NO: 160925 - RNA, 19 nt, Homo sapiens
  misc_RNA (1)...(19): siRNA sense strand
auucuaagcugcugguaag

SEQ ID NO: 160926 - RNA, 19 nt, Homo sapiens
  misc_RNA (1)...(19): siRNA sense strand
ggcugugucuccugacuuc

SEQ ID NO: 160927 - RNA, 19 nt, Homo sapiens
  misc_RNA (1)...(19): siRNA sense strand
gucaugaccugugccuaug

SEQ ID NO: 160928 - RNA, 19 nt, Homo sapiens
  misc_RNA (1)...(19): siRNA sense strand
gacaucaacgccaucuguu

SEQ ID NO: 160929 - RNA, 19 nt, Homo sapiens
  misc_RNA (1)...(19): siRNA sense strand
ugggacagcuuccucaaaa

SEQ ID NO: 160930 - RNA, 19 nt, Homo sapiens
  misc_RNA (1)...(19): siRNA sense strand
gggcagaccaggagcugau

SEQ ID NO: 160931 - RNA, 19 nt, Homo sapiens
  misc_RNA (1)...(19): siRNA sense strand
caaaucccgugagggcaau

SEQ ID NO: 160932 - RNA, 19 nt, Homo sapiens
  misc_RNA (1)...(19): siRNA sense strand
gacuucaaucucuucauuu

SEQ ID NO: 160933 - RNA, 19 nt, Homo sapiens
  misc_RNA (1)...(19): siRNA sense strand
gagacugggcagcagaaga

SEQ ID NO: 160934 - RNA, 19 nt, Homo sapiens
  misc_RNA (1)...(19): siRNA sense strand
caacgccaucuguuucuuc

SEQ ID NO: 160935 - RNA, 19 nt, Homo sapiens
  misc_RNA (1)...(19): siRNA sense strand
acuucaaucucuucauuuc

SEQ ID NO: 160936 - RNA, 19 nt, Homo sapiens
  misc_RNA (1)...(19): siRNA sense strand
cuuccuggaugacaacaau

SEQ ID NO: 160937 - RNA, 19 nt, Homo sapiens
  misc_RNA (1)...(19): siRNA sense strand
uuucugcucacacagguua

SEQ ID NO: 160938 - RNA, 19 nt, Homo sapiens
  misc_RNA (1)...(19): siRNA sense strand
gaccugccgucagacuuuc

SEQ ID NO: 160939 - RNA, 19 nt, Homo sapiens
  misc_RNA (1)...(19): siRNA sense strand
gggcagcagaagacuguau

SEQ ID NO: 160940 - RNA, 19 nt, Homo sapiens
  misc_RNA (1)...(19): siRNA sense strand
cgacuucaacugcaauguc

SEQ ID NO: 160941 - RNA, 19 nt, Homo sapiens
  misc_RNA (1)...(19): siRNA sense strand
ucuccugacuucaaucucu

SEQ ID NO: 160942 - RNA, 19 nt, Homo sapiens
  misc_RNA (1)...(19): siRNA sense strand
ggcagcagaagacuguauu

SEQ ID NO: 160943 - RNA, 19 nt, Homo sapiens
  misc_RNA (1)...(19): siRNA sense strand
gcucacacagguuaucucu

SEQ ID NO: 160944 - RNA, 19 nt, Homo sapiens
  misc_RNA (1)...(19): siRNA sense strand
acaucaacgccaucuguuu

SEQ ID NO: 160945 - RNA, 19 nt, Homo sapiens
  misc_RNA (1)...(19): siRNA sense strand
ggagcaacugcgucaggaa

SEQ ID NO: 160946 - RNA, 19 nt, Homo sapiens
  misc_RNA (1)...(19): siRNA sense strand
ggggacaccuggccaagau

SEQ ID NO: 160947 - RNA, 19 nt, Homo sapiens
  misc_RNA (1)...(19): siRNA sense strand
caagaagcagauugcagau

SEQ ID NO: 160948 - RNA, 19 nt, Homo sapiens
  misc_RNA (1)...(19): siRNA sense strand
ggacagcuuccucaaaauc

SEQ ID NO: 160949 - RNA, 19 nt, Homo sapiens
  misc_RNA (1)...(19): siRNA sense strand
ucaacgccaucuguuucuu

SEQ ID NO: 160950 - RNA, 19 nt, Homo sapiens
  misc_RNA (1)...(19): siRNA sense strand
caacaacacuuacaucuuc

SEQ ID NO: 160951 - RNA, 19 nt, Homo sapiens
  misc_RNA (1)...(19): siRNA sense strand
gaaaguacccacauaauca

SEQ ID NO: 160952 - RNA, 19 nt, Homo sapiens
  misc_RNA (1)...(19): siRNA sense strand
aacaagcacugguuaauua

SEQ ID NO: 160953 - RNA, 19 nt, Homo sapiens
  misc_RNA (1)...(19): siRNA sense strand
gcagggaaauauuuaaaug

SEQ ID NO: 160954 - RNA, 19 nt, Homo sapiens
  misc_RNA (1)...(19): siRNA sense strand
ccagaaggcuuuccagaau

SEQ ID NO: 160955 - RNA, 19 nt, Homo sapiens
  misc_RNA (1)...(19): siRNA sense strand
gaacaagcacugguuaauu

SEQ ID NO: 160956 - RNA, 19 nt, Homo sapiens
  misc_RNA (1)...(19): siRNA sense strand
uaucaaaguuccacuguug

SEQ ID NO: 160957 - RNA, 19 nt, Homo sapiens
  misc_RNA (1)...(19): siRNA sense strand
agagacagcuguaugaguu

SEQ ID NO: 160958 - RNA, 19 nt, Homo sapiens
  misc_RNA (1)...(19): siRNA sense strand
ugucaggacucgaagauuu

SEQ ID NO: 160959 - RNA, 19 nt, Homo sapiens
  misc_RNA (1)...(19): siRNA sense strand
gcaauucucagaucaaugu

SEQ ID NO: 160960 - RNA, 19 nt, Homo sapiens
  misc_RNA (1)...(19): siRNA sense strand
ccaaauacuuucccagcaa

SEQ ID NO: 160961 - RNA, 19 nt, Homo sapiens
  misc_RNA (1)...(19): siRNA sense strand
gaccagaucacuaacauug

SEQ ID NO: 160962 - RNA, 19 nt, Homo sapiens
  misc_RNA (1)...(19): siRNA sense strand
cagauguccugguggaaua

SEQ ID NO: 160963 - RNA, 19 nt, Homo sapiens
  misc_RNA (1)...(19): siRNA sense strand
ggaaaguacccacauaauc

SEQ ID NO: 160964 - RNA, 19 nt, Homo sapiens
  misc_RNA (1)...(19): siRNA sense strand
gaccugggaucaaaccaaa

SEQ ID NO: 160965 - RNA, 19 nt, Homo sapiens
  misc_RNA (1)...(19): siRNA sense strand
gaacgaacaagcacugguu

SEQ ID NO: 160966 - RNA, 19 nt, Homo sapiens
  misc_RNA (1)...(19): siRNA sense strand
ugacuuggguccuacuauu

SEQ ID NO: 160967 - RNA, 19 nt, Homo sapiens
  misc_RNA (1)...(19): siRNA sense strand
aagaugaacuaucgguuaa

SEQ ID NO: 160968 - RNA, 19 nt, Homo sapiens
  misc_RNA (1)...(19): siRNA sense strand
ucagaucaaugugugguua

SEQ ID NO: 160969 - RNA, 19 nt, Homo sapiens
  misc_RNA (1)...(19): siRNA sense strand
gaugaacuaucgguuaaug

SEQ ID NO: 160970 - RNA, 19 nt, Homo sapiens
  misc_RNA (1)...(19): siRNA sense strand
aaagaugaacuaucgguua

SEQ ID NO: 160971 - RNA, 19 nt, Homo sapiens
  misc_RNA (1)...(19): siRNA sense strand
gaggggaacugcaguagua

SEQ ID NO: 160972 - RNA, 19 nt, Homo sapiens
  misc_RNA (1)...(19): siRNA sense strand
acacuuacaucuucuauac

SEQ ID NO: 160973 - RNA, 19 nt, Homo sapiens
  misc_RNA (1)...(19): siRNA sense strand
gaaacaagaacuucaacau

SEQ ID NO: 160974 - RNA, 19 nt, Homo sapiens
  misc_RNA (1)...(19): siRNA sense strand
ggacagcugcaccucagua

SEQ ID NO: 160975 - RNA, 19 nt, Homo sapiens
  misc_RNA (1)...(19): siRNA sense strand
ccaagacuccaaugacuaa

SEQ ID NO: 160976 - RNA, 19 nt, Homo sapiens
  misc_RNA (1)...(19): siRNA sense strand
acaggaaaguacccacaua

SEQ ID NO: 160977 - RNA, 19 nt, Homo sapiens
  misc_RNA (1)...(19): siRNA sense strand
gaagauccaagaaccaaau

SEQ ID NO: 160978 - RNA, 19 nt, Homo sapiens
  misc_RNA (1)...(19): siRNA sense strand
uaggaaagaugaacuaucg

SEQ ID NO: 160979 - RNA, 19 nt, Homo sapiens
  misc_RNA (1)...(19): siRNA sense strand
caaauacuuucccagcaau

SEQ ID NO: 160980 - RNA, 19 nt, Homo sapiens
  misc_RNA (1)...(19): siRNA sense strand
ugacagauguuuuggcuaa

SEQ ID NO: 160981 - RNA, 19 nt, Homo sapiens
  misc_RNA (1)...(19): siRNA sense strand
gaucaaaccaaaucagaca

SEQ ID NO: 160982 - RNA, 19 nt, Homo sapiens
  misc_RNA (1)...(19): siRNA sense strand
gugaagaugcuuauaacaa

SEQ ID NO: 160983 - RNA, 19 nt, Homo sapiens
  misc_RNA (1)...(19): siRNA sense strand
uaaauaagacacagaugga

SEQ ID NO: 160984 - RNA, 19 nt, Homo sapiens
  misc_RNA (1)...(19): siRNA sense strand
ggcaaacucuccucucagu

SEQ ID NO: 160985 - RNA, 19 nt, Homo sapiens
  misc_RNA (1)...(19): siRNA sense strand
cagaaugucuuugcaccaa

SEQ ID NO: 160986 - RNA, 19 nt, Homo sapiens
  misc_RNA (1)...(19): siRNA sense strand
uggaugggauguccuuauu

SEQ ID NO: 160987 - RNA, 19 nt, Homo sapiens
  misc_RNA (1)...(19): siRNA sense strand
caagaaacaagaacuucaa

SEQ ID NO: 160988 - RNA, 19 nt, Homo sapiens
  misc_RNA (1)...(19): siRNA sense strand
gaacuucaacauccaugga

SEQ ID NO: 160989 - RNA, 19 nt, Homo sapiens
  misc_RNA (1)...(19): siRNA sense strand
ggagguguuuguagaaguc

SEQ ID NO: 160990 - RNA, 19 nt, Homo sapiens
  misc_RNA (1)...(19): siRNA sense strand
gaugggauguccuuauugc

SEQ ID NO: 160991 - RNA, 19 nt, Homo sapiens
  misc_RNA (1)...(19): siRNA sense strand
gaacuaucgguuaaugaug

SEQ ID NO: 160992 - RNA, 19 nt, Homo sapiens
  misc_RNA (1)...(19): siRNA sense strand
cagaaggcuuuccagaaug

SEQ ID NO: 160993 - RNA, 19 nt, Homo sapiens
  misc_RNA (1)...(19): siRNA sense strand
uugaugaccuuguggagaa

SEQ ID NO: 160994 - RNA, 19 nt, Homo sapiens
  misc_RNA (1)...(19): siRNA sense strand
agacuccaaugacuaauuc

SEQ ID NO: 160995 - RNA, 19 nt, Homo sapiens
  misc_RNA (1)...(19): siRNA sense strand
caggaaaguacccacauaa

SEQ ID NO: 160996 - RNA, 19 nt, Homo sapiens
  misc_RNA (1)...(19): siRNA sense strand
gagaggugccaguaacuug

SEQ ID NO: 160997 - RNA, 19 nt, Homo sapiens
  misc_RNA (1)...(19): siRNA sense strand
uccaagaaccaaauacuuu

SEQ ID NO: 160998 - RNA, 19 nt, Homo sapiens
  misc_RNA (1)...(19): siRNA sense strand
uguggaauuugcaguauug

SEQ ID NO: 160999 - RNA, 19 nt, Homo sapiens
  misc_RNA (1)...(19): siRNA sense strand
acaagagacagcuguauga

SEQ ID NO: 161000 - RNA, 19 nt, Homo sapiens
  misc_RNA (1)...(19): siRNA sense strand
uuacugguaugccuuggaa

SEQ ID NO: 161001 - RNA, 19 nt, Homo sapiens
  misc_RNA (1)...(19): siRNA sense strand
ucgaggaccugggaucaaa

SEQ ID NO: 161002 - RNA, 19 nt, Homo sapiens
  misc_RNA (1)...(19): siRNA sense strand
gacaagagacagcuguaug

SEQ ID NO: 161003 - RNA, 19 nt, Homo sapiens
  misc_RNA (1)...(19): siRNA sense strand
uggagaaacuggucaagag

SEQ ID NO: 161004 - RNA, 19 nt, Homo sapiens
  misc_RNA (1)...(19): siRNA sense strand
aaacaagaacuucaacauc

SEQ ID NO: 161005 - RNA, 19 nt, Homo sapiens
  misc_RNA (1)...(19): siRNA sense strand
gcacggaagcauggugaaa

SEQ ID NO: 161006 - RNA, 19 nt, Homo sapiens
  misc_RNA (1)...(19): siRNA sense strand
cagcaauucucagaucaau

SEQ ID NO: 161007 - RNA, 19 nt, Homo sapiens
  misc_RNA (1)...(19): siRNA sense strand
ugucagcauuguggaauuu

SEQ ID NO: 161008 - RNA, 19 nt, Homo sapiens
  misc_RNA (1)...(19): siRNA sense strand
guggcaaacucuccucuca

SEQ ID NO: 161009 - RNA, 19 nt, Homo sapiens
  misc_RNA (1)...(19): siRNA sense strand
agaugcagguggacuagaa

SEQ ID NO: 161010 - RNA, 19 nt, Homo sapiens
  misc_RNA (1)...(19): siRNA sense strand
agaaggcuuuccagaaugu

SEQ ID NO: 161011 - RNA, 19 nt, Homo sapiens
  misc_RNA (1)...(19): siRNA sense strand
gcuacgaccuaaauaagac

SEQ ID NO: 161012 - RNA, 19 nt, Homo sapiens
  misc_RNA (1)...(19): siRNA sense strand
ccaaaucagacaagcaaga

SEQ ID NO: 161013 - RNA, 19 nt, Homo sapiens
  misc_RNA (1)...(19): siRNA sense strand
uggacuaccugacagaugu

SEQ ID NO: 161014 - RNA, 19 nt, Homo sapiens
  misc_RNA (1)...(19): siRNA sense strand
ccaagaaccaaauacuuuc

SEQ ID NO: 161015 - RNA, 19 nt, Homo sapiens
  misc_RNA (1)...(19): siRNA sense strand
gggaucaaaccaaaucaga

SEQ ID NO: 161016 - RNA, 19 nt, Homo sapiens
  misc_RNA (1)...(19): siRNA sense strand
gaagcauggugaaaacuau

SEQ ID NO: 161017 - RNA, 19 nt, Homo sapiens
  misc_RNA (1)...(19): siRNA sense strand
cagaccagaucacuaacau

SEQ ID NO: 161018 - RNA, 19 nt, Homo sapiens
  misc_RNA (1)...(19): siRNA sense strand
gguggaauaccaaggagaa

SEQ ID NO: 161019 - RNA, 19 nt, Homo sapiens
  misc_RNA (1)...(19): siRNA sense strand
gauaucaaaguuccacugu

SEQ ID NO: 161020 - RNA, 19 nt, Homo sapiens
  misc_RNA (1)...(19): siRNA sense strand
gccaagacuccaaugacua

SEQ ID NO: 161021 - RNA, 19 nt, Homo sapiens
  misc_RNA (1)...(19): siRNA sense strand
ccaagaaacaagaacuuca

SEQ ID NO: 161022 - RNA, 19 nt, Homo sapiens
  misc_RNA (1)...(19): siRNA sense strand
uaaugucuccuuggacuuu

SEQ ID NO: 161023 - RNA, 19 nt, Homo sapiens
  misc_RNA (1)...(19): siRNA sense strand
gacuuggguccuacuauuu

SEQ ID NO: 161024 - RNA, 19 nt, Homo sapiens
  misc_RNA (1)...(19): siRNA sense strand
auaauuacacccugucuau

SEQ ID NO: 161025 - RNA, 19 nt, Homo sapiens
  misc_RNA (1)...(19): siRNA sense strand
ucaagaggcuggaguucac

SEQ ID NO: 161026 - RNA, 19 nt, Homo sapiens
  misc_RNA (1)...(19): siRNA sense strand
ggacgaccaggacgaagug

SEQ ID NO: 161027 - RNA, 19 nt, Homo sapiens
  misc_RNA (1)...(19): siRNA sense strand
uggcuaaugucuccuugga

SEQ ID NO: 161028 - RNA, 19 nt, Homo sapiens
  misc_RNA (1)...(19): siRNA sense strand
uaacuugaccuggcgauca

SEQ ID NO: 161029 - RNA, 19 nt, Homo sapiens
  misc_RNA (1)...(19): siRNA sense strand
ccagaucacuaacauugcu

SEQ ID NO: 161030 - RNA, 19 nt, Homo sapiens
  misc_RNA (1)...(19): siRNA sense strand
caacacuuacaucuucuau

SEQ ID NO: 161031 - RNA, 19 nt, Homo sapiens
  misc_RNA (1)...(19): siRNA sense strand
ggaccugggaucaaaccaa

SEQ ID NO: 161032 - RNA, 19 nt, Homo sapiens
  misc_RNA (1)...(19): siRNA sense strand
ggguuggaguuacugguau

SEQ ID NO: 161033 - RNA, 19 nt, Homo sapiens
  misc_RNA (1)...(19): siRNA sense strand
caaaucagacaagcaagau

SEQ ID NO: 161034 - RNA, 19 nt, Homo sapiens
  misc_RNA (1)...(19): siRNA sense strand
gacuaauucuucaauacag

SEQ ID NO: 161035 - RNA, 19 nt, Homo sapiens
  misc_RNA (1)...(19): siRNA sense strand
caagccaagacuccaauga

SEQ ID NO: 161036 - RNA, 19 nt, Homo sapiens
  misc_RNA (1)...(19): siRNA sense strand
cgaacaagcacugguuaau

SEQ ID NO: 161037 - RNA, 19 nt, Homo sapiens
  misc_RNA (1)...(19): siRNA sense strand
uccaaugacuaauucuuca

SEQ ID NO: 161038 - RNA, 19 nt, Homo sapiens
  misc_RNA (1)...(19): siRNA sense strand
cgucucauguucagcaauc

SEQ ID NO: 161039 - RNA, 19 nt, Homo sapiens
  misc_RNA (1)...(19): siRNA sense strand
ugaacuaucgguuaaugau

SEQ ID NO: 161040 - RNA, 19 nt, Homo sapiens
  misc_RNA (1)...(19): siRNA sense strand
gagacagcuguaugaguuu

SEQ ID NO: 161041 - RNA, 19 nt, Homo sapiens
  misc_RNA (1)...(19): siRNA sense strand
ucaacaacacuuacaucuu

SEQ ID NO: 161042 - RNA, 19 nt, Homo sapiens
  misc_RNA (1)...(19): siRNA sense strand
ccucucaguugaugaccuu

SEQ ID NO: 161043 - RNA, 19 nt, Homo sapiens
  misc_RNA (1)...(19): siRNA sense strand
agacagcuguaugaguuug

SEQ ID NO: 161044 - RNA, 19 nt, Homo sapiens
  misc_RNA (1)...(19): siRNA sense strand
acccagaccagaucacuaa

SEQ ID NO: 161045 - RNA, 19 nt, Homo sapiens
  misc_RNA (1)...(19): siRNA sense strand
ggaugggauguccuuauug

SEQ ID NO: 161046 - RNA, 19 nt, Homo sapiens
  misc_RNA (1)...(19): siRNA sense strand
cagaagauccaagaaccaa

SEQ ID NO: 161047 - RNA, 19 nt, Homo sapiens
  misc_RNA (1)...(19): siRNA sense strand
accaggagguguuuguaga

SEQ ID NO: 161048 - RNA, 19 nt, Homo sapiens
  misc_RNA (1)...(19): siRNA sense strand
aacuaucgguuaaugaugu

SEQ ID NO: 161049 - RNA, 19 nt, Homo sapiens
  misc_RNA (1)...(19): siRNA sense strand
ccaggagguguuuguagaa

SEQ ID NO: 161050 - RNA, 19 nt, Homo sapiens
  misc_RNA (1)...(19): siRNA sense strand
uaaagaagcugaaggaaga

SEQ ID NO: 161051 - RNA, 19 nt, Homo sapiens
  misc_RNA (1)...(19): siRNA sense strand
gagaaggaaugaacagaua

SEQ ID NO: 161052 - RNA, 19 nt, Homo sapiens
  misc_RNA (1)...(19): siRNA sense strand
gagaugaaauggaugaauu

SEQ ID NO: 161053 - RNA, 19 nt, Homo sapiens
  misc_RNA (1)...(19): siRNA sense strand
gaacuuaucaggagaagaa

SEQ ID NO: 161054 - RNA, 19 nt, Homo sapiens
  misc_RNA (1)...(19): siRNA sense strand
ggaagacucugcagaagga

SEQ ID NO: 161055 - RNA, 19 nt, Homo sapiens
  misc_RNA (1)...(19): siRNA sense strand
caaggaaacucuggaauau

SEQ ID NO: 161056 - RNA, 19 nt, Homo sapiens
  misc_RNA (1)...(19): siRNA sense strand
gaaagaagacguuaucaca

SEQ ID NO: 161057 - RNA, 19 nt, Homo sapiens
  misc_RNA (1)...(19): siRNA sense strand
ggaagcagcuccagagaag

SEQ ID NO: 161058 - RNA, 19 nt, Homo sapiens
  misc_RNA (1)...(19): siRNA sense strand
gaauaacacugaccugaca

SEQ ID NO: 161059 - RNA, 19 nt, Homo sapiens
  misc_RNA (1)...(19): siRNA sense strand
gcacgaaccagagaacuua

SEQ ID NO: 161060 - RNA, 19 nt, Homo sapiens
  misc_RNA (1)...(19): siRNA sense strand
aggaaacucuggaauauaa

SEQ ID NO: 161061 - RNA, 19 nt, Homo sapiens
  misc_RNA (1)...(19): siRNA sense strand
gccagaagcuagaagaauu

SEQ ID NO: 161062 - RNA, 19 nt, Homo sapiens
  misc_RNA (1)...(19): siRNA sense strand
gaauggagccaaagagaaa

SEQ ID NO: 161063 - RNA, 19 nt, Homo sapiens
  misc_RNA (1)...(19): siRNA sense strand
ggaaucaguugccucaaug

SEQ ID NO: 161064 - RNA, 19 nt, Homo sapiens
  misc_RNA (1)...(19): siRNA sense strand
gaacagauacggaaguuag

SEQ ID NO: 161065 - RNA, 19 nt, Homo sapiens
  misc_RNA (1)...(19): siRNA sense strand
gagcagaauuuggaggaua

SEQ ID NO: 161066 - RNA, 19 nt, Homo sapiens
  misc_RNA (1)...(19): siRNA sense strand
gaaaugaagaaccagagua

SEQ ID NO: 161067 - RNA, 19 nt, Homo sapiens
  misc_RNA (1)...(19): siRNA sense strand
ucacacagcuacagaagga

SEQ ID NO: 161068 - RNA, 19 nt, Homo sapiens
  misc_RNA (1)...(19): siRNA sense strand
uauaagaugucaugguuug

SEQ ID NO: 161069 - RNA, 19 nt, Homo sapiens
  misc_RNA (1)...(19): siRNA sense strand
ugaaauggaugaauuagag

SEQ ID NO: 161070 - RNA, 19 nt, Homo sapiens
  misc_RNA (1)...(19): siRNA sense strand
gaaacuugcagaagauaaa

SEQ ID NO: 161071 - RNA, 19 nt, Homo sapiens
  misc_RNA (1)...(19): siRNA sense strand
gagaagaacacgugcaaga

SEQ ID NO: 161072 - RNA, 19 nt, Homo sapiens
  misc_RNA (1)...(19): siRNA sense strand
ucaaggaaacucuggaaua

SEQ ID NO: 161073 - RNA, 19 nt, Homo sapiens
  misc_RNA (1)...(19): siRNA sense strand
ugagacaacuggagcaaga

SEQ ID NO: 161074 - RNA, 19 nt, Homo sapiens
  misc_RNA (1)...(19): siRNA sense strand
gaaugaauaugaacguucu

SEQ ID NO: 161075 - RNA, 19 nt, Homo sapiens
  misc_RNA (1)...(19): siRNA sense strand
agaagaaagucuagggaaa

SEQ ID NO: 161076 - RNA, 19 nt, Homo sapiens
  misc_RNA (1)...(19): siRNA sense strand
gcaggaagaacaccaaaug

SEQ ID NO: 161077 - RNA, 19 nt, Homo sapiens
  misc_RNA (1)...(19): siRNA sense strand
caagaacuccugaaagaga

SEQ ID NO: 161078 - RNA, 19 nt, Homo sapiens
  misc_RNA (1)...(19): siRNA sense strand
ugcaagaacuccugaaaga

SEQ ID NO: 161079 - RNA, 19 nt, Homo sapiens
  misc_RNA (1)...(19): siRNA sense strand
gaaaauggaacaagaauug

SEQ ID NO: 161080 - RNA, 19 nt, Homo sapiens
  misc_RNA (1)...(19): siRNA sense strand
gagcagagagaucauguga

SEQ ID NO: 161081 - RNA, 19 nt, Homo sapiens
  misc_RNA (1)...(19): siRNA sense strand
gaccugagauggcaaacau

SEQ ID NO: 161082 - RNA, 19 nt, Homo sapiens
  misc_RNA (1)...(19): siRNA sense strand
uaaccugacagccauaaua

SEQ ID NO: 161083 - RNA, 19 nt, Homo sapiens
  misc_RNA (1)...(19): siRNA sense strand
gagaagagacuagaacaga

SEQ ID NO: 161084 - RNA, 19 nt, Homo sapiens
  misc_RNA (1)...(19): siRNA sense strand
gagacuagaacagaacuua

SEQ ID NO: 161085 - RNA, 19 nt, Homo sapiens
  misc_RNA (1)...(19): siRNA sense strand
auaaugagcucuucgaagu

SEQ ID NO: 161086 - RNA, 19 nt, Homo sapiens
  misc_RNA (1)...(19): siRNA sense strand
gaagcacucucagucaaug

SEQ ID NO: 161087 - RNA, 19 nt, Homo sapiens
  misc_RNA (1)...(19): siRNA sense strand
gaacuccaaucagauguca

SEQ ID NO: 161088 - RNA, 19 nt, Homo sapiens
  misc_RNA (1)...(19): siRNA sense strand
ucacacauuugcaagagaa

SEQ ID NO: 161089 - RNA, 19 nt, Homo sapiens
  misc_RNA (1)...(19): siRNA sense strand
guccgaaacuugcagaaga

SEQ ID NO: 161090 - RNA, 19 nt, Homo sapiens
  misc_RNA (1)...(19): siRNA sense strand
gagaacaugcucaaggaaa

SEQ ID NO: 161091 - RNA, 19 nt, Homo sapiens
  misc_RNA (1)...(19): siRNA sense strand
ggagcgaggucacaacucu

SEQ ID NO: 161092 - RNA, 19 nt, Homo sapiens
  misc_RNA (1)...(19): siRNA sense strand
caacagagcaagggcauug

SEQ ID NO: 161093 - RNA, 19 nt, Homo sapiens
  misc_RNA (1)...(19): siRNA sense strand
cagcagcuuuccauugauu

SEQ ID NO: 161094 - RNA, 19 nt, Homo sapiens
  misc_RNA (1)...(19): siRNA sense strand
ggagagaugaaauggauga

SEQ ID NO: 161095 - RNA, 19 nt, Homo sapiens
  misc_RNA (1)...(19): siRNA sense strand
gaagcuugaaauugcauua

SEQ ID NO: 161096 - RNA, 19 nt, Homo sapiens
  misc_RNA (1)...(19): siRNA sense strand
gaucacagcccuggaacaa

SEQ ID NO: 161097 - RNA, 19 nt, Homo sapiens
  misc_RNA (1)...(19): siRNA sense strand
aagagaagcuugaaauugc

SEQ ID NO: 161098 - RNA, 19 nt, Homo sapiens
  misc_RNA (1)...(19): siRNA sense strand
aaagauggaucagcuugaa

SEQ ID NO: 161099 - RNA, 19 nt, Homo sapiens
  misc_RNA (1)...(19): siRNA sense strand
gcuugaaauugcauuagaa

SEQ ID NO: 161100 - RNA, 19 nt, Homo sapiens
  misc_RNA (1)...(19): siRNA sense strand
ugacuuugcuuccgaugga

SEQ ID NO: 161101 - RNA, 19 nt, Homo sapiens
  misc_RNA (1)...(19): siRNA sense strand
ggaagaauggagccaaaga

SEQ ID NO: 161102 - RNA, 19 nt, Homo sapiens
  misc_RNA (1)...(19): siRNA sense strand
agaagagacuagaacagaa

SEQ ID NO: 161103 - RNA, 19 nt, Homo sapiens
  misc_RNA (1)...(19): siRNA sense strand
aaagagaagcuugaaauug

SEQ ID NO: 161104 - RNA, 19 nt, Homo sapiens
  misc_RNA (1)...(19): siRNA sense strand
aaacaggugcagaaaguaa

SEQ ID NO: 161105 - RNA, 19 nt, Homo sapiens
  misc_RNA (1)...(19): siRNA sense strand
aagaagacguuaucacaca

SEQ ID NO: 161106 - RNA, 19 nt, Homo sapiens
  misc_RNA (1)...(19): siRNA sense strand
caacuuugaguaccuuaaa

SEQ ID NO: 161107 - RNA, 19 nt, Homo sapiens
  misc_RNA (1)...(19): siRNA sense strand
aaggagagaugaaauggau

SEQ ID NO: 161108 - RNA, 19 nt, Homo sapiens
  misc_RNA (1)...(19): siRNA sense strand
gaaacucuggaauauaaga

SEQ ID NO: 161109 - RNA, 19 nt, Homo sapiens
  misc_RNA (1)...(19): siRNA sense strand
gaauaugaacguucuuuac

SEQ ID NO: 161110 - RNA, 19 nt, Homo sapiens
  misc_RNA (1)...(19): siRNA sense strand
ggaaauuucaagagcagaa

SEQ ID NO: 161111 - RNA, 19 nt, Homo sapiens
  misc_RNA (1)...(19): siRNA sense strand
uugaguaccuuaaacaugu

SEQ ID NO: 161112 - RNA, 19 nt, Homo sapiens
  misc_RNA (1)...(19): siRNA sense strand
cauaauagacgagaaggaa

SEQ ID NO: 161113 - RNA, 19 nt, Homo sapiens
  misc_RNA (1)...(19): siRNA sense strand
aaaugcagcccuuaaagaa

SEQ ID NO: 161114 - RNA, 19 nt, Homo sapiens
  misc_RNA (1)...(19): siRNA sense strand
gcuagaagcccagauagug

SEQ ID NO: 161115 - RNA, 19 nt, Homo sapiens
  misc_RNA (1)...(19): siRNA sense strand
caagagaaagaagacguua

SEQ ID NO: 161116 - RNA, 19 nt, Homo sapiens
  misc_RNA (1)...(19): siRNA sense strand
gaagaaaauugcagaagag

SEQ ID NO: 161117 - RNA, 19 nt, Homo sapiens
  misc_RNA (1)...(19): siRNA sense strand
gaagaacacgugcaagaac

SEQ ID NO: 161118 - RNA, 19 nt, Homo sapiens
  misc_RNA (1)...(19): siRNA sense strand
ugacucaggagaugacuuu

SEQ ID NO: 161119 - RNA, 19 nt, Homo sapiens
  misc_RNA (1)...(19): siRNA sense strand
ggucacugcugaaacucaa

SEQ ID NO: 161120 - RNA, 19 nt, Homo sapiens
  misc_RNA (1)...(19): siRNA sense strand
uagaagaauugcagagaca

SEQ ID NO: 161121 - RNA, 19 nt, Homo sapiens
  misc_RNA (1)...(19): siRNA sense strand
gaugaacuccaaucagaug

SEQ ID NO: 161122 - RNA, 19 nt, Homo sapiens
  misc_RNA (1)...(19): siRNA sense strand
aggacuggcuuuggcauua

SEQ ID NO: 161123 - RNA, 19 nt, Homo sapiens
  misc_RNA (1)...(19): siRNA sense strand
cgccuuccgucacgaauaa

SEQ ID NO: 161124 - RNA, 19 nt, Homo sapiens
  misc_RNA (1)...(19): siRNA sense strand
ucaccaauuugaacuaaag

SEQ ID NO: 161125 - RNA, 19 nt, Homo sapiens
  misc_RNA (1)...(19): siRNA sense strand
ucacagcccuggaacaaaa

SEQ ID NO: 161126 - RNA, 19 nt, Homo sapiens
  misc_RNA (1)...(19): siRNA sense strand
ccaaaggagagaugaaaug

SEQ ID NO: 161127 - RNA, 19 nt, Homo sapiens
  misc_RNA (1)...(19): siRNA sense strand
ccagaaaggaccaggaaug

SEQ ID NO: 161128 - RNA, 19 nt, Homo sapiens
  misc_RNA (1)...(19): siRNA sense strand
gaagcaaagggaagaguuc

SEQ ID NO: 161129 - RNA, 19 nt, Homo sapiens
  misc_RNA (1)...(19): siRNA sense strand
ggaagcaaagggaagaguu

SEQ ID NO: 161130 - RNA, 19 nt, Homo sapiens
  misc_RNA (1)...(19): siRNA sense strand
gaagacguuaucacacauu

SEQ ID NO: 161131 - RNA, 19 nt, Homo sapiens
  misc_RNA (1)...(19): siRNA sense strand
aaaggucacugcugaaacu

SEQ ID NO: 161132 - RNA, 19 nt, Homo sapiens
  misc_RNA (1)...(19): siRNA sense strand
gaagaaccagaguaugaau

SEQ ID NO: 161133 - RNA, 19 nt, Homo sapiens
  misc_RNA (1)...(19): siRNA sense strand
gaaccagaguaugaaucuu

SEQ ID NO: 161134 - RNA, 19 nt, Homo sapiens
  misc_RNA (1)...(19): siRNA sense strand
gaauauaagaugucauggu

SEQ ID NO: 161135 - RNA, 19 nt, Homo sapiens
  misc_RNA (1)...(19): siRNA sense strand
gauaguggcccuggagaga

SEQ ID NO: 161136 - RNA, 19 nt, Homo sapiens
  misc_RNA (1)...(19): siRNA sense strand
cauuguggcugcccaggaa

SEQ ID NO: 161137 - RNA, 19 nt, Homo sapiens
  misc_RNA (1)...(19): siRNA sense strand
ggaacaagagcuccaagca

SEQ ID NO: 161138 - RNA, 19 nt, Homo sapiens
  misc_RNA (1)...(19): siRNA sense strand
ggacuggcuuuggcauuag

SEQ ID NO: 161139 - RNA, 19 nt, Homo sapiens
  misc_RNA (1)...(19): siRNA sense strand
ccgaagcacucucagucaa

SEQ ID NO: 161140 - RNA, 19 nt, Homo sapiens
  misc_RNA (1)...(19): siRNA sense strand
cuuaaagaaugcaggaaug

SEQ ID NO: 161141 - RNA, 19 nt, Homo sapiens
  misc_RNA (1)...(19): siRNA sense strand
uaagaucacagcccuggaa

SEQ ID NO: 161142 - RNA, 19 nt, Homo sapiens
  misc_RNA (1)...(19): siRNA sense strand
gcacucauucagcagcuuu

SEQ ID NO: 161143 - RNA, 19 nt, Homo sapiens
  misc_RNA (1)...(19): siRNA sense strand
ccagaaagagcaggagauu

SEQ ID NO: 161144 - RNA, 19 nt, Homo sapiens
  misc_RNA (1)...(19): siRNA sense strand
aagaaugcaggaaugaaua

SEQ ID NO: 161145 - RNA, 19 nt, Homo sapiens
  misc_RNA (1)...(19): siRNA sense strand
uucagcagcuuuccauuga

SEQ ID NO: 161146 - RNA, 19 nt, Homo sapiens
  misc_RNA (1)...(19): siRNA sense strand
gaagaaagucuagggaaaa

SEQ ID NO: 161147 - RNA, 19 nt, Homo sapiens
  misc_RNA (1)...(19): siRNA sense strand
gaagagacuagaacagaac

SEQ ID NO: 161148 - RNA, 19 nt, Homo sapiens
  misc_RNA (1)...(19): siRNA sense strand
gaagaauggagccaaagag

SEQ ID NO: 161149 - RNA, 19 nt, Homo sapiens
  misc_RNA (1)...(19): siRNA sense strand
ccaggaaacucagauacag

SEQ ID NO: 161150 - RNA, 19 nt, Homo sapiens
  misc_RNA (1)...(19): siRNA sense strand
gagaagaucgugcggauua

SEQ ID NO: 161151 - RNA, 19 nt, Homo sapiens
  misc_RNA (1)...(19): siRNA sense strand
aauuggagcugauuucuua

SEQ ID NO: 161152 - RNA, 19 nt, Homo sapiens
  misc_RNA (1)...(19): siRNA sense strand
gacaauggcugaccggauu

SEQ ID NO: 161153 - RNA, 19 nt, Homo sapiens
  misc_RNA (1)...(19): siRNA sense strand
gagcauaucgcacggauga

SEQ ID NO: 161154 - RNA, 19 nt, Homo sapiens
  misc_RNA (1)...(19): siRNA sense strand
ugaagaaaguggagcagaa

SEQ ID NO: 161155 - RNA, 19 nt, Homo sapiens
  misc_RNA (1)...(19): siRNA sense strand
ugaaugaucuggagaaugc

SEQ ID NO: 161156 - RNA, 19 nt, Homo sapiens
  misc_RNA (1)...(19): siRNA sense strand
gcaaguccuuucccagaug

SEQ ID NO: 161157 - RNA, 19 nt, Homo sapiens
  misc_RNA (1)...(19): siRNA sense strand
ccaagcagguugaguaucu

SEQ ID NO: 161158 - RNA, 19 nt, Homo sapiens
  misc_RNA (1)...(19): siRNA sense strand
gcccagcacucaaggagaa

SEQ ID NO: 161159 - RNA, 19 nt, Homo sapiens
  misc_RNA (1)...(19): siRNA sense strand
gaacuucgggcucuacaau

SEQ ID NO: 161160 - RNA, 19 nt, Homo sapiens
  misc_RNA (1)...(19): siRNA sense strand
gaaaguggagcagaagauu

SEQ ID NO: 161161 - RNA, 19 nt, Homo sapiens
  misc_RNA (1)...(19): siRNA sense strand
uaggaggugugcaaucuuu

SEQ ID NO: 161162 - RNA, 19 nt, Homo sapiens
  misc_RNA (1)...(19): siRNA sense strand
gaauggacagguaauguga

SEQ ID NO: 161163 - RNA, 19 nt, Homo sapiens
  misc_RNA (1)...(19): siRNA sense strand
caagaacacaccugucuau

SEQ ID NO: 161164 - RNA, 19 nt, Homo sapiens
  misc_RNA (1)...(19): siRNA sense strand
gagcugugcuucucgucuu

SEQ ID NO: 161165 - RNA, 19 nt, Homo sapiens
  misc_RNA (1)...(19): siRNA sense strand
gaacucagggcacgacuag

SEQ ID NO: 161166 - RNA, 19 nt, Homo sapiens
  misc_RNA (1)...(19): siRNA sense strand
uuaaagacauucgguccua

SEQ ID NO: 161167 - RNA, 19 nt, Homo sapiens
  misc_RNA (1)...(19): siRNA sense strand
caagcucacugccgacuuc

SEQ ID NO: 161168 - RNA, 19 nt, Homo sapiens
  misc_RNA (1)...(19): siRNA sense strand
gaacaaacaacaagaacac

SEQ ID NO: 161169 - RNA, 19 nt, Homo sapiens
  misc_RNA (1)...(19): siRNA sense strand
gggaacaggugcacuucga

SEQ ID NO: 161170 - RNA, 19 nt, Homo sapiens
  misc_RNA (1)...(19): siRNA sense strand
gagagagucgggaaucuga

SEQ ID NO: 161171 - RNA, 19 nt, Homo sapiens
  misc_RNA (1)...(19): siRNA sense strand
cagguaaugugaagacaau

SEQ ID NO: 161172 - RNA, 19 nt, Homo sapiens
  misc_RNA (1)...(19): siRNA sense strand
gguaggaggugugcaaucu

SEQ ID NO: 161173 - RNA, 19 nt, Homo sapiens
  misc_RNA (1)...(19): siRNA sense strand
uagccuaaaucacgaguau

SEQ ID NO: 161174 - RNA, 19 nt, Homo sapiens
  misc_RNA (1)...(19): siRNA sense strand
gaacaggugcacuucgaau

SEQ ID NO: 161175 - RNA, 19 nt, Homo sapiens
  misc_RNA (1)...(19): siRNA sense strand
gcuccugaguucuccauug

SEQ ID NO: 161176 - RNA, 19 nt, Homo sapiens
  misc_RNA (1)...(19): siRNA sense strand
ggaauggacagguaaugug

SEQ ID NO: 161177 - RNA, 19 nt, Homo sapiens
  misc_RNA (1)...(19): siRNA sense strand
cuggaaaccuggagagaga

SEQ ID NO: 161178 - RNA, 19 nt, Homo sapiens
  misc_RNA (1)...(19): siRNA sense strand
gcccaguccuucuccaaga

SEQ ID NO: 161179 - RNA, 19 nt, Homo sapiens
  misc_RNA (1)...(19): siRNA sense strand
gaaaagaaccugagagcau

SEQ ID NO: 161180 - RNA, 19 nt, Homo sapiens
  misc_RNA (1)...(19): siRNA sense strand
ccugaguucuccauuguug

SEQ ID NO: 161181 - RNA, 19 nt, Homo sapiens
  misc_RNA (1)...(19): siRNA sense strand
ggaacaaacaacaagaaca

SEQ ID NO: 161182 - RNA, 19 nt, Homo sapiens
  misc_RNA (1)...(19): siRNA sense strand
gaaucugacugugguugga

SEQ ID NO: 161183 - RNA, 19 nt, Homo sapiens
  misc_RNA (1)...(19): siRNA sense strand
gcagaagauugcuaaugac

SEQ ID NO: 161184 - RNA, 19 nt, Homo sapiens
  misc_RNA (1)...(19): siRNA sense strand
ccaugaagcagucaccaaa

SEQ ID NO: 161185 - RNA, 19 nt, Homo sapiens
  misc_RNA (1)...(19): siRNA sense strand
gaucaaauuggcauguuca

SEQ ID NO: 161186 - RNA, 19 nt, Homo sapiens
  misc_RNA (1)...(19): siRNA sense strand
cuacugggaugcagagaag

SEQ ID NO: 161187 - RNA, 19 nt, Homo sapiens
  misc_RNA (1)...(19): siRNA sense strand
gcaccuccgucagucuuug

SEQ ID NO: 161188 - RNA, 19 nt, Homo sapiens
  misc_RNA (1)...(19): siRNA sense strand
gaugacagcccagcacuca

SEQ ID NO: 161189 - RNA, 19 nt, Homo sapiens
  misc_RNA (1)...(19): siRNA sense strand
gaauuggagcugauuucuu

SEQ ID NO: 161190 - RNA, 19 nt, Homo sapiens
  misc_RNA (1)...(19): siRNA sense strand
gaagaaaguggagcagaag

SEQ ID NO: 161191 - RNA, 19 nt, Homo sapiens
  misc_RNA (1)...(19): siRNA sense strand
gaccggauucugaccauga

SEQ ID NO: 161192 - RNA, 19 nt, Homo sapiens
  misc_RNA (1)...(19): siRNA sense strand
uaaagacauucgguccuau

SEQ ID NO: 161193 - RNA, 19 nt, Homo sapiens
  misc_RNA (1)...(19): siRNA sense strand
gaguaucuggucaaugaaa

SEQ ID NO: 161194 - RNA, 19 nt, Homo sapiens
  misc_RNA (1)...(19): siRNA sense strand
ccagggagcacgaauugug

SEQ ID NO: 161195 - RNA, 19 nt, Homo sapiens
  misc_RNA (1)...(19): siRNA sense strand
gcccagggagcacgaauug

SEQ ID NO: 161196 - RNA, 19 nt, Homo sapiens
  misc_RNA (1)...(19): siRNA sense strand
ccaagaacuucgggcucua

SEQ ID NO: 161197 - RNA, 19 nt, Homo sapiens
  misc_RNA (1)...(19): siRNA sense strand
ucaccaaccugggagaauc

SEQ ID NO: 161198 - RNA, 19 nt, Homo sapiens
  misc_RNA (1)...(19): siRNA sense strand
uaucagggcuucgcaucug

SEQ ID NO: 161199 - RNA, 19 nt, Homo sapiens
  misc_RNA (1)...(19): siRNA sense strand
caacgugaguggcuuaacc

SEQ ID NO: 161200 - RNA, 19 nt, Homo sapiens
  misc_RNA (1)...(19): siRNA sense strand
agagaugccugggccauuc

SEQ ID NO: 161201 - RNA, 19 nt, Homo sapiens
  misc_RNA (1)...(19): siRNA sense strand
ggacagguaaugugaagac

SEQ ID NO: 161202 - RNA, 19 nt, Homo sapiens
  misc_RNA (1)...(19): siRNA sense strand
uuugaggaauggacaggua

SEQ ID NO: 161203 - RNA, 19 nt, Homo sapiens
  misc_RNA (1)...(19): siRNA sense strand
ggaacaggugcacuucgaa

SEQ ID NO: 161204 - RNA, 19 nt, Homo sapiens
  misc_RNA (1)...(19): siRNA sense strand
aaauuggcauguucagcuu

SEQ ID NO: 161205 - RNA, 19 nt, Homo sapiens
  misc_RNA (1)...(19): siRNA sense strand
ccugggccauucgcuauuu

SEQ ID NO: 161206 - RNA, 19 nt, Homo sapiens
  misc_RNA (1)...(19): siRNA sense strand
gagcaguggaagcagauug

SEQ ID NO: 161207 - RNA, 19 nt, Homo sapiens
  misc_RNA (1)...(19): siRNA sense strand
agaacacaccugucuaugu

SEQ ID NO: 161208 - RNA, 19 nt, Homo sapiens
  misc_RNA (1)...(19): siRNA sense strand
acuucgggcucuacaauga

SEQ ID NO: 161209 - RNA, 19 nt, Homo sapiens
  misc_RNA (1)...(19): siRNA sense strand
gaagcaccgguuucuguuc

SEQ ID NO: 161210 - RNA, 19 nt, Homo sapiens
  misc_RNA (1)...(19): siRNA sense strand
caacuccggagcaguggaa

SEQ ID NO: 161211 - RNA, 19 nt, Homo sapiens
  misc_RNA (1)...(19): siRNA sense strand
gagagaugccugggccauu

SEQ ID NO: 161212 - RNA, 19 nt, Homo sapiens
  misc_RNA (1)...(19): siRNA sense strand
acaggugcacuucgaauug

SEQ ID NO: 161213 - RNA, 19 nt, Homo sapiens
  misc_RNA (1)...(19): siRNA sense strand
acucagggcacgacuagaa

SEQ ID NO: 161214 - RNA, 19 nt, Homo sapiens
  misc_RNA (1)...(19): siRNA sense strand
ggaaaccuggagagagaug

SEQ ID NO: 161215 - RNA, 19 nt, Homo sapiens
  misc_RNA (1)...(19): siRNA sense strand
caaccugggagaaucacaa

SEQ ID NO: 161216 - RNA, 19 nt, Homo sapiens
  misc_RNA (1)...(19): siRNA sense strand
ucacgaguaucugccaauc

SEQ ID NO: 161217 - RNA, 19 nt, Homo sapiens
  misc_RNA (1)...(19): siRNA sense strand
gccaaguggucgaaucaac

SEQ ID NO: 161218 - RNA, 19 nt, Homo sapiens
  misc_RNA (1)...(19): siRNA sense strand
ugaucaaauuggcauguuc

SEQ ID NO: 161219 - RNA, 19 nt, Homo sapiens
  misc_RNA (1)...(19): siRNA sense strand
ccuggaaccacaucacuga

SEQ ID NO: 161220 - RNA, 19 nt, Homo sapiens
  misc_RNA (1)...(19): siRNA sense strand
gcagagaagagaggauugg

SEQ ID NO: 161221 - RNA, 19 nt, Homo sapiens
  misc_RNA (1)...(19): siRNA sense strand
cagaagauugcuaaugaca

SEQ ID NO: 161222 - RNA, 19 nt, Homo sapiens
  misc_RNA (1)...(19): siRNA sense strand
ggagaagaucgugcggauu

SEQ ID NO: 161223 - RNA, 19 nt, Homo sapiens
  misc_RNA (1)...(19): siRNA sense strand
ugaagcaccgguuucuguu

SEQ ID NO: 161224 - RNA, 19 nt, Homo sapiens
  misc_RNA (1)...(19): siRNA sense strand
caauggaacaaacaacaag

SEQ ID NO: 161225 - RNA, 19 nt, Homo sapiens
  misc_RNA (1)...(19): siRNA sense strand
aaucaacgugaguggcuua

SEQ ID NO: 161226 - RNA, 19 nt, Homo sapiens
  misc_RNA (1)...(19): siRNA sense strand
ccugagcucuuugaggaau

SEQ ID NO: 161227 - RNA, 19 nt, Homo sapiens
  misc_RNA (1)...(19): siRNA sense strand
acaagaacacaccugucua

SEQ ID NO: 161228 - RNA, 19 nt, Homo sapiens
  misc_RNA (1)...(19): siRNA sense strand
aaaguggagcagaagauug

SEQ ID NO: 161229 - RNA, 19 nt, Homo sapiens
  misc_RNA (1)...(19): siRNA sense strand
ugacagcccagcacucaag

SEQ ID NO: 161230 - RNA, 19 nt, Homo sapiens
  misc_RNA (1)...(19): siRNA sense strand
acaauggaacaaacaacaa

SEQ ID NO: 161231 - RNA, 19 nt, Homo sapiens
  misc_RNA (1)...(19): siRNA sense strand
gguaaugugaagacaaugg

SEQ ID NO: 161232 - RNA, 19 nt, Homo sapiens
  misc_RNA (1)...(19): siRNA sense strand
gagcauccugcaaguccuu

SEQ ID NO: 161233 - RNA, 19 nt, Homo sapiens
  misc_RNA (1)...(19): siRNA sense strand
gccauucgcuauuuugugu

SEQ ID NO: 161234 - RNA, 19 nt, Homo sapiens
  misc_RNA (1)...(19): siRNA sense strand
gccuaaaucacgaguaucu

SEQ ID NO: 161235 - RNA, 19 nt, Homo sapiens
  misc_RNA (1)...(19): siRNA sense strand
cuccugaguucuccauugu

SEQ ID NO: 161236 - RNA, 19 nt, Homo sapiens
  misc_RNA (1)...(19): siRNA sense strand
gguacaauggaacaaacaa

SEQ ID NO: 161237 - RNA, 19 nt, Homo sapiens
  misc_RNA (1)...(19): siRNA sense strand
gcugccaaguggucgaauc

SEQ ID NO: 161238 - RNA, 19 nt, Homo sapiens
  misc_RNA (1)...(19): siRNA sense strand
gaggaauggacagguaaug

SEQ ID NO: 161239 - RNA, 19 nt, Homo sapiens
  misc_RNA (1)...(19): siRNA sense strand
cuaaugacaauagccuaaa

SEQ ID NO: 161240 - RNA, 19 nt, Homo sapiens
  misc_RNA (1)...(19): siRNA sense strand
caggugcacuucgaauugg

SEQ ID NO: 161241 - RNA, 19 nt, Homo sapiens
  misc_RNA (1)...(19): siRNA sense strand
gggcuucgcaucuggaaac

SEQ ID NO: 161242 - RNA, 19 nt, Homo sapiens
  misc_RNA (1)...(19): siRNA sense strand
gcuacugggaugcagagaa

SEQ ID NO: 161243 - RNA, 19 nt, Homo sapiens
  misc_RNA (1)...(19): siRNA sense strand
ggaggugugcaaucuuugg

SEQ ID NO: 161244 - RNA, 19 nt, Homo sapiens
  misc_RNA (1)...(19): siRNA sense strand
gcggguaggaggugugcaa

SEQ ID NO: 161245 - RNA, 19 nt, Homo sapiens
  misc_RNA (1)...(19): siRNA sense strand
ccugaaugaucuggagaau

SEQ ID NO: 161246 - RNA, 19 nt, Homo sapiens
  misc_RNA (1)...(19): siRNA sense strand
gacagguaaugugaagaca

SEQ ID NO: 161247 - RNA, 19 nt, Homo sapiens
  misc_RNA (1)...(19): siRNA sense strand
gucagucuuugccgagguu

SEQ ID NO: 161248 - RNA, 19 nt, Homo sapiens
  misc_RNA (1)...(19): siRNA sense strand
gcaugcagcuacaagguua

SEQ ID NO: 161249 - RNA, 19 nt, Homo sapiens
  misc_RNA (1)...(19): siRNA sense strand
caaggcaucugcagaacua

SEQ ID NO: 161250 - RNA, 19 nt, Homo sapiens
  misc_RNA (1)...(19): siRNA sense strand
ccaagaacaugggcuuaua

SEQ ID NO: 161251 - RNA, 19 nt, Homo sapiens
  misc_RNA (1)...(19): siRNA sense strand
gggagucacugaagccuuu

SEQ ID NO: 161252 - RNA, 19 nt, Homo sapiens
  misc_RNA (1)...(19): siRNA sense strand
ggaaggaaauagcaacagu

SEQ ID NO: 161253 - RNA, 19 nt, Homo sapiens
  misc_RNA (1)...(19): siRNA sense strand
gaacaugggcuuauauggu

SEQ ID NO: 161254 - RNA, 19 nt, Homo sapiens
  misc_RNA (1)...(19): siRNA sense strand
gcuacaagguuaucgguau

SEQ ID NO: 161255 - RNA, 19 nt, Homo sapiens
  misc_RNA (1)...(19): siRNA sense strand
gaaaugggaccuccagauc

SEQ ID NO: 161256 - RNA, 19 nt, Homo sapiens
  misc_RNA (1)...(19): siRNA sense strand
gaacagcgaagucuugaag

SEQ ID NO: 161257 - RNA, 19 nt, Homo sapiens
  misc_RNA (1)...(19): siRNA sense strand
acacaucaccgaccaaauu

SEQ ID NO: 161258 - RNA, 19 nt, Homo sapiens
  misc_RNA (1)...(19): siRNA sense strand
uagcaacaguggugaagaa

SEQ ID NO: 161259 - RNA, 19 nt, Homo sapiens
  misc_RNA (1)...(19): siRNA sense strand
guaggagccuucacuaugg

SEQ ID NO: 161260 - RNA, 19 nt, Homo sapiens
  misc_RNA (1)...(19): siRNA sense strand
caaauuggcauguucuguu

SEQ ID NO: 161261 - RNA, 19 nt, Homo sapiens
  misc_RNA (1)...(19): siRNA sense strand
aaauuggcauguucuguuu

SEQ ID NO: 161262 - RNA, 19 nt, Homo sapiens
  misc_RNA (1)...(19): siRNA sense strand
gaacuagcccugggugaga

SEQ ID NO: 161263 - RNA, 19 nt, Homo sapiens
  misc_RNA (1)...(19): siRNA sense strand
gagcagaguguucuucuuc

SEQ ID NO: 161264 - RNA, 19 nt, Homo sapiens
  misc_RNA (1)...(19): siRNA sense strand
gaacuggagccuuaaggau

SEQ ID NO: 161265 - RNA, 19 nt, Homo sapiens
  misc_RNA (1)...(19): siRNA sense strand
cuacaagguuaucgguauu

SEQ ID NO: 161266 - RNA, 19 nt, Homo sapiens
  misc_RNA (1)...(19): siRNA sense strand
ggaaaugggaccuccagau

SEQ ID NO: 161267 - RNA, 19 nt, Homo sapiens
  misc_RNA (1)...(19): siRNA sense strand
gaaucucuuugcguucuuu

SEQ ID NO: 161268 - RNA, 19 nt, Homo sapiens
  misc_RNA (1)...(19): siRNA sense strand
aacaauggcugcaagaagu

SEQ ID NO: 161269 - RNA, 19 nt, Homo sapiens
  misc_RNA (1)...(19): siRNA sense strand
caagaacaugggcuuauau

SEQ ID NO: 161270 - RNA, 19 nt, Homo sapiens
  misc_RNA (1)...(19): siRNA sense strand
ucuccaaccucaagaagga

SEQ ID NO: 161271 - RNA, 19 nt, Homo sapiens
  misc_RNA (1)...(19): siRNA sense strand
aagguuaucgguauuauga

SEQ ID NO: 161272 - RNA, 19 nt, Homo sapiens
  misc_RNA (1)...(19): siRNA sense strand
caacacaucaccgaccaaa

SEQ ID NO: 161273 - RNA, 19 nt, Homo sapiens
  misc_RNA (1)...(19): siRNA sense strand
ucacuauggucugcaaaga

SEQ ID NO: 161274 - RNA, 19 nt, Homo sapiens
  misc_RNA (1)...(19): siRNA sense strand
ccaaucauaugccaagaac

SEQ ID NO: 161275 - RNA, 19 nt, Homo sapiens
  misc_RNA (1)...(19): siRNA sense strand
aggaauaccugcccauugg

SEQ ID NO: 161276 - RNA, 19 nt, Homo sapiens
  misc_RNA (1)...(19): siRNA sense strand
ggaacuggagccuuaagga

SEQ ID NO: 161277 - RNA, 19 nt, Homo sapiens
  misc_RNA (1)...(19): siRNA sense strand
cugcaaagaugcggaugaa

SEQ ID NO: 161278 - RNA, 19 nt, Homo sapiens
  misc_RNA (1)...(19): siRNA sense strand
ccggauugcugcugccauu

SEQ ID NO: 161279 - RNA, 19 nt, Homo sapiens
  misc_RNA (1)...(19): siRNA sense strand
gagaacagcgaagucuuga

SEQ ID NO: 161280 - RNA, 19 nt, Homo sapiens
  misc_RNA (1)...(19): siRNA sense strand
acuauggucugcaaagaug

SEQ ID NO: 161281 - RNA, 19 nt, Homo sapiens
  misc_RNA (1)...(19): siRNA sense strand
cuaccgggaugauaaugga

SEQ ID NO: 161282 - RNA, 19 nt, Homo sapiens
  misc_RNA (1)...(19): siRNA sense strand
caacaguggugaagaaaag

SEQ ID NO: 161283 - RNA, 19 nt, Homo sapiens
  misc_RNA (1)...(19): siRNA sense strand
gaacaguggaaggaaauag

SEQ ID NO: 161284 - RNA, 19 nt, Homo sapiens
  misc_RNA (1)...(19): siRNA sense strand
cagccgagaugucuuucug

SEQ ID NO: 161285 - RNA, 19 nt, Homo sapiens
  misc_RNA (1)...(19): siRNA sense strand
caaggcagaggcccagauu

SEQ ID NO: 161286 - RNA, 19 nt, Homo sapiens
  misc_RNA (1)...(19): siRNA sense strand
ugagaacagcgaagucuug

SEQ ID NO: 161287 - RNA, 19 nt, Homo sapiens
  misc_RNA (1)...(19): siRNA sense strand
ggaaaccacacacccaucu

SEQ ID NO: 161288 - RNA, 19 nt, Homo sapiens
  misc_RNA (1)...(19): siRNA sense strand
gugccuaccgggaugauaa

SEQ ID NO: 161289 - RNA, 19 nt, Homo sapiens
  misc_RNA (1)...(19): siRNA sense strand
uggaaagccuuacguucug

SEQ ID NO: 161290 - RNA, 19 nt, Homo sapiens
  misc_RNA (1)...(19): siRNA sense strand
uggagcggcugaucaagga

SEQ ID NO: 161291 - RNA, 19 nt, Homo sapiens
  misc_RNA (1)...(19): siRNA sense strand
ggaacaguggaaggaaaua

SEQ ID NO: 161292 - RNA, 19 nt, Homo sapiens
  misc_RNA (1)...(19): siRNA sense strand
ccggaacaguggaaggaaa

SEQ ID NO: 161293 - RNA, 19 nt, Homo sapiens
  misc_RNA (1)...(19): siRNA sense strand
gagggacaccaauagcaaa

SEQ ID NO: 161294 - RNA, 19 nt, Homo sapiens
  misc_RNA (1)...(19): siRNA sense strand
guucagccgagaugucuuu

SEQ ID NO: 161295 - RNA, 19 nt, Homo sapiens
  misc_RNA (1)...(19): siRNA sense strand
uguaggagccuucacuaug

SEQ ID NO: 161296 - RNA, 19 nt, Homo sapiens
  misc_RNA (1)...(19): siRNA sense strand
ggaaucucuuugcguucuu

SEQ ID NO: 161297 - RNA, 19 nt, Homo sapiens
  misc_RNA (1)...(19): siRNA sense strand
caaggaauaccugcccauu

SEQ ID NO: 161298 - RNA, 19 nt, Homo sapiens
  misc_RNA (1)...(19): siRNA sense strand
uuuaagagggacaccaaua

SEQ ID NO: 161299 - RNA, 19 nt, Homo sapiens
  misc_RNA (1)...(19): siRNA sense strand
ucacugaagccuuuaagag

SEQ ID NO: 161300 - RNA, 19 nt, Homo sapiens
  misc_RNA (1)...(19): siRNA sense strand
gaaaccacacacccaucuu

SEQ ID NO: 161301 - RNA, 19 nt, Homo sapiens
  misc_RNA (1)...(19): siRNA sense strand
cuugaagaguggccgguuu

SEQ ID NO: 161302 - RNA, 19 nt, Homo sapiens
  misc_RNA (1)...(19): siRNA sense strand
agucacaguugaagaucuu

SEQ ID NO: 161303 - RNA, 19 nt, Homo sapiens
  misc_RNA (1)...(19): siRNA sense strand
uucuggaacuggagccuua

SEQ ID NO: 161304 - RNA, 19 nt, Homo sapiens
  misc_RNA (1)...(19): siRNA sense strand
aagaguggccgguuuguca

SEQ ID NO: 161305 - RNA, 19 nt, Homo sapiens
  misc_RNA (1)...(19): siRNA sense strand
aaacaauggcugcaagaag

SEQ ID NO: 161306 - RNA, 19 nt, Homo sapiens
  misc_RNA (1)...(19): siRNA sense strand
cuugauccgucccauguau

SEQ ID NO: 161307 - RNA, 19 nt, Homo sapiens
  misc_RNA (1)...(19): siRNA sense strand
aaucauaugccaagaacau

SEQ ID NO: 161308 - RNA, 19 nt, Homo sapiens
  misc_RNA (1)...(19): siRNA sense strand
ccaguuuucugcaaagauu

SEQ ID NO: 161309 - RNA, 19 nt, Homo sapiens
  misc_RNA (1)...(19): siRNA sense strand
ucacugugcagaccauuuc

SEQ ID NO: 161310 - RNA, 19 nt, Homo sapiens
  misc_RNA (1)...(19): siRNA sense strand
uaauggaaagccuuacguu

SEQ ID NO: 161311 - RNA, 19 nt, Homo sapiens
  misc_RNA (1)...(19): siRNA sense strand
acaagguuaucgguauuau

SEQ ID NO: 161312 - RNA, 19 nt, Homo sapiens
  misc_RNA (1)...(19): siRNA sense strand
caucgaacagggcauuaau

SEQ ID NO: 161313 - RNA, 19 nt, Homo sapiens
  misc_RNA (1)...(19): siRNA sense strand
ucgaacagggcauuaaugu

SEQ ID NO: 161314 - RNA, 19 nt, Homo sapiens
  misc_RNA (1)...(19): siRNA sense strand
gccaagaacaugggcuuau

SEQ ID NO: 161315 - RNA, 19 nt, Homo sapiens
  misc_RNA (1)...(19): siRNA sense strand
uucaccaggucaccaagua

SEQ ID NO: 161316 - RNA, 19 nt, Homo sapiens
  misc_RNA (1)...(19): siRNA sense strand
uacaagguuaucgguauua

SEQ ID NO: 161317 - RNA, 19 nt, Homo sapiens
  misc_RNA (1)...(19): siRNA sense strand
gaaaacaauggcugcaaga

SEQ ID NO: 161318 - RNA, 19 nt, Homo sapiens
  misc_RNA (1)...(19): siRNA sense strand
ccaaaaggguagagucaca

SEQ ID NO: 161319 - RNA, 19 nt, Homo sapiens
  misc_RNA (1)...(19): siRNA sense strand
agaugcggaugaagccaaa

SEQ ID NO: 161320 - RNA, 19 nt, Homo sapiens
  misc_RNA (1)...(19): siRNA sense strand
uuaagagggacaccaauag

SEQ ID NO: 161321 - RNA, 19 nt, Homo sapiens
  misc_RNA (1)...(19): siRNA sense strand
caggcgcuguggaggauau

SEQ ID NO: 161322 - RNA, 19 nt, Homo sapiens
  misc_RNA (1)...(19): siRNA sense strand
ggagccaguuuucugcaaa

SEQ ID NO: 161323 - RNA, 19 nt, Homo sapiens
  misc_RNA (1)...(19): siRNA sense strand
ucaccaggucaccaaguaa

SEQ ID NO: 161324 - RNA, 19 nt, Homo sapiens
  misc_RNA (1)...(19): siRNA sense strand
gauugcugcugccauucug

SEQ ID NO: 161325 - RNA, 19 nt, Homo sapiens
  misc_RNA (1)...(19): siRNA sense strand
gagucacaguugaagaucu

SEQ ID NO: 161326 - RNA, 19 nt, Homo sapiens
  misc_RNA (1)...(19): siRNA sense strand
uagagucacaguugaagau

SEQ ID NO: 161327 - RNA, 19 nt, Homo sapiens
  misc_RNA (1)...(19): siRNA sense strand
ggguagagucacaguugaa

SEQ ID NO: 161328 - RNA, 19 nt, Homo sapiens
  misc_RNA (1)...(19): siRNA sense strand
aaggguagagucacaguug

SEQ ID NO: 161329 - RNA, 19 nt, Homo sapiens
  misc_RNA (1)...(19): siRNA sense strand
gccaaucauaugccaagaa

SEQ ID NO: 161330 - RNA, 19 nt, Homo sapiens
  misc_RNA (1)...(19): siRNA sense strand
aaaccacacacccaucuuc

SEQ ID NO: 161331 - RNA, 19 nt, Homo sapiens
  misc_RNA (1)...(19): siRNA sense strand
gcaaggcagaggcccagau

SEQ ID NO: 161332 - RNA, 19 nt, Homo sapiens
  misc_RNA (1)...(19): siRNA sense strand
gaagaguggccgguuuguc

SEQ ID NO: 161333 - RNA, 19 nt, Homo sapiens
  misc_RNA (1)...(19): siRNA sense strand
cacaucaccgaccaaauug

SEQ ID NO: 161334 - RNA, 19 nt, Homo sapiens
  misc_RNA (1)...(19): siRNA sense strand
guagagucacaguugaaga

SEQ ID NO: 161335 - RNA, 19 nt, Homo sapiens
  misc_RNA (1)...(19): siRNA sense strand
ggcaugcagcuacaagguu

SEQ ID NO: 161336 - RNA, 19 nt, Homo sapiens
  misc_RNA (1)...(19): siRNA sense strand
cuaccuugcccaugccauu

SEQ ID NO: 161337 - RNA, 19 nt, Homo sapiens
  misc_RNA (1)...(19): siRNA sense strand
ccaucuacaugacaaaaga

SEQ ID NO: 161338 - RNA, 19 nt, Homo sapiens
  misc_RNA (1)...(19): siRNA sense strand
guggacccauguggaaaug

SEQ ID NO: 161339 - RNA, 19 nt, Homo sapiens
  misc_RNA (1)...(19): siRNA sense strand
gcaaggcaucugcagaacu

SEQ ID NO: 161340 - RNA, 19 nt, Homo sapiens
  misc_RNA (1)...(19): siRNA sense strand
gguggacccauguggaaau

SEQ ID NO: 161341 - RNA, 19 nt, Homo sapiens
  misc_RNA (1)...(19): siRNA sense strand
caagguuaucgguauuaug

SEQ ID NO: 161342 - RNA, 19 nt, Homo sapiens
  misc_RNA (1)...(19): siRNA sense strand
agagcagaguguucuucuu

SEQ ID NO: 161343 - RNA, 19 nt, Homo sapiens
  misc_RNA (1)...(19): siRNA sense strand
aaggaauaccugcccauug

SEQ ID NO: 161344 - RNA, 19 nt, Homo sapiens
  misc_RNA (1)...(19): siRNA sense strand
agagggacaccaauagcaa

SEQ ID NO: 161345 - RNA, 19 nt, Homo sapiens
  misc_RNA (1)...(19): siRNA sense strand
ccaguggugauggugauaa

SEQ ID NO: 161346 - RNA, 19 nt, Homo sapiens
  misc_RNA (1)...(19): siRNA sense strand
ggagucacugaagccuuua

SEQ ID NO: 161347 - RNA, 19 nt, Homo sapiens
  misc_RNA (1)...(19): siRNA sense strand
ucaugaagcuggucuacug

SEQ ID NO: 161348 - RNA, 19 nt, Homo sapiens
  misc_RNA (1)...(19): siRNA sense strand
ccagcgagauggaggagaa

SEQ ID NO: 161349 - RNA, 19 nt, Homo sapiens
  misc_RNA (1)...(19): siRNA sense strand
cagcuucgaugaccacuuc

SEQ ID NO: 161350 - RNA, 19 nt, Homo sapiens
  misc_RNA (1)...(19): siRNA sense strand
gcucaucaccgacaaguuc

SEQ ID NO: 161351 - RNA, 19 nt, Homo sapiens
  misc_RNA (1)...(19): siRNA sense strand
acucagagcugcgccugua

SEQ ID NO: 161352 - RNA, 19 nt, Homo sapiens
  misc_RNA (1)...(19): siRNA sense strand
ucaacgcccuccaggacaa

SEQ ID NO: 161353 - RNA, 19 nt, Homo sapiens
  misc_RNA (1)...(19): siRNA sense strand
caucggguguggagagugu

SEQ ID NO: 161354 - RNA, 19 nt, Homo sapiens
  misc_RNA (1)...(19): siRNA sense strand
aggagacgcuggccgaguu

SEQ ID NO: 161355 - RNA, 19 nt, Homo sapiens
  misc_RNA (1)...(19): siRNA sense strand
ucaugcagcugaagaucau

SEQ ID NO: 161356 - RNA, 19 nt, Homo sapiens
  misc_RNA (1)...(19): siRNA sense strand
cucgagagcugucaugaag

SEQ ID NO: 161357 - RNA, 19 nt, Homo sapiens
  misc_RNA (1)...(19): siRNA sense strand
gccggaaggucagcaggaa

SEQ ID NO: 161358 - RNA, 19 nt, Homo sapiens
  misc_RNA (1)...(19): siRNA sense strand
gcugcugccugaugacuac

SEQ ID NO: 161359 - RNA, 19 nt, Homo sapiens
  misc_RNA (1)...(19): siRNA sense strand
uccgggaccuguacucaga

SEQ ID NO: 161360 - RNA, 19 nt, Homo sapiens
  misc_RNA (1)...(19): siRNA sense strand
ggcccugcccugacuauug

SEQ ID NO: 161361 - RNA, 19 nt, Homo sapiens
  misc_RNA (1)...(19): siRNA sense strand
gcccugcccugacuauugc

SEQ ID NO: 161362 - RNA, 19 nt, Homo sapiens
  misc_RNA (1)...(19): siRNA sense strand
cguggcugcucgcuccuuu

SEQ ID NO: 161363 - RNA, 19 nt, Homo sapiens
  misc_RNA (1)...(19): siRNA sense strand
cuuccuggcccuuacagua

SEQ ID NO: 161364 - RNA, 19 nt, Homo sapiens
  misc_RNA (1)...(19): siRNA sense strand
cggaaggucagcaggaaga

SEQ ID NO: 161365 - RNA, 19 nt, Homo sapiens
  misc_RNA (1)...(19): siRNA sense strand
cgaggcugguggcugcuau

SEQ ID NO: 161366 - RNA, 19 nt, Homo sapiens
  misc_RNA (1)...(19): siRNA sense strand
cagagcugcgccuguacua

SEQ ID NO: 161367 - RNA, 19 nt, Homo sapiens
  misc_RNA (1)...(19): siRNA sense strand
caggcacgcuggagaagcu

SEQ ID NO: 161368 - RNA, 19 nt, Homo sapiens
  misc_RNA (1)...(19): siRNA sense strand
ucaccaagccggacaugac

SEQ ID NO: 161369 - RNA, 19 nt, Homo sapiens
  misc_RNA (1)...(19): siRNA sense strand
gaacgagcauccugucuuc

SEQ ID NO: 161370 - RNA, 19 nt, Homo sapiens
  misc_RNA (1)...(19): siRNA sense strand
gaauguggcuucgcucuga

SEQ ID NO: 161371 - RNA, 19 nt, Homo sapiens
  misc_RNA (1)...(19): siRNA sense strand
gaagguagauuucaauacg

SEQ ID NO: 161372 - RNA, 19 nt, Homo sapiens
  misc_RNA (1)...(19): siRNA sense strand
caggagaacugucagaaug

SEQ ID NO: 161373 - RNA, 19 nt, Homo sapiens
  misc_RNA (1)...(19): siRNA sense strand
gcucagauguggccuggaa

SEQ ID NO: 161374 - RNA, 19 nt, Homo sapiens
  misc_RNA (1)...(19): siRNA sense strand
gcagggccgugcugauuga

SEQ ID NO: 161375 - RNA, 19 nt, Homo sapiens
  misc_RNA (1)...(19): siRNA sense strand
gauguggccuggaacuuug

SEQ ID NO: 161376 - RNA, 19 nt, Homo sapiens
  misc_RNA (1)...(19): siRNA sense strand
ugaacagucucaaguaugu

SEQ ID NO: 161377 - RNA, 19 nt, Homo sapiens
  misc_RNA (1)...(19): siRNA sense strand
gggagaagguagauuucaa

SEQ ID NO: 161378 - RNA, 19 nt, Homo sapiens
  misc_RNA (1)...(19): siRNA sense strand
gagaagguagauuucaaua

SEQ ID NO: 161379 - RNA, 19 nt, Homo sapiens
  misc_RNA (1)...(19): siRNA sense strand
gagcugcaaugccgcuuuc

SEQ ID NO: 161380 - RNA, 19 nt, Homo sapiens
  misc_RNA (1)...(19): siRNA sense strand
gaucccaagcucaucauuu

SEQ ID NO: 161381 - RNA, 19 nt, Homo sapiens
  misc_RNA (1)...(19): siRNA sense strand
gacaucaagcgccuccuua

SEQ ID NO: 161382 - RNA, 19 nt, Homo sapiens
  misc_RNA (1)...(19): siRNA sense strand
ccuuaaaguugccauauag

SEQ ID NO: 161383 - RNA, 19 nt, Homo sapiens
  misc_RNA (1)...(19): siRNA sense strand
gggccgugcugauugagaa

SEQ ID NO: 161384 - RNA, 19 nt, Homo sapiens
  misc_RNA (1)...(19): siRNA sense strand
ucaagcgccuccuuaaagu

SEQ ID NO: 161385 - RNA, 19 nt, Homo sapiens
  misc_RNA (1)...(19): siRNA sense strand
ggagaagguagauuucaau

SEQ ID NO: 161386 - RNA, 19 nt, Homo sapiens
  misc_RNA (1)...(19): siRNA sense strand
ccugaacagucucaaguau

SEQ ID NO: 161387 - RNA, 19 nt, Homo sapiens
  misc_RNA (1)...(19): siRNA sense strand
caucaagcgccuccuuaaa

SEQ ID NO: 161388 - RNA, 19 nt, Homo sapiens
  misc_RNA (1)...(19): siRNA sense strand
ggagaacugucagaaugag

SEQ ID NO: 161389 - RNA, 19 nt, Homo sapiens
  misc_RNA (1)...(19): siRNA sense strand
uccuuaaaguugccauaua

SEQ ID NO: 161390 - RNA, 19 nt, Homo sapiens
  misc_RNA (1)...(19): siRNA sense strand
caacauugagccugacauc

SEQ ID NO: 161391 - RNA, 19 nt, Homo sapiens
  misc_RNA (1)...(19): siRNA sense strand
uggcuucccuugcaaccaa

SEQ ID NO: 161392 - RNA, 19 nt, Homo sapiens
  misc_RNA (1)...(19): siRNA sense strand
aucccaagcucaucauuug

SEQ ID NO: 161393 - RNA, 19 nt, Homo sapiens
  misc_RNA (1)...(19): siRNA sense strand
ucgccuaccugaaggacaa

SEQ ID NO: 161394 - RNA, 19 nt, Homo sapiens
  misc_RNA (1)...(19): siRNA sense strand
guccuuggcuucccuugca

SEQ ID NO: 161395 - RNA, 19 nt, Homo sapiens
  misc_RNA (1)...(19): siRNA sense strand
gcacaaccacccgggacuu

SEQ ID NO: 161396 - RNA, 19 nt, Homo sapiens
  misc_RNA (1)...(19): siRNA sense strand
ggacuucacccagcucaac

SEQ ID NO: 161397 - RNA, 19 nt, Homo sapiens
  misc_RNA (1)...(19): siRNA sense strand
agguagauuucaauacguu

SEQ ID NO: 161398 - RNA, 19 nt, Homo sapiens
  misc_RNA (1)...(19): siRNA sense strand
acaucaagcgccuccuuaa

SEQ ID NO: 161399 - RNA, 19 nt, Homo sapiens
  misc_RNA (1)...(19): siRNA sense strand
agauguggccuggaacuuu

SEQ ID NO: 161400 - RNA, 19 nt, Homo sapiens
  misc_RNA (1)...(19): siRNA sense strand
caagcgccuccuuaaaguu

SEQ ID NO: 161401 - RNA, 19 nt, Homo sapiens
  misc_RNA (1)...(19): siRNA sense strand
cccuuaugaugacccauuu

SEQ ID NO: 161402 - RNA, 19 nt, Homo sapiens
  misc_RNA (1)...(19): siRNA sense strand
guccuucuaugaccucagu

SEQ ID NO: 161403 - RNA, 19 nt, Homo sapiens
  misc_RNA (1)...(19): siRNA sense strand
aagcgccuccuuaaaguug

SEQ ID NO: 161404 - RNA, 19 nt, Homo sapiens
  misc_RNA (1)...(19): siRNA sense strand
ucaggagaacugucagaau

SEQ ID NO: 161405 - RNA, 19 nt, Homo sapiens
  misc_RNA (1)...(19): siRNA sense strand
gcaccuucccaaccaucaa

SEQ ID NO: 161406 - RNA, 19 nt, Homo sapiens
  misc_RNA (1)...(19): siRNA sense strand
agaacgagcauccugucuu

SEQ ID NO: 161407 - RNA, 19 nt, Homo sapiens
  misc_RNA (1)...(19): siRNA sense strand
ugacaucaagcgccuccuu

SEQ ID NO: 161408 - RNA, 19 nt, Homo sapiens
  misc_RNA (1)...(19): siRNA sense strand
guacggagcccucaccauu

SEQ ID NO: 161409 - RNA, 19 nt, Homo sapiens
  misc_RNA (1)...(19): siRNA sense strand
aggaagagcuugcaccauu

SEQ ID NO: 161410 - RNA, 19 nt, Homo sapiens
  misc_RNA (1)...(19): siRNA sense strand
ggaugucaauggagagaaa

SEQ ID NO: 161411 - RNA, 19 nt, Homo sapiens
  misc_RNA (1)...(19): siRNA sense strand
gagagaaagagcagaaauu

SEQ ID NO: 161412 - RNA, 19 nt, Homo sapiens
  misc_RNA (1)...(19): siRNA sense strand
gcauaaguggcaccauuua

SEQ ID NO: 161413 - RNA, 19 nt, Homo sapiens
  misc_RNA (1)...(19): siRNA sense strand
ggaagagcuugcaccauuc

SEQ ID NO: 161414 - RNA, 19 nt, Homo sapiens
  misc_RNA (1)...(19): siRNA sense strand
gacauccgcuggaacuuug

SEQ ID NO: 161415 - RNA, 19 nt, Homo sapiens
  misc_RNA (1)...(19): siRNA sense strand
caacguggccagcuacuga

SEQ ID NO: 161416 - RNA, 19 nt, Homo sapiens
  misc_RNA (1)...(19): siRNA sense strand
ugaaugcacuacaggaaga

SEQ ID NO: 161417 - RNA, 19 nt, Homo sapiens
  misc_RNA (1)...(19): siRNA sense strand
gaggcuuugucccuaauuu

SEQ ID NO: 161418 - RNA, 19 nt, Homo sapiens
  misc_RNA (1)...(19): siRNA sense strand
gaaaggggaugucaaugga

SEQ ID NO: 161419 - RNA, 19 nt, Homo sapiens
  misc_RNA (1)...(19): siRNA sense strand
gacaagagaagucgaagau

SEQ ID NO: 161420 - RNA, 19 nt, Homo sapiens
  misc_RNA (1)...(19): siRNA sense strand
uggcauaaguggcaccauu

SEQ ID NO: 161421 - RNA, 19 nt, Homo sapiens
  misc_RNA (1)...(19): siRNA sense strand
uggcaaauacguccucuuu

SEQ ID NO: 161422 - RNA, 19 nt, Homo sapiens
  misc_RNA (1)...(19): siRNA sense strand
ggagagaaagagcagaaau

SEQ ID NO: 161423 - RNA, 19 nt, Homo sapiens
  misc_RNA (1)...(19): siRNA sense strand
ggacaagagaagucgaaga

SEQ ID NO: 161424 - RNA, 19 nt, Homo sapiens
  misc_RNA (1)...(19): siRNA sense strand
cgacauccgcuggaacuuu

SEQ ID NO: 161425 - RNA, 19 nt, Homo sapiens
  misc_RNA (1)...(19): siRNA sense strand
ggcauaaguggcaccauuu

SEQ ID NO: 161426 - RNA, 19 nt, Homo sapiens
  misc_RNA (1)...(19): siRNA sense strand
ggucagcaacgucaagaug

SEQ ID NO: 161427 - RNA, 19 nt, Homo sapiens
  misc_RNA (1)...(19): siRNA sense strand
guggaggcuuugucccuaa

SEQ ID NO: 161428 - RNA, 19 nt, Homo sapiens
  misc_RNA (1)...(19): siRNA sense strand
acggagcccucaccauuga

SEQ ID NO: 161429 - RNA, 19 nt, Homo sapiens
  misc_RNA (1)...(19): siRNA sense strand
ugacgggccaguacauuga

SEQ ID NO: 161430 - RNA, 19 nt, Homo sapiens
  misc_RNA (1)...(19): siRNA sense strand
guggcaccauuuacgagua

SEQ ID NO: 161431 - RNA, 19 nt, Homo sapiens
  misc_RNA (1)...(19): siRNA sense strand
ucagcaacgucaagaugga

SEQ ID NO: 161432 - RNA, 19 nt, Homo sapiens
  misc_RNA (1)...(19): siRNA sense strand
ccgaccagguggaggcuuu

SEQ ID NO: 161433 - RNA, 19 nt, Homo sapiens
  misc_RNA (1)...(19): siRNA sense strand
agagaaagagcagaaauuc

SEQ ID NO: 161434 - RNA, 19 nt, Homo sapiens
  misc_RNA (1)...(19): siRNA sense strand
cuaauuuccagcucuuuga

SEQ ID NO: 161435 - RNA, 19 nt, Homo sapiens
  misc_RNA (1)...(19): siRNA sense strand
aaauacguccucuuuguca

SEQ ID NO: 161436 - RNA, 19 nt, Homo sapiens
  misc_RNA (1)...(19): siRNA sense strand
aaacaggaaccaggagaga

SEQ ID NO: 161437 - RNA, 19 nt, Homo sapiens
  misc_RNA (1)...(19): siRNA sense strand
uaaguggcaccauuuacga

SEQ ID NO: 161438 - RNA, 19 nt, Homo sapiens
  misc_RNA (1)...(19): siRNA sense strand
uuccuacccucaaguaugu

SEQ ID NO: 161439 - RNA, 19 nt, Homo sapiens
  misc_RNA (1)...(19): siRNA sense strand
gauccuuccuacccucaag

SEQ ID NO: 161440 - RNA, 19 nt, Homo sapiens
  misc_RNA (1)...(19): siRNA sense strand
caggagagaacucagagau

SEQ ID NO: 161441 - RNA, 19 nt, Homo sapiens
  misc_RNA (1)...(19): siRNA sense strand
ugaacugaaugcacuacag

SEQ ID NO: 161442 - RNA, 19 nt, Homo sapiens
  misc_RNA (1)...(19): siRNA sense strand
ggaaccaggagagaacuca

SEQ ID NO: 161443 - RNA, 19 nt, Homo sapiens
  misc_RNA (1)...(19): siRNA sense strand
ggcuuucccugcaaccaau

SEQ ID NO: 161444 - RNA, 19 nt, Homo sapiens
  misc_RNA (1)...(19): siRNA sense strand
aagagaagucgaagaugga

SEQ ID NO: 161445 - RNA, 19 nt, Homo sapiens
  misc_RNA (1)...(19): siRNA sense strand
gggcuuucccugcaaccaa

SEQ ID NO: 161446 - RNA, 19 nt, Homo sapiens
  misc_RNA (1)...(19): siRNA sense strand
gaagagcuugcaccauucg

SEQ ID NO: 161447 - RNA, 19 nt, Homo sapiens
  misc_RNA (1)...(19): siRNA sense strand
ggagcccucaccauugaug

SEQ ID NO: 161448 - RNA, 19 nt, Homo sapiens
  misc_RNA (1)...(19): siRNA sense strand
caucugaccgccucuucug

SEQ ID NO: 161449 - RNA, 19 nt, Homo sapiens
  misc_RNA (1)...(19): siRNA sense strand
gaaaugccaucaaguggaa

SEQ ID NO: 161450 - RNA, 19 nt, Homo sapiens
  misc_RNA (1)...(19): siRNA sense strand
gcaagggcauccugggaaa

SEQ ID NO: 161451 - RNA, 19 nt, Homo sapiens
  misc_RNA (1)...(19): siRNA sense strand
caacguggccucccaguga

SEQ ID NO: 161452 - RNA, 19 nt, Homo sapiens
  misc_RNA (1)...(19): siRNA sense strand
acgaagagaucaaagaguu

SEQ ID NO: 161453 - RNA, 19 nt, Homo sapiens
  misc_RNA (1)...(19): siRNA sense strand
ugguuaaccuggacaagua

SEQ ID NO: 161454 - RNA, 19 nt, Homo sapiens
  misc_RNA (1)...(19): siRNA sense strand
ggacaucgacgggcacaug

SEQ ID NO: 161455 - RNA, 19 nt, Homo sapiens
  misc_RNA (1)...(19): siRNA sense strand
gcaagaccgaaguaaacua

SEQ ID NO: 161456 - RNA, 19 nt, Homo sapiens
  misc_RNA (1)...(19): siRNA sense strand
guaacgaagagaucaaaga

SEQ ID NO: 161457 - RNA, 19 nt, Homo sapiens
  misc_RNA (1)...(19): siRNA sense strand
gaggcaagaccgaaguaaa

SEQ ID NO: 161458 - RNA, 19 nt, Homo sapiens
  misc_RNA (1)...(19): siRNA sense strand
caacgucaaauucgauaug

SEQ ID NO: 161459 - RNA, 19 nt, Homo sapiens
  misc_RNA (1)...(19): siRNA sense strand
uaacgaagagaucaaagag

SEQ ID NO: 161460 - RNA, 19 nt, Homo sapiens
  misc_RNA (1)...(19): siRNA sense strand
cgucaaauucgauauguuc

SEQ ID NO: 161461 - RNA, 19 nt, Homo sapiens
  misc_RNA (1)...(19): siRNA sense strand
agaaggaccugccccacua

SEQ ID NO: 161462 - RNA, 19 nt, Homo sapiens
  misc_RNA (1)...(19): siRNA sense strand
ggaguaacgaagagaucaa

SEQ ID NO: 161463 - RNA, 19 nt, Homo sapiens
  misc_RNA (1)...(19): siRNA sense strand
gaguaacgaagagaucaaa

SEQ ID NO: 161464 - RNA, 19 nt, Homo sapiens
  misc_RNA (1)...(19): siRNA sense strand
ucagcaagaucugcgugaa

SEQ ID NO: 161465 - RNA, 19 nt, Homo sapiens
  misc_RNA (1)...(19): siRNA sense strand
caagaccgaaguaaacuac

SEQ ID NO: 161466 - RNA, 19 nt, Homo sapiens
  misc_RNA (1)...(19): siRNA sense strand
uucgauauguucagcaaga

SEQ ID NO: 161467 - RNA, 19 nt, Homo sapiens
  misc_RNA (1)...(19): siRNA sense strand
gaacggcugcguggugaag

SEQ ID NO: 161468 - RNA, 19 nt, Homo sapiens
  misc_RNA (1)...(19): siRNA sense strand
ccugggaaaugccaucaag

SEQ ID NO: 161469 - RNA, 19 nt, Homo sapiens
  misc_RNA (1)...(19): siRNA sense strand
gauauguucagcaagaucu

SEQ ID NO: 161470 - RNA, 19 nt, Homo sapiens
  misc_RNA (1)...(19): siRNA sense strand
guaaccaguucgggaagca

SEQ ID NO: 161471 - RNA, 19 nt, Homo sapiens
  misc_RNA (1)...(19): siRNA sense strand
gggaguaacgaagagauca

SEQ ID NO: 161472 - RNA, 19 nt, Homo sapiens
  misc_RNA (1)...(19): siRNA sense strand
ugggaaaugccaucaagug

SEQ ID NO: 161473 - RNA, 19 nt, Homo sapiens
  misc_RNA (1)...(19): siRNA sense strand
caucgacgggcacaugguu

SEQ ID NO: 161474 - RNA, 19 nt, Homo sapiens
  misc_RNA (1)...(19): siRNA sense strand
cgaagagaucaaagaguuc

SEQ ID NO: 161475 - RNA, 19 nt, Homo sapiens
  misc_RNA (1)...(19): siRNA sense strand
ggagccagggaguaacgaa

SEQ ID NO: 161476 - RNA, 19 nt, Homo sapiens
  misc_RNA (1)...(19): siRNA sense strand
cuguggaaguggaugaaga

SEQ ID NO: 161477 - RNA, 19 nt, Homo sapiens
  misc_RNA (1)...(19): siRNA sense strand
uacaacgucaaauucgaua

SEQ ID NO: 161478 - RNA, 19 nt, Homo sapiens
  misc_RNA (1)...(19): siRNA sense strand
ggaaguggaugaugucuuu

SEQ ID NO: 161479 - RNA, 19 nt, Homo sapiens
  misc_RNA (1)...(19): siRNA sense strand
ggugaugccuuaauugaaa

SEQ ID NO: 161480 - RNA, 19 nt, Homo sapiens
  misc_RNA (1)...(19): siRNA sense strand
gaaagacauuguagacuuc

SEQ ID NO: 161481 - RNA, 19 nt, Homo sapiens
  misc_RNA (1)...(19): siRNA sense strand
gaaauagaauugccuaagg

SEQ ID NO: 161482 - RNA, 19 nt, Homo sapiens
  misc_RNA (1)...(19): siRNA sense strand
gcagaaagccuuagagaag

SEQ ID NO: 161483 - RNA, 19 nt, Homo sapiens
  misc_RNA (1)...(19): siRNA sense strand
gauaaacaaugaagaugug

SEQ ID NO: 161484 - RNA, 19 nt, Homo sapiens
  misc_RNA (1)...(19): siRNA sense strand
ggaagccuaugugcaauuu

SEQ ID NO: 161485 - RNA, 19 nt, Homo sapiens
  misc_RNA (1)...(19): siRNA sense strand
ggaaguauaugagauaaac

SEQ ID NO: 161486 - RNA, 19 nt, Homo sapiens
  misc_RNA (1)...(19): siRNA sense strand
ggaagaaauugguaaucga

SEQ ID NO: 161487 - RNA, 19 nt, Homo sapiens
  misc_RNA (1)...(19): siRNA sense strand
guauauaacugagccagaa

SEQ ID NO: 161488 - RNA, 19 nt, Homo sapiens
  misc_RNA (1)...(19): siRNA sense strand
agaaagacauuguagacuu

SEQ ID NO: 161489 - RNA, 19 nt, Homo sapiens
  misc_RNA (1)...(19): siRNA sense strand
ggaaugaaguucgaacaca

SEQ ID NO: 161490 - RNA, 19 nt, Homo sapiens
  misc_RNA (1)...(19): siRNA sense strand
aaacagagaugggaaacga

SEQ ID NO: 161491 - RNA, 19 nt, Homo sapiens
  misc_RNA (1)...(19): siRNA sense strand
gaaacacagggaagaaauu

SEQ ID NO: 161492 - RNA, 19 nt, Homo sapiens
  misc_RNA (1)...(19): siRNA sense strand
gaaugaaguucgaacacau

SEQ ID NO: 161493 - RNA, 19 nt, Homo sapiens
  misc_RNA (1)...(19): siRNA sense strand
uaauugaaauggagucaga

SEQ ID NO: 161494 - RNA, 19 nt, Homo sapiens
  misc_RNA (1)...(19): siRNA sense strand
acacaugucgguucuuaua

SEQ ID NO: 161495 - RNA, 19 nt, Homo sapiens
  misc_RNA (1)...(19): siRNA sense strand
caucauagguauauugaac

SEQ ID NO: 161496 - RNA, 19 nt, Homo sapiens
  misc_RNA (1)...(19): siRNA sense strand
uggaagaugugcuuaacuu

SEQ ID NO: 161497 - RNA, 19 nt, Homo sapiens
  misc_RNA (1)...(19): siRNA sense strand
cccaagacauuauaaacuu

SEQ ID NO: 161498 - RNA, 19 nt, Homo sapiens
  misc_RNA (1)...(19): siRNA sense strand
aagcugaugugcacuuuga

SEQ ID NO: 161499 - RNA, 19 nt, Homo sapiens
  misc_RNA (1)...(19): siRNA sense strand
gaagaaauugguaaucgau

SEQ ID NO: 161500 - RNA, 19 nt, Homo sapiens
  misc_RNA (1)...(19): siRNA sense strand
aaauagaauugccuaagga

SEQ ID NO: 161501 - RNA, 19 nt, Homo sapiens
  misc_RNA (1)...(19): siRNA sense strand
ggaagaugugcuuaacuuu

SEQ ID NO: 161502 - RNA, 19 nt, Homo sapiens
  misc_RNA (1)...(19): siRNA sense strand
ggaauacauuuucuccuaa

SEQ ID NO: 161503 - RNA, 19 nt, Homo sapiens
  misc_RNA (1)...(19): siRNA sense strand
gggaagaaauugguaaucg

SEQ ID NO: 161504 - RNA, 19 nt, Homo sapiens
  misc_RNA (1)...(19): siRNA sense strand
gcaauuugaagaaccagaa

SEQ ID NO: 161505 - RNA, 19 nt, Homo sapiens
  misc_RNA (1)...(19): siRNA sense strand
gaaggccacuggagaagcu

SEQ ID NO: 161506 - RNA, 19 nt, Homo sapiens
  misc_RNA (1)...(19): siRNA sense strand
aagccuaugugcaauuuga

SEQ ID NO: 161507 - RNA, 19 nt, Homo sapiens
  misc_RNA (1)...(19): siRNA sense strand
gaagaugugcuuaacuuuu

SEQ ID NO: 161508 - RNA, 19 nt, Homo sapiens
  misc_RNA (1)...(19): siRNA sense strand
ggaaauagaauugccuaag

SEQ ID NO: 161509 - RNA, 19 nt, Homo sapiens
  misc_RNA (1)...(19): siRNA sense strand
ccuuauaguugcaaugaga

SEQ ID NO: 161510 - RNA, 19 nt, Homo sapiens
  misc_RNA (1)...(19): siRNA sense strand
gcuugcaggucaaaucuuc

SEQ ID NO: 161511 - RNA, 19 nt, Homo sapiens
  misc_RNA (1)...(19): siRNA sense strand
ccacguucaucauagguau

SEQ ID NO: 161512 - RNA, 19 nt, Homo sapiens
  misc_RNA (1)...(19): siRNA sense strand
uaacugagccagaaauggu

SEQ ID NO: 161513 - RNA, 19 nt, Homo sapiens
  misc_RNA (1)...(19): siRNA sense strand
cagaaggaaugaaguucga

SEQ ID NO: 161514 - RNA, 19 nt, Homo sapiens
  misc_RNA (1)...(19): siRNA sense strand
ggucaugcacuauggaaga

SEQ ID NO: 161515 - RNA, 19 nt, Homo sapiens
  misc_RNA (1)...(19): siRNA sense strand
aagaggaaguggaugaugu

SEQ ID NO: 161516 - RNA, 19 nt, Homo sapiens
  misc_RNA (1)...(19): siRNA sense strand
aaagugagaaggaaauaga

SEQ ID NO: 161517 - RNA, 19 nt, Homo sapiens
  misc_RNA (1)...(19): siRNA sense strand
agccagaaauggucuuuga

SEQ ID NO: 161518 - RNA, 19 nt, Homo sapiens
  misc_RNA (1)...(19): siRNA sense strand
gagaagcaccgcauguaca

SEQ ID NO: 161519 - RNA, 19 nt, Homo sapiens
  misc_RNA (1)...(19): siRNA sense strand
ugagaaggaaauagaauug

SEQ ID NO: 161520 - RNA, 19 nt, Homo sapiens
  misc_RNA (1)...(19): siRNA sense strand
guggaaguauaugagauaa

SEQ ID NO: 161521 - RNA, 19 nt, Homo sapiens
  misc_RNA (1)...(19): siRNA sense strand
cuaaggaggugccagaaaa

SEQ ID NO: 161522 - RNA, 19 nt, Homo sapiens
  misc_RNA (1)...(19): siRNA sense strand
gaaauugguaaucgauaca

SEQ ID NO: 161523 - RNA, 19 nt, Homo sapiens
  misc_RNA (1)...(19): siRNA sense strand
ggacuuccuuauaguugca

SEQ ID NO: 161524 - RNA, 19 nt, Homo sapiens
  misc_RNA (1)...(19): siRNA sense strand
acucaagccuguuagaauc

SEQ ID NO: 161525 - RNA, 19 nt, Homo sapiens
  misc_RNA (1)...(19): siRNA sense strand
uagaagaggaaguggauga

SEQ ID NO: 161526 - RNA, 19 nt, Homo sapiens
  misc_RNA (1)...(19): siRNA sense strand
gagauaaacaaugaagaug

SEQ ID NO: 161527 - RNA, 19 nt, Homo sapiens
  misc_RNA (1)...(19): siRNA sense strand
caaaacuacuuaccuggaa

SEQ ID NO: 161528 - RNA, 19 nt, Homo sapiens
  misc_RNA (1)...(19): siRNA sense strand
gaauucauguccaaaagga

SEQ ID NO: 161529 - RNA, 19 nt, Homo sapiens
  misc_RNA (1)...(19): siRNA sense strand
gugagaaggaaauagaauu

SEQ ID NO: 161530 - RNA, 19 nt, Homo sapiens
  misc_RNA (1)...(19): siRNA sense strand
gaagaggaaguggaugaug

SEQ ID NO: 161531 - RNA, 19 nt, Homo sapiens
  misc_RNA (1)...(19): siRNA sense strand
ccagcgguauguggaagua

SEQ ID NO: 161532 - RNA, 19 nt, Homo sapiens
  misc_RNA (1)...(19): siRNA sense strand
uagagaagcaccgcaugua

SEQ ID NO: 161533 - RNA, 19 nt, Homo sapiens
  misc_RNA (1)...(19): siRNA sense strand
ggucccacguucaucauag

SEQ ID NO: 161534 - RNA, 19 nt, Homo sapiens
  misc_RNA (1)...(19): siRNA sense strand
gaaucaccauggaauacag

SEQ ID NO: 161535 - RNA, 19 nt, Homo sapiens
  misc_RNA (1)...(19): siRNA sense strand
gcuccacucaagccuguua

SEQ ID NO: 161536 - RNA, 19 nt, Homo sapiens
  misc_RNA (1)...(19): siRNA sense strand
agaaauugguaaucgauac

SEQ ID NO: 161537 - RNA, 19 nt, Homo sapiens
  misc_RNA (1)...(19): siRNA sense strand
aaucuucgccugugguaaa

SEQ ID NO: 161538 - RNA, 19 nt, Homo sapiens
  misc_RNA (1)...(19): siRNA sense strand
caaaucuucgccuguggua

SEQ ID NO: 161539 - RNA, 19 nt, Homo sapiens
  misc_RNA (1)...(19): siRNA sense strand
gaagagcuugcaggucaaa

SEQ ID NO: 161540 - RNA, 19 nt, Homo sapiens
  misc_RNA (1)...(19): siRNA sense strand
caaguuagaagaggaagug

SEQ ID NO: 161541 - RNA, 19 nt, Homo sapiens
  misc_RNA (1)...(19): siRNA sense strand
gaaagugagaaggaaauag

SEQ ID NO: 161542 - RNA, 19 nt, Homo sapiens
  misc_RNA (1)...(19): siRNA sense strand
aaacacagggaagaaauug

SEQ ID NO: 161543 - RNA, 19 nt, Homo sapiens
  misc_RNA (1)...(19): siRNA sense strand
guacaugggccagcgguau

SEQ ID NO: 161544 - RNA, 19 nt, Homo sapiens
  misc_RNA (1)...(19): siRNA sense strand
guucaucauagguauauug

SEQ ID NO: 161545 - RNA, 19 nt, Homo sapiens
  misc_RNA (1)...(19): siRNA sense strand
uugcagcgaugcucaagga

SEQ ID NO: 161546 - RNA, 19 nt, Homo sapiens
  misc_RNA (1)...(19): siRNA sense strand
ugaaagugagaaggaaaua

SEQ ID NO: 161547 - RNA, 19 nt, Homo sapiens
  misc_RNA (1)...(19): siRNA sense strand
ugacauuacuuuugugaug

SEQ ID NO: 161548 - RNA, 19 nt, Homo sapiens
  misc_RNA (1)...(19): siRNA sense strand
gcaggacugaauauaguug

SEQ ID NO: 161549 - RNA, 19 nt, Homo sapiens
  misc_RNA (1)...(19): siRNA sense strand
ggaugugcagaaagccuua

SEQ ID NO: 161550 - RNA, 19 nt, Homo sapiens
  misc_RNA (1)...(19): siRNA sense strand
gagaagcugaugugcacuu

SEQ ID NO: 161551 - RNA, 19 nt, Homo sapiens
  misc_RNA (1)...(19): siRNA sense strand
gaagaacaugaaguaaaug

SEQ ID NO: 161552 - RNA, 19 nt, Homo sapiens
  misc_RNA (1)...(19): siRNA sense strand
uugcaggacugaauauagu

SEQ ID NO: 161553 - RNA, 19 nt, Homo sapiens
  misc_RNA (1)...(19): siRNA sense strand
gugcagaaagccuuagaga

SEQ ID NO: 161554 - RNA, 19 nt, Homo sapiens
  misc_RNA (1)...(19): siRNA sense strand
agacauuguagacuucuuu

SEQ ID NO: 161555 - RNA, 19 nt, Homo sapiens
  misc_RNA (1)...(19): siRNA sense strand
uuagaaucaccauggaaua

SEQ ID NO: 161556 - RNA, 19 nt, Homo sapiens
  misc_RNA (1)...(19): siRNA sense strand
caugagaggauuaccuuuc

SEQ ID NO: 161557 - RNA, 19 nt, Homo sapiens
  misc_RNA (1)...(19): siRNA sense strand
cuacgucuucucugcauuu

SEQ ID NO: 161558 - RNA, 19 nt, Homo sapiens
  misc_RNA (1)...(19): siRNA sense strand
gguauguggaaguauauga

SEQ ID NO: 161559 - RNA, 19 nt, Homo sapiens
  misc_RNA (1)...(19): siRNA sense strand
agaagcugaugugcacuuu

SEQ ID NO: 161560 - RNA, 19 nt, Homo sapiens
  misc_RNA (1)...(19): siRNA sense strand
uggaauacauuuucuccua

SEQ ID NO: 161561 - RNA, 19 nt, Homo sapiens
  misc_RNA (1)...(19): siRNA sense strand
ccagaaauggucuuugaag

SEQ ID NO: 161562 - RNA, 19 nt, Homo sapiens
  misc_RNA (1)...(19): siRNA sense strand
ugaaacacagggaagaaau

SEQ ID NO: 161563 - RNA, 19 nt, Homo sapiens
  misc_RNA (1)...(19): siRNA sense strand
uguggaaguauaugagaua

SEQ ID NO: 161564 - RNA, 19 nt, Homo sapiens
  misc_RNA (1)...(19): siRNA sense strand
ucauagguauauugaacug

SEQ ID NO: 161565 - RNA, 19 nt, Homo sapiens
  misc_RNA (1)...(19): siRNA sense strand
guuagaaucaccauggaau

SEQ ID NO: 161566 - RNA, 19 nt, Homo sapiens
  misc_RNA (1)...(19): siRNA sense strand
gagaggauuaccuuuccaa

SEQ ID NO: 161567 - RNA, 19 nt, Homo sapiens
  misc_RNA (1)...(19): siRNA sense strand
uuccagaggcugcugauuu

SEQ ID NO: 161568 - RNA, 19 nt, Homo sapiens
  misc_RNA (1)...(19): siRNA sense strand
cuucgccugugguaaauga

SEQ ID NO: 161569 - RNA, 19 nt, Homo sapiens
  misc_RNA (1)...(19): siRNA sense strand
agcgguauguggaaguaua

SEQ ID NO: 161570 - RNA, 19 nt, Homo sapiens
  misc_RNA (1)...(19): siRNA sense strand
ccacucaagccuguuagaa

SEQ ID NO: 161571 - RNA, 19 nt, Homo sapiens
  misc_RNA (1)...(19): siRNA sense strand
gggaagccuaugugcaauu

SEQ ID NO: 161572 - RNA, 19 nt, Homo sapiens
  misc_RNA (1)...(19): siRNA sense strand
acaugucgguucuuauaag

SEQ ID NO: 161573 - RNA, 19 nt, Homo sapiens
  misc_RNA (1)...(19): siRNA sense strand
ccaugaggaugcuguugca

SEQ ID NO: 161574 - RNA, 19 nt, Homo sapiens
  misc_RNA (1)...(19): siRNA sense strand
ugagaaagacauuguagac

SEQ ID NO: 161575 - RNA, 19 nt, Homo sapiens
  misc_RNA (1)...(19): siRNA sense strand
gagauauuuccaagcagaa

SEQ ID NO: 161576 - RNA, 19 nt, Homo sapiens
  misc_RNA (1)...(19): siRNA sense strand
gugaugccuuaauugaaau

SEQ ID NO: 161577 - RNA, 19 nt, Homo sapiens
  misc_RNA (1)...(19): siRNA sense strand
ggacugaauauaguugaca

SEQ ID NO: 161578 - RNA, 19 nt, Homo sapiens
  misc_RNA (1)...(19): siRNA sense strand
ggaacgauccucuuaauuu

SEQ ID NO: 161579 - RNA, 19 nt, Homo sapiens
  misc_RNA (1)...(19): siRNA sense strand
gaacgauccucuuaauuuc

SEQ ID NO: 161580 - RNA, 19 nt, Homo sapiens
  misc_RNA (1)...(19): siRNA sense strand
ggugauggcugguguuauu

SEQ ID NO: 161581 - RNA, 19 nt, Homo sapiens
  misc_RNA (1)...(19): siRNA sense strand
ggagaaaggguacaacuug

SEQ ID NO: 161582 - RNA, 19 nt, Homo sapiens
  misc_RNA (1)...(19): siRNA sense strand
ccagagauaacacucauua

SEQ ID NO: 161583 - RNA, 19 nt, Homo sapiens
  misc_RNA (1)...(19): siRNA sense strand
gguauucgccgacugauaa

SEQ ID NO: 161584 - RNA, 19 nt, Homo sapiens
  misc_RNA (1)...(19): siRNA sense strand
gcacaaacgggacacauau

SEQ ID NO: 161585 - RNA, 19 nt, Homo sapiens
  misc_RNA (1)...(19): siRNA sense strand
agagacaagugaucaauga

SEQ ID NO: 161586 - RNA, 19 nt, Homo sapiens
  misc_RNA (1)...(19): siRNA sense strand
uccuagagcucaugaaguu

SEQ ID NO: 161587 - RNA, 19 nt, Homo sapiens
  misc_RNA (1)...(19): siRNA sense strand
acacagacgugccuuuaag

SEQ ID NO: 161588 - RNA, 19 nt, Homo sapiens
  misc_RNA (1)...(19): siRNA sense strand
ugacacagacgugccuuua

SEQ ID NO: 161589 - RNA, 19 nt, Homo sapiens
  misc_RNA (1)...(19): siRNA sense strand
ggguacaacuugcccauca

SEQ ID NO: 161590 - RNA, 19 nt, Homo sapiens
  misc_RNA (1)...(19): siRNA sense strand
cacaaagaguuacaucuca

SEQ ID NO: 161591 - RNA, 19 nt, Homo sapiens
  misc_RNA (1)...(19): siRNA sense strand
gacaaaugauacgcacaaa

SEQ ID NO: 161592 - RNA, 19 nt, Homo sapiens
  misc_RNA (1)...(19): siRNA sense strand
gaagaggaaaccggagaaa

SEQ ID NO: 161593 - RNA, 19 nt, Homo sapiens
  misc_RNA (1)...(19): siRNA sense strand
agaguuacaucucaucaca

SEQ ID NO: 161594 - RNA, 19 nt, Homo sapiens
  misc_RNA (1)...(19): siRNA sense strand
gaaccagagauaacacuca

SEQ ID NO: 161595 - RNA, 19 nt, Homo sapiens
  misc_RNA (1)...(19): siRNA sense strand
guacaacuugcccaucauu

SEQ ID NO: 161596 - RNA, 19 nt, Homo sapiens
  misc_RNA (1)...(19): siRNA sense strand
gccuuuaaguucuguugaa

SEQ ID NO: 161597 - RNA, 19 nt, Homo sapiens
  misc_RNA (1)...(19): siRNA sense strand
caaaugauacgcacaaacg

SEQ ID NO: 161598 - RNA, 19 nt, Homo sapiens
  misc_RNA (1)...(19): siRNA sense strand
gacacagacgugccuuuaa

SEQ ID NO: 161599 - RNA, 19 nt, Homo sapiens
  misc_RNA (1)...(19): siRNA sense strand
agacgugccuuuaaguucu

SEQ ID NO: 161600 - RNA, 19 nt, Homo sapiens
  misc_RNA (1)...(19): siRNA sense strand
acaaagaguuacaucucau

SEQ ID NO: 161601 - RNA, 19 nt, Homo sapiens
  misc_RNA (1)...(19): siRNA sense strand
caacuugcccaucauuucu

SEQ ID NO: 161602 - RNA, 19 nt, Homo sapiens
  misc_RNA (1)...(19): siRNA sense strand
uauuggaacgauccucuua

SEQ ID NO: 161603 - RNA, 19 nt, Homo sapiens
  misc_RNA (1)...(19): siRNA sense strand
gauggcugguguuauugga

SEQ ID NO: 161604 - RNA, 19 nt, Homo sapiens
  misc_RNA (1)...(19): siRNA sense strand
ucacaaagaguuacaucuc

SEQ ID NO: 161605 - RNA, 19 nt, Homo sapiens
  misc_RNA (1)...(19): siRNA sense strand
aguuacaucucaucacaga

SEQ ID NO: 161606 - RNA, 19 nt, Homo sapiens
  misc_RNA (1)...(19): siRNA sense strand
agacaaaugauacgcacaa

SEQ ID NO: 161607 - RNA, 19 nt, Homo sapiens
  misc_RNA (1)...(19): siRNA sense strand
ccuuuaaguucuguugaaa

SEQ ID NO: 161608 - RNA, 19 nt, Homo sapiens
  misc_RNA (1)...(19): siRNA sense strand
uuggaacgauccucuuaau

SEQ ID NO: 161609 - RNA, 19 nt, Homo sapiens
  misc_RNA (1)...(19): siRNA sense strand
uuacaucucaucacagaca

SEQ ID NO: 161610 - RNA, 19 nt, Homo sapiens
  misc_RNA (1)...(19): siRNA sense strand
acgauccucuuaauuucuu

SEQ ID NO: 161611 - RNA, 19 nt, Homo sapiens
  misc_RNA (1)...(19): siRNA sense strand
gguacaacuugcccaucau

SEQ ID NO: 161612 - RNA, 19 nt, Homo sapiens
  misc_RNA (1)...(19): siRNA sense strand
caaagaguuacaucucauc

SEQ ID NO: 161613 - RNA, 19 nt, Homo sapiens
  misc_RNA (1)...(19): siRNA sense strand
cgcacaaacgggacacaua

SEQ ID NO: 161614 - RNA, 19 nt, Homo sapiens
  misc_RNA (1)...(19): siRNA sense strand
gcccaucauuucucugaac

SEQ ID NO: 161615 - RNA, 19 nt, Homo sapiens
  misc_RNA (1)...(19): siRNA sense strand
cagacgugccuuuaaguuc

SEQ ID NO: 161616 - RNA, 19 nt, Homo sapiens
  misc_RNA (1)...(19): siRNA sense strand
agaggaaaccggagaaagg

SEQ ID NO: 161617 - RNA, 19 nt, Homo sapiens
  misc_RNA (1)...(19): siRNA sense strand
uaaagaaaagcccaucuga

SEQ ID NO: 161618 - RNA, 19 nt, Homo sapiens
  misc_RNA (1)...(19): siRNA sense strand
acaacuugcccaucauuuc

SEQ ID NO: 161619 - RNA, 19 nt, Homo sapiens
  misc_RNA (1)...(19): siRNA sense strand
cuagagcucaugaaguuuc

SEQ ID NO: 161620 - RNA, 19 nt, Homo sapiens
  misc_RNA (1)...(19): siRNA sense strand
acagacgugccuuuaaguu

SEQ ID NO: 161621 - RNA, 19 nt, Homo sapiens
  misc_RNA (1)...(19): siRNA sense strand
ccagagacaagugaucaau

SEQ ID NO: 161622 - RNA, 19 nt, Homo sapiens
  misc_RNA (1)...(19): siRNA sense strand
gaaaauccagagacaagug

SEQ ID NO: 161623 - RNA, 19 nt, Homo sapiens
  misc_RNA (1)...(19): siRNA sense strand
aaccagagauaacacucau

SEQ ID NO: 161624 - RNA, 19 nt, Homo sapiens
  misc_RNA (1)...(19): siRNA sense strand
cagagacaagugaucaaug

SEQ ID NO: 161625 - RNA, 19 nt, Homo sapiens
  misc_RNA (1)...(19): siRNA sense strand
gaaauagaaaauccagaga

SEQ ID NO: 161626 - RNA, 19 nt, Homo sapiens
  misc_RNA (1)...(19): siRNA sense strand
cggagaaaggguacaacuu

SEQ ID NO: 161627 - RNA, 19 nt, Homo sapiens
  misc_RNA (1)...(19): siRNA sense strand
gacgugccuuuaaguucug

SEQ ID NO: 161628 - RNA, 19 nt, Homo sapiens
  misc_RNA (1)...(19): siRNA sense strand
cgauccucuuaauuucuua

SEQ ID NO: 161629 - RNA, 19 nt, Homo sapiens
  misc_RNA (1)...(19): siRNA sense strand
ggaacgauccucuuaauuu

SEQ ID NO: 161630 - RNA, 19 nt, Homo sapiens
  misc_RNA (1)...(19): siRNA sense strand
gaacgauccucuuaauuuc

SEQ ID NO: 161631 - RNA, 19 nt, Homo sapiens
  misc_RNA (1)...(19): siRNA sense strand
ugugauggcugguauuauu

SEQ ID NO: 161632 - RNA, 19 nt, Homo sapiens
  misc_RNA (1)...(19): siRNA sense strand
ggagaaacgggacaacuug

SEQ ID NO: 161633 - RNA, 19 nt, Homo sapiens
  misc_RNA (1)...(19): siRNA sense strand
cacaaagaguuacaucuca

SEQ ID NO: 161634 - RNA, 19 nt, Homo sapiens
  misc_RNA (1)...(19): siRNA sense strand
caacuuguccaucguuuca

SEQ ID NO: 161635 - RNA, 19 nt, Homo sapiens
  misc_RNA (1)...(19): siRNA sense strand
agaguuacaucucaucaca

SEQ ID NO: 161636 - RNA, 19 nt, Homo sapiens
  misc_RNA (1)...(19): siRNA sense strand
uguaccagcuccuguagug

SEQ ID NO: 161637 - RNA, 19 nt, Homo sapiens
  misc_RNA (1)...(19): siRNA sense strand
acaaagaguuacaucucau

SEQ ID NO: 161638 - RNA, 19 nt, Homo sapiens
  misc_RNA (1)...(19): siRNA sense strand
uauuggaacgauccucuua

SEQ ID NO: 161639 - RNA, 19 nt, Homo sapiens
  misc_RNA (1)...(19): siRNA sense strand
ucacaaagaguuacaucuc

SEQ ID NO: 161640 - RNA, 19 nt, Homo sapiens
  misc_RNA (1)...(19): siRNA sense strand
aguuacaucucaucacaga

SEQ ID NO: 161641 - RNA, 19 nt, Homo sapiens
  misc_RNA (1)...(19): siRNA sense strand
guccaucguuucacuguac

SEQ ID NO: 161642 - RNA, 19 nt, Homo sapiens
  misc_RNA (1)...(19): siRNA sense strand
uuggaacgauccucuuaau

SEQ ID NO: 161643 - RNA, 19 nt, Homo sapiens
  misc_RNA (1)...(19): siRNA sense strand
ucacagacaaauggagaaa

SEQ ID NO: 161644 - RNA, 19 nt, Homo sapiens
  misc_RNA (1)...(19): siRNA sense strand
gcaaugcacacuucaaccu

SEQ ID NO: 161645 - RNA, 19 nt, Homo sapiens
  misc_RNA (1)...(19): siRNA sense strand
uuacaucucaucacagaca

SEQ ID NO: 161646 - RNA, 19 nt, Homo sapiens
  misc_RNA (1)...(19): siRNA sense strand
acgauccucuuaauuucuu

SEQ ID NO: 161647 - RNA, 19 nt, Homo sapiens
  misc_RNA (1)...(19): siRNA sense strand
acacuucaaccucuucuuc

SEQ ID NO: 161648 - RNA, 19 nt, Homo sapiens
  misc_RNA (1)...(19): siRNA sense strand
gauggcugguauuauugga

SEQ ID NO: 161649 - RNA, 19 nt, Homo sapiens
  misc_RNA (1)...(19): siRNA sense strand
acagacaaauggagaaacg

SEQ ID NO: 161650 - RNA, 19 nt, Homo sapiens
  misc_RNA (1)...(19): siRNA sense strand
caaagaguuacaucucauc

SEQ ID NO: 161651 - RNA, 19 nt, Homo sapiens
  misc_RNA (1)...(19): siRNA sense strand
ugugugauggcugguauua

SEQ ID NO: 161652 - RNA, 19 nt, Homo sapiens
  misc_RNA (1)...(19): siRNA sense strand
cuucagucacaaagaguua

SEQ ID NO: 161653 - RNA, 19 nt, Homo sapiens
  misc_RNA (1)...(19): siRNA sense strand
cagcuccuguagugauaau

SEQ ID NO: 161654 - RNA, 19 nt, Homo sapiens
  misc_RNA (1)...(19): siRNA sense strand
uggagaaacgggacaacuu

SEQ ID NO: 161655 - RNA, 19 nt, Homo sapiens
  misc_RNA (1)...(19): siRNA sense strand
ucucaucacagacaaaugg

SEQ ID NO: 161656 - RNA, 19 nt, Homo sapiens
  misc_RNA (1)...(19): siRNA sense strand
gugauggcugguauuauug

SEQ ID NO: 161657 - RNA, 19 nt, Homo sapiens
  misc_RNA (1)...(19): siRNA sense strand
accagcuccuguagugaua

SEQ ID NO: 161658 - RNA, 19 nt, Homo sapiens
  misc_RNA (1)...(19): siRNA sense strand
cgauccucuuaauuucuua

SEQ ID NO: 161659 - RNA, 19 nt, Homo sapiens
  misc_RNA (1)...(19): siRNA sense strand
gcacguaccacaccaauga

SEQ ID NO: 161660 - RNA, 19 nt, Homo sapiens
  misc_RNA (1)...(19): siRNA sense strand
ggugauagcagcagaaagg

SEQ ID NO: 161661 - RNA, 19 nt, Homo sapiens
  misc_RNA (1)...(19): siRNA sense strand
ccaagaugcuggugauagc

SEQ ID NO: 161662 - RNA, 19 nt, Homo sapiens
  misc_RNA (1)...(19): siRNA sense strand
cgucauugcaggugugauu

SEQ ID NO: 161663 - RNA, 19 nt, Homo sapiens
  misc_RNA (1)...(19): siRNA sense strand
ccuccaagaugcuggugau

SEQ ID NO: 161664 - RNA, 19 nt, Homo sapiens
  misc_RNA (1)...(19): siRNA sense strand
ccuagucucccuccucuuc

SEQ ID NO: 161665 - RNA, 19 nt, Homo sapiens
  misc_RNA (1)...(19): siRNA sense strand
gcagcagaaaggaguacuu

SEQ ID NO: 161666 - RNA, 19 nt, Homo sapiens
  misc_RNA (1)...(19): siRNA sense strand
gacccugcccuccaagaug

SEQ ID NO: 161667 - RNA, 19 nt, Homo sapiens
  misc_RNA (1)...(19): siRNA sense strand
ggccaagggcacggaguuu

SEQ ID NO: 161668 - RNA, 19 nt, Homo sapiens
  misc_RNA (1)...(19): siRNA sense strand
gccaagggcacggaguuug

SEQ ID NO: 161669 - RNA, 19 nt, Homo sapiens
  misc_RNA (1)...(19): siRNA sense strand
gcacguaccacaccaauga

SEQ ID NO: 161670 - RNA, 19 nt, Homo sapiens
  misc_RNA (1)...(19): siRNA sense strand
ggugauagcagcagaaagg

SEQ ID NO: 161671 - RNA, 19 nt, Homo sapiens
  misc_RNA (1)...(19): siRNA sense strand
ccaagaugcuggugauagc

SEQ ID NO: 161672 - RNA, 19 nt, Homo sapiens
  misc_RNA (1)...(19): siRNA sense strand
cgucauugcaggugugauu

SEQ ID NO: 161673 - RNA, 19 nt, Homo sapiens
  misc_RNA (1)...(19): siRNA sense strand
ccuccaagaugcuggugau

SEQ ID NO: 161674 - RNA, 19 nt, Homo sapiens
  misc_RNA (1)...(19): siRNA sense strand
ccuagucucccuccucuuc

SEQ ID NO: 161675 - RNA, 19 nt, Homo sapiens
  misc_RNA (1)...(19): siRNA sense strand
gcagcagaaaggaguacuu

SEQ ID NO: 161676 - RNA, 19 nt, Homo sapiens
  misc_RNA (1)...(19): siRNA sense strand
gacccugcccuccaagaug

SEQ ID NO: 161677 - RNA, 19 nt, Homo sapiens
  misc_RNA (1)...(19): siRNA sense strand
ggccaagggcacggaguuu

SEQ ID NO: 161678 - RNA, 19 nt, Homo sapiens
  misc_RNA (1)...(19): siRNA sense strand
gccaagggcacggaguuug

SEQ ID NO: 161679 - RNA, 19 nt, Homo sapiens
  misc_RNA (1)...(19): siRNA sense strand
ggauaacacucauuaauug

SEQ ID NO: 161680 - RNA, 19 nt, Homo sapiens
  misc_RNA (1)...(19): siRNA sense strand
gggauaacacucauuaauu

SEQ ID NO: 161681 - RNA, 19 nt, Homo sapiens
  misc_RNA (1)...(19): siRNA sense strand
ggcgauggcucguguuauu

SEQ ID NO: 161682 - RNA, 19 nt, Homo sapiens
  misc_RNA (1)...(19): siRNA sense strand
gagcauaucagcaucaagu

SEQ ID NO: 161683 - RNA, 19 nt, Homo sapiens
  misc_RNA (1)...(19): siRNA sense strand
cacaaagaguuacaucuca

SEQ ID NO: 161684 - RNA, 19 nt, Homo sapiens
  misc_RNA (1)...(19): siRNA sense strand
ggugaugcuuguuguuguu

SEQ ID NO: 161685 - RNA, 19 nt, Homo sapiens
  misc_RNA (1)...(19): siRNA sense strand
caaaugggauaacacucau

SEQ ID NO: 161686 - RNA, 19 nt, Homo sapiens
  misc_RNA (1)...(19): siRNA sense strand
agaguuacaucucaucaca

SEQ ID NO: 161687 - RNA, 19 nt, Homo sapiens
  misc_RNA (1)...(19): siRNA sense strand
ugucagaaauugugagcau

SEQ ID NO: 161688 - RNA, 19 nt, Homo sapiens
  misc_RNA (1)...(19): siRNA sense strand
acaaaugggauaacacuca

SEQ ID NO: 161689 - RNA, 19 nt, Homo sapiens
  misc_RNA (1)...(19): siRNA sense strand
gaggugaugcuuguuguug

SEQ ID NO: 161690 - RNA, 19 nt, Homo sapiens
  misc_RNA (1)...(19): siRNA sense strand
gucagaaauugugagcaua

SEQ ID NO: 161691 - RNA, 19 nt, Homo sapiens
  misc_RNA (1)...(19): siRNA sense strand
acaaagaguuacaucucau

SEQ ID NO: 161692 - RNA, 19 nt, Homo sapiens
  misc_RNA (1)...(19): siRNA sense strand
ucagaaauugugagcauau

SEQ ID NO: 161693 - RNA, 19 nt, Homo sapiens
  misc_RNA (1)...(19): siRNA sense strand
ucacagacaaaugggauaa

SEQ ID NO: 161694 - RNA, 19 nt, Homo sapiens
  misc_RNA (1)...(19): siRNA sense strand
ucacaaagaguuacaucuc

SEQ ID NO: 161695 - RNA, 19 nt, Homo sapiens
  misc_RNA (1)...(19): siRNA sense strand
gaaauugugagcauaucag

SEQ ID NO: 161696 - RNA, 19 nt, Homo sapiens
  misc_RNA (1)...(19): siRNA sense strand
acagacaaaugggauaaca

SEQ ID NO: 161697 - RNA, 19 nt, Homo sapiens
  misc_RNA (1)...(19): siRNA sense strand
aguuacaucucaucacaga

SEQ ID NO: 161698 - RNA, 19 nt, Homo sapiens
  misc_RNA (1)...(19): siRNA sense strand
guuggaaugaucaucuuaa

SEQ ID NO: 161699 - RNA, 19 nt, Homo sapiens
  misc_RNA (1)...(19): siRNA sense strand
gauaacacucauuaauugg

SEQ ID NO: 161700 - RNA, 19 nt, Homo sapiens
  misc_RNA (1)...(19): siRNA sense strand
gcgauggcucguguuauuu

SEQ ID NO: 161701 - RNA, 19 nt, Homo sapiens
  misc_RNA (1)...(19): siRNA sense strand
gcaaugcacacuucaaccu

SEQ ID NO: 161702 - RNA, 19 nt, Homo sapiens
  misc_RNA (1)...(19): siRNA sense strand
gaugcuuguuguuguugga

SEQ ID NO: 161703 - RNA, 19 nt, Homo sapiens
  misc_RNA (1)...(19): siRNA sense strand
ugggauaacacucauuaau

SEQ ID NO: 161704 - RNA, 19 nt, Homo sapiens
  misc_RNA (1)...(19): siRNA sense strand
uuacaucucaucacagaca

SEQ ID NO: 161705 - RNA, 19 nt, Homo sapiens
  misc_RNA (1)...(19): siRNA sense strand
acacuucaaccucuucuuc

SEQ ID NO: 161706 - RNA, 19 nt, Homo sapiens
  misc_RNA (1)...(19): siRNA sense strand
caaagaguuacaucucauc

SEQ ID NO: 161707 - RNA, 19 nt, Homo sapiens
  misc_RNA (1)...(19): siRNA sense strand
gcuuguuguuguuggaaug

SEQ ID NO: 161708 - RNA, 19 nt, Homo sapiens
  misc_RNA (1)...(19): siRNA sense strand
cagaaauugugagcauauc

SEQ ID NO: 161709 - RNA, 19 nt, Homo sapiens
  misc_RNA (1)...(19): siRNA sense strand
gcauaucagcaucaaguac

SEQ ID NO: 161710 - RNA, 19 nt, Homo sapiens
  misc_RNA (1)...(19): siRNA sense strand
cuucagucacaaagaguua

SEQ ID NO: 161711 - RNA, 19 nt, Homo sapiens
  misc_RNA (1)...(19): siRNA sense strand
gugagcauaucagcaucaa

SEQ ID NO: 161712 - RNA, 19 nt, Homo sapiens
  misc_RNA (1)...(19): siRNA sense strand
ucucaucacagacaaaugg

SEQ ID NO: 161713 - RNA, 19 nt, Homo sapiens
  misc_RNA (1)...(19): siRNA sense strand
agacaaaugggauaacacu

SEQ ID NO: 161714 - RNA, 19 nt, Homo sapiens
  misc_RNA (1)...(19): siRNA sense strand
ggauaacacucauuaauug

SEQ ID NO: 161715 - RNA, 19 nt, Homo sapiens
  misc_RNA (1)...(19): siRNA sense strand
gggauaacacucauuaauu

SEQ ID NO: 161716 - RNA, 19 nt, Homo sapiens
  misc_RNA (1)...(19): siRNA sense strand
ggcgauggcucguguuauu

SEQ ID NO: 161717 - RNA, 19 nt, Homo sapiens
  misc_RNA (1)...(19): siRNA sense strand
gagcauaucagcaucaagu

SEQ ID NO: 161718 - RNA, 19 nt, Homo sapiens
  misc_RNA (1)...(19): siRNA sense strand
cacaaagaguuacaucuca

SEQ ID NO: 161719 - RNA, 19 nt, Homo sapiens
  misc_RNA (1)...(19): siRNA sense strand
ggugaugcuuguuguuguu

SEQ ID NO: 161720 - RNA, 19 nt, Homo sapiens
  misc_RNA (1)...(19): siRNA sense strand
caaaugggauaacacucau

SEQ ID NO: 161721 - RNA, 19 nt, Homo sapiens
  misc_RNA (1)...(19): siRNA sense strand
agaguuacaucucaucaca

SEQ ID NO: 161722 - RNA, 19 nt, Homo sapiens
  misc_RNA (1)...(19): siRNA sense strand
ugucagaaauugugagcau

SEQ ID NO: 161723 - RNA, 19 nt, Homo sapiens
  misc_RNA (1)...(19): siRNA sense strand
acaaaugggauaacacuca

SEQ ID NO: 161724 - RNA, 19 nt, Homo sapiens
  misc_RNA (1)...(19): siRNA sense strand
gaggugaugcuuguuguug

SEQ ID NO: 161725 - RNA, 19 nt, Homo sapiens
  misc_RNA (1)...(19): siRNA sense strand
gucagaaauugugagcaua

SEQ ID NO: 161726 - RNA, 19 nt, Homo sapiens
  misc_RNA (1)...(19): siRNA sense strand
acaaagaguuacaucucau

SEQ ID NO: 161727 - RNA, 19 nt, Homo sapiens
  misc_RNA (1)...(19): siRNA sense strand
ucagaaauugugagcauau

SEQ ID NO: 161728 - RNA, 19 nt, Homo sapiens
  misc_RNA (1)...(19): siRNA sense strand
ucacagacaaaugggauaa

SEQ ID NO: 161729 - RNA, 19 nt, Homo sapiens
  misc_RNA (1)...(19): siRNA sense strand
ucacaaagaguuacaucuc

SEQ ID NO: 161730 - RNA, 19 nt, Homo sapiens
  misc_RNA (1)...(19): siRNA sense strand
gaaauugugagcauaucag

SEQ ID NO: 161731 - RNA, 19 nt, Homo sapiens
  misc_RNA (1)...(19): siRNA sense strand
acagacaaaugggauaaca

SEQ ID NO: 161732 - RNA, 19 nt, Homo sapiens
  misc_RNA (1)...(19): siRNA sense strand
aguuacaucucaucacaga

SEQ ID NO: 161733 - RNA, 19 nt, Homo sapiens
  misc_RNA (1)...(19): siRNA sense strand
guuggaaugaucaucuuaa

SEQ ID NO: 161734 - RNA, 19 nt, Homo sapiens
  misc_RNA (1)...(19): siRNA sense strand
gauaacacucauuaauugg

SEQ ID NO: 161735 - RNA, 19 nt, Homo sapiens
  misc_RNA (1)...(19): siRNA sense strand
gcgauggcucguguuauuu

SEQ ID NO: 161736 - RNA, 19 nt, Homo sapiens
  misc_RNA (1)...(19): siRNA sense strand
gcaaugcacacuucaaccu

SEQ ID NO: 161737 - RNA, 19 nt, Homo sapiens
  misc_RNA (1)...(19): siRNA sense strand
gaugcuuguuguuguugga

SEQ ID NO: 161738 - RNA, 19 nt, Homo sapiens
  misc_RNA (1)...(19): siRNA sense strand
ugggauaacacucauuaau

SEQ ID NO: 161739 - RNA, 19 nt, Homo sapiens
  misc_RNA (1)...(19): siRNA sense strand
uuacaucucaucacagaca

SEQ ID NO: 161740 - RNA, 19 nt, Homo sapiens
  misc_RNA (1)...(19): siRNA sense strand
acacuucaaccucuucuuc

SEQ ID NO: 161741 - RNA, 19 nt, Homo sapiens
  misc_RNA (1)...(19): siRNA sense strand
caaagaguuacaucucauc

SEQ ID NO: 161742 - RNA, 19 nt, Homo sapiens
  misc_RNA (1)...(19): siRNA sense strand
gcuuguuguuguuggaaug

SEQ ID NO: 161743 - RNA, 19 nt, Homo sapiens
  misc_RNA (1)...(19): siRNA sense strand
cagaaauugugagcauauc

SEQ ID NO: 161744 - RNA, 19 nt, Homo sapiens
  misc_RNA (1)...(19): siRNA sense strand
gcauaucagcaucaaguac

SEQ ID NO: 161745 - RNA, 19 nt, Homo sapiens
  misc_RNA (1)...(19): siRNA sense strand
cuucagucacaaagaguua

SEQ ID NO: 161746 - RNA, 19 nt, Homo sapiens
  misc_RNA (1)...(19): siRNA sense strand
gugagcauaucagcaucaa

SEQ ID NO: 161747 - RNA, 19 nt, Homo sapiens
  misc_RNA (1)...(19): siRNA sense strand
ucucaucacagacaaaugg

SEQ ID NO: 161748 - RNA, 19 nt, Homo sapiens
  misc_RNA (1)...(19): siRNA sense strand
agacaaaugggauaacacu

SEQ ID NO: 161749 - RNA, 19 nt, Homo sapiens
  misc_RNA (1)...(19): siRNA sense strand
caauaaacaugucaagaug

SEQ ID NO: 161750 - RNA, 19 nt, Homo sapiens
  misc_RNA (1)...(19): siRNA sense strand
caucagauccucaaucaaa

SEQ ID NO: 161751 - RNA, 19 nt, Homo sapiens
  misc_RNA (1)...(19): siRNA sense strand
ggaaauuauuggagggaaa

SEQ ID NO: 161752 - RNA, 19 nt, Homo sapiens
  misc_RNA (1)...(19): siRNA sense strand
ccacaaagccuggaaucua

SEQ ID NO: 161753 - RNA, 19 nt, Homo sapiens
  misc_RNA (1)...(19): siRNA sense strand
aaagaagugucaccucauu

SEQ ID NO: 161754 - RNA, 19 nt, Homo sapiens
  misc_RNA (1)...(19): siRNA sense strand
gaaugaggccuccaaacaa

SEQ ID NO: 161755 - RNA, 19 nt, Homo sapiens
  misc_RNA (1)...(19): siRNA sense strand
acucauguguguuucaaua

SEQ ID NO: 161756 - RNA, 19 nt, Homo sapiens
  misc_RNA (1)...(19): siRNA sense strand
caauaucgguuuaccaaag

SEQ ID NO: 161757 - RNA, 19 nt, Homo sapiens
  misc_RNA (1)...(19): siRNA sense strand
aaugaggccuccaaacaaa

SEQ ID NO: 161758 - RNA, 19 nt, Homo sapiens
  misc_RNA (1)...(19): siRNA sense strand
ggucaugaaugugguguug

SEQ ID NO: 161759 - RNA, 19 nt, Homo sapiens
  misc_RNA (1)...(19): siRNA sense strand
auaccauucucaagaguua

SEQ ID NO: 161760 - RNA, 19 nt, Homo sapiens
  misc_RNA (1)...(19): siRNA sense strand
cgauccagauucauuaaga

SEQ ID NO: 161761 - RNA, 19 nt, Homo sapiens
  misc_RNA (1)...(19): siRNA sense strand
guggagguguucugauuga

SEQ ID NO: 161762 - RNA, 19 nt, Homo sapiens
  misc_RNA (1)...(19): siRNA sense strand
ucuuagaucuggaaccaaa

SEQ ID NO: 161763 - RNA, 19 nt, Homo sapiens
  misc_RNA (1)...(19): siRNA sense strand
ucaagaugcuccacauaag

SEQ ID NO: 161764 - RNA, 19 nt, Homo sapiens
  misc_RNA (1)...(19): siRNA sense strand
uacaucagauccucaauca

SEQ ID NO: 161765 - RNA, 19 nt, Homo sapiens
  misc_RNA (1)...(19): siRNA sense strand
gucaagaugcuccacauaa

SEQ ID NO: 161766 - RNA, 19 nt, Homo sapiens
  misc_RNA (1)...(19): siRNA sense strand
cacacucucucucaaagaa

SEQ ID NO: 161767 - RNA, 19 nt, Homo sapiens
  misc_RNA (1)...(19): siRNA sense strand
ucucaagaguuacaucaga

SEQ ID NO: 161768 - RNA, 19 nt, Homo sapiens
  misc_RNA (1)...(19): siRNA sense strand
caagaugcuccacauaaga

SEQ ID NO: 161769 - RNA, 19 nt, Homo sapiens
  misc_RNA (1)...(19): siRNA sense strand
cacaaagccuggaaucuac

SEQ ID NO: 161770 - RNA, 19 nt, Homo sapiens
  misc_RNA (1)...(19): siRNA sense strand
ccaccgauccagauucauu

SEQ ID NO: 161771 - RNA, 19 nt, Homo sapiens
  misc_RNA (1)...(19): siRNA sense strand
ccaaaggccagaaggauuc

SEQ ID NO: 161772 - RNA, 19 nt, Homo sapiens
  misc_RNA (1)...(19): siRNA sense strand
ccagauucauuaagaccuu

SEQ ID NO: 161773 - RNA, 19 nt, Homo sapiens
  misc_RNA (1)...(19): siRNA sense strand
gccaauaucgguuuaccaa

SEQ ID NO: 161774 - RNA, 19 nt, Homo sapiens
  misc_RNA (1)...(19): siRNA sense strand
ggaaucuacacccuguuaa

SEQ ID NO: 161775 - RNA, 19 nt, Homo sapiens
  misc_RNA (1)...(19): siRNA sense strand
gaaagaagugucaccucau

SEQ ID NO: 161776 - RNA, 19 nt, Homo sapiens
  misc_RNA (1)...(19): siRNA sense strand
ccgcaaaacucaauaaaca

SEQ ID NO: 161777 - RNA, 19 nt, Homo sapiens
  misc_RNA (1)...(19): siRNA sense strand
aacaaacacuggagaucaa

SEQ ID NO: 161778 - RNA, 19 nt, Homo sapiens
  misc_RNA (1)...(19): siRNA sense strand
aaacaaacacuggagauca

SEQ ID NO: 161779 - RNA, 19 nt, Homo sapiens
  misc_RNA (1)...(19): siRNA sense strand
agaaugaggccuccaaaca

SEQ ID NO: 161780 - RNA, 19 nt, Homo sapiens
  misc_RNA (1)...(19): siRNA sense strand
ccucauuccaggccauuua

SEQ ID NO: 161781 - RNA, 19 nt, Homo sapiens
  misc_RNA (1)...(19): siRNA sense strand
agaaauaccagacuuggau

SEQ ID NO: 161782 - RNA, 19 nt, Homo sapiens
  misc_RNA (1)...(19): siRNA sense strand
caaagaaugaggccuccaa

SEQ ID NO: 161783 - RNA, 19 nt, Homo sapiens
  misc_RNA (1)...(19): siRNA sense strand
gaucuggaaccaaaugcaa

SEQ ID NO: 161784 - RNA, 19 nt, Homo sapiens
  misc_RNA (1)...(19): siRNA sense strand
ucauguguguuucaauaug

SEQ ID NO: 161785 - RNA, 19 nt, Homo sapiens
  misc_RNA (1)...(19): siRNA sense strand
gccaaaggccagaaggauu

SEQ ID NO: 161786 - RNA, 19 nt, Homo sapiens
  misc_RNA (1)...(19): siRNA sense strand
gagaagucacuguuacugu

SEQ ID NO: 161787 - RNA, 19 nt, Homo sapiens
  misc_RNA (1)...(19): siRNA sense strand
gcgcacacucucucucaaa

SEQ ID NO: 161788 - RNA, 19 nt, Homo sapiens
  misc_RNA (1)...(19): siRNA sense strand
uggaaucuacacccuguua

SEQ ID NO: 161789 - RNA, 19 nt, Homo sapiens
  misc_RNA (1)...(19): siRNA sense strand
caaaaccucucuuagaucu

SEQ ID NO: 161790 - RNA, 19 nt, Homo sapiens
  misc_RNA (1)...(19): siRNA sense strand
gcacacucucucucaaaga

SEQ ID NO: 161791 - RNA, 19 nt, Homo sapiens
  misc_RNA (1)...(19): siRNA sense strand
ccacugccaauaucgguuu

SEQ ID NO: 161792 - RNA, 19 nt, Homo sapiens
  misc_RNA (1)...(19): siRNA sense strand
gaaauuauuggagggaaag

SEQ ID NO: 161793 - RNA, 19 nt, Homo sapiens
  misc_RNA (1)...(19): siRNA sense strand
uggcggacaucacguuugu

SEQ ID NO: 161794 - RNA, 19 nt, Homo sapiens
  misc_RNA (1)...(19): siRNA sense strand
caccgauccagauucauua

SEQ ID NO: 161795 - RNA, 19 nt, Homo sapiens
  misc_RNA (1)...(19): siRNA sense strand
ugacucauguguguuucaa

SEQ ID NO: 161796 - RNA, 19 nt, Homo sapiens
  misc_RNA (1)...(19): siRNA sense strand
gcaacagccaaaguuacua

SEQ ID NO: 161797 - RNA, 19 nt, Homo sapiens
  misc_RNA (1)...(19): siRNA sense strand
cagccaaaguuacuacaac

SEQ ID NO: 161798 - RNA, 19 nt, Homo sapiens
  misc_RNA (1)...(19): siRNA sense strand
auaccagacuuggaucaaa

SEQ ID NO: 161799 - RNA, 19 nt, Homo sapiens
  misc_RNA (1)...(19): siRNA sense strand
gcaaaacucaauaaacaug

SEQ ID NO: 161800 - RNA, 19 nt, Homo sapiens
  misc_RNA (1)...(19): siRNA sense strand
gauccagauucauuaagac

SEQ ID NO: 161801 - RNA, 19 nt, Homo sapiens
  misc_RNA (1)...(19): siRNA sense strand
ucacguuuguggagguguu

SEQ ID NO: 161802 - RNA, 19 nt, Homo sapiens
  misc_RNA (1)...(19): siRNA sense strand
uuguggagguguucugauu

SEQ ID NO: 161803 - RNA, 19 nt, Homo sapiens
  misc_RNA (1)...(19): siRNA sense strand
caaacaaacacuggagauc

SEQ ID NO: 161804 - RNA, 19 nt, Homo sapiens
  misc_RNA (1)...(19): siRNA sense strand
aaccuugucccgccucaua

SEQ ID NO: 161805 - RNA, 19 nt, Homo sapiens
  misc_RNA (1)...(19): siRNA sense strand
ucuacacccuguuaaccaa

SEQ ID NO: 161806 - RNA, 19 nt, Homo sapiens
  misc_RNA (1)...(19): siRNA sense strand
uauagucucuggaggucau

SEQ ID NO: 161807 - RNA, 19 nt, Homo sapiens
  misc_RNA (1)...(19): siRNA sense strand
ucauuaagaccuucugaca

SEQ ID NO: 161808 - RNA, 19 nt, Homo sapiens
  misc_RNA (1)...(19): siRNA sense strand
cauguguguuucaauaugg

SEQ ID NO: 161809 - RNA, 19 nt, Homo sapiens
  misc_RNA (1)...(19): siRNA sense strand
cagauccucaaucaaauga

SEQ ID NO: 161810 - RNA, 19 nt, Homo sapiens
  misc_RNA (1)...(19): siRNA sense strand
ggagguguucugauugauc

SEQ ID NO: 161811 - RNA, 19 nt, Homo sapiens
  misc_RNA (1)...(19): siRNA sense strand
guuacuguccuaagucgaa

SEQ ID NO: 161812 - RNA, 19 nt, Homo sapiens
  misc_RNA (1)...(19): siRNA sense strand
ccaaacaaacacuggagau

SEQ ID NO: 161813 - RNA, 19 nt, Homo sapiens
  misc_RNA (1)...(19): siRNA sense strand
ggagccaccgauccagauu

SEQ ID NO: 161814 - RNA, 19 nt, Homo sapiens
  misc_RNA (1)...(19): siRNA sense strand
ucccgccucauacaaauua

SEQ ID NO: 161815 - RNA, 19 nt, Homo sapiens
  misc_RNA (1)...(19): siRNA sense strand
gaaucuacacccuguuaac

SEQ ID NO: 161816 - RNA, 19 nt, Homo sapiens
  misc_RNA (1)...(19): siRNA sense strand
caacagccaaaguuacuac

SEQ ID NO: 161817 - RNA, 19 nt, Homo sapiens
  misc_RNA (1)...(19): siRNA sense strand
aaagaaugaggccuccaaa

SEQ ID NO: 161818 - RNA, 19 nt, Homo sapiens
  misc_RNA (1)...(19): siRNA sense strand
cauggucugugcaggagau

SEQ ID NO: 161819 - RNA, 19 nt, Homo sapiens
  misc_RNA (1)...(19): siRNA sense strand
ccaauaucgguuuaccaaa

SEQ ID NO: 161820 - RNA, 19 nt, Homo sapiens
  misc_RNA (1)...(19): siRNA sense strand
gaucuguaaaggugucuuc

SEQ ID NO: 161821 - RNA, 19 nt, Homo sapiens
  misc_RNA (1)...(19): siRNA sense strand
cugcgagaagucacuguua

SEQ ID NO: 161822 - RNA, 19 nt, Homo sapiens
  misc_RNA (1)...(19): siRNA sense strand
ucucuuagaucuggaacca

SEQ ID NO: 161823 - RNA, 19 nt, Homo sapiens
  misc_RNA (1)...(19): siRNA sense strand
ucagauccucaaucaaaug

SEQ ID NO: 161824 - RNA, 19 nt, Homo sapiens
  misc_RNA (1)...(19): siRNA sense strand
ugucaagaugcuccacaua

SEQ ID NO: 161825 - RNA, 19 nt, Homo sapiens
  misc_RNA (1)...(19): siRNA sense strand
auaaacaugucaagaugcu

SEQ ID NO: 161826 - RNA, 19 nt, Homo sapiens
  misc_RNA (1)...(19): siRNA sense strand
cacucucucucaaagaaug

SEQ ID NO: 161827 - RNA, 19 nt, Homo sapiens
  misc_RNA (1)...(19): siRNA sense strand
agacuuggaucaaaagcaa

SEQ ID NO: 161828 - RNA, 19 nt, Homo sapiens
  misc_RNA (1)...(19): siRNA sense strand
accaagaaauaccagacuu

SEQ ID NO: 161829 - RNA, 19 nt, Homo sapiens
  misc_RNA (1)...(19): siRNA sense strand
uccaaaaccucucuuagau

SEQ ID NO: 161830 - RNA, 19 nt, Homo sapiens
  misc_RNA (1)...(19): siRNA sense strand
cucaagaguuacaucagau

SEQ ID NO: 161831 - RNA, 19 nt, Homo sapiens
  misc_RNA (1)...(19): siRNA sense strand
uaccagacuuggaucaaaa

SEQ ID NO: 161832 - RNA, 19 nt, Homo sapiens
  misc_RNA (1)...(19): siRNA sense strand
cucuggaggucaugaaugu

SEQ ID NO: 161833 - RNA, 19 nt, Homo sapiens
  misc_RNA (1)...(19): siRNA sense strand
uuacuguccuaagucgaaa

SEQ ID NO: 161834 - RNA, 19 nt, Homo sapiens
  misc_RNA (1)...(19): siRNA sense strand
guauggcggacaucacguu

SEQ ID NO: 161835 - RNA, 19 nt, Homo sapiens
  misc_RNA (1)...(19): siRNA sense strand
caagaagacgcgaaucauc

SEQ ID NO: 161836 - RNA, 19 nt, Homo sapiens
  misc_RNA (1)...(19): siRNA sense strand
uggcggcagugcuggagua

SEQ ID NO: 161837 - RNA, 19 nt, Homo sapiens
  misc_RNA (1)...(19): siRNA sense strand
gcaacgacgaggagcucaa

SEQ ID NO: 161838 - RNA, 19 nt, Homo sapiens
  misc_RNA (1)...(19): siRNA sense strand
cgacgaggagcucaacaag

SEQ ID NO: 161839 - RNA, 19 nt, Homo sapiens
  misc_RNA (1)...(19): siRNA sense strand
gaggcguccugcccaacau

SEQ ID NO: 161840 - RNA, 19 nt, Homo sapiens
  misc_RNA (1)...(19): siRNA sense strand
aacaagaagacgcgaauca

SEQ ID NO: 161841 - RNA, 19 nt, Homo sapiens
  misc_RNA (1)...(19): siRNA sense strand
gcgcagccauccuggagua

SEQ ID NO: 161842 - RNA, 19 nt, Homo sapiens
  misc_RNA (1)...(19): siRNA sense strand
gaagaaaggacaacagaag

SEQ ID NO: 161843 - RNA, 19 nt, Homo sapiens
  misc_RNA (1)...(19): siRNA sense strand
ggaaaggacuccggaaagg

SEQ ID NO: 161844 - RNA, 19 nt, Homo sapiens
  misc_RNA (1)...(19): siRNA sense strand
ccucgucacuugcaacuug

SEQ ID NO: 161845 - RNA, 19 nt, Homo sapiens
  misc_RNA (1)...(19): siRNA sense strand
ucguggagaugaagaauug

SEQ ID NO: 161846 - RNA, 19 nt, Homo sapiens
  misc_RNA (1)...(19): siRNA sense strand
ggaagaaaggacaacagaa

SEQ ID NO: 161847 - RNA, 19 nt, Homo sapiens
  misc_RNA (1)...(19): siRNA sense strand
gggaagaaaggacaacaga

SEQ ID NO: 161848 - RNA, 19 nt, Homo sapiens
  misc_RNA (1)...(19): siRNA sense strand
ccggaaaggccaagacaaa

SEQ ID NO: 161849 - RNA, 19 nt, Homo sapiens
  misc_RNA (1)...(19): siRNA sense strand
caucaaggcuacaauugcu

SEQ ID NO: 161850 - RNA, 19 nt, Homo sapiens
  misc_RNA (1)...(19): siRNA sense strand
ggagaugaagaauuggauu

SEQ ID NO: 161851 - RNA, 19 nt, Homo sapiens
  misc_RNA (1)...(19): siRNA sense strand
ggaaaggccaagacaaagg

SEQ ID NO: 161852 - RNA, 19 nt, Homo sapiens
  misc_RNA (1)...(19): siRNA sense strand
ccagugggccguauucauc

SEQ ID NO: 161853 - RNA, 19 nt, Homo sapiens
  misc_RNA (1)...(19): siRNA sense strand
ggaaaugcaucaaaagacu

SEQ ID NO: 161854 - RNA, 19 nt, Homo sapiens
  misc_RNA (1)...(19): siRNA sense strand
uacuugaacuggcaggaaa

SEQ ID NO: 161855 - RNA, 19 nt, Homo sapiens
  misc_RNA (1)...(19): siRNA sense strand
gaacuggcaggaaaugcau

SEQ ID NO: 161856 - RNA, 19 nt, Homo sapiens
  misc_RNA (1)...(19): siRNA sense strand
ccgcagagguacuugaacu

SEQ ID NO: 161857 - RNA, 19 nt, Homo sapiens
  misc_RNA (1)...(19): siRNA sense strand
ggcaggaaaugcaucaaaa

SEQ ID NO: 161858 - RNA, 19 nt, Homo sapiens
  misc_RNA (1)...(19): siRNA sense strand
gaaaggacaacagaagacu

SEQ ID NO: 161859 - RNA, 19 nt, Homo sapiens
  misc_RNA (1)...(19): siRNA sense strand
acuuaaagguaaagcguau

SEQ ID NO: 161860 - RNA, 19 nt, Homo sapiens
  misc_RNA (1)...(19): siRNA sense strand
guacuugaacuggcaggaa

SEQ ID NO: 161861 - RNA, 19 nt, Homo sapiens
  misc_RNA (1)...(19): siRNA sense strand
aagaaaggacaacagaaga

SEQ ID NO: 161862 - RNA, 19 nt, Homo sapiens
  misc_RNA (1)...(19): siRNA sense strand
gcgguaaggcuggaaagga

SEQ ID NO: 161863 - RNA, 19 nt, Homo sapiens
  misc_RNA (1)...(19): siRNA sense strand
ccacacauccacaaaucuc

SEQ ID NO: 161864 - RNA, 19 nt, Homo sapiens
  misc_RNA (1)...(19): siRNA sense strand
ucucaucaaggcuacaauu

SEQ ID NO: 161865 - RNA, 19 nt, Homo sapiens
  misc_RNA (1)...(19): siRNA sense strand
guauucaucgacaccuaaa

SEQ ID NO: 161866 - RNA, 19 nt, Homo sapiens
  misc_RNA (1)...(19): siRNA sense strand
aaucuaggacgaccaguca

SEQ ID NO: 161867 - RNA, 19 nt, Homo sapiens
  misc_RNA (1)...(19): siRNA sense strand
cguauucaucgacaccuaa

SEQ ID NO: 161868 - RNA, 19 nt, Homo sapiens
  misc_RNA (1)...(19): siRNA sense strand
uggcaggaaaugcaucaaa

SEQ ID NO: 161869 - RNA, 19 nt, Homo sapiens
  misc_RNA (1)...(19): siRNA sense strand
ccguauucaucgacaccua

SEQ ID NO: 161870 - RNA, 19 nt, Homo sapiens
  misc_RNA (1)...(19): siRNA sense strand
uuccacacauccacaaauc

SEQ ID NO: 161871 - RNA, 19 nt, Homo sapiens
  misc_RNA (1)...(19): siRNA sense strand
ggaagcaacuggcuacaaa

SEQ ID NO: 161872 - RNA, 19 nt, Homo sapiens
  misc_RNA (1)...(19): siRNA sense strand
gaagaaaccucaucguuac

SEQ ID NO: 161873 - RNA, 19 nt, Homo sapiens
  misc_RNA (1)...(19): siRNA sense strand
ugaagaaaccucaucguua

SEQ ID NO: 161874 - RNA, 19 nt, Homo sapiens
  misc_RNA (1)...(19): siRNA sense strand
gcaaaucgaccggugguaa

SEQ ID NO: 161875 - RNA, 19 nt, Homo sapiens
  misc_RNA (1)...(19): siRNA sense strand
gccaaacguguaacaauua

SEQ ID NO: 161876 - RNA, 19 nt, Homo sapiens
  misc_RNA (1)...(19): siRNA sense strand
ccacugaacuucugauucg

SEQ ID NO: 161877 - RNA, 19 nt, Homo sapiens
  misc_RNA (1)...(19): siRNA sense strand
ccaaacguguaacaauuau

SEQ ID NO: 161878 - RNA, 19 nt, Homo sapiens
  misc_RNA (1)...(19): siRNA sense strand
ugccaaacguguaacaauu

SEQ ID NO: 161879 - RNA, 19 nt, Homo sapiens
  misc_RNA (1)...(19): siRNA sense strand
gcgcagcuaucggugcuuu

SEQ ID NO: 161880 - RNA, 19 nt, Homo sapiens
  misc_RNA (1)...(19): siRNA sense strand
caaaucgaccggugguaaa

SEQ ID NO: 161881 - RNA, 19 nt, Homo sapiens
  misc_RNA (1)...(19): siRNA sense strand
gugaagaaaccucaucguu

SEQ ID NO: 161882 - RNA, 19 nt, Homo sapiens
  misc_RNA (1)...(19): siRNA sense strand
aaacagaucugcgcuucca

SEQ ID NO: 161883 - RNA, 19 nt, Homo sapiens
  misc_RNA (1)...(19): siRNA sense strand
guguaacaauuaugccaaa

SEQ ID NO: 161884 - RNA, 19 nt, Homo sapiens
  misc_RNA (1)...(19): siRNA sense strand
ccagcuagcacgccgcaua

SEQ ID NO: 161885 - RNA, 19 nt, Homo sapiens
  misc_RNA (1)...(19): siRNA sense strand
aaauugcucaggacuuuaa

SEQ ID NO: 161886 - RNA, 19 nt, Homo sapiens
  misc_RNA (1)...(19): siRNA sense strand
gaacuucugauucgcaaac

SEQ ID NO: 161887 - RNA, 19 nt, Homo sapiens
  misc_RNA (1)...(19): siRNA sense strand
caaccugugugcuauccau

SEQ ID NO: 161888 - RNA, 19 nt, Homo sapiens
  misc_RNA (1)...(19): siRNA sense strand
guaaagcacccaggaagca

SEQ ID NO: 161889 - RNA, 19 nt, Homo sapiens
  misc_RNA (1)...(19): siRNA sense strand
guggcgcuccgugaaauua

SEQ ID NO: 161890 - RNA, 19 nt, Homo sapiens
  misc_RNA (1)...(19): siRNA sense strand
gcucaggacuuuaaaacag

SEQ ID NO: 161891 - RNA, 19 nt, Homo sapiens
  misc_RNA (1)...(19): siRNA sense strand
ggcgcuccgugaaauuaga

SEQ ID NO: 161892 - RNA, 19 nt, Homo sapiens
  misc_RNA (1)...(19): siRNA sense strand
aaacguguaacaauuaugc

SEQ ID NO: 161893 - RNA, 19 nt, Homo sapiens
  misc_RNA (1)...(19): siRNA sense strand
ggucauagauagcaucaua

SEQ ID NO: 161894 - RNA, 19 nt, Homo sapiens
  misc_RNA (1)...(19): siRNA sense strand
ggaaguagcugcuccauac

SEQ ID NO: 161895 - RNA, 19 nt, Homo sapiens
  misc_RNA (1)...(19): siRNA sense strand
gaacaucauuaccacagaa

SEQ ID NO: 161896 - RNA, 19 nt, Homo sapiens
  misc_RNA (1)...(19): siRNA sense strand
gcagaagguuugggaagua

SEQ ID NO: 161897 - RNA, 19 nt, Homo sapiens
  misc_RNA (1)...(19): siRNA sense strand
cagaaggaguuuaucuaua

SEQ ID NO: 161898 - RNA, 19 nt, Homo sapiens
  misc_RNA (1)...(19): siRNA sense strand
cagcagcccuuguuucuga

SEQ ID NO: 161899 - RNA, 19 nt, Homo sapiens
  misc_RNA (1)...(19): siRNA sense strand
gaacuguaauuccuaucaa

SEQ ID NO: 161900 - RNA, 19 nt, Homo sapiens
  misc_RNA (1)...(19): siRNA sense strand
gaaauuugccagaacugua

SEQ ID NO: 161901 - RNA, 19 nt, Homo sapiens
  misc_RNA (1)...(19): siRNA sense strand
gcuagaagcccauggauug

SEQ ID NO: 161902 - RNA, 19 nt, Homo sapiens
  misc_RNA (1)...(19): siRNA sense strand
gaacagcgcaacagauaau

SEQ ID NO: 161903 - RNA, 19 nt, Homo sapiens
  misc_RNA (1)...(19): siRNA sense strand
ccaaagcccuagacuacuu

SEQ ID NO: 161904 - RNA, 19 nt, Homo sapiens
  misc_RNA (1)...(19): siRNA sense strand
gauaaaagaucgcuucaug

SEQ ID NO: 161905 - RNA, 19 nt, Homo sapiens
  misc_RNA (1)...(19): siRNA sense strand
ggcgcuauaucaagaauaa

SEQ ID NO: 161906 - RNA, 19 nt, Homo sapiens
  misc_RNA (1)...(19): siRNA sense strand
caauagcauuugugaagaa

SEQ ID NO: 161907 - RNA, 19 nt, Homo sapiens
  misc_RNA (1)...(19): siRNA sense strand
ccagggaggucauagauag

SEQ ID NO: 161908 - RNA, 19 nt, Homo sapiens
  misc_RNA (1)...(19): siRNA sense strand
agaaggaguuuaucuauac

SEQ ID NO: 161909 - RNA, 19 nt, Homo sapiens
  misc_RNA (1)...(19): siRNA sense strand
gaucaccacccaucagaaa

SEQ ID NO: 161910 - RNA, 19 nt, Homo sapiens
  misc_RNA (1)...(19): siRNA sense strand
ggauugaaaccaguuauuu

SEQ ID NO: 161911 - RNA, 19 nt, Homo sapiens
  misc_RNA (1)...(19): siRNA sense strand
gaguuuaucuauacagcaa

SEQ ID NO: 161912 - RNA, 19 nt, Homo sapiens
  misc_RNA (1)...(19): siRNA sense strand
gagaagagggugcagaaau

SEQ ID NO: 161913 - RNA, 19 nt, Homo sapiens
  misc_RNA (1)...(19): siRNA sense strand
cggaggaucuggucaacuu

SEQ ID NO: 161914 - RNA, 19 nt, Homo sapiens
  misc_RNA (1)...(19): siRNA sense strand
gcacaagaaauccaccaaa

SEQ ID NO: 161915 - RNA, 19 nt, Homo sapiens
  misc_RNA (1)...(19): siRNA sense strand
ccuauggucuuugccaaua

SEQ ID NO: 161916 - RNA, 19 nt, Homo sapiens
  misc_RNA (1)...(19): siRNA sense strand
gugaggcgcuauaucaaga

SEQ ID NO: 161917 - RNA, 19 nt, Homo sapiens
  misc_RNA (1)...(19): siRNA sense strand
aaacuuccauggugaauac

SEQ ID NO: 161918 - RNA, 19 nt, Homo sapiens
  misc_RNA (1)...(19): siRNA sense strand
gaaggaguuuaucuauaca

SEQ ID NO: 161919 - RNA, 19 nt, Homo sapiens
  misc_RNA (1)...(19): siRNA sense strand
agaauaagcccgacaaugg

SEQ ID NO: 161920 - RNA, 19 nt, Homo sapiens
  misc_RNA (1)...(19): siRNA sense strand
agaagagggugcagaaauc

SEQ ID NO: 161921 - RNA, 19 nt, Homo sapiens
  misc_RNA (1)...(19): siRNA sense strand
caaacaagucauagaaaug

SEQ ID NO: 161922 - RNA, 19 nt, Homo sapiens
  misc_RNA (1)...(19): siRNA sense strand
ccagaacuguaauuccuau

SEQ ID NO: 161923 - RNA, 19 nt, Homo sapiens
  misc_RNA (1)...(19): siRNA sense strand
gaaacuuccauggugaaua

SEQ ID NO: 161924 - RNA, 19 nt, Homo sapiens
  misc_RNA (1)...(19): siRNA sense strand
uguggugaaugauacaaua

SEQ ID NO: 161925 - RNA, 19 nt, Homo sapiens
  misc_RNA (1)...(19): siRNA sense strand
uuaguacgcucacauucuu

SEQ ID NO: 161926 - RNA, 19 nt, Homo sapiens
  misc_RNA (1)...(19): siRNA sense strand
guuguaaggcccuggauaa

SEQ ID NO: 161927 - RNA, 19 nt, Homo sapiens
  misc_RNA (1)...(19): siRNA sense strand
ucaccacccaucagaaaua

SEQ ID NO: 161928 - RNA, 19 nt, Homo sapiens
  misc_RNA (1)...(19): siRNA sense strand
uggcugggcugaugcuaaa

SEQ ID NO: 161929 - RNA, 19 nt, Homo sapiens
  misc_RNA (1)...(19): siRNA sense strand
caaaggauacaguggcauu

SEQ ID NO: 161930 - RNA, 19 nt, Homo sapiens
  misc_RNA (1)...(19): siRNA sense strand
cggaugcucuuggcuuuaa

SEQ ID NO: 161931 - RNA, 19 nt, Homo sapiens
  misc_RNA (1)...(19): siRNA sense strand
ccagaaggaguuuaucuau

SEQ ID NO: 161932 - RNA, 19 nt, Homo sapiens
  misc_RNA (1)...(19): siRNA sense strand
gggaaagggacgcuacaaa

SEQ ID NO: 161933 - RNA, 19 nt, Homo sapiens
  misc_RNA (1)...(19): siRNA sense strand
uacaggagcuucaggucaa

SEQ ID NO: 161934 - RNA, 19 nt, Homo sapiens
  misc_RNA (1)...(19): siRNA sense strand
ggaaagggacgcuacaaaa

SEQ ID NO: 161935 - RNA, 19 nt, Homo sapiens
  misc_RNA (1)...(19): siRNA sense strand
gaaauccagggaggucaua

SEQ ID NO: 161936 - RNA, 19 nt, Homo sapiens
  misc_RNA (1)...(19): siRNA sense strand
cugaacagcgcaacagaua

SEQ ID NO: 161937 - RNA, 19 nt, Homo sapiens
  misc_RNA (1)...(19): siRNA sense strand
gaucaaugucuuagccaaa

SEQ ID NO: 161938 - RNA, 19 nt, Homo sapiens
  misc_RNA (1)...(19): siRNA sense strand
gcaaucagugagagaagaa

SEQ ID NO: 161939 - RNA, 19 nt, Homo sapiens
  misc_RNA (1)...(19): siRNA sense strand
gaauaagcccgacaauggu

SEQ ID NO: 161940 - RNA, 19 nt, Homo sapiens
  misc_RNA (1)...(19): siRNA sense strand
agaagcccauggauugaaa

SEQ ID NO: 161941 - RNA, 19 nt, Homo sapiens
  misc_RNA (1)...(19): siRNA sense strand
caacagauaauccuauggu

SEQ ID NO: 161942 - RNA, 19 nt, Homo sapiens
  misc_RNA (1)...(19): siRNA sense strand
uggcagcccugacccuuga

SEQ ID NO: 161943 - RNA, 19 nt, Homo sapiens
  misc_RNA (1)...(19): siRNA sense strand
acaguuguuuacgguauua

SEQ ID NO: 161944 - RNA, 19 nt, Homo sapiens
  misc_RNA (1)...(19): siRNA sense strand
ugccaucccucgucuguug

SEQ ID NO: 161945 - RNA, 19 nt, Homo sapiens
  misc_RNA (1)...(19): siRNA sense strand
ccucaaacaagucauagaa

SEQ ID NO: 161946 - RNA, 19 nt, Homo sapiens
  misc_RNA (1)...(19): siRNA sense strand
aaaaguacaucgaguuaga

SEQ ID NO: 161947 - RNA, 19 nt, Homo sapiens
  misc_RNA (1)...(19): siRNA sense strand
cagauaauccuauggucuu

SEQ ID NO: 161948 - RNA, 19 nt, Homo sapiens
  misc_RNA (1)...(19): siRNA sense strand
ugaaguugcuuuucgguuu

SEQ ID NO: 161949 - RNA, 19 nt, Homo sapiens
  misc_RNA (1)...(19): siRNA sense strand
guagagcgagccagugcua

SEQ ID NO: 161950 - RNA, 19 nt, Homo sapiens
  misc_RNA (1)...(19): siRNA sense strand
gcugggcugaugcuaaaua

SEQ ID NO: 161951 - RNA, 19 nt, Homo sapiens
  misc_RNA (1)...(19): siRNA sense strand
aaauuugccagaacuguaa

SEQ ID NO: 161952 - RNA, 19 nt, Homo sapiens
  misc_RNA (1)...(19): siRNA sense strand
uagcagagagucacagguu

SEQ ID NO: 161953 - RNA, 19 nt, Homo sapiens
  misc_RNA (1)...(19): siRNA sense strand
gaaagggacgcuacaaaau

SEQ ID NO: 161954 - RNA, 19 nt, Homo sapiens
  misc_RNA (1)...(19): siRNA sense strand
gggaaguagcugcuccaua

SEQ ID NO: 161955 - RNA, 19 nt, Homo sapiens
  misc_RNA (1)...(19): siRNA sense strand
gaacugaacagcgcaacag

SEQ ID NO: 161956 - RNA, 19 nt, Homo sapiens
  misc_RNA (1)...(19): siRNA sense strand
ggugaaugauacaauagca

SEQ ID NO: 161957 - RNA, 19 nt, Homo sapiens
  misc_RNA (1)...(19): siRNA sense strand
ggagcuucaggucaacuua

SEQ ID NO: 161958 - RNA, 19 nt, Homo sapiens
  misc_RNA (1)...(19): siRNA sense strand
gauguggucuccgaagagu

SEQ ID NO: 161959 - RNA, 19 nt, Homo sapiens
  misc_RNA (1)...(19): siRNA sense strand
cacaagaaauccaccaaaa

SEQ ID NO: 161960 - RNA, 19 nt, Homo sapiens
  misc_RNA (1)...(19): siRNA sense strand
guaaggcccuggauaaaag

SEQ ID NO: 161961 - RNA, 19 nt, Homo sapiens
  misc_RNA (1)...(19): siRNA sense strand
gaaauagcagagagucaca

SEQ ID NO: 161962 - RNA, 19 nt, Homo sapiens
  misc_RNA (1)...(19): siRNA sense strand
gagcgagccagugcuauug

SEQ ID NO: 161963 - RNA, 19 nt, Homo sapiens
  misc_RNA (1)...(19): siRNA sense strand
ugccaugucuccugacuuc

SEQ ID NO: 161964 - RNA, 19 nt, Homo sapiens
  misc_RNA (1)...(19): siRNA sense strand
gucggaugcucuuggcuuu

SEQ ID NO: 161965 - RNA, 19 nt, Homo sapiens
  misc_RNA (1)...(19): siRNA sense strand
ggagucugaggaccuuuaa

SEQ ID NO: 161966 - RNA, 19 nt, Homo sapiens
  misc_RNA (1)...(19): siRNA sense strand
cuggugcgcucuguuguaa

SEQ ID NO: 161967 - RNA, 19 nt, Homo sapiens
  misc_RNA (1)...(19): siRNA sense strand
gaggaugggcagcaaggaa

SEQ ID NO: 161968 - RNA, 19 nt, Homo sapiens
  misc_RNA (1)...(19): siRNA sense strand
caugucuccugacuucauu

SEQ ID NO: 161969 - RNA, 19 nt, Homo sapiens
  misc_RNA (1)...(19): siRNA sense strand
ugacauucaugcucuucga

SEQ ID NO: 161970 - RNA, 19 nt, Homo sapiens
  misc_RNA (1)...(19): siRNA sense strand
aauacagaauggagcauau

SEQ ID NO: 161971 - RNA, 19 nt, Homo sapiens
  misc_RNA (1)...(19): siRNA sense strand
gcugcuccauacauugaaa

SEQ ID NO: 161972 - RNA, 19 nt, Homo sapiens
  misc_RNA (1)...(19): siRNA sense strand
gcaaucccucccucaguga

SEQ ID NO: 161973 - RNA, 19 nt, Homo sapiens
  misc_RNA (1)...(19): siRNA sense strand
uccaugguguggugaauga

SEQ ID NO: 161974 - RNA, 19 nt, Homo sapiens
  misc_RNA (1)...(19): siRNA sense strand
ggaaauuugccagaacugu

SEQ ID NO: 161975 - RNA, 19 nt, Homo sapiens
  misc_RNA (1)...(19): siRNA sense strand
gugaagaacaucauuacca

SEQ ID NO: 161976 - RNA, 19 nt, Homo sapiens
  misc_RNA (1)...(19): siRNA sense strand
gccgugaggcgcuauauca

SEQ ID NO: 161977 - RNA, 19 nt, Homo sapiens
  misc_RNA (1)...(19): siRNA sense strand
aaagggacgcuacaaaaua

SEQ ID NO: 161978 - RNA, 19 nt, Homo sapiens
  misc_RNA (1)...(19): siRNA sense strand
ugacuucauuccaucucaa

SEQ ID NO: 161979 - RNA, 19 nt, Homo sapiens
  misc_RNA (1)...(19): siRNA sense strand
ggaugacgcgcacuuccuu

SEQ ID NO: 161980 - RNA, 19 nt, Homo sapiens
  misc_RNA (1)...(19): siRNA sense strand
gcgcaacagauaauccuau

SEQ ID NO: 161981 - RNA, 19 nt, Homo sapiens
  misc_RNA (1)...(19): siRNA sense strand
uagcauuugugaagaacau

SEQ ID NO: 161982 - RNA, 19 nt, Homo sapiens
  misc_RNA (1)...(19): siRNA sense strand
cauuccaucucaaccagaa

SEQ ID NO: 161983 - RNA, 19 nt, Homo sapiens
  misc_RNA (1)...(19): siRNA sense strand
aagaguggcugggcugaug

SEQ ID NO: 161984 - RNA, 19 nt, Homo sapiens
  misc_RNA (1)...(19): siRNA sense strand
ccuccugccugcccuaugu

SEQ ID NO: 161985 - RNA, 19 nt, Homo sapiens
  misc_RNA (1)...(19): siRNA sense strand
gacccucaaacaagucaua

SEQ ID NO: 161986 - RNA, 19 nt, Homo sapiens
  misc_RNA (1)...(19): siRNA sense strand
caacuuaguacgcucacau

SEQ ID NO: 161987 - RNA, 19 nt, Homo sapiens
  misc_RNA (1)...(19): siRNA sense strand
aguagcugcuccauacauu

SEQ ID NO: 161988 - RNA, 19 nt, Homo sapiens
  misc_RNA (1)...(19): siRNA sense strand
gaggcgcuauaucaagaau

SEQ ID NO: 161989 - RNA, 19 nt, Homo sapiens
  misc_RNA (1)...(19): siRNA sense strand
uggagacccucaaacaagu

SEQ ID NO: 161990 - RNA, 19 nt, Homo sapiens
  misc_RNA (1)...(19): siRNA sense strand
ucacauucuucagguguug

SEQ ID NO: 161991 - RNA, 19 nt, Homo sapiens
  misc_RNA (1)...(19): siRNA sense strand
uagcugcuccauacauuga

SEQ ID NO: 161992 - RNA, 19 nt, Homo sapiens
  misc_RNA (1)...(19): siRNA sense strand
caagaaauccaccaaaauc

SEQ ID NO: 161993 - RNA, 19 nt, Homo sapiens
  misc_RNA (1)...(19): siRNA sense strand
ggaaugcgaugucuccuua

SEQ ID NO: 161994 - RNA, 19 nt, Homo sapiens
  misc_RNA (1)...(19): siRNA sense strand
gcaguugacucgugucuga

SEQ ID NO: 161995 - RNA, 19 nt, Homo sapiens
  misc_RNA (1)...(19): siRNA sense strand
gacaggagcacccucauuu

SEQ ID NO: 161996 - RNA, 19 nt, Homo sapiens
  misc_RNA (1)...(19): siRNA sense strand
ccacauccuuuuacauuua

SEQ ID NO: 161997 - RNA, 19 nt, Homo sapiens
  misc_RNA (1)...(19): siRNA sense strand
gggaagaaacccugaguug

SEQ ID NO: 161998 - RNA, 19 nt, Homo sapiens
  misc_RNA (1)...(19): siRNA sense strand
gggcacagcuacagcagau

SEQ ID NO: 161999 - RNA, 19 nt, Homo sapiens
  misc_RNA (1)...(19): siRNA sense strand
gaagaaacccugaguugcu

SEQ ID NO: 162000 - RNA, 19 nt, Homo sapiens
  misc_RNA (1)...(19): siRNA sense strand
gaccagugcugaccaccuu

SEQ ID NO: 162001 - RNA, 19 nt, Homo sapiens
  misc_RNA (1)...(19): siRNA sense strand
gcaacaaacacuccagguu

SEQ ID NO: 162002 - RNA, 19 nt, Homo sapiens
  misc_RNA (1)...(19): siRNA sense strand
gccagcagcucuuugacuu

SEQ ID NO: 162003 - RNA, 19 nt, Homo sapiens
  misc_RNA (1)...(19): siRNA sense strand
cagcagcucuuugacuuug

SEQ ID NO: 162004 - RNA, 19 nt, Homo sapiens
  misc_RNA (1)...(19): siRNA sense strand
agaccaaguuccucucuga

SEQ ID NO: 162005 - RNA, 19 nt, Homo sapiens
  misc_RNA (1)...(19): siRNA sense strand
ggacaggagcacccucauu

SEQ ID NO: 162006 - RNA, 19 nt, Homo sapiens
  misc_RNA (1)...(19): siRNA sense strand
gaccaugagucccugaauc

SEQ ID NO: 162007 - RNA, 19 nt, Homo sapiens
  misc_RNA (1)...(19): siRNA sense strand
cagcuucucuuucccuugu

SEQ ID NO: 162008 - RNA, 19 nt, Homo sapiens
  misc_RNA (1)...(19): siRNA sense strand
gggccaagaugucgugagu

SEQ ID NO: 162009 - RNA, 19 nt, Homo sapiens
  misc_RNA (1)...(19): siRNA sense strand
ucacguuccugcagucaga

SEQ ID NO: 162010 - RNA, 19 nt, Homo sapiens
  misc_RNA (1)...(19): siRNA sense strand
gccaagaugucgugagucu

SEQ ID NO: 162011 - RNA, 19 nt, Homo sapiens
  misc_RNA (1)...(19): siRNA sense strand
caagaugucgugagucugu

SEQ ID NO: 162012 - RNA, 19 nt, Homo sapiens
  misc_RNA (1)...(19): siRNA sense strand
uggcagugcuggacgaaga

SEQ ID NO: 162013 - RNA, 19 nt, Homo sapiens
  misc_RNA (1)...(19): siRNA sense strand
gcacugagcaaggagacuu

SEQ ID NO: 162014 - RNA, 19 nt, Homo sapiens
  misc_RNA (1)...(19): siRNA sense strand
cgagauaggccucauuguc

SEQ ID NO: 162015 - RNA, 19 nt, Homo sapiens
  misc_RNA (1)...(19): siRNA sense strand
gacaggcaguggagcugaa

SEQ ID NO: 162016 - RNA, 19 nt, Homo sapiens
  misc_RNA (1)...(19): siRNA sense strand
caaacagggucugcagcuu

SEQ ID NO: 162017 - RNA, 19 nt, Homo sapiens
  misc_RNA (1)...(19): siRNA sense strand
gcagcauccuccuggaaca

SEQ ID NO: 162018 - RNA, 19 nt, Homo sapiens
  misc_RNA (1)...(19): siRNA sense strand
ccagcgagaucuacuccau

SEQ ID NO: 162019 - RNA, 19 nt, Homo sapiens
  misc_RNA (1)...(19): siRNA sense strand
gaggauggguccggcaaag

SEQ ID NO: 162020 - RNA, 19 nt, Homo sapiens
  misc_RNA (1)...(19): siRNA sense strand
gaacuggaccaaggguuuc

SEQ ID NO: 162021 - RNA, 19 nt, Homo sapiens
  misc_RNA (1)...(19): siRNA sense strand
ggucaggccgugugagguu

SEQ ID NO: 162022 - RNA, 19 nt, Homo sapiens
  misc_RNA (1)...(19): siRNA sense strand
ggagaucguccgccacauc

SEQ ID NO: 162023 - RNA, 19 nt, Homo sapiens
  misc_RNA (1)...(19): siRNA sense strand
gcucagcacccgcuuugau

SEQ ID NO: 162024 - RNA, 19 nt, Homo sapiens
  misc_RNA (1)...(19): siRNA sense strand
ugaacuggaccaaggguuu

SEQ ID NO: 162025 - RNA, 19 nt, Homo sapiens
  misc_RNA (1)...(19): siRNA sense strand
gcccagaagccaggaguuu

SEQ ID NO: 162026 - RNA, 19 nt, Homo sapiens
  misc_RNA (1)...(19): siRNA sense strand
gcagagguuugaaaagaug

SEQ ID NO: 162027 - RNA, 19 nt, Homo sapiens
  misc_RNA (1)...(19): siRNA sense strand
caugauguccuguggcuau

SEQ ID NO: 162028 - RNA, 19 nt, Homo sapiens
  misc_RNA (1)...(19): siRNA sense strand
uccggaugcugccuacaua

SEQ ID NO: 162029 - RNA, 19 nt, Homo sapiens
  misc_RNA (1)...(19): siRNA sense strand
caccaacgcguguuacaug

SEQ ID NO: 162030 - RNA, 19 nt, Homo sapiens
  misc_RNA (1)...(19): siRNA sense strand
ggauggaacgcucuacaag

SEQ ID NO: 162031 - RNA, 19 nt, Homo sapiens
  misc_RNA (1)...(19): siRNA sense strand
uagcugccgugguggagaa

SEQ ID NO: 162032 - RNA, 19 nt, Homo sapiens
  misc_RNA (1)...(19): siRNA sense strand
gcagcucuuugaccacauc

SEQ ID NO: 162033 - RNA, 19 nt, Homo sapiens
  misc_RNA (1)...(19): siRNA sense strand
gcaagcagagguuugaaaa

SEQ ID NO: 162034 - RNA, 19 nt, Homo sapiens
  misc_RNA (1)...(19): siRNA sense strand
ccagaagccaggaguuugu

SEQ ID NO: 162035 - RNA, 19 nt, Homo sapiens
  misc_RNA (1)...(19): siRNA sense strand
accauacccuggaccauga

SEQ ID NO: 162036 - RNA, 19 nt, Homo sapiens
  misc_RNA (1)...(19): siRNA sense strand
caccaaugccugcuacaug

SEQ ID NO: 162037 - RNA, 19 nt, Homo sapiens
  misc_RNA (1)...(19): siRNA sense strand
gcagguccgagccauccua

SEQ ID NO: 162038 - RNA, 19 nt, Homo sapiens
  misc_RNA (1)...(19): siRNA sense strand
ggcaagcagagguuugaaa

SEQ ID NO: 162039 - RNA, 19 nt, Homo sapiens
  misc_RNA (1)...(19): siRNA sense strand
uaggugcagugguguggaa

SEQ ID NO: 162040 - RNA, 19 nt, Homo sapiens
  misc_RNA (1)...(19): siRNA sense strand
gaucguccgccacauccuu

SEQ ID NO: 162041 - RNA, 19 nt, Homo sapiens
  misc_RNA (1)...(19): siRNA sense strand
gaugaucagcggcauguac

SEQ ID NO: 162042 - RNA, 19 nt, Homo sapiens
  misc_RNA (1)...(19): siRNA sense strand
aagcagagguuugaaaaga

SEQ ID NO: 162043 - RNA, 19 nt, Homo sapiens
  misc_RNA (1)...(19): siRNA sense strand
gcacagccgggagcaacaa

SEQ ID NO: 162044 - RNA, 19 nt, Homo sapiens
  misc_RNA (1)...(19): siRNA sense strand
ucagagguuugagaagaug

SEQ ID NO: 162045 - RNA, 19 nt, Homo sapiens
  misc_RNA (1)...(19): siRNA sense strand
ggaacacguggcugagaug

SEQ ID NO: 162046 - RNA, 19 nt, Homo sapiens
  misc_RNA (1)...(19): siRNA sense strand
gacucuaacuggcauugag

SEQ ID NO: 162047 - RNA, 19 nt, Homo sapiens
  misc_RNA (1)...(19): siRNA sense strand
ggacuccauugggucuuca

SEQ ID NO: 162048 - RNA, 19 nt, Homo sapiens
  misc_RNA (1)...(19): siRNA sense strand
cuucggauguugagcuugu

SEQ ID NO: 162049 - RNA, 19 nt, Homo sapiens
  misc_RNA (1)...(19): siRNA sense strand
gaugaucggaggccuguac

SEQ ID NO: 162050 - RNA, 19 nt, Homo sapiens
  misc_RNA (1)...(19): siRNA sense strand
ggauggguccggcaaaggu

SEQ ID NO: 162051 - RNA, 19 nt, Homo sapiens
  misc_RNA (1)...(19): siRNA sense strand
gaccagggacaucuucaag

SEQ ID NO: 162052 - RNA, 19 nt, Homo sapiens
  misc_RNA (1)...(19): siRNA sense strand
agcgagaucuacuccauuc

SEQ ID NO: 162053 - RNA, 19 nt, Homo sapiens
  misc_RNA (1)...(19): siRNA sense strand
aaugcgaugucuccuuaau

SEQ ID NO: 162054 - RNA, 19 nt, Homo sapiens
  misc_RNA (1)...(19): siRNA sense strand
uggaacacguggcugagau

SEQ ID NO: 162055 - RNA, 19 nt, Homo sapiens
  misc_RNA (1)...(19): siRNA sense strand
cuacaacaucgacgugguu

SEQ ID NO: 162056 - RNA, 19 nt, Homo sapiens
  misc_RNA (1)...(19): siRNA sense strand
gguccgagccauccuagag

SEQ ID NO: 162057 - RNA, 19 nt, Homo sapiens
  misc_RNA (1)...(19): siRNA sense strand
gaagccaggaguuugugau

SEQ ID NO: 162058 - RNA, 19 nt, Homo sapiens
  misc_RNA (1)...(19): siRNA sense strand
gaaugcgaugucuccuuaa

SEQ ID NO: 162059 - RNA, 19 nt, Homo sapiens
  misc_RNA (1)...(19): siRNA sense strand
gcaccaacgcguguuacau

SEQ ID NO: 162060 - RNA, 19 nt, Homo sapiens
  misc_RNA (1)...(19): siRNA sense strand
ggugacaagggcacagcua

SEQ ID NO: 162061 - RNA, 19 nt, Homo sapiens
  misc_RNA (1)...(19): siRNA sense strand
gcaccaaugccugcuacau

SEQ ID NO: 162062 - RNA, 19 nt, Homo sapiens
  misc_RNA (1)...(19): siRNA sense strand
ccacaggcgugcagaucac

SEQ ID NO: 162063 - RNA, 19 nt, Homo sapiens
  misc_RNA (1)...(19): siRNA sense strand
cccacugccugucugaguu

SEQ ID NO: 162064 - RNA, 19 nt, Homo sapiens
  misc_RNA (1)...(19): siRNA sense strand
gauguccuguggcuaugag

SEQ ID NO: 162065 - RNA, 19 nt, Homo sapiens
  misc_RNA (1)...(19): siRNA sense strand
ggacugcaucguggacuuc

SEQ ID NO: 162066 - RNA, 19 nt, Homo sapiens
  misc_RNA (1)...(19): siRNA sense strand
ccagcagcucuuugacuuu

SEQ ID NO: 162067 - RNA, 19 nt, Homo sapiens
  misc_RNA (1)...(19): siRNA sense strand
gagguugggcuaguuguag

SEQ ID NO: 162068 - RNA, 19 nt, Homo sapiens
  misc_RNA (1)...(19): siRNA sense strand
cugaccaccuucgaccaua

SEQ ID NO: 162069 - RNA, 19 nt, Homo sapiens
  misc_RNA (1)...(19): siRNA sense strand
uaaccagccuuggcguucu

SEQ ID NO: 162070 - RNA, 19 nt, Homo sapiens
  misc_RNA (1)...(19): siRNA sense strand
ugagguugggcuaguugua

SEQ ID NO: 162071 - RNA, 19 nt, Homo sapiens
  misc_RNA (1)...(19): siRNA sense strand
gccacauccuuuuacauuu

SEQ ID NO: 162072 - RNA, 19 nt, Homo sapiens
  misc_RNA (1)...(19): siRNA sense strand
acauggcacugagcaagga

SEQ ID NO: 162073 - RNA, 19 nt, Homo sapiens
  misc_RNA (1)...(19): siRNA sense strand
agaaaugacuccugaacuu

SEQ ID NO: 162074 - RNA, 19 nt, Homo sapiens
  misc_RNA (1)...(19): siRNA sense strand
gcuaagggcucagaaagga

SEQ ID NO: 162075 - RNA, 19 nt, Homo sapiens
  misc_RNA (1)...(19): siRNA sense strand
gcacagacucuccagaaga

SEQ ID NO: 162076 - RNA, 19 nt, Homo sapiens
  misc_RNA (1)...(19): siRNA sense strand
aggcaaaggcugacuguua

SEQ ID NO: 162077 - RNA, 19 nt, Homo sapiens
  misc_RNA (1)...(19): siRNA sense strand
gaaaugacuccugaacuug

SEQ ID NO: 162078 - RNA, 19 nt, Homo sapiens
  misc_RNA (1)...(19): siRNA sense strand
ggaggaguauguacguuuc

SEQ ID NO: 162079 - RNA, 19 nt, Homo sapiens
  misc_RNA (1)...(19): siRNA sense strand
gcucagaaaggauauguga

SEQ ID NO: 162080 - RNA, 19 nt, Homo sapiens
  misc_RNA (1)...(19): siRNA sense strand
aaccagaggugacagugua

SEQ ID NO: 162081 - RNA, 19 nt, Homo sapiens
  misc_RNA (1)...(19): siRNA sense strand
gaauggagacuggaccuuu

SEQ ID NO: 162082 - RNA, 19 nt, Homo sapiens
  misc_RNA (1)...(19): siRNA sense strand
ggaaucgucauccagcuaa

SEQ ID NO: 162083 - RNA, 19 nt, Homo sapiens
  misc_RNA (1)...(19): siRNA sense strand
ggcaaaggcugacuguuac

SEQ ID NO: 162084 - RNA, 19 nt, Homo sapiens
  misc_RNA (1)...(19): siRNA sense strand
ggagagagcuggggucaug

SEQ ID NO: 162085 - RNA, 19 nt, Homo sapiens
  misc_RNA (1)...(19): siRNA sense strand
ucaagugguuccugaaugg

SEQ ID NO: 162086 - RNA, 19 nt, Homo sapiens
  misc_RNA (1)...(19): siRNA sense strand
uaagggcucagaaaggaua

SEQ ID NO: 162087 - RNA, 19 nt, Homo sapiens
  misc_RNA (1)...(19): siRNA sense strand
guauguacguuucgacagu

SEQ ID NO: 162088 - RNA, 19 nt, Homo sapiens
  misc_RNA (1)...(19): siRNA sense strand
ccacuggcccuaucaggaa

SEQ ID NO: 162089 - RNA, 19 nt, Homo sapiens
  misc_RNA (1)...(19): siRNA sense strand
ggugguggcucugcuagug

SEQ ID NO: 162090 - RNA, 19 nt, Homo sapiens
  misc_RNA (1)...(19): siRNA sense strand
cagaaaaggugcaguuugu

SEQ ID NO: 162091 - RNA, 19 nt, Homo sapiens
  misc_RNA (1)...(19): siRNA sense strand
uaacuuggaggaguaugua

SEQ ID NO: 162092 - RNA, 19 nt, Homo sapiens
  misc_RNA (1)...(19): siRNA sense strand
gaucaagugguuccugaau

SEQ ID NO: 162093 - RNA, 19 nt, Homo sapiens
  misc_RNA (1)...(19): siRNA sense strand
cugcugcacugcucuguga

SEQ ID NO: 162094 - RNA, 19 nt, Homo sapiens
  misc_RNA (1)...(19): siRNA sense strand
acaccugccuugucgauca

SEQ ID NO: 162095 - RNA, 19 nt, Homo sapiens
  misc_RNA (1)...(19): siRNA sense strand
agacuguggugaugcuaga

SEQ ID NO: 162096 - RNA, 19 nt, Homo sapiens
  misc_RNA (1)...(19): siRNA sense strand
gcucugcuagugaaucuga

SEQ ID NO: 162097 - RNA, 19 nt, Homo sapiens
  misc_RNA (1)...(19): siRNA sense strand
gagcagacaggccguggau

SEQ ID NO: 162098 - RNA, 19 nt, Homo sapiens
  misc_RNA (1)...(19): siRNA sense strand
gggaaucgucauccagcua

SEQ ID NO: 162099 - RNA, 19 nt, Homo sapiens
  misc_RNA (1)...(19): siRNA sense strand
gaacuuggacaugucuaca

SEQ ID NO: 162100 - RNA, 19 nt, Homo sapiens
  misc_RNA (1)...(19): siRNA sense strand
auaucaagaucaagugguu

SEQ ID NO: 162101 - RNA, 19 nt, Homo sapiens
  misc_RNA (1)...(19): siRNA sense strand
ggacagaaaaggugcaguu

SEQ ID NO: 162102 - RNA, 19 nt, Homo sapiens
  misc_RNA (1)...(19): siRNA sense strand
ucuuuaacuuggaggagua

SEQ ID NO: 162103 - RNA, 19 nt, Homo sapiens
  misc_RNA (1)...(19): siRNA sense strand
aauggagacuggaccuuuc

SEQ ID NO: 162104 - RNA, 19 nt, Homo sapiens
  misc_RNA (1)...(19): siRNA sense strand
ggcacagacucuccagaag

SEQ ID NO: 162105 - RNA, 19 nt, Homo sapiens
  misc_RNA (1)...(19): siRNA sense strand
guggugaugcuagaaauga

SEQ ID NO: 162106 - RNA, 19 nt, Homo sapiens
  misc_RNA (1)...(19): siRNA sense strand
ggagacuggaccuuucaga

SEQ ID NO: 162107 - RNA, 19 nt, Homo sapiens
  misc_RNA (1)...(19): siRNA sense strand
ccagcuaagggcucagaaa

SEQ ID NO: 162108 - RNA, 19 nt, Homo sapiens
  misc_RNA (1)...(19): siRNA sense strand
cagcuaagggcucagaaag

SEQ ID NO: 162109 - RNA, 19 nt, Homo sapiens
  misc_RNA (1)...(19): siRNA sense strand
gcaguuuguggucagauuc

SEQ ID NO: 162110 - RNA, 19 nt, Homo sapiens
  misc_RNA (1)...(19): siRNA sense strand
caaaggcugacuguuacuu

SEQ ID NO: 162111 - RNA, 19 nt, Homo sapiens
  misc_RNA (1)...(19): siRNA sense strand
uggaggaguauguacguuu

SEQ ID NO: 162112 - RNA, 19 nt, Homo sapiens
  misc_RNA (1)...(19): siRNA sense strand
guacguuucgacagugaug

SEQ ID NO: 162113 - RNA, 19 nt, Homo sapiens
  misc_RNA (1)...(19): siRNA sense strand
gaaucgucauccagcuaag

SEQ ID NO: 162114 - RNA, 19 nt, Homo sapiens
  misc_RNA (1)...(19): siRNA sense strand
ccacuccugcaccagcaua

SEQ ID NO: 162115 - RNA, 19 nt, Homo sapiens
  misc_RNA (1)...(19): siRNA sense strand
caaccagaggugacagugu

SEQ ID NO: 162116 - RNA, 19 nt, Homo sapiens
  misc_RNA (1)...(19): siRNA sense strand
gauaugugaggacgcagau

SEQ ID NO: 162117 - RNA, 19 nt, Homo sapiens
  misc_RNA (1)...(19): siRNA sense strand
aaggcugacuguuacuuca

SEQ ID NO: 162118 - RNA, 19 nt, Homo sapiens
  misc_RNA (1)...(19): siRNA sense strand
cuccugaacuuggacaugu

SEQ ID NO: 162119 - RNA, 19 nt, Homo sapiens
  misc_RNA (1)...(19): siRNA sense strand
aggcacagacucuccagaa

SEQ ID NO: 162120 - RNA, 19 nt, Homo sapiens
  misc_RNA (1)...(19): siRNA sense strand
gugacaguguacccagaga

SEQ ID NO: 162121 - RNA, 19 nt, Homo sapiens
  misc_RNA (1)...(19): siRNA sense strand
uggcauugcagccuuccua

SEQ ID NO: 162122 - RNA, 19 nt, Homo sapiens
  misc_RNA (1)...(19): siRNA sense strand
gauuucguguaccaguuua

SEQ ID NO: 162123 - RNA, 19 nt, Homo sapiens
  misc_RNA (1)...(19): siRNA sense strand
ggauuucguguaccaguuu

SEQ ID NO: 162124 - RNA, 19 nt, Homo sapiens
  misc_RNA (1)...(19): siRNA sense strand
aagcaucuauaaccgagaa

SEQ ID NO: 162125 - RNA, 19 nt, Homo sapiens
  misc_RNA (1)...(19): siRNA sense strand
gugagcagaagcaucuaua

SEQ ID NO: 162126 - RNA, 19 nt, Homo sapiens
  misc_RNA (1)...(19): siRNA sense strand
gagcagaagcaucuauaac

SEQ ID NO: 162127 - RNA, 19 nt, Homo sapiens
  misc_RNA (1)...(19): siRNA sense strand
acagagcgcgugcgucuug

SEQ ID NO: 162128 - RNA, 19 nt, Homo sapiens
  misc_RNA (1)...(19): siRNA sense strand
gagcgcgugcgucuuguga

SEQ ID NO: 162129 - RNA, 19 nt, Homo sapiens
  misc_RNA (1)...(19): siRNA sense strand
ugagcagaagcaucuauaa

SEQ ID NO: 162130 - RNA, 19 nt, Homo sapiens
  misc_RNA (1)...(19): siRNA sense strand
gaacagccagaaggacauc

SEQ ID NO: 162131 - RNA, 19 nt, Homo sapiens
  misc_RNA (1)...(19): siRNA sense strand
ggaacagccagaaggacau

SEQ ID NO: 162132 - RNA, 19 nt, Homo sapiens
  misc_RNA (1)...(19): siRNA sense strand
ccgaggauuucguguacca

SEQ ID NO: 162133 - RNA, 19 nt, Homo sapiens
  misc_RNA (1)...(19): siRNA sense strand
gcauugaagucaggugguu

SEQ ID NO: 162134 - RNA, 19 nt, Homo sapiens
  misc_RNA (1)...(19): siRNA sense strand
cgggugcgguugcuggaaa

SEQ ID NO: 162135 - RNA, 19 nt, Homo sapiens
  misc_RNA (1)...(19): siRNA sense strand
cuccuggucugcucuguga

SEQ ID NO: 162136 - RNA, 19 nt, Homo sapiens
  misc_RNA (1)...(19): siRNA sense strand
ggaugaagaugaagaauaa

SEQ ID NO: 162137 - RNA, 19 nt, Homo sapiens
  misc_RNA (1)...(19): siRNA sense strand
gcaaagaaauugggugaaa

SEQ ID NO: 162138 - RNA, 19 nt, Homo sapiens
  misc_RNA (1)...(19): siRNA sense strand
gaacaucgcccaaagauca

SEQ ID NO: 162139 - RNA, 19 nt, Homo sapiens
  misc_RNA (1)...(19): siRNA sense strand
ggaagaggaugaagaugaa

SEQ ID NO: 162140 - RNA, 19 nt, Homo sapiens
  misc_RNA (1)...(19): siRNA sense strand
gggaagagcacaagaagaa

SEQ ID NO: 162141 - RNA, 19 nt, Homo sapiens
  misc_RNA (1)...(19): siRNA sense strand
ccaacaggcucaaagaaga

SEQ ID NO: 162142 - RNA, 19 nt, Homo sapiens
  misc_RNA (1)...(19): siRNA sense strand
caaaggagaagucgaaguu

SEQ ID NO: 162143 - RNA, 19 nt, Homo sapiens
  misc_RNA (1)...(19): siRNA sense strand
ggaagaagaagaugaagau

SEQ ID NO: 162144 - RNA, 19 nt, Homo sapiens
  misc_RNA (1)...(19): siRNA sense strand
gaagaagaacgaaccagaa

SEQ ID NO: 162145 - RNA, 19 nt, Homo sapiens
  misc_RNA (1)...(19): siRNA sense strand
ugacaaagcucgcuaugac

SEQ ID NO: 162146 - RNA, 19 nt, Homo sapiens
  misc_RNA (1)...(19): siRNA sense strand
gcagucagccaaagauaaa

SEQ ID NO: 162147 - RNA, 19 nt, Homo sapiens
  misc_RNA (1)...(19): siRNA sense strand
gaagaacgaaccagaagau

SEQ ID NO: 162148 - RNA, 19 nt, Homo sapiens
  misc_RNA (1)...(19): siRNA sense strand
ggaggaagaagaagaugaa

SEQ ID NO: 162149 - RNA, 19 nt, Homo sapiens
  misc_RNA (1)...(19): siRNA sense strand
caaagaaauugggugaaau

SEQ ID NO: 162150 - RNA, 19 nt, Homo sapiens
  misc_RNA (1)...(19): siRNA sense strand
ccaaagauaaacaaccaua

SEQ ID NO: 162151 - RNA, 19 nt, Homo sapiens
  misc_RNA (1)...(19): siRNA sense strand
gaacgaaccagaagaugag

SEQ ID NO: 162152 - RNA, 19 nt, Homo sapiens
  misc_RNA (1)...(19): siRNA sense strand
caagaaguguucggagaga

SEQ ID NO: 162153 - RNA, 19 nt, Homo sapiens
  misc_RNA (1)...(19): siRNA sense strand
ggaggaagaggaugaagau

SEQ ID NO: 162154 - RNA, 19 nt, Homo sapiens
  misc_RNA (1)...(19): siRNA sense strand
agaagaagaugaagaugag

SEQ ID NO: 162155 - RNA, 19 nt, Homo sapiens
  misc_RNA (1)...(19): siRNA sense strand
aaaaggauauugcugcaua

SEQ ID NO: 162156 - RNA, 19 nt, Homo sapiens
  misc_RNA (1)...(19): siRNA sense strand
gcccaaagaucaaaaguga

SEQ ID NO: 162157 - RNA, 19 nt, Homo sapiens
  misc_RNA (1)...(19): siRNA sense strand
ggagaaauaugaaaaggau

SEQ ID NO: 162158 - RNA, 19 nt, Homo sapiens
  misc_RNA (1)...(19): siRNA sense strand
acaaccauaugaacagaaa

SEQ ID NO: 162159 - RNA, 19 nt, Homo sapiens
  misc_RNA (1)...(19): siRNA sense strand
ggaggaggaggaagaagaa

SEQ ID NO: 162160 - RNA, 19 nt, Homo sapiens
  misc_RNA (1)...(19): siRNA sense strand
gcucaaagaagaagaacga

SEQ ID NO: 162161 - RNA, 19 nt, Homo sapiens
  misc_RNA (1)...(19): siRNA sense strand
agucgaaguuugaagauau

SEQ ID NO: 162162 - RNA, 19 nt, Homo sapiens
  misc_RNA (1)...(19): siRNA sense strand
gagcagucagccaaagaua

SEQ ID NO: 162163 - RNA, 19 nt, Homo sapiens
  misc_RNA (1)...(19): siRNA sense strand
aaggagaagucgaaguuug

SEQ ID NO: 162164 - RNA, 19 nt, Homo sapiens
  misc_RNA (1)...(19): siRNA sense strand
aaacaaccauaugaacaga

SEQ ID NO: 162165 - RNA, 19 nt, Homo sapiens
  misc_RNA (1)...(19): siRNA sense strand
caacaggcucaaagaagaa

SEQ ID NO: 162166 - RNA, 19 nt, Homo sapiens
  misc_RNA (1)...(19): siRNA sense strand
gggauacugcaaagaaauu

SEQ ID NO: 162167 - RNA, 19 nt, Homo sapiens
  misc_RNA (1)...(19): siRNA sense strand
gcuaaaggagaaauaugaa

SEQ ID NO: 162168 - RNA, 19 nt, Homo sapiens
  misc_RNA (1)...(19): siRNA sense strand
gauaaacaaccauaugaac

SEQ ID NO: 162169 - RNA, 19 nt, Homo sapiens
  misc_RNA (1)...(19): siRNA sense strand
ucccaaaggugauaagaag

SEQ ID NO: 162170 - RNA, 19 nt, Homo sapiens
  misc_RNA (1)...(19): siRNA sense strand
gaagaaacacccggacucu

SEQ ID NO: 162171 - RNA, 19 nt, Homo sapiens
  misc_RNA (1)...(19): siRNA sense strand
aaauuacguuccucccaaa

SEQ ID NO: 162172 - RNA, 19 nt, Homo sapiens
  misc_RNA (1)...(19): siRNA sense strand
aagaagaagaugaagauga

SEQ ID NO: 162173 - RNA, 19 nt, Homo sapiens
  misc_RNA (1)...(19): siRNA sense strand
ggaggaggaagaagaagau

SEQ ID NO: 162174 - RNA, 19 nt, Homo sapiens
  misc_RNA (1)...(19): siRNA sense strand
ggacucuuccgucaauuuc

SEQ ID NO: 162175 - RNA, 19 nt, Homo sapiens
  misc_RNA (1)...(19): siRNA sense strand
agaaacacccggacucuuc

SEQ ID NO: 162176 - RNA, 19 nt, Homo sapiens
  misc_RNA (1)...(19): siRNA sense strand
aaagaaauugggugaaaug

SEQ ID NO: 162177 - RNA, 19 nt, Homo sapiens
  misc_RNA (1)...(19): siRNA sense strand
gaacagaaagcagcuaagc

SEQ ID NO: 162178 - RNA, 19 nt, Homo sapiens
  misc_RNA (1)...(19): siRNA sense strand
gccaccaucugccuucuuc

SEQ ID NO: 162179 - RNA, 19 nt, Homo sapiens
  misc_RNA (1)...(19): siRNA sense strand
gaagagcacaagaagaaac

SEQ ID NO: 162180 - RNA, 19 nt, Homo sapiens
  misc_RNA (1)...(19): siRNA sense strand
ggaagagcacaagaagaaa

SEQ ID NO: 162181 - RNA, 19 nt, Homo sapiens
  misc_RNA (1)...(19): siRNA sense strand
gcuaugacagggagaugaa

SEQ ID NO: 162182 - RNA, 19 nt, Homo sapiens
  misc_RNA (1)...(19): siRNA sense strand
agaacgaaccagaagauga

SEQ ID NO: 162183 - RNA, 19 nt, Homo sapiens
  misc_RNA (1)...(19): siRNA sense strand
gaagucgaaguuugaagau

SEQ ID NO: 162184 - RNA, 19 nt, Homo sapiens
  misc_RNA (1)...(19): siRNA sense strand
gauaagaaggggaagaaaa

SEQ ID NO: 162185 - RNA, 19 nt, Homo sapiens
  misc_RNA (1)...(19): siRNA sense strand
aggaagaggaugaagauga

SEQ ID NO: 162186 - RNA, 19 nt, Homo sapiens
  misc_RNA (1)...(19): siRNA sense strand
gaagaagaagaugaagaug

SEQ ID NO: 162187 - RNA, 19 nt, Homo sapiens
  misc_RNA (1)...(19): siRNA sense strand
ggagaagucgaaguuugaa

SEQ ID NO: 162188 - RNA, 19 nt, Homo sapiens
  misc_RNA (1)...(19): siRNA sense strand
agaugaagaugaggaggaa

SEQ ID NO: 162189 - RNA, 19 nt, Homo sapiens
  misc_RNA (1)...(19): siRNA sense strand
aggaugaagaugaagaaua

SEQ ID NO: 162190 - RNA, 19 nt, Homo sapiens
  misc_RNA (1)...(19): siRNA sense strand
uaaacaaccauaugaacag

SEQ ID NO: 162191 - RNA, 19 nt, Homo sapiens
  misc_RNA (1)...(19): siRNA sense strand
ggaggaggaggaggaagaa

SEQ ID NO: 162192 - RNA, 19 nt, Homo sapiens
  misc_RNA (1)...(19): siRNA sense strand
agaagucgaaguuugaaga

SEQ ID NO: 162193 - RNA, 19 nt, Homo sapiens
  misc_RNA (1)...(19): siRNA sense strand
gcaaaggagaagucgaagu

SEQ ID NO: 162194 - RNA, 19 nt, Homo sapiens
  misc_RNA (1)...(19): siRNA sense strand
caucugccuucuuccuguu

SEQ ID NO: 162195 - RNA, 19 nt, Homo sapiens
  misc_RNA (1)...(19): siRNA sense strand
gcucugaacaucgcccaaa

SEQ ID NO: 162196 - RNA, 19 nt, Homo sapiens
  misc_RNA (1)...(19): siRNA sense strand
cacccuggccuauccauug

SEQ ID NO: 162197 - RNA, 19 nt, Homo sapiens
  misc_RNA (1)...(19): siRNA sense strand
gucgaaguuugaagauaug

SEQ ID NO: 162198 - RNA, 19 nt, Homo sapiens
  misc_RNA (1)...(19): siRNA sense strand
gccaacaggcucaaagaag

SEQ ID NO: 162199 - RNA, 19 nt, Homo sapiens
  misc_RNA (1)...(19): siRNA sense strand
ggccaacaggcucaaagaa

SEQ ID NO: 162200 - RNA, 19 nt, Homo sapiens
  misc_RNA (1)...(19): siRNA sense strand
ugggugaaauguggucuga

SEQ ID NO: 162201 - RNA, 19 nt, Homo sapiens
  misc_RNA (1)...(19): siRNA sense strand
cugcaaaggagaagucgaa

SEQ ID NO: 162202 - RNA, 19 nt, Homo sapiens
  misc_RNA (1)...(19): siRNA sense strand
uuacguuccucccaaaggu

SEQ ID NO: 162203 - RNA, 19 nt, Homo sapiens
  misc_RNA (1)...(19): siRNA sense strand
aagucgaaguuugaagaua

SEQ ID NO: 162204 - RNA, 19 nt, Homo sapiens
  misc_RNA (1)...(19): siRNA sense strand
cuaagcuaaaggagaaaua

SEQ ID NO: 162205 - RNA, 19 nt, Homo sapiens
  misc_RNA (1)...(19): siRNA sense strand
ggauacugcaaagaaauug

SEQ ID NO: 162206 - RNA, 19 nt, Homo sapiens
  misc_RNA (1)...(19): siRNA sense strand
aggagaagucgaaguuuga

SEQ ID NO: 162207 - RNA, 19 nt, Homo sapiens
  misc_RNA (1)...(19): siRNA sense strand
ugaacacccuggccuaucc

SEQ ID NO: 162208 - RNA, 19 nt, Homo sapiens
  misc_RNA (1)...(19): siRNA sense strand
agccaaagauaaacaacca

SEQ ID NO: 162209 - RNA, 19 nt, Homo sapiens
  misc_RNA (1)...(19): siRNA sense strand
ggggcaaaauguccucgua

SEQ ID NO: 162210 - RNA, 19 nt, Homo sapiens
  misc_RNA (1)...(19): siRNA sense strand
gugacaaagcucgcuauga

SEQ ID NO: 162211 - RNA, 19 nt, Homo sapiens
  misc_RNA (1)...(19): siRNA sense strand
gacaaagcucgcuaugaca

SEQ ID NO: 162212 - RNA, 19 nt, Homo sapiens
  misc_RNA (1)...(19): siRNA sense strand
aaagugaagcaggaaagaa

SEQ ID NO: 162213 - RNA, 19 nt, Homo sapiens
  misc_RNA (1)...(19): siRNA sense strand
aaaggagaagucgaaguuu

SEQ ID NO: 162214 - RNA, 19 nt, Homo sapiens
  misc_RNA (1)...(19): siRNA sense strand
aauguggucugagcaguca

SEQ ID NO: 162215 - RNA, 19 nt, Homo sapiens
  misc_RNA (1)...(19): siRNA sense strand
agaaauugggugaaaugug

SEQ ID NO: 162216 - RNA, 19 nt, Homo sapiens
  misc_RNA (1)...(19): siRNA sense strand
gcaacaaagugcaagauuc

SEQ ID NO: 162217 - RNA, 19 nt, Homo sapiens
  misc_RNA (1)...(19): siRNA sense strand
ggcagagggugauagaaga

SEQ ID NO: 162218 - RNA, 19 nt, Homo sapiens
  misc_RNA (1)...(19): siRNA sense strand
caacaaagugcaagauucu

SEQ ID NO: 162219 - RNA, 19 nt, Homo sapiens
  misc_RNA (1)...(19): siRNA sense strand
ugaaggaggccaccaagga

SEQ ID NO: 162220 - RNA, 19 nt, Homo sapiens
  misc_RNA (1)...(19): siRNA sense strand
ggcagagaaugcugaguuc

SEQ ID NO: 162221 - RNA, 19 nt, Homo sapiens
  misc_RNA (1)...(19): siRNA sense strand
agagaaugcugaguucaug

SEQ ID NO: 162222 - RNA, 19 nt, Homo sapiens
  misc_RNA (1)...(19): siRNA sense strand
ggugauggccucccuguac

SEQ ID NO: 162223 - RNA, 19 nt, Homo sapiens
  misc_RNA (1)...(19): siRNA sense strand
gagaaugcugaguucauga

SEQ ID NO: 162224 - RNA, 19 nt, Homo sapiens
  misc_RNA (1)...(19): siRNA sense strand
gauagaagaggccaagacu

SEQ ID NO: 162225 - RNA, 19 nt, Homo sapiens
  misc_RNA (1)...(19): siRNA sense strand
gcacacccaggcagagaau

SEQ ID NO: 162226 - RNA, 19 nt, Homo sapiens
  misc_RNA (1)...(19): siRNA sense strand
gcucaacauccagcucuuu

SEQ ID NO: 162227 - RNA, 19 nt, Homo sapiens
  misc_RNA (1)...(19): siRNA sense strand
caaggagagcccagucuuc

SEQ ID NO: 162228 - RNA, 19 nt, Homo sapiens
  misc_RNA (1)...(19): siRNA sense strand
agauugagcgcaacaagga

SEQ ID NO: 162229 - RNA, 19 nt, Homo sapiens
  misc_RNA (1)...(19): siRNA sense strand
augcugaguucaugaggaa

SEQ ID NO: 162230 - RNA, 19 nt, Homo sapiens
  misc_RNA (1)...(19): siRNA sense strand
caacauccagcucuuugag

SEQ ID NO: 162231 - RNA, 19 nt, Homo sapiens
  misc_RNA (1)...(19): siRNA sense strand
ggagauugagcgcaacaag

SEQ ID NO: 162232 - RNA, 19 nt, Homo sapiens
  misc_RNA (1)...(19): siRNA sense strand
agacugcguuccugcucaa

SEQ ID NO: 162233 - RNA, 19 nt, Homo sapiens
  misc_RNA (1)...(19): siRNA sense strand
cuucuccgauggguccuua

SEQ ID NO: 162234 - RNA, 19 nt, Homo sapiens
  misc_RNA (1)...(19): siRNA sense strand
gccaugcagcgcuauguga

SEQ ID NO: 162235 - RNA, 19 nt, Homo sapiens
  misc_RNA (1)...(19): siRNA sense strand
cgauggguccuuacacuca

SEQ ID NO: 162236 - RNA, 19 nt, Homo sapiens
  misc_RNA (1)...(19): siRNA sense strand
cuaccugggugaccugucu

SEQ ID NO: 162237 - RNA, 19 nt, Homo sapiens
  misc_RNA (1)...(19): siRNA sense strand
aggagcugcugacccauga

SEQ ID NO: 162238 - RNA, 19 nt, Homo sapiens
  misc_RNA (1)...(19): siRNA sense strand
aggcagagaaugcugaguu

SEQ ID NO: 162239 - RNA, 19 nt, Homo sapiens
  misc_RNA (1)...(19): siRNA sense strand
gcagagaaugcugaguuca

SEQ ID NO: 162240 - RNA, 19 nt, Homo sapiens
  misc_RNA (1)...(19): siRNA sense strand
gacccgagacggcuucaag

SEQ ID NO: 162241 - RNA, 19 nt, Homo sapiens
  misc_RNA (1)...(19): siRNA sense strand
cagagaaugcugaguucau

SEQ ID NO: 162242 - RNA, 19 nt, Homo sapiens
  misc_RNA (1)...(19): siRNA sense strand
ccaugcagcgcuaugugaa

SEQ ID NO: 162243 - RNA, 19 nt, Homo sapiens
  misc_RNA (1)...(19): siRNA sense strand
gcagagggugauagaagag

SEQ ID NO: 162244 - RNA, 19 nt, Homo sapiens
  misc_RNA (1)...(19): siRNA sense strand
caguugcuguagggcuuua

SEQ ID NO: 162245 - RNA, 19 nt, Homo sapiens
  misc_RNA (1)...(19): siRNA sense strand
gguccuuacacucagcuuu

SEQ ID NO: 162246 - RNA, 19 nt, Homo sapiens
  misc_RNA (1)...(19): siRNA sense strand
ucaggcagagggugauaga

SEQ ID NO: 162247 - RNA, 19 nt, Homo sapiens
  misc_RNA (1)...(19): siRNA sense strand
caugaggaacuuucagaag

SEQ ID NO: 162248 - RNA, 19 nt, Homo sapiens
  misc_RNA (1)...(19): siRNA sense strand
gaacaucaccuaagagauu

SEQ ID NO: 162249 - RNA, 19 nt, Homo sapiens
  misc_RNA (1)...(19): siRNA sense strand
gguggaagcuacaaugauu

SEQ ID NO: 162250 - RNA, 19 nt, Homo sapiens
  misc_RNA (1)...(19): siRNA sense strand
ugaagaacaucaccuaaga

SEQ ID NO: 162251 - RNA, 19 nt, Homo sapiens
  misc_RNA (1)...(19): siRNA sense strand
gaccaugacuccguggaua

SEQ ID NO: 162252 - RNA, 19 nt, Homo sapiens
  misc_RNA (1)...(19): siRNA sense strand
uaaagaagacacugaagaa

SEQ ID NO: 162253 - RNA, 19 nt, Homo sapiens
  misc_RNA (1)...(19): siRNA sense strand
ggauggcuauaauggauuu

SEQ ID NO: 162254 - RNA, 19 nt, Homo sapiens
  misc_RNA (1)...(19): siRNA sense strand
gaaaagcccugucaaagca

SEQ ID NO: 162255 - RNA, 19 nt, Homo sapiens
  misc_RNA (1)...(19): siRNA sense strand
ggagguggaugcagcuaug

SEQ ID NO: 162256 - RNA, 19 nt, Homo sapiens
  misc_RNA (1)...(19): siRNA sense strand
gauauuuguugguggcauu

SEQ ID NO: 162257 - RNA, 19 nt, Homo sapiens
  misc_RNA (1)...(19): siRNA sense strand
ggguugagcuuugaaacaa

SEQ ID NO: 162258 - RNA, 19 nt, Homo sapiens
  misc_RNA (1)...(19): siRNA sense strand
uauaauggauuuggcaaug

SEQ ID NO: 162259 - RNA, 19 nt, Homo sapiens
  misc_RNA (1)...(19): siRNA sense strand
agaagacacugaagaacau

SEQ ID NO: 162260 - RNA, 19 nt, Homo sapiens
  misc_RNA (1)...(19): siRNA sense strand
gcucacggacuguguggua

SEQ ID NO: 162261 - RNA, 19 nt, Homo sapiens
  misc_RNA (1)...(19): siRNA sense strand
guaaugagagauccaaaca

SEQ ID NO: 162262 - RNA, 19 nt, Homo sapiens
  misc_RNA (1)...(19): siRNA sense strand
agagauggcuagugcuuca

SEQ ID NO: 162263 - RNA, 19 nt, Homo sapiens
  misc_RNA (1)...(19): siRNA sense strand
aacaucaccuaagagauua

SEQ ID NO: 162264 - RNA, 19 nt, Homo sapiens
  misc_RNA (1)...(19): siRNA sense strand
caagagauggcuagugcuu

SEQ ID NO: 162265 - RNA, 19 nt, Homo sapiens
  misc_RNA (1)...(19): siRNA sense strand
gcauuaaagaagacacuga

SEQ ID NO: 162266 - RNA, 19 nt, Homo sapiens
  misc_RNA (1)...(19): siRNA sense strand
ccgaggcaguggcaagaaa

SEQ ID NO: 162267 - RNA, 19 nt, Homo sapiens
  misc_RNA (1)...(19): siRNA sense strand
ugagagauccaaacaccaa

SEQ ID NO: 162268 - RNA, 19 nt, Homo sapiens
  misc_RNA (1)...(19): siRNA sense strand
uaauggauuuggcaaugau

SEQ ID NO: 162269 - RNA, 19 nt, Homo sapiens
  misc_RNA (1)...(19): siRNA sense strand
uuaaagaagacacugaaga

SEQ ID NO: 162270 - RNA, 19 nt, Homo sapiens
  misc_RNA (1)...(19): siRNA sense strand
uaagucagagucuccuaaa

SEQ ID NO: 162271 - RNA, 19 nt, Homo sapiens
  misc_RNA (1)...(19): siRNA sense strand
agucagagucuccuaaaga

SEQ ID NO: 162272 - RNA, 19 nt, Homo sapiens
  misc_RNA (1)...(19): siRNA sense strand
gaagaacaucaccuaagag

SEQ ID NO: 162273 - RNA, 19 nt, Homo sapiens
  misc_RNA (1)...(19): siRNA sense strand
ggacugugugguaaugaga

SEQ ID NO: 162274 - RNA, 19 nt, Homo sapiens
  misc_RNA (1)...(19): siRNA sense strand
gguggaggccaauacuuug

SEQ ID NO: 162275 - RNA, 19 nt, Homo sapiens
  misc_RNA (1)...(19): siRNA sense strand
uuacaacaaucagucuuca

SEQ ID NO: 162276 - RNA, 19 nt, Homo sapiens
  misc_RNA (1)...(19): siRNA sense strand
gucagagucuccuaaagag

SEQ ID NO: 162277 - RNA, 19 nt, Homo sapiens
  misc_RNA (1)...(19): siRNA sense strand
auaauggauuuggcaauga

SEQ ID NO: 162278 - RNA, 19 nt, Homo sapiens
  misc_RNA (1)...(19): siRNA sense strand
aagaacaucaccuaagaga

SEQ ID NO: 162279 - RNA, 19 nt, Homo sapiens
  misc_RNA (1)...(19): siRNA sense strand
cauuaaagaagacacugaa

SEQ ID NO: 162280 - RNA, 19 nt, Homo sapiens
  misc_RNA (1)...(19): siRNA sense strand
ggaggguugagcuuugaaa

SEQ ID NO: 162281 - RNA, 19 nt, Homo sapiens
  misc_RNA (1)...(19): siRNA sense strand
aagaagacacugaagaaca

SEQ ID NO: 162282 - RNA, 19 nt, Homo sapiens
  misc_RNA (1)...(19): siRNA sense strand
gcuuugaaacaacugauga

SEQ ID NO: 162283 - RNA, 19 nt, Homo sapiens
  misc_RNA (1)...(19): siRNA sense strand
gaacgcucacggacugugu

SEQ ID NO: 162284 - RNA, 19 nt, Homo sapiens
  misc_RNA (1)...(19): siRNA sense strand
cuaagucagagucuccuaa

SEQ ID NO: 162285 - RNA, 19 nt, Homo sapiens
  misc_RNA (1)...(19): siRNA sense strand
acacaagguggauggaaga

SEQ ID NO: 162286 - RNA, 19 nt, Homo sapiens
  misc_RNA (1)...(19): siRNA sense strand
cuauggcaguggcagaaga

SEQ ID NO: 162287 - RNA, 19 nt, Homo sapiens
  misc_RNA (1)...(19): siRNA sense strand
gaggagccauuuugagcaa

SEQ ID NO: 162288 - RNA, 19 nt, Homo sapiens
  misc_RNA (1)...(19): siRNA sense strand
gaaccaaagagagcugucu

SEQ ID NO: 162289 - RNA, 19 nt, Homo sapiens
  misc_RNA (1)...(19): siRNA sense strand
ggucguggaggaaacuuca

SEQ ID NO: 162290 - RNA, 19 nt, Homo sapiens
  misc_RNA (1)...(19): siRNA sense strand
guggaagcuacaaugauuu

SEQ ID NO: 162291 - RNA, 19 nt, Homo sapiens
  misc_RNA (1)...(19): siRNA sense strand
ggggauggcuauaauggau

SEQ ID NO: 162292 - RNA, 19 nt, Homo sapiens
  misc_RNA (1)...(19): siRNA sense strand
ggugguggaagcuacaaug

SEQ ID NO: 162293 - RNA, 19 nt, Homo sapiens
  misc_RNA (1)...(19): siRNA sense strand
gcuuugccuuuguaaccuu

SEQ ID NO: 162294 - RNA, 19 nt, Homo sapiens
  misc_RNA (1)...(19): siRNA sense strand
gaaaccaagguggcuaugg

SEQ ID NO: 162295 - RNA, 19 nt, Homo sapiens
  misc_RNA (1)...(19): siRNA sense strand
gaccgaggcaguggcaaga

SEQ ID NO: 162296 - RNA, 19 nt, Homo sapiens
  misc_RNA (1)...(19): siRNA sense strand
gugguggaagcuacaauga

SEQ ID NO: 162297 - RNA, 19 nt, Homo sapiens
  misc_RNA (1)...(19): siRNA sense strand
uggcaguggcagaagauuu

SEQ ID NO: 162298 - RNA, 19 nt, Homo sapiens
  misc_RNA (1)...(19): siRNA sense strand
gaacaucaccuaagagauu

SEQ ID NO: 162299 - RNA, 19 nt, Homo sapiens
  misc_RNA (1)...(19): siRNA sense strand
gguggaagcuacaaugauu

SEQ ID NO: 162300 - RNA, 19 nt, Homo sapiens
  misc_RNA (1)...(19): siRNA sense strand
ugaagaacaucaccuaaga

SEQ ID NO: 162301 - RNA, 19 nt, Homo sapiens
  misc_RNA (1)...(19): siRNA sense strand
gaccaugacuccguggaua

SEQ ID NO: 162302 - RNA, 19 nt, Homo sapiens
  misc_RNA (1)...(19): siRNA sense strand
uaaagaagacacugaagaa

SEQ ID NO: 162303 - RNA, 19 nt, Homo sapiens
  misc_RNA (1)...(19): siRNA sense strand
ggauggcuauaauggauuu

SEQ ID NO: 162304 - RNA, 19 nt, Homo sapiens
  misc_RNA (1)...(19): siRNA sense strand
gaaaagcccugucaaagca

SEQ ID NO: 162305 - RNA, 19 nt, Homo sapiens
  misc_RNA (1)...(19): siRNA sense strand
ggagguggaugcagcuaug

SEQ ID NO: 162306 - RNA, 19 nt, Homo sapiens
  misc_RNA (1)...(19): siRNA sense strand
gauauuuguugguggcauu

SEQ ID NO: 162307 - RNA, 19 nt, Homo sapiens
  misc_RNA (1)...(19): siRNA sense strand
ggguugagcuuugaaacaa

SEQ ID NO: 162308 - RNA, 19 nt, Homo sapiens
  misc_RNA (1)...(19): siRNA sense strand
uauaauggauuuggcaaug

SEQ ID NO: 162309 - RNA, 19 nt, Homo sapiens
  misc_RNA (1)...(19): siRNA sense strand
agaagacacugaagaacau

SEQ ID NO: 162310 - RNA, 19 nt, Homo sapiens
  misc_RNA (1)...(19): siRNA sense strand
gcucacggacuguguggua

SEQ ID NO: 162311 - RNA, 19 nt, Homo sapiens
  misc_RNA (1)...(19): siRNA sense strand
guaaugagagauccaaaca

SEQ ID NO: 162312 - RNA, 19 nt, Homo sapiens
  misc_RNA (1)...(19): siRNA sense strand
agagauggcuagugcuuca

SEQ ID NO: 162313 - RNA, 19 nt, Homo sapiens
  misc_RNA (1)...(19): siRNA sense strand
aacaucaccuaagagauua

SEQ ID NO: 162314 - RNA, 19 nt, Homo sapiens
  misc_RNA (1)...(19): siRNA sense strand
caagagauggcuagugcuu

SEQ ID NO: 162315 - RNA, 19 nt, Homo sapiens
  misc_RNA (1)...(19): siRNA sense strand
gcauuaaagaagacacuga

SEQ ID NO: 162316 - RNA, 19 nt, Homo sapiens
  misc_RNA (1)...(19): siRNA sense strand
ccgaggcaguggcaagaaa

SEQ ID NO: 162317 - RNA, 19 nt, Homo sapiens
  misc_RNA (1)...(19): siRNA sense strand
ugagagauccaaacaccaa

SEQ ID NO: 162318 - RNA, 19 nt, Homo sapiens
  misc_RNA (1)...(19): siRNA sense strand
uaauggauuuggcaaugau

SEQ ID NO: 162319 - RNA, 19 nt, Homo sapiens
  misc_RNA (1)...(19): siRNA sense strand
uuaaagaagacacugaaga

SEQ ID NO: 162320 - RNA, 19 nt, Homo sapiens
  misc_RNA (1)...(19): siRNA sense strand
uaagucagagucuccuaaa

SEQ ID NO: 162321 - RNA, 19 nt, Homo sapiens
  misc_RNA (1)...(19): siRNA sense strand
agucagagucuccuaaaga

SEQ ID NO: 162322 - RNA, 19 nt, Homo sapiens
  misc_RNA (1)...(19): siRNA sense strand
gaagaacaucaccuaagag

SEQ ID NO: 162323 - RNA, 19 nt, Homo sapiens
  misc_RNA (1)...(19): siRNA sense strand
ggacugugugguaaugaga

SEQ ID NO: 162324 - RNA, 19 nt, Homo sapiens
  misc_RNA (1)...(19): siRNA sense strand
gguggaggccaauacuuug

SEQ ID NO: 162325 - RNA, 19 nt, Homo sapiens
  misc_RNA (1)...(19): siRNA sense strand
uuacaacaaucagucuuca

SEQ ID NO: 162326 - RNA, 19 nt, Homo sapiens
  misc_RNA (1)...(19): siRNA sense strand
gucagagucuccuaaagag

SEQ ID NO: 162327 - RNA, 19 nt, Homo sapiens
  misc_RNA (1)...(19): siRNA sense strand
auaauggauuuggcaauga

SEQ ID NO: 162328 - RNA, 19 nt, Homo sapiens
  misc_RNA (1)...(19): siRNA sense strand
aagaacaucaccuaagaga

SEQ ID NO: 162329 - RNA, 19 nt, Homo sapiens
  misc_RNA (1)...(19): siRNA sense strand
cauuaaagaagacacugaa

SEQ ID NO: 162330 - RNA, 19 nt, Homo sapiens
  misc_RNA (1)...(19): siRNA sense strand
ggaggguugagcuuugaaa

SEQ ID NO: 162331 - RNA, 19 nt, Homo sapiens
  misc_RNA (1)...(19): siRNA sense strand
aagaagacacugaagaaca

SEQ ID NO: 162332 - RNA, 19 nt, Homo sapiens
  misc_RNA (1)...(19): siRNA sense strand
gcuuugaaacaacugauga

SEQ ID NO: 162333 - RNA, 19 nt, Homo sapiens
  misc_RNA (1)...(19): siRNA sense strand
gaacgcucacggacugugu

SEQ ID NO: 162334 - RNA, 19 nt, Homo sapiens
  misc_RNA (1)...(19): siRNA sense strand
gaauuacaacaaucagucu

SEQ ID NO: 162335 - RNA, 19 nt, Homo sapiens
  misc_RNA (1)...(19): siRNA sense strand
cuaagucagagucuccuaa

SEQ ID NO: 162336 - RNA, 19 nt, Homo sapiens
  misc_RNA (1)...(19): siRNA sense strand
acacaagguggauggaaga

SEQ ID NO: 162337 - RNA, 19 nt, Homo sapiens
  misc_RNA (1)...(19): siRNA sense strand
cuauggcaguggcagaaga

SEQ ID NO: 162338 - RNA, 19 nt, Homo sapiens
  misc_RNA (1)...(19): siRNA sense strand
gaggagccauuuugagcaa

SEQ ID NO: 162339 - RNA, 19 nt, Homo sapiens
  misc_RNA (1)...(19): siRNA sense strand
gaaccaaagagagcugucu

SEQ ID NO: 162340 - RNA, 19 nt, Homo sapiens
  misc_RNA (1)...(19): siRNA sense strand
ggucguggaggaaacuuca

SEQ ID NO: 162341 - RNA, 19 nt, Homo sapiens
  misc_RNA (1)...(19): siRNA sense strand
guggaagcuacaaugauuu

SEQ ID NO: 162342 - RNA, 19 nt, Homo sapiens
  misc_RNA (1)...(19): siRNA sense strand
ggggauggcuauaauggau

SEQ ID NO: 162343 - RNA, 19 nt, Homo sapiens
  misc_RNA (1)...(19): siRNA sense strand
ggugguggaagcuacaaug

SEQ ID NO: 162344 - RNA, 19 nt, Homo sapiens
  misc_RNA (1)...(19): siRNA sense strand
gcuuugccuuuguaaccuu

SEQ ID NO: 162345 - RNA, 19 nt, Homo sapiens
  misc_RNA (1)...(19): siRNA sense strand
gaaaccaagguggcuaugg

SEQ ID NO: 162346 - RNA, 19 nt, Homo sapiens
  misc_RNA (1)...(19): siRNA sense strand
gaccgaggcaguggcaaga

SEQ ID NO: 162347 - RNA, 19 nt, Homo sapiens
  misc_RNA (1)...(19): siRNA sense strand
gugguggaagcuacaauga

SEQ ID NO: 162348 - RNA, 19 nt, Homo sapiens
  misc_RNA (1)...(19): siRNA sense strand
uggcaguggcagaagauuu

SEQ ID NO: 162349 - RNA, 19 nt, Homo sapiens
  misc_RNA (1)...(19): siRNA sense strand
gaacaucaccuuagagauu

SEQ ID NO: 162350 - RNA, 19 nt, Homo sapiens
  misc_RNA (1)...(19): siRNA sense strand
gagauuacuuugaggaaua

SEQ ID NO: 162351 - RNA, 19 nt, Homo sapiens
  misc_RNA (1)...(19): siRNA sense strand
uaaagaagauacugaggaa

SEQ ID NO: 162352 - RNA, 19 nt, Homo sapiens
  misc_RNA (1)...(19): siRNA sense strand
gaaauaccauaccaucaau

SEQ ID NO: 162353 - RNA, 19 nt, Homo sapiens
  misc_RNA (1)...(19): siRNA sense strand
gaaguggaaauuacaauga

SEQ ID NO: 162354 - RNA, 19 nt, Homo sapiens
  misc_RNA (1)...(19): siRNA sense strand
ccauugagauaauuacuga

SEQ ID NO: 162355 - RNA, 19 nt, Homo sapiens
  misc_RNA (1)...(19): siRNA sense strand
ugcaagaccucauucaauu

SEQ ID NO: 162356 - RNA, 19 nt, Homo sapiens
  misc_RNA (1)...(19): siRNA sense strand
gacaagaaaugcaggaagu

SEQ ID NO: 162357 - RNA, 19 nt, Homo sapiens
  misc_RNA (1)...(19): siRNA sense strand
gaacuacuacgaacaaugg

SEQ ID NO: 162358 - RNA, 19 nt, Homo sapiens
  misc_RNA (1)...(19): siRNA sense strand
ggagaguaguugagccaaa

SEQ ID NO: 162359 - RNA, 19 nt, Homo sapiens
  misc_RNA (1)...(19): siRNA sense strand
uaacuacgguccaaugaag

SEQ ID NO: 162360 - RNA, 19 nt, Homo sapiens
  misc_RNA (1)...(19): siRNA sense strand
ggaggcaacuuuggcuuug

SEQ ID NO: 162361 - RNA, 19 nt, Homo sapiens
  misc_RNA (1)...(19): siRNA sense strand
aaugaagaguggaaacuuu

SEQ ID NO: 162362 - RNA, 19 nt, Homo sapiens
  misc_RNA (1)...(19): siRNA sense strand
ugaggaacaucaccuuaga

SEQ ID NO: 162363 - RNA, 19 nt, Homo sapiens
  misc_RNA (1)...(19): siRNA sense strand
gauaggcagucuggaaaga

SEQ ID NO: 162364 - RNA, 19 nt, Homo sapiens
  misc_RNA (1)...(19): siRNA sense strand
gcucuuuauugguggcuua

SEQ ID NO: 162365 - RNA, 19 nt, Homo sapiens
  misc_RNA (1)...(19): siRNA sense strand
aacaucaccuuagagauua

SEQ ID NO: 162366 - RNA, 19 nt, Homo sapiens
  misc_RNA (1)...(19): siRNA sense strand
aggaggaucugauggauau

SEQ ID NO: 162367 - RNA, 19 nt, Homo sapiens
  misc_RNA (1)...(19): siRNA sense strand
gugaagaagcuguuuguug

SEQ ID NO: 162368 - RNA, 19 nt, Homo sapiens
  misc_RNA (1)...(19): siRNA sense strand
gagggauccugcaagcaaa

SEQ ID NO: 162369 - RNA, 19 nt, Homo sapiens
  misc_RNA (1)...(19): siRNA sense strand
ggaagaggaggcaacuuug

SEQ ID NO: 162370 - RNA, 19 nt, Homo sapiens
  misc_RNA (1)...(19): siRNA sense strand
caagaccucauucaauuga

SEQ ID NO: 162371 - RNA, 19 nt, Homo sapiens
  misc_RNA (1)...(19): siRNA sense strand
gcaagaccucauucaauug

SEQ ID NO: 162372 - RNA, 19 nt, Homo sapiens
  misc_RNA (1)...(19): siRNA sense strand
ccagcaaccuucuaacuac

SEQ ID NO: 162373 - RNA, 19 nt, Homo sapiens
  misc_RNA (1)...(19): siRNA sense strand
caagagaggaaucuggaaa

SEQ ID NO: 162374 - RNA, 19 nt, Homo sapiens
  misc_RNA (1)...(19): siRNA sense strand
gaacaauggggaaagcuua

SEQ ID NO: 162375 - RNA, 19 nt, Homo sapiens
  misc_RNA (1)...(19): siRNA sense strand
ggaaguggaaauuacaaug

SEQ ID NO: 162376 - RNA, 19 nt, Homo sapiens
  misc_RNA (1)...(19): siRNA sense strand
gaaauuauggaaguggaaa

SEQ ID NO: 162377 - RNA, 19 nt, Homo sapiens
  misc_RNA (1)...(19): siRNA sense strand
ggaccaggaccaggaagua

SEQ ID NO: 162378 - RNA, 19 nt, Homo sapiens
  misc_RNA (1)...(19): siRNA sense strand
caaaagaucaagaggauuu

SEQ ID NO: 162379 - RNA, 19 nt, Homo sapiens
  misc_RNA (1)...(19): siRNA sense strand
gaaguucagaguucuagga

SEQ ID NO: 162380 - RNA, 19 nt, Homo sapiens
  misc_RNA (1)...(19): siRNA sense strand
agaaauaccauaccaucaa

SEQ ID NO: 162381 - RNA, 19 nt, Homo sapiens
  misc_RNA (1)...(19): siRNA sense strand
gaggaacuacuacgaacaa

SEQ ID NO: 162382 - RNA, 19 nt, Homo sapiens
  misc_RNA (1)...(19): siRNA sense strand
gcuuuggcuuuguuacuuu

SEQ ID NO: 162383 - RNA, 19 nt, Homo sapiens
  misc_RNA (1)...(19): siRNA sense strand
gaucaagaggauuugguuu

SEQ ID NO: 162384 - RNA, 19 nt, Homo sapiens
  misc_RNA (1)...(19): siRNA sense strand
cagaagaaaguuugaggaa

SEQ ID NO: 162385 - RNA, 19 nt, Homo sapiens
  misc_RNA (1)...(19): siRNA sense strand
gaggaggaucugauggaua

SEQ ID NO: 162386 - RNA, 19 nt, Homo sapiens
  misc_RNA (1)...(19): siRNA sense strand
uggaagaggaggcaacuuu

SEQ ID NO: 162387 - RNA, 19 nt, Homo sapiens
  misc_RNA (1)...(19): siRNA sense strand
ggaggaaauuauggaagug

SEQ ID NO: 162388 - RNA, 19 nt, Homo sapiens
  misc_RNA (1)...(19): siRNA sense strand
ggauggcuauaauggguau

SEQ ID NO: 162389 - RNA, 19 nt, Homo sapiens
  misc_RNA (1)...(19): siRNA sense strand
uaggcagucuggaaagaaa

SEQ ID NO: 162390 - RNA, 19 nt, Homo sapiens
  misc_RNA (1)...(19): siRNA sense strand
caucaauggucauaaugca

SEQ ID NO: 162391 - RNA, 19 nt, Homo sapiens
  misc_RNA (1)...(19): siRNA sense strand
ggucauaaugcagaaguaa

SEQ ID NO: 162392 - RNA, 19 nt, Homo sapiens
  misc_RNA (1)...(19): siRNA sense strand
gcaggaaguucagaguucu

SEQ ID NO: 162393 - RNA, 19 nt, Homo sapiens
  misc_RNA (1)...(19): siRNA sense strand
gcuguuuguuggcggaauu

SEQ ID NO: 162394 - RNA, 19 nt, Homo sapiens
  misc_RNA (1)...(19): siRNA sense strand
gaagaggaggcaacuuugg

SEQ ID NO: 162395 - RNA, 19 nt, Homo sapiens
  misc_RNA (1)...(19): siRNA sense strand
gaccaggaccaggaaguaa

SEQ ID NO: 162396 - RNA, 19 nt, Homo sapiens
  misc_RNA (1)...(19): siRNA sense strand
aguggaaacuuugguggua

SEQ ID NO: 162397 - RNA, 19 nt, Homo sapiens
  misc_RNA (1)...(19): siRNA sense strand
ggaaauuauggaaguggaa

SEQ ID NO: 162398 - RNA, 19 nt, Homo sapiens
  misc_RNA (1)...(19): siRNA sense strand
ggaggaggaaauuauggaa

SEQ ID NO: 162399 - RNA, 19 nt, Homo sapiens
  misc_RNA (1)...(19): siRNA sense strand
gagaguaguugagccaaaa

SEQ ID NO: 162400 - RNA, 19 nt, Homo sapiens
  misc_RNA (1)...(19): siRNA sense strand
cuacggaggugguuaugac

SEQ ID NO: 162401 - RNA, 19 nt, Homo sapiens
  misc_RNA (1)...(19): siRNA sense strand
ggaggaagaggaggauaug

SEQ ID NO: 162402 - RNA, 19 nt, Homo sapiens
  misc_RNA (1)...(19): siRNA sense strand
ggaacuacuacgaacaaug

SEQ ID NO: 162403 - RNA, 19 nt, Homo sapiens
  misc_RNA (1)...(19): siRNA sense strand
gggcucauguaacugugaa

SEQ ID NO: 162404 - RNA, 19 nt, Homo sapiens
  misc_RNA (1)...(19): siRNA sense strand
guaaugagggauccugcaa

SEQ ID NO: 162405 - RNA, 19 nt, Homo sapiens
  misc_RNA (1)...(19): siRNA sense strand
ccuuagagauuacuuugag

SEQ ID NO: 162406 - RNA, 19 nt, Homo sapiens
  misc_RNA (1)...(19): siRNA sense strand
uccguaagcucuuuauugg

SEQ ID NO: 162407 - RNA, 19 nt, Homo sapiens
  misc_RNA (1)...(19): siRNA sense strand
gcaagagaggaaucuggaa

SEQ ID NO: 162408 - RNA, 19 nt, Homo sapiens
  misc_RNA (1)...(19): siRNA sense strand
ucauaaugcagaaguaaga

SEQ ID NO: 162409 - RNA, 19 nt, Homo sapiens
  misc_RNA (1)...(19): siRNA sense strand
ucauguaacugugaagaag

SEQ ID NO: 162410 - RNA, 19 nt, Homo sapiens
  misc_RNA (1)...(19): siRNA sense strand
caagaaaugcaggaaguuc

SEQ ID NO: 162411 - RNA, 19 nt, Homo sapiens
  misc_RNA (1)...(19): siRNA sense strand
ugagggauccugcaagcaa

SEQ ID NO: 162412 - RNA, 19 nt, Homo sapiens
  misc_RNA (1)...(19): siRNA sense strand
ggcuuuggcuuuguuacuu

SEQ ID NO: 162413 - RNA, 19 nt, Homo sapiens
  misc_RNA (1)...(19): siRNA sense strand
ugaaaccacagaagaaagu

SEQ ID NO: 162414 - RNA, 19 nt, Homo sapiens
  misc_RNA (1)...(19): siRNA sense strand
caacuauggaggaggaaau

SEQ ID NO: 162415 - RNA, 19 nt, Homo sapiens
  misc_RNA (1)...(19): siRNA sense strand
gaaaugcaggaaguucaga

SEQ ID NO: 162416 - RNA, 19 nt, Homo sapiens
  misc_RNA (1)...(19): siRNA sense strand
ugagauaauuacugauagg

SEQ ID NO: 162417 - RNA, 19 nt, Homo sapiens
  misc_RNA (1)...(19): siRNA sense strand
ggaauuaaagaagauacug

SEQ ID NO: 162418 - RNA, 19 nt, Homo sapiens
  misc_RNA (1)...(19): siRNA sense strand
caauggucauaaugcagaa

SEQ ID NO: 162419 - RNA, 19 nt, Homo sapiens
  misc_RNA (1)...(19): siRNA sense strand
aggaggaaauuauggaagu

SEQ ID NO: 162420 - RNA, 19 nt, Homo sapiens
  misc_RNA (1)...(19): siRNA sense strand
ugcaggaaguucagaguuc

SEQ ID NO: 162421 - RNA, 19 nt, Homo sapiens
  misc_RNA (1)...(19): siRNA sense strand
agaccucauucaauugaug

SEQ ID NO: 162422 - RNA, 19 nt, Homo sapiens
  misc_RNA (1)...(19): siRNA sense strand
gcuuugaaaccacagaaga

SEQ ID NO: 162423 - RNA, 19 nt, Homo sapiens
  misc_RNA (1)...(19): siRNA sense strand
gaaaccacagaagaaaguu

SEQ ID NO: 162424 - RNA, 19 nt, Homo sapiens
  misc_RNA (1)...(19): siRNA sense strand
aagaagauacugaggaaca

SEQ ID NO: 162425 - RNA, 19 nt, Homo sapiens
  misc_RNA (1)...(19): siRNA sense strand
cagaaauaccauaccauca

SEQ ID NO: 162426 - RNA, 19 nt, Homo sapiens
  misc_RNA (1)...(19): siRNA sense strand
caaugaagaguggaaacuu

SEQ ID NO: 162427 - RNA, 19 nt, Homo sapiens
  misc_RNA (1)...(19): siRNA sense strand
ggcuuaagcuuugaaacca

SEQ ID NO: 162428 - RNA, 19 nt, Homo sapiens
  misc_RNA (1)...(19): siRNA sense strand
gaggugguuaugacaacua

SEQ ID NO: 162429 - RNA, 19 nt, Homo sapiens
  misc_RNA (1)...(19): siRNA sense strand
auugguggcuuaagcuuug

SEQ ID NO: 162430 - RNA, 19 nt, Homo sapiens
  misc_RNA (1)...(19): siRNA sense strand
gcugcaagaccucauucaa

SEQ ID NO: 162431 - RNA, 19 nt, Homo sapiens
  misc_RNA (1)...(19): siRNA sense strand
uuauggaaguggaaauuac

SEQ ID NO: 162432 - RNA, 19 nt, Homo sapiens
  misc_RNA (1)...(19): siRNA sense strand
acaguuccguaagcucuuu

SEQ ID NO: 162433 - RNA, 19 nt, Homo sapiens
  misc_RNA (1)...(19): siRNA sense strand
agagauuacuuugaggaau

SEQ ID NO: 162434 - RNA, 19 nt, Homo sapiens
  misc_RNA (1)...(19): siRNA sense strand
cugcaagaccucauucaau

SEQ ID NO: 162435 - RNA, 19 nt, Homo sapiens
  misc_RNA (1)...(19): siRNA sense strand
cuauggaggaggaaauuau

SEQ ID NO: 162436 - RNA, 19 nt, Homo sapiens
  misc_RNA (1)...(19): siRNA sense strand
ucaagaggauuugguuuug

SEQ ID NO: 162437 - RNA, 19 nt, Homo sapiens
  misc_RNA (1)...(19): siRNA sense strand
aagaggcuuuggcuuuguu

SEQ ID NO: 162438 - RNA, 19 nt, Homo sapiens
  misc_RNA (1)...(19): siRNA sense strand
uaacugugaagaagcuguu

SEQ ID NO: 162439 - RNA, 19 nt, Homo sapiens
  misc_RNA (1)...(19): siRNA sense strand
gaagauacugaggaacauc

SEQ ID NO: 162440 - RNA, 19 nt, Homo sapiens
  misc_RNA (1)...(19): siRNA sense strand
uggcggaauuaaagaagau

SEQ ID NO: 162441 - RNA, 19 nt, Homo sapiens
  misc_RNA (1)...(19): siRNA sense strand
gaagaguggaaacuuuggu

SEQ ID NO: 162442 - RNA, 19 nt, Homo sapiens
  misc_RNA (1)...(19): siRNA sense strand
auaaccagcaaccuucuaa

SEQ ID NO: 162443 - RNA, 19 nt, Homo sapiens
  misc_RNA (1)...(19): siRNA sense strand
gggcuacggaggugguuau

SEQ ID NO: 162444 - RNA, 19 nt, Homo sapiens
  misc_RNA (1)...(19): siRNA sense strand
uagaggaggaucugaugga

SEQ ID NO: 162445 - RNA, 19 nt, Homo sapiens
  misc_RNA (1)...(19): siRNA sense strand
caccuuagagauuacuuug

SEQ ID NO: 162446 - RNA, 19 nt, Homo sapiens
  misc_RNA (1)...(19): siRNA sense strand
agaagauacugaggaacau

SEQ ID NO: 162447 - RNA, 19 nt, Homo sapiens
  misc_RNA (1)...(19): siRNA sense strand
aagaggauuugguuuugua

SEQ ID NO: 162448 - RNA, 19 nt, Homo sapiens
  misc_RNA (1)...(19): siRNA sense strand
ggaacaucaccuuagagau

SEQ ID NO: 162449 - RNA, 19 nt, Homo sapiens
  misc_RNA (1)...(19): siRNA sense strand
gaacaucaccuuagagauu

SEQ ID NO: 162450 - RNA, 19 nt, Homo sapiens
  misc_RNA (1)...(19): siRNA sense strand
gagauuacuuugaggaaua

SEQ ID NO: 162451 - RNA, 19 nt, Homo sapiens
  misc_RNA (1)...(19): siRNA sense strand
uaaagaagauacugaggaa

SEQ ID NO: 162452 - RNA, 19 nt, Homo sapiens
  misc_RNA (1)...(19): siRNA sense strand
gaaauaccauaccaucaau

SEQ ID NO: 162453 - RNA, 19 nt, Homo sapiens
  misc_RNA (1)...(19): siRNA sense strand
gaaguggaaauuacaauga

SEQ ID NO: 162454 - RNA, 19 nt, Homo sapiens
  misc_RNA (1)...(19): siRNA sense strand
ccauugagauaauuacuga

SEQ ID NO: 162455 - RNA, 19 nt, Homo sapiens
  misc_RNA (1)...(19): siRNA sense strand
ugcaagaccucauucaauu

SEQ ID NO: 162456 - RNA, 19 nt, Homo sapiens
  misc_RNA (1)...(19): siRNA sense strand
gacaagaaaugcaggaagu

SEQ ID NO: 162457 - RNA, 19 nt, Homo sapiens
  misc_RNA (1)...(19): siRNA sense strand
gaacuacuacgaacaaugg

SEQ ID NO: 162458 - RNA, 19 nt, Homo sapiens
  misc_RNA (1)...(19): siRNA sense strand
ggagaguaguugagccaaa

SEQ ID NO: 162459 - RNA, 19 nt, Homo sapiens
  misc_RNA (1)...(19): siRNA sense strand
uaacuacgguccaaugaag

SEQ ID NO: 162460 - RNA, 19 nt, Homo sapiens
  misc_RNA (1)...(19): siRNA sense strand
ggaggcaacuuuggcuuug

SEQ ID NO: 162461 - RNA, 19 nt, Homo sapiens
  misc_RNA (1)...(19): siRNA sense strand
aaugaagaguggaaacuuu

SEQ ID NO: 162462 - RNA, 19 nt, Homo sapiens
  misc_RNA (1)...(19): siRNA sense strand
ugaggaacaucaccuuaga

SEQ ID NO: 162463 - RNA, 19 nt, Homo sapiens
  misc_RNA (1)...(19): siRNA sense strand
gauaggcagucuggaaaga

SEQ ID NO: 162464 - RNA, 19 nt, Homo sapiens
  misc_RNA (1)...(19): siRNA sense strand
gcucuuuauugguggcuua

SEQ ID NO: 162465 - RNA, 19 nt, Homo sapiens
  misc_RNA (1)...(19): siRNA sense strand
aacaucaccuuagagauua

SEQ ID NO: 162466 - RNA, 19 nt, Homo sapiens
  misc_RNA (1)...(19): siRNA sense strand
aggaggaucugauggauau

SEQ ID NO: 162467 - RNA, 19 nt, Homo sapiens
  misc_RNA (1)...(19): siRNA sense strand
gugaagaagcuguuuguug

SEQ ID NO: 162468 - RNA, 19 nt, Homo sapiens
  misc_RNA (1)...(19): siRNA sense strand
gagggauccugcaagcaaa

SEQ ID NO: 162469 - RNA, 19 nt, Homo sapiens
  misc_RNA (1)...(19): siRNA sense strand
ggaagaggaggcaacuuug

SEQ ID NO: 162470 - RNA, 19 nt, Homo sapiens
  misc_RNA (1)...(19): siRNA sense strand
caagaccucauucaauuga

SEQ ID NO: 162471 - RNA, 19 nt, Homo sapiens
  misc_RNA (1)...(19): siRNA sense strand
gcaagaccucauucaauug

SEQ ID NO: 162472 - RNA, 19 nt, Homo sapiens
  misc_RNA (1)...(19): siRNA sense strand
ccagcaaccuucuaacuac

SEQ ID NO: 162473 - RNA, 19 nt, Homo sapiens
  misc_RNA (1)...(19): siRNA sense strand
caagagaggaaucuggaaa

SEQ ID NO: 162474 - RNA, 19 nt, Homo sapiens
  misc_RNA (1)...(19): siRNA sense strand
gaacaauggggaaagcuua

SEQ ID NO: 162475 - RNA, 19 nt, Homo sapiens
  misc_RNA (1)...(19): siRNA sense strand
ggaaguggaaauuacaaug

SEQ ID NO: 162476 - RNA, 19 nt, Homo sapiens
  misc_RNA (1)...(19): siRNA sense strand
gaaauuauggaaguggaaa

SEQ ID NO: 162477 - RNA, 19 nt, Homo sapiens
  misc_RNA (1)...(19): siRNA sense strand
ggaccaggaccaggaagua

SEQ ID NO: 162478 - RNA, 19 nt, Homo sapiens
  misc_RNA (1)...(19): siRNA sense strand
caaaagaucaagaggauuu

SEQ ID NO: 162479 - RNA, 19 nt, Homo sapiens
  misc_RNA (1)...(19): siRNA sense strand
gaaguucagaguucuagga

SEQ ID NO: 162480 - RNA, 19 nt, Homo sapiens
  misc_RNA (1)...(19): siRNA sense strand
agaaauaccauaccaucaa

SEQ ID NO: 162481 - RNA, 19 nt, Homo sapiens
  misc_RNA (1)...(19): siRNA sense strand
gaggaacuacuacgaacaa

SEQ ID NO: 162482 - RNA, 19 nt, Homo sapiens
  misc_RNA (1)...(19): siRNA sense strand
gcuuuggcuuuguuacuuu

SEQ ID NO: 162483 - RNA, 19 nt, Homo sapiens
  misc_RNA (1)...(19): siRNA sense strand
gaucaagaggauuugguuu

SEQ ID NO: 162484 - RNA, 19 nt, Homo sapiens
  misc_RNA (1)...(19): siRNA sense strand
cagaagaaaguuugaggaa

SEQ ID NO: 162485 - RNA, 19 nt, Homo sapiens
  misc_RNA (1)...(19): siRNA sense strand
gaggaggaucugauggaua

SEQ ID NO: 162486 - RNA, 19 nt, Homo sapiens
  misc_RNA (1)...(19): siRNA sense strand
uggaagaggaggcaacuuu

SEQ ID NO: 162487 - RNA, 19 nt, Homo sapiens
  misc_RNA (1)...(19): siRNA sense strand
ggaggaaauuauggaagug

SEQ ID NO: 162488 - RNA, 19 nt, Homo sapiens
  misc_RNA (1)...(19): siRNA sense strand
ggauggcuauaauggguau

SEQ ID NO: 162489 - RNA, 19 nt, Homo sapiens
  misc_RNA (1)...(19): siRNA sense strand
uaggcagucuggaaagaaa

SEQ ID NO: 162490 - RNA, 19 nt, Homo sapiens
  misc_RNA (1)...(19): siRNA sense strand
caucaauggucauaaugca

SEQ ID NO: 162491 - RNA, 19 nt, Homo sapiens
  misc_RNA (1)...(19): siRNA sense strand
ggucauaaugcagaaguaa

SEQ ID NO: 162492 - RNA, 19 nt, Homo sapiens
  misc_RNA (1)...(19): siRNA sense strand
gcaggaaguucagaguucu

SEQ ID NO: 162493 - RNA, 19 nt, Homo sapiens
  misc_RNA (1)...(19): siRNA sense strand
gcuguuuguuggcggaauu

SEQ ID NO: 162494 - RNA, 19 nt, Homo sapiens
  misc_RNA (1)...(19): siRNA sense strand
gaagaggaggcaacuuugg

SEQ ID NO: 162495 - RNA, 19 nt, Homo sapiens
  misc_RNA (1)...(19): siRNA sense strand
gaccaggaccaggaaguaa

SEQ ID NO: 162496 - RNA, 19 nt, Homo sapiens
  misc_RNA (1)...(19): siRNA sense strand
aguggaaacuuugguggua

SEQ ID NO: 162497 - RNA, 19 nt, Homo sapiens
  misc_RNA (1)...(19): siRNA sense strand
ggaaauuauggaaguggaa

SEQ ID NO: 162498 - RNA, 19 nt, Homo sapiens
  misc_RNA (1)...(19): siRNA sense strand
ggaggaggaaauuauggaa

SEQ ID NO: 162499 - RNA, 19 nt, Homo sapiens
  misc_RNA (1)...(19): siRNA sense strand
gagaguaguugagccaaaa

SEQ ID NO: 162500 - RNA, 19 nt, Homo sapiens
  misc_RNA (1)...(19): siRNA sense strand
cuacggaggugguuaugac

SEQ ID NO: 162501 - RNA, 19 nt, Homo sapiens
  misc_RNA (1)...(19): siRNA sense strand
ggaggaagaggaggauaug

SEQ ID NO: 162502 - RNA, 19 nt, Homo sapiens
  misc_RNA (1)...(19): siRNA sense strand
ggaacuacuacgaacaaug

SEQ ID NO: 162503 - RNA, 19 nt, Homo sapiens
  misc_RNA (1)...(19): siRNA sense strand
gggcucauguaacugugaa

SEQ ID NO: 162504 - RNA, 19 nt, Homo sapiens
  misc_RNA (1)...(19): siRNA sense strand
guaaugagggauccugcaa

SEQ ID NO: 162505 - RNA, 19 nt, Homo sapiens
  misc_RNA (1)...(19): siRNA sense strand
ccuuagagauuacuuugag

SEQ ID NO: 162506 - RNA, 19 nt, Homo sapiens
  misc_RNA (1)...(19): siRNA sense strand
uccguaagcucuuuauugg

SEQ ID NO: 162507 - RNA, 19 nt, Homo sapiens
  misc_RNA (1)...(19): siRNA sense strand
gcaagagaggaaucuggaa

SEQ ID NO: 162508 - RNA, 19 nt, Homo sapiens
  misc_RNA (1)...(19): siRNA sense strand
ucauaaugcagaaguaaga

SEQ ID NO: 162509 - RNA, 19 nt, Homo sapiens
  misc_RNA (1)...(19): siRNA sense strand
ucauguaacugugaagaag

SEQ ID NO: 162510 - RNA, 19 nt, Homo sapiens
  misc_RNA (1)...(19): siRNA sense strand
caagaaaugcaggaaguuc

SEQ ID NO: 162511 - RNA, 19 nt, Homo sapiens
  misc_RNA (1)...(19): siRNA sense strand
ugagggauccugcaagcaa

SEQ ID NO: 162512 - RNA, 19 nt, Homo sapiens
  misc_RNA (1)...(19): siRNA sense strand
ggcuuuggcuuuguuacuu

SEQ ID NO: 162513 - RNA, 19 nt, Homo sapiens
  misc_RNA (1)...(19): siRNA sense strand
ugaaaccacagaagaaagu

SEQ ID NO: 162514 - RNA, 19 nt, Homo sapiens
  misc_RNA (1)...(19): siRNA sense strand
caacuauggaggaggaaau

SEQ ID NO: 162515 - RNA, 19 nt, Homo sapiens
  misc_RNA (1)...(19): siRNA sense strand
gaaaugcaggaaguucaga

SEQ ID NO: 162516 - RNA, 19 nt, Homo sapiens
  misc_RNA (1)...(19): siRNA sense strand
ugagauaauuacugauagg

SEQ ID NO: 162517 - RNA, 19 nt, Homo sapiens
  misc_RNA (1)...(19): siRNA sense strand
ggaauuaaagaagauacug

SEQ ID NO: 162518 - RNA, 19 nt, Homo sapiens
  misc_RNA (1)...(19): siRNA sense strand
caauggucauaaugcagaa

SEQ ID NO: 162519 - RNA, 19 nt, Homo sapiens
  misc_RNA (1)...(19): siRNA sense strand
aggaggaaauuauggaagu

SEQ ID NO: 162520 - RNA, 19 nt, Homo sapiens
  misc_RNA (1)...(19): siRNA sense strand
ugcaggaaguucagaguuc

SEQ ID NO: 162521 - RNA, 19 nt, Homo sapiens
  misc_RNA (1)...(19): siRNA sense strand
agaccucauucaauugaug

SEQ ID NO: 162522 - RNA, 19 nt, Homo sapiens
  misc_RNA (1)...(19): siRNA sense strand
gcuuugaaaccacagaaga

SEQ ID NO: 162523 - RNA, 19 nt, Homo sapiens
  misc_RNA (1)...(19): siRNA sense strand
gaaaccacagaagaaaguu

SEQ ID NO: 162524 - RNA, 19 nt, Homo sapiens
  misc_RNA (1)...(19): siRNA sense strand
aagaagauacugaggaaca

SEQ ID NO: 162525 - RNA, 19 nt, Homo sapiens
  misc_RNA (1)...(19): siRNA sense strand
cagaaauaccauaccauca

SEQ ID NO: 162526 - RNA, 19 nt, Homo sapiens
  misc_RNA (1)...(19): siRNA sense strand
caaugaagaguggaaacuu

SEQ ID NO: 162527 - RNA, 19 nt, Homo sapiens
  misc_RNA (1)...(19): siRNA sense strand
ggcuuaagcuuugaaacca

SEQ ID NO: 162528 - RNA, 19 nt, Homo sapiens
  misc_RNA (1)...(19): siRNA sense strand
gaggugguuaugacaacua

SEQ ID NO: 162529 - RNA, 19 nt, Homo sapiens
  misc_RNA (1)...(19): siRNA sense strand
auugguggcuuaagcuuug

SEQ ID NO: 162530 - RNA, 19 nt, Homo sapiens
  misc_RNA (1)...(19): siRNA sense strand
gcugcaagaccucauucaa

SEQ ID NO: 162531 - RNA, 19 nt, Homo sapiens
  misc_RNA (1)...(19): siRNA sense strand
uuauggaaguggaaauuac

SEQ ID NO: 162532 - RNA, 19 nt, Homo sapiens
  misc_RNA (1)...(19): siRNA sense strand
acaguuccguaagcucuuu

SEQ ID NO: 162533 - RNA, 19 nt, Homo sapiens
  misc_RNA (1)...(19): siRNA sense strand
agagauuacuuugaggaau

SEQ ID NO: 162534 - RNA, 19 nt, Homo sapiens
  misc_RNA (1)...(19): siRNA sense strand
cugcaagaccucauucaau

SEQ ID NO: 162535 - RNA, 19 nt, Homo sapiens
  misc_RNA (1)...(19): siRNA sense strand
cuauggaggaggaaauuau

SEQ ID NO: 162536 - RNA, 19 nt, Homo sapiens
  misc_RNA (1)...(19): siRNA sense strand
ucaagaggauuugguuuug

SEQ ID NO: 162537 - RNA, 19 nt, Homo sapiens
  misc_RNA (1)...(19): siRNA sense strand
aagaggcuuuggcuuuguu

SEQ ID NO: 162538 - RNA, 19 nt, Homo sapiens
  misc_RNA (1)...(19): siRNA sense strand
uaacugugaagaagcuguu

SEQ ID NO: 162539 - RNA, 19 nt, Homo sapiens
  misc_RNA (1)...(19): siRNA sense strand
gaagauacugaggaacauc

SEQ ID NO: 162540 - RNA, 19 nt, Homo sapiens
  misc_RNA (1)...(19): siRNA sense strand
uggcggaauuaaagaagau

SEQ ID NO: 162541 - RNA, 19 nt, Homo sapiens
  misc_RNA (1)...(19): siRNA sense strand
gaagaguggaaacuuuggu

SEQ ID NO: 162542 - RNA, 19 nt, Homo sapiens
  misc_RNA (1)...(19): siRNA sense strand
auaaccagcaaccuucuaa

SEQ ID NO: 162543 - RNA, 19 nt, Homo sapiens
  misc_RNA (1)...(19): siRNA sense strand
gggcuacggaggugguuau

SEQ ID NO: 162544 - RNA, 19 nt, Homo sapiens
  misc_RNA (1)...(19): siRNA sense strand
uagaggaggaucugaugga

SEQ ID NO: 162545 - RNA, 19 nt, Homo sapiens
  misc_RNA (1)...(19): siRNA sense strand
caccuuagagauuacuuug

SEQ ID NO: 162546 - RNA, 19 nt, Homo sapiens
  misc_RNA (1)...(19): siRNA sense strand
agaagauacugaggaacau

SEQ ID NO: 162547 - RNA, 19 nt, Homo sapiens
  misc_RNA (1)...(19): siRNA sense strand
aagaggauuugguuuugua

SEQ ID NO: 162548 - RNA, 19 nt, Homo sapiens
  misc_RNA (1)...(19): siRNA sense strand
ggaacaucaccuuagagau

SEQ ID NO: 162549 - RNA, 19 nt, Homo sapiens
  misc_RNA (1)...(19): siRNA sense strand
ggaggaagccgaucugaua

SEQ ID NO: 162550 - RNA, 19 nt, Homo sapiens
  misc_RNA (1)...(19): siRNA sense strand
gaaguacucuugaugaaag

SEQ ID NO: 162551 - RNA, 19 nt, Homo sapiens
  misc_RNA (1)...(19): siRNA sense strand
gaugauggguauucuacua

SEQ ID NO: 162552 - RNA, 19 nt, Homo sapiens
  misc_RNA (1)...(19): siRNA sense strand
ugagaaagcucuugaagca

SEQ ID NO: 162553 - RNA, 19 nt, Homo sapiens
  misc_RNA (1)...(19): siRNA sense strand
uaagagaucugcaccuuca

SEQ ID NO: 162554 - RNA, 19 nt, Homo sapiens
  misc_RNA (1)...(19): siRNA sense strand
uggcaaauauggacgaaua

SEQ ID NO: 162555 - RNA, 19 nt, Homo sapiens
  misc_RNA (1)...(19): siRNA sense strand
ccagagacaugaauggaaa

SEQ ID NO: 162556 - RNA, 19 nt, Homo sapiens
  misc_RNA (1)...(19): siRNA sense strand
gaaagucauuagauggaaa

SEQ ID NO: 162557 - RNA, 19 nt, Homo sapiens
  misc_RNA (1)...(19): siRNA sense strand
gaauauagcgauagagaug

SEQ ID NO: 162558 - RNA, 19 nt, Homo sapiens
  misc_RNA (1)...(19): siRNA sense strand
caggaaagcucuucauugg

SEQ ID NO: 162559 - RNA, 19 nt, Homo sapiens
  misc_RNA (1)...(19): siRNA sense strand
guagagauguuuauuuguc

SEQ ID NO: 162560 - RNA, 19 nt, Homo sapiens
  misc_RNA (1)...(19): siRNA sense strand
gaaagcucuugaagcagua

SEQ ID NO: 162561 - RNA, 19 nt, Homo sapiens
  misc_RNA (1)...(19): siRNA sense strand
cuacagagauucauaugag

SEQ ID NO: 162562 - RNA, 19 nt, Homo sapiens
  misc_RNA (1)...(19): siRNA sense strand
ggaaagucauuagauggaa

SEQ ID NO: 162563 - RNA, 19 nt, Homo sapiens
  misc_RNA (1)...(19): siRNA sense strand
aaagacagcuauucaagca

SEQ ID NO: 162564 - RNA, 19 nt, Homo sapiens
  misc_RNA (1)...(19): siRNA sense strand
gagaauauagcgauagaga

SEQ ID NO: 162565 - RNA, 19 nt, Homo sapiens
  misc_RNA (1)...(19): siRNA sense strand
ucaagagaauauagcgaua

SEQ ID NO: 162566 - RNA, 19 nt, Homo sapiens
  misc_RNA (1)...(19): siRNA sense strand
ggagguuccuacagagauu

SEQ ID NO: 162567 - RNA, 19 nt, Homo sapiens
  misc_RNA (1)...(19): siRNA sense strand
gauuauacuuaccgugauu

SEQ ID NO: 162568 - RNA, 19 nt, Homo sapiens
  misc_RNA (1)...(19): siRNA sense strand
gagauucauaugagaguua

SEQ ID NO: 162569 - RNA, 19 nt, Homo sapiens
  misc_RNA (1)...(19): siRNA sense strand
agacaugaauggaaaguca

SEQ ID NO: 162570 - RNA, 19 nt, Homo sapiens
  misc_RNA (1)...(19): siRNA sense strand
ucguagagauguuuauuug

SEQ ID NO: 162571 - RNA, 19 nt, Homo sapiens
  misc_RNA (1)...(19): siRNA sense strand
uaugguaacucacguagug

SEQ ID NO: 162572 - RNA, 19 nt, Homo sapiens
  misc_RNA (1)...(19): siRNA sense strand
gaacaagccaccaaaccau

SEQ ID NO: 162573 - RNA, 19 nt, Homo sapiens
  misc_RNA (1)...(19): siRNA sense strand
gaagcagucgcuaugauga

SEQ ID NO: 162574 - RNA, 19 nt, Homo sapiens
  misc_RNA (1)...(19): siRNA sense strand
aagcagagauuacccaagu

SEQ ID NO: 162575 - RNA, 19 nt, Homo sapiens
  misc_RNA (1)...(19): siRNA sense strand
ggaaacaaaugagaaagcu

SEQ ID NO: 162576 - RNA, 19 nt, Homo sapiens
  misc_RNA (1)...(19): siRNA sense strand
gaaccgcugcccucucgua

SEQ ID NO: 162577 - RNA, 19 nt, Homo sapiens
  misc_RNA (1)...(19): siRNA sense strand
ggaaguacucuugaugaaa

SEQ ID NO: 162578 - RNA, 19 nt, Homo sapiens
  misc_RNA (1)...(19): siRNA sense strand
caaaugagaaagcucuuga

SEQ ID NO: 162579 - RNA, 19 nt, Homo sapiens
  misc_RNA (1)...(19): siRNA sense strand
cgauagagauggauauggu

SEQ ID NO: 162580 - RNA, 19 nt, Homo sapiens
  misc_RNA (1)...(19): siRNA sense strand
uacccaaguucucgugaua

SEQ ID NO: 162581 - RNA, 19 nt, Homo sapiens
  misc_RNA (1)...(19): siRNA sense strand
ugacggauaugguggaagu

SEQ ID NO: 162582 - RNA, 19 nt, Homo sapiens
  misc_RNA (1)...(19): siRNA sense strand
ggaagcagucgcuaugaug

SEQ ID NO: 162583 - RNA, 19 nt, Homo sapiens
  misc_RNA (1)...(19): siRNA sense strand
ugaaagaccgugaaaccaa

SEQ ID NO: 162584 - RNA, 19 nt, Homo sapiens
  misc_RNA (1)...(19): siRNA sense strand
uggaagagauaguuaugga

SEQ ID NO: 162585 - RNA, 19 nt, Homo sapiens
  misc_RNA (1)...(19): siRNA sense strand
ccaggaaagcucuucauug

SEQ ID NO: 162586 - RNA, 19 nt, Homo sapiens
  misc_RNA (1)...(19): siRNA sense strand
cagcucacgugacggauau

SEQ ID NO: 162587 - RNA, 19 nt, Homo sapiens
  misc_RNA (1)...(19): siRNA sense strand
uggaaguacucuugaugaa

SEQ ID NO: 162588 - RNA, 19 nt, Homo sapiens
  misc_RNA (1)...(19): siRNA sense strand
gcagagauuacccaaguuc

SEQ ID NO: 162589 - RNA, 19 nt, Homo sapiens
  misc_RNA (1)...(19): siRNA sense strand
ccuaagagaucugcaccuu

SEQ ID NO: 162590 - RNA, 19 nt, Homo sapiens
  misc_RNA (1)...(19): siRNA sense strand
ggaacaagccaccaaacca

SEQ ID NO: 162591 - RNA, 19 nt, Homo sapiens
  misc_RNA (1)...(19): siRNA sense strand
gacuauccaucaagagaau

SEQ ID NO: 162592 - RNA, 19 nt, Homo sapiens
  misc_RNA (1)...(19): siRNA sense strand
ggaagccgaucugauagag

SEQ ID NO: 162593 - RNA, 19 nt, Homo sapiens
  misc_RNA (1)...(19): siRNA sense strand
gcagucgcuaugaugauua

SEQ ID NO: 162594 - RNA, 19 nt, Homo sapiens
  misc_RNA (1)...(19): siRNA sense strand
gcuauucaagcagagauua

SEQ ID NO: 162595 - RNA, 19 nt, Homo sapiens
  misc_RNA (1)...(19): siRNA sense strand
gcagcucacgugacggaua

SEQ ID NO: 162596 - RNA, 19 nt, Homo sapiens
  misc_RNA (1)...(19): siRNA sense strand
aagagaauauagcgauaga

SEQ ID NO: 162597 - RNA, 19 nt, Homo sapiens
  misc_RNA (1)...(19): siRNA sense strand
gcaccaccaccacgagauu

SEQ ID NO: 162598 - RNA, 19 nt, Homo sapiens
  misc_RNA (1)...(19): siRNA sense strand
gcuccuguaucacguggaa

SEQ ID NO: 162599 - RNA, 19 nt, Homo sapiens
  misc_RNA (1)...(19): siRNA sense strand
caagagaugauggguauuc

SEQ ID NO: 162600 - RNA, 19 nt, Homo sapiens
  misc_RNA (1)...(19): siRNA sense strand
ugauggguauucuacuaaa

SEQ ID NO: 162601 - RNA, 19 nt, Homo sapiens
  misc_RNA (1)...(19): siRNA sense strand
ucaagcagccgaagugauc

SEQ ID NO: 162602 - RNA, 19 nt, Homo sapiens
  misc_RNA (1)...(19): siRNA sense strand
guggaagucgagacaguua

SEQ ID NO: 162603 - RNA, 19 nt, Homo sapiens
  misc_RNA (1)...(19): siRNA sense strand
caaguucucgugauacuag

SEQ ID NO: 162604 - RNA, 19 nt, Homo sapiens
  misc_RNA (1)...(19): siRNA sense strand
caaauauggacgaauagug

SEQ ID NO: 162605 - RNA, 19 nt, Homo sapiens
  misc_RNA (1)...(19): siRNA sense strand
gaaaccaacaaaucaagag

SEQ ID NO: 162606 - RNA, 19 nt, Homo sapiens
  misc_RNA (1)...(19): siRNA sense strand
cgagacaguuacucaagca

SEQ ID NO: 162607 - RNA, 19 nt, Homo sapiens
  misc_RNA (1)...(19): siRNA sense strand
ggaugcagccagagacaug

SEQ ID NO: 162608 - RNA, 19 nt, Homo sapiens
  misc_RNA (1)...(19): siRNA sense strand
gagaugauggguauucuac

SEQ ID NO: 162609 - RNA, 19 nt, Homo sapiens
  misc_RNA (1)...(19): siRNA sense strand
ggaccaccaccaagaagug

SEQ ID NO: 162610 - RNA, 19 nt, Homo sapiens
  misc_RNA (1)...(19): siRNA sense strand
ccaguucacgugaugacua

SEQ ID NO: 162611 - RNA, 19 nt, Homo sapiens
  misc_RNA (1)...(19): siRNA sense strand
caccacgagauuauacuua

SEQ ID NO: 162612 - RNA, 19 nt, Homo sapiens
  misc_RNA (1)...(19): siRNA sense strand
gaugaaagaccgugaaacc

SEQ ID NO: 162613 - RNA, 19 nt, Homo sapiens
  misc_RNA (1)...(19): siRNA sense strand
aaguggagguuccuacaga

SEQ ID NO: 162614 - RNA, 19 nt, Homo sapiens
  misc_RNA (1)...(19): siRNA sense strand
guggaaguacucuugauga

SEQ ID NO: 162615 - RNA, 19 nt, Homo sapiens
  misc_RNA (1)...(19): siRNA sense strand
gguggaagcagucgcuaug

SEQ ID NO: 162616 - RNA, 19 nt, Homo sapiens
  misc_RNA (1)...(19): siRNA sense strand
caguucacgugaugacuau

SEQ ID NO: 162617 - RNA, 19 nt, Homo sapiens
  misc_RNA (1)...(19): siRNA sense strand
gauggguauucuacuaaag

SEQ ID NO: 162618 - RNA, 19 nt, Homo sapiens
  misc_RNA (1)...(19): siRNA sense strand
ggaugacgguggauauucc

SEQ ID NO: 162619 - RNA, 19 nt, Homo sapiens
  misc_RNA (1)...(19): siRNA sense strand
aagcagaucgcccaggaaa

SEQ ID NO: 162620 - RNA, 19 nt, Homo sapiens
  misc_RNA (1)...(19): siRNA sense strand
ucacguagugcuccaccua

SEQ ID NO: 162621 - RNA, 19 nt, Homo sapiens
  misc_RNA (1)...(19): siRNA sense strand
gcaaauauggacgaauagu

SEQ ID NO: 162622 - RNA, 19 nt, Homo sapiens
  misc_RNA (1)...(19): siRNA sense strand
cuaaagacagcuauucaag

SEQ ID NO: 162623 - RNA, 19 nt, Homo sapiens
  misc_RNA (1)...(19): siRNA sense strand
cuauucagaucauccaagu

SEQ ID NO: 162624 - RNA, 19 nt, Homo sapiens
  misc_RNA (1)...(19): siRNA sense strand
gcagaucgcccaggaaagc

SEQ ID NO: 162625 - RNA, 19 nt, Homo sapiens
  misc_RNA (1)...(19): siRNA sense strand
ggacgaauaguggaaguac

SEQ ID NO: 162626 - RNA, 19 nt, Homo sapiens
  misc_RNA (1)...(19): siRNA sense strand
uacagagauucauaugaga

SEQ ID NO: 162627 - RNA, 19 nt, Homo sapiens
  misc_RNA (1)...(19): siRNA sense strand
ccaccaccacgagauuaua

SEQ ID NO: 162628 - RNA, 19 nt, Homo sapiens
  misc_RNA (1)...(19): siRNA sense strand
gaggaagccgaucugauag

SEQ ID NO: 162629 - RNA, 19 nt, Homo sapiens
  misc_RNA (1)...(19): siRNA sense strand
ggcuuaauacggaaacaaa

SEQ ID NO: 162630 - RNA, 19 nt, Homo sapiens
  misc_RNA (1)...(19): siRNA sense strand
auacuuaccgugauuaugg

SEQ ID NO: 162631 - RNA, 19 nt, Homo sapiens
  misc_RNA (1)...(19): siRNA sense strand
ugaaaccaacaaaucaaga

SEQ ID NO: 162632 - RNA, 19 nt, Homo sapiens
  misc_RNA (1)...(19): siRNA sense strand
gaagcagaucgcccaggaa

SEQ ID NO: 162633 - RNA, 19 nt, Homo sapiens
  misc_RNA (1)...(19): siRNA sense strand
uggaagcagucgcuaugau

SEQ ID NO: 162634 - RNA, 19 nt, Homo sapiens
  misc_RNA (1)...(19): siRNA sense strand
guuccuacagagauucaua

SEQ ID NO: 162635 - RNA, 19 nt, Homo sapiens
  misc_RNA (1)...(19): siRNA sense strand
gauuauggucauuccaguu

SEQ ID NO: 162636 - RNA, 19 nt, Homo sapiens
  misc_RNA (1)...(19): siRNA sense strand
gccagagacaugaauggaa

SEQ ID NO: 162637 - RNA, 19 nt, Homo sapiens
  misc_RNA (1)...(19): siRNA sense strand
cgugauuccuacagcaguu

SEQ ID NO: 162638 - RNA, 19 nt, Homo sapiens
  misc_RNA (1)...(19): siRNA sense strand
ugacuauccaucaagagaa

SEQ ID NO: 162639 - RNA, 19 nt, Homo sapiens
  misc_RNA (1)...(19): siRNA sense strand
caagaggauuugcuuuugu

SEQ ID NO: 162640 - RNA, 19 nt, Homo sapiens
  misc_RNA (1)...(19): siRNA sense strand
aauaguggaaguacucuug

SEQ ID NO: 162641 - RNA, 19 nt, Homo sapiens
  misc_RNA (1)...(19): siRNA sense strand
caagagaauauagcgauag

SEQ ID NO: 162642 - RNA, 19 nt, Homo sapiens
  misc_RNA (1)...(19): siRNA sense strand
cggguuggcagacaagaaa

SEQ ID NO: 162643 - RNA, 19 nt, Homo sapiens
  misc_RNA (1)...(19): siRNA sense strand
ucaagaggauuugcuuuug

SEQ ID NO: 162644 - RNA, 19 nt, Homo sapiens
  misc_RNA (1)...(19): siRNA sense strand
ucacguggaagagauaguu

SEQ ID NO: 162645 - RNA, 19 nt, Homo sapiens
  misc_RNA (1)...(19): siRNA sense strand
cuacuaaagacagcuauuc

SEQ ID NO: 162646 - RNA, 19 nt, Homo sapiens
  misc_RNA (1)...(19): siRNA sense strand
aagaggaccaccaccaaga

SEQ ID NO: 162647 - RNA, 19 nt, Homo sapiens
  misc_RNA (1)...(19): siRNA sense strand
gucgugaucgugacuauuc

SEQ ID NO: 162648 - RNA, 19 nt, Homo sapiens
  misc_RNA (1)...(19): siRNA sense strand
uguaucacguggaagagau

SEQ ID NO: 162649 - RNA, 19 nt, Homo sapiens
  misc_RNA (1)...(19): siRNA sense strand
gcauaaagaucauccuuga

SEQ ID NO: 162650 - RNA, 19 nt, Homo sapiens
  misc_RNA (1)...(19): siRNA sense strand
ugacagaguuguucuuauu

SEQ ID NO: 162651 - RNA, 19 nt, Homo sapiens
  misc_RNA (1)...(19): siRNA sense strand
gcagauggcuuaugaacca

SEQ ID NO: 162652 - RNA, 19 nt, Homo sapiens
  misc_RNA (1)...(19): siRNA sense strand
gagcgcauauugaguauca

SEQ ID NO: 162653 - RNA, 19 nt, Homo sapiens
  misc_RNA (1)...(19): siRNA sense strand
ggaagaggaacaagcauuu

SEQ ID NO: 162654 - RNA, 19 nt, Homo sapiens
  misc_RNA (1)...(19): siRNA sense strand
gaucuugguggaccuauua

SEQ ID NO: 162655 - RNA, 19 nt, Homo sapiens
  misc_RNA (1)...(19): siRNA sense strand
gaugaaaccuaugauuaug

SEQ ID NO: 162656 - RNA, 19 nt, Homo sapiens
  misc_RNA (1)...(19): siRNA sense strand
gaagaggaacaagcauuua

SEQ ID NO: 162657 - RNA, 19 nt, Homo sapiens
  misc_RNA (1)...(19): siRNA sense strand
uagaaacacugaugagaug

SEQ ID NO: 162658 - RNA, 19 nt, Homo sapiens
  misc_RNA (1)...(19): siRNA sense strand
acaaguaacuauucccaaa

SEQ ID NO: 162659 - RNA, 19 nt, Homo sapiens
  misc_RNA (1)...(19): siRNA sense strand
cagaauggcagauggcuua

SEQ ID NO: 162660 - RNA, 19 nt, Homo sapiens
  misc_RNA (1)...(19): siRNA sense strand
aaaggaggcaagaauauua

SEQ ID NO: 162661 - RNA, 19 nt, Homo sapiens
  misc_RNA (1)...(19): siRNA sense strand
gaacacaggaccagauaca

SEQ ID NO: 162662 - RNA, 19 nt, Homo sapiens
  misc_RNA (1)...(19): siRNA sense strand
cugaugagaugguugaauu

SEQ ID NO: 162663 - RNA, 19 nt, Homo sapiens
  misc_RNA (1)...(19): siRNA sense strand
aaacaaauccgucaugagu

SEQ ID NO: 162664 - RNA, 19 nt, Homo sapiens
  misc_RNA (1)...(19): siRNA sense strand
uagcagagcucggaaucuu

SEQ ID NO: 162665 - RNA, 19 nt, Homo sapiens
  misc_RNA (1)...(19): siRNA sense strand
uaaacgcccugcagaagau

SEQ ID NO: 162666 - RNA, 19 nt, Homo sapiens
  misc_RNA (1)...(19): siRNA sense strand
ggucagcggauuaaacaaa

SEQ ID NO: 162667 - RNA, 19 nt, Homo sapiens
  misc_RNA (1)...(19): siRNA sense strand
ggaaaaggaggcaagaaua

SEQ ID NO: 162668 - RNA, 19 nt, Homo sapiens
  misc_RNA (1)...(19): siRNA sense strand
caaaauugaugagccuuua

SEQ ID NO: 162669 - RNA, 19 nt, Homo sapiens
  misc_RNA (1)...(19): siRNA sense strand
aauggcagauggcuuauga

SEQ ID NO: 162670 - RNA, 19 nt, Homo sapiens
  misc_RNA (1)...(19): siRNA sense strand
cgaugaaaccuaugauuau

SEQ ID NO: 162671 - RNA, 19 nt, Homo sapiens
  misc_RNA (1)...(19): siRNA sense strand
ggaacaagcauuuaaaaga

SEQ ID NO: 162672 - RNA, 19 nt, Homo sapiens
  misc_RNA (1)...(19): siRNA sense strand
uuaaacaaauccgucauga

SEQ ID NO: 162673 - RNA, 19 nt, Homo sapiens
  misc_RNA (1)...(19): siRNA sense strand
acgaugaaaccuaugauua

SEQ ID NO: 162674 - RNA, 19 nt, Homo sapiens
  misc_RNA (1)...(19): siRNA sense strand
guaaacgcccugcagaaga

SEQ ID NO: 162675 - RNA, 19 nt, Homo sapiens
  misc_RNA (1)...(19): siRNA sense strand
aaacugaacagccagaaga

SEQ ID NO: 162676 - RNA, 19 nt, Homo sapiens
  misc_RNA (1)...(19): siRNA sense strand
uaccaacacuauaaaggaa

SEQ ID NO: 162677 - RNA, 19 nt, Homo sapiens
  misc_RNA (1)...(19): siRNA sense strand
gaucuagaaacacugauga

SEQ ID NO: 162678 - RNA, 19 nt, Homo sapiens
  misc_RNA (1)...(19): siRNA sense strand
agaacagugugaagcagua

SEQ ID NO: 162679 - RNA, 19 nt, Homo sapiens
  misc_RNA (1)...(19): siRNA sense strand
guaacuauucccaaagauu

SEQ ID NO: 162680 - RNA, 19 nt, Homo sapiens
  misc_RNA (1)...(19): siRNA sense strand
guuguagagugcauaaaga

SEQ ID NO: 162681 - RNA, 19 nt, Homo sapiens
  misc_RNA (1)...(19): siRNA sense strand
caaaccaccaucaagcuuu

SEQ ID NO: 162682 - RNA, 19 nt, Homo sapiens
  misc_RNA (1)...(19): siRNA sense strand
aaucaucccuaccuuggaa

SEQ ID NO: 162683 - RNA, 19 nt, Homo sapiens
  misc_RNA (1)...(19): siRNA sense strand
gaaaaggaggcaagaauau

SEQ ID NO: 162684 - RNA, 19 nt, Homo sapiens
  misc_RNA (1)...(19): siRNA sense strand
cuugguggaccuauuauua

SEQ ID NO: 162685 - RNA, 19 nt, Homo sapiens
  misc_RNA (1)...(19): siRNA sense strand
guagagugcauaaagauca

SEQ ID NO: 162686 - RNA, 19 nt, Homo sapiens
  misc_RNA (1)...(19): siRNA sense strand
ggaagagggccugcaguug

SEQ ID NO: 162687 - RNA, 19 nt, Homo sapiens
  misc_RNA (1)...(19): siRNA sense strand
cgaaucugaugcuguggaa

SEQ ID NO: 162688 - RNA, 19 nt, Homo sapiens
  misc_RNA (1)...(19): siRNA sense strand
gucgggagcuucgaucaaa

SEQ ID NO: 162689 - RNA, 19 nt, Homo sapiens
  misc_RNA (1)...(19): siRNA sense strand
caaagguggucagcggauu

SEQ ID NO: 162690 - RNA, 19 nt, Homo sapiens
  misc_RNA (1)...(19): siRNA sense strand
ggauaugauuauuccuaug

SEQ ID NO: 162691 - RNA, 19 nt, Homo sapiens
  misc_RNA (1)...(19): siRNA sense strand
gaguugaggcuguugauuc

SEQ ID NO: 162692 - RNA, 19 nt, Homo sapiens
  misc_RNA (1)...(19): siRNA sense strand
gauuuggcuggaucuauua

SEQ ID NO: 162693 - RNA, 19 nt, Homo sapiens
  misc_RNA (1)...(19): siRNA sense strand
gagucuagcaggaggaauu

SEQ ID NO: 162694 - RNA, 19 nt, Homo sapiens
  misc_RNA (1)...(19): siRNA sense strand
cacaguauuugcugcagaa

SEQ ID NO: 162695 - RNA, 19 nt, Homo sapiens
  misc_RNA (1)...(19): siRNA sense strand
cggauaugauuauuccuau

SEQ ID NO: 162696 - RNA, 19 nt, Homo sapiens
  misc_RNA (1)...(19): siRNA sense strand
uccuugaucuuauaucuga

SEQ ID NO: 162697 - RNA, 19 nt, Homo sapiens
  misc_RNA (1)...(19): siRNA sense strand
gaccuauuauuacuacaca

SEQ ID NO: 162698 - RNA, 19 nt, Homo sapiens
  misc_RNA (1)...(19): siRNA sense strand
agacuacaaugccaguguu

SEQ ID NO: 162699 - RNA, 19 nt, Homo sapiens
  misc_RNA (1)...(19): siRNA sense strand
aaguaacuauucccaaaga

SEQ ID NO: 162700 - RNA, 19 nt, Homo sapiens
  misc_RNA (1)...(19): siRNA sense strand
ugaaaccuaugauuauggu

SEQ ID NO: 162701 - RNA, 19 nt, Homo sapiens
  misc_RNA (1)...(19): siRNA sense strand
aaacacugaugagaugguu

SEQ ID NO: 162702 - RNA, 19 nt, Homo sapiens
  misc_RNA (1)...(19): siRNA sense strand
uacagaaugcacaguauuu

SEQ ID NO: 162703 - RNA, 19 nt, Homo sapiens
  misc_RNA (1)...(19): siRNA sense strand
aaagguggucagcggauua

SEQ ID NO: 162704 - RNA, 19 nt, Homo sapiens
  misc_RNA (1)...(19): siRNA sense strand
aagaggaacaagcauuuaa

SEQ ID NO: 162705 - RNA, 19 nt, Homo sapiens
  misc_RNA (1)...(19): siRNA sense strand
uauuaaggcucuccguaca

SEQ ID NO: 162706 - RNA, 19 nt, Homo sapiens
  misc_RNA (1)...(19): siRNA sense strand
gacgugcacagccuuauga

SEQ ID NO: 162707 - RNA, 19 nt, Homo sapiens
  misc_RNA (1)...(19): siRNA sense strand
uuaaggcucuccguacaga

SEQ ID NO: 162708 - RNA, 19 nt, Homo sapiens
  misc_RNA (1)...(19): siRNA sense strand
ggagaccuggagaccguua

SEQ ID NO: 162709 - RNA, 19 nt, Homo sapiens
  misc_RNA (1)...(19): siRNA sense strand
cauccuugaucuuauaucu

SEQ ID NO: 162710 - RNA, 19 nt, Homo sapiens
  misc_RNA (1)...(19): siRNA sense strand
ggacgugcacagccuuaug

SEQ ID NO: 162711 - RNA, 19 nt, Homo sapiens
  misc_RNA (1)...(19): siRNA sense strand
gagauuaugaugauaugag

SEQ ID NO: 162712 - RNA, 19 nt, Homo sapiens
  misc_RNA (1)...(19): siRNA sense strand
ugacuuugacugcgaguug

SEQ ID NO: 162713 - RNA, 19 nt, Homo sapiens
  misc_RNA (1)...(19): siRNA sense strand
acacaggaccagauacaga

SEQ ID NO: 162714 - RNA, 19 nt, Homo sapiens
  misc_RNA (1)...(19): siRNA sense strand
caggguggcuccggauaug

SEQ ID NO: 162715 - RNA, 19 nt, Homo sapiens
  misc_RNA (1)...(19): siRNA sense strand
ugaugagaugguugaauua

SEQ ID NO: 162716 - RNA, 19 nt, Homo sapiens
  misc_RNA (1)...(19): siRNA sense strand
cuagaagagauuaugauga

SEQ ID NO: 162717 - RNA, 19 nt, Homo sapiens
  misc_RNA (1)...(19): siRNA sense strand
cagaguuguucuuauugga

SEQ ID NO: 162718 - RNA, 19 nt, Homo sapiens
  misc_RNA (1)...(19): siRNA sense strand
gacagaguuguucuuauug

SEQ ID NO: 162719 - RNA, 19 nt, Homo sapiens
  misc_RNA (1)...(19): siRNA sense strand
cgagagaacacucaaacca

SEQ ID NO: 162720 - RNA, 19 nt, Homo sapiens
  misc_RNA (1)...(19): siRNA sense strand
cuacaaugccaguguuuca

SEQ ID NO: 162721 - RNA, 19 nt, Homo sapiens
  misc_RNA (1)...(19): siRNA sense strand
gucagcggauuaaacaaau

SEQ ID NO: 162722 - RNA, 19 nt, Homo sapiens
  misc_RNA (1)...(19): siRNA sense strand
gauaugauuauuccuaugc

SEQ ID NO: 162723 - RNA, 19 nt, Homo sapiens
  misc_RNA (1)...(19): siRNA sense strand
cggcaugguugguuucagu

SEQ ID NO: 162724 - RNA, 19 nt, Homo sapiens
  misc_RNA (1)...(19): siRNA sense strand
aaaccuucccuaacacuga

SEQ ID NO: 162725 - RNA, 19 nt, Homo sapiens
  misc_RNA (1)...(19): siRNA sense strand
gguaaacgcccugcagaag

SEQ ID NO: 162726 - RNA, 19 nt, Homo sapiens
  misc_RNA (1)...(19): siRNA sense strand
cuagaaacacugaugagau

SEQ ID NO: 162727 - RNA, 19 nt, Homo sapiens
  misc_RNA (1)...(19): siRNA sense strand
agaggaacaagcauuuaaa

SEQ ID NO: 162728 - RNA, 19 nt, Homo sapiens
  misc_RNA (1)...(19): siRNA sense strand
ccaacacuauaaaggaagu

SEQ ID NO: 162729 - RNA, 19 nt, Homo sapiens
  misc_RNA (1)...(19): siRNA sense strand
gacuuugacugcgaguuga

SEQ ID NO: 162730 - RNA, 19 nt, Homo sapiens
  misc_RNA (1)...(19): siRNA sense strand
agauacagaaugcacagua

SEQ ID NO: 162731 - RNA, 19 nt, Homo sapiens
  misc_RNA (1)...(19): siRNA sense strand
gaucuauuauuggcaaagg

SEQ ID NO: 162732 - RNA, 19 nt, Homo sapiens
  misc_RNA (1)...(19): siRNA sense strand
ucccaugccuccaucuaga

SEQ ID NO: 162733 - RNA, 19 nt, Homo sapiens
  misc_RNA (1)...(19): siRNA sense strand
aaagaucuagaaacacuga

SEQ ID NO: 162734 - RNA, 19 nt, Homo sapiens
  misc_RNA (1)...(19): siRNA sense strand
gaaacugaacagccagaag

SEQ ID NO: 162735 - RNA, 19 nt, Homo sapiens
  misc_RNA (1)...(19): siRNA sense strand
gaacagugugaagcaguau

SEQ ID NO: 162736 - RNA, 19 nt, Homo sapiens
  misc_RNA (1)...(19): siRNA sense strand
cacaggaccagauacagaa

SEQ ID NO: 162737 - RNA, 19 nt, Homo sapiens
  misc_RNA (1)...(19): siRNA sense strand
uuggcuggaucuauuauug

SEQ ID NO: 162738 - RNA, 19 nt, Homo sapiens
  misc_RNA (1)...(19): siRNA sense strand
ccggauaugauuauuccua

SEQ ID NO: 162739 - RNA, 19 nt, Homo sapiens
  misc_RNA (1)...(19): siRNA sense strand
acacugaugagaugguuga

SEQ ID NO: 162740 - RNA, 19 nt, Homo sapiens
  misc_RNA (1)...(19): siRNA sense strand
ugaugaaacuugggacucu

SEQ ID NO: 162741 - RNA, 19 nt, Homo sapiens
  misc_RNA (1)...(19): siRNA sense strand
cauggccuaugacagaaga

SEQ ID NO: 162742 - RNA, 19 nt, Homo sapiens
  misc_RNA (1)...(19): siRNA sense strand
cccgagcgcauauugagua

SEQ ID NO: 162743 - RNA, 19 nt, Homo sapiens
  misc_RNA (1)...(19): siRNA sense strand
guggaccuauuauuacuac

SEQ ID NO: 162744 - RNA, 19 nt, Homo sapiens
  misc_RNA (1)...(19): siRNA sense strand
gaugguugaauuacgcauu

SEQ ID NO: 162745 - RNA, 19 nt, Homo sapiens
  misc_RNA (1)...(19): siRNA sense strand
aguugaggcuguugauuca

SEQ ID NO: 162746 - RNA, 19 nt, Homo sapiens
  misc_RNA (1)...(19): siRNA sense strand
aaggaggcaagaauauuaa

SEQ ID NO: 162747 - RNA, 19 nt, Homo sapiens
  misc_RNA (1)...(19): siRNA sense strand
gaaacacugaugagauggu

SEQ ID NO: 162748 - RNA, 19 nt, Homo sapiens
  misc_RNA (1)...(19): siRNA sense strand
acagaguuguucuuauugg

SEQ ID NO: 162749 - RNA, 19 nt, Homo sapiens
  misc_RNA (1)...(19): siRNA sense strand
gcauaaagaucauccuuga

SEQ ID NO: 162750 - RNA, 19 nt, Homo sapiens
  misc_RNA (1)...(19): siRNA sense strand
ugacagaguuguucuuauu

SEQ ID NO: 162751 - RNA, 19 nt, Homo sapiens
  misc_RNA (1)...(19): siRNA sense strand
gcaguauucuggaaaguuu

SEQ ID NO: 162752 - RNA, 19 nt, Homo sapiens
  misc_RNA (1)...(19): siRNA sense strand
gcagauggcuuaugaacca

SEQ ID NO: 162753 - RNA, 19 nt, Homo sapiens
  misc_RNA (1)...(19): siRNA sense strand
gagcgcauauugaguauca

SEQ ID NO: 162754 - RNA, 19 nt, Homo sapiens
  misc_RNA (1)...(19): siRNA sense strand
ggaagaggaacaagcauuu

SEQ ID NO: 162755 - RNA, 19 nt, Homo sapiens
  misc_RNA (1)...(19): siRNA sense strand
gaucuugguggaccuauua

SEQ ID NO: 162756 - RNA, 19 nt, Homo sapiens
  misc_RNA (1)...(19): siRNA sense strand
gaugaaaccuaugauuaug

SEQ ID NO: 162757 - RNA, 19 nt, Homo sapiens
  misc_RNA (1)...(19): siRNA sense strand
gaagaggaacaagcauuua

SEQ ID NO: 162758 - RNA, 19 nt, Homo sapiens
  misc_RNA (1)...(19): siRNA sense strand
uagaaacacugaugagaug

SEQ ID NO: 162759 - RNA, 19 nt, Homo sapiens
  misc_RNA (1)...(19): siRNA sense strand
acaaguaacuauucccaaa

SEQ ID NO: 162760 - RNA, 19 nt, Homo sapiens
  misc_RNA (1)...(19): siRNA sense strand
cagaauggcagauggcuua

SEQ ID NO: 162761 - RNA, 19 nt, Homo sapiens
  misc_RNA (1)...(19): siRNA sense strand
aaaggaggcaagaauauua

SEQ ID NO: 162762 - RNA, 19 nt, Homo sapiens
  misc_RNA (1)...(19): siRNA sense strand
gaacacaggaccagauaca

SEQ ID NO: 162763 - RNA, 19 nt, Homo sapiens
  misc_RNA (1)...(19): siRNA sense strand
cugaugagaugguugaauu

SEQ ID NO: 162764 - RNA, 19 nt, Homo sapiens
  misc_RNA (1)...(19): siRNA sense strand
aaacaaauccgucaugagu

SEQ ID NO: 162765 - RNA, 19 nt, Homo sapiens
  misc_RNA (1)...(19): siRNA sense strand
uagcagagcucggaaucuu

SEQ ID NO: 162766 - RNA, 19 nt, Homo sapiens
  misc_RNA (1)...(19): siRNA sense strand
uaaacgcccugcagaagau

SEQ ID NO: 162767 - RNA, 19 nt, Homo sapiens
  misc_RNA (1)...(19): siRNA sense strand
gaagcaguauucuggaaag

SEQ ID NO: 162768 - RNA, 19 nt, Homo sapiens
  misc_RNA (1)...(19): siRNA sense strand
ggucagcggauuaaacaaa

SEQ ID NO: 162769 - RNA, 19 nt, Homo sapiens
  misc_RNA (1)...(19): siRNA sense strand
ggaaaaggaggcaagaaua

SEQ ID NO: 162770 - RNA, 19 nt, Homo sapiens
  misc_RNA (1)...(19): siRNA sense strand
caaaauugaugagccuuua

SEQ ID NO: 162771 - RNA, 19 nt, Homo sapiens
  misc_RNA (1)...(19): siRNA sense strand
aauggcagauggcuuauga

SEQ ID NO: 162772 - RNA, 19 nt, Homo sapiens
  misc_RNA (1)...(19): siRNA sense strand
cgaugaaaccuaugauuau

SEQ ID NO: 162773 - RNA, 19 nt, Homo sapiens
  misc_RNA (1)...(19): siRNA sense strand
ggaacaagcauuuaaaaga

SEQ ID NO: 162774 - RNA, 19 nt, Homo sapiens
  misc_RNA (1)...(19): siRNA sense strand
uuaaacaaauccgucauga

SEQ ID NO: 162775 - RNA, 19 nt, Homo sapiens
  misc_RNA (1)...(19): siRNA sense strand
acgaugaaaccuaugauua

SEQ ID NO: 162776 - RNA, 19 nt, Homo sapiens
  misc_RNA (1)...(19): siRNA sense strand
guaaacgcccugcagaaga

SEQ ID NO: 162777 - RNA, 19 nt, Homo sapiens
  misc_RNA (1)...(19): siRNA sense strand
aaacugaacagccagaaga

SEQ ID NO: 162778 - RNA, 19 nt, Homo sapiens
  misc_RNA (1)...(19): siRNA sense strand
uaccaacacuauaaaggaa

SEQ ID NO: 162779 - RNA, 19 nt, Homo sapiens
  misc_RNA (1)...(19): siRNA sense strand
gaucuagaaacacugauga

SEQ ID NO: 162780 - RNA, 19 nt, Homo sapiens
  misc_RNA (1)...(19): siRNA sense strand
agaacagugugaagcagua

SEQ ID NO: 162781 - RNA, 19 nt, Homo sapiens
  misc_RNA (1)...(19): siRNA sense strand
guaacuauucccaaagauu

SEQ ID NO: 162782 - RNA, 19 nt, Homo sapiens
  misc_RNA (1)...(19): siRNA sense strand
guuguagagugcauaaaga

SEQ ID NO: 162783 - RNA, 19 nt, Homo sapiens
  misc_RNA (1)...(19): siRNA sense strand
caaaccaccaucaagcuuu

SEQ ID NO: 162784 - RNA, 19 nt, Homo sapiens
  misc_RNA (1)...(19): siRNA sense strand
aaucaucccuaccuuggaa

SEQ ID NO: 162785 - RNA, 19 nt, Homo sapiens
  misc_RNA (1)...(19): siRNA sense strand
gaaaaggaggcaagaauau

SEQ ID NO: 162786 - RNA, 19 nt, Homo sapiens
  misc_RNA (1)...(19): siRNA sense strand
cuugguggaccuauuauua

SEQ ID NO: 162787 - RNA, 19 nt, Homo sapiens
  misc_RNA (1)...(19): siRNA sense strand
guagagugcauaaagauca

SEQ ID NO: 162788 - RNA, 19 nt, Homo sapiens
  misc_RNA (1)...(19): siRNA sense strand
ggaagagggccugcaguug

SEQ ID NO: 162789 - RNA, 19 nt, Homo sapiens
  misc_RNA (1)...(19): siRNA sense strand
cgaaucugaugcuguggaa

SEQ ID NO: 162790 - RNA, 19 nt, Homo sapiens
  misc_RNA (1)...(19): siRNA sense strand
gugaagcaguauucuggaa

SEQ ID NO: 162791 - RNA, 19 nt, Homo sapiens
  misc_RNA (1)...(19): siRNA sense strand
gucgggagcuucgaucaaa

SEQ ID NO: 162792 - RNA, 19 nt, Homo sapiens
  misc_RNA (1)...(19): siRNA sense strand
caaagguggucagcggauu

SEQ ID NO: 162793 - RNA, 19 nt, Homo sapiens
  misc_RNA (1)...(19): siRNA sense strand
ggauaugauuauuccuaug

SEQ ID NO: 162794 - RNA, 19 nt, Homo sapiens
  misc_RNA (1)...(19): siRNA sense strand
gaguugaggcuguugauuc

SEQ ID NO: 162795 - RNA, 19 nt, Homo sapiens
  misc_RNA (1)...(19): siRNA sense strand
gauuuggcuggaucuauua

SEQ ID NO: 162796 - RNA, 19 nt, Homo sapiens
  misc_RNA (1)...(19): siRNA sense strand
gagucuagcaggaggaauu

SEQ ID NO: 162797 - RNA, 19 nt, Homo sapiens
  misc_RNA (1)...(19): siRNA sense strand
cacaguauuugcugcagaa

SEQ ID NO: 162798 - RNA, 19 nt, Homo sapiens
  misc_RNA (1)...(19): siRNA sense strand
cggauaugauuauuccuau

SEQ ID NO: 162799 - RNA, 19 nt, Homo sapiens
  misc_RNA (1)...(19): siRNA sense strand
uccuugaucuuauaucuga

SEQ ID NO: 162800 - RNA, 19 nt, Homo sapiens
  misc_RNA (1)...(19): siRNA sense strand
gaccuauuauuacuacaca

SEQ ID NO: 162801 - RNA, 19 nt, Homo sapiens
  misc_RNA (1)...(19): siRNA sense strand
agacuacaaugccaguguu

SEQ ID NO: 162802 - RNA, 19 nt, Homo sapiens
  misc_RNA (1)...(19): siRNA sense strand
aaguaacuauucccaaaga

SEQ ID NO: 162803 - RNA, 19 nt, Homo sapiens
  misc_RNA (1)...(19): siRNA sense strand
ugaaaccuaugauuauggu

SEQ ID NO: 162804 - RNA, 19 nt, Homo sapiens
  misc_RNA (1)...(19): siRNA sense strand
aaacacugaugagaugguu

SEQ ID NO: 162805 - RNA, 19 nt, Homo sapiens
  misc_RNA (1)...(19): siRNA sense strand
uacagaaugcacaguauuu

SEQ ID NO: 162806 - RNA, 19 nt, Homo sapiens
  misc_RNA (1)...(19): siRNA sense strand
aaagguggucagcggauua

SEQ ID NO: 162807 - RNA, 19 nt, Homo sapiens
  misc_RNA (1)...(19): siRNA sense strand
aagaggaacaagcauuuaa

SEQ ID NO: 162808 - RNA, 19 nt, Homo sapiens
  misc_RNA (1)...(19): siRNA sense strand
uauuaaggcucuccguaca

SEQ ID NO: 162809 - RNA, 19 nt, Homo sapiens
  misc_RNA (1)...(19): siRNA sense strand
gacgugcacagccuuauga

SEQ ID NO: 162810 - RNA, 19 nt, Homo sapiens
  misc_RNA (1)...(19): siRNA sense strand
uuaaggcucuccguacaga

SEQ ID NO: 162811 - RNA, 19 nt, Homo sapiens
  misc_RNA (1)...(19): siRNA sense strand
ggagaccuggagaccguua

SEQ ID NO: 162812 - RNA, 19 nt, Homo sapiens
  misc_RNA (1)...(19): siRNA sense strand
cauccuugaucuuauaucu

SEQ ID NO: 162813 - RNA, 19 nt, Homo sapiens
  misc_RNA (1)...(19): siRNA sense strand
ggacgugcacagccuuaug

SEQ ID NO: 162814 - RNA, 19 nt, Homo sapiens
  misc_RNA (1)...(19): siRNA sense strand
gagauuaugaugauaugag

SEQ ID NO: 162815 - RNA, 19 nt, Homo sapiens
  misc_RNA (1)...(19): siRNA sense strand
ugacuuugacugcgaguug

SEQ ID NO: 162816 - RNA, 19 nt, Homo sapiens
  misc_RNA (1)...(19): siRNA sense strand
acacaggaccagauacaga

SEQ ID NO: 162817 - RNA, 19 nt, Homo sapiens
  misc_RNA (1)...(19): siRNA sense strand
caggguggcuccggauaug

SEQ ID NO: 162818 - RNA, 19 nt, Homo sapiens
  misc_RNA (1)...(19): siRNA sense strand
ugaugagaugguugaauua

SEQ ID NO: 162819 - RNA, 19 nt, Homo sapiens
  misc_RNA (1)...(19): siRNA sense strand
cuagaagagauuaugauga

SEQ ID NO: 162820 - RNA, 19 nt, Homo sapiens
  misc_RNA (1)...(19): siRNA sense strand
cagaguuguucuuauugga

SEQ ID NO: 162821 - RNA, 19 nt, Homo sapiens
  misc_RNA (1)...(19): siRNA sense strand
gacagaguuguucuuauug

SEQ ID NO: 162822 - RNA, 19 nt, Homo sapiens
  misc_RNA (1)...(19): siRNA sense strand
cgagagaacacucaaacca

SEQ ID NO: 162823 - RNA, 19 nt, Homo sapiens
  misc_RNA (1)...(19): siRNA sense strand
cuacaaugccaguguuuca

SEQ ID NO: 162824 - RNA, 19 nt, Homo sapiens
  misc_RNA (1)...(19): siRNA sense strand
gucagcggauuaaacaaau

SEQ ID NO: 162825 - RNA, 19 nt, Homo sapiens
  misc_RNA (1)...(19): siRNA sense strand
gauaugauuauuccuaugc

SEQ ID NO: 162826 - RNA, 19 nt, Homo sapiens
  misc_RNA (1)...(19): siRNA sense strand
cggcaugguugguuucagu

SEQ ID NO: 162827 - RNA, 19 nt, Homo sapiens
  misc_RNA (1)...(19): siRNA sense strand
aaaccuucccuaacacuga

SEQ ID NO: 162828 - RNA, 19 nt, Homo sapiens
  misc_RNA (1)...(19): siRNA sense strand
cuagaaacacugaugagau

SEQ ID NO: 162829 - RNA, 19 nt, Homo sapiens
  misc_RNA (1)...(19): siRNA sense strand
gguaaacgcccugcagaag

SEQ ID NO: 162830 - RNA, 19 nt, Homo sapiens
  misc_RNA (1)...(19): siRNA sense strand
agaggaacaagcauuuaaa

SEQ ID NO: 162831 - RNA, 19 nt, Homo sapiens
  misc_RNA (1)...(19): siRNA sense strand
ccaacacuauaaaggaagu

SEQ ID NO: 162832 - RNA, 19 nt, Homo sapiens
  misc_RNA (1)...(19): siRNA sense strand
gacuuugacugcgaguuga

SEQ ID NO: 162833 - RNA, 19 nt, Homo sapiens
  misc_RNA (1)...(19): siRNA sense strand
agauacagaaugcacagua

SEQ ID NO: 162834 - RNA, 19 nt, Homo sapiens
  misc_RNA (1)...(19): siRNA sense strand
gaucuauuauuggcaaagg

SEQ ID NO: 162835 - RNA, 19 nt, Homo sapiens
  misc_RNA (1)...(19): siRNA sense strand
ucccaugccuccaucuaga

SEQ ID NO: 162836 - RNA, 19 nt, Homo sapiens
  misc_RNA (1)...(19): siRNA sense strand
aaagaucuagaaacacuga

SEQ ID NO: 162837 - RNA, 19 nt, Homo sapiens
  misc_RNA (1)...(19): siRNA sense strand
ccggauaugauuauuccua

SEQ ID NO: 162838 - RNA, 19 nt, Homo sapiens
  misc_RNA (1)...(19): siRNA sense strand
gaaacugaacagccagaag

SEQ ID NO: 162839 - RNA, 19 nt, Homo sapiens
  misc_RNA (1)...(19): siRNA sense strand
gaacagugugaagcaguau

SEQ ID NO: 162840 - RNA, 19 nt, Homo sapiens
  misc_RNA (1)...(19): siRNA sense strand
cacaggaccagauacagaa

SEQ ID NO: 162841 - RNA, 19 nt, Homo sapiens
  misc_RNA (1)...(19): siRNA sense strand
uuggcuggaucuauuauug

SEQ ID NO: 162842 - RNA, 19 nt, Homo sapiens
  misc_RNA (1)...(19): siRNA sense strand
cauggccuaugacagaaga

SEQ ID NO: 162843 - RNA, 19 nt, Homo sapiens
  misc_RNA (1)...(19): siRNA sense strand
acacugaugagaugguuga

SEQ ID NO: 162844 - RNA, 19 nt, Homo sapiens
  misc_RNA (1)...(19): siRNA sense strand
ugaugaaacuugggacucu

SEQ ID NO: 162845 - RNA, 19 nt, Homo sapiens
  misc_RNA (1)...(19): siRNA sense strand
aguugaggcuguugauuca

SEQ ID NO: 162846 - RNA, 19 nt, Homo sapiens
  misc_RNA (1)...(19): siRNA sense strand
ugaagcaguauucuggaaa

SEQ ID NO: 162847 - RNA, 19 nt, Homo sapiens
  misc_RNA (1)...(19): siRNA sense strand
guggaccuauuauuacuac

SEQ ID NO: 162848 - RNA, 19 nt, Homo sapiens
  misc_RNA (1)...(19): siRNA sense strand
gaugguugaauuacgcauu

SEQ ID NO: 162849 - RNA, 19 nt, Homo sapiens
  misc_RNA (1)...(19): siRNA sense strand
gcauaaagaucauccuuga

SEQ ID NO: 162850 - RNA, 19 nt, Homo sapiens
  misc_RNA (1)...(19): siRNA sense strand
ugacagaguuguucuuauu

SEQ ID NO: 162851 - RNA, 19 nt, Homo sapiens
  misc_RNA (1)...(19): siRNA sense strand
gcagauggcuuaugaacca

SEQ ID NO: 162852 - RNA, 19 nt, Homo sapiens
  misc_RNA (1)...(19): siRNA sense strand
gagcgcauauugaguauca

SEQ ID NO: 162853 - RNA, 19 nt, Homo sapiens
  misc_RNA (1)...(19): siRNA sense strand
ggaagaggaacaagcauuu

SEQ ID NO: 162854 - RNA, 19 nt, Homo sapiens
  misc_RNA (1)...(19): siRNA sense strand
gaucuugguggaccuauua

SEQ ID NO: 162855 - RNA, 19 nt, Homo sapiens
  misc_RNA (1)...(19): siRNA sense strand
gaugaaaccuaugauuaug

SEQ ID NO: 162856 - RNA, 19 nt, Homo sapiens
  misc_RNA (1)...(19): siRNA sense strand
gaagaggaacaagcauuua

SEQ ID NO: 162857 - RNA, 19 nt, Homo sapiens
  misc_RNA (1)...(19): siRNA sense strand
uagaaacacugaugagaug

SEQ ID NO: 162858 - RNA, 19 nt, Homo sapiens
  misc_RNA (1)...(19): siRNA sense strand
acaaguaacuauucccaaa

SEQ ID NO: 162859 - RNA, 19 nt, Homo sapiens
  misc_RNA (1)...(19): siRNA sense strand
cagaauggcagauggcuua

SEQ ID NO: 162860 - RNA, 19 nt, Homo sapiens
  misc_RNA (1)...(19): siRNA sense strand
aaaggaggcaagaauauua

SEQ ID NO: 162861 - RNA, 19 nt, Homo sapiens
  misc_RNA (1)...(19): siRNA sense strand
gaacacaggaccagauaca

SEQ ID NO: 162862 - RNA, 19 nt, Homo sapiens
  misc_RNA (1)...(19): siRNA sense strand
cugaugagaugguugaauu

SEQ ID NO: 162863 - RNA, 19 nt, Homo sapiens
  misc_RNA (1)...(19): siRNA sense strand
aaacaaauccgucaugagu

SEQ ID NO: 162864 - RNA, 19 nt, Homo sapiens
  misc_RNA (1)...(19): siRNA sense strand
uagcagagcucggaaucuu

SEQ ID NO: 162865 - RNA, 19 nt, Homo sapiens
  misc_RNA (1)...(19): siRNA sense strand
uaaacgcccugcagaagau

SEQ ID NO: 162866 - RNA, 19 nt, Homo sapiens
  misc_RNA (1)...(19): siRNA sense strand
ggucagcggauuaaacaaa

SEQ ID NO: 162867 - RNA, 19 nt, Homo sapiens
  misc_RNA (1)...(19): siRNA sense strand
ggaaaaggaggcaagaaua

SEQ ID NO: 162868 - RNA, 19 nt, Homo sapiens
  misc_RNA (1)...(19): siRNA sense strand
caaaauugaugagccuuua

SEQ ID NO: 162869 - RNA, 19 nt, Homo sapiens
  misc_RNA (1)...(19): siRNA sense strand
aauggcagauggcuuauga

SEQ ID NO: 162870 - RNA, 19 nt, Homo sapiens
  misc_RNA (1)...(19): siRNA sense strand
cgaugaaaccuaugauuau

SEQ ID NO: 162871 - RNA, 19 nt, Homo sapiens
  misc_RNA (1)...(19): siRNA sense strand
ggaacaagcauuuaaaaga

SEQ ID NO: 162872 - RNA, 19 nt, Homo sapiens
  misc_RNA (1)...(19): siRNA sense strand
uuaaacaaauccgucauga

SEQ ID NO: 162873 - RNA, 19 nt, Homo sapiens
  misc_RNA (1)...(19): siRNA sense strand
acgaugaaaccuaugauua

SEQ ID NO: 162874 - RNA, 19 nt, Homo sapiens
  misc_RNA (1)...(19): siRNA sense strand
guaaacgcccugcagaaga

SEQ ID NO: 162875 - RNA, 19 nt, Homo sapiens
  misc_RNA (1)...(19): siRNA sense strand
aaacugaacagccagaaga

SEQ ID NO: 162876 - RNA, 19 nt, Homo sapiens
  misc_RNA (1)...(19): siRNA sense strand
uaccaacacuauaaaggaa

SEQ ID NO: 162877 - RNA, 19 nt, Homo sapiens
  misc_RNA (1)...(19): siRNA sense strand
gaucuagaaacacugauga

SEQ ID NO: 162878 - RNA, 19 nt, Homo sapiens
  misc_RNA (1)...(19): siRNA sense strand
agaacagugugaagcagua

SEQ ID NO: 162879 - RNA, 19 nt, Homo sapiens
  misc_RNA (1)...(19): siRNA sense strand
guaacuauucccaaagauu

SEQ ID NO: 162880 - RNA, 19 nt, Homo sapiens
  misc_RNA (1)...(19): siRNA sense strand
guuguagagugcauaaaga

SEQ ID NO: 162881 - RNA, 19 nt, Homo sapiens
  misc_RNA (1)...(19): siRNA sense strand
caaaccaccaucaagcuuu

SEQ ID NO: 162882 - RNA, 19 nt, Homo sapiens
  misc_RNA (1)...(19): siRNA sense strand
aaucaucccuaccuuggaa

SEQ ID NO: 162883 - RNA, 19 nt, Homo sapiens
  misc_RNA (1)...(19): siRNA sense strand
gaaaaggaggcaagaauau

SEQ ID NO: 162884 - RNA, 19 nt, Homo sapiens
  misc_RNA (1)...(19): siRNA sense strand
cuugguggaccuauuauua

SEQ ID NO: 162885 - RNA, 19 nt, Homo sapiens
  misc_RNA (1)...(19): siRNA sense strand
guagagugcauaaagauca

SEQ ID NO: 162886 - RNA, 19 nt, Homo sapiens
  misc_RNA (1)...(19): siRNA sense strand
ggaagagggccugcaguug

SEQ ID NO: 162887 - RNA, 19 nt, Homo sapiens
  misc_RNA (1)...(19): siRNA sense strand
cgaaucugaugcuguggaa

SEQ ID NO: 162888 - RNA, 19 nt, Homo sapiens
  misc_RNA (1)...(19): siRNA sense strand
gucgggagcuucgaucaaa

SEQ ID NO: 162889 - RNA, 19 nt, Homo sapiens
  misc_RNA (1)...(19): siRNA sense strand
caaagguggucagcggauu

SEQ ID NO: 162890 - RNA, 19 nt, Homo sapiens
  misc_RNA (1)...(19): siRNA sense strand
ggauaugauuauuccuaug

SEQ ID NO: 162891 - RNA, 19 nt, Homo sapiens
  misc_RNA (1)...(19): siRNA sense strand
gaguugaggcuguugauuc

SEQ ID NO: 162892 - RNA, 19 nt, Homo sapiens
  misc_RNA (1)...(19): siRNA sense strand
gauuuggcuggaucuauua

SEQ ID NO: 162893 - RNA, 19 nt, Homo sapiens
  misc_RNA (1)...(19): siRNA sense strand
gagucuagcaggaggaauu

SEQ ID NO: 162894 - RNA, 19 nt, Homo sapiens
  misc_RNA (1)...(19): siRNA sense strand
cacaguauuugcugcagaa

SEQ ID NO: 162895 - RNA, 19 nt, Homo sapiens
  misc_RNA (1)...(19): siRNA sense strand
cggauaugauuauuccuau

SEQ ID NO: 162896 - RNA, 19 nt, Homo sapiens
  misc_RNA (1)...(19): siRNA sense strand
uccuugaucuuauaucuga

SEQ ID NO: 162897 - RNA, 19 nt, Homo sapiens
  misc_RNA (1)...(19): siRNA sense strand
gaccuauuauuacuacaca

SEQ ID NO: 162898 - RNA, 19 nt, Homo sapiens
  misc_RNA (1)...(19): siRNA sense strand
agacuacaaugccaguguu

SEQ ID NO: 162899 - RNA, 19 nt, Homo sapiens
  misc_RNA (1)...(19): siRNA sense strand
aaguaacuauucccaaaga

SEQ ID NO: 162900 - RNA, 19 nt, Homo sapiens
  misc_RNA (1)...(19): siRNA sense strand
ugaaaccuaugauuauggu

SEQ ID NO: 162901 - RNA, 19 nt, Homo sapiens
  misc_RNA (1)...(19): siRNA sense strand
aaacacugaugagaugguu

SEQ ID NO: 162902 - RNA, 19 nt, Homo sapiens
  misc_RNA (1)...(19): siRNA sense strand
uacagaaugcacaguauuu

SEQ ID NO: 162903 - RNA, 19 nt, Homo sapiens
  misc_RNA (1)...(19): siRNA sense strand
aaagguggucagcggauua

SEQ ID NO: 162904 - RNA, 19 nt, Homo sapiens
  misc_RNA (1)...(19): siRNA sense strand
aagaggaacaagcauuuaa

SEQ ID NO: 162905 - RNA, 19 nt, Homo sapiens
  misc_RNA (1)...(19): siRNA sense strand
uauuaaggcucuccguaca

SEQ ID NO: 162906 - RNA, 19 nt, Homo sapiens
  misc_RNA (1)...(19): siRNA sense strand
gacgugcacagccuuauga

SEQ ID NO: 162907 - RNA, 19 nt, Homo sapiens
  misc_RNA (1)...(19): siRNA sense strand
uuaaggcucuccguacaga

SEQ ID NO: 162908 - RNA, 19 nt, Homo sapiens
  misc_RNA (1)...(19): siRNA sense strand
ggagaccuggagaccguua

SEQ ID NO: 162909 - RNA, 19 nt, Homo sapiens
  misc_RNA (1)...(19): siRNA sense strand
cauccuugaucuuauaucu

SEQ ID NO: 162910 - RNA, 19 nt, Homo sapiens
  misc_RNA (1)...(19): siRNA sense strand
ggacgugcacagccuuaug

SEQ ID NO: 162911 - RNA, 19 nt, Homo sapiens
  misc_RNA (1)...(19): siRNA sense strand
gagauuaugaugauaugag

SEQ ID NO: 162912 - RNA, 19 nt, Homo sapiens
  misc_RNA (1)...(19): siRNA sense strand
ugacuuugacugcgaguug

SEQ ID NO: 162913 - RNA, 19 nt, Homo sapiens
  misc_RNA (1)...(19): siRNA sense strand
acacaggaccagauacaga

SEQ ID NO: 162914 - RNA, 19 nt, Homo sapiens
  misc_RNA (1)...(19): siRNA sense strand
caggguggcuccggauaug

SEQ ID NO: 162915 - RNA, 19 nt, Homo sapiens
  misc_RNA (1)...(19): siRNA sense strand
ugaugagaugguugaauua

SEQ ID NO: 162916 - RNA, 19 nt, Homo sapiens
  misc_RNA (1)...(19): siRNA sense strand
cuagaagagauuaugauga

SEQ ID NO: 162917 - RNA, 19 nt, Homo sapiens
  misc_RNA (1)...(19): siRNA sense strand
cagaguuguucuuauugga

SEQ ID NO: 162918 - RNA, 19 nt, Homo sapiens
  misc_RNA (1)...(19): siRNA sense strand
gacagaguuguucuuauug

SEQ ID NO: 162919 - RNA, 19 nt, Homo sapiens
  misc_RNA (1)...(19): siRNA sense strand
cgagagaacacucaaacca

SEQ ID NO: 162920 - RNA, 19 nt, Homo sapiens
  misc_RNA (1)...(19): siRNA sense strand
cuacaaugccaguguuuca

SEQ ID NO: 162921 - RNA, 19 nt, Homo sapiens
  misc_RNA (1)...(19): siRNA sense strand
gucagcggauuaaacaaau

SEQ ID NO: 162922 - RNA, 19 nt, Homo sapiens
  misc_RNA (1)...(19): siRNA sense strand
gauaugauuauuccuaugc

SEQ ID NO: 162923 - RNA, 19 nt, Homo sapiens
  misc_RNA (1)...(19): siRNA sense strand
cggcaugguugguuucagu

SEQ ID NO: 162924 - RNA, 19 nt, Homo sapiens
  misc_RNA (1)...(19): siRNA sense strand
aaaccuucccuaacacuga

SEQ ID NO: 162925 - RNA, 19 nt, Homo sapiens
  misc_RNA (1)...(19): siRNA sense strand
gguaaacgcccugcagaag

SEQ ID NO: 162926 - RNA, 19 nt, Homo sapiens
  misc_RNA (1)...(19): siRNA sense strand
cuagaaacacugaugagau

SEQ ID NO: 162927 - RNA, 19 nt, Homo sapiens
  misc_RNA (1)...(19): siRNA sense strand
agaggaacaagcauuuaaa

SEQ ID NO: 162928 - RNA, 19 nt, Homo sapiens
  misc_RNA (1)...(19): siRNA sense strand
ccaacacuauaaaggaagu

SEQ ID NO: 162929 - RNA, 19 nt, Homo sapiens
  misc_RNA (1)...(19): siRNA sense strand
gacuuugacugcgaguuga

SEQ ID NO: 162930 - RNA, 19 nt, Homo sapiens
  misc_RNA (1)...(19): siRNA sense strand
agauacagaaugcacagua

SEQ ID NO: 162931 - RNA, 19 nt, Homo sapiens
  misc_RNA (1)...(19): siRNA sense strand
gaucuauuauuggcaaagg

SEQ ID NO: 162932 - RNA, 19 nt, Homo sapiens
  misc_RNA (1)...(19): siRNA sense strand
ucccaugccuccaucuaga

SEQ ID NO: 162933 - RNA, 19 nt, Homo sapiens
  misc_RNA (1)...(19): siRNA sense strand
aaagaucuagaaacacuga

SEQ ID NO: 162934 - RNA, 19 nt, Homo sapiens
  misc_RNA (1)...(19): siRNA sense strand
gaaacugaacagccagaag

SEQ ID NO: 162935 - RNA, 19 nt, Homo sapiens
  misc_RNA (1)...(19): siRNA sense strand
gaacagugugaagcaguau

SEQ ID NO: 162936 - RNA, 19 nt, Homo sapiens
  misc_RNA (1)...(19): siRNA sense strand
cacaggaccagauacagaa

SEQ ID NO: 162937 - RNA, 19 nt, Homo sapiens
  misc_RNA (1)...(19): siRNA sense strand
uuggcuggaucuauuauug

SEQ ID NO: 162938 - RNA, 19 nt, Homo sapiens
  misc_RNA (1)...(19): siRNA sense strand
ccggauaugauuauuccua

SEQ ID NO: 162939 - RNA, 19 nt, Homo sapiens
  misc_RNA (1)...(19): siRNA sense strand
acacugaugagaugguuga

SEQ ID NO: 162940 - RNA, 19 nt, Homo sapiens
  misc_RNA (1)...(19): siRNA sense strand
ugaugaaacuugggacucu

SEQ ID NO: 162941 - RNA, 19 nt, Homo sapiens
  misc_RNA (1)...(19): siRNA sense strand
cauggccuaugacagaaga

SEQ ID NO: 162942 - RNA, 19 nt, Homo sapiens
  misc_RNA (1)...(19): siRNA sense strand
cccgagcgcauauugagua

SEQ ID NO: 162943 - RNA, 19 nt, Homo sapiens
  misc_RNA (1)...(19): siRNA sense strand
guggaccuauuauuacuac

SEQ ID NO: 162944 - RNA, 19 nt, Homo sapiens
  misc_RNA (1)...(19): siRNA sense strand
gaugguugaauuacgcauu

SEQ ID NO: 162945 - RNA, 19 nt, Homo sapiens
  misc_RNA (1)...(19): siRNA sense strand
aguugaggcuguugauuca

SEQ ID NO: 162946 - RNA, 19 nt, Homo sapiens
  misc_RNA (1)...(19): siRNA sense strand
aaggaggcaagaauauuaa

SEQ ID NO: 162947 - RNA, 19 nt, Homo sapiens
  misc_RNA (1)...(19): siRNA sense strand
gaaacacugaugagauggu

SEQ ID NO: 162948 - RNA, 19 nt, Homo sapiens
  misc_RNA (1)...(19): siRNA sense strand
acagaguuguucuuauugg

SEQ ID NO: 162949 - RNA, 19 nt, Homo sapiens
  misc_RNA (1)...(19): siRNA sense strand
gcaaggagcccguggugua

SEQ ID NO: 162950 - RNA, 19 nt, Homo sapiens
  misc_RNA (1)...(19): siRNA sense strand
gaagaaagaccacaaacug

SEQ ID NO: 162951 - RNA, 19 nt, Homo sapiens
  misc_RNA (1)...(19): siRNA sense strand
aagaugcgauccuccaauu

SEQ ID NO: 162952 - RNA, 19 nt, Homo sapiens
  misc_RNA (1)...(19): siRNA sense strand
gauaaacuccaacuacauc

SEQ ID NO: 162953 - RNA, 19 nt, Homo sapiens
  misc_RNA (1)...(19): siRNA sense strand
ggaagaaagaccacaaacu

SEQ ID NO: 162954 - RNA, 19 nt, Homo sapiens
  misc_RNA (1)...(19): siRNA sense strand
ucuuggagcuggagaagga

SEQ ID NO: 162955 - RNA, 19 nt, Homo sapiens
  misc_RNA (1)...(19): siRNA sense strand
uugauaaacuccaacuaca

SEQ ID NO: 162956 - RNA, 19 nt, Homo sapiens
  misc_RNA (1)...(19): siRNA sense strand
gggaaagcacaaacucaga

SEQ ID NO: 162957 - RNA, 19 nt, Homo sapiens
  misc_RNA (1)...(19): siRNA sense strand
cuacaucgagcccaaguuc

SEQ ID NO: 162958 - RNA, 19 nt, Homo sapiens
  misc_RNA (1)...(19): siRNA sense strand
gaccacaaacugcccaaca

SEQ ID NO: 162959 - RNA, 19 nt, Homo sapiens
  misc_RNA (1)...(19): siRNA sense strand
ggacaccgccuaccccuau

SEQ ID NO: 162960 - RNA, 19 nt, Homo sapiens
  misc_RNA (1)...(19): siRNA sense strand
cccguucccuccuccauau

SEQ ID NO: 162961 - RNA, 19 nt, Homo sapiens
  misc_RNA (1)...(19): siRNA sense strand
caagaugcgauccuccaau

SEQ ID NO: 162962 - RNA, 19 nt, Homo sapiens
  misc_RNA (1)...(19): siRNA sense strand
aaacugcccaacaccaaga

SEQ ID NO: 162963 - RNA, 19 nt, Homo sapiens
  misc_RNA (1)...(19): siRNA sense strand
acaaacugcccaacaccaa

SEQ ID NO: 162964 - RNA, 19 nt, Homo sapiens
  misc_RNA (1)...(19): siRNA sense strand
gaugcgauccuccaauucg

SEQ ID NO: 162965 - RNA, 19 nt, Homo sapiens
  misc_RNA (1)...(19): siRNA sense strand
gcccacacgcucuguuugu

SEQ ID NO: 162966 - RNA, 19 nt, Homo sapiens
  misc_RNA (1)...(19): siRNA sense strand
ggaugaagguuaagagaaa

SEQ ID NO: 162967 - RNA, 19 nt, Homo sapiens
  misc_RNA (1)...(19): siRNA sense strand
aaacacaggucaagauuug

SEQ ID NO: 162968 - RNA, 19 nt, Homo sapiens
  misc_RNA (1)...(19): siRNA sense strand
gaaacacaggucaagauuu

SEQ ID NO: 162969 - RNA, 19 nt, Homo sapiens
  misc_RNA (1)...(19): siRNA sense strand
ggaaacacccugcccuuca

SEQ ID NO: 162970 - RNA, 19 nt, Homo sapiens
  misc_RNA (1)...(19): siRNA sense strand
ggaguuccauuucaacaag

SEQ ID NO: 162971 - RNA, 19 nt, Homo sapiens
  misc_RNA (1)...(19): siRNA sense strand
gagcagaccgcgagcuuug

SEQ ID NO: 162972 - RNA, 19 nt, Homo sapiens
  misc_RNA (1)...(19): siRNA sense strand
caaggcagcugacagaacu

SEQ ID NO: 162973 - RNA, 19 nt, Homo sapiens
  misc_RNA (1)...(19): siRNA sense strand
ugacagaacuggaaaagga

SEQ ID NO: 162974 - RNA, 19 nt, Homo sapiens
  misc_RNA (1)...(19): siRNA sense strand
ccacaaggcagcugacaga

SEQ ID NO: 162975 - RNA, 19 nt, Homo sapiens
  misc_RNA (1)...(19): siRNA sense strand
gaaacacccugcccuucag

SEQ ID NO: 162976 - RNA, 19 nt, Homo sapiens
  misc_RNA (1)...(19): siRNA sense strand
gcuacgggccuucucagua

SEQ ID NO: 162977 - RNA, 19 nt, Homo sapiens
  misc_RNA (1)...(19): siRNA sense strand
gcaccaacuucaccacaag

SEQ ID NO: 162978 - RNA, 19 nt, Homo sapiens
  misc_RNA (1)...(19): siRNA sense strand
gaugaacuccuucuuagag

SEQ ID NO: 162979 - RNA, 19 nt, Homo sapiens
  misc_RNA (1)...(19): siRNA sense strand
ugaaacacaggucaagauu

SEQ ID NO: 162980 - RNA, 19 nt, Homo sapiens
  misc_RNA (1)...(19): siRNA sense strand
gagaaacccacccaagaca

SEQ ID NO: 162981 - RNA, 19 nt, Homo sapiens
  misc_RNA (1)...(19): siRNA sense strand
cagcagaacuccggcuauc

SEQ ID NO: 162982 - RNA, 19 nt, Homo sapiens
  misc_RNA (1)...(19): siRNA sense strand
cuacgggccuucucaguac

SEQ ID NO: 162983 - RNA, 19 nt, Homo sapiens
  misc_RNA (1)...(19): siRNA sense strand
ucgacuggaugaagguuaa

SEQ ID NO: 162984 - RNA, 19 nt, Homo sapiens
  misc_RNA (1)...(19): siRNA sense strand
ggaugaacuccuucuuaga

SEQ ID NO: 162985 - RNA, 19 nt, Homo sapiens
  misc_RNA (1)...(19): siRNA sense strand
agaaggagacggaggcuau

SEQ ID NO: 162986 - RNA, 19 nt, Homo sapiens
  misc_RNA (1)...(19): siRNA sense strand
gaaggagacggaggcuauu

SEQ ID NO: 162987 - RNA, 19 nt, Homo sapiens
  misc_RNA (1)...(19): siRNA sense strand
aagagaaacccacccaaga

SEQ ID NO: 162988 - RNA, 19 nt, Homo sapiens
  misc_RNA (1)...(19): siRNA sense strand
gaagcgcgagcgagaggaa

SEQ ID NO: 162989 - RNA, 19 nt, Homo sapiens
  misc_RNA (1)...(19): siRNA sense strand
gcagcugacagaacuggaa

SEQ ID NO: 162990 - RNA, 19 nt, Homo sapiens
  misc_RNA (1)...(19): siRNA sense strand
uuccagaaccgacgaauga

SEQ ID NO: 162991 - RNA, 19 nt, Homo sapiens
  misc_RNA (1)...(19): siRNA sense strand
aaaaggaguuccauuucaa

SEQ ID NO: 162992 - RNA, 19 nt, Homo sapiens
  misc_RNA (1)...(19): siRNA sense strand
ccucagaccagucgacaug

SEQ ID NO: 162993 - RNA, 19 nt, Homo sapiens
  misc_RNA (1)...(19): siRNA sense strand
gcaccggccuaugcugauc

SEQ ID NO: 162994 - RNA, 19 nt, Homo sapiens
  misc_RNA (1)...(19): siRNA sense strand
caaggaggcagcuggagau

SEQ ID NO: 162995 - RNA, 19 nt, Homo sapiens
  misc_RNA (1)...(19): siRNA sense strand
gacgaaugaagcagaagaa

SEQ ID NO: 162996 - RNA, 19 nt, Homo sapiens
  misc_RNA (1)...(19): siRNA sense strand
cgacgaaugaagcagaaga

SEQ ID NO: 162997 - RNA, 19 nt, Homo sapiens
  misc_RNA (1)...(19): siRNA sense strand
gaugaagguuaagagaaac

SEQ ID NO: 162998 - RNA, 19 nt, Homo sapiens
  misc_RNA (1)...(19): siRNA sense strand
ucaggcgguugacagcuau

SEQ ID NO: 162999 - RNA, 19 nt, Homo sapiens
  misc_RNA (1)...(19): siRNA sense strand
cucaggcgguugacagcua

SEQ ID NO: 163000 - RNA, 19 nt, Homo sapiens
  misc_RNA (1)...(19): siRNA sense strand
ucaaugaaacacaggucaa

SEQ ID NO: 163001 - RNA, 19 nt, Homo sapiens
  misc_RNA (1)...(19): siRNA sense strand
uggaugaagguuaagagaa

SEQ ID NO: 163002 - RNA, 19 nt, Homo sapiens
  misc_RNA (1)...(19): siRNA sense strand
ucagaccagucgacaugca

SEQ ID NO: 163003 - RNA, 19 nt, Homo sapiens
  misc_RNA (1)...(19): siRNA sense strand
gcagaccgcgagcuuugca

SEQ ID NO: 163004 - RNA, 19 nt, Homo sapiens
  misc_RNA (1)...(19): siRNA sense strand
cccuggagcucaaugaaac

SEQ ID NO: 163005 - RNA, 19 nt, Homo sapiens
  misc_RNA (1)...(19): siRNA sense strand
gaguuccauuucaacaagu

SEQ ID NO: 163006 - RNA, 19 nt, Homo sapiens
  misc_RNA (1)...(19): siRNA sense strand
cagcugacagaacuggaaa

SEQ ID NO: 163007 - RNA, 19 nt, Homo sapiens
  misc_RNA (1)...(19): siRNA sense strand
cgcaccaacuucaccacaa

SEQ ID NO: 163008 - RNA, 19 nt, Homo sapiens
  misc_RNA (1)...(19): siRNA sense strand
gagaaggaauuccacuuua

SEQ ID NO: 163009 - RNA, 19 nt, Homo sapiens
  misc_RNA (1)...(19): siRNA sense strand
gaagaaauccgccaagaaa

SEQ ID NO: 163010 - RNA, 19 nt, Homo sapiens
  misc_RNA (1)...(19): siRNA sense strand
ggagaaggaauuccacuuu

SEQ ID NO: 163011 - RNA, 19 nt, Homo sapiens
  misc_RNA (1)...(19): siRNA sense strand
gagaagaaauccgccaaga

SEQ ID NO: 163012 - RNA, 19 nt, Homo sapiens
  misc_RNA (1)...(19): siRNA sense strand
agaaggaauuccacuuuaa

SEQ ID NO: 163013 - RNA, 19 nt, Homo sapiens
  misc_RNA (1)...(19): siRNA sense strand
ggagacauuucaaacuuca

SEQ ID NO: 163014 - RNA, 19 nt, Homo sapiens
  misc_RNA (1)...(19): siRNA sense strand
gaaggaauuccacuuuaau

SEQ ID NO: 163015 - RNA, 19 nt, Homo sapiens
  misc_RNA (1)...(19): siRNA sense strand
cgaguucccuuggaugaaa

SEQ ID NO: 163016 - RNA, 19 nt, Homo sapiens
  misc_RNA (1)...(19): siRNA sense strand
gccuuuagccguucgcuua

SEQ ID NO: 163017 - RNA, 19 nt, Homo sapiens
  misc_RNA (1)...(19): siRNA sense strand
ggaauuccacuuuaauaag

SEQ ID NO: 163018 - RNA, 19 nt, Homo sapiens
  misc_RNA (1)...(19): siRNA sense strand
gagggagauuggguuuaua

SEQ ID NO: 163019 - RNA, 19 nt, Homo sapiens
  misc_RNA (1)...(19): siRNA sense strand
caaggagucgacauuaauu

SEQ ID NO: 163020 - RNA, 19 nt, Homo sapiens
  misc_RNA (1)...(19): siRNA sense strand
agagggagauuggguuuau

SEQ ID NO: 163021 - RNA, 19 nt, Homo sapiens
  misc_RNA (1)...(19): siRNA sense strand
cgacuccugucuccagcua

SEQ ID NO: 163022 - RNA, 19 nt, Homo sapiens
  misc_RNA (1)...(19): siRNA sense strand
gcaggucaaagucugguuu

SEQ ID NO: 163023 - RNA, 19 nt, Homo sapiens
  misc_RNA (1)...(19): siRNA sense strand
ucaaggagucgacauuaau

SEQ ID NO: 163024 - RNA, 19 nt, Homo sapiens
  misc_RNA (1)...(19): siRNA sense strand
ggaugaaagagaagaaauc

SEQ ID NO: 163025 - RNA, 19 nt, Homo sapiens
  misc_RNA (1)...(19): siRNA sense strand
gaaaggcaggucaaagucu

SEQ ID NO: 163026 - RNA, 19 nt, Homo sapiens
  misc_RNA (1)...(19): siRNA sense strand
aaucaaggagucgacauua

SEQ ID NO: 163027 - RNA, 19 nt, Homo sapiens
  misc_RNA (1)...(19): siRNA sense strand
gcgccaggauucaccuuuc

SEQ ID NO: 163028 - RNA, 19 nt, Homo sapiens
  misc_RNA (1)...(19): siRNA sense strand
ccgagugucugacuuccuu

SEQ ID NO: 163029 - RNA, 19 nt, Homo sapiens
  misc_RNA (1)...(19): siRNA sense strand
uuggagacauuucaaacuu

SEQ ID NO: 163030 - RNA, 19 nt, Homo sapiens
  misc_RNA (1)...(19): siRNA sense strand
caaucaaggagucgacauu

SEQ ID NO: 163031 - RNA, 19 nt, Homo sapiens
  misc_RNA (1)...(19): siRNA sense strand
gagagggagauuggguuua

SEQ ID NO: 163032 - RNA, 19 nt, Homo sapiens
  misc_RNA (1)...(19): siRNA sense strand
agaagaaauccgccaagaa

SEQ ID NO: 163033 - RNA, 19 nt, Homo sapiens
  misc_RNA (1)...(19): siRNA sense strand
ucccuuggaugaaagagaa

SEQ ID NO: 163034 - RNA, 19 nt, Homo sapiens
  misc_RNA (1)...(19): siRNA sense strand
caagaaacccagccaaucc

SEQ ID NO: 163035 - RNA, 19 nt, Homo sapiens
  misc_RNA (1)...(19): siRNA sense strand
ccaagaaacccagccaauc

SEQ ID NO: 163036 - RNA, 19 nt, Homo sapiens
  misc_RNA (1)...(19): siRNA sense strand
aucaaggagucgacauuaa

SEQ ID NO: 163037 - RNA, 19 nt, Homo sapiens
  misc_RNA (1)...(19): siRNA sense strand
ccgaaaggcaggucaaagu

SEQ ID NO: 163038 - RNA, 19 nt, Homo sapiens
  misc_RNA (1)...(19): siRNA sense strand
ccgaggaagagcuggauuu

SEQ ID NO: 163039 - RNA, 19 nt, Homo sapiens
  misc_RNA (1)...(19): siRNA sense strand
gccaagaaacccagccaau

SEQ ID NO: 163040 - RNA, 19 nt, Homo sapiens
  misc_RNA (1)...(19): siRNA sense strand
gaauuugagagggagauug

SEQ ID NO: 163041 - RNA, 19 nt, Homo sapiens
  misc_RNA (1)...(19): siRNA sense strand
ugagagggagauuggguuu

SEQ ID NO: 163042 - RNA, 19 nt, Homo sapiens
  misc_RNA (1)...(19): siRNA sense strand
uggagacauuucaaacuuc

SEQ ID NO: 163043 - RNA, 19 nt, Homo sapiens
  misc_RNA (1)...(19): siRNA sense strand
ggucggaucgccugcagau

SEQ ID NO: 163044 - RNA, 19 nt, Homo sapiens
  misc_RNA (1)...(19): siRNA sense strand
cgaaaggcaggucaaaguc

SEQ ID NO: 163045 - RNA, 19 nt, Homo sapiens
  misc_RNA (1)...(19): siRNA sense strand
gggagauuggguuuauaaa

SEQ ID NO: 163046 - RNA, 19 nt, Homo sapiens
  misc_RNA (1)...(19): siRNA sense strand
ggaacuggagaaggaauuc

SEQ ID NO: 163047 - RNA, 19 nt, Homo sapiens
  misc_RNA (1)...(19): siRNA sense strand
agggagauuggguuuauaa

SEQ ID NO: 163048 - RNA, 19 nt, Homo sapiens
  misc_RNA (1)...(19): siRNA sense strand
cagagacccaggagccaaa

SEQ ID NO: 163049 - RNA, 19 nt, Homo sapiens
  misc_RNA (1)...(19): siRNA sense strand
cgaccugcaguuucccuaa

SEQ ID NO: 163050 - RNA, 19 nt, Homo sapiens
  misc_RNA (1)...(19): siRNA sense strand
aaacuucaucaaucaagga

SEQ ID NO: 163051 - RNA, 19 nt, Homo sapiens
  misc_RNA (1)...(19): siRNA sense strand
ugcuggaacuggagaagga

SEQ ID NO: 163052 - RNA, 19 nt, Homo sapiens
  misc_RNA (1)...(19): siRNA sense strand
gaacagaucuugucgaaua

SEQ ID NO: 163053 - RNA, 19 nt, Homo sapiens
  misc_RNA (1)...(19): siRNA sense strand
gcaauuggcucacugcaaa

SEQ ID NO: 163054 - RNA, 19 nt, Homo sapiens
  misc_RNA (1)...(19): siRNA sense strand
gaaugaaacucaagaagau

SEQ ID NO: 163055 - RNA, 19 nt, Homo sapiens
  misc_RNA (1)...(19): siRNA sense strand
gaaugugcauccuuauaua

SEQ ID NO: 163056 - RNA, 19 nt, Homo sapiens
  misc_RNA (1)...(19): siRNA sense strand
gaaggcagcuccacuguca

SEQ ID NO: 163057 - RNA, 19 nt, Homo sapiens
  misc_RNA (1)...(19): siRNA sense strand
guaugaaugugcauccuua

SEQ ID NO: 163058 - RNA, 19 nt, Homo sapiens
  misc_RNA (1)...(19): siRNA sense strand
gaaagaagaggugcccuua

SEQ ID NO: 163059 - RNA, 19 nt, Homo sapiens
  misc_RNA (1)...(19): siRNA sense strand
gcaccaaacgcuggaauua

SEQ ID NO: 163060 - RNA, 19 nt, Homo sapiens
  misc_RNA (1)...(19): siRNA sense strand
gcaaagaguggcagaaaga

SEQ ID NO: 163061 - RNA, 19 nt, Homo sapiens
  misc_RNA (1)...(19): siRNA sense strand
gaagugaaccaccaaaaua

SEQ ID NO: 163062 - RNA, 19 nt, Homo sapiens
  misc_RNA (1)...(19): siRNA sense strand
ccaccaacauuaaggaaga

SEQ ID NO: 163063 - RNA, 19 nt, Homo sapiens
  misc_RNA (1)...(19): siRNA sense strand
aagaggaaaucaagucuga

SEQ ID NO: 163064 - RNA, 19 nt, Homo sapiens
  misc_RNA (1)...(19): siRNA sense strand
ccgaacagaucuugucgaa

SEQ ID NO: 163065 - RNA, 19 nt, Homo sapiens
  misc_RNA (1)...(19): siRNA sense strand
gcaaagaggaaaucaaguc

SEQ ID NO: 163066 - RNA, 19 nt, Homo sapiens
  misc_RNA (1)...(19): siRNA sense strand
gaaggaaagcaaagaggaa

SEQ ID NO: 163067 - RNA, 19 nt, Homo sapiens
  misc_RNA (1)...(19): siRNA sense strand
cgaauagagcaaccuguua

SEQ ID NO: 163068 - RNA, 19 nt, Homo sapiens
  misc_RNA (1)...(19): siRNA sense strand
cgaaugaaacucaagaaga

SEQ ID NO: 163069 - RNA, 19 nt, Homo sapiens
  misc_RNA (1)...(19): siRNA sense strand
guagacaguuggacagauc

SEQ ID NO: 163070 - RNA, 19 nt, Homo sapiens
  misc_RNA (1)...(19): siRNA sense strand
aagaagaggugcccuuaca

SEQ ID NO: 163071 - RNA, 19 nt, Homo sapiens
  misc_RNA (1)...(19): siRNA sense strand
acaggcaggucaagauuug

SEQ ID NO: 163072 - RNA, 19 nt, Homo sapiens
  misc_RNA (1)...(19): siRNA sense strand
ugaaugugcauccuuauau

SEQ ID NO: 163073 - RNA, 19 nt, Homo sapiens
  misc_RNA (1)...(19): siRNA sense strand
gaauagagcaaccuguuac

SEQ ID NO: 163074 - RNA, 19 nt, Homo sapiens
  misc_RNA (1)...(19): siRNA sense strand
accaaacgcuggaauuaga

SEQ ID NO: 163075 - RNA, 19 nt, Homo sapiens
  misc_RNA (1)...(19): siRNA sense strand
acccaagaguacaauaaua

SEQ ID NO: 163076 - RNA, 19 nt, Homo sapiens
  misc_RNA (1)...(19): siRNA sense strand
gagaucaguaagagcguua

SEQ ID NO: 163077 - RNA, 19 nt, Homo sapiens
  misc_RNA (1)...(19): siRNA sense strand
gaauccaauugcugcaugu

SEQ ID NO: 163078 - RNA, 19 nt, Homo sapiens
  misc_RNA (1)...(19): siRNA sense strand
aaacccaagaguacaauaa

SEQ ID NO: 163079 - RNA, 19 nt, Homo sapiens
  misc_RNA (1)...(19): siRNA sense strand
uccaauugcugcauguauu

SEQ ID NO: 163080 - RNA, 19 nt, Homo sapiens
  misc_RNA (1)...(19): siRNA sense strand
uuauauaccucaaguagac

SEQ ID NO: 163081 - RNA, 19 nt, Homo sapiens
  misc_RNA (1)...(19): siRNA sense strand
agaggugcccuuacacuaa

SEQ ID NO: 163082 - RNA, 19 nt, Homo sapiens
  misc_RNA (1)...(19): siRNA sense strand
uuuaguagauuccuugauc

SEQ ID NO: 163083 - RNA, 19 nt, Homo sapiens
  misc_RNA (1)...(19): siRNA sense strand
gccaggagcccaccaaagu

SEQ ID NO: 163084 - RNA, 19 nt, Homo sapiens
  misc_RNA (1)...(19): siRNA sense strand
cgacaggcaggucaagauu

SEQ ID NO: 163085 - RNA, 19 nt, Homo sapiens
  misc_RNA (1)...(19): siRNA sense strand
gaagaugagccgagagaac

SEQ ID NO: 163086 - RNA, 19 nt, Homo sapiens
  misc_RNA (1)...(19): siRNA sense strand
ggaaagcaaagaggaaauc

SEQ ID NO: 163087 - RNA, 19 nt, Homo sapiens
  misc_RNA (1)...(19): siRNA sense strand
gaaagcaaagaggaaauca

SEQ ID NO: 163088 - RNA, 19 nt, Homo sapiens
  misc_RNA (1)...(19): siRNA sense strand
gaagaggugcccuuacacu

SEQ ID NO: 163089 - RNA, 19 nt, Homo sapiens
  misc_RNA (1)...(19): siRNA sense strand
gcaggagaaggaaagcaaa

SEQ ID NO: 163090 - RNA, 19 nt, Homo sapiens
  misc_RNA (1)...(19): siRNA sense strand
ggucaagauuugguuucaa

SEQ ID NO: 163091 - RNA, 19 nt, Homo sapiens
  misc_RNA (1)...(19): siRNA sense strand
gacaggcaggucaagauuu

SEQ ID NO: 163092 - RNA, 19 nt, Homo sapiens
  misc_RNA (1)...(19): siRNA sense strand
gcaggucaagauuugguuu

SEQ ID NO: 163093 - RNA, 19 nt, Homo sapiens
  misc_RNA (1)...(19): siRNA sense strand
gaagugcaggagaaggaaa

SEQ ID NO: 163094 - RNA, 19 nt, Homo sapiens
  misc_RNA (1)...(19): siRNA sense strand
caaaauauggguaugaaug

SEQ ID NO: 163095 - RNA, 19 nt, Homo sapiens
  misc_RNA (1)...(19): siRNA sense strand
gaccuacgccaccgggaaa

SEQ ID NO: 163096 - RNA, 19 nt, Homo sapiens
  misc_RNA (1)...(19): siRNA sense strand
caaagaguggcagaaagaa

SEQ ID NO: 163097 - RNA, 19 nt, Homo sapiens
  misc_RNA (1)...(19): siRNA sense strand
gaguucuuguucaauaugu

SEQ ID NO: 163098 - RNA, 19 nt, Homo sapiens
  misc_RNA (1)...(19): siRNA sense strand
uuaaggaagaauccaauug

SEQ ID NO: 163099 - RNA, 19 nt, Homo sapiens
  misc_RNA (1)...(19): siRNA sense strand
gauacaccaaccagcaauu

SEQ ID NO: 163100 - RNA, 19 nt, Homo sapiens
  misc_RNA (1)...(19): siRNA sense strand
ggagaaggaaagcaaagag

SEQ ID NO: 163101 - RNA, 19 nt, Homo sapiens
  misc_RNA (1)...(19): siRNA sense strand
cugcauguauucugauaag

SEQ ID NO: 163102 - RNA, 19 nt, Homo sapiens
  misc_RNA (1)...(19): siRNA sense strand
caaacgcuggaauuagaaa

SEQ ID NO: 163103 - RNA, 19 nt, Homo sapiens
  misc_RNA (1)...(19): siRNA sense strand
uaccucaaguagacaguug

SEQ ID NO: 163104 - RNA, 19 nt, Homo sapiens
  misc_RNA (1)...(19): siRNA sense strand
uuaguagauuccuugauca

SEQ ID NO: 163105 - RNA, 19 nt, Homo sapiens
  misc_RNA (1)...(19): siRNA sense strand
aagaguggcagaaagaaga

SEQ ID NO: 163106 - RNA, 19 nt, Homo sapiens
  misc_RNA (1)...(19): siRNA sense strand
caaagaggaaaucaagucu

SEQ ID NO: 163107 - RNA, 19 nt, Homo sapiens
  misc_RNA (1)...(19): siRNA sense strand
aagcaaagaggaaaucaag

SEQ ID NO: 163108 - RNA, 19 nt, Homo sapiens
  misc_RNA (1)...(19): siRNA sense strand
ccaauugcugcauguauuc

SEQ ID NO: 163109 - RNA, 19 nt, Homo sapiens
  misc_RNA (1)...(19): siRNA sense strand
uaaggaagaauccaauugc

SEQ ID NO: 163110 - RNA, 19 nt, Homo sapiens
  misc_RNA (1)...(19): siRNA sense strand
aaauauggguaugaaugug

SEQ ID NO: 163111 - RNA, 19 nt, Homo sapiens
  misc_RNA (1)...(19): siRNA sense strand
gaaccggauccgagaacug

SEQ ID NO: 163112 - RNA, 19 nt, Homo sapiens
  misc_RNA (1)...(19): siRNA sense strand
gccuagagaucaguaagag

SEQ ID NO: 163113 - RNA, 19 nt, Homo sapiens
  misc_RNA (1)...(19): siRNA sense strand
ccaaacgcuggaauuagaa

SEQ ID NO: 163114 - RNA, 19 nt, Homo sapiens
  misc_RNA (1)...(19): siRNA sense strand
ucgaauagagcaaccuguu

SEQ ID NO: 163115 - RNA, 19 nt, Homo sapiens
  misc_RNA (1)...(19): siRNA sense strand
gucccgaagugcaggagaa

SEQ ID NO: 163116 - RNA, 19 nt, Homo sapiens
  misc_RNA (1)...(19): siRNA sense strand
cccaagaguacaauaauag

SEQ ID NO: 163117 - RNA, 19 nt, Homo sapiens
  misc_RNA (1)...(19): siRNA sense strand
uagagcaaccuguuacaca

SEQ ID NO: 163118 - RNA, 19 nt, Homo sapiens
  misc_RNA (1)...(19): siRNA sense strand
cagcagcgccagcauguac

SEQ ID NO: 163119 - RNA, 19 nt, Homo sapiens
  misc_RNA (1)...(19): siRNA sense strand
aagaggugcccuuacacua

SEQ ID NO: 163120 - RNA, 19 nt, Homo sapiens
  misc_RNA (1)...(19): siRNA sense strand
gcuggucccugagucuugu

SEQ ID NO: 163121 - RNA, 19 nt, Homo sapiens
  misc_RNA (1)...(19): siRNA sense strand
ggaaaacccaagaguacaa

SEQ ID NO: 163122 - RNA, 19 nt, Homo sapiens
  misc_RNA (1)...(19): siRNA sense strand
caccaacauuaaggaagaa

SEQ ID NO: 163123 - RNA, 19 nt, Homo sapiens
  misc_RNA (1)...(19): siRNA sense strand
aagaagaugagccgagaga

SEQ ID NO: 163124 - RNA, 19 nt, Homo sapiens
  misc_RNA (1)...(19): siRNA sense strand
gguaugaaugugcauccuu

SEQ ID NO: 163125 - RNA, 19 nt, Homo sapiens
  misc_RNA (1)...(19): siRNA sense strand
gaccgccaaccucacguuu

SEQ ID NO: 163126 - RNA, 19 nt, Homo sapiens
  misc_RNA (1)...(19): siRNA sense strand
ccuuauauaccucaaguag

SEQ ID NO: 163127 - RNA, 19 nt, Homo sapiens
  misc_RNA (1)...(19): siRNA sense strand
gcucccgucucuggccaaa

SEQ ID NO: 163128 - RNA, 19 nt, Homo sapiens
  misc_RNA (1)...(19): siRNA sense strand
gcgcagacauggggaccua

SEQ ID NO: 163129 - RNA, 19 nt, Homo sapiens
  misc_RNA (1)...(19): siRNA sense strand
ccgaagugcaggagaagga

SEQ ID NO: 163130 - RNA, 19 nt, Homo sapiens
  misc_RNA (1)...(19): siRNA sense strand
caacauuaaggaagaaucc

SEQ ID NO: 163131 - RNA, 19 nt, Homo sapiens
  misc_RNA (1)...(19): siRNA sense strand
gaagcuacguugacuauuu

SEQ ID NO: 163132 - RNA, 19 nt, Homo sapiens
  misc_RNA (1)...(19): siRNA sense strand
gaagaugucuccaaggaau

SEQ ID NO: 163133 - RNA, 19 nt, Homo sapiens
  misc_RNA (1)...(19): siRNA sense strand
gaugaugucuccauugaau

SEQ ID NO: 163134 - RNA, 19 nt, Homo sapiens
  misc_RNA (1)...(19): siRNA sense strand
ggaagaugaugaaggagaa

SEQ ID NO: 163135 - RNA, 19 nt, Homo sapiens
  misc_RNA (1)...(19): siRNA sense strand
ggaagaagaugaggaugug

SEQ ID NO: 163136 - RNA, 19 nt, Homo sapiens
  misc_RNA (1)...(19): siRNA sense strand
ggagaucacaguccaguuu

SEQ ID NO: 163137 - RNA, 19 nt, Homo sapiens
  misc_RNA (1)...(19): siRNA sense strand
ugaagaagaugacaaugau

SEQ ID NO: 163138 - RNA, 19 nt, Homo sapiens
  misc_RNA (1)...(19): siRNA sense strand
gcaccaaggccaugaagaa

SEQ ID NO: 163139 - RNA, 19 nt, Homo sapiens
  misc_RNA (1)...(19): siRNA sense strand
ggaugaagaugucucagau

SEQ ID NO: 163140 - RNA, 19 nt, Homo sapiens
  misc_RNA (1)...(19): siRNA sense strand
ugaagaagaugacgaugau

SEQ ID NO: 163141 - RNA, 19 nt, Homo sapiens
  misc_RNA (1)...(19): siRNA sense strand
caaagaggguccaucaaag

SEQ ID NO: 163142 - RNA, 19 nt, Homo sapiens
  misc_RNA (1)...(19): siRNA sense strand
gaugaugucuccacugagu

SEQ ID NO: 163143 - RNA, 19 nt, Homo sapiens
  misc_RNA (1)...(19): siRNA sense strand
ggaggucucugcugagcuu

SEQ ID NO: 163144 - RNA, 19 nt, Homo sapiens
  misc_RNA (1)...(19): siRNA sense strand
gcaaagccaccaagaugaa

SEQ ID NO: 163145 - RNA, 19 nt, Homo sapiens
  misc_RNA (1)...(19): siRNA sense strand
ggaaagcggugaggacaca

SEQ ID NO: 163146 - RNA, 19 nt, Homo sapiens
  misc_RNA (1)...(19): siRNA sense strand
ucaaagaggguccaucaaa

SEQ ID NO: 163147 - RNA, 19 nt, Homo sapiens
  misc_RNA (1)...(19): siRNA sense strand
gagaaaggcacccaucaug

SEQ ID NO: 163148 - RNA, 19 nt, Homo sapiens
  misc_RNA (1)...(19): siRNA sense strand
acaaggauguuuccacaga

SEQ ID NO: 163149 - RNA, 19 nt, Homo sapiens
  misc_RNA (1)...(19): siRNA sense strand
caaggaauaugggcaccua

SEQ ID NO: 163150 - RNA, 19 nt, Homo sapiens
  misc_RNA (1)...(19): siRNA sense strand
gcaccgaagccaugaagaa

SEQ ID NO: 163151 - RNA, 19 nt, Homo sapiens
  misc_RNA (1)...(19): siRNA sense strand
ggaugaggaugaaguugug

SEQ ID NO: 163152 - RNA, 19 nt, Homo sapiens
  misc_RNA (1)...(19): siRNA sense strand
ccaccaagaugaagaaacu

SEQ ID NO: 163153 - RNA, 19 nt, Homo sapiens
  misc_RNA (1)...(19): siRNA sense strand
ccacagagacgaggaagaa

SEQ ID NO: 163154 - RNA, 19 nt, Homo sapiens
  misc_RNA (1)...(19): siRNA sense strand
ccacaagagugaugaagag

SEQ ID NO: 163155 - RNA, 19 nt, Homo sapiens
  misc_RNA (1)...(19): siRNA sense strand
ugaagaaacuggccauggu

SEQ ID NO: 163156 - RNA, 19 nt, Homo sapiens
  misc_RNA (1)...(19): siRNA sense strand
ggaagaagaggaagacaag

SEQ ID NO: 163157 - RNA, 19 nt, Homo sapiens
  misc_RNA (1)...(19): siRNA sense strand
gaaacuggccauggucaaa

SEQ ID NO: 163158 - RNA, 19 nt, Homo sapiens
  misc_RNA (1)...(19): siRNA sense strand
ccaaggccaugaagaagau

SEQ ID NO: 163159 - RNA, 19 nt, Homo sapiens
  misc_RNA (1)...(19): siRNA sense strand
ugacaaugaugaugaugau

SEQ ID NO: 163160 - RNA, 19 nt, Homo sapiens
  misc_RNA (1)...(19): siRNA sense strand
gcaccaaggccacgggauu

SEQ ID NO: 163161 - RNA, 19 nt, Homo sapiens
  misc_RNA (1)...(19): siRNA sense strand
ggacuuccaagaugaguau

SEQ ID NO: 163162 - RNA, 19 nt, Homo sapiens
  misc_RNA (1)...(19): siRNA sense strand
ggucaaagaggguccauca

SEQ ID NO: 163163 - RNA, 19 nt, Homo sapiens
  misc_RNA (1)...(19): siRNA sense strand
gcaccaagaccacagaaag

SEQ ID NO: 163164 - RNA, 19 nt, Homo sapiens
  misc_RNA (1)...(19): siRNA sense strand
ugaagaggaugaagauguc

SEQ ID NO: 163165 - RNA, 19 nt, Homo sapiens
  misc_RNA (1)...(19): siRNA sense strand
ccacagaaaggaagagguu

SEQ ID NO: 163166 - RNA, 19 nt, Homo sapiens
  misc_RNA (1)...(19): siRNA sense strand
aagaggacuuccaagauga

SEQ ID NO: 163167 - RNA, 19 nt, Homo sapiens
  misc_RNA (1)...(19): siRNA sense strand
acacaguggucaaggauag

SEQ ID NO: 163168 - RNA, 19 nt, Homo sapiens
  misc_RNA (1)...(19): siRNA sense strand
gaagaugacaaugaugaug

SEQ ID NO: 163169 - RNA, 19 nt, Homo sapiens
  misc_RNA (1)...(19): siRNA sense strand
ggagugaagacacggaaga

SEQ ID NO: 163170 - RNA, 19 nt, Homo sapiens
  misc_RNA (1)...(19): siRNA sense strand
ugaggaaggaugauucuga

SEQ ID NO: 163171 - RNA, 19 nt, Homo sapiens
  misc_RNA (1)...(19): siRNA sense strand
gaggguccaucaaagagau

SEQ ID NO: 163172 - RNA, 19 nt, Homo sapiens
  misc_RNA (1)...(19): siRNA sense strand
ggacaccgaggccaugaug

SEQ ID NO: 163173 - RNA, 19 nt, Homo sapiens
  misc_RNA (1)...(19): siRNA sense strand
ggaggaggaagaagaggaa

SEQ ID NO: 163174 - RNA, 19 nt, Homo sapiens
  misc_RNA (1)...(19): siRNA sense strand
aaagaggguccaucaaaga

SEQ ID NO: 163175 - RNA, 19 nt, Homo sapiens
  misc_RNA (1)...(19): siRNA sense strand
ccacagcccuagagaccau

SEQ ID NO: 163176 - RNA, 19 nt, Homo sapiens
  misc_RNA (1)...(19): siRNA sense strand
ccgaagccaugaagaagau

SEQ ID NO: 163177 - RNA, 19 nt, Homo sapiens
  misc_RNA (1)...(19): siRNA sense strand
gaagaugacgaugaugaug

SEQ ID NO: 163178 - RNA, 19 nt, Homo sapiens
  misc_RNA (1)...(19): siRNA sense strand
gggcuaggcuucagaaacc

SEQ ID NO: 163179 - RNA, 19 nt, Homo sapiens
  misc_RNA (1)...(19): siRNA sense strand
gaaccaggaggaggaagaa

SEQ ID NO: 163180 - RNA, 19 nt, Homo sapiens
  misc_RNA (1)...(19): siRNA sense strand
ggaagaagaggagaucaca

SEQ ID NO: 163181 - RNA, 19 nt, Homo sapiens
  misc_RNA (1)...(19): siRNA sense strand
aaaggaggaugaagauguc

SEQ ID NO: 163182 - RNA, 19 nt, Homo sapiens
  misc_RNA (1)...(19): siRNA sense strand
gaggauguguccacugaac

SEQ ID NO: 163183 - RNA, 19 nt, Homo sapiens
  misc_RNA (1)...(19): siRNA sense strand
ugacgaugaugaugaugau

SEQ ID NO: 163184 - RNA, 19 nt, Homo sapiens
  misc_RNA (1)...(19): siRNA sense strand
aagaagaugacaaugauga

SEQ ID NO: 163185 - RNA, 19 nt, Homo sapiens
  misc_RNA (1)...(19): siRNA sense strand
ccaggaagaugaggaggau

SEQ ID NO: 163186 - RNA, 19 nt, Homo sapiens
  misc_RNA (1)...(19): siRNA sense strand
gagagaaaggcacccauca

SEQ ID NO: 163187 - RNA, 19 nt, Homo sapiens
  misc_RNA (1)...(19): siRNA sense strand
ugaggaagacgaugaaagu

SEQ ID NO: 163188 - RNA, 19 nt, Homo sapiens
  misc_RNA (1)...(19): siRNA sense strand
gagacgaggaagaagauga

SEQ ID NO: 163189 - RNA, 19 nt, Homo sapiens
  misc_RNA (1)...(19): siRNA sense strand
ggauugaagaggaugaaga

SEQ ID NO: 163190 - RNA, 19 nt, Homo sapiens
  misc_RNA (1)...(19): siRNA sense strand
ggaugauucugaggaggaa

SEQ ID NO: 163191 - RNA, 19 nt, Homo sapiens
  misc_RNA (1)...(19): siRNA sense strand
gaagccauuugaggaagga

SEQ ID NO: 163192 - RNA, 19 nt, Homo sapiens
  misc_RNA (1)...(19): siRNA sense strand
gacacacaguggucaagga

SEQ ID NO: 163193 - RNA, 19 nt, Homo sapiens
  misc_RNA (1)...(19): siRNA sense strand
ggcaaagccaccaagauga

SEQ ID NO: 163194 - RNA, 19 nt, Homo sapiens
  misc_RNA (1)...(19): siRNA sense strand
gaagaagaugacaaugaug

SEQ ID NO: 163195 - RNA, 19 nt, Homo sapiens
  misc_RNA (1)...(19): siRNA sense strand
agacgaggaugaggaugaa

SEQ ID NO: 163196 - RNA, 19 nt, Homo sapiens
  misc_RNA (1)...(19): siRNA sense strand
aagcuacguugacuauuuc

SEQ ID NO: 163197 - RNA, 19 nt, Homo sapiens
  misc_RNA (1)...(19): siRNA sense strand
ggaagagagggcugagguu

SEQ ID NO: 163198 - RNA, 19 nt, Homo sapiens
  misc_RNA (1)...(19): siRNA sense strand
gugaagaggaugaggaugu

SEQ ID NO: 163199 - RNA, 19 nt, Homo sapiens
  misc_RNA (1)...(19): siRNA sense strand
aagaagaugacgaugauga

SEQ ID NO: 163200 - RNA, 19 nt, Homo sapiens
  misc_RNA (1)...(19): siRNA sense strand
aaggauagaagccauuuga

SEQ ID NO: 163201 - RNA, 19 nt, Homo sapiens
  misc_RNA (1)...(19): siRNA sense strand
cagaugagaacaaggaugu

SEQ ID NO: 163202 - RNA, 19 nt, Homo sapiens
  misc_RNA (1)...(19): siRNA sense strand
cuuccaagaugaguauaaa

SEQ ID NO: 163203 - RNA, 19 nt, Homo sapiens
  misc_RNA (1)...(19): siRNA sense strand
ccacagagaaugggcauca

SEQ ID NO: 163204 - RNA, 19 nt, Homo sapiens
  misc_RNA (1)...(19): siRNA sense strand
gauugaagaggaugaagau

SEQ ID NO: 163205 - RNA, 19 nt, Homo sapiens
  misc_RNA (1)...(19): siRNA sense strand
augaugaugucuccauuga

SEQ ID NO: 163206 - RNA, 19 nt, Homo sapiens
  misc_RNA (1)...(19): siRNA sense strand
augaagaugucuccaagga

SEQ ID NO: 163207 - RNA, 19 nt, Homo sapiens
  misc_RNA (1)...(19): siRNA sense strand
guucagagcagggagagaa

SEQ ID NO: 163208 - RNA, 19 nt, Homo sapiens
  misc_RNA (1)...(19): siRNA sense strand
ccacaaagucggagaugag

SEQ ID NO: 163209 - RNA, 19 nt, Homo sapiens
  misc_RNA (1)...(19): siRNA sense strand
cacaggaugcucaggagua

SEQ ID NO: 163210 - RNA, 19 nt, Homo sapiens
  misc_RNA (1)...(19): siRNA sense strand
augaugaugucuccacuga

SEQ ID NO: 163211 - RNA, 19 nt, Homo sapiens
  misc_RNA (1)...(19): siRNA sense strand
caaugaugaugaugauguc

SEQ ID NO: 163212 - RNA, 19 nt, Homo sapiens
  misc_RNA (1)...(19): siRNA sense strand
gaugaugaugucuccauug

SEQ ID NO: 163213 - RNA, 19 nt, Homo sapiens
  misc_RNA (1)...(19): siRNA sense strand
ugaugaugaugucuccauu

SEQ ID NO: 163214 - RNA, 19 nt, Homo sapiens
  misc_RNA (1)...(19): siRNA sense strand
ugaggaggaugaggaggaa

SEQ ID NO: 163215 - RNA, 19 nt, Homo sapiens
  misc_RNA (1)...(19): siRNA sense strand
gagaucacaguccaguuug

SEQ ID NO: 163216 - RNA, 19 nt, Homo sapiens
  misc_RNA (1)...(19): siRNA sense strand
accauggccuuguagauga

SEQ ID NO: 163217 - RNA, 19 nt, Homo sapiens
  misc_RNA (1)...(19): siRNA sense strand
gaagccaugaagaagauga

SEQ ID NO: 163218 - RNA, 19 nt, Homo sapiens
  misc_RNA (1)...(19): siRNA sense strand
ggaggucuuugcagagcau

SEQ ID NO: 163219 - RNA, 19 nt, Homo sapiens
  misc_RNA (1)...(19): siRNA sense strand
ccacgggauugaagaggau

SEQ ID NO: 163220 - RNA, 19 nt, Homo sapiens
  misc_RNA (1)...(19): siRNA sense strand
ggaggcaucagcagagcuu

SEQ ID NO: 163221 - RNA, 19 nt, Homo sapiens
  misc_RNA (1)...(19): siRNA sense strand
gaggagaggagggaagaga

SEQ ID NO: 163222 - RNA, 19 nt, Homo sapiens
  misc_RNA (1)...(19): siRNA sense strand
gagcaucaccaucauaucc

SEQ ID NO: 163223 - RNA, 19 nt, Homo sapiens
  misc_RNA (1)...(19): siRNA sense strand
ccaggaagcuacguugacu

SEQ ID NO: 163224 - RNA, 19 nt, Homo sapiens
  misc_RNA (1)...(19): siRNA sense strand
acaggaugcucaggaguau

SEQ ID NO: 163225 - RNA, 19 nt, Homo sapiens
  misc_RNA (1)...(19): siRNA sense strand
ggaggaggaggaggaagaa

SEQ ID NO: 163226 - RNA, 19 nt, Homo sapiens
  misc_RNA (1)...(19): siRNA sense strand
ugaagacacggaagacuca

SEQ ID NO: 163227 - RNA, 19 nt, Homo sapiens
  misc_RNA (1)...(19): siRNA sense strand
augaggauguguccacuga

SEQ ID NO: 163228 - RNA, 19 nt, Homo sapiens
  misc_RNA (1)...(19): siRNA sense strand
aagaugacaaugaugauga

SEQ ID NO: 163229 - RNA, 19 nt, Homo sapiens
  misc_RNA (1)...(19): siRNA sense strand
caaccucgaggccacaaga

SEQ ID NO: 163230 - RNA, 19 nt, Homo sapiens
  misc_RNA (1)...(19): siRNA sense strand
aggcaaagccaccaagaug

SEQ ID NO: 163231 - RNA, 19 nt, Homo sapiens
  misc_RNA (1)...(19): siRNA sense strand
aaacagacaugucaagaaa

SEQ ID NO: 163232 - RNA, 19 nt, Homo sapiens
  misc_RNA (1)...(19): siRNA sense strand
cauaaucugucccugaaua

SEQ ID NO: 163233 - RNA, 19 nt, Homo sapiens
  misc_RNA (1)...(19): siRNA sense strand
auacagacguugauuauga

SEQ ID NO: 163234 - RNA, 19 nt, Homo sapiens
  misc_RNA (1)...(19): siRNA sense strand
ccaacaggcuggaagaauu

SEQ ID NO: 163235 - RNA, 19 nt, Homo sapiens
  misc_RNA (1)...(19): siRNA sense strand
gaagaauucuguucgacau

SEQ ID NO: 163236 - RNA, 19 nt, Homo sapiens
  misc_RNA (1)...(19): siRNA sense strand
ugaagaagauacagacguu

SEQ ID NO: 163237 - RNA, 19 nt, Homo sapiens
  misc_RNA (1)...(19): siRNA sense strand
acagacaugucaagaaauu

SEQ ID NO: 163238 - RNA, 19 nt, Homo sapiens
  misc_RNA (1)...(19): siRNA sense strand
ccuuuagucuucucauuua

SEQ ID NO: 163239 - RNA, 19 nt, Homo sapiens
  misc_RNA (1)...(19): siRNA sense strand
ucccagugcuguacgauua

SEQ ID NO: 163240 - RNA, 19 nt, Homo sapiens
  misc_RNA (1)...(19): siRNA sense strand
ucauuuauauggccauuga

SEQ ID NO: 163241 - RNA, 19 nt, Homo sapiens
  misc_RNA (1)...(19): siRNA sense strand
gcuggauucuggaccauuu

SEQ ID NO: 163242 - RNA, 19 nt, Homo sapiens
  misc_RNA (1)...(19): siRNA sense strand
uggaugagguauaugaauu

SEQ ID NO: 163243 - RNA, 19 nt, Homo sapiens
  misc_RNA (1)...(19): siRNA sense strand
auugagcacucuccaaaua

SEQ ID NO: 163244 - RNA, 19 nt, Homo sapiens
  misc_RNA (1)...(19): siRNA sense strand
ugagcacucuccaaauaaa

SEQ ID NO: 163245 - RNA, 19 nt, Homo sapiens
  misc_RNA (1)...(19): siRNA sense strand
ggaugagguauaugaauuu

SEQ ID NO: 163246 - RNA, 19 nt, Homo sapiens
  misc_RNA (1)...(19): siRNA sense strand
agaauucuguucgacauaa

SEQ ID NO: 163247 - RNA, 19 nt, Homo sapiens
  misc_RNA (1)...(19): siRNA sense strand
guguugauccggaauauaa

SEQ ID NO: 163248 - RNA, 19 nt, Homo sapiens
  misc_RNA (1)...(19): siRNA sense strand
ccucaaagaaucugauauu

SEQ ID NO: 163249 - RNA, 19 nt, Homo sapiens
  misc_RNA (1)...(19): siRNA sense strand
gaucacaauuacagugcaa

SEQ ID NO: 163250 - RNA, 19 nt, Homo sapiens
  misc_RNA (1)...(19): siRNA sense strand
gaagauacagacguugauu

SEQ ID NO: 163251 - RNA, 19 nt, Homo sapiens
  misc_RNA (1)...(19): siRNA sense strand
gggaagugauggcagugaa

SEQ ID NO: 163252 - RNA, 19 nt, Homo sapiens
  misc_RNA (1)...(19): siRNA sense strand
ggcaaugcauuucaucauc

SEQ ID NO: 163253 - RNA, 19 nt, Homo sapiens
  misc_RNA (1)...(19): siRNA sense strand
ugauggcagugaaggauuu

SEQ ID NO: 163254 - RNA, 19 nt, Homo sapiens
  misc_RNA (1)...(19): siRNA sense strand
ccaccagcauugauccaaa

SEQ ID NO: 163255 - RNA, 19 nt, Homo sapiens
  misc_RNA (1)...(19): siRNA sense strand
ggaguuacggcaaugcauu

SEQ ID NO: 163256 - RNA, 19 nt, Homo sapiens
  misc_RNA (1)...(19): siRNA sense strand
gcaaagacacaaaaucaaa

SEQ ID NO: 163257 - RNA, 19 nt, Homo sapiens
  misc_RNA (1)...(19): siRNA sense strand
agacguugauuaugaagau

SEQ ID NO: 163258 - RNA, 19 nt, Homo sapiens
  misc_RNA (1)...(19): siRNA sense strand
ggaauucguacauguuuag

SEQ ID NO: 163259 - RNA, 19 nt, Homo sapiens
  misc_RNA (1)...(19): siRNA sense strand
aaagaggaguuacggcaau

SEQ ID NO: 163260 - RNA, 19 nt, Homo sapiens
  misc_RNA (1)...(19): siRNA sense strand
gaauucuguucgacauaau

SEQ ID NO: 163261 - RNA, 19 nt, Homo sapiens
  misc_RNA (1)...(19): siRNA sense strand
uggaauucguacauguuua

SEQ ID NO: 163262 - RNA, 19 nt, Homo sapiens
  misc_RNA (1)...(19): siRNA sense strand
gugcgaaaccucaaagaau

SEQ ID NO: 163263 - RNA, 19 nt, Homo sapiens
  misc_RNA (1)...(19): siRNA sense strand
caacaggcuggaagaauuc

SEQ ID NO: 163264 - RNA, 19 nt, Homo sapiens
  misc_RNA (1)...(19): siRNA sense strand
ccuaauaaguacugcaaag

SEQ ID NO: 163265 - RNA, 19 nt, Homo sapiens
  misc_RNA (1)...(19): siRNA sense strand
aagaagccauggcaagguu

SEQ ID NO: 163266 - RNA, 19 nt, Homo sapiens
  misc_RNA (1)...(19): siRNA sense strand
aauaaguacugcaaagaca

SEQ ID NO: 163267 - RNA, 19 nt, Homo sapiens
  misc_RNA (1)...(19): siRNA sense strand
caaagaggcagcuggaucu

SEQ ID NO: 163268 - RNA, 19 nt, Homo sapiens
  misc_RNA (1)...(19): siRNA sense strand
ccauugagcacucuccaaa

SEQ ID NO: 163269 - RNA, 19 nt, Homo sapiens
  misc_RNA (1)...(19): siRNA sense strand
gaagccauggcaagguuaa

SEQ ID NO: 163270 - RNA, 19 nt, Homo sapiens
  misc_RNA (1)...(19): siRNA sense strand
gaaauuuauagcuggauuc

SEQ ID NO: 163271 - RNA, 19 nt, Homo sapiens
  misc_RNA (1)...(19): siRNA sense strand
ugucuucccugucuucugu

SEQ ID NO: 163272 - RNA, 19 nt, Homo sapiens
  misc_RNA (1)...(19): siRNA sense strand
gaguuacggcaaugcauuu

SEQ ID NO: 163273 - RNA, 19 nt, Homo sapiens
  misc_RNA (1)...(19): siRNA sense strand
gcaccaacaggcuggaaga

SEQ ID NO: 163274 - RNA, 19 nt, Homo sapiens
  misc_RNA (1)...(19): siRNA sense strand
uuuaagcucuguaaucaag

SEQ ID NO: 163275 - RNA, 19 nt, Homo sapiens
  misc_RNA (1)...(19): siRNA sense strand
uacagacguugauuaugaa

SEQ ID NO: 163276 - RNA, 19 nt, Homo sapiens
  misc_RNA (1)...(19): siRNA sense strand
aagauacagacguugauua

SEQ ID NO: 163277 - RNA, 19 nt, Homo sapiens
  misc_RNA (1)...(19): siRNA sense strand
ugcgaaaccucaaagaauc

SEQ ID NO: 163278 - RNA, 19 nt, Homo sapiens
  misc_RNA (1)...(19): siRNA sense strand
ccauacuccuuuagucuuc

SEQ ID NO: 163279 - RNA, 19 nt, Homo sapiens
  misc_RNA (1)...(19): siRNA sense strand
aauaaauguuugccuguca

SEQ ID NO: 163280 - RNA, 19 nt, Homo sapiens
  misc_RNA (1)...(19): siRNA sense strand
cuuuaucaccucacuauuu

SEQ ID NO: 163281 - RNA, 19 nt, Homo sapiens
  misc_RNA (1)...(19): siRNA sense strand
gcacugaagaagcaaccuu

SEQ ID NO: 163282 - RNA, 19 nt, Homo sapiens
  misc_RNA (1)...(19): siRNA sense strand
uagcgugucuucccugucu

SEQ ID NO: 163283 - RNA, 19 nt, Homo sapiens
  misc_RNA (1)...(19): siRNA sense strand
cagcauugauccaaaagaa

SEQ ID NO: 163284 - RNA, 19 nt, Homo sapiens
  misc_RNA (1)...(19): siRNA sense strand
agauacagacguugauuau

SEQ ID NO: 163285 - RNA, 19 nt, Homo sapiens
  misc_RNA (1)...(19): siRNA sense strand
ggugcgaaaccucaaagaa

SEQ ID NO: 163286 - RNA, 19 nt, Homo sapiens
  misc_RNA (1)...(19): siRNA sense strand
auucguacauguuuagguu

SEQ ID NO: 163287 - RNA, 19 nt, Homo sapiens
  misc_RNA (1)...(19): siRNA sense strand
cucaaagaaucugauauug

SEQ ID NO: 163288 - RNA, 19 nt, Homo sapiens
  misc_RNA (1)...(19): siRNA sense strand
ggaauauaaacccaaucuu

SEQ ID NO: 163289 - RNA, 19 nt, Homo sapiens
  misc_RNA (1)...(19): siRNA sense strand
ggaccauuuuccauauuuu

SEQ ID NO: 163290 - RNA, 19 nt, Homo sapiens
  misc_RNA (1)...(19): siRNA sense strand
gcacucuccaaauaaaugu

SEQ ID NO: 163291 - RNA, 19 nt, Homo sapiens
  misc_RNA (1)...(19): siRNA sense strand
gaaaacagacaugucaaga

SEQ ID NO: 163292 - RNA, 19 nt, Homo sapiens
  misc_RNA (1)...(19): siRNA sense strand
acaauuacagugcaaguag

SEQ ID NO: 163293 - RNA, 19 nt, Homo sapiens
  misc_RNA (1)...(19): siRNA sense strand
cuaauaaguacugcaaaga

SEQ ID NO: 163294 - RNA, 19 nt, Homo sapiens
  misc_RNA (1)...(19): siRNA sense strand
gcuggaauucguacauguu

SEQ ID NO: 163295 - RNA, 19 nt, Homo sapiens
  misc_RNA (1)...(19): siRNA sense strand
aagaagauacagacguuga

SEQ ID NO: 163296 - RNA, 19 nt, Homo sapiens
  misc_RNA (1)...(19): siRNA sense strand
agacaguggcuaugcauca

SEQ ID NO: 163297 - RNA, 19 nt, Homo sapiens
  misc_RNA (1)...(19): siRNA sense strand
auaaauguuugccugucaa

SEQ ID NO: 163298 - RNA, 19 nt, Homo sapiens
  misc_RNA (1)...(19): siRNA sense strand
ccaccuugcuggaauucgu

SEQ ID NO: 163299 - RNA, 19 nt, Homo sapiens
  misc_RNA (1)...(19): siRNA sense strand
gagcacucuccaaauaaau

SEQ ID NO: 163300 - RNA, 19 nt, Homo sapiens
  misc_RNA (1)...(19): siRNA sense strand
uaagcucuguaaucaagca

SEQ ID NO: 163301 - RNA, 19 nt, Homo sapiens
  misc_RNA (1)...(19): siRNA sense strand
ucaccucacuauuuaagcu

SEQ ID NO: 163302 - RNA, 19 nt, Homo sapiens
  misc_RNA (1)...(19): siRNA sense strand
cuauuuaagcucuguaauc

SEQ ID NO: 163303 - RNA, 19 nt, Homo sapiens
  misc_RNA (1)...(19): siRNA sense strand
gauacagacguugauuaug

SEQ ID NO: 163304 - RNA, 19 nt, Homo sapiens
  misc_RNA (1)...(19): siRNA sense strand
aagaagaucacaauuacag

SEQ ID NO: 163305 - RNA, 19 nt, Homo sapiens
  misc_RNA (1)...(19): siRNA sense strand
uuacggcaaugcauuucau

SEQ ID NO: 163306 - RNA, 19 nt, Homo sapiens
  misc_RNA (1)...(19): siRNA sense strand
ugaugcugcugcugcaaug

SEQ ID NO: 163307 - RNA, 19 nt, Homo sapiens
  misc_RNA (1)...(19): siRNA sense strand
aaucugucccugaauaaau

SEQ ID NO: 163308 - RNA, 19 nt, Homo sapiens
  misc_RNA (1)...(19): siRNA sense strand
gacacaaaaucaaaagcaa

SEQ ID NO: 163309 - RNA, 19 nt, Homo sapiens
  misc_RNA (1)...(19): siRNA sense strand
ggagacaguggcuaugcau

SEQ ID NO: 163310 - RNA, 19 nt, Homo sapiens
  misc_RNA (1)...(19): siRNA sense strand
cacaauuacagugcaagua

SEQ ID NO: 163311 - RNA, 19 nt, Homo sapiens
  misc_RNA (1)...(19): siRNA sense strand
gaaaccucaaagaaucuga

SEQ ID NO: 163312 - RNA, 19 nt, Homo sapiens
  misc_RNA (1)...(19): siRNA sense strand
auggcaagguuaauggaaa

SEQ ID NO: 163313 - RNA, 19 nt, Homo sapiens
  misc_RNA (1)...(19): siRNA sense strand
ggaagugauggcagugaag

SEQ ID NO: 163314 - RNA, 19 nt, Homo sapiens
  misc_RNA (1)...(19): siRNA sense strand
uaaucugucccugaauaaa

SEQ ID NO: 163315 - RNA, 19 nt, Homo sapiens
  misc_RNA (1)...(19): siRNA sense strand
gcauugauccaaaagaaga

SEQ ID NO: 163316 - RNA, 19 nt, Homo sapiens
  misc_RNA (1)...(19): siRNA sense strand
aaucuuauccaggcacuga

SEQ ID NO: 163317 - RNA, 19 nt, Homo sapiens
  misc_RNA (1)...(19): siRNA sense strand
gguguguugauccggaaua

SEQ ID NO: 163318 - RNA, 19 nt, Homo sapiens
  misc_RNA (1)...(19): siRNA sense strand
gaccagcuugcuaccagaa

SEQ ID NO: 163319 - RNA, 19 nt, Homo sapiens
  misc_RNA (1)...(19): siRNA sense strand
uccaggcacugaagaagca

SEQ ID NO: 163320 - RNA, 19 nt, Homo sapiens
  misc_RNA (1)...(19): siRNA sense strand
caaaaugguucuuuaucac

SEQ ID NO: 163321 - RNA, 19 nt, Homo sapiens
  misc_RNA (1)...(19): siRNA sense strand
uaauaaguacugcaaagac

SEQ ID NO: 163322 - RNA, 19 nt, Homo sapiens
  misc_RNA (1)...(19): siRNA sense strand
auaaucugucccugaauaa

SEQ ID NO: 163323 - RNA, 19 nt, Homo sapiens
  misc_RNA (1)...(19): siRNA sense strand
gcgaaaccucaaagaaucu

SEQ ID NO: 163324 - RNA, 19 nt, Homo sapiens
  misc_RNA (1)...(19): siRNA sense strand
gaacauaucugaauagugu

SEQ ID NO: 163325 - RNA, 19 nt, Homo sapiens
  misc_RNA (1)...(19): siRNA sense strand
gcacgugacuggacaauuu

SEQ ID NO: 163326 - RNA, 19 nt, Homo sapiens
  misc_RNA (1)...(19): siRNA sense strand
ggaagaagaugaaacugua

SEQ ID NO: 163327 - RNA, 19 nt, Homo sapiens
  misc_RNA (1)...(19): siRNA sense strand
gaaggaacauaucugaaua

SEQ ID NO: 163328 - RNA, 19 nt, Homo sapiens
  misc_RNA (1)...(19): siRNA sense strand
caacggaggugacagauuu

SEQ ID NO: 163329 - RNA, 19 nt, Homo sapiens
  misc_RNA (1)...(19): siRNA sense strand
gaagggaucugaacuggaa

SEQ ID NO: 163330 - RNA, 19 nt, Homo sapiens
  misc_RNA (1)...(19): siRNA sense strand
gagcaauugugaugagaua

SEQ ID NO: 163331 - RNA, 19 nt, Homo sapiens
  misc_RNA (1)...(19): siRNA sense strand
gaguggaagucuacuguua

SEQ ID NO: 163332 - RNA, 19 nt, Homo sapiens
  misc_RNA (1)...(19): siRNA sense strand
gaucugaacuggaaauuac

SEQ ID NO: 163333 - RNA, 19 nt, Homo sapiens
  misc_RNA (1)...(19): siRNA sense strand
caacuggacugccucacua

SEQ ID NO: 163334 - RNA, 19 nt, Homo sapiens
  misc_RNA (1)...(19): siRNA sense strand
gugcauaugucaaucuuaa

SEQ ID NO: 163335 - RNA, 19 nt, Homo sapiens
  misc_RNA (1)...(19): siRNA sense strand
ucaagauccuucaguauuu

SEQ ID NO: 163336 - RNA, 19 nt, Homo sapiens
  misc_RNA (1)...(19): siRNA sense strand
agacugaaauggcagcuua

SEQ ID NO: 163337 - RNA, 19 nt, Homo sapiens
  misc_RNA (1)...(19): siRNA sense strand
gugaagacuuugaauauga

SEQ ID NO: 163338 - RNA, 19 nt, Homo sapiens
  misc_RNA (1)...(19): siRNA sense strand
ugaacaagguggaguauug

SEQ ID NO: 163339 - RNA, 19 nt, Homo sapiens
  misc_RNA (1)...(19): siRNA sense strand
ccaccaagcuccuuacuuc

SEQ ID NO: 163340 - RNA, 19 nt, Homo sapiens
  misc_RNA (1)...(19): siRNA sense strand
gagaagaauugauugacaa

SEQ ID NO: 163341 - RNA, 19 nt, Homo sapiens
  misc_RNA (1)...(19): siRNA sense strand
gaaaucacaguguacuaua

SEQ ID NO: 163342 - RNA, 19 nt, Homo sapiens
  misc_RNA (1)...(19): siRNA sense strand
ccacacagaguucauauuu

SEQ ID NO: 163343 - RNA, 19 nt, Homo sapiens
  misc_RNA (1)...(19): siRNA sense strand
ccgcaucucugaaguguuu

SEQ ID NO: 163344 - RNA, 19 nt, Homo sapiens
  misc_RNA (1)...(19): siRNA sense strand
ugucagcccucuauaaauu

SEQ ID NO: 163345 - RNA, 19 nt, Homo sapiens
  misc_RNA (1)...(19): siRNA sense strand
ccaccaaggucuucuguau

SEQ ID NO: 163346 - RNA, 19 nt, Homo sapiens
  misc_RNA (1)...(19): siRNA sense strand
gaaagaaauugugguuauc

SEQ ID NO: 163347 - RNA, 19 nt, Homo sapiens
  misc_RNA (1)...(19): siRNA sense strand
ggucaaguuuguagauauu

SEQ ID NO: 163348 - RNA, 19 nt, Homo sapiens
  misc_RNA (1)...(19): siRNA sense strand
gcaaucugguuccaacuga

SEQ ID NO: 163349 - RNA, 19 nt, Homo sapiens
  misc_RNA (1)...(19): siRNA sense strand
gugaggagcuggagcaguu

SEQ ID NO: 163350 - RNA, 19 nt, Homo sapiens
  misc_RNA (1)...(19): siRNA sense strand
gaaggaggaagaaauagaa

SEQ ID NO: 163351 - RNA, 19 nt, Homo sapiens
  misc_RNA (1)...(19): siRNA sense strand
ccagaaggaggaagaaaua

SEQ ID NO: 163352 - RNA, 19 nt, Homo sapiens
  misc_RNA (1)...(19): siRNA sense strand
ccacaagaguguuuaaugg

SEQ ID NO: 163353 - RNA, 19 nt, Homo sapiens
  misc_RNA (1)...(19): siRNA sense strand
agaggacgauuacucauuu

SEQ ID NO: 163354 - RNA, 19 nt, Homo sapiens
  misc_RNA (1)...(19): siRNA sense strand
ucaagucuuuggagaagua

SEQ ID NO: 163355 - RNA, 19 nt, Homo sapiens
  misc_RNA (1)...(19): siRNA sense strand
caaugccuaucgcuucuua

SEQ ID NO: 163356 - RNA, 19 nt, Homo sapiens
  misc_RNA (1)...(19): siRNA sense strand
cagaguggguuucauguug

SEQ ID NO: 163357 - RNA, 19 nt, Homo sapiens
  misc_RNA (1)...(19): siRNA sense strand
gauggaggauugugucaug

SEQ ID NO: 163358 - RNA, 19 nt, Homo sapiens
  misc_RNA (1)...(19): siRNA sense strand
ugagauccuugaaagauuu

SEQ ID NO: 163359 - RNA, 19 nt, Homo sapiens
  misc_RNA (1)...(19): siRNA sense strand
gcauguaacacuccacuuu

SEQ ID NO: 163360 - RNA, 19 nt, Homo sapiens
  misc_RNA (1)...(19): siRNA sense strand
guucauauuuaccaccaua

SEQ ID NO: 163361 - RNA, 19 nt, Homo sapiens
  misc_RNA (1)...(19): siRNA sense strand
aaaccaaacugacuuacug

SEQ ID NO: 163362 - RNA, 19 nt, Homo sapiens
  misc_RNA (1)...(19): siRNA sense strand
ggaaauuggcugaaagaug

SEQ ID NO: 163363 - RNA, 19 nt, Homo sapiens
  misc_RNA (1)...(19): siRNA sense strand
gaauugauguaccagaauc

SEQ ID NO: 163364 - RNA, 19 nt, Homo sapiens
  misc_RNA (1)...(19): siRNA sense strand
uagauauucugaccaauug

SEQ ID NO: 163365 - RNA, 19 nt, Homo sapiens
  misc_RNA (1)...(19): siRNA sense strand
gcagaaaaccuccgcuuua

SEQ ID NO: 163366 - RNA, 19 nt, Homo sapiens
  misc_RNA (1)...(19): siRNA sense strand
gccgauggauugacuuuga

SEQ ID NO: 163367 - RNA, 19 nt, Homo sapiens
  misc_RNA (1)...(19): siRNA sense strand
cuaaagcuguuucugaaug

SEQ ID NO: 163368 - RNA, 19 nt, Homo sapiens
  misc_RNA (1)...(19): siRNA sense strand
acacagaguucauauuuac

SEQ ID NO: 163369 - RNA, 19 nt, Homo sapiens
  misc_RNA (1)...(19): siRNA sense strand
gaagaacugucaggagcaa

SEQ ID NO: 163370 - RNA, 19 nt, Homo sapiens
  misc_RNA (1)...(19): siRNA sense strand
ggacaaccgccuuucaaga

SEQ ID NO: 163371 - RNA, 19 nt, Homo sapiens
  misc_RNA (1)...(19): siRNA sense strand
uaaagcuguuucugaauga

SEQ ID NO: 163372 - RNA, 19 nt, Homo sapiens
  misc_RNA (1)...(19): siRNA sense strand
cacacagaguucauauuua

SEQ ID NO: 163373 - RNA, 19 nt, Homo sapiens
  misc_RNA (1)...(19): siRNA sense strand
gcaauugugaugagauauu

SEQ ID NO: 163374 - RNA, 19 nt, Homo sapiens
  misc_RNA (1)...(19): siRNA sense strand
guagauauucugaccaauu

SEQ ID NO: 163375 - RNA, 19 nt, Homo sapiens
  misc_RNA (1)...(19): siRNA sense strand
gacaaccgccuuucaagaa

SEQ ID NO: 163376 - RNA, 19 nt, Homo sapiens
  misc_RNA (1)...(19): siRNA sense strand
cagacacuccucuaauuua

SEQ ID NO: 163377 - RNA, 19 nt, Homo sapiens
  misc_RNA (1)...(19): siRNA sense strand
gaacuggaaauuacacuca

SEQ ID NO: 163378 - RNA, 19 nt, Homo sapiens
  misc_RNA (1)...(19): siRNA sense strand
gaaagacucacucccuguu

SEQ ID NO: 163379 - RNA, 19 nt, Homo sapiens
  misc_RNA (1)...(19): siRNA sense strand
caauugguauguuagaaug

SEQ ID NO: 163380 - RNA, 19 nt, Homo sapiens
  misc_RNA (1)...(19): siRNA sense strand
caucaggacuuugaaggaa

SEQ ID NO: 163381 - RNA, 19 nt, Homo sapiens
  misc_RNA (1)...(19): siRNA sense strand
gauaagacacugggaauca

SEQ ID NO: 163382 - RNA, 19 nt, Homo sapiens
  misc_RNA (1)...(19): siRNA sense strand
cgagaagaauugauugaca

SEQ ID NO: 163383 - RNA, 19 nt, Homo sapiens
  misc_RNA (1)...(19): siRNA sense strand
caagauccuucaguauuug

SEQ ID NO: 163384 - RNA, 19 nt, Homo sapiens
  misc_RNA (1)...(19): siRNA sense strand
cuaguacucuucuuuguca

SEQ ID NO: 163385 - RNA, 19 nt, Homo sapiens
  misc_RNA (1)...(19): siRNA sense strand
caacaguucuaguacucuu

SEQ ID NO: 163386 - RNA, 19 nt, Homo sapiens
  misc_RNA (1)...(19): siRNA sense strand
gaucagacacuccucuaau

SEQ ID NO: 163387 - RNA, 19 nt, Homo sapiens
  misc_RNA (1)...(19): siRNA sense strand
gccaugaauugcacgauga

SEQ ID NO: 163388 - RNA, 19 nt, Homo sapiens
  misc_RNA (1)...(19): siRNA sense strand
ucaagaacguaauugugaa

SEQ ID NO: 163389 - RNA, 19 nt, Homo sapiens
  misc_RNA (1)...(19): siRNA sense strand
ccagaaaugcaauauguga

SEQ ID NO: 163390 - RNA, 19 nt, Homo sapiens
  misc_RNA (1)...(19): siRNA sense strand
accaaggucuucuguauga

SEQ ID NO: 163391 - RNA, 19 nt, Homo sapiens
  misc_RNA (1)...(19): siRNA sense strand
agagaaagccccaacauua

SEQ ID NO: 163392 - RNA, 19 nt, Homo sapiens
  misc_RNA (1)...(19): siRNA sense strand
uggcuuaccuguggaauau

SEQ ID NO: 163393 - RNA, 19 nt, Homo sapiens
  misc_RNA (1)...(19): siRNA sense strand
aaugguagaugaaggaaug

SEQ ID NO: 163394 - RNA, 19 nt, Homo sapiens
  misc_RNA (1)...(19): siRNA sense strand
ggagaaguauaucauugag

SEQ ID NO: 163395 - RNA, 19 nt, Homo sapiens
  misc_RNA (1)...(19): siRNA sense strand
gauugacccuguuucuguu

SEQ ID NO: 163396 - RNA, 19 nt, Homo sapiens
  misc_RNA (1)...(19): siRNA sense strand
gaaugaaccgcagaagauu

SEQ ID NO: 163397 - RNA, 19 nt, Homo sapiens
  misc_RNA (1)...(19): siRNA sense strand
gcggguacaauuaaagaua

SEQ ID NO: 163398 - RNA, 19 nt, Homo sapiens
  misc_RNA (1)...(19): siRNA sense strand
ugugaaggaugcugacaaa

SEQ ID NO: 163399 - RNA, 19 nt, Homo sapiens
  misc_RNA (1)...(19): siRNA sense strand
acaacuaugugaaggaaga

SEQ ID NO: 163400 - RNA, 19 nt, Homo sapiens
  misc_RNA (1)...(19): siRNA sense strand
ugacaacuaugugaaggaa

SEQ ID NO: 163401 - RNA, 19 nt, Homo sapiens
  misc_RNA (1)...(19): siRNA sense strand
gcuuaccuguggaauauga

SEQ ID NO: 163402 - RNA, 19 nt, Homo sapiens
  misc_RNA (1)...(19): siRNA sense strand
ucuauaaauuggagaguga

SEQ ID NO: 163403 - RNA, 19 nt, Homo sapiens
  misc_RNA (1)...(19): siRNA sense strand
caacaacagcagacuucua

SEQ ID NO: 163404 - RNA, 19 nt, Homo sapiens
  misc_RNA (1)...(19): siRNA sense strand
ggaaauuacagaagacauc

SEQ ID NO: 163405 - RNA, 19 nt, Homo sapiens
  misc_RNA (1)...(19): siRNA sense strand
gaucaacaguucuaguacu

SEQ ID NO: 163406 - RNA, 19 nt, Homo sapiens
  misc_RNA (1)...(19): siRNA sense strand
ugacguccaucaagcaguu

SEQ ID NO: 163407 - RNA, 19 nt, Homo sapiens
  misc_RNA (1)...(19): siRNA sense strand
agacuuggccgauggauug

SEQ ID NO: 163408 - RNA, 19 nt, Homo sapiens
  misc_RNA (1)...(19): siRNA sense strand
ugaagacuguguauguuuc

SEQ ID NO: 163409 - RNA, 19 nt, Homo sapiens
  misc_RNA (1)...(19): siRNA sense strand
gaacuuggaagagugauca

SEQ ID NO: 163410 - RNA, 19 nt, Homo sapiens
  misc_RNA (1)...(19): siRNA sense strand
ccuaugcucagguucauua

SEQ ID NO: 163411 - RNA, 19 nt, Homo sapiens
  misc_RNA (1)...(19): siRNA sense strand
gaaggaugcugacaaaagu

SEQ ID NO: 163412 - RNA, 19 nt, Homo sapiens
  misc_RNA (1)...(19): siRNA sense strand
ucgagucacaccagaauua

SEQ ID NO: 163413 - RNA, 19 nt, Homo sapiens
  misc_RNA (1)...(19): siRNA sense strand
gcaaauggcagugaacaag

SEQ ID NO: 163414 - RNA, 19 nt, Homo sapiens
  misc_RNA (1)...(19): siRNA sense strand
ugaaggaacauaucugaau

SEQ ID NO: 163415 - RNA, 19 nt, Homo sapiens
  misc_RNA (1)...(19): siRNA sense strand
ggaagucaucaaucgcaua

SEQ ID NO: 163416 - RNA, 19 nt, Homo sapiens
  misc_RNA (1)...(19): siRNA sense strand
cagaaaaccuccgcuuuaa

SEQ ID NO: 163417 - RNA, 19 nt, Homo sapiens
  misc_RNA (1)...(19): siRNA sense strand
ggaacaaugaccugugcua

SEQ ID NO: 163418 - RNA, 19 nt, Homo sapiens
  misc_RNA (1)...(19): siRNA sense strand
acuauuuccugaaguguaa

SEQ ID NO: 163419 - RNA, 19 nt, Homo sapiens
  misc_RNA (1)...(19): siRNA sense strand
gauugucagcccucuauaa

SEQ ID NO: 163420 - RNA, 19 nt, Homo sapiens
  misc_RNA (1)...(19): siRNA sense strand
gauauucugcugaguggaa

SEQ ID NO: 163421 - RNA, 19 nt, Homo sapiens
  misc_RNA (1)...(19): siRNA sense strand
ggaucugaacuggaaauua

SEQ ID NO: 163422 - RNA, 19 nt, Homo sapiens
  misc_RNA (1)...(19): siRNA sense strand
ucagacacuccucuaauuu

SEQ ID NO: 163423 - RNA, 19 nt, Homo sapiens
  misc_RNA (1)...(19): siRNA sense strand
acacuccacuuuccaacuu

SEQ ID NO: 163424 - RNA, 19 nt, Homo sapiens
  misc_RNA (1)...(19): siRNA sense strand
gaacauaucugaauagugu

SEQ ID NO: 163425 - RNA, 19 nt, Homo sapiens
  misc_RNA (1)...(19): siRNA sense strand
gcacgugacuggacaauuu

SEQ ID NO: 163426 - RNA, 19 nt, Homo sapiens
  misc_RNA (1)...(19): siRNA sense strand
ggaagaagaugaaacugua

SEQ ID NO: 163427 - RNA, 19 nt, Homo sapiens
  misc_RNA (1)...(19): siRNA sense strand
gaaggaacauaucugaaua

SEQ ID NO: 163428 - RNA, 19 nt, Homo sapiens
  misc_RNA (1)...(19): siRNA sense strand
caacggaggugacagauuu

SEQ ID NO: 163429 - RNA, 19 nt, Homo sapiens
  misc_RNA (1)...(19): siRNA sense strand
gaagggaucugaacuggaa

SEQ ID NO: 163430 - RNA, 19 nt, Homo sapiens
  misc_RNA (1)...(19): siRNA sense strand
gagcaauugugaugagaua

SEQ ID NO: 163431 - RNA, 19 nt, Homo sapiens
  misc_RNA (1)...(19): siRNA sense strand
gaguggaagucuacuguua

SEQ ID NO: 163432 - RNA, 19 nt, Homo sapiens
  misc_RNA (1)...(19): siRNA sense strand
gaucugaacuggaaauuac

SEQ ID NO: 163433 - RNA, 19 nt, Homo sapiens
  misc_RNA (1)...(19): siRNA sense strand
caacuggacugccucacua

SEQ ID NO: 163434 - RNA, 19 nt, Homo sapiens
  misc_RNA (1)...(19): siRNA sense strand
gugcauaugucaaucuuaa

SEQ ID NO: 163435 - RNA, 19 nt, Homo sapiens
  misc_RNA (1)...(19): siRNA sense strand
ucaagauccuucaguauuu

SEQ ID NO: 163436 - RNA, 19 nt, Homo sapiens
  misc_RNA (1)...(19): siRNA sense strand
agacugaaauggcagcuua

SEQ ID NO: 163437 - RNA, 19 nt, Homo sapiens
  misc_RNA (1)...(19): siRNA sense strand
gugaagacuuugaauauga

SEQ ID NO: 163438 - RNA, 19 nt, Homo sapiens
  misc_RNA (1)...(19): siRNA sense strand
ugaacaagguggaguauug

SEQ ID NO: 163439 - RNA, 19 nt, Homo sapiens
  misc_RNA (1)...(19): siRNA sense strand
ccaccaagcuccuuacuuc

SEQ ID NO: 163440 - RNA, 19 nt, Homo sapiens
  misc_RNA (1)...(19): siRNA sense strand
gagaagaauugauugacaa

SEQ ID NO: 163441 - RNA, 19 nt, Homo sapiens
  misc_RNA (1)...(19): siRNA sense strand
gaaaucacaguguacuaua

SEQ ID NO: 163442 - RNA, 19 nt, Homo sapiens
  misc_RNA (1)...(19): siRNA sense strand
ccacacagaguucauauuu

SEQ ID NO: 163443 - RNA, 19 nt, Homo sapiens
  misc_RNA (1)...(19): siRNA sense strand
ccgcaucucugaaguguuu

SEQ ID NO: 163444 - RNA, 19 nt, Homo sapiens
  misc_RNA (1)...(19): siRNA sense strand
ugucagcccucuauaaauu

SEQ ID NO: 163445 - RNA, 19 nt, Homo sapiens
  misc_RNA (1)...(19): siRNA sense strand
ccaccaaggucuucuguau

SEQ ID NO: 163446 - RNA, 19 nt, Homo sapiens
  misc_RNA (1)...(19): siRNA sense strand
gaaagaaauugugguuauc

SEQ ID NO: 163447 - RNA, 19 nt, Homo sapiens
  misc_RNA (1)...(19): siRNA sense strand
ggucaaguuuguagauauu

SEQ ID NO: 163448 - RNA, 19 nt, Homo sapiens
  misc_RNA (1)...(19): siRNA sense strand
gcaaucugguuccaacuga

SEQ ID NO: 163449 - RNA, 19 nt, Homo sapiens
  misc_RNA (1)...(19): siRNA sense strand
gugaggagcuggagcaguu

SEQ ID NO: 163450 - RNA, 19 nt, Homo sapiens
  misc_RNA (1)...(19): siRNA sense strand
gaaggaggaagaaauagaa

SEQ ID NO: 163451 - RNA, 19 nt, Homo sapiens
  misc_RNA (1)...(19): siRNA sense strand
ccagaaggaggaagaaaua

SEQ ID NO: 163452 - RNA, 19 nt, Homo sapiens
  misc_RNA (1)...(19): siRNA sense strand
ccacaagaguguuuaaugg

SEQ ID NO: 163453 - RNA, 19 nt, Homo sapiens
  misc_RNA (1)...(19): siRNA sense strand
agaggacgauuacucauuu

SEQ ID NO: 163454 - RNA, 19 nt, Homo sapiens
  misc_RNA (1)...(19): siRNA sense strand
ucaagucuuuggagaagua

SEQ ID NO: 163455 - RNA, 19 nt, Homo sapiens
  misc_RNA (1)...(19): siRNA sense strand
caaugccuaucgcuucuua

SEQ ID NO: 163456 - RNA, 19 nt, Homo sapiens
  misc_RNA (1)...(19): siRNA sense strand
cagaguggguuucauguug

SEQ ID NO: 163457 - RNA, 19 nt, Homo sapiens
  misc_RNA (1)...(19): siRNA sense strand
gauggaggauugugucaug

SEQ ID NO: 163458 - RNA, 19 nt, Homo sapiens
  misc_RNA (1)...(19): siRNA sense strand
ugagauccuugaaagauuu

SEQ ID NO: 163459 - RNA, 19 nt, Homo sapiens
  misc_RNA (1)...(19): siRNA sense strand
gcauguaacacuccacuuu

SEQ ID NO: 163460 - RNA, 19 nt, Homo sapiens
  misc_RNA (1)...(19): siRNA sense strand
guucauauuuaccaccaua

SEQ ID NO: 163461 - RNA, 19 nt, Homo sapiens
  misc_RNA (1)...(19): siRNA sense strand
aaaccaaacugacuuacug

SEQ ID NO: 163462 - RNA, 19 nt, Homo sapiens
  misc_RNA (1)...(19): siRNA sense strand
ggaaauuggcugaaagaug

SEQ ID NO: 163463 - RNA, 19 nt, Homo sapiens
  misc_RNA (1)...(19): siRNA sense strand
gaauugauguaccagaauc

SEQ ID NO: 163464 - RNA, 19 nt, Homo sapiens
  misc_RNA (1)...(19): siRNA sense strand
uagauauucugaccaauug

SEQ ID NO: 163465 - RNA, 19 nt, Homo sapiens
  misc_RNA (1)...(19): siRNA sense strand
gcagaaaaccuccgcuuua

SEQ ID NO: 163466 - RNA, 19 nt, Homo sapiens
  misc_RNA (1)...(19): siRNA sense strand
gccgauggauugacuuuga

SEQ ID NO: 163467 - RNA, 19 nt, Homo sapiens
  misc_RNA (1)...(19): siRNA sense strand
cuaaagcuguuucugaaug

SEQ ID NO: 163468 - RNA, 19 nt, Homo sapiens
  misc_RNA (1)...(19): siRNA sense strand
acacagaguucauauuuac

SEQ ID NO: 163469 - RNA, 19 nt, Homo sapiens
  misc_RNA (1)...(19): siRNA sense strand
gaagaacugucaggagcaa

SEQ ID NO: 163470 - RNA, 19 nt, Homo sapiens
  misc_RNA (1)...(19): siRNA sense strand
ggacaaccgccuuucaaga

SEQ ID NO: 163471 - RNA, 19 nt, Homo sapiens
  misc_RNA (1)...(19): siRNA sense strand
uaaagcuguuucugaauga

SEQ ID NO: 163472 - RNA, 19 nt, Homo sapiens
  misc_RNA (1)...(19): siRNA sense strand
cacacagaguucauauuua

SEQ ID NO: 163473 - RNA, 19 nt, Homo sapiens
  misc_RNA (1)...(19): siRNA sense strand
gcaauugugaugagauauu

SEQ ID NO: 163474 - RNA, 19 nt, Homo sapiens
  misc_RNA (1)...(19): siRNA sense strand
guagauauucugaccaauu

SEQ ID NO: 163475 - RNA, 19 nt, Homo sapiens
  misc_RNA (1)...(19): siRNA sense strand
gacaaccgccuuucaagaa

SEQ ID NO: 163476 - RNA, 19 nt, Homo sapiens
  misc_RNA (1)...(19): siRNA sense strand
cagacacuccucuaauuua

SEQ ID NO: 163477 - RNA, 19 nt, Homo sapiens
  misc_RNA (1)...(19): siRNA sense strand
gaacuggaaauuacacuca

SEQ ID NO: 163478 - RNA, 19 nt, Homo sapiens
  misc_RNA (1)...(19): siRNA sense strand
gaaagacucacucccuguu

SEQ ID NO: 163479 - RNA, 19 nt, Homo sapiens
  misc_RNA (1)...(19): siRNA sense strand
caauugguauguuagaaug

SEQ ID NO: 163480 - RNA, 19 nt, Homo sapiens
  misc_RNA (1)...(19): siRNA sense strand
caucaggacuuugaaggaa

SEQ ID NO: 163481 - RNA, 19 nt, Homo sapiens
  misc_RNA (1)...(19): siRNA sense strand
gauaagacacugggaauca

SEQ ID NO: 163482 - RNA, 19 nt, Homo sapiens
  misc_RNA (1)...(19): siRNA sense strand
cgagaagaauugauugaca

SEQ ID NO: 163483 - RNA, 19 nt, Homo sapiens
  misc_RNA (1)...(19): siRNA sense strand
caagauccuucaguauuug

SEQ ID NO: 163484 - RNA, 19 nt, Homo sapiens
  misc_RNA (1)...(19): siRNA sense strand
cuaguacucuucuuuguca

SEQ ID NO: 163485 - RNA, 19 nt, Homo sapiens
  misc_RNA (1)...(19): siRNA sense strand
caacaguucuaguacucuu

SEQ ID NO: 163486 - RNA, 19 nt, Homo sapiens
  misc_RNA (1)...(19): siRNA sense strand
gaucagacacuccucuaau

SEQ ID NO: 163487 - RNA, 19 nt, Homo sapiens
  misc_RNA (1)...(19): siRNA sense strand
gccaugaauugcacgauga

SEQ ID NO: 163488 - RNA, 19 nt, Homo sapiens
  misc_RNA (1)...(19): siRNA sense strand
ucaagaacguaauugugaa

SEQ ID NO: 163489 - RNA, 19 nt, Homo sapiens
  misc_RNA (1)...(19): siRNA sense strand
ccagaaaugcaauauguga

SEQ ID NO: 163490 - RNA, 19 nt, Homo sapiens
  misc_RNA (1)...(19): siRNA sense strand
accaaggucuucuguauga

SEQ ID NO: 163491 - RNA, 19 nt, Homo sapiens
  misc_RNA (1)...(19): siRNA sense strand
agagaaagccccaacauua

SEQ ID NO: 163492 - RNA, 19 nt, Homo sapiens
  misc_RNA (1)...(19): siRNA sense strand
uggcuuaccuguggaauau

SEQ ID NO: 163493 - RNA, 19 nt, Homo sapiens
  misc_RNA (1)...(19): siRNA sense strand
aaugguagaugaaggaaug

SEQ ID NO: 163494 - RNA, 19 nt, Homo sapiens
  misc_RNA (1)...(19): siRNA sense strand
ggagaaguauaucauugag

SEQ ID NO: 163495 - RNA, 19 nt, Homo sapiens
  misc_RNA (1)...(19): siRNA sense strand
gauugacccuguuucuguu

SEQ ID NO: 163496 - RNA, 19 nt, Homo sapiens
  misc_RNA (1)...(19): siRNA sense strand
gaaugaaccgcagaagauu

SEQ ID NO: 163497 - RNA, 19 nt, Homo sapiens
  misc_RNA (1)...(19): siRNA sense strand
gcggguacaauuaaagaua

SEQ ID NO: 163498 - RNA, 19 nt, Homo sapiens
  misc_RNA (1)...(19): siRNA sense strand
ugugaaggaugcugacaaa

SEQ ID NO: 163499 - RNA, 19 nt, Homo sapiens
  misc_RNA (1)...(19): siRNA sense strand
acaacuaugugaaggaaga

SEQ ID NO: 163500 - RNA, 19 nt, Homo sapiens
  misc_RNA (1)...(19): siRNA sense strand
ugacaacuaugugaaggaa

SEQ ID NO: 163501 - RNA, 19 nt, Homo sapiens
  misc_RNA (1)...(19): siRNA sense strand
gcuuaccuguggaauauga

SEQ ID NO: 163502 - RNA, 19 nt, Homo sapiens
  misc_RNA (1)...(19): siRNA sense strand
ucuauaaauuggagaguga

SEQ ID NO: 163503 - RNA, 19 nt, Homo sapiens
  misc_RNA (1)...(19): siRNA sense strand
caacaacagcagacuucua

SEQ ID NO: 163504 - RNA, 19 nt, Homo sapiens
  misc_RNA (1)...(19): siRNA sense strand
ggaaauuacagaagacauc

SEQ ID NO: 163505 - RNA, 19 nt, Homo sapiens
  misc_RNA (1)...(19): siRNA sense strand
gaucaacaguucuaguacu

SEQ ID NO: 163506 - RNA, 19 nt, Homo sapiens
  misc_RNA (1)...(19): siRNA sense strand
ugacguccaucaagcaguu

SEQ ID NO: 163507 - RNA, 19 nt, Homo sapiens
  misc_RNA (1)...(19): siRNA sense strand
agacuuggccgauggauug

SEQ ID NO: 163508 - RNA, 19 nt, Homo sapiens
  misc_RNA (1)...(19): siRNA sense strand
ugaagacuguguauguuuc

SEQ ID NO: 163509 - RNA, 19 nt, Homo sapiens
  misc_RNA (1)...(19): siRNA sense strand
gaacuuggaagagugauca

SEQ ID NO: 163510 - RNA, 19 nt, Homo sapiens
  misc_RNA (1)...(19): siRNA sense strand
ccuaugcucagguucauua

SEQ ID NO: 163511 - RNA, 19 nt, Homo sapiens
  misc_RNA (1)...(19): siRNA sense strand
gaaggaugcugacaaaagu

SEQ ID NO: 163512 - RNA, 19 nt, Homo sapiens
  misc_RNA (1)...(19): siRNA sense strand
ucgagucacaccagaauua

SEQ ID NO: 163513 - RNA, 19 nt, Homo sapiens
  misc_RNA (1)...(19): siRNA sense strand
gcaaauggcagugaacaag

SEQ ID NO: 163514 - RNA, 19 nt, Homo sapiens
  misc_RNA (1)...(19): siRNA sense strand
ugaaggaacauaucugaau

SEQ ID NO: 163515 - RNA, 19 nt, Homo sapiens
  misc_RNA (1)...(19): siRNA sense strand
ggaagucaucaaucgcaua

SEQ ID NO: 163516 - RNA, 19 nt, Homo sapiens
  misc_RNA (1)...(19): siRNA sense strand
cagaaaaccuccgcuuuaa

SEQ ID NO: 163517 - RNA, 19 nt, Homo sapiens
  misc_RNA (1)...(19): siRNA sense strand
ggaacaaugaccugugcua

SEQ ID NO: 163518 - RNA, 19 nt, Homo sapiens
  misc_RNA (1)...(19): siRNA sense strand
acuauuuccugaaguguaa

SEQ ID NO: 163519 - RNA, 19 nt, Homo sapiens
  misc_RNA (1)...(19): siRNA sense strand
gauugucagcccucuauaa

SEQ ID NO: 163520 - RNA, 19 nt, Homo sapiens
  misc_RNA (1)...(19): siRNA sense strand
gauauucugcugaguggaa

SEQ ID NO: 163521 - RNA, 19 nt, Homo sapiens
  misc_RNA (1)...(19): siRNA sense strand
ggaucugaacuggaaauua

SEQ ID NO: 163522 - RNA, 19 nt, Homo sapiens
  misc_RNA (1)...(19): siRNA sense strand
ucagacacuccucuaauuu

SEQ ID NO: 163523 - RNA, 19 nt, Homo sapiens
  misc_RNA (1)...(19): siRNA sense strand
acacuccacuuuccaacuu

SEQ ID NO: 163524 - RNA, 19 nt, Homo sapiens
  misc_RNA (1)...(19): siRNA sense strand
gcacagaacuggacaugca

SEQ ID NO: 163525 - RNA, 19 nt, Homo sapiens
  misc_RNA (1)...(19): siRNA sense strand
gaacugcaguacugauugu

SEQ ID NO: 163526 - RNA, 19 nt, Homo sapiens
  misc_RNA (1)...(19): siRNA sense strand
ugcaauggcucccagauaa

SEQ ID NO: 163527 - RNA, 19 nt, Homo sapiens
  misc_RNA (1)...(19): siRNA sense strand
gagcggcaguuaccauguu

SEQ ID NO: 163528 - RNA, 19 nt, Homo sapiens
  misc_RNA (1)...(19): siRNA sense strand
caacuucagcuaaaugcua

SEQ ID NO: 163529 - RNA, 19 nt, Homo sapiens
  misc_RNA (1)...(19): siRNA sense strand
cacuugaaauggaaagaua

SEQ ID NO: 163530 - RNA, 19 nt, Homo sapiens
  misc_RNA (1)...(19): siRNA sense strand
ccucuaacaucaccgugua

SEQ ID NO: 163531 - RNA, 19 nt, Homo sapiens
  misc_RNA (1)...(19): siRNA sense strand
gcuaaaugcuaccgagagu

SEQ ID NO: 163532 - RNA, 19 nt, Homo sapiens
  misc_RNA (1)...(19): siRNA sense strand
uaaaugcuaccgagaguga

SEQ ID NO: 163533 - RNA, 19 nt, Homo sapiens
  misc_RNA (1)...(19): siRNA sense strand
caacguaacacauaauggu

SEQ ID NO: 163534 - RNA, 19 nt, Homo sapiens
  misc_RNA (1)...(19): siRNA sense strand
agacgucccuaucaaagga

SEQ ID NO: 163535 - RNA, 19 nt, Homo sapiens
  misc_RNA (1)...(19): siRNA sense strand
auaacaggcuccucuaaca

SEQ ID NO: 163536 - RNA, 19 nt, Homo sapiens
  misc_RNA (1)...(19): siRNA sense strand
gcagccagcucaacuucag

SEQ ID NO: 163537 - RNA, 19 nt, Homo sapiens
  misc_RNA (1)...(19): siRNA sense strand
ccacagugaccgugaguug

SEQ ID NO: 163538 - RNA, 19 nt, Homo sapiens
  misc_RNA (1)...(19): siRNA sense strand
ggagacgucccuaucaaag

SEQ ID NO: 163539 - RNA, 19 nt, Homo sapiens
  misc_RNA (1)...(19): siRNA sense strand
gaacuugacggucuuuagc

SEQ ID NO: 163540 - RNA, 19 nt, Homo sapiens
  misc_RNA (1)...(19): siRNA sense strand
gggagaacuugacggucuu

SEQ ID NO: 163541 - RNA, 19 nt, Homo sapiens
  misc_RNA (1)...(19): siRNA sense strand
gggaccagaugcugaaugc

SEQ ID NO: 163542 - RNA, 19 nt, Homo sapiens
  misc_RNA (1)...(19): siRNA sense strand
gauaacaggcuccucuaac

SEQ ID NO: 163543 - RNA, 19 nt, Homo sapiens
  misc_RNA (1)...(19): siRNA sense strand
ccagaacccugugcucucu

SEQ ID NO: 163544 - RNA, 19 nt, Homo sapiens
  misc_RNA (1)...(19): siRNA sense strand
ugaaugcgacagucaugaa

SEQ ID NO: 163545 - RNA, 19 nt, Homo sapiens
  misc_RNA (1)...(19): siRNA sense strand
gcucaacuucagcuaaaug

SEQ ID NO: 163546 - RNA, 19 nt, Homo sapiens
  misc_RNA (1)...(19): siRNA sense strand
gcacuugaaauggaaagau

SEQ ID NO: 163547 - RNA, 19 nt, Homo sapiens
  misc_RNA (1)...(19): siRNA sense strand
cggauccucugcucagugu

SEQ ID NO: 163548 - RNA, 19 nt, Homo sapiens
  misc_RNA (1)...(19): siRNA sense strand
gcgaguucuugcacaggaa

SEQ ID NO: 163549 - RNA, 19 nt, Homo sapiens
  misc_RNA (1)...(19): siRNA sense strand
uuugugaacugcaguacug

SEQ ID NO: 163550 - RNA, 19 nt, Homo sapiens
  misc_RNA (1)...(19): siRNA sense strand
uaacaggcuccucuaacau

SEQ ID NO: 163551 - RNA, 19 nt, Homo sapiens
  misc_RNA (1)...(19): siRNA sense strand
gugaacugcaguacugauu

SEQ ID NO: 163552 - RNA, 19 nt, Homo sapiens
  misc_RNA (1)...(19): siRNA sense strand
gacggucuuuagcuuccua

SEQ ID NO: 163553 - RNA, 19 nt, Homo sapiens
  misc_RNA (1)...(19): siRNA sense strand
cgacggacgcagcuucuuc

SEQ ID NO: 163554 - RNA, 19 nt, Homo sapiens
  misc_RNA (1)...(19): siRNA sense strand
cugcaauggcucccagaua

SEQ ID NO: 163555 - RNA, 19 nt, Homo sapiens
  misc_RNA (1)...(19): siRNA sense strand
caugagggguccacaguga

SEQ ID NO: 163556 - RNA, 19 nt, Homo sapiens
  misc_RNA (1)...(19): siRNA sense strand
ccacggagccccuuucuca

SEQ ID NO: 163557 - RNA, 19 nt, Homo sapiens
  misc_RNA (1)...(19): siRNA sense strand
cagauaacaggcuccucua

SEQ ID NO: 163558 - RNA, 19 nt, Homo sapiens
  misc_RNA (1)...(19): siRNA sense strand
gagaacuugacggucuuua

SEQ ID NO: 163559 - RNA, 19 nt, Homo sapiens
  misc_RNA (1)...(19): siRNA sense strand
caacggagcggcaguuacc

SEQ ID NO: 163560 - RNA, 19 nt, Homo sapiens
  misc_RNA (1)...(19): siRNA sense strand
gggcagccagcucaacuuc

SEQ ID NO: 163561 - RNA, 19 nt, Homo sapiens
  misc_RNA (1)...(19): siRNA sense strand
ggcugggacuguucgugaa

SEQ ID NO: 163562 - RNA, 19 nt, Homo sapiens
  misc_RNA (1)...(19): siRNA sense strand
gauugucccagcucugaga

SEQ ID NO: 163563 - RNA, 19 nt, Homo sapiens
  misc_RNA (1)...(19): siRNA sense strand
ggagaacuugacggucuuu

SEQ ID NO: 163564 - RNA, 19 nt, Homo sapiens
  misc_RNA (1)...(19): siRNA sense strand
agauaacaggcuccucuaa

SEQ ID NO: 163565 - RNA, 19 nt, Homo sapiens
  misc_RNA (1)...(19): siRNA sense strand
ucgucaacguaacacauaa

SEQ ID NO: 163566 - RNA, 19 nt, Homo sapiens
  misc_RNA (1)...(19): siRNA sense strand
ggucuuuagcuuccuagga

SEQ ID NO: 163567 - RNA, 19 nt, Homo sapiens
  misc_RNA (1)...(19): siRNA sense strand
uuggagacgucccuaucaa

SEQ ID NO: 163568 - RNA, 19 nt, Homo sapiens
  misc_RNA (1)...(19): siRNA sense strand
acaggcuccucuaacauca

SEQ ID NO: 163569 - RNA, 19 nt, Homo sapiens
  misc_RNA (1)...(19): siRNA sense strand
gcaauggcucccagauaac

SEQ ID NO: 163570 - RNA, 19 nt, Homo sapiens
  misc_RNA (1)...(19): siRNA sense strand
uaucguacuggccuuaaug

SEQ ID NO: 163571 - RNA, 19 nt, Homo sapiens
  misc_RNA (1)...(19): siRNA sense strand
ugaacugcaguacugauug

SEQ ID NO: 163572 - RNA, 19 nt, Homo sapiens
  misc_RNA (1)...(19): siRNA sense strand
caauggcucccagauaaca

SEQ ID NO: 163573 - RNA, 19 nt, Homo sapiens
  misc_RNA (1)...(19): siRNA sense strand
gcugaaugcgacagucaug

SEQ ID NO: 163574 - RNA, 19 nt, Homo sapiens
  misc_RNA (1)...(19): siRNA sense strand
agcggcaguuaccauguua

SEQ ID NO: 163575 - RNA, 19 nt, Homo sapiens
  misc_RNA (1)...(19): siRNA sense strand
cguggugacuaucguacug

SEQ ID NO: 163576 - RNA, 19 nt, Homo sapiens
  misc_RNA (1)...(19): siRNA sense strand
gggcguggugacuaucgua

SEQ ID NO: 163577 - RNA, 19 nt, Homo sapiens
  misc_RNA (1)...(19): siRNA sense strand
ugggcagccuucaaucuca

SEQ ID NO: 163578 - RNA, 19 nt, Homo sapiens
  misc_RNA (1)...(19): siRNA sense strand
gcagccgacagaagcaaug

SEQ ID NO: 163579 - RNA, 19 nt, Homo sapiens
  misc_RNA (1)...(19): siRNA sense strand
cccagcacuugaaauggaa

SEQ ID NO: 163580 - RNA, 19 nt, Homo sapiens
  misc_RNA (1)...(19): siRNA sense strand
gaaacacgcuggcaagcaa

SEQ ID NO: 163581 - RNA, 19 nt, Homo sapiens
  misc_RNA (1)...(19): siRNA sense strand
gaaugaaguuacagagaug

SEQ ID NO: 163582 - RNA, 19 nt, Homo sapiens
  misc_RNA (1)...(19): siRNA sense strand
ugaauaagagcccagauuu

SEQ ID NO: 163583 - RNA, 19 nt, Homo sapiens
  misc_RNA (1)...(19): siRNA sense strand
ggacugauuugggagaaug

SEQ ID NO: 163584 - RNA, 19 nt, Homo sapiens
  misc_RNA (1)...(19): siRNA sense strand
gugaucagcuucuacuaug

SEQ ID NO: 163585 - RNA, 19 nt, Homo sapiens
  misc_RNA (1)...(19): siRNA sense strand
ugaaugaaguuacagagau

SEQ ID NO: 163586 - RNA, 19 nt, Homo sapiens
  misc_RNA (1)...(19): siRNA sense strand
ggagugcggucgcucugaa

SEQ ID NO: 163587 - RNA, 19 nt, Homo sapiens
  misc_RNA (1)...(19): siRNA sense strand
aaagggaaguuuaaagaag

SEQ ID NO: 163588 - RNA, 19 nt, Homo sapiens
  misc_RNA (1)...(19): siRNA sense strand
gaaccagccacuuggaaga

SEQ ID NO: 163589 - RNA, 19 nt, Homo sapiens
  misc_RNA (1)...(19): siRNA sense strand
ucgacgagcugaucaagga

SEQ ID NO: 163590 - RNA, 19 nt, Homo sapiens
  misc_RNA (1)...(19): siRNA sense strand
gcaacgccguggugugcaa

SEQ ID NO: 163591 - RNA, 19 nt, Homo sapiens
  misc_RNA (1)...(19): siRNA sense strand
gcaaaggcaggcccaacaa

SEQ ID NO: 163592 - RNA, 19 nt, Homo sapiens
  misc_RNA (1)...(19): siRNA sense strand
cauacaaaguuuaccgaau

SEQ ID NO: 163593 - RNA, 19 nt, Homo sapiens
  misc_RNA (1)...(19): siRNA sense strand
gcaggguggugcugugcuu

SEQ ID NO: 163594 - RNA, 19 nt, Homo sapiens
  misc_RNA (1)...(19): siRNA sense strand
gauugacaguagcauguau

SEQ ID NO: 163595 - RNA, 19 nt, Homo sapiens
  misc_RNA (1)...(19): siRNA sense strand
gaaaucgacgagcugauca

SEQ ID NO: 163596 - RNA, 19 nt, Homo sapiens
  misc_RNA (1)...(19): siRNA sense strand
gagguuacgcugugcuuug

SEQ ID NO: 163597 - RNA, 19 nt, Homo sapiens
  misc_RNA (1)...(19): siRNA sense strand
caaaguuuaccgaauuguu

SEQ ID NO: 163598 - RNA, 19 nt, Homo sapiens
  misc_RNA (1)...(19): siRNA sense strand
uacaaaguuuaccgaauug

SEQ ID NO: 163599 - RNA, 19 nt, Homo sapiens
  misc_RNA (1)...(19): siRNA sense strand
uuccggauguuuccagaua

SEQ ID NO: 163600 - RNA, 19 nt, Homo sapiens
  misc_RNA (1)...(19): siRNA sense strand
ggugaucagcuucuacuau

SEQ ID NO: 163601 - RNA, 19 nt, Homo sapiens
  misc_RNA (1)...(19): siRNA sense strand
agccuucuguggacgauua

SEQ ID NO: 163602 - RNA, 19 nt, Homo sapiens
  misc_RNA (1)...(19): siRNA sense strand
uuuaaggccugggcaguuu

SEQ ID NO: 163603 - RNA, 19 nt, Homo sapiens
  misc_RNA (1)...(19): siRNA sense strand
gaauaagagcccagauuuu

SEQ ID NO: 163604 - RNA, 19 nt, Homo sapiens
  misc_RNA (1)...(19): siRNA sense strand
ucgagcagauugacaguag

SEQ ID NO: 163605 - RNA, 19 nt, Homo sapiens
  misc_RNA (1)...(19): siRNA sense strand
ccggauguuuccagauauu

SEQ ID NO: 163606 - RNA, 19 nt, Homo sapiens
  misc_RNA (1)...(19): siRNA sense strand
ggauguuuccagauauuug

SEQ ID NO: 163607 - RNA, 19 nt, Homo sapiens
  misc_RNA (1)...(19): siRNA sense strand
ccacuuggaagacgagguu

SEQ ID NO: 163608 - RNA, 19 nt, Homo sapiens
  misc_RNA (1)...(19): siRNA sense strand
agauugagcagcuguaugu

SEQ ID NO: 163609 - RNA, 19 nt, Homo sapiens
  misc_RNA (1)...(19): siRNA sense strand
ggaaacacgcuggcaagca

SEQ ID NO: 163610 - RNA, 19 nt, Homo sapiens
  misc_RNA (1)...(19): siRNA sense strand
aaaguuuaccgaauuguuc

SEQ ID NO: 163611 - RNA, 19 nt, Homo sapiens
  misc_RNA (1)...(19): siRNA sense strand
ggacauuuccgagccauac

SEQ ID NO: 163612 - RNA, 19 nt, Homo sapiens
  misc_RNA (1)...(19): siRNA sense strand
guuacgcugugcuuugaau

SEQ ID NO: 163613 - RNA, 19 nt, Homo sapiens
  misc_RNA (1)...(19): siRNA sense strand
gagcccagauuuugaggaa

SEQ ID NO: 163614 - RNA, 19 nt, Homo sapiens
  misc_RNA (1)...(19): siRNA sense strand
gugaaugaaguuacagaga

SEQ ID NO: 163615 - RNA, 19 nt, Homo sapiens
  misc_RNA (1)...(19): siRNA sense strand
gcagauugagcagcuguau

SEQ ID NO: 163616 - RNA, 19 nt, Homo sapiens
  misc_RNA (1)...(19): siRNA sense strand
cuacgacgcgcaccauuca

SEQ ID NO: 163617 - RNA, 19 nt, Homo sapiens
  misc_RNA (1)...(19): siRNA sense strand
gcugugcuuugaauaagag

SEQ ID NO: 163618 - RNA, 19 nt, Homo sapiens
  misc_RNA (1)...(19): siRNA sense strand
accaacagaucaccgucua

SEQ ID NO: 163619 - RNA, 19 nt, Homo sapiens
  misc_RNA (1)...(19): siRNA sense strand
gauguuuccagauauuugu

SEQ ID NO: 163620 - RNA, 19 nt, Homo sapiens
  misc_RNA (1)...(19): siRNA sense strand
cagauugacaguagcaugu

SEQ ID NO: 163621 - RNA, 19 nt, Homo sapiens
  misc_RNA (1)...(19): siRNA sense strand
cuggcaagcaagauuauaa

SEQ ID NO: 163622 - RNA, 19 nt, Homo sapiens
  misc_RNA (1)...(19): siRNA sense strand
uccgagccauacaaaguuu

SEQ ID NO: 163623 - RNA, 19 nt, Homo sapiens
  misc_RNA (1)...(19): siRNA sense strand
ugaaaucgacgagcugauc

SEQ ID NO: 163624 - RNA, 19 nt, Homo sapiens
  misc_RNA (1)...(19): siRNA sense strand
gagcagauugacaguagca

SEQ ID NO: 163625 - RNA, 19 nt, Homo sapiens
  misc_RNA (1)...(19): siRNA sense strand
gcagaagaggcugggaaga

SEQ ID NO: 163626 - RNA, 19 nt, Homo sapiens
  misc_RNA (1)...(19): siRNA sense strand
cagaagaggcugggaagag

SEQ ID NO: 163627 - RNA, 19 nt, Homo sapiens
  misc_RNA (1)...(19): siRNA sense strand
cccuugcgcuccaaacuca

SEQ ID NO: 163628 - RNA, 19 nt, Homo sapiens
  misc_RNA (1)...(19): siRNA sense strand
gggagaaugaggagaagag

SEQ ID NO: 163629 - RNA, 19 nt, Homo sapiens
  misc_RNA (1)...(19): siRNA sense strand
ccaacagaucaccgucuaa

SEQ ID NO: 163630 - RNA, 19 nt, Homo sapiens
  misc_RNA (1)...(19): siRNA sense strand
gaagaguuuccggauaugg

SEQ ID NO: 163631 - RNA, 19 nt, Homo sapiens
  misc_RNA (1)...(19): siRNA sense strand
uugaauaagagcccagauu

SEQ ID NO: 163632 - RNA, 19 nt, Homo sapiens
  misc_RNA (1)...(19): siRNA sense strand
cugcgugaaugaaguuaca

SEQ ID NO: 163633 - RNA, 19 nt, Homo sapiens
  misc_RNA (1)...(19): siRNA sense strand
gcuggcaagcaagauuaua

SEQ ID NO: 163634 - RNA, 19 nt, Homo sapiens
  misc_RNA (1)...(19): siRNA sense strand
ccucacaccagagaucauu

SEQ ID NO: 163635 - RNA, 19 nt, Homo sapiens
  misc_RNA (1)...(19): siRNA sense strand
acgcuggcaagcaagauua

SEQ ID NO: 163636 - RNA, 19 nt, Homo sapiens
  misc_RNA (1)...(19): siRNA sense strand
caaaggcaggcccaacaag

SEQ ID NO: 163637 - RNA, 19 nt, Homo sapiens
  misc_RNA (1)...(19): siRNA sense strand
ggcagggcguguucgucaa

SEQ ID NO: 163638 - RNA, 19 nt, Homo sapiens
  misc_RNA (1)...(19): siRNA sense strand
agguuacgcugugcuuuga

SEQ ID NO: 163639 - RNA, 19 nt, Homo sapiens
  misc_RNA (1)...(19): siRNA sense strand
agaaugaggagaagagcau

SEQ ID NO: 163640 - RNA, 19 nt, Homo sapiens
  misc_RNA (1)...(19): siRNA sense strand
caggacugauuugggagaa

SEQ ID NO: 163641 - RNA, 19 nt, Homo sapiens
  misc_RNA (1)...(19): siRNA sense strand
aaacuaggcguggcaacug

SEQ ID NO: 163642 - RNA, 19 nt, Homo sapiens
  misc_RNA (1)...(19): siRNA sense strand
aauaagagcccagauuuug

SEQ ID NO: 163643 - RNA, 19 nt, Homo sapiens
  misc_RNA (1)...(19): siRNA sense strand
ucagggaccuucaguugga

SEQ ID NO: 163644 - RNA, 19 nt, Homo sapiens
  misc_RNA (1)...(19): siRNA sense strand
caucagggaccuucaguug

SEQ ID NO: 163645 - RNA, 19 nt, Homo sapiens
  misc_RNA (1)...(19): siRNA sense strand
gagcagagcguggccaucu

SEQ ID NO: 163646 - RNA, 19 nt, Homo sapiens
  misc_RNA (1)...(19): siRNA sense strand
ugagcaagguggagauucu

SEQ ID NO: 163647 - RNA, 19 nt, Homo sapiens
  misc_RNA (1)...(19): siRNA sense strand
caugaacggcuguuacuca

SEQ ID NO: 163648 - RNA, 19 nt, Homo sapiens
  misc_RNA (1)...(19): siRNA sense strand
gugcugcucuacgacauga

SEQ ID NO: 163649 - RNA, 19 nt, Homo sapiens
  misc_RNA (1)...(19): siRNA sense strand
gcacgucaucgacuacauc

SEQ ID NO: 163650 - RNA, 19 nt, Homo sapiens
  misc_RNA (1)...(19): siRNA sense strand
cgacaugaacggcuguuac

SEQ ID NO: 163651 - RNA, 19 nt, Homo sapiens
  misc_RNA (1)...(19): siRNA sense strand
gacaugaacggcuguuacu

SEQ ID NO: 163652 - RNA, 19 nt, Homo sapiens
  misc_RNA (1)...(19): siRNA sense strand
ggacgaucgcaucuugugu

SEQ ID NO: 163653 - RNA, 19 nt, Homo sapiens
  misc_RNA (1)...(19): siRNA sense strand
uccagcacgucaucgacua

SEQ ID NO: 163654 - RNA, 19 nt, Homo sapiens
  misc_RNA (1)...(19): siRNA sense strand
gagguggugcgcugucugu

SEQ ID NO: 163655 - RNA, 19 nt, Homo sapiens
  misc_RNA (1)...(19): siRNA sense strand
ucagggaccuucaguugga

SEQ ID NO: 163656 - RNA, 19 nt, Homo sapiens
  misc_RNA (1)...(19): siRNA sense strand
caucagggaccuucaguug

SEQ ID NO: 163657 - RNA, 19 nt, Homo sapiens
  misc_RNA (1)...(19): siRNA sense strand
gagcagagcguggccaucu

SEQ ID NO: 163658 - RNA, 19 nt, Homo sapiens
  misc_RNA (1)...(19): siRNA sense strand
ugagcaagguggagauucu

SEQ ID NO: 163659 - RNA, 19 nt, Homo sapiens
  misc_RNA (1)...(19): siRNA sense strand
caugaacggcuguuacuca

SEQ ID NO: 163660 - RNA, 19 nt, Homo sapiens
  misc_RNA (1)...(19): siRNA sense strand
gugcugcucuacgacauga

SEQ ID NO: 163661 - RNA, 19 nt, Homo sapiens
  misc_RNA (1)...(19): siRNA sense strand
gcacgucaucgacuacauc

SEQ ID NO: 163662 - RNA, 19 nt, Homo sapiens
  misc_RNA (1)...(19): siRNA sense strand
cgacaugaacggcuguuac

SEQ ID NO: 163663 - RNA, 19 nt, Homo sapiens
  misc_RNA (1)...(19): siRNA sense strand
gacaugaacggcuguuacu

SEQ ID NO: 163664 - RNA, 19 nt, Homo sapiens
  misc_RNA (1)...(19): siRNA sense strand
uccagcacgucaucgacua

SEQ ID NO: 163665 - RNA, 19 nt, Homo sapiens
  misc_RNA (1)...(19): siRNA sense strand
gagguggugcgcugucugu

SEQ ID NO: 163666 - RNA, 19 nt, Homo sapiens
  misc_RNA (1)...(19): siRNA sense strand
gaugagaugacccguauua

SEQ ID NO: 163667 - RNA, 19 nt, Homo sapiens
  misc_RNA (1)...(19): siRNA sense strand
guacaaggccacagacuuu

SEQ ID NO: 163668 - RNA, 19 nt, Homo sapiens
  misc_RNA (1)...(19): siRNA sense strand
agaauaagaucugguauga

SEQ ID NO: 163669 - RNA, 19 nt, Homo sapiens
  misc_RNA (1)...(19): siRNA sense strand
ggagauggauggugaugag

SEQ ID NO: 163670 - RNA, 19 nt, Homo sapiens
  misc_RNA (1)...(19): siRNA sense strand
gcacagcugcuuccaguau

SEQ ID NO: 163671 - RNA, 19 nt, Homo sapiens
  misc_RNA (1)...(19): siRNA sense strand
caagaacaccauacugaaa

SEQ ID NO: 163672 - RNA, 19 nt, Homo sapiens
  misc_RNA (1)...(19): siRNA sense strand
gugaugagaugacccguau

SEQ ID NO: 163673 - RNA, 19 nt, Homo sapiens
  misc_RNA (1)...(19): siRNA sense strand
ggacauccagcuaaaguau

SEQ ID NO: 163674 - RNA, 19 nt, Homo sapiens
  misc_RNA (1)...(19): siRNA sense strand
caagaacuaugacggagau

SEQ ID NO: 163675 - RNA, 19 nt, Homo sapiens
  misc_RNA (1)...(19): siRNA sense strand
cguauuaucuggcaguuca

SEQ ID NO: 163676 - RNA, 19 nt, Homo sapiens
  misc_RNA (1)...(19): siRNA sense strand
acauccagcuaaaguauuu

SEQ ID NO: 163677 - RNA, 19 nt, Homo sapiens
  misc_RNA (1)...(19): siRNA sense strand
gauggauggugaugagaug

SEQ ID NO: 163678 - RNA, 19 nt, Homo sapiens
  misc_RNA (1)...(19): siRNA sense strand
gaacuaugacggagaugug

SEQ ID NO: 163679 - RNA, 19 nt, Homo sapiens
  misc_RNA (1)...(19): siRNA sense strand
ggaccaagcccaucaccau

SEQ ID NO: 163680 - RNA, 19 nt, Homo sapiens
  misc_RNA (1)...(19): siRNA sense strand
gaagcuggaugggaaccaa

SEQ ID NO: 163681 - RNA, 19 nt, Homo sapiens
  misc_RNA (1)...(19): siRNA sense strand
gaaauggccgcuguacaug

SEQ ID NO: 163682 - RNA, 19 nt, Homo sapiens
  misc_RNA (1)...(19): siRNA sense strand
acaagaauaagaucuggua

SEQ ID NO: 163683 - RNA, 19 nt, Homo sapiens
  misc_RNA (1)...(19): siRNA sense strand
gcgccacuaugccgacaaa

SEQ ID NO: 163684 - RNA, 19 nt, Homo sapiens
  misc_RNA (1)...(19): siRNA sense strand
ccaagaacaccauacugaa

SEQ ID NO: 163685 - RNA, 19 nt, Homo sapiens
  misc_RNA (1)...(19): siRNA sense strand
caguguggcugucaagugu

SEQ ID NO: 163686 - RNA, 19 nt, Homo sapiens
  misc_RNA (1)...(19): siRNA sense strand
agaaauggccgcuguacau

SEQ ID NO: 163687 - RNA, 19 nt, Homo sapiens
  misc_RNA (1)...(19): siRNA sense strand
agaccgacuucgacaagaa

SEQ ID NO: 163688 - RNA, 19 nt, Homo sapiens
  misc_RNA (1)...(19): siRNA sense strand
gaacgagcacuuccugaac

SEQ ID NO: 163689 - RNA, 19 nt, Homo sapiens
  misc_RNA (1)...(19): siRNA sense strand
gaccaagcccaucaccauu

SEQ ID NO: 163690 - RNA, 19 nt, Homo sapiens
  misc_RNA (1)...(19): siRNA sense strand
uccaggagaucuuugacaa

SEQ ID NO: 163691 - RNA, 19 nt, Homo sapiens
  misc_RNA (1)...(19): siRNA sense strand
guggagccaugaccaagga

SEQ ID NO: 163692 - RNA, 19 nt, Homo sapiens
  misc_RNA (1)...(19): siRNA sense strand
gaccgucacccgccacuau

SEQ ID NO: 163693 - RNA, 19 nt, Homo sapiens
  misc_RNA (1)...(19): siRNA sense strand
ugagaugacccguauuauc

SEQ ID NO: 163694 - RNA, 19 nt, Homo sapiens
  misc_RNA (1)...(19): siRNA sense strand
gcucagguccucaagucuu

SEQ ID NO: 163695 - RNA, 19 nt, Homo sapiens
  misc_RNA (1)...(19): siRNA sense strand
ucaaggagugggaagugua

SEQ ID NO: 163696 - RNA, 19 nt, Homo sapiens
  misc_RNA (1)...(19): siRNA sense strand
aguaugccauccagaagaa

SEQ ID NO: 163697 - RNA, 19 nt, Homo sapiens
  misc_RNA (1)...(19): siRNA sense strand
ugaacgagcacuuccugaa

SEQ ID NO: 163698 - RNA, 19 nt, Homo sapiens
  misc_RNA (1)...(19): siRNA sense strand
gaagaaauggccgcuguac

SEQ ID NO: 163699 - RNA, 19 nt, Homo sapiens
  misc_RNA (1)...(19): siRNA sense strand
guccuggucugcccugaug

SEQ ID NO: 163700 - RNA, 19 nt, Homo sapiens
  misc_RNA (1)...(19): siRNA sense strand
gcaaugugaagcugaacga

SEQ ID NO: 163701 - RNA, 19 nt, Homo sapiens
  misc_RNA (1)...(19): siRNA sense strand
gagcaccaagaacaccaua

SEQ ID NO: 163702 - RNA, 19 nt, Homo sapiens
  misc_RNA (1)...(19): siRNA sense strand
acggagaugugcagucaga

SEQ ID NO: 163703 - RNA, 19 nt, Homo sapiens
  misc_RNA (1)...(19): siRNA sense strand
ggcaguucaucaaggagaa

SEQ ID NO: 163704 - RNA, 19 nt, Homo sapiens
  misc_RNA (1)...(19): siRNA sense strand
gcaccaagaacaccauacu

SEQ ID NO: 163705 - RNA, 19 nt, Homo sapiens
  misc_RNA (1)...(19): siRNA sense strand
acgaguccaucucagguuu

SEQ ID NO: 163706 - RNA, 19 nt, Homo sapiens
  misc_RNA (1)...(19): siRNA sense strand
aaacaucccacgccuaguc

SEQ ID NO: 163707 - RNA, 19 nt, Homo sapiens
  misc_RNA (1)...(19): siRNA sense strand
gggagcccaucaucugcaa

SEQ ID NO: 163708 - RNA, 19 nt, Homo sapiens
  misc_RNA (1)...(19): siRNA sense strand
ggagaugugcagucagaca

SEQ ID NO: 163709 - RNA, 19 nt, Homo sapiens
  misc_RNA (1)...(19): siRNA sense strand
caagagcaaccuggacaga

SEQ ID NO: 163710 - RNA, 19 nt, Homo sapiens
  misc_RNA (1)...(19): siRNA sense strand
aaagauggcagugguguca

SEQ ID NO: 163711 - RNA, 19 nt, Homo sapiens
  misc_RNA (1)...(19): siRNA sense strand
ugaugaggcccguguggaa

SEQ ID NO: 163712 - RNA, 19 nt, Homo sapiens
  misc_RNA (1)...(19): siRNA sense strand
cgaagcccgugguggagau

SEQ ID NO: 163713 - RNA, 19 nt, Homo sapiens
  misc_RNA (1)...(19): siRNA sense strand
uggcucagguccucaaguc

SEQ ID NO: 163714 - RNA, 19 nt, Homo sapiens
  misc_RNA (1)...(19): siRNA sense strand
gacauccagcuaaaguauu

SEQ ID NO: 163715 - RNA, 19 nt, Homo sapiens
  misc_RNA (1)...(19): siRNA sense strand
uaagaccgacuucgacaag

SEQ ID NO: 163716 - RNA, 19 nt, Homo sapiens
  misc_RNA (1)...(19): siRNA sense strand
accaagaacaccauacuga

SEQ ID NO: 163717 - RNA, 19 nt, Homo sapiens
  misc_RNA (1)...(19): siRNA sense strand
ugaagaagauguggaaaag

SEQ ID NO: 163718 - RNA, 19 nt, Homo sapiens
  misc_RNA (1)...(19): siRNA sense strand
aacgagcacuuccugaaca

SEQ ID NO: 163719 - RNA, 19 nt, Homo sapiens
  misc_RNA (1)...(19): siRNA sense strand
gggccugcaagaacuauga

SEQ ID NO: 163720 - RNA, 19 nt, Homo sapiens
  misc_RNA (1)...(19): siRNA sense strand
uacaugagcaccaagaaca

SEQ ID NO: 163721 - RNA, 19 nt, Homo sapiens
  misc_RNA (1)...(19): siRNA sense strand
aagaauaagaucugguaug

SEQ ID NO: 163722 - RNA, 19 nt, Homo sapiens
  misc_RNA (1)...(19): siRNA sense strand
ucuggcaguucaucaagga

SEQ ID NO: 163723 - RNA, 19 nt, Homo sapiens
  misc_RNA (1)...(19): siRNA sense strand
ucuuugacaagcacuauaa

SEQ ID NO: 163724 - RNA, 19 nt, Homo sapiens
  misc_RNA (1)...(19): siRNA sense strand
gaucuuugacaagcacuau

SEQ ID NO: 163725 - RNA, 19 nt, Homo sapiens
  misc_RNA (1)...(19): siRNA sense strand
cacagcugcuuccaguaug

SEQ ID NO: 163726 - RNA, 19 nt, Homo sapiens
  misc_RNA (1)...(19): siRNA sense strand
aaauggccgcuguacauga

SEQ ID NO: 163727 - RNA, 19 nt, Homo sapiens
  misc_RNA (1)...(19): siRNA sense strand
caagucuucggguggcuuu

SEQ ID NO: 163728 - RNA, 19 nt, Homo sapiens
  misc_RNA (1)...(19): siRNA sense strand
gcacuauaagaccgacuuc

SEQ ID NO: 163729 - RNA, 19 nt, Homo sapiens
  misc_RNA (1)...(19): siRNA sense strand
guacaugagcaccaagaac

SEQ ID NO: 163730 - RNA, 19 nt, Homo sapiens
  misc_RNA (1)...(19): siRNA sense strand
agaagaaauggccgcugua

SEQ ID NO: 163731 - RNA, 19 nt, Homo sapiens
  misc_RNA (1)...(19): siRNA sense strand
caaaccgugaccagacuga

SEQ ID NO: 163732 - RNA, 19 nt, Homo sapiens
  misc_RNA (1)...(19): siRNA sense strand
caagaauaagaucugguau

SEQ ID NO: 163733 - RNA, 19 nt, Homo sapiens
  misc_RNA (1)...(19): siRNA sense strand
ccacccagaaguacagugu

SEQ ID NO: 163734 - RNA, 19 nt, Homo sapiens
  misc_RNA (1)...(19): siRNA sense strand
aagaagauguggaaaaguc

SEQ ID NO: 163735 - RNA, 19 nt, Homo sapiens
  misc_RNA (1)...(19): siRNA sense strand
aagaacaccauacugaaag

SEQ ID NO: 163736 - RNA, 19 nt, Homo sapiens
  misc_RNA (1)...(19): siRNA sense strand
caguaugccauccagaaga

SEQ ID NO: 163737 - RNA, 19 nt, Homo sapiens
  misc_RNA (1)...(19): siRNA sense strand
gucaaggagugggaagugu

SEQ ID NO: 163738 - RNA, 19 nt, Homo sapiens
  misc_RNA (1)...(19): siRNA sense strand
gaagaaagauguuuauguc

SEQ ID NO: 163739 - RNA, 19 nt, Homo sapiens
  misc_RNA (1)...(19): siRNA sense strand
ggaauuugguccacugaua

SEQ ID NO: 163740 - RNA, 19 nt, Homo sapiens
  misc_RNA (1)...(19): siRNA sense strand
gaaagauguuuaugucgua

SEQ ID NO: 163741 - RNA, 19 nt, Homo sapiens
  misc_RNA (1)...(19): siRNA sense strand
gaugcgaggccaagaauua

SEQ ID NO: 163742 - RNA, 19 nt, Homo sapiens
  misc_RNA (1)...(19): siRNA sense strand
uaugggaacugaagaaaga

SEQ ID NO: 163743 - RNA, 19 nt, Homo sapiens
  misc_RNA (1)...(19): siRNA sense strand
ccagagcagugaggucuua

SEQ ID NO: 163744 - RNA, 19 nt, Homo sapiens
  misc_RNA (1)...(19): siRNA sense strand
gaacugaagaaagauguuu

SEQ ID NO: 163745 - RNA, 19 nt, Homo sapiens
  misc_RNA (1)...(19): siRNA sense strand
guacaccugucacaaagga

SEQ ID NO: 163746 - RNA, 19 nt, Homo sapiens
  misc_RNA (1)...(19): siRNA sense strand
aaaggaagauggaauuugg

SEQ ID NO: 163747 - RNA, 19 nt, Homo sapiens
  misc_RNA (1)...(19): siRNA sense strand
gcugguggcugacgacaau

SEQ ID NO: 163748 - RNA, 19 nt, Homo sapiens
  misc_RNA (1)...(19): siRNA sense strand
gaggagagucugcccauug

SEQ ID NO: 163749 - RNA, 19 nt, Homo sapiens
  misc_RNA (1)...(19): siRNA sense strand
ggucuuaggcucuggcaaa

SEQ ID NO: 163750 - RNA, 19 nt, Homo sapiens
  misc_RNA (1)...(19): siRNA sense strand
gaauuugguccacugauau

SEQ ID NO: 163751 - RNA, 19 nt, Homo sapiens
  misc_RNA (1)...(19): siRNA sense strand
caaaggaggcgagguucua

SEQ ID NO: 163752 - RNA, 19 nt, Homo sapiens
  misc_RNA (1)...(19): siRNA sense strand
ggcaagagcaagagagaaa

SEQ ID NO: 163753 - RNA, 19 nt, Homo sapiens
  misc_RNA (1)...(19): siRNA sense strand
cugaagccauuaaagaauu

SEQ ID NO: 163754 - RNA, 19 nt, Homo sapiens
  misc_RNA (1)...(19): siRNA sense strand
uucacaagcucaaguauga

SEQ ID NO: 163755 - RNA, 19 nt, Homo sapiens
  misc_RNA (1)...(19): siRNA sense strand
uacuauagcucaucuugga

SEQ ID NO: 163756 - RNA, 19 nt, Homo sapiens
  misc_RNA (1)...(19): siRNA sense strand
ccaguacaccugucacaaa

SEQ ID NO: 163757 - RNA, 19 nt, Homo sapiens
  misc_RNA (1)...(19): siRNA sense strand
gcccaggaccgcuacuaua

SEQ ID NO: 163758 - RNA, 19 nt, Homo sapiens
  misc_RNA (1)...(19): siRNA sense strand
cagcugaagccauuaaaga

SEQ ID NO: 163759 - RNA, 19 nt, Homo sapiens
  misc_RNA (1)...(19): siRNA sense strand
caacaaggaguaugaguac

SEQ ID NO: 163760 - RNA, 19 nt, Homo sapiens
  misc_RNA (1)...(19): siRNA sense strand
ccacugauauuuuaaagga

SEQ ID NO: 163761 - RNA, 19 nt, Homo sapiens
  misc_RNA (1)...(19): siRNA sense strand
ucacaaaggaggcgagguu

SEQ ID NO: 163762 - RNA, 19 nt, Homo sapiens
  misc_RNA (1)...(19): siRNA sense strand
caucagggacaucaucaaa

SEQ ID NO: 163763 - RNA, 19 nt, Homo sapiens
  misc_RNA (1)...(19): siRNA sense strand
caucugugcccugcaguua

SEQ ID NO: 163764 - RNA, 19 nt, Homo sapiens
  misc_RNA (1)...(19): siRNA sense strand
acaacaaggaguaugagua

SEQ ID NO: 163765 - RNA, 19 nt, Homo sapiens
  misc_RNA (1)...(19): siRNA sense strand
aggagagucugcccauuga

SEQ ID NO: 163766 - RNA, 19 nt, Homo sapiens
  misc_RNA (1)...(19): siRNA sense strand
ucguagaauuggauuggua

SEQ ID NO: 163767 - RNA, 19 nt, Homo sapiens
  misc_RNA (1)...(19): siRNA sense strand
gggacaacaaggaguauga

SEQ ID NO: 163768 - RNA, 19 nt, Homo sapiens
  misc_RNA (1)...(19): siRNA sense strand
gcugaagccauuaaagaau

SEQ ID NO: 163769 - RNA, 19 nt, Homo sapiens
  misc_RNA (1)...(19): siRNA sense strand
caguacaccugucacaaag

SEQ ID NO: 163770 - RNA, 19 nt, Homo sapiens
  misc_RNA (1)...(19): siRNA sense strand
cauccaagucaaagaguuu

SEQ ID NO: 163771 - RNA, 19 nt, Homo sapiens
  misc_RNA (1)...(19): siRNA sense strand
uaagaugcgaggccaagaa

SEQ ID NO: 163772 - RNA, 19 nt, Homo sapiens
  misc_RNA (1)...(19): siRNA sense strand
gcaaaacccugaccaucca

SEQ ID NO: 163773 - RNA, 19 nt, Homo sapiens
  misc_RNA (1)...(19): siRNA sense strand
guacuccacauuccuacuu

SEQ ID NO: 163774 - RNA, 19 nt, Homo sapiens
  misc_RNA (1)...(19): siRNA sense strand
ugaagccauuaaagaauuc

SEQ ID NO: 163775 - RNA, 19 nt, Homo sapiens
  misc_RNA (1)...(19): siRNA sense strand
ggaccagaaagaacccaaa

SEQ ID NO: 163776 - RNA, 19 nt, Homo sapiens
  misc_RNA (1)...(19): siRNA sense strand
accagcagcuucuucauca

SEQ ID NO: 163777 - RNA, 19 nt, Homo sapiens
  misc_RNA (1)...(19): siRNA sense strand
auaagaccuuucuaagaug

SEQ ID NO: 163778 - RNA, 19 nt, Homo sapiens
  misc_RNA (1)...(19): siRNA sense strand
ccauccaagucaaagaguu

SEQ ID NO: 163779 - RNA, 19 nt, Homo sapiens
  misc_RNA (1)...(19): siRNA sense strand
aaaccugacccacccaaga

SEQ ID NO: 163780 - RNA, 19 nt, Homo sapiens
  misc_RNA (1)...(19): siRNA sense strand
cacaagcucaaguaugaaa

SEQ ID NO: 163781 - RNA, 19 nt, Homo sapiens
  misc_RNA (1)...(19): siRNA sense strand
ggaacugaagaaagauguu

SEQ ID NO: 163782 - RNA, 19 nt, Homo sapiens
  misc_RNA (1)...(19): siRNA sense strand
ccugacaccuggaguacuc

SEQ ID NO: 163783 - RNA, 19 nt, Homo sapiens
  misc_RNA (1)...(19): siRNA sense strand
agauguuuaugucguagaa

SEQ ID NO: 163784 - RNA, 19 nt, Homo sapiens
  misc_RNA (1)...(19): siRNA sense strand
ccauaugggaacugaagaa

SEQ ID NO: 163785 - RNA, 19 nt, Homo sapiens
  misc_RNA (1)...(19): siRNA sense strand
gaaaagaaagauagagucu

SEQ ID NO: 163786 - RNA, 19 nt, Homo sapiens
  misc_RNA (1)...(19): siRNA sense strand
acuugcagcugaagccauu

SEQ ID NO: 163787 - RNA, 19 nt, Homo sapiens
  misc_RNA (1)...(19): siRNA sense strand
gcucaaguaugaaaacuac

SEQ ID NO: 163788 - RNA, 19 nt, Homo sapiens
  misc_RNA (1)...(19): siRNA sense strand
guucacaagcucaaguaug

SEQ ID NO: 163789 - RNA, 19 nt, Homo sapiens
  misc_RNA (1)...(19): siRNA sense strand
cauaugggaacugaagaaa

SEQ ID NO: 163790 - RNA, 19 nt, Homo sapiens
  misc_RNA (1)...(19): siRNA sense strand
aaaggaggcgagguucuaa

SEQ ID NO: 163791 - RNA, 19 nt, Homo sapiens
  misc_RNA (1)...(19): siRNA sense strand
gcgagguucuaagccauuc

SEQ ID NO: 163792 - RNA, 19 nt, Homo sapiens
  misc_RNA (1)...(19): siRNA sense strand
ucagggacaucaucaaacc

SEQ ID NO: 163793 - RNA, 19 nt, Homo sapiens
  misc_RNA (1)...(19): siRNA sense strand
ugacaccccugaagaagau

SEQ ID NO: 163794 - RNA, 19 nt, Homo sapiens
  misc_RNA (1)...(19): siRNA sense strand
gagcaagagagaaaagaaa

SEQ ID NO: 163795 - RNA, 19 nt, Homo sapiens
  misc_RNA (1)...(19): siRNA sense strand
ugaggagagucugcccauu

SEQ ID NO: 163796 - RNA, 19 nt, Homo sapiens
  misc_RNA (1)...(19): siRNA sense strand
ggaugccccuggagaaaug

SEQ ID NO: 163797 - RNA, 19 nt, Homo sapiens
  misc_RNA (1)...(19): siRNA sense strand
uggagaugcuggccaguac

SEQ ID NO: 163798 - RNA, 19 nt, Homo sapiens
  misc_RNA (1)...(19): siRNA sense strand
cuacuucucccugacauuc

SEQ ID NO: 163799 - RNA, 19 nt, Homo sapiens
  misc_RNA (1)...(19): siRNA sense strand
gcagcugaagccauuaaag

SEQ ID NO: 163800 - RNA, 19 nt, Homo sapiens
  misc_RNA (1)...(19): siRNA sense strand
gaccauccaagucaaagag

SEQ ID NO: 163801 - RNA, 19 nt, Homo sapiens
  misc_RNA (1)...(19): siRNA sense strand
ggccauaugggaacugaag

SEQ ID NO: 163802 - RNA, 19 nt, Homo sapiens
  misc_RNA (1)...(19): siRNA sense strand
ggacaacaaggaguaugag

SEQ ID NO: 163803 - RNA, 19 nt, Homo sapiens
  misc_RNA (1)...(19): siRNA sense strand
uuuaaaggaccagaaagaa

SEQ ID NO: 163804 - RNA, 19 nt, Homo sapiens
  misc_RNA (1)...(19): siRNA sense strand
gggaacugaagaaagaugu

SEQ ID NO: 163805 - RNA, 19 nt, Homo sapiens
  misc_RNA (1)...(19): siRNA sense strand
cagcagagaugaagacuug

SEQ ID NO: 163806 - RNA, 19 nt, Homo sapiens
  misc_RNA (1)...(19): siRNA sense strand
aaacugcucucaccaccua

SEQ ID NO: 163807 - RNA, 19 nt, Homo sapiens
  misc_RNA (1)...(19): siRNA sense strand
gcgccacccuccacaguaa

SEQ ID NO: 163808 - RNA, 19 nt, Homo sapiens
  misc_RNA (1)...(19): siRNA sense strand
ccacagagauaagcaguca

SEQ ID NO: 163809 - RNA, 19 nt, Homo sapiens
  misc_RNA (1)...(19): siRNA sense strand
gagauaagcagucaugagu

SEQ ID NO: 163810 - RNA, 19 nt, Homo sapiens
  misc_RNA (1)...(19): siRNA sense strand
ccagggagcgguacauuug

SEQ ID NO: 163811 - RNA, 19 nt, Homo sapiens
  misc_RNA (1)...(19): siRNA sense strand
caacacagcggccacaaca

SEQ ID NO: 163812 - RNA, 19 nt, Homo sapiens
  misc_RNA (1)...(19): siRNA sense strand
ggccagcguugaaauggaa

SEQ ID NO: 163813 - RNA, 19 nt, Homo sapiens
  misc_RNA (1)...(19): siRNA sense strand
gaacaaggccacgaauguc

SEQ ID NO: 163814 - RNA, 19 nt, Homo sapiens
  misc_RNA (1)...(19): siRNA sense strand
cacaggaaccacagagaua

SEQ ID NO: 163815 - RNA, 19 nt, Homo sapiens
  misc_RNA (1)...(19): siRNA sense strand
uagagacccugcccugguu

SEQ ID NO: 163816 - RNA, 19 nt, Homo sapiens
  misc_RNA (1)...(19): siRNA sense strand
ugaacaaggccacgaaugu

SEQ ID NO: 163817 - RNA, 19 nt, Homo sapiens
  misc_RNA (1)...(19): siRNA sense strand
caugcuaccucaagucaag

SEQ ID NO: 163818 - RNA, 19 nt, Homo sapiens
  misc_RNA (1)...(19): siRNA sense strand
gcagagaugaagacuugga

SEQ ID NO: 163819 - RNA, 19 nt, Homo sapiens
  misc_RNA (1)...(19): siRNA sense strand
ucucccagcucaaacaaca

SEQ ID NO: 163820 - RNA, 19 nt, Homo sapiens
  misc_RNA (1)...(19): siRNA sense strand
uaccucaagucaaggcaaa

SEQ ID NO: 163821 - RNA, 19 nt, Homo sapiens
  misc_RNA (1)...(19): siRNA sense strand
ccacaggaaccacagagau

SEQ ID NO: 163822 - RNA, 19 nt, Homo sapiens
  misc_RNA (1)...(19): siRNA sense strand
acaggaaccacagagauaa

SEQ ID NO: 163823 - RNA, 19 nt, Homo sapiens
  misc_RNA (1)...(19): siRNA sense strand
ggccacaacagcagcuauu

SEQ ID NO: 163824 - RNA, 19 nt, Homo sapiens
  misc_RNA (1)...(19): siRNA sense strand
cccagucucaaaugcauua

SEQ ID NO: 163825 - RNA, 19 nt, Homo sapiens
  misc_RNA (1)...(19): siRNA sense strand
acagagauaagcagucaug

SEQ ID NO: 163826 - RNA, 19 nt, Homo sapiens
  misc_RNA (1)...(19): siRNA sense strand
acaucugggucaagagcua

SEQ ID NO: 163827 - RNA, 19 nt, Homo sapiens
  misc_RNA (1)...(19): siRNA sense strand
gaccagcagcagagaugaa

SEQ ID NO: 163828 - RNA, 19 nt, Homo sapiens
  misc_RNA (1)...(19): siRNA sense strand
acucugguuucaagcguaa

SEQ ID NO: 163829 - RNA, 19 nt, Homo sapiens
  misc_RNA (1)...(19): siRNA sense strand
gggaccagcagcagagaug

SEQ ID NO: 163830 - RNA, 19 nt, Homo sapiens
  misc_RNA (1)...(19): siRNA sense strand
gagaugaagacuuggaaaa

SEQ ID NO: 163831 - RNA, 19 nt, Homo sapiens
  misc_RNA (1)...(19): siRNA sense strand
ggaccagcagcagagauga

SEQ ID NO: 163832 - RNA, 19 nt, Homo sapiens
  misc_RNA (1)...(19): siRNA sense strand
ugucucuccuggcaugcua

SEQ ID NO: 163833 - RNA, 19 nt, Homo sapiens
  misc_RNA (1)...(19): siRNA sense strand
gaugaagacuuggaaaacu

SEQ ID NO: 163834 - RNA, 19 nt, Homo sapiens
  misc_RNA (1)...(19): siRNA sense strand
agucucaaaugcauuagag

SEQ ID NO: 163835 - RNA, 19 nt, Homo sapiens
  misc_RNA (1)...(19): siRNA sense strand
cuucaucucccagcucaaa

SEQ ID NO: 163836 - RNA, 19 nt, Homo sapiens
  misc_RNA (1)...(19): siRNA sense strand
ggcaugcuaccucaaguca

SEQ ID NO: 163837 - RNA, 19 nt, Homo sapiens
  misc_RNA (1)...(19): siRNA sense strand
cagcagagaugaagacuug

SEQ ID NO: 163838 - RNA, 19 nt, Homo sapiens
  misc_RNA (1)...(19): siRNA sense strand
aaacugcucucaccaccua

SEQ ID NO: 163839 - RNA, 19 nt, Homo sapiens
  misc_RNA (1)...(19): siRNA sense strand
gcgccacccuccacaguaa

SEQ ID NO: 163840 - RNA, 19 nt, Homo sapiens
  misc_RNA (1)...(19): siRNA sense strand
ccacagagauaagcaguca

SEQ ID NO: 163841 - RNA, 19 nt, Homo sapiens
  misc_RNA (1)...(19): siRNA sense strand
gagauaagcagucaugagu

SEQ ID NO: 163842 - RNA, 19 nt, Homo sapiens
  misc_RNA (1)...(19): siRNA sense strand
ccagggagcgguacauuug

SEQ ID NO: 163843 - RNA, 19 nt, Homo sapiens
  misc_RNA (1)...(19): siRNA sense strand
caacacagcggccacaaca

SEQ ID NO: 163844 - RNA, 19 nt, Homo sapiens
  misc_RNA (1)...(19): siRNA sense strand
ggccagcguugaaauggaa

SEQ ID NO: 163845 - RNA, 19 nt, Homo sapiens
  misc_RNA (1)...(19): siRNA sense strand
gaacaaggccacgaauguc

SEQ ID NO: 163846 - RNA, 19 nt, Homo sapiens
  misc_RNA (1)...(19): siRNA sense strand
cacaggaaccacagagaua

SEQ ID NO: 163847 - RNA, 19 nt, Homo sapiens
  misc_RNA (1)...(19): siRNA sense strand
uagagacccugcccugguu

SEQ ID NO: 163848 - RNA, 19 nt, Homo sapiens
  misc_RNA (1)...(19): siRNA sense strand
ugaacaaggccacgaaugu

SEQ ID NO: 163849 - RNA, 19 nt, Homo sapiens
  misc_RNA (1)...(19): siRNA sense strand
caugcuaccucaagucaag

SEQ ID NO: 163850 - RNA, 19 nt, Homo sapiens
  misc_RNA (1)...(19): siRNA sense strand
gcagagaugaagacuugga

SEQ ID NO: 163851 - RNA, 19 nt, Homo sapiens
  misc_RNA (1)...(19): siRNA sense strand
ucucccagcucaaacaaca

SEQ ID NO: 163852 - RNA, 19 nt, Homo sapiens
  misc_RNA (1)...(19): siRNA sense strand
uaccucaagucaaggcaaa

SEQ ID NO: 163853 - RNA, 19 nt, Homo sapiens
  misc_RNA (1)...(19): siRNA sense strand
ccacaggaaccacagagau

SEQ ID NO: 163854 - RNA, 19 nt, Homo sapiens
  misc_RNA (1)...(19): siRNA sense strand
acaggaaccacagagauaa

SEQ ID NO: 163855 - RNA, 19 nt, Homo sapiens
  misc_RNA (1)...(19): siRNA sense strand
ggccacaacagcagcuauu

SEQ ID NO: 163856 - RNA, 19 nt, Homo sapiens
  misc_RNA (1)...(19): siRNA sense strand
cccagucucaaaugcauua

SEQ ID NO: 163857 - RNA, 19 nt, Homo sapiens
  misc_RNA (1)...(19): siRNA sense strand
acaucugggucaagagcua

SEQ ID NO: 163858 - RNA, 19 nt, Homo sapiens
  misc_RNA (1)...(19): siRNA sense strand
acagagauaagcagucaug

SEQ ID NO: 163859 - RNA, 19 nt, Homo sapiens
  misc_RNA (1)...(19): siRNA sense strand
acucugguuucaagcguaa

SEQ ID NO: 163860 - RNA, 19 nt, Homo sapiens
  misc_RNA (1)...(19): siRNA sense strand
gaccagcagcagagaugaa

SEQ ID NO: 163861 - RNA, 19 nt, Homo sapiens
  misc_RNA (1)...(19): siRNA sense strand
gggaccagcagcagagaug

SEQ ID NO: 163862 - RNA, 19 nt, Homo sapiens
  misc_RNA (1)...(19): siRNA sense strand
gagaugaagacuuggaaaa

SEQ ID NO: 163863 - RNA, 19 nt, Homo sapiens
  misc_RNA (1)...(19): siRNA sense strand
ggaccagcagcagagauga

SEQ ID NO: 163864 - RNA, 19 nt, Homo sapiens
  misc_RNA (1)...(19): siRNA sense strand
ugucucuccuggcaugcua

SEQ ID NO: 163865 - RNA, 19 nt, Homo sapiens
  misc_RNA (1)...(19): siRNA sense strand
gaugaagacuuggaaaacu

SEQ ID NO: 163866 - RNA, 19 nt, Homo sapiens
  misc_RNA (1)...(19): siRNA sense strand
agucucaaaugcauuagag

SEQ ID NO: 163867 - RNA, 19 nt, Homo sapiens
  misc_RNA (1)...(19): siRNA sense strand
cuucaucucccagcucaaa

SEQ ID NO: 163868 - RNA, 19 nt, Homo sapiens
  misc_RNA (1)...(19): siRNA sense strand
ggcaugcuaccucaaguca

SEQ ID NO: 163869 - RNA, 19 nt, Homo sapiens
  misc_RNA (1)...(19): siRNA sense strand
gaacauccauaaccggaau

SEQ ID NO: 163870 - RNA, 19 nt, Homo sapiens
  misc_RNA (1)...(19): siRNA sense strand
gaaucacaaucccacgaaa

SEQ ID NO: 163871 - RNA, 19 nt, Homo sapiens
  misc_RNA (1)...(19): siRNA sense strand
ggaaucacaaucccacgaa

SEQ ID NO: 163872 - RNA, 19 nt, Homo sapiens
  misc_RNA (1)...(19): siRNA sense strand
ccaaaagguccucagauua

SEQ ID NO: 163873 - RNA, 19 nt, Homo sapiens
  misc_RNA (1)...(19): siRNA sense strand
ugaggacccugagagauau

SEQ ID NO: 163874 - RNA, 19 nt, Homo sapiens
  misc_RNA (1)...(19): siRNA sense strand
ggacugugauggucaaccu

SEQ ID NO: 163875 - RNA, 19 nt, Homo sapiens
  misc_RNA (1)...(19): siRNA sense strand
cauaaccggaauaccaaua

SEQ ID NO: 163876 - RNA, 19 nt, Homo sapiens
  misc_RNA (1)...(19): siRNA sense strand
gaagaccucauugguguca

SEQ ID NO: 163877 - RNA, 19 nt, Homo sapiens
  misc_RNA (1)...(19): siRNA sense strand
caggaugcccaaauucuga

SEQ ID NO: 163878 - RNA, 19 nt, Homo sapiens
  misc_RNA (1)...(19): siRNA sense strand
gaaggcaggaaucacaauc

SEQ ID NO: 163879 - RNA, 19 nt, Homo sapiens
  misc_RNA (1)...(19): siRNA sense strand
caaugaggacccugagaga

SEQ ID NO: 163880 - RNA, 19 nt, Homo sapiens
  misc_RNA (1)...(19): siRNA sense strand
gagauaucccucugugauc

SEQ ID NO: 163881 - RNA, 19 nt, Homo sapiens
  misc_RNA (1)...(19): siRNA sense strand
augaggacccugagagaua

SEQ ID NO: 163882 - RNA, 19 nt, Homo sapiens
  misc_RNA (1)...(19): siRNA sense strand
cccaaaagguccucagauu

SEQ ID NO: 163883 - RNA, 19 nt, Homo sapiens
  misc_RNA (1)...(19): siRNA sense strand
ggaaucuccaccgcaauga

SEQ ID NO: 163884 - RNA, 19 nt, Homo sapiens
  misc_RNA (1)...(19): siRNA sense strand
gcccaaauucugaggacaa

SEQ ID NO: 163885 - RNA, 19 nt, Homo sapiens
  misc_RNA (1)...(19): siRNA sense strand
guccucagauuacuacaac

SEQ ID NO: 163886 - RNA, 19 nt, Homo sapiens
  misc_RNA (1)...(19): siRNA sense strand
ggaauaccaauaccaaucc

SEQ ID NO: 163887 - RNA, 19 nt, Homo sapiens
  misc_RNA (1)...(19): siRNA sense strand
caaaagguccucagauuac

SEQ ID NO: 163888 - RNA, 19 nt, Homo sapiens
  misc_RNA (1)...(19): siRNA sense strand
cggaauaccaauaccaauc

SEQ ID NO: 163889 - RNA, 19 nt, Homo sapiens
  misc_RNA (1)...(19): siRNA sense strand
ccacuugggcugcaucaac

SEQ ID NO: 163890 - RNA, 19 nt, Homo sapiens
  misc_RNA (1)...(19): siRNA sense strand
aaagguccucagauuacua

SEQ ID NO: 163891 - RNA, 19 nt, Homo sapiens
  misc_RNA (1)...(19): siRNA sense strand
ccaggaugcccaaauucug

SEQ ID NO: 163892 - RNA, 19 nt, Homo sapiens
  misc_RNA (1)...(19): siRNA sense strand
aaagacagcuguuucaauu

SEQ ID NO: 163893 - RNA, 19 nt, Homo sapiens
  misc_RNA (1)...(19): siRNA sense strand
gaaacaagaacucagauuu

SEQ ID NO: 163894 - RNA, 19 nt, Homo sapiens
  misc_RNA (1)...(19): siRNA sense strand
ggacguacguuucaucuca

SEQ ID NO: 163895 - RNA, 19 nt, Homo sapiens
  misc_RNA (1)...(19): siRNA sense strand
gcaaagugaugccucagaa

SEQ ID NO: 163896 - RNA, 19 nt, Homo sapiens
  misc_RNA (1)...(19): siRNA sense strand
caacuauaccugcauguua

SEQ ID NO: 163897 - RNA, 19 nt, Homo sapiens
  misc_RNA (1)...(19): siRNA sense strand
ucaagaaaguuaccucuga

SEQ ID NO: 163898 - RNA, 19 nt, Homo sapiens
  misc_RNA (1)...(19): siRNA sense strand
gaggaucacuuguccaaau

SEQ ID NO: 163899 - RNA, 19 nt, Homo sapiens
  misc_RNA (1)...(19): siRNA sense strand
gaacagaagaugaaacaag

SEQ ID NO: 163900 - RNA, 19 nt, Homo sapiens
  misc_RNA (1)...(19): siRNA sense strand
agaaagaugugcugugguu

SEQ ID NO: 163901 - RNA, 19 nt, Homo sapiens
  misc_RNA (1)...(19): siRNA sense strand
caaugacacuggcaacuau

SEQ ID NO: 163902 - RNA, 19 nt, Homo sapiens
  misc_RNA (1)...(19): siRNA sense strand
gaucacuuguccaaaugua

SEQ ID NO: 163903 - RNA, 19 nt, Homo sapiens
  misc_RNA (1)...(19): siRNA sense strand
uaaggaacacuacauauug

SEQ ID NO: 163904 - RNA, 19 nt, Homo sapiens
  misc_RNA (1)...(19): siRNA sense strand
ccaggacucugacuguaaa

SEQ ID NO: 163905 - RNA, 19 nt, Homo sapiens
  misc_RNA (1)...(19): siRNA sense strand
cuauugaugucaccauuaa

SEQ ID NO: 163906 - RNA, 19 nt, Homo sapiens
  misc_RNA (1)...(19): siRNA sense strand
gugcauaaacuguauauag

SEQ ID NO: 163907 - RNA, 19 nt, Homo sapiens
  misc_RNA (1)...(19): siRNA sense strand
cagccaaggugaagcagaa

SEQ ID NO: 163908 - RNA, 19 nt, Homo sapiens
  misc_RNA (1)...(19): siRNA sense strand
ggcccacucuccucaauga

SEQ ID NO: 163909 - RNA, 19 nt, Homo sapiens
  misc_RNA (1)...(19): siRNA sense strand
aacagaagaugaaacaaga

SEQ ID NO: 163910 - RNA, 19 nt, Homo sapiens
  misc_RNA (1)...(19): siRNA sense strand
gagaggagcuacucauucc

SEQ ID NO: 163911 - RNA, 19 nt, Homo sapiens
  misc_RNA (1)...(19): siRNA sense strand
aacuauaccugcauguuaa

SEQ ID NO: 163912 - RNA, 19 nt, Homo sapiens
  misc_RNA (1)...(19): siRNA sense strand
gaugaaacaagaacucaga

SEQ ID NO: 163913 - RNA, 19 nt, Homo sapiens
  misc_RNA (1)...(19): siRNA sense strand
guuguuacauauccagaaa

SEQ ID NO: 163914 - RNA, 19 nt, Homo sapiens
  misc_RNA (1)...(19): siRNA sense strand
ggagaggagcuacucauuc

SEQ ID NO: 163915 - RNA, 19 nt, Homo sapiens
  misc_RNA (1)...(19): siRNA sense strand
gacucugacuguaaaggua

SEQ ID NO: 163916 - RNA, 19 nt, Homo sapiens
  misc_RNA (1)...(19): siRNA sense strand
gagcuacucauucccugua

SEQ ID NO: 163917 - RNA, 19 nt, Homo sapiens
  misc_RNA (1)...(19): siRNA sense strand
gccuuacucugaucuggua

SEQ ID NO: 163918 - RNA, 19 nt, Homo sapiens
  misc_RNA (1)...(19): siRNA sense strand
ucaaaccgacuaucacuug

SEQ ID NO: 163919 - RNA, 19 nt, Homo sapiens
  misc_RNA (1)...(19): siRNA sense strand
gaaacucccagugcauaaa

SEQ ID NO: 163920 - RNA, 19 nt, Homo sapiens
  misc_RNA (1)...(19): siRNA sense strand
ccgagaaccgcauuaguaa

SEQ ID NO: 163921 - RNA, 19 nt, Homo sapiens
  misc_RNA (1)...(19): siRNA sense strand
caaaggcgaaguugccaaa

SEQ ID NO: 163922 - RNA, 19 nt, Homo sapiens
  misc_RNA (1)...(19): siRNA sense strand
gaccuugaggagccaauua

SEQ ID NO: 163923 - RNA, 19 nt, Homo sapiens
  misc_RNA (1)...(19): siRNA sense strand
cccgagaaccgcauuagua

SEQ ID NO: 163924 - RNA, 19 nt, Homo sapiens
  misc_RNA (1)...(19): siRNA sense strand
acucugaucugguauugga

SEQ ID NO: 163925 - RNA, 19 nt, Homo sapiens
  misc_RNA (1)...(19): siRNA sense strand
gaagaugaaacaagaacuc

SEQ ID NO: 163926 - RNA, 19 nt, Homo sapiens
  misc_RNA (1)...(19): siRNA sense strand
gaugucaccauuaacgaaa

SEQ ID NO: 163927 - RNA, 19 nt, Homo sapiens
  misc_RNA (1)...(19): siRNA sense strand
gacuaucacuugguauaug

SEQ ID NO: 163928 - RNA, 19 nt, Homo sapiens
  misc_RNA (1)...(19): siRNA sense strand
gcauucagaggaucacuug

SEQ ID NO: 163929 - RNA, 19 nt, Homo sapiens
  misc_RNA (1)...(19): siRNA sense strand
caccaggacucugacugua

SEQ ID NO: 163930 - RNA, 19 nt, Homo sapiens
  misc_RNA (1)...(19): siRNA sense strand
cuugguauaugggcuguua

SEQ ID NO: 163931 - RNA, 19 nt, Homo sapiens
  misc_RNA (1)...(19): siRNA sense strand
gaggcaaauccaaguguuu

SEQ ID NO: 163932 - RNA, 19 nt, Homo sapiens
  misc_RNA (1)...(19): siRNA sense strand
cuaaugaucauguggucua

SEQ ID NO: 163933 - RNA, 19 nt, Homo sapiens
  misc_RNA (1)...(19): siRNA sense strand
gagaaccgcauuaguaagg

SEQ ID NO: 163934 - RNA, 19 nt, Homo sapiens
  misc_RNA (1)...(19): siRNA sense strand
gcaacuauaccugcauguu

SEQ ID NO: 163935 - RNA, 19 nt, Homo sapiens
  misc_RNA (1)...(19): siRNA sense strand
ucaaugacacuggcaacua

SEQ ID NO: 163936 - RNA, 19 nt, Homo sapiens
  misc_RNA (1)...(19): siRNA sense strand
ccucauugccuuaauuuca

SEQ ID NO: 163937 - RNA, 19 nt, Homo sapiens
  misc_RNA (1)...(19): siRNA sense strand
gcauuaguaaggagaaaga

SEQ ID NO: 163938 - RNA, 19 nt, Homo sapiens
  misc_RNA (1)...(19): siRNA sense strand
ugaggcaaauccaaguguu

SEQ ID NO: 163939 - RNA, 19 nt, Homo sapiens
  misc_RNA (1)...(19): siRNA sense strand
aaccgacuaucacuuggua

SEQ ID NO: 163940 - RNA, 19 nt, Homo sapiens
  misc_RNA (1)...(19): siRNA sense strand
cagcuggccuuacucugau

SEQ ID NO: 163941 - RNA, 19 nt, Homo sapiens
  misc_RNA (1)...(19): siRNA sense strand
uauggaauccugcaaagug

SEQ ID NO: 163942 - RNA, 19 nt, Homo sapiens
  misc_RNA (1)...(19): siRNA sense strand
ccaaagcagccaaggugaa

SEQ ID NO: 163943 - RNA, 19 nt, Homo sapiens
  misc_RNA (1)...(19): siRNA sense strand
ccauucagcuggccuuacu

SEQ ID NO: 163944 - RNA, 19 nt, Homo sapiens
  misc_RNA (1)...(19): siRNA sense strand
uagaacagaagaugaaaca

SEQ ID NO: 163945 - RNA, 19 nt, Homo sapiens
  misc_RNA (1)...(19): siRNA sense strand
gauggauucucgcaaugag

SEQ ID NO: 163946 - RNA, 19 nt, Homo sapiens
  misc_RNA (1)...(19): siRNA sense strand
ugaaacucccagugcauaa

SEQ ID NO: 163947 - RNA, 19 nt, Homo sapiens
  misc_RNA (1)...(19): siRNA sense strand
gcgcagcuaugucugucau

SEQ ID NO: 163948 - RNA, 19 nt, Homo sapiens
  misc_RNA (1)...(19): siRNA sense strand
ugaaacaagaacucagauu

SEQ ID NO: 163949 - RNA, 19 nt, Homo sapiens
  misc_RNA (1)...(19): siRNA sense strand
uagugagucucuacuuuua

SEQ ID NO: 163950 - RNA, 19 nt, Homo sapiens
  misc_RNA (1)...(19): siRNA sense strand
caucucaccaggacucuga

SEQ ID NO: 163951 - RNA, 19 nt, Homo sapiens
  misc_RNA (1)...(19): siRNA sense strand
ccgacuaucacuugguaua

SEQ ID NO: 163952 - RNA, 19 nt, Homo sapiens
  misc_RNA (1)...(19): siRNA sense strand
ucagaacgcugcgaugacu

SEQ ID NO: 163953 - RNA, 19 nt, Homo sapiens
  misc_RNA (1)...(19): siRNA sense strand
ccaaguguuugaagaugag

SEQ ID NO: 163954 - RNA, 19 nt, Homo sapiens
  misc_RNA (1)...(19): siRNA sense strand
ucugauggauucucgcaau

SEQ ID NO: 163955 - RNA, 19 nt, Homo sapiens
  misc_RNA (1)...(19): siRNA sense strand
cagaggaucacuuguccaa

SEQ ID NO: 163956 - RNA, 19 nt, Homo sapiens
  misc_RNA (1)...(19): siRNA sense strand
guuaaggaacacuacauau

SEQ ID NO: 163957 - RNA, 19 nt, Homo sapiens
  misc_RNA (1)...(19): siRNA sense strand
aaauccaaguguuugaaga

SEQ ID NO: 163958 - RNA, 19 nt, Homo sapiens
  misc_RNA (1)...(19): siRNA sense strand
ggaauccugcaaagugaug

SEQ ID NO: 163959 - RNA, 19 nt, Homo sapiens
  misc_RNA (1)...(19): siRNA sense strand
gaucucaagcgcagcuaug

SEQ ID NO: 163960 - RNA, 19 nt, Homo sapiens
  misc_RNA (1)...(19): siRNA sense strand
caccauuaacgaaaguaua

SEQ ID NO: 163961 - RNA, 19 nt, Homo sapiens
  misc_RNA (1)...(19): siRNA sense strand
uccaaguguuugaagauga

SEQ ID NO: 163962 - RNA, 19 nt, Homo sapiens
  misc_RNA (1)...(19): siRNA sense strand
uaguagaacagaagaugaa

SEQ ID NO: 163963 - RNA, 19 nt, Homo sapiens
  misc_RNA (1)...(19): siRNA sense strand
cuacagcacagcccauuca

SEQ ID NO: 163964 - RNA, 19 nt, Homo sapiens
  misc_RNA (1)...(19): siRNA sense strand
guagauggauauuuuccuu

SEQ ID NO: 163965 - RNA, 19 nt, Homo sapiens
  misc_RNA (1)...(19): siRNA sense strand
ucacuuguccaaauguaga

SEQ ID NO: 163966 - RNA, 19 nt, Homo sapiens
  misc_RNA (1)...(19): siRNA sense strand
uuacucugaucugguauug

SEQ ID NO: 163967 - RNA, 19 nt, Homo sapiens
  misc_RNA (1)...(19): siRNA sense strand
gguaguaggcucuccaaaa

SEQ ID NO: 163968 - RNA, 19 nt, Homo sapiens
  misc_RNA (1)...(19): siRNA sense strand
cucauugccuuaauuucaa

SEQ ID NO: 163969 - RNA, 19 nt, Homo sapiens
  misc_RNA (1)...(19): siRNA sense strand
auaccugcauguuaaggaa

SEQ ID NO: 163970 - RNA, 19 nt, Homo sapiens
  misc_RNA (1)...(19): siRNA sense strand
cauaguagaacagaagaug

SEQ ID NO: 163971 - RNA, 19 nt, Homo sapiens
  misc_RNA (1)...(19): siRNA sense strand
cacuauugaugucaccauu

SEQ ID NO: 163972 - RNA, 19 nt, Homo sapiens
  misc_RNA (1)...(19): siRNA sense strand
cuagacaccaugaggcaaa

SEQ ID NO: 163973 - RNA, 19 nt, Homo sapiens
  misc_RNA (1)...(19): siRNA sense strand
ggacucugacuguaaaggu

SEQ ID NO: 163974 - RNA, 19 nt, Homo sapiens
  misc_RNA (1)...(19): siRNA sense strand
ccgaagguaugaacuugag

SEQ ID NO: 163975 - RNA, 19 nt, Homo sapiens
  misc_RNA (1)...(19): siRNA sense strand
aauauggcauucagaggau

SEQ ID NO: 163976 - RNA, 19 nt, Homo sapiens
  misc_RNA (1)...(19): siRNA sense strand
agacagcuguuucaauucc

SEQ ID NO: 163977 - RNA, 19 nt, Homo sapiens
  misc_RNA (1)...(19): siRNA sense strand
caaagcagccaaggugaag

SEQ ID NO: 163978 - RNA, 19 nt, Homo sapiens
  misc_RNA (1)...(19): siRNA sense strand
ccucagaacgcugcgauga

SEQ ID NO: 163979 - RNA, 19 nt, Homo sapiens
  misc_RNA (1)...(19): siRNA sense strand
uuaguaaggagaaagaugu

SEQ ID NO: 163980 - RNA, 19 nt, Homo sapiens
  misc_RNA (1)...(19): siRNA sense strand
ccaaauguagauggauauu

SEQ ID NO: 163981 - RNA, 19 nt, Homo sapiens
  misc_RNA (1)...(19): siRNA sense strand
uugaggagccaauuaacuu

SEQ ID NO: 163982 - RNA, 19 nt, Homo sapiens
  misc_RNA (1)...(19): siRNA sense strand
gaguuuccucauugccuua

SEQ ID NO: 163983 - RNA, 19 nt, Homo sapiens
  misc_RNA (1)...(19): siRNA sense strand
cgacuaucacuugguauau

SEQ ID NO: 163984 - RNA, 19 nt, Homo sapiens
  misc_RNA (1)...(19): siRNA sense strand
aggaucacuuguccaaaug

SEQ ID NO: 163985 - RNA, 19 nt, Homo sapiens
  misc_RNA (1)...(19): siRNA sense strand
uaaugaucauguggucuau

SEQ ID NO: 163986 - RNA, 19 nt, Homo sapiens
  misc_RNA (1)...(19): siRNA sense strand
auggaauccugcaaaguga

SEQ ID NO: 163987 - RNA, 19 nt, Homo sapiens
  misc_RNA (1)...(19): siRNA sense strand
aggcgaaguugccaaagca

SEQ ID NO: 163988 - RNA, 19 nt, Homo sapiens
  misc_RNA (1)...(19): siRNA sense strand
cuaugucugucaugcuaga

SEQ ID NO: 163989 - RNA, 19 nt, Homo sapiens
  misc_RNA (1)...(19): siRNA sense strand
ucaccaggacucugacugu

SEQ ID NO: 163990 - RNA, 19 nt, Homo sapiens
  misc_RNA (1)...(19): siRNA sense strand
agcuaugucugucaugcua

SEQ ID NO: 163991 - RNA, 19 nt, Homo sapiens
  misc_RNA (1)...(19): siRNA sense strand
aacaagaacucagauuuug

SEQ ID NO: 163992 - RNA, 19 nt, Homo sapiens
  misc_RNA (1)...(19): siRNA sense strand
aaagacagcuguuucaauu

SEQ ID NO: 163993 - RNA, 19 nt, Homo sapiens
  misc_RNA (1)...(19): siRNA sense strand
gaaacaagaacucagauuu

SEQ ID NO: 163994 - RNA, 19 nt, Homo sapiens
  misc_RNA (1)...(19): siRNA sense strand
ggacguacguuucaucuca

SEQ ID NO: 163995 - RNA, 19 nt, Homo sapiens
  misc_RNA (1)...(19): siRNA sense strand
gcaaagugaugccucagaa

SEQ ID NO: 163996 - RNA, 19 nt, Homo sapiens
  misc_RNA (1)...(19): siRNA sense strand
caacuauaccugcauguua

SEQ ID NO: 163997 - RNA, 19 nt, Homo sapiens
  misc_RNA (1)...(19): siRNA sense strand
ucaagaaaguuaccucuga

SEQ ID NO: 163998 - RNA, 19 nt, Homo sapiens
  misc_RNA (1)...(19): siRNA sense strand
gaggaucacuuguccaaau

SEQ ID NO: 163999 - RNA, 19 nt, Homo sapiens
  misc_RNA (1)...(19): siRNA sense strand
gaacagaagaugaaacaag

SEQ ID NO: 164000 - RNA, 19 nt, Homo sapiens
  misc_RNA (1)...(19): siRNA sense strand
agaaagaugugcugugguu

SEQ ID NO: 164001 - RNA, 19 nt, Homo sapiens
  misc_RNA (1)...(19): siRNA sense strand
caaugacacuggcaacuau

SEQ ID NO: 164002 - RNA, 19 nt, Homo sapiens
  misc_RNA (1)...(19): siRNA sense strand
gaucacuuguccaaaugua

SEQ ID NO: 164003 - RNA, 19 nt, Homo sapiens
  misc_RNA (1)...(19): siRNA sense strand
uaaggaacacuacauauug

SEQ ID NO: 164004 - RNA, 19 nt, Homo sapiens
  misc_RNA (1)...(19): siRNA sense strand
ccaggacucugacuguaaa

SEQ ID NO: 164005 - RNA, 19 nt, Homo sapiens
  misc_RNA (1)...(19): siRNA sense strand
cuauugaugucaccauuaa

SEQ ID NO: 164006 - RNA, 19 nt, Homo sapiens
  misc_RNA (1)...(19): siRNA sense strand
gugcauaaacuguauauag

SEQ ID NO: 164007 - RNA, 19 nt, Homo sapiens
  misc_RNA (1)...(19): siRNA sense strand
cagccaaggugaagcagaa

SEQ ID NO: 164008 - RNA, 19 nt, Homo sapiens
  misc_RNA (1)...(19): siRNA sense strand
ggcccacucuccucaauga

SEQ ID NO: 164009 - RNA, 19 nt, Homo sapiens
  misc_RNA (1)...(19): siRNA sense strand
aacagaagaugaaacaaga

SEQ ID NO: 164010 - RNA, 19 nt, Homo sapiens
  misc_RNA (1)...(19): siRNA sense strand
gagaggagcuacucauucc

SEQ ID NO: 164011 - RNA, 19 nt, Homo sapiens
  misc_RNA (1)...(19): siRNA sense strand
aacuauaccugcauguuaa

SEQ ID NO: 164012 - RNA, 19 nt, Homo sapiens
  misc_RNA (1)...(19): siRNA sense strand
gaugaaacaagaacucaga

SEQ ID NO: 164013 - RNA, 19 nt, Homo sapiens
  misc_RNA (1)...(19): siRNA sense strand
guuguuacauauccagaaa

SEQ ID NO: 164014 - RNA, 19 nt, Homo sapiens
  misc_RNA (1)...(19): siRNA sense strand
ggagaggagcuacucauuc

SEQ ID NO: 164015 - RNA, 19 nt, Homo sapiens
  misc_RNA (1)...(19): siRNA sense strand
gacucugacuguaaaggua

SEQ ID NO: 164016 - RNA, 19 nt, Homo sapiens
  misc_RNA (1)...(19): siRNA sense strand
gagcuacucauucccugua

SEQ ID NO: 164017 - RNA, 19 nt, Homo sapiens
  misc_RNA (1)...(19): siRNA sense strand
gccuuacucugaucuggua

SEQ ID NO: 164018 - RNA, 19 nt, Homo sapiens
  misc_RNA (1)...(19): siRNA sense strand
ucaaaccgacuaucacuug

SEQ ID NO: 164019 - RNA, 19 nt, Homo sapiens
  misc_RNA (1)...(19): siRNA sense strand
gaaacucccagugcauaaa

SEQ ID NO: 164020 - RNA, 19 nt, Homo sapiens
  misc_RNA (1)...(19): siRNA sense strand
ccgagaaccgcauuaguaa

SEQ ID NO: 164021 - RNA, 19 nt, Homo sapiens
  misc_RNA (1)...(19): siRNA sense strand
caaaggcgaaguugccaaa

SEQ ID NO: 164022 - RNA, 19 nt, Homo sapiens
  misc_RNA (1)...(19): siRNA sense strand
gaccuugaggagccaauua

SEQ ID NO: 164023 - RNA, 19 nt, Homo sapiens
  misc_RNA (1)...(19): siRNA sense strand
cccgagaaccgcauuagua

SEQ ID NO: 164024 - RNA, 19 nt, Homo sapiens
  misc_RNA (1)...(19): siRNA sense strand
acucugaucugguauugga

SEQ ID NO: 164025 - RNA, 19 nt, Homo sapiens
  misc_RNA (1)...(19): siRNA sense strand
gaagaugaaacaagaacuc

SEQ ID NO: 164026 - RNA, 19 nt, Homo sapiens
  misc_RNA (1)...(19): siRNA sense strand
gaugucaccauuaacgaaa

SEQ ID NO: 164027 - RNA, 19 nt, Homo sapiens
  misc_RNA (1)...(19): siRNA sense strand
gacuaucacuugguauaug

SEQ ID NO: 164028 - RNA, 19 nt, Homo sapiens
  misc_RNA (1)...(19): siRNA sense strand
gcauucagaggaucacuug

SEQ ID NO: 164029 - RNA, 19 nt, Homo sapiens
  misc_RNA (1)...(19): siRNA sense strand
caccaggacucugacugua

SEQ ID NO: 164030 - RNA, 19 nt, Homo sapiens
  misc_RNA (1)...(19): siRNA sense strand
cuugguauaugggcuguua

SEQ ID NO: 164031 - RNA, 19 nt, Homo sapiens
  misc_RNA (1)...(19): siRNA sense strand
gaggcaaauccaaguguuu

SEQ ID NO: 164032 - RNA, 19 nt, Homo sapiens
  misc_RNA (1)...(19): siRNA sense strand
cuaaugaucauguggucua

SEQ ID NO: 164033 - RNA, 19 nt, Homo sapiens
  misc_RNA (1)...(19): siRNA sense strand
gagaaccgcauuaguaagg

SEQ ID NO: 164034 - RNA, 19 nt, Homo sapiens
  misc_RNA (1)...(19): siRNA sense strand
gcaacuauaccugcauguu

SEQ ID NO: 164035 - RNA, 19 nt, Homo sapiens
  misc_RNA (1)...(19): siRNA sense strand
ucaaugacacuggcaacua

SEQ ID NO: 164036 - RNA, 19 nt, Homo sapiens
  misc_RNA (1)...(19): siRNA sense strand
ccucauugccuuaauuuca

SEQ ID NO: 164037 - RNA, 19 nt, Homo sapiens
  misc_RNA (1)...(19): siRNA sense strand
gcauuaguaaggagaaaga

SEQ ID NO: 164038 - RNA, 19 nt, Homo sapiens
  misc_RNA (1)...(19): siRNA sense strand
ugaggcaaauccaaguguu

SEQ ID NO: 164039 - RNA, 19 nt, Homo sapiens
  misc_RNA (1)...(19): siRNA sense strand
aaccgacuaucacuuggua

SEQ ID NO: 164040 - RNA, 19 nt, Homo sapiens
  misc_RNA (1)...(19): siRNA sense strand
cagcuggccuuacucugau

SEQ ID NO: 164041 - RNA, 19 nt, Homo sapiens
  misc_RNA (1)...(19): siRNA sense strand
uauggaauccugcaaagug

SEQ ID NO: 164042 - RNA, 19 nt, Homo sapiens
  misc_RNA (1)...(19): siRNA sense strand
ccaaagcagccaaggugaa

SEQ ID NO: 164043 - RNA, 19 nt, Homo sapiens
  misc_RNA (1)...(19): siRNA sense strand
ccauucagcuggccuuacu

SEQ ID NO: 164044 - RNA, 19 nt, Homo sapiens
  misc_RNA (1)...(19): siRNA sense strand
uagaacagaagaugaaaca

SEQ ID NO: 164045 - RNA, 19 nt, Homo sapiens
  misc_RNA (1)...(19): siRNA sense strand
gauggauucucgcaaugag

SEQ ID NO: 164046 - RNA, 19 nt, Homo sapiens
  misc_RNA (1)...(19): siRNA sense strand
ugaaacucccagugcauaa

SEQ ID NO: 164047 - RNA, 19 nt, Homo sapiens
  misc_RNA (1)...(19): siRNA sense strand
gcgcagcuaugucugucau

SEQ ID NO: 164048 - RNA, 19 nt, Homo sapiens
  misc_RNA (1)...(19): siRNA sense strand
ugaaacaagaacucagauu

SEQ ID NO: 164049 - RNA, 19 nt, Homo sapiens
  misc_RNA (1)...(19): siRNA sense strand
uagugagucucuacuuuua

SEQ ID NO: 164050 - RNA, 19 nt, Homo sapiens
  misc_RNA (1)...(19): siRNA sense strand
caucucaccaggacucuga

SEQ ID NO: 164051 - RNA, 19 nt, Homo sapiens
  misc_RNA (1)...(19): siRNA sense strand
ccgacuaucacuugguaua

SEQ ID NO: 164052 - RNA, 19 nt, Homo sapiens
  misc_RNA (1)...(19): siRNA sense strand
ucagaacgcugcgaugacu

SEQ ID NO: 164053 - RNA, 19 nt, Homo sapiens
  misc_RNA (1)...(19): siRNA sense strand
ccaaguguuugaagaugag

SEQ ID NO: 164054 - RNA, 19 nt, Homo sapiens
  misc_RNA (1)...(19): siRNA sense strand
ucugauggauucucgcaau

SEQ ID NO: 164055 - RNA, 19 nt, Homo sapiens
  misc_RNA (1)...(19): siRNA sense strand
cagaggaucacuuguccaa

SEQ ID NO: 164056 - RNA, 19 nt, Homo sapiens
  misc_RNA (1)...(19): siRNA sense strand
guuaaggaacacuacauau

SEQ ID NO: 164057 - RNA, 19 nt, Homo sapiens
  misc_RNA (1)...(19): siRNA sense strand
aaauccaaguguuugaaga

SEQ ID NO: 164058 - RNA, 19 nt, Homo sapiens
  misc_RNA (1)...(19): siRNA sense strand
ggaauccugcaaagugaug

SEQ ID NO: 164059 - RNA, 19 nt, Homo sapiens
  misc_RNA (1)...(19): siRNA sense strand
gaucucaagcgcagcuaug

SEQ ID NO: 164060 - RNA, 19 nt, Homo sapiens
  misc_RNA (1)...(19): siRNA sense strand
caccauuaacgaaaguaua

SEQ ID NO: 164061 - RNA, 19 nt, Homo sapiens
  misc_RNA (1)...(19): siRNA sense strand
uccaaguguuugaagauga

SEQ ID NO: 164062 - RNA, 19 nt, Homo sapiens
  misc_RNA (1)...(19): siRNA sense strand
uaguagaacagaagaugaa

SEQ ID NO: 164063 - RNA, 19 nt, Homo sapiens
  misc_RNA (1)...(19): siRNA sense strand
cuacagcacagcccauuca

SEQ ID NO: 164064 - RNA, 19 nt, Homo sapiens
  misc_RNA (1)...(19): siRNA sense strand
guagauggauauuuuccuu

SEQ ID NO: 164065 - RNA, 19 nt, Homo sapiens
  misc_RNA (1)...(19): siRNA sense strand
ucacuuguccaaauguaga

SEQ ID NO: 164066 - RNA, 19 nt, Homo sapiens
  misc_RNA (1)...(19): siRNA sense strand
uuacucugaucugguauug

SEQ ID NO: 164067 - RNA, 19 nt, Homo sapiens
  misc_RNA (1)...(19): siRNA sense strand
gguaguaggcucuccaaaa

SEQ ID NO: 164068 - RNA, 19 nt, Homo sapiens
  misc_RNA (1)...(19): siRNA sense strand
cucauugccuuaauuucaa

SEQ ID NO: 164069 - RNA, 19 nt, Homo sapiens
  misc_RNA (1)...(19): siRNA sense strand
auaccugcauguuaaggaa

SEQ ID NO: 164070 - RNA, 19 nt, Homo sapiens
  misc_RNA (1)...(19): siRNA sense strand
cauaguagaacagaagaug

SEQ ID NO: 164071 - RNA, 19 nt, Homo sapiens
  misc_RNA (1)...(19): siRNA sense strand
cacuauugaugucaccauu

SEQ ID NO: 164072 - RNA, 19 nt, Homo sapiens
  misc_RNA (1)...(19): siRNA sense strand
cuagacaccaugaggcaaa

SEQ ID NO: 164073 - RNA, 19 nt, Homo sapiens
  misc_RNA (1)...(19): siRNA sense strand
ggacucugacuguaaaggu

SEQ ID NO: 164074 - RNA, 19 nt, Homo sapiens
  misc_RNA (1)...(19): siRNA sense strand
ccgaagguaugaacuugag

SEQ ID NO: 164075 - RNA, 19 nt, Homo sapiens
  misc_RNA (1)...(19): siRNA sense strand
aauauggcauucagaggau

SEQ ID NO: 164076 - RNA, 19 nt, Homo sapiens
  misc_RNA (1)...(19): siRNA sense strand
agacagcuguuucaauucc

SEQ ID NO: 164077 - RNA, 19 nt, Homo sapiens
  misc_RNA (1)...(19): siRNA sense strand
caaagcagccaaggugaag

SEQ ID NO: 164078 - RNA, 19 nt, Homo sapiens
  misc_RNA (1)...(19): siRNA sense strand
ccucagaacgcugcgauga

SEQ ID NO: 164079 - RNA, 19 nt, Homo sapiens
  misc_RNA (1)...(19): siRNA sense strand
uuaguaaggagaaagaugu

SEQ ID NO: 164080 - RNA, 19 nt, Homo sapiens
  misc_RNA (1)...(19): siRNA sense strand
ccaaauguagauggauauu

SEQ ID NO: 164081 - RNA, 19 nt, Homo sapiens
  misc_RNA (1)...(19): siRNA sense strand
uugaggagccaauuaacuu

SEQ ID NO: 164082 - RNA, 19 nt, Homo sapiens
  misc_RNA (1)...(19): siRNA sense strand
gaguuuccucauugccuua

SEQ ID NO: 164083 - RNA, 19 nt, Homo sapiens
  misc_RNA (1)...(19): siRNA sense strand
cgacuaucacuugguauau

SEQ ID NO: 164084 - RNA, 19 nt, Homo sapiens
  misc_RNA (1)...(19): siRNA sense strand
aggaucacuuguccaaaug

SEQ ID NO: 164085 - RNA, 19 nt, Homo sapiens
  misc_RNA (1)...(19): siRNA sense strand
uaaugaucauguggucuau

SEQ ID NO: 164086 - RNA, 19 nt, Homo sapiens
  misc_RNA (1)...(19): siRNA sense strand
auggaauccugcaaaguga

SEQ ID NO: 164087 - RNA, 19 nt, Homo sapiens
  misc_RNA (1)...(19): siRNA sense strand
aggcgaaguugccaaagca

SEQ ID NO: 164088 - RNA, 19 nt, Homo sapiens
  misc_RNA (1)...(19): siRNA sense strand
cuaugucugucaugcuaga

SEQ ID NO: 164089 - RNA, 19 nt, Homo sapiens
  misc_RNA (1)...(19): siRNA sense strand
ucaccaggacucugacugu

SEQ ID NO: 164090 - RNA, 19 nt, Homo sapiens
  misc_RNA (1)...(19): siRNA sense strand
agcuaugucugucaugcua

SEQ ID NO: 164091 - RNA, 19 nt, Homo sapiens
  misc_RNA (1)...(19): siRNA sense strand
aacaagaacucagauuuug

SEQ ID NO: 164092 - RNA, 19 nt, Homo sapiens
  misc_RNA (1)...(19): siRNA sense strand
gccagaagaucuacaauua

SEQ ID NO: 164093 - RNA, 19 nt, Homo sapiens
  misc_RNA (1)...(19): siRNA sense strand
gagacaaacuucacuuuaa

SEQ ID NO: 164094 - RNA, 19 nt, Homo sapiens
  misc_RNA (1)...(19): siRNA sense strand
ggaacugucuaguaucuua

SEQ ID NO: 164095 - RNA, 19 nt, Homo sapiens
  misc_RNA (1)...(19): siRNA sense strand
gggaaucuguaaagaaaua

SEQ ID NO: 164096 - RNA, 19 nt, Homo sapiens
  misc_RNA (1)...(19): siRNA sense strand
caguaaaucucacaaauga

SEQ ID NO: 164097 - RNA, 19 nt, Homo sapiens
  misc_RNA (1)...(19): siRNA sense strand
ggagugcuguucugcuuua

SEQ ID NO: 164098 - RNA, 19 nt, Homo sapiens
  misc_RNA (1)...(19): siRNA sense strand
ggagcaauauacuaucaua

SEQ ID NO: 164099 - RNA, 19 nt, Homo sapiens
  misc_RNA (1)...(19): siRNA sense strand
aaacacaucuggccuaaug

SEQ ID NO: 164100 - RNA, 19 nt, Homo sapiens
  misc_RNA (1)...(19): siRNA sense strand
caagugggaucaccuauga

SEQ ID NO: 164101 - RNA, 19 nt, Homo sapiens
  misc_RNA (1)...(19): siRNA sense strand
gaucaaauguauucagaug

SEQ ID NO: 164102 - RNA, 19 nt, Homo sapiens
  misc_RNA (1)...(19): siRNA sense strand
ggagacaaacuucacuuua

SEQ ID NO: 164103 - RNA, 19 nt, Homo sapiens
  misc_RNA (1)...(19): siRNA sense strand
aaacgaagcugucuuagag

SEQ ID NO: 164104 - RNA, 19 nt, Homo sapiens
  misc_RNA (1)...(19): siRNA sense strand
gaaggaugguccagaauuc

SEQ ID NO: 164105 - RNA, 19 nt, Homo sapiens
  misc_RNA (1)...(19): siRNA sense strand
gaauauacauuguccucuu

SEQ ID NO: 164106 - RNA, 19 nt, Homo sapiens
  misc_RNA (1)...(19): siRNA sense strand
cagaggaacugucuaguau

SEQ ID NO: 164107 - RNA, 19 nt, Homo sapiens
  misc_RNA (1)...(19): siRNA sense strand
cagaauggauuuaucagaa

SEQ ID NO: 164108 - RNA, 19 nt, Homo sapiens
  misc_RNA (1)...(19): siRNA sense strand
guccagauauuucacauuu

SEQ ID NO: 164109 - RNA, 19 nt, Homo sapiens
  misc_RNA (1)...(19): siRNA sense strand
gaacuuagcagagagcaaa

SEQ ID NO: 164110 - RNA, 19 nt, Homo sapiens
  misc_RNA (1)...(19): siRNA sense strand
gaaaugaaacugcugugaa

SEQ ID NO: 164111 - RNA, 19 nt, Homo sapiens
  misc_RNA (1)...(19): siRNA sense strand
gugcuguucugcuuuaaua

SEQ ID NO: 164112 - RNA, 19 nt, Homo sapiens
  misc_RNA (1)...(19): siRNA sense strand
caaaucagaugcagcuguu

SEQ ID NO: 164113 - RNA, 19 nt, Homo sapiens
  misc_RNA (1)...(19): siRNA sense strand
ggacacagcagugguauug

SEQ ID NO: 164114 - RNA, 19 nt, Homo sapiens
  misc_RNA (1)...(19): siRNA sense strand
gacaguaaaucucacaaau

SEQ ID NO: 164115 - RNA, 19 nt, Homo sapiens
  misc_RNA (1)...(19): siRNA sense strand
cuaauuacauugucuggaa

SEQ ID NO: 164116 - RNA, 19 nt, Homo sapiens
  misc_RNA (1)...(19): siRNA sense strand
gaacugcagucagcaugaa

SEQ ID NO: 164117 - RNA, 19 nt, Homo sapiens
  misc_RNA (1)...(19): siRNA sense strand
uccaagaccuuaaaccuuu

SEQ ID NO: 164118 - RNA, 19 nt, Homo sapiens
  misc_RNA (1)...(19): siRNA sense strand
cagaagaucuacaauuagu

SEQ ID NO: 164119 - RNA, 19 nt, Homo sapiens
  misc_RNA (1)...(19): siRNA sense strand
cagaauauguguuuaggau

SEQ ID NO: 164120 - RNA, 19 nt, Homo sapiens
  misc_RNA (1)...(19): siRNA sense strand
ccaaagaugccucaacuug

SEQ ID NO: 164121 - RNA, 19 nt, Homo sapiens
  misc_RNA (1)...(19): siRNA sense strand
gaaggacacagcaguggua

SEQ ID NO: 164122 - RNA, 19 nt, Homo sapiens
  misc_RNA (1)...(19): siRNA sense strand
caauuucacugauguaagu

SEQ ID NO: 164123 - RNA, 19 nt, Homo sapiens
  misc_RNA (1)...(19): siRNA sense strand
aagggaaucuguaaagaaa

SEQ ID NO: 164124 - RNA, 19 nt, Homo sapiens
  misc_RNA (1)...(19): siRNA sense strand
gggaucaccuaugaagaua

SEQ ID NO: 164125 - RNA, 19 nt, Homo sapiens
  misc_RNA (1)...(19): siRNA sense strand
caaagcaaguuucaucagu

SEQ ID NO: 164126 - RNA, 19 nt, Homo sapiens
  misc_RNA (1)...(19): siRNA sense strand
ggaaggaugguccagaauu

SEQ ID NO: 164127 - RNA, 19 nt, Homo sapiens
  misc_RNA (1)...(19): siRNA sense strand
ccaauccgccacauaauuu

SEQ ID NO: 164128 - RNA, 19 nt, Homo sapiens
  misc_RNA (1)...(19): siRNA sense strand
aaaugaaacugcugugaau

SEQ ID NO: 164129 - RNA, 19 nt, Homo sapiens
  misc_RNA (1)...(19): siRNA sense strand
aaagaugccucaacuugga

SEQ ID NO: 164130 - RNA, 19 nt, Homo sapiens
  misc_RNA (1)...(19): siRNA sense strand
gaccaaagaugccucaacu

SEQ ID NO: 164131 - RNA, 19 nt, Homo sapiens
  misc_RNA (1)...(19): siRNA sense strand
gauccuguauauaaaguga

SEQ ID NO: 164132 - RNA, 19 nt, Homo sapiens
  misc_RNA (1)...(19): siRNA sense strand
aaaguuugcucaaggagaa

SEQ ID NO: 164133 - RNA, 19 nt, Homo sapiens
  misc_RNA (1)...(19): siRNA sense strand
ccacacagaauauacauug

SEQ ID NO: 164134 - RNA, 19 nt, Homo sapiens
  misc_RNA (1)...(19): siRNA sense strand
gaggaacugucuaguaucu

SEQ ID NO: 164135 - RNA, 19 nt, Homo sapiens
  misc_RNA (1)...(19): siRNA sense strand
guagaaagauuugaaacag

SEQ ID NO: 164136 - RNA, 19 nt, Homo sapiens
  misc_RNA (1)...(19): siRNA sense strand
guauucagauggcaauuuc

SEQ ID NO: 164137 - RNA, 19 nt, Homo sapiens
  misc_RNA (1)...(19): siRNA sense strand
ggaccaacccaaguauuaa

SEQ ID NO: 164138 - RNA, 19 nt, Homo sapiens
  misc_RNA (1)...(19): siRNA sense strand
uaauuucacugcaguuugu

SEQ ID NO: 164139 - RNA, 19 nt, Homo sapiens
  misc_RNA (1)...(19): siRNA sense strand
aggaagcccugaauccaua

SEQ ID NO: 164140 - RNA, 19 nt, Homo sapiens
  misc_RNA (1)...(19): siRNA sense strand
ccucaugcacuguugauua

SEQ ID NO: 164141 - RNA, 19 nt, Homo sapiens
  misc_RNA (1)...(19): siRNA sense strand
ggacaaguagaaagauuug

SEQ ID NO: 164142 - RNA, 19 nt, Homo sapiens
  misc_RNA (1)...(19): siRNA sense strand
uaagcgagaccuaauuaaa

SEQ ID NO: 164143 - RNA, 19 nt, Homo sapiens
  misc_RNA (1)...(19): siRNA sense strand
agucgugccuguuugcuua

SEQ ID NO: 164144 - RNA, 19 nt, Homo sapiens
  misc_RNA (1)...(19): siRNA sense strand
guaaaucucacaaaugauc

SEQ ID NO: 164145 - RNA, 19 nt, Homo sapiens
  misc_RNA (1)...(19): siRNA sense strand
cuagauccaugugguuaua

SEQ ID NO: 164146 - RNA, 19 nt, Homo sapiens
  misc_RNA (1)...(19): siRNA sense strand
gaaauagaagcaaaugaca

SEQ ID NO: 164147 - RNA, 19 nt, Homo sapiens
  misc_RNA (1)...(19): siRNA sense strand
ucggacagcuugaacagaa

SEQ ID NO: 164148 - RNA, 19 nt, Homo sapiens
  misc_RNA (1)...(19): siRNA sense strand
gcauggaggcugcgacuga

SEQ ID NO: 164149 - RNA, 19 nt, Homo sapiens
  misc_RNA (1)...(19): siRNA sense strand
ggaaauagaagcaaaugac

SEQ ID NO: 164150 - RNA, 19 nt, Homo sapiens
  misc_RNA (1)...(19): siRNA sense strand
aauaagcgagaccuaauua

SEQ ID NO: 164151 - RNA, 19 nt, Homo sapiens
  misc_RNA (1)...(19): siRNA sense strand
ccaagggaaucuguaaaga

SEQ ID NO: 164152 - RNA, 19 nt, Homo sapiens
  misc_RNA (1)...(19): siRNA sense strand
ccaaguauuaagaguguua

SEQ ID NO: 164153 - RNA, 19 nt, Homo sapiens
  misc_RNA (1)...(19): siRNA sense strand
agugucaccuuuacagaua

SEQ ID NO: 164154 - RNA, 19 nt, Homo sapiens
  misc_RNA (1)...(19): siRNA sense strand
caagggaaucuguaaagaa

SEQ ID NO: 164155 - RNA, 19 nt, Homo sapiens
  misc_RNA (1)...(19): siRNA sense strand
caauauaggaccaaagaug

SEQ ID NO: 164156 - RNA, 19 nt, Homo sapiens
  misc_RNA (1)...(19): siRNA sense strand
ucagcucacuugcaacauu

SEQ ID NO: 164157 - RNA, 19 nt, Homo sapiens
  misc_RNA (1)...(19): siRNA sense strand
gaauguuuauggaaucaca

SEQ ID NO: 164158 - RNA, 19 nt, Homo sapiens
  misc_RNA (1)...(19): siRNA sense strand
ugaauccaguccagauauu

SEQ ID NO: 164159 - RNA, 19 nt, Homo sapiens
  misc_RNA (1)...(19): siRNA sense strand
ucagaggaacugucuagua

SEQ ID NO: 164160 - RNA, 19 nt, Homo sapiens
  misc_RNA (1)...(19): siRNA sense strand
acacacaaguuugcugauu

SEQ ID NO: 164161 - RNA, 19 nt, Homo sapiens
  misc_RNA (1)...(19): siRNA sense strand
ggucaaagcaaguuucauc

SEQ ID NO: 164162 - RNA, 19 nt, Homo sapiens
  misc_RNA (1)...(19): siRNA sense strand
uguaauggaucuuaaagca

SEQ ID NO: 164163 - RNA, 19 nt, Homo sapiens
  misc_RNA (1)...(19): siRNA sense strand
cuaaggagcaauauacuau

SEQ ID NO: 164164 - RNA, 19 nt, Homo sapiens
  misc_RNA (1)...(19): siRNA sense strand
ggaagaaaaugagguguga

SEQ ID NO: 164165 - RNA, 19 nt, Homo sapiens
  misc_RNA (1)...(19): siRNA sense strand
cagaucauauuucacaauc

SEQ ID NO: 164166 - RNA, 19 nt, Homo sapiens
  misc_RNA (1)...(19): siRNA sense strand
gaaaggucaaagcaaguuu

SEQ ID NO: 164167 - RNA, 19 nt, Homo sapiens
  misc_RNA (1)...(19): siRNA sense strand
ggaaaugaaacugcuguga

SEQ ID NO: 164168 - RNA, 19 nt, Homo sapiens
  misc_RNA (1)...(19): siRNA sense strand
gaaaucuuguuggcaaauc

SEQ ID NO: 164169 - RNA, 19 nt, Homo sapiens
  misc_RNA (1)...(19): siRNA sense strand
aagguuacaucagaucaua

SEQ ID NO: 164170 - RNA, 19 nt, Homo sapiens
  misc_RNA (1)...(19): siRNA sense strand
guagauggcggugauggua

SEQ ID NO: 164171 - RNA, 19 nt, Homo sapiens
  misc_RNA (1)...(19): siRNA sense strand
ugaaaucauuggaccuguu

SEQ ID NO: 164172 - RNA, 19 nt, Homo sapiens
  misc_RNA (1)...(19): siRNA sense strand
gauggcaauuucacugaug

SEQ ID NO: 164173 - RNA, 19 nt, Homo sapiens
  misc_RNA (1)...(19): siRNA sense strand
cacacaaguuugcugauug

SEQ ID NO: 164174 - RNA, 19 nt, Homo sapiens
  misc_RNA (1)...(19): siRNA sense strand
gaucauauuucacaauccu

SEQ ID NO: 164175 - RNA, 19 nt, Homo sapiens
  misc_RNA (1)...(19): siRNA sense strand
gaaaucauuggaccuguuc

SEQ ID NO: 164176 - RNA, 19 nt, Homo sapiens
  misc_RNA (1)...(19): siRNA sense strand
uaacaugcuuuggguggaa

SEQ ID NO: 164177 - RNA, 19 nt, Homo sapiens
  misc_RNA (1)...(19): siRNA sense strand
uggaccaacccaaguauua

SEQ ID NO: 164178 - RNA, 19 nt, Homo sapiens
  misc_RNA (1)...(19): siRNA sense strand
gaacugucuaguaucuuaa

SEQ ID NO: 164179 - RNA, 19 nt, Homo sapiens
  misc_RNA (1)...(19): siRNA sense strand
uaacuaucccugccuguga

SEQ ID NO: 164180 - RNA, 19 nt, Homo sapiens
  misc_RNA (1)...(19): siRNA sense strand
gcaucgcaccuauuuaaga

SEQ ID NO: 164181 - RNA, 19 nt, Homo sapiens
  misc_RNA (1)...(19): siRNA sense strand
uaaauauucagcucacuug

SEQ ID NO: 164182 - RNA, 19 nt, Homo sapiens
  misc_RNA (1)...(19): siRNA sense strand
gggacaaguagaaagauuu

SEQ ID NO: 164183 - RNA, 19 nt, Homo sapiens
  misc_RNA (1)...(19): siRNA sense strand
gcaaguuucaucagucaau

SEQ ID NO: 164184 - RNA, 19 nt, Homo sapiens
  misc_RNA (1)...(19): siRNA sense strand
gaccuacuguucggacaaa

SEQ ID NO: 164185 - RNA, 19 nt, Homo sapiens
  misc_RNA (1)...(19): siRNA sense strand
uaaagcacccuguaucaca

SEQ ID NO: 164186 - RNA, 19 nt, Homo sapiens
  misc_RNA (1)...(19): siRNA sense strand
agagggaacuuagcagaga

SEQ ID NO: 164187 - RNA, 19 nt, Homo sapiens
  misc_RNA (1)...(19): siRNA sense strand
gaauccaguccagauauuu

SEQ ID NO: 164188 - RNA, 19 nt, Homo sapiens
  misc_RNA (1)...(19): siRNA sense strand
aggagaaauugaagccaua

SEQ ID NO: 164189 - RNA, 19 nt, Homo sapiens
  misc_RNA (1)...(19): siRNA sense strand
gguccagaauucacuuuua

SEQ ID NO: 164190 - RNA, 19 nt, Homo sapiens
  misc_RNA (1)...(19): siRNA sense strand
ccagauauuucacauuuug

SEQ ID NO: 164191 - RNA, 19 nt, Homo sapiens
  misc_RNA (1)...(19): siRNA sense strand
ggccagaagaucuacaauu

SEQ ID NO: 164192 - RNA, 19 nt, Homo sapiens
  misc_RNA (1)...(19): siRNA sense strand
gagacaaacuucacuuuaa

SEQ ID NO: 164193 - RNA, 19 nt, Homo sapiens
  misc_RNA (1)...(19): siRNA sense strand
ggaacugucuaguaucuua

SEQ ID NO: 164194 - RNA, 19 nt, Homo sapiens
  misc_RNA (1)...(19): siRNA sense strand
ggagcaauauacuaucaua

SEQ ID NO: 164195 - RNA, 19 nt, Homo sapiens
  misc_RNA (1)...(19): siRNA sense strand
caagugggaucaccuauga

SEQ ID NO: 164196 - RNA, 19 nt, Homo sapiens
  misc_RNA (1)...(19): siRNA sense strand
ggagacaaacuucacuuua

SEQ ID NO: 164197 - RNA, 19 nt, Homo sapiens
  misc_RNA (1)...(19): siRNA sense strand
cagaggaacugucuaguau

SEQ ID NO: 164198 - RNA, 19 nt, Homo sapiens
  misc_RNA (1)...(19): siRNA sense strand
cuaauuacauugucuggaa

SEQ ID NO: 164199 - RNA, 19 nt, Homo sapiens
  misc_RNA (1)...(19): siRNA sense strand
uccaagaccuuaaaccuuu

SEQ ID NO: 164200 - RNA, 19 nt, Homo sapiens
  misc_RNA (1)...(19): siRNA sense strand
cagaauauguguuuaggau

SEQ ID NO: 164201 - RNA, 19 nt, Homo sapiens
  misc_RNA (1)...(19): siRNA sense strand
ccaaagaugccucaacuug

SEQ ID NO: 164202 - RNA, 19 nt, Homo sapiens
  misc_RNA (1)...(19): siRNA sense strand
gggaucaccuaugaagaua

SEQ ID NO: 164203 - RNA, 19 nt, Homo sapiens
  misc_RNA (1)...(19): siRNA sense strand
ccaauccgccacauaauuu

SEQ ID NO: 164204 - RNA, 19 nt, Homo sapiens
  misc_RNA (1)...(19): siRNA sense strand
aaagaugccucaacuugga

SEQ ID NO: 164205 - RNA, 19 nt, Homo sapiens
  misc_RNA (1)...(19): siRNA sense strand
gaccaaagaugccucaacu

SEQ ID NO: 164206 - RNA, 19 nt, Homo sapiens
  misc_RNA (1)...(19): siRNA sense strand
gauccuguauauaaaguga

SEQ ID NO: 164207 - RNA, 19 nt, Homo sapiens
  misc_RNA (1)...(19): siRNA sense strand
gaggaacugucuaguaucu

SEQ ID NO: 164208 - RNA, 19 nt, Homo sapiens
  misc_RNA (1)...(19): siRNA sense strand
uaauuucacugcaguuugu

SEQ ID NO: 164209 - RNA, 19 nt, Homo sapiens
  misc_RNA (1)...(19): siRNA sense strand
ggaccaacccaaguauuaa

SEQ ID NO: 164210 - RNA, 19 nt, Homo sapiens
  misc_RNA (1)...(19): siRNA sense strand
ccucaugcacuguugauua

SEQ ID NO: 164211 - RNA, 19 nt, Homo sapiens
  misc_RNA (1)...(19): siRNA sense strand
cuagauccaugugguuaua

SEQ ID NO: 164212 - RNA, 19 nt, Homo sapiens
  misc_RNA (1)...(19): siRNA sense strand
ucggacagcuugaacagaa

SEQ ID NO: 164213 - RNA, 19 nt, Homo sapiens
  misc_RNA (1)...(19): siRNA sense strand
ccaaguauuaagaguguua

SEQ ID NO: 164214 - RNA, 19 nt, Homo sapiens
  misc_RNA (1)...(19): siRNA sense strand
agugucaccuuuacagaua

SEQ ID NO: 164215 - RNA, 19 nt, Homo sapiens
  misc_RNA (1)...(19): siRNA sense strand
caauauaggaccaaagaug

SEQ ID NO: 164216 - RNA, 19 nt, Homo sapiens
  misc_RNA (1)...(19): siRNA sense strand
ucagcucacuugcaacauu

SEQ ID NO: 164217 - RNA, 19 nt, Homo sapiens
  misc_RNA (1)...(19): siRNA sense strand
gaauguuuauggaaucaca

SEQ ID NO: 164218 - RNA, 19 nt, Homo sapiens
  misc_RNA (1)...(19): siRNA sense strand
ucagaggaacugucuagua

SEQ ID NO: 164219 - RNA, 19 nt, Homo sapiens
  misc_RNA (1)...(19): siRNA sense strand
cuaaggagcaauauacuau

SEQ ID NO: 164220 - RNA, 19 nt, Homo sapiens
  misc_RNA (1)...(19): siRNA sense strand
acacacaaguuugcugauu

SEQ ID NO: 164221 - RNA, 19 nt, Homo sapiens
  misc_RNA (1)...(19): siRNA sense strand
ggaagaaaaugagguguga

SEQ ID NO: 164222 - RNA, 19 nt, Homo sapiens
  misc_RNA (1)...(19): siRNA sense strand
aagguuacaucagaucaua

SEQ ID NO: 164223 - RNA, 19 nt, Homo sapiens
  misc_RNA (1)...(19): siRNA sense strand
cacacaaguuugcugauug

SEQ ID NO: 164224 - RNA, 19 nt, Homo sapiens
  misc_RNA (1)...(19): siRNA sense strand
uggaccaacccaaguauua

SEQ ID NO: 164225 - RNA, 19 nt, Homo sapiens
  misc_RNA (1)...(19): siRNA sense strand
gaacugucuaguaucuuaa

SEQ ID NO: 164226 - RNA, 19 nt, Homo sapiens
  misc_RNA (1)...(19): siRNA sense strand
uaaauauucagcucacuug

SEQ ID NO: 164227 - RNA, 19 nt, Homo sapiens
  misc_RNA (1)...(19): siRNA sense strand
aauuugaguugcauuguga

SEQ ID NO: 164228 - RNA, 19 nt, Homo sapiens
  misc_RNA (1)...(19): siRNA sense strand
gcaagugggaucaccuaug

SEQ ID NO: 164229 - RNA, 19 nt, Homo sapiens
  misc_RNA (1)...(19): siRNA sense strand
ugacuggagugaagaagca

SEQ ID NO: 164230 - RNA, 19 nt, Homo sapiens
  misc_RNA (1)...(19): siRNA sense strand
caugcacuguugauuauuc

SEQ ID NO: 164231 - RNA, 19 nt, Homo sapiens
  misc_RNA (1)...(19): siRNA sense strand
caacccaaguauuaagagu

SEQ ID NO: 164232 - RNA, 19 nt, Homo sapiens
  misc_RNA (1)...(19): siRNA sense strand
gaacuucuagauccaugug

SEQ ID NO: 164233 - RNA, 19 nt, Homo sapiens
  misc_RNA (1)...(19): siRNA sense strand
caauccgccacauaauuua

SEQ ID NO: 164234 - RNA, 19 nt, Homo sapiens
  misc_RNA (1)...(19): siRNA sense strand
ugaguugcauugugaacga

SEQ ID NO: 164235 - RNA, 19 nt, Homo sapiens
  misc_RNA (1)...(19): siRNA sense strand
aaggagcaauauacuauca

SEQ ID NO: 164236 - RNA, 19 nt, Homo sapiens
  misc_RNA (1)...(19): siRNA sense strand
uccugaaucuccaguugua

SEQ ID NO: 164237 - RNA, 19 nt, Homo sapiens
  misc_RNA (1)...(19): siRNA sense strand
guaugaaggaagaugguaa

SEQ ID NO: 164238 - RNA, 19 nt, Homo sapiens
  misc_RNA (1)...(19): siRNA sense strand
cagcucacuugcaacauuc

SEQ ID NO: 164239 - RNA, 19 nt, Homo sapiens
  misc_RNA (1)...(19): siRNA sense strand
cucaugcacuguugauuau

SEQ ID NO: 164240 - RNA, 19 nt, Homo sapiens
  misc_RNA (1)...(19): siRNA sense strand
gaagaagcaagugggauca

SEQ ID NO: 164241 - RNA, 19 nt, Homo sapiens
  misc_RNA (1)...(19): siRNA sense strand
ugucaccuuuacagauaua

SEQ ID NO: 164242 - RNA, 19 nt, Homo sapiens
  misc_RNA (1)...(19): siRNA sense strand
ccagauuccuccugaagac

SEQ ID NO: 164243 - RNA, 19 nt, Homo sapiens
  misc_RNA (1)...(19): siRNA sense strand
uugggaagguuacaucaga

SEQ ID NO: 164244 - RNA, 19 nt, Homo sapiens
  misc_RNA (1)...(19): siRNA sense strand
aaauuugaguugcauugug

SEQ ID NO: 164245 - RNA, 19 nt, Homo sapiens
  misc_RNA (1)...(19): siRNA sense strand
cagaauguuuauggaauca

SEQ ID NO: 164246 - RNA, 19 nt, Homo sapiens
  misc_RNA (1)...(19): siRNA sense strand
auauucagcucacuugcaa

SEQ ID NO: 164247 - RNA, 19 nt, Homo sapiens
  misc_RNA (1)...(19): siRNA sense strand
ggaagaugguaagggauac

SEQ ID NO: 164248 - RNA, 19 nt, Homo sapiens
  misc_RNA (1)...(19): siRNA sense strand
caacucagaggaacugucu

SEQ ID NO: 164249 - RNA, 19 nt, Homo sapiens
  misc_RNA (1)...(19): siRNA sense strand
cuugcaacauucuuacauu

SEQ ID NO: 164250 - RNA, 19 nt, Homo sapiens
  misc_RNA (1)...(19): siRNA sense strand
ccuaaggagcaauauacua

SEQ ID NO: 164251 - RNA, 19 nt, Homo sapiens
  misc_RNA (1)...(19): siRNA sense strand
gagccagauuccuccugaa

SEQ ID NO: 164252 - RNA, 19 nt, Homo sapiens
  misc_RNA (1)...(19): siRNA sense strand
acagaauguuuauggaauc

SEQ ID NO: 164253 - RNA, 19 nt, Homo sapiens
  misc_RNA (1)...(19): siRNA sense strand
ggacagcuugaacagaaug

SEQ ID NO: 164254 - RNA, 19 nt, Homo sapiens
  misc_RNA (1)...(19): siRNA sense strand
gcauccagugucaccuuua

SEQ ID NO: 164255 - RNA, 19 nt, Homo sapiens
  misc_RNA (1)...(19): siRNA sense strand
agaacagcauccaguguca

SEQ ID NO: 164256 - RNA, 19 nt, Homo sapiens
  misc_RNA (1)...(19): siRNA sense strand
ccucaccacugaaucuaca

SEQ ID NO: 164257 - RNA, 19 nt, Homo sapiens
  misc_RNA (1)...(19): siRNA sense strand
ggaagguuacaucagauca

SEQ ID NO: 164258 - RNA, 19 nt, Homo sapiens
  misc_RNA (1)...(19): siRNA sense strand
caguuugugugcuaaagga

SEQ ID NO: 164259 - RNA, 19 nt, Homo sapiens
  misc_RNA (1)...(19): siRNA sense strand
gaucaacucagaggaacug

SEQ ID NO: 164260 - RNA, 19 nt, Homo sapiens
  misc_RNA (1)...(19): siRNA sense strand
gaagguuacaucagaucau

SEQ ID NO: 164261 - RNA, 19 nt, Homo sapiens
  misc_RNA (1)...(19): siRNA sense strand
aggaagaugguaagggaua

SEQ ID NO: 164262 - RNA, 19 nt, Homo sapiens
  misc_RNA (1)...(19): siRNA sense strand
cccaauccgccacauaauu

SEQ ID NO: 164263 - RNA, 19 nt, Homo sapiens
  misc_RNA (1)...(19): siRNA sense strand
uggagugacuggagugaag

SEQ ID NO: 164264 - RNA, 19 nt, Homo sapiens
  misc_RNA (1)...(19): siRNA sense strand
uugcaacauucuuacauuc

SEQ ID NO: 164265 - RNA, 19 nt, Homo sapiens
  misc_RNA (1)...(19): siRNA sense strand
guccaagaccuuaaaccuu

SEQ ID NO: 164266 - RNA, 19 nt, Homo sapiens
  misc_RNA (1)...(19): siRNA sense strand
cacccgaucuucauucacu

SEQ ID NO: 164267 - RNA, 19 nt, Homo sapiens
  misc_RNA (1)...(19): siRNA sense strand
acacaaguuugcugauugc

SEQ ID NO: 164268 - RNA, 19 nt, Homo sapiens
  misc_RNA (1)...(19): siRNA sense strand
ggaaucacaauaauuucag

SEQ ID NO: 164269 - RNA, 19 nt, Homo sapiens
  misc_RNA (1)...(19): siRNA sense strand
gcacuguugauuauucuac

SEQ ID NO: 164270 - RNA, 19 nt, Homo sapiens
  misc_RNA (1)...(19): siRNA sense strand
guugauuauucuacugugu

SEQ ID NO: 164271 - RNA, 19 nt, Homo sapiens
  misc_RNA (1)...(19): siRNA sense strand
acccaaguauuaagagugu

SEQ ID NO: 164272 - RNA, 19 nt, Homo sapiens
  misc_RNA (1)...(19): siRNA sense strand
cacugaaucuacaggugaa

SEQ ID NO: 164273 - RNA, 19 nt, Homo sapiens
  misc_RNA (1)...(19): siRNA sense strand
acauggaccaacccaagua

SEQ ID NO: 164274 - RNA, 19 nt, Homo sapiens
  misc_RNA (1)...(19): siRNA sense strand
cauccagugucaccuuuac

SEQ ID NO: 164275 - RNA, 19 nt, Homo sapiens
  misc_RNA (1)...(19): siRNA sense strand
gguuacaucagaucauauc

SEQ ID NO: 164276 - RNA, 19 nt, Homo sapiens
  misc_RNA (1)...(19): siRNA sense strand
gaccaacccaaguauuaag

SEQ ID NO: 164277 - RNA, 19 nt, Homo sapiens
  misc_RNA (1)...(19): siRNA sense strand
gaaugggcaacacacaagu

SEQ ID NO: 164278 - RNA, 19 nt, Homo sapiens
  misc_RNA (1)...(19): siRNA sense strand
ggaccaaagaugccucaac

SEQ ID NO: 164279 - RNA, 19 nt, Homo sapiens
  misc_RNA (1)...(19): siRNA sense strand
gauccaugugguuauauca

SEQ ID NO: 164280 - RNA, 19 nt, Homo sapiens
  misc_RNA (1)...(19): siRNA sense strand
gaaucuacaggugaacuuc

SEQ ID NO: 164281 - RNA, 19 nt, Homo sapiens
  misc_RNA (1)...(19): siRNA sense strand
uggagacaaacuucacuuu

SEQ ID NO: 164282 - RNA, 19 nt, Homo sapiens
  misc_RNA (1)...(19): siRNA sense strand
ugggaucaccuaugaagau

SEQ ID NO: 164283 - RNA, 19 nt, Homo sapiens
  misc_RNA (1)...(19): siRNA sense strand
aguccugaaucuccaguug

SEQ ID NO: 164284 - RNA, 19 nt, Homo sapiens
  misc_RNA (1)...(19): siRNA sense strand
cacugcaguuugugugcua

SEQ ID NO: 164285 - RNA, 19 nt, Homo sapiens
  misc_RNA (1)...(19): siRNA sense strand
uuuaggauucgcuguauga

SEQ ID NO: 164286 - RNA, 19 nt, Homo sapiens
  misc_RNA (1)...(19): siRNA sense strand
guguuuaggauucgcugua

SEQ ID NO: 164287 - RNA, 19 nt, Homo sapiens
  misc_RNA (1)...(19): siRNA sense strand
ugaaugggcaacacacaag

SEQ ID NO: 164288 - RNA, 19 nt, Homo sapiens
  misc_RNA (1)...(19): siRNA sense strand
ggagugacuggagugaaga

SEQ ID NO: 164289 - RNA, 19 nt, Homo sapiens
  misc_RNA (1)...(19): siRNA sense strand
gccagauuccuccugaaga

SEQ ID NO: 164290 - RNA, 19 nt, Homo sapiens
  misc_RNA (1)...(19): siRNA sense strand
ucacuguccaagaccuuaa

SEQ ID NO: 164291 - RNA, 19 nt, Homo sapiens
  misc_RNA (1)...(19): siRNA sense strand
cuaauuucacugcaguuug

SEQ ID NO: 164292 - RNA, 19 nt, Homo sapiens
  misc_RNA (1)...(19): siRNA sense strand
gaaaguggcuaugcucaaa

SEQ ID NO: 164293 - RNA, 19 nt, Homo sapiens
  misc_RNA (1)...(19): siRNA sense strand
ggaaggagccaaugacuuu

SEQ ID NO: 164294 - RNA, 19 nt, Homo sapiens
  misc_RNA (1)...(19): siRNA sense strand
gagaugaaguggaagguuu

SEQ ID NO: 164295 - RNA, 19 nt, Homo sapiens
  misc_RNA (1)...(19): siRNA sense strand
ggaaaaggaugaaaacaaa

SEQ ID NO: 164296 - RNA, 19 nt, Homo sapiens
  misc_RNA (1)...(19): siRNA sense strand
ucaccaaucuggaauuuga

SEQ ID NO: 164297 - RNA, 19 nt, Homo sapiens
  misc_RNA (1)...(19): siRNA sense strand
gagguaaagugccugaauu

SEQ ID NO: 164298 - RNA, 19 nt, Homo sapiens
  misc_RNA (1)...(19): siRNA sense strand
caucuuggccuguguguua

SEQ ID NO: 164299 - RNA, 19 nt, Homo sapiens
  misc_RNA (1)...(19): siRNA sense strand
ggaaagagcaauauaugug

SEQ ID NO: 164300 - RNA, 19 nt, Homo sapiens
  misc_RNA (1)...(19): siRNA sense strand
gcagcaauguaugagauua

SEQ ID NO: 164301 - RNA, 19 nt, Homo sapiens
  misc_RNA (1)...(19): siRNA sense strand
gaacuccagagaucaauaa

SEQ ID NO: 164302 - RNA, 19 nt, Homo sapiens
  misc_RNA (1)...(19): siRNA sense strand
ggacgcaugugaauuuauc

SEQ ID NO: 164303 - RNA, 19 nt, Homo sapiens
  misc_RNA (1)...(19): siRNA sense strand
gggaucaaaucaagaagaa

SEQ ID NO: 164304 - RNA, 19 nt, Homo sapiens
  misc_RNA (1)...(19): siRNA sense strand
gauccuaucuuacuaacca

SEQ ID NO: 164305 - RNA, 19 nt, Homo sapiens
  misc_RNA (1)...(19): siRNA sense strand
ggauuaagccuaucguaug

SEQ ID NO: 164306 - RNA, 19 nt, Homo sapiens
  misc_RNA (1)...(19): siRNA sense strand
caauauaugugugaagguu

SEQ ID NO: 164307 - RNA, 19 nt, Homo sapiens
  misc_RNA (1)...(19): siRNA sense strand
gaaugggccucauguguac

SEQ ID NO: 164308 - RNA, 19 nt, Homo sapiens
  misc_RNA (1)...(19): siRNA sense strand
caacaucaccaaucuggaa

SEQ ID NO: 164309 - RNA, 19 nt, Homo sapiens
  misc_RNA (1)...(19): siRNA sense strand
gauggauccuaucuuacua

SEQ ID NO: 164310 - RNA, 19 nt, Homo sapiens
  misc_RNA (1)...(19): siRNA sense strand
gaaagagcaauauaugugu

SEQ ID NO: 164311 - RNA, 19 nt, Homo sapiens
  misc_RNA (1)...(19): siRNA sense strand
caucaccaaucuggaauuu

SEQ ID NO: 164312 - RNA, 19 nt, Homo sapiens
  misc_RNA (1)...(19): siRNA sense strand
ggaaacuacaagagauaua

SEQ ID NO: 164313 - RNA, 19 nt, Homo sapiens
  misc_RNA (1)...(19): siRNA sense strand
ugacacuccugcagagaaa

SEQ ID NO: 164314 - RNA, 19 nt, Homo sapiens
  misc_RNA (1)...(19): siRNA sense strand
uuacuaaccaucagcauuu

SEQ ID NO: 164315 - RNA, 19 nt, Homo sapiens
  misc_RNA (1)...(19): siRNA sense strand
cuccagagaucaauaauag

SEQ ID NO: 164316 - RNA, 19 nt, Homo sapiens
  misc_RNA (1)...(19): siRNA sense strand
gauuaagccuaucguaugg

SEQ ID NO: 164317 - RNA, 19 nt, Homo sapiens
  misc_RNA (1)...(19): siRNA sense strand
augcagaacuggaugacua

SEQ ID NO: 164318 - RNA, 19 nt, Homo sapiens
  misc_RNA (1)...(19): siRNA sense strand
gaauuuauccagcacaaag

SEQ ID NO: 164319 - RNA, 19 nt, Homo sapiens
  misc_RNA (1)...(19): siRNA sense strand
uaagaagacucuggaacau

SEQ ID NO: 164320 - RNA, 19 nt, Homo sapiens
  misc_RNA (1)...(19): siRNA sense strand
cuucagaacuccagagauc

SEQ ID NO: 164321 - RNA, 19 nt, Homo sapiens
  misc_RNA (1)...(19): siRNA sense strand
ucaggaaacuacaagagau

SEQ ID NO: 164322 - RNA, 19 nt, Homo sapiens
  misc_RNA (1)...(19): siRNA sense strand
agaaugggccucaugugua

SEQ ID NO: 164323 - RNA, 19 nt, Homo sapiens
  misc_RNA (1)...(19): siRNA sense strand
gcaagaaugggccucaugu

SEQ ID NO: 164324 - RNA, 19 nt, Homo sapiens
  misc_RNA (1)...(19): siRNA sense strand
caaauggacgcaugugaau

SEQ ID NO: 164325 - RNA, 19 nt, Homo sapiens
  misc_RNA (1)...(19): siRNA sense strand
caaaucaagaagaagcaua

SEQ ID NO: 164326 - RNA, 19 nt, Homo sapiens
  misc_RNA (1)...(19): siRNA sense strand
agaagacucuggaacaucu

SEQ ID NO: 164327 - RNA, 19 nt, Homo sapiens
  misc_RNA (1)...(19): siRNA sense strand
aaucuggaauccugacauu

SEQ ID NO: 164328 - RNA, 19 nt, Homo sapiens
  misc_RNA (1)...(19): siRNA sense strand
agaacuggaugacuacuca

SEQ ID NO: 164329 - RNA, 19 nt, Homo sapiens
  misc_RNA (1)...(19): siRNA sense strand
ggucagcccauucuuacuu

SEQ ID NO: 164330 - RNA, 19 nt, Homo sapiens
  misc_RNA (1)...(19): siRNA sense strand
ggagguaaagugccugaau

SEQ ID NO: 164331 - RNA, 19 nt, Homo sapiens
  misc_RNA (1)...(19): siRNA sense strand
caagaagaagcauauguca

SEQ ID NO: 164332 - RNA, 19 nt, Homo sapiens
  misc_RNA (1)...(19): siRNA sense strand
gcagggagaguggcaagaa

SEQ ID NO: 164333 - RNA, 19 nt, Homo sapiens
  misc_RNA (1)...(19): siRNA sense strand
aauggacgcaugugaauuu

SEQ ID NO: 164334 - RNA, 19 nt, Homo sapiens
  misc_RNA (1)...(19): siRNA sense strand
ggugacauuuaauacauca

SEQ ID NO: 164335 - RNA, 19 nt, Homo sapiens
  misc_RNA (1)...(19): siRNA sense strand
guggugacauuuaauacau

SEQ ID NO: 164336 - RNA, 19 nt, Homo sapiens
  misc_RNA (1)...(19): siRNA sense strand
ugaccugagugucgucuau

SEQ ID NO: 164337 - RNA, 19 nt, Homo sapiens
  misc_RNA (1)...(19): siRNA sense strand
caggaaacuacaagagaua

SEQ ID NO: 164338 - RNA, 19 nt, Homo sapiens
  misc_RNA (1)...(19): siRNA sense strand
ggaagaugcagaacuggau

SEQ ID NO: 164339 - RNA, 19 nt, Homo sapiens
  misc_RNA (1)...(19): siRNA sense strand
ggaugacauucaagcuaga

SEQ ID NO: 164340 - RNA, 19 nt, Homo sapiens
  misc_RNA (1)...(19): siRNA sense strand
ggaaugucagugcauguga

SEQ ID NO: 164341 - RNA, 19 nt, Homo sapiens
  misc_RNA (1)...(19): siRNA sense strand
aagcauaugucaccauguc

SEQ ID NO: 164342 - RNA, 19 nt, Homo sapiens
  misc_RNA (1)...(19): siRNA sense strand
cagggucagcccauucuua

SEQ ID NO: 164343 - RNA, 19 nt, Homo sapiens
  misc_RNA (1)...(19): siRNA sense strand
acaaauggacgcaugugaa

SEQ ID NO: 164344 - RNA, 19 nt, Homo sapiens
  misc_RNA (1)...(19): siRNA sense strand
gugaauuuauccagcacaa

SEQ ID NO: 164345 - RNA, 19 nt, Homo sapiens
  misc_RNA (1)...(19): siRNA sense strand
gaauggaucgcagcacuca

SEQ ID NO: 164346 - RNA, 19 nt, Homo sapiens
  misc_RNA (1)...(19): siRNA sense strand
agaccuaaccacuauaguu

SEQ ID NO: 164347 - RNA, 19 nt, Homo sapiens
  misc_RNA (1)...(19): siRNA sense strand
cggcagcaauguaugagau

SEQ ID NO: 164348 - RNA, 19 nt, Homo sapiens
  misc_RNA (1)...(19): siRNA sense strand
uaggguggaugacauucaa

SEQ ID NO: 164349 - RNA, 19 nt, Homo sapiens
  misc_RNA (1)...(19): siRNA sense strand
cagcaauguaugagauuaa

SEQ ID NO: 164350 - RNA, 19 nt, Homo sapiens
  misc_RNA (1)...(19): siRNA sense strand
gacuuuguggugacauuua

SEQ ID NO: 164351 - RNA, 19 nt, Homo sapiens
  misc_RNA (1)...(19): siRNA sense strand
ucuggaauccugacauuga

SEQ ID NO: 164352 - RNA, 19 nt, Homo sapiens
  misc_RNA (1)...(19): siRNA sense strand
uuaaaggcuucuggaguga

SEQ ID NO: 164353 - RNA, 19 nt, Homo sapiens
  misc_RNA (1)...(19): siRNA sense strand
caacugcccaucugaggau

SEQ ID NO: 164354 - RNA, 19 nt, Homo sapiens
  misc_RNA (1)...(19): siRNA sense strand
caacuagaagaaucugaga

SEQ ID NO: 164355 - RNA, 19 nt, Homo sapiens
  misc_RNA (1)...(19): siRNA sense strand
uaauacaucacacuugcaa

SEQ ID NO: 164356 - RNA, 19 nt, Homo sapiens
  misc_RNA (1)...(19): siRNA sense strand
gagauucaucccucacaug

SEQ ID NO: 164357 - RNA, 19 nt, Homo sapiens
  misc_RNA (1)...(19): siRNA sense strand
ucaucgagacaaagaaauu

SEQ ID NO: 164358 - RNA, 19 nt, Homo sapiens
  misc_RNA (1)...(19): siRNA sense strand
ucaagaagaagcauauguc

SEQ ID NO: 164359 - RNA, 19 nt, Homo sapiens
  misc_RNA (1)...(19): siRNA sense strand
guggaugacauucaagcua

SEQ ID NO: 164360 - RNA, 19 nt, Homo sapiens
  misc_RNA (1)...(19): siRNA sense strand
ucacugaccugugcuuuug

SEQ ID NO: 164361 - RNA, 19 nt, Homo sapiens
  misc_RNA (1)...(19): siRNA sense strand
gggaaggagccaaugacuu

SEQ ID NO: 164362 - RNA, 19 nt, Homo sapiens
  misc_RNA (1)...(19): siRNA sense strand
cuuggaagaugcagaacug

SEQ ID NO: 164363 - RNA, 19 nt, Homo sapiens
  misc_RNA (1)...(19): siRNA sense strand
cagggagaguggcaagaau

SEQ ID NO: 164364 - RNA, 19 nt, Homo sapiens
  misc_RNA (1)...(19): siRNA sense strand
aaaggcuucuggagugaau

SEQ ID NO: 164365 - RNA, 19 nt, Homo sapiens
  misc_RNA (1)...(19): siRNA sense strand
gaaauucuuacugauugga

SEQ ID NO: 164366 - RNA, 19 nt, Homo sapiens
  misc_RNA (1)...(19): siRNA sense strand
gguaaagugccugaauuuc

SEQ ID NO: 164367 - RNA, 19 nt, Homo sapiens
  misc_RNA (1)...(19): siRNA sense strand
auaagaagacucuggaaca

SEQ ID NO: 164368 - RNA, 19 nt, Homo sapiens
  misc_RNA (1)...(19): siRNA sense strand
gaaggagccaaugacuuug

SEQ ID NO: 164369 - RNA, 19 nt, Homo sapiens
  misc_RNA (1)...(19): siRNA sense strand
auccaucccugaucacuau

SEQ ID NO: 164370 - RNA, 19 nt, Homo sapiens
  misc_RNA (1)...(19): siRNA sense strand
cuggaauccugacauugaa

SEQ ID NO: 164371 - RNA, 19 nt, Homo sapiens
  misc_RNA (1)...(19): siRNA sense strand
caucacacuugcaaaagaa

SEQ ID NO: 164372 - RNA, 19 nt, Homo sapiens
  misc_RNA (1)...(19): siRNA sense strand
aagaaugggccucaugugu

SEQ ID NO: 164373 - RNA, 19 nt, Homo sapiens
  misc_RNA (1)...(19): siRNA sense strand
agcuagagaugaaguggaa

SEQ ID NO: 164374 - RNA, 19 nt, Homo sapiens
  misc_RNA (1)...(19): siRNA sense strand
gagauuaaaguucgaucca

SEQ ID NO: 164375 - RNA, 19 nt, Homo sapiens
  misc_RNA (1)...(19): siRNA sense strand
ccaaccggcagcaauguau

SEQ ID NO: 164376 - RNA, 19 nt, Homo sapiens
  misc_RNA (1)...(19): siRNA sense strand
gcuccaaccggcagcaaug

SEQ ID NO: 164377 - RNA, 19 nt, Homo sapiens
  misc_RNA (1)...(19): siRNA sense strand
agacuuggaagaugcagaa

SEQ ID NO: 164378 - RNA, 19 nt, Homo sapiens
  misc_RNA (1)...(19): siRNA sense strand
ucagaacuccagagaucaa

SEQ ID NO: 164379 - RNA, 19 nt, Homo sapiens
  misc_RNA (1)...(19): siRNA sense strand
ccuauucucuccucuucca

SEQ ID NO: 164380 - RNA, 19 nt, Homo sapiens
  misc_RNA (1)...(19): siRNA sense strand
uagaagaaucugagaagca

SEQ ID NO: 164381 - RNA, 19 nt, Homo sapiens
  misc_RNA (1)...(19): siRNA sense strand
gacauucaagcuagagaug

SEQ ID NO: 164382 - RNA, 19 nt, Homo sapiens
  misc_RNA (1)...(19): siRNA sense strand
aaaauagaccuaaccacua

SEQ ID NO: 164383 - RNA, 19 nt, Homo sapiens
  misc_RNA (1)...(19): siRNA sense strand
ccagagaucaauaauagcu

SEQ ID NO: 164384 - RNA, 19 nt, Homo sapiens
  misc_RNA (1)...(19): siRNA sense strand
gcuauagccaguuggaagu

SEQ ID NO: 164385 - RNA, 19 nt, Homo sapiens
  misc_RNA (1)...(19): siRNA sense strand
acuuuguggugacauuuaa

SEQ ID NO: 164386 - RNA, 19 nt, Homo sapiens
  misc_RNA (1)...(19): siRNA sense strand
uauagccaguuggaaguga

SEQ ID NO: 164387 - RNA, 19 nt, Homo sapiens
  misc_RNA (1)...(19): siRNA sense strand
aauggagacuuggaagaug

SEQ ID NO: 164388 - RNA, 19 nt, Homo sapiens
  misc_RNA (1)...(19): siRNA sense strand
cugcuuagccuugggacua

SEQ ID NO: 164389 - RNA, 19 nt, Homo sapiens
  misc_RNA (1)...(19): siRNA sense strand
acaauucuagguacaacuu

SEQ ID NO: 164390 - RNA, 19 nt, Homo sapiens
  misc_RNA (1)...(19): siRNA sense strand
caagaaugggccucaugug

SEQ ID NO: 164391 - RNA, 19 nt, Homo sapiens
  misc_RNA (1)...(19): siRNA sense strand
gaagguuuucugcaagaua

SEQ ID NO: 164392 - RNA, 19 nt, Homo sapiens
  misc_RNA (1)...(19): siRNA sense strand
gcuaugagcuggccuucaa

SEQ ID NO: 164393 - RNA, 19 nt, Homo sapiens
  misc_RNA (1)...(19): siRNA sense strand
gcacagggaucacauuguc

SEQ ID NO: 164394 - RNA, 19 nt, Homo sapiens
  misc_RNA (1)...(19): siRNA sense strand
ccacugcacugcucacuug

SEQ ID NO: 164395 - RNA, 19 nt, Homo sapiens
  misc_RNA (1)...(19): siRNA sense strand
ugaccuggcuuauacuuga

SEQ ID NO: 164396 - RNA, 19 nt, Homo sapiens
  misc_RNA (1)...(19): siRNA sense strand
ggacaagggccaaggucua

SEQ ID NO: 164397 - RNA, 19 nt, Homo sapiens
  misc_RNA (1)...(19): siRNA sense strand
cgaccuaccuccuguucaa

SEQ ID NO: 164398 - RNA, 19 nt, Homo sapiens
  misc_RNA (1)...(19): siRNA sense strand
gcauguugcucccuucugu

SEQ ID NO: 164399 - RNA, 19 nt, Homo sapiens
  misc_RNA (1)...(19): siRNA sense strand
ugaccacacuucucagcua

SEQ ID NO: 164400 - RNA, 19 nt, Homo sapiens
  misc_RNA (1)...(19): siRNA sense strand
ccacacuucucagcuauga

SEQ ID NO: 164401 - RNA, 19 nt, Homo sapiens
  misc_RNA (1)...(19): siRNA sense strand
gagcuggacccuggcuuua

SEQ ID NO: 164402 - RNA, 19 nt, Homo sapiens
  misc_RNA (1)...(19): siRNA sense strand
ccaacaacauucucaggau

SEQ ID NO: 164403 - RNA, 19 nt, Homo sapiens
  misc_RNA (1)...(19): siRNA sense strand
ccaaugaccacacuucuca

SEQ ID NO: 164404 - RNA, 19 nt, Homo sapiens
  misc_RNA (1)...(19): siRNA sense strand
ucaccugccucaccaacaa

SEQ ID NO: 164405 - RNA, 19 nt, Homo sapiens
  misc_RNA (1)...(19): siRNA sense strand
gaccacacuucucagcuau

SEQ ID NO: 164406 - RNA, 19 nt, Homo sapiens
  misc_RNA (1)...(19): siRNA sense strand
ccuguggccuuucuuguga

SEQ ID NO: 164407 - RNA, 19 nt, Homo sapiens
  misc_RNA (1)...(19): siRNA sense strand
ucucagcccucccaggaaa

SEQ ID NO: 164408 - RNA, 19 nt, Homo sapiens
  misc_RNA (1)...(19): siRNA sense strand
gcuccuggcggcacacaua

SEQ ID NO: 164409 - RNA, 19 nt, Homo sapiens
  misc_RNA (1)...(19): siRNA sense strand
uacagacgcuugccuaucu

SEQ ID NO: 164410 - RNA, 19 nt, Homo sapiens
  misc_RNA (1)...(19): siRNA sense strand
gcuggacccuggcuuuauc

SEQ ID NO: 164411 - RNA, 19 nt, Homo sapiens
  misc_RNA (1)...(19): siRNA sense strand
gcuggaccuuggagaguga

SEQ ID NO: 164412 - RNA, 19 nt, Homo sapiens
  misc_RNA (1)...(19): siRNA sense strand
gagacaaggcccucugauc

SEQ ID NO: 164413 - RNA, 19 nt, Homo sapiens
  misc_RNA (1)...(19): siRNA sense strand
ggagccagccugugugcuu

SEQ ID NO: 164414 - RNA, 19 nt, Homo sapiens
  misc_RNA (1)...(19): siRNA sense strand
acuggaggaugauguggua

SEQ ID NO: 164415 - RNA, 19 nt, Homo sapiens
  misc_RNA (1)...(19): siRNA sense strand
gaccuggcuuauacuugaa

SEQ ID NO: 164416 - RNA, 19 nt, Homo sapiens
  misc_RNA (1)...(19): siRNA sense strand
acaauuucaccaucacuuu

SEQ ID NO: 164417 - RNA, 19 nt, Homo sapiens
  misc_RNA (1)...(19): siRNA sense strand
uggccacacuggaggauga

SEQ ID NO: 164418 - RNA, 19 nt, Homo sapiens
  misc_RNA (1)...(19): siRNA sense strand
ggaggaugaugugguagag

SEQ ID NO: 164419 - RNA, 19 nt, Homo sapiens
  misc_RNA (1)...(19): siRNA sense strand
gaguggagccagccugugu

SEQ ID NO: 164420 - RNA, 19 nt, Homo sapiens
  misc_RNA (1)...(19): siRNA sense strand
ggaccuccagggcauguug

SEQ ID NO: 164421 - RNA, 19 nt, Homo sapiens
  misc_RNA (1)...(19): siRNA sense strand
caagggccaaggucuagaa

SEQ ID NO: 164422 - RNA, 19 nt, Homo sapiens
  misc_RNA (1)...(19): siRNA sense strand
cgugccaucugacaauuuc

SEQ ID NO: 164423 - RNA, 19 nt, Homo sapiens
  misc_RNA (1)...(19): siRNA sense strand
cagcacagggaucacauug

SEQ ID NO: 164424 - RNA, 19 nt, Homo sapiens
  misc_RNA (1)...(19): siRNA sense strand
gagccaaugaccacacuuc

SEQ ID NO: 164425 - RNA, 19 nt, Homo sapiens
  misc_RNA (1)...(19): siRNA sense strand
gcucgugccaucugacaau

SEQ ID NO: 164426 - RNA, 19 nt, Homo sapiens
  misc_RNA (1)...(19): siRNA sense strand
gacaauuucaccaucacuu

SEQ ID NO: 164427 - RNA, 19 nt, Homo sapiens
  misc_RNA (1)...(19): siRNA sense strand
gaaggacaagggccaaggu

SEQ ID NO: 164428 - RNA, 19 nt, Homo sapiens
  misc_RNA (1)...(19): siRNA sense strand
ggagacccagcaaggaguu

SEQ ID NO: 164429 - RNA, 19 nt, Homo sapiens
  misc_RNA (1)...(19): siRNA sense strand
guacagacgcuugccuauc

SEQ ID NO: 164430 - RNA, 19 nt, Homo sapiens
  misc_RNA (1)...(19): siRNA sense strand
ucugacaauuucaccauca

SEQ ID NO: 164431 - RNA, 19 nt, Homo sapiens
  misc_RNA (1)...(19): siRNA sense strand
gacaagggccaaggucuag

SEQ ID NO: 164432 - RNA, 19 nt, Homo sapiens
  misc_RNA (1)...(19): siRNA sense strand
caauuucaccaucacuuuc

SEQ ID NO: 164433 - RNA, 19 nt, Homo sapiens
  misc_RNA (1)...(19): siRNA sense strand
ggggugaccuggcuuauac

SEQ ID NO: 164434 - RNA, 19 nt, Homo sapiens
  misc_RNA (1)...(19): siRNA sense strand
gcagugcucgugccaucug

SEQ ID NO: 164435 - RNA, 19 nt, Homo sapiens
  misc_RNA (1)...(19): siRNA sense strand
gcgcguccuuggaaaucug

SEQ ID NO: 164436 - RNA, 19 nt, Homo sapiens
  misc_RNA (1)...(19): siRNA sense strand
gcaucaguccugccuugga

SEQ ID NO: 164437 - RNA, 19 nt, Homo sapiens
  misc_RNA (1)...(19): siRNA sense strand
ugagcuggacccuggcuuu

SEQ ID NO: 164438 - RNA, 19 nt, Homo sapiens
  misc_RNA (1)...(19): siRNA sense strand
auccugaccuggagcauca

SEQ ID NO: 164439 - RNA, 19 nt, Homo sapiens
  misc_RNA (1)...(19): siRNA sense strand
gguacagacgcuugccuau

SEQ ID NO: 164440 - RNA, 19 nt, Homo sapiens
  misc_RNA (1)...(19): siRNA sense strand
gcuaugagcuggccuucaa

SEQ ID NO: 164441 - RNA, 19 nt, Homo sapiens
  misc_RNA (1)...(19): siRNA sense strand
gcacagggaucacauuguc

SEQ ID NO: 164442 - RNA, 19 nt, Homo sapiens
  misc_RNA (1)...(19): siRNA sense strand
ugaccuggcuuauacuuga

SEQ ID NO: 164443 - RNA, 19 nt, Homo sapiens
  misc_RNA (1)...(19): siRNA sense strand
ggacaagggccaaggucua

SEQ ID NO: 164444 - RNA, 19 nt, Homo sapiens
  misc_RNA (1)...(19): siRNA sense strand
cgaccuaccuccuguucaa

SEQ ID NO: 164445 - RNA, 19 nt, Homo sapiens
  misc_RNA (1)...(19): siRNA sense strand
ugaccacacuucucagcua

SEQ ID NO: 164446 - RNA, 19 nt, Homo sapiens
  misc_RNA (1)...(19): siRNA sense strand
ccacacuucucagcuauga

SEQ ID NO: 164447 - RNA, 19 nt, Homo sapiens
  misc_RNA (1)...(19): siRNA sense strand
gagcuggacccuggcuuua

SEQ ID NO: 164448 - RNA, 19 nt, Homo sapiens
  misc_RNA (1)...(19): siRNA sense strand
ccaacaacauucucaggau

SEQ ID NO: 164449 - RNA, 19 nt, Homo sapiens
  misc_RNA (1)...(19): siRNA sense strand
ccaaugaccacacuucuca

SEQ ID NO: 164450 - RNA, 19 nt, Homo sapiens
  misc_RNA (1)...(19): siRNA sense strand
ucaccugccucaccaacaa

SEQ ID NO: 164451 - RNA, 19 nt, Homo sapiens
  misc_RNA (1)...(19): siRNA sense strand
gaccacacuucucagcuau

SEQ ID NO: 164452 - RNA, 19 nt, Homo sapiens
  misc_RNA (1)...(19): siRNA sense strand
gcuccuggcggcacacaua

SEQ ID NO: 164453 - RNA, 19 nt, Homo sapiens
  misc_RNA (1)...(19): siRNA sense strand
gcuggacccuggcuuuauc

SEQ ID NO: 164454 - RNA, 19 nt, Homo sapiens
  misc_RNA (1)...(19): siRNA sense strand
gcuggaccuuggagaguga

SEQ ID NO: 164455 - RNA, 19 nt, Homo sapiens
  misc_RNA (1)...(19): siRNA sense strand
gagacaaggcccucugauc

SEQ ID NO: 164456 - RNA, 19 nt, Homo sapiens
  misc_RNA (1)...(19): siRNA sense strand
ggagccagccugugugcuu

SEQ ID NO: 164457 - RNA, 19 nt, Homo sapiens
  misc_RNA (1)...(19): siRNA sense strand
acuggaggaugauguggua

SEQ ID NO: 164458 - RNA, 19 nt, Homo sapiens
  misc_RNA (1)...(19): siRNA sense strand
gaccuggcuuauacuugaa

SEQ ID NO: 164459 - RNA, 19 nt, Homo sapiens
  misc_RNA (1)...(19): siRNA sense strand
acaauuucaccaucacuuu

SEQ ID NO: 164460 - RNA, 19 nt, Homo sapiens
  misc_RNA (1)...(19): siRNA sense strand
uggccacacuggaggauga

SEQ ID NO: 164461 - RNA, 19 nt, Homo sapiens
  misc_RNA (1)...(19): siRNA sense strand
ggaggaugaugugguagag

SEQ ID NO: 164462 - RNA, 19 nt, Homo sapiens
  misc_RNA (1)...(19): siRNA sense strand
gaguggagccagccugugu

SEQ ID NO: 164463 - RNA, 19 nt, Homo sapiens
  misc_RNA (1)...(19): siRNA sense strand
caagggccaaggucuagaa

SEQ ID NO: 164464 - RNA, 19 nt, Homo sapiens
  misc_RNA (1)...(19): siRNA sense strand
cgugccaucugacaauuuc

SEQ ID NO: 164465 - RNA, 19 nt, Homo sapiens
  misc_RNA (1)...(19): siRNA sense strand
cagcacagggaucacauug

SEQ ID NO: 164466 - RNA, 19 nt, Homo sapiens
  misc_RNA (1)...(19): siRNA sense strand
gagccaaugaccacacuuc

SEQ ID NO: 164467 - RNA, 19 nt, Homo sapiens
  misc_RNA (1)...(19): siRNA sense strand
gcucgugccaucugacaau

SEQ ID NO: 164468 - RNA, 19 nt, Homo sapiens
  misc_RNA (1)...(19): siRNA sense strand
gacaauuucaccaucacuu

SEQ ID NO: 164469 - RNA, 19 nt, Homo sapiens
  misc_RNA (1)...(19): siRNA sense strand
gaaggacaagggccaaggu

SEQ ID NO: 164470 - RNA, 19 nt, Homo sapiens
  misc_RNA (1)...(19): siRNA sense strand
ucugacaauuucaccauca

SEQ ID NO: 164471 - RNA, 19 nt, Homo sapiens
  misc_RNA (1)...(19): siRNA sense strand
gacaagggccaaggucuag

SEQ ID NO: 164472 - RNA, 19 nt, Homo sapiens
  misc_RNA (1)...(19): siRNA sense strand
caauuucaccaucacuuuc

SEQ ID NO: 164473 - RNA, 19 nt, Homo sapiens
  misc_RNA (1)...(19): siRNA sense strand
ggggugaccuggcuuauac

SEQ ID NO: 164474 - RNA, 19 nt, Homo sapiens
  misc_RNA (1)...(19): siRNA sense strand
gcagugcucgugccaucug

SEQ ID NO: 164475 - RNA, 19 nt, Homo sapiens
  misc_RNA (1)...(19): siRNA sense strand
gcaucaguccugccuugga

SEQ ID NO: 164476 - RNA, 19 nt, Homo sapiens
  misc_RNA (1)...(19): siRNA sense strand
ugagcuggacccuggcuuu

SEQ ID NO: 164477 - RNA, 19 nt, Homo sapiens
  misc_RNA (1)...(19): siRNA sense strand
auccugaccuggagcauca

SEQ ID NO: 164478 - RNA, 19 nt, Homo sapiens
  misc_RNA (1)...(19): siRNA sense strand
ggauggagguuacucuuuc

SEQ ID NO: 164479 - RNA, 19 nt, Homo sapiens
  misc_RNA (1)...(19): siRNA sense strand
gcacagcagccuccaauag

SEQ ID NO: 164480 - RNA, 19 nt, Homo sapiens
  misc_RNA (1)...(19): siRNA sense strand
ggagguuacucuuucaagu

SEQ ID NO: 164481 - RNA, 19 nt, Homo sapiens
  misc_RNA (1)...(19): siRNA sense strand
gauggagguuacucuuuca

SEQ ID NO: 164482 - RNA, 19 nt, Homo sapiens
  misc_RNA (1)...(19): siRNA sense strand
ccaguuucaucuuccacua

SEQ ID NO: 164483 - RNA, 19 nt, Homo sapiens
  misc_RNA (1)...(19): siRNA sense strand
gaguagcacugaacaucuc

SEQ ID NO: 164484 - RNA, 19 nt, Homo sapiens
  misc_RNA (1)...(19): siRNA sense strand
ugagggcccuguucuugga

SEQ ID NO: 164485 - RNA, 19 nt, Homo sapiens
  misc_RNA (1)...(19): siRNA sense strand
gcaccuacugcucuucuug

SEQ ID NO: 164486 - RNA, 19 nt, Homo sapiens
  misc_RNA (1)...(19): siRNA sense strand
ggugagggcccuguucuug

SEQ ID NO: 164487 - RNA, 19 nt, Homo sapiens
  misc_RNA (1)...(19): siRNA sense strand
gggcacagcagccuccaau

SEQ ID NO: 164488 - RNA, 19 nt, Homo sapiens
  misc_RNA (1)...(19): siRNA sense strand
ggccaccucugcucucucu

SEQ ID NO: 164489 - RNA, 19 nt, Homo sapiens
  misc_RNA (1)...(19): siRNA sense strand
uggcugugcccaugucuuu

SEQ ID NO: 164490 - RNA, 19 nt, Homo sapiens
  misc_RNA (1)...(19): siRNA sense strand
cguguacccucccaguuuc

SEQ ID NO: 164491 - RNA, 19 nt, Homo sapiens
  misc_RNA (1)...(19): siRNA sense strand
cagaguagcacugaacauc

SEQ ID NO: 164492 - RNA, 19 nt, Homo sapiens
  misc_RNA (1)...(19): siRNA sense strand
ccacagaguagcacugaac

SEQ ID NO: 164493 - RNA, 19 nt, Homo sapiens
  misc_RNA (1)...(19): siRNA sense strand
ucguguacccucccaguuu

SEQ ID NO: 164494 - RNA, 19 nt, Homo sapiens
  misc_RNA (1)...(19): siRNA sense strand
caacugccacagaguagca

SEQ ID NO: 164495 - RNA, 19 nt, Homo sapiens
  misc_RNA (1)...(19): siRNA sense strand
cggauggagguuacucuuu

SEQ ID NO: 164496 - RNA, 19 nt, Homo sapiens
  misc_RNA (1)...(19): siRNA sense strand
cuacugucauggugguugu

SEQ ID NO: 164497 - RNA, 19 nt, Homo sapiens
  misc_RNA (1)...(19): siRNA sense strand
gggaacgguggaucgugua

SEQ ID NO: 164498 - RNA, 19 nt, Homo sapiens
  misc_RNA (1)...(19): siRNA sense strand
gggcugcacaucccaccaa

SEQ ID NO: 164499 - RNA, 19 nt, Homo sapiens
  misc_RNA (1)...(19): siRNA sense strand
cagcccagcccuacuccuu

SEQ ID NO: 164500 - RNA, 19 nt, Homo sapiens
  misc_RNA (1)...(19): siRNA sense strand
caaggugagggcccuguuc

SEQ ID NO: 164501 - RNA, 19 nt, Homo sapiens
  misc_RNA (1)...(19): siRNA sense strand
ggcugcacaucccaccaaa

SEQ ID NO: 164502 - RNA, 19 nt, Homo sapiens
  misc_RNA (1)...(19): siRNA sense strand
gcacagaccuuuccucaug

SEQ ID NO: 164503 - RNA, 19 nt, Homo sapiens
  misc_RNA (1)...(19): siRNA sense strand
gaacggguauguggagaua

SEQ ID NO: 164504 - RNA, 19 nt, Homo sapiens
  misc_RNA (1)...(19): siRNA sense strand
ggagaggagugaacuguug

SEQ ID NO: 164505 - RNA, 19 nt, Homo sapiens
  misc_RNA (1)...(19): siRNA sense strand
gcaagaagaagaagaaaga

SEQ ID NO: 164506 - RNA, 19 nt, Homo sapiens
  misc_RNA (1)...(19): siRNA sense strand
ggagauagaggaugacauu

SEQ ID NO: 164507 - RNA, 19 nt, Homo sapiens
  misc_RNA (1)...(19): siRNA sense strand
gagcagaccucggagauca

SEQ ID NO: 164508 - RNA, 19 nt, Homo sapiens
  misc_RNA (1)...(19): siRNA sense strand
gauagaggaugacauugga

SEQ ID NO: 164509 - RNA, 19 nt, Homo sapiens
  misc_RNA (1)...(19): siRNA sense strand
caacagucaucaaccacua

SEQ ID NO: 164510 - RNA, 19 nt, Homo sapiens
  misc_RNA (1)...(19): siRNA sense strand
caacaucugcuguaagaaa

SEQ ID NO: 164511 - RNA, 19 nt, Homo sapiens
  misc_RNA (1)...(19): siRNA sense strand
gcagaaaugaaugaacuua

SEQ ID NO: 164512 - RNA, 19 nt, Homo sapiens
  misc_RNA (1)...(19): siRNA sense strand
uaaacaugcugcacuugaa

SEQ ID NO: 164513 - RNA, 19 nt, Homo sapiens
  misc_RNA (1)...(19): siRNA sense strand
gucaacaucugcuguaaga

SEQ ID NO: 164514 - RNA, 19 nt, Homo sapiens
  misc_RNA (1)...(19): siRNA sense strand
ggaaggagggcagaaauga

SEQ ID NO: 164515 - RNA, 19 nt, Homo sapiens
  misc_RNA (1)...(19): siRNA sense strand
gaacuguugcucucugaaa

SEQ ID NO: 164516 - RNA, 19 nt, Homo sapiens
  misc_RNA (1)...(19): siRNA sense strand
gggcagaaaugaaugaacu

SEQ ID NO: 164517 - RNA, 19 nt, Homo sapiens
  misc_RNA (1)...(19): siRNA sense strand
ccucggagaucaucacguu

SEQ ID NO: 164518 - RNA, 19 nt, Homo sapiens
  misc_RNA (1)...(19): siRNA sense strand
aaacaguucuuugucaguu

SEQ ID NO: 164519 - RNA, 19 nt, Homo sapiens
  misc_RNA (1)...(19): siRNA sense strand
gaaggagggcagaaaugaa

SEQ ID NO: 164520 - RNA, 19 nt, Homo sapiens
  misc_RNA (1)...(19): siRNA sense strand
gcugagaggauuucuguug

SEQ ID NO: 164521 - RNA, 19 nt, Homo sapiens
  misc_RNA (1)...(19): siRNA sense strand
caaaggauguacccaacuc

SEQ ID NO: 164522 - RNA, 19 nt, Homo sapiens
  misc_RNA (1)...(19): siRNA sense strand
guacuaugaugauggucaa

SEQ ID NO: 164523 - RNA, 19 nt, Homo sapiens
  misc_RNA (1)...(19): siRNA sense strand
gaaaugaaugaacuuaugg

SEQ ID NO: 164524 - RNA, 19 nt, Homo sapiens
  misc_RNA (1)...(19): siRNA sense strand
ggaagaggccgaggaagug

SEQ ID NO: 164525 - RNA, 19 nt, Homo sapiens
  misc_RNA (1)...(19): siRNA sense strand
ggauuucuguuggcaaguu

SEQ ID NO: 164526 - RNA, 19 nt, Homo sapiens
  misc_RNA (1)...(19): siRNA sense strand
gaucagaaagcuucaugug

SEQ ID NO: 164527 - RNA, 19 nt, Homo sapiens
  misc_RNA (1)...(19): siRNA sense strand
agaagaagaagaaagaaga

SEQ ID NO: 164528 - RNA, 19 nt, Homo sapiens
  misc_RNA (1)...(19): siRNA sense strand
ggugagugcccgagccaua

SEQ ID NO: 164529 - RNA, 19 nt, Homo sapiens
  misc_RNA (1)...(19): siRNA sense strand
ucaaggacaucggcuggaa

SEQ ID NO: 164530 - RNA, 19 nt, Homo sapiens
  misc_RNA (1)...(19): siRNA sense strand
gggaagaggccgaggaagu

SEQ ID NO: 164531 - RNA, 19 nt, Homo sapiens
  misc_RNA (1)...(19): siRNA sense strand
ggcaggagcagaugaggaa

SEQ ID NO: 164532 - RNA, 19 nt, Homo sapiens
  misc_RNA (1)...(19): siRNA sense strand
ggucaaaacaucaucaaaa

SEQ ID NO: 164533 - RNA, 19 nt, Homo sapiens
  misc_RNA (1)...(19): siRNA sense strand
ggagggcagaaaugaauga

SEQ ID NO: 164534 - RNA, 19 nt, Homo sapiens
  misc_RNA (1)...(19): siRNA sense strand
gacaucggcuggaaugacu

SEQ ID NO: 164535 - RNA, 19 nt, Homo sapiens
  misc_RNA (1)...(19): siRNA sense strand
caacaggaccaggaccaaa

SEQ ID NO: 164536 - RNA, 19 nt, Homo sapiens
  misc_RNA (1)...(19): siRNA sense strand
gaagaagaagaaagaagag

SEQ ID NO: 164537 - RNA, 19 nt, Homo sapiens
  misc_RNA (1)...(19): siRNA sense strand
ccgaggaagugggcuuaaa

SEQ ID NO: 164538 - RNA, 19 nt, Homo sapiens
  misc_RNA (1)...(19): siRNA sense strand
gaaacaguucuuugucagu

SEQ ID NO: 164539 - RNA, 19 nt, Homo sapiens
  misc_RNA (1)...(19): siRNA sense strand
gaagagcaccuggcauguc

SEQ ID NO: 164540 - RNA, 19 nt, Homo sapiens
  misc_RNA (1)...(19): siRNA sense strand
gugaacuguugcucucuga

SEQ ID NO: 164541 - RNA, 19 nt, Homo sapiens
  misc_RNA (1)...(19): siRNA sense strand
caagagcucccuggacguu

SEQ ID NO: 164542 - RNA, 19 nt, Homo sapiens
  misc_RNA (1)...(19): siRNA sense strand
ccaggaagacgcugcacuu

SEQ ID NO: 164543 - RNA, 19 nt, Homo sapiens
  misc_RNA (1)...(19): siRNA sense strand
ucacuguccuuccacucaa

SEQ ID NO: 164544 - RNA, 19 nt, Homo sapiens
  misc_RNA (1)...(19): siRNA sense strand
uggcaugucuucccugucu

SEQ ID NO: 164545 - RNA, 19 nt, Homo sapiens
  misc_RNA (1)...(19): siRNA sense strand
acgcugcacuucgagauuu

SEQ ID NO: 164546 - RNA, 19 nt, Homo sapiens
  misc_RNA (1)...(19): siRNA sense strand
gaagaagagacccgauguc

SEQ ID NO: 164547 - RNA, 19 nt, Homo sapiens
  misc_RNA (1)...(19): siRNA sense strand
uuaaacaugcugcacuuga

SEQ ID NO: 164548 - RNA, 19 nt, Homo sapiens
  misc_RNA (1)...(19): siRNA sense strand
guaguagacgcucggaaga

SEQ ID NO: 164549 - RNA, 19 nt, Homo sapiens
  misc_RNA (1)...(19): siRNA sense strand
gaagggcggaggugaaggu

SEQ ID NO: 164550 - RNA, 19 nt, Homo sapiens
  misc_RNA (1)...(19): siRNA sense strand
aaagaagggcggaggugaa

SEQ ID NO: 164551 - RNA, 19 nt, Homo sapiens
  misc_RNA (1)...(19): siRNA sense strand
gaggaugacauuggaagga

SEQ ID NO: 164552 - RNA, 19 nt, Homo sapiens
  misc_RNA (1)...(19): siRNA sense strand
gaagcacauuuuaaacaug

SEQ ID NO: 164553 - RNA, 19 nt, Homo sapiens
  misc_RNA (1)...(19): siRNA sense strand
caucacguuugccgaguca

SEQ ID NO: 164554 - RNA, 19 nt, Homo sapiens
  misc_RNA (1)...(19): siRNA sense strand
gauuucuguuggcaaguug

SEQ ID NO: 164555 - RNA, 19 nt, Homo sapiens
  misc_RNA (1)...(19): siRNA sense strand
ggauuauagugaggaguuc

SEQ ID NO: 164556 - RNA, 19 nt, Homo sapiens
  misc_RNA (1)...(19): siRNA sense strand
gguggagcgugcagaaguc

SEQ ID NO: 164557 - RNA, 19 nt, Homo sapiens
  misc_RNA (1)...(19): siRNA sense strand
aaaaggacauucagaacau

SEQ ID NO: 164558 - RNA, 19 nt, Homo sapiens
  misc_RNA (1)...(19): siRNA sense strand
uguccauguuguacuauga

SEQ ID NO: 164559 - RNA, 19 nt, Homo sapiens
  misc_RNA (1)...(19): siRNA sense strand
augcugcacuugaagaaga

SEQ ID NO: 164560 - RNA, 19 nt, Homo sapiens
  misc_RNA (1)...(19): siRNA sense strand
caagaagaagaagaaagaa

SEQ ID NO: 164561 - RNA, 19 nt, Homo sapiens
  misc_RNA (1)...(19): siRNA sense strand
aagagcaccuggcaugucu

SEQ ID NO: 164562 - RNA, 19 nt, Homo sapiens
  misc_RNA (1)...(19): siRNA sense strand
ggaagagcaccuggcaugu

SEQ ID NO: 164563 - RNA, 19 nt, Homo sapiens
  misc_RNA (1)...(19): siRNA sense strand
ugaagaagagacccgaugu

SEQ ID NO: 164564 - RNA, 19 nt, Homo sapiens
  misc_RNA (1)...(19): siRNA sense strand
ugagugcccgagccauaua

SEQ ID NO: 164565 - RNA, 19 nt, Homo sapiens
  misc_RNA (1)...(19): siRNA sense strand
aagucuggcucuuccuaaa

SEQ ID NO: 164566 - RNA, 19 nt, Homo sapiens
  misc_RNA (1)...(19): siRNA sense strand
acggguauguggagauaga

SEQ ID NO: 164567 - RNA, 19 nt, Homo sapiens
  misc_RNA (1)...(19): siRNA sense strand
gguggaggccgucaagaag

SEQ ID NO: 164568 - RNA, 19 nt, Homo sapiens
  misc_RNA (1)...(19): siRNA sense strand
gcuaucaugccaacuacug

SEQ ID NO: 164569 - RNA, 19 nt, Homo sapiens
  misc_RNA (1)...(19): siRNA sense strand
aagaagagacccgauguca

SEQ ID NO: 164570 - RNA, 19 nt, Homo sapiens
  misc_RNA (1)...(19): siRNA sense strand
ggacauucagaacaugauc

SEQ ID NO: 164571 - RNA, 19 nt, Homo sapiens
  misc_RNA (1)...(19): siRNA sense strand
aaaggacauucagaacaug

SEQ ID NO: 164572 - RNA, 19 nt, Homo sapiens
  misc_RNA (1)...(19): siRNA sense strand
gguccucacuguccuucca

SEQ ID NO: 164573 - RNA, 19 nt, Homo sapiens
  misc_RNA (1)...(19): siRNA sense strand
gagcaccuggcaugucuuc

SEQ ID NO: 164574 - RNA, 19 nt, Homo sapiens
  misc_RNA (1)...(19): siRNA sense strand
gggagaggagugaacuguu

SEQ ID NO: 164575 - RNA, 19 nt, Homo sapiens
  misc_RNA (1)...(19): siRNA sense strand
ggacaucggcuggaaugac

SEQ ID NO: 164576 - RNA, 19 nt, Homo sapiens
  misc_RNA (1)...(19): siRNA sense strand
acaguucuuugucaguuuc

SEQ ID NO: 164577 - RNA, 19 nt, Homo sapiens
  misc_RNA (1)...(19): siRNA sense strand
gaguggcgccagcuugguu

SEQ ID NO: 164578 - RNA, 19 nt, Homo sapiens
  misc_RNA (1)...(19): siRNA sense strand
aaggagggcagaaaugaau

SEQ ID NO: 164579 - RNA, 19 nt, Homo sapiens
  misc_RNA (1)...(19): siRNA sense strand
ggagugugggugcucauag

SEQ ID NO: 164580 - RNA, 19 nt, Homo sapiens
  misc_RNA (1)...(19): siRNA sense strand
gaacgcgaucagaaagcuu

SEQ ID NO: 164581 - RNA, 19 nt, Homo sapiens
  misc_RNA (1)...(19): siRNA sense strand
aacaguucuuugucaguuu

SEQ ID NO: 164582 - RNA, 19 nt, Homo sapiens
  misc_RNA (1)...(19): siRNA sense strand
gcgaucagaaagcuucaug

SEQ ID NO: 164583 - RNA, 19 nt, Homo sapiens
  misc_RNA (1)...(19): siRNA sense strand
cgaggaagugggcuuaaag

SEQ ID NO: 164584 - RNA, 19 nt, Homo sapiens
  misc_RNA (1)...(19): siRNA sense strand
ucggagaucaucacguuug

SEQ ID NO: 164585 - RNA, 19 nt, Homo sapiens
  misc_RNA (1)...(19): siRNA sense strand
guuguacuaugaugauggu

SEQ ID NO: 164586 - RNA, 19 nt, Homo sapiens
  misc_RNA (1)...(19): siRNA sense strand
ucaggaacagccaggaaga

SEQ ID NO: 164587 - RNA, 19 nt, Homo sapiens
  misc_RNA (1)...(19): siRNA sense strand
ccacucaacagucaucaac

SEQ ID NO: 164588 - RNA, 19 nt, Homo sapiens
  misc_RNA (1)...(19): siRNA sense strand
gagcagaugaggaaaagga

SEQ ID NO: 164589 - RNA, 19 nt, Homo sapiens
  misc_RNA (1)...(19): siRNA sense strand
gaggaagugggcuuaaagg

SEQ ID NO: 164590 - RNA, 19 nt, Homo sapiens
  misc_RNA (1)...(19): siRNA sense strand
acucaacagucaucaacca

SEQ ID NO: 164591 - RNA, 19 nt, Homo sapiens
  misc_RNA (1)...(19): siRNA sense strand
gagauagaggaugacauug

SEQ ID NO: 164592 - RNA, 19 nt, Homo sapiens
  misc_RNA (1)...(19): siRNA sense strand
uggcugagaggauuucugu

SEQ ID NO: 164593 - RNA, 19 nt, Homo sapiens
  misc_RNA (1)...(19): siRNA sense strand
uggauuauagugaggaguu

SEQ ID NO: 164594 - RNA, 19 nt, Homo sapiens
  misc_RNA (1)...(19): siRNA sense strand
gggcaagaagaagaagaaa

SEQ ID NO: 164595 - RNA, 19 nt, Homo sapiens
  misc_RNA (1)...(19): siRNA sense strand
acuucgagauuuccaagga

SEQ ID NO: 164596 - RNA, 19 nt, Homo sapiens
  misc_RNA (1)...(19): siRNA sense strand
ggcaacaguucuucauuga

SEQ ID NO: 164597 - RNA, 19 nt, Homo sapiens
  misc_RNA (1)...(19): siRNA sense strand
caacaguucuucauugacu

SEQ ID NO: 164598 - RNA, 19 nt, Homo sapiens
  misc_RNA (1)...(19): siRNA sense strand
uggcauaccuucccacuca

SEQ ID NO: 164599 - RNA, 19 nt, Homo sapiens
  misc_RNA (1)...(19): siRNA sense strand
ggacgugcccaacaugauu

SEQ ID NO: 164600 - RNA, 19 nt, Homo sapiens
  misc_RNA (1)...(19): siRNA sense strand
gguggaacaugguggagaa

SEQ ID NO: 164601 - RNA, 19 nt, Homo sapiens
  misc_RNA (1)...(19): siRNA sense strand
ggaacaugguggagaagag

SEQ ID NO: 164602 - RNA, 19 nt, Homo sapiens
  misc_RNA (1)...(19): siRNA sense strand
aggcaacaguucuucauug

SEQ ID NO: 164603 - RNA, 19 nt, Homo sapiens
  misc_RNA (1)...(19): siRNA sense strand
ggaaggugcgggucaaagu

SEQ ID NO: 164604 - RNA, 19 nt, Homo sapiens
  misc_RNA (1)...(19): siRNA sense strand
ggugaacuccugcugcauu

SEQ ID NO: 164605 - RNA, 19 nt, Homo sapiens
  misc_RNA (1)...(19): siRNA sense strand
ccaccaagcugagcaccau

SEQ ID NO: 164606 - RNA, 19 nt, Homo sapiens
  misc_RNA (1)...(19): siRNA sense strand
gcaaccagaaccuguuugu

SEQ ID NO: 164607 - RNA, 19 nt, Homo sapiens
  misc_RNA (1)...(19): siRNA sense strand
gaaggugcgggucaaagug

SEQ ID NO: 164608 - RNA, 19 nt, Homo sapiens
  misc_RNA (1)...(19): siRNA sense strand
uggaacgacuggaucauag

SEQ ID NO: 164609 - RNA, 19 nt, Homo sapiens
  misc_RNA (1)...(19): siRNA sense strand
gccuguggcuuuaccugaa

SEQ ID NO: 164610 - RNA, 19 nt, Homo sapiens
  misc_RNA (1)...(19): siRNA sense strand
gugaacuccugcugcauuc

SEQ ID NO: 164611 - RNA, 19 nt, Homo sapiens
  misc_RNA (1)...(19): siRNA sense strand
caacgaaggcaaccagaac

SEQ ID NO: 164612 - RNA, 19 nt, Homo sapiens
  misc_RNA (1)...(19): siRNA sense strand
gaacgacuggaucauagca

SEQ ID NO: 164613 - RNA, 19 nt, Homo sapiens
  misc_RNA (1)...(19): siRNA sense strand
caaccuagacgugcagugu

SEQ ID NO: 164614 - RNA, 19 nt, Homo sapiens
  misc_RNA (1)...(19): siRNA sense strand
ccuguggcuuuaccugaaa

SEQ ID NO: 164615 - RNA, 19 nt, Homo sapiens
  misc_RNA (1)...(19): siRNA sense strand
gugaagcggcacaucuuga

SEQ ID NO: 164616 - RNA, 19 nt, Homo sapiens
  misc_RNA (1)...(19): siRNA sense strand
gcaggcaacaguucuucau

SEQ ID NO: 164617 - RNA, 19 nt, Homo sapiens
  misc_RNA (1)...(19): siRNA sense strand
cgacagcaggcaccgcauu

SEQ ID NO: 164618 - RNA, 19 nt, Homo sapiens
  misc_RNA (1)...(19): siRNA sense strand
ccaacgaaggcaaccagaa

SEQ ID NO: 164619 - RNA, 19 nt, Homo sapiens
  misc_RNA (1)...(19): siRNA sense strand
ggugaagcggcacaucuug

SEQ ID NO: 164620 - RNA, 19 nt, Homo sapiens
  misc_RNA (1)...(19): siRNA sense strand
ugaaacuccugcccuacgu

SEQ ID NO: 164621 - RNA, 19 nt, Homo sapiens
  misc_RNA (1)...(19): siRNA sense strand
ccauccaggccuuguuuga

SEQ ID NO: 164622 - RNA, 19 nt, Homo sapiens
  misc_RNA (1)...(19): siRNA sense strand
cuacuacggcaacuacugu

SEQ ID NO: 164623 - RNA, 19 nt, Homo sapiens
  misc_RNA (1)...(19): siRNA sense strand
gacagcaggcaccgcauuc

SEQ ID NO: 164624 - RNA, 19 nt, Homo sapiens
  misc_RNA (1)...(19): siRNA sense strand
accuagacgugcaguguga

SEQ ID NO: 164625 - RNA, 19 nt, Homo sapiens
  misc_RNA (1)...(19): siRNA sense strand
gacgugcccaacaugauug

SEQ ID NO: 164626 - RNA, 19 nt, Homo sapiens
  misc_RNA (1)...(19): siRNA sense strand
cuggaacgacuggaucaua

SEQ ID NO: 164627 - RNA, 19 nt, Homo sapiens
  misc_RNA (1)...(19): siRNA sense strand
caggcaacaguucuucauu

SEQ ID NO: 164628 - RNA, 19 nt, Homo sapiens
  misc_RNA (1)...(19): siRNA sense strand
gguagcaucugaagcauua

SEQ ID NO: 164629 - RNA, 19 nt, Homo sapiens
  misc_RNA (1)...(19): siRNA sense strand
ccaaugaguuuacuaauga

SEQ ID NO: 164630 - RNA, 19 nt, Homo sapiens
  misc_RNA (1)...(19): siRNA sense strand
gcaaaguccucaaugguaa

SEQ ID NO: 164631 - RNA, 19 nt, Homo sapiens
  misc_RNA (1)...(19): siRNA sense strand
gaaagaaugcuuagaaaga

SEQ ID NO: 164632 - RNA, 19 nt, Homo sapiens
  misc_RNA (1)...(19): siRNA sense strand
uaucaaagcugcauuguca

SEQ ID NO: 164633 - RNA, 19 nt, Homo sapiens
  misc_RNA (1)...(19): siRNA sense strand
ggaagcggcuggagacauu

SEQ ID NO: 164634 - RNA, 19 nt, Homo sapiens
  misc_RNA (1)...(19): siRNA sense strand
cagcagagcuucuuagcaa

SEQ ID NO: 164635 - RNA, 19 nt, Homo sapiens
  misc_RNA (1)...(19): siRNA sense strand
ugagaaggcugcuaacauu

SEQ ID NO: 164636 - RNA, 19 nt, Homo sapiens
  misc_RNA (1)...(19): siRNA sense strand
gaagauaccacauucaaau

SEQ ID NO: 164637 - RNA, 19 nt, Homo sapiens
  misc_RNA (1)...(19): siRNA sense strand
uauaagagccuauguguug

SEQ ID NO: 164638 - RNA, 19 nt, Homo sapiens
  misc_RNA (1)...(19): siRNA sense strand
guaacaagguagcaucuga

SEQ ID NO: 164639 - RNA, 19 nt, Homo sapiens
  misc_RNA (1)...(19): siRNA sense strand
agaaagaaauccagaaaca

SEQ ID NO: 164640 - RNA, 19 nt, Homo sapiens
  misc_RNA (1)...(19): siRNA sense strand
gaacaagaaguuugcaguu

SEQ ID NO: 164641 - RNA, 19 nt, Homo sapiens
  misc_RNA (1)...(19): siRNA sense strand
guguggagaucgcauauuu

SEQ ID NO: 164642 - RNA, 19 nt, Homo sapiens
  misc_RNA (1)...(19): siRNA sense strand
ggagaagaauccaaugagu

SEQ ID NO: 164643 - RNA, 19 nt, Homo sapiens
  misc_RNA (1)...(19): siRNA sense strand
gaauauggagaacaaguuu

SEQ ID NO: 164644 - RNA, 19 nt, Homo sapiens
  misc_RNA (1)...(19): siRNA sense strand
ggaaaggacagugcuauug

SEQ ID NO: 164645 - RNA, 19 nt, Homo sapiens
  misc_RNA (1)...(19): siRNA sense strand
acaagaaguuugcaguuga

SEQ ID NO: 164646 - RNA, 19 nt, Homo sapiens
  misc_RNA (1)...(19): siRNA sense strand
gaaacagcagagcuucuua

SEQ ID NO: 164647 - RNA, 19 nt, Homo sapiens
  misc_RNA (1)...(19): siRNA sense strand
caacaagggaggacucauu

SEQ ID NO: 164648 - RNA, 19 nt, Homo sapiens
  misc_RNA (1)...(19): siRNA sense strand
caacaugcauucacuacag

SEQ ID NO: 164649 - RNA, 19 nt, Homo sapiens
  misc_RNA (1)...(19): siRNA sense strand
ucaagacucuggcugaugu

SEQ ID NO: 164650 - RNA, 19 nt, Homo sapiens
  misc_RNA (1)...(19): siRNA sense strand
ggaagaaacagcagagcuu

SEQ ID NO: 164651 - RNA, 19 nt, Homo sapiens
  misc_RNA (1)...(19): siRNA sense strand
agaagaauccaaugaguuu

SEQ ID NO: 164652 - RNA, 19 nt, Homo sapiens
  misc_RNA (1)...(19): siRNA sense strand
gagaagaauccaaugaguu

SEQ ID NO: 164653 - RNA, 19 nt, Homo sapiens
  misc_RNA (1)...(19): siRNA sense strand
gggaauaguagacuugaaa

SEQ ID NO: 164654 - RNA, 19 nt, Homo sapiens
  misc_RNA (1)...(19): siRNA sense strand
gagccuauguguuguccaa

SEQ ID NO: 164655 - RNA, 19 nt, Homo sapiens
  misc_RNA (1)...(19): siRNA sense strand
gaagaauccaaugaguuua

SEQ ID NO: 164656 - RNA, 19 nt, Homo sapiens
  misc_RNA (1)...(19): siRNA sense strand
ggaccaacaugcauucacu

SEQ ID NO: 164657 - RNA, 19 nt, Homo sapiens
  misc_RNA (1)...(19): siRNA sense strand
gaaaggacagugcuauugg

SEQ ID NO: 164658 - RNA, 19 nt, Homo sapiens
  misc_RNA (1)...(19): siRNA sense strand
caagguagcaucugaagca

SEQ ID NO: 164659 - RNA, 19 nt, Homo sapiens
  misc_RNA (1)...(19): siRNA sense strand
gaaaagaacaagaaguuug

SEQ ID NO: 164660 - RNA, 19 nt, Homo sapiens
  misc_RNA (1)...(19): siRNA sense strand
ccucaaugguaacaaggua

SEQ ID NO: 164661 - RNA, 19 nt, Homo sapiens
  misc_RNA (1)...(19): siRNA sense strand
agggaggacucauugcaua

SEQ ID NO: 164662 - RNA, 19 nt, Homo sapiens
  misc_RNA (1)...(19): siRNA sense strand
agaagaaacggcagugaaa

SEQ ID NO: 164663 - RNA, 19 nt, Homo sapiens
  misc_RNA (1)...(19): siRNA sense strand
gaauaguagacuugaaaga

SEQ ID NO: 164664 - RNA, 19 nt, Homo sapiens
  misc_RNA (1)...(19): siRNA sense strand
gagaaaagaacaagaaguu

SEQ ID NO: 164665 - RNA, 19 nt, Homo sapiens
  misc_RNA (1)...(19): siRNA sense strand
ccagaaacagggcuugauu

SEQ ID NO: 164666 - RNA, 19 nt, Homo sapiens
  misc_RNA (1)...(19): siRNA sense strand
uccaaugaguuuacuaaug

SEQ ID NO: 164667 - RNA, 19 nt, Homo sapiens
  misc_RNA (1)...(19): siRNA sense strand
cagaagauaccacauucaa

SEQ ID NO: 164668 - RNA, 19 nt, Homo sapiens
  misc_RNA (1)...(19): siRNA sense strand
cagaaacagggcuugauuu

SEQ ID NO: 164669 - RNA, 19 nt, Homo sapiens
  misc_RNA (1)...(19): siRNA sense strand
aacagaauauggagaacaa

SEQ ID NO: 164670 - RNA, 19 nt, Homo sapiens
  misc_RNA (1)...(19): siRNA sense strand
agaaacagggcuugauuug

SEQ ID NO: 164671 - RNA, 19 nt, Homo sapiens
  misc_RNA (1)...(19): siRNA sense strand
agacuugaaagaaugcuua

SEQ ID NO: 164672 - RNA, 19 nt, Homo sapiens
  misc_RNA (1)...(19): siRNA sense strand
aacaagaaguuugcaguug

SEQ ID NO: 164673 - RNA, 19 nt, Homo sapiens
  misc_RNA (1)...(19): siRNA sense strand
gagaaggcugcuaacauug

SEQ ID NO: 164674 - RNA, 19 nt, Homo sapiens
  misc_RNA (1)...(19): siRNA sense strand
gaaacacacacuggaaaca

SEQ ID NO: 164675 - RNA, 19 nt, Homo sapiens
  misc_RNA (1)...(19): siRNA sense strand
uaguagacuugaaagaaug

SEQ ID NO: 164676 - RNA, 19 nt, Homo sapiens
  misc_RNA (1)...(19): siRNA sense strand
uaacaagguagcaucugaa

SEQ ID NO: 164677 - RNA, 19 nt, Homo sapiens
  misc_RNA (1)...(19): siRNA sense strand
guuauaagagccuaugugu

SEQ ID NO: 164678 - RNA, 19 nt, Homo sapiens
  misc_RNA (1)...(19): siRNA sense strand
gugaaacacacacuggaaa

SEQ ID NO: 164679 - RNA, 19 nt, Homo sapiens
  misc_RNA (1)...(19): siRNA sense strand
cugcugacauuaaauccaa

SEQ ID NO: 164680 - RNA, 19 nt, Homo sapiens
  misc_RNA (1)...(19): siRNA sense strand
uagccaggguuguucauca

SEQ ID NO: 164681 - RNA, 19 nt, Homo sapiens
  misc_RNA (1)...(19): siRNA sense strand
gggaaaagauuaccuugag

SEQ ID NO: 164682 - RNA, 19 nt, Homo sapiens
  misc_RNA (1)...(19): siRNA sense strand
cugcagagacgcauaccua

SEQ ID NO: 164683 - RNA, 19 nt, Homo sapiens
  misc_RNA (1)...(19): siRNA sense strand
gaaagaaauccagaaacag

SEQ ID NO: 164684 - RNA, 19 nt, Homo sapiens
  misc_RNA (1)...(19): siRNA sense strand
cagcucaccaucucuagaa

SEQ ID NO: 164685 - RNA, 19 nt, Homo sapiens
  misc_RNA (1)...(19): siRNA sense strand
ccuguggacuucagugugu

SEQ ID NO: 164686 - RNA, 19 nt, Homo sapiens
  misc_RNA (1)...(19): siRNA sense strand
uagaagaaacggcagugaa

SEQ ID NO: 164687 - RNA, 19 nt, Homo sapiens
  misc_RNA (1)...(19): siRNA sense strand
gaaacggcagugaaacaca

SEQ ID NO: 164688 - RNA, 19 nt, Homo sapiens
  misc_RNA (1)...(19): siRNA sense strand
cuugaaagaaugcuuagaa

SEQ ID NO: 164689 - RNA, 19 nt, Homo sapiens
  misc_RNA (1)...(19): siRNA sense strand
caagaaguuugcaguugac

SEQ ID NO: 164690 - RNA, 19 nt, Homo sapiens
  misc_RNA (1)...(19): siRNA sense strand
gcagagcuucuuagcaaag

SEQ ID NO: 164691 - RNA, 19 nt, Homo sapiens
  misc_RNA (1)...(19): siRNA sense strand
gacucuggcugauguacug

SEQ ID NO: 164692 - RNA, 19 nt, Homo sapiens
  misc_RNA (1)...(19): siRNA sense strand
cguugacauuuacaucuuu

SEQ ID NO: 164693 - RNA, 19 nt, Homo sapiens
  misc_RNA (1)...(19): siRNA sense strand
cuacagcucaccaucucua

SEQ ID NO: 164694 - RNA, 19 nt, Homo sapiens
  misc_RNA (1)...(19): siRNA sense strand
ccauagauucaacuuauca

SEQ ID NO: 164695 - RNA, 19 nt, Homo sapiens
  misc_RNA (1)...(19): siRNA sense strand
caaucaaccuuuuguguca

SEQ ID NO: 164696 - RNA, 19 nt, Homo sapiens
  misc_RNA (1)...(19): siRNA sense strand
ggagucaucaaucaaccuu

SEQ ID NO: 164697 - RNA, 19 nt, Homo sapiens
  misc_RNA (1)...(19): siRNA sense strand
aaaagguucugcugacauu

SEQ ID NO: 164698 - RNA, 19 nt, Homo sapiens
  misc_RNA (1)...(19): siRNA sense strand
caccaucucuagaagaaac

SEQ ID NO: 164699 - RNA, 19 nt, Homo sapiens
  misc_RNA (1)...(19): siRNA sense strand
gggcuugauuugccacagu

SEQ ID NO: 164700 - RNA, 19 nt, Homo sapiens
  misc_RNA (1)...(19): siRNA sense strand
ccaaggccucguugacauu

SEQ ID NO: 164701 - RNA, 19 nt, Homo sapiens
  misc_RNA (1)...(19): siRNA sense strand
aaaggagacuaucaaagcu

SEQ ID NO: 164702 - RNA, 19 nt, Homo sapiens
  misc_RNA (1)...(19): siRNA sense strand
gaagaaacggcagugaaac

SEQ ID NO: 164703 - RNA, 19 nt, Homo sapiens
  misc_RNA (1)...(19): siRNA sense strand
uuagcaaaguccucaaugg

SEQ ID NO: 164704 - RNA, 19 nt, Homo sapiens
  misc_RNA (1)...(19): siRNA sense strand
ugaaagaaugcuuagaaag

SEQ ID NO: 164705 - RNA, 19 nt, Homo sapiens
  misc_RNA (1)...(19): siRNA sense strand
ggaauaguagacuugaaag

SEQ ID NO: 164706 - RNA, 19 nt, Homo sapiens
  misc_RNA (1)...(19): siRNA sense strand
gaccaacaugcauucacua

SEQ ID NO: 164707 - RNA, 19 nt, Homo sapiens
  misc_RNA (1)...(19): siRNA sense strand
agcaaaguccucaauggua

SEQ ID NO: 164708 - RNA, 19 nt, Homo sapiens
  misc_RNA (1)...(19): siRNA sense strand
gcaccugcagagacgcaua

SEQ ID NO: 164709 - RNA, 19 nt, Homo sapiens
  misc_RNA (1)...(19): siRNA sense strand
caagggaggacucauugca

SEQ ID NO: 164710 - RNA, 19 nt, Homo sapiens
  misc_RNA (1)...(19): siRNA sense strand
gaaaagaaagagggagaaa

SEQ ID NO: 164711 - RNA, 19 nt, Homo sapiens
  misc_RNA (1)...(19): siRNA sense strand
agaagauaccacauucaaa

SEQ ID NO: 164712 - RNA, 19 nt, Homo sapiens
  misc_RNA (1)...(19): siRNA sense strand
caaggccucguugacauuu

SEQ ID NO: 164713 - RNA, 19 nt, Homo sapiens
  misc_RNA (1)...(19): siRNA sense strand
gcuauuggggccuuucuua

SEQ ID NO: 164714 - RNA, 19 nt, Homo sapiens
  misc_RNA (1)...(19): siRNA sense strand
cucaccaucucuagaagaa

SEQ ID NO: 164715 - RNA, 19 nt, Homo sapiens
  misc_RNA (1)...(19): siRNA sense strand
ggacucauugcauacagau

SEQ ID NO: 164716 - RNA, 19 nt, Homo sapiens
  misc_RNA (1)...(19): siRNA sense strand
gaaacagggcuugauuugc

SEQ ID NO: 164717 - RNA, 19 nt, Homo sapiens
  misc_RNA (1)...(19): siRNA sense strand
ccccauagauucaacuuau

SEQ ID NO: 164718 - RNA, 19 nt, Homo sapiens
  misc_RNA (1)...(19): siRNA sense strand
cguaauuaguacaagugaa

SEQ ID NO: 164719 - RNA, 19 nt, Homo sapiens
  misc_RNA (1)...(19): siRNA sense strand
agaauauggagaacaaguu

SEQ ID NO: 164720 - RNA, 19 nt, Homo sapiens
  misc_RNA (1)...(19): siRNA sense strand
guggagaucgcauauuugg

SEQ ID NO: 164721 - RNA, 19 nt, Homo sapiens
  misc_RNA (1)...(19): siRNA sense strand
ggcuugauuugccacaguu

SEQ ID NO: 164722 - RNA, 19 nt, Homo sapiens
  misc_RNA (1)...(19): siRNA sense strand
aagguucugcugacauuaa

SEQ ID NO: 164723 - RNA, 19 nt, Homo sapiens
  misc_RNA (1)...(19): siRNA sense strand
uucagaagauaccacauuc

SEQ ID NO: 164724 - RNA, 19 nt, Homo sapiens
  misc_RNA (1)...(19): siRNA sense strand
uuucagaagauaccacauu

SEQ ID NO: 164725 - RNA, 19 nt, Homo sapiens
  misc_RNA (1)...(19): siRNA sense strand
ucacguguguguggagauc

SEQ ID NO: 164726 - RNA, 19 nt, Homo sapiens
  misc_RNA (1)...(19): siRNA sense strand
gaaaaggagacuaucaaag

SEQ ID NO: 164727 - RNA, 19 nt, Homo sapiens
  misc_RNA (1)...(19): siRNA sense strand
aaacagcagagcuucuuag

SEQ ID NO: 164728 - RNA, 19 nt, Homo sapiens
  misc_RNA (1)...(19): siRNA sense strand
gaaaacacuugcugucaua

SEQ ID NO: 164729 - RNA, 19 nt, Homo sapiens
  misc_RNA (1)...(19): siRNA sense strand
ggacaagccuuagguacga

SEQ ID NO: 164730 - RNA, 19 nt, Homo sapiens
  misc_RNA (1)...(19): siRNA sense strand
ucacagauuugauccauuc

SEQ ID NO: 164731 - RNA, 19 nt, Homo sapiens
  misc_RNA (1)...(19): siRNA sense strand
gaaguggacgucacagauu

SEQ ID NO: 164732 - RNA, 19 nt, Homo sapiens
  misc_RNA (1)...(19): siRNA sense strand
ccaaagaaauggugucaac

SEQ ID NO: 164733 - RNA, 19 nt, Homo sapiens
  misc_RNA (1)...(19): siRNA sense strand
gggcagccaucauugaaga

SEQ ID NO: 164734 - RNA, 19 nt, Homo sapiens
  misc_RNA (1)...(19): siRNA sense strand
gaggguggcugcuggaauc

SEQ ID NO: 164735 - RNA, 19 nt, Homo sapiens
  misc_RNA (1)...(19): siRNA sense strand
gaagggcagccaucauuga

SEQ ID NO: 164736 - RNA, 19 nt, Homo sapiens
  misc_RNA (1)...(19): siRNA sense strand
gaagaaaccacugucugaa

SEQ ID NO: 164737 - RNA, 19 nt, Homo sapiens
  misc_RNA (1)...(19): siRNA sense strand
caaagauggacaagccuua

SEQ ID NO: 164738 - RNA, 19 nt, Homo sapiens
  misc_RNA (1)...(19): siRNA sense strand
ugaagaaaccacugucuga

SEQ ID NO: 164739 - RNA, 19 nt, Homo sapiens
  misc_RNA (1)...(19): siRNA sense strand
aauaauacuuucccgcaaa

SEQ ID NO: 164740 - RNA, 19 nt, Homo sapiens
  misc_RNA (1)...(19): siRNA sense strand
gguccuaucugccagcaau

SEQ ID NO: 164741 - RNA, 19 nt, Homo sapiens
  misc_RNA (1)...(19): siRNA sense strand
guugugaaguaauuuguga

SEQ ID NO: 164742 - RNA, 19 nt, Homo sapiens
  misc_RNA (1)...(19): siRNA sense strand
ugaaguaauuugugacgau

SEQ ID NO: 164743 - RNA, 19 nt, Homo sapiens
  misc_RNA (1)...(19): siRNA sense strand
gauuugauccauucuguug

SEQ ID NO: 164744 - RNA, 19 nt, Homo sapiens
  misc_RNA (1)...(19): siRNA sense strand
ggacgucacagauuugauc

SEQ ID NO: 164745 - RNA, 19 nt, Homo sapiens
  misc_RNA (1)...(19): siRNA sense strand
caccagagcugaagaaacc

SEQ ID NO: 164746 - RNA, 19 nt, Homo sapiens
  misc_RNA (1)...(19): siRNA sense strand
caacaacaaagauggacaa

SEQ ID NO: 164747 - RNA, 19 nt, Homo sapiens
  misc_RNA (1)...(19): siRNA sense strand
uccauucuguugugaagua

SEQ ID NO: 164748 - RNA, 19 nt, Homo sapiens
  misc_RNA (1)...(19): siRNA sense strand
gauccauucuguugugaag

SEQ ID NO: 164749 - RNA, 19 nt, Homo sapiens
  misc_RNA (1)...(19): siRNA sense strand
aaguggacgucacagauuu

SEQ ID NO: 164750 - RNA, 19 nt, Homo sapiens
  misc_RNA (1)...(19): siRNA sense strand
aacacuugcugucauauug

SEQ ID NO: 164751 - RNA, 19 nt, Homo sapiens
  misc_RNA (1)...(19): siRNA sense strand
gguacgacaucagaauuca

SEQ ID NO: 164752 - RNA, 19 nt, Homo sapiens
  misc_RNA (1)...(19): siRNA sense strand
ggaaaacacuugcugucau

SEQ ID NO: 164753 - RNA, 19 nt, Homo sapiens
  misc_RNA (1)...(19): siRNA sense strand
gauggacaagccuuaggua

SEQ ID NO: 164754 - RNA, 19 nt, Homo sapiens
  misc_RNA (1)...(19): siRNA sense strand
caaccuccaacaacaaaga

SEQ ID NO: 164755 - RNA, 19 nt, Homo sapiens
  misc_RNA (1)...(19): siRNA sense strand
gagaaguggacgucacaga

SEQ ID NO: 164756 - RNA, 19 nt, Homo sapiens
  misc_RNA (1)...(19): siRNA sense strand
aaacacuugcugucauauu

SEQ ID NO: 164757 - RNA, 19 nt, Homo sapiens
  misc_RNA (1)...(19): siRNA sense strand
gcagccaucauugaagaaa

SEQ ID NO: 164758 - RNA, 19 nt, Homo sapiens
  misc_RNA (1)...(19): siRNA sense strand
gagcugaagaaaccacugu

SEQ ID NO: 164759 - RNA, 19 nt, Homo sapiens
  misc_RNA (1)...(19): siRNA sense strand
cugaagggcagccaucauu

SEQ ID NO: 164760 - RNA, 19 nt, Homo sapiens
  misc_RNA (1)...(19): siRNA sense strand
gugucaaccuccaacaaca

SEQ ID NO: 164761 - RNA, 19 nt, Homo sapiens
  misc_RNA (1)...(19): siRNA sense strand
cgucacagauuugauccau

SEQ ID NO: 164762 - RNA, 19 nt, Homo sapiens
  misc_RNA (1)...(19): siRNA sense strand
uacgacaucagaauucauu

SEQ ID NO: 164763 - RNA, 19 nt, Homo sapiens
  misc_RNA (1)...(19): siRNA sense strand
ugaagggcagccaucauug

SEQ ID NO: 164764 - RNA, 19 nt, Homo sapiens
  misc_RNA (1)...(19): siRNA sense strand
uagguacgacaucagaauu

SEQ ID NO: 164765 - RNA, 19 nt, Homo sapiens
  misc_RNA (1)...(19): siRNA sense strand
agaaguggacgucacagau

SEQ ID NO: 164766 - RNA, 19 nt, Homo sapiens
  misc_RNA (1)...(19): siRNA sense strand
ggaggguggcugcuggaau

SEQ ID NO: 164767 - RNA, 19 nt, Homo sapiens
  misc_RNA (1)...(19): siRNA sense strand
ccauucuguugugaaguaa

SEQ ID NO: 164768 - RNA, 19 nt, Homo sapiens
  misc_RNA (1)...(19): siRNA sense strand
gucaaccuccaacaacaaa

SEQ ID NO: 164769 - RNA, 19 nt, Homo sapiens
  misc_RNA (1)...(19): siRNA sense strand
aguaauuugugacgaugga

SEQ ID NO: 164770 - RNA, 19 nt, Homo sapiens
  misc_RNA (1)...(19): siRNA sense strand
gagagucguucgccagcaa

SEQ ID NO: 164771 - RNA, 19 nt, Homo sapiens
  misc_RNA (1)...(19): siRNA sense strand
gcacgagaagcacaaguac

SEQ ID NO: 164772 - RNA, 19 nt, Homo sapiens
  misc_RNA (1)...(19): siRNA sense strand
gugaagcgcagcaagaagu

SEQ ID NO: 164773 - RNA, 19 nt, Homo sapiens
  misc_RNA (1)...(19): siRNA sense strand
gcaucgugcguguggagua

SEQ ID NO: 164774 - RNA, 19 nt, Homo sapiens
  misc_RNA (1)...(19): siRNA sense strand
acgagaagcacaaguacuu

SEQ ID NO: 164775 - RNA, 19 nt, Homo sapiens
  misc_RNA (1)...(19): siRNA sense strand
ggccuuacgcggcacauca

SEQ ID NO: 164776 - RNA, 19 nt, Homo sapiens
  misc_RNA (1)...(19): siRNA sense strand
ucacugcgccaagaaguuc

SEQ ID NO: 164777 - RNA, 19 nt, Homo sapiens
  misc_RNA (1)...(19): siRNA sense strand
ugccaucacugcgccaaga

SEQ ID NO: 164778 - RNA, 19 nt, Homo sapiens
  misc_RNA (1)...(19): siRNA sense strand
uuacgcggcacaucaacaa

SEQ ID NO: 164779 - RNA, 19 nt, Homo sapiens
  misc_RNA (1)...(19): siRNA sense strand
ggaaauccuugauguguuu

SEQ ID NO: 164780 - RNA, 19 nt, Homo sapiens
  misc_RNA (1)...(19): siRNA sense strand
gcaaacaggucgugaugaa

SEQ ID NO: 164781 - RNA, 19 nt, Homo sapiens
  misc_RNA (1)...(19): siRNA sense strand
gaacauagaagugccauuu

SEQ ID NO: 164782 - RNA, 19 nt, Homo sapiens
  misc_RNA (1)...(19): siRNA sense strand
aaagauaucuggccgacua

SEQ ID NO: 164783 - RNA, 19 nt, Homo sapiens
  misc_RNA (1)...(19): siRNA sense strand
gcagacaguuuacagaaga

SEQ ID NO: 164784 - RNA, 19 nt, Homo sapiens
  misc_RNA (1)...(19): siRNA sense strand
guaggaauguuucgagauu

SEQ ID NO: 164785 - RNA, 19 nt, Homo sapiens
  misc_RNA (1)...(19): siRNA sense strand
gaagaaacaggauauugaa

SEQ ID NO: 164786 - RNA, 19 nt, Homo sapiens
  misc_RNA (1)...(19): siRNA sense strand
gagauucgguaacaacuga

SEQ ID NO: 164787 - RNA, 19 nt, Homo sapiens
  misc_RNA (1)...(19): siRNA sense strand
ccuaugugcugcuaaauuu

SEQ ID NO: 164788 - RNA, 19 nt, Homo sapiens
  misc_RNA (1)...(19): siRNA sense strand
gcaaggauuuaaaggauuc

SEQ ID NO: 164789 - RNA, 19 nt, Homo sapiens
  misc_RNA (1)...(19): siRNA sense strand
caaaucaccaccauucuuu

SEQ ID NO: 164790 - RNA, 19 nt, Homo sapiens
  misc_RNA (1)...(19): siRNA sense strand
acauagaagugccauuuaa

SEQ ID NO: 164791 - RNA, 19 nt, Homo sapiens
  misc_RNA (1)...(19): siRNA sense strand
gguaacaacugaccacauc

SEQ ID NO: 164792 - RNA, 19 nt, Homo sapiens
  misc_RNA (1)...(19): siRNA sense strand
gcaaauuugucgaguucuu

SEQ ID NO: 164793 - RNA, 19 nt, Homo sapiens
  misc_RNA (1)...(19): siRNA sense strand
aaauagagacugugaauga

SEQ ID NO: 164794 - RNA, 19 nt, Homo sapiens
  misc_RNA (1)...(19): siRNA sense strand
cagaagggcagacaguuua

SEQ ID NO: 164795 - RNA, 19 nt, Homo sapiens
  misc_RNA (1)...(19): siRNA sense strand
gaaucaagaccuggaauuu

SEQ ID NO: 164796 - RNA, 19 nt, Homo sapiens
  misc_RNA (1)...(19): siRNA sense strand
gagcuacgauugcuaacau

SEQ ID NO: 164797 - RNA, 19 nt, Homo sapiens
  misc_RNA (1)...(19): siRNA sense strand
gggcaaauuugucgaguuc

SEQ ID NO: 164798 - RNA, 19 nt, Homo sapiens
  misc_RNA (1)...(19): siRNA sense strand
ccuuguagcuguuggagua

SEQ ID NO: 164799 - RNA, 19 nt, Homo sapiens
  misc_RNA (1)...(19): siRNA sense strand
gggaacauuugccaacauu

SEQ ID NO: 164800 - RNA, 19 nt, Homo sapiens
  misc_RNA (1)...(19): siRNA sense strand
ggacagcagguauuucuga

SEQ ID NO: 164801 - RNA, 19 nt, Homo sapiens
  misc_RNA (1)...(19): siRNA sense strand
ggaaauauugcaagaaaca

SEQ ID NO: 164802 - RNA, 19 nt, Homo sapiens
  misc_RNA (1)...(19): siRNA sense strand
gaaagagccauugggagua

SEQ ID NO: 164803 - RNA, 19 nt, Homo sapiens
  misc_RNA (1)...(19): siRNA sense strand
ggaagucuaucagaaaaua

SEQ ID NO: 164804 - RNA, 19 nt, Homo sapiens
  misc_RNA (1)...(19): siRNA sense strand
ugaagaaacaggauauuga

SEQ ID NO: 164805 - RNA, 19 nt, Homo sapiens
  misc_RNA (1)...(19): siRNA sense strand
uuaaggaagucuaucagaa

SEQ ID NO: 164806 - RNA, 19 nt, Homo sapiens
  misc_RNA (1)...(19): siRNA sense strand
guaauagcauaugcaauug

SEQ ID NO: 164807 - RNA, 19 nt, Homo sapiens
  misc_RNA (1)...(19): siRNA sense strand
ggaguggcguggucaccua

SEQ ID NO: 164808 - RNA, 19 nt, Homo sapiens
  misc_RNA (1)...(19): siRNA sense strand
uaacauguguccagaguac

SEQ ID NO: 164809 - RNA, 19 nt, Homo sapiens
  misc_RNA (1)...(19): siRNA sense strand
cagaaucgacuuugagaaa

SEQ ID NO: 164810 - RNA, 19 nt, Homo sapiens
  misc_RNA (1)...(19): siRNA sense strand
caagagugguauuugauca

SEQ ID NO: 164811 - RNA, 19 nt, Homo sapiens
  misc_RNA (1)...(19): siRNA sense strand
gggaaauccuugauguguu

SEQ ID NO: 164812 - RNA, 19 nt, Homo sapiens
  misc_RNA (1)...(19): siRNA sense strand
uaaggaagucuaucagaaa

SEQ ID NO: 164813 - RNA, 19 nt, Homo sapiens
  misc_RNA (1)...(19): siRNA sense strand
ucaaugacccuucucaaga

SEQ ID NO: 164814 - RNA, 19 nt, Homo sapiens
  misc_RNA (1)...(19): siRNA sense strand
gcugcucgcuacuuaacua

SEQ ID NO: 164815 - RNA, 19 nt, Homo sapiens
  misc_RNA (1)...(19): siRNA sense strand
cugcugaucuuguaauaga

SEQ ID NO: 164816 - RNA, 19 nt, Homo sapiens
  misc_RNA (1)...(19): siRNA sense strand
aaagagccauugggaguaa

SEQ ID NO: 164817 - RNA, 19 nt, Homo sapiens
  misc_RNA (1)...(19): siRNA sense strand
ucacccagguuguggaauu

SEQ ID NO: 164818 - RNA, 19 nt, Homo sapiens
  misc_RNA (1)...(19): siRNA sense strand
gcacaagaacauagaagug

SEQ ID NO: 164819 - RNA, 19 nt, Homo sapiens
  misc_RNA (1)...(19): siRNA sense strand
cuggaaauauugcaagaaa

SEQ ID NO: 164820 - RNA, 19 nt, Homo sapiens
  misc_RNA (1)...(19): siRNA sense strand
gcaaagggacagcagguau

SEQ ID NO: 164821 - RNA, 19 nt, Homo sapiens
  misc_RNA (1)...(19): siRNA sense strand
gggcaggauuguuagcaaa

SEQ ID NO: 164822 - RNA, 19 nt, Homo sapiens
  misc_RNA (1)...(19): siRNA sense strand
ccaaguugcuccugaacau

SEQ ID NO: 164823 - RNA, 19 nt, Homo sapiens
  misc_RNA (1)...(19): siRNA sense strand
uuuaaaggauuccaaguug

SEQ ID NO: 164824 - RNA, 19 nt, Homo sapiens
  misc_RNA (1)...(19): siRNA sense strand
ucaccaccauucuuugaaa

SEQ ID NO: 164825 - RNA, 19 nt, Homo sapiens
  misc_RNA (1)...(19): siRNA sense strand
ccucaaaccacaaaugaaa

SEQ ID NO: 164826 - RNA, 19 nt, Homo sapiens
  misc_RNA (1)...(19): siRNA sense strand
gccauuggauccuguacaa

SEQ ID NO: 164827 - RNA, 19 nt, Homo sapiens
  misc_RNA (1)...(19): siRNA sense strand
aggaggagauccagagaaa

SEQ ID NO: 164828 - RNA, 19 nt, Homo sapiens
  misc_RNA (1)...(19): siRNA sense strand
auguggagcucacuuauuu

SEQ ID NO: 164829 - RNA, 19 nt, Homo sapiens
  misc_RNA (1)...(19): siRNA sense strand
aaagcggagucaugccuua

SEQ ID NO: 164830 - RNA, 19 nt, Homo sapiens
  misc_RNA (1)...(19): siRNA sense strand
gcuaacauguguccagagu

SEQ ID NO: 164831 - RNA, 19 nt, Homo sapiens
  misc_RNA (1)...(19): siRNA sense strand
gaccuggaauuugaaagaa

SEQ ID NO: 164832 - RNA, 19 nt, Homo sapiens
  misc_RNA (1)...(19): siRNA sense strand
ucacagggcaagaacgaua

SEQ ID NO: 164833 - RNA, 19 nt, Homo sapiens
  misc_RNA (1)...(19): siRNA sense strand
ggaauuccaaaucuacgua

SEQ ID NO: 164834 - RNA, 19 nt, Homo sapiens
  misc_RNA (1)...(19): siRNA sense strand
ggaguacuaucuggaaaca

SEQ ID NO: 164835 - RNA, 19 nt, Homo sapiens
  misc_RNA (1)...(19): siRNA sense strand
gccugaacgugaugccuua

SEQ ID NO: 164836 - RNA, 19 nt, Homo sapiens
  misc_RNA (1)...(19): siRNA sense strand
ucacguaccuggugcaaac

SEQ ID NO: 164837 - RNA, 19 nt, Homo sapiens
  misc_RNA (1)...(19): siRNA sense strand
ccaggugaauuuggaauau

SEQ ID NO: 164838 - RNA, 19 nt, Homo sapiens
  misc_RNA (1)...(19): siRNA sense strand
uaaauuggaggauucaaga

SEQ ID NO: 164839 - RNA, 19 nt, Homo sapiens
  misc_RNA (1)...(19): siRNA sense strand
ggucauugcugccauuacu

SEQ ID NO: 164840 - RNA, 19 nt, Homo sapiens
  misc_RNA (1)...(19): siRNA sense strand
aagcaaggauuuaaaggau

SEQ ID NO: 164841 - RNA, 19 nt, Homo sapiens
  misc_RNA (1)...(19): siRNA sense strand
uggcaagagugguauuuga

SEQ ID NO: 164842 - RNA, 19 nt, Homo sapiens
  misc_RNA (1)...(19): siRNA sense strand
gaaugucacucagcacaag

SEQ ID NO: 164843 - RNA, 19 nt, Homo sapiens
  misc_RNA (1)...(19): siRNA sense strand
gaucaggauggauauuauu

SEQ ID NO: 164844 - RNA, 19 nt, Homo sapiens
  misc_RNA (1)...(19): siRNA sense strand
ccaaaucuacguauaucaa

SEQ ID NO: 164845 - RNA, 19 nt, Homo sapiens
  misc_RNA (1)...(19): siRNA sense strand
gacagcagguauuucugaa

SEQ ID NO: 164846 - RNA, 19 nt, Homo sapiens
  misc_RNA (1)...(19): siRNA sense strand
gcaggauuguuagcaaaga

SEQ ID NO: 164847 - RNA, 19 nt, Homo sapiens
  misc_RNA (1)...(19): siRNA sense strand
aaacaggucgugaugaaga

SEQ ID NO: 164848 - RNA, 19 nt, Homo sapiens
  misc_RNA (1)...(19): siRNA sense strand
gacaucgugcucaccauua

SEQ ID NO: 164849 - RNA, 19 nt, Homo sapiens
  misc_RNA (1)...(19): siRNA sense strand
gggcaagaacgauacacua

SEQ ID NO: 164850 - RNA, 19 nt, Homo sapiens
  misc_RNA (1)...(19): siRNA sense strand
uaucaaaucaccaccauuc

SEQ ID NO: 164851 - RNA, 19 nt, Homo sapiens
  misc_RNA (1)...(19): siRNA sense strand
caaagggacagcagguauu

SEQ ID NO: 164852 - RNA, 19 nt, Homo sapiens
  misc_RNA (1)...(19): siRNA sense strand
uaauccgucugugauguua

SEQ ID NO: 164853 - RNA, 19 nt, Homo sapiens
  misc_RNA (1)...(19): siRNA sense strand
caaaaggccucaggacaaa

SEQ ID NO: 164854 - RNA, 19 nt, Homo sapiens
  misc_RNA (1)...(19): siRNA sense strand
gggcagacaguuuacagaa

SEQ ID NO: 164855 - RNA, 19 nt, Homo sapiens
  misc_RNA (1)...(19): siRNA sense strand
gagccaagcaaggauuuaa

SEQ ID NO: 164856 - RNA, 19 nt, Homo sapiens
  misc_RNA (1)...(19): siRNA sense strand
gcacagacucgcacacuac

SEQ ID NO: 164857 - RNA, 19 nt, Homo sapiens
  misc_RNA (1)...(19): siRNA sense strand
caagcaaggauuuaaagga

SEQ ID NO: 164858 - RNA, 19 nt, Homo sapiens
  misc_RNA (1)...(19): siRNA sense strand
cacgagaauucaacuccua

SEQ ID NO: 164859 - RNA, 19 nt, Homo sapiens
  misc_RNA (1)...(19): siRNA sense strand
gaaaauagagacugugaau

SEQ ID NO: 164860 - RNA, 19 nt, Homo sapiens
  misc_RNA (1)...(19): siRNA sense strand
ugucucagcuuggguuuga

SEQ ID NO: 164861 - RNA, 19 nt, Homo sapiens
  misc_RNA (1)...(19): siRNA sense strand
aaagaaagcuguggaugcu

SEQ ID NO: 164862 - RNA, 19 nt, Homo sapiens
  misc_RNA (1)...(19): siRNA sense strand
gaagaaucaagaccuggaa

SEQ ID NO: 164863 - RNA, 19 nt, Homo sapiens
  misc_RNA (1)...(19): siRNA sense strand
ggugugaucccacuugaau

SEQ ID NO: 164864 - RNA, 19 nt, Homo sapiens
  misc_RNA (1)...(19): siRNA sense strand
gcucgcuacuuaacuaaca

SEQ ID NO: 164865 - RNA, 19 nt, Homo sapiens
  misc_RNA (1)...(19): siRNA sense strand
guacaaccaggaaagaaau

SEQ ID NO: 164866 - RNA, 19 nt, Homo sapiens
  misc_RNA (1)...(19): siRNA sense strand
caacagaagggcagacagu

SEQ ID NO: 164867 - RNA, 19 nt, Homo sapiens
  misc_RNA (1)...(19): siRNA sense strand
gauguggagcucacuuauu

SEQ ID NO: 164868 - RNA, 19 nt, Homo sapiens
  misc_RNA (1)...(19): siRNA sense strand
ucaugagguuugacacuga

SEQ ID NO: 164869 - RNA, 19 nt, Homo sapiens
  misc_RNA (1)...(19): siRNA sense strand
cacccagguuguggaauua

SEQ ID NO: 164870 - RNA, 19 nt, Homo sapiens
  misc_RNA (1)...(19): siRNA sense strand
ggcacagacucgcacacua

SEQ ID NO: 164871 - RNA, 19 nt, Homo sapiens
  misc_RNA (1)...(19): siRNA sense strand
uuucacaacaugcggauua

SEQ ID NO: 164872 - RNA, 19 nt, Homo sapiens
  misc_RNA (1)...(19): siRNA sense strand
ggcaagaacgauacacuau

SEQ ID NO: 164873 - RNA, 19 nt, Homo sapiens
  misc_RNA (1)...(19): siRNA sense strand
ugaaagcuggaaugccuua

SEQ ID NO: 164874 - RNA, 19 nt, Homo sapiens
  misc_RNA (1)...(19): siRNA sense strand
ggagucaugccuuaucugu

SEQ ID NO: 164875 - RNA, 19 nt, Homo sapiens
  misc_RNA (1)...(19): siRNA sense strand
gggugucggugguauugaa

SEQ ID NO: 164876 - RNA, 19 nt, Homo sapiens
  misc_RNA (1)...(19): siRNA sense strand
ugaucaggauggauauuau

SEQ ID NO: 164877 - RNA, 19 nt, Homo sapiens
  misc_RNA (1)...(19): siRNA sense strand
guagugccuugcuguagug

SEQ ID NO: 164878 - RNA, 19 nt, Homo sapiens
  misc_RNA (1)...(19): siRNA sense strand
gaacauuugccaacauucg

SEQ ID NO: 164879 - RNA, 19 nt, Homo sapiens
  misc_RNA (1)...(19): siRNA sense strand
gggcucaucuggauuaaua

SEQ ID NO: 164880 - RNA, 19 nt, Homo sapiens
  misc_RNA (1)...(19): siRNA sense strand
gaaauuaccugaggacauc

SEQ ID NO: 164881 - RNA, 19 nt, Homo sapiens
  misc_RNA (1)...(19): siRNA sense strand
ucacagaucugaagaacau

SEQ ID NO: 164882 - RNA, 19 nt, Homo sapiens
  misc_RNA (1)...(19): siRNA sense strand
ccagugaucuguacaacuu

SEQ ID NO: 164883 - RNA, 19 nt, Homo sapiens
  misc_RNA (1)...(19): siRNA sense strand
ggcuagagaugcagauuaa

SEQ ID NO: 164884 - RNA, 19 nt, Homo sapiens
  misc_RNA (1)...(19): siRNA sense strand
gcagauuaauuccaaccaa

SEQ ID NO: 164885 - RNA, 19 nt, Homo sapiens
  misc_RNA (1)...(19): siRNA sense strand
ccugauaccuucucugaug

SEQ ID NO: 164886 - RNA, 19 nt, Homo sapiens
  misc_RNA (1)...(19): siRNA sense strand
cagauuaauuccaaccaaa

SEQ ID NO: 164887 - RNA, 19 nt, Homo sapiens
  misc_RNA (1)...(19): siRNA sense strand
gcuccacucugccugauga

SEQ ID NO: 164888 - RNA, 19 nt, Homo sapiens
  misc_RNA (1)...(19): siRNA sense strand
ucacacaggccgauacaaa

SEQ ID NO: 164889 - RNA, 19 nt, Homo sapiens
  misc_RNA (1)...(19): siRNA sense strand
gcugggacaucaacaagga

SEQ ID NO: 164890 - RNA, 19 nt, Homo sapiens
  misc_RNA (1)...(19): siRNA sense strand
ggaugaggaagggaaauua

SEQ ID NO: 164891 - RNA, 19 nt, Homo sapiens
  misc_RNA (1)...(19): siRNA sense strand
ugaacucccugccagauau

SEQ ID NO: 164892 - RNA, 19 nt, Homo sapiens
  misc_RNA (1)...(19): siRNA sense strand
uauggagacuuuagcugua

SEQ ID NO: 164893 - RNA, 19 nt, Homo sapiens
  misc_RNA (1)...(19): siRNA sense strand
gcacaucccaguggaaguu

SEQ ID NO: 164894 - RNA, 19 nt, Homo sapiens
  misc_RNA (1)...(19): siRNA sense strand
cuagagaugcagauuaauu

SEQ ID NO: 164895 - RNA, 19 nt, Homo sapiens
  misc_RNA (1)...(19): siRNA sense strand
cagcgugucuucacagauc

SEQ ID NO: 164896 - RNA, 19 nt, Homo sapiens
  misc_RNA (1)...(19): siRNA sense strand
guaaggaggagccagaaau

SEQ ID NO: 164897 - RNA, 19 nt, Homo sapiens
  misc_RNA (1)...(19): siRNA sense strand
uaaggaggagccagaaauu

SEQ ID NO: 164898 - RNA, 19 nt, Homo sapiens
  misc_RNA (1)...(19): siRNA sense strand
caaggaugccuguuuguuc

SEQ ID NO: 164899 - RNA, 19 nt, Homo sapiens
  misc_RNA (1)...(19): siRNA sense strand
ggaaauuaccugaggacau

SEQ ID NO: 164900 - RNA, 19 nt, Homo sapiens
  misc_RNA (1)...(19): siRNA sense strand
gcucagcugugcgagugua

SEQ ID NO: 164901 - RNA, 19 nt, Homo sapiens
  misc_RNA (1)...(19): siRNA sense strand
aagcauggcugggacauca

SEQ ID NO: 164902 - RNA, 19 nt, Homo sapiens
  misc_RNA (1)...(19): siRNA sense strand
cacagcagcuacacaguuc

SEQ ID NO: 164903 - RNA, 19 nt, Homo sapiens
  misc_RNA (1)...(19): siRNA sense strand
ccacagcagcuacacaguu

SEQ ID NO: 164904 - RNA, 19 nt, Homo sapiens
  misc_RNA (1)...(19): siRNA sense strand
ggacagcaccagugaucug

SEQ ID NO: 164905 - RNA, 19 nt, Homo sapiens
  misc_RNA (1)...(19): siRNA sense strand
gauauugggcugagucuac

SEQ ID NO: 164906 - RNA, 19 nt, Homo sapiens
  misc_RNA (1)...(19): siRNA sense strand
ucaccaagaaccagagaaa

SEQ ID NO: 164907 - RNA, 19 nt, Homo sapiens
  misc_RNA (1)...(19): siRNA sense strand
gcccaccucugucuaugga

SEQ ID NO: 164908 - RNA, 19 nt, Homo sapiens
  misc_RNA (1)...(19): siRNA sense strand
gaaaagaaagaaagucgaa

SEQ ID NO: 164909 - RNA, 19 nt, Homo sapiens
  misc_RNA (1)...(19): siRNA sense strand
gcccugauaccuucucuga

SEQ ID NO: 164910 - RNA, 19 nt, Homo sapiens
  misc_RNA (1)...(19): siRNA sense strand
gcucaucuggauuaauaaa

SEQ ID NO: 164911 - RNA, 19 nt, Homo sapiens
  misc_RNA (1)...(19): siRNA sense strand
gagcugggccauucacaca

SEQ ID NO: 164912 - RNA, 19 nt, Homo sapiens
  misc_RNA (1)...(19): siRNA sense strand
ugaaagaccagagcaggaa

SEQ ID NO: 164913 - RNA, 19 nt, Homo sapiens
  misc_RNA (1)...(19): siRNA sense strand
agaugcagauuaauuccaa

SEQ ID NO: 164914 - RNA, 19 nt, Homo sapiens
  misc_RNA (1)...(19): siRNA sense strand
gcuaagagcaaggccaaga

SEQ ID NO: 164915 - RNA, 19 nt, Homo sapiens
  misc_RNA (1)...(19): siRNA sense strand
cuacaacagaugaggauga

SEQ ID NO: 164916 - RNA, 19 nt, Homo sapiens
  misc_RNA (1)...(19): siRNA sense strand
uagagaugcagauuaauuc

SEQ ID NO: 164917 - RNA, 19 nt, Homo sapiens
  misc_RNA (1)...(19): siRNA sense strand
gcaccagugaucuguacaa

SEQ ID NO: 164918 - RNA, 19 nt, Homo sapiens
  misc_RNA (1)...(19): siRNA sense strand
aggaggagccagaaauuga

SEQ ID NO: 164919 - RNA, 19 nt, Homo sapiens
  misc_RNA (1)...(19): siRNA sense strand
aaagaaagaaagucgaagu

SEQ ID NO: 164920 - RNA, 19 nt, Homo sapiens
  misc_RNA (1)...(19): siRNA sense strand
cagcaccagugaucuguac

SEQ ID NO: 164921 - RNA, 19 nt, Homo sapiens
  misc_RNA (1)...(19): siRNA sense strand
uggcuagagaugcagauua

SEQ ID NO: 164922 - RNA, 19 nt, Homo sapiens
  misc_RNA (1)...(19): siRNA sense strand
gacccuggcuagagaugca

SEQ ID NO: 164923 - RNA, 19 nt, Homo sapiens
  misc_RNA (1)...(19): siRNA sense strand
caggcuacaugcaggacuu

SEQ ID NO: 164924 - RNA, 19 nt, Homo sapiens
  misc_RNA (1)...(19): siRNA sense strand
uaauaaagaggagaugauc

SEQ ID NO: 164925 - RNA, 19 nt, Homo sapiens
  misc_RNA (1)...(19): siRNA sense strand
gacguggaaggccaacuuu

SEQ ID NO: 164926 - RNA, 19 nt, Homo sapiens
  misc_RNA (1)...(19): siRNA sense strand
ggacaucaugaagcucuug

SEQ ID NO: 164927 - RNA, 19 nt, Homo sapiens
  misc_RNA (1)...(19): siRNA sense strand
gaugaggaagggaaauuac

SEQ ID NO: 164928 - RNA, 19 nt, Homo sapiens
  misc_RNA (1)...(19): siRNA sense strand
caucuggauuaauaaagag

SEQ ID NO: 164929 - RNA, 19 nt, Homo sapiens
  misc_RNA (1)...(19): siRNA sense strand
uuccaccucucaccaagaa

SEQ ID NO: 164930 - RNA, 19 nt, Homo sapiens
  misc_RNA (1)...(19): siRNA sense strand
guacaacuuccagguguca

SEQ ID NO: 164931 - RNA, 19 nt, Homo sapiens
  misc_RNA (1)...(19): siRNA sense strand
ggauuaauaaagaggagau

SEQ ID NO: 164932 - RNA, 19 nt, Homo sapiens
  misc_RNA (1)...(19): siRNA sense strand
agagcaaggccaagaggaa

SEQ ID NO: 164933 - RNA, 19 nt, Homo sapiens
  misc_RNA (1)...(19): siRNA sense strand
gggaagggguaccuacuca

SEQ ID NO: 164934 - RNA, 19 nt, Homo sapiens
  misc_RNA (1)...(19): siRNA sense strand
uaccugaggacaucaugaa

SEQ ID NO: 164935 - RNA, 19 nt, Homo sapiens
  misc_RNA (1)...(19): siRNA sense strand
augagacccuggcuagaga

SEQ ID NO: 164936 - RNA, 19 nt, Homo sapiens
  misc_RNA (1)...(19): siRNA sense strand
gaacucccugccagauauc

SEQ ID NO: 164937 - RNA, 19 nt, Homo sapiens
  misc_RNA (1)...(19): siRNA sense strand
gaguccagcccaccucugu

SEQ ID NO: 164938 - RNA, 19 nt, Homo sapiens
  misc_RNA (1)...(19): siRNA sense strand
ccagcacugucgccaugug

SEQ ID NO: 164939 - RNA, 19 nt, Homo sapiens
  misc_RNA (1)...(19): siRNA sense strand
gccaagaggaagucaugug

SEQ ID NO: 164940 - RNA, 19 nt, Homo sapiens
  misc_RNA (1)...(19): siRNA sense strand
auggagacuuuagcuguaa

SEQ ID NO: 164941 - RNA, 19 nt, Homo sapiens
  misc_RNA (1)...(19): siRNA sense strand
agacguggaaggccaacuu

SEQ ID NO: 164942 - RNA, 19 nt, Homo sapiens
  misc_RNA (1)...(19): siRNA sense strand
uacagcgugucuucacaga

SEQ ID NO: 164943 - RNA, 19 nt, Homo sapiens
  misc_RNA (1)...(19): siRNA sense strand
cagcccaccucugucuaug

SEQ ID NO: 164944 - RNA, 19 nt, Homo sapiens
  misc_RNA (1)...(19): siRNA sense strand
gaaagaaaccaaagacaga

SEQ ID NO: 164945 - RNA, 19 nt, Homo sapiens
  misc_RNA (1)...(19): siRNA sense strand
ucaaguggcuuaacaagga

SEQ ID NO: 164946 - RNA, 19 nt, Homo sapiens
  misc_RNA (1)...(19): siRNA sense strand
gguccugacuucaacuaua

SEQ ID NO: 164947 - RNA, 19 nt, Homo sapiens
  misc_RNA (1)...(19): siRNA sense strand
gcaauccggugccuuacaa

SEQ ID NO: 164948 - RNA, 19 nt, Homo sapiens
  misc_RNA (1)...(19): siRNA sense strand
aaacauggaaggcgaauuu

SEQ ID NO: 164949 - RNA, 19 nt, Homo sapiens
  misc_RNA (1)...(19): siRNA sense strand
gcaagaaccaguugaguca

SEQ ID NO: 164950 - RNA, 19 nt, Homo sapiens
  misc_RNA (1)...(19): siRNA sense strand
agauaaaccugaucccaaa

SEQ ID NO: 164951 - RNA, 19 nt, Homo sapiens
  misc_RNA (1)...(19): siRNA sense strand
gaaagcgaaacgacugaua

SEQ ID NO: 164952 - RNA, 19 nt, Homo sapiens
  misc_RNA (1)...(19): siRNA sense strand
guccugacuucaacuauaa

SEQ ID NO: 164953 - RNA, 19 nt, Homo sapiens
  misc_RNA (1)...(19): siRNA sense strand
gaacaucauaguuguagga

SEQ ID NO: 164954 - RNA, 19 nt, Homo sapiens
  misc_RNA (1)...(19): siRNA sense strand
ccagacauuugccaaguug

SEQ ID NO: 164955 - RNA, 19 nt, Homo sapiens
  misc_RNA (1)...(19): siRNA sense strand
ggaaggcgaauuucagaug

SEQ ID NO: 164956 - RNA, 19 nt, Homo sapiens
  misc_RNA (1)...(19): siRNA sense strand
ugaauuccuugccugauau

SEQ ID NO: 164957 - RNA, 19 nt, Homo sapiens
  misc_RNA (1)...(19): siRNA sense strand
ggacagcaacauugagaau

SEQ ID NO: 164958 - RNA, 19 nt, Homo sapiens
  misc_RNA (1)...(19): siRNA sense strand
gaaaggaaagaaaccaaag

SEQ ID NO: 164959 - RNA, 19 nt, Homo sapiens
  misc_RNA (1)...(19): siRNA sense strand
cuucgucacuuccaacaaa

SEQ ID NO: 164960 - RNA, 19 nt, Homo sapiens
  misc_RNA (1)...(19): siRNA sense strand
gcgaaacgacugauagugu

SEQ ID NO: 164961 - RNA, 19 nt, Homo sapiens
  misc_RNA (1)...(19): siRNA sense strand
gggcucaaguggcuuaaca

SEQ ID NO: 164962 - RNA, 19 nt, Homo sapiens
  misc_RNA (1)...(19): siRNA sense strand
gaggaauauugaaggcaaa

SEQ ID NO: 164963 - RNA, 19 nt, Homo sapiens
  misc_RNA (1)...(19): siRNA sense strand
gcaccacucuuuagaaacc

SEQ ID NO: 164964 - RNA, 19 nt, Homo sapiens
  misc_RNA (1)...(19): siRNA sense strand
acagcaacauugagaauca

SEQ ID NO: 164965 - RNA, 19 nt, Homo sapiens
  misc_RNA (1)...(19): siRNA sense strand
gauaguacggugaacauca

SEQ ID NO: 164966 - RNA, 19 nt, Homo sapiens
  misc_RNA (1)...(19): siRNA sense strand
uuaagcacaucaagcaaga

SEQ ID NO: 164967 - RNA, 19 nt, Homo sapiens
  misc_RNA (1)...(19): siRNA sense strand
gcaaacaguaccucagcaa

SEQ ID NO: 164968 - RNA, 19 nt, Homo sapiens
  misc_RNA (1)...(19): siRNA sense strand
augaauuccuugccugaua

SEQ ID NO: 164969 - RNA, 19 nt, Homo sapiens
  misc_RNA (1)...(19): siRNA sense strand
gggccagcgucaucaagaa

SEQ ID NO: 164970 - RNA, 19 nt, Homo sapiens
  misc_RNA (1)...(19): siRNA sense strand
gcccagcgaugaagagagu

SEQ ID NO: 164971 - RNA, 19 nt, Homo sapiens
  misc_RNA (1)...(19): siRNA sense strand
agagcaauccggugccuua

SEQ ID NO: 164972 - RNA, 19 nt, Homo sapiens
  misc_RNA (1)...(19): siRNA sense strand
caaguggcuuaacaaggaa

SEQ ID NO: 164973 - RNA, 19 nt, Homo sapiens
  misc_RNA (1)...(19): siRNA sense strand
gagcagccggucagcauga

SEQ ID NO: 164974 - RNA, 19 nt, Homo sapiens
  misc_RNA (1)...(19): siRNA sense strand
ccaauccgccagacauuug

SEQ ID NO: 164975 - RNA, 19 nt, Homo sapiens
  misc_RNA (1)...(19): siRNA sense strand
gccagacauuugccaaguu

SEQ ID NO: 164976 - RNA, 19 nt, Homo sapiens
  misc_RNA (1)...(19): siRNA sense strand
gcacaucaagcaagaacca

SEQ ID NO: 164977 - RNA, 19 nt, Homo sapiens
  misc_RNA (1)...(19): siRNA sense strand
gcucuacccucugcagauc

SEQ ID NO: 164978 - RNA, 19 nt, Homo sapiens
  misc_RNA (1)...(19): siRNA sense strand
uuguagaggugaccacuga

SEQ ID NO: 164979 - RNA, 19 nt, Homo sapiens
  misc_RNA (1)...(19): siRNA sense strand
gagcagauaaacuccaaca

SEQ ID NO: 164980 - RNA, 19 nt, Homo sapiens
  misc_RNA (1)...(19): siRNA sense strand
augcaccacucuuuagaaa

SEQ ID NO: 164981 - RNA, 19 nt, Homo sapiens
  misc_RNA (1)...(19): siRNA sense strand
agacauuugccaaguugua

SEQ ID NO: 164982 - RNA, 19 nt, Homo sapiens
  misc_RNA (1)...(19): siRNA sense strand
caucuggacagcaacauug

SEQ ID NO: 164983 - RNA, 19 nt, Homo sapiens
  misc_RNA (1)...(19): siRNA sense strand
agacaaaguuaagcacauc

SEQ ID NO: 164984 - RNA, 19 nt, Homo sapiens
  misc_RNA (1)...(19): siRNA sense strand
gaugcgccaugaauuccuu

SEQ ID NO: 164985 - RNA, 19 nt, Homo sapiens
  misc_RNA (1)...(19): siRNA sense strand
ucagaugcgccaugaauuc

SEQ ID NO: 164986 - RNA, 19 nt, Homo sapiens
  misc_RNA (1)...(19): siRNA sense strand
agaaaccgggcaauccaua

SEQ ID NO: 164987 - RNA, 19 nt, Homo sapiens
  misc_RNA (1)...(19): siRNA sense strand
aaacaguaccucagcaaca

SEQ ID NO: 164988 - RNA, 19 nt, Homo sapiens
  misc_RNA (1)...(19): siRNA sense strand
ggcggaagaggaauauuga

SEQ ID NO: 164989 - RNA, 19 nt, Homo sapiens
  misc_RNA (1)...(19): siRNA sense strand
gaugcaccacucuuuagaa

SEQ ID NO: 164990 - RNA, 19 nt, Homo sapiens
  misc_RNA (1)...(19): siRNA sense strand
uggaguaagugaucuuucu

SEQ ID NO: 164991 - RNA, 19 nt, Homo sapiens
  misc_RNA (1)...(19): siRNA sense strand
caucaaccaggaguagaua

SEQ ID NO: 164992 - RNA, 19 nt, Homo sapiens
  misc_RNA (1)...(19): siRNA sense strand
gggcaauccauacaggaaa

SEQ ID NO: 164993 - RNA, 19 nt, Homo sapiens
  misc_RNA (1)...(19): siRNA sense strand
agaaaggaaagaaaccaaa

SEQ ID NO: 164994 - RNA, 19 nt, Homo sapiens
  misc_RNA (1)...(19): siRNA sense strand
gcaucaaccaggaguagau

SEQ ID NO: 164995 - RNA, 19 nt, Homo sapiens
  misc_RNA (1)...(19): siRNA sense strand
ucaaccaggaguagauaaa

SEQ ID NO: 164996 - RNA, 19 nt, Homo sapiens
  misc_RNA (1)...(19): siRNA sense strand
ggcaauccauacaggaaag

SEQ ID NO: 164997 - RNA, 19 nt, Homo sapiens
  misc_RNA (1)...(19): siRNA sense strand
aucaagagauugucaccaa

SEQ ID NO: 164998 - RNA, 19 nt, Homo sapiens
  misc_RNA (1)...(19): siRNA sense strand
ggugaacaucauaguugua

SEQ ID NO: 164999 - RNA, 19 nt, Homo sapiens
  misc_RNA (1)...(19): siRNA sense strand
aguaugcgguccugacuuc

SEQ ID NO: 165000 - RNA, 19 nt, Homo sapiens
  misc_RNA (1)...(19): siRNA sense strand
aaaggaaagaaaccaaaga

SEQ ID NO: 165001 - RNA, 19 nt, Homo sapiens
  misc_RNA (1)...(19): siRNA sense strand
ugaagaagucaaggauaaa

SEQ ID NO: 165002 - RNA, 19 nt, Homo sapiens
  misc_RNA (1)...(19): siRNA sense strand
gaagaagucaaggauaaaa

SEQ ID NO: 165003 - RNA, 19 nt, Homo sapiens
  misc_RNA (1)...(19): siRNA sense strand
guagaggugaccacugaga

SEQ ID NO: 165004 - RNA, 19 nt, Homo sapiens
  misc_RNA (1)...(19): siRNA sense strand
aaaaugaaguggauaguac

SEQ ID NO: 165005 - RNA, 19 nt, Homo sapiens
  misc_RNA (1)...(19): siRNA sense strand
guaauggaguaagugaucu

SEQ ID NO: 165006 - RNA, 19 nt, Homo sapiens
  misc_RNA (1)...(19): siRNA sense strand
aaagaaaccaaagacagaa

SEQ ID NO: 165007 - RNA, 19 nt, Homo sapiens
  misc_RNA (1)...(19): siRNA sense strand
caucaagcaagaaccaguu

SEQ ID NO: 165008 - RNA, 19 nt, Homo sapiens
  misc_RNA (1)...(19): siRNA sense strand
ugaucuuucuccugaguau

SEQ ID NO: 165009 - RNA, 19 nt, Homo sapiens
  misc_RNA (1)...(19): siRNA sense strand
gggcuuaguaauggaguaa

SEQ ID NO: 165010 - RNA, 19 nt, Homo sapiens
  misc_RNA (1)...(19): siRNA sense strand
uuccuugccugauauugaa

SEQ ID NO: 165011 - RNA, 19 nt, Homo sapiens
  misc_RNA (1)...(19): siRNA sense strand
gaauauugaaggcaaacag

SEQ ID NO: 165012 - RNA, 19 nt, Homo sapiens
  misc_RNA (1)...(19): siRNA sense strand
aagaaccaguugagucauc

SEQ ID NO: 165013 - RNA, 19 nt, Homo sapiens
  misc_RNA (1)...(19): siRNA sense strand
ugccugauauugaagaagu

SEQ ID NO: 165014 - RNA, 19 nt, Homo sapiens
  misc_RNA (1)...(19): siRNA sense strand
gaauuccuugccugauauu

SEQ ID NO: 165015 - RNA, 19 nt, Homo sapiens
  misc_RNA (1)...(19): siRNA sense strand
ggccagcgucaucaagaaa

SEQ ID NO: 165016 - RNA, 19 nt, Homo sapiens
  misc_RNA (1)...(19): siRNA sense strand
gaaaccgggcaauccauac

SEQ ID NO: 165017 - RNA, 19 nt, Homo sapiens
  misc_RNA (1)...(19): siRNA sense strand
uggcggaagaggaauauug

SEQ ID NO: 165018 - RNA, 19 nt, Homo sapiens
  misc_RNA (1)...(19): siRNA sense strand
aagacaaaguuaagcacau

SEQ ID NO: 165019 - RNA, 19 nt, Homo sapiens
  misc_RNA (1)...(19): siRNA sense strand
caucaaagaggagagcaau

SEQ ID NO: 165020 - RNA, 19 nt, Homo sapiens
  misc_RNA (1)...(19): siRNA sense strand
cagaaagcgaaacgacuga

SEQ ID NO: 165021 - RNA, 19 nt, Homo sapiens
  misc_RNA (1)...(19): siRNA sense strand
gcucaaguggcuuaacaag

SEQ ID NO: 165022 - RNA, 19 nt, Homo sapiens
  misc_RNA (1)...(19): siRNA sense strand
aaagcgaaacgacugauag

SEQ ID NO: 165023 - RNA, 19 nt, Homo sapiens
  misc_RNA (1)...(19): siRNA sense strand
aggaguagauaaaccugau

SEQ ID NO: 165024 - RNA, 19 nt, Homo sapiens
  misc_RNA (1)...(19): siRNA sense strand
cggugaacaucauaguugu

SEQ ID NO: 165025 - RNA, 19 nt, Homo sapiens
  misc_RNA (1)...(19): siRNA sense strand
agucaaggauaaaagcaua

SEQ ID NO: 165026 - RNA, 19 nt, Homo sapiens
  misc_RNA (1)...(19): siRNA sense strand
aacaguaccucagcaacau

SEQ ID NO: 165027 - RNA, 19 nt, Homo sapiens
  misc_RNA (1)...(19): siRNA sense strand
gugaacaucauaguuguag

SEQ ID NO: 165028 - RNA, 19 nt, Homo sapiens
  misc_RNA (1)...(19): siRNA sense strand
aauuucagaugcgccauga

SEQ ID NO: 165029 - RNA, 19 nt, Homo sapiens
  misc_RNA (1)...(19): siRNA sense strand
aagaaaacaucggauauca

SEQ ID NO: 165030 - RNA, 19 nt, Homo sapiens
  misc_RNA (1)...(19): siRNA sense strand
ucaccaauccgccagacau

SEQ ID NO: 165031 - RNA, 19 nt, Homo sapiens
  misc_RNA (1)...(19): siRNA sense strand
guacggugaacaucauagu

SEQ ID NO: 165032 - RNA, 19 nt, Homo sapiens
  misc_RNA (1)...(19): siRNA sense strand
auaguacggugaacaucau

SEQ ID NO: 165033 - RNA, 19 nt, Homo sapiens
  misc_RNA (1)...(19): siRNA sense strand
caaaguuaagcacaucaag

SEQ ID NO: 165034 - RNA, 19 nt, Homo sapiens
  misc_RNA (1)...(19): siRNA sense strand
ggaugcaugcggcuagaca

SEQ ID NO: 165035 - RNA, 19 nt, Homo sapiens
  misc_RNA (1)...(19): siRNA sense strand
cggaagaggaauauugaag

SEQ ID NO: 165036 - RNA, 19 nt, Homo sapiens
  misc_RNA (1)...(19): siRNA sense strand
acggugaacaucauaguug

SEQ ID NO: 165037 - RNA, 19 nt, Homo sapiens
  misc_RNA (1)...(19): siRNA sense strand
uuaguaauggaguaaguga

SEQ ID NO: 165038 - RNA, 19 nt, Homo sapiens
  misc_RNA (1)...(19): siRNA sense strand
caagcaagaaccaguugag

SEQ ID NO: 165039 - RNA, 19 nt, Homo sapiens
  misc_RNA (1)...(19): siRNA sense strand
agaagaagcucauuacugu

SEQ ID NO: 165040 - RNA, 19 nt, Homo sapiens
  misc_RNA (1)...(19): siRNA sense strand
gcacccagcuggcaugcaa

SEQ ID NO: 165041 - RNA, 19 nt, Homo sapiens
  misc_RNA (1)...(19): siRNA sense strand
ucaaggagcuccaucacau

SEQ ID NO: 165042 - RNA, 19 nt, Homo sapiens
  misc_RNA (1)...(19): siRNA sense strand
gagaagaagcucauuacug

SEQ ID NO: 165043 - RNA, 19 nt, Homo sapiens
  misc_RNA (1)...(19): siRNA sense strand
ccaaggagacagggaaaua

SEQ ID NO: 165044 - RNA, 19 nt, Homo sapiens
  misc_RNA (1)...(19): siRNA sense strand
cgagagaagaagcucauua

SEQ ID NO: 165045 - RNA, 19 nt, Homo sapiens
  misc_RNA (1)...(19): siRNA sense strand
gagcucauccuguuccaaa

SEQ ID NO: 165046 - RNA, 19 nt, Homo sapiens
  misc_RNA (1)...(19): siRNA sense strand
gagaucuucuucugcuuug

SEQ ID NO: 165047 - RNA, 19 nt, Homo sapiens
  misc_RNA (1)...(19): siRNA sense strand
agaauggccugaccgcaaa

SEQ ID NO: 165048 - RNA, 19 nt, Homo sapiens
  misc_RNA (1)...(19): siRNA sense strand
gaagaagcucauuacugua

SEQ ID NO: 165049 - RNA, 19 nt, Homo sapiens
  misc_RNA (1)...(19): siRNA sense strand
gagaggaggaggaagaaga

SEQ ID NO: 165050 - RNA, 19 nt, Homo sapiens
  misc_RNA (1)...(19): siRNA sense strand
ugaccgaccuggagaucaa

SEQ ID NO: 165051 - RNA, 19 nt, Homo sapiens
  misc_RNA (1)...(19): siRNA sense strand
aggaagagcugcagaggau

SEQ ID NO: 165052 - RNA, 19 nt, Homo sapiens
  misc_RNA (1)...(19): siRNA sense strand
gaagagcugcagaggaugu

SEQ ID NO: 165053 - RNA, 19 nt, Homo sapiens
  misc_RNA (1)...(19): siRNA sense strand
gagagaagaagcucauuac

SEQ ID NO: 165054 - RNA, 19 nt, Homo sapiens
  misc_RNA (1)...(19): siRNA sense strand
ccauaagccuggagcaagu

SEQ ID NO: 165055 - RNA, 19 nt, Homo sapiens
  misc_RNA (1)...(19): siRNA sense strand
gcugugcccuuaacaagag

SEQ ID NO: 165056 - RNA, 19 nt, Homo sapiens
  misc_RNA (1)...(19): siRNA sense strand
ggaggaggaagaagaggaa

SEQ ID NO: 165057 - RNA, 19 nt, Homo sapiens
  misc_RNA (1)...(19): siRNA sense strand
aaccugcgcugugcccuua

SEQ ID NO: 165058 - RNA, 19 nt, Homo sapiens
  misc_RNA (1)...(19): siRNA sense strand
cgagaucuucuucugcuuu

SEQ ID NO: 165059 - RNA, 19 nt, Homo sapiens
  misc_RNA (1)...(19): siRNA sense strand
ggagcaggccuugguguug

SEQ ID NO: 165060 - RNA, 19 nt, Homo sapiens
  misc_RNA (1)...(19): siRNA sense strand
uacgaggucugcuccaaug

SEQ ID NO: 165061 - RNA, 19 nt, Homo sapiens
  misc_RNA (1)...(19): siRNA sense strand
ggagaucaaguuucaguac

SEQ ID NO: 165062 - RNA, 19 nt, Homo sapiens
  misc_RNA (1)...(19): siRNA sense strand
ggacuuccgccucaucuac

SEQ ID NO: 165063 - RNA, 19 nt, Homo sapiens
  misc_RNA (1)...(19): siRNA sense strand
ccucagcccuacaagaucu

SEQ ID NO: 165064 - RNA, 19 nt, Homo sapiens
  misc_RNA (1)...(19): siRNA sense strand
caggagaggaggaggaaga

SEQ ID NO: 165065 - RNA, 19 nt, Homo sapiens
  misc_RNA (1)...(19): siRNA sense strand
cgaccuggagaucaaguuu

SEQ ID NO: 165066 - RNA, 19 nt, Homo sapiens
  misc_RNA (1)...(19): siRNA sense strand
cuacagggccaggaccuuu

SEQ ID NO: 165067 - RNA, 19 nt, Homo sapiens
  misc_RNA (1)...(19): siRNA sense strand
caccucagcccuacaagau

SEQ ID NO: 165068 - RNA, 19 nt, Homo sapiens
  misc_RNA (1)...(19): siRNA sense strand
uaacaagagccgggacuuc

SEQ ID NO: 165069 - RNA, 19 nt, Homo sapiens
  misc_RNA (1)...(19): siRNA sense strand
gaagcucauuacuguacag

SEQ ID NO: 165070 - RNA, 19 nt, Homo sapiens
  misc_RNA (1)...(19): siRNA sense strand
caacggggaaaagaaauua

SEQ ID NO: 165071 - RNA, 19 nt, Homo sapiens
  misc_RNA (1)...(19): siRNA sense strand
gacugcugcuggagauguu

SEQ ID NO: 165072 - RNA, 19 nt, Homo sapiens
  misc_RNA (1)...(19): siRNA sense strand
ggaggaagaagaggaagag

SEQ ID NO: 165073 - RNA, 19 nt, Homo sapiens
  misc_RNA (1)...(19): siRNA sense strand
gcgcugugcccuuaacaag

SEQ ID NO: 165074 - RNA, 19 nt, Homo sapiens
  misc_RNA (1)...(19): siRNA sense strand
uacagggccaggaccuuua

SEQ ID NO: 165075 - RNA, 19 nt, Homo sapiens
  misc_RNA (1)...(19): siRNA sense strand
ccaccacccuucgagaucu

SEQ ID NO: 165076 - RNA, 19 nt, Homo sapiens
  misc_RNA (1)...(19): siRNA sense strand
guacccagggcuucaaugg

SEQ ID NO: 165077 - RNA, 19 nt, Homo sapiens
  misc_RNA (1)...(19): siRNA sense strand
caaacccagaccucaaaga

SEQ ID NO: 165078 - RNA, 19 nt, Homo sapiens
  misc_RNA (1)...(19): siRNA sense strand
ccaccucagcccuacaaga

SEQ ID NO: 165079 - RNA, 19 nt, Homo sapiens
  misc_RNA (1)...(19): siRNA sense strand
caaaagggccagaccaaca

SEQ ID NO: 165080 - RNA, 19 nt, Homo sapiens
  misc_RNA (1)...(19): siRNA sense strand
caaggagacagggaaauac

SEQ ID NO: 165081 - RNA, 19 nt, Homo sapiens
  misc_RNA (1)...(19): siRNA sense strand
ggucaacggggaaaagaaa

SEQ ID NO: 165082 - RNA, 19 nt, Homo sapiens
  misc_RNA (1)...(19): siRNA sense strand
aagaagcucauuacuguac

SEQ ID NO: 165083 - RNA, 19 nt, Homo sapiens
  misc_RNA (1)...(19): siRNA sense strand
ggagcagguggaacucuuc

SEQ ID NO: 165084 - RNA, 19 nt, Homo sapiens
  misc_RNA (1)...(19): siRNA sense strand
ugccagaccugcugaucag

SEQ ID NO: 165085 - RNA, 19 nt, Homo sapiens
  misc_RNA (1)...(19): siRNA sense strand
agaagaagcucauuacugu

SEQ ID NO: 165086 - RNA, 19 nt, Homo sapiens
  misc_RNA (1)...(19): siRNA sense strand
gcacccagcuggcaugcaa

SEQ ID NO: 165087 - RNA, 19 nt, Homo sapiens
  misc_RNA (1)...(19): siRNA sense strand
ucaaggagcuccaucacau

SEQ ID NO: 165088 - RNA, 19 nt, Homo sapiens
  misc_RNA (1)...(19): siRNA sense strand
gagaagaagcucauuacug

SEQ ID NO: 165089 - RNA, 19 nt, Homo sapiens
  misc_RNA (1)...(19): siRNA sense strand
ccaaggagacagggaaaua

SEQ ID NO: 165090 - RNA, 19 nt, Homo sapiens
  misc_RNA (1)...(19): siRNA sense strand
cgagagaagaagcucauua

SEQ ID NO: 165091 - RNA, 19 nt, Homo sapiens
  misc_RNA (1)...(19): siRNA sense strand
gagcucauccuguuccaaa

SEQ ID NO: 165092 - RNA, 19 nt, Homo sapiens
  misc_RNA (1)...(19): siRNA sense strand
gagaucuucuucugcuuug

SEQ ID NO: 165093 - RNA, 19 nt, Homo sapiens
  misc_RNA (1)...(19): siRNA sense strand
agaauggccugaccgcaaa

SEQ ID NO: 165094 - RNA, 19 nt, Homo sapiens
  misc_RNA (1)...(19): siRNA sense strand
gaagaagcucauuacugua

SEQ ID NO: 165095 - RNA, 19 nt, Homo sapiens
  misc_RNA (1)...(19): siRNA sense strand
gagaggaggaggaagaaga

SEQ ID NO: 165096 - RNA, 19 nt, Homo sapiens
  misc_RNA (1)...(19): siRNA sense strand
ugaccgaccuggagaucaa

SEQ ID NO: 165097 - RNA, 19 nt, Homo sapiens
  misc_RNA (1)...(19): siRNA sense strand
aggaagagcugcagaggau

SEQ ID NO: 165098 - RNA, 19 nt, Homo sapiens
  misc_RNA (1)...(19): siRNA sense strand
gaagagcugcagaggaugu

SEQ ID NO: 165099 - RNA, 19 nt, Homo sapiens
  misc_RNA (1)...(19): siRNA sense strand
gagagaagaagcucauuac

SEQ ID NO: 165100 - RNA, 19 nt, Homo sapiens
  misc_RNA (1)...(19): siRNA sense strand
ccauaagccuggagcaagu

SEQ ID NO: 165101 - RNA, 19 nt, Homo sapiens
  misc_RNA (1)...(19): siRNA sense strand
gcugugcccuuaacaagag

SEQ ID NO: 165102 - RNA, 19 nt, Homo sapiens
  misc_RNA (1)...(19): siRNA sense strand
ggaggaggaagaagaggaa

SEQ ID NO: 165103 - RNA, 19 nt, Homo sapiens
  misc_RNA (1)...(19): siRNA sense strand
aaccugcgcugugcccuua

SEQ ID NO: 165104 - RNA, 19 nt, Homo sapiens
  misc_RNA (1)...(19): siRNA sense strand
cgagaucuucuucugcuuu

SEQ ID NO: 165105 - RNA, 19 nt, Homo sapiens
  misc_RNA (1)...(19): siRNA sense strand
ggagcaggccuugguguug

SEQ ID NO: 165106 - RNA, 19 nt, Homo sapiens
  misc_RNA (1)...(19): siRNA sense strand
uacgaggucugcuccaaug

SEQ ID NO: 165107 - RNA, 19 nt, Homo sapiens
  misc_RNA (1)...(19): siRNA sense strand
ggagaucaaguuucaguac

SEQ ID NO: 165108 - RNA, 19 nt, Homo sapiens
  misc_RNA (1)...(19): siRNA sense strand
ggacuuccgccucaucuac

SEQ ID NO: 165109 - RNA, 19 nt, Homo sapiens
  misc_RNA (1)...(19): siRNA sense strand
ccucagcccuacaagaucu

SEQ ID NO: 165110 - RNA, 19 nt, Homo sapiens
  misc_RNA (1)...(19): siRNA sense strand
caggagaggaggaggaaga

SEQ ID NO: 165111 - RNA, 19 nt, Homo sapiens
  misc_RNA (1)...(19): siRNA sense strand
cgaccuggagaucaaguuu

SEQ ID NO: 165112 - RNA, 19 nt, Homo sapiens
  misc_RNA (1)...(19): siRNA sense strand
cuacagggccaggaccuuu

SEQ ID NO: 165113 - RNA, 19 nt, Homo sapiens
  misc_RNA (1)...(19): siRNA sense strand
caccucagcccuacaagau

SEQ ID NO: 165114 - RNA, 19 nt, Homo sapiens
  misc_RNA (1)...(19): siRNA sense strand
uaacaagagccgggacuuc

SEQ ID NO: 165115 - RNA, 19 nt, Homo sapiens
  misc_RNA (1)...(19): siRNA sense strand
gaagcucauuacuguacag

SEQ ID NO: 165116 - RNA, 19 nt, Homo sapiens
  misc_RNA (1)...(19): siRNA sense strand
caacggggaaaagaaauua

SEQ ID NO: 165117 - RNA, 19 nt, Homo sapiens
  misc_RNA (1)...(19): siRNA sense strand
gacugcugcuggagauguu

SEQ ID NO: 165118 - RNA, 19 nt, Homo sapiens
  misc_RNA (1)...(19): siRNA sense strand
ggaggaagaagaggaagag

SEQ ID NO: 165119 - RNA, 19 nt, Homo sapiens
  misc_RNA (1)...(19): siRNA sense strand
gcgcugugcccuuaacaag

SEQ ID NO: 165120 - RNA, 19 nt, Homo sapiens
  misc_RNA (1)...(19): siRNA sense strand
uacagggccaggaccuuua

SEQ ID NO: 165121 - RNA, 19 nt, Homo sapiens
  misc_RNA (1)...(19): siRNA sense strand
ccaccacccuucgagaucu

SEQ ID NO: 165122 - RNA, 19 nt, Homo sapiens
  misc_RNA (1)...(19): siRNA sense strand
guacccagggcuucaaugg

SEQ ID NO: 165123 - RNA, 19 nt, Homo sapiens
  misc_RNA (1)...(19): siRNA sense strand
caaacccagaccucaaaga

SEQ ID NO: 165124 - RNA, 19 nt, Homo sapiens
  misc_RNA (1)...(19): siRNA sense strand
ccaccucagcccuacaaga

SEQ ID NO: 165125 - RNA, 19 nt, Homo sapiens
  misc_RNA (1)...(19): siRNA sense strand
caaaagggccagaccaaca

SEQ ID NO: 165126 - RNA, 19 nt, Homo sapiens
  misc_RNA (1)...(19): siRNA sense strand
caaggagacagggaaauac

SEQ ID NO: 165127 - RNA, 19 nt, Homo sapiens
  misc_RNA (1)...(19): siRNA sense strand
ggucaacggggaaaagaaa

SEQ ID NO: 165128 - RNA, 19 nt, Homo sapiens
  misc_RNA (1)...(19): siRNA sense strand
aagaagcucauuacuguac

SEQ ID NO: 165129 - RNA, 19 nt, Homo sapiens
  misc_RNA (1)...(19): siRNA sense strand
ggagcagguggaacucuuc

SEQ ID NO: 165130 - RNA, 19 nt, Homo sapiens
  misc_RNA (1)...(19): siRNA sense strand
ugccagaccugcugaucag

SEQ ID NO: 165131 - RNA, 19 nt, Homo sapiens
  misc_RNA (1)...(19): siRNA sense strand
ggacugugcugaacgagaa

SEQ ID NO: 165132 - RNA, 19 nt, Homo sapiens
  misc_RNA (1)...(19): siRNA sense strand
gagauuauaucagguugua

SEQ ID NO: 165133 - RNA, 19 nt, Homo sapiens
  misc_RNA (1)...(19): siRNA sense strand
cagaugcgcucaugaagga

SEQ ID NO: 165134 - RNA, 19 nt, Homo sapiens
  misc_RNA (1)...(19): siRNA sense strand
gcagugaaguagcaucaau

SEQ ID NO: 165135 - RNA, 19 nt, Homo sapiens
  misc_RNA (1)...(19): siRNA sense strand
gggaaaaccuacuguaaaa

SEQ ID NO: 165136 - RNA, 19 nt, Homo sapiens
  misc_RNA (1)...(19): siRNA sense strand
caguggaaguacaaaguua

SEQ ID NO: 165137 - RNA, 19 nt, Homo sapiens
  misc_RNA (1)...(19): siRNA sense strand
ugaaaugugcggaguguaa

SEQ ID NO: 165138 - RNA, 19 nt, Homo sapiens
  misc_RNA (1)...(19): siRNA sense strand
cgagagcuguacaugcuuu

SEQ ID NO: 165139 - RNA, 19 nt, Homo sapiens
  misc_RNA (1)...(19): siRNA sense strand
ggaccgggcucuaauucca

SEQ ID NO: 165140 - RNA, 19 nt, Homo sapiens
  misc_RNA (1)...(19): siRNA sense strand
gagacacgacgguggcuua

SEQ ID NO: 165141 - RNA, 19 nt, Homo sapiens
  misc_RNA (1)...(19): siRNA sense strand
agaagcagcugcacaccuu

SEQ ID NO: 165142 - RNA, 19 nt, Homo sapiens
  misc_RNA (1)...(19): siRNA sense strand
gacgagagcuguacaugcu

SEQ ID NO: 165143 - RNA, 19 nt, Homo sapiens
  misc_RNA (1)...(19): siRNA sense strand
ucaauguccucucaacuuc

SEQ ID NO: 165144 - RNA, 19 nt, Homo sapiens
  misc_RNA (1)...(19): siRNA sense strand
uguaucacaucgaguguuu

SEQ ID NO: 165145 - RNA, 19 nt, Homo sapiens
  misc_RNA (1)...(19): siRNA sense strand
ggaguguaaucaguauuug

SEQ ID NO: 165146 - RNA, 19 nt, Homo sapiens
  misc_RNA (1)...(19): siRNA sense strand
uagcaucaauguccucuca

SEQ ID NO: 165147 - RNA, 19 nt, Homo sapiens
  misc_RNA (1)...(19): siRNA sense strand
ccagccaccuuggaaagua

SEQ ID NO: 165148 - RNA, 19 nt, Homo sapiens
  misc_RNA (1)...(19): siRNA sense strand
gacaagaagcgaagcauca

SEQ ID NO: 165149 - RNA, 19 nt, Homo sapiens
  misc_RNA (1)...(19): siRNA sense strand
uucagcaacuggucaauuu

SEQ ID NO: 165150 - RNA, 19 nt, Homo sapiens
  misc_RNA (1)...(19): siRNA sense strand
gcuccaagguguaucacau

SEQ ID NO: 165151 - RNA, 19 nt, Homo sapiens
  misc_RNA (1)...(19): siRNA sense strand
gaaaaccuacuguaaaaga

SEQ ID NO: 165152 - RNA, 19 nt, Homo sapiens
  misc_RNA (1)...(19): siRNA sense strand
gauucacgaucaguauauu

SEQ ID NO: 165153 - RNA, 19 nt, Homo sapiens
  misc_RNA (1)...(19): siRNA sense strand
ggaggaccgggcucuaauu

SEQ ID NO: 165154 - RNA, 19 nt, Homo sapiens
  misc_RNA (1)...(19): siRNA sense strand
gaggguuucuccggauuug

SEQ ID NO: 165155 - RNA, 19 nt, Homo sapiens
  misc_RNA (1)...(19): siRNA sense strand
caugaaggagcaacuggua

SEQ ID NO: 165156 - RNA, 19 nt, Homo sapiens
  misc_RNA (1)...(19): siRNA sense strand
ccucucaacuuccagauac

SEQ ID NO: 165157 - RNA, 19 nt, Homo sapiens
  misc_RNA (1)...(19): siRNA sense strand
gcagcagcccaaugacaaa

SEQ ID NO: 165158 - RNA, 19 nt, Homo sapiens
  misc_RNA (1)...(19): siRNA sense strand
gaaaugugcggaguguaau

SEQ ID NO: 165159 - RNA, 19 nt, Homo sapiens
  misc_RNA (1)...(19): siRNA sense strand
caugguagccaguccuauu

SEQ ID NO: 165160 - RNA, 19 nt, Homo sapiens
  misc_RNA (1)...(19): siRNA sense strand
agcuguacaugcuuuguua

SEQ ID NO: 165161 - RNA, 19 nt, Homo sapiens
  misc_RNA (1)...(19): siRNA sense strand
gugcggaguguaaucagua

SEQ ID NO: 165162 - RNA, 19 nt, Homo sapiens
  misc_RNA (1)...(19): siRNA sense strand
gcaucaauguccucucaac

SEQ ID NO: 165163 - RNA, 19 nt, Homo sapiens
  misc_RNA (1)...(19): siRNA sense strand
acauagaucagccugcuuu

SEQ ID NO: 165164 - RNA, 19 nt, Homo sapiens
  misc_RNA (1)...(19): siRNA sense strand
gagcaacugguagagauga

SEQ ID NO: 165165 - RNA, 19 nt, Homo sapiens
  misc_RNA (1)...(19): siRNA sense strand
ggccagaugcgcucaugaa

SEQ ID NO: 165166 - RNA, 19 nt, Homo sapiens
  misc_RNA (1)...(19): siRNA sense strand
cagauucacgaucaguaua

SEQ ID NO: 165167 - RNA, 19 nt, Homo sapiens
  misc_RNA (1)...(19): siRNA sense strand
cggaguguaaucaguauuu

SEQ ID NO: 165168 - RNA, 19 nt, Homo sapiens
  misc_RNA (1)...(19): siRNA sense strand
gaaggaggaccgggcucua

SEQ ID NO: 165169 - RNA, 19 nt, Homo sapiens
  misc_RNA (1)...(19): siRNA sense strand
ugaaggagcaacugguaga

SEQ ID NO: 165170 - RNA, 19 nt, Homo sapiens
  misc_RNA (1)...(19): siRNA sense strand
gagcuguacaugcuuuguu

SEQ ID NO: 165171 - RNA, 19 nt, Homo sapiens
  misc_RNA (1)...(19): siRNA sense strand
caacuuccagauacaccua

SEQ ID NO: 165172 - RNA, 19 nt, Homo sapiens
  misc_RNA (1)...(19): siRNA sense strand
aagaagcgaagcaucauga

SEQ ID NO: 165173 - RNA, 19 nt, Homo sapiens
  misc_RNA (1)...(19): siRNA sense strand
gaggaccgggcucuaauuc

SEQ ID NO: 165174 - RNA, 19 nt, Homo sapiens
  misc_RNA (1)...(19): siRNA sense strand
cgucugauuucccuaugug

SEQ ID NO: 165175 - RNA, 19 nt, Homo sapiens
  misc_RNA (1)...(19): siRNA sense strand
caguauauucugaggguuu

SEQ ID NO: 165176 - RNA, 19 nt, Homo sapiens
  misc_RNA (1)...(19): siRNA sense strand
ccaguggaaguacaaaguu

SEQ ID NO: 165177 - RNA, 19 nt, Homo sapiens
  misc_RNA (1)...(19): siRNA sense strand
acacgacgguggcuuacag

SEQ ID NO: 165178 - RNA, 19 nt, Homo sapiens
  misc_RNA (1)...(19): siRNA sense strand
ucagauucacgaucaguau

SEQ ID NO: 165179 - RNA, 19 nt, Homo sapiens
  misc_RNA (1)...(19): siRNA sense strand
cgacuucgccuugcagagu

SEQ ID NO: 165180 - RNA, 19 nt, Homo sapiens
  misc_RNA (1)...(19): siRNA sense strand
caaaguuaccagccaccuu

SEQ ID NO: 165181 - RNA, 19 nt, Homo sapiens
  misc_RNA (1)...(19): siRNA sense strand
gggaucaaaugcgccaagu

SEQ ID NO: 165182 - RNA, 19 nt, Homo sapiens
  misc_RNA (1)...(19): siRNA sense strand
caagaagcgaagcaucaug

SEQ ID NO: 165183 - RNA, 19 nt, Homo sapiens
  misc_RNA (1)...(19): siRNA sense strand
aggagcaacugguagagau

SEQ ID NO: 165184 - RNA, 19 nt, Homo sapiens
  misc_RNA (1)...(19): siRNA sense strand
aaacgucugauuucccuau

SEQ ID NO: 165185 - RNA, 19 nt, Homo sapiens
  misc_RNA (1)...(19): siRNA sense strand
gguuguacgggaucaaaug

SEQ ID NO: 165186 - RNA, 19 nt, Homo sapiens
  misc_RNA (1)...(19): siRNA sense strand
cagauacaccuaacagcau

SEQ ID NO: 165187 - RNA, 19 nt, Homo sapiens
  misc_RNA (1)...(19): siRNA sense strand
ggagcaacugguagagaug

SEQ ID NO: 165188 - RNA, 19 nt, Homo sapiens
  misc_RNA (1)...(19): siRNA sense strand
gcaucggcuucagcaagaa

SEQ ID NO: 165189 - RNA, 19 nt, Homo sapiens
  misc_RNA (1)...(19): siRNA sense strand
agcaucggcuucagcaaga

SEQ ID NO: 165190 - RNA, 19 nt, Homo sapiens
  misc_RNA (1)...(19): siRNA sense strand
gguagccaguccuauugag

SEQ ID NO: 165191 - RNA, 19 nt, Homo sapiens
  misc_RNA (1)...(19): siRNA sense strand
uaacccaguggaaguacaa

SEQ ID NO: 165192 - RNA, 19 nt, Homo sapiens
  misc_RNA (1)...(19): siRNA sense strand
guggagagggccagucuag

SEQ ID NO: 165193 - RNA, 19 nt, Homo sapiens
  misc_RNA (1)...(19): siRNA sense strand
auccgggucugguuucaaa

SEQ ID NO: 165194 - RNA, 19 nt, Homo sapiens
  misc_RNA (1)...(19): siRNA sense strand
acaagcagccggagaagac

SEQ ID NO: 165195 - RNA, 19 nt, Homo sapiens
  misc_RNA (1)...(19): siRNA sense strand
guuaccagccaccuuggaa

SEQ ID NO: 165196 - RNA, 19 nt, Homo sapiens
  misc_RNA (1)...(19): siRNA sense strand
cagcagcagcccaaugaca

SEQ ID NO: 165197 - RNA, 19 nt, Homo sapiens
  misc_RNA (1)...(19): siRNA sense strand
gaaacgcccuugauacuaa

SEQ ID NO: 165198 - RNA, 19 nt, Homo sapiens
  misc_RNA (1)...(19): siRNA sense strand
caacaagaaugcucagaua

SEQ ID NO: 165199 - RNA, 19 nt, Homo sapiens
  misc_RNA (1)...(19): siRNA sense strand
aaacaaggcugauaauuug

SEQ ID NO: 165200 - RNA, 19 nt, Homo sapiens
  misc_RNA (1)...(19): siRNA sense strand
ggaagagucuaccuguuua

SEQ ID NO: 165201 - RNA, 19 nt, Homo sapiens
  misc_RNA (1)...(19): siRNA sense strand
gaacgggacuuucgcauca

SEQ ID NO: 165202 - RNA, 19 nt, Homo sapiens
  misc_RNA (1)...(19): siRNA sense strand
ggacagaaaucacaguuca

SEQ ID NO: 165203 - RNA, 19 nt, Homo sapiens
  misc_RNA (1)...(19): siRNA sense strand
gcagauuacucuucucaaa

SEQ ID NO: 165204 - RNA, 19 nt, Homo sapiens
  misc_RNA (1)...(19): siRNA sense strand
caacauggauggcuuuaau

SEQ ID NO: 165205 - RNA, 19 nt, Homo sapiens
  misc_RNA (1)...(19): siRNA sense strand
ggauggcuauggagauuua

SEQ ID NO: 165206 - RNA, 19 nt, Homo sapiens
  misc_RNA (1)...(19): siRNA sense strand
caagaaugcucagauaauu

SEQ ID NO: 165207 - RNA, 19 nt, Homo sapiens
  misc_RNA (1)...(19): siRNA sense strand
ggacaaacaucuucuucug

SEQ ID NO: 165208 - RNA, 19 nt, Homo sapiens
  misc_RNA (1)...(19): siRNA sense strand
gaauugaacugcagaacug

SEQ ID NO: 165209 - RNA, 19 nt, Homo sapiens
  misc_RNA (1)...(19): siRNA sense strand
acaaacaucuucuucugua

SEQ ID NO: 165210 - RNA, 19 nt, Homo sapiens
  misc_RNA (1)...(19): siRNA sense strand
gaacaaauuuucagcauug

SEQ ID NO: 165211 - RNA, 19 nt, Homo sapiens
  misc_RNA (1)...(19): siRNA sense strand
gaaaguaaugguaguugua

SEQ ID NO: 165212 - RNA, 19 nt, Homo sapiens
  misc_RNA (1)...(19): siRNA sense strand
guucaacucuggucacaaa

SEQ ID NO: 165213 - RNA, 19 nt, Homo sapiens
  misc_RNA (1)...(19): siRNA sense strand
ggagaauacuuuguuaaug

SEQ ID NO: 165214 - RNA, 19 nt, Homo sapiens
  misc_RNA (1)...(19): siRNA sense strand
caacucuggucacaaagua

SEQ ID NO: 165215 - RNA, 19 nt, Homo sapiens
  misc_RNA (1)...(19): siRNA sense strand
uauagaagcuucauucaca

SEQ ID NO: 165216 - RNA, 19 nt, Homo sapiens
  misc_RNA (1)...(19): siRNA sense strand
aaugaaaccugaugagaaa

SEQ ID NO: 165217 - RNA, 19 nt, Homo sapiens
  misc_RNA (1)...(19): siRNA sense strand
gcagaaaucaacaccuaua

SEQ ID NO: 165218 - RNA, 19 nt, Homo sapiens
  misc_RNA (1)...(19): siRNA sense strand
gcagaagaauaugguagua

SEQ ID NO: 165219 - RNA, 19 nt, Homo sapiens
  misc_RNA (1)...(19): siRNA sense strand
ccucauagauguugugguu

SEQ ID NO: 165220 - RNA, 19 nt, Homo sapiens
  misc_RNA (1)...(19): siRNA sense strand
aacaagaucuaccaacaua

SEQ ID NO: 165221 - RNA, 19 nt, Homo sapiens
  misc_RNA (1)...(19): siRNA sense strand
gagaacaacaggugacuuu

SEQ ID NO: 165222 - RNA, 19 nt, Homo sapiens
  misc_RNA (1)...(19): siRNA sense strand
gccaaggucuucaguauuc

SEQ ID NO: 165223 - RNA, 19 nt, Homo sapiens
  misc_RNA (1)...(19): siRNA sense strand
gggaugcaguaaagaauuu

SEQ ID NO: 165224 - RNA, 19 nt, Homo sapiens
  misc_RNA (1)...(19): siRNA sense strand
guacaugagugaccuaaag

SEQ ID NO: 165225 - RNA, 19 nt, Homo sapiens
  misc_RNA (1)...(19): siRNA sense strand
gaggauggacuuugcauuu

SEQ ID NO: 165226 - RNA, 19 nt, Homo sapiens
  misc_RNA (1)...(19): siRNA sense strand
uaaauguccuguugaccua

SEQ ID NO: 165227 - RNA, 19 nt, Homo sapiens
  misc_RNA (1)...(19): siRNA sense strand
gaaaggugccugcagaaga

SEQ ID NO: 165228 - RNA, 19 nt, Homo sapiens
  misc_RNA (1)...(19): siRNA sense strand
ugagugaccuaaagaaaga

SEQ ID NO: 165229 - RNA, 19 nt, Homo sapiens
  misc_RNA (1)...(19): siRNA sense strand
gcagauaucaauccacuga

SEQ ID NO: 165230 - RNA, 19 nt, Homo sapiens
  misc_RNA (1)...(19): siRNA sense strand
gcacaaaguauucccagaa

SEQ ID NO: 165231 - RNA, 19 nt, Homo sapiens
  misc_RNA (1)...(19): siRNA sense strand
caagaacaacccuuuauug

SEQ ID NO: 165232 - RNA, 19 nt, Homo sapiens
  misc_RNA (1)...(19): siRNA sense strand
gcaauucaauaugcaagaa

SEQ ID NO: 165233 - RNA, 19 nt, Homo sapiens
  misc_RNA (1)...(19): siRNA sense strand
gcaaaguucagaccuacua

SEQ ID NO: 165234 - RNA, 19 nt, Homo sapiens
  misc_RNA (1)...(19): siRNA sense strand
gagucuaccuguuuacuau

SEQ ID NO: 165235 - RNA, 19 nt, Homo sapiens
  misc_RNA (1)...(19): siRNA sense strand
gacauuaggagaacaaauu

SEQ ID NO: 165236 - RNA, 19 nt, Homo sapiens
  misc_RNA (1)...(19): siRNA sense strand
gcccugcccuucccucaua

SEQ ID NO: 165237 - RNA, 19 nt, Homo sapiens
  misc_RNA (1)...(19): siRNA sense strand
gcacaucauuuauauacag

SEQ ID NO: 165238 - RNA, 19 nt, Homo sapiens
  misc_RNA (1)...(19): siRNA sense strand
aaaggugccugcagaagaa

SEQ ID NO: 165239 - RNA, 19 nt, Homo sapiens
  misc_RNA (1)...(19): siRNA sense strand
caacaggaguuauaauagg

SEQ ID NO: 165240 - RNA, 19 nt, Homo sapiens
  misc_RNA (1)...(19): siRNA sense strand
agacaaggcuggugacauc

SEQ ID NO: 165241 - RNA, 19 nt, Homo sapiens
  misc_RNA (1)...(19): siRNA sense strand
gcacuauccgcacaaagua

SEQ ID NO: 165242 - RNA, 19 nt, Homo sapiens
  misc_RNA (1)...(19): siRNA sense strand
caagaucuaccaacauaaa

SEQ ID NO: 165243 - RNA, 19 nt, Homo sapiens
  misc_RNA (1)...(19): siRNA sense strand
gaaugggagauguguauaa

SEQ ID NO: 165244 - RNA, 19 nt, Homo sapiens
  misc_RNA (1)...(19): siRNA sense strand
gaaaagaacccacugaugu

SEQ ID NO: 165245 - RNA, 19 nt, Homo sapiens
  misc_RNA (1)...(19): siRNA sense strand
gaacaacaggugacuuuua

SEQ ID NO: 165246 - RNA, 19 nt, Homo sapiens
  misc_RNA (1)...(19): siRNA sense strand
guauauaacaucacacuug

SEQ ID NO: 165247 - RNA, 19 nt, Homo sapiens
  misc_RNA (1)...(19): siRNA sense strand
ucacuuuggucaacaagaa

SEQ ID NO: 165248 - RNA, 19 nt, Homo sapiens
  misc_RNA (1)...(19): siRNA sense strand
gaaugagaauggcaauauc

SEQ ID NO: 165249 - RNA, 19 nt, Homo sapiens
  misc_RNA (1)...(19): siRNA sense strand
uaaacaagccuuugaccaa

SEQ ID NO: 165250 - RNA, 19 nt, Homo sapiens
  misc_RNA (1)...(19): siRNA sense strand
gaaguauaauugcuggaau

SEQ ID NO: 165251 - RNA, 19 nt, Homo sapiens
  misc_RNA (1)...(19): siRNA sense strand
guucagaccuacuaagcaa

SEQ ID NO: 165252 - RNA, 19 nt, Homo sapiens
  misc_RNA (1)...(19): siRNA sense strand
gcagugcagcaguuuauaa

SEQ ID NO: 165253 - RNA, 19 nt, Homo sapiens
  misc_RNA (1)...(19): siRNA sense strand
uauaauugcuggaauccuu

SEQ ID NO: 165254 - RNA, 19 nt, Homo sapiens
  misc_RNA (1)...(19): siRNA sense strand
ggaguuauaauaggaagua

SEQ ID NO: 165255 - RNA, 19 nt, Homo sapiens
  misc_RNA (1)...(19): siRNA sense strand
gagcacaucauuuauauac

SEQ ID NO: 165256 - RNA, 19 nt, Homo sapiens
  misc_RNA (1)...(19): siRNA sense strand
cacaaaguauucccagaaa

SEQ ID NO: 165257 - RNA, 19 nt, Homo sapiens
  misc_RNA (1)...(19): siRNA sense strand
gacaauauacugagguuug

SEQ ID NO: 165258 - RNA, 19 nt, Homo sapiens
  misc_RNA (1)...(19): siRNA sense strand
gaaguaccaacaggaguua

SEQ ID NO: 165259 - RNA, 19 nt, Homo sapiens
  misc_RNA (1)...(19): siRNA sense strand
ucaaggaggagacaacuuu

SEQ ID NO: 165260 - RNA, 19 nt, Homo sapiens
  misc_RNA (1)...(19): siRNA sense strand
guguauaaauguccuguug

SEQ ID NO: 165261 - RNA, 19 nt, Homo sapiens
  misc_RNA (1)...(19): siRNA sense strand
uaaugugacuaccagaauu

SEQ ID NO: 165262 - RNA, 19 nt, Homo sapiens
  misc_RNA (1)...(19): siRNA sense strand
gcacuagcccugcccuuga

SEQ ID NO: 165263 - RNA, 19 nt, Homo sapiens
  misc_RNA (1)...(19): siRNA sense strand
ucaaguggccauuguauau

SEQ ID NO: 165264 - RNA, 19 nt, Homo sapiens
  misc_RNA (1)...(19): siRNA sense strand
gugcagcaguuuauaaauc

SEQ ID NO: 165265 - RNA, 19 nt, Homo sapiens
  misc_RNA (1)...(19): siRNA sense strand
caacggguguguguucuga

SEQ ID NO: 165266 - RNA, 19 nt, Homo sapiens
  misc_RNA (1)...(19): siRNA sense strand
agaaaaggcugggacauua

SEQ ID NO: 165267 - RNA, 19 nt, Homo sapiens
  misc_RNA (1)...(19): siRNA sense strand
gaacugcuuccuguaguaa

SEQ ID NO: 165268 - RNA, 19 nt, Homo sapiens
  misc_RNA (1)...(19): siRNA sense strand
aaauuccucuccuguauga

SEQ ID NO: 165269 - RNA, 19 nt, Homo sapiens
  misc_RNA (1)...(19): siRNA sense strand
caaagacuguggugaggau

SEQ ID NO: 165270 - RNA, 19 nt, Homo sapiens
  misc_RNA (1)...(19): siRNA sense strand
gccauuugaucuuuccuaa

SEQ ID NO: 165271 - RNA, 19 nt, Homo sapiens
  misc_RNA (1)...(19): siRNA sense strand
guugaaagcugugauugau

SEQ ID NO: 165272 - RNA, 19 nt, Homo sapiens
  misc_RNA (1)...(19): siRNA sense strand
aauaccagcugcucaagaa

SEQ ID NO: 165273 - RNA, 19 nt, Homo sapiens
  misc_RNA (1)...(19): siRNA sense strand
ggagauguguauaaauguc

SEQ ID NO: 165274 - RNA, 19 nt, Homo sapiens
  misc_RNA (1)...(19): siRNA sense strand
ccgagcacaucauuuauau

SEQ ID NO: 165275 - RNA, 19 nt, Homo sapiens
  misc_RNA (1)...(19): siRNA sense strand
gggauccgauggagccuuu

SEQ ID NO: 165276 - RNA, 19 nt, Homo sapiens
  misc_RNA (1)...(19): siRNA sense strand
ugggagauguguauaaaug

SEQ ID NO: 165277 - RNA, 19 nt, Homo sapiens
  misc_RNA (1)...(19): siRNA sense strand
caaugugucugaugaagca

SEQ ID NO: 165278 - RNA, 19 nt, Homo sapiens
  misc_RNA (1)...(19): siRNA sense strand
ggaguggcuuuccugagaa

SEQ ID NO: 165279 - RNA, 19 nt, Homo sapiens
  misc_RNA (1)...(19): siRNA sense strand
cugcagaaaucaacaccua

SEQ ID NO: 165280 - RNA, 19 nt, Homo sapiens
  misc_RNA (1)...(19): siRNA sense strand
gcucaagaacaacccuuua

SEQ ID NO: 165281 - RNA, 19 nt, Homo sapiens
  misc_RNA (1)...(19): siRNA sense strand
gggaaucaguauuacacaa

SEQ ID NO: 165282 - RNA, 19 nt, Homo sapiens
  misc_RNA (1)...(19): siRNA sense strand
uaaugaaaccugaugagaa

SEQ ID NO: 165283 - RNA, 19 nt, Homo sapiens
  misc_RNA (1)...(19): siRNA sense strand
caguugauguggauaaaga

SEQ ID NO: 165284 - RNA, 19 nt, Homo sapiens
  misc_RNA (1)...(19): siRNA sense strand
gcgacgaagugcuacgaaa

SEQ ID NO: 165285 - RNA, 19 nt, Homo sapiens
  misc_RNA (1)...(19): siRNA sense strand
gaagaaaugauuguagcaa

SEQ ID NO: 165286 - RNA, 19 nt, Homo sapiens
  misc_RNA (1)...(19): siRNA sense strand
aauguuaccugcugguuga

SEQ ID NO: 165287 - RNA, 19 nt, Homo sapiens
  misc_RNA (1)...(19): siRNA sense strand
guaagcauggcaacuguaa

SEQ ID NO: 165288 - RNA, 19 nt, Homo sapiens
  misc_RNA (1)...(19): siRNA sense strand
caaaauuccucuccuguau

SEQ ID NO: 165289 - RNA, 19 nt, Homo sapiens
  misc_RNA (1)...(19): siRNA sense strand
acacuggaauuguuguuga

SEQ ID NO: 165290 - RNA, 19 nt, Homo sapiens
  misc_RNA (1)...(19): siRNA sense strand
ggucagcaccaauuucuug

SEQ ID NO: 165291 - RNA, 19 nt, Homo sapiens
  misc_RNA (1)...(19): siRNA sense strand
aaagaaagaggaaggaaga

SEQ ID NO: 165292 - RNA, 19 nt, Homo sapiens
  misc_RNA (1)...(19): siRNA sense strand
gagacaacuuucagaugga

SEQ ID NO: 165293 - RNA, 19 nt, Homo sapiens
  misc_RNA (1)...(19): siRNA sense strand
uggaguggcuuuccugaga

SEQ ID NO: 165294 - RNA, 19 nt, Homo sapiens
  misc_RNA (1)...(19): siRNA sense strand
agauaucaauccacugaaa

SEQ ID NO: 165295 - RNA, 19 nt, Homo sapiens
  misc_RNA (1)...(19): siRNA sense strand
ccacugauguaccuaacug

SEQ ID NO: 165296 - RNA, 19 nt, Homo sapiens
  misc_RNA (1)...(19): siRNA sense strand
acaaaguauugcugaugua

SEQ ID NO: 165297 - RNA, 19 nt, Homo sapiens
  misc_RNA (1)...(19): siRNA sense strand
gcaagaaucucaacaacuc

SEQ ID NO: 165298 - RNA, 19 nt, Homo sapiens
  misc_RNA (1)...(19): siRNA sense strand
ggacaaggcugugguauac

SEQ ID NO: 165299 - RNA, 19 nt, Homo sapiens
  misc_RNA (1)...(19): siRNA sense strand
gagaggagccuguggagua

SEQ ID NO: 165300 - RNA, 19 nt, Homo sapiens
  misc_RNA (1)...(19): siRNA sense strand
gcagugcuauucccaguaa

SEQ ID NO: 165301 - RNA, 19 nt, Homo sapiens
  misc_RNA (1)...(19): siRNA sense strand
ucacaucgcucucaacuuc

SEQ ID NO: 165302 - RNA, 19 nt, Homo sapiens
  misc_RNA (1)...(19): siRNA sense strand
gaaccucacuuacggcuau

SEQ ID NO: 165303 - RNA, 19 nt, Homo sapiens
  misc_RNA (1)...(19): siRNA sense strand
ccaaagggaaccucacuua

SEQ ID NO: 165304 - RNA, 19 nt, Homo sapiens
  misc_RNA (1)...(19): siRNA sense strand
gggaacagauggccuccua

SEQ ID NO: 165305 - RNA, 19 nt, Homo sapiens
  misc_RNA (1)...(19): siRNA sense strand
gacaaacucucgccgauuc

SEQ ID NO: 165306 - RNA, 19 nt, Homo sapiens
  misc_RNA (1)...(19): siRNA sense strand
guacaaagcccugaagaug

SEQ ID NO: 165307 - RNA, 19 nt, Homo sapiens
  misc_RNA (1)...(19): siRNA sense strand
ggaccaggauggcuacaau

SEQ ID NO: 165308 - RNA, 19 nt, Homo sapiens
  misc_RNA (1)...(19): siRNA sense strand
caaagggccuggaguugga

SEQ ID NO: 165309 - RNA, 19 nt, Homo sapiens
  misc_RNA (1)...(19): siRNA sense strand
gaugacagcuaccuaggau

SEQ ID NO: 165310 - RNA, 19 nt, Homo sapiens
  misc_RNA (1)...(19): siRNA sense strand
gaagaugcccuaccgaauc

SEQ ID NO: 165311 - RNA, 19 nt, Homo sapiens
  misc_RNA (1)...(19): siRNA sense strand
gggaguaguguuuguauuu

SEQ ID NO: 165312 - RNA, 19 nt, Homo sapiens
  misc_RNA (1)...(19): siRNA sense strand
acagauggccuccuacuuu

SEQ ID NO: 165313 - RNA, 19 nt, Homo sapiens
  misc_RNA (1)...(19): siRNA sense strand
caggagggcugggcucuaa

SEQ ID NO: 165314 - RNA, 19 nt, Homo sapiens
  misc_RNA (1)...(19): siRNA sense strand
caggauggcuacaaugaug

SEQ ID NO: 165315 - RNA, 19 nt, Homo sapiens
  misc_RNA (1)...(19): siRNA sense strand
guaccugggugacaagaau

SEQ ID NO: 165316 - RNA, 19 nt, Homo sapiens
  misc_RNA (1)...(19): siRNA sense strand
gucagcagcuccuauaugu

SEQ ID NO: 165317 - RNA, 19 nt, Homo sapiens
  misc_RNA (1)...(19): siRNA sense strand
cagauggccuccuacuuug

SEQ ID NO: 165318 - RNA, 19 nt, Homo sapiens
  misc_RNA (1)...(19): siRNA sense strand
cagcagcuccuauauguga

SEQ ID NO: 165319 - RNA, 19 nt, Homo sapiens
  misc_RNA (1)...(19): siRNA sense strand
ggccagcccuacauuauca

SEQ ID NO: 165320 - RNA, 19 nt, Homo sapiens
  misc_RNA (1)...(19): siRNA sense strand
ggaguaguguuuguauuuc

SEQ ID NO: 165321 - RNA, 19 nt, Homo sapiens
  misc_RNA (1)...(19): siRNA sense strand
gaacgagucagaauuucga

SEQ ID NO: 165322 - RNA, 19 nt, Homo sapiens
  misc_RNA (1)...(19): siRNA sense strand
gcuccuaggucuacucauc

SEQ ID NO: 165323 - RNA, 19 nt, Homo sapiens
  misc_RNA (1)...(19): siRNA sense strand
acacguugcugacuccauu

SEQ ID NO: 165324 - RNA, 19 nt, Homo sapiens
  misc_RNA (1)...(19): siRNA sense strand
gagccaaagucugcaguug

SEQ ID NO: 165325 - RNA, 19 nt, Homo sapiens
  misc_RNA (1)...(19): siRNA sense strand
ccugagcugugacuacuuu

SEQ ID NO: 165326 - RNA, 19 nt, Homo sapiens
  misc_RNA (1)...(19): siRNA sense strand
gagaagacaacaucugugu

SEQ ID NO: 165327 - RNA, 19 nt, Homo sapiens
  misc_RNA (1)...(19): siRNA sense strand
caggaacgagucagaauuu

SEQ ID NO: 165328 - RNA, 19 nt, Homo sapiens
  misc_RNA (1)...(19): siRNA sense strand
cauccuagccauccuguuu

SEQ ID NO: 165329 - RNA, 19 nt, Homo sapiens
  misc_RNA (1)...(19): siRNA sense strand
gggacgggcuggaugacuu

SEQ ID NO: 165330 - RNA, 19 nt, Homo sapiens
  misc_RNA (1)...(19): siRNA sense strand
cuacaagcuuggauucuuc

SEQ ID NO: 165331 - RNA, 19 nt, Homo sapiens
  misc_RNA (1)...(19): siRNA sense strand
cauuuagccugcaguguga

SEQ ID NO: 165332 - RNA, 19 nt, Homo sapiens
  misc_RNA (1)...(19): siRNA sense strand
gcccggaggcugaguguuu

SEQ ID NO: 165333 - RNA, 19 nt, Homo sapiens
  misc_RNA (1)...(19): siRNA sense strand
gagaccagccucagaagga

SEQ ID NO: 165334 - RNA, 19 nt, Homo sapiens
  misc_RNA (1)...(19): siRNA sense strand
gucagaauuucgagacaaa

SEQ ID NO: 165335 - RNA, 19 nt, Homo sapiens
  misc_RNA (1)...(19): siRNA sense strand
caaacgcucccucccauau

SEQ ID NO: 165336 - RNA, 19 nt, Homo sapiens
  misc_RNA (1)...(19): siRNA sense strand
gacauucgaucccucuaca

SEQ ID NO: 165337 - RNA, 19 nt, Homo sapiens
  misc_RNA (1)...(19): siRNA sense strand
cgagaggauugcagagaga

SEQ ID NO: 165338 - RNA, 19 nt, Homo sapiens
  misc_RNA (1)...(19): siRNA sense strand
caauggauauccugaucug

SEQ ID NO: 165339 - RNA, 19 nt, Homo sapiens
  misc_RNA (1)...(19): siRNA sense strand
ggcaugcgcuccacuguac

SEQ ID NO: 165340 - RNA, 19 nt, Homo sapiens
  misc_RNA (1)...(19): siRNA sense strand
ugacacagaagacuuuguu

SEQ ID NO: 165341 - RNA, 19 nt, Homo sapiens
  misc_RNA (1)...(19): siRNA sense strand
ggcaauggauauccugauc

SEQ ID NO: 165342 - RNA, 19 nt, Homo sapiens
  misc_RNA (1)...(19): siRNA sense strand
uggauauccugaucugauu

SEQ ID NO: 165343 - RNA, 19 nt, Homo sapiens
  misc_RNA (1)...(19): siRNA sense strand
gaccugcuguccaccaugu

SEQ ID NO: 165344 - RNA, 19 nt, Homo sapiens
  misc_RNA (1)...(19): siRNA sense strand
gaacagauggccuccuacu

SEQ ID NO: 165345 - RNA, 19 nt, Homo sapiens
  misc_RNA (1)...(19): siRNA sense strand
gcagggaguaguguuugua

SEQ ID NO: 165346 - RNA, 19 nt, Homo sapiens
  misc_RNA (1)...(19): siRNA sense strand
gcaggguggugcugucuac

SEQ ID NO: 165347 - RNA, 19 nt, Homo sapiens
  misc_RNA (1)...(19): siRNA sense strand
cagauaacuucacccgaau

SEQ ID NO: 165348 - RNA, 19 nt, Homo sapiens
  misc_RNA (1)...(19): siRNA sense strand
cagcaagaaucucaacaac

SEQ ID NO: 165349 - RNA, 19 nt, Homo sapiens
  misc_RNA (1)...(19): siRNA sense strand
ugacaagaaugcccugaac

SEQ ID NO: 165350 - RNA, 19 nt, Homo sapiens
  misc_RNA (1)...(19): siRNA sense strand
ucacccgaauucuggagua

SEQ ID NO: 165351 - RNA, 19 nt, Homo sapiens
  misc_RNA (1)...(19): siRNA sense strand
gauaacuucacccgaauuc

SEQ ID NO: 165352 - RNA, 19 nt, Homo sapiens
  misc_RNA (1)...(19): siRNA sense strand
ccauugaauuugacagcaa

SEQ ID NO: 165353 - RNA, 19 nt, Homo sapiens
  misc_RNA (1)...(19): siRNA sense strand
guacucaggacucgucaga

SEQ ID NO: 165354 - RNA, 19 nt, Homo sapiens
  misc_RNA (1)...(19): siRNA sense strand
uaacuucacccgaauucug

SEQ ID NO: 165355 - RNA, 19 nt, Homo sapiens
  misc_RNA (1)...(19): siRNA sense strand
ggucagcagcuccuauaug

SEQ ID NO: 165356 - RNA, 19 nt, Homo sapiens
  misc_RNA (1)...(19): siRNA sense strand
ugaugaguuuggccgauuu

SEQ ID NO: 165357 - RNA, 19 nt, Homo sapiens
  misc_RNA (1)...(19): siRNA sense strand
ccaggccaguuccaucuau

SEQ ID NO: 165358 - RNA, 19 nt, Homo sapiens
  misc_RNA (1)...(19): siRNA sense strand
gcacccugccgcucagauu

SEQ ID NO: 165359 - RNA, 19 nt, Homo sapiens
  misc_RNA (1)...(19): siRNA sense strand
ucaucuacauccucuacaa

SEQ ID NO: 165360 - RNA, 19 nt, Homo sapiens
  misc_RNA (1)...(19): siRNA sense strand
gcaauggaccaaggcagaa

SEQ ID NO: 165361 - RNA, 19 nt, Homo sapiens
  misc_RNA (1)...(19): siRNA sense strand
gugugaggcuguguacaaa

SEQ ID NO: 165362 - RNA, 19 nt, Homo sapiens
  misc_RNA (1)...(19): siRNA sense strand
cgggagcaccagccauuua

SEQ ID NO: 165363 - RNA, 19 nt, Homo sapiens
  misc_RNA (1)...(19): siRNA sense strand
caacaagagagccaaaguc

SEQ ID NO: 165364 - RNA, 19 nt, Homo sapiens
  misc_RNA (1)...(19): siRNA sense strand
cuauaugugaccagaguua

SEQ ID NO: 165365 - RNA, 19 nt, Homo sapiens
  misc_RNA (1)...(19): siRNA sense strand
gcaucaaccuuagcuucug

SEQ ID NO: 165366 - RNA, 19 nt, Homo sapiens
  misc_RNA (1)...(19): siRNA sense strand
gaaggucagcagcuccuau

SEQ ID NO: 165367 - RNA, 19 nt, Homo sapiens
  misc_RNA (1)...(19): siRNA sense strand
aaagcgacgugguuuccuu

SEQ ID NO: 165368 - RNA, 19 nt, Homo sapiens
  misc_RNA (1)...(19): siRNA sense strand
ccugcuaccucuccacaga

SEQ ID NO: 165369 - RNA, 19 nt, Homo sapiens
  misc_RNA (1)...(19): siRNA sense strand
guugcugacuccauugguu

SEQ ID NO: 165370 - RNA, 19 nt, Homo sapiens
  misc_RNA (1)...(19): siRNA sense strand
ucuacaagcuuggauucuu

SEQ ID NO: 165371 - RNA, 19 nt, Homo sapiens
  misc_RNA (1)...(19): siRNA sense strand
gggagcagaaccaugugua

SEQ ID NO: 165372 - RNA, 19 nt, Homo sapiens
  misc_RNA (1)...(19): siRNA sense strand
gaggauugcagagagauga

SEQ ID NO: 165373 - RNA, 19 nt, Homo sapiens
  misc_RNA (1)...(19): siRNA sense strand
gaauggggcucgagaggau

SEQ ID NO: 165374 - RNA, 19 nt, Homo sapiens
  misc_RNA (1)...(19): siRNA sense strand
ggcuaugucaccauccuua

SEQ ID NO: 165375 - RNA, 19 nt, Homo sapiens
  misc_RNA (1)...(19): siRNA sense strand
ccucaaugcuucuggaaaa

SEQ ID NO: 165376 - RNA, 19 nt, Homo sapiens
  misc_RNA (1)...(19): siRNA sense strand
ugaugacacagaagacuuu

SEQ ID NO: 165377 - RNA, 19 nt, Homo sapiens
  misc_RNA (1)...(19): siRNA sense strand
acucaggacucgucagaca

SEQ ID NO: 165378 - RNA, 19 nt, Homo sapiens
  misc_RNA (1)...(19): siRNA sense strand
ucaggccagcccuacauua

SEQ ID NO: 165379 - RNA, 19 nt, Homo sapiens
  misc_RNA (1)...(19): siRNA sense strand
agaccuggauggcaaugga

SEQ ID NO: 165380 - RNA, 19 nt, Homo sapiens
  misc_RNA (1)...(19): siRNA sense strand
gggcagcaggacaggguua

SEQ ID NO: 165381 - RNA, 19 nt, Homo sapiens
  misc_RNA (1)...(19): siRNA sense strand
ggacgggcuggaugacuug

SEQ ID NO: 165382 - RNA, 19 nt, Homo sapiens
  misc_RNA (1)...(19): siRNA sense strand
gcuaugucaccauccuuaa

SEQ ID NO: 165383 - RNA, 19 nt, Homo sapiens
  misc_RNA (1)...(19): siRNA sense strand
ucaggaacgagucagaauu

SEQ ID NO: 165384 - RNA, 19 nt, Homo sapiens
  misc_RNA (1)...(19): siRNA sense strand
ggagcacccaaggcuaaua

SEQ ID NO: 165385 - RNA, 19 nt, Homo sapiens
  misc_RNA (1)...(19): siRNA sense strand
gauucucaguggaguuuua

SEQ ID NO: 165386 - RNA, 19 nt, Homo sapiens
  misc_RNA (1)...(19): siRNA sense strand
ucacuggccaugaugaguu

SEQ ID NO: 165387 - RNA, 19 nt, Homo sapiens
  misc_RNA (1)...(19): siRNA sense strand
cacuggccaugaugaguuu

SEQ ID NO: 165388 - RNA, 19 nt, Homo sapiens
  misc_RNA (1)...(19): siRNA sense strand
aagcuuggauucuucaaac

SEQ ID NO: 165389 - RNA, 19 nt, Homo sapiens
  misc_RNA (1)...(19): siRNA sense strand
caaggcagaaggcagcuau

SEQ ID NO: 165390 - RNA, 19 nt, Homo sapiens
  misc_RNA (1)...(19): siRNA sense strand
uggacaaggcugugguaua

SEQ ID NO: 165391 - RNA, 19 nt, Homo sapiens
  misc_RNA (1)...(19): siRNA sense strand
gaacagacggggucagugu

SEQ ID NO: 165392 - RNA, 19 nt, Homo sapiens
  misc_RNA (1)...(19): siRNA sense strand
ccgaguaccugaucaaccu

SEQ ID NO: 165393 - RNA, 19 nt, Homo sapiens
  misc_RNA (1)...(19): siRNA sense strand
ccagcagggaguaguguuu

SEQ ID NO: 165394 - RNA, 19 nt, Homo sapiens
  misc_RNA (1)...(19): siRNA sense strand
ugcuaccucuccacagaua

SEQ ID NO: 165395 - RNA, 19 nt, Homo sapiens
  misc_RNA (1)...(19): siRNA sense strand
agacccugcucauccagaa

SEQ ID NO: 165396 - RNA, 19 nt, Homo sapiens
  misc_RNA (1)...(19): siRNA sense strand
gugccucccucaccaucuu

SEQ ID NO: 165397 - RNA, 19 nt, Homo sapiens
  misc_RNA (1)...(19): siRNA sense strand
gaacagaucugaugaauga

SEQ ID NO: 165398 - RNA, 19 nt, Homo sapiens
  misc_RNA (1)...(19): siRNA sense strand
caagagagcugaagacuau

SEQ ID NO: 165399 - RNA, 19 nt, Homo sapiens
  misc_RNA (1)...(19): siRNA sense strand
gaagggaguuugcuaaauu

SEQ ID NO: 165400 - RNA, 19 nt, Homo sapiens
  misc_RNA (1)...(19): siRNA sense strand
ccacagacauuuacauuaa

SEQ ID NO: 165401 - RNA, 19 nt, Homo sapiens
  misc_RNA (1)...(19): siRNA sense strand
gcgcauaucuggaaauuug

SEQ ID NO: 165402 - RNA, 19 nt, Homo sapiens
  misc_RNA (1)...(19): siRNA sense strand
gaagagggauaauacaaau

SEQ ID NO: 165403 - RNA, 19 nt, Homo sapiens
  misc_RNA (1)...(19): siRNA sense strand
gugaagacauggaugcuua

SEQ ID NO: 165404 - RNA, 19 nt, Homo sapiens
  misc_RNA (1)...(19): siRNA sense strand
gaaagacgauuuggagaau

SEQ ID NO: 165405 - RNA, 19 nt, Homo sapiens
  misc_RNA (1)...(19): siRNA sense strand
guaauucaguugaucauug

SEQ ID NO: 165406 - RNA, 19 nt, Homo sapiens
  misc_RNA (1)...(19): siRNA sense strand
gaaaugaggaggauuacuu

SEQ ID NO: 165407 - RNA, 19 nt, Homo sapiens
  misc_RNA (1)...(19): siRNA sense strand
caaaucauguggagaaugu

SEQ ID NO: 165408 - RNA, 19 nt, Homo sapiens
  misc_RNA (1)...(19): siRNA sense strand
gaacugcaccagcccauuu

SEQ ID NO: 165409 - RNA, 19 nt, Homo sapiens
  misc_RNA (1)...(19): siRNA sense strand
guacagauccgaaguuuca

SEQ ID NO: 165410 - RNA, 19 nt, Homo sapiens
  misc_RNA (1)...(19): siRNA sense strand
cagaugaaguuaacaguga

SEQ ID NO: 165411 - RNA, 19 nt, Homo sapiens
  misc_RNA (1)...(19): siRNA sense strand
ggaguuugcuaaauuugaa

SEQ ID NO: 165412 - RNA, 19 nt, Homo sapiens
  misc_RNA (1)...(19): siRNA sense strand
gugcagagccuucaauaaa

SEQ ID NO: 165413 - RNA, 19 nt, Homo sapiens
  misc_RNA (1)...(19): siRNA sense strand
gaacaacgaggucaugguu

SEQ ID NO: 165414 - RNA, 19 nt, Homo sapiens
  misc_RNA (1)...(19): siRNA sense strand
gaaacuugguggcauuguu

SEQ ID NO: 165415 - RNA, 19 nt, Homo sapiens
  misc_RNA (1)...(19): siRNA sense strand
gaaaugguguuugcaagug

SEQ ID NO: 165416 - RNA, 19 nt, Homo sapiens
  misc_RNA (1)...(19): siRNA sense strand
ggaagagggauaauacaaa

SEQ ID NO: 165417 - RNA, 19 nt, Homo sapiens
  misc_RNA (1)...(19): siRNA sense strand
caaauugucagaaggagua

SEQ ID NO: 165418 - RNA, 19 nt, Homo sapiens
  misc_RNA (1)...(19): siRNA sense strand
ggagaaguauuuaaugaac

SEQ ID NO: 165419 - RNA, 19 nt, Homo sapiens
  misc_RNA (1)...(19): siRNA sense strand
cccagaggcuccaaagaua

SEQ ID NO: 165420 - RNA, 19 nt, Homo sapiens
  misc_RNA (1)...(19): siRNA sense strand
gcugaagacuaucccauug

SEQ ID NO: 165421 - RNA, 19 nt, Homo sapiens
  misc_RNA (1)...(19): siRNA sense strand
agacaucauuccaauugua

SEQ ID NO: 165422 - RNA, 19 nt, Homo sapiens
  misc_RNA (1)...(19): siRNA sense strand
gauccugugucccauugua

SEQ ID NO: 165423 - RNA, 19 nt, Homo sapiens
  misc_RNA (1)...(19): siRNA sense strand
ggaaguagagguuauucuu

SEQ ID NO: 165424 - RNA, 19 nt, Homo sapiens
  misc_RNA (1)...(19): siRNA sense strand
ucagaaggaguaacaauaa

SEQ ID NO: 165425 - RNA, 19 nt, Homo sapiens
  misc_RNA (1)...(19): siRNA sense strand
gaaaaugaaugccaaaugg

SEQ ID NO: 165426 - RNA, 19 nt, Homo sapiens
  misc_RNA (1)...(19): siRNA sense strand
gcaagugucguguguguga

SEQ ID NO: 165427 - RNA, 19 nt, Homo sapiens
  misc_RNA (1)...(19): siRNA sense strand
gugauaauuucaacuguga

SEQ ID NO: 165428 - RNA, 19 nt, Homo sapiens
  misc_RNA (1)...(19): siRNA sense strand
acaauucccuuuccucaga

SEQ ID NO: 165429 - RNA, 19 nt, Homo sapiens
  misc_RNA (1)...(19): siRNA sense strand
gaaggaguaacaauaaguu

SEQ ID NO: 165430 - RNA, 19 nt, Homo sapiens
  misc_RNA (1)...(19): siRNA sense strand
gcaauguaauucaguugau

SEQ ID NO: 165431 - RNA, 19 nt, Homo sapiens
  misc_RNA (1)...(19): siRNA sense strand
gguagaaagucgggacaaa

SEQ ID NO: 165432 - RNA, 19 nt, Homo sapiens
  misc_RNA (1)...(19): siRNA sense strand
gaaggauguugacgacugu

SEQ ID NO: 165433 - RNA, 19 nt, Homo sapiens
  misc_RNA (1)...(19): siRNA sense strand
aaacagcgcauaucuggaa

SEQ ID NO: 165434 - RNA, 19 nt, Homo sapiens
  misc_RNA (1)...(19): siRNA sense strand
ccagacaucauuccaauug

SEQ ID NO: 165435 - RNA, 19 nt, Homo sapiens
  misc_RNA (1)...(19): siRNA sense strand
guaaggagaaggauguuga

SEQ ID NO: 165436 - RNA, 19 nt, Homo sapiens
  misc_RNA (1)...(19): siRNA sense strand
ugauagauccaauggcuua

SEQ ID NO: 165437 - RNA, 19 nt, Homo sapiens
  misc_RNA (1)...(19): siRNA sense strand
gaaaucugcaguaacaaug

SEQ ID NO: 165438 - RNA, 19 nt, Homo sapiens
  misc_RNA (1)...(19): siRNA sense strand
gcaugugacuguucuuugg

SEQ ID NO: 165439 - RNA, 19 nt, Homo sapiens
  misc_RNA (1)...(19): siRNA sense strand
ggagaugagguucaauuug

SEQ ID NO: 165440 - RNA, 19 nt, Homo sapiens
  misc_RNA (1)...(19): siRNA sense strand
cagaggauauuacucagau

SEQ ID NO: 165441 - RNA, 19 nt, Homo sapiens
  misc_RNA (1)...(19): siRNA sense strand
gcaaacgugugagaugugu

SEQ ID NO: 165442 - RNA, 19 nt, Homo sapiens
  misc_RNA (1)...(19): siRNA sense strand
gaaagucccaagugucaug

SEQ ID NO: 165443 - RNA, 19 nt, Homo sapiens
  misc_RNA (1)...(19): siRNA sense strand
gugcucagucuuacuaaua

SEQ ID NO: 165444 - RNA, 19 nt, Homo sapiens
  misc_RNA (1)...(19): siRNA sense strand
ggacuucagaauuggauuu

SEQ ID NO: 165445 - RNA, 19 nt, Homo sapiens
  misc_RNA (1)...(19): siRNA sense strand
gcaaaggaacagcagagaa

SEQ ID NO: 165446 - RNA, 19 nt, Homo sapiens
  misc_RNA (1)...(19): siRNA sense strand
gggcaaacgugugagaugu

SEQ ID NO: 165447 - RNA, 19 nt, Homo sapiens
  misc_RNA (1)...(19): siRNA sense strand
ugcacgaugugaugauuua

SEQ ID NO: 165448 - RNA, 19 nt, Homo sapiens
  misc_RNA (1)...(19): siRNA sense strand
uagauccaauggcuuaauu

SEQ ID NO: 165449 - RNA, 19 nt, Homo sapiens
  misc_RNA (1)...(19): siRNA sense strand
gaauuggauuuggcucauu

SEQ ID NO: 165450 - RNA, 19 nt, Homo sapiens
  misc_RNA (1)...(19): siRNA sense strand
uagaaagucgggacaaauu

SEQ ID NO: 165451 - RNA, 19 nt, Homo sapiens
  misc_RNA (1)...(19): siRNA sense strand
aaugaaaugaggaggauua

SEQ ID NO: 165452 - RNA, 19 nt, Homo sapiens
  misc_RNA (1)...(19): siRNA sense strand
aauuguagcuggugugguu

SEQ ID NO: 165453 - RNA, 19 nt, Homo sapiens
  misc_RNA (1)...(19): siRNA sense strand
agaaagucgggacaaauua

SEQ ID NO: 165454 - RNA, 19 nt, Homo sapiens
  misc_RNA (1)...(19): siRNA sense strand
gagcauaaagaauguguuc

SEQ ID NO: 165455 - RNA, 19 nt, Homo sapiens
  misc_RNA (1)...(19): siRNA sense strand
uccaauggcuuaauuugug

SEQ ID NO: 165456 - RNA, 19 nt, Homo sapiens
  misc_RNA (1)...(19): siRNA sense strand
gaaguuaacagugaagaca

SEQ ID NO: 165457 - RNA, 19 nt, Homo sapiens
  misc_RNA (1)...(19): siRNA sense strand
cagcacagaugaaguuaac

SEQ ID NO: 165458 - RNA, 19 nt, Homo sapiens
  misc_RNA (1)...(19): siRNA sense strand
gcaaaugccaaaucaugug

SEQ ID NO: 165459 - RNA, 19 nt, Homo sapiens
  misc_RNA (1)...(19): siRNA sense strand
gaagaauuucagccuguuu

SEQ ID NO: 165460 - RNA, 19 nt, Homo sapiens
  misc_RNA (1)...(19): siRNA sense strand
cagaggcuccaaagauaua

SEQ ID NO: 165461 - RNA, 19 nt, Homo sapiens
  misc_RNA (1)...(19): siRNA sense strand
cugcugauauggaagcuuu

SEQ ID NO: 165462 - RNA, 19 nt, Homo sapiens
  misc_RNA (1)...(19): siRNA sense strand
caacugugauagauccaau

SEQ ID NO: 165463 - RNA, 19 nt, Homo sapiens
  misc_RNA (1)...(19): siRNA sense strand
uagagguuauucuucagua

SEQ ID NO: 165464 - RNA, 19 nt, Homo sapiens
  misc_RNA (1)...(19): siRNA sense strand
cagcgcauaucuggaaauu

SEQ ID NO: 165465 - RNA, 19 nt, Homo sapiens
  misc_RNA (1)...(19): siRNA sense strand
caaaggaacagcagagaag

SEQ ID NO: 165466 - RNA, 19 nt, Homo sapiens
  misc_RNA (1)...(19): siRNA sense strand
gaacagcagagaagcucaa

SEQ ID NO: 165467 - RNA, 19 nt, Homo sapiens
  misc_RNA (1)...(19): siRNA sense strand
gauccaauggcuuaauuug

SEQ ID NO: 165468 - RNA, 19 nt, Homo sapiens
  misc_RNA (1)...(19): siRNA sense strand
gaaaacaguucagaaaucu

SEQ ID NO: 165469 - RNA, 19 nt, Homo sapiens
  misc_RNA (1)...(19): siRNA sense strand
caagugucaugaaggaaau

SEQ ID NO: 165470 - RNA, 19 nt, Homo sapiens
  misc_RNA (1)...(19): siRNA sense strand
gucagaaggaguaacaaua

SEQ ID NO: 165471 - RNA, 19 nt, Homo sapiens
  misc_RNA (1)...(19): siRNA sense strand
gaggauuacuucggacuuc

SEQ ID NO: 165472 - RNA, 19 nt, Homo sapiens
  misc_RNA (1)...(19): siRNA sense strand
ugaaagacgauuuggagaa

SEQ ID NO: 165473 - RNA, 19 nt, Homo sapiens
  misc_RNA (1)...(19): siRNA sense strand
gccacagacauuuacauua

SEQ ID NO: 165474 - RNA, 19 nt, Homo sapiens
  misc_RNA (1)...(19): siRNA sense strand
gcaguugguuuugcgauua

SEQ ID NO: 165475 - RNA, 19 nt, Homo sapiens
  misc_RNA (1)...(19): siRNA sense strand
aaaagacugugaugccuua

SEQ ID NO: 165476 - RNA, 19 nt, Homo sapiens
  misc_RNA (1)...(19): siRNA sense strand
ggaaaugguguuugcaagu

SEQ ID NO: 165477 - RNA, 19 nt, Homo sapiens
  misc_RNA (1)...(19): siRNA sense strand
gcgaaggcaucccugaaag

SEQ ID NO: 165478 - RNA, 19 nt, Homo sapiens
  misc_RNA (1)...(19): siRNA sense strand
gcucagucuuacuaauaaa

SEQ ID NO: 165479 - RNA, 19 nt, Homo sapiens
  misc_RNA (1)...(19): siRNA sense strand
gcaccagcccauuuagcua

SEQ ID NO: 165480 - RNA, 19 nt, Homo sapiens
  misc_RNA (1)...(19): siRNA sense strand
aagggaguuugcuaaauuu

SEQ ID NO: 165481 - RNA, 19 nt, Homo sapiens
  misc_RNA (1)...(19): siRNA sense strand
acaacgaggucaugguuca

SEQ ID NO: 165482 - RNA, 19 nt, Homo sapiens
  misc_RNA (1)...(19): siRNA sense strand
cugauuggcuggaggaaug

SEQ ID NO: 165483 - RNA, 19 nt, Homo sapiens
  misc_RNA (1)...(19): siRNA sense strand
aaguagagguuauucuuca

SEQ ID NO: 165484 - RNA, 19 nt, Homo sapiens
  misc_RNA (1)...(19): siRNA sense strand
guccagacaucauuccaau

SEQ ID NO: 165485 - RNA, 19 nt, Homo sapiens
  misc_RNA (1)...(19): siRNA sense strand
gaaagucgggacaaauuac

SEQ ID NO: 165486 - RNA, 19 nt, Homo sapiens
  misc_RNA (1)...(19): siRNA sense strand
guguacagauccgaaguuu

SEQ ID NO: 165487 - RNA, 19 nt, Homo sapiens
  misc_RNA (1)...(19): siRNA sense strand
guaggaagagggauaauac

SEQ ID NO: 165488 - RNA, 19 nt, Homo sapiens
  misc_RNA (1)...(19): siRNA sense strand
ccaagugucaugaaggaaa

SEQ ID NO: 165489 - RNA, 19 nt, Homo sapiens
  misc_RNA (1)...(19): siRNA sense strand
gaucugaugaaugaaauga

SEQ ID NO: 165490 - RNA, 19 nt, Homo sapiens
  misc_RNA (1)...(19): siRNA sense strand
ggacaguguguuuguagga

SEQ ID NO: 165491 - RNA, 19 nt, Homo sapiens
  misc_RNA (1)...(19): siRNA sense strand
cauuacugcugauauggaa

SEQ ID NO: 165492 - RNA, 19 nt, Homo sapiens
  misc_RNA (1)...(19): siRNA sense strand
gcuccaaagauauaaagaa

SEQ ID NO: 165493 - RNA, 19 nt, Homo sapiens
  misc_RNA (1)...(19): siRNA sense strand
ugacgacuguugguucuau

SEQ ID NO: 165494 - RNA, 19 nt, Homo sapiens
  misc_RNA (1)...(19): siRNA sense strand
uguggugucuguaagugua

SEQ ID NO: 165495 - RNA, 19 nt, Homo sapiens
  misc_RNA (1)...(19): siRNA sense strand
gaggaaaugguguuugcaa

SEQ ID NO: 165496 - RNA, 19 nt, Homo sapiens
  misc_RNA (1)...(19): siRNA sense strand
gacaguguguuuguaggaa

SEQ ID NO: 165497 - RNA, 19 nt, Homo sapiens
  misc_RNA (1)...(19): siRNA sense strand
gaacagaucugaugaauga

SEQ ID NO: 165498 - RNA, 19 nt, Homo sapiens
  misc_RNA (1)...(19): siRNA sense strand
caagagagcugaagacuau

SEQ ID NO: 165499 - RNA, 19 nt, Homo sapiens
  misc_RNA (1)...(19): siRNA sense strand
gaagggaguuugcuaaauu

SEQ ID NO: 165500 - RNA, 19 nt, Homo sapiens
  misc_RNA (1)...(19): siRNA sense strand
ccacagacauuuacauuaa

SEQ ID NO: 165501 - RNA, 19 nt, Homo sapiens
  misc_RNA (1)...(19): siRNA sense strand
gcgcauaucuggaaauuug

SEQ ID NO: 165502 - RNA, 19 nt, Homo sapiens
  misc_RNA (1)...(19): siRNA sense strand
gaagagggauaauacaaau

SEQ ID NO: 165503 - RNA, 19 nt, Homo sapiens
  misc_RNA (1)...(19): siRNA sense strand
gugaagacauggaugcuua

SEQ ID NO: 165504 - RNA, 19 nt, Homo sapiens
  misc_RNA (1)...(19): siRNA sense strand
gaaagacgauuuggagaau

SEQ ID NO: 165505 - RNA, 19 nt, Homo sapiens
  misc_RNA (1)...(19): siRNA sense strand
guaauucaguugaucauug

SEQ ID NO: 165506 - RNA, 19 nt, Homo sapiens
  misc_RNA (1)...(19): siRNA sense strand
gaaaugaggaggauuacuu

SEQ ID NO: 165507 - RNA, 19 nt, Homo sapiens
  misc_RNA (1)...(19): siRNA sense strand
caaaucauguggagaaugu

SEQ ID NO: 165508 - RNA, 19 nt, Homo sapiens
  misc_RNA (1)...(19): siRNA sense strand
gaacugcaccagcccauuu

SEQ ID NO: 165509 - RNA, 19 nt, Homo sapiens
  misc_RNA (1)...(19): siRNA sense strand
guacagauccgaaguuuca

SEQ ID NO: 165510 - RNA, 19 nt, Homo sapiens
  misc_RNA (1)...(19): siRNA sense strand
cagaugaaguuaacaguga

SEQ ID NO: 165511 - RNA, 19 nt, Homo sapiens
  misc_RNA (1)...(19): siRNA sense strand
ggaguuugcuaaauuugaa

SEQ ID NO: 165512 - RNA, 19 nt, Homo sapiens
  misc_RNA (1)...(19): siRNA sense strand
gugcagagccuucaauaaa

SEQ ID NO: 165513 - RNA, 19 nt, Homo sapiens
  misc_RNA (1)...(19): siRNA sense strand
gaacaacgaggucaugguu

SEQ ID NO: 165514 - RNA, 19 nt, Homo sapiens
  misc_RNA (1)...(19): siRNA sense strand
gaaacuugguggcauuguu

SEQ ID NO: 165515 - RNA, 19 nt, Homo sapiens
  misc_RNA (1)...(19): siRNA sense strand
gaaaugguguuugcaagug

SEQ ID NO: 165516 - RNA, 19 nt, Homo sapiens
  misc_RNA (1)...(19): siRNA sense strand
ggaagagggauaauacaaa

SEQ ID NO: 165517 - RNA, 19 nt, Homo sapiens
  misc_RNA (1)...(19): siRNA sense strand
caaauugucagaaggagua

SEQ ID NO: 165518 - RNA, 19 nt, Homo sapiens
  misc_RNA (1)...(19): siRNA sense strand
ggagaaguauuuaaugaac

SEQ ID NO: 165519 - RNA, 19 nt, Homo sapiens
  misc_RNA (1)...(19): siRNA sense strand
cccagaggcuccaaagaua

SEQ ID NO: 165520 - RNA, 19 nt, Homo sapiens
  misc_RNA (1)...(19): siRNA sense strand
gcugaagacuaucccauug

SEQ ID NO: 165521 - RNA, 19 nt, Homo sapiens
  misc_RNA (1)...(19): siRNA sense strand
agacaucauuccaauugua

SEQ ID NO: 165522 - RNA, 19 nt, Homo sapiens
  misc_RNA (1)...(19): siRNA sense strand
gauccugugucccauugua

SEQ ID NO: 165523 - RNA, 19 nt, Homo sapiens
  misc_RNA (1)...(19): siRNA sense strand
ggaaguagagguuauucuu

SEQ ID NO: 165524 - RNA, 19 nt, Homo sapiens
  misc_RNA (1)...(19): siRNA sense strand
ucagaaggaguaacaauaa

SEQ ID NO: 165525 - RNA, 19 nt, Homo sapiens
  misc_RNA (1)...(19): siRNA sense strand
gaaaaugaaugccaaaugg

SEQ ID NO: 165526 - RNA, 19 nt, Homo sapiens
  misc_RNA (1)...(19): siRNA sense strand
gcaagugucguguguguga

SEQ ID NO: 165527 - RNA, 19 nt, Homo sapiens
  misc_RNA (1)...(19): siRNA sense strand
gugauaauuucaacuguga

SEQ ID NO: 165528 - RNA, 19 nt, Homo sapiens
  misc_RNA (1)...(19): siRNA sense strand
acaauucccuuuccucaga

SEQ ID NO: 165529 - RNA, 19 nt, Homo sapiens
  misc_RNA (1)...(19): siRNA sense strand
gaaggaguaacaauaaguu

SEQ ID NO: 165530 - RNA, 19 nt, Homo sapiens
  misc_RNA (1)...(19): siRNA sense strand
gcaauguaauucaguugau

SEQ ID NO: 165531 - RNA, 19 nt, Homo sapiens
  misc_RNA (1)...(19): siRNA sense strand
gguagaaagucgggacaaa

SEQ ID NO: 165532 - RNA, 19 nt, Homo sapiens
  misc_RNA (1)...(19): siRNA sense strand
gaaggauguugacgacugu

SEQ ID NO: 165533 - RNA, 19 nt, Homo sapiens
  misc_RNA (1)...(19): siRNA sense strand
aaacagcgcauaucuggaa

SEQ ID NO: 165534 - RNA, 19 nt, Homo sapiens
  misc_RNA (1)...(19): siRNA sense strand
ccagacaucauuccaauug

SEQ ID NO: 165535 - RNA, 19 nt, Homo sapiens
  misc_RNA (1)...(19): siRNA sense strand
guaaggagaaggauguuga

SEQ ID NO: 165536 - RNA, 19 nt, Homo sapiens
  misc_RNA (1)...(19): siRNA sense strand
ugauagauccaauggcuua

SEQ ID NO: 165537 - RNA, 19 nt, Homo sapiens
  misc_RNA (1)...(19): siRNA sense strand
gaaaucugcaguaacaaug

SEQ ID NO: 165538 - RNA, 19 nt, Homo sapiens
  misc_RNA (1)...(19): siRNA sense strand
gcaugugacuguucuuugg

SEQ ID NO: 165539 - RNA, 19 nt, Homo sapiens
  misc_RNA (1)...(19): siRNA sense strand
ggagaugagguucaauuug

SEQ ID NO: 165540 - RNA, 19 nt, Homo sapiens
  misc_RNA (1)...(19): siRNA sense strand
cagaggauauuacucagau

SEQ ID NO: 165541 - RNA, 19 nt, Homo sapiens
  misc_RNA (1)...(19): siRNA sense strand
gcaaacgugugagaugugu

SEQ ID NO: 165542 - RNA, 19 nt, Homo sapiens
  misc_RNA (1)...(19): siRNA sense strand
gaaagucccaagugucaug

SEQ ID NO: 165543 - RNA, 19 nt, Homo sapiens
  misc_RNA (1)...(19): siRNA sense strand
gugcucagucuuacuaaua

SEQ ID NO: 165544 - RNA, 19 nt, Homo sapiens
  misc_RNA (1)...(19): siRNA sense strand
ggacuucagaauuggauuu

SEQ ID NO: 165545 - RNA, 19 nt, Homo sapiens
  misc_RNA (1)...(19): siRNA sense strand
gcaaaggaacagcagagaa

SEQ ID NO: 165546 - RNA, 19 nt, Homo sapiens
  misc_RNA (1)...(19): siRNA sense strand
gggcaaacgugugagaugu

SEQ ID NO: 165547 - RNA, 19 nt, Homo sapiens
  misc_RNA (1)...(19): siRNA sense strand
ugcacgaugugaugauuua

SEQ ID NO: 165548 - RNA, 19 nt, Homo sapiens
  misc_RNA (1)...(19): siRNA sense strand
uagauccaauggcuuaauu

SEQ ID NO: 165549 - RNA, 19 nt, Homo sapiens
  misc_RNA (1)...(19): siRNA sense strand
gaauuggauuuggcucauu

SEQ ID NO: 165550 - RNA, 19 nt, Homo sapiens
  misc_RNA (1)...(19): siRNA sense strand
uagaaagucgggacaaauu

SEQ ID NO: 165551 - RNA, 19 nt, Homo sapiens
  misc_RNA (1)...(19): siRNA sense strand
aaugaaaugaggaggauua

SEQ ID NO: 165552 - RNA, 19 nt, Homo sapiens
  misc_RNA (1)...(19): siRNA sense strand
aauuguagcuggugugguu

SEQ ID NO: 165553 - RNA, 19 nt, Homo sapiens
  misc_RNA (1)...(19): siRNA sense strand
agaaagucgggacaaauua

SEQ ID NO: 165554 - RNA, 19 nt, Homo sapiens
  misc_RNA (1)...(19): siRNA sense strand
gagcauaaagaauguguuc

SEQ ID NO: 165555 - RNA, 19 nt, Homo sapiens
  misc_RNA (1)...(19): siRNA sense strand
uccaauggcuuaauuugug

SEQ ID NO: 165556 - RNA, 19 nt, Homo sapiens
  misc_RNA (1)...(19): siRNA sense strand
gaaguuaacagugaagaca

SEQ ID NO: 165557 - RNA, 19 nt, Homo sapiens
  misc_RNA (1)...(19): siRNA sense strand
cagcacagaugaaguuaac

SEQ ID NO: 165558 - RNA, 19 nt, Homo sapiens
  misc_RNA (1)...(19): siRNA sense strand
gcaaaugccaaaucaugug

SEQ ID NO: 165559 - RNA, 19 nt, Homo sapiens
  misc_RNA (1)...(19): siRNA sense strand
gaagaauuucagccuguuu

SEQ ID NO: 165560 - RNA, 19 nt, Homo sapiens
  misc_RNA (1)...(19): siRNA sense strand
cagaggcuccaaagauaua

SEQ ID NO: 165561 - RNA, 19 nt, Homo sapiens
  misc_RNA (1)...(19): siRNA sense strand
cugcugauauggaagcuuu

SEQ ID NO: 165562 - RNA, 19 nt, Homo sapiens
  misc_RNA (1)...(19): siRNA sense strand
caacugugauagauccaau

SEQ ID NO: 165563 - RNA, 19 nt, Homo sapiens
  misc_RNA (1)...(19): siRNA sense strand
uagagguuauucuucagua

SEQ ID NO: 165564 - RNA, 19 nt, Homo sapiens
  misc_RNA (1)...(19): siRNA sense strand
cagcgcauaucuggaaauu

SEQ ID NO: 165565 - RNA, 19 nt, Homo sapiens
  misc_RNA (1)...(19): siRNA sense strand
caaaggaacagcagagaag

SEQ ID NO: 165566 - RNA, 19 nt, Homo sapiens
  misc_RNA (1)...(19): siRNA sense strand
gaacagcagagaagcucaa

SEQ ID NO: 165567 - RNA, 19 nt, Homo sapiens
  misc_RNA (1)...(19): siRNA sense strand
gauccaauggcuuaauuug

SEQ ID NO: 165568 - RNA, 19 nt, Homo sapiens
  misc_RNA (1)...(19): siRNA sense strand
gaaaacaguucagaaaucu

SEQ ID NO: 165569 - RNA, 19 nt, Homo sapiens
  misc_RNA (1)...(19): siRNA sense strand
caagugucaugaaggaaau

SEQ ID NO: 165570 - RNA, 19 nt, Homo sapiens
  misc_RNA (1)...(19): siRNA sense strand
gucagaaggaguaacaaua

SEQ ID NO: 165571 - RNA, 19 nt, Homo sapiens
  misc_RNA (1)...(19): siRNA sense strand
gaggauuacuucggacuuc

SEQ ID NO: 165572 - RNA, 19 nt, Homo sapiens
  misc_RNA (1)...(19): siRNA sense strand
ugaaagacgauuuggagaa

SEQ ID NO: 165573 - RNA, 19 nt, Homo sapiens
  misc_RNA (1)...(19): siRNA sense strand
gccacagacauuuacauua

SEQ ID NO: 165574 - RNA, 19 nt, Homo sapiens
  misc_RNA (1)...(19): siRNA sense strand
gcaguugguuuugcgauua

SEQ ID NO: 165575 - RNA, 19 nt, Homo sapiens
  misc_RNA (1)...(19): siRNA sense strand
aaaagacugugaugccuua

SEQ ID NO: 165576 - RNA, 19 nt, Homo sapiens
  misc_RNA (1)...(19): siRNA sense strand
ggaaaugguguuugcaagu

SEQ ID NO: 165577 - RNA, 19 nt, Homo sapiens
  misc_RNA (1)...(19): siRNA sense strand
gcgaaggcaucccugaaag

SEQ ID NO: 165578 - RNA, 19 nt, Homo sapiens
  misc_RNA (1)...(19): siRNA sense strand
gcucagucuuacuaauaaa

SEQ ID NO: 165579 - RNA, 19 nt, Homo sapiens
  misc_RNA (1)...(19): siRNA sense strand
gcaccagcccauuuagcua

SEQ ID NO: 165580 - RNA, 19 nt, Homo sapiens
  misc_RNA (1)...(19): siRNA sense strand
aagggaguuugcuaaauuu

SEQ ID NO: 165581 - RNA, 19 nt, Homo sapiens
  misc_RNA (1)...(19): siRNA sense strand
acaacgaggucaugguuca

SEQ ID NO: 165582 - RNA, 19 nt, Homo sapiens
  misc_RNA (1)...(19): siRNA sense strand
cugauuggcuggaggaaug

SEQ ID NO: 165583 - RNA, 19 nt, Homo sapiens
  misc_RNA (1)...(19): siRNA sense strand
aaguagagguuauucuuca

SEQ ID NO: 165584 - RNA, 19 nt, Homo sapiens
  misc_RNA (1)...(19): siRNA sense strand
guccagacaucauuccaau

SEQ ID NO: 165585 - RNA, 19 nt, Homo sapiens
  misc_RNA (1)...(19): siRNA sense strand
gaaagucgggacaaauuac

SEQ ID NO: 165586 - RNA, 19 nt, Homo sapiens
  misc_RNA (1)...(19): siRNA sense strand
guguacagauccgaaguuu

SEQ ID NO: 165587 - RNA, 19 nt, Homo sapiens
  misc_RNA (1)...(19): siRNA sense strand
guaggaagagggauaauac

SEQ ID NO: 165588 - RNA, 19 nt, Homo sapiens
  misc_RNA (1)...(19): siRNA sense strand
ccaagugucaugaaggaaa

SEQ ID NO: 165589 - RNA, 19 nt, Homo sapiens
  misc_RNA (1)...(19): siRNA sense strand
gaucugaugaaugaaauga

SEQ ID NO: 165590 - RNA, 19 nt, Homo sapiens
  misc_RNA (1)...(19): siRNA sense strand
ggacaguguguuuguagga

SEQ ID NO: 165591 - RNA, 19 nt, Homo sapiens
  misc_RNA (1)...(19): siRNA sense strand
cauuacugcugauauggaa

SEQ ID NO: 165592 - RNA, 19 nt, Homo sapiens
  misc_RNA (1)...(19): siRNA sense strand
gcuccaaagauauaaagaa

SEQ ID NO: 165593 - RNA, 19 nt, Homo sapiens
  misc_RNA (1)...(19): siRNA sense strand
ugacgacuguugguucuau

SEQ ID NO: 165594 - RNA, 19 nt, Homo sapiens
  misc_RNA (1)...(19): siRNA sense strand
uguggugucuguaagugua

SEQ ID NO: 165595 - RNA, 19 nt, Homo sapiens
  misc_RNA (1)...(19): siRNA sense strand
gaggaaaugguguuugcaa

SEQ ID NO: 165596 - RNA, 19 nt, Homo sapiens
  misc_RNA (1)...(19): siRNA sense strand
gacaguguguuuguaggaa

SEQ ID NO: 165597 - RNA, 19 nt, Homo sapiens
  misc_RNA (1)...(19): siRNA sense strand
gaacagaucugaugaauga

SEQ ID NO: 165598 - RNA, 19 nt, Homo sapiens
  misc_RNA (1)...(19): siRNA sense strand
caagagagcugaagacuau

SEQ ID NO: 165599 - RNA, 19 nt, Homo sapiens
  misc_RNA (1)...(19): siRNA sense strand
gaagggaguuugcuaaauu

SEQ ID NO: 165600 - RNA, 19 nt, Homo sapiens
  misc_RNA (1)...(19): siRNA sense strand
ccacagacauuuacauuaa

SEQ ID NO: 165601 - RNA, 19 nt, Homo sapiens
  misc_RNA (1)...(19): siRNA sense strand
gcgcauaucuggaaauuug

SEQ ID NO: 165602 - RNA, 19 nt, Homo sapiens
  misc_RNA (1)...(19): siRNA sense strand
gaagagggauaauacaaau

SEQ ID NO: 165603 - RNA, 19 nt, Homo sapiens
  misc_RNA (1)...(19): siRNA sense strand
gugaagacauggaugcuua

SEQ ID NO: 165604 - RNA, 19 nt, Homo sapiens
  misc_RNA (1)...(19): siRNA sense strand
gaaagacgauuuggagaau

SEQ ID NO: 165605 - RNA, 19 nt, Homo sapiens
  misc_RNA (1)...(19): siRNA sense strand
guaauucaguugaucauug

SEQ ID NO: 165606 - RNA, 19 nt, Homo sapiens
  misc_RNA (1)...(19): siRNA sense strand
gaaaugaggaggauuacuu

SEQ ID NO: 165607 - RNA, 19 nt, Homo sapiens
  misc_RNA (1)...(19): siRNA sense strand
caaaucauguggagaaugu

SEQ ID NO: 165608 - RNA, 19 nt, Homo sapiens
  misc_RNA (1)...(19): siRNA sense strand
gaacugcaccagcccauuu

SEQ ID NO: 165609 - RNA, 19 nt, Homo sapiens
  misc_RNA (1)...(19): siRNA sense strand
guacagauccgaaguuuca

SEQ ID NO: 165610 - RNA, 19 nt, Homo sapiens
  misc_RNA (1)...(19): siRNA sense strand
cagaugaaguuaacaguga

SEQ ID NO: 165611 - RNA, 19 nt, Homo sapiens
  misc_RNA (1)...(19): siRNA sense strand
ggaguuugcuaaauuugaa

SEQ ID NO: 165612 - RNA, 19 nt, Homo sapiens
  misc_RNA (1)...(19): siRNA sense strand
gugcagagccuucaauaaa

SEQ ID NO: 165613 - RNA, 19 nt, Homo sapiens
  misc_RNA (1)...(19): siRNA sense strand
gaacaacgaggucaugguu

SEQ ID NO: 165614 - RNA, 19 nt, Homo sapiens
  misc_RNA (1)...(19): siRNA sense strand
gaaacuugguggcauuguu

SEQ ID NO: 165615 - RNA, 19 nt, Homo sapiens
  misc_RNA (1)...(19): siRNA sense strand
gaaaugguguuugcaagug

SEQ ID NO: 165616 - RNA, 19 nt, Homo sapiens
  misc_RNA (1)...(19): siRNA sense strand
ggaagagggauaauacaaa

SEQ ID NO: 165617 - RNA, 19 nt, Homo sapiens
  misc_RNA (1)...(19): siRNA sense strand
caaauugucagaaggagua

SEQ ID NO: 165618 - RNA, 19 nt, Homo sapiens
  misc_RNA (1)...(19): siRNA sense strand
ggagaaguauuuaaugaac

SEQ ID NO: 165619 - RNA, 19 nt, Homo sapiens
  misc_RNA (1)...(19): siRNA sense strand
cccagaggcuccaaagaua

SEQ ID NO: 165620 - RNA, 19 nt, Homo sapiens
  misc_RNA (1)...(19): siRNA sense strand
gcugaagacuaucccauug

SEQ ID NO: 165621 - RNA, 19 nt, Homo sapiens
  misc_RNA (1)...(19): siRNA sense strand
agacaucauuccaauugua

SEQ ID NO: 165622 - RNA, 19 nt, Homo sapiens
  misc_RNA (1)...(19): siRNA sense strand
gauccugugucccauugua

SEQ ID NO: 165623 - RNA, 19 nt, Homo sapiens
  misc_RNA (1)...(19): siRNA sense strand
ggaaguagagguuauucuu

SEQ ID NO: 165624 - RNA, 19 nt, Homo sapiens
  misc_RNA (1)...(19): siRNA sense strand
ucagaaggaguaacaauaa

SEQ ID NO: 165625 - RNA, 19 nt, Homo sapiens
  misc_RNA (1)...(19): siRNA sense strand
gaaaaugaaugccaaaugg

SEQ ID NO: 165626 - RNA, 19 nt, Homo sapiens
  misc_RNA (1)...(19): siRNA sense strand
gcaagugucguguguguga

SEQ ID NO: 165627 - RNA, 19 nt, Homo sapiens
  misc_RNA (1)...(19): siRNA sense strand
gugauaauuucaacuguga

SEQ ID NO: 165628 - RNA, 19 nt, Homo sapiens
  misc_RNA (1)...(19): siRNA sense strand
acaauucccuuuccucaga

SEQ ID NO: 165629 - RNA, 19 nt, Homo sapiens
  misc_RNA (1)...(19): siRNA sense strand
gaaggaguaacaauaaguu

SEQ ID NO: 165630 - RNA, 19 nt, Homo sapiens
  misc_RNA (1)...(19): siRNA sense strand
gcaauguaauucaguugau

SEQ ID NO: 165631 - RNA, 19 nt, Homo sapiens
  misc_RNA (1)...(19): siRNA sense strand
gguagaaagucgggacaaa

SEQ ID NO: 165632 - RNA, 19 nt, Homo sapiens
  misc_RNA (1)...(19): siRNA sense strand
gaaggauguugacgacugu

SEQ ID NO: 165633 - RNA, 19 nt, Homo sapiens
  misc_RNA (1)...(19): siRNA sense strand
aaacagcgcauaucuggaa

SEQ ID NO: 165634 - RNA, 19 nt, Homo sapiens
  misc_RNA (1)...(19): siRNA sense strand
ccagacaucauuccaauug

SEQ ID NO: 165635 - RNA, 19 nt, Homo sapiens
  misc_RNA (1)...(19): siRNA sense strand
guaaggagaaggauguuga

SEQ ID NO: 165636 - RNA, 19 nt, Homo sapiens
  misc_RNA (1)...(19): siRNA sense strand
ugauagauccaauggcuua

SEQ ID NO: 165637 - RNA, 19 nt, Homo sapiens
  misc_RNA (1)...(19): siRNA sense strand
gaaaucugcaguaacaaug

SEQ ID NO: 165638 - RNA, 19 nt, Homo sapiens
  misc_RNA (1)...(19): siRNA sense strand
gcaugugacuguucuuugg

SEQ ID NO: 165639 - RNA, 19 nt, Homo sapiens
  misc_RNA (1)...(19): siRNA sense strand
ggagaugagguucaauuug

SEQ ID NO: 165640 - RNA, 19 nt, Homo sapiens
  misc_RNA (1)...(19): siRNA sense strand
cagaggauauuacucagau

SEQ ID NO: 165641 - RNA, 19 nt, Homo sapiens
  misc_RNA (1)...(19): siRNA sense strand
gcaaacgugugagaugugu

SEQ ID NO: 165642 - RNA, 19 nt, Homo sapiens
  misc_RNA (1)...(19): siRNA sense strand
gaaagucccaagugucaug

SEQ ID NO: 165643 - RNA, 19 nt, Homo sapiens
  misc_RNA (1)...(19): siRNA sense strand
gugcucagucuuacuaaua

SEQ ID NO: 165644 - RNA, 19 nt, Homo sapiens
  misc_RNA (1)...(19): siRNA sense strand
ggacuucagaauuggauuu

SEQ ID NO: 165645 - RNA, 19 nt, Homo sapiens
  misc_RNA (1)...(19): siRNA sense strand
gcaaaggaacagcagagaa

SEQ ID NO: 165646 - RNA, 19 nt, Homo sapiens
  misc_RNA (1)...(19): siRNA sense strand
gggcaaacgugugagaugu

SEQ ID NO: 165647 - RNA, 19 nt, Homo sapiens
  misc_RNA (1)...(19): siRNA sense strand
ugcacgaugugaugauuua

SEQ ID NO: 165648 - RNA, 19 nt, Homo sapiens
  misc_RNA (1)...(19): siRNA sense strand
uagauccaauggcuuaauu

SEQ ID NO: 165649 - RNA, 19 nt, Homo sapiens
  misc_RNA (1)...(19): siRNA sense strand
gaauuggauuuggcucauu

SEQ ID NO: 165650 - RNA, 19 nt, Homo sapiens
  misc_RNA (1)...(19): siRNA sense strand
uagaaagucgggacaaauu

SEQ ID NO: 165651 - RNA, 19 nt, Homo sapiens
  misc_RNA (1)...(19): siRNA sense strand
aaugaaaugaggaggauua

SEQ ID NO: 165652 - RNA, 19 nt, Homo sapiens
  misc_RNA (1)...(19): siRNA sense strand
aauuguagcuggugugguu

SEQ ID NO: 165653 - RNA, 19 nt, Homo sapiens
  misc_RNA (1)...(19): siRNA sense strand
agaaagucgggacaaauua

SEQ ID NO: 165654 - RNA, 19 nt, Homo sapiens
  misc_RNA (1)...(19): siRNA sense strand
gagcauaaagaauguguuc

SEQ ID NO: 165655 - RNA, 19 nt, Homo sapiens
  misc_RNA (1)...(19): siRNA sense strand
uccaauggcuuaauuugug

SEQ ID NO: 165656 - RNA, 19 nt, Homo sapiens
  misc_RNA (1)...(19): siRNA sense strand
gaaguuaacagugaagaca

SEQ ID NO: 165657 - RNA, 19 nt, Homo sapiens
  misc_RNA (1)...(19): siRNA sense strand
cagcacagaugaaguuaac

SEQ ID NO: 165658 - RNA, 19 nt, Homo sapiens
  misc_RNA (1)...(19): siRNA sense strand
gcaaaugccaaaucaugug

SEQ ID NO: 165659 - RNA, 19 nt, Homo sapiens
  misc_RNA (1)...(19): siRNA sense strand
gaagaauuucagccuguuu

SEQ ID NO: 165660 - RNA, 19 nt, Homo sapiens
  misc_RNA (1)...(19): siRNA sense strand
cagaggcuccaaagauaua

SEQ ID NO: 165661 - RNA, 19 nt, Homo sapiens
  misc_RNA (1)...(19): siRNA sense strand
cugcugauauggaagcuuu

SEQ ID NO: 165662 - RNA, 19 nt, Homo sapiens
  misc_RNA (1)...(19): siRNA sense strand
caacugugauagauccaau

SEQ ID NO: 165663 - RNA, 19 nt, Homo sapiens
  misc_RNA (1)...(19): siRNA sense strand
uagagguuauucuucagua

SEQ ID NO: 165664 - RNA, 19 nt, Homo sapiens
  misc_RNA (1)...(19): siRNA sense strand
cagcgcauaucuggaaauu

SEQ ID NO: 165665 - RNA, 19 nt, Homo sapiens
  misc_RNA (1)...(19): siRNA sense strand
caaaggaacagcagagaag

SEQ ID NO: 165666 - RNA, 19 nt, Homo sapiens
  misc_RNA (1)...(19): siRNA sense strand
gaacagcagagaagcucaa

SEQ ID NO: 165667 - RNA, 19 nt, Homo sapiens
  misc_RNA (1)...(19): siRNA sense strand
gauccaauggcuuaauuug

SEQ ID NO: 165668 - RNA, 19 nt, Homo sapiens
  misc_RNA (1)...(19): siRNA sense strand
gaaaacaguucagaaaucu

SEQ ID NO: 165669 - RNA, 19 nt, Homo sapiens
  misc_RNA (1)...(19): siRNA sense strand
caagugucaugaaggaaau

SEQ ID NO: 165670 - RNA, 19 nt, Homo sapiens
  misc_RNA (1)...(19): siRNA sense strand
gucagaaggaguaacaaua

SEQ ID NO: 165671 - RNA, 19 nt, Homo sapiens
  misc_RNA (1)...(19): siRNA sense strand
gaggauuacuucggacuuc

SEQ ID NO: 165672 - RNA, 19 nt, Homo sapiens
  misc_RNA (1)...(19): siRNA sense strand
ugaaagacgauuuggagaa

SEQ ID NO: 165673 - RNA, 19 nt, Homo sapiens
  misc_RNA (1)...(19): siRNA sense strand
gccacagacauuuacauua

SEQ ID NO: 165674 - RNA, 19 nt, Homo sapiens
  misc_RNA (1)...(19): siRNA sense strand
gcaguugguuuugcgauua

SEQ ID NO: 165675 - RNA, 19 nt, Homo sapiens
  misc_RNA (1)...(19): siRNA sense strand
aaaagacugugaugccuua

SEQ ID NO: 165676 - RNA, 19 nt, Homo sapiens
  misc_RNA (1)...(19): siRNA sense strand
ggaaaugguguuugcaagu

SEQ ID NO: 165677 - RNA, 19 nt, Homo sapiens
  misc_RNA (1)...(19): siRNA sense strand
gcgaaggcaucccugaaag

SEQ ID NO: 165678 - RNA, 19 nt, Homo sapiens
  misc_RNA (1)...(19): siRNA sense strand
gcucagucuuacuaauaaa

SEQ ID NO: 165679 - RNA, 19 nt, Homo sapiens
  misc_RNA (1)...(19): siRNA sense strand
gcaccagcccauuuagcua

SEQ ID NO: 165680 - RNA, 19 nt, Homo sapiens
  misc_RNA (1)...(19): siRNA sense strand
aagggaguuugcuaaauuu

SEQ ID NO: 165681 - RNA, 19 nt, Homo sapiens
  misc_RNA (1)...(19): siRNA sense strand
acaacgaggucaugguuca

SEQ ID NO: 165682 - RNA, 19 nt, Homo sapiens
  misc_RNA (1)...(19): siRNA sense strand
cugauuggcuggaggaaug

SEQ ID NO: 165683 - RNA, 19 nt, Homo sapiens
  misc_RNA (1)...(19): siRNA sense strand
aaguagagguuauucuuca

SEQ ID NO: 165684 - RNA, 19 nt, Homo sapiens
  misc_RNA (1)...(19): siRNA sense strand
guccagacaucauuccaau

SEQ ID NO: 165685 - RNA, 19 nt, Homo sapiens
  misc_RNA (1)...(19): siRNA sense strand
gaaagucgggacaaauuac

SEQ ID NO: 165686 - RNA, 19 nt, Homo sapiens
  misc_RNA (1)...(19): siRNA sense strand
guguacagauccgaaguuu

SEQ ID NO: 165687 - RNA, 19 nt, Homo sapiens
  misc_RNA (1)...(19): siRNA sense strand
guaggaagagggauaauac

SEQ ID NO: 165688 - RNA, 19 nt, Homo sapiens
  misc_RNA (1)...(19): siRNA sense strand
ccaagugucaugaaggaaa

SEQ ID NO: 165689 - RNA, 19 nt, Homo sapiens
  misc_RNA (1)...(19): siRNA sense strand
gaucugaugaaugaaauga

SEQ ID NO: 165690 - RNA, 19 nt, Homo sapiens
  misc_RNA (1)...(19): siRNA sense strand
ggacaguguguuuguagga

SEQ ID NO: 165691 - RNA, 19 nt, Homo sapiens
  misc_RNA (1)...(19): siRNA sense strand
cauuacugcugauauggaa

SEQ ID NO: 165692 - RNA, 19 nt, Homo sapiens
  misc_RNA (1)...(19): siRNA sense strand
gcuccaaagauauaaagaa

SEQ ID NO: 165693 - RNA, 19 nt, Homo sapiens
  misc_RNA (1)...(19): siRNA sense strand
ugacgacuguugguucuau

SEQ ID NO: 165694 - RNA, 19 nt, Homo sapiens
  misc_RNA (1)...(19): siRNA sense strand
uguggugucuguaagugua

SEQ ID NO: 165695 - RNA, 19 nt, Homo sapiens
  misc_RNA (1)...(19): siRNA sense strand
gaggaaaugguguuugcaa

SEQ ID NO: 165696 - RNA, 19 nt, Homo sapiens
  misc_RNA (1)...(19): siRNA sense strand
gacaguguguuuguaggaa

SEQ ID NO: 165697 - RNA, 19 nt, Homo sapiens
  misc_RNA (1)...(19): siRNA sense strand
gaacagaucugaugaauga

SEQ ID NO: 165698 - RNA, 19 nt, Homo sapiens
  misc_RNA (1)...(19): siRNA sense strand
caagagagcugaagacuau

SEQ ID NO: 165699 - RNA, 19 nt, Homo sapiens
  misc_RNA (1)...(19): siRNA sense strand
gaagggaguuugcuaaauu

SEQ ID NO: 165700 - RNA, 19 nt, Homo sapiens
  misc_RNA (1)...(19): siRNA sense strand
ccacagacauuuacauuaa

SEQ ID NO: 165701 - RNA, 19 nt, Homo sapiens
  misc_RNA (1)...(19): siRNA sense strand
gcgcauaucuggaaauuug

SEQ ID NO: 165702 - RNA, 19 nt, Homo sapiens
  misc_RNA (1)...(19): siRNA sense strand
gaagagggauaauacaaau

SEQ ID NO: 165703 - RNA, 19 nt, Homo sapiens
  misc_RNA (1)...(19): siRNA sense strand
gugaagacauggaugcuua

SEQ ID NO: 165704 - RNA, 19 nt, Homo sapiens
  misc_RNA (1)...(19): siRNA sense strand
gaaagacgauuuggagaau

SEQ ID NO: 165705 - RNA, 19 nt, Homo sapiens
  misc_RNA (1)...(19): siRNA sense strand
guaauucaguugaucauug

SEQ ID NO: 165706 - RNA, 19 nt, Homo sapiens
  misc_RNA (1)...(19): siRNA sense strand
gaaaugaggaggauuacuu

SEQ ID NO: 165707 - RNA, 19 nt, Homo sapiens
  misc_RNA (1)...(19): siRNA sense strand
caaaucauguggagaaugu

SEQ ID NO: 165708 - RNA, 19 nt, Homo sapiens
  misc_RNA (1)...(19): siRNA sense strand
gaacugcaccagcccauuu

SEQ ID NO: 165709 - RNA, 19 nt, Homo sapiens
  misc_RNA (1)...(19): siRNA sense strand
guacagauccgaaguuuca

SEQ ID NO: 165710 - RNA, 19 nt, Homo sapiens
  misc_RNA (1)...(19): siRNA sense strand
cagaugaaguuaacaguga

SEQ ID NO: 165711 - RNA, 19 nt, Homo sapiens
  misc_RNA (1)...(19): siRNA sense strand
ggaguuugcuaaauuugaa

SEQ ID NO: 165712 - RNA, 19 nt, Homo sapiens
  misc_RNA (1)...(19): siRNA sense strand
gugcagagccuucaauaaa

SEQ ID NO: 165713 - RNA, 19 nt, Homo sapiens
  misc_RNA (1)...(19): siRNA sense strand
gaacaacgaggucaugguu

SEQ ID NO: 165714 - RNA, 19 nt, Homo sapiens
  misc_RNA (1)...(19): siRNA sense strand
gaaacuugguggcauuguu

SEQ ID NO: 165715 - RNA, 19 nt, Homo sapiens
  misc_RNA (1)...(19): siRNA sense strand
gaaaugguguuugcaagug

SEQ ID NO: 165716 - RNA, 19 nt, Homo sapiens
  misc_RNA (1)...(19): siRNA sense strand
ggaagagggauaauacaaa

SEQ ID NO: 165717 - RNA, 19 nt, Homo sapiens
  misc_RNA (1)...(19): siRNA sense strand
caaauugucagaaggagua

SEQ ID NO: 165718 - RNA, 19 nt, Homo sapiens
  misc_RNA (1)...(19): siRNA sense strand
ggagaaguauuuaaugaac

SEQ ID NO: 165719 - RNA, 19 nt, Homo sapiens
  misc_RNA (1)...(19): siRNA sense strand
cccagaggcuccaaagaua

SEQ ID NO: 165720 - RNA, 19 nt, Homo sapiens
  misc_RNA (1)...(19): siRNA sense strand
gcugaagacuaucccauug

SEQ ID NO: 165721 - RNA, 19 nt, Homo sapiens
  misc_RNA (1)...(19): siRNA sense strand
agacaucauuccaauugua

SEQ ID NO: 165722 - RNA, 19 nt, Homo sapiens
  misc_RNA (1)...(19): siRNA sense strand
gauccugugucccauugua

SEQ ID NO: 165723 - RNA, 19 nt, Homo sapiens
  misc_RNA (1)...(19): siRNA sense strand
ggaaguagagguuauucuu

SEQ ID NO: 165724 - RNA, 19 nt, Homo sapiens
  misc_RNA (1)...(19): siRNA sense strand
ucagaaggaguaacaauaa

SEQ ID NO: 165725 - RNA, 19 nt, Homo sapiens
  misc_RNA (1)...(19): siRNA sense strand
gaaaaugaaugccaaaugg

SEQ ID NO: 165726 - RNA, 19 nt, Homo sapiens
  misc_RNA (1)...(19): siRNA sense strand
gcaagugucguguguguga

SEQ ID NO: 165727 - RNA, 19 nt, Homo sapiens
  misc_RNA (1)...(19): siRNA sense strand
gugauaauuucaacuguga

SEQ ID NO: 165728 - RNA, 19 nt, Homo sapiens
  misc_RNA (1)...(19): siRNA sense strand
acaauucccuuuccucaga

SEQ ID NO: 165729 - RNA, 19 nt, Homo sapiens
  misc_RNA (1)...(19): siRNA sense strand
gaaggaguaacaauaaguu

SEQ ID NO: 165730 - RNA, 19 nt, Homo sapiens
  misc_RNA (1)...(19): siRNA sense strand
gcaauguaauucaguugau

SEQ ID NO: 165731 - RNA, 19 nt, Homo sapiens
  misc_RNA (1)...(19): siRNA sense strand
gguagaaagucgggacaaa

SEQ ID NO: 165732 - RNA, 19 nt, Homo sapiens
  misc_RNA (1)...(19): siRNA sense strand
gaaggauguugacgacugu

SEQ ID NO: 165733 - RNA, 19 nt, Homo sapiens
  misc_RNA (1)...(19): siRNA sense strand
aaacagcgcauaucuggaa

SEQ ID NO: 165734 - RNA, 19 nt, Homo sapiens
  misc_RNA (1)...(19): siRNA sense strand
ccagacaucauuccaauug

SEQ ID NO: 165735 - RNA, 19 nt, Homo sapiens
  misc_RNA (1)...(19): siRNA sense strand
guaaggagaaggauguuga

SEQ ID NO: 165736 - RNA, 19 nt, Homo sapiens
  misc_RNA (1)...(19): siRNA sense strand
ugauagauccaauggcuua

SEQ ID NO: 165737 - RNA, 19 nt, Homo sapiens
  misc_RNA (1)...(19): siRNA sense strand
gaaaucugcaguaacaaug

SEQ ID NO: 165738 - RNA, 19 nt, Homo sapiens
  misc_RNA (1)...(19): siRNA sense strand
gcaugugacuguucuuugg

SEQ ID NO: 165739 - RNA, 19 nt, Homo sapiens
  misc_RNA (1)...(19): siRNA sense strand
ggagaugagguucaauuug

SEQ ID NO: 165740 - RNA, 19 nt, Homo sapiens
  misc_RNA (1)...(19): siRNA sense strand
cagaggauauuacucagau

SEQ ID NO: 165741 - RNA, 19 nt, Homo sapiens
  misc_RNA (1)...(19): siRNA sense strand
gcaaacgugugagaugugu

SEQ ID NO: 165742 - RNA, 19 nt, Homo sapiens
  misc_RNA (1)...(19): siRNA sense strand
gaaagucccaagugucaug

SEQ ID NO: 165743 - RNA, 19 nt, Homo sapiens
  misc_RNA (1)...(19): siRNA sense strand
gugcucagucuuacuaaua

SEQ ID NO: 165744 - RNA, 19 nt, Homo sapiens
  misc_RNA (1)...(19): siRNA sense strand
ggacuucagaauuggauuu

SEQ ID NO: 165745 - RNA, 19 nt, Homo sapiens
  misc_RNA (1)...(19): siRNA sense strand
gcaaaggaacagcagagaa

SEQ ID NO: 165746 - RNA, 19 nt, Homo sapiens
  misc_RNA (1)...(19): siRNA sense strand
gggcaaacgugugagaugu

SEQ ID NO: 165747 - RNA, 19 nt, Homo sapiens
  misc_RNA (1)...(19): siRNA sense strand
ugcacgaugugaugauuua

SEQ ID NO: 165748 - RNA, 19 nt, Homo sapiens
  misc_RNA (1)...(19): siRNA sense strand
uagauccaauggcuuaauu

SEQ ID NO: 165749 - RNA, 19 nt, Homo sapiens
  misc_RNA (1)...(19): siRNA sense strand
gaauuggauuuggcucauu

SEQ ID NO: 165750 - RNA, 19 nt, Homo sapiens
  misc_RNA (1)...(19): siRNA sense strand
uagaaagucgggacaaauu

SEQ ID NO: 165751 - RNA, 19 nt, Homo sapiens
  misc_RNA (1)...(19): siRNA sense strand
aaugaaaugaggaggauua

SEQ ID NO: 165752 - RNA, 19 nt, Homo sapiens
  misc_RNA (1)...(19): siRNA sense strand
aauuguagcuggugugguu

SEQ ID NO: 165753 - RNA, 19 nt, Homo sapiens
  misc_RNA (1)...(19): siRNA sense strand
agaaagucgggacaaauua

SEQ ID NO: 165754 - RNA, 19 nt, Homo sapiens
  misc_RNA (1)...(19): siRNA sense strand
gagcauaaagaauguguuc

SEQ ID NO: 165755 - RNA, 19 nt, Homo sapiens
  misc_RNA (1)...(19): siRNA sense strand
uccaauggcuuaauuugug

SEQ ID NO: 165756 - RNA, 19 nt, Homo sapiens
  misc_RNA (1)...(19): siRNA sense strand
gaaguuaacagugaagaca

SEQ ID NO: 165757 - RNA, 19 nt, Homo sapiens
  misc_RNA (1)...(19): siRNA sense strand
cagcacagaugaaguuaac

SEQ ID NO: 165758 - RNA, 19 nt, Homo sapiens
  misc_RNA (1)...(19): siRNA sense strand
gcaaaugccaaaucaugug

SEQ ID NO: 165759 - RNA, 19 nt, Homo sapiens
  misc_RNA (1)...(19): siRNA sense strand
gaagaauuucagccuguuu

SEQ ID NO: 165760 - RNA, 19 nt, Homo sapiens
  misc_RNA (1)...(19): siRNA sense strand
cagaggcuccaaagauaua

SEQ ID NO: 165761 - RNA, 19 nt, Homo sapiens
  misc_RNA (1)...(19): siRNA sense strand
cugcugauauggaagcuuu

SEQ ID NO: 165762 - RNA, 19 nt, Homo sapiens
  misc_RNA (1)...(19): siRNA sense strand
caacugugauagauccaau

SEQ ID NO: 165763 - RNA, 19 nt, Homo sapiens
  misc_RNA (1)...(19): siRNA sense strand
uagagguuauucuucagua

SEQ ID NO: 165764 - RNA, 19 nt, Homo sapiens
  misc_RNA (1)...(19): siRNA sense strand
cagcgcauaucuggaaauu

SEQ ID NO: 165765 - RNA, 19 nt, Homo sapiens
  misc_RNA (1)...(19): siRNA sense strand
caaaggaacagcagagaag

SEQ ID NO: 165766 - RNA, 19 nt, Homo sapiens
  misc_RNA (1)...(19): siRNA sense strand
gaacagcagagaagcucaa

SEQ ID NO: 165767 - RNA, 19 nt, Homo sapiens
  misc_RNA (1)...(19): siRNA sense strand
gauccaauggcuuaauuug

SEQ ID NO: 165768 - RNA, 19 nt, Homo sapiens
  misc_RNA (1)...(19): siRNA sense strand
gaaaacaguucagaaaucu

SEQ ID NO: 165769 - RNA, 19 nt, Homo sapiens
  misc_RNA (1)...(19): siRNA sense strand
caagugucaugaaggaaau

SEQ ID NO: 165770 - RNA, 19 nt, Homo sapiens
  misc_RNA (1)...(19): siRNA sense strand
gucagaaggaguaacaaua

SEQ ID NO: 165771 - RNA, 19 nt, Homo sapiens
  misc_RNA (1)...(19): siRNA sense strand
gaggauuacuucggacuuc

SEQ ID NO: 165772 - RNA, 19 nt, Homo sapiens
  misc_RNA (1)...(19): siRNA sense strand
ugaaagacgauuuggagaa

SEQ ID NO: 165773 - RNA, 19 nt, Homo sapiens
  misc_RNA (1)...(19): siRNA sense strand
gccacagacauuuacauua

SEQ ID NO: 165774 - RNA, 19 nt, Homo sapiens
  misc_RNA (1)...(19): siRNA sense strand
gcaguugguuuugcgauua

SEQ ID NO: 165775 - RNA, 19 nt, Homo sapiens
  misc_RNA (1)...(19): siRNA sense strand
aaaagacugugaugccuua

SEQ ID NO: 165776 - RNA, 19 nt, Homo sapiens
  misc_RNA (1)...(19): siRNA sense strand
ggaaaugguguuugcaagu

SEQ ID NO: 165777 - RNA, 19 nt, Homo sapiens
  misc_RNA (1)...(19): siRNA sense strand
gcgaaggcaucccugaaag

SEQ ID NO: 165778 - RNA, 19 nt, Homo sapiens
  misc_RNA (1)...(19): siRNA sense strand
gcucagucuuacuaauaaa

SEQ ID NO: 165779 - RNA, 19 nt, Homo sapiens
  misc_RNA (1)...(19): siRNA sense strand
gcaccagcccauuuagcua

SEQ ID NO: 165780 - RNA, 19 nt, Homo sapiens
  misc_RNA (1)...(19): siRNA sense strand
aagggaguuugcuaaauuu

SEQ ID NO: 165781 - RNA, 19 nt, Homo sapiens
  misc_RNA (1)...(19): siRNA sense strand
acaacgaggucaugguuca

SEQ ID NO: 165782 - RNA, 19 nt, Homo sapiens
  misc_RNA (1)...(19): siRNA sense strand
cugauuggcuggaggaaug

SEQ ID NO: 165783 - RNA, 19 nt, Homo sapiens
  misc_RNA (1)...(19): siRNA sense strand
aaguagagguuauucuuca

SEQ ID NO: 165784 - RNA, 19 nt, Homo sapiens
  misc_RNA (1)...(19): siRNA sense strand
guccagacaucauuccaau

SEQ ID NO: 165785 - RNA, 19 nt, Homo sapiens
  misc_RNA (1)...(19): siRNA sense strand
gaaagucgggacaaauuac

SEQ ID NO: 165786 - RNA, 19 nt, Homo sapiens
  misc_RNA (1)...(19): siRNA sense strand
guguacagauccgaaguuu

SEQ ID NO: 165787 - RNA, 19 nt, Homo sapiens
  misc_RNA (1)...(19): siRNA sense strand
guaggaagagggauaauac

SEQ ID NO: 165788 - RNA, 19 nt, Homo sapiens
  misc_RNA (1)...(19): siRNA sense strand
ccaagugucaugaaggaaa

SEQ ID NO: 165789 - RNA, 19 nt, Homo sapiens
  misc_RNA (1)...(19): siRNA sense strand
gaucugaugaaugaaauga

SEQ ID NO: 165790 - RNA, 19 nt, Homo sapiens
  misc_RNA (1)...(19): siRNA sense strand
ggacaguguguuuguagga

SEQ ID NO: 165791 - RNA, 19 nt, Homo sapiens
  misc_RNA (1)...(19): siRNA sense strand
cauuacugcugauauggaa

SEQ ID NO: 165792 - RNA, 19 nt, Homo sapiens
  misc_RNA (1)...(19): siRNA sense strand
gcuccaaagauauaaagaa

SEQ ID NO: 165793 - RNA, 19 nt, Homo sapiens
  misc_RNA (1)...(19): siRNA sense strand
ugacgacuguugguucuau

SEQ ID NO: 165794 - RNA, 19 nt, Homo sapiens
  misc_RNA (1)...(19): siRNA sense strand
uguggugucuguaagugua

SEQ ID NO: 165795 - RNA, 19 nt, Homo sapiens
  misc_RNA (1)...(19): siRNA sense strand
gaggaaaugguguuugcaa

SEQ ID NO: 165796 - RNA, 19 nt, Homo sapiens
  misc_RNA (1)...(19): siRNA sense strand
gacaguguguuuguaggaa

SEQ ID NO: 165797 - RNA, 19 nt, Homo sapiens
  misc_RNA (1)...(19): siRNA sense strand
gaacagaucugaugaauga

SEQ ID NO: 165798 - RNA, 19 nt, Homo sapiens
  misc_RNA (1)...(19): siRNA sense strand
caagagagcugaagacuau

SEQ ID NO: 165799 - RNA, 19 nt, Homo sapiens
  misc_RNA (1)...(19): siRNA sense strand
gaagggaguuugcuaaauu

SEQ ID NO: 165800 - RNA, 19 nt, Homo sapiens
  misc_RNA (1)...(19): siRNA sense strand
ccacagacauuuacauuaa

SEQ ID NO: 165801 - RNA, 19 nt, Homo sapiens
  misc_RNA (1)...(19): siRNA sense strand
gcgcauaucuggaaauuug

SEQ ID NO: 165802 - RNA, 19 nt, Homo sapiens
  misc_RNA (1)...(19): siRNA sense strand
gaagagggauaauacaaau

SEQ ID NO: 165803 - RNA, 19 nt, Homo sapiens
  misc_RNA (1)...(19): siRNA sense strand
gugaagacauggaugcuua

SEQ ID NO: 165804 - RNA, 19 nt, Homo sapiens
  misc_RNA (1)...(19): siRNA sense strand
gaaagacgauuuggagaau

SEQ ID NO: 165805 - RNA, 19 nt, Homo sapiens
  misc_RNA (1)...(19): siRNA sense strand
guaauucaguugaucauug

SEQ ID NO: 165806 - RNA, 19 nt, Homo sapiens
  misc_RNA (1)...(19): siRNA sense strand
gaaaugaggaggauuacuu

SEQ ID NO: 165807 - RNA, 19 nt, Homo sapiens
  misc_RNA (1)...(19): siRNA sense strand
caaaucauguggagaaugu

SEQ ID NO: 165808 - RNA, 19 nt, Homo sapiens
  misc_RNA (1)...(19): siRNA sense strand
gaacugcaccagcccauuu

SEQ ID NO: 165809 - RNA, 19 nt, Homo sapiens
  misc_RNA (1)...(19): siRNA sense strand
guacagauccgaaguuuca

SEQ ID NO: 165810 - RNA, 19 nt, Homo sapiens
  misc_RNA (1)...(19): siRNA sense strand
cagaugaaguuaacaguga

SEQ ID NO: 165811 - RNA, 19 nt, Homo sapiens
  misc_RNA (1)...(19): siRNA sense strand
ggaguuugcuaaauuugaa

SEQ ID NO: 165812 - RNA, 19 nt, Homo sapiens
  misc_RNA (1)...(19): siRNA sense strand
gugcagagccuucaauaaa

SEQ ID NO: 165813 - RNA, 19 nt, Homo sapiens
  misc_RNA (1)...(19): siRNA sense strand
gaacaacgaggucaugguu

SEQ ID NO: 165814 - RNA, 19 nt, Homo sapiens
  misc_RNA (1)...(19): siRNA sense strand
gaaacuugguggcauuguu

SEQ ID NO: 165815 - RNA, 19 nt, Homo sapiens
  misc_RNA (1)...(19): siRNA sense strand
gaaaugguguuugcaagug

SEQ ID NO: 165816 - RNA, 19 nt, Homo sapiens
  misc_RNA (1)...(19): siRNA sense strand
ggaagagggauaauacaaa

SEQ ID NO: 165817 - RNA, 19 nt, Homo sapiens
  misc_RNA (1)...(19): siRNA sense strand
caaauugucagaaggagua

SEQ ID NO: 165818 - RNA, 19 nt, Homo sapiens
  misc_RNA (1)...(19): siRNA sense strand
ggagaaguauuuaaugaac

SEQ ID NO: 165819 - RNA, 19 nt, Homo sapiens
  misc_RNA (1)...(19): siRNA sense strand
cccagaggcuccaaagaua

SEQ ID NO: 165820 - RNA, 19 nt, Homo sapiens
  misc_RNA (1)...(19): siRNA sense strand
gcugaagacuaucccauug

SEQ ID NO: 165821 - RNA, 19 nt, Homo sapiens
  misc_RNA (1)...(19): siRNA sense strand
agacaucauuccaauugua

SEQ ID NO: 165822 - RNA, 19 nt, Homo sapiens
  misc_RNA (1)...(19): siRNA sense strand
gauccugugucccauugua

SEQ ID NO: 165823 - RNA, 19 nt, Homo sapiens
  misc_RNA (1)...(19): siRNA sense strand
ggaaguagagguuauucuu

SEQ ID NO: 165824 - RNA, 19 nt, Homo sapiens
  misc_RNA (1)...(19): siRNA sense strand
ucagaaggaguaacaauaa

SEQ ID NO: 165825 - RNA, 19 nt, Homo sapiens
  misc_RNA (1)...(19): siRNA sense strand
gaaaaugaaugccaaaugg

SEQ ID NO: 165826 - RNA, 19 nt, Homo sapiens
  misc_RNA (1)...(19): siRNA sense strand
gcaagugucguguguguga

SEQ ID NO: 165827 - RNA, 19 nt, Homo sapiens
  misc_RNA (1)...(19): siRNA sense strand
gugauaauuucaacuguga

SEQ ID NO: 165828 - RNA, 19 nt, Homo sapiens
  misc_RNA (1)...(19): siRNA sense strand
acaauucccuuuccucaga

SEQ ID NO: 165829 - RNA, 19 nt, Homo sapiens
  misc_RNA (1)...(19): siRNA sense strand
gaaggaguaacaauaaguu

SEQ ID NO: 165830 - RNA, 19 nt, Homo sapiens
  misc_RNA (1)...(19): siRNA sense strand
gcaauguaauucaguugau

SEQ ID NO: 165831 - RNA, 19 nt, Homo sapiens
  misc_RNA (1)...(19): siRNA sense strand
gguagaaagucgggacaaa

SEQ ID NO: 165832 - RNA, 19 nt, Homo sapiens
  misc_RNA (1)...(19): siRNA sense strand
gaaggauguugacgacugu

SEQ ID NO: 165833 - RNA, 19 nt, Homo sapiens
  misc_RNA (1)...(19): siRNA sense strand
aaacagcgcauaucuggaa

SEQ ID NO: 165834 - RNA, 19 nt, Homo sapiens
  misc_RNA (1)...(19): siRNA sense strand
ccagacaucauuccaauug

SEQ ID NO: 165835 - RNA, 19 nt, Homo sapiens
  misc_RNA (1)...(19): siRNA sense strand
guaaggagaaggauguuga

SEQ ID NO: 165836 - RNA, 19 nt, Homo sapiens
  misc_RNA (1)...(19): siRNA sense strand
ugauagauccaauggcuua

SEQ ID NO: 165837 - RNA, 19 nt, Homo sapiens
  misc_RNA (1)...(19): siRNA sense strand
gaaaucugcaguaacaaug

SEQ ID NO: 165838 - RNA, 19 nt, Homo sapiens
  misc_RNA (1)...(19): siRNA sense strand
gcaugugacuguucuuugg

SEQ ID NO: 165839 - RNA, 19 nt, Homo sapiens
  misc_RNA (1)...(19): siRNA sense strand
ggagaugagguucaauuug

SEQ ID NO: 165840 - RNA, 19 nt, Homo sapiens
  misc_RNA (1)...(19): siRNA sense strand
cagaggauauuacucagau

SEQ ID NO: 165841 - RNA, 19 nt, Homo sapiens
  misc_RNA (1)...(19): siRNA sense strand
gcaaacgugugagaugugu

SEQ ID NO: 165842 - RNA, 19 nt, Homo sapiens
  misc_RNA (1)...(19): siRNA sense strand
gaaagucccaagugucaug

SEQ ID NO: 165843 - RNA, 19 nt, Homo sapiens
  misc_RNA (1)...(19): siRNA sense strand
gugcucagucuuacuaaua

SEQ ID NO: 165844 - RNA, 19 nt, Homo sapiens
  misc_RNA (1)...(19): siRNA sense strand
ggacuucagaauuggauuu

SEQ ID NO: 165845 - RNA, 19 nt, Homo sapiens
  misc_RNA (1)...(19): siRNA sense strand
gcaaaggaacagcagagaa

SEQ ID NO: 165846 - RNA, 19 nt, Homo sapiens
  misc_RNA (1)...(19): siRNA sense strand
gggcaaacgugugagaugu

SEQ ID NO: 165847 - RNA, 19 nt, Homo sapiens
  misc_RNA (1)...(19): siRNA sense strand
ugcacgaugugaugauuua

SEQ ID NO: 165848 - RNA, 19 nt, Homo sapiens
  misc_RNA (1)...(19): siRNA sense strand
uagauccaauggcuuaauu

SEQ ID NO: 165849 - RNA, 19 nt, Homo sapiens
  misc_RNA (1)...(19): siRNA sense strand
gaauuggauuuggcucauu

SEQ ID NO: 165850 - RNA, 19 nt, Homo sapiens
  misc_RNA (1)...(19): siRNA sense strand
uagaaagucgggacaaauu

SEQ ID NO: 165851 - RNA, 19 nt, Homo sapiens
  misc_RNA (1)...(19): siRNA sense strand
aaugaaaugaggaggauua

SEQ ID NO: 165852 - RNA, 19 nt, Homo sapiens
  misc_RNA (1)...(19): siRNA sense strand
aauuguagcuggugugguu

SEQ ID NO: 165853 - RNA, 19 nt, Homo sapiens
  misc_RNA (1)...(19): siRNA sense strand
agaaagucgggacaaauua

SEQ ID NO: 165854 - RNA, 19 nt, Homo sapiens
  misc_RNA (1)...(19): siRNA sense strand
gagcauaaagaauguguuc

SEQ ID NO: 165855 - RNA, 19 nt, Homo sapiens
  misc_RNA (1)...(19): siRNA sense strand
uccaauggcuuaauuugug

SEQ ID NO: 165856 - RNA, 19 nt, Homo sapiens
  misc_RNA (1)...(19): siRNA sense strand
gaaguuaacagugaagaca

SEQ ID NO: 165857 - RNA, 19 nt, Homo sapiens
  misc_RNA (1)...(19): siRNA sense strand
cagcacagaugaaguuaac

SEQ ID NO: 165858 - RNA, 19 nt, Homo sapiens
  misc_RNA (1)...(19): siRNA sense strand
gcaaaugccaaaucaugug

SEQ ID NO: 165859 - RNA, 19 nt, Homo sapiens
  misc_RNA (1)...(19): siRNA sense strand
gaagaauuucagccuguuu

SEQ ID NO: 165860 - RNA, 19 nt, Homo sapiens
  misc_RNA (1)...(19): siRNA sense strand
cagaggcuccaaagauaua

SEQ ID NO: 165861 - RNA, 19 nt, Homo sapiens
  misc_RNA (1)...(19): siRNA sense strand
cugcugauauggaagcuuu

SEQ ID NO: 165862 - RNA, 19 nt, Homo sapiens
  misc_RNA (1)...(19): siRNA sense strand
caacugugauagauccaau

SEQ ID NO: 165863 - RNA, 19 nt, Homo sapiens
  misc_RNA (1)...(19): siRNA sense strand
uagagguuauucuucagua

SEQ ID NO: 165864 - RNA, 19 nt, Homo sapiens
  misc_RNA (1)...(19): siRNA sense strand
cagcgcauaucuggaaauu

SEQ ID NO: 165865 - RNA, 19 nt, Homo sapiens
  misc_RNA (1)...(19): siRNA sense strand
caaaggaacagcagagaag

SEQ ID NO: 165866 - RNA, 19 nt, Homo sapiens
  misc_RNA (1)...(19): siRNA sense strand
gaacagcagagaagcucaa

SEQ ID NO: 165867 - RNA, 19 nt, Homo sapiens
  misc_RNA (1)...(19): siRNA sense strand
gauccaauggcuuaauuug

SEQ ID NO: 165868 - RNA, 19 nt, Homo sapiens
  misc_RNA (1)...(19): siRNA sense strand
gaaaacaguucagaaaucu

SEQ ID NO: 165869 - RNA, 19 nt, Homo sapiens
  misc_RNA (1)...(19): siRNA sense strand
caagugucaugaaggaaau

SEQ ID NO: 165870 - RNA, 19 nt, Homo sapiens
  misc_RNA (1)...(19): siRNA sense strand
gucagaaggaguaacaaua

SEQ ID NO: 165871 - RNA, 19 nt, Homo sapiens
  misc_RNA (1)...(19): siRNA sense strand
gaggauuacuucggacuuc

SEQ ID NO: 165872 - RNA, 19 nt, Homo sapiens
  misc_RNA (1)...(19): siRNA sense strand
ugaaagacgauuuggagaa

SEQ ID NO: 165873 - RNA, 19 nt, Homo sapiens
  misc_RNA (1)...(19): siRNA sense strand
gccacagacauuuacauua

SEQ ID NO: 165874 - RNA, 19 nt, Homo sapiens
  misc_RNA (1)...(19): siRNA sense strand
gcaguugguuuugcgauua

SEQ ID NO: 165875 - RNA, 19 nt, Homo sapiens
  misc_RNA (1)...(19): siRNA sense strand
aaaagacugugaugccuua

SEQ ID NO: 165876 - RNA, 19 nt, Homo sapiens
  misc_RNA (1)...(19): siRNA sense strand
ggaaaugguguuugcaagu

SEQ ID NO: 165877 - RNA, 19 nt, Homo sapiens
  misc_RNA (1)...(19): siRNA sense strand
gcgaaggcaucccugaaag

SEQ ID NO: 165878 - RNA, 19 nt, Homo sapiens
  misc_RNA (1)...(19): siRNA sense strand
gcucagucuuacuaauaaa

SEQ ID NO: 165879 - RNA, 19 nt, Homo sapiens
  misc_RNA (1)...(19): siRNA sense strand
gcaccagcccauuuagcua

SEQ ID NO: 165880 - RNA, 19 nt, Homo sapiens
  misc_RNA (1)...(19): siRNA sense strand
aagggaguuugcuaaauuu

SEQ ID NO: 165881 - RNA, 19 nt, Homo sapiens
  misc_RNA (1)...(19): siRNA sense strand
acaacgaggucaugguuca

SEQ ID NO: 165882 - RNA, 19 nt, Homo sapiens
  misc_RNA (1)...(19): siRNA sense strand
cugauuggcuggaggaaug

SEQ ID NO: 165883 - RNA, 19 nt, Homo sapiens
  misc_RNA (1)...(19): siRNA sense strand
aaguagagguuauucuuca

SEQ ID NO: 165884 - RNA, 19 nt, Homo sapiens
  misc_RNA (1)...(19): siRNA sense strand
guccagacaucauuccaau

SEQ ID NO: 165885 - RNA, 19 nt, Homo sapiens
  misc_RNA (1)...(19): siRNA sense strand
gaaagucgggacaaauuac

SEQ ID NO: 165886 - RNA, 19 nt, Homo sapiens
  misc_RNA (1)...(19): siRNA sense strand
guguacagauccgaaguuu

SEQ ID NO: 165887 - RNA, 19 nt, Homo sapiens
  misc_RNA (1)...(19): siRNA sense strand
guaggaagagggauaauac

SEQ ID NO: 165888 - RNA, 19 nt, Homo sapiens
  misc_RNA (1)...(19): siRNA sense strand
ccaagugucaugaaggaaa

SEQ ID NO: 165889 - RNA, 19 nt, Homo sapiens
  misc_RNA (1)...(19): siRNA sense strand
gaucugaugaaugaaauga

SEQ ID NO: 165890 - RNA, 19 nt, Homo sapiens
  misc_RNA (1)...(19): siRNA sense strand
ggacaguguguuuguagga

SEQ ID NO: 165891 - RNA, 19 nt, Homo sapiens
  misc_RNA (1)...(19): siRNA sense strand
cauuacugcugauauggaa

SEQ ID NO: 165892 - RNA, 19 nt, Homo sapiens
  misc_RNA (1)...(19): siRNA sense strand
gcuccaaagauauaaagaa

SEQ ID NO: 165893 - RNA, 19 nt, Homo sapiens
  misc_RNA (1)...(19): siRNA sense strand
ugacgacuguugguucuau

SEQ ID NO: 165894 - RNA, 19 nt, Homo sapiens
  misc_RNA (1)...(19): siRNA sense strand
uguggugucuguaagugua

SEQ ID NO: 165895 - RNA, 19 nt, Homo sapiens
  misc_RNA (1)...(19): siRNA sense strand
gaggaaaugguguuugcaa

SEQ ID NO: 165896 - RNA, 19 nt, Homo sapiens
  misc_RNA (1)...(19): siRNA sense strand
gacaguguguuuguaggaa

SEQ ID NO: 165897 - RNA, 19 nt, Homo sapiens
  misc_RNA (1)...(19): siRNA sense strand
gaacagaucugaugaauga

SEQ ID NO: 165898 - RNA, 19 nt, Homo sapiens
  misc_RNA (1)...(19): siRNA sense strand
caagagagcugaagacuau

SEQ ID NO: 165899 - RNA, 19 nt, Homo sapiens
  misc_RNA (1)...(19): siRNA sense strand
gaagggaguuugcuaaauu

SEQ ID NO: 165900 - RNA, 19 nt, Homo sapiens
  misc_RNA (1)...(19): siRNA sense strand
ccacagacauuuacauuaa

SEQ ID NO: 165901 - RNA, 19 nt, Homo sapiens
  misc_RNA (1)...(19): siRNA sense strand
gcgcauaucuggaaauuug

SEQ ID NO: 165902 - RNA, 19 nt, Homo sapiens
  misc_RNA (1)...(19): siRNA sense strand
gaagagggauaauacaaau

SEQ ID NO: 165903 - RNA, 19 nt, Homo sapiens
  misc_RNA (1)...(19): siRNA sense strand
gugaagacauggaugcuua

SEQ ID NO: 165904 - RNA, 19 nt, Homo sapiens
  misc_RNA (1)...(19): siRNA sense strand
gaaagacgauuuggagaau

SEQ ID NO: 165905 - RNA, 19 nt, Homo sapiens
  misc_RNA (1)...(19): siRNA sense strand
guaauucaguugaucauug

SEQ ID NO: 165906 - RNA, 19 nt, Homo sapiens
  misc_RNA (1)...(19): siRNA sense strand
gaaaugaggaggauuacuu

SEQ ID NO: 165907 - RNA, 19 nt, Homo sapiens
  misc_RNA (1)...(19): siRNA sense strand
caaaucauguggagaaugu

SEQ ID NO: 165908 - RNA, 19 nt, Homo sapiens
  misc_RNA (1)...(19): siRNA sense strand
gaacugcaccagcccauuu

SEQ ID NO: 165909 - RNA, 19 nt, Homo sapiens
  misc_RNA (1)...(19): siRNA sense strand
guacagauccgaaguuuca

SEQ ID NO: 165910 - RNA, 19 nt, Homo sapiens
  misc_RNA (1)...(19): siRNA sense strand
cagaugaaguuaacaguga

SEQ ID NO: 165911 - RNA, 19 nt, Homo sapiens
  misc_RNA (1)...(19): siRNA sense strand
ggaguuugcuaaauuugaa

SEQ ID NO: 165912 - RNA, 19 nt, Homo sapiens
  misc_RNA (1)...(19): siRNA sense strand
gugcagagccuucaauaaa

SEQ ID NO: 165913 - RNA, 19 nt, Homo sapiens
  misc_RNA (1)...(19): siRNA sense strand
gaacaacgaggucaugguu

SEQ ID NO: 165914 - RNA, 19 nt, Homo sapiens
  misc_RNA (1)...(19): siRNA sense strand
gaaacuugguggcauuguu

SEQ ID NO: 165915 - RNA, 19 nt, Homo sapiens
  misc_RNA (1)...(19): siRNA sense strand
gaaaugguguuugcaagug

SEQ ID NO: 165916 - RNA, 19 nt, Homo sapiens
  misc_RNA (1)...(19): siRNA sense strand
ggaagagggauaauacaaa

SEQ ID NO: 165917 - RNA, 19 nt, Homo sapiens
  misc_RNA (1)...(19): siRNA sense strand
caaauugucagaaggagua

SEQ ID NO: 165918 - RNA, 19 nt, Homo sapiens
  misc_RNA (1)...(19): siRNA sense strand
ggagaaguauuuaaugaac

SEQ ID NO: 165919 - RNA, 19 nt, Homo sapiens
  misc_RNA (1)...(19): siRNA sense strand
cccagaggcuccaaagaua

SEQ ID NO: 165920 - RNA, 19 nt, Homo sapiens
  misc_RNA (1)...(19): siRNA sense strand
gcugaagacuaucccauug

SEQ ID NO: 165921 - RNA, 19 nt, Homo sapiens
  misc_RNA (1)...(19): siRNA sense strand
agacaucauuccaauugua

SEQ ID NO: 165922 - RNA, 19 nt, Homo sapiens
  misc_RNA (1)...(19): siRNA sense strand
gauccugugucccauugua

SEQ ID NO: 165923 - RNA, 19 nt, Homo sapiens
  misc_RNA (1)...(19): siRNA sense strand
ggaaguagagguuauucuu

SEQ ID NO: 165924 - RNA, 19 nt, Homo sapiens
  misc_RNA (1)...(19): siRNA sense strand
ucagaaggaguaacaauaa

SEQ ID NO: 165925 - RNA, 19 nt, Homo sapiens
  misc_RNA (1)...(19): siRNA sense strand
gaaaaugaaugccaaaugg

SEQ ID NO: 165926 - RNA, 19 nt, Homo sapiens
  misc_RNA (1)...(19): siRNA sense strand
gcaagugucguguguguga

SEQ ID NO: 165927 - RNA, 19 nt, Homo sapiens
  misc_RNA (1)...(19): siRNA sense strand
gugauaauuucaacuguga

SEQ ID NO: 165928 - RNA, 19 nt, Homo sapiens
  misc_RNA (1)...(19): siRNA sense strand
acaauucccuuuccucaga

SEQ ID NO: 165929 - RNA, 19 nt, Homo sapiens
  misc_RNA (1)...(19): siRNA sense strand
gaaggaguaacaauaaguu

SEQ ID NO: 165930 - RNA, 19 nt, Homo sapiens
  misc_RNA (1)...(19): siRNA sense strand
gcaauguaauucaguugau

SEQ ID NO: 165931 - RNA, 19 nt, Homo sapiens
  misc_RNA (1)...(19): siRNA sense strand
gguagaaagucgggacaaa

SEQ ID NO: 165932 - RNA, 19 nt, Homo sapiens
  misc_RNA (1)...(19): siRNA sense strand
gaaggauguugacgacugu

SEQ ID NO: 165933 - RNA, 19 nt, Homo sapiens
  misc_RNA (1)...(19): siRNA sense strand
aaacagcgcauaucuggaa

SEQ ID NO: 165934 - RNA, 19 nt, Homo sapiens
  misc_RNA (1)...(19): siRNA sense strand
ccagacaucauuccaauug

SEQ ID NO: 165935 - RNA, 19 nt, Homo sapiens
  misc_RNA (1)...(19): siRNA sense strand
guaaggagaaggauguuga

SEQ ID NO: 165936 - RNA, 19 nt, Homo sapiens
  misc_RNA (1)...(19): siRNA sense strand
ugauagauccaauggcuua

SEQ ID NO: 165937 - RNA, 19 nt, Homo sapiens
  misc_RNA (1)...(19): siRNA sense strand
gaaaucugcaguaacaaug

SEQ ID NO: 165938 - RNA, 19 nt, Homo sapiens
  misc_RNA (1)...(19): siRNA sense strand
gcaugugacuguucuuugg

SEQ ID NO: 165939 - RNA, 19 nt, Homo sapiens
  misc_RNA (1)...(19): siRNA sense strand
ggagaugagguucaauuug

SEQ ID NO: 165940 - RNA, 19 nt, Homo sapiens
  misc_RNA (1)...(19): siRNA sense strand
cagaggauauuacucagau

SEQ ID NO: 165941 - RNA, 19 nt, Homo sapiens
  misc_RNA (1)...(19): siRNA sense strand
gcaaacgugugagaugugu

SEQ ID NO: 165942 - RNA, 19 nt, Homo sapiens
  misc_RNA (1)...(19): siRNA sense strand
gaaagucccaagugucaug

SEQ ID NO: 165943 - RNA, 19 nt, Homo sapiens
  misc_RNA (1)...(19): siRNA sense strand
gugcucagucuuacuaaua

SEQ ID NO: 165944 - RNA, 19 nt, Homo sapiens
  misc_RNA (1)...(19): siRNA sense strand
ggacuucagaauuggauuu

SEQ ID NO: 165945 - RNA, 19 nt, Homo sapiens
  misc_RNA (1)...(19): siRNA sense strand
gcaaaggaacagcagagaa

SEQ ID NO: 165946 - RNA, 19 nt, Homo sapiens
  misc_RNA (1)...(19): siRNA sense strand
gggcaaacgugugagaugu

SEQ ID NO: 165947 - RNA, 19 nt, Homo sapiens
  misc_RNA (1)...(19): siRNA sense strand
ugcacgaugugaugauuua

SEQ ID NO: 165948 - RNA, 19 nt, Homo sapiens
  misc_RNA (1)...(19): siRNA sense strand
uagauccaauggcuuaauu

SEQ ID NO: 165949 - RNA, 19 nt, Homo sapiens
  misc_RNA (1)...(19): siRNA sense strand
gaauuggauuuggcucauu

SEQ ID NO: 165950 - RNA, 19 nt, Homo sapiens
  misc_RNA (1)...(19): siRNA sense strand
uagaaagucgggacaaauu

SEQ ID NO: 165951 - RNA, 19 nt, Homo sapiens
  misc_RNA (1)...(19): siRNA sense strand
aaugaaaugaggaggauua

SEQ ID NO: 165952 - RNA, 19 nt, Homo sapiens
  misc_RNA (1)...(19): siRNA sense strand
aauuguagcuggugugguu

SEQ ID NO: 165953 - RNA, 19 nt, Homo sapiens
  misc_RNA (1)...(19): siRNA sense strand
agaaagucgggacaaauua

SEQ ID NO: 165954 - RNA, 19 nt, Homo sapiens
  misc_RNA (1)...(19): siRNA sense strand
gagcauaaagaauguguuc

SEQ ID NO: 165955 - RNA, 19 nt, Homo sapiens
  misc_RNA (1)...(19): siRNA sense strand
uccaauggcuuaauuugug

SEQ ID NO: 165956 - RNA, 19 nt, Homo sapiens
  misc_RNA (1)...(19): siRNA sense strand
gaaguuaacagugaagaca

SEQ ID NO: 165957 - RNA, 19 nt, Homo sapiens
  misc_RNA (1)...(19): siRNA sense strand
cagcacagaugaaguuaac

SEQ ID NO: 165958 - RNA, 19 nt, Homo sapiens
  misc_RNA (1)...(19): siRNA sense strand
gcaaaugccaaaucaugug

SEQ ID NO: 165959 - RNA, 19 nt, Homo sapiens
  misc_RNA (1)...(19): siRNA sense strand
gaagaauuucagccuguuu

SEQ ID NO: 165960 - RNA, 19 nt, Homo sapiens
  misc_RNA (1)...(19): siRNA sense strand
cagaggcuccaaagauaua

SEQ ID NO: 165961 - RNA, 19 nt, Homo sapiens
  misc_RNA (1)...(19): siRNA sense strand
cugcugauauggaagcuuu

SEQ ID NO: 165962 - RNA, 19 nt, Homo sapiens
  misc_RNA (1)...(19): siRNA sense strand
caacugugauagauccaau

SEQ ID NO: 165963 - RNA, 19 nt, Homo sapiens
  misc_RNA (1)...(19): siRNA sense strand
uagagguuauucuucagua

SEQ ID NO: 165964 - RNA, 19 nt, Homo sapiens
  misc_RNA (1)...(19): siRNA sense strand
cagcgcauaucuggaaauu

SEQ ID NO: 165965 - RNA, 19 nt, Homo sapiens
  misc_RNA (1)...(19): siRNA sense strand
caaaggaacagcagagaag

SEQ ID NO: 165966 - RNA, 19 nt, Homo sapiens
  misc_RNA (1)...(19): siRNA sense strand
gaacagcagagaagcucaa

SEQ ID NO: 165967 - RNA, 19 nt, Homo sapiens
  misc_RNA (1)...(19): siRNA sense strand
gauccaauggcuuaauuug

SEQ ID NO: 165968 - RNA, 19 nt, Homo sapiens
  misc_RNA (1)...(19): siRNA sense strand
gaaaacaguucagaaaucu

SEQ ID NO: 165969 - RNA, 19 nt, Homo sapiens
  misc_RNA (1)...(19): siRNA sense strand
caagugucaugaaggaaau

SEQ ID NO: 165970 - RNA, 19 nt, Homo sapiens
  misc_RNA (1)...(19): siRNA sense strand
gucagaaggaguaacaaua

SEQ ID NO: 165971 - RNA, 19 nt, Homo sapiens
  misc_RNA (1)...(19): siRNA sense strand
gaggauuacuucggacuuc

SEQ ID NO: 165972 - RNA, 19 nt, Homo sapiens
  misc_RNA (1)...(19): siRNA sense strand
ugaaagacgauuuggagaa

SEQ ID NO: 165973 - RNA, 19 nt, Homo sapiens
  misc_RNA (1)...(19): siRNA sense strand
gccacagacauuuacauua

SEQ ID NO: 165974 - RNA, 19 nt, Homo sapiens
  misc_RNA (1)...(19): siRNA sense strand
gcaguugguuuugcgauua

SEQ ID NO: 165975 - RNA, 19 nt, Homo sapiens
  misc_RNA (1)...(19): siRNA sense strand
aaaagacugugaugccuua

SEQ ID NO: 165976 - RNA, 19 nt, Homo sapiens
  misc_RNA (1)...(19): siRNA sense strand
ggaaaugguguuugcaagu

SEQ ID NO: 165977 - RNA, 19 nt, Homo sapiens
  misc_RNA (1)...(19): siRNA sense strand
gcgaaggcaucccugaaag

SEQ ID NO: 165978 - RNA, 19 nt, Homo sapiens
  misc_RNA (1)...(19): siRNA sense strand
gcucagucuuacuaauaaa

SEQ ID NO: 165979 - RNA, 19 nt, Homo sapiens
  misc_RNA (1)...(19): siRNA sense strand
gcaccagcccauuuagcua

SEQ ID NO: 165980 - RNA, 19 nt, Homo sapiens
  misc_RNA (1)...(19): siRNA sense strand
aagggaguuugcuaaauuu

SEQ ID NO: 165981 - RNA, 19 nt, Homo sapiens
  misc_RNA (1)...(19): siRNA sense strand
acaacgaggucaugguuca

SEQ ID NO: 165982 - RNA, 19 nt, Homo sapiens
  misc_RNA (1)...(19): siRNA sense strand
cugauuggcuggaggaaug

SEQ ID NO: 165983 - RNA, 19 nt, Homo sapiens
  misc_RNA (1)...(19): siRNA sense strand
aaguagagguuauucuuca

SEQ ID NO: 165984 - RNA, 19 nt, Homo sapiens
  misc_RNA (1)...(19): siRNA sense strand
guccagacaucauuccaau

SEQ ID NO: 165985 - RNA, 19 nt, Homo sapiens
  misc_RNA (1)...(19): siRNA sense strand
gaaagucgggacaaauuac

SEQ ID NO: 165986 - RNA, 19 nt, Homo sapiens
  misc_RNA (1)...(19): siRNA sense strand
guguacagauccgaaguuu

SEQ ID NO: 165987 - RNA, 19 nt, Homo sapiens
  misc_RNA (1)...(19): siRNA sense strand
guaggaagagggauaauac

SEQ ID NO: 165988 - RNA, 19 nt, Homo sapiens
  misc_RNA (1)...(19): siRNA sense strand
ccaagugucaugaaggaaa

SEQ ID NO: 165989 - RNA, 19 nt, Homo sapiens
  misc_RNA (1)...(19): siRNA sense strand
gaucugaugaaugaaauga

SEQ ID NO: 165990 - RNA, 19 nt, Homo sapiens
  misc_RNA (1)...(19): siRNA sense strand
ggacaguguguuuguagga

SEQ ID NO: 165991 - RNA, 19 nt, Homo sapiens
  misc_RNA (1)...(19): siRNA sense strand
cauuacugcugauauggaa

SEQ ID NO: 165992 - RNA, 19 nt, Homo sapiens
  misc_RNA (1)...(19): siRNA sense strand
gcuccaaagauauaaagaa

SEQ ID NO: 165993 - RNA, 19 nt, Homo sapiens
  misc_RNA (1)...(19): siRNA sense strand
ugacgacuguugguucuau

SEQ ID NO: 165994 - RNA, 19 nt, Homo sapiens
  misc_RNA (1)...(19): siRNA sense strand
uguggugucuguaagugua

SEQ ID NO: 165995 - RNA, 19 nt, Homo sapiens
  misc_RNA (1)...(19): siRNA sense strand
gaggaaaugguguuugcaa

SEQ ID NO: 165996 - RNA, 19 nt, Homo sapiens
  misc_RNA (1)...(19): siRNA sense strand
gacaguguguuuguaggaa

SEQ ID NO: 165997 - RNA, 19 nt, Homo sapiens
  misc_RNA (1)...(19): siRNA sense strand
ggaaggacauguacaagaa

SEQ ID NO: 165998 - RNA, 19 nt, Homo sapiens
  misc_RNA (1)...(19): siRNA sense strand
gcaaggagaugaggaagug

SEQ ID NO: 165999 - RNA, 19 nt, Homo sapiens
  misc_RNA (1)...(19): siRNA sense strand
gcagcucgcuccucuuugu

SEQ ID NO: 166000 - RNA, 19 nt, Homo sapiens
  misc_RNA (1)...(19): siRNA sense strand
gcaggugcuucgcgucuuu

SEQ ID NO: 166001 - RNA, 19 nt, Homo sapiens
  misc_RNA (1)...(19): siRNA sense strand
cauaagcccuuucaagaag

SEQ ID NO: 166002 - RNA, 19 nt, Homo sapiens
  misc_RNA (1)...(19): siRNA sense strand
gcaccgacuucaagacuac

SEQ ID NO: 166003 - RNA, 19 nt, Homo sapiens
  misc_RNA (1)...(19): siRNA sense strand
gaaggacauguacaagaaa

SEQ ID NO: 166004 - RNA, 19 nt, Homo sapiens
  misc_RNA (1)...(19): siRNA sense strand
ggagguauccgaguucuuc

SEQ ID NO: 166005 - RNA, 19 nt, Homo sapiens
  misc_RNA (1)...(19): siRNA sense strand
gucauaagcccuuucaaga

SEQ ID NO: 166006 - RNA, 19 nt, Homo sapiens
  misc_RNA (1)...(19): siRNA sense strand
ucauaagcccuuucaagaa

SEQ ID NO: 166007 - RNA, 19 nt, Homo sapiens
  misc_RNA (1)...(19): siRNA sense strand
gugcugaggcgguaucuga

SEQ ID NO: 166008 - RNA, 19 nt, Homo sapiens
  misc_RNA (1)...(19): siRNA sense strand
cgucaggacuuaccuagag

SEQ ID NO: 166009 - RNA, 19 nt, Homo sapiens
  misc_RNA (1)...(19): siRNA sense strand
aaaugggcgucaggacuua

SEQ ID NO: 166010 - RNA, 19 nt, Homo sapiens
  misc_RNA (1)...(19): siRNA sense strand
ggucauaagcccuuucaag

SEQ ID NO: 166011 - RNA, 19 nt, Homo sapiens
  misc_RNA (1)...(19): siRNA sense strand
gcguguggcucaucgacuu

SEQ ID NO: 166012 - RNA, 19 nt, Homo sapiens
  misc_RNA (1)...(19): siRNA sense strand
gcgaggacgugggucagaa

SEQ ID NO: 166013 - RNA, 19 nt, Homo sapiens
  misc_RNA (1)...(19): siRNA sense strand
gcaucgagggcaucaagaa

SEQ ID NO: 166014 - RNA, 19 nt, Homo sapiens
  misc_RNA (1)...(19): siRNA sense strand
cggcagcucgcuccucuuu

SEQ ID NO: 166015 - RNA, 19 nt, Homo sapiens
  misc_RNA (1)...(19): siRNA sense strand
caucgagggcaucaagaaa

SEQ ID NO: 166016 - RNA, 19 nt, Homo sapiens
  misc_RNA (1)...(19): siRNA sense strand
gggacacccuggagguauc

SEQ ID NO: 166017 - RNA, 19 nt, Homo sapiens
  misc_RNA (1)...(19): siRNA sense strand
cggaaggacauguacaaga

SEQ ID NO: 166018 - RNA, 19 nt, Homo sapiens
  misc_RNA (1)...(19): siRNA sense strand
ugaagaguuugugcaagga

SEQ ID NO: 166019 - RNA, 19 nt, Homo sapiens
  misc_RNA (1)...(19): siRNA sense strand
ggcagaagauccggaccau

SEQ ID NO: 166020 - RNA, 19 nt, Homo sapiens
  misc_RNA (1)...(19): siRNA sense strand
ccgcgaggacggcuauuug

SEQ ID NO: 166021 - RNA, 19 nt, Homo sapiens
  misc_RNA (1)...(19): siRNA sense strand
caaccgcgaggacggcuau

SEQ ID NO: 166022 - RNA, 19 nt, Homo sapiens
  misc_RNA (1)...(19): siRNA sense strand
gcagggcacacugggaguu

SEQ ID NO: 166023 - RNA, 19 nt, Homo sapiens
  misc_RNA (1)...(19): siRNA sense strand
gaagugcugaggcgguauc

SEQ ID NO: 166024 - RNA, 19 nt, Homo sapiens
  misc_RNA (1)...(19): siRNA sense strand
cgaggacgugggucagaaa

SEQ ID NO: 166025 - RNA, 19 nt, Homo sapiens
  misc_RNA (1)...(19): siRNA sense strand
uagaggaggagcugaccaa

SEQ ID NO: 166026 - RNA, 19 nt, Homo sapiens
  misc_RNA (1)...(19): siRNA sense strand
gucaaucugccggucauaa

SEQ ID NO: 166027 - RNA, 19 nt, Homo sapiens
  misc_RNA (1)...(19): siRNA sense strand
gcacagagcuccgccauuc

SEQ ID NO: 166028 - RNA, 19 nt, Homo sapiens
  misc_RNA (1)...(19): siRNA sense strand
caacauaccugcugucauc

SEQ ID NO: 166029 - RNA, 19 nt, Homo sapiens
  misc_RNA (1)...(19): siRNA sense strand
gcagaaugcuggagccuuu

SEQ ID NO: 166030 - RNA, 19 nt, Homo sapiens
  misc_RNA (1)...(19): siRNA sense strand
ggaaggacauguaccagaa

SEQ ID NO: 166031 - RNA, 19 nt, Homo sapiens
  misc_RNA (1)...(19): siRNA sense strand
ccacagcuauggaaauuga

SEQ ID NO: 166032 - RNA, 19 nt, Homo sapiens
  misc_RNA (1)...(19): siRNA sense strand
gaaccacucuagaaguuuc

SEQ ID NO: 166033 - RNA, 19 nt, Homo sapiens
  misc_RNA (1)...(19): siRNA sense strand
gaaguggcagcgagaguua

SEQ ID NO: 166034 - RNA, 19 nt, Homo sapiens
  misc_RNA (1)...(19): siRNA sense strand
gaagaagcacugugaguca

SEQ ID NO: 166035 - RNA, 19 nt, Homo sapiens
  misc_RNA (1)...(19): siRNA sense strand
gaauagcgccaacgagaug

SEQ ID NO: 166036 - RNA, 19 nt, Homo sapiens
  misc_RNA (1)...(19): siRNA sense strand
ucaauaaccucgucgacau

SEQ ID NO: 166037 - RNA, 19 nt, Homo sapiens
  misc_RNA (1)...(19): siRNA sense strand
gaugaucgacuuugggaaa

SEQ ID NO: 166038 - RNA, 19 nt, Homo sapiens
  misc_RNA (1)...(19): siRNA sense strand
cagcagaaaccuagaguga

SEQ ID NO: 166039 - RNA, 19 nt, Homo sapiens
  misc_RNA (1)...(19): siRNA sense strand
gccagacccugcagcauga

SEQ ID NO: 166040 - RNA, 19 nt, Homo sapiens
  misc_RNA (1)...(19): siRNA sense strand
ccagaaagugggcauguuu

SEQ ID NO: 166041 - RNA, 19 nt, Homo sapiens
  misc_RNA (1)...(19): siRNA sense strand
ucagagaguucacuaaagg

SEQ ID NO: 166042 - RNA, 19 nt, Homo sapiens
  misc_RNA (1)...(19): siRNA sense strand
gaaggaacaggccaaagug

SEQ ID NO: 166043 - RNA, 19 nt, Homo sapiens
  misc_RNA (1)...(19): siRNA sense strand
uaaaggaaaccauaacauc

SEQ ID NO: 166044 - RNA, 19 nt, Homo sapiens
  misc_RNA (1)...(19): siRNA sense strand
ucgaaccacucuagaaguu

SEQ ID NO: 166045 - RNA, 19 nt, Homo sapiens
  misc_RNA (1)...(19): siRNA sense strand
cugccuagcucccucauug

SEQ ID NO: 166046 - RNA, 19 nt, Homo sapiens
  misc_RNA (1)...(19): siRNA sense strand
ggagagcccgugagcuuga

SEQ ID NO: 166047 - RNA, 19 nt, Homo sapiens
  misc_RNA (1)...(19): siRNA sense strand
ggacauguaccagaagaug

SEQ ID NO: 166048 - RNA, 19 nt, Homo sapiens
  misc_RNA (1)...(19): siRNA sense strand
ucaauagccuggugaucau

SEQ ID NO: 166049 - RNA, 19 nt, Homo sapiens
  misc_RNA (1)...(19): siRNA sense strand
ucacuaaaggaaaccauaa

SEQ ID NO: 166050 - RNA, 19 nt, Homo sapiens
  misc_RNA (1)...(19): siRNA sense strand
caacucagccuuccugcau

SEQ ID NO: 166051 - RNA, 19 nt, Homo sapiens
  misc_RNA (1)...(19): siRNA sense strand
ggaaguggcagcgagaguu

SEQ ID NO: 166052 - RNA, 19 nt, Homo sapiens
  misc_RNA (1)...(19): siRNA sense strand
cauaccugcugucaucauu

SEQ ID NO: 166053 - RNA, 19 nt, Homo sapiens
  misc_RNA (1)...(19): siRNA sense strand
guacugcuaugcgcucaau

SEQ ID NO: 166054 - RNA, 19 nt, Homo sapiens
  misc_RNA (1)...(19): siRNA sense strand
gaucgagggaaucaagaaa

SEQ ID NO: 166055 - RNA, 19 nt, Homo sapiens
  misc_RNA (1)...(19): siRNA sense strand
ggagcaauguccagagacu

SEQ ID NO: 166056 - RNA, 19 nt, Homo sapiens
  misc_RNA (1)...(19): siRNA sense strand
ucgagggaaucaagaaaga

SEQ ID NO: 166057 - RNA, 19 nt, Homo sapiens
  misc_RNA (1)...(19): siRNA sense strand
gcuguucggagcuagcuua

SEQ ID NO: 166058 - RNA, 19 nt, Homo sapiens
  misc_RNA (1)...(19): siRNA sense strand
agaggaagcugcggaucuu

SEQ ID NO: 166059 - RNA, 19 nt, Homo sapiens
  misc_RNA (1)...(19): siRNA sense strand
gcagcucccuccucuucau

SEQ ID NO: 166060 - RNA, 19 nt, Homo sapiens
  misc_RNA (1)...(19): siRNA sense strand
guucggagcuagcuuaacg

SEQ ID NO: 166061 - RNA, 19 nt, Homo sapiens
  misc_RNA (1)...(19): siRNA sense strand
gaaaggaaugccaccucuu

SEQ ID NO: 166062 - RNA, 19 nt, Homo sapiens
  misc_RNA (1)...(19): siRNA sense strand
ugcgaaagaucugaaagaa

SEQ ID NO: 166063 - RNA, 19 nt, Homo sapiens
  misc_RNA (1)...(19): siRNA sense strand
cggcgcaggcugaauagua

SEQ ID NO: 166064 - RNA, 19 nt, Homo sapiens
  misc_RNA (1)...(19): siRNA sense strand
aaucauggaggaagauaaa

SEQ ID NO: 166065 - RNA, 19 nt, Homo sapiens
  misc_RNA (1)...(19): siRNA sense strand
gagaguucacuaaaggaaa

SEQ ID NO: 166066 - RNA, 19 nt, Homo sapiens
  misc_RNA (1)...(19): siRNA sense strand
gcuccucgcaggugaagaa

SEQ ID NO: 166067 - RNA, 19 nt, Homo sapiens
  misc_RNA (1)...(19): siRNA sense strand
caaaucauggaggaagaua

SEQ ID NO: 166068 - RNA, 19 nt, Homo sapiens
  misc_RNA (1)...(19): siRNA sense strand
ggcgcaggcugaauaguag

SEQ ID NO: 166069 - RNA, 19 nt, Homo sapiens
  misc_RNA (1)...(19): siRNA sense strand
gaggaacggaggacaaagu

SEQ ID NO: 166070 - RNA, 19 nt, Homo sapiens
  misc_RNA (1)...(19): siRNA sense strand
aaaccuagagugagcaaau

SEQ ID NO: 166071 - RNA, 19 nt, Homo sapiens
  misc_RNA (1)...(19): siRNA sense strand
gaucuugcagcgcgaguug

SEQ ID NO: 166072 - RNA, 19 nt, Homo sapiens
  misc_RNA (1)...(19): siRNA sense strand
gcgaggaacggaggacaaa

SEQ ID NO: 166073 - RNA, 19 nt, Homo sapiens
  misc_RNA (1)...(19): siRNA sense strand
ucaccgaggccuucagaga

SEQ ID NO: 166074 - RNA, 19 nt, Homo sapiens
  misc_RNA (1)...(19): siRNA sense strand
ggacacgcagggaguuuca

SEQ ID NO: 166075 - RNA, 19 nt, Homo sapiens
  misc_RNA (1)...(19): siRNA sense strand
acccacagcuauggaaauu

SEQ ID NO: 166076 - RNA, 19 nt, Homo sapiens
  misc_RNA (1)...(19): siRNA sense strand
aaaggaaugccaccucuuc

SEQ ID NO: 166077 - RNA, 19 nt, Homo sapiens
  misc_RNA (1)...(19): siRNA sense strand
cuucagagaguucacuaaa

SEQ ID NO: 166078 - RNA, 19 nt, Homo sapiens
  misc_RNA (1)...(19): siRNA sense strand
gaauguggaggcgggaauu

SEQ ID NO: 166079 - RNA, 19 nt, Homo sapiens
  misc_RNA (1)...(19): siRNA sense strand
agaaggaacaggccaaagu

SEQ ID NO: 166080 - RNA, 19 nt, Homo sapiens
  misc_RNA (1)...(19): siRNA sense strand
caagaaggaacaggccaaa

SEQ ID NO: 166081 - RNA, 19 nt, Homo sapiens
  misc_RNA (1)...(19): siRNA sense strand
ggaucgagggaaucaagaa

SEQ ID NO: 166082 - RNA, 19 nt, Homo sapiens
  misc_RNA (1)...(19): siRNA sense strand
gacauguaccagaagauga

SEQ ID NO: 166083 - RNA, 19 nt, Homo sapiens
  misc_RNA (1)...(19): siRNA sense strand
gcagggcaccauggagaaa

SEQ ID NO: 166084 - RNA, 19 nt, Homo sapiens
  misc_RNA (1)...(19): siRNA sense strand
ccucgcaggugaagaaagg

SEQ ID NO: 166085 - RNA, 19 nt, Homo sapiens
  misc_RNA (1)...(19): siRNA sense strand
agaaagugggcauguuuga

SEQ ID NO: 166086 - RNA, 19 nt, Homo sapiens
  misc_RNA (1)...(19): siRNA sense strand
ccacgggcuucuccucauc

SEQ ID NO: 166087 - RNA, 19 nt, Homo sapiens
  misc_RNA (1)...(19): siRNA sense strand
cggaggaggccaagaggaa

SEQ ID NO: 166088 - RNA, 19 nt, Homo sapiens
  misc_RNA (1)...(19): siRNA sense strand
gaaaccauaacauccugau

SEQ ID NO: 166089 - RNA, 19 nt, Homo sapiens
  misc_RNA (1)...(19): siRNA sense strand
ccagaggagacgacuguga

SEQ ID NO: 166090 - RNA, 19 nt, Homo sapiens
  misc_RNA (1)...(19): siRNA sense strand
ggccagaggagacgacugu

SEQ ID NO: 166091 - RNA, 19 nt, Homo sapiens
  misc_RNA (1)...(19): siRNA sense strand
ggcaguuucugggcaguga

SEQ ID NO: 166092 - RNA, 19 nt, Homo sapiens
  misc_RNA (1)...(19): siRNA sense strand
cgacucgcccugugugaug

SEQ ID NO: 166093 - RNA, 19 nt, Homo sapiens
  misc_RNA (1)...(19): siRNA sense strand
gagggaaucaagaaagaag

SEQ ID NO: 166094 - RNA, 19 nt, Homo sapiens
  misc_RNA (1)...(19): siRNA sense strand
gcaaaucauggaggaagau

SEQ ID NO: 166095 - RNA, 19 nt, Homo sapiens
  misc_RNA (1)...(19): siRNA sense strand
gaaagugggcauguuugag

SEQ ID NO: 166096 - RNA, 19 nt, Homo sapiens
  misc_RNA (1)...(19): siRNA sense strand
cuucguaccugccuaccau

SEQ ID NO: 166097 - RNA, 19 nt, Homo sapiens
  misc_RNA (1)...(19): siRNA sense strand
cagaaagugggcauguuug

SEQ ID NO: 166098 - RNA, 19 nt, Homo sapiens
  misc_RNA (1)...(19): siRNA sense strand
gcaggugaaccagaaagug

SEQ ID NO: 166099 - RNA, 19 nt, Homo sapiens
  misc_RNA (1)...(19): siRNA sense strand
aaggacauguaccagaaga

SEQ ID NO: 166100 - RNA, 19 nt, Homo sapiens
  misc_RNA (1)...(19): siRNA sense strand
gaagauggggaaaggauau

SEQ ID NO: 166101 - RNA, 19 nt, Homo sapiens
  misc_RNA (1)...(19): siRNA sense strand
gcaggugaagaaaggaaug

SEQ ID NO: 166102 - RNA, 19 nt, Homo sapiens
  misc_RNA (1)...(19): siRNA sense strand
caagugccacgaggucauu

SEQ ID NO: 166103 - RNA, 19 nt, Homo sapiens
  misc_RNA (1)...(19): siRNA sense strand
guugggacgcugcgaaaga

SEQ ID NO: 166104 - RNA, 19 nt, Homo sapiens
  misc_RNA (1)...(19): siRNA sense strand
ugggagagcccgugagcuu

SEQ ID NO: 166105 - RNA, 19 nt, Homo sapiens
  misc_RNA (1)...(19): siRNA sense strand
gccuggugaucaugaauag

SEQ ID NO: 166106 - RNA, 19 nt, Homo sapiens
  misc_RNA (1)...(19): siRNA sense strand
agaguucacuaaaggaaac

SEQ ID NO: 166107 - RNA, 19 nt, Homo sapiens
  misc_RNA (1)...(19): siRNA sense strand
acagagcuccgccauucaa

SEQ ID NO: 166108 - RNA, 19 nt, Homo sapiens
  misc_RNA (1)...(19): siRNA sense strand
ggucaccgaggccuucaga

SEQ ID NO: 166109 - RNA, 19 nt, Homo sapiens
  misc_RNA (1)...(19): siRNA sense strand
gaaggacauguaccagaag

SEQ ID NO: 166110 - RNA, 19 nt, Homo sapiens
  misc_RNA (1)...(19): siRNA sense strand
ggaauguggaggcgggaau

SEQ ID NO: 166111 - RNA, 19 nt, Homo sapiens
  misc_RNA (1)...(19): siRNA sense strand
aaaggagggcccagccuau

SEQ ID NO: 166112 - RNA, 19 nt, Homo sapiens
  misc_RNA (1)...(19): siRNA sense strand
gcaggacacgcagggaguu

SEQ ID NO: 166113 - RNA, 19 nt, Homo sapiens
  misc_RNA (1)...(19): siRNA sense strand
agagugagcaaaucaugga

SEQ ID NO: 166114 - RNA, 19 nt, Homo sapiens
  misc_RNA (1)...(19): siRNA sense strand
aagaucaggacaagccuuu

SEQ ID NO: 166115 - RNA, 19 nt, Homo sapiens
  misc_RNA (1)...(19): siRNA sense strand
ccauggagaaagccgguuu

SEQ ID NO: 166116 - RNA, 19 nt, Homo sapiens
  misc_RNA (1)...(19): siRNA sense strand
cuaaaggaaaccauaacau

SEQ ID NO: 166117 - RNA, 19 nt, Homo sapiens
  misc_RNA (1)...(19): siRNA sense strand
gacaaaaggggcucuccua

SEQ ID NO: 166118 - RNA, 19 nt, Homo sapiens
  misc_RNA (1)...(19): siRNA sense strand
uggcagcucccuccucuuc

SEQ ID NO: 166119 - RNA, 19 nt, Homo sapiens
  misc_RNA (1)...(19): siRNA sense strand
cuggaaggguccugguuca

SEQ ID NO: 166120 - RNA, 19 nt, Homo sapiens
  misc_RNA (1)...(19): siRNA sense strand
gaccaagccacgguacaug

SEQ ID NO: 166121 - RNA, 19 nt, Homo sapiens
  misc_RNA (1)...(19): siRNA sense strand
ggaagauggggaaaggaua

SEQ ID NO: 166122 - RNA, 19 nt, Homo sapiens
  misc_RNA (1)...(19): siRNA sense strand
uaacgauggccacggaagu

SEQ ID NO: 166123 - RNA, 19 nt, Homo sapiens
  misc_RNA (1)...(19): siRNA sense strand
gguucaggaucgagggaau

SEQ ID NO: 166124 - RNA, 19 nt, Homo sapiens
  misc_RNA (1)...(19): siRNA sense strand
cucaauagccuggugauca

SEQ ID NO: 166125 - RNA, 19 nt, Homo sapiens
  misc_RNA (1)...(19): siRNA sense strand
agagaguucacuaaaggaa

SEQ ID NO: 166126 - RNA, 19 nt, Homo sapiens
  misc_RNA (1)...(19): siRNA sense strand
gcgcacauccaggcacaga

SEQ ID NO: 166127 - RNA, 19 nt, Homo sapiens
  misc_RNA (1)...(19): siRNA sense strand
gaagauggcugacauguac

SEQ ID NO: 166128 - RNA, 19 nt, Homo sapiens
  misc_RNA (1)...(19): siRNA sense strand
gaaaggaaaucacuacauc

SEQ ID NO: 166129 - RNA, 19 nt, Homo sapiens
  misc_RNA (1)...(19): siRNA sense strand
ggaaugaggcccagaaaga

SEQ ID NO: 166130 - RNA, 19 nt, Homo sapiens
  misc_RNA (1)...(19): siRNA sense strand
gugcaggugugauucuuua

SEQ ID NO: 166131 - RNA, 19 nt, Homo sapiens
  misc_RNA (1)...(19): siRNA sense strand
gcucugauguugucucuau

SEQ ID NO: 166132 - RNA, 19 nt, Homo sapiens
  misc_RNA (1)...(19): siRNA sense strand
ggagaucgaucgcagcaau

SEQ ID NO: 166133 - RNA, 19 nt, Homo sapiens
  misc_RNA (1)...(19): siRNA sense strand
ucaagaaccugcgagaauu

SEQ ID NO: 166134 - RNA, 19 nt, Homo sapiens
  misc_RNA (1)...(19): siRNA sense strand
gaggagauaucccgagcuu

SEQ ID NO: 166135 - RNA, 19 nt, Homo sapiens
  misc_RNA (1)...(19): siRNA sense strand
ggcaauggcuacaucaaug

SEQ ID NO: 166136 - RNA, 19 nt, Homo sapiens
  misc_RNA (1)...(19): siRNA sense strand
ccugugagcuaaucuuuga

SEQ ID NO: 166137 - RNA, 19 nt, Homo sapiens
  misc_RNA (1)...(19): siRNA sense strand
ggaagauggcugacaugua

SEQ ID NO: 166138 - RNA, 19 nt, Homo sapiens
  misc_RNA (1)...(19): siRNA sense strand
ggcaguaugucuacaaugu

SEQ ID NO: 166139 - RNA, 19 nt, Homo sapiens
  misc_RNA (1)...(19): siRNA sense strand
ggacugugcaggugugauu

SEQ ID NO: 166140 - RNA, 19 nt, Homo sapiens
  misc_RNA (1)...(19): siRNA sense strand
gcaauggcuacaucaauga

SEQ ID NO: 166141 - RNA, 19 nt, Homo sapiens
  misc_RNA (1)...(19): siRNA sense strand
caagaaccugcgagaauuu

SEQ ID NO: 166142 - RNA, 19 nt, Homo sapiens
  misc_RNA (1)...(19): siRNA sense strand
ggcaacaaguucuggauca

SEQ ID NO: 166143 - RNA, 19 nt, Homo sapiens
  misc_RNA (1)...(19): siRNA sense strand
gaccauggcuaaguuccuu

SEQ ID NO: 166144 - RNA, 19 nt, Homo sapiens
  misc_RNA (1)...(19): siRNA sense strand
gggcaucacagccuucauu

SEQ ID NO: 166145 - RNA, 19 nt, Homo sapiens
  misc_RNA (1)...(19): siRNA sense strand
gagaugccaagcuguauga

SEQ ID NO: 166146 - RNA, 19 nt, Homo sapiens
  misc_RNA (1)...(19): siRNA sense strand
ucuaacaccugugagcuaa

SEQ ID NO: 166147 - RNA, 19 nt, Homo sapiens
  misc_RNA (1)...(19): siRNA sense strand
gcagcaaugaguucaagaa

SEQ ID NO: 166148 - RNA, 19 nt, Homo sapiens
  misc_RNA (1)...(19): siRNA sense strand
gcacgugagggaagccuuu

SEQ ID NO: 166149 - RNA, 19 nt, Homo sapiens
  misc_RNA (1)...(19): siRNA sense strand
gaucaguggugaguacauc

SEQ ID NO: 166150 - RNA, 19 nt, Homo sapiens
  misc_RNA (1)...(19): siRNA sense strand
agaaguaucucccgaagcu

SEQ ID NO: 166151 - RNA, 19 nt, Homo sapiens
  misc_RNA (1)...(19): siRNA sense strand
gcucaaagcggaaaagaaa

SEQ ID NO: 166152 - RNA, 19 nt, Homo sapiens
  misc_RNA (1)...(19): siRNA sense strand
uaacaccugugagcuaauc

SEQ ID NO: 166153 - RNA, 19 nt, Homo sapiens
  misc_RNA (1)...(19): siRNA sense strand
gaucggccacuuccaguug

SEQ ID NO: 166154 - RNA, 19 nt, Homo sapiens
  misc_RNA (1)...(19): siRNA sense strand
gaaaucacuacauccugaa

SEQ ID NO: 166155 - RNA, 19 nt, Homo sapiens
  misc_RNA (1)...(19): siRNA sense strand
gcugaucaguggugaguac

SEQ ID NO: 166156 - RNA, 19 nt, Homo sapiens
  misc_RNA (1)...(19): siRNA sense strand
aacaaguucuggaucacua

SEQ ID NO: 166157 - RNA, 19 nt, Homo sapiens
  misc_RNA (1)...(19): siRNA sense strand
uuugaagacugcaagauuc

SEQ ID NO: 166158 - RNA, 19 nt, Homo sapiens
  misc_RNA (1)...(19): siRNA sense strand
ggaagccuuuggccagaag

SEQ ID NO: 166159 - RNA, 19 nt, Homo sapiens
  misc_RNA (1)...(19): siRNA sense strand
caaugcagacuuucacuag

SEQ ID NO: 166160 - RNA, 19 nt, Homo sapiens
  misc_RNA (1)...(19): siRNA sense strand
cggcagagccuucaaugca

SEQ ID NO: 166161 - RNA, 19 nt, Homo sapiens
  misc_RNA (1)...(19): siRNA sense strand
caaccagcuuguacgcaau

SEQ ID NO: 166162 - RNA, 19 nt, Homo sapiens
  misc_RNA (1)...(19): siRNA sense strand
gccagaagaucggccacuu

SEQ ID NO: 166163 - RNA, 19 nt, Homo sapiens
  misc_RNA (1)...(19): siRNA sense strand
cguggacgaugcaaucaau

SEQ ID NO: 166164 - RNA, 19 nt, Homo sapiens
  misc_RNA (1)...(19): siRNA sense strand
caaugcaggcucugauguu

SEQ ID NO: 166165 - RNA, 19 nt, Homo sapiens
  misc_RNA (1)...(19): siRNA sense strand
gaaugaggcccagaaagag

SEQ ID NO: 166166 - RNA, 19 nt, Homo sapiens
  misc_RNA (1)...(19): siRNA sense strand
uggacggcauucaguguuu

SEQ ID NO: 166167 - RNA, 19 nt, Homo sapiens
  misc_RNA (1)...(19): siRNA sense strand
ccaacauccugggccauga

SEQ ID NO: 166168 - RNA, 19 nt, Homo sapiens
  misc_RNA (1)...(19): siRNA sense strand
gggaagccuuuggccagaa

SEQ ID NO: 166169 - RNA, 19 nt, Homo sapiens
  misc_RNA (1)...(19): siRNA sense strand
gagggccauugcacugcua

SEQ ID NO: 166170 - RNA, 19 nt, Homo sapiens
  misc_RNA (1)...(19): siRNA sense strand
aaagaaaggaaaucacuac

SEQ ID NO: 166171 - RNA, 19 nt, Homo sapiens
  misc_RNA (1)...(19): siRNA sense strand
ucaaugcagacuuucacua

SEQ ID NO: 166172 - RNA, 19 nt, Homo sapiens
  misc_RNA (1)...(19): siRNA sense strand
agccuucaaugcagacuuu

SEQ ID NO: 166173 - RNA, 19 nt, Homo sapiens
  misc_RNA (1)...(19): siRNA sense strand
gaugcugacguccugauug

SEQ ID NO: 166174 - RNA, 19 nt, Homo sapiens
  misc_RNA (1)...(19): siRNA sense strand
gaaaagaaaggaaaucacu

SEQ ID NO: 166175 - RNA, 19 nt, Homo sapiens
  misc_RNA (1)...(19): siRNA sense strand
aaugcaggcucugauguug

SEQ ID NO: 166176 - RNA, 19 nt, Homo sapiens
  misc_RNA (1)...(19): siRNA sense strand
gaaggguaugccuggcuuu

SEQ ID NO: 166177 - RNA, 19 nt, Homo sapiens
  misc_RNA (1)...(19): siRNA sense strand
augccaagcuguaugagau

SEQ ID NO: 166178 - RNA, 19 nt, Homo sapiens
  misc_RNA (1)...(19): siRNA sense strand
cauccugaauggcaacaag

SEQ ID NO: 166179 - RNA, 19 nt, Homo sapiens
  misc_RNA (1)...(19): siRNA sense strand
gcaacaaguucuggaucac

SEQ ID NO: 166180 - RNA, 19 nt, Homo sapiens
  misc_RNA (1)...(19): siRNA sense strand
ugggcuaccuggagcaugu

SEQ ID NO: 166181 - RNA, 19 nt, Homo sapiens
  misc_RNA (1)...(19): siRNA sense strand
gaugccaagcuguaugaga

SEQ ID NO: 166182 - RNA, 19 nt, Homo sapiens
  misc_RNA (1)...(19): siRNA sense strand
cagccuucauuguggagaa

SEQ ID NO: 166183 - RNA, 19 nt, Homo sapiens
  misc_RNA (1)...(19): siRNA sense strand
ggguaugccuggcuuuagc

SEQ ID NO: 166184 - RNA, 19 nt, Homo sapiens
  misc_RNA (1)...(19): siRNA sense strand
gccaagcuguaugagauag

SEQ ID NO: 166185 - RNA, 19 nt, Homo sapiens
  misc_RNA (1)...(19): siRNA sense strand
ggacggcauucaguguuuu

SEQ ID NO: 166186 - RNA, 19 nt, Homo sapiens
  misc_RNA (1)...(19): siRNA sense strand
caggugugauucuuuacuc

SEQ ID NO: 166187 - RNA, 19 nt, Homo sapiens
  misc_RNA (1)...(19): siRNA sense strand
gggaagauggcugacaugu

SEQ ID NO: 166188 - RNA, 19 nt, Homo sapiens
  misc_RNA (1)...(19): siRNA sense strand
ccaaugcaggcucugaugu

SEQ ID NO: 166189 - RNA, 19 nt, Homo sapiens
  misc_RNA (1)...(19): siRNA sense strand
gaugcaaucaaugggcuaa

SEQ ID NO: 166190 - RNA, 19 nt, Homo sapiens
  misc_RNA (1)...(19): siRNA sense strand
caccugugagcuaaucuuu

SEQ ID NO: 166191 - RNA, 19 nt, Homo sapiens
  misc_RNA (1)...(19): siRNA sense strand
gccauugcacugcuaagga

SEQ ID NO: 166192 - RNA, 19 nt, Homo sapiens
  misc_RNA (1)...(19): siRNA sense strand
ggccaugagugagcccaau

SEQ ID NO: 166193 - RNA, 19 nt, Homo sapiens
  misc_RNA (1)...(19): siRNA sense strand
gaucgcagcaaugaguuca

SEQ ID NO: 166194 - RNA, 19 nt, Homo sapiens
  misc_RNA (1)...(19): siRNA sense strand
gcaguaugucuacaauguc

SEQ ID NO: 166195 - RNA, 19 nt, Homo sapiens
  misc_RNA (1)...(19): siRNA sense strand
agaauaagggugucuacgu

SEQ ID NO: 166196 - RNA, 19 nt, Homo sapiens
  misc_RNA (1)...(19): siRNA sense strand
gauuccugcugccaacauc

SEQ ID NO: 166197 - RNA, 19 nt, Homo sapiens
  misc_RNA (1)...(19): siRNA sense strand
cuuugaagacugcaagauu

SEQ ID NO: 166198 - RNA, 19 nt, Homo sapiens
  misc_RNA (1)...(19): siRNA sense strand
agaaaggaaaucacuacau

SEQ ID NO: 166199 - RNA, 19 nt, Homo sapiens
  misc_RNA (1)...(19): siRNA sense strand
cugauguugucucuaugaa

SEQ ID NO: 166200 - RNA, 19 nt, Homo sapiens
  misc_RNA (1)...(19): siRNA sense strand
augcugacguccugauugu

SEQ ID NO: 166201 - RNA, 19 nt, Homo sapiens
  misc_RNA (1)...(19): siRNA sense strand
ccgcuugccggcuucguuu

SEQ ID NO: 166202 - RNA, 19 nt, Homo sapiens
  misc_RNA (1)...(19): siRNA sense strand
gagaucgaucgcagcaaug

SEQ ID NO: 166203 - RNA, 19 nt, Homo sapiens
  misc_RNA (1)...(19): siRNA sense strand
gcaucacagccuucauugu

SEQ ID NO: 166204 - RNA, 19 nt, Homo sapiens
  misc_RNA (1)...(19): siRNA sense strand
ggcaucacagccuucauug

SEQ ID NO: 166205 - RNA, 19 nt, Homo sapiens
  misc_RNA (1)...(19): siRNA sense strand
gcugacguccugauugucu
